(19) United States
(12) Patent Application Publication
(10) Pub. No.: US 2015/0133362 A1
(43) Pub. Date: May 14, 2015

(54) COMPOSITIONS AND METHODS FOR MODULATING GENE EXPRESSION

(71) Applicants: RaNA Therapeutics, Inc., Cambridge, MA (US); The General Hospital Corporation d/b/a Massachusetts General Hospital, Boston, MA (US)

(72) Inventors: Arthur M. Krieg, Cambridge, MA (US); Romesh Subramanian, Framingham, MA (US); James McSwiggen, Arlington, MA (US); Jeannie T. Lee, Boston, MA (US)

(73) Assignees: RaNA Therapeutics, Inc., Cambridge, MA (US); The General Hospital Corporation d/b/a Massachusetts General Hospital, Boston, MA (US)

(21) Appl. No.: 14/401,252

(22) PCT Filed: May 16, 2013
(86) PCT No.: PCT/US2013/041461

§ 371 Date: Nov. 14, 2014

Related U.S. Application Data
(60) Provisional application No. 61/785,956, filed on Mar. 14, 2013.
(60) Provisional application No. 61/785,885, filed on Mar. 14, 2013.
(60) Provisional application No. 61/785,832, filed on Mar. 14, 2013.
(60) Provisional application No. 61/785,778, filed on Mar. 14, 2013.
(60) Provisional application No. 61/785,529, filed on Mar. 14, 2013.
(60) Provisional application No. 61/786,232, filed on Mar. 14, 2013.
(60) Provisional application No. 61/719,394, filed on Oct. 27, 2012.
(60) Provisional application No. 61/648,051, filed on May 16, 2012.
(60) Provisional application No. 61/648,058, filed on May 16, 2012.
(60) Provisional application No. 61/648,041, filed on May 16, 2012.
(60) Provisional application No. 61/648,016, filed on May 16, 2012.
(60) Provisional application No. 61/648,021, filed on May 16, 2012.
(60) Provisional application No. 61/647,949, filed on May 16, 2012.
(60) Provisional application No. 61/647,925, filed on May 16, 2012.
(60) Provisional application No. 61/647,901, filed on May 16, 2012.
(60) Provisional application No. 61/647,858, filed on May 16, 2012.
(60) Provisional application No. 61/647,886, filed on May 16, 2012.

(51) Int. Cl. C12N 15/113

(52) U.S. Cl. CPC C12N 15/113; C12N 2310/11
USPC 514/1.2; 536/26.2; 536/23.1; 530/322; 530/396; 514/44 R; 514/20.9; 506/8; 435/375

(57) ABSTRACT

Aspects of the invention provide methods for selecting a candidate oligonucleotide for activating expression of a target gene. Further aspects of the invention provide methods of selecting a set of oligonucleotides that is enriched in oligonucleotides that activate expression of a target gene. Further aspects provide single stranded oligonucleotides that modulate gene expression and compositions and kits comprising the same. Methods for modulating gene expression using the single stranded oligonucleotides are also provided.

### CROSS-REFERENCE TO RELATED APPLICATIONS

[0001] This application claims the benefit under 35 U.S.C. §119(e) of U.S. Provisional Application No. 61/648,016, entitled, “COMPOSITIONS AND METHODS FOR MODULATING GENE EXPRESSION”, filed on May 16, 2012, of U.S. Provisional Application No. 61/648,021, entitled, “COMPOSITIONS AND METHODS FOR MODULATING GENE EXPRESSION”, filed on May 16, 2012, of U.S. Provisional Application No. 61/786,232, entitled, “COMPOSITIONS AND METHODS FOR MODULATING GENE EXPRESSION”, filed on Mar. 14, 2013, of U.S. Provisional Application No. 61/647,858, entitled, “COMPOSITIONS AND METHODS FOR MODULATING SMN GENE FAMILY EXPRESSION”, filed on May 16, 2012, of U.S. Provisional Application No. 61/719,394, entitled, “COMPOSITIONS AND METHODS FOR MODULATING SMN GENE FAMILY EXPRESSION”, filed on Oct. 27, 2012, of U.S. Provisional Application No. 61/785,529, entitled, “COMPOSITIONS AND METHODS FOR MODULATING SMN GENE FAMILY EXPRESSION”, filed on Mar. 14, 2013, of U.S. Provisional Application No. 61/647,886, entitled, “COMPOSITIONS AND METHODS FOR MODULATING UTRN EXPRESSION”, filed on May 16, 2012, of U.S. Provisional Application No. 61/647,901, entitled, “COMPOSITIONS AND METHODS FOR MODULATING HEMOGLOBIN GENE FAMILY EXPRESSION”, filed on May 16, 2012, of U.S. Provisional Application No. 61/785,956, entitled, “COMPOSITIONS AND METHODS FOR MODULATING HEMOGLOBIN GENE FAMILY EXPRESSION”, filed on Mar. 14, 2013, of U.S. Provisional Application No. 61/647,925, entitled, “COMPOSITIONS AND METHODS FOR MODULATING ATP2A2 EXPRESSION”, filed on May 16, 2012, of U.S. Provisional Application No. 61/785,832, entitled, “COMPOSITIONS AND METHODS FOR MODULATING ATP2A2 EXPRESSION”, filed on Mar. 14, 2013, of U.S. Provisional Application No. 61/647,949, entitled, “COMPOSITIONS AND METHODS FOR MODULATING APOA1 AND ABCA1 EXPRESSION”, filed on May 16, 2012, of U.S. Provisional Application No. 61/785,778, entitled, “COMPOSITIONS AND METHODS FOR MODULATING APOA1 AND ABCA1 EXPRESSION”, filed on Mar. 14, 2013, of U.S. Provisional Application No. 61/648,041, entitled, “COMPOSITIONS AND METHODS FOR MODULATING PTEN EXPRESSION”, filed on May 16, 2012, of U.S. Provisional Application No. 61/785,885, entitled, “COMPOSITIONS AND METHODS FOR MODULATING PTEN EXPRESSION”, filed on Mar. 14, 2013, of U.S. Provisional Application No. 61/648,058, entitled, “COMPOSITIONS AND METHODS FOR MODULATING BDNF EXPRESSION”, filed on May 16, 2012, and of U.S. Provisional Application No. 61/648,051, entitled, “COMPOSITIONS AND METHODS FOR MODULATING MECP2 EXPRESSION”, filed on May 16, 2012, the contents of each of which are incorporated herein by reference in their entireties.

### FIELD OF THE INVENTION

[0002] The invention relates to oligonucleotide based compositions, as well as methods of using oligonucleotide based compositions for treating disease.

### BACKGROUND OF THE INVENTION

[0003] Transcriptome analyses have suggested that, although only 1-2% of the mammalian genome is protein coding, 70-90% is transcriptionally active. Recent discoveries argue that a subset of these non-protein coding transcripts play crucial roles in epigenetic regulation. In spite of their ubiquity, the structure and function of many of such transcripts remains uncharacterized. Recent studies indicate that some long non-coding RNAs function as an epigenetic regulator/RNA cofactor in chromatin remodeling through interactions with Polycomb repressor complex 2 (PRC2) and thus function to regulate gene expression.

### SUMMARY OF THE INVENTION

[0004] Aspects of the invention provide methods for selecting oligonucleotides for activating or enhancing expression of target genes. The methods are particularly useful for identifying candidate oligonucleotides for activating or enhancing expression of target genes for which reduced expression or activity results in, or contributes to, disease. Further aspects of the invention provide methods of selecting a set of oligonucleotides that is enriched in oligonucleotides (e.g., compared with a random selection of oligonucleotides) that activate expression of a target gene. Accordingly, the methods may be used to establish large libraries of clinical candidates that are enriched in oligonucleotides that activate gene expression. Such libraries may be utilized, for example, to identify lead oligonucleotides for therapeutic development. Thus, the methods provided are useful for establishing a broad platform of candidate oligonucleotides for targeting the expression of most known genes, including protein coding genes. Further aspects provide single stranded oligonucleotides that modulate gene expression, and compositions and kits comprising the same. Methods for modulating gene expression using the single stranded oligonucleotides are also provided.

[0005] In some aspects, the invention is a method for selecting a candidate oligonucleotide for activating expression of a target gene by selecting a PRC2-associated region within a first nucleotide sequence, wherein the first nucleotide sequence maps to a position in a first chromosome between 50 kilobases upstream of a 5′-end of the target gene and 50 kilobases downstream of a 3′-end of the target gene; determining a second nucleotide sequence that is complementary with at least 8 consecutive nucleotides of the PRC2-associated region; and selecting as the candidate oligonucleotide, a single stranded oligonucleotide comprising the second nucleotide sequence, wherein the oligonucleotide has at least one of following features: a) a sequence comprising 5′-X-Y-Z, wherein X is any nucleotide, Y is a nucleotide sequence of 6 nucleotides in length that is not a seed sequence of a human microRNA, and Z is a nucleotide sequence of 1 to 23 nucleotides in length, wherein X is anchored at the 5′ end of the oligonucleotide; b) a sequence that does not comprise three or more consecutive guanosine nucleotides; c) a sequence that has less than a threshold level of sequence identity with every sequence of nucleotides, of equivalent length to the second nucleotide sequence, that is between 50 kilobases upstream of a 5′-end of an off-target gene and 50 kilobases downstream of a 3′-end of the off-target gene; d) a sequence that is complementary to a PRC2-associated region that encodes an RNA that forms a secondary structure comprising at least two single stranded loops; and/or e) a sequence that has greater than 60% G-C content.

[0006] In some embodiments, the single stranded oligonucleotide has only one of features a), b), c), d), and e). In some embodiments, the single stranded oligonucleotide has at least two of features a), b), c), d), and e), each independently selected. In some embodiments, the single stranded oligonucleotide has at least three of features a), b), c), d), and e), each independently selected. In some embodiments, the single stranded oligonucleotide has at least four of features a), b), c), d), and e), each independently selected. In some embodiments, the single stranded oligonucleotide has each of features a), b), c), d), and e). In certain embodiments, the oligonucleotide has the sequence 5′X-Y-Z, in which the oligonucleotide is 8-50 nucleotides in length. In some embodiments, Y is a sequence selected from Table 3.

[0007] In another aspect the invention is a method of selecting a set of oligonucleotides that is enriched in oligonucleotides that activate expression of a target gene, by selecting a PRC2-associated region within a first nucleotide sequence that maps to a position in a first chromosome between 50 kilobases upstream of a 5′-end of the target gene and 50 kilobases downstream of a 3′-end of the target gene; selecting a set of oligonucleotides, wherein each oligonucleotide in the set comprises a second nucleotide sequence that is complementary with at least 8 consecutive nucleotides of the PRC2-associated region, and has at least one of the following features: a) a sequence: 5′-X-Y-Z, wherein X is any nucleotide, Y is a nucleotide sequence of 6 nucleotides in length that is not a human seed sequence of a microRNA, and Z is a nucleotide sequence of 1 to 23 nucleotides in length, wherein X is anchored at the 5′ end of the oligonucleotide; b) a sequence that does not comprise three or more consecutive guanosine nucleotides; c) a sequence that has less than a threshold level of sequence identity with every sequence of nucleotides, of equivalent length to the second nucleotide sequence, that are between 50 kilobases upstream of a 5′-end of an off-target gene and 50 kilobases downstream of a 3′-end of the off-target gene; d) a sequence that is complementary to a PRC2-associated region that encodes an RNA that forms a secondary structure comprising at least two single stranded loops; and/or) a sequence that has greater than 60% G-C content; and wherein the set of oligonucleotides is enriched in oligonucleotides that activate expression of a target gene.

[0008] In some embodiments, each of the oligonucleotides has only one of features a), b), c), d), and e). In some embodiments, each of the oligonucleotides has at least two of features a), b), c), d), and e), each independently selected. In some embodiments, each of the oligonucleotides has at least three of features a), b), c), d), and e), each independently selected. In some embodiments, each of the oligonucleotides has at least four of features a), b), c), d), and e), each independently selected. In some embodiments, each of the oligonucleotides has each of features a), b), c), d), and e). In certain embodiments, each of the oligonucleotides has the sequence 5′X-Y-Z, in which the oligonucleotide is 8-50 nucleotides in length. In some embodiments, Y is a sequence selected from Table 3.

[0009] In some embodiments the single stranded oligonucleotide or each of the oligonucleotides is up to 100, 50, 40, 30, or 20 nucleotides in length. In other embodiments the single stranded oligonucleotide or each of the oligonucleotides is 8 to 30 nucleotides in length.

[0010] The threshold level of sequence identity in some embodiments is 50%, 60%, 70%, 80%, 85%, 90%, 95% or 99% sequence identity.

[0011] In one embodiment Y is a nucleotide sequence of 6 nucleotides in length set forth in Table 3.

[0012] In other embodiments the first chromosome is a chromosome of a first species, and wherein the method further comprises determining that the second nucleotide sequence is complementary to a second region of a second chromosome of a second species, the second region being located between 50 kilobases upstream of a 5′-end of a homolog of the target gene and 50 kilobases downstream of a 3′-end of the homolog of the target gene.

[0013] The second nucleotide sequence may be at least 80% complementary to the second region of the second chromosome

[0014] In some embodiments the first nucleotide sequence maps to the strand of the first chromosome comprising the sense strand of the target gene. In other embodiments the first nucleotide sequence maps to the strand of the first chromosome comprising the antisense strand of the target gene.

[0015] In some embodiments the PRC2-associated region is upstream of the 5′ end of the target gene and in other embodiments the PRC2-associated region is downstream of the 3′ end of the target gene. Optionally, the PRC2-associated region may be within an intron or an exon of the target gene or the PRC2-associated region may traverse an intron-exon junction, a 5′-UTR-exon junction or a 3′-UTR-exon junction of the target gene.

[0016] The PRC2-associated region may encode an RNA that forms a secondary structure comprising at least two single stranded loops. Optionally the secondary structure comprises a double stranded stem between the at least two single stranded loops. In some embodiments the at least 8 consecutive nucleotides of the PRC2-associated region encode at least a portion of at least one or at least two of the loops or at least a portion of the double stranded stem.

[0017] In other aspects the invention is a single stranded oligonucleotide comprising a region of complementarity that is complementary with at least 8 consecutive nucleotides of a PRC2-associated region located in a first chromosome between 50 kilobases upstream of a 5′-end of a target gene and 50 kilobases downstream of a 3′-end of the target gene, wherein the oligonucleotide has at least one of: a) a sequence comprising 5′-X-Y-Z, wherein X is any nucleotide, Y is a nucleotide sequence of 6 nucleotides in length that is not a human seed sequence of a microRNA, and Z is a nucleotide sequence of 1 to 23 nucleotides in length; b) a sequence that does not comprise three or more consecutive guanosine nucleotides; c) a sequence that has less than a threshold level of sequence identity with every sequence of nucleotides, of equivalent length to the second nucleotide sequence, that are between 50 kilobases upstream of a 5′-end of an off-target gene and 50 kilobases downstream of a 3′-end of the off-target gene; d) a sequence that is complementary to a PRC2-associated region that encodes an RNA that forms a secondary structure comprising at least two single stranded loops; and/or e) a sequence that has greater than 60% G-C content. In some embodiments, the single stranded oligonucleotide has only one of features a), b), c), d), and e). In some embodiments, the single stranded oligonucleotide has at least two of features a), b), c), d), and e), each independently selected. In some embodiments, the single stranded oligonucleotide has at least three of features a), b), c), d), and e), each independently selected. In some embodiments, the single stranded oligonucleotide has at least four of features a), b), c), d), and e), each independently selected. In some embodiments, the single stranded oligonucleotide has each of features a), b), c), d), and e). In certain embodiments, the oligonucleotide has the sequence 5′X-Y-Z, in which the oligonucleotide is 8-50 nucleotides in length. In some embodiments, Y is a sequence selected from Table 3.

[0018] The first chromosome is a chromosome of a first species in some embodiments. A sequence comprising the at least 8 consecutive nucleotides is located in a second chromosome between 50 kilobases upstream of a 5′-end of a homolog of the target gene and 50 kilobases downstream of a 3′-end of the homolog of the target gene, wherein the second chromosome is a chromosome of second species. The first species may be human and the second species may be a mouse.

[0019] The invention also includes a single stranded oligonucleotide of 8-30 nucleotides in length, wherein the single stranded oligonucleotide is complementary with at least 8 consecutive nucleotides of a PRC2-associated region located in a chromosome between 50 kilobases upstream of a 5′-end of a target gene and 50 kilobases downstream of a 3′-end of the target gene, wherein the nucleotide sequence of the single stranded oligonucleotide comprises one or more nucleotide sequences selected from (X)Xxxxxx, (X)xXxxxx, (X)xxXxxx, (X)xxxXxx, (X)xxxxXx and (X)xxxxxX, (X)XXxxxx, (X)XxXxxx, (X)XxxXxx, (X)XxxxXx, (X)XxxxxX, (X)xXXxxx, (X)xXxXxx, (X)xXxxXx, (X)xXxxxX, (X)xxXXxx, (X)xxXxXx, (X)xxXxxX, (X)xxxXXx, (X)xxxXxX and (X)xxxxXX, (X)XXXxxx, (X)xXXXxx, (X)xxXXXx, (X)xxxXXX, (X)XXxXxx, (X)XXxxXx, (X)XXxxxX, (X)xXXxXx, (X)xXXxxX, (X)xxXXxX, (X)XxXXxx, (X)XxxXXx (X)XxxxXX, (X)xXxXXx, (X)xXxxXX, (X)xxXxXX, (X)xXxXxX and (X)XxXxXx, (X)xxXXX, (X)xXxXXX, (X)xXXxXX, (X)xXXXxX, (X)xXXXXx, (X)XxxXXXX, (X)XxXxXX, (X)XxXXxX, (X)XxXXx, (X)XXxxXX, (X)XXxXxX, (X)XXxXXx, (X)XXXxxX, (X)XXXxXx, and (X)XXXXxx, (X)xXXXXX, (X)XxXXXX, (X)XXxXXX, (X)XXXxXX, (X)XXXXxX and (X)XXXXXx, and XXXXXX, XxXXXXX, XXxXXXX, XXXxXXX, XXXXxXX, XXXXXxX and XXXXXXx, wherein “X” denotes a nucleotide analogue, (X) denotes an optional nucleotide analogue, and “x” denotes a DNA or RNA nucleotide unit.

[0020] A single stranded oligonucleotide of 8 to 30 nucleotides in length having a region of complementarity that is complementary with at least 8 contiguous nucleotides of a long non-coding RNA (lncRNA) that regulates expression of a target gene, wherein 2-19 nucleotides of the oligonucleotide are nucleotide analogues is provided in other aspects of the invention.

[0021] In other aspects, a single stranded oligonucleotide of 5 to 30 nucleotides in length having a region of complementarity that is complementary with at least 5 contiguous nucleotides of a long non-coding RNA (lncRNA) that regulates expression of a target gene, wherein the oligonucleotide is linked to a second oligonucleotide by a cleavable linker is provided. In some embodiments the oligonucleotide has the structure of any of the single stranded oligonucleotides described herein.

[0022] A single stranded single stranded oligonucleotide of 8 to 40 nucleotides in length having a region of complementarity that is complementary with at least 5 contiguous nucleotides of a PRC2-binding long non-coding RNA (lncRNA) that regulates expression of a protein-coding reference gene, wherein the lncRNA is transcribed from the opposite strand as the protein-coding reference gene in a genomic region containing the protein-coding reference gene, wherein the single stranded oligonucleotide binds to a region of the lncRNA that originates within or overlaps an exon, an intron, exon, intron-exon junction, 5′ UTR, 3′ UTR, a translation initiation region, or a translation termination region is provided in other aspects of the invention.

[0023] A single stranded oligonucleotide of 8 to 40 nucleotides in length having a region of complementarity that is complementary with at least 5 contiguous nucleotides of a long non-coding RNA (lncRNA) that regulates expression of a target gene is provided in other aspects of the invention. The oligonucleotide has complementarity to the lncRNA in a region of the lncRNA that is outside of the transcribed region of the target gene.

[0024] In yet other aspects of the invention a single stranded oligonucleotide of 8 to 30 nucleotides in length having a region of complementarity that is complementary with at least 5 contiguous nucleotides of a long non-coding RNA (lncRNA) that inhibits expression of a target gene, wherein the oligonucleotide has complementarity to the lncRNA in a region of the lncRNA that is transcribed from a non-coding portion of the target gene is provided.

[0025] In some embodiments the lncRNA is a PRC2-associated region.

[0026] The present application incorporates by reference the nucleotide sequences listed as SEQ ID NOs:1-193,049 in International Patent Application PCT/US2011/060493, filed on Nov. 12, 2011, published on May 18, 2012, as WO/2012/065143, and entitled, “POLYCOMB-ASSOCIATED NON-CODING RNAS.” These sequences are referred to herein by their sequence identifier number preceded by an “A”. Accordingly, the set of nucleotide sequences incorporated by reference from International Patent Application PCT/US2011/060493 is referred to as “sequences A1-A193,049.”

[0027] The present application also incorporates by reference the nucleotide sequences listed as SEQ ID NOs: 1 to 916,209, or 916,626 to 934,931 in International Patent Application PCT/US2011/65939, filed on Dec. 19, 2011, published on Jun. 28, 2012, as WO/2012/087983, and entitled “POLYCOMB-ASSOCIATED NON-CODING RNAS.” These sequences are referred to herein by their sequence identifier number preceded by an “B”. Accordingly, the set of nucleotide sequences incorporated by reference from International Patent Application PCT/US2011/65939 is referred to as “sequences B1 to B916,209, or B916,626 to B934,931.”

[0028] In some embodiments the PRC2-associated region has a nucleotide sequence selected from sequences A1 to A193,049, B1 to B916,209, and B916,626 to B934,931.

[0029] In some embodiments, the PRC2-associated region has a nucleotide sequence selected from SEQ ID NO: 1-1212.

[0030] The oligonucleotide may be any length. In some embodiments the oligonucleotide is up to 100, 50, 40, 30, or 20 nucleotides in length. In other embodiments the oligonucleotide is 8 to 30 nucleotides in length. In yet other embodiments the oligonucleotide is 8 to 10 nucleotides in length and all but 1, 2, or 3 of the nucleotides of the complementary sequence of the PRC2-associated region are cytosine or guanosine nucleotides.

[0031] The at least 8 consecutive nucleotides of the PRC2-associated region in some embodiments is in the strand of the chromosome comprising the antisense strand of the target gene and in other embodiments is in the strand of the chromosome comprising the sense strand of the target gene.

[0032] In some embodiments the PRC2-associated region is upstream of the 5′ end of the target gene and in other embodiments the PRC2-associated region is downstream of the 3′ end of the target gene. Optionally, the PRC2-associated region may be within an intron or an exon of the target gene or the PRC2-associated region may traverse an intron-exon junction, a 5′-UTR-exon junction or a 3′-UTR-exon junction of the target gene.

[0033] The PRC2-associated region may encode an RNA that forms a secondary structure comprising at least two single stranded loops. Optionally the secondary structure comprises a double stranded stem between the at least two single stranded loops. In some embodiments the at least 8 consecutive nucleotides of the PRC2-associated region encode at least a portion of at least one or at least two of the loops or at least a portion of the double stranded stem.

[0034] In some embodiments the at least one nucleotide analogue results in an increase in Tₘ of the oligonucleotide in a range of 1 to 5° C. compared with an oligonucleotide that does not have the at least one nucleotide analogue.

[0035] In some embodiments at least one nucleotide of the oligonucleotide comprises a nucleotide analogue. In other embodiments each nucleotide of the oligonucleotide comprises a nucleotide analogue For instance the nucleotide analogue may be a 2′ O-methyl or a bridged nucleotide. In other embodiments the oligonucleotide comprises at least one ribonucleotide, at least one deoxyribonucleotide, or at least one bridged nucleotide. The bridged nucleotide may be, for instance, a LNA nucleotide, a cEt nucleotide or a ENA nucleotide analogue. Optionally each nucleotide of the oligonucleotide is a LNA nucleotide.

[0036] In some embodiments the nucleotides of the oligonucleotide comprise alternating nucleotide types. For instance, in some embodiments the oligonucleotide comprises deoxyribonucleotides and 2′-fluoro-deoxyribonucleotides. In other embodiments the nucleotides of the oligonucleotide comprise alternating deoxyribonucleotides and 2′-O-methyl nucleotides. In yet other embodiments the nucleotides of the oligonucleotide comprise alternating deoxyribonucleotides and ENA nucleotide analogues or the nucleotides of the oligonucleotide comprise alternating deoxyribonucleotides and LNA nucleotides. In yet other embodiments the nucleotides of the oligonucleotide comprise alternating LNA nucleotides and 2′-O-methyl nucleotides.

[0037] The 5′ nucleotide of the oligonucleotide may have different properties. For instance in some embodiments the 5′ nucleotide of the oligonucleotide is a deoxyribonucleotide or a LNA nucleotide.

[0038] In some embodiments the nucleotides of the oligonucleotide comprise deoxyribonucleotides flanked by at least one LNA nucleotide on each of the 5′ and 3′ ends of the deoxyribonucleotides.

[0039] The single stranded oligonucleotide may also include phosphorothioate internucleotide linkages between at least two nucleotides or between all nucleotides.

[0040] In some embodiments the nucleotide at the 3′ position of the oligonucleotide has a 3′ hydroxyl group. In other embodiments the nucleotide at the 3′ position of the oligonucleotide has a 3′ thiophosphate.

[0041] Optionally the single stranded oligonucleotide has a biotin moiety conjugated to the 5′ or 3′ nucleotide. In some embodiments the single stranded oligonucleotide has one or more of the following conjugates to either the 5′ or 3′ nucleotide or both: cholesterol, Vitamin A, folate, sigma receptor ligands, aptamers, peptides, such as CPP, hydrophobic molecules, such as lipids, ASGPR or dynamic polyconjugates and variants thereof.

[0042] A composition is provided in another aspect. The composition is a single stranded oligonucleotide described herein and a carrier, a buffered solution, and/or a pharmaceutically acceptable carrier.

[0043] In some aspects the invention is a composition of a single stranded RNA oligonucleotide of 8 to 20 nucleotides in length having a region of complementarity that is complementary with at least 5 contiguous nucleotides of a long non-coding RNA (lncRNA) that regulates expression of a target gene, wherein 2-19 nucleotides of the oligonucleotide are nucleotide analogues, formulated in a pharmaceutically acceptable carrier, wherein a complementary RNA oligonucleotide is not present in the composition.

[0044] In some embodiments the nucleotide analogues are selected from the group consisting of a bridged nucleotide, 2′ fluoro, and 2′O-methyl nucleotide. In other embodiments the bridged nucleotide is a LNA, ENA or cEt nucleotide.

[0045] The lncRNA may be transcribed from the opposite strand as the target gene in a genomic region containing the target gene.

[0046] In some embodiments the oligonucleotide has complementarity to the lncRNA in a region of the lncRNA that is transcribed from a non-coding portion of the target gene. In other embodiments the oligonucleotide has complementarity to the lncRNA in a region of the lncRNA that is outside of the transcribed region of the target gene.

[0047] A kit comprising a container housing any of the compositions is also provided.

[0048] In other aspects the invention is a method of increasing expression of a target gene in a cell, by delivering a single stranded oligonucleotide described herein into the cell.

[0049] A method of increasing levels of a target gene in a subject by administering a single stranded oligonucleotide described herein to the subject is provided in other aspects of the invention.

[0050] A method of treating a condition associated with decreased levels of a target gene in a subject by administering a single stranded oligonucleotide described herein to the subject is provided in yet other aspects of the invention.

[0051] A method of upregulating gene expression is provided in other aspects. The method involves contacting a cell with a single stranded RNA oligonucleotide of 8 to 30 nucleotides in length having a region of complementarity that is complementary with at least 5 contiguous nucleotides of a long non-coding RNA (lncRNA) that inhibits expression of a target gene.

[0052] The following applications are incorporated herein by reference in their entireties International Patent Application: PCT/US2011/65939, filed on Dec. 19, 2011, published on Jun. 28, 2012, as WO/2012/087983, and entitled POLYCOMB-ASSOCIATED NON-CODING RNAS, and International Patent Application: PCT/US2011/060493, filed on Nov. 12, 2011, published on May 18, 2012, as WO/2012/065143, and entitled POLYCOMB-ASSOCIATED NON-CODING RNAS.

[0053] Each of the limitations of the invention can encompass various embodiments of the invention. It is, therefore, anticipated that each of the limitations of the invention involving any one element or combinations of elements can be included in each aspect of the invention. This invention is not limited in its application to the details of construction and the arrangement of components set forth in the following description or illustrated in the drawings. The invention is capable of other embodiments and of being practiced or of being carried out in various ways. Also, the phraseology and terminology used herein is for the purpose of description and should not be regarded as limiting. The use of “including,” “comprising,” or “having,” “containing”, “involving”, and variations thereof herein, is meant to encompass the items listed thereafter and equivalents thereof as well as additional items.

TABLE 1
Brief Description of Sequence Listing

| | | | | | | | Approx. |
|---|---|---|---|---|---|---|---|
| SeqID | Chrom | gene | Chr. Start | Chr. End | strand | Organism | Length |
| 1 | chr9 | FXN | 71638478 | 71705993 | + | Homo sapiens | 67515 |
| 2 | chr9 | FXN | 71638478 | 71705993 | − | Homo sapiens | 67515 |
| 3 | chr19 | Fxn | 24323942 | 24367076 | − | Mus musculus | 43134 |
| 4 | chr19 | Fxn | 24323942 | 24367076 | + | Mus musculus | 43134 |
| 5 | chr9 | FXN | 71651581 | 71651633 | + | Homo sapiens | 52 |
| 6 | chr9 | FXN | 71651674 | 71651733 | + | Homo sapiens | 59 |
| 7 | chr9 | FXN | 71664748 | 71664793 | + | Homo sapiens | 45 |
| 8 | chr9 | FXN | 71676243 | 71676290 | + | Homo sapiens | 47 |
| 9 | chr9 | FXN | 71677819 | 71678190 | + | Homo sapiens | 371 |
| 10 | chr9 | FXN | 71649581 | 71653633 | + | Homo sapiens | 4052 |
| 11 | chr9 | FXN | 71649674 | 71653733 | + | Homo sapiens | 4059 |
| 12 | chr9 | FXN | 71662748 | 71666793 | + | Homo sapiens | 4045 |
| 13 | chr9 | FXN | 71674243 | 71678290 | + | Homo sapiens | 4047 |
| 14 | chr9 | FXN | 71675819 | 71680190 | + | Homo sapiens | 4371 |
| 15 | chr9 | FXN | 71661444 | 71661499 | − | Homo sapiens | 55 |
| 16 | chr9 | FXN | 71679886 | 71679910 | − | Homo sapiens | 24 |
| 17 | chr9 | FXN | 71659444 | 71663499 | − | Homo sapiens | 4055 |
| 18 | chr9 | FXN | 71677886 | 71681910 | − | Homo sapiens | 4024 |
| 19 | chr5 | SMN1 | 70208768 | 70260842 | + | Homo sapiens | 52070 |
| 20 | chr5 | SMN2 | 69333350 | 69385422 | + | Homo sapiens | 52073 |
| 21 | chr9 | SMNP | 20319406 | 20344375 | + | Homo sapiens | 24970 |
| 22 | chr5 | SMN1 | 70208768 | 70260838 | − | Homo sapiens | 52071 |
| 23 | chr5 | SMN2 | 69333350 | 69385422 | − | Homo sapiens | 52073 |
| 24 | chr9 | SMNP | 20319406 | 20344375 | − | Homo sapiens | 24970 |
| 25 | chr1S | Smn1 | 100881160 | 100919653 | + | Mus musculus | 38494 |
| 26 | chr1S | Smn1 | 100881160 | 100919653 | − | Mus musculus | 38494 |
| 27 | chr5 | SMN1 | 70240095 | 70240127 | + | Homo sapiens | 32 |
| 27 | chr5 | SMN2 | 69364672 | 69364704 | + | Homo sapiens | 32 |
| 28 | chr5 | SMN1 | 70214393 | 70214822 | + | Homo sapiens | 429 |
| 28 | chr5 | SMN2 | 69338976 | 69339405 | + | Homo sapiens | 429 |
| 29 | chr5 | SMN1 | 70214064 | 70214108 | + | Homo sapiens | 44 |
| 29 | chr5 | SMN2 | 69338647 | 69338691 | + | Homo sapiens | 44 |
| 30 | chr5 | SMN1 | 70214276 | 70214317 | + | Homo sapiens | 41 |
| 30 | chr5 | SMN2 | 69338859 | 69338900 | + | Homo sapiens | 41 |
| 31 | chr5 | SMN1 | 70214445 | 70214472 | + | Homo sapiens | 27 |
| 31 | chr5 | SMN2 | 69339028 | 69339055 | + | Homo sapiens | 27 |
| 32 | chr5 | SMN1 | 70238095 | 70242127 | + | Homo sapiens | 4032 |
| 32 | chr5 | SMN2 | 69362672 | 69366704 | + | Homo sapiens | 4032 |
| 33 | chr5 | SMN1 | 70212393 | 70216822 | + | Homo sapiens | 4429 |
| 33 | chr5 | SMN2 | 69336976 | 69341405 | + | Homo sapiens | 4429 |
| 34 | chr5 | SMN1 | 70212064 | 70216108 | + | Homo sapiens | 4044 |
| 34 | chr5 | SMN2 | 69336647 | 69340691 | + | Homo sapiens | 4044 |
| 35 | chr5 | SMN1 | 70212276 | 70216317 | + | Homo sapiens | 4041 |
| 35 | chr5 | SMN2 | 69336859 | 69340900 | + | Homo sapiens | 4041 |
| 36 | chr5 | SMN1 | 70212445 | 70216472 | + | Homo sapiens | 4027 |
| 36 | chr5 | SMN2 | 69337028 | 69341055 | + | Homo sapiens | 4027 |
| 37 | chr5 | SMN1 | 70240510 | 70240551 | − | Homo sapiens | 41 |
| 37 | chr5 | SMN2 | 69365087 | 69365128 | − | Homo sapiens | 41 |
| 38 | chr5 | SMN1 | 70241924 | 70241968 | − | Homo sapiens | 44 |
| 38 | chr5 | SMN2 | 69366499 | 69366543 | − | Homo sapiens | 44 |
| 39 | chr5 | SMN1 | 70238510 | 70242551 | − | Homo sapiens | 4041 |
| 39 | chr5 | SMN2 | 69363087 | 69367128 | − | Homo sapiens | 4041 |
| 40 | chr5 | SMN1 | 70239924 | 70243968 | − | Homo sapiens | 4044 |
| 40 | chr5 | SMN2 | 69364499 | 69368543 | − | Homo sapiens | 4044 |
| 41 | chr5 | SMN1 | 70247831 | 70247845 | + | Homo sapiens | 14 |
| 41 | chr5 | SMN2 | 69372411 | 69372425 | + | Homo sapiens | 14 |
| 42 | chr5 | SMN2 | 69372402 | 69372845 | + | Homo sapiens | 443 |
| 43 | chr6 | UTRN | 144600872 | 145186170 | + | Homo sapiens | 585298 |
| 44 | chr6 | UTRN | 144600872 | 145186170 | − | Homo sapiens | 585298 |
| 45 | chr10 | Utrn | 12089985 | 12593533 | − | Mus musculus | 503548 |
| 46 | chr10 | Utrn | 12089985 | 12593533 | + | Mus musculus | 503548 |
| 47 | chr6 | UTRN | 144610489 | 144610535 | + | Homo sapiens | 46 |
| 48 | chr6 | UTRN | 144612994 | 144613040 | + | Homo sapiens | 46 |
| 49 | chr6 | UTRN | 144614120 | 144614162 | + | Homo sapiens | 42 |
| 50 | chr6 | UTRN | 144614968 | 144615021 | + | Homo sapiens | 53 |
| 51 | chr6 | UTRN | 144618862 | 144618901 | + | Homo sapiens | 39 |
| 52 | chr6 | UTRN | 144621690 | 144621714 | + | Homo sapiens | 24 |
| 53 | chr6 | UTRN | 144625028 | 144625096 | + | Homo sapiens | 68 |
| 54 | chr6 | UTRN | 144625129 | 144625174 | + | Homo sapiens | 45 |
| 55 | chr6 | UTRN | 144625319 | 144625379 | + | Homo sapiens | 60 |
| 56 | chr6 | UTRN | 144628965 | 144629011 | + | Homo sapiens | 46 |
| 57 | chr6 | UTRN | 144633818 | 144633869 | + | Homo sapiens | 51 |
| 58 | chr6 | UTRN | 144633933 | 144633968 | + | Homo sapiens | 35 |
| 59 | chr6 | UTRN | 144658267 | 144658302 | + | Homo sapiens | 35 |
| 60 | chr6 | UTRN | 144685087 | 144685140 | + | Homo sapiens | 53 |
| 61 | chr6 | UTRN | 144695039 | 144695063 | + | Homo sapiens | 24 |
| 62 | chr6 | UTRN | 144699670 | 144699699 | + | Homo sapiens | 29 |
| 63 | chr6 | UTRN | 144704043 | 144704398 | + | Homo sapiens | 355 |
| 64 | chr6 | UTRN | 144706312 | 144706345 | + | Homo sapiens | 33 |
| 65 | chr6 | UTRN | 144706654 | 144706704 | + | Homo sapiens | 50 |
| 66 | chr6 | UTRN | 144721683 | 144721738 | + | Homo sapiens | 55 |
| 67 | chr6 | UTRN | 144722580 | 144722627 | + | Homo sapiens | 47 |
| 68 | chr6 | UTRN | 144724848 | 144724889 | + | Homo sapiens | 41 |
| 69 | chr6 | UTRN | 144727897 | 144727947 | + | Homo sapiens | 50 |
| 70 | chr6 | UTRN | 144746408 | 144746448 | + | Homo sapiens | 40 |
| 71 | chr6 | UTRN | 144749102 | 144749152 | + | Homo sapiens | 50 |
| 72 | chr6 | UTRN | 144749948 | 144750026 | + | Homo sapiens | 78 |
| 73 | chr6 | UTRN | 144750728 | 144750789 | + | Homo sapiens | 61 |
| 74 | chr6 | UTRN | 144750789 | 144750853 | + | Homo sapiens | 64 |
| 75 | chr6 | UTRN | 144757162 | 144757214 | + | Homo sapiens | 52 |
| 76 | chr6 | UTRN | 144757214 | 144757274 | + | Homo sapiens | 60 |
| 77 | chr6 | UTRN | 144758752 | 144758807 | + | Homo sapiens | 55 |
| 78 | chr6 | UTRN | 144758807 | 144758864 | + | Homo sapiens | 57 |
| 79 | chr6 | UTRN | 144761513 | 144761579 | + | Homo sapiens | 66 |
| 80 | chr6 | UTRN | 144765456 | 144765506 | + | Homo sapiens | 50 |
| 81 | chr6 | UTRN | 144768420 | 144768461 | + | Homo sapiens | 41 |
| 82 | chr6 | UTRN | 144768737 | 144768764 | + | Homo sapiens | 27 |
| 83 | chr6 | UTRN | 144772549 | 144772627 | + | Homo sapiens | 78 |
| 84 | chr6 | UTRN | 144774960 | 144775001 | + | Homo sapiens | 41 |
| 85 | chr6 | UTRN | 144779914 | 144779960 | + | Homo sapiens | 46 |
| 86 | chr6 | UTRN | 144780026 | 144780070 | + | Homo sapiens | 44 |
| 87 | chr6 | UTRN | 144780278 | 144780324 | + | Homo sapiens | 46 |
| 88 | chr6 | UTRN | 144783879 | 144783933 | + | Homo sapiens | 54 |
| 89 | chr6 | UTRN | 144783933 | 144783995 | + | Homo sapiens | 62 |
| 90 | chr6 | UTRN | 144800953 | 144800999 | + | Homo sapiens | 46 |
| 91 | chr6 | UTRN | 144802780 | 144802822 | + | Homo sapiens | 42 |
| 92 | chr6 | UTRN | 144803427 | 144803473 | + | Homo sapiens | 46 |
| 93 | chr6 | UTRN | 144803714 | 144803742 | + | Homo sapiens | 28 |
| 94 | chr6 | UTRN | 144803774 | 144803849 | + | Homo sapiens | 75 |
| 95 | chr6 | UTRN | 144806673 | 144806714 | + | Homo sapiens | 41 |
| 96 | chr6 | UTRN | 144808684 | 144808739 | + | Homo sapiens | 55 |
| 97 | chr6 | UTRN | 144808739 | 144808803 | + | Homo sapiens | 64 |
| 98 | chr6 | UTRN | 144809834 | 144809881 | + | Homo sapiens | 47 |
| 99 | chr6 | UTRN | 144811266 | 144811310 | + | Homo sapiens | 44 |
| 100 | chr6 | UTRN | 144814476 | 144814522 | + | Homo sapiens | 46 |
| 101 | chr6 | UTRN | 144815156 | 144815199 | + | Homo sapiens | 43 |
| 102 | chr6 | UTRN | 144820469 | 144820529 | + | Homo sapiens | 60 |
| 103 | chr6 | UTRN | 144832193 | 144832243 | + | Homo sapiens | 50 |
| 104 | chr6 | UTRN | 144835120 | 144835166 | + | Homo sapiens | 46 |
| 105 | chr6 | UTRN | 144835862 | 144835907 | + | Homo sapiens | 45 |
| 106 | chr6 | UTRN | 144837423 | 144837465 | + | Homo sapiens | 42 |
| 107 | chr6 | UTRN | 144837943 | 144837989 | + | Homo sapiens | 46 |
| 108 | chr6 | UTRN | 144844263 | 144844304 | + | Homo sapiens | 41 |
| 109 | chr6 | UTRN | 144858722 | 144858798 | + | Homo sapiens | 76 |
| 110 | chr6 | UTRN | 144870778 | 144870817 | + | Homo sapiens | 39 |
| 111 | chr6 | UTRN | 144871113 | 144871154 | + | Homo sapiens | 41 |
| 112 | chr6 | UTRN | 144872123 | 144872165 | + | Homo sapiens | 42 |
| 113 | chr6 | UTRN | 144872599 | 144872669 | + | Homo sapiens | 70 |
| 114 | chr6 | UTRN | 144873625 | 144873662 | + | Homo sapiens | 37 |
| 115 | chr6 | UTRN | 144875136 | 144875182 | + | Homo sapiens | 46 |
| 116 | chr6 | UTRN | 144875895 | 144875938 | + | Homo sapiens | 43 |
| 117 | chr6 | UTRN | 144886315 | 144886378 | + | Homo sapiens | 63 |
| 118 | chr6 | UTRN | 144904604 | 144904645 | + | Homo sapiens | 41 |
| 119 | chr6 | UTRN | 144905276 | 144905300 | + | Homo sapiens | 24 |
| 120 | chr6 | UTRN | 144906334 | 144906358 | + | Homo sapiens | 24 |
| 121 | chr6 | UTRN | 144907025 | 144907055 | + | Homo sapiens | 30 |
| 122 | chr6 | UTRN | 144908864 | 144908908 | + | Homo sapiens | 44 |
| 123 | chr6 | UTRN | 144909055 | 144909078 | + | Homo sapiens | 23 |
| 124 | chr6 | UTRN | 144910040 | 144910085 | + | Homo sapiens | 45 |
| 125 | chr6 | UTRN | 144918990 | 144919013 | + | Homo sapiens | 23 |
| 126 | chr6 | UTRN | 144935390 | 144935427 | + | Homo sapiens | 37 |
| 127 | chr6 | UTRN | 144938199 | 144938248 | + | Homo sapiens | 49 |
| 128 | chr6 | UTRN | 144941446 | 144941489 | + | Homo sapiens | 43 |
| 129 | chr6 | UTRN | 144941551 | 144941596 | + | Homo sapiens | 45 |
| 130 | chr6 | UTRN | 144941700 | 144941748 | + | Homo sapiens | 48 |
| 131 | chr6 | UTRN | 144941856 | 144941912 | + | Homo sapiens | 56 |
| 132 | chr6 | UTRN | 144941912 | 144941988 | + | Homo sapiens | 76 |
| 133 | chr6 | UTRN | 144942080 | 144942136 | + | Homo sapiens | 56 |
| 134 | chr6 | UTRN | 144944667 | 144944712 | + | Homo sapiens | 45 |
| 135 | chr6 | UTRN | 144945160 | 144945207 | + | Homo sapiens | 47 |
| 136 | chr6 | UTRN | 144950918 | 144950987 | + | Homo sapiens | 69 |
| 137 | chr6 | UTRN | 144952595 | 144952650 | + | Homo sapiens | 55 |
| 138 | chr6 | UTRN | 144954758 | 144954804 | + | Homo sapiens | 46 |
| 139 | chr6 | UTRN | 144960952 | 144960996 | + | Homo sapiens | 44 |
| 140 | chr6 | UTRN | 144968386 | 144968438 | + | Homo sapiens | 52 |
| 141 | chr6 | UTRN | 144981668 | 144981709 | + | Homo sapiens | 41 |
| 142 | chr6 | UTRN | 144985026 | 144985072 | + | Homo sapiens | 46 |
| 143 | chr6 | UTRN | 144999637 | 144999686 | + | Homo sapiens | 49 |
| 144 | chr6 | UTRN | 144999750 | 144999785 | + | Homo sapiens | 35 |
| 145 | chr6 | UTRN | 144999904 | 144999956 | + | Homo sapiens | 52 |
| 146 | chr6 | UTRN | 145012224 | 145012561 | + | Homo sapiens | 337 |
| 147 | chr6 | UTRN | 145017897 | 145017969 | + | Homo sapiens | 72 |
| 148 | chr6 | UTRN | 145017978 | 145018021 | + | Homo sapiens | 43 |
| 149 | chr6 | UTRN | 145019229 | 145019261 | + | Homo sapiens | 32 |
| 150 | chr6 | UTRN | 145021232 | 145021278 | + | Homo sapiens | 46 |
| 151 | chr6 | UTRN | 145021336 | 145021382 | + | Homo sapiens | 46 |
| 152 | chr6 | UTRN | 145031285 | 145031331 | + | Homo sapiens | 46 |
| 153 | chr6 | UTRN | 145038424 | 145038467 | + | Homo sapiens | 43 |
| 154 | chr6 | UTRN | 145042706 | 145042751 | + | Homo sapiens | 45 |
| 155 | chr6 | UTRN | 145047775 | 145047820 | + | Homo sapiens | 45 |
| 156 | chr6 | UTRN | 145051549 | 145051592 | + | Homo sapiens | 43 |
| 157 | chr6 | UTRN | 145061899 | 145061941 | + | Homo sapiens | 42 |
| 158 | chr6 | UTRN | 145063569 | 145063615 | + | Homo sapiens | 46 |
| 159 | chr6 | UTRN | 145069445 | 145069497 | + | Homo sapiens | 52 |
| 160 | chr6 | UTRN | 145072959 | 145073005 | + | Homo sapiens | 46 |
| 161 | chr6 | UTRN | 145079115 | 145079162 | + | Homo sapiens | 47 |
| 162 | chr6 | UTRN | 145079204 | 145079271 | + | Homo sapiens | 67 |
| 163 | chr6 | UTRN | 145080780 | 145080816 | + | Homo sapiens | 36 |
| 164 | chr6 | UTRN | 145080843 | 145080885 | + | Homo sapiens | 42 |
| 165 | chr6 | UTRN | 145081884 | 145081930 | + | Homo sapiens | 46 |
| 166 | chr6 | UTRN | 145087734 | 145087827 | + | Homo sapiens | 93 |
| 167 | chr6 | UTRN | 145087827 | 145087911 | + | Homo sapiens | 84 |
| 168 | chr6 | UTRN | 145088046 | 145088124 | + | Homo sapiens | 78 |
| 169 | chr6 | UTRN | 145088210 | 145088245 | + | Homo sapiens | 35 |
| 170 | chr6 | UTRN | 145088678 | 145088723 | + | Homo sapiens | 45 |
| 171 | chr6 | UTRN | 145090281 | 145090327 | + | Homo sapiens | 46 |
| 172 | chr6 | UTRN | 145090884 | 145090934 | + | Homo sapiens | 50 |
| 173 | chr6 | UTRN | 145093542 | 145093591 | + | Homo sapiens | 49 |
| 174 | chr6 | UTRN | 145094155 | 145094199 | + | Homo sapiens | 44 |
| 175 | chr6 | UTRN | 145096714 | 145096756 | + | Homo sapiens | 42 |
| 176 | chr6 | UTRN | 145101237 | 145101284 | + | Homo sapiens | 47 |
| 177 | chr6 | UTRN | 145101598 | 145101642 | + | Homo sapiens | 44 |
| 178 | chr6 | UTRN | 145127145 | 145127194 | + | Homo sapiens | 49 |
| 179 | chr6 | UTRN | 145127467 | 145127507 | + | Homo sapiens | 40 |
| 180 | chr6 | UTRN | 145127866 | 145127929 | + | Homo sapiens | 63 |
| 181 | chr6 | UTRN | 145128105 | 145128160 | + | Homo sapiens | 55 |
| 182 | chr6 | UTRN | 145128415 | 145128460 | + | Homo sapiens | 45 |
| 183 | chr6 | UTRN | 145132350 | 145132397 | + | Homo sapiens | 47 |
| 184 | chr6 | UTRN | 145132917 | 145132974 | + | Homo sapiens | 57 |
| 185 | chr6 | UTRN | 145133779 | 145133802 | + | Homo sapiens | 23 |
| 186 | chr6 | UTRN | 145134097 | 145134169 | + | Homo sapiens | 72 |
| 187 | chr6 | UTRN | 145134835 | 145134881 | + | Homo sapiens | 46 |
| 188 | chr6 | UTRN | 145142034 | 145142135 | + | Homo sapiens | 101 |
| 189 | chr6 | UTRN | 145142629 | 145142676 | + | Homo sapiens | 47 |
| 190 | chr6 | UTRN | 145148750 | 145148806 | + | Homo sapiens | 56 |
| 191 | chr6 | UTRN | 145149936 | 145149984 | + | Homo sapiens | 48 |
| 192 | chr6 | UTRN | 145153900 | 145154300 | + | Homo sapiens | 400 |
| 193 | chr6 | UTRN | 145154735 | 145154782 | + | Homo sapiens | 47 |
| 194 | chr6 | UTRN | 145155438 | 145155468 | + | Homo sapiens | 30 |
| 195 | chr6 | UTRN | 145156972 | 145157019 | + | Homo sapiens | 47 |
| 196 | chr6 | UTRN | 145157440 | 145157555 | + | Homo sapiens | 115 |
| 197 | chr6 | UTRN | 145157566 | 145157621 | + | Homo sapiens | 55 |
| 198 | chr6 | UTRN | 145158149 | 145158194 | + | Homo sapiens | 45 |
| 199 | chr6 | UTRN | 145160356 | 145160409 | + | Homo sapiens | 53 |
| 200 | chr6 | UTRN | 145161881 | 145161927 | + | Homo sapiens | 46 |
| 201 | chr6 | UTRN | 145167107 | 145167151 | + | Homo sapiens | 44 |
| 202 | chr6 | UTRN | 145167205 | 145167243 | + | Homo sapiens | 38 |
| 203 | chr6 | UTRN | 145168292 | 145168344 | + | Homo sapiens | 52 |
| 204 | chr6 | UTRN | 145169033 | 145169085 | + | Homo sapiens | 52 |
| 205 | chr6 | UTRN | 145169156 | 145169202 | + | Homo sapiens | 46 |
| 206 | chr6 | UTRN | 145169270 | 145169315 | + | Homo sapiens | 45 |
| 207 | chr6 | UTRN | 145171814 | 145171863 | + | Homo sapiens | 49 |
| 208 | chr6 | UTRN | 145173631 | 145173718 | + | Homo sapiens | 87 |
| 209 | chr6 | UTRN | 144608489 | 144612535 | + | Homo sapiens | 4046 |
| 210 | chr6 | UTRN | 144610994 | 144615040 | + | Homo sapiens | 4046 |
| 211 | chr6 | UTRN | 144612120 | 144616162 | + | Homo sapiens | 4042 |
| 212 | chr6 | UTRN | 144612968 | 144617021 | + | Homo sapiens | 4053 |
| 213 | chr6 | UTRN | 144616862 | 144620901 | + | Homo sapiens | 4039 |
| 214 | chr6 | UTRN | 144619690 | 144623714 | + | Homo sapiens | 4024 |
| 215 | chr6 | UTRN | 144623028 | 144627096 | + | Homo sapiens | 4068 |
| 216 | chr6 | UTRN | 144623129 | 144627174 | + | Homo sapiens | 4045 |
| 217 | chr6 | UTRN | 144623319 | 144627379 | + | Homo sapiens | 4060 |
| 218 | chr6 | UTRN | 144626965 | 144631011 | + | Homo sapiens | 4046 |
| 219 | chr6 | UTRN | 144631818 | 144635869 | + | Homo sapiens | 4051 |
| 220 | chr6 | UTRN | 144631933 | 144635968 | + | Homo sapiens | 4035 |
| 221 | chr6 | UTRN | 144656267 | 144660302 | + | Homo sapiens | 4035 |
| 222 | chr6 | UTRN | 144683087 | 144687140 | + | Homo sapiens | 4053 |
| 223 | chr6 | UTRN | 144693039 | 144697063 | + | Homo sapiens | 4024 |
| 224 | chr6 | UTRN | 144697670 | 144701699 | + | Homo sapiens | 4029 |
| 225 | chr6 | UTRN | 144702043 | 144706398 | + | Homo sapiens | 4355 |
| 226 | chr6 | UTRN | 144704312 | 144708345 | + | Homo sapiens | 4033 |
| 227 | chr6 | UTRN | 144704654 | 144708704 | + | Homo sapiens | 4050 |
| 228 | chr6 | UTRN | 144719683 | 144723738 | + | Homo sapiens | 4055 |
| 229 | chr6 | UTRN | 144720580 | 144724627 | + | Homo sapiens | 4047 |
| 230 | chr6 | UTRN | 144722848 | 144726889 | + | Homo sapiens | 4041 |
| 231 | chr6 | UTRN | 144725897 | 144729947 | + | Homo sapiens | 4050 |
| 232 | chr6 | UTRN | 144744408 | 144748448 | + | Homo sapiens | 4040 |
| 233 | chr6 | UTRN | 144747102 | 144751152 | + | Homo sapiens | 4050 |
| 234 | chr6 | UTRN | 144747948 | 144752026 | + | Homo sapiens | 4078 |
| 235 | chr6 | UTRN | 144748728 | 144752789 | + | Homo sapiens | 4061 |
| 236 | chr6 | UTRN | 144748789 | 144752853 | + | Homo sapiens | 4064 |
| 237 | chr6 | UTRN | 144755162 | 144759214 | + | Homo sapiens | 4052 |
| 238 | chr6 | UTRN | 144755214 | 144759274 | + | Homo sapiens | 4060 |
| 239 | chr6 | UTRN | 144756752 | 144760807 | + | Homo sapiens | 4055 |
| 240 | chr6 | UTRN | 144756807 | 144760864 | + | Homo sapiens | 4057 |
| 241 | chr6 | UTRN | 144759513 | 144763579 | + | Homo sapiens | 4066 |
| 242 | chr6 | UTRN | 144763456 | 144767506 | + | Homo sapiens | 4050 |
| 243 | chr6 | UTRN | 144766420 | 144770461 | + | Homo sapiens | 4041 |
| 244 | chr6 | UTRN | 144766737 | 144770764 | + | Homo sapiens | 4027 |
| 245 | chr6 | UTRN | 144770549 | 144774627 | + | Homo sapiens | 4078 |
| 246 | chr6 | UTRN | 144772960 | 144777001 | + | Homo sapiens | 4041 |
| 247 | chr6 | UTRN | 144777914 | 144781960 | + | Homo sapiens | 4046 |
| 248 | chr6 | UTRN | 144778026 | 144782070 | + | Homo sapiens | 4044 |
| 249 | chr6 | UTRN | 144778278 | 144782324 | + | Homo sapiens | 4046 |
| 250 | chr6 | UTRN | 144781879 | 144785933 | + | Homo sapiens | 4054 |
| 251 | chr6 | UTRN | 144781933 | 144785995 | + | Homo sapiens | 4062 |
| 252 | chr6 | UTRN | 144798953 | 144802999 | + | Homo sapiens | 4046 |
| 253 | chr6 | UTRN | 144800780 | 144804822 | + | Homo sapiens | 4042 |
| 254 | chr6 | UTRN | 144801427 | 144805473 | + | Homo sapiens | 4046 |
| 255 | chr6 | UTRN | 144801714 | 144805742 | + | Homo sapiens | 4028 |
| 256 | chr6 | UTRN | 144801774 | 144805849 | + | Homo sapiens | 4075 |
| 257 | chr6 | UTRN | 144804673 | 144808714 | + | Homo sapiens | 4041 |
| 258 | chr6 | UTRN | 144806684 | 144810739 | + | Homo sapiens | 4055 |
| 259 | chr6 | UTRN | 144806739 | 144810803 | + | Homo sapiens | 4064 |
| 260 | chr6 | UTRN | 144807834 | 144811881 | + | Homo sapiens | 4047 |
| 261 | chr6 | UTRN | 144809266 | 144813310 | + | Homo sapiens | 4044 |
| 262 | chr6 | UTRN | 144812476 | 144816522 | + | Homo sapiens | 4046 |
| 263 | chr6 | UTRN | 144813156 | 144817199 | + | Homo sapiens | 4043 |
| 264 | chr6 | UTRN | 144818469 | 144822529 | + | Homo sapiens | 4060 |
| 265 | chr6 | UTRN | 144830193 | 144834243 | + | Homo sapiens | 4050 |
| 266 | chr6 | UTRN | 144833120 | 144837166 | + | Homo sapiens | 4046 |
| 267 | chr6 | UTRN | 144833862 | 144837907 | + | Homo sapiens | 4045 |
| 268 | chr6 | UTRN | 144835423 | 144839465 | + | Homo sapiens | 4042 |
| 269 | chr6 | UTRN | 144835943 | 144839989 | + | Homo sapiens | 4046 |
| 270 | chr6 | UTRN | 144842263 | 144846304 | + | Homo sapiens | 4041 |
| 271 | chr6 | UTRN | 144856722 | 144860798 | + | Homo sapiens | 4076 |
| 272 | chr6 | UTRN | 144868778 | 144872817 | + | Homo sapiens | 4039 |
| 273 | chr6 | UTRN | 144869113 | 144873154 | + | Homo sapiens | 4041 |
| 274 | chr6 | UTRN | 144870123 | 144874165 | + | Homo sapiens | 4042 |
| 275 | chr6 | UTRN | 144870599 | 144874669 | + | Homo sapiens | 4070 |
| 276 | chr6 | UTRN | 144871625 | 144875662 | + | Homo sapiens | 4037 |
| 277 | chr6 | UTRN | 144873136 | 144877182 | + | Homo sapiens | 4046 |
| 278 | chr6 | UTRN | 144873895 | 144877938 | + | Homo sapiens | 4043 |
| 279 | chr6 | UTRN | 144884315 | 144888378 | + | Homo sapiens | 4063 |
| 280 | chr6 | UTRN | 144902604 | 144906645 | + | Homo sapiens | 4041 |
| 281 | chr6 | UTRN | 144903276 | 144907300 | + | Homo sapiens | 4024 |
| 282 | chr6 | UTRN | 144904334 | 144908358 | + | Homo sapiens | 4024 |
| 283 | chr6 | UTRN | 144905025 | 144909055 | + | Homo sapiens | 4030 |
| 284 | chr6 | UTRN | 144906864 | 144910908 | + | Homo sapiens | 4044 |
| 285 | chr6 | UTRN | 144907055 | 144911078 | + | Homo sapiens | 4023 |
| 286 | chr6 | UTRN | 144908040 | 144912085 | + | Homo sapiens | 4045 |
| 287 | chr6 | UTRN | 144916990 | 144921013 | + | Homo sapiens | 4023 |
| 288 | chr6 | UTRN | 144933390 | 144937427 | + | Homo sapiens | 4037 |
| 289 | chr6 | UTRN | 144936199 | 144940248 | + | Homo sapiens | 4049 |
| 290 | chr6 | UTRN | 144939446 | 144943489 | + | Homo sapiens | 4043 |
| 291 | chr6 | UTRN | 144939551 | 144943596 | + | Homo sapiens | 4045 |
| 292 | chr6 | UTRN | 144939700 | 144943748 | + | Homo sapiens | 4048 |
| 293 | chr6 | UTRN | 144939856 | 144943912 | + | Homo sapiens | 4056 |
| 294 | chr6 | UTRN | 144939912 | 144943988 | + | Homo sapiens | 4076 |
| 295 | chr6 | UTRN | 144940080 | 144944136 | + | Homo sapiens | 4056 |
| 296 | chr6 | UTRN | 144942667 | 144946712 | + | Homo sapiens | 4045 |
| 297 | chr6 | UTRN | 144943160 | 144947207 | + | Homo sapiens | 4047 |
| 298 | chr6 | UTRN | 144948918 | 144952987 | + | Homo sapiens | 4069 |
| 299 | chr6 | UTRN | 144950595 | 144954650 | + | Homo sapiens | 4055 |
| 300 | chr6 | UTRN | 144952758 | 144956804 | + | Homo sapiens | 4046 |
| 301 | chr6 | UTRN | 144958952 | 144962996 | + | Homo sapiens | 4044 |
| 302 | chr6 | UTRN | 144966386 | 144970438 | + | Homo sapiens | 4052 |
| 303 | chr6 | UTRN | 144979668 | 144983709 | + | Homo sapiens | 4041 |
| 304 | chr6 | UTRN | 144983026 | 144987072 | + | Homo sapiens | 4046 |
| 305 | chr6 | UTRN | 144997637 | 145001686 | + | Homo sapiens | 4049 |
| 306 | chr6 | UTRN | 144997750 | 145001785 | + | Homo sapiens | 4035 |
| 307 | chr6 | UTRN | 144997904 | 145001956 | + | Homo sapiens | 4052 |
| 308 | chr6 | UTRN | 145010224 | 145014561 | + | Homo sapiens | 4337 |
| 309 | chr6 | UTRN | 145015897 | 145019969 | + | Homo sapiens | 4072 |
| 310 | chr6 | UTRN | 145015978 | 145020021 | + | Homo sapiens | 4043 |
| 311 | chr6 | UTRN | 145017229 | 145021261 | + | Homo sapiens | 4032 |
| 312 | chr6 | UTRN | 145019232 | 145023278 | + | Homo sapiens | 4046 |
| 313 | chr6 | UTRN | 145019336 | 145023382 | + | Homo sapiens | 4046 |
| 314 | chr6 | UTRN | 145029285 | 145033331 | + | Homo sapiens | 4046 |
| 315 | chr6 | UTRN | 145036424 | 145040467 | + | Homo sapiens | 4043 |
| 316 | chr6 | UTRN | 145040706 | 145044751 | + | Homo sapiens | 4045 |
| 317 | chr6 | UTRN | 145045775 | 145049820 | + | Homo sapiens | 4045 |
| 318 | chr6 | UTRN | 145049549 | 145053592 | + | Homo sapiens | 4043 |
| 319 | chr6 | UTRN | 145059899 | 145063941 | + | Homo sapiens | 4042 |
| 320 | chr6 | UTRN | 145061569 | 145065615 | + | Homo sapiens | 4046 |
| 321 | chr6 | UTRN | 145067445 | 145071497 | + | Homo sapiens | 4052 |
| 322 | chr6 | UTRN | 145070959 | 145075005 | + | Homo sapiens | 4046 |
| 323 | chr6 | UTRN | 145077115 | 145081162 | + | Homo sapiens | 4047 |
| 324 | chr6 | UTRN | 145077204 | 145081271 | + | Homo sapiens | 4067 |
| 325 | chr6 | UTRN | 145078780 | 145082816 | + | Homo sapiens | 4036 |
| 326 | chr6 | UTRN | 145078843 | 145082885 | + | Homo sapiens | 4042 |
| 327 | chr6 | UTRN | 145079884 | 145083930 | + | Homo sapiens | 4046 |
| 328 | chr6 | UTRN | 145085734 | 145089827 | + | Homo sapiens | 4093 |
| 329 | chr6 | UTRN | 145085827 | 145089911 | + | Homo sapiens | 4084 |
| 330 | chr6 | UTRN | 145086046 | 145090124 | + | Homo sapiens | 4078 |
| 331 | chr6 | UTRN | 145086210 | 145090245 | + | Homo sapiens | 4035 |
| 332 | chr6 | UTRN | 145086678 | 145090723 | + | Homo sapiens | 4045 |
| 333 | chr6 | UTRN | 145088281 | 145092327 | + | Homo sapiens | 4046 |
| 334 | chr6 | UTRN | 145088884 | 145092934 | + | Homo sapiens | 4050 |
| 335 | chr6 | UTRN | 145091542 | 145095591 | + | Homo sapiens | 4049 |
| 336 | chr6 | UTRN | 145092155 | 145096199 | + | Homo sapiens | 4044 |
| 337 | chr6 | UTRN | 145094714 | 145098756 | + | Homo sapiens | 4042 |
| 338 | chr6 | UTRN | 145099237 | 145103284 | + | Homo sapiens | 4047 |
| 339 | chr6 | UTRN | 145099598 | 145103642 | + | Homo sapiens | 4044 |
| 340 | chr6 | UTRN | 145125145 | 145129194 | + | Homo sapiens | 4049 |
| 341 | chr6 | UTRN | 145125467 | 145129507 | + | Homo sapiens | 4040 |
| 342 | chr6 | UTRN | 145125866 | 145129929 | + | Homo sapiens | 4063 |
| 343 | chr6 | UTRN | 145126105 | 145130160 | + | Homo sapiens | 4055 |
| 344 | chr6 | UTRN | 145126415 | 145130460 | + | Homo sapiens | 4045 |
| 345 | chr6 | UTRN | 145130350 | 145134397 | + | Homo sapiens | 4047 |
| 346 | chr6 | UTRN | 145130917 | 145134974 | + | Homo sapiens | 4057 |
| 347 | chr6 | UTRN | 145131779 | 145135802 | + | Homo sapiens | 4023 |
| 348 | chr6 | UTRN | 145132097 | 145136169 | + | Homo sapiens | 4072 |
| 349 | chr6 | UTRN | 145132835 | 145136881 | + | Homo sapiens | 4046 |
| 350 | chr6 | UTRN | 145140034 | 145144135 | + | Homo sapiens | 4101 |
| 351 | chr6 | UTRN | 145140629 | 145144676 | + | Homo sapiens | 4047 |
| 352 | chr6 | UTRN | 145146750 | 145150806 | + | Homo sapiens | 4056 |
| 353 | chr6 | UTRN | 145147936 | 145151984 | + | Homo sapiens | 4048 |
| 354 | chr6 | UTRN | 145151900 | 145156300 | + | Homo sapiens | 4400 |
| 355 | chr6 | UTRN | 145152735 | 145156782 | + | Homo sapiens | 4047 |
| 356 | chr6 | UTRN | 145153438 | 145157468 | + | Homo sapiens | 4030 |
| 357 | chr6 | UTRN | 145154972 | 145159019 | + | Homo sapiens | 4047 |
| 358 | chr6 | UTRN | 145155440 | 145159555 | + | Homo sapiens | 4115 |
| 359 | chr6 | UTRN | 145155566 | 145159621 | + | Homo sapiens | 4055 |
| 360 | chr6 | UTRN | 145156149 | 145160194 | + | Homo sapiens | 4045 |
| 361 | chr6 | UTRN | 145158356 | 145162409 | + | Homo sapiens | 4053 |
| 362 | chr6 | UTRN | 145159881 | 145163927 | + | Homo sapiens | 4046 |
| 363 | chr6 | UTRN | 145165107 | 145169151 | + | Homo sapiens | 4044 |
| 364 | chr6 | UTRN | 145165205 | 145169243 | + | Homo sapiens | 4038 |
| 365 | chr6 | UTRN | 145166292 | 145170344 | + | Homo sapiens | 4052 |
| 366 | chr6 | UTRN | 145167033 | 145171085 | + | Homo sapiens | 4052 |
| 367 | chr6 | UTRN | 145167156 | 145171202 | + | Homo sapiens | 4046 |
| 368 | chr6 | UTRN | 145167270 | 145171315 | + | Homo sapiens | 4045 |
| 369 | chr6 | UTRN | 145169814 | 145173863 | + | Homo sapiens | 4049 |
| 370 | chr6 | UTRN | 145171631 | 145175718 | + | Homo sapiens | 4087 |
| 371 | chr6 | UTRN | 144608031 | 144608073 | − | Homo sapiens | 42 |
| 372 | chr6 | UTRN | 144612926 | 144612972 | − | Homo sapiens | 46 |
| 373 | chr6 | UTRN | 144628552 | 144628595 | − | Homo sapiens | 43 |
| 374 | chr6 | UTRN | 144633946 | 144633970 | − | Homo sapiens | 24 |
| 375 | chr6 | UTRN | 144650739 | 144650804 | − | Homo sapiens | 65 |
| 376 | chr6 | UTRN | 144657045 | 144657093 | − | Homo sapiens | 48 |
| 377 | chr6 | UTRN | 144696995 | 144697041 | − | Homo sapiens | 46 |
| 378 | chr6 | UTRN | 144747612 | 144747674 | − | Homo sapiens | 62 |
| 379 | chr6 | UTRN | 144747879 | 144747925 | − | Homo sapiens | 46 |
| 380 | chr6 | UTRN | 144759816 | 144759863 | − | Homo sapiens | 47 |
| 381 | chr6 | UTRN | 144768238 | 144768312 | − | Homo sapiens | 74 |
| 382 | chr6 | UTRN | 144780036 | 144780082 | − | Homo sapiens | 46 |
| 383 | chr6 | UTRN | 144782886 | 144782935 | − | Homo sapiens | 49 |
| 384 | chr6 | UTRN | 144795766 | 144795789 | − | Homo sapiens | 23 |
| 385 | chr6 | UTRN | 144806556 | 144806601 | − | Homo sapiens | 45 |
| 386 | chr6 | UTRN | 144854365 | 144854401 | − | Homo sapiens | 36 |
| 387 | chr6 | UTRN | 144858769 | 144858809 | − | Homo sapiens | 40 |
| 388 | chr6 | UTRN | 144861763 | 144861805 | − | Homo sapiens | 42 |
| 389 | chr6 | UTRN | 144865560 | 144865594 | − | Homo sapiens | 34 |
| 390 | chr6 | UTRN | 144871095 | 144871118 | − | Homo sapiens | 23 |
| 391 | chr6 | UTRN | 144872146 | 144872179 | − | Homo sapiens | 33 |
| 392 | chr6 | UTRN | 144873792 | 144873815 | − | Homo sapiens | 23 |
| 393 | chr6 | UTRN | 144875726 | 144875775 | − | Homo sapiens | 49 |
| 394 | chr6 | UTRN | 144881389 | 144881429 | − | Homo sapiens | 40 |
| 395 | chr6 | UTRN | 144902992 | 144903093 | − | Homo sapiens | 101 |
| 396 | chr6 | UTRN | 144913242 | 144913292 | − | Homo sapiens | 50 |
| 397 | chr6 | UTRN | 144916606 | 144916629 | − | Homo sapiens | 23 |
| 398 | chr6 | UTRN | 144953033 | 144953075 | − | Homo sapiens | 42 |
| 399 | chr6 | UTRN | 144957938 | 144957985 | − | Homo sapiens | 47 |
| 400 | chr6 | UTRN | 144960849 | 144960900 | − | Homo sapiens | 51 |
| 401 | chr6 | UTRN | 144963737 | 144963802 | − | Homo sapiens | 65 |
| 402 | chr6 | UTRN | 144980957 | 144981000 | − | Homo sapiens | 43 |
| 403 | chr6 | UTRN | 144981226 | 144981271 | − | Homo sapiens | 45 |
| 404 | chr6 | UTRN | 144981350 | 144981396 | − | Homo sapiens | 46 |
| 405 | chr6 | UTRN | 144981507 | 144981542 | − | Homo sapiens | 35 |
| 406 | chr6 | UTRN | 144983660 | 144983707 | − | Homo sapiens | 47 |
| 407 | chr6 | UTRN | 145005066 | 145005095 | − | Homo sapiens | 29 |
| 408 | chr6 | UTRN | 145005500 | 145005548 | − | Homo sapiens | 48 |
| 409 | chr6 | UTRN | 145021339 | 145021384 | − | Homo sapiens | 45 |
| 410 | chr6 | UTRN | 145036068 | 145036136 | − | Homo sapiens | 68 |
| 411 | chr6 | UTRN | 145036766 | 145036820 | − | Homo sapiens | 54 |
| 412 | chr6 | UTRN | 145038552 | 145038606 | − | Homo sapiens | 54 |
| 413 | chr6 | UTRN | 145058056 | 145058096 | − | Homo sapiens | 40 |
| 414 | chr6 | UTRN | 145059402 | 145059450 | − | Homo sapiens | 48 |
| 415 | chr6 | UTRN | 145060834 | 145060905 | − | Homo sapiens | 71 |
| 416 | chr6 | UTRN | 145062448 | 145062475 | − | Homo sapiens | 27 |
| 417 | chr6 | UTRN | 145063125 | 145063160 | − | Homo sapiens | 35 |
| 418 | chr6 | UTRN | 145063273 | 145063302 | − | Homo sapiens | 29 |
| 419 | chr6 | UTRN | 145071318 | 145071359 | − | Homo sapiens | 41 |
| 420 | chr6 | UTRN | 145079495 | 145079543 | − | Homo sapiens | 48 |
| 421 | chr6 | UTRN | 145090227 | 145090266 | − | Homo sapiens | 39 |
| 422 | chr6 | UTRN | 145095420 | 145095465 | − | Homo sapiens | 45 |
| 423 | chr6 | UTRN | 145097191 | 145097232 | − | Homo sapiens | 41 |
| 424 | chr6 | UTRN | 145098097 | 145098128 | − | Homo sapiens | 31 |
| 425 | chr6 | UTRN | 145098960 | 145099005 | − | Homo sapiens | 45 |
| 426 | chr6 | UTRN | 145106983 | 145107024 | − | Homo sapiens | 41 |
| 427 | chr6 | UTRN | 145124174 | 145124220 | − | Homo sapiens | 46 |
| 428 | chr6 | UTRN | 145128278 | 145128325 | − | Homo sapiens | 47 |
| 429 | chr6 | UTRN | 145142105 | 145142152 | − | Homo sapiens | 47 |
| 430 | chr6 | UTRN | 145149926 | 145149972 | − | Homo sapiens | 46 |
| 431 | chr6 | UTRN | 145153110 | 145153155 | − | Homo sapiens | 45 |
| 432 | chr6 | UTRN | 145155586 | 145155641 | − | Homo sapiens | 55 |
| 433 | chr6 | UTRN | 145156956 | 145157020 | − | Homo sapiens | 64 |
| 434 | chr6 | UTRN | 145161886 | 145161931 | − | Homo sapiens | 45 |
| 435 | chr6 | UTRN | 145166490 | 145166527 | − | Homo sapiens | 37 |
| 436 | chr6 | UTRN | 145167701 | 145167736 | − | Homo sapiens | 35 |
| 437 | chr6 | UTRN | 145173585 | 145173627 | − | Homo sapiens | 42 |
| 438 | chr6 | UTRN | 144606031 | 144610073 | − | Homo sapiens | 4042 |
| 439 | chr6 | UTRN | 144610926 | 144614972 | − | Homo sapiens | 4046 |
| 440 | chr6 | UTRN | 144626552 | 144630595 | − | Homo sapiens | 4043 |
| 441 | chr6 | UTRN | 144631946 | 144635970 | − | Homo sapiens | 4024 |
| 442 | chr6 | UTRN | 144648739 | 144652804 | − | Homo sapiens | 4065 |
| 443 | chr6 | UTRN | 144655045 | 144659093 | − | Homo sapiens | 4048 |
| 444 | chr6 | UTRN | 144694995 | 144699041 | − | Homo sapiens | 4046 |
| 445 | chr6 | UTRN | 144745612 | 144749674 | − | Homo sapiens | 4062 |
| 446 | chr6 | UTRN | 144745879 | 144749925 | − | Homo sapiens | 4046 |
| 447 | chr6 | UTRN | 144757816 | 144761863 | − | Homo sapiens | 4047 |
| 448 | chr6 | UTRN | 144766238 | 144770312 | − | Homo sapiens | 4074 |
| 449 | chr6 | UTRN | 144778036 | 144782082 | − | Homo sapiens | 4046 |
| 450 | chr6 | UTRN | 144780886 | 144784935 | − | Homo sapiens | 4049 |
| 451 | chr6 | UTRN | 144793766 | 144797789 | − | Homo sapiens | 4023 |
| 452 | chr6 | UTRN | 144804556 | 144808601 | − | Homo sapiens | 4045 |
| 453 | chr6 | UTRN | 144852365 | 144856401 | − | Homo sapiens | 4036 |
| 454 | chr6 | UTRN | 144856769 | 144860809 | − | Homo sapiens | 4040 |
| 455 | chr6 | UTRN | 144859763 | 144863805 | − | Homo sapiens | 4042 |
| 456 | chr6 | UTRN | 144863560 | 144867594 | − | Homo sapiens | 4034 |
| 457 | chr6 | UTRN | 144869095 | 144873118 | − | Homo sapiens | 4023 |
| 458 | chr6 | UTRN | 144870146 | 144874179 | − | Homo sapiens | 4033 |
| 459 | chr6 | UTRN | 144871792 | 144875815 | − | Homo sapiens | 4023 |
| 460 | chr6 | UTRN | 144873726 | 144877775 | − | Homo sapiens | 4049 |
| 461 | chr6 | UTRN | 144879389 | 144883429 | − | Homo sapiens | 4040 |
| 462 | chr6 | UTRN | 144900992 | 144905093 | − | Homo sapiens | 4101 |
| 463 | chr6 | UTRN | 144911242 | 144915292 | − | Homo sapiens | 4050 |
| 464 | chr6 | UTRN | 144914606 | 144918629 | − | Homo sapiens | 4023 |
| 465 | chr6 | UTRN | 144951033 | 144955075 | − | Homo sapiens | 4042 |
| 466 | chr6 | UTRN | 144955938 | 144959985 | − | Homo sapiens | 4047 |
| 467 | chr6 | UTRN | 144958849 | 144962900 | − | Homo sapiens | 4051 |
| 468 | chr6 | UTRN | 144961737 | 144965802 | − | Homo sapiens | 4065 |
| 469 | chr6 | UTRN | 144978957 | 144983000 | − | Homo sapiens | 4043 |
| 470 | chr6 | UTRN | 144979226 | 144983271 | − | Homo sapiens | 4045 |
| 471 | chr6 | UTRN | 144979350 | 144983396 | − | Homo sapiens | 4046 |
| 472 | chr6 | UTRN | 144979507 | 144983542 | − | Homo sapiens | 4035 |
| 473 | chr6 | UTRN | 144981660 | 144985707 | − | Homo sapiens | 4047 |
| 474 | chr6 | UTRN | 145003066 | 145007095 | − | Homo sapiens | 4029 |
| 475 | chr6 | UTRN | 145003500 | 145007548 | − | Homo sapiens | 4048 |
| 476 | chr6 | UTRN | 145019339 | 145023384 | − | Homo sapiens | 4045 |
| 477 | chr6 | UTRN | 145034068 | 145038136 | − | Homo sapiens | 4068 |
| 478 | chr6 | UTRN | 145034766 | 145038820 | − | Homo sapiens | 4054 |
| 479 | chr6 | UTRN | 145036552 | 145040606 | − | Homo sapiens | 4054 |
| 480 | chr6 | UTRN | 145056056 | 145060096 | − | Homo sapiens | 4040 |
| 481 | chr6 | UTRN | 145057402 | 145061450 | − | Homo sapiens | 4048 |
| 482 | chr6 | UTRN | 145058834 | 145062905 | − | Homo sapiens | 4071 |
| 483 | chr6 | UTRN | 145060448 | 145064475 | − | Homo sapiens | 4027 |
| 484 | chr6 | UTRN | 145061125 | 145065160 | − | Homo sapiens | 4035 |
| 485 | chr6 | UTRN | 145061273 | 145065302 | − | Homo sapiens | 4029 |
| 486 | chr6 | UTRN | 145069318 | 145073359 | − | Homo sapiens | 4041 |
| 487 | chr6 | UTRN | 145077495 | 145081543 | − | Homo sapiens | 4048 |
| 488 | chr6 | UTRN | 145088227 | 145092266 | − | Homo sapiens | 4039 |
| 489 | chr6 | UTRN | 145093420 | 145097465 | − | Homo sapiens | 4045 |
| 490 | chr6 | UTRN | 145095191 | 145099232 | − | Homo sapiens | 4041 |
| 491 | chr6 | UTRN | 145096097 | 145100128 | − | Homo sapiens | 4031 |
| 492 | chr6 | UTRN | 145096960 | 145101005 | − | Homo sapiens | 4045 |
| 493 | chr6 | UTRN | 145104983 | 145109024 | − | Homo sapiens | 4041 |
| 494 | chr6 | UTRN | 145122174 | 145126220 | − | Homo sapiens | 4046 |
| 495 | chr6 | UTRN | 145126278 | 145130325 | − | Homo sapiens | 4047 |
| 496 | chr6 | UTRN | 145140105 | 145144152 | − | Homo sapiens | 4047 |
| 497 | chr6 | UTRN | 145147926 | 145151972 | − | Homo sapiens | 4046 |
| 498 | chr6 | UTRN | 145151110 | 145155155 | − | Homo sapiens | 4045 |
| 499 | chr6 | UTRN | 145153586 | 145157641 | − | Homo sapiens | 4055 |
| 500 | chr6 | UTRN | 145154956 | 145159020 | − | Homo sapiens | 4064 |
| 501 | chr6 | UTRN | 145159886 | 145163931 | − | Homo sapiens | 4045 |
| 502 | chr6 | UTRN | 145164490 | 145168527 | − | Homo sapiens | 4037 |
| 503 | chr6 | UTRN | 145165701 | 145169736 | − | Homo sapiens | 4035 |
| 504 | chr6 | UTRN | 145171585 | 145175627 | − | Homo sapiens | 4042 |
| 505 | chr11 | HBB | 5234695 | 5260301 | − | Homo sapiens | 25606 |
| 506 | chr11 | HBB | 5234695 | 5260301 | + | Homo sapiens | 25606 |
| 507 | chr11 | HBD | 5242058 | 5267858 | − | Homo sapiens | 25800 |
| 508 | chr11 | HBD | 5242058 | 5267858 | + | Homo sapiens | 25800 |
| 509 | chr11 | HBE1 | 5277579 | 5303373 | − | Homo sapiens | 25794 |
| 510 | chr11 | HBE1 | 5277579 | 5303373 | + | Homo sapiens | 25794 |
| 511 | chr11 | HBG1 | 5257501 | 5283087 | − | Homo sapiens | 25586 |
| 512 | chr11 | HBG1 | 5257501 | 5283087 | + | Homo sapiens | 25586 |
| 513 | chr11 | HBG2 | 5262420 | 5288011 | − | Homo sapiens | 25591 |
| 514 | chr11 | HBG2 | 5262420 | 5288011 | + | Homo sapiens | 25591 |
| 515 | chr7 | Hbb-b1 | 110949041 | 110974437 | − | Mus musculus | 25396 |
| 516 | chr7 | Hbb-b1 | 110949041 | 110974437 | + | Mus musculus | 25396 |
| 517 | chr7 | Hbb-bh1 | 110978151 | 111003676 | − | Mus musculus | 25525 |
| 518 | chr7 | Hbb-bh1 | 110978151 | 111003676 | + | Mus musculus | 25525 |
| 519 | chr7 | Hbb-y | 110988267 | 111013721 | − | Mus musculus | 25454 |
| 520 | chr7 | Hbb-y | 110988267 | 111013721 | + | Mus musculus | 25454 |
| 521 | chr11 | HBB/HBD | 5246366 | 5246414 | + | Homo sapiens | 48 |
| 522 | chr11 | HBB/HBD | 5244366 | 5248414 | + | Homo sapiens | 4048 |
| 523 | chr12 | ATP2A2 | 110707031 | 110800897 | + | Homo sapiens | 93866 |
| 524 | chr12 | ATP2A2 | 110707031 | 110800897 | − | Homo sapiens | 93866 |
| 525 | chr5 | Atp2a2 | 122891521 | 122964234 | − | Mus musculus | 72713 |
| 526 | chr5 | Atp2a2 | 122891521 | 122964234 | + | Mus musculus | 72713 |
| 527 | chr12 | ATP2A2 | 110719627 | 110719694 | + | Homo sapiens | 67 |
| 528 | chr12 | ATP2A2 | 110720529 | 110720579 | + | Homo sapiens | 50 |
| 529 | chr12 | ATP2A2 | 110721473 | 110721523 | + | Homo sapiens | 50 |
| 530 | chr12 | ATP2A2 | 110723314 | 110723392 | + | Homo sapiens | 78 |
| 531 | chr12 | ATP2A2 | 110725261 | 110725324 | + | Homo sapiens | 63 |
| 532 | chr12 | ATP2A2 | 110727087 | 110727134 | + | Homo sapiens | 47 |
| 533 | chr12 | ATP2A2 | 110729885 | 110729930 | + | Homo sapiens | 45 |
| 534 | chr12 | ATP2A2 | 110734433 | 110734479 | + | Homo sapiens | 46 |
| 535 | chr12 | ATP2A2 | 110764013 | 110764059 | + | Homo sapiens | 46 |
| 536 | chr12 | ATP2A2 | 110765378 | 110765425 | + | Homo sapiens | 47 |
| 537 | chr12 | ATP2A2 | 110765494 | 110765540 | + | Homo sapiens | 46 |
| 538 | chr12 | ATP2A2 | 110765734 | 110765819 | + | Homo sapiens | 85 |
| 539 | chr12 | ATP2A2 | 110770988 | 110771034 | + | Homo sapiens | 46 |
| 540 | chr12 | ATP2A2 | 110771832 | 110771877 | + | Homo sapiens | 45 |
| 541 | chr12 | ATP2A2 | 110777332 | 110777374 | + | Homo sapiens | 42 |
| 542 | chr12 | ATP2A2 | 110777482 | 110777528 | + | Homo sapiens | 46 |
| 543 | chr12 | ATP2A2 | 110778549 | 110778580 | + | Homo sapiens | 31 |
| 544 | chr12 | ATP2A2 | 110778678 | 110778748 | + | Homo sapiens | 70 |
| 545 | chr12 | ATP2A2 | 110780135 | 110780183 | + | Homo sapiens | 48 |
| 546 | chr12 | ATP2A2 | 110780320 | 110780386 | + | Homo sapiens | 66 |
| 547 | chr12 | ATP2A2 | 110781060 | 110781169 | + | Homo sapiens | 109 |
| 548 | chr12 | ATP2A2 | 110781169 | 110781235 | + | Homo sapiens | 66 |
| 549 | chr12 | ATP2A2 | 110782732 | 110782779 | + | Homo sapiens | 47 |
| 550 | chr12 | ATP2A2 | 110783060 | 110783131 | + | Homo sapiens | 71 |
| 551 | chr12 | ATP2A2 | 110783131 | 110783186 | + | Homo sapiens | 55 |
| 552 | chr12 | ATP2A2 | 110783143 | 110783843 | + | Homo sapiens | 700 |
| 553 | chr12 | ATP2A2 | 110783803 | 110783845 | + | Homo sapiens | 42 |
| 554 | chr12 | ATP2A2 | 110784061 | 110784090 | + | Homo sapiens | 29 |
| 555 | chr12 | ATP2A2 | 110784453 | 110784505 | + | Homo sapiens | 52 |
| 556 | chr12 | ATP2A2 | 110784577 | 110784623 | + | Homo sapiens | 46 |
| 557 | chr12 | ATP2A2 | 110784786 | 110784835 | + | Homo sapiens | 49 |
| 558 | chr12 | ATP2A2 | 110784919 | 110784969 | + | Homo sapiens | 50 |
| 559 | chr12 | ATP2A2 | 110788463 | 110788513 | + | Homo sapiens | 50 |
| 560 | chr12 | ATP2A2 | 110717627 | 110721694 | + | Homo sapiens | 4067 |
| 561 | chr12 | ATP2A2 | 110718529 | 110722579 | + | Homo sapiens | 4050 |
| 562 | chr12 | ATP2A2 | 110719473 | 110723523 | + | Homo sapiens | 4050 |
| 563 | chr12 | ATP2A2 | 110721314 | 110725392 | + | Homo sapiens | 4078 |
| 564 | chr12 | ATP2A2 | 110723261 | 110727324 | + | Homo sapiens | 4063 |
| 565 | chr12 | ATP2A2 | 110725087 | 110729134 | + | Homo sapiens | 4047 |
| 566 | chr12 | ATP2A2 | 110727885 | 110731930 | + | Homo sapiens | 4045 |
| 567 | chr12 | ATP2A2 | 110732433 | 110736479 | + | Homo sapiens | 4046 |
| 568 | chr12 | ATP2A2 | 110762013 | 110766059 | + | Homo sapiens | 4046 |
| 569 | chr12 | ATP2A2 | 110763378 | 110767425 | + | Homo sapiens | 4047 |
| 570 | chr12 | ATP2A2 | 110763494 | 110767540 | + | Homo sapiens | 4046 |
| 571 | chr12 | ATP2A2 | 110763734 | 110767819 | + | Homo sapiens | 4085 |
| 572 | chr12 | ATP2A2 | 110768988 | 110773034 | + | Homo sapiens | 4046 |
| 573 | chr12 | ATP2A2 | 110769832 | 110773877 | + | Homo sapiens | 4045 |
| 574 | chr12 | ATP2A2 | 110775332 | 110779374 | + | Homo sapiens | 4042 |
| 575 | chr12 | ATP2A2 | 110775482 | 110779528 | + | Homo sapiens | 4046 |
| 576 | chr12 | ATP2A2 | 110776549 | 110780580 | + | Homo sapiens | 4031 |
| 577 | chr12 | ATP2A2 | 110776678 | 110780748 | + | Homo sapiens | 4070 |
| 578 | chr12 | ATP2A2 | 110778135 | 110782183 | + | Homo sapiens | 4048 |
| 579 | chr12 | ATP2A2 | 110778320 | 110782386 | + | Homo sapiens | 4066 |
| 580 | chr12 | ATP2A2 | 110779060 | 110783169 | + | Homo sapiens | 4109 |
| 581 | chr12 | ATP2A2 | 110779169 | 110783235 | + | Homo sapiens | 4066 |
| 582 | chr12 | ATP2A2 | 110780732 | 110784779 | + | Homo sapiens | 4047 |
| 583 | chr12 | ATP2A2 | 110781060 | 110785131 | + | Homo sapiens | 4071 |
| 584 | chr12 | ATP2A2 | 110781131 | 110785186 | + | Homo sapiens | 4055 |
| 585 | chr12 | ATP2A2 | 110781143 | 110785843 | + | Homo sapiens | 4700 |
| 586 | chr12 | ATP2A2 | 110781803 | 110785845 | + | Homo sapiens | 4042 |
| 587 | chr12 | ATP2A2 | 110782061 | 110786090 | + | Homo sapiens | 4029 |
| 588 | chr12 | ATP2A2 | 110782453 | 110786505 | + | Homo sapiens | 4052 |
| 589 | chr12 | ATP2A2 | 110782577 | 110786623 | + | Homo sapiens | 4046 |
| 590 | chr12 | ATP2A2 | 110782786 | 110786835 | + | Homo sapiens | 4049 |
| 591 | chr12 | ATP2A2 | 110782919 | 110786969 | + | Homo sapiens | 4050 |
| 592 | chr12 | ATP2A2 | 110786463 | 110790513 | + | Homo sapiens | 4050 |
| 593 | chr12 | ATP2A2 | 110764239 | 110764284 | − | Homo sapiens | 45 |
| 594 | chr12 | ATP2A2 | 110771869 | 110771910 | − | Homo sapiens | 41 |
| 595 | chr12 | ATP2A2 | 110777311 | 110777357 | − | Homo sapiens | 46 |
| 596 | chr12 | ATP2A2 | 110778603 | 110778648 | − | Homo sapiens | 45 |
| 597 | chr12 | ATP2A2 | 110781134 | 110781180 | − | Homo sapiens | 46 |
| 598 | chr12 | ATP2A2 | 110783112 | 110783161 | − | Homo sapiens | 49 |
| 599 | chr12 | ATP2A2 | 110783116 | 110783161 | − | Homo sapiens | 45 |
| 600 | chr12 | ATP2A2 | 110784019 | 110784061 | − | Homo sapiens | 42 |
| 601 | chr12 | ATP2A2 | 110784142 | 110784184 | − | Homo sapiens | 42 |
| 602 | chr12 | ATP2A2 | 110762239 | 110766284 | − | Homo sapiens | 4045 |
| 603 | chr12 | ATP2A2 | 110769869 | 110773910 | − | Homo sapiens | 4041 |
| 604 | chr12 | ATP2A2 | 110775311 | 110779357 | − | Homo sapiens | 4046 |
| 605 | chr12 | ATP2A2 | 110776603 | 110780648 | − | Homo sapiens | 4045 |
| 606 | chr12 | ATP2A2 | 110779134 | 110783180 | − | Homo sapiens | 4046 |
| 607 | chr12 | ATP2A2 | 110781112 | 110785161 | − | Homo sapiens | 4049 |
| 608 | chr12 | ATP2A2 | 110781116 | 110785161 | − | Homo sapiens | 4045 |
| 609 | chr12 | ATP2A2 | 110782019 | 110786061 | − | Homo sapiens | 4042 |
| 610 | chr12 | ATP2A2 | 110782142 | 110786184 | − | Homo sapiens | 4042 |
| 611 | chr11 | APOA1 | 116694468 | 116720338 | − | Homo sapiens | 25870 |
| 612 | chr11 | APOA1 | 116694468 | 116720338 | + | Homo sapiens | 25870 |
| 613 | chr4 | Abca1 | 53031660 | 53184767 | − | Mus musculus | 153107 |
| 614 | chr4 | Abca1 | 53031660 | 53184767 | + | Mus musculus | 153107 |
| 615 | chr9 | ABCA1 | 107531283 | 107702527 | − | Homo sapiens | 171244 |
| 616 | chr9 | ABCA1 | 107531283 | 107702527 | + | Homo sapiens | 171244 |
| 617 | chr9 | Apoa1 | 46024712 | 46050549 | + | Mus musculus | 25837 |
| 618 | chr9 | Apoa1 | 46024712 | 46050549 | − | Mus musculus | 25837 |
| 619 | chr11 | APOA1 | 116703452 | 116703490 | − | Homo sapiens | 38 |
| 620 | chr11 | APOA1 | 116716006 | 116716043 | − | Homo sapiens | 37 |
| 621 | chr9 | ABCA1 | 107544853 | 107544898 | − | Homo sapiens | 45 |
| 622 | chr9 | ABCA1 | 107545317 | 107545373 | − | Homo sapiens | 56 |
| 623 | chr9 | ABCA1 | 107549175 | 107549221 | − | Homo sapiens | 46 |
| 624 | chr9 | ABCA1 | 107550274 | 107550320 | − | Homo sapiens | 46 |
| 625 | chr9 | ABCA1 | 107550704 | 107550746 | − | Homo sapiens | 42 |
| 626 | chr9 | ABCA1 | 107550769 | 107550815 | − | Homo sapiens | 46 |
| 627 | chr9 | ABCA1 | 107553424 | 107553449 | − | Homo sapiens | 25 |
| 628 | chr9 | ABCA1 | 107555135 | 107555180 | − | Homo sapiens | 45 |
| 629 | chr9 | ABCA1 | 107559478 | 107559514 | − | Homo sapiens | 36 |
| 630 | chr9 | ABCA1 | 107562144 | 107562189 | − | Homo sapiens | 45 |
| 631 | chr9 | ABCA1 | 107562811 | 107562856 | − | Homo sapiens | 45 |
| 632 | chr9 | ABCA1 | 107564383 | 107564429 | − | Homo sapiens | 46 |
| 633 | chr9 | ABCA1 | 107564542 | 107564589 | − | Homo sapiens | 47 |
| 634 | chr9 | ABCA1 | 107565573 | 107565597 | − | Homo sapiens | 24 |
| 635 | chr9 | ABCA1 | 107566955 | 107566997 | − | Homo sapiens | 42 |
| 636 | chr9 | ABCA1 | 107567799 | 107567822 | − | Homo sapiens | 23 |
| 637 | chr9 | ABCA1 | 107568594 | 107568642 | − | Homo sapiens | 48 |
| 638 | chr9 | ABCA1 | 107570966 | 107571012 | − | Homo sapiens | 46 |
| 639 | chr9 | ABCA1 | 107571761 | 107571807 | − | Homo sapiens | 46 |
| 640 | chr9 | ABCA1 | 107572492 | 107572538 | − | Homo sapiens | 46 |
| 641 | chr9 | ABCA1 | 107573100 | 107573151 | − | Homo sapiens | 51 |
| 642 | chr9 | ABCA1 | 107574024 | 107574054 | − | Homo sapiens | 30 |
| 643 | chr9 | ABCA1 | 107574852 | 107574906 | − | Homo sapiens | 54 |
| 644 | chr9 | ABCA1 | 107574906 | 107574968 | − | Homo sapiens | 62 |
| 645 | chr9 | ABCA1 | 107576399 | 107576466 | − | Homo sapiens | 67 |
| 646 | chr9 | ABCA1 | 107576708 | 107576754 | − | Homo sapiens | 46 |
| 647 | chr9 | ABCA1 | 107578270 | 107578349 | − | Homo sapiens | 79 |
| 648 | chr9 | ABCA1 | 107578369 | 107578447 | − | Homo sapiens | 78 |
| 649 | chr9 | ABCA1 | 107582257 | 107582303 | − | Homo sapiens | 46 |
| 650 | chr9 | ABCA1 | 107583704 | 107583756 | − | Homo sapiens | 52 |
| 651 | chr9 | ABCA1 | 107584821 | 107584867 | − | Homo sapiens | 46 |
| 652 | chr9 | ABCA1 | 107590239 | 107590277 | − | Homo sapiens | 38 |
| 653 | chr9 | ABCA1 | 107590789 | 107590834 | − | Homo sapiens | 45 |
| 654 | chr9 | ABCA1 | 107591342 | 107591392 | − | Homo sapiens | 50 |
| 655 | chr9 | ABCA1 | 107593256 | 107593298 | − | Homo sapiens | 42 |
| 656 | chr9 | ABCA1 | 107593396 | 107593433 | − | Homo sapiens | 37 |
| 657 | chr9 | ABCA1 | 107593922 | 107593967 | − | Homo sapiens | 45 |
| 658 | chr9 | ABCA1 | 107594977 | 107595047 | − | Homo sapiens | 70 |
| 659 | chr9 | ABCA1 | 107596375 | 107596423 | − | Homo sapiens | 48 |
| 660 | chr9 | ABCA1 | 107597784 | 107597829 | − | Homo sapiens | 45 |
| 661 | chr9 | ABCA1 | 107597907 | 107597985 | − | Homo sapiens | 78 |
| 662 | chr9 | ABCA1 | 107602215 | 107602260 | − | Homo sapiens | 45 |
| 663 | chr9 | ABCA1 | 107602653 | 107602701 | − | Homo sapiens | 48 |
| 664 | chr9 | ABCA1 | 107613685 | 107613749 | − | Homo sapiens | 64 |
| 665 | chr9 | ABCA1 | 107615130 | 107615165 | − | Homo sapiens | 35 |
| 666 | chr9 | ABCA1 | 107620268 | 107620352 | − | Homo sapiens | 84 |
| 667 | chr9 | ABCA1 | 107620400 | 107620445 | − | Homo sapiens | 45 |
| 668 | chr9 | ABCA1 | 107624149 | 107624175 | − | Homo sapiens | 26 |
| 669 | chr9 | ABCA1 | 107625349 | 107625393 | − | Homo sapiens | 44 |
| 670 | chr9 | ABCA1 | 107632152 | 107632259 | − | Homo sapiens | 107 |
| 671 | chr9 | ABCA1 | 107640145 | 107640188 | − | Homo sapiens | 43 |
| 672 | chr9 | ABCA1 | 107648733 | 107648779 | − | Homo sapiens | 46 |
| 673 | chr9 | ABCA1 | 107651606 | 107651651 | − | Homo sapiens | 45 |
| 674 | chr9 | ABCA1 | 107651838 | 107651884 | − | Homo sapiens | 46 |
| 675 | chr9 | ABCA1 | 107654768 | 107654818 | − | Homo sapiens | 50 |
| 676 | chr9 | ABCA1 | 107656823 | 107656846 | − | Homo sapiens | 23 |
| 677 | chr9 | ABCA1 | 107663411 | 107663449 | − | Homo sapiens | 38 |
| 678 | chr9 | ABCA1 | 107664297 | 107664344 | − | Homo sapiens | 47 |
| 679 | chr9 | ABCA1 | 107666346 | 107666399 | − | Homo sapiens | 53 |
| 680 | chr9 | ABCA1 | 107666418 | 107666515 | − | Homo sapiens | 97 |
| 681 | chr9 | ABCA1 | 107669296 | 107669353 | − | Homo sapiens | 57 |
| 682 | chr9 | ABCA1 | 107669453 | 107669501 | − | Homo sapiens | 48 |
| 683 | chr9 | ABCA1 | 107669654 | 107669754 | − | Homo sapiens | 100 |
| 684 | chr9 | ABCA1 | 107669789 | 107669837 | − | Homo sapiens | 48 |
| 685 | chr9 | ABCA1 | 107688863 | 107688904 | − | Homo sapiens | 41 |
| 686 | chr9 | ABCA1 | 107689641 | 107689696 | − | Homo sapiens | 55 |
| 687 | chr9 | ABCA1 | 107689892 | 107689938 | − | Homo sapiens | 46 |
| 688 | chr9 | ABCA1 | 107690078 | 107690126 | − | Homo sapiens | 48 |
| 689 | chr9 | ABCA1 | 107690345 | 107690386 | − | Homo sapiens | 41 |
| 690 | chr11 | ABCA1 | 116701452 | 116705490 | − | Homo sapiens | 4038 |
| 691 | chr11 | ABCA1 | 116714006 | 116718043 | − | Homo sapiens | 4037 |
| 692 | chr9 | ABCA1 | 107542853 | 107546898 | − | Homo sapiens | 4045 |
| 693 | chr9 | ABCA1 | 107543317 | 107547373 | − | Homo sapiens | 4056 |
| 694 | chr9 | ABCA1 | 107547175 | 107551221 | − | Homo sapiens | 4046 |
| 695 | chr9 | ABCA1 | 107548274 | 107552320 | − | Homo sapiens | 4046 |
| 696 | chr9 | ABCA1 | 107548704 | 107552746 | − | Homo sapiens | 4042 |
| 697 | chr9 | ABCA1 | 107548769 | 107552815 | − | Homo sapiens | 4046 |
| 698 | chr9 | ABCA1 | 107551424 | 107555449 | − | Homo sapiens | 4025 |
| 699 | chr9 | ABCA1 | 107553135 | 107557180 | − | Homo sapiens | 4045 |
| 700 | chr9 | ABCA1 | 107557478 | 107561514 | − | Homo sapiens | 4036 |
| 701 | chr9 | ABCA1 | 107560144 | 107564189 | − | Homo sapiens | 4045 |
| 702 | chr9 | ABCA1 | 107560811 | 107564856 | − | Homo sapiens | 4045 |
| 703 | chr9 | ABCA1 | 107562383 | 107566429 | − | Homo sapiens | 4046 |
| 704 | chr9 | ABCA1 | 107562542 | 107566589 | − | Homo sapiens | 4047 |
| 705 | chr9 | ABCA1 | 107563573 | 107567597 | − | Homo sapiens | 4024 |
| 706 | chr9 | ABCA1 | 107564955 | 107568997 | − | Homo sapiens | 4042 |
| 707 | chr9 | ABCA1 | 107565799 | 107569822 | − | Homo sapiens | 4023 |
| 708 | chr9 | ABCA1 | 107566594 | 107570642 | − | Homo sapiens | 4048 |
| 709 | chr9 | ABCA1 | 107568966 | 107573012 | − | Homo sapiens | 4046 |
| 710 | chr9 | ABCA1 | 107569761 | 107573807 | − | Homo sapiens | 4046 |
| 711 | chr9 | ABCA1 | 107570492 | 107574538 | − | Homo sapiens | 4046 |
| 712 | chr9 | ABCA1 | 107571100 | 107575151 | − | Homo sapiens | 4051 |
| 713 | chr9 | ABCA1 | 107572024 | 107576054 | − | Homo sapiens | 4030 |
| 714 | chr9 | ABCA1 | 107572852 | 107576906 | − | Homo sapiens | 4054 |
| 715 | chr9 | ABCA1 | 107572906 | 107576968 | − | Homo sapiens | 4062 |
| 716 | chr9 | ABCA1 | 107574399 | 107578466 | − | Homo sapiens | 4067 |
| 717 | chr9 | ABCA1 | 107574708 | 107578754 | − | Homo sapiens | 4046 |
| 718 | chr9 | ABCA1 | 107576270 | 107580349 | − | Homo sapiens | 4079 |
| 719 | chr9 | ABCA1 | 107576369 | 107580447 | − | Homo sapiens | 4078 |
| 720 | chr9 | ABCA1 | 107580257 | 107584303 | − | Homo sapiens | 4046 |
| 721 | chr9 | ABCA1 | 107581704 | 107585756 | − | Homo sapiens | 4052 |
| 722 | chr9 | ABCA1 | 107582821 | 107586867 | − | Homo sapiens | 4046 |
| 723 | chr9 | ABCA1 | 107588239 | 107592277 | − | Homo sapiens | 4038 |
| 724 | chr9 | ABCA1 | 107588789 | 107592834 | − | Homo sapiens | 4045 |
| 725 | chr9 | ABCA1 | 107589342 | 107593392 | − | Homo sapiens | 4050 |
| 726 | chr9 | ABCA1 | 107591256 | 107595298 | − | Homo sapiens | 4042 |
| 727 | chr9 | ABCA1 | 107591396 | 107595433 | − | Homo sapiens | 4037 |
| 728 | chr9 | ABCA1 | 107591922 | 107595967 | − | Homo sapiens | 4045 |
| 729 | chr9 | ABCA1 | 107592977 | 107597047 | − | Homo sapiens | 4070 |
| 730 | chr9 | ABCA1 | 107594375 | 107598423 | − | Homo sapiens | 4048 |
| 731 | chr9 | ABCA1 | 107595784 | 107599829 | − | Homo sapiens | 4045 |
| 732 | chr9 | ABCA1 | 107595907 | 107599985 | − | Homo sapiens | 4078 |
| 733 | chr9 | ABCA1 | 107600215 | 107604260 | − | Homo sapiens | 4045 |
| 734 | chr9 | ABCA1 | 107600653 | 107604701 | − | Homo sapiens | 4048 |
| 735 | chr9 | ABCA1 | 107611685 | 107615749 | − | Homo sapiens | 4064 |
| 736 | chr9 | ABCA1 | 107613130 | 107617165 | − | Homo sapiens | 4035 |
| 737 | chr9 | ABCA1 | 107618268 | 107622352 | − | Homo sapiens | 4084 |
| 738 | chr9 | ABCA1 | 107618400 | 107622445 | − | Homo sapiens | 4045 |
| 739 | chr9 | ABCA1 | 107622149 | 107626175 | − | Homo sapiens | 4026 |
| 740 | chr9 | ABCA1 | 107623349 | 107627393 | − | Homo sapiens | 4044 |
| 741 | chr9 | ABCA1 | 107630152 | 107634259 | − | Homo sapiens | 4107 |
| 742 | chr9 | ABCA1 | 107638145 | 107642188 | − | Homo sapiens | 4043 |
| 743 | chr9 | ABCA1 | 107646733 | 107650779 | − | Homo sapiens | 4046 |
| 744 | chr9 | ABCA1 | 107649606 | 107653651 | − | Homo sapiens | 4045 |
| 745 | chr9 | ABCA1 | 107649838 | 107653884 | − | Homo sapiens | 4046 |
| 746 | chr9 | ABCA1 | 107652768 | 107656818 | − | Homo sapiens | 4050 |
| 747 | chr9 | ABCA1 | 107654823 | 107658846 | − | Homo sapiens | 4023 |
| 748 | chr9 | ABCA1 | 107661411 | 107665449 | − | Homo sapiens | 4038 |
| 749 | chr9 | ABCA1 | 107662297 | 107666344 | − | Homo sapiens | 4047 |
| 750 | chr9 | ABCA1 | 107664346 | 107668399 | − | Homo sapiens | 4053 |
| 751 | chr9 | ABCA1 | 107664418 | 107668515 | − | Homo sapiens | 4097 |
| 752 | chr9 | ABCA1 | 107667296 | 107671353 | − | Homo sapiens | 4057 |
| 753 | chr9 | ABCA1 | 107667453 | 107671501 | − | Homo sapiens | 4048 |
| 754 | chr9 | ABCA1 | 107667654 | 107671754 | − | Homo sapiens | 4100 |
| 755 | chr9 | ABCA1 | 107667789 | 107671837 | − | Homo sapiens | 4048 |
| 756 | chr9 | ABCA1 | 107686863 | 107690904 | − | Homo sapiens | 4041 |
| 757 | chr9 | ABCA1 | 107687641 | 107691696 | − | Homo sapiens | 4055 |
| 758 | chr9 | ABCA1 | 107687892 | 107691938 | − | Homo sapiens | 4046 |
| 759 | chr9 | ABCA1 | 107688078 | 107692126 | − | Homo sapiens | 4048 |
| 760 | chr9 | ABCA1 | 107688345 | 107692386 | − | Homo sapiens | 4041 |
| 761 | chr11 | ABCA1 | 116707870 | 116707947 | + | Homo sapiens | 77 |
| 762 | chr11 | ABCA1 | 116714416 | 116714458 | + | Homo sapiens | 42 |
| 763 | chr11 | ABCA1 | 116714536 | 116714578 | + | Homo sapiens | 42 |
| 764 | chr11 | ABCA1 | 116714762 | 116714821 | + | Homo sapiens | 59 |
| 765 | chr9 | ABCA1 | 107535234 | 107535273 | + | Homo sapiens | 39 |
| 766 | chr9 | ABCA1 | 107544880 | 107544926 | + | Homo sapiens | 46 |
| 767 | chr9 | ABCA1 | 107547830 | 107547871 | + | Homo sapiens | 41 |
| 768 | chr9 | ABCA1 | 107555512 | 107555554 | + | Homo sapiens | 42 |
| 769 | chr9 | ABCA1 | 107565561 | 107565603 | + | Homo sapiens | 42 |
| 770 | chr9 | ABCA1 | 107573103 | 107573142 | + | Homo sapiens | 39 |
| 771 | chr9 | ABCA1 | 107599184 | 107599234 | + | Homo sapiens | 50 |
| 772 | chr9 | ABCA1 | 107601126 | 107601170 | + | Homo sapiens | 44 |
| 773 | chr9 | ABCA1 | 107607774 | 107607819 | + | Homo sapiens | 45 |
| 774 | chr9 | ABCA1 | 107613720 | 107613783 | + | Homo sapiens | 63 |
| 775 | chr9 | ABCA1 | 107623957 | 107624003 | + | Homo sapiens | 46 |
| 776 | chr9 | ABCA1 | 107630025 | 107630076 | + | Homo sapiens | 51 |
| 111 | chr9 | ABCA1 | 107631197 | 107631265 | + | Homo sapiens | 68 |
| 778 | chr9 | ABCA1 | 107633948 | 107633996 | + | Homo sapiens | 48 |
| 779 | chr9 | ABCA1 | 107648816 | 107648890 | + | Homo sapiens | 74 |
| 780 | chr9 | ABCA1 | 107650500 | 107650558 | + | Homo sapiens | 58 |
| 781 | chr9 | ABCA1 | 107665550 | 107665591 | + | Homo sapiens | 41 |
| 782 | chr9 | ABCA1 | 107666033 | 107666073 | + | Homo sapiens | 40 |
| 783 | chr11 | ABCA1 | 116705870 | 116709947 | + | Homo sapiens | 4077 |
| 784 | chr11 | ABCA1 | 116712416 | 116716458 | + | Homo sapiens | 4042 |
| 785 | chr11 | ABCA1 | 116712536 | 116716578 | + | Homo sapiens | 4042 |
| 786 | chr11 | ABCA1 | 116712762 | 116716821 | + | Homo sapiens | 4059 |
| 787 | chr9 | ABCA1 | 107533234 | 107537273 | + | Homo sapiens | 4039 |
| 788 | chr9 | ABCA1 | 107542880 | 107546926 | + | Homo sapiens | 4046 |
| 789 | chr9 | ABCA1 | 107545830 | 107549871 | + | Homo sapiens | 4041 |
| 790 | chr9 | ABCA1 | 107553512 | 107557554 | + | Homo sapiens | 4042 |
| 791 | chr9 | ABCA1 | 107563561 | 107567603 | + | Homo sapiens | 4042 |
| 792 | chr9 | ABCA1 | 107571103 | 107575142 | + | Homo sapiens | 4039 |
| 793 | chr9 | ABCA1 | 107597184 | 107601234 | + | Homo sapiens | 4050 |
| 794 | chr9 | ABCA1 | 107599126 | 107603170 | + | Homo sapiens | 4044 |
| 795 | chr9 | ABCA1 | 107605774 | 107609819 | + | Homo sapiens | 4045 |
| 796 | chr9 | ABCA1 | 107611720 | 107615783 | + | Homo sapiens | 4063 |
| 797 | chr9 | ABCA1 | 107621957 | 107626003 | + | Homo sapiens | 4046 |
| 798 | chr9 | ABCA1 | 107628025 | 107632076 | + | Homo sapiens | 4051 |
| 799 | chr9 | ABCA1 | 107629197 | 107633265 | + | Homo sapiens | 4068 |
| 800 | chr9 | ABCA1 | 107631948 | 107635996 | + | Homo sapiens | 4048 |
| 801 | chr9 | ABCA1 | 107646816 | 107650890 | + | Homo sapiens | 4074 |
| 802 | chr9 | ABCA1 | 107648500 | 107652558 | + | Homo sapiens | 4058 |
| 803 | chr9 | ABCA1 | 107663550 | 107667591 | + | Homo sapiens | 4041 |
| 804 | chr9 | ABCA1 | 107664033 | 107668073 | + | Homo sapiens | 4040 |
| 805 | chr10 | PTEN | 89611194 | 89740532 | + | Homo sapiens | 129338 |
| 806 | chr10 | PTEN | 89611194 | 89740532 | − | Homo sapiens | 129338 |
| 807 | chr19 | Pten | 32820066 | 32912650 | + | Mus musculus | 92584 |
| 808 | chr19 | Pten | 32820066 | 32912650 | − | Mus musculus | 92584 |
| 809 | chr10 | PTEN | 89624228 | 89624270 | + | Homo sapiens | 42 |
| 810 | chr10 | PTEN | 89624833 | 89624878 | + | Homo sapiens | 45 |
| 811 | chr10 | PTEN | 89624926 | 89624970 | + | Homo sapiens | 44 |
| 812 | chr10 | PTEN | 89625394 | 89625442 | + | Homo sapiens | 48 |
| 813 | chr10 | PTEN | 89625544 | 89625602 | + | Homo sapiens | 58 |
| 814 | chr10 | PTEN | 89625817 | 89625863 | + | Homo sapiens | 46 |
| 815 | chr10 | PTEN | 89625913 | 89625938 | + | Homo sapiens | 25 |
| 816 | chr10 | PTEN | 89625981 | 89626027 | + | Homo sapiens | 46 |
| 817 | chr10 | PTEN | 89626204 | 89626244 | + | Homo sapiens | 40 |
| 818 | chr10 | PTEN | 89626597 | 89626641 | + | Homo sapiens | 44 |
| 819 | chr10 | PTEN | 89626724 | 89626775 | + | Homo sapiens | 51 |
| 820 | chr10 | PTEN | 89626875 | 89626911 | + | Homo sapiens | 36 |
| 821 | chr10 | PTEN | 89627125 | 89627169 | + | Homo sapiens | 44 |
| 822 | chr10 | PTEN | 89628194 | 89628243 | + | Homo sapiens | 49 |
| 823 | chr10 | PTEN | 89630898 | 89630936 | + | Homo sapiens | 38 |
| 824 | chr10 | PTEN | 89633768 | 89633831 | + | Homo sapiens | 63 |
| 825 | chr10 | PTEN | 89637731 | 89637778 | + | Homo sapiens | 47 |
| 826 | chr10 | PTEN | 89655949 | 89655994 | + | Homo sapiens | 45 |
| 827 | chr10 | PTEN | 89685417 | 89685446 | + | Homo sapiens | 29 |
| 828 | chr10 | PTEN | 89686532 | 89686579 | + | Homo sapiens | 47 |
| 829 | chr10 | PTEN | 89686846 | 89686893 | + | Homo sapiens | 47 |
| 830 | chr10 | PTEN | 89690160 | 89690213 | + | Homo sapiens | 53 |
| 831 | chr10 | PTEN | 89691658 | 89691701 | + | Homo sapiens | 43 |
| 832 | chr10 | PTEN | 89692927 | 89692973 | + | Homo sapiens | 46 |
| 833 | chr10 | PTEN | 89693941 | 89693990 | + | Homo sapiens | 49 |
| 834 | chr10 | PTEN | 89695260 | 89695313 | + | Homo sapiens | 53 |
| 835 | chr10 | PTEN | 89695827 | 89695873 | + | Homo sapiens | 46 |
| 836 | chr10 | PTEN | 89697310 | 89697355 | + | Homo sapiens | 45 |
| 837 | chr10 | PTEN | 89698069 | 89698110 | + | Homo sapiens | 41 |
| 838 | chr10 | PTEN | 89698500 | 89698543 | + | Homo sapiens | 43 |
| 839 | chr10 | PTEN | 89698790 | 89698828 | + | Homo sapiens | 38 |
| 840 | chr10 | PTEN | 89699611 | 89699656 | + | Homo sapiens | 45 |
| 841 | chr10 | PTEN | 89700446 | 89700493 | + | Homo sapiens | 47 |
| 842 | chr10 | PTEN | 89700876 | 89700919 | + | Homo sapiens | 43 |
| 843 | chr10 | PTEN | 89701325 | 89701377 | + | Homo sapiens | 52 |
| 844 | chr10 | PTEN | 89701617 | 89701717 | + | Homo sapiens | 100 |
| 845 | chr10 | PTEN | 89701764 | 89701818 | + | Homo sapiens | 54 |
| 846 | chr10 | PTEN | 89701915 | 89701962 | + | Homo sapiens | 47 |
| 847 | chr10 | PTEN | 89712065 | 89712111 | + | Homo sapiens | 46 |
| 848 | chr10 | PTEN | 89712351 | 89712402 | + | Homo sapiens | 51 |
| 849 | chr10 | PTEN | 89712411 | 89712510 | + | Homo sapiens | 99 |
| 850 | chr10 | PTEN | 89714201 | 89714228 | + | Homo sapiens | 27 |
| 851 | chr10 | PTEN | 89717191 | 89717238 | + | Homo sapiens | 47 |
| 852 | chr10 | PTEN | 89720717 | 89720765 | + | Homo sapiens | 48 |
| 853 | chr10 | PTEN | 89723393 | 89723443 | + | Homo sapiens | 50 |
| 854 | chr10 | PTEN | 89725518 | 89725564 | + | Homo sapiens | 46 |
| 855 | chr10 | PTEN | 89725617 | 89725658 | + | Homo sapiens | 41 |
| 856 | chr10 | PTEN | 89725819 | 89725865 | + | Homo sapiens | 46 |
| 857 | chr10 | PTEN | 89726333 | 89726368 | + | Homo sapiens | 35 |
| 858 | chr10 | PTEN | 89726640 | 89726709 | + | Homo sapiens | 69 |
| 859 | chr10 | PTEN | 89727525 | 89727567 | + | Homo sapiens | 42 |
| 860 | chr10 | PTEN | 89727527 | 89727569 | + | Homo sapiens | 42 |
| 861 | chr10 | PTEN | 89728125 | 89728171 | + | Homo sapiens | 46 |
| 862 | chr10 | PTEN | 89728126 | 89728170 | + | Homo sapiens | 44 |
| 863 | chr10 | PTEN | 89728128 | 89728172 | + | Homo sapiens | 44 |
| 864 | chr10 | PTEN | 89730064 | 89730112 | + | Homo sapiens | 48 |
| 865 | chr10 | PTEN | 89730269 | 89730384 | + | Homo sapiens | 115 |
| 866 | chr10 | PTEN | 89622228 | 89626270 | + | Homo sapiens | 4042 |
| 867 | chr10 | PTEN | 89622833 | 89626878 | + | Homo sapiens | 4045 |
| 868 | chr10 | PTEN | 89622926 | 89626970 | + | Homo sapiens | 4044 |
| 869 | chr10 | PTEN | 89623394 | 89627442 | + | Homo sapiens | 4048 |
| 870 | chr10 | PTEN | 89623544 | 89627602 | + | Homo sapiens | 4058 |
| 871 | chr10 | PTEN | 89623817 | 89627863 | + | Homo sapiens | 4046 |
| 872 | chr10 | PTEN | 89623913 | 89627938 | + | Homo sapiens | 4025 |
| 873 | chr10 | PTEN | 89623981 | 89628027 | + | Homo sapiens | 4046 |
| 874 | chr10 | PTEN | 89624204 | 89628244 | + | Homo sapiens | 4040 |
| 875 | chr10 | PTEN | 89624597 | 89628641 | + | Homo sapiens | 4044 |
| 876 | chr10 | PTEN | 89624724 | 89628775 | + | Homo sapiens | 4051 |
| 877 | chr10 | PTEN | 89624875 | 89628911 | + | Homo sapiens | 4036 |
| 878 | chr10 | PTEN | 89625125 | 89629169 | + | Homo sapiens | 4044 |
| 879 | chr10 | PTEN | 89626194 | 89630243 | + | Homo sapiens | 4049 |
| 880 | chr10 | PTEN | 89628898 | 89632936 | + | Homo sapiens | 4038 |
| 881 | chr10 | PTEN | 89631768 | 89635831 | + | Homo sapiens | 4063 |
| 882 | chr10 | PTEN | 89635731 | 89639778 | + | Homo sapiens | 4047 |
| 883 | chr10 | PTEN | 89653949 | 89657994 | + | Homo sapiens | 4045 |
| 884 | chr10 | PTEN | 89683417 | 89687446 | + | Homo sapiens | 4029 |
| 885 | chr10 | PTEN | 89684532 | 89688579 | + | Homo sapiens | 4047 |
| 886 | chr10 | PTEN | 89684846 | 89688893 | + | Homo sapiens | 4047 |
| 887 | chr10 | PTEN | 89688160 | 89692213 | + | Homo sapiens | 4053 |
| 888 | chr10 | PTEN | 89689658 | 89693701 | + | Homo sapiens | 4043 |
| 889 | chr10 | PTEN | 89690927 | 89694973 | + | Homo sapiens | 4046 |
| 890 | chr10 | PTEN | 89691941 | 89695990 | + | Homo sapiens | 4049 |
| 891 | chr10 | PTEN | 89693260 | 89697313 | + | Homo sapiens | 4053 |
| 892 | chr10 | PTEN | 89693827 | 89697873 | + | Homo sapiens | 4046 |
| 893 | chr10 | PTEN | 89695310 | 89699355 | + | Homo sapiens | 4045 |
| 894 | chr10 | PTEN | 89696069 | 89700110 | + | Homo sapiens | 4041 |
| 895 | chr10 | PTEN | 89696500 | 89700543 | + | Homo sapiens | 4043 |
| 896 | chr10 | PTEN | 89696790 | 89700828 | + | Homo sapiens | 4038 |
| 897 | chr10 | PTEN | 89697611 | 89701656 | + | Homo sapiens | 4045 |
| 898 | chr10 | PTEN | 89698446 | 89702493 | + | Homo sapiens | 4047 |
| 899 | chr10 | PTEN | 89698876 | 89702919 | + | Homo sapiens | 4043 |
| 900 | chr10 | PTEN | 89699325 | 89703377 | + | Homo sapiens | 4052 |
| 901 | chr10 | PTEN | 89699617 | 89703717 | + | Homo sapiens | 4100 |
| 902 | chr10 | PTEN | 89699764 | 89703818 | + | Homo sapiens | 4054 |
| 903 | chr10 | PTEN | 89699915 | 89703962 | + | Homo sapiens | 4047 |
| 904 | chr10 | PTEN | 89710065 | 89714111 | + | Homo sapiens | 4046 |
| 905 | chr10 | PTEN | 89710351 | 89714402 | + | Homo sapiens | 4051 |
| 906 | chr10 | PTEN | 89710411 | 89714510 | + | Homo sapiens | 4099 |
| 907 | chr10 | PTEN | 89712201 | 89716228 | + | Homo sapiens | 4027 |
| 908 | chr10 | PTEN | 89715191 | 89719238 | + | Homo sapiens | 4047 |
| 909 | chr10 | PTEN | 89718717 | 89722765 | + | Homo sapiens | 4048 |
| 910 | chr10 | PTEN | 89721393 | 89725443 | + | Homo sapiens | 4050 |
| 911 | chr10 | PTEN | 89723518 | 89727564 | + | Homo sapiens | 4046 |
| 912 | chr10 | PTEN | 89723617 | 89727658 | + | Homo sapiens | 4041 |
| 913 | chr10 | PTEN | 89723819 | 89727865 | + | Homo sapiens | 4046 |
| 914 | chr10 | PTEN | 89724333 | 89728368 | + | Homo sapiens | 4035 |
| 915 | chr10 | PTEN | 89724640 | 89728709 | + | Homo sapiens | 4069 |
| 916 | chr10 | PTEN | 89725525 | 89729567 | + | Homo sapiens | 4042 |
| 917 | chr10 | PTEN | 89725527 | 89729569 | + | Homo sapiens | 4042 |
| 918 | chr10 | PTEN | 89726125 | 89730171 | + | Homo sapiens | 4046 |
| 919 | chr10 | PTEN | 89726126 | 89730170 | + | Homo sapiens | 4044 |
| 920 | chr10 | PTEN | 89726128 | 89730172 | + | Homo sapiens | 4044 |
| 921 | chr10 | PTEN | 89728064 | 89732112 | + | Homo sapiens | 4048 |
| 922 | chr10 | PTEN | 89728269 | 89732384 | + | Homo sapiens | 4115 |
| 923 | chr10 | PTEN | 89623576 | 89623622 | − | Homo sapiens | 46 |
| 924 | chr10 | PTEN | 89623906 | 89623956 | − | Homo sapiens | 50 |
| 925 | chr10 | PTEN | 89624031 | 89624073 | − | Homo sapiens | 42 |
| 926 | chr10 | PTEN | 89624202 | 89624247 | − | Homo sapiens | 45 |
| 927 | chr10 | PTEN | 89624760 | 89624805 | − | Homo sapiens | 45 |
| 928 | chr10 | PTEN | 89625073 | 89625113 | − | Homo sapiens | 40 |
| 929 | chr10 | PTEN | 89628887 | 89628953 | − | Homo sapiens | 66 |
| 930 | chr10 | PTEN | 89665539 | 89665573 | − | Homo sapiens | 34 |
| 931 | chr10 | PTEN | 89692964 | 89693006 | − | Homo sapiens | 42 |
| 932 | chr10 | PTEN | 89695528 | 89695586 | − | Homo sapiens | 58 |
| 933 | chr10 | PTEN | 89695765 | 89695876 | − | Homo sapiens | 111 |
| 934 | chr10 | PTEN | 89695889 | 89695911 | − | Homo sapiens | 22 |
| 935 | chr10 | PTEN | 89697361 | 89697418 | − | Homo sapiens | 57 |
| 936 | chr10 | PTEN | 89697767 | 89697812 | − | Homo sapiens | 45 |
| 937 | chr10 | PTEN | 89721856 | 89721896 | − | Homo sapiens | 40 |
| 938 | chr10 | PTEN | 89621576 | 89625622 | − | Homo sapiens | 4046 |
| 939 | chr10 | PTEN | 89621906 | 89625956 | − | Homo sapiens | 4050 |
| 940 | chr10 | PTEN | 89622031 | 89626073 | − | Homo sapiens | 4042 |
| 941 | chr10 | PTEN | 89622202 | 89626247 | − | Homo sapiens | 4045 |
| 942 | chr10 | PTEN | 89622760 | 89626805 | − | Homo sapiens | 4045 |
| 943 | chr10 | PTEN | 89623073 | 89627113 | − | Homo sapiens | 4040 |
| 944 | chr10 | PTEN | 89626887 | 89630953 | − | Homo sapiens | 4066 |
| 945 | chr10 | PTEN | 89663539 | 89667573 | − | Homo sapiens | 4034 |
| 946 | chr10 | PTEN | 89690964 | 89695006 | − | Homo sapiens | 4042 |
| 947 | chr10 | PTEN | 89693528 | 89697586 | − | Homo sapiens | 4058 |
| 948 | chr10 | PTEN | 89693765 | 89697876 | − | Homo sapiens | 4111 |
| 949 | chr10 | PTEN | 89693889 | 89697911 | − | Homo sapiens | 4022 |
| 950 | chr10 | PTEN | 89695361 | 89699418 | − | Homo sapiens | 4057 |
| 951 | chr10 | PTEN | 89695767 | 89699812 | − | Homo sapiens | 4045 |
| 952 | chr10 | PTEN | 89719856 | 89723896 | − | Homo sapiens | 4040 |
| 953 | chr11 | BDNF | 27664441 | 27693196 | − | Homo sapiens | 28755 |
| 954 | chr11 | BDNF | 27664441 | 27693196 | + | Homo sapiens | 28755 |
| 955 | chr11 | BDNF-AS1 | 27516398 | 27731718 | + | Homo sapiens | 215320 |
| 956 | chr11 | BDNF-AS1 | 27516398 | 27731718 | − | Homo sapiens | 215320 |
| 957 | chr2 | Bdnf | 109502856 | 109579200 | + | Mus musculus | 76344 |
| 958 | chr2 | Bdnf | 109502856 | 109579200 | − | Mus musculus | 76344 |
| 959 | chr11 | BDNF | 27678819 | 27678888 | − | Homo sapiens | 69 |
| 960 | chr11 | BDNF | 27679423 | 27679469 | − | Homo sapiens | 46 |
| 961 | chr11 | BDNF | 27679512 | 27679558 | − | Homo sapiens | 46 |
| 962 | chr11 | BDNF | 27679705 | 27679749 | − | Homo sapiens | 44 |
| 963 | chr11 | BDNF | 27686657 | 27686742 | − | Homo sapiens | 85 |
| 964 | chr11 | BDNF | 27718502 | 27718548 | − | Homo sapiens | 46 |
| 965 | chr11 | BDNF | 27719743 | 27719780 | − | Homo sapiens | 37 |
| 966 | chr11 | BDNF | 27721391 | 27721434 | − | Homo sapiens | 43 |
| 967 | chr11 | BDNF | 27676819 | 27680888 | − | Homo sapiens | 4069 |
| 968 | chr11 | BDNF | 27677423 | 27681469 | − | Homo sapiens | 4046 |
| 969 | chr11 | BDNF | 27677512 | 27681558 | − | Homo sapiens | 4046 |
| 970 | chr11 | BDNF | 27677705 | 27681749 | − | Homo sapiens | 4044 |
| 971 | chr11 | BDNF | 27684657 | 27688742 | − | Homo sapiens | 4085 |
| 972 | chr11 | BDNF | 27716502 | 27720548 | − | Homo sapiens | 4046 |
| 973 | chr11 | BDNF | 27717743 | 27721780 | − | Homo sapiens | 4037 |
| 974 | chr11 | BDNF | 27719391 | 27723434 | − | Homo sapiens | 4043 |
| 975 | chr11 | BDNF | 27739230 | 27739276 | − | Homo sapiens | 46 |
| 976 | chr11 | BDNF | 27741576 | 27741622 | − | Homo sapiens | 46 |
| 977 | chr11 | BDNF | 27742481 | 27742526 | − | Homo sapiens | 45 |
| 978 | chr11 | BDNF | 27742552 | 27742602 | − | Homo sapiens | 50 |
| 979 | chr11 | BDNF | 27737230 | 27741276 | − | Homo sapiens | 4046 |
| 980 | chr11 | BDNF | 27739576 | 27743622 | − | Homo sapiens | 4046 |
| 981 | chr11 | BDNF | 27740481 | 27744526 | − | Homo sapiens | 4045 |
| 982 | chr11 | BDNF | 27740552 | 27744602 | − | Homo sapiens | 4050 |
| 983 | chr11 | BDNF | 27518527 | 27518574 | − | Homo sapiens | 47 |
| 984 | chr11 | BDNF | 27518780 | 27518823 | − | Homo sapiens | 43 |
| 985 | chr11 | BDNF | 27518870 | 27518922 | − | Homo sapiens | 52 |
| 986 | chr11 | BDNF | 27519285 | 27519333 | − | Homo sapiens | 48 |
| 987 | chr11 | BDNF | 27520498 | 27520547 | − | Homo sapiens | 49 |
| 988 | chr11 | BDNF | 27520913 | 27520996 | − | Homo sapiens | 83 |
| 989 | chr11 | BDNF | 27521081 | 27521112 | − | Homo sapiens | 31 |
| 990 | chr11 | BDNF | 27523348 | 27523395 | − | Homo sapiens | 47 |
| 991 | chr11 | BDNF | 27523423 | 27523469 | − | Homo sapiens | 46 |
| 992 | chr11 | BDNF | 27516527 | 27520574 | − | Homo sapiens | 4047 |
| 993 | chr11 | BDNF | 27516780 | 27520823 | − | Homo sapiens | 4043 |
| 994 | chr11 | BDNF | 27516870 | 27520922 | − | Homo sapiens | 4052 |
| 995 | chr11 | BDNF | 27517285 | 27521333 | − | Homo sapiens | 4048 |
| 996 | chr11 | BDNF | 27518498 | 27522547 | − | Homo sapiens | 4049 |
| 997 | chr11 | BDNF | 27518913 | 27522996 | − | Homo sapiens | 4083 |
| 998 | chr11 | BDNF | 27519081 | 27523112 | − | Homo sapiens | 4031 |
| 999 | chr11 | BDNF | 27521348 | 27525395 | − | Homo sapiens | 4047 |
| 1000 | chr11 | BDNF | 27521423 | 27525469 | − | Homo sapiens | 4046 |
| 1001 | chr11 | BDNF | 27681917 | 27681964 | + | Homo sapiens | 47 |
| 1002 | chr11 | BDNF | 27697978 | 27698023 | + | Homo sapiens | 45 |
| 1003 | chr11 | BDNF | 27718599 | 27718680 | + | Homo sapiens | 81 |
| 1004 | chr11 | BDNF | 27679917 | 27683964 | + | Homo sapiens | 4047 |
| 1005 | chr11 | BDNF | 27695978 | 27700023 | + | Homo sapiens | 4045 |
| 1006 | chr11 | BDNF | 27716599 | 27720680 | + | Homo sapiens | 4081 |
| 1007 | chr11 | BDNF | 27523708 | 27523784 | + | Homo sapiens | 76 |
| 1008 | chr11 | BDNF | 27527959 | 27528009 | + | Homo sapiens | 50 |
| 1009 | chr11 | BDNF | 27528063 | 27528106 | + | Homo sapiens | 43 |
| 1010 | chr11 | BDNF | 27521708 | 27525784 | + | Homo sapiens | 4076 |
| 1011 | chr11 | BDNF | 27525959 | 27530009 | + | Homo sapiens | 4050 |
| 1012 | chr11 | BDNF | 27526063 | 27530106 | + | Homo sapiens | 4043 |
| 1013 | chr11 | BDNF | 27734836 | 27734884 | + | Homo sapiens | 48 |
| 1014 | chr11 | BDNF | 27740311 | 27740344 | + | Homo sapiens | 33 |
| 1015 | chr11 | BDNF | 27741786 | 27741828 | + | Homo sapiens | 42 |
| 1016 | chr11 | BDNF | 27742450 | 27742493 | + | Homo sapiens | 43 |
| 1017 | chr11 | BDNF | 27732836 | 27736884 | + | Homo sapiens | 4048 |
| 1018 | chr11 | BDNF | 27738311 | 27742344 | + | Homo sapiens | 4033 |
| 1019 | chr11 | BDNF | 27739786 | 27743828 | + | Homo sapiens | 4042 |
| 1020 | chr11 | BDNF | 27740450 | 27744493 | + | Homo sapiens | 4043 |
| 1021 | chr3 | ADIPOQ | 186548462 | 186588252 | + | Homo sapiens | 39790 |
| 1022 | chr3 | ADIPOQ | 186548462 | 186588252 | − | Homo sapiens | 39790 |
| 1023 | chr16 | Adipoq | 23134608 | 23170041 | + | Mus musculus | 35433 |
| 1024 | chr16 | Adipoq | 23134608 | 23170041 | − | Mus musculus | 35433 |
| 1025 | chr3 | ADIPOQ | 186566781 | 186566827 | + | Homo sapiens | 46 |
| 1026 | chr3 | ADIPOQ | 186571630 | 186571674 | + | Homo sapiens | 44 |
| 1027 | chr3 | ADIPOQ | 186564781 | 186568827 | + | Homo sapiens | 4046 |
| 1028 | chr3 | ADIPOQ | 186569630 | 186573674 | + | Homo sapiens | 4044 |
| 1029 | chr3 | ADIPOQ | 186572160 | 186572189 | − | Homo sapiens | 29 |
| 1030 | chr3 | ADIPOQ | 186570160 | 186574189 | − | Homo sapiens | 4029 |
| 1031 | chrX | MECP2 | 153275263 | 153375188 | − | Homo sapiens | 99925 |
| 1032 | chrX | MECP2 | 153275263 | 153375188 | + | Homo sapiens | 99925 |
| 1033 | chrX | Mecp2 | 71260160 | 71342932 | − | Homo sapiens | 82772 |
| 1034 | chrX | Mecp2 | 71260160 | 71342932 | + | Homo sapiens | 82772 |
| 1035 | chrX | MECP2 | 153278064 | 153278111 | − | Homo sapiens | 47 |
| 1036 | chrX | MECP2 | 153278111 | 153278156 | − | Homo sapiens | 45 |
| 1037 | chrX | MECP2 | 153278706 | 153278747 | − | Homo sapiens | 41 |
| 1038 | chrX | MECP2 | 153279512 | 153279556 | − | Homo sapiens | 44 |
| 1039 | chrX | MECP2 | 153279613 | 153279658 | − | Homo sapiens | 45 |
| 1040 | chrX | MECP2 | 153281486 | 153281531 | − | Homo sapiens | 45 |
| 1041 | chrX | MECP2 | 153283707 | 153283737 | − | Homo sapiens | 30 |
| 1042 | chrX | MECP2 | 153284059 | 153284105 | − | Homo sapiens | 46 |
| 1043 | chrX | MECP2 | 153287944 | 153287992 | − | Homo sapiens | 48 |
| 1044 | chrX | MECP2 | 153288681 | 153288722 | − | Homo sapiens | 41 |
| 1045 | chrX | MECP2 | 153290087 | 153290134 | − | Homo sapiens | 47 |
| 1046 | chrX | MECP2 | 153290216 | 153290263 | − | Homo sapiens | 47 |
| 1047 | chrX | MECP2 | 153290364 | 153290414 | − | Homo sapiens | 50 |
| 1048 | chrX | MECP2 | 153291585 | 153291633 | − | Homo sapiens | 48 |
| 1049 | chrX | MECP2 | 153292312 | 153292362 | − | Homo sapiens | 50 |
| 1050 | chrX | MECP2 | 153292731 | 153292774 | − | Homo sapiens | 43 |
| 1051 | chrX | MECP2 | 153293138 | 153293185 | − | Homo sapiens | 47 |
| 1052 | chrX | MECP2 | 153293331 | 153293377 | − | Homo sapiens | 46 |
| 1053 | chrX | MECP2 | 153293427 | 153293469 | − | Homo sapiens | 42 |
| 1054 | chrX | MECP2 | 153293568 | 153293614 | − | Homo sapiens | 46 |
| 1055 | chrX | MECP2 | 153293715 | 153293764 | − | Homo sapiens | 49 |
| 1056 | chrX | MECP2 | 153293792 | 153293878 | − | Homo sapiens | 86 |
| 1057 | chrX | MECP2 | 153293901 | 153293948 | − | Homo sapiens | 47 |
| 1058 | chrX | MECP2 | 153294420 | 153294467 | − | Homo sapiens | 47 |
| 1059 | chrX | MECP2 | 153297927 | 153297972 | − | Homo sapiens | 45 |
| 1060 | chrX | MECP2 | 153315466 | 153315571 | − | Homo sapiens | 105 |
| 1061 | chrX | MECP2 | 153343401 | 153343447 | − | Homo sapiens | 46 |
| 1062 | chrX | MECP2 | 153344298 | 153344339 | − | Homo sapiens | 41 |
| 1063 | chrX | MECP2 | 153348654 | 153348702 | − | Homo sapiens | 48 |
| 1064 | chrX | MECP2 | 153348997 | 153349021 | − | Homo sapiens | 24 |
| 1065 | chrX | MECP2 | 153349179 | 153349222 | − | Homo sapiens | 43 |
| 1066 | chrX | MECP2 | 153349694 | 153349734 | − | Homo sapiens | 40 |
| 1067 | chrX | MECP2 | 153350493 | 153350518 | − | Homo sapiens | 25 |
| 1068 | chrX | MECP2 | 153356667 | 153356713 | − | Homo sapiens | 46 |
| 1069 | chrX | MECP2 | 153356742 | 153356795 | − | Homo sapiens | 53 |
| 1070 | chrX | MECP2 | 153357047 | 153357106 | − | Homo sapiens | 59 |
| 1071 | chrX | MECP2 | 153357161 | 153357204 | − | Homo sapiens | 43 |
| 1072 | chrX | MECP2 | 153361085 | 153361163 | − | Homo sapiens | 78 |
| 1073 | chrX | MECP2 | 153361423 | 153361467 | − | Homo sapiens | 44 |
| 1074 | chrX | MECP2 | 153362464 | 153362527 | − | Homo sapiens | 63 |
| 1075 | chrX | MECP2 | 153276064 | 153280111 | − | Homo sapiens | 4047 |
| 1076 | chrX | MECP2 | 153276111 | 153280156 | − | Homo sapiens | 4045 |
| 1077 | chrX | MECP2 | 153276706 | 153280747 | − | Homo sapiens | 4041 |
| 1078 | chrX | MECP2 | 153277512 | 153281556 | − | Homo sapiens | 4044 |
| 1079 | chrX | MECP2 | 153277613 | 153281658 | − | Homo sapiens | 4045 |
| 1080 | chrX | MECP2 | 153279486 | 153283531 | − | Homo sapiens | 4045 |
| 1081 | chrX | MECP2 | 153281707 | 153285737 | − | Homo sapiens | 4030 |
| 1082 | chrX | MECP2 | 153282059 | 153286105 | − | Homo sapiens | 4046 |
| 1083 | chrX | MECP2 | 153285944 | 153289992 | − | Homo sapiens | 4048 |
| 1084 | chrX | MECP2 | 153286681 | 153290722 | − | Homo sapiens | 4041 |
| 1085 | chrX | MECP2 | 153288087 | 153292134 | − | Homo sapiens | 4047 |
| 1086 | chrX | MECP2 | 153288216 | 153292263 | − | Homo sapiens | 4047 |
| 1087 | chrX | MECP2 | 153288364 | 153292414 | − | Homo sapiens | 4050 |
| 1088 | chrX | MECP2 | 153289585 | 153293633 | − | Homo sapiens | 4048 |
| 1089 | chrX | MECP2 | 153290312 | 153294362 | − | Homo sapiens | 4050 |
| 1090 | chrX | MECP2 | 153290731 | 153294774 | − | Homo sapiens | 4043 |
| 1091 | chrX | MECP2 | 153291138 | 153295185 | − | Homo sapiens | 4047 |
| 1092 | chrX | MECP2 | 153291331 | 153295377 | − | Homo sapiens | 4046 |
| 1093 | chrX | MECP2 | 153291427 | 153295469 | − | Homo sapiens | 4042 |
| 1094 | chrX | MECP2 | 153291568 | 153295614 | − | Homo sapiens | 4046 |
| 1095 | chrX | MECP2 | 153291715 | 153295764 | − | Homo sapiens | 4049 |
| 1096 | chrX | MECP2 | 153291792 | 153295878 | − | Homo sapiens | 4086 |
| 1097 | chrX | MECP2 | 153291901 | 153295948 | − | Homo sapiens | 4047 |
| 1098 | chrX | MECP2 | 153292420 | 153296467 | − | Homo sapiens | 4047 |
| 1099 | chrX | MECP2 | 153295927 | 153299972 | − | Homo sapiens | 4045 |
| 1100 | chrX | MECP2 | 153313466 | 153317571 | − | Homo sapiens | 4105 |
| 1101 | chrX | MECP2 | 153341401 | 153345447 | − | Homo sapiens | 4046 |
| 1102 | chrX | MECP2 | 153342298 | 153346339 | − | Homo sapiens | 4041 |
| 1103 | chrX | MECP2 | 153346654 | 153350702 | − | Homo sapiens | 4048 |
| 1104 | chrX | MECP2 | 153346997 | 153351021 | − | Homo sapiens | 4024 |
| 1105 | chrX | MECP2 | 153347179 | 153351222 | − | Homo sapiens | 4043 |
| 1106 | chrX | MECP2 | 153347694 | 153351734 | − | Homo sapiens | 4040 |
| 1107 | chrX | MECP2 | 153348493 | 153352518 | − | Homo sapiens | 4025 |
| 1108 | chrX | MECP2 | 153354667 | 153358713 | − | Homo sapiens | 4046 |
| 1109 | chrX | MECP2 | 153354742 | 153358795 | − | Homo sapiens | 4053 |
| 1110 | chrX | MECP2 | 153355047 | 153359106 | − | Homo sapiens | 4059 |
| 1111 | chrX | MECP2 | 153355161 | 153359204 | − | Homo sapiens | 4043 |
| 1112 | chrX | MECP2 | 153359085 | 153363163 | − | Homo sapiens | 4078 |
| 1113 | chrX | MECP2 | 153359423 | 153363467 | − | Homo sapiens | 4044 |
| 1114 | chrX | MECP2 | 153360464 | 153364527 | − | Homo sapiens | 4063 |
| 1115 | chrX | MECP2 | 153279614 | 153279660 | + | Homo sapiens | 46 |
| 1116 | chrX | MECP2 | 153281662 | 153281720 | + | Homo sapiens | 58 |
| 1117 | chrX | MECP2 | 153281946 | 153281988 | + | Homo sapiens | 42 |
| 1118 | chrX | MECP2 | 153284367 | 153284448 | + | Homo sapiens | 81 |
| 1119 | chrX | MECP2 | 153284489 | 153284534 | + | Homo sapiens | 45 |
| 1120 | chrX | MECP2 | 153288786 | 153288832 | + | Homo sapiens | 46 |
| 1121 | chrX | MECP2 | 153289895 | 153289940 | + | Homo sapiens | 45 |
| 1122 | chrX | MECP2 | 153292315 | 153292365 | + | Homo sapiens | 50 |
| 1123 | chrX | MECP2 | 153292496 | 153292548 | + | Homo sapiens | 52 |
| 1124 | chrX | MECP2 | 153297642 | 153297688 | + | Homo sapiens | 46 |
| 1125 | chrX | MECP2 | 153297723 | 153297765 | + | Homo sapiens | 42 |
| 1126 | chrX | MECP2 | 153300816 | 153300879 | + | Homo sapiens | 63 |
| 1127 | chrX | MECP2 | 153315579 | 153315621 | + | Homo sapiens | 42 |
| 1128 | chrX | MECP2 | 153316595 | 153316640 | + | Homo sapiens | 45 |
| 1129 | chrX | MECP2 | 153348783 | 153348830 | + | Homo sapiens | 47 |
| 1130 | chrX | MECP2 | 153349199 | 153349250 | + | Homo sapiens | 51 |
| 1131 | chrX | MECP2 | 153358221 | 153358285 | + | Homo sapiens | 64 |
| 1132 | chrX | MECP2 | 153277614 | 153281660 | + | Homo sapiens | 4046 |
| 1133 | chrX | MECP2 | 153279662 | 153283720 | + | Homo sapiens | 4058 |
| 1134 | chrX | MECP2 | 153279946 | 153283988 | + | Homo sapiens | 4042 |
| 1135 | chrX | MECP2 | 153282367 | 153286448 | + | Homo sapiens | 4081 |
| 1136 | chrX | MECP2 | 153282489 | 153286534 | + | Homo sapiens | 4045 |
| 1137 | chrX | MECP2 | 153286786 | 153290832 | + | Homo sapiens | 4046 |
| 1138 | chrX | MECP2 | 153287895 | 153291940 | + | Homo sapiens | 4045 |
| 1139 | chrX | MECP2 | 153290315 | 153294365 | + | Homo sapiens | 4050 |
| 1140 | chrX | MECP2 | 153290496 | 153294548 | + | Homo sapiens | 4052 |
| 1141 | chrX | MECP2 | 153295642 | 153299688 | + | Homo sapiens | 4046 |
| 1142 | chrX | MECP2 | 153295723 | 153299765 | + | Homo sapiens | 4042 |
| 1143 | chrX | MECP2 | 153298816 | 153302879 | + | Homo sapiens | 4063 |
| 1144 | chrX | MECP2 | 153313579 | 153317621 | + | Homo sapiens | 4042 |
| 1145 | chrX | MECP2 | 153314595 | 153318640 | + | Homo sapiens | 4045 |
| 1146 | chrX | MECP2 | 153346783 | 153350830 | + | Homo sapiens | 4047 |
| 1147 | chrX | MECP2 | 153347199 | 153351250 | + | Homo sapiens | 4051 |
| 1148 | chrX | MECP2 | 153356221 | 153360285 | + | Homo sapiens | 4064 |
| 1149 | chrX | FOXP3 | 49094896 | 49133288 | − | Homo sapiens | 38392 |
| 1150 | chrX | FOXP3 | 49094896 | 49133288 | + | Homo sapiens | 38392 |
| 1151 | chrX | Foxp3 | 7567675 | 7607243 | + | Mus musculus | 39568 |
| 1152 | chrX | Foxp3 | 7567675 | 7607243 | − | Mus musculus | 39568 |
| 1153 | chrX | FOXP3 | 49091852 | 49146158 | + | Homo sapiens | 54306 |
| 1154 | chrX | FOXP3 | 49105387 | 49126985 | + | Homo sapiens | 21598 |
| 1155 | chrX | FOXP3 | 49105442 | 49121156 | + | Homo sapiens | 15714 |
| 1156 | chrX | FOXP3 | 49131266 | 49131313 | + | Homo sapiens | 47 |
| 1157 | chrX | FOXP3 | 49131123 | 49131172 | + | Homo sapiens | 49 |
| 1158 | chrX | FOXP3 | 49127994 | 49128033 | + | Homo sapiens | 39 |
| 1159 | chrX | FOXP3 | 49127843 | 49127890 | + | Homo sapiens | 47 |
| 1160 | chrX | FOXP3 | 49127628 | 49127670 | + | Homo sapiens | 42 |
| 1161 | chrX | FOXP3 | 49124798 | 49124897 | + | Homo sapiens | 99 |
| 1162 | chrX | FOXP3 | 49123918 | 49123965 | + | Homo sapiens | 47 |
| 1163 | chrX | FOXP3 | 49120701 | 49120753 | + | Homo sapiens | 52 |
| 1164 | chrX | FOXP3 | 49118531 | 49118555 | + | Homo sapiens | 24 |
| 1165 | chrX | FOXP3 | 49115652 | 49115685 | + | Homo sapiens | 33 |
| 1166 | chrX | FOXP3 | 49112995 | 49113044 | + | Homo sapiens | 49 |
| 1167 | chrX | FOXP3 | 49112863 | 49112906 | + | Homo sapiens | 43 |
| 1168 | chrX | FOXP3 | 49112637 | 49112717 | + | Homo sapiens | 80 |
| 1169 | chrX | FOXP3 | 49107522 | 49107575 | + | Homo sapiens | 53 |
| 1170 | chrX | FOXP3 | 49106607 | 49106653 | + | Homo sapiens | 46 |
| 1171 | chrX | FOXP3 | 49106128 | 49106175 | + | Homo sapiens | 47 |
| 1172 | chrX | FOXP3 | 49105839 | 49105886 | + | Homo sapiens | 47 |
| 1173 | chrX | FOXP3 | 49105669 | 49105701 | + | Homo sapiens | 32 |
| 1174 | chrX | FOXP3 | 49105241 | 49105285 | + | Homo sapiens | 44 |
| 1175 | chrX | FOXP3 | 49089852 | 49148158 | + | Homo sapiens | 58306 |
| 1176 | chrX | FOXP3 | 49103387 | 49128985 | + | Homo sapiens | 25598 |
| 1177 | chrX | FOXP3 | 49103442 | 49123156 | + | Homo sapiens | 19714 |
| 1178 | chrX | FOXP3 | 49129266 | 49133313 | + | Homo sapiens | 4047 |
| 1179 | chrX | FOXP3 | 49129123 | 49133172 | + | Homo sapiens | 4049 |
| 1180 | chrX | FOXP3 | 49125994 | 49130033 | + | Homo sapiens | 4039 |
| 1181 | chrX | FOXP3 | 49125843 | 49129890 | + | Homo sapiens | 4047 |
| 1182 | chrX | FOXP3 | 49125628 | 49129670 | + | Homo sapiens | 4042 |
| 1183 | chrX | FOXP3 | 49122798 | 49126897 | + | Homo sapiens | 4099 |
| 1184 | chrX | FOXP3 | 49121918 | 49125965 | + | Homo sapiens | 4047 |
| 1185 | chrX | FOXP3 | 49118701 | 49122753 | + | Homo sapiens | 4052 |
| 1186 | chrX | FOXP3 | 49116531 | 49120555 | + | Homo sapiens | 4024 |
| 1187 | chrX | FOXP3 | 49113652 | 49117685 | + | Homo sapiens | 4033 |
| 1188 | chrX | FOXP3 | 49110995 | 49115044 | + | Homo sapiens | 4049 |
| 1189 | chrX | FOXP3 | 49110863 | 49114906 | + | Homo sapiens | 4043 |
| 1190 | chrX | FOXP3 | 49110637 | 49114717 | + | Homo sapiens | 4080 |
| 1191 | chrX | FOXP3 | 49105522 | 49109575 | + | Homo sapiens | 4053 |
| 1192 | chrX | FOXP3 | 49104607 | 49108653 | + | Homo sapiens | 4046 |
| 1193 | chrX | FOXP3 | 49104128 | 49108175 | + | Homo sapiens | 4047 |
| 1194 | chrX | FOXP3 | 49103839 | 49107886 | + | Homo sapiens | 4047 |
| 1195 | chrX | FOXP3 | 49103669 | 49107701 | + | Homo sapiens | 4032 |
| 1196 | chrX | FOXP3 | 49103241 | 49107285 | + | Homo sapiens | 4044 |
| 1197 | chrX | FOXP3 | 49091852 | 49146158 | − | Homo sapiens | 54306 |
| 1198 | chrX | FOXP3 | 49105387 | 49126985 | − | Homo sapiens | 21598 |
| 1199 | chrX | FOXP3 | 49127432 | 49127481 | − | Homo sapiens | 49 |
| 1200 | chrX | FOXP3 | 49127343 | 49127398 | − | Homo sapiens | 55 |
| 1201 | chrX | FOXP3 | 49117756 | 49117794 | − | Homo sapiens | 38 |
| 1202 | chrX | FOXP3 | 49100610 | 49100635 | − | Homo sapiens | 25 |
| 1203 | chrX | FOXP3 | 49100129 | 49100194 | − | Homo sapiens | 65 |
| 1204 | chrX | FOXP3 | 49099553 | 49099595 | − | Homo sapiens | 42 |
| 1205 | chrX | FOXP3 | 49089852 | 49148158 | − | Homo sapiens | 58306 |
| 1206 | chrX | FOXP3 | 49103387 | 49128985 | − | Homo sapiens | 25598 |
| 1207 | chrX | FOXP3 | 49125432 | 49129481 | − | Homo sapiens | 4049 |
| 1208 | chrX | FOXP3 | 49125343 | 49129398 | − | Homo sapiens | 4055 |
| 1209 | chrX | FOXP3 | 49115756 | 49119794 | − | Homo sapiens | 4038 |
| 1210 | chrX | FOXP3 | 49098610 | 49102635 | − | Homo sapiens | 4025 |
| 1211 | chrX | FOXP3 | 49098129 | 49102194 | − | Homo sapiens | 4065 |
| 1212 | chrX | FOXP3 | 49097553 | 49101595 | − | Homo sapiens | 4042 |

[0054] Table 2: Imprinted regions hit by the expanded PRC2 transcriptome.

[0055] Intersection of the PRC2 transcriptome with imprinted gene coordinates (available online at geneimprint.com). The murine imprinted gene (i.e., an intersecting or nearby gene) targeted by the PRC2 binding transcript is shown in column 1. Column 1 also shows the chromosome strand of the murine imprinted gene (“+” sign indicates that the gene is transcribed from the top or plus strand, while “−” sign indicates that the PRC2 binding transcript is transcribed from the bottom or minus strand of the chromosome). The chromosome localization and nucleotide coordinates in mm9 of the PRC2 binding transcript are shown in column 2, as well as a “+” sign or “−” sign that indicates whether the PRC2 binding transcript is transcribed from the top strand (plus strand hit) or bottom strand (minus strand hit) of the chromosome. Column 3 displays the sequence identifiers of the mouse PRC2 binding transcript (i.e., the nucleotide sequence transcribed from the mouse chromosomal coordinates and strand of column 2, converted to RNA by replacing T with U). Column 4 shows the corresponding human gene name for the murine imprinted gene of column 1, obtained from the Mouse Genome Database (MGD), Mouse Genome Informatics, The Jackson Laboratory, Bar Harbor, Me. World Wide Web (informatics.jax.org). Mouse to human LiftOver of the mouse chromosome coordinates in column 2, performed in the UCSC genome browser as described herein, generated the orthologous human chromosome coordinates which appear in Column 5. 50% conservation was used for LiftOver analysis. Additional human chromosome coordinates were generated by mapping of highly conserved or homologous regions from the mouse to human genome. Column 6 displays the sequence identifiers of the predicted human PRC2 binding transcript (i.e., the nucleotide sequence transcribed from the human chromosomal coordinates and strand of column 5, converted to RNA by replacing T with U). When the PRC2 interacting transcript is transcribed from the opposite strand compared to the imprinted reference gene in column 1, that implies that the PRC2 interacting RNA is complementary, or antisense strand (“opposite strand”) in orientation, to the reference imprinted gene. Note that the PRC2 binding transcript need not be the reference imprinted gene itself, but a distinct transcript that overlaps in position.

[0056] Table 3: Hexamers that are not seed sequences of human miRNAs

[0057] APPENDIX I, of U.S. provisional application 61/425,174 filed on Dec. 20, 2010, the entirety of which is incorporated by reference herein, is a listing of a complete RIP seq dataset, showing all of the reads in the dataset. Appendix I is not attached hereto. The sequence reads in Appendix I come directly off the Illumina GA II genome analyzer and are in an orientation that is the reverse complement of the PRC2 binding transcript. Appendix I is a filtered subset of all of the reads after bioinformatic filtering removed adaptor/primer dimers, mitochondrial RNA, rRNA, homopolymers, reads with indeterminate nucleotides, and truncated reads (<15 nt).

### DETAILED DESCRIPTION OF CERTAIN EMBODIMENTS OF THE INVENTION

[0058] Aspects of the invention provided herein relate to the discovery of polycomb repressive complex 2 (PRC2)-interacting RNAs. Polycomb repressive complex 2 (PRC2) is a histone methyltransferase and a known epigenetic regulator involved in silencing of genomic regions through methylation of histone H3. Among other functions, PRC2 interacts with long noncoding RNAs (lncRNAs), such as RepA and Xist, and Tsix, to catalyze trimethylation of histone H3-lysine27. PRC2 contains four subunits, Eed, Suz12, RbAp48, and Ezh2.

[0059] A method, referred to herein as “RNA immunoprecipitation (RIP)-seq,” was used to identify a genome-wide pool of >100,000 polycomb repressive complex 2 (PRC2)-interacting RNAs in embryonic stem cells. A large number of transcripts occur within and around imprinted regions, oncogene and tumor suppressor loci, and stem-cell-related bivalent domains. Evidence for direct RNA-protein interactions, some via the Ezh2 subunit, was established. Further evidence was established that single stranded oligonucleotides designed to bind to these PRC2-interacting RNAs can successfully up-regulate gene expression in a variety of separate and independent examples, which is believed to result from inhibition of PRC2 mediated repression of these target genes. Thus, PRC2 complexes interact with a genome-wide family of RNAs, which may be used as therapeutic targets for human disease. In some embodiments, the sequences of RNA's that interact with PRC2 were between 40-60 nucleotides in length.

[0060] As used herein, the term “PRC2-associated region” refers to a region of a nucleic acid that comprises or encodes a sequence of nucleotides that interact directly or indirectly with a component of PRC2. A PRC2-associated region may be present in a RNA (e.g., a long non-coding RNA (lncRNA)) that that interacts with a PRC2. A PRC2-associated region may be present in a DNA that encodes an RNA that interacts with a PRC2.

[0061] In some embodiments, a PRC2-associated region is a region of an RNA that crosslinks to a component of PRC2 in response to in situ ultraviolet irradiation of a cell that expresses the RNA, or a region of genomic DNA that encodes that RNA region. In some embodiments, a PRC2-associated region is a region of an RNA that immunoprecipitates with an antibody that targets a component of PRC2, or a region of genomic DNA that encodes that RNA region. In some embodiments, a PRC2-associated region is a region of an RNA that immunoprecipitates with an antibody that targets SUZ12, EED, EZH2 or RBBP4 (which are components of PRC2), or a region of genomic DNA that encodes that RNA region.

[0062] In some embodiments, a PRC2-associated region is a region of an RNA that is protected from nucleases (e.g., RNases) in an RNA-immunoprecipitation assay that employs an antibody that targets a component of PRC2, or a region of genomic DNA that encodes that protected RNA region. In some embodiments, a PRC2-associated region is a region of an RNA that is protected from nucleases (e.g., RNases) in an RNA-immunoprecipitation assay that employs an antibody that targets SUZ12, EED, EZH2 or RBBP4, or a region of genomic DNA that encodes that protected RNA region.

[0063] In some embodiments, a PRC2-associated region is a region of an RNA within which occur a relatively high frequency of sequence reads in a sequencing reaction of products of an RNA-immunoprecipitation assay that employs an antibody that targets a component of PRC2, or a region of genomic DNA that encodes that RNA region. In some embodiments, a PRC2-associated region is a region of an RNA within which occur a relatively high frequency of sequence reads in a sequencing reaction of products of an RNA-immunoprecipitation assay that employs an antibody that targets SUZ12, EED, EZH2 or RBBP4, or a region of genomic DNA that encodes that protected RNA region. In such embodiments, the PRC2-associated region may be referred to as a “peak.”

[0064] In some embodiments, a PRC2-associated region comprises a sequence of 40 to 60 nucleotides that interact with PRC2 complex. In some embodiments, a PRC2-associated region comprises a sequence of 40 to 60 nucleotides that encode an RNA that interacts with PRC2. In some embodiments, a PRC2-associated region comprises a sequence of up to 5 kb in length that comprises a sequence (e.g., of 40 to 60 nucleotides) that interacts with PRC2. In some embodiments, a PRC2-associated region comprises a sequence of up to 5 kb in length within which an RNA is encoded that has a sequence (e.g., of 40 to 60 nucleotides) that is known to interact with PRC2. In some embodiments, a PRC2-associated region comprises a sequence of about 4 kb in length that comprise a sequence (e.g., of 40 to 60 nucleotides) that interacts with PRC2. In some embodiments, a PRC2-associated region comprises a sequence of about 4 kb in length within which an RNA is encoded that includes a sequence (e.g., of 40 to 60 nucleotides) that is known to interact with PRC2.

[0065] In some embodiments, a PRC2-associated region has a sequence as set forth in any one of sequences A1 to A193,049, B1 to B916,209, and B916,626 to B934,931.

[0066] In some embodiments, single stranded oligonucleotides are provided that specifically bind to, or are complementary to, a PRC2-associated region, for example, a nucleic acid having a sequence as set forth in sequences A1 to A193,049, B1 to B916,209, and B916,626 to B934,931. Without being bound by a theory of invention, these oligonucleotides are able to interfere with the binding of and function of PRC2, by preventing recruitment of PRC2 to a specific chromosomal locus. For example, data herein shows that a single administration of single stranded oligonucleotides designed to specifically bind a PRC2-associated region lncRNA can stably displace not only the lncRNA, but also the PRC2 that binds to the lncRNA, from binding chromatin. After displacement, the full complement of PRC2 is not recovered for up to 24 hours. Further, data provided herein support that lncRNA can recruit PRC2 in a cis fashion, repressing gene expression at or near the specific chromosomal locus from which the lncRNA was transcribed, thus making it possible to design oligonucleotides that inhibit the function of PRC2 and increase the expression of a specific target gene.

[0067] In further aspects of the invention, methods are provided for selecting a candidate oligonucleotide for activating expression of a target gene. The methods generally involve selecting as a candidate oligonucleotide, a single stranded oligonucleotide comprising a nucleotide sequence that is complementary to a PRC2-associated region (e.g., a nucleotide sequence as set forth in sequences A1 to A193,049, B1 to B916,209, and B916,626 to B934,931). In some embodiments, sets of oligonucleotides may be selected that are enriched (e.g., compared with a random selection of oligonucleotides) in oligonucleotides that activate expression of a target gene.

[0068] In some embodiments, the single stranded oligonucleotide is provided for use in a method of modulating expression of a “gene targeted by the PRC2-binding RNA” (e.g., an intersecting or nearby gene, as set forth in Tables 1-3), meaning a gene whose expression is regulated by the PRC2-binding RNA. The term “PRC2-binding RNA” or “RNA that binds PRC2” is used interchangeably with “PRC2-associated RNA” and “PRC2-interacting RNA”, and refers to a lncRNA, RNA transcript or a PRC2-associated region thereof (e.g., a Peak as described below) that binds PRC2, directly or indirectly. Such binding may be determined by immunoprecipitation techniques using antibodies to a component of the PRC2 complex, e.g. Ezh2. Sequences A1 to A193,049, B1 to B916,209, and B916,626 to B934,931 represent murine RNA sequences containing portions that have been experimentally determined to bind PRC2 using the RIP-seq method described herein, or human RNA sequences corresponding to these murine RNA sequences.

[0069] Such methods of modulating gene expression may be carried out in vitro, ex vivo, or in vivo. Table 8 of International Patent Application Publication WO/2012/065143 displays genes targeted by the PRC2-binding RNA; the sequence identifiers of the PRC2-binding RNA are set forth in the same row as the gene name. In some embodiments, a single stranded oligonucleotide is provided for use in a method of treating disease, e.g. a disease category as set forth in Table 9 of International Patent Application Publication WO/2012/065143 or Table 2. Table 2 of International Patent Application Publication WO/2012/087983, displays genes targeted by the PRC2-binding RNA; the sequence identifiers of the PRC2-binding RNA are set forth in the same row as the gene name. In some embodiments, a single stranded oligonucleotide is provided for use in a method of treating disease, e.g. a disease category as set forth in Table 3 of International Patent Application Publication WO/2012/087983 or Table 2. The treatment may involve modulating expression of a gene targeted by the PRC2-binding RNA, preferably upregulating gene expression. The single stranded oligonucleotide may be formulated as a sterile composition for parenteral administration. It is understood that any reference to uses of compounds throughout the description contemplates use of the compound in preparation of a pharmaceutical composition or medicament for use in the treatment of a disease. Thus, as one nonlimiting example, this aspect of the invention includes use of such single stranded oligonucleotides in the preparation of a medicament for use in the treatment of disease, wherein the treatment involves upregulating expression of a gene targeted by the PRC2-binding RNA.

### Method for Selecting Candidate Oligonucleotides for Activating Gene Expression

[0070] Methods are provided herein for selecting a candidate oligonucleotide for activating expression of a target gene. The target gene of interest may, for example, be a gene of Table 9 of International Patent Application Publication WO/2012/065143. The target gene of interest may, for example, be a gene of Table 3 of International Patent Application Publication WO/2012/087983. The target gene of interest may be FXN, SMN1, SMN2, SMNP, UTRN, HBB, HBD, HBE1, HBG1, HBG2, Hbb-b1, Hbb-bh1, Hbb-y, HBB/HBD, ATP2A2, APOA1, Abca1, PTEN, BDNF, BDNF-AS1, ADIPOQ, MECP2 or FOXP3. Accordingly, the candidate oligonucleotide may be complementary to a sequence selected from the sequences set forth in SEQ ID NOS: 1-1212.

[0071] Typically, the methods involve one or more steps aimed at identifying oligonucleotides that target a PRC2-associated region that is functionally related to the target gene, for example a PRC2-associated region of a lncRNA that regulates expression of the target gene by facilitating (e.g., in a cis-regulatory manner) the recruitment of PRC2 to the target gene. Such oligonucleotides are expected to be candidates for activating expression of the target gene because of their ability to hybridize with the PRC2-associated region of a nucleic acid (e.g., a lncRNA). In some embodiments, this hybridization event is understood to disrupt interaction of PRC2 with the nucleic acid (e.g., a lncRNA) and as a result disrupt recruitment of PRC2 and its associated co-repressors (e.g., chromatin remodeling factors) to the target gene locus.

[0072] Methods of selecting a candidate oligonucleotide may involve selecting a PRC2-associated region (e.g., a nucleotide sequence as set forth in sequences A1 to A193,049, B1 to B916,209, and B916,626 to B934,931) that maps to a chromosomal position encompassing or in proximity to a target gene of interest. The PRC2-associated region may map to the strand of the chromosome comprising the sense strand of the target gene, in which case the candidate oligonucleotide is complementary to the sense strand of the target gene (i.e., is antisense to the target gene). Alternatively, the PRC2-associated region may map to the strand of the first chromosome comprising the antisense strand of the target gene, in which case the oligonucleotide is complementary to the antisense strand (the template strand) of the target gene (i.e., is sense to the target gene).

[0073] Methods for selecting a set of candidate oligonucleotides that is enriched in oligonucleotides that activate expression of a target gene may involve selecting one or more PRC2-associated regions that maps to a chromosomal position that encompasses or that is in proximity to the target gene and selecting a set of oligonucleotides, in which each oligonucleotide in the set comprises a nucleotide sequence that is complementary with the one or more PRC2-associated regions. As used herein, the phrase, “a set of oligonucleotides that is enriched in oligonucleotides that activate expression of a target gene” refers to a set of oligonucleotides that has a greater number of oligonucleotides that activate expression of a target gene compared with a random selection of oligonucleotides of the same physicochemical properties (e.g., the same GC content, Tₘ, length etc.) as the enriched set.

[0074] The PRC2-associated region may map to a position in a chromosome between 50 kilobases upstream of a 5′-end of the target gene and 50 kilobases downstream of a 3′-end of the target gene. The PRC2-associated region may map to a position in a chromosome between 25 kilobases upstream of a 5′-end of the target gene and 25 kilobases downstream of a 3′-end of the target gene. The PRC2-associated region may map to a position in a chromosome between 12 kilobases upstream of a 5′-end of the target gene and 12 kilobases downstream of a 3′-end of the target gene. The PRC2-associated region may map to a position in a chromosome between 5 kilobases upstream of a 5′-end of the target gene and 5 kilobases downstream of a 3′-end of the target gene.

[0075] The genomic position of the selected PRC2-associated region relative to the target gene may vary. For example, the PRC2-associated region may be upstream of the 5′ end of the target gene. The PRC2-associated region may be downstream of the 3′ end of the target gene. The PRC2-associated region may be within an intron of the target gene. The PRC2-associated region may be within an exon of the target gene. The PRC2-associated region may traverse an intron-exon junction, a 5′-UTR-exon junction or a 3′-UTR-exon junction of the target gene.

[0076] The candidate oligonucleotide selection methods may generally also involve determining or identifying an appropriate nucleotide sequence that is complementary with the PRC2-associated region. This nucleotide sequence may be complementary with at least 6, at least 7, at least 8, at least 9, at least 10, at least 15 or more consecutive nucleotides of the PRC2-associated region.

[0077] The candidate oligonucleotide may comprise a sequence having the formula X-Y-Z, in which X is any nucleotide, Y is a nucleotide sequence of 6 nucleotides in length that is not a human seed sequence of a microRNA, and Z is a nucleotide sequence of varying length. In some embodiments X is anchored at the 5′ end of the oligonucleotide. In some embodiments, when X is anchored at the 5′ end of the oligonucleotide, the oligonucleotide does not have any nucleotides or nucleotide analogs linked 5′ to X. In some embodiments, other compounds such as peptides or sterols may be linked at the 5′ end in this embodiment as long as they are not nucleotides or nucleotide analogs. Candidate oligonucleotides that have these sequence characteristics are predicted to avoid the miRNA pathway. Therefore, in some embodiments, oligonucleotides having these sequence characteristics unlikely to have an unintended consequence of functioning in a cell as a miRNA molecule. The Y sequence may be a nucleotide sequence of 6 nucleotides in length set forth in Table 3.

[0078] The candidate oligonucleotide may have a sequence that does not contain guanosine nucleotide stretches (e.g., 3 or more, 4 or more, 5 or more, 6 or more consecutive guanosine nucleotides). In some embodiments, oligonucleotides having guanosine nucleotide stretches have increased non-specific binding and/or off-target effects, compared with oligonucleotides that do not have guanosine nucleotide stretches.

[0079] The candidate oligonucleotide may be selected such that it has a sequence that has less than a threshold level of sequence identity with every sequence of nucleotides, of equivalent length, that map to a genomic position encompassing or in proximity to an off-target gene. For example, a candidate oligonucleotide may be designed to ensure that it does not have a sequence that maps to genomic positions encompassing or in proximity with all known genes (e.g., all known protein coding genes) other than the target gene. In a similar embodiment, a candidate oligonucleotide may be designed to ensure that it does not have a sequence that maps to any other known PRC2-associated region (e.g., a nucleotide sequence as set forth in sequences A1 to A193,049, B1 to B916,209, and B916,626 to B934,931), particularly PRC2-associated regions that are functionally related to any other known gene (e.g., any other known protein coding gene). In either case, the candidate oligonucleotide is expected to have a reduced likelihood of having off-target effects. The threshold level of sequence identity may be 50%, 60%, 70%, 80%, 85%, 90%, 95% or 99% sequence identity.

[0080] The candidate oligonucleotide may be selected such that it has a sequence that is complementary to a PRC2-associated region that encodes an RNA that forms a secondary structure comprising at least two single stranded loops. In has been discovered that, in some embodiments, oligonucleotides that are complementary to a PRC2-associated region that encodes an RNA that forms a secondary structure comprising one or more single stranded loops (e.g., at least two single stranded loops) have a greater likelihood of being active than a randomly selected oligonucleotide. In some cases, the secondary structure may comprise a double stranded stem between the at least two single stranded loops. Accordingly, the selection methods may involve selecting a sequence for the oligonucleotide such that the region of complementarity between the oligonucleotide and the PRC2-associated region is at a location of the PRC2 associated region that encodes at least a portion of at least one of the loops. In some cases, the selection methods may involve selecting a sequence for the oligonucleotide such that the region of complementarity between the oligonucleotide and the PRC2-associated region is at a location of the PRC2-associated region that encodes at least a portion of at least two of the loops. In some cases, the selection methods may involve selecting a sequence for the oligonucleotide such that the region of complementarity between the oligonucleotide and the PRC2-associated region is at a location of the PRC2 associated region that encodes at least a portion of the double stranded stem. In some embodiments, a PRC2-associated region (e.g., of an lncRNA) is identified (e.g., using RIP-Seq methodology or information derived therefrom). In some embodiments, the predicted secondary structure RNA (e.g., lncRNA) containing the PRC2-associated region is determined using RNA secondary structure prediction algorithms, e.g., RNAfold, mfold. In some embodiments, oligonucleotides are designed to target a region of the RNA that forms a secondary structure comprising one or more single stranded loop (e.g., at least two single stranded loops) structures which may comprise a double stranded stem between the at least two single stranded loops.

[0081] The candidate oligonucleotide may be selected such that it has a sequence that is has greater than 30% G-C content, greater than 40% G-C content, greater than 50% G-C content, greater than 60% G-C content, greater than 70% G-C content, or greater than 80% G-C content. In some embodiments in which the oligonucleotide is 8 to 10 nucleotides in length, all but 1, 2, 3, 4, or 5 of the nucleotides of the complementary sequence of the PRC2-associated region are cytosine or guanosine nucleotides.

[0082] The candidate oligonucleotide selection methods may also involve determining that the candidate oligonucleotide is complementary to a chromosome of a different species (e.g., a mouse, rat, rabbit, goat, monkey, etc.) at a position that encompasses or that is in proximity to the homolog of the target gene. This enables the design of oligonucleotides that may be tested in vivo or in vitro for efficacy in multiple species (e.g., human and mouse). This approach also facilitates development of clinical candidates for treating human disease by selecting a species in which an appropriate animal exists for the disease. The candidate oligonucleotide can be readily tested in the animal model.

[0083] Where the design and/or synthesis of a single stranded oligonucleotide involves design and/or synthesis of a sequence that is complementary to a nucleic acid or PRC2-associated region described by such sequence information, the skilled person is readily able to determine the complementary sequence, e.g., through understanding of Watson Crick base pairing rules which form part of the common general knowledge in the field.

[0084] In some embodiments design and/or synthesis of a single stranded oligonucleotide involves manufacture of an oligonucleotide from starting materials by techniques known to those of skill in the art, where the synthesis may be based on a sequence of a PRC2-associated region, or portion thereof.

[0085] Methods of design and/or synthesis of a single stranded oligonucleotide may involve one or more of the steps of:

[0086] Identifying and/or selecting PRC2-associated region;

[0087] Designing a nucleic acid sequence having a desired degree of sequence identity or complementarity to a PRC2-associated region or a portion thereof;

[0088] Synthesizing a single stranded oligonucleotide to the designed sequence;

[0089] Purifying the synthesized single stranded oligonucleotide; and

[0090] Optionally mixing the synthesized single stranded oligonucleotide with at least one pharmaceutically acceptable diluent, carrier or excipient to form a pharmaceutical composition or medicament.

[0091] Single stranded oligonucleotides so designed and/or synthesized may be useful in method of modulating gene expression as described herein.

[0092] Preferably, single stranded oligonucleotides of the invention are synthesized chemically. Oligonucleotides used to practice this invention can be synthesized in vitro by well-known chemical synthesis techniques.

[0093] Oligonucleotides of the invention can be stabilized against nucleolytic degradation such as by the incorporation of a modification, e.g., a nucleotide modification. For example, nucleic acid sequences of the invention include a phosphorothioate at least the first, second, or third internucleotide linkage at the 5′ or 3′ end of the nucleotide sequence. As another example, the nucleic acid sequence can include a 2′-modified nucleotide, e.g., a 2′-deoxy, 2′-deoxy-2′-fluoro, 2′-O-methyl, 2′-O-methoxyethyl (2′-O-MOE), 2′-O-aminopropyl (2′-O-AP), 2′-O-dimethylaminoethyl (2′-O-DMAOE), 2′-O-dimethylaminopropyl (2′-O-DMAP), 2′-O-dimethylaminoethyloxyethyl (2′-O-DMAEOE), or 2′-O—N-methylacetamido (2′-O—NMA). As another example, the nucleic acid sequence can include at least one 2′-O-methyl-modified nucleotide, and in some embodiments, all of the nucleotides include a 2′-O-methyl modification. In some embodiments, the nucleic acids are “locked,” i.e., comprise nucleic acid analogues in which the ribose ring is “locked” by a methylene bridge connecting the 2′-O atom and the 4′-C atom.

[0094] It is understood that any of the modified chemistries or formats of single stranded oligonucleotides described herein can be combined with each other, and that one, two, three, four, five, or more different types of modifications can be included within the same molecule.

[0095] In some embodiments, the method may further comprise the steps of amplifying the synthesized single stranded oligonucleotide, and/or purifying the single stranded oligonucleotide (or amplified single stranded oligonucleotide), and/or sequencing the single stranded oligonucleotide so obtained.

[0096] As such, the process of preparing a single stranded oligonucleotide may be a process that is for use in the manufacture of a pharmaceutical composition or medicament for use in the treatment of disease, optionally wherein the treatment involves modulating expression of a gene associated with a PRC2-associated region.

[0097] In the methods described above a PRC2-associated region may be, or have been, identified, or obtained, by a method that involves identifying RNA that binds to PRC2.

[0098] Such methods may involve the following steps: providing a sample containing nuclear ribonucleic acids, contacting the sample with an agent that binds specifically to PRC2 or a subunit thereof, allowing complexes to form between the agent and protein in the sample, partitioning the complexes, synthesizing nucleic acid that is complementary to nucleic acid present in the complexes.

[0099] Where the single stranded oligonucleotide is based on a PRC2-associated region, or a portion of such a sequence, it may be based on information about that sequence, e.g., sequence information available in written or electronic form, which may include sequence information contained in publicly available scientific publications or sequence databases.

[0100] Single Stranded Oligonucleotides

[0101] In one aspect of the invention, single stranded oligonucleotides complementary to the PRC2-associated regions are provided for modulating expression of target genes in a cell. In some embodiments, expression of target genes is upregulated or increased. In some embodiments, single stranded oligonucleotides complementary to these PRC2-associated regions inhibit the interaction of PRC2 with long RNA transcripts, resulting in reduced methylation of histone H3 and reduced gene inactivation, such that gene expression is upregulated or increased. In some embodiments, this interaction may be disrupted or inhibited due to a change in the structure of the long RNA that prevents or reduces binding to PRC2. The oligonucleotide may be selected using any of the methods disclosed herein for selecting a candidate oligonucleotide for activating expression of a target gene.

[0102] In some embodiments, the region of complementarity is complementary with at least 8 to 15, 8 to 30, 8 to 40, or 10 to 50, or 5 to 50, or 5 to 40 bases, e.g., 5, 6, 7, 8, 9, 10, 11, 12, 13, 14, 15, 16, 17, 18, 19, 20, 21, 22, 23, 24, 25, 26, 27, 28, 29, 30, 31, 32, 33, 34, 35, 36, 37, 38, 39, 40, 41, 42, 43, 44, 45, 46, 47, 48, 49, or 50 consecutive nucleotides of a PRC2-associated region. In some embodiments, the region of complementarity is complementary with at least 8 consecutive nucleotides of a PRC2-associated region. In some embodiments the sequence of the single stranded oligonucleotide is based on an RNA sequence that binds to PRC2, or a portion thereof, said portion having a length of from 5 to 40 contiguous base pairs, or about 8 to 40 bases, or about 5 to 15, or about 5 to 30, or about 5 to 40 bases, or about 5 to 50 bases.

[0103] Any of the oligonucleotides disclosed herein may be linked to one or more other oligonucleotides disclosed herein by a cleavable linker.

[0104] Complementary, as the term is used in the art, refers to the capacity for precise pairing between two nucleotides. For example, if a nucleotide at a certain position of an oligonucleotide is capable of hydrogen bonding with a nucleotide at the same position of PRC2-associated region, then the single stranded nucleotide and PRC2-associated region are considered to be complementary to each other at that position. The single stranded nucleotide and PRC2-associated region are complementary to each other when a sufficient number of corresponding positions in each molecule are occupied by nucleotides that can hydrogen bond with each other through their bases. Thus, “complementary” is a term which is used to indicate a sufficient degree of complementarity or precise pairing such that stable and specific binding occurs between the single stranded nucleotide and PRC2-associated region. For example, if a base at one position of a single stranded nucleotide is capable of hydrogen bonding with a base at the corresponding position of a PRC2-associated region, then the bases are considered to be complementary to each other at that position. 100% complementarity is not required.

[0105] The single stranded oligonucleotide may be at least 80% complementary to (optionally one of at least 85%, 90%, 91%, 92%, 93%, 94%, 95%, 96%, 97%, 98%, 99% or 100% complementary to) the consecutive nucleotides of a PRC2-associated region. In some embodiments the single stranded oligonucleotide may contain 1, 2 or 3 base mismatches compared to the portion of the consecutive nucleotides of a PRC2-associated region. In some embodiments the single stranded oligonucleotide may have up to 3 mismatches over 15 bases, or up to 2 mismatches over 10 bases.

[0106] It is understood in the art that a complementary nucleotide sequence need not be 100% complementary to that of its target to be specifically hybridizable. In some embodiments, a complementary nucleic acid sequence for purposes of the present methods is specifically hybridizable when binding of the sequence to the target molecule (e.g., lncRNA) interferes with the normal function of the target (e.g., lncRNA) to cause a loss of activity (e.g., inhibiting PRC2-associated repression with consequent up-regulation of gene expression) and there is a sufficient degree of complementarity to avoid non-specific binding of the sequence to non-target sequences under conditions in which avoidance of non-specific binding is desired, e.g., under physiological conditions in the case of in vivo assays or therapeutic treatment, and in the case of in vitro assays, under conditions in which the assays are performed under suitable conditions of stringency.

[0107] In some embodiments, the single stranded oligonucleotide is 7, 8, 9, 10, 11, 12, 13, 14, 15, 16, 17, 18, 19, 20, 21, 22, 23, 24, 25, 26, 27, 28, 29, 30, 35, 40, 45, 50 or more nucleotides in length. In an embodiment, the oligonucleotide is 8 to 30 nucleotides in length.

[0108] In some embodiments, the PRC2-associated region occurs on the same DNA strand as a gene sequence (sense). In some embodiments, the PRC2-associated region occurs on the opposite DNA strand as a gene sequence (anti-sense). Oligonucleotides complementary to a PRC2-associated region can bind either sense or anti-sense sequences. Base pairings may include both canonical Watson-Crick base pairing and non-Watson-Crick base pairing (e.g., Wobble base pairing and Hoogsteen base pairing). It is understood that for complementary base pairings, adenosine-type bases (A) are complementary to thymidine-type bases (T) or uracil-type bases (U), that cytosine-type bases (C) are complementary to guanosine-type bases (G), and that universal bases such as 3-nitropyrrole or 5-nitroindole can hybridize to and are considered complementary to any A, C, U, or T. Inosine (I) has also been considered in the art to be a universal base and is considered complementary to any A, C, U or T.

[0109] In some embodiments, any one or more thymidine (T) nucleotides (or modified nucleotide thereof) or uridines (U) nucleotides (or a modified nucleotide thereof) in a sequence provided herein, including a sequence provided in the sequence listing, may be replaced with any other nucleotide suitable for base pairing (e.g., via a Watson-Crick base pair) with an adenosine nucleotide. In some embodiments, any one or more thymidine (T) nucleotides (or modified nucleotide thereof) or uridines (U) nucleotides (or a modified nucleotide thereof) in a sequence provided herein, including a sequence provided in the sequence listing, may be suitably replaced with a different pyrimidine nucleotide or vice versa. In some embodiments, any one or more thymidine (T) nucleotides (or modified nucleotide thereof) in a sequence provided herein, including a sequence provided in the sequence listing, may be suitably replaced with a uridine (U) nucleotide (or a modified nucleotide thereof) or vice versa. Inosine (I) has also been considered in the art to be a universal base and is considered complementary to any A, C, U or T.

[0110] Inosine (I) has also been considered in the art to be a universal base and is considered complementary to any A, C, U or T.

[0111] In some embodiments, GC content of the single stranded oligonucleotide may be between about 30-60%. Contiguous runs of three or more Gs or Cs may not be preferable in some embodiments. Accordingly, in some embodiments, the oligonucleotide does not comprise a stretch of three or more guanosine nucleotides.

[0112] In some embodiments, the single stranded oligonucleotide specifically binds to, or is complementary to an RNA that is encoded in a genome (e.g., a human genome) as a single contiguous transcript (e.g., a non-spliced RNA). In some embodiments, the single stranded oligonucleotide specifically binds to, or is complementary to an RNA that is encoded in a genome (e.g., a human genome), in which the distance in the genome between the 5′ end of the coding region of the RNA and the 3′ end of the coding region of the RNA is less than 1 kb, less than 2 kb, less than 3 kb, less than 4 kb, less than 5 kb, less than 7 kb, less than 8 kb, less than 9 kb, less than 10 kb, or less than 20 kb.

[0113] It is to be understood that any oligonucleotide provided herein can be excluded. In some embodiments, a single stranded oligonucleotide is not complementary to any one or more of SEQ ID NOs: 1213 to 1226.

[0114] Nucleotide Analogues

[0115] In some embodiments, the oligonucleotide may comprise at least one ribonucleotide, at least one deoxyribonucleotide, and/or at least one bridged nucleotide. In some embodiments, the oligonucleotide may comprise a bridged nucleotide, such as a LNA nucleotide, a cEt nucleotide or a ENA nucleotide analogue. Examples of such nucleotides are disclosed herein and known in the art. In some embodiments, the oligonucleotide comprises a nucleotide analog disclosed in one of the following United States patent or patent application Publications: U.S. Pat. No. 7,399,845, U.S. Pat. No. 7,741,457, U.S. Pat. No. 8,022,193, U.S. Pat. No. 7,569,686, U.S. Pat. No. 7,335,765, U.S. Pat. No. 7,314,923, U.S. Pat. No. 7,335,765, and U.S. Pat. No. 7,816,333, US 20110009471, the entire contents of each of which are incorporated herein by reference for all purposes. The oligonucleotide may have one or more 2′ O-methyl nucleotides. The oligonucleotide may consist entirely of 2′ O-methyl nucleotides.

[0116] Often the single stranded oligonucleotide has one or more nucleotide analogues. For example, the single stranded oligonucleotide may have at least one nucleotide analogue that results in an increase in Tₘ of the oligonucleotide in a range of 1° C., 2° C., 3° C., 4° C., or 5° C. compared with an oligonucleotide that does not have the at least one nucleotide analogue. The single stranded oligonucleotide may have a plurality of nucleotide analogues that results in a total increase in Tₘ of the oligonucleotide in a range of 2° C., 3° C., 4° C., 5° C., 6° C., 7° C., 8° C., 9° C., 10° C., 15° C., 20° C., 25° C., 30° C., 35° C., 40° C., 45° C. or more compared with an oligonucleotide that does not have the nucleotide analogue.

[0117] The oligonucleotide may be of up to 50 nucleotides in length in which 2 to 10, 2 to 15, 2 to 16, 2 to 17, 2 to 18, 2 to 19, 2 to 20, 2 to 25, 2 to 30, 2 to 40, 2 to 45, or more nucleotides of the oligonucleotide are nucleotide analogues. The oligonucleotide may be of 8 to 30 nucleotides in length in which 2 to 10, 2 to 15, 2 to 16, 2 to 17, 2 to 18, 2 to 19, 2 to 20, 2 to 25, 2 to 30 nucleotides of the oligonucleotide are nucleotide analogues.

[0118] The oligonucleotide may be of 8 to 15 nucleotides in length in which 2 to 4, 2 to 5, 2 to 6, 2 to 7, 2 to 8, 2 to 9, 2 to 10, 2 to 11, 2 to 12, 2 to 13, 2 to 14 nucleotides of the oligonucleotide are nucleotide analogues. Optionally, the oligonucleotides may have every nucleotide except 1, 2, 3, 4, 5, 6, 7, 8, 9, or 10 nucleotides modified.

[0119] The oligonucleotide may consist entirely of bridged nucleotides (e.g., LNA nucleotides, cEt nucleotides, ENA nucleotides). The oligonucleotide may comprise alternating deoxyribonucleotides and 2′-fluoro-deoxyribonucleotides. The oligonucleotide may comprise alternating deoxyribonucleotides and 2′-O-methyl nucleotides. The oligonucleotide may comprise alternating deoxyribonucleotides and ENA nucleotide analogues. The oligonucleotide may comprise alternating deoxyribonucleotides and LNA nucleotides. The oligonucleotide may comprise alternating LNA nucleotides and 2′-O-methyl nucleotides. The oligonucleotide may have a 5′ nucleotide that is a bridged nucleotide (e.g., a LNA nucleotide, cEt nucleotide, ENA nucleotide). The oligonucleotide may have a 5′ nucleotide that is a deoxyribonucleotide.

[0120] The oligonucleotide may comprise deoxyribonucleotides flanked by at least one bridged nucleotide (e.g., a LNA nucleotide, cEt nucleotide, ENA nucleotide) on each of the 5′ and 3′ ends of the deoxyribonucleotides. The oligonucleotide may comprise deoxyribonucleotides flanked by 1, 2, 3, 4, 5, 6, 7, 8 or more bridged nucleotides (e.g., LNA nucleotides, cEt nucleotides, ENA nucleotides) on each of the 5′ and 3′ ends of the deoxyribonucleotides. The 3′ position of the oligonucleotide may have a 3′ hydroxyl group. The 3′ position of the oligonucleotide may have a 3′ thiophosphate.

[0121] The oligonucleotide may be conjugated with a label. For example, the oligonucleotide may be conjugated with a biotin moiety, cholesterol, Vitamin A, folate, sigma receptor ligands, aptamers, peptides, such as CPP, hydrophobic molecules, such as lipids, ASGPR or dynamic polyconjugates and variants thereof at its 5′ or 3′ end.

[0122] Preferably the single stranded oligonucleotide comprises one or more modifications comprising: a modified sugar moiety, and/or a modified internucleoside linkage, and/or a modified nucleotide and/or combinations thereof. It is not necessary for all positions in a given oligonucleotide to be uniformly modified, and in fact more than one of the modifications described herein may be incorporated in a single oligonucleotide or even at within a single nucleoside within an oligonucleotide.

[0123] In some embodiments, the single stranded oligonucleotides are chimeric oligonucleotides that contain two or more chemically distinct regions, each made up of at least one nucleotide. These oligonucleotides typically contain at least one region of modified nucleotides that confers one or more beneficial properties (such as, for example, increased nuclease resistance, increased uptake into cells, increased binding affinity for the target) and a region that is a substrate for enzymes capable of cleaving RNA:DNA or RNA:RNA hybrids. Chimeric single stranded oligonucleotides of the invention may be formed as composite structures of two or more oligonucleotides, modified oligonucleotides, oligonucleosides and/or oligonucleotide mimetics as described above. Such compounds have also been referred to in the art as hybrids or gapmers. Representative United States patents that teach the preparation of such hybrid structures comprise, but are not limited to, U.S. Pat. Nos. 5,013,830; 5,149,797; 5,220,007; 5,256,775; 5,366,878; 5,403,711; 5,491,133; 5,565,350; 5,623,065; 5,652,355; 5,652,356; and 5,700,922, each of which is herein incorporated by reference.

[0124] In some embodiments, the single stranded oligonucleotide comprises at least one nucleotide modified at the 2′ position of the sugar, e.g., a 2′-O-alkyl, 2′-O-alkyl-O-alkyl or 2′-fluoro-modified nucleotide. In other embodiments, RNA modifications include 2′-fluoro, 2′-amino and 2′ O-methyl modifications on the ribose of pyrimidines, abasic residues or an inverted base at the 3′ end of the RNA. Such modifications are routinely incorporated into oligonucleotides and these oligonucleotides have been shown to have a higher Tm (i.e., higher target binding affinity) than 2′-deoxyoligonucleotides against a given target.

[0125] A number of nucleotide and nucleoside modifications have been shown to make the oligonucleotide into which they are incorporated more resistant to nuclease digestion than the native oligodeoxynucleotide; these modified oligos survive intact for a longer time than unmodified oligonucleotides. Specific examples of modified oligonucleotides include those comprising modified backbones, for example, phosphorothioates, phosphotriesters, methyl phosphonates, short chain alkyl or cycloalkyl intersugar linkages or short chain heteroatomic or heterocyclic intersugar linkages. Examples are oligonucleotides with phosphorothioate backbones and those with heteroatom backbones, particularly CH2-NH—O—CH2, CH, ˜N(CH3)˜O˜CH2 (known as a methylene(methylimino) or MMI backbone], CH2-O—N(CH3)-CH2, CH2-N(CH3)-N(CH3)-CH2 and O—N(CH3)-CH2-CH2 backbones, wherein the native phosphodiester backbone is represented as O—P—O—CH); amide backbones (see De Mesmaeker et al. Ace. Chem. Res. 1995, 28:366-374); morpholino backbone structures (see Summerton and Weller, U.S. Pat. No. 5,034,506); peptide nucleic acid (PNA) backbone (wherein the phosphodiester backbone of the oligonucleotide is replaced with a polyamide backbone, the nucleotides being bound directly or indirectly to the aza nitrogen atoms of the polyamide backbone, see Nielsen et al., Science 1991, 254, 1497). Phosphorus-containing linkages include, but are not limited to, phosphorothioates, chiral phosphorothioates, phosphorodithioates, phosphotriesters, aminoalkylphosphotriesters, methyl and other alkyl phosphonates comprising 3′alkylene phosphonates and chiral phosphonates, phosphinates, phosphoramidates comprising 3′-amino phosphoramidate and aminoalkylphosphoramidates, thionophosphoramidates, thionoalkylphosphonates, thionoalkylphosphotriesters, and boranophosphates having normal 3′-5′ linkages, 2′-5′ linked analogs of these, and those having inverted polarity wherein the adjacent pairs of nucleoside units are linked 3′-5′ to 5′-3′ or 2′-5′ to 5′-2′; see U.S. Pat. Nos. 3,687,808; 4,469,863; 4,476,301; 5,023,243; 5,177,196; 5,188,897; 5,264,423; 5,276,019; 5,278,302; 5,286,717; 5,321,131; 5,399,676; 5,405,939; 5,453,496; 5,455, 233; 5,466,677; 5,476,925; 5,519,126; 5,536,821; 5,541,306; 5,550,111; 5,563, 253; 5,571,799; 5,587,361; and 5,625,050.

[0126] Morpholino-based oligomeric compounds are described in Dwaine A. Braasch and David R. Corey, Biochemistry, 2002, 41(14), 4503-4510); Genesis, volume 30, issue 3, 2001; Heasman, J., Dev. Biol., 2002, 243, 209-214; Nasevicius et al., Nat. Genet., 2000, 26, 216-220; Lacerra et al., Proc. Natl. Acad. Sci., 2000, 97, 9591-9596; and U.S. Pat. No. 5,034,506, issued Jul. 23, 1991. In some embodiments, the morpholino-based oligomeric compound is a phosphorodiamidate morpholino oligomer (PMO) (e.g., as described in Iverson, Curr. Opin. Mol. Ther., 3:235-238, 2001; and Wang et al., J. Gene Med., 12:354-364, 2010; the disclosures of which are incorporated herein by reference in their entireties).

[0127] Cyclohexenyl nucleic acid oligonucleotide mimetics are described in Wang et al., J. Am. Chem. Soc., 2000, 122, 8595-8602.

[0128] Modified oligonucleotide backbones that do not include a phosphorus atom therein have backbones that are formed by short chain alkyl or cycloalkyl internucleoside linkages, mixed heteroatom and alkyl or cycloalkyl internucleoside linkages, or one or more short chain heteroatomic or heterocyclic internucleoside linkages. These comprise those having morpholino linkages (formed in part from the sugar portion of a nucleoside); siloxane backbones; sulfide, sulfoxide and sulfone backbones; formacetyl and thioformacetyl backbones; methylene formacetyl and thioformacetyl backbones; alkene containing backbones; sulfamate backbones; methyleneimino and methylenehydrazino backbones; sulfonate and sulfonamide backbones; amide backbones; and others having mixed N, O, S and CH2 component parts; see U.S. Pat. Nos. 5,034,506; 5,166,315; 5,185,444; 5,214,134; 5,216,141; 5,235,033; 5,264, 562; 5,264,564; 5,405,938; 5,434,257; 5,466,677; 5,470,967; 5,489,677; 5,541,307; 5,561,225; 5,596, 086; 5,602,240; 5,610,289; 5,602,240; 5,608,046; 5,610,289; 5,618,704; 5,623, 070; 5,663,312; 5,633,360; 5,677,437; and 5,677,439, each of which is herein incorporated by reference.

[0129] Modified oligonucleotides are also known that include oligonucleotides that are based on or constructed from arabinonucleotide or modified arabinonucleotide residues. Arabinonucleosides are stereoisomers of ribonucleosides, differing only in the configuration at the 2′-position of the sugar ring. In some embodiments, a 2′-arabino modification is 2′-F arabino. In some embodiments, the modified oligonucleotide is 2′-fluoro-D-arabinonucleic acid (FANA) (as described in, for example, Lon et al., Biochem., 41:3457-3467, 2002 and Min et al., Bioorg. Med. Chem. Lett., 12:2651-2654, 2002; the disclosures of which are incorporated herein by reference in their entireties). Similar modifications can also be made at other positions on the sugar, particularly the 3′ position of the sugar on a 3′ terminal nucleoside or in 2′-5′ linked oligonucleotides and the 5′ position of 5′ terminal nucleotide.

[0130] PCT Publication No. WO 99/67378 discloses arabinonucleic acids (ANA) oligomers and their analogues for improved sequence specific inhibition of gene expression via association to complementary messenger RNA.

[0131] Other modifications include ethylene-bridged nucleic acids (ENAs) (e.g., International Patent Publication No. WO 2005/042777, Morita et al., Nucleic Acid Res., Suppl 1:241-242, 2001; Surono et al., Hum. Gene Ther., 15:749-757, 2004; Koizumi, Curr. Opin. Mol. Ther., 8:144-149, 2006 and Horie et al., Nucleic Acids Symp. Ser (Oxf), 49:171-172, 2005; the disclosures of which are incorporated herein by reference in their entireties). Preferred ENAs include, but are not limited to, 2′-0,4′-C-ethylene-bridged nucleic acids.

[0132] Examples of LNAs are described in WO/2008/043753 and include compounds of the following formula.

[chemical structure]

[0133] where X and Y are independently selected among the groups —O—,

[0134] —S—, —N(H)—, N(R)—, —CH2- or —CH— (if part of a double bond),

[0135] —CH₂—O—, —CH₂—S—, —CH₂—N(H)—, —CH₂—N(R)—, —CH₂—CH₂— or —CH₂—CH— (if part of a double bond),

[0136] —CH═CH—, where R is selected from hydrogen and C₁₋₄-alkyl; Z and Z* are independently selected among an internucleoside linkage, a terminal group or a protecting group; B constitutes a natural or non-natural nucleotide base moiety; and the asymmetric groups may be found in either orientation.

[0137] Preferably, the LNA used in the oligomer of the invention comprises at least one LNA unit according any of the formulas

[chemical structure]

[0138] wherein Y is —O—, —S—, —NH—, or N(R^{H}); Z and Z* are independently selected among an internucleoside linkage, a terminal group or a protecting group; B constitutes a natural or non-natural nucleotide base moiety, and RH is selected from hydrogen and C₁₋₄-alkyl.

[0139] In some embodiments, the Locked Nucleic Acid (LNA) used in the oligomeric compound, such as an antisense oligonucleotide, of the invention comprises a Locked Nucleic Acid (LNA) unit according any of the formulas shown in Scheme 2 of PCT/DK2006/000512.

[0140] In some embodiments, the LNA used in the oligomer of the invention comprises internucleoside linkages selected from -0-P(O)₂—O—, —O—P(O,S)—O—, -0-P(S)₂—O—, —S—P(O)₂—O—, —S—P(O,S)—O—, —S—P(S)₂—O—, -0-P(O)₂—S—, —O—P(O,S)—S—, —S—P(O)₂—S—, —O—PO(R^{H})—O—, 0-PO(OCH₃)—O—, —O—PO(NR^{H})—O—, -0-PO(OCH₂CH₂S—R)—O—, —O—PO(BH₃)—O—, —O—PO(NHR^{H})—O—, -0-P(O)₂—NR^{H}—, —NR^{H}—P(O)₂—O—, —NR^{H}—CO—O—, where R^{H} is selected from hydrogen and C₁₋₄-alkyl.

[0141] Certain examples of LNA units are shown in scheme 2:

[chemical structure]

[0142] The term “thio-LNA” comprises a locked nucleotide in which at least one of X or Y in the general formula above is selected from S or —CH2-S—. Thio-LNA can be in both beta-D and alpha-L-configuration.

[0143] The term “amino-LNA” comprises a locked nucleotide in which at least one of X or Y in the general formula above is selected from —N(H)—, N(R)—, CH₂—N(H)—, and —CH₂—N(R)— where R is selected from hydrogen and C₁₋₄-alkyl. Amino-LNA can be in both beta-D and alpha-L-configuration.

[0144] The term “oxy-LNA” comprises a locked nucleotide in which at least one of X or Y in the general formula above represents —O— or —CH₂—O—. Oxy-LNA can be in both beta-D and alpha-L-configuration.

[0145] The term “ena-LNA” comprises a locked nucleotide in which Y in the general formula above is —CH₂—O— (where the oxygen atom of —CH₂—O— is attached to the 2′-position relative to the base B).

[0146] LNAs are described in additional detail herein.

[0147] One or more substituted sugar moieties can also be included, e.g., one of the following at the 2′ position: OH, SH, SCH₃, F, OCN, OCH₃OCH₃, OCH₃O(CH₂)n CH₃, O(CH₂)n NH₂ or O(CH₂)n CH₃ where n is from 1 to about 10; C1 to C10 lower alkyl, alkoxyalkoxy, substituted lower alkyl, alkaryl or aralkyl; Cl; Br; CN; CF3; OCF3; O—, S—, or N-alkyl; O—, S—, or N-alkenyl; SOCH3; SO2 CH3; ONO2; NO2; N3; NH2; heterocycloalkyl; heterocycloalkaryl; amino alkylamino; polyalkylamino; substituted silyl; an RNA cleaving group; a reporter group; an intercalator; a group for improving the pharmacokinetic properties of an oligonucleotide; or a group for improving the pharmacodynamic properties of an oligonucleotide and other substituents having similar properties. An example modification includes 2′-methoxyethoxy[2′-O—CH₂CH₂OCH₃, also known as 2′-O-(2-methoxyethyl)] (Martin et al, HeIv. Chim. Acta, 1995, 78, 486). Other modifications include 2′-methoxy (2′-O—CH₃), 2′-propoxy (2′-OCH₂CH₂CH₃) and 2′-fluoro (2′-F). Similar modifications may also be made at other positions on the oligonucleotide, particularly the 3′ position of the sugar on the 3′ terminal nucleotide and the 5′ position of 5′ terminal nucleotide. Oligonucleotides may also have sugar mimetics such as cyclobutyls in place of the pentofuranosyl group.

[0148] Single stranded oligonucleotides can also include, additionally or alternatively, nucleobase (often referred to in the art simply as “base”) modifications or substitutions. As used herein, “unmodified” or “natural” nucleobases include adenine (A), guanine (G), thymine (T), cytosine (C) and uracil (U). Modified nucleobases include nucleobases found only infrequently or transiently in natural nucleic acids, e.g., hypoxanthine, 6-methyladenine, 5-Me pyrimidines, particularly 5-methylcytosine (also referred to as 5-methyl-2′ deoxycytosine and often referred to in the art as 5-Me-C), 5-hydroxymethylcytosine (HMC), glycosyl HMC and gentobiosyl HMC, isocytosine, pseudoisocytosine, as well as synthetic nucleobases, e.g., 2-aminoadenine, 2-(methylamino)adenine, 2-(imidazolylalkyl)adenine, 2-(aminoalklyamino)adenine or other heterosubstituted alkyladenines, 2-thiouracil, 2-thiothymine, 5-bromouracil, 5-hydroxymethyluracil, 5-propynyluracil, 8-azaguanine, 7-deazaguanine, N6 (6-aminohexyl)adenine, 6-aminopurine, 2-aminopurine, 2-chloro-6-aminopurine and 2,6-diaminopurine or other diaminopurines. See, e.g., Kornberg, “DNA Replication,” W. H. Freeman & Co., San Francisco, 1980, pp 75-77; and Gebeyehu, G., et al. Nucl. Acids Res., 15:4513 (1987)). A “universal” base known in the art, e.g., inosine, can also be included. 5-Me-C substitutions have been shown to increase nucleic acid duplex stability by 0.6-1.2<0>C. (Sanghvi, in Crooke, and Lebleu, eds., Antisense Research and Applications, CRC Press, Boca Raton, 1993, pp. 276-278) and are example base substitutions.

[0149] It is not necessary for all positions in a given oligonucleotide to be uniformly modified, and in fact more than one of the modifications described herein may be incorporated in a single oligonucleotide or even at within a single nucleoside within an oligonucleotide.

[0150] In some embodiments, both a sugar and an internucleoside linkage, i.e., the backbone, of the nucleotide units are replaced with novel groups. The base units are maintained for hybridization with an appropriate nucleic acid target compound. One such oligomeric compound, an oligonucleotide mimetic that has been shown to have excellent hybridization properties, is referred to as a peptide nucleic acid (PNA). In PNA compounds, the sugar-backbone of an oligonucleotide is replaced with an amide containing backbone, for example, an aminoethylglycine backbone. The nucleobases are retained and are bound directly or indirectly to aza nitrogen atoms of the amide portion of the backbone. Representative United States patents that teach the preparation of PNA compounds include, but are not limited to, U.S. Pat. Nos. 5,539,082; 5,714,331; and 5,719,262, each of which is herein incorporated by reference. Further teaching of PNA compounds can be found in Nielsen et al, Science, 1991, 254, 1497-1500.

[0151] Single stranded oligonucleotides can also include one or more nucleobase (often referred to in the art simply as “base”) modifications or substitutions. As used herein, “unmodified” or “natural” nucleobases comprise the purine bases adenine (A) and guanine (G), and the pyrimidine bases thymine (T), cytosine (C) and uracil (U). Modified nucleobases comprise other synthetic and natural nucleobases such as 5-methylcytosine (5-me-C), 5-hydroxymethyl cytosine, xanthine, hypoxanthine, 2-aminoadenine, 6-methyl and other alkyl derivatives of adenine and guanine, 2-propyl and other alkyl derivatives of adenine and guanine, 2-thiouracil, 2-thiothymine and 2-thiocytosine, 5-halouracil and cytosine, 5-propynyl uracil and cytosine, 6-azo uracil, cytosine and thymine, 5-uracil (pseudo-uracil), 4-thiouracil, 8-halo, 8-amino, 8-thiol, 8-thioalkyl, 8-hydroxyl and other 8-substituted adenines and guanines, 5-halo particularly 5-bromo, 5-trifluoromethyl and other 5-substituted uracils and cytosines, 7-methylquanine and 7-methyladenine, 8-azaguanine and 8-azaadenine, 7-deazaguanine and 7-deazaadenine and 3-deazaguanine and 3-deazaadenine.

[0152] Further, nucleobases comprise those disclosed in U.S. Pat. No. 3,687,808, those disclosed in “The Concise Encyclopedia of Polymer Science And Engineering”, pages 858-859, Kroschwitz, ed. John Wiley & Sons, 1990; those disclosed by Englisch et al., Angewandle Chemie, International Edition, 1991, 30, page 613, and those disclosed by Sanghvi, Chapter 15, Antisense Research and Applications,” pages 289-302, Crooke, and Lebleu, eds., CRC Press, 1993. Certain of these nucleobases are particularly useful for increasing the binding affinity of the oligomeric compounds of the invention. These include 5-substituted pyrimidines, 6-azapyrimidines and N-2, N-6 and 0-6 substituted purines, comprising 2-aminopropyladenine, 5-propynyluracil and 5-propynylcytosine. 5-methylcytosine substitutions have been shown to increase nucleic acid duplex stability by 0.6-1.2<0>C (Sanghvi, et al., eds, “Antisense Research and Applications,” CRC Press, Boca Raton, 1993, pp. 276-278) and are example base substitutions, even more particularly when combined with 2′-O-methoxyethyl sugar modifications. Modified nucleobases are described in U.S. Pat. No. 3,687,808, as well as U.S. Pat. Nos. 4,845,205; 5,130,302; 5,134,066; 5,175, 273; 5,367,066; 5,432,272; 5,457,187; 5,459,255; 5,484,908; 5,502,177; 5,525,711; 5,552,540; 5,587,469; 5,596,091; 5,614,617; 5,750,692, and 5,681,941, each of which is herein incorporated by reference.

[0153] In some embodiments, the single stranded oligonucleotides are chemically linked to one or more moieties or conjugates that enhance the activity, cellular distribution, or cellular uptake of the oligonucleotide. For example, one or more single stranded oligonucleotides, of the same or different types, can be conjugated to each other; or single stranded oligonucleotides can be conjugated to targeting moieties with enhanced specificity for a cell type or tissue type. Such moieties include, but are not limited to, lipid moieties such as a cholesterol moiety (Letsinger et al., Proc. Natl. Acad. Sci. USA, 1989, 86, 6553-6556), cholic acid (Manoharan et al., Bioorg. Med. Chem. Let., 1994, 4, 1053-1060), a thioether, e.g., hexyl-S— tritylthiol (Manoharan et al, Ann. N. Y. Acad. Sci., 1992, 660, 306-309; Manoharan et al., Bioorg. Med. Chem. Let., 1993, 3, 2765-2770), a thiocholesterol (Oberhauser et al., Nucl. Acids Res., 1992, 20, 533-538), an aliphatic chain, e.g., dodecandiol or undecyl residues (Kabanov et al., FEBS Lett., 1990, 259, 327-330; Svinarchuk et al., Biochimie, 1993, 75, 49-54), a phospholipid, e.g., di-hexadecyl-rac-glycerol or triethylammonium 1,2-di-O-hexadecyl-rac-glycero-3-H-phosphonate (Manoharan et al., Tetrahedron Lett., 1995, 36, 3651-3654; Shea et al., Nucl. Acids Res., 1990, 18, 3777-3783), a polyamine or a polyethylene glycol chain (Mancharan et al., Nucleosides & Nucleotides, 1995, 14, 969-973), or adamantane acetic acid (Manoharan et al., Tetrahedron Lett., 1995, 36, 3651-3654), a palmityl moiety (Mishra et al., Biochim. Biophys. Acta, 1995, 1264, 229-237), or an octadecylamine or hexylamino-carbonyl-t oxycholesterol moiety (Crooke et al., J. Pharmacol. Exp. Ther., 1996, 277, 923-937). See also U.S. Pat. Nos. 4,828,979; 4,948,882; 5,218,105; 5,525,465; 5,541,313; 5,545,730; 5,552, 538; 5,578,717, 5,580,731; 5,580,731; 5,591,584; 5,109,124; 5,118,802; 5,138,045; 5,414,077; 5,486, 603; 5,512,439; 5,578,718; 5,608,046; 4,587,044; 4,605,735; 4,667,025; 4,762, 779; 4,789,737; 4,824,941; 4,835,263; 4,876,335; 4,904,582; 4,958,013; 5,082, 830; 5,112,963; 5,214,136; 5,082,830; 5,112,963; 5,214,136; 5,245,022; 5,254,469; 5,258,506; 5,262,536; 5,272,250; 5,292,873; 5,317,098; 5,371,241, 5,391, 723; 5,416,203, 5,451,463; 5,510,475; 5,512,667; 5,514,785; 5,565,552; 5,567,810; 5,574,142; 5,585,481; 5,587,371; 5,595,726; 5,597,696; 5,599,923; 5,599, 928 and 5,688,941, each of which is herein incorporated by reference.

[0154] These moieties or conjugates can include conjugate groups covalently bound to functional groups such as primary or secondary hydroxyl groups. Conjugate groups of the invention include intercalators, reporter molecules, polyamines, polyamides, polyethylene glycols, polyethers, groups that enhance the pharmacodynamic properties of oligomers, and groups that enhance the pharmacokinetic properties of oligomers. Typical conjugate groups include cholesterols, lipids, phospholipids, biotin, phenazine, folate, phenanthridine, anthraquinone, acridine, fluoresceins, rhodamines, coumarins, and dyes. Groups that enhance the pharmacodynamic properties, in the context of this invention, include groups that improve uptake, enhance resistance to degradation, and/or strengthen sequence-specific hybridization with the target nucleic acid. Groups that enhance the pharmacokinetic properties, in the context of this invention, include groups that improve uptake, distribution, metabolism or excretion of the compounds of the present invention. Representative conjugate groups are disclosed in International Patent Application No. PCT/US92/09196, filed Oct. 23, 1992, and U.S. Pat. No. 6,287,860, which are incorporated herein by reference. Conjugate moieties include, but are not limited to, lipid moieties such as a cholesterol moiety, cholic acid, a thioether, e.g., hexyl-5-tritylthiol, a thiocholesterol, an aliphatic chain, e.g., dodecandiol or undecyl residues, a phospholipid, e.g., di-hexadecyl-rac-glycerol or triethylammonium 1,2-di-O-hexadecyl-rac-glycero-3-H-phosphonate, a polyamine or a polyethylene glycol chain, or adamantane acetic acid, a palmityl moiety, or an octadecylamine or hexylamino-carbonyl-oxy cholesterol moiety. See, e.g., U.S. Pat. Nos. 4,828,979; 4,948,882; 5,218,105; 5,525,465; 5,541,313; 5,545,730; 5,552,538; 5,578,717, 5,580,731; 5,580,731; 5,591,584; 5,109,124; 5,118,802; 5,138,045; 5,414,077; 5,486,603; 5,512,439; 5,578,718; 5,608,046; 4,587,044; 4,605,735; 4,667,025; 4,762,779; 4,789,737; 4,824,941; 4,835,263; 4,876,335; 4,904,582; 4,958,013; 5,082,830; 5,112,963; 5,214,136; 5,082,830; 5,112,963; 5,214,136; 5,245,022; 5,254,469; 5,258,506; 5,262,536; 5,272,250; 5,292,873; 5,317,098; 5,371,241, 5,391,723; 5,416,203, 5,451,463; 5,510,475; 5,512,667; 5,514,785; 5,565,552; 5,567,810; 5,574,142; 5,585,481; 5,587,371; 5,595,726; 5,597,696; 5,599,923; 5,599,928 and 5,688,941.

[0155] In some embodiments, single stranded oligonucleotide modification include modification of the 5′ or 3′ end of the oligonucleotide. In some embodiments, the 3′ end of the oligonucleotide comprises a hydroxyl group or a thiophosphate. It should be appreciated that additional molecules (e.g. a biotin moiety or a fluorophor) can be conjugated to the 5′ or 3′ end of the single stranded oligonucleotide. In some embodiments, the single stranded oligonucleotide comprises a biotin moiety conjugated to the 5′ nucleotide.

[0156] In some embodiments, the single stranded oligonucleotide comprises locked nucleic acids (LNA), ENA modified nucleotides, 2′-O-methyl nucleotides, or 2′-fluoro-deoxyribonucleotides. In some embodiments, the single stranded oligonucleotide comprises alternating deoxyribonucleotides and 2′-fluoro-deoxyribonucleotides. In some embodiments, the single stranded oligonucleotide comprises alternating deoxyribonucleotides and 2′-O-methyl nucleotides. In some embodiments, the single stranded oligonucleotide comprises alternating deoxyribonucleotides and ENA modified nucleotides. In some embodiments, the single stranded oligonucleotide comprises alternating deoxyribonucleotides and locked nucleic acid nucleotides. In some embodiments, the single stranded oligonucleotide comprises alternating locked nucleic acid nucleotides and 2′-O-methyl nucleotides.

[0157] In some embodiments, the 5′ nucleotide of the oligonucleotide is a deoxyribonucleotide. In some embodiments, the 5′ nucleotide of the oligonucleotide is a locked nucleic acid nucleotide. In some embodiments, the nucleotides of the oligonucleotide comprise deoxyribonucleotides flanked by at least one locked nucleic acid nucleotide on each of the 5′ and 3′ ends of the deoxyribonucleotides. In some embodiments, the nucleotide at the 3′ position of the oligonucleotide has a 3′ hydroxyl group or a 3′ thiophosphate.

[0158] In some embodiments, the single stranded oligonucleotide comprises phosphorothioate internucleotide linkages. In some embodiments, the single stranded oligonucleotide comprises phosphorothioate internucleotide linkages between at least two nucleotides. In some embodiments, the single stranded oligonucleotide comprises phosphorothioate internucleotide linkages between all nucleotides.

[0159] It should be appreciated that the single stranded oligonucleotide can have any combination of modifications as described herein.

[0160] The oligonucleotide may comprise a nucleotide sequence having one or more of the following modification patterns.

[0161] (a) (X)Xxxxxx, (X)xXxxxx, (X)xxXxxx, (X)xxxXxx, (X)xxxxXx and (X)xxxxxX,

[0162] (b) (X)XXxxxx, (X)XxXxxx, (X)XxxXxx, (X)XxxxXx, (X)XxxxxX, (X)xXXxxx, (X)xXxXxx, (X)xXxxXx, (X)xXxxxX, (X)xxXXxx, (X)xxXxXx, (X)xxXxxX, (X)xxxXXx, (X)xxxXxX and (X)xxxxXX,

[0163] (c) (X)XXXxxx, (X)xXXXxx, (X)xxXXXx, (X)xxxXXX, (X)XXxXxx, (X)XXxxXx, (X)XXxxxX, (X)xXXxXx, (X)xXXxxX, (X)xxXXxX, (X)XxXXxx, (X)XxxXXx (X)XxxxXX, (X)xXxXXx, (X)xXxxXX, (X)xxXxXX, (X)xXxXxX and (X)XxXxXx,

[0164] (d) (X)xxXXX, (X)xXxXXX, (X)xXXxXX, (X)xXXXxX, (X)xXXXXx, (X)XxxXXXX, (X)XxXxXX, (X)XxXXxX, (X)XxXXx, (X)XXxxXX, (X)XXxXxX, (X)XXxXXx, (X)XXXxxX, (X)XXXxXx, and (X)XXXXxx,

[0165] (e) (X)xXXXXX, (X)XxXXXX, (X)XXxXXX, (X)XXXxXX, (X)XXXXxX and (X)XXXXXx, and

[0166] (f) XXXXXX, XxXXXXX, XXxXXXX, XXXxXXX, XXXXxXX, XXXXXxX and XXXXXXx, in which “X” denotes a nucleotide analogue, (X) denotes an optional nucleotide analogue, and “x” denotes a DNA or RNA nucleotide unit. Each of the above listed patterns may appear one or more times within an oligonucleotide, alone or in combination with any of the other disclosed modification patterns.

[0167] Further Features of Oligonucleotides

[0168] Evidence is provided herein that such oligonucleotides increased expression of mRNA corresponding to the gene by at least about 50% (i.e. 150% of normal or 1.5 fold), or by about 2 fold to about 5 fold. In some embodiments it is contemplated that expression may be increased by at least about 15 fold, 20 fold, 30 fold, 40 fold, 50 fold or 100 fold, or any range between any of the foregoing numbers. In other experiments, increased mRNA expression has been shown to correlate to increased protein expression.

[0169] The sequence identifiers outlined in Table 2 refer to sequences of RNAs that associate (binds) with PRC2 (i.e., the RNA against which oligonucleotides would be directed) that are disclosed in International Patent Application Publication WO/2012/087983. Accordingly, each of the sequences comprise PRC2-associated regions. Each of (a) the reference genes described in the tables, (b) the PRC2 binding transcripts or Peaks (i.e., smaller regions of RNA that bind to PRC2) that target (modulate expression of) these genes, and (c) the oligonucleotides that specifically bind to, or are complementary to, the PRC2 binding transcripts or Peaks, may conveniently be grouped into any of these categories, represented by numbers in Table 3 of International Patent Application Publication WO/2012/087983 or represented by numbers in Table 9 of International Patent Application Publication WO/2012/065143 as follows: Diseases are marked by category numbers 11, 14, 15, 17, 21, 24, 26, 42, 44, 49, 58, 69, 82, 103, 119, 120, 126, 143, 163, 167, 172, 177, 182, 183, 184, 187, 191, 196, 200, 203, 204, 219, 220, 221, 227, 234, 239, 240, 244, 249, any one of 300-323, or any one of 400-643.

[0170] Other functional groups are marked by category numbers 10, 12, 13, 16, 18, 19, 20, 22, 23, 25, 27, 28, 29, 30, 31, 32, 33, 34, 36, 37, 38, 39, 40, 41, 43, 45, 46, 47, 48, 50, 51, 52, 54, 55, 56, 59, 60, 61, 62, 63, 64, 65, 66, 67, 68, 70, 71, 72, 73, 74, 75, 76, 77, 78, 79, 80, 81, 83, 84, 85, 86, 87, 88, 89, 90, 91, 92, 93, 94, 95, 96, 97, 98, 100, 101, 102, 104, 105, 106, 107, 108, 109, 110, 111, 112, 113, 114, 115, 116, 117, 118, 121, 122, 123, 124, 125, 127, 128, 129, 130, 131, 132, 133, 134, 135, 136, 137, 138, 139, 140, 141, 142, 144, 145, 146, 147, 148, 149, 150, 151, 152, 153, 154, 155, 156, 157, 158, 158, 160, 161, 162, 164, 165, 166, 168, 169, 170, 171, 173, 174, 175, 176, 178, 179, 180, 181, 185, 186, 188, 189, 190, 192, 193, 194, 195, 197, 198, 199, 201, 202, 205, 206, 207, 208, 209, 210, 211, 213, 215, 216, 217, 218, 222, 223, 224, 226, 228, 229, 230, 231, 232, 233, 235, 236, 237, 238, 241, 242, 243, 245, 246, 247, 248, 250, 251, 252, or 253.

### CATEGORY

[0171] No. Name
10 actin cytoskeleton organization
11 Acute myeloid leukemia
12 Adherens junction
13 Adipocytokine signaling pathway
14 aging
15 Alzheimer's disease
16 Amino sugar and nucleotide sugar metabolism
17 Amyotrophic lateral sclerosis (ALS)
18 angiogenesis

### 19 Apoptosis

[0172] 20 Arginine and proline metabolism
21 Arrhythmogenic right ventricular cardiomyopathy (ARVC)
22 Axon guidance
23 B cell receptor signaling pathway
24 Basal cell carcinoma, also in category 644
25 Basal transcription factors
26 Bladder cancer, also in category 644
27 blood coagulation
28 blood vessel development
29 bone development
30 Calcium signaling pathway
31 Cardiac muscle contraction
32 cation channel activity
33 cell adhesion
34 cell cycle
35 Cell cycle
36 cell motion
37 cell surface receptor linked signal transduction
38 cellular response to stress
39 channel activity
40 Chemokine signaling pathway
41 cholesterol metabolic process
42 Chronic myeloid leukemia
43 Citrate cycle (TCA cycle)
44 Colorectal cancer
45 Complement and coagulation cascades
46 cytokine activity
47 cytoskeletal protein binding
48 cytosol
49 Dilated cardiomyopathy
50 DNA binding
51 DNA repair
52 DNA replication
53 DNA replication
54 Drug metabolism
55 embryonic morphogenesis
56 endocytosis

### 57 Endocytosis

[0173] 58 Endometrial cancer
59 endoplasmic reticulum
60 ErbB signaling pathway
61 extracellular region
62 eye development
63 Fatty acid metabolism
64 Fructose and mannose metabolism
65 G-protein coupled receptor protein signaling pathway
66 gamete generation
67 Gap junction
68 gene silencing by miRNA

### 69 Glioma

[0174] 70 glucose metabolic process

### 71 Glycolysis/Gluconeogenesis

[0175] 72 Golgi apparatus
73 growth factor activity
74 GTPase regulator activity
75 heart development
76 Hedgehog signaling pathway
77 Hematopoietic cell lineage
78 hemopoiesis
79 hemopoietic or lymphoid organ development
80 histone modification
81 Huntington's disease
82 Hypertrophic cardiomyopathy (HCM)
83 immune response
84 immune system development
85 inflammatory response
86 Insulin signaling pathway
87 intracellular signaling cascade
88 ion channel activity
89 ion transport
90 Jak-STAT signaling pathway
91 learning or memory
92 leukocyte activation
93 Leukocyte transendothelial migration
94 limb development
95 locomotory behavior
96 Long-term potentiation
97 lung development
98 lysosome

### 99 Lysosome

[0176] 100 MAPK signaling pathway
101 MAPKKK cascade

### 102 Melanogenesis

### 103 Melanoma

[0177] 104 Mismatch repair
105 mitochondrion
106 mitochondrion organization
107 mTOR signaling pathway
108 muscle tissue development
109 ncRNA metabolic process
110 neuron development
111 Neurotrophin signaling pathway
112 Non-small cell lung cancer, also in category 644
113 Notch signaling pathway
114 nucleolus
115 Oocyte meiosis
116 oxidation reduction
117 Oxidative phosphorylation
118 p53 signaling pathway
119 Pancreatic cancer, also in category 644
120 Parkinson's disease
121 Pathways in cancer, also in category 644
122 phosphatase activity
123 phosphoprotein phosphatase activity
124 positive regulation of cellular biosynthetic process
125 PPAR signaling pathway
126 Prostate cancer, also in category 644

### 127 Proteasome

[0178] 128 protein amino acid dephosphorylation
129 protein folding
130 protein kinase activity
131 protein serine/threonine kinase activity
132 Purine metabolism
133 Pyrimidine metabolism
134 Ras protein signal transduction
135 Regulation of actin cytoskeleton
136 Regulation of autophagy
137 regulation of cell death, also in category 644
138 regulation of cell proliferation, also in category 644
139 regulation of cell size
140 regulation of protein ubiquitination
141 regulation of Ras protein signal transduction
142 regulation of transcription
143 Renal cell carcinoma, also in category 644
144 response to hypoxia
145 response to steroid hormone stimulus
146 response to virus
147 ribosome
148 RNA degradation
149 RNA processing
150 RNA splicing, via transesterification reactions
151 secretion
152 skeletal system development
153 skeletal system morphogenesis
154 Small cell lung cancer, also in category 644
155 small GTPase regulator activity
156 spermatogenesis
157 Sphingolipid metabolism
158 spliceosome

### 159 Spliceosome

[0179] 160 stem cell differentiation
161 Steroid biosynthesis
162 synapse
163 Systemic lupus erythematosus
164 T cell activation
165 T cell receptor signaling pathway
166 TGF-beta signaling pathway
167 Thyroid cancer, also in category 644
168 Toll-like receptor signaling pathway
169 transcription activator activity
170 transcription factor activity
171 translation
172 Type II diabetes mellitus
173 Ubiquitin mediated proteolysis
174 Vascular smooth muscle contraction
175 vasculature development
176 VEGF signaling pathway
177 Viral myocarditis
178 Wnt signaling pathway
179 amino-acid biosynthesis
180 ank repeat
181 bromodomain

### 182 Cardiomyopathy

[0180] 183 cataract
184 charcot-marie-tooth disease
185 cytokine
186 cytokine receptor
187 deafness
188 disease mutation
189 egf-like domain
190 endosome
191 epilepsy
192 glycoprotein
193 growth factor
194 Growth factor binding
195 growth factor receptor

### 196 Ichthyosis

[0181] 197 Immunoglobulin domain
198 ionic channel
199 leucine-rich repeat
200 leukodystrophy
201 methylation
202 methyltransferase
203 neurodegeneration
204 neuropathy
205 nucleus
206 obesity
207 protein phosphatase
208 protein phosphatase inhibitor
209 Oncogene (including proto-oncogenes), also in category 644

### 210 Secreted

[0182] 211 serine/threonine-specific protein kinase
212 systemic lupus erythematosus
213 transmembrane
214 transmembrane protein
215 tumor suppressor, also in category 644
216 tyrosine-protein kinase
217 ubl conjugation pathway
218 wd repeat
300 Downregulated in Bladder cancer, also in category 644
301 Downregulated in Leukemia, also in category 644
302 Downregulated in Brain cancer, also in category 644
303 Downregulated in Breast cancer, also in category 644
304 Downregulated in Cervical cancer, also in category 644
305 Downregulated in Colon cancer, also in category 644
306 Downregulated in Esophageal cancer, also in category 644
307 Downregulated in Gastric cancer, also in category 644
308 Downregulated in Head and Neck cancer, also in category 644
309 Downregulated in Renal cancer, also in category 644
310 Downregulated in Liver cancer, also in category 644
311 Downregulated in Lung cancer, also in category 644
312 Downregulated in Lymphoma, also in category 644
313 Downregulated in Melanoma, also in category 644
314 Downregulated in Multiple Myeloma, also in category 644
315 Downregulated in Ovarian cancer, also in category 644
316 Downregulated in Pancreatic cancer, also in category 644
317 Downregulated in Prostate cancer, also in category 644
318 Downregulated in Sarcoma, also in category 644
319 Downregulated in Non-melanoma skin cancer, also in category 644
320 Downregulated in Uterine cancer, also in category 644
321 Downregulated in Mesothelioma, also in category 644
322 Downregulated in Adrenal cancer, also in category 644
323 Downregulated in Parathyroid cancer, also in category 644
400 Upregulated in Clear cell sarcoma of kidney, also in category 644
401 Upregulated in Acute lung injury
402 Upregulated in Acute megakaryoblastic leukemia, also in category 644
403 Upregulated in Acute myelocytic leukemia, also in category 644
404 Upregulated in Acute pancreatitis unspecified
405 Upregulated in Adenocarcinoma of esophagus, also in category 644
406 Upregulated in Adenocarcinoma of lung, also in category 644
407 Upregulated in Adenoma of small intestine, also in category 644
408 Upregulated in Adenovirus infection
409 Upregulated in AIDS with encephalitis
410 Upregulated in Alcohol poisoning
411 Upregulated in Alexander disease
412 Upregulated in alpha-1-Antitrypsin deficiency
413 Upregulated in Alzheimer's disease
414 Upregulated in Anaplastic oligoastrocytoma, also in category 644
415 Upregulated in Androgen insensitivity syndrome
416 Upregulated in Astrocytoma, also in category 644
417 Upregulated in Atrophy—muscular
418 Upregulated in Autoimmune hepatitis
419 Upregulated in Bacterial infection
420 Upregulated in Barrett's esophagus
421 Upregulated in Carcinoma in situ of small intestin, also in category 644e

### 422 Upregulated in Cardiomyopathy

[0183] 423 Upregulated in Chronic granulomatous disease
424 Upregulated in Chronic lymphocytic leukemia
425 Upregulated in Chronic obstructive airway disease
426 Upregulated in Chronic polyarticular juvenile rheumatoid arthritis
427 Upregulated in Cirrhosis of liver
428 Upregulated in Cocaine dependence
429 Upregulated in Complex dental caries
430 Upregulated in Crohn's disease
431 Upregulated in Decompensated cardiac failure

### 432 Upregulated in Dehydration

[0184] 433 Upregulated in Dilated cardiomyopathy
434 Upregulated in Dilated cardiomyopathy secondary to viral myocarditis
435 Upregulated in Epithelial proliferation
436 Upregulated in Escherichia coli infection of the central nervous system
437 Upregulated in Essential thrombocythemia
438 Upregulated in Exhaustion due to excessive exertion
439 Upregulated in Familial hypophosphatemic bone disease

### 440 Upregulated in Fracture

[0185] 441 Upregulated in Fracture of femur
442 Upregulated in Generalized ischemic myocardial dysfunction
443 Upregulated in Glioblastoma, also in category 644
444 Upregulated in Hamman-Rich syndrome
445 Upregulated in Helicobacter pylori gastrointestinal tract infection

### 446 Upregulated in Hepatitis C

[0186] 447 Upregulated in HIV infection
448 Upregulated in Huntington's disease

### 449 Upregulated in Hypercholesterolemia

### 450 Upregulated in Hypertrophy

[0187] 451 Upregulated in Idiopathic thrombocytopenic purpura
452 Upregulated in Infection by Yersinia enterocolitica
453 Upregulated in Infertility due to azoospermia
454 Upregulated in Injury of heart
455 Upregulated in ISM—In situ melanoma of skin
456 Upregulated in Leber's amaurosis
457 Upregulated in Liver carcinoma, also in category 644
458 Upregulated in Macular degeneration
459 Upregulated in Malignant lymphoma, also in category 644
460 Upregulated in Malignant neoplasm of cervix uteri, also in category 644
461 Upregulated in Malignant neoplasm of duodenum, also in category 644
462 Upregulated in Malignant neoplasm of prostate, also in category 644
463 Upregulated in Malignant neoplasm of stomach, also in category 644
464 Upregulated in Malignant neoplasm of testis, also in category 644
465 Upregulated in Malignant tumor of colon, also in category 644
466 Upregulated in Multiple benign melanocytic nevi
467 Upregulated in Nephropathy—diabetic
468 Upregulated in Non-insulin dependent diabetes mellitus
469 Upregulated in Nutritional deficiency
470 Upregulated in Obstructive sleep apnea
471 Upregulated in Oligodendroglioma, also in category 644
472 Upregulated in Papillary thyroid carcinoma, also in category 644
473 Upregulated in Parkinson disease
474 Upregulated in Porcine nephropathy

### 475 Upregulated in Pre-eclampsia

[0188] 476 Upregulated in Primary cardiomyopathy
477 Upregulated in Primary open angle glaucoma
478 Upregulated in Primary pulmonary hypoplasia
479 Upregulated in Pseudomonas infection
480 Upregulated in Pulmonary emphysema
481 Upregulated in Pulmonary hypertension
482 Upregulated in Renal disorder associated with type II diabetes mellitus
483 Upregulated in Retinal damage
484 Upregulated in Retinitis pigmentosa
485 Upregulated in Rheumatoid arthritis
486 Upregulated in Squamous cell carcinoma, also in category 644
487 Upregulated in Squamous cell carcinoma of lung, also in category 644
488 Upregulated in Status epilepticus
489 Upregulated in Systemic infection

### 490 Upregulated in Thrombocytopenia

[0189] 491 Upregulated in Thymic carcinoma, also in category 644
492 Upregulated in Transitional cell carcinoma, also in category 644
493 Upregulated in Transitional cell carcinoma in situ, also in category 644
494 Upregulated in Ulcerative colitis
495 Upregulated in Uterine fibroids
496 Upregulated in Ventilator-associated lung injury
497 Upregulated in Ventricular hypertrophy
498 Upregulated in Ventricular hypertrophy (& [left])
499 Upregulated in Vitamin A deficiency
500 Downregulated in Clear cell sarcoma of kidney, also in category 644
501 Downregulated in Acute lung injury
502 Downregulated in Acute megakaryoblastic leukemia, also in category 644
503 Downregulated in Acute myelocytic leukemia, also in category 644
504 Downregulated in Acute pancreatitis unspecified
505 Downregulated in Adenocarcinoma of esophagus, also in category 644
506 Downregulated in Adenocarcinoma of lung, also in category 644
507 Downregulated in Adenoma of small intestine, also in category 644
508 Downregulated in Adenovirus infection
509 Downregulated in AIDS with encephalitis
510 Downregulated in Alcohol poisoning
511 Downregulated in Alexander disease
512 Downregulated in alpha-1-Antitrypsin deficiency
513 Downregulated in Alzheimer's disease
514 Downregulated in Anaplastic oligoastrocytoma
515 Downregulated in Androgen insensitivity syndrome
516 Downregulated in Astrocytoma, also in category 644
517 Downregulated in Atrophy—muscular
518 Downregulated in Autoimmune hepatitis
519 Downregulated in Bacterial infection
520 Downregulated in Barrett's esophagus
521 Downregulated in Carcinoma in situ of small intestine, also in category 644

### 522 Downregulated in Cardiomyopathy

[0190] 523 Downregulated in Chronic granulomatous disease
524 Downregulated in Chronic lymphocytic leukemia
525 Downregulated in Chronic obstructive airway disease
526 Downregulated in Chronic polyarticular juvenile rheumatoid arthritis
527 Downregulated in Cirrhosis of liver
528 Downregulated in Cocaine dependence
529 Downregulated in Complex dental caries
530 Downregulated in Crohn's disease
531 Downregulated in Decompensated cardiac failure

### 532 Downregulated in Dehydration

[0191] 533 Downregulated in Dilated cardiomyopathy
534 Downregulated in Dilated cardiomyopathy secondary to viral myocarditis
535 Downregulated in Epithelial proliferation
536 Downregulated in Escherichia coli infection of the central nervous system
537 Downregulated in Essential thrombocythemia
538 Downregulated in Exhaustion due to excessive exertion
539 Downregulated in Familial hypophosphatemic bone disease

### 540 Downregulated in Fracture

[0192] 541 Downregulated in Fracture of femur
542 Downregulated in Generalized ischemic myocardial dysfunction
543 Downregulated in Glioblastoma, also in category 644
544 Downregulated in Hamman-Rich syndrome
545 Downregulated in Helicobacter pylori gastrointestinal tract infection

### 546 Downregulated in Hepatitis C

[0193] 547 Downregulated in HIV infection
548 Downregulated in Huntington's disease

### 549 Downregulated in Hypercholesterolemia

### 550 Downregulated in Hypertrophy

[0194] 551 Downregulated in Idiopathic thrombocytopenic purpura
552 Downregulated in Infection by Yersinia enterocolitica
553 Downregulated in Infertility due to azoospermia
554 Downregulated in Injury of heart
555 Downregulated in ISM—In situ melanoma of skin, also in category 644
556 Downregulated in Leber's amaurosis
557 Downregulated in Liver carcinoma, also in category 644
558 Downregulated in Macular degeneration
559 Downregulated in Malignant lymphoma, also in category 644
560 Downregulated in Malignant neoplasm of cervix uteri, also in category 644
561 Downregulated in Malignant neoplasm of duodenum, also in category 644
562 Downregulated in Malignant neoplasm of prostate, also in category 644
563 Downregulated in Malignant neoplasm of stomach, also in category 644
564 Downregulated in Malignant neoplasm of testis, also in category 644
565 Downregulated in Malignant tumor of colon, also in category 644
566 Downregulated in Multiple benign melanocytic nevi
567 Downregulated in Nephropathy—diabetic
568 Downregulated in Non-insulin dependent diabetes mellitus
569 Downregulated in Nutritional deficiency
570 Downregulated in Obstructive sleep apnea

### 571 Downregulated in Oligodendroglioma

[0195] 572 Downregulated in Papillary thyroid carcinoma
573 Downregulated in Parkinson disease
574 Downregulated in Porcine nephropathy

### 575 Downregulated in Pre-eclampsia

[0196] 576 Downregulated in Primary cardiomyopathy
577 Downregulated in Primary open angle glaucoma
578 Downregulated in Primary pulmonary hypoplasia
579 Downregulated in Pseudomonas infection
580 Downregulated in Pulmonary emphysema
581 Downregulated in Pulmonary hypertension
582 Downregulated in Renal disorder associated with type II diabetes mellitus
583 Downregulated in Retinal damage
584 Downregulated in Retinitis pigmentosa
585 Downregulated in Rheumatoid arthritis
586 Downregulated in Squamous cell carcinoma, also in category 644
587 Downregulated in Squamous cell carcinoma of lung, also in category 644
588 Downregulated in Status epilepticus
589 Downregulated in Systemic infection

### 590 Downregulated in Thrombocytopenia

[0197] 591 Downregulated in Thymic carcinoma, also in category 644
592 Downregulated in Transitional cell carcinoma, also in category 644
593 Downregulated in Transitional cell carcinoma in situ, also in category 644
594 Downregulated in Ulcerative colitis
595 Downregulated in Uterine fibroids
596 Downregulated in Ventilator-associated lung injury
597 Downregulated in Ventricular hypertrophy
598 Downregulated in Ventricular hypertrophy (& [left])
599 Downregulated in Vitamin A deficiency
600 is associated with Bone diseases
601 is associated with Cancer diseases, also in category 644
602 is associated with Cardiovascular diseases
603 is associated with Connective tissue disorder diseases
604 is associated with Dermatological diseases
605 is associated with Developmental diseases
606 is associated with Ear, Nose, Throat diseases
607 is associated with Endocrine diseases
608 is associated with Gastrointestinal diseases
609 is associated with Hematological diseases
610 is associated with Immunological diseases
611 is associated with Metabolic diseases
612 is associated with multiple diseases
613 is associated with Muscular diseases
614 is associated with Neurological diseases
615 is associated with Nutritional diseases
616 is associated with Ophthamological diseases
617 is associated with Other diseases
618 is associated with Psychiatric diseases
619 is associated with Renal diseases
620 is associated with Respiratory diseases
621 is associated with Skeletal diseases
622 is decreased in Bone diseases
623 is decreased in Cancer diseases, also in category 644
624 is decreased in Cardiovascular diseases
625 is decreased in Connective tissue disorder diseases
626 is decreased in Dermatological diseases
627 is decreased in Developmental diseases
628 is decreased in Ear, Nose, Throat diseases
629 is decreased in Endocrine diseases
630 is decreased in Gastrointestinal diseases
631 is decreased in Hematological diseases
632 is decreased in Immunological diseases
633 is decreased in Metabolic diseases
634 is decreased in multiple diseases
635 is decreased in Muscular diseases
636 is decreased in Neurological diseases
637 is decreased in Nutritional diseases
638 is decreased in Ophthamological diseases
639 is decreased in Other diseases
640 is decreased in Psychiatric diseases
641 is decreased in Renal diseases
642 is decreased in Respiratory diseases
643 is decreased in Skeletal diseases
644 is involved in cancer

[0198] Thus, in various aspects, the invention features oligonucleotides that specifically bind to any of the RNA sequences disclosed herein, for use in modulating expression of genes. In another aspect, the invention also features oligonucleotides that specifically bind, or are complementary, to any of the RNA sequences of sequences B47,408 to B616,428 [mouse Peaks] or B652,256 to B916,209 [human Peaks] or B916,626 to B934,761—[longer region surrounding human Peaks], whether in the “opposite strand” or the “same strand” as a target gene (e.g., as indicated in Table 2 of International Patent Application Publication WO/2012/087983). In some embodiments, the oligonucleotide is provided for use in a method of modulating expression of a gene targeted by the PRC2 binding RNA (e.g., an intersecting or nearby gene). Such methods may be carried out in vitro, ex vivo, or in vivo. In some embodiments, the oligonucleotide is provided for use in methods of treating disease. The treatments may involve modulating expression of a gene targeted by the PRC2 binding RNA, preferably upregulating gene expression. In some embodiments, the oligonucleotide is formulated as a sterile composition for parenteral administration. The reference genes targeted by these RNA sequences are set forth in Tables 2-3 and are grouped according to categories 1-644 in Table 3 of International Patent Application Publication WO/2012/087983 or are imprinted genes set forth in Table 2. Thus, in one aspect the invention describes a group of oligonucleotides that specifically bind, or are complementary to, a group of RNA sequences, either transcripts or Peaks, in any one of categories 1-644. In particular, the invention features uses of such oligonucleotides to upregulate expression of any of the reference genes set forth in Tables 2, for use in treating a disease, disorder, condition or association described in any of the categories set forth in Table 3 of International Patent Application Publication WO/2012/087983 (e.g., any one or more of category numbers 11, 14, 15, 17, 21, 24, 26, 42, 44, 49, 58, 69, 82, 103, 119, 120, 126, 143, 163, 167, 172, 177, 182, 183, 184, 187, 191, 196, 200, 203, 204, 212, 300 323, and/or 400-644).

[0199] By way of non-limiting example, category 45 (Complement and coagulation cascades) includes reference genes selected from the group consisting of A2M, SERPINC1, BDKRB1, BDKRB2, CFB, SERPING1, C1QA, C1QB, C1QC, C1R, C1S, C2, C3, C3AR1, C4A, C4B, C4BPA, C4BPB, C5, C5AR1, C6, C7, C8A, C8B, C9, CD59, CPB2, CR1, CR2, CD55, CFD, F2, F3, F5, F7, F8, F9, F10, F11, F12, F13A1, F13B, FGA, FGB, FGG, SERPIND1, CFH, CFI, KLKB1, KNG1, MBL2, CD46, SERPINE1, SERPINA1, PLAT, PLAU, PLAUR, PLG, SERPINF2, PROC, PROS1, MASP1, TFPI, THBD, VWF and/or MASP2.

[0200] In turn, each of A2M, SERPINC1, BDKRB1, BDKRB2, CFB, SERPING1, C1QA, C1QB, C1QC, C1R, C1S, C2, C3, C3AR1, C4A, C4B, C4BPA, C4BPB, C5, C5AR1, C6, C7, C8A, C8B, C9, CD59, CPB2, CR1, CR2, CD55, CFD, F2, F3, F5, F7, F8, F9, F10, F11, F12, F13A1, F13B, FGA, FGB, FGG, SERPIND1, CFH, CFI, KLKB1, KNG1, MBL2, CD46, SERPINE1, SERPINA1, PLAT, PLAU, PLAUR, PLG, SERPINF2, PROC, PROS1, MASP1, TFPI, THBD, VWF and/or MASP2 are targeted by PRC2-associated RNA having the sequence identifiers displayed in the applicable row of Table 2 of International Patent Application Publication WO/2012/087983. For example, F2 targeting sequences include sequences: B620037 [F], B620035 [4027], B790730 [4752], B4539 [2059], B341288 [3278], B4537 [4639] on the same strand as the coding gene, and sequences: B620036 [F], B790731—[F], B4538 [F], B341286 [F], B341287 [F] on the opposite strand from the coding gene, according to Table 2 of International Patent Application Publication WO/2012/087983.

[0201] The group of oligonucleotides that specifically bind to, or are complementary to, any one of these sequences that are listed in Table 2 of International Patent Application Publication WO/2012/087983 as targeting refGenes A2M, SERPINC1, BDKRB1, BDKRB2, CFB, SERPING1, C1QA, C1QB, C1QC, C1R, C1S, C2, C3, C3AR1, C4A, C4B, C4BPA, C4BPB, C5, C5AR1, C6, C7, C8A, C8B, C9, CD59, CPB2, CR1, CR2, CD55, CFD, F2, F3, F5, F7, F8, F9, F10, F11, F12, F13A1, F13B, FGA, FGB, FGG, SERPIND1, CFH, CFI, KLKB1, KNG1, MBL2, CD46, SERPINE1, SERPINA1, PLAT, PLAU, PLAUR, PLG, SERPINF2, PROC, PROS1, MASP1, TFPI, THBD, VWF and/or MASP2 are contemplated for use in any of the compositions and methods described herein, including but not limited to use in treating a disease of category 45 (Complement and coagulation cascades), the treatment involving modulation of any of the refGenes A2M, SERPINC1, BDKRB1, BDKRB2, CFB, SERPING1, C1QA, C1QB, C1QC, C1R, C1S, C2, C3, C3AR1, C4A, C4B, C4BPA, C4BPB, C5, C5AR1, C6, C7, C8A, C8B, C9, CD59, CPB2, CR1, CR2, CD55, CFD, F2, F3, F5, F7, F8, F9, F10, F11, F12, F13A1, F13B, FGA, FGB, FGG, SERPIND1, CFH, CFI, KLKB1, KNG1, MBL2, CD46, SERPINE1, SERPINA1, PLAT, PLAU, PLAUR, PLG, SERPINF2, PROC, PROS1, MASP1, TFPI, THBD, VWF and/or MASP2.

[0202] Similarly, oligonucleotides that specifically bind to, or are complementary to, genes in category 643 (“is decreased in Skeletal disease”) are contemplated for use in any of the compositions and methods described herein, including but not limited to use in treating Skeletal disease. Oligonucleotides that specifically bind to, or are complementary to, genes in the categories that are also part of category 644 (involved in cancer) are contemplated for use in any of the compositions and methods described herein, including but not limited to use in treating cancer.

[0203] It is understood that oligonucleotides of the invention may be complementary to, or specifically bind to, Peaks, or non-Peak regions of transcripts disclosed herein, or regions adjacent to Peaks. In various aspects, the invention also features oligonucleotides that bind to the RNA sequence between two or more Peaks that correspond to chromosomal coordinates that are near each other, e.g., within 100 bases, 200 bases, 300 bases, 400 bases, 500 bases, 1 kb, or 2 kb, of each other, and that are preferably associated with the same reference gene in Table 8 of International Patent Application Publication WO/2012/065143 or Table 2 of International Patent Application: PCT/US2011/65939. For example, the invention features oligonucleotides that specifically bind, or are complementary to, a fragment of any of the RNA transcripts of sequences A1 to A21582 or A191089 to A193049 or B1 to B47,407 or B934,762 to B934,863[mouse transcripts] or B616,429 to B652,255 or B916,210 to B916,625 or B934,864 to B934,968 [human transcripts] or B916,626 to B934,761 [larger region surrounding human Peaks], said fragment about 2000, about 1750, about 1500, about 1250 nucleotides in length, or preferably about 1000, about 750, about 500, about 400, about 300 nucleotides in length, or more preferably about 200, about 150, or about 100 nucleotides in length, wherein the fragment of RNA comprises a stretch of at least five (5) consecutive nucleotides within any of sequences A124437 to A190716, or A190934 to A191086, or A191087 [human Peaks], or sequences A21583 to A124436, or A190717 to 190933, or 191088 [mouse Peaks], or sequences B47,408 to B616,428 [mouse Peaks] or sequences B652,256 to B916,209 [human Peaks], or the reverse complement of any of the cDNA sequences of Appendix I of U.S. Prov. Appl. No. 61/425,174 filed on Dec. 20, 2010, which is incorporated by reference herein in its entirety. In exemplary embodiments the fragment of RNA comprises at least 5, 6, 7, 8, 9, 10, 11, 12, 13, 14, 15, 16, 17, 18, 19, 20, 21, 22, 23, 24, 25, 26, 27, 28, 29, 30, 31, 32, 33, 34, 35, 36, 37, 38, 39, 40, 41, 42, 43, 44, 45, 46, 47, 48, 49 or 50 consecutive nucleotides within any of sequences A124437 to A190716, or A190934 to A191086, or A191087 [human Peaks], or sequences A21583 to A124436, or A190717 to A190933, or A191088 [mouse Peaks], or sequences B47,408 to B616,428 [mouse Peaks] or sequences B652,256 to B916,209 [human Peaks], or the reverse complement of any of the cDNA sequences of Appendix I of U.S. Prov. Appl. No. 61/425,174 filed on Dec. 20, 2010.

[0204] Thus, for example, this description includes oligonucleotides that bind to fragments about 2000, about 1750, about 1500, about 1250 nucleotides in length, or preferably about 1000, about 750, about 500, about 400, about 300 nucleotides in length, or more preferably about 200, about 150, or about 100 nucleotides in length, which are:

[0205] (a) fragments of any of sequences B1-B47407 [mouse transcripts] that comprise a stretch of at least five (5) consecutive nucleotides, or 6, 7, 8, 9 or 10 or more consecutive nucleotides, within any of sequences B47408-B616428 [mouse Peaks], preferably associated with the same reference gene in Table 2 of International Patent Application Publication WO/2012/087983;

[0206] (b) fragments of any of sequences B616429-B652255 [human transcripts] that comprise a stretch of at least five (5) consecutive nucleotides, or 6, 7, 8, 9 or 10 or more consecutive nucleotides, within any of sequences B652256-B916209 [human Peaks], preferably associated with the same reference gene in Table 2 of International Patent Application Publication WO/2012/087983;

[0207] (c) fragments of any of sequences B916626-B934761—[longer regions around human Peaks] that comprise a stretch of at least five (5) consecutive nucleotides, or 6, 7, 8, 9 or 10 or more consecutive nucleotides, within any of sequences B652256-B916209 [human Peaks], preferably associated with the same reference gene in Table 2 of International Patent Application Publication WO/2012/087983;

[0208] (d) fragments of any of sequences B934762-B934863 [mouse imprinted transcripts] that encompass that comprise a stretch of at least five (5) consecutive nucleotides, or 6, 7, 8, 9 or 10 or more consecutive nucleotides, within any of sequences B47408-B616428 [mouse Peaks], preferably associated with the same reference gene in Table 2 of International Patent Application Publication WO/2012/087983 or Table 2;

[0209] (e) fragments of any of sequences B629991, B629992, B630983, B630984, B630990, B631003, B631004, B632396, B632397, B632402, B632403, B632419, B632422, B634959, B638303, B638304, B647595, B647596, B647597, B647598, B647601, B649028, and B934864-B934931—[human imprinted transcripts] that comprise a stretch of at least five (5) consecutive nucleotides, or 6, 7, 8, 9 or 10 or more consecutive nucleotides, within any of sequences B652256-B916209 [human Peaks], preferably associated with the same reference gene in Table 2 of International Patent Application Publication WO/2012/087983 or Table 2;

[0210] (f) fragments of any of sequences B916210-B916625 [human transcripts] that comprise a stretch of at least five (5) consecutive nucleotides, or 6, 7, 8, 9 or 10 or more consecutive nucleotides, within any of sequences B652256-B916209 [human Peaks], preferably associated with the same reference gene in Table 2 of International Patent Application Publication WO/2012/087983; or

[0211] (g) fragments of any of sequences B934932-B934968 [human transcripts] that comprise a stretch of at least five (5) consecutive nucleotides, or 6, 7, 8, 9 or 10 or more consecutive nucleotides, within any of sequences B652256-B916209 [human Peaks], preferably associated with the same reference gene in Table 2 of International Patent Application Publication WO/2012/087983.

[0212] Thus, as noted above, the oligonucleotide can comprise or consist of a sequence of bases at least 80% complementary to at least 10, or 10-30 or 10-40 contiguous bases of the target RNA, or at least 80% complementary to at least 15, or 15-30, or 15-40 contiguous bases of the target RNA, or at least 80% complementary to at least 20, or 20-30, or 20-40 contiguous bases of the target RNA, or at least 80% complementary to at least 25, or 25-30, or 25-40 contiguous bases of the target RNA, or at least 80% complementary to at least 30, or 30-40 contiguous bases of the target RNA, or at least 80% complementary to at least 40 contiguous bases of the target RNA. Moreover, the oligonucleotide can comprise or consist of a sequence of bases at least 90% complementary to at least 5, or 5-30 or 5-40 or 8-40 contiguous bases of the target RNA, or at least 90% complementary to at least 10, or 10-30, or 10-40 contiguous bases of the target RNA, or at least 90% complementary to at least 15, or 15-30, or 15-40 contiguous bases of the target RNA, or at least 90% complementary to at least 20, or 20-30, or 20-40 contiguous bases of the target RNA, or at least 90% complementary to at least 25, or 25-30, or 25-40 contiguous bases of the target RNA, or at least 90% complementary to at least 30, or 30-40 contiguous bases of the target RNA, or at least 90% complementary to at least 40 contiguous bases of the target RNA. Similarly, the oligonucleotide can comprise or consist of a sequence of bases fully complementary to at least 5, 10, or 15 contiguous bases of the target RNA. It is understood that some additional non complementary bases may be included. It is understood that oligonucleotides that comprise such sequences of bases as described may also comprise other non-complementary bases. For example, an oligonucleotide can be 20 bases in total length but comprise a 15 base portion that is fully complementary to 15 bases of the target RNA. Similarly, an oligonucleotide can be 20 bases in total length but comprise a 15 base portion that is at least 80% complementary to 15 bases of the target RNA.

[0213] Complementarity can also be referenced in terms of the number of mismatches in complementary base pairing, as noted above. Thus, the oligonucleotide can comprise or consist of a sequence of bases with up to 3 mismatches over 10 contiguous bases of the target RNA, or up to 3 mismatches over 15 contiguous bases of the target RNA, or up to 3 mismatches over 20 contiguous bases of the target RNA, or up to 3 mismatches over 25 contiguous bases of the target RNA, or up to 3 mismatches over 30 contiguous bases of the target RNA. Similarly, the oligonucleotide can comprise or consist of a sequence of bases with up to 2 mismatches over 10 contiguous bases of the target RNA, or up to 2 mismatches over 15 contiguous bases of the target RNA, or up to 2 mismatches over 20 contiguous bases of the target RNA, or up to 2 mismatches over 25 contiguous bases of the target RNA, or up to 2 mismatches over 30 contiguous bases of the target RNA. Similarly, the oligonucleotide can comprise or consist of a sequence of bases with one mismatch over 10, 15, 20, 25 or 30 contiguous bases of the target RNA.

[0214] In some or any of the embodiments of oligonucleotides described herein (e.g., in the summary, detailed description, or examples of embodiments) or the processes for designing or synthesizing them, the oligonucleotides may optionally exclude any one or more of the oligonucleotides as disclosed in any one or more of the following publications: as target HOTAIR RNA (Rinn et al., 2007), Tsix, RepA, or Xist RNAs ((Zhao et al., 2008) [sequences B936166-B936170], or (Sarma et al., 2010) [sequences B936177-B936186] or (Zhao et al., 2010) [sequences B936187-B936188] or (Prasnath et al., 2005) [sequences B936173-B936176]. or (Shamovsky et al., 2006) [sequence B936172] or (Mariner et al., 2008) [sequence B936171] or (Sunwoo et al., 2008) or (Bernard et al., 2010) [sequence B936189]; or as targeting short RNAs of 50 200 nt that are identified as candidate PRC2 regulators (Kanhere et al., 2010); or (Kuwabara et al., US 2005/0226848) [sequences B936190-B936191] or (Li et al., US 2010/0210707) [sequences B936192-B936227] or (Corey et al., 7,709,456) [sequences B936228-B936245] or (Mattick et al., WO 2009/124341), or (Corey et al., US 2010/0273863) [sequences B936246-B936265], or (Wahlstedt et al., US 2009/0258925) [sequences B935060-B935126], or BACE: US 2009/0258925 [sequences B935060-B935126]; ApoA1: US 2010/0105760/EP235283 [sequences B935127-B935299], P73, p53, PTEN, WO 2010/065787 A2/EP2370582 [sequences B935300-B935345]; SIRT1: WO 2010/065662 A2/EP09831068 [sequences B935346-B935392]; VEGF: WO 2010/065671-A2/EP2370581—[sequences B935393-B935403]; EPO: WO 2010/065792 A2/EP09831152 [sequences B935404-B935412]; BDNF: WO2010/093904 [sequences B935413-B935423], DLK1: WO 2010/107740 [sequences B935424-B935430]; NRF2/NFE2L2: WO 2010/107733 [sequences B935431-B935438]; GDNF: WO 2010/093906 [sequences B935439-B935476]; SOX2, KLF4, Oct3A/B, “reprogramming factors: WO 2010/135329 [sequences B935477-B935493]; Dystrophin: WO 2010/129861—[sequences B935494-B935525]; ABCA1, LCAT, LRP1, ApoE, LDLR, ApoA1: WO 2010/129799 [sequences B935526-B935804]; HgF: WO 2010/127195 [sequences B935805-B935809]; TTP/Zfp36: WO 2010/129746[sequences B935810-B935824]; TFE3, IRS2: WO 2010/135695 [sequences B935825-B935839]; RIG1, MDAS, IFNA1: WO 2010/138806 [sequences B935840-B935878]; PON1: WO 2010/148065 [sequences B935879-B935885]; Collagen: WO/2010/148050 [sequences B935886-B935918]; Dyrk1A, Dscr1, “Down Syndrome Gene”: WO/2010/151674 [sequences B935919-B935942]; TNFR2: WO/2010/151671—[sequences B935943-B935951]; Insulin: WO/2011/017516 [sequences B935952-B935963]; ADIPOQ: WO/2011/019815 [sequences B935964-B935992]; CHIP: WO/2011/022606 [sequences B935993-B936004]; ABCB1: WO/2011/025862 [sequences B936005-B936014]; NEUROD1, EUROD1, HNF4A, MAFA, PDX, KX6, “Pancreatic development gene”: WO/2011/085066 [sequences B936015-B936054]; MBTPS1: WO/2011/084455 [sequences B936055-B936059]; SHBG: WO/2011/085347 [sequences B936060-B936075]; IRF8: WO/2011/082409 [sequences B936076-B936080]; UCP2: WO/2011/079263 [sequences B936081-B936093]; HGF: WO/2011/079261—[sequences B936094-B936104]; GH: WO/2011/038205 [sequences B936105-B936110]; IQGAP: WO/2011/031482 [sequences B936111-B936116]; NRF1: WO/2011/090740 [sequences B936117-B936123]; P63: WO/2011/090741—[sequences B936124-B936128]; RNAseH1: WO/2011/091390 [sequences B936129-B936140]; ALOX12B: WO/2011/097582 [sequences B936141-B936146]; PYCR1: WO/2011/103528 [sequences B936147-B936151]; CSF3: WO/2011/123745 [sequences B936152-B936157]; FGF21: WO/2011/127337 [sequences B936158-B936165]; SIRTUIN (SIRT): WO2011/139387 [sequences B936266-B936369 and B936408-B936425]; PAR4: WO2011/143640 [sequences B936370-B936376 and B936426]; LHX2: WO2011/146675 [sequences B936377-B936388 and B936427 B936429]; BCL2L11: WO2011/146674 [sequences B936389-B936398 and B936430 B936431]; MSRA: WO2011/150007 [sequences B936399-B936405 and B936432]; ATOH1: WO2011/150005 [sequences B936406-B936407 and B936433] of which each of the foregoing is incorporated by reference in its entirety herein. In some or any of the embodiments, optionally excluded from the invention are of oligonucleotides that specifically bind to, or are complementary to, any one or more of the following regions: Nucleotides 1-932 of sequence B935128; Nucleotides 1-1675 of sequence B935306; Nucleotides 1-518 of sequence B935307; Nucleotides 1-759 of sequence B935308; Nucleotides 1-25892 of sequence B935309; Nucleotides 1-279 of sequence B935310; Nucleotides 1-1982 of sequence B935311; Nucleotides 1-789 of sequence B935312; Nucleotides 1-467 of sequence B935313; Nucleotides 1-1028 of sequence B935347; Nucleotides 1-429 of sequence B935348; Nucleotides 1-156 of sequence B935349; Nucleotides 1-593 of sequence B935350; Nucleotides 1-643 of sequence B935395; Nucleotides 1-513 of sequence B935396; Nucleotides 1-156 of sequence B935406; Nucleotides 1-3175 of sequence B935414; Nucleotides 1-1347 of sequence B935426; Nucleotides 1-5808 of sequence B935433; Nucleotides 1-237 of sequence B935440; Nucleotides 1-1246 of sequence B935441; Nucleotides 1-684 of sequence B935442; Nucleotides 1-400 of sequence B935473; Nucleotides 1-619 of sequence B935474; Nucleotides 1-813 of sequence B935475; Nucleotides 1-993 of sequence B935480; Nucleotides 1-401 of sequence B935480; Nucleotides 1-493 of sequence B935481; Nucleotides 1-418 of sequence B935482; Nucleotides 1-378 of sequence B935496; Nucleotides 1-294 of sequence B935497; Nucleotides 1-686 of sequence B935498; Nucleotides 1-480 of sequence B935499; Nucleotides 1-501 of sequence B935500; Nucleotides 1-1299 of sequence B935533; Nucleotides 1-918 of sequence B935534; Nucleotides 1-1550 of sequence B935535; Nucleotides 1-329 of sequence B935536; Nucleotides 1-1826 of sequence B935537; Nucleotides 1-536 of sequence B935538; Nucleotides 1-551 of sequence B935539; Nucleotides 1-672 of sequence B935540; Nucleotides 1-616 of sequence B935541; Nucleotides 1-471 of sequence B935542; Nucleotides 1-707 of sequence B935543; Nucleotides 1-741 of sequence B935544; Nucleotides 1-346 of sequence B935545; Nucleotides 1-867 of sequence B935546; Nucleotides 1-563 of sequence B935547; Nucleotides 1-970 of sequence B935812; Nucleotides 1-1117 of sequence B935913; Nucleotides 1-297 of sequence B935814; Nucleotides 1-497 of sequence B935827; Nucleotides 1-1267 of sequence B935843; Nucleotides 1-586 of sequence B935844; Nucleotides 1-741 of sequence B935845; Nucleotides 1-251 of sequence B935846; Nucleotides 1-681 of sequence B935847; Nucleotides 1-580 of sequence B935848; Nucleotides 1-534 of sequence B935880; Nucleotides 1-387 of sequence B935889; Nucleotides 1-561 of sequence B935890; Nucleotides 1-335 of sequence B935891; Nucleotides 1-613 of sequence B935892; Nucleotides 1-177 of sequence B935893; Nucleotides 1-285 of sequence B935894; Nucleotides 1-3814 of sequence B935921; Nucleotides 1-633 of sequence B935922; Nucleotides 1-497 of sequence B935923 Nucleotides 1-545 of sequence B935924; Nucleotides 1-413 of sequence B935950; Nucleotides 1-413 of sequence B935951; Nucleotides 1-334 of sequence B935962; Nucleotides 1-582 of sequence B935963; Nucleotides 1-416 of sequence B935964; Nucleotides 1-3591 of sequence B935990; Nucleotides 1-875 of sequence B935991; Nucleotides 1-194 of sequence B935992; Nucleotides 1-2074 of sequence B936003; Nucleotides 1-1237 of sequence B936004; Nucleotides 1-4050 of sequence B936013; Nucleotides 1-1334 of sequence B936014; Nucleotides 1-1235 of sequence B936048; Nucleotides 1-17,964 of sequence B936049; Nucleotides 1-50,003 of sequence B936050; Nucleotides 1-486 of sequence B936051; Nucleotides 1-494 of sequence B936052; Nucleotides 1-1992 of sequence B936053; Nucleotides 1-1767 of sequence B936054; Nucleotides 1-1240 of sequence B936059; Nucleotides 1-3016 of sequence B936074; Nucleotides 1-1609 of sequence B936075; Nucleotides 1-312 of sequence B936080; Nucleotides 1-243 of sequence B936092; Nucleotides 1-802 of sequence B936093; Nucleotides 1-514 of sequence B936102; Nucleotides 1-936 of sequence B936103; Nucleotides 1-1075 of sequence B936104; Nucleotides 1-823 of sequence B936110; Nucleotides 1-979 of sequence B936116; Nucleotides 1-979 of sequence B936123; Nucleotides 1-288 of sequence B936128; Nucleotides 1-437 of sequence B936137; Nucleotides 1-278 of sequence B936138; Nucleotides 1-436 of sequence B936139; Nucleotides 1-1140 of sequence B936140; Nucleotides 1-2082 of sequence B936146; Nucleotides 1-380 of sequence B936151; Nucleotides 1-742 of sequence B936157; Nucleotides 1-4246 of sequence B936165; Nucleotides 1-1028 of sequence B936408; Nucleotides 1-429 of sequence B936409; Nucleotides 1-508 of sequence B936410; Nucleotides 1-593 of sequence B936411; Nucleotides 1-373 of sequence B936412; Nucleotides 1-1713 of sequence B936413; Nucleotides 1-660 of sequence B936414; Nucleotides 1-589 of sequence B936415; Nucleotides 1-726 of sequence B936416; Nucleotides 1-320 of sequence B936417; Nucletides 1-616 of sequence B936418; Nucletides 1-492 of sequence B936419; Nucletides 1-428 of sequence B936420; Nucletides 1-4041 of sequence B936421; Nucletides 1-705 of sequence B936422; Nucletides 1-2714 of sequence B936423; Nucletides 1-1757 of sequence B936424; Nucletides 1-3647 of sequence B936425; Nucleotides 1-354 of sequence B936426; Nucleotides 1-2145 of sequence B936427, Nucleotides 1-606 of sequence B936428; Nucleotides 1-480 of sequence B936429; Nucleotides 1-3026 of sequence B936430; Nucleotides 1-1512 of sequence B936431; Nucleotides 1-3774 of sequence B936432; and Nucleotides 1-589 of sequence B936433. In some or any of the embodiments of the oligonucleotides described herein, or processes for designing or synthesizing them, the oligonucleotides will upregulate gene expression and may specifically bind or specifically hybridize or be complementary to the PRC2 binding RNA that is transcribed from the same strand as a protein coding reference gene. The oligonucleotide may bind to a region of the PRC2 binding RNA that originates within or overlaps an intron, exon, intron exon junction, 5′ UTR, 3′ UTR, a translation initiation region, or a translation termination region of a protein coding sense strand of a reference gene (refGene).

[0215] In some or any of the embodiments of oligonucleotides described herein, or processes for designing or synthesizing them, the oligonucleotides will upregulate gene expression and may specifically bind or specifically hybridize or be complementary to a PRC2 binding RNA that transcribed from the opposite strand (the antisense strand) of a protein coding reference gene. The oligonucleotide may bind to a region of the PRC2 binding RNA that originates within or overlaps an intron, exon, intron exon junction, 5′ UTR, 3′ UTR, a translation initiation region, or a translation termination region of a protein coding antisense strand of a reference gene

[0216] The oligonucleotides described herein may be modified, e.g., comprise a modified sugar moiety, a modified internucleoside linkage, a modified nucleotide and/or combinations thereof. In addition, the oligonucleotides can exhibit one or more of the following properties:

[0217] do not induce substantial cleavage or degradation of the target RNA; do not cause substantially complete cleavage or degradation of the target RNA; do not activate the RNAse H pathway; do not activate RISC; do not recruit any Argonaute family protein; are not cleaved by Dicer; do not mediate alternative splicing; are not immune stimulatory; are nuclease resistant; have improved cell uptake compared to unmodified oligonucleotides; are not toxic to cells or mammals; may have improved endosomal exit; do interfere with interaction of lncRNA with PRC2, preferably the Ezh2 subunit but optionally the Suz12, Eed, RbAp46/48 subunits or accessory factors such as Jarid2; do decrease histone H3 lysine27 methylation and/or do upregulate gene expression.

[0218] In some or any of the embodiments of oligonucleotides described herein, or processes for designing or synthesizing them, the oligonucleotides may optionally exclude those that bind DNA of a promoter region, as described in Kuwabara et al., US 2005/0226848 or Li et al., US 2010/0210707 or Corey et al., 7,709,456 or Mattick et al., WO 2009/124341, or those that bind DNA of a 3′ UTR region, as described in Corey et al., US 2010/0273863.

[0219] Oligonucleotides that are designed to interact with RNA to modulate gene expression are a distinct subset of base sequences from those that are designed to bind a DNA target (e.g., are complementary to the underlying genomic DNA sequence from which the RNA is transcribed).

[0220] Methods for Modulating Gene Expression

[0221] In another aspect, the invention relates to methods for modulating gene expression in a cell, e.g., a cancer cell, a stem cell, or other normal cell types for gene or epigenetic therapy. The cells can be in vitro, ex vivo, or in vivo (e.g., in a subject who has cancer, e.g., a tumor). In some embodiments, methods for modulating gene expression in a cell comprise delivering a single stranded oligonucleotide as described herein. In some embodiments, delivery of the single stranded oligonucleotide to the cell results in a level of expression of gene that is at least 5%, 10%, 20%, 30%, 40%, 50%, 60%, 70%, 80%, 90%, 100%, 200% or more greater than a level of expression of gene in a control cell to which the single stranded oligonucleotide has not been delivered. In certain embodiments, delivery of the single stranded oligonucleotide to the cell results in a level of expression of gene that is at least 50% greater than a level of expression of gene in a control cell to which the single stranded oligonucleotide has not been delivered.

[0222] In another aspect of the invention, methods comprise administering to a subject (e.g. a human) a composition comprising a single stranded oligonucleotide as described herein to increase protein levels in the subject. In some embodiments, the increase in protein levels is at least 5%, 10%, 20%, 30%, 40%, 50%, 60%, 70%, 80%, 90%, 100%, 200%, or more, higher than the amount of a protein in the subject before administering.

[0223] As another example, to increase expression of a tumor suppressor in a cell, the methods include introducing into the cell a single stranded oligonucleotide that is sufficiently complementary to a PRC2-associated region (e.g., of a long non-coding RNA) that maps to a genomic position encompassing or in proximity to a target gene (e.g., a tumor suppressor as set forth in Table 2 of International Patent Application Publication WO/2012/087983, an imprinted gene in Table 2, and/or other growth-suppressing genes in Table 2 of International Patent Application Publication WO/2012/087983 (e.g., Nkx2-1 or Titf-1, e.g., in subjects with cancer, e.g., lung adenocarcinoma patients)).

[0224] In another aspect of the invention provides methods of treating a condition (e.g., cancer) associated with decreased levels of expression of a particular gene in a subject, the method comprising administering a single stranded oligonucleotide as described herein.

[0225] A subject can include a non-human mammal, e.g. mouse, rat, guinea pig, rabbit, cat, dog, goat, cow, or horse. In preferred embodiments, a subject is a human.

[0226] In some embodiments, specific cancers that can be treated using the methods described herein are listed in Table 3 of International Patent Application Publication WO/2012/087983, for example, and include, but are not limited to: breast, lung, prostate, CNS (e.g., glioma), salivary gland, prostate, ovarian, and leukemias (e.g., ALL, CML, or AML). Associations of these genes with a particular cancer are known in the art, e.g., as described in Futreal et al., Nat Rev Cancer. 2004; 4; 177-83 (see, e.g., Table 1, incorporated by reference herein); and The COSMIC (Catalogue of Somatic Mutations in Cancer) database and website, Bamford et al., Br J Cancer. 2004; 91; 355-8; see also Forbes et al., Curr Protoc Hum Genet. 2008; Chapter 10; Unit 10.11, and the COSMIC database, e.g., v. 50 (Nov. 30, 2010). It is understood that reference to any particular type of cancer in, for example, Table 3 of International Patent Application Publication WO/2012/087983, means that patients with other types of cancer, i.e., cancer in general, may be treated.

[0227] In addition, the methods described herein can be used for modulating (e.g., enhancing or decreasing) pluripotency of a stem cell and to direct stem cells down specific differentiation pathways to make endoderm, mesoderm, ectoderm, and their developmental derivatives. To increase, maintain, or enhance pluripotency, the methods include introducing into the cell a single stranded oligonucleotide that specifically binds to, or is complementary to, a PRC2-associated region of a nucleic acid (e.g., of any long non-coding RNA disclosed herein). Stem cells useful in the methods described herein include adult stem cells (e.g., adult stem cells obtained from the inner ear, bone marrow, mesenchyme, skin, fat, liver, muscle, or blood of a subject, e.g., the subject to be treated); embryonic stem cells, or stem cells obtained from a placenta or umbilical cord; progenitor cells (e.g., progenitor cells derived from the inner ear, bone marrow, mesenchyme, skin, fat, liver, muscle, or blood); and induced pluripotent stem cells (e.g., iPS cells).

[0228] In some embodiments, the methods described herein include administering a composition, e.g., a sterile composition, comprising a single stranded oligonucleotide that is complementary to a PRC2-associated region of a nucleic acid (e.g., of an lncRNA described herein, e.g., as set forth in sequences A1 to A193,049, B1 to B916,209, and B916,626 to B934,931). In some embodiments, the single stranded oligonucleotide comprises one or more modified nucleotides (e.g., a locked nucleic acid (LNA) molecule).

[0229] Single stranded oligonucleotides have been employed as therapeutic moieties in the treatment of disease states in animals, including humans. Single stranded oligonucleotides can be useful therapeutic modalities that can be configured to be useful in treatment regimes for the treatment of cells, tissues and animals, especially humans.

[0230] For therapeutics, an animal, preferably a human, suspected of having cancer is treated by administering single stranded oligonucleotide in accordance with this invention. For example, in one non-limiting embodiment, the methods comprise the step of administering to the animal in need of treatment, a therapeutically effective amount of a single stranded oligonucleotide as described herein.

[0231] Formulation, Delivery, and Dosing

[0232] The oligonucleotides described herein can be formulated for administration to a subject. It should be understood that the formulations, compositions and methods can be practiced with any of the oligonucleotides disclosed herein.

[0233] The formulations may conveniently be presented in unit dosage form and may be prepared by any methods well known in the art of pharmacy. The amount of active ingredient (e.g., an oligonucleotide or compound of the invention) which can be combined with a carrier material to produce a single dosage form will vary depending upon the host being treated, the particular mode of administration, e.g., intradermal or inhalation. The amount of active ingredient which can be combined with a carrier material to produce a single dosage form will generally be that amount of the compound which produces a therapeutic effect, e.g. tumor regression.

[0234] Pharmaceutical formulations of this invention can be prepared according to any method known to the art for the manufacture of pharmaceuticals. Such formulations can contain sweetening agents, flavoring agents, coloring agents and preserving agents. A formulation can be admixtured with nontoxic pharmaceutically acceptable excipients which are suitable for manufacture. Formulations may comprise one or more diluents, emulsifiers, preservatives, buffers, excipients, etc. and may be provided in such forms as liquids, powders, emulsions, lyophilized powders, sprays, creams, lotions, controlled release formulations, tablets, pills, gels, on patches, in implants, etc.

[0235] A formulated single stranded oligonucleotide composition can assume a variety of states. In some examples, the composition is at least partially crystalline, uniformly crystalline, and/or anhydrous (e.g., less than 80, 50, 30, 20, or 10% water). In another example, the single stranded oligonucleotide is in an aqueous phase, e.g., in a solution that includes water. The aqueous phase or the crystalline compositions can, e.g., be incorporated into a delivery vehicle, e.g., a liposome (particularly for the aqueous phase) or a particle (e.g., a microparticle as can be appropriate for a crystalline composition). Generally, the single stranded oligonucleotide composition is formulated in a manner that is compatible with the intended method of administration.

[0236] In some embodiments, the composition is prepared by at least one of the following methods: spray drying, lyophilization, vacuum drying, evaporation, fluid bed drying, or a combination of these techniques; or sonication with a lipid, freeze-drying, condensation and other self-assembly.

[0237] A single stranded oligonucleotide preparation can be formulated or administered (together or separately) in combination with another agent, e.g., another therapeutic agent or an agent that stabilizes a single stranded oligonucleotide, e.g., a protein that complexes with single stranded oligonucleotide. Still other agents include chelators, e.g., EDTA (e.g., to remove divalent cations such as Mg²⁺), salts, RNAse inhibitors (e.g., a broad specificity RNAse inhibitor such as RNAsin) and so forth.

[0238] In one embodiment, the single stranded oligonucleotide preparation includes another single stranded oligonucleotide, e.g., a second single stranded oligonucleotide that modulates expression of a second gene or a second single stranded oligonucleotide that modulates expression of the first gene. Still other preparation can include at least 3, 5, ten, twenty, fifty, or a hundred or more different single stranded oligonucleotide species. Such single stranded oligonucleotides can mediated gene expression with respect to a similar number of different genes.

[0239] In one embodiment, the single stranded oligonucleotide preparation includes at least a second therapeutic agent (e.g., an agent other than an oligonucleotide). For example, e.g., a single stranded oligonucleotide composition for the treatment of a cancer might further comprise a chemotherapeutic agent.

[0240] Route of Delivery

[0241] A composition that includes a single stranded oligonucleotide can be delivered to a subject by a variety of routes. Exemplary routes include: intravenous, intradermal, topical, rectal, parenteral, anal, intravaginal, intranasal, pulmonary, ocular.

[0242] The single stranded oligonucleotide molecules of the invention can be incorporated into pharmaceutical compositions suitable for administration. Such compositions typically include one or more species of single stranded oligonucleotide and a pharmaceutically acceptable carrier. As used herein the language “pharmaceutically acceptable carrier” is intended to include any and all solvents, dispersion media, coatings, antibacterial and antifungal agents, isotonic and absorption delaying agents, and the like, compatible with pharmaceutical administration. The use of such media and agents for pharmaceutically active substances is well known in the art. Except insofar as any conventional media or agent is incompatible with the active compound, use thereof in the compositions is contemplated. Supplementary active compounds can also be incorporated into the compositions.

[0243] The pharmaceutical compositions of the present invention may be administered in a number of ways depending upon whether local or systemic treatment is desired and upon the area to be treated. Administration may be topical (including ophthalmic, vaginal, rectal, intranasal, transdermal), oral or parenteral. Parenteral administration includes intravenous drip, subcutaneous, intraperitoneal or intramuscular injection, or intrathecal or intraventricular administration.

[0244] The route and site of administration may be chosen to enhance targeting. For example, to target muscle cells, intramuscular injection into the muscles of interest would be a logical choice. Lung cells might be targeted by administering the single stranded oligonucleotide in aerosol form. The vascular endothelial cells could be targeted by coating a balloon catheter with the single stranded oligonucleotide and mechanically introducing the oligonucleotide.

[0245] Topical Delivery

[0246] Topical administration refers to the delivery to a subject by contacting the formulation directly to a surface of the subject. The most common form of topical delivery is to the skin, but a composition disclosed herein can also be directly applied to other surfaces of the body, e.g., to the eye, a mucous membrane, to surfaces of a body cavity or to an internal surface. As mentioned above, the most common topical delivery is to the skin. The term encompasses several routes of administration including, but not limited to, topical and transdermal. These modes of administration typically include penetration of the skin's permeability barrier and efficient delivery to the target tissue or stratum. Topical administration can be used as a means to penetrate the epidermis and dermis and ultimately achieve systemic delivery of the composition. Topical administration can also be used as a means to selectively deliver oligonucleotides to the epidermis or dermis of a subject, or to specific strata thereof, or to an underlying tissue.

[0247] Formulations for topical administration may include transdermal patches, ointments, lotions, creams, gels, drops, suppositories, sprays, liquids and powders. Conventional pharmaceutical carriers, aqueous, powder or oily bases, thickeners and the like may be necessary or desirable. Coated condoms, gloves and the like may also be useful.

[0248] Transdermal delivery is a valuable route for the administration of lipid soluble therapeutics. The dermis is more permeable than the epidermis and therefore absorption is much more rapid through abraded, burned or denuded skin. Inflammation and other physiologic conditions that increase blood flow to the skin also enhance transdermal adsorption. Absorption via this route may be enhanced by the use of an oily vehicle (inunction) or through the use of one or more penetration enhancers. Other effective ways to deliver a composition disclosed herein via the transdermal route include hydration of the skin and the use of controlled release topical patches. The transdermal route provides a potentially effective means to deliver a composition disclosed herein for systemic and/or local therapy. In addition, iontophoresis (transfer of ionic solutes through biological membranes under the influence of an electric field), phonophoresis or sonophoresis (use of ultrasound to enhance the absorption of various therapeutic agents across biological membranes, notably the skin and the cornea), and optimization of vehicle characteristics relative to dose position and retention at the site of administration may be useful methods for enhancing the transport of topically applied compositions across skin and mucosal sites.

[0249] Oral or Nasal Delivery

[0250] Both the oral and nasal membranes offer advantages over other routes of administration. For example, oligonucleotides administered through these membranes may have a rapid onset of action, provide therapeutic plasma levels, avoid first pass effect of hepatic metabolism, and avoid exposure of the oligonucleotides to the hostile gastrointestinal (GI) environment. Additional advantages include easy access to the membrane sites so that the oligonucleotide can be applied, localized and removed easily.

[0251] In oral delivery, compositions can be targeted to a surface of the oral cavity, e.g., to sublingual mucosa which includes the membrane of ventral surface of the tongue and the floor of the mouth or the buccal mucosa which constitutes the lining of the cheek. The sublingual mucosa is relatively permeable thus giving rapid absorption and acceptable bioavailability of many agents. Further, the sublingual mucosa is convenient, acceptable and easily accessible.

[0252] A pharmaceutical composition of single stranded oligonucleotide may also be administered to the buccal cavity of a human being by spraying into the cavity, without inhalation, from a metered dose spray dispenser, a mixed micellar pharmaceutical formulation as described above and a propellant. In one embodiment, the dispenser is first shaken prior to spraying the pharmaceutical formulation and propellant into the buccal cavity.

[0253] Compositions for oral administration include powders or granules, suspensions or solutions in water, syrups, slurries, emulsions, elixirs or non-aqueous media, tablets, capsules, lozenges, or troches. In the case of tablets, carriers that can be used include lactose, sodium citrate and salts of phosphoric acid. Various disintegrants such as starch, and lubricating agents such as magnesium stearate, sodium lauryl sulfate and talc, are commonly used in tablets. For oral administration in capsule form, useful diluents are lactose and high molecular weight polyethylene glycols. When aqueous suspensions are required for oral use, the nucleic acid compositions can be combined with emulsifying and suspending agents. If desired, certain sweetening and/or flavoring agents can be added.

[0254] Parenteral Delivery

[0255] Parenteral administration includes intravenous drip, subcutaneous, intraperitoneal or intramuscular injection, intrathecal or intraventricular administration. In some embodiments, parental administration involves administration directly to the site of disease (e.g. injection into a tumor).

[0256] Formulations for parenteral administration may include sterile aqueous solutions which may also contain buffers, diluents and other suitable additives. Intraventricular injection may be facilitated by an intraventricular catheter, for example, attached to a reservoir. For intravenous use, the total concentration of solutes should be controlled to render the preparation isotonic.

[0257] Ocular Delivery

[0258] Any of the single stranded oligonucleotides described herein can be administered to ocular tissue. For example, the compositions can be applied to the surface of the eye or nearby tissue, e.g., the inside of the eyelid. For ocular administration, ointments or droppable liquids may be delivered by ocular delivery systems known to the art such as applicators or eye droppers. Such compositions can include mucomimetics such as hyaluronic acid, chondroitin sulfate, hydroxypropyl methylcellulose or poly(vinyl alcohol), preservatives such as sorbic acid, EDTA or benzylchronium chloride, and the usual quantities of diluents and/or carriers. The single stranded oligonucleotide can also be administered to the interior of the eye, and can be introduced by a needle or other delivery device which can introduce it to a selected area or structure.

[0259] Pulmonary Delivery

[0260] Pulmonary delivery compositions can be delivered by inhalation by the patient of a dispersion so that the composition, preferably single stranded oligonucleotides, within the dispersion can reach the lung where it can be readily absorbed through the alveolar region directly into blood circulation. Pulmonary delivery can be effective both for systemic delivery and for localized delivery to treat diseases of the lungs.

[0261] Pulmonary delivery can be achieved by different approaches, including the use of nebulized, aerosolized, micellular and dry powder-based formulations. Delivery can be achieved with liquid nebulizers, aerosol-based inhalers, and dry powder dispersion devices. Metered-dose devices are preferred. One of the benefits of using an atomizer or inhaler is that the potential for contamination is minimized because the devices are self-contained. Dry powder dispersion devices, for example, deliver agents that may be readily formulated as dry powders. A single stranded oligonucleotide composition may be stably stored as lyophilized or spray-dried powders by itself or in combination with suitable powder carriers. The delivery of a composition for inhalation can be mediated by a dosing timing element which can include a timer, a dose counter, time measuring device, or a time indicator which when incorporated into the device enables dose tracking, compliance monitoring, and/or dose triggering to a patient during administration of the aerosol medicament.

[0262] The term “powder” means a composition that consists of finely dispersed solid particles that are free flowing and capable of being readily dispersed in an inhalation device and subsequently inhaled by a subject so that the particles reach the lungs to permit penetration into the alveoli. Thus, the powder is said to be “respirable.” Preferably the average particle size is less than about 10 μm in diameter preferably with a relatively uniform spheroidal shape distribution. More preferably the diameter is less than about 7.5 μm and most preferably less than about 5.0 μm. Usually the particle size distribution is between about 0.1 μm and about 5 μm in diameter, particularly about 0.3 μm to about 5 μm.

[0263] The term “dry” means that the composition has a moisture content below about 10% by weight (% w) water, usually below about 5% w and preferably less it than about 3% w. A dry composition can be such that the particles are readily dispersible in an inhalation device to form an aerosol.

[0264] The term “therapeutically effective amount” is the amount of oligonucleotide present in the composition that is needed to provide the desired level of target gene expression in the subject to be treated to give the anticipated physiological response. The term “physiologically effective amount” is that amount delivered to a subject to give the desired palliative or curative effect. The term “pharmaceutically acceptable carrier” means that the carrier can be taken into the lungs with no significant adverse toxicological effects on the lungs.

[0265] The types of pharmaceutical excipients that are useful as carrier include stabilizers such as human serum albumin (HSA), bulking agents such as carbohydrates, amino acids and polypeptides; pH adjusters or buffers; salts such as sodium chloride; and the like. These carriers may be in a crystalline or amorphous form or may be a mixture of the two.

[0266] Suitable pH adjusters or buffers include organic salts prepared from organic acids and bases, such as sodium citrate, sodium ascorbate, and the like; sodium citrate is preferred. Pulmonary administration of a micellar single stranded oligonucleotide formulation may be achieved through metered dose spray devices with propellants such as tetrafluoroethane, heptafluoroethane, dimethylfluoropropane, tetrafluoropropane, butane, isobutane, dimethyl ether and other non-CFC and CFC propellants.

[0267] Devices and Implants

[0268] Exemplary devices include devices which are introduced into the vasculature, e.g., devices inserted into the lumen of a vascular tissue, or which devices themselves form a part of the vasculature, including stents, catheters, heart valves, and other vascular devices. These devices, e.g., catheters or stents, can be placed in the vasculature of the lung, heart, or leg.

[0269] Other devices include non-vascular devices, e.g., devices implanted in the peritoneum, or in organ or glandular tissue, e.g., artificial organs. The device can release a therapeutic substance in addition to a single stranded oligonucleotide, e.g., a device can release insulin.

[0270] In one embodiment, unit doses or measured doses of a composition that includes single stranded oligonucleotide are dispensed by an implanted device. The device can include a sensor that monitors a parameter within a subject. For example, the device can include pump, e.g., and, optionally, associated electronics.

[0271] Tissue, e.g., cells or organs can be treated with a single stranded oligonucleotide, ex vivo and then administered or implanted in a subject. The tissue can be autologous, allogeneic, or xenogeneic tissue. E.g., tissue can be treated to reduce graft v. host disease. In other embodiments, the tissue is allogeneic and the tissue is treated to treat a disorder characterized by unwanted gene expression in that tissue. E.g., tissue, e.g., hematopoietic cells, e.g., bone marrow hematopoietic cells, can be treated to inhibit unwanted cell proliferation. Introduction of treated tissue, whether autologous or transplant, can be combined with other therapies. In some implementations, the single stranded oligonucleotide treated cells are insulated from other cells, e.g., by a semi-permeable porous barrier that prevents the cells from leaving the implant, but enables molecules from the body to reach the cells and molecules produced by the cells to enter the body. In one embodiment, the porous barrier is formed from alginate.

[0272] In one embodiment, a contraceptive device is coated with or contains a single stranded oligonucleotide. Exemplary devices include condoms, diaphragms, IUD (implantable uterine devices, sponges, vaginal sheaths, and birth control devices.

[0273] Dosage

[0274] In one aspect, the invention features a method of administering a single stranded oligonucleotide (e.g., as a compound or as a component of a composition) to a subject (e.g., a human subject). In one embodiment, the unit dose is between about 10 mg and 25 mg per kg of bodyweight. In one embodiment, the unit dose is between about 1 mg and 100 mg per kg of bodyweight. In one embodiment, the unit dose is between about 0.1 mg and 500 mg per kg of bodyweight. In some embodiments, the unit dose is more than 0.001, 0.005, 0.01, 0.05, 0.1, 0.5, 1, 2, 5, 10, 25, 50 or 100 mg per kg of bodyweight.

[0275] The defined amount can be an amount effective to treat or prevent a disease or disorder, e.g., a disease or disorder associated with the target gene. The unit dose, for example, can be administered by injection (e.g., intravenous or intramuscular), an inhaled dose, or a topical application.

[0276] In some embodiments, the unit dose is administered daily. In some embodiments, less frequently than once a day, e.g., less than every 2, 4, 8 or 30 days. In another embodiment, the unit dose is not administered with a frequency (e.g., not a regular frequency). For example, the unit dose may be administered a single time. In some embodiments, the unit dose is administered more than once a day, e.g., once an hour, two hours, four hours, eight hours, twelve hours, etc.

[0277] In one embodiment, a subject is administered an initial dose and one or more maintenance doses of a single stranded oligonucleotide. The maintenance dose or doses are generally lower than the initial dose, e.g., one-half less of the initial dose. A maintenance regimen can include treating the subject with a dose or doses ranging from 0.0001 to 100 mg/kg of body weight per day, e.g., 100, 10, 1, 0.1, 0.01, 0.001, or 0.0001 mg per kg of bodyweight per day. The maintenance doses may be administered no more than once every 1, 5, 10, or 30 days. Further, the treatment regimen may last for a period of time which will vary depending upon the nature of the particular disease, its severity and the overall condition of the patient. In some embodiments the dosage may be delivered no more than once per day, e.g., no more than once per 24, 36, 48, or more hours, e.g., no more than once for every 5 or 8 days. Following treatment, the patient can be monitored for changes in his condition and for alleviation of the symptoms of the disease state. The dosage of the oligonucleotide may either be increased in the event the patient does not respond significantly to current dosage levels, or the dose may be decreased if an alleviation of the symptoms of the disease state is observed, if the disease state has been ablated, or if undesired side-effects are observed.

[0278] The effective dose can be administered in a single dose or in two or more doses, as desired or considered appropriate under the specific circumstances. If desired to facilitate repeated or frequent infusions, implantation of a delivery device, e.g., a pump, semi-permanent stent (e.g., intravenous, intraperitoneal, intracisternal or intracapsular), or reservoir may be advisable.

[0279] In some embodiments, the oligonucleotide pharmaceutical composition includes a plurality of single stranded oligonucleotide species. In another embodiment, the single stranded oligonucleotide species has sequences that are non-overlapping and non-adjacent to another species with respect to a naturally occurring target sequence (e.g., a PRC2-associated region). In another embodiment, the plurality of single stranded oligonucleotide species is specific for different PRC2-associated regions. In another embodiment, the single stranded oligonucleotide is allele specific.

[0280] In some cases, a patient is treated with a single stranded oligonucleotide in conjunction with other therapeutic modalities. For example, a patient being treated for cancer may be administered a single stranded oligonucleotide in conjunction with a chemotherapy.

[0281] Following successful treatment, it may be desirable to have the patient undergo maintenance therapy to prevent the recurrence of the disease state, wherein the compound of the invention is administered in maintenance doses, ranging from 0.0001 mg to 100 mg per kg of body weight.

[0282] The concentration of the single stranded oligonucleotide composition is an amount sufficient to be effective in treating or preventing a disorder or to regulate a physiological condition in humans. The concentration or amount of single stranded oligonucleotide administered will depend on the parameters determined for the agent and the method of administration, e.g. nasal, buccal, pulmonary. For example, nasal formulations may tend to require much lower concentrations of some ingredients in order to avoid irritation or burning of the nasal passages. It is sometimes desirable to dilute an oral formulation up to 10-100 times in order to provide a suitable nasal formulation.

[0283] Certain factors may influence the dosage required to effectively treat a subject, including but not limited to the severity of the disease or disorder, previous treatments, the general health and/or age of the subject, and other diseases present. Moreover, treatment of a subject with a therapeutically effective amount of a single stranded oligonucleotide can include a single treatment or, preferably, can include a series of treatments. It will also be appreciated that the effective dosage of a single stranded oligonucleotide used for treatment may increase or decrease over the course of a particular treatment. For example, the subject can be monitored after administering a single stranded oligonucleotide composition. Based on information from the monitoring, an additional amount of the single stranded oligonucleotide composition can be administered.

[0284] Dosing is dependent on severity and responsiveness of the disease condition to be treated, with the course of treatment lasting from several days to several months, or until a cure is effected or a diminution of disease state is achieved. Optimal dosing schedules can be calculated from measurements of target gene expression levels in the body of the patient. Persons of ordinary skill can easily determine optimum dosages, dosing methodologies and repetition rates. Optimum dosages may vary depending on the relative potency of individual compounds, and can generally be estimated based on EC50s found to be effective in in vitro and in vivo animal models. In some embodiments, the animal models include transgenic animals that express a human target gene. In another embodiment, the composition for testing includes a single stranded oligonucleotide that is complementary, at least in an internal region, to a sequence that is conserved between the target gene in the animal model and the target gene in a human.

[0285] In one embodiment, the administration of the single stranded oligonucleotide composition is parenteral, e.g. intravenous (e.g., as a bolus or as a diffusible infusion), intradermal, intraperitoneal, intramuscular, intrathecal, intraventricular, intracranial, subcutaneous, transmucosal, buccal, sublingual, endoscopic, rectal, oral, vaginal, topical, pulmonary, intranasal, urethral or ocular. Administration can be provided by the subject or by another person, e.g., a health care provider. The composition can be provided in measured doses or in a dispenser which delivers a metered dose. Selected modes of delivery are discussed in more detail below.

[0286] Kits

[0287] In certain aspects of the invention, kits are provided, comprising a container housing a composition comprising a single stranded oligonucleotide. In some embodiments, the composition is a pharmaceutical composition comprising a single stranded oligonucleotide and a pharmaceutically acceptable carrier. In some embodiments, the individual components of the pharmaceutical composition may be provided in one container. Alternatively, it may be desirable to provide the components of the pharmaceutical composition separately in two or more containers, e.g., one container for single stranded oligonucleotides, and at least another for a carrier compound. The kit may be packaged in a number of different configurations such as one or more containers in a single box. The different components can be combined, e.g., according to instructions provided with the kit. The components can be combined according to a method described herein, e.g., to prepare and administer a pharmaceutical composition. The kit can also include a delivery device.

[0288] The present invention is further illustrated by the following Examples, which in no way should be construed as further limiting. The entire contents of all of the references (including literature references, issued patents, published patent applications, and co-pending patent applications) cited throughout this application are hereby expressly incorporated by reference.

### EXAMPLES

[0289] The invention is further described in the following examples, which do not limit the scope of the invention described in the claims.

[0290] Materials and Methods

[0291] The following materials and methods were used in the Examples 1-7 set forth below.

[0292] RIP-seq

[0293] RNA immunoprecipitation was performed using 10⁷ wildtype 16.7 (Lee and Lu, 1999) and Ezh2−/− ES cells. To construct RIP-seq libraries, cell nuclei were isolated, nuclear lysates were prepared, treated with 400 U/ml DNAse, and incubated with anti-Ezh2 antibodies (Active Motif) or control IgG (Cell Signaling Technology). RNA-protein complexes were immunoprecipitated with protein A agarose beads and RNA extracted using Trizol (Invitrogen). To preserve strand information, template switching was used for the library construction. 20-150 ng RNA and Adaptor1 (5′-CTTTCCCTACACGACGCTCTTCCGATCTNNNNNN-3′; SEQ ID NO: 1277) were used for first-strand cDNA synthesis using Superscript II Reverse Transcription Kit (Invitrogen). Superscript II adds non-template CCC 3′ overhangs, which were used to hybridize to Adaptor2-GGG template-switch primer (5′-CAAGCAGAAGACGGCATACGAGCTCTTCCGATCTGGG-3′; SEQ ID NO: 1278). During 1^{st}-strand cDNA synthesis, samples were incubated with adaptor1 at 20° C. for 10 min, followed by 37° C. for 10 min and 42° C. for 45 min. Denatured template switch primer was then added and each tube incubated for 30 min at 42° C., followed by 75° C. for 15 min. Resulting cDNAs were amplified by forward (5′-AATGATACGGCGACCACCGAGATCTACACTCTTTCCCTACACGACGCTCTTCCGA TCT-3′; SEQ ID NO: 1279) and reverse (5′-CAAGCAGAAGACGGCATACGAGCTCTTCCGATCT-3′; SEQ ID NO: 1280) Illumina primers. PCR was performed by Phusion polymerase (BioRad) as follows: 98° C. for 30 s, 20-24 cycles of [98° C. 10 s, 65° C. 30 s, 72° C. 30 s], and 72° C. for 5 min. PCR products were loaded on 3% NuSieve gel for size-selection and 200-1,200 bp products were excised and extracted by QIAEX II Agarose Gel Extraction Kit (Qiagen). Minus-RT samples generally yielded no products. DNA concentrations were quantitated by PicoGreen. 5-10 ml of 2-20 nM cDNA samples were sequenced by the Sequencing Core Facility of the Dept. of Molecular Biology, MGH, on the Illumina GAII.

[0294] Bioinformatic Analysis

[0295] Except as noted below, all analyses were performed using C++ programs. Image processing and base calling were performed using the Illumina pipeline. 3′ adaptor sequences were detected by crossmatch and matches of bases were trimmed, homopolymer reads filtered, and reads matching the mitochondrial genome and ribosomal RNAs excluded from all subsequent analyses. Remaining sequences were then aligned to the mm9 mouse reference genome using shortQueryLookup (Batzoglou et al., 2002). Alignments with ≦1 error were retained. Because library construction and sequencing generate sequence from the opposite strand of the PRC2-bound RNA, in all further analysis, we treated each read as if it were reverse-complemented. To determine the correlation coefficients comparing the original a-Ezh2 RIP-seq library to its technical and biological replicates and also to RIP-seq of the Ezh2−/− control line the number of reads per gene was compared between two samples and, for each pair, the Pearson correlation was computed between the number of reads mapped to each refGene. That is, for each sample, a vector was created of counts of reads mapped to each refGene and computed the Pearson correlation between all pairs of vectors.

[0296] Locations of repetitive sequences in mm9 (RepeatMasker) were obtained from the UCSC Genome Browser database. The overlap of PRC2 transcriptome reads with these repeats was obtained by intersecting coordinates of RepeatMasker data with coordinates of read alignments. The UCSC transcriptome was used as general reference. To obtain a set of non-overlapping distinct transcribed regions, the UCSC transcriptome transcripts were sorted by start coordinate and merged overlapping transcripts on the same strand (joined UCSC transcriptome: 39,003 transcripts total). Read alignment coordinates were intersected with those of the merged UCSC transcripts to determine the number of UCSC transcripts present in the PRC2 transcriptome. Hits to the transcripts were converted to RPKM units, where the read count is 1/(n*K*M), and n is the number of alignments in the genome, K is the transcript length divided by 1,000, and M is the sequencing depth including only reads mapping to mm9 divided by 1,000,000. This normalization allows for comparisons between transcripts of differing lengths and between samples of differing sequencing depths.

[0297] To generate promoter maps, promoter regions were defined as −10,000 to +2000 bases relative to TSS (obtained from refGene catalog, UCSC Genome Browser). Read counts overlapping promoter regions were plotted, except that the limit of 10 alignments was relaxed. For chromosomal alignments read numbers were computed for all non-overlapping consecutive 100 kb windows on each chromosome. Reads were normalized such that those mapping to n locations were counted as 1/n^{th} of a read at each location. Graphs were plotted using custom scripts written in R. A list of all enriched transcripts were found by comparing the RPKM scores on each strand for all transcripts in the WT and Ezh2−/− samples. Then their coordinates were intersected with coordinates of the feature of interest. Features not in NCBI37/mm9 mouse assembly coordinates were converted to those coordinates using UCSC's LiftOver utility. The liftOver utility effectively maps one genome to another, allowing rapid identification of regions of interest between successive assemblies of the same species or between two distinct species.

[0298] RIP/qRT-PCR

[0299] Validation RIPs were performed, based on existing methods, using 5 ul of rabbit anti-mouse-Ezh2 antibodies (Active Motif) or normal rabbit IgG (Millipore). RIP was followed by quantitative, strand-specific RT-PCR using the ICYCLER IQ detection system (BioRad). Gene-specific PCR primer pairs are:

Malat-1:
SEQ ID NO: 1281
Forward 5′-GCCTTTTGTCACCTCACT-3′;
SEQ ID NO: 1282
Reverse 5′-CAAACTCACTGCAAGGTCTC-3′;
Malat1-as:
SEQ ID NO: 1283
Forward 5′-TACTGGGTCTGGATTCTCTG-3′;
SEQ ID NO: 1284
Reverse 5′-CAGTTCCGTGGTCTTTAGTG-3′;
Foxn2-as:
SEQ ID NO: 1285
Forward5′-GGCTATGCTCATGCTGTAAC;
SEQ ID NO: 1286
Reverse 5′-GTTACTGGCATCTTTCTCACA-3′;
Ly6e-as:
SEQ ID NO: 1287
Forward 5′-CCACACCGAGATTGAGATTG-3′;
SEQ ID NO: 1288
Reverse 5′-GCCAGGAGAAAGACCATTAC-3′;
Bgn-as:
SEQ ID NO: 1289
Forward 5′-TGTGAACCCTTTCCTGGA-3′;
SEQ ID NO: 1290
Reverse 5′-CTTCACAGGTCTCTAGCCA-3′;
Gtl2:
SEQ ID NO: 1291
Forward 5′-CGAGGACTTCACGCACAAC-3′;
SEQ ID NO: 1292
Reverse 5′-TTACAGTTGGAGGGTCCTGG-3′;
Gtl2-as:
SEQ ID NO: 1293
Forward 5′-CACCCTGAACATCCAACA-3′;
SEQ ID NO: 1294
Reverse 5′-CATCTGCTTTTCCTACCTGG-3′;
Hapa1-upstream:
SEQ ID NO: 1227
Forward 5′-GGTCCAAAATCGGCAGT-3′;
SEQ ID NO: 1228
Reverse 5′-GTCCTCAAATCCCTACCAGA-3′;
Htr6-downstream:
SEQ ID NO: 1229
Forward 5′-ACACGGTCGTGAAGCTAGGTA-3′;
SEQ ID NO: 1230
Reverse 5′-CAGTTGGAGTAGGCCATTCCC-3′;
Nespas/TR019501:
SEQ ID NO: 1231
Forward 5′-AGATGAGTCCAGGTGCTT-3′;
SEQ ID NO: 1232
Reverse 5′-CAAGTCCAGAGTAGCCAAC-3′;

[0300] Xist-Forward 3F5 and -Reverse 2R primers have been described (Zhao et al., 2008). For strand-specific cDNA synthesis, the reverse primer was used, qPCR carried out with SYBR green (BioRad), and threshold crossings (Ct) recorded. Each value was normalized to input RNA levels.

[0301] Northern Blot Analysis

[0302] 5 μg of poly(A+) RNA were isolated from 16.7 ES cells, separated by 0.8% agarose gel containing formaldehyde, blotted onto Hybond-XL (GE Healthcare), and hybridized to probe using Ultrahyb (Ambion) at 42° C. Probes were generated using STRIP-EZ PCR kit (Ambion) and amplified from genomic DNA with:

SEQ ID NO: 1233
Malat1-AS-F, 5′-TGGGCTATTTTTCCTTACTGG-3′;
SEQ ID NO: 1234
Malat1-AS-R, 5′-GAGTCCCTTTGCTGTGCTG-3′;
SEQ ID NO: 1235
(Gtl2) Meg3-F, 5′-GCGATAAAGGAAGACACATGC-3′;
SEQ ID NO: 1236
Meg3-R, 5′-CCACTCCTTACTGGCTGCTC-3′;
SEQ ID NO: 1237
Meg3 ds-F3, 5′- ATGAAGTCCATGGTGACAGAC-3′;
SEQ ID NO: 1238
Meg3 ds-R2, 5′-ACGCTCTCGCATACACAATG-3′;
SEQ ID NO: 1239
Rtl1-F, 5′-GTTGGGGATGAAGATGTCGT-3′;
SEQ ID NO: 1240
Rtl1-R, 5′-GAGGCACAAGGGAAAATGAC-3′;
SEQ ID NO: 1241
Nespas ds-F, 5′-TGGACTTGCTACCCAAAAGG-3′;
SEQ ID NO: 1242
Nespas ds-R, 5′-CGATGTTGCCCAGTTATCAG-3′;
SEQ ID NO: 1243
Bgn-AS-F, 5′-CAACTGACCTCATAAGCAGCAC-3′;
SEQ ID NO: 1244
Bgn-AS-R, 5′-AGGCTGCTTTCTGCTTCACA-3′;
SEQ ID NO: 1245
Htr6 up-F, 5′-ATACTGAAGTGCCCGGAGTG-3′;
SEQ ID NO: 1246
Htr6 up-R, 5′-CAGGGGACAGACATCAGTGAG-3′;

[0303] UV-Crosslink RIP

[0304] UV-crosslink IP was performed using existing methods, except that transcripts in the RNA-protein complexes were not trimmed by RNAse treatment prior to RNA isolation in order to preserve full-length RNA for RT-PCR. Mouse ES cells were UV-irradiated at 254 nm, 400 mJ/cm² (using a Stratagene STRATALINKER), cell nuclei were lysed in RSB-TRITON buffer (10 mM Tris-HCl, 100 mM NaCl, 2.5 mM MgCl₂, 35 μg/mL digitonin, 0.5% triton X-100) with disruptive sonication. Nuclear lysates were pre-cleared with salmon sperm DNA/protein agarose beads for 1 hr at 4° C. and incubated with antibodies overnight. RNA/antibody complexes were then precipitated with Protein A DYNABEADS (Invitrogen), washed first in a low-stringency buffer (1×PBS [150 mM NaCl], 0.1% SDS, 0.5% deoxycholate, 0.5% NP-40), then washed twice in a high-stringency, high-salt buffer (5×PBS [750 mM NaCl], 0.1% SDS, 0.5% deoxycholate, 0.5% NP-40), and treated with proteinase K. RNA was extracted using TRIZOL (Invitrogen) and RT-qPCR was performed as described above.

[0305] Expression and Purification of Human PRC2 Components

[0306] For expression of human PRC2 subunits, N-terminal flagged-tagged EZH2 and SUZ12 in pFastBac1 were expressed in Sf9 cells. For expression of the whole PRC2 complex, flag-tagged EZH2 was coexpressed with untagged SUZ12, EED, and RBAP48. Extracts were made by four freeze-thaw cycles in BC300 buffer (20 mM HEPES pH 7.9, 300 mM KCl, 0.2 mM EDTA, 10% glycerol, 1 mM DTT, 0.2 mM PMSF, and complete protease inhibitors (Roche)) and bound to M2 beads for 4 h and washed with BC2000 before eluting in BC300 with 0.4 mg/ml flag peptide. EZH2 and PRC2 were adjusted to 100 mM KCl and loaded onto a HiTrap Heparin FF 1 ml column and eluted with a 100-1000 mM KCl gradient. Peak fractions were concentrated using Amicon ultra 10 kDa MWCO concentrators (Millipore) and loaded onto a Superose 6 column equilibrated with BC300. Peak fractions were collected and concentrated. For SUZ12, the flag elution was concentrated and loaded onto a Superdex 200 column equilibrated with BC300.

[0307] Electrophoretic Mobility Shifting Assays (EMSA)

[0308] For RNA-EMSA, a 30 nt Hes-1 probe (˜270 bp downstream of TSS in an antisense direction) was used for gel shifts. RNA probes were radiolabeled with [γ-33p]ATP using T4 polynucleotide kinase (Ambion). Purified PRC2 proteins (1 μg) were incubated with labeled probe for 1 hr at 4 C. RNA-protein complexes were separated on a 4% non-denaturing polyacrylamide gel in 0.5×TBE at 250 V at 4° C. for 1 h. Gels were dried and exposed to Kodak BioMax film.

[0309] RNA Pulldown Assays

[0310] T7 promoter sequence was incorporated into forward primers for PCR products of RepA, Xist exon 1, and truncated Gtl2. Full-length Gtl2 was cloned into pYX-ASC and XistE1 into pEF1/V5/HisB (Invitrogen). Specific primer sequences were:

SEQ ID NO: 1247
RepA-F: TAATACGACTCACTATAGGGAGAcccatcggggccacggata
cctgtgtgtcc;
SEQ ID NO: 1248
RepA-R: taataggtgaggtttcaatgatttacatcg;
Truncated-Gtl2-F:
SEQ ID NO: 1249
TAATACGACTCACTATAGGGAGATTCTGAGACACTGACCATGTGCCCAGT
GCACC;
SEQ ID NO: 1250
Truncated-Gtl2-R: CGTCGTGGGTGGAGTCCTCGCGCTGGGCT
TCC;
SEQ ID NO: 1251
Xist E1-F: atgctctgtgtcctctatcaga;
SEQ ID NO: 1252
Xist E1-R: gaagtcagtatggagggggt;

[0311] RNAs were then transcribed using the Mega Script T7 (Ambion), purified using Trizol, and slow-cooled to facilitate secondary structure formation. For pulldown assays, 3 μg of Flag-PRC2 or Flag-GFP and 5 pmol of RNA supplemented with 20U RNAsin were incubated for 30 min on ice. 10 μl of flag beads were added and incubated on a rotating wheel at 4° C. for 1 hr. Beads were washed 3 times with 200 μl buffer containing 150 mM KCl, 25 mM Tris pH 7.4, 5 mM EDTA, 0.5 mM DTT, 0.5% NP40 and 1 mM PMSF. RNA-protein complexes were eluted from flag beads by addition of 35 μl of 0.2M-glycine pH2.5. Eluates were neutralized by addition of 1/10^{th} volume of 1M Tris pH 8.0 and analyzed by gel electrophoresis.

[0312] Knockdown Analysis and qRT-PCR

[0313] shRNA oligos were cloned into MISSION pLKO.1-puro (Sigma-Aldrich) vector and transfected into wild-type mouse ES cells by Lipofectamine 2000 (Invitrogen). After 10 days of puromycin selection, cells were collected and qRT-PCR was performed to confirm RNA knockdown. The corresponding scrambled sequence (MISSION Non-target shRNA) was used as a control (Scr). The shRNA oligos for Gtl2: (Top strand) 5′-CCG GGC AAG TGA GAG GAC ACA TAG GCT CGA GCC TAT GTG TCC TCT CAC TTG CTT TTT G-3′; SEQ ID NO: 1253 (Bottom strand) 5′-AAT TCA AAA AGC AAG TGA GAG GAC ACA TAG GCT CGA GCC TAT GTG TCC TCT CAC TTG C-3′; SEQ ID NO: 1254. qPCR primers for Gtl2 and Gtl2-as RNAs are as described above. Primers for Dlk1 RNAs: (Forward) 5′-ACG GGA AAT TCT GCG AAA TA-3′; SEQ ID NO: 1255 (Reverse) 5′-CTT TCC AGA GAA CCC AGG TG-3′; SEQ ID NO: 1256. Another Gtl2 shRNA was purchased from Open Biosystems (V2MM_{—}97929). Ezh2 levels after knockdown with this shRNA were tested by qPCR. After testing multiple clones, we concluded that Gtl2 could be knocked down in early passage clones (50-70%), but knockdown clones were difficult to maintain in culture long-term.

[0314] DNA ChIP and Real-Time PCR

[0315] ChIP was performed as described (Zhao et al., 2008). 5μl of α-Ezh2 antibodies (Active Motif 39103), normal rabbit IgG (Upstate 12-370), and α-H3K27me3 (Upstate) were used per IP. Real-time PCR for ChIP DNA was performed at the Gtl2-proximal DMR with prGtL2F/prGtL2R, at the Gtl2-distal DMR with DMR-F/DMR-R, at the Dlk1 promoter with prDLk1F/prDLk1R, and at the Gapdh promoter with prGAPDH-F/prGAPDH-R. Primer sequences are as follows:

SEQ ID NO: 1257
proximal-DMR 5′-CATTACCACAGGGACCCCATTTT;
SEQ ID NO: 1258
proximal-DMR 5′-GATACGGGGAATTTGGCATTGTT;
SEQ ID NO: 1259
prDlk1F 5′-CTGTCTGCATTTGACGGTGAAC;
SEQ ID NO: 1260
prDlk1R 5′-CTCCTCTCGCAGGTACCACAGT;
SEQ ID NO: 1261
distal-DMR-F 5′-GCCGTAAAGATGACCACA;
SEQ ID NO: 1262
distal-DMR-R 5′-GGAGAAACCCCTAAGCTGTA;
SEQ ID NO: 1263
prGAPDH-F 5′-AGCATCCCTAGACCCGTACAGT;
SEQ ID NO: 1264
prGAPDH-R 5′-GGGTTCCTATAAATACGGACTGC;
SEQ ID NO: 1265
prActin-F 5′-GCA GGC CTA GTA ACC GAG ACA;
SEQ ID NO: 1266
prActin-R 5′-AGT TTT GGC GAT GGG TGC T;

[0316] The following materials and methods were used in Examples 6-10 set forth below.

[0317] LNA Nucleofection—2×10⁶ SV40T transformed MEFs were resuspended in 100 μl of Mef nucleofector solution (Lonza). Cy3-labeled LNA molecules were added to a final concentration of 2 μM. The cells were transfected using the T-20 program. 2 ml of culture medium was added to the cells and 100 μl of this suspension was plated on one gelatinized 10 well slide per timepoint. LNA sequences were designed using Exiqon software (available at exiqon.com). Modified LNA bases were strategically introduced to maximize target affinity (Tm) while minimizing self-hybridization score. The LNA molecule sequences (from 5′ to 3′) were as follows:

SEQ ID NO: 1267
LNA-Scr, GTGTAACACGTCTATACGCCCA;
SEQ ID NO: 1268
LNA-C1, CACTGCATTTTAGCA;
SEQ ID NO: 1269
LNA-C2, AAGTCAGTATGGAG;
SEQ ID NO: 1270
LNA-B, AGGGGCTGGGGCTGG;
SEQ ID NO: 1271
LNA-E, ATAGACACACAAAGCA;
SEQ ID NO: 1272
LNA-F, AAAGCCCGCCAA;
SEQ ID NO: 1273
LNA-4978, GCTAAATGCACACAGGG;
SEQ ID NO: 1274
LNA-5205, CAGTGCAGAGGTTTTT;
SEQ ID NO: 1275
LNA-726, TGCAATAACTCACAAAACCA;
SEQ ID NO: 1276
LNA-3′, ACCCACCCATCCACCCACCC;

[0318] Real Time PCR—Total RNA was extracted after nucleofection using Trizol (Invitrogen). Reverse transcriptase reaction was performed using the Superscript II kit and real time PCR performed on cDNA samples using icycler SYBR green chemistry (Biorad).

[0319] ChIP—Cells were fixed at various time points after nucleofection in 1% formaldehyde solution. Fixation was stopped by addition of glycine to 0.125M and ChIP was performed as described earlier (28) and quantitated by qPCR.

[0320] Antibodies—The antibodies for various epitopes were purchased as follows: H3K27me3, Active Motif 39535. Ezh2, Active Motif 39639 and BD Pharmingen 612666. For Immunostaining, H3K27me3 antibodies were used at 1:100 dilution and Ezh2 antibodies (BD Pharmingen) at 1:500. Alexa-Fluor secondary antibodies were from Invitrogen. For Western blots, Ezh2 antibodies (BD Pharmingen) were used at 1:2000 dilution. Actin antibody (Sigma A2066) was used at 1:5000 dilution.

[0321] DNA FISH, RNA FISH, and Immunostaining—Cells were grown on gelatinized glass slides or cytospun. RNA FISH, DNA FISH, serial RNA-DNA FISH, immunostaining, and immunoFISH were performed based on existing methods. Xist RNA FISH was performed using nick-translated pSx9-3 probe or an Xist riboprobe cocktail. pSx9-3 was used as probe for Xist DNA FISH. For metaphase spreads, colchicine was added to cells for 1 hr. Cells were trypsinized and resuspended in 3 ml of 0.056M KCl for 30 minutes at room temperature, centrifuged and resuspended in methanol:acetic acid (3:1) fixative. After several changes of fixative, cells were dropped on a chilled slide and processed for RNA or DNA FISH.

### Example 1

### Capturing the PRC2 Transcriptome by RIP-Seq

[0322] A method of capturing a genome-wide pool of RNA bound to PRC2 was developed by combining two existing methods native RIP and RNA-seq (this method is referred to herein as “RIP-seq”). Nuclear RNAs immunoprecipitated by α-Ezh2 antibodies were isolated from mouse ES cells and an Ezh2−/− control, cDNAs created using strand-specific adaptors, and those from 200-1,200 nt were purified and subjected to Illumina sequencing.

[0323] In pilot experiments, we performed RIP on 10⁷ ES cells and included several control RIPs to assess the specificity of α-Ezh2 pulldowns. In the wildtype pulldown and its technical and biological replicates, α-Ezh2 antibodies precipitated 70-170 ng of RNA from 107 ES cells and yielded a cDNA smear of >200 nt. Treatment with RNAses eliminated products in this size range and −RT samples yielded no products, suggesting that the immunoprecipitated material was indeed RNA. There was ˜10-fold less RNA in the Ezh2−/− pulldown (˜14 ng) and when wildtype cells were immunoprecipitated by IgG (˜24 ng). A 500-fold enrichment over a mock RIP control (no cells) was also observed. In the >200 nt size range, control RIPs (null cells, IgG pulldowns, mock) were even further depleted of RNA, as these samples were dominated by adaptor and primer dimers. Adaptor/primer dimers, rRNA, mitochondrial RNA, reads with <18 nt or indeterminate nucleotides, and homopolymer runs in excess of 15 bases were computationally filtered out. From an equivalent number of cells, control RIPs were significantly depleted of reads. In wildtype libraries, 231,880-1.2 million reads remained after filtering. By contrast, only 4,888 to 73,691 reads remained in controls. The overwhelming majority of transcripts in the controls were of spurious nature (adaptor/primer dimers, homopolymers, etc.). Therefore, wildtype RIPs exhibited substantial RNA enrichment and greater degrees of RNA complexity in comparison to control RIPs.

[0324] Approximately half of all reads in the wildtype libraries was represented three times or more. Even after removing duplicates to avoid potential PCR artifacts, the wildtype library contained 301,427 distinct reads (technical and biological replicates with 98,704 and 87,128, respectively), whereas control samples yielded only 1,050 (IgG) and 17,424 (null). The wildtype libraries were highly similar among each other, with correlation coefficients (CC) of 0.71-0.90, as compared to 0.27-0.01 when compared against Ezh2−/− and IgG controls, respectively. Reads mapping to repetitive elements of >10 copies/genome accounted for <20% of total wildtype reads, with simple repeats being most common and accounting for 85.714%, whereas LINEs, SINEs, and LTRs were relatively under-represented. Because reads with ≦10 alignments have greatest representation, we hereafter focus analysis on these reads (a cutoff of ≦10 retains genes with low-copy genomic duplications).

[0325] Genome distributions were examined by plotting distinct reads as a function of chromosome position. Alignments showed that PRC2-associated RNAs occurred on every chromosome in the wildtype libraries. Alignments for IgG and Ezh2−/− controls demonstrated few and sporadic reads. Therefore, our RIP-seq produced a specific and reproducible profile for the PRC2 transcriptome. A large number of wildtype reads hits the X-chromosome, and a zoom of the X-inactivation center showed that our positive controls—Tsix, RepA, and Xist RNAs—were each represented dozens of times. The high sensitivity of RIP-seq detection was suggested by representation of RepA and Xist, which are in aggregate expressed at <10 copies/ES cell. On the other hand, no hits occurred within other noncoding RNAs of the X-inactivation center. Thus, the RIP-seq technique was both sensitive and specific.

### Example 2

### The PRC2 Transcriptome

[0326] To obtain saturating coverage, sequencing was scaled up and 31.9 million reads were obtained for the original wildtype sample and 36.4 million for its biological replicate. After removing duplicates and filtering 1,030,708 and 852,635 distinct reads of alignment ≦10 remained for each library, respectively. These reads were then combined with pilot wildtype reads for subsequent analyses (henceforth, WT library) and all analyses were performed using the Ezh2−/− library as control.

[0327] A strategy was designed based on the relative representation in the WT versus null libraries, reasoning that bona fide positives should be enriched in the WT. Genic representations were calculated using “reads per kilobase per million reads” (RPKM) as a means of normalizing for gene length and depth of sequencing, and then all 39,003 transcripts in the UCSC joined transcriptome were mapped to a scatterplot by their WT RPKM (x-axis) and their null RPKM (y-axis) values. Transcripts with zero or near-zero representation in both libraries accounted for the vast majority of datapoints [blue cloud at (0,0)]. Transcripts with nonzero x-values and a zero y-value indicated a population represented only in WT pulldowns. To determine an appropriate enrichment threshold, we performed an in silico subtraction. WT/null RPKM ratios were examined for the same calibrators. Xist/RepA scored 4.18/0, implying hundreds to thousands of representations in the WT library but none in the null. Tsix scored 10.35/3.27, Bsn pasr 0.95/0, and Kcnq1ot1 1.17/0. The negative controls scored low ratios, with Pax3-pasr at 0.11/0.26, Hey1-pasr 0.28/0, Hotair 0.25/0, Insl6 0.27/3.09, and Ccdc8 0.22/5.04. On this basis, a 3:1 enrichment ratio for RPKM(WT)/RPKM(null) and a minimum RPKM of 0.4 were called.

[0328] Transcript identification for the “PRC2 transcriptome” was based on the fact that there are ˜10-times more RNAs pulled down by EZH2 antibodies in the wildtype cell line than in the Ezh2-null line, indicating that the wildtype library is highly enriched for PRC2-associated transcripts and that no further in silico subtraction is necessary. Using this criterion, the size of the expanded PRC2 transcriptome is estimated at ˜57K RNAs.

### Example 3

### Identification of PRC2-Binding Peaks (PRC2-Associated Regions) from Appendix I

[0329] In some or any embodiments, the region of an RNA to which a protein binding partner (e.g., PRC2) binds is one of the exemplary locations on a target lncRNA to which a single stranded oligonucleotide is designed to hybridize. For example, these regions can be identified by reviewing the data in Appendix I and identifying regions that are enriched in the dataset; these regions are likely to include PRC2-binding sequences.

[0330] The sequence reads in Appendix I come directly off the Illumina GA-II genome analyzer and are in an orientation that is the reverse complement of the PRC2-binding transcript. Appendix I is a filtered subset of all of the reads after bioinformatic filtering removed adaptor/primer dimers, mitochondrial RNA, rRNA, homopolymers, reads with indeterminate nucleotides, and truncated reads (<15 nt). They are likely to represent regions best protected from endogenous nucleases during RIP and subsequent RNA purification steps described in Example 1 above (a RIP-seq method) and thus represent candidate regions of RNA that bind to PRC2 or associated proteins or complexes. From Appendix I, reads were extracted corresponding to transcripts that are enriched 3:1 in WT vs. null [RPKM(WT)/RPKM(null)≧3.0] and with a minimal RPKM value of 0.4. Regions of the PRC2-binding transcripts with an uninterrupted pile-up of reads (peaks) were identified and considered candidate PRC2 contact regions within the RNA.

[0331] The sequence reads in Appendix I were used to generate sequence coverage on the reference genome using the Broad Institute's Arachne aligner, ShortQueryLookup, which is based on making a k-mer (K=12) dictionary of the reference genome and performing a local Smith-Waterman alignment on a read's candidate locations based on matching k-mer locations in the genome. The aligner does multiple placements. The best alignment is allowed to have at most one error and alignments that differ from the best alignment's number of errors by one are also accepted. The coverage is normalized by dividing by the number of places the read aligns (e.g. if a reads aligns to four places, 0.25 is added to each of the bases in the four places).

[0332] To obtain the target Peaks, the following methodology was used. A base-level mouse (mm9) coverage file of regions where the wild-type coverage of the transcriptome is enriched at least three-fold over the coverage of the Ezh2 −/− transcriptome and has a minimum RPKM coverage of at least 0.4 serves as the starting point. The coverage is strand-specific. Next, in non-overlapping consecutive windows of 100 bps in length, peak values and their locations are determined. Peak positions are then corrected for those peaks that are on the edge of a window that are determined to be on a side of a larger peak. Those peaks are moved to the top of the larger peak. Duplicate peak locations are then removed. Peaks positions that are on a plateau are moved to the center of the plateau. The coverage is then smoothed using a Gaussian kernel, (1/sqrt(2*sigma*pi))*exp(−t̂2/(2*sigma)), where sigma=5.0. Peak widths are then determined by locating the nearest position to the peak such that the smoothed coverage is less than or equal to one-third the maximum coverage. Adjacent peaks that overlap each other are resolved by placing a boundary between them at the midpoint between the peaks. Peaks are then output into a table with the position, width, the maximum amplitude, and the sum of unsmoothed coverage underneath the width of the peak. The corresponding nucleotide sequences of the mouse Peaks in mm9 (converted to RNA by replacing T with U) appear in sequences B47,408 to B616,428 [mouse Peaks]. Mouse-to-human LiftOver of the mouse chromosome coordinates and strand of these mouse Peaks was performed in the UCSC genome browser as described herein, to generate orthologous human chromosome coordinates. This process and LiftOver chains is known in the art. When the mouse coordinates (mm9) of each mouse Peak were converted to the corresponding human (hg19) coordinates, mapping percentages of 50, 65, 75, and 95 yielded essentially identical location and length results whenever a match occurred. Consequently, the 50% mapping parameter was used.

[0333] Each corresponding human Peak RNA sequence (i.e., the nucleotide sequence of the human chromosomal coordinates and strand, converted to RNA by replacing T with U) appear in sequences B652,256 to B916,209 [human Peaks]. Table 1 displays the mouse sequences and the corresponding human sequences. These human Peaks and the human PRC2 transcriptome (i.e. human sequences of PRC2-binding transcripts) were intersected with known genes from the NCBI database to identify genes targeted by the PRC2-binding RNA (i.e. an intersecting or nearby gene).

[0334] Table 2 of International Patent Application Publication WO/2012/087983 shows the annotation of the mouse and human Peaks with the names of genes that were near or intersected with each Peak. The unique NCBI gene ID associated with the human gene (listed first) or mouse gene (listed second) appears in parentheses adjacent to the gene name. The degree of overlap between the Peak coordinates and the gene coordinates appears in square brackets. A positive number indicates the number of overlapping nucleotides between the two, and a negative number represents the size of the gap between the two (i.e. the number of nucleotides of distance between the two). For Peaks, an “F” within the square brackets indicates that the Peak coordinates fully overlap the gene coordinates. For transcripts, an “F” within the square brackets indicates that the transcript coordinates fully overlap the gene coordinates, or vice versa. The RNA transcript or Peak is “antisense” to the reference genes in the “Opposite Strand” column, while the RNA transcript or Peak is in the same “sense” orientation as the reference gene in the “Same Strand” column.

[0335] Bioinformatic analysis indicates that the average Peak is about 40-60 bases, which is an excellent size for initial design of single stranded oligonucleotides. Each of these Peaks is fully represented by the reverse-complement reads in Appendix I since it corresponds to a segment of overlapping reverse-complement reads from Appendix I. The Peaks can be found anywhere within the coding gene, and in either sense or antisense orientations. Peaks can also be found in the promoter/5′UTR regions, introns, internal exons, and 3′UTR and beyond. The analysis strongly suggests that the PRC2-interacting transcripts are not the protein-coding mRNA, but a distinct transcript or transcripts that overlap with the mRNA sequence. Many are novel RNAs not previously described.

[0336] Methods disclosed herein can be used to design a single stranded oligonucleotide that binds to target locations or segments with sufficient specificity, or are sufficiently complementary to the target RNA to give the desired effect. In some embodiments, the methods include using bioinformatics methods known in the art to identify regions of secondary structure, e.g., one, two, or more stem-loop structures, or pseudoknots, and selecting those regions to target with a single stranded oligonucleotide.

[0337] Additional target segments 5-500 nucleotides in length, or about 5 to about 100 nucleotides in length, or about 2 kb in length, comprising a stretch of at least five (5) consecutive nucleotides within the Peak, or immediately adjacent thereto, are considered to be suitable for targeting as well.

[0338] For each of the human Peaks that did not match a longer human transcript sequence, a longer 2 kb fragment of surrounding human chromosomal sequence was identified, and appears in sequences B916,626-B934,761 [larger region surrounding human Peaks].

### Example 4

### Evidence Supporting Direct Binding of RNA to PRC2 in or Around the Peak Regions

[0339] Experiments were carried out to test the idea that RNA identified using the criteria in Example 2 directly bind PRC2. In vitro biochemical analyses were performed using purified recombinant human PRC2 subunits, EED, EZH2, SUZ12, and RBAP48. The newly identified antisense RNA for Hes1 (a transcription factor in the Notch signaling pathway contains a double stem-loop structure, a motif also found in RepA. In an RNA electrophoretic mobility shift assay (EMSA), both the 28-nt RepA and 30-nt Hes1-as probes were shifted by PRC2, whereas RNAs derived from other regions of Xist (DsI, DsII) were not. Mutating the stem-loop structures reduced PRC2 binding. To determine which subunit of PRC2 binds Hes1-as, we performed EMSA using specific subunits. EZH2 strongly shifted wildtype but not mutated Hes1-as RNA, whereas neither SUZ12 nor EED shifted Hes1-as. The RNA-protein shift was always more discrete when whole PRC2 was used, suggesting that other subunits stabilize the interaction.

[0340] These results show that Hes1-as RNA directly and specifically interacts with PRC2 and Ezh2 is the RNA-binding subunit. Further evidence comes from the observation that the two of the greatest peaks within the Xist/Tsix locus localize to the Repeat A region, the 28-nt repeated motif known to directly interact with EZH2 on both the forward and reverse strands. RNA fragments derived from “Peaks” showed robust shifts with PRC2, whereas those mapping outside the “Peaks” shifted poorly. We therefore believe that many, if not all, of the identified “Peaks” of Table 2 of International Patent Application Publication WO/2012/087983 represent bona fide PRC2-interacting domains of the RNA. These results show that the Peaks, and likely adjacent regions, directly and specifically interact with PRC2 complex.

### Example 5

### In Vitro Effect of Single Stranded Oligonucleotides on Upregulation of mRNA Expression

[0341] A. ApoE

[0342] Single stranded oligonucleotides were designed to target lncRNA in order to upregulate ApoE. The oligonucleotides were less than 16 bases in length and comprised unmodified DNA and multiple locked nucleic acid modified bases, all linked by phosphorothioate bonds. Transfection and data analysis were carried out briefly as follows.

[0343] RNA was harvested from the Hep 3B cells using Promega SV 96 Total RNA Isolation system omitting the DNAse step. In separate pilot experiments, 50 ng of RNA was determined to be sufficient template for the reverse transcriptase reaction. RNA harvested from the Hep3B cells was normalized so that 50 ng of RNA was input to each reverse transcription reaction. For the few samples that were too dilute to reach this limit, the maximum input volume was added. Quantitative PCR evaluation was then completed.

[0344] A baseline level of ApoE mRNA expression was determined through quantitative PCR as outlined above. Baseline levels were also determined for mRNA of various housekeeping genes which are constitutively expressed. A “control” housekeeping gene with approximately the same level of baseline expression as ApoE mRNA was chosen for comparison purposes to ApoE.

[0345] Hep3B cells were seeded into each well of 24-well plates at a density of 25,000 cells per 500 uL and transfections were performed with Lipofectamine and the single stranded oligonucleotides. Control wells contained Lipofectamine alone. At 48 hours post-transfection, approximately 200 uL of cell culture supernatants were stored at −80 C for ELISA. At 48 hours post-transfection, RNA was harvested from the Hep 3B cells and quantitative PCR was carried out as outlined above. The percent induction of ApoE mRNA expression by each single stranded oligonucleotide was determined by normalizing mRNA levels in the presence of the single stranded oligonucleotide to the mRNA levels in the presence of control (Lipofectamine alone). This was compared side-by-side with the increase in mRNA expression of the “control” housekeeping gene.

[0346] A total of 26 oligonucleotides tested were complementary to PRC2-binding RNA sequences identified according to Example 2 above. Of these 26 oligonucleotides, 7 upregulated apoE expression in human Hep3B cells, as indicated by increased ApoE mRNA levels relative to the “control” housekeeping gene.

[0347] The above procedure was repeated using human renal proximal tubule epithelial cells (RPTEC). Of the 26 oligonucleotides complementary to PRC2-binding RNA sequences identified according to Example 2 above, 5 increased ApoE mRNA levels in renal cells, relative to the “control” housekeeping gene. Levels increased by about 1.5 to about 5-fold over baseline expression.

[0348] In addition, of 11 oligonucleotides that are complementary to Peaks associated with apoE identified according to Example 3 above, 3 upregulated apoE expression.

[0349] Single stranded oligonucleotides as short as 8 nucleobases in length were demonstrated to upregulate gene expression.

[0350] B. Nkx2-1

[0351] The experiments as described in Example 5A above were repeated for single stranded oligonucleotides designed to target lncRNA in order to upregulate Nkx2-1. A total of 13 oligonucleotides tested were complementary to a PRC2-binding RNA sequence identified according to Example 2 above. Of these 13 oligonucleotides, 3 upregulated Nkx2-1 expression as indicated by increased Nkx2-1 mRNA expression relative to baseline, although no “control” housekeeping gene could be matched with Nkx2-1 due to low levels of intrinsic expression. In addition, of 9 oligonucleotides that are complementary to Peaks associated with Nkx2-1 identified according to Example 3 above, 3 upregulated Nkx-21 expression.

[0352] C. Brca1

[0353] The experiments as described in Example 5A above were repeated for single stranded oligonucleotides designed to target lncRNA in order to upregulate Brca1. A total of 30 oligonucleotides tested were complementary to two PRC2-binding RNA sequences identified according to Example 2 above. Of these 30 oligonucleotides, 5 oligonucleotides upregulated Brca1 expression. Of these 30 oligonucleotides, 13 oligonucleotides were also complementary to Peaks associated with Brca1 identified according to Example 3 above. Of these 13 oligonucleotides complementary to Peaks, 2 oligonucleotides upregulated Brca1 expression. Levels increased by about 2 to about 3 fold over baseline expression.

[0354] D. Smad7

[0355] The experiments as described in Example 5A above were repeated for single stranded oligonucleotides designed to target lncRNA as set forth in the sequence listing in order to upregulate Smad7, with the following exception: the kidney cell line RPTEC was used instead of HepB3. A total of 28 oligonucleotides tested were complementary to sequence B18602. Of these 28 oligonucleotides, 4 upregulated Smad7 expression. In addition, of 28 oligonucleotides that are complementary to Peaks in Table 2 of International Patent Application Publication WO/2012/087983 associated with Smad7, 4 upregulated Smad7 expression.

[0356] E. SirT6

[0357] The experiments as described in Example 5A above were repeated for single stranded oligonucleotides designed to target lncRNA in order to upregulate SirT6. A total of 25 oligonucleotides tested were complementary to a PRC2-binding RNA sequence identified according to Example 2 above. Of these 25 oligonucleotides, 3 upregulated SirT6 expression. A total of 2 oligonucleotides tested were complementary to another PRC2-binding RNA sequence identified according to Example 2 above. Of these 2 oligonucleotides, 1 upregulated SirT6 expression. A total of 2 oligonucleotides tested were complementary to another PRC2-binding RNA sequence identified according to Example 2 above. Of these 2 oligonucleotides, neither upregulated SirT6 expression. Levels increased by 2 to 6 fold over baseline expression. In addition, of 6 oligonucleotides that are complementary to Peaks associated with SirT6 identified according to Example 3 above, 1 upregulated SirT6 expression.

[0358] F. SerpinF1

[0359] The experiments as described in Example 5A above were repeated for single stranded oligonucleotides designed to target lncRNA in order to upregulate SerpinF1. A total of 38 oligonucleotides tested were complementary to two PRC2-binding RNA sequences identified according to Example 2 above. Of these 38 oligonucleotides, 3 upregulated SerpinF1 expression. Levels increased by 1.2 to 2 fold over baseline expression. In addition, of 32 oligonucleotides that are complementary to Peaks associated with SerpinF1 identified according to Example 3 above, 3 upregulated SerpinF1 expression.

[0360] G. KLF1

[0361] The experiments as described in Example 5A above were repeated for single stranded oligonucleotides designed to target lncRNA as set forth in Table 2 of International Patent Application Publication WO/2012/087983 in order to upregulate KLF1. A total of 30 oligonucleotides tested were complementary to sequences B15688 and B15689 in Table 2 of International Patent Application Publication WO/2012/087983. Of these 30 oligonucleotides, 15 upregulated KLF1 expression in human Hep3B cells, as indicated by increased KLF1 mRNA levels relative to the “control” housekeeping gene. In addition, of 2 oligonucleotides that are complementary to Peaks in Table 2 of International Patent Application Publication WO/2012/087983 associated with KLF1, 1 upregulated KLF1 expression. Levels increased by 2 to 50 fold over baseline expression.

[0362] H. Rps19

[0363] The experiments as described in Example 5A above were repeated for single stranded oligonucleotides designed to target lncRNA as set forth in Table 2 of International Patent Application Publication WO/2012/087983 in order to upregulate rps19. A total of 30 oligonucleotides tested were complementary to sequences B630259 and B630260. Of these 30 oligonucleotides, 7 upregulated rps19 expression as indicated by increased rps19 mRNA expression relative to the “control” housekeeping gene. In addition, of 25 oligonucleotides that are complementary to Peaks in Table 2 of International Patent Application Publication WO/2012/087983 associated with rps19, 7 upregulated Rps19 expression. Levels increased by 1.2 to 1.6 fold over baseline expression.

[0364] I. PTEN

[0365] The experiments as described in Example 5A above were repeated for single stranded oligonucleotides designed to target lncRNA as set forth in Table 2 of International Patent Application Publication WO/2012/087983 in order to upregulate PTEN. A total of 40 oligonucleotides tested were complementary to sequences B650,560 and B650,559 in Table 2 of International Patent Application Publication WO/2012/087983. Of these 40 oligonucleotides, 18 oligonucleotides upregulated PTEN expression. Of these 40 oligonucleotides, 31 were also complementary to Peaks in Table 2 of International Patent Application Publication WO/2012/087983 associated with PTEN. Of these 31 oligonucleotides complementary to Peaks, 11 oligonucleotides upregulated PTEN expression. Levels increased by about 1.5 to about 5 fold over baseline expression.

[0366] J. EPO

[0367] The experiments as described in Example 5A above were repeated for single stranded oligonucleotides designed to target lncRNA as set forth in Table 2 of International Patent Application Publication WO/2012/087983 in order 111 to upregulate erythropoietin (EPO). A total of 13 tested oligonucleotides were complementary to sequences B932,189 or B932,190. Of these 13 oligonucleotides, 5 upregulated EPO expression. In addition, of 2 oligonucleotides that are complementary to Peaks in Table 2 of International Patent Application Publication WO/2012/087983 associated with EPO, 1 upregulated EPO expression. Levels increased by 4 fold over baseline expression.

[0368] An ELISA assay using a commercially available kit [DEP00, RnD Systems] was used according to the manufacturer's instructions to determine secreted protein present in cellular supernatant. Fold induction of protein was determined by normalizing protein levels induced by oligonucleotides to the protein levels induced by control (Lipofectamine alone). The data showed that of the 1 oligonucleotides tested that increased EPO mRNA expression, it demonstrated a corresponding EPO protein expression increase. 3 oligonucleotides complementary to sequences B14486 and B14487 (transcripts that overlap the mouse EPO gene) were tested in vivo for ability to upregulate mouse EPO expression.

[0369] In addition, two other oligos targeting downstream peak regions were tested as well. Of these, 4 oligonucleotides were complementary to Peak regions in Table 2 of International Patent Application Publication WO/2012/087983 associated with EPO. Male C57B16/J mice [6-8 wks old and 20-25 g] were administered subcutaneously a single injection of oligonucleotide, at a dose of either 10 mg/kg or 25 mg/kg in 100 μl of sterile phosphate buffered saline.

[0370] At a time point 48 hours after injection, terminal blood samples were taken via cardiac puncture and assayed for levels of EPO protein using an ELISA assay [MEP00, RnD Systems] according to the manufacturer's instructions. Of the oligos tested that were complementary to sequence B14486 or B14487 or Peaks, one demonstrated a 5-fold induction and another demonstrated a 7-fold induction of EPO protein at a dose of 25 mg/kg. Of these two oligonucleotides that induced EPO protein expression in vivo, one is within 150 bases of (and the other is within 1500 bases of) and both are on the opposite strand as the mouse Peak that is sequence B461812. This mouse Peak corresponds to the human Peak of sequence B845472.

[0371] K. BDNF

[0372] The experiments as described in Example 5A above were repeated for single stranded oligonucleotides designed to target lncRNA as set forth in Table 2 of International Patent Application Publication WO/2012/087983 in order to upregulate BDNF. A total of 21 oligonucleotides tested were complementary to sequences B620236 and B620237. Of these 21 oligonucleotides, 9 upregulated BDNF expression. A total of 2 oligonucleotides tested were complementary to sequence B130,694. Of these 2 oligonucleotides, 1 upregulated BDNF expression. Levels increased by 1.5 to 6 fold over baseline expression. In addition, of 14 oligonucleotides that are complementary to Peaks in Table 2 of International Patent Application Publication WO/2012/087983 associated with BDNF, 6 upregulated BDNF expression. Levels increased by 2 to 7 fold over baseline expression.

[0373] L. Granulin

[0374] The experiments as described in Example 5A above were repeated for single stranded oligonucleotides designed to target lncRNA as set forth in Table 2 of International Patent Application Publication WO/2012/087983 in order to upregulate Granulin. A total of 30 oligonucleotides tested were complementary to sequence B640164 and B192311. Of these 30 oligonucleotides, 6 upregulated Granulin expression as indicated by increased Granulin mRNA expression relative to the “control” housekeeping gene. In addition, of 22 oligonucleotides that are complementary to Peaks in Table 2 of International Patent Application Publication WO/2012/087983 associated with Granulin, 4 upregulated Granulin expression. Levels increased by 1.5 to 2 fold over baseline expression.

[0375] M. KLF4

[0376] A total of 30 oligonucleotides tested were complementary to sequence B624099. Of these 30 oligonucleotides, 13 upregulated KLF1 expression in human Hep3B cells, as indicated by increased KLF4 mRNA levels relative to the “control” housekeeping gene. In addition, of 20 oligonucleotides that are complementary to Peaks in Table 2 of International Patent Application Publication WO/2012/087983 associated with KLF4, 10 upregulated KLF4 expression. Levels increased by 2 to 15 fold over baseline expression.

[0377] N. Fvii (Factor VII)

[0378] The experiments as described in Example 5A above were repeated for single stranded oligonucleotides designed to target lncRNA as set forth in Table 2 of International Patent Application Publication WO/2012/087983 in order to upregulate Fvii. The oligonucleotides designed to target Fvii were about 20 bases in length and comprised modified DNA with a 2′-O-Me with full phosphorothioate linkage backbone. A total of 25 oligonucleotides tested were complementary to sequences B632564 and B632565 in Table 2 of International Patent Application Publication WO/2012/087983. Of these 25 oligonucleotides, 12 upregulated Fvii expression. Levels increased by 2- to 25 fold over baseline expression. In addition, of 25 oligonucleotides that are complementary to Peaks in Table 2 of International Patent Application Publication WO/2012/087983 associated with Fvii, 12 upregulated Fvii expression.

### Example 6

### LNA Molecules Targeting Xist Repeat C Rapidly Displace Xist RNA from Xi

[0379] Repeat C was aligned using Geneious (Geneious v5.1, Available on the internet at geneious.com) and LNA molecules complementary to two regions with a high degree of inter-repeat conservation were synthesized. The first LNA molecule showed conservation in all 14 repeats (LNA-C1) and the second in 13 of 14 (LNA-C2). LNA molecules were nucleofected separately into transformed mouse embryonic fibroblasts (MEFs), and the cells were adhered onto slides and fixed in situ at various timepoints between 0 minutes (immediately after nucleofection) and 8 hours post-nucleofection. To examine effects on Xist RNA, RNA fluorescence in situ hybridization (FISH) was performed using Xist-specific probes. (MEF cells are tetraploid due to transformation; each tetraploid cell has two Xa and two Xi). In controls transfected with scrambled LNA molecules (LNA-Scr), robust Xist clouds were seen in 80-90% of cells at all timepoints. Intriguingly, introduction of either LNA-C1 or —C2 resulted in immediate loss of Xist RNA from Xi. Even at t=0 (cells fixed immediately, within seconds to minutes, after LNA introduction), ˜10% of nuclei displayed a loosening of the Xist RNA clusters, with the clusters appearing faint and diffuse. The percentage of nuclei with full Xist clouds continued to drop during the first hour and reached a minimum at t=60 minutes (21%, n=190). These findings indicate that LNA molecules disrupted Xist binding to chromatin as soon as they were introduced. However, the loss of Xist from Xi was transient, as pinpoints of Xist RNA typical of nascent transcripts seen in undifferentiated embryonic stem (ES) cells, became visible at t=3 hr. Full recovery of Xist clouds was not seen until 8-24 hr post-nucleofection (81% at 8 hr, n=117).

[0380] The next experiment addressed whether LNA molecules had similar effects in mouse ES cells an established ex vivo model which recapitulates XCI as the cells differentiate in culture. In the undifferentiated state, wildtype female ES cells express low levels of Xist RNA, visible as pinpoint signals by RNA FISH. By day 6 of differentiation, ˜40% of cells would normally have upregulated Xist RNA. When ES cells were nucleofected with LNA-C1 on day 6, Xist displacement occurred rapidly, reaching a maximum at 1 hr and recovering by 8 hr. Thus, LNA molecules were effective in ES cells as well as in somatic cells. These results contrasted sharply with those obtained from MEFs nucleofected with siRNAs or shRNAs toward the same region of Xist. Neither siRNAs nor shRNAs led to loss of Xist at the 1, 3 or 24 hour timepoints, and partial decreases in Xist clouds occurred only at 48 hours (83%, n=84 at 1 hr; 80%, n=106 at 24 hr). Thus, LNA molecules can be used efficiently to target long nuclear ncRNAs such as Xist with extremely rapid kinetics, much more rapid than the action of siRNAs or shRNAs, in multiple cell types.

[0381] To test the specificity of the LNA molecules, human 293 cells were nucleofected with the Repeat C LNA molecules. Sequence comparison between the mouse and human Xist/XIST revealed that the region targeted by LNA-C1 is conserved in 10 of 15 nt and is conserved in 10 of 14 nt for LNA-C2. Nucleofection of scrambled LNA molecules followed by XIST RNA FISH in human cells showed two normal XIST clouds in nearly all cells (92%, n=108). Similarly, nucleofection with either LNA-C1 or LNAC-2 did not change the XIST clouds (LNA-C1, 89%, n=126; LNA-C2, 85%, n=139). Thus, mouse Repeat C LNA molecules do not affect human XIST localization, suggesting that they function in a species-specific manner. To determine whether human Repeat C could displace human XIST, we nucleofected LNA molecules complementary to the human Repeat C into 293 cells, but observed no loss of XIST clouds (91%, n=103 at 1 hr; 87%, n=95 at 3 hr and 92%, n=85 at 8 hr). This finding indicated that, although Repeat C may play a role in humans, additional human elements function in RNA localization. Whereas mouse Repeat C occurs 14 times, the human repeat is present only once.

### Example 7

### Xist RNA is Displaced without Transcript Destabilization

[0382] Several mechanisms could explain the disappearance of Xist. LNA molecules could anneal to the complementary region and target Xist for degradation. Alternatively, hybridization to LNA molecules could displace Xist RNA from Xi without affecting the transcript stability. To distinguish between these possibilities, Xist levels were quantitated relative to Gadph levels (control) by qRT-PCR at different timepoints. At 1 hr when Xist clouds were no longer visible, Xist levels remained comparable to that seen in the scrambled control. Even at 3 and 8 hr, Xist levels did not change significantly. These results showed that displacement of Xist occurred without complete RNA degradation. Thus, LNA molecules function by blocking Xist interaction with chromatin rather than altering the RNA's stability.

[0383] The rapid displacement of Xist and the slow kinetics of recovery provided the opportunity to investigate several unanswered questions regarding Xist's mechanism of localization. To ask whether reappearance of Xist on Xi is due to relocalization of displaced Xist molecules or to coating by newly synthesized RNA, we performed time-course analysis in the presence of actinomycin D (ActD), an inhibitor of RNA polymerase II. Previous studies have shown that the half-life of Xist in the cell is approximately 4-6 hr. It was reasoned that treating cells with ActD for 0-8 hr would prevent new synthesis of Xist RNA during this timeframe and that, therefore, reappearance of Xist clouds would imply relocalization of displaced RNA back onto Xi. LNA molecules were introduced into cells and then the cells were allowed to recover in medium containing ActD. In the scrambled controls, Xist clouds were clearly visible at all time points without ActD. With ActD, Xist clouds were apparent in the 1 and 3 hr timepoints and were lost by 8 hr, consistent with a 4-6 hr half-life. In LNA-C1- or LNA-C2-treated samples allowed to recover without ActD, pinpoints of Xist were visible at 3 hr and Xist clouds were restored by the 8 hr timepoint. However, with ActD, Xist clouds were never restored, neither fully nor partially. Thus, Xist recovery after LNA molecule-mediated displacement from Xi is due to new RNA synthesis and not relocalization of the displaced transcript.

### Example 8

### Xist RNA Localizes Near the X-Inactivation Center First

[0384] Taking further advantage of the rapid displacement and slow recovery, the long-standing question of whether Xist spreads in a piecemeal fashion or localizes simultaneously throughout Xi was asked. One hypothesis is that coating initiates near the Xist locus and proceeds to both ends of the chromosome through booster elements located along the X. Alternatively, coating can occur all at once through multiple X-linked seeding points which would promote local spreading. Xist localization on metaphase chromosomes was analyzed during the 3-8 hr period of recovery. In cells treated with scrambled LNA molecules, all metaphase chromosomes coated with Xist RNA showed a banded pattern similar to the heterogeneous patterns described in earlier works. By contrast, LNA-C1 treated cells gave intermediate patterns. At 1 hr, no metaphase chromosomes showed a coat of Xist RNA (0%, n=41). At 3 hr when Xist RNA could be seen as a pinpoint in interphase cells, the predominant pattern was a combination of a single bright band in the middle of the metaphase chromosome together with a small number of very faint bands elsewhere on the X (52%, n=46). This result suggested that Xist RNA initially bound locally. To determine whether the strong RNA band was localized to the Xist region, Xist RNA FISH was carried out on non-denatured nuclei and followed with denaturation and hybridization to an Xist probe. Indeed, the focal RNA band observed at the 3-hr mark colocalized with the Xist region. At 5 hr, intermediate degrees of coating and intensities could be seen (68%, n=38). At 8 hr, the predominant pattern was the whole-chromosome painting pattern typical of control cells (78%, n=38). In controls, intermediate patterns were not observed at any time. These findings argue that Xist RNA initially binds nearby, but seems to spread to the rest of Xi at the same time, within the temporal and spatial resolution of the FISH technique.

### Example 9

### Xist RNA Displacement is Accompanied by Loss of PRC2 Localization

[0385] The pattern of Polycomb repressive complex 2 (PRC2) binding to Xi has been of considerable interest, as its Ezh2 subunit catalyzes trimethylation of Histone H3 at lysine 27 (H3K27me3). Several studies have shown that PRC2 localizes to Xi in an Xist-dependent manner, as deleting Xist in ES cells precludes PRC2 recruitment during differentiation and conditionally deleting Xist in MEF cells results in loss of PRC2 on Xi. However, the kinetics with which PRC2 is recruited to and lost from X are not known. Because Xist RNA directly recruits PRC2, it was asked whether LNA molecule-mediated displacement of Xist results in immediate loss of PRC2 by immunostaining for Ezh2 in MEFs after LNA molecule delivery. Upon treatment with the Repeat C LNA molecules, Ezh2 was rapidly lost. There was nearly perfect concordance between Xist and PRC2 loss. At 1 and 3 hr, Ezh2 foci were never observed in nuclei that had lost Xist and, conversely, were always observed in nuclei with restored Xist clouds. The loss of Ezh2 on Xi was due to Ezh2 protein turnover. Transient displacement of PRC2, however, does not lead to appreciable H3K27me3 loss within the 1-8 hr timeframe. Thus, PRC2's localization onto Xi absolutely depends on Xist RNA for both initial targeting and for stable association after XCI is established, but the H3K27me3 mark is stable in the short term when Xist and PRC2 are displaced.

[0386] Given this, it was asked whether LNA molecules affected gene silencing. At 3 hr when Xist was maximally displaced, RNA FISH was performed for Xist and either Pgk1 or Hprt, two X-linked genes subject to XCI. In control-nucleofected (LNA-Scr) cells, Xist clouds were observed from Xi and nascent Pgk1 or Hprt transcripts from Xa. Nucleofection with LNA-C1 and LNA-4978 did not change the expression pattern, as two foci of Pgk1 transcripts were still seen in 79% (n=39) of controls and 80% (n=36) of LNA-C1-treated cells, and two foci of Hprt RNA were seen in 84% (n=44) of controls and 79% (n=35) of LNA-C1-treated cells. Four foci of Pgk1 or Hprt transcripts were never seen. Thus, consistent with retention of H3K27me3, silencing was not disrupted by transient loss of Xist and PRC2.

### Example 10

### A Broader Domain Around Repeat C is Required for Xist Localization

[0387] The next experiments investigated other conserved repeats within Xist. As Repeat A has already been shown to be essential for targeting PRC2, the experiments focused on Repeats B, E, and F, and found tht Xist localization was not affected by targeting any repeat individually or in combination. Conserved unique regions of Xist were also tested, including LNA-726, LNA-4978 and LNA-5205, and LNA-3′ (distal terminus of Xist). None affected Xist localization except for LNA-4978, which corresponds to a 15-nt element located 280 bp downstream of Repeat C. LNA-4978 induced effects similar to LNA-C1/C2 but differed by its slower kinetics. At 1 hr, Xist clouds were still visible but appeared faint and dispersed (78%, n=125). The number of clouds reached a minimum at 3 hr (25%, n=158). At 8 hr, Xist was visible as small pinpoints (39%, n=123). Recovery was not complete until the 24-hr timepoint. As for Repeat C LNA molecules, loss of Xist was not due to RNA turnover, as determined by qRT-PCR, and Ezh2 was displaced without affecting H3K27me3 or change in Ezh2 protein level. Therefore, Xist localization to chromatin involves a broader region encompass both Repeat C and a unique region directly downstream of the repeat.

[0388] To determine if the two motifs cooperate, LNA-4978 and LNA-C1 were nucleofected separately or together into MEFs. As expected, treating with LNA-C1 alone resulted in loss of Xist RNA clouds by 1 hr and recovery beginning at 3 hr, and treating with LNA-4978 showed loss and recovery at 3 hr and 8 hr, respectively. Treating with both LNA molecules expanded the window of Xist depletion: Loss of Xist RNA and Ezh2 was observed by 1 hr (as was the case for LNA-C1 alone) and recovery did not begin until the 8 hr timepoint (as was the case for LNA-4978 alone). Thus, the LNA molecule effects were additive, not synergistic, as the effects were not enhanced beyond the widening of the Xist-depleted time window.

### Example 11

### Ezh2 Recovery after LNA Molecule Nucleofection is Slow but Uniform Along Xi

[0389] Finally, it was asked whether Ezh2 retargeting to Xi closely follows the piecemeal relocalization of Xist RNA during the recovery phase. Because PRC2 generally binds near promoters, Ezh2 localization at X-gene promoters was analyzed by quantitative chromatin immunoprecipitation (qChIP). Although female cells have two Xs and Ezh2 epitopes pulled down by the antibody could theoretically come from either Xa or Xi, evidence indicates that the vast bulk of Ezh2 and H3K27me3 is bound to Xi. Ezh2 was indeed enriched at promoters of genes that are silenced on Xi (e.g., Xmr, Pgk1), but not at promoters of genes (e.g., Jaridlc) that escape XCI. Then, MEF cells were nucleofected with LNA-C1 and performed qChIP using anti-Ezh2 antibodies between 1 and 24 hr. At t=1 hr, Ezh2 levels decreased dramatically at all tested target gene promoters to background levels, indicating that depletion of promoter-bound Ezh2 closely followed Xist displacement along Xi. At the 3- and 8-hr points, there was a gradual, uniform increase in Ezh2 levels across all genes, with many genes appearing to have reached saturating amounts of Ezh2 by t=8 hr. On promoters with the highest levels of Ezh2 at t=0 hr, Ezh2 levels did not fully recover until 24 hr. Thus, ChIP pulldowns were expected to originate predominantly, if not nearly exclusively, from Xi. In contrast, Ezh2 levels at the Enl control, a known autosomal PRC2 target, did not change significantly. Thus, Ezh2 levels fall and rise with similar kinetics throughout Xi. The loss of Xist RNA and Ezh2 binding between 1 and 8 hrs presents a window of opportunity during which cells could be reprogrammed to achieve novel epigenetic states.

TABLE 3
Hexamers that are not seed sequences of human miRNAs

AAAAAA, AAAAAG, AAAACA, AAAAGA, AAAAGC, AAAAGG, AAAAUA, AAACAA, AAACAC, AAACAG,
AAACAU, AAACCC, AAACCU, AAACGA, AAACGC, AAACGU, AAACUA, AAACUC, AAACUU, AAAGAU,
AAAGCC, AAAGGA, AAAGGG, AAAGUC, AAAUAC, AAAUAU, AAAUCG, AAAUCU, AAAUGC, AAAUGU,
AAAUUA, AAAUUG, AACAAC, AACAAG, AACAAU, AACACA, AACACG, AACAGA, AACAGC, AACAGG,
AACAUC, AACAUG, AACCAA, AACCAC, AACCAG, AACCAU, AACCCC, AACCCG, AACCGA, AACCGC,
AACCGG, AACCUA, AACCUU, AACGAA, AACGAC, AACGAG, AACGAU, AACGCU, AACGGG, AACGGU,
AACGUA, AACGUC, AACGUG, AACGUU, AACUAU, AACUCA, AACUCC, AACUCG, AACUGA, AACUGC,
AACUGU, AACUUA, AACUUC, AACUUG, AACUUU, AAGAAA, AAGAAG, AAGAAU, AAGACG, AAGAGA,
AAGAGC, AAGAGG, AAGAGU, AAGAUU, AAGCAA, AAGCAC, AAGCAG, AAGCAU, AAGCCA, AAGCCC,
AAGCCG, AAGCCU, AAGCGA, AAGCGG, AAGCGU, AAGCUA, AAGGAA, AAGGAC, AAGGCU, AAGGGC,
AAGGGU, AAGGUU, AAGUAA, AAGUAC, AAGUAU, AAGUCC, AAGUCG, AAGUGA, AAGUGG, AAGUUA,
AAGUUU, AAUAAA, AAUAAC, AAUAAG, AAUAAU, AAUACA, AAUACC, AAUACG, AAUAGA, AAUAGC,
AAUAGG, AAUAGU, AAUAUC, AAUAUU, AAUCAA, AAUCAU, AAUCCA, AAUCCC, AAUCCG, AAUCGA,
AAUCGC, AAUCGU, AAUCUA, AAUCUG, AAUCUU, AAUGAA, AAUGAC, AAUGAG, AAUGAU, AAUGCG,
AAUGCU, AAUGGA, AAUGGU, AAUGUA, AAUGUC, AAUGUG, AAUUAA, AAUUAC, AAUUAG, AAUUCC,
AAUUCG, AAUUGA, AAUUGG, AAUUGU, AAUUUC, AAUUUG, ACAAAA, ACAAAC, ACAAAG, ACAAAU,
ACAACC, ACAACG, ACAACU, ACAAGA, ACAAGC, ACAAGU, ACAAUC, ACAAUG, ACAAUU, ACACAG,
ACACCA, ACACCC, ACACCG, ACACCU, ACACGA, ACACGC, ACACGU, ACACUC, ACACUG, ACACUU,
ACAGAA, ACAGAC, ACAGCC, ACAGCG, ACAGCU, ACAGGG, ACAGUC, ACAGUG, ACAGUU, ACAUAA,
ACAUAC, ACAUCC, ACAUCG, ACAUCU, ACAUGA, ACAUGC, ACAUGU, ACAUUG, ACAUUU, ACCAAA,
ACCAAC, ACCAAG, ACCAAU, ACCACC, ACCACG, ACCAGA, ACCAGU, ACCAUA, ACCAUG, ACCAUU,
ACCCAA, ACCCAC, ACCCCA, ACCCCG, ACCCGA, ACCCGC, ACCCUA, ACCCUC, ACCCUU, ACCGAA,
ACCGAC, ACCGAU, ACCGCA, ACCGCC, ACCGCG, ACCGCU, ACCGGA, ACCGGC, ACCGGU, ACCGUA,
ACCGUC, ACCGUG, ACCGUU, ACCUAA, ACCUAC, ACCUAG, ACCUAU, ACCUCA, ACCUCC, ACCUCG,
ACCUCU, ACCUGA, ACCUGC, ACCUGU, ACCUUA, ACCUUC, ACCUUU, ACGAAA, ACGAAC, ACGAAG,
ACGAAU, ACGACA, ACGACC, ACGACG, ACGACU, ACGAGA, ACGAGC, ACGAGG, ACGAGU, ACGAUA,
ACGAUC, ACGAUG, ACGAUU, ACGCAA, ACGCAG, ACGCAU, ACGCCC, ACGCCG, ACGCCU, ACGCGA,
ACGCGG, ACGCGU, ACGCUA, ACGCUG, ACGCUU, ACGGAA, ACGGAC, ACGGAG, ACGGAU, ACGGCC,
ACGGCG, ACGGCU, ACGGGC, ACGGGG, ACGGGU, ACGGUA, ACGGUC, ACGGUG, ACGGUU, ACGUAA,
ACGUAC, ACGUAU, ACGUCC, ACGUCG, ACGUCU, ACGUGA, ACGUGC, ACGUGG, ACGUGU, ACGUUA,
ACGUUC, ACGUUG, ACGUUU, ACUAAA, ACUAAG, ACUAAU, ACUACA, ACUACC, ACUACG, ACUACU,
ACUAGG, ACUAUC, ACUAUG, ACUAUU, ACUCAU, ACUCCC, ACUCCG, ACUCCU, ACUCGA, ACUCGC,
ACUCGG, ACUCUC, ACUCUU, ACUGAG, ACUGAU, ACUGCC, ACUGCG, ACUGCU, ACUGGG, ACUGGU,
ACUGUC, ACUUAA, ACUUAC, ACUUAU, ACUUCA, ACUUCC, ACUUCG, ACUUCU, ACUUGA, ACUUGC,
ACUUGU, ACUUUA, ACUUUC, ACUUUG, AGAAAA, AGAAAC, AGAAAG, AGAACC, AGAACG, AGAACU,
AGAAGC, AGAAGU, AGAAUA, AGAAUC, AGAAUG, AGAAUU, AGACAA, AGACAC, AGACAU, AGACCA,
AGACCC, AGACCG, AGACCU, AGACGA, AGACGC, AGACGU, AGACUA, AGACUC, AGACUU, AGAGAC,
AGAGAG, AGAGAU, AGAGCC, AGAGCG, AGAGCU, AGAGGC, AGAGGG, AGAGGU, AGAGUA, AGAGUU,
AGAUAC, AGAUAG, AGAUAU, AGAUCC, AGAUCG, AGAUCU, AGAUGA, AGAUGC, AGAUGG, AGAUUA,
AGAUUC, AGAUUG, AGAUUU, AGCAAC, AGCACA, AGCACG, AGCACU, AGCAGA, AGCAUA, AGCAUC,
AGCAUG, AGCCAA, AGCCAU, AGCCCA, AGCCGA, AGCCGC, AGCCGG, AGCCGU, AGCCUA, AGCCUC,
AGCGAA, AGCGAG, AGCGAU, AGCGCA, AGCGCC, AGCGCG, AGCGCU, AGCGGA, AGCGGC, AGCGGU,
AGCGUA, AGCGUC, AGCGUG, AGCGUU, AGCUAA, AGCUAC, AGCUAG, AGCUAU, AGCUCA, AGCUCC,
AGCUCG, AGCUCU, AGCUGA, AGCUGG, AGCUGU, AGCUUC, AGCUUU, AGGAAU, AGGACC, AGGACG,
AGGAGA, AGGAGU, AGGAUA, AGGCAA, AGGCAU, AGGCCG, AGGCGA, AGGCGC, AGGCGG, AGGCUA,
AGGCUC, AGGCUU, AGGGAC, AGGGAU, AGGGGA, AGGGGU, AGGGUA, AGGGUG, AGGUAA,
AGGUAC, AGGUCA, AGGUCC, AGGUCU, AGGUGA, AGGUGC, AGGUGG, AGGUGU, AGGUUC,
AGGUUG, AGUAAA, AGUAAG, AGUAAU, AGUACA, AGUACG, AGUAGC, AGUAGG, AGUAUA, AGUAUC,
AGUAUG, AGUAUU, AGUCAA, AGUCAC, AGUCAG, AGUCAU, AGUCCA, AGUCCG, AGUCCU, AGUCGA,
AGUCGC, AGUCGG, AGUCGU, AGUCUA, AGUCUC, AGUCUG, AGUCUU, AGUGAA, AGUGAC, AGUGCG,
AGUGGG, AGUGUC, AGUUAA, AGUUAC, AGUUAG, AGUUCC, AGUUCG, AGUUGA, AGUUGC,
AGUUGU, AGUUUA, AGUUUC, AGUUUG, AGUUUU, AUAAAC, AUAAAU, AUAACA, AUAACC, AUAACG,
AUAACU, AUAAGA, AUAAGC, AUAAGG, AUAAGU, AUAAUC, AUAAUG, AUAAUU, AUACAC, AUACAG,
AUACAU, AUACCA, AUACCC, AUACCG, AUACGA, AUACGC, AUACGG, AUACGU, AUACUA, AUACUC,
AUACUG, AUACUU, AUAGAA, AUAGAC, AUAGAU, AUAGCA, AUAGCG, AUAGCU, AUAGGA, AUAGGU,
AUAGUA, AUAGUC, AUAGUG, AUAGUU, AUAUAC, AUAUAG, AUAUCC, AUAUCG, AUAUCU, AUAUGA,
AUAUGC, AUAUGG, AUAUGU, AUAUUC, AUAUUG, AUAUUU, AUCAAA, AUCAAC, AUCAAG, AUCAAU,
AUCACA, AUCACC, AUCACG, AUCAGC, AUCAGG, AUCCAA, AUCCAU, AUCCCC, AUCCCG, AUCCGA,
AUCCGC, AUCCGG, AUCCUA, AUCCUC, AUCCUG, AUCGAA, AUCGAC, AUCGAG, AUCGAU, AUCGCA,
AUCGCC, AUCGCG, AUCGCU, AUCGGC, AUCGGG, AUCGGU, AUCGUC, AUCGUG, AUCGUU, AUCUAA,
AUCUAC, AUCUAG, AUCUAU, AUCUCC, AUCUCG, AUCUGU, AUCUUG, AUCUUU, AUGAAA, AUGAAC,
AUGAAG, AUGAAU, AUGACC, AUGACU, AUGAGG, AUGAGU, AUGAUA, AUGAUC, AUGAUU, AUGCAA,
AUGCAG, AUGCCA, AUGCCC, AUGCCG, AUGCGA, AUGCGG, AUGCGU, AUGCUC, AUGCUU, AUGGAC,
AUGGCC, AUGGGA, AUGGGC, AUGGGU, AUGGUC, AUGGUG, AUGUAC, AUGUAU, AUGUCA,
AUGUCC, AUGUCG, AUGUGU, AUGUUA, AUGUUC, AUUAAA, AUUAAC, AUUAAG, AUUAAU, AUUACA,
AUUACC, AUUACG, AUUACU, AUUAGA, AUUAGC, AUUAGG, AUUAGU, AUUAUA, AUUAUC, AUUAUG,
AUUCAC, AUUCCA, AUUCCG, AUUCCU, AUUCGA, AUUCGC, AUUCGG, AUUCGU, AUUCUA, AUUCUC,
AUUCUU, AUUGAA, AUUGAC, AUUGAU, AUUGCC, AUUGCG, AUUGCU, AUUGGA, AUUGGC,
AUUGGG, AUUGGU, AUUGUA, AUUGUC, AUUGUG, AUUGUU, AUUUAA, AUUUAG, AUUUAU,
AUUUCC, AUUUCG, AUUUCU, AUUUGA, AUUUGC, AUUUGU, AUUUUA, AUUUUC, AUUUUG,
AUUUUU, CAAAAG, CAAACA, CAAACC, CAAACG, CAAACU, CAAAGA, CAAAGG, CAAAUA, CAAAUU,
CAACAC, CAACAU, CAACCA, CAACCC, CAACCG, CAACGA, CAACGC, CAACGG, CAACGU, CAACUA,
CAACUC, CAACUG, CAACUU, CAAGAA, CAAGAC, CAAGAU, CAAGCA, CAAGCC, CAAGCG, CAAGCU,
CAAGGA, CAAGGG, CAAGUC, CAAGUG, CAAGUU, CAAUAA, CAAUAC, CAAUAG, CAAUCC, CAAUCG,
CAAUCU, CAAUGA, CAAUGC, CAAUGG, CAAUGU, CAAUUC, CAAUUG, CAAUUU, CACAAU, CACACA,
CACACG, CACACU, CACAGA, CACAGC, CACAGG, CACAUA, CACAUC, CACAUU, CACCAA, CACCAC,
CACCAU, CACCCA, CACCCC, CACCCG, CACCGA, CACCGC, CACCGG, CACCGU, CACCUA, CACCUU,
CACGAA, CACGAC, CACGAG, CACGAU, CACGCA, CACGCC, CACGCU, CACGGA, CACGGC, CACGGG,
CACGGU, CACGUA, CACGUC, CACGUG, CACGUU, CACUAA, CACUAG, CACUAU, CACUCA, CACUCG,
CACUGA, CACUGC, CACUGG, CACUUA, CACUUC, CACUUU, CAGAAA, CAGAAG, CAGAAU, CAGACC,
CAGACG, CAGAGC, CAGAUA, CAGAUC, CAGCCG, CAGCCU, CAGCGA, CAGCGC, CAGCGG, CAGCGU,
CAGCUC, CAGCUU, CAGGAU, CAGGGG, CAGGGU, CAGGUA, CAGGUC, CAGGUU, CAGUAC, CAGUCG,
CAGUUG, CAUAAA, CAUAAC, CAUAAG, CAUAAU, CAUACA, CAUACC, CAUACG, CAUACU, CAUAGA,
CAUAGG, CAUAGU, CAUAUA, CAUAUC, CAUAUG, CAUCAA, CAUCAC, CAUCAG, CAUCAU, CAUCCA,
CAUCCC, CAUCCG, CAUCGA, CAUCGC, CAUCGG, CAUCGU, CAUCUA, CAUCUC, CAUCUG, CAUCUU,
CAUGAA, CAUGAC, CAUGAG, CAUGAU, CAUGCA, CAUGCC, CAUGCG, CAUGCU, CAUGGC, CAUGGG,
CAUGGU, CAUGUA, CAUGUC, CAUGUU, CAUUAA, CAUUAC, CAUUAG, CAUUCA, CAUUCC, CAUUCG,
CAUUCU, CAUUGA, CAUUGG, CAUUUC, CAUUUG, CAUUUU, CCAAAA, CCAAAC, CCAAAG, CCAAAU,
CCAACA, CCAACC, CCAACG, CCAACU, CCAAGA, CCAAGC, CCAAGG, CCAAUC, CCAAUG, CCAAUU,
CCACAA, CCACAC, CCACAG, CCACAU, CCACCA, CCACCC, CCACCG, CCACCU, CCACGA, CCACGC,
CCACGG, CCACGU, CCACUA, CCACUC, CCACUU, CCAGAA, CCAGAC, CCAGAG, CCAGCC, CCAGGU,
CCAGUC, CCAGUU, CCAUAA, CCAUAC, CCAUAG, CCAUAU, CCAUCA, CCAUCC, CCAUCU, CCAUGA,
CCAUGC, CCAUGG, CCAUUC, CCAUUG, CCAUUU, CCCAAC, CCCAAG, CCCAAU, CCCACA, CCCAGA,
CCCAGC, CCCAGU, CCCAUA, CCCAUC, CCCAUG, CCCAUU, CCCCAA, CCCCAG, CCCCAU, CCCCCC,
CCCCCG, CCCCCU, CCCCGA, CCCCGC, CCCCGU, CCCCUA, CCCCUC, CCCGAA, CCCGAC, CCCGAU,
CCCGCA, CCCGCU, CCCGGA, CCCGGC, CCCGUA, CCCGUG, CCCGUU, CCCUAA, CCCUAG, CCCUCA,
CCCUCU, CCCUGC, CCCUUA, CCCUUC, CCCUUU, CCGAAA, CCGAAC, CCGAAU, CCGACA, CCGACC,
CCGACG, CCGACU, CCGAGA, CCGAGG, CCGAGU, CCGAUA, CCGAUC, CCGAUG, CCGAUU, CCGCAA,
CCGCAC, CCGCAG, CCGCAU, CCGCCA, CCGCCC, CCGCCG, CCGCCU, CCGCGA, CCGCGC, CCGCGG,
CCGCGU, CCGCUA, CCGCUC, CCGCUG, CCGCUU, CCGGAA, CCGGAU, CCGGCA, CCGGCC, CCGGCG,
CCGGCU, CCGGGA, CCGGGC, CCGGGG, CCGGGU, CCGGUA, CCGGUC, CCGGUG, CCGUAA, CCGUAG,
CCGUAU, CCGUCA, CCGUCC, CCGUCG, CCGUGA, CCGUGU, CCGUUA, CCGUUC, CCGUUG, CCGUUU,
CCUAAC, CCUAAG, CCUAAU, CCUACA, CCUACC, CCUACG, CCUACU, CCUAGA, CCUAGC, CCUAGG,
CCUAGU, CCUAUA, CCUAUC, CCUAUG, CCUAUU, CCUCAA, CCUCAC, CCUCAG, CCUCAU, CCUCCA,
CCUCCC, CCUCCG, CCUCGA, CCUCGC, CCUCGG, CCUCGU, CCUCUA, CCUCUG, CCUGAC, CCUGAU,
CCUGCA, CCUGGG, CCUGGU, CCUGUU, CCUUAA, CCUUAC, CCUUAG, CCUUAU, CCUUCG, CCUUGA,
CCUUGU, CCUUUA, CCUUUC, CCUUUU, CGAAAA, CGAAAC, CGAAAG, CGAAAU, CGAACA, CGAACC,
CGAACG, CGAACU, CGAAGA, CGAAGC, CGAAGG, CGAAGU, CGAAUA, CGAAUC, CGAAUG, CGAAUU,
CGACAA, CGACAC, CGACAU, CGACCA, CGACCU, CGACGA, CGACGC, CGACGG, CGACGU, CGACUA,
CGACUG, CGACUU, CGAGAA, CGAGAC, CGAGAG, CGAGAU, CGAGCA, CGAGCC, CGAGCG, CGAGCU,
CGAGGC, CGAGGG, CGAGGU, CGAGUA, CGAGUC, CGAGUG, CGAGUU, CGAUAA, CGAUAC, CGAUAG,
CGAUAU, CGAUCA, CGAUCC, CGAUCG, CGAUCU, CGAUGA, CGAUGC, CGAUGG, CGAUGU, CGAUUA,
CGAUUC, CGAUUG, CGAUUU, CGCAAA, CGCAAC, CGCAAG, CGCAAU, CGCACA, CGCACC, CGCACG,
CGCAGA, CGCAGC, CGCAGG, CGCAGU, CGCAUA, CGCAUC, CGCAUG, CGCAUU, CGCCAA, CGCCAC,
CGCCAG, CGCCAU, CGCCCA, CGCCCC, CGCCCG, CGCCGA, CGCCGC, CGCCGG, CGCCGU, CGCCUA,
CGCCUG, CGCCUU, CGCGAA, CGCGAC, CGCGAG, CGCGAU, CGCGCA, CGCGCC, CGCGCG, CGCGCU,
CGCGGA, CGCGGC, CGCGGG, CGCGGU, CGCGUA, CGCGUC, CGCGUG, CGCGUU, CGCUAA, CGCUAC,
CGCUAG, CGCUAU, CGCUCA, CGCUCC, CGCUCG, CGCUCU, CGCUGA, CGCUGC, CGCUGG, CGCUGU,
CGCUUA, CGCUUC, CGCUUG, CGGAAA, CGGAAC, CGGAAG, CGGACA, CGGACC, CGGACG, CGGACU,
CGGAGC, CGGAGG, CGGAGU, CGGAUA, CGGAUU, CGGCAA, CGGCAC, CGGCAG, CGGCCA, CGGCCC,
CGGCCG, CGGCGC, CGGCGG, CGGCGU, CGGCUA, CGGCUC, CGGCUG, CGGCUU, CGGGAA, CGGGAC,
CGGGAG, CGGGAU, CGGGCA, CGGGCC, CGGGCG, CGGGCU, CGGGGU, CGGGUA, CGGGUC, CGGGUG,
CGGUAA, CGGUAC, CGGUAG, CGGUAU, CGGUCA, CGGUCG, CGGUCU, CGGUGA, CGGUGG, CGGUGU,
CGGUUA, CGGUUC, CGGUUG, CGGUUU, CGUAAA, CGUAAC, CGUAAG, CGUAAU, CGUACA, CGUACG,
CGUACU, CGUAGA, CGUAGC, CGUAGG, CGUAGU, CGUAUA, CGUAUC, CGUAUG, CGUAUU, CGUCAA,
CGUCAC, CGUCAG, CGUCAU, CGUCCA, CGUCCC, CGUCCG, CGUCCU, CGUCGA, CGUCGG, CGUCGU,
CGUCUA, CGUCUC, CGUCUG, CGUCUU, CGUGAA, CGUGAC, CGUGAG, CGUGAU, CGUGCC, CGUGCG,
CGUGCU, CGUGGA, CGUGGG, CGUGGU, CGUGUA, CGUGUG, CGUUAA, CGUUAC, CGUUAG,
CGUUAU, CGUUCA, CGUUCC, CGUUCG, CGUUCU, CGUUGA, CGUUGC, CGUUGU, CGUUUA, CGUUUC,
CGUUUU, CUAAAA, CUAAAC, CUAAAU, CUAACA, CUAACC, CUAACG, CUAACU, CUAAGA, CUAAGC,
CUAAGU, CUAAUA, CUAAUC, CUAAUG, CUACAC, CUACAU, CUACCA, CUACCC, CUACCG, CUACCU,
CUACGA, CUACGC, CUACGG, CUACGU, CUACUA, CUACUC, CUACUG, CUAGAA, CUAGAG, CUAGAU,
CUAGCA, CUAGCC, CUAGCG, CUAGCU, CUAGGA, CUAGGG, CUAGGU, CUAGUG, CUAGUU, CUAUAA,
CUAUAG, CUAUAU, CUAUCA, CUAUCC, CUAUCG, CUAUCU, CUAUGA, CUAUGC, CUAUGG, CUAUGU,
CUAUUA, CUAUUG, CUCAAC, CUCAAG, CUCAAU, CUCACC, CUCACG, CUCAGC, CUCAUA, CUCAUC,
CUCAUG, CUCAUU, CUCCAC, CUCCCC, CUCCCG, CUCCGA, CUCCGC, CUCCGG, CUCCUA, CUCCUC,
CUCCUU, CUCGAA, CUCGAC, CUCGAG, CUCGAU, CUCGCA, CUCGCC, CUCGCG, CUCGGG, CUCGGU,
CUCGUA, CUCGUC, CUCGUG, CUCGUU, CUCUAA, CUCUAC, CUCUAU, CUCUCA, CUCUCC, CUCUCU,
CUCUGC, CUCUGU, CUCUUA, CUCUUG, CUGAAG, CUGACC, CUGACG, CUGAGC, CUGAUA, CUGAUC,
CUGCCG, CUGCCU, CUGCGA, CUGCUA, CUGCUU, CUGGAG, CUGGAU, CUGGCG, CUGGGU, CUGUAC,
CUGUCA, CUGUCC, CUGUCG, CUGUGG, CUGUGU, CUGUUA, CUGUUU, CUUAAC, CUUAAG, CUUAAU,
CUUACC, CUUACG, CUUAGA, CUUAGC, CUUAGG, CUUAGU, CUUAUA, CUUAUC, CUUAUG, CUUAUU,
CUUCAG, CUUCAU, CUUCCA, CUUCCC, CUUCCG, CUUCCU, CUUCGA, CUUCGC, CUUCGG, CUUCGU,
CUUCUA, CUUGAC, CUUGAG, CUUGAU, CUUGCA, CUUGCC, CUUGCG, CUUGCU, CUUGGC, CUUGGU,
CUUGUU, CUUUAC, CUUUAG, CUUUAU, CUUUCA, CUUUCG, CUUUCU, CUUUGA, CUUUGC, CUUUGU,
CUUUUA, CUUUUC, CUUUUG, CUUUUU, GAAAAA, GAAAAG, GAAAAU, GAAACC, GAAACG, GAAAGA,
GAAAGC, GAAAGU, GAAAUA, GAAAUC, GAAAUG, GAAAUU, GAACAA, GAACAC, GAACAG, GAACAU,
GAACCA, GAACCC, GAACCG, GAACCU, GAACGA, GAACGC, GAACGG, GAACGU, GAACUA, GAACUG,
GAACUU, GAAGAC, GAAGAG, GAAGCA, GAAGCG, GAAGCU, GAAGUC, GAAUAA, GAAUAC, GAAUAG,
GAAUAU, GAAUCC, GAAUCG, GAAUCU, GAAUGA, GAAUGC, GAAUGU, GAAUUA, GAAUUC, GAAUUU,
GACAAA, GACAAG, GACAAU, GACACC, GACAGA, GACAGG, GACAUA, GACAUG, GACAUU, GACCAA,
GACCAC, GACCAG, GACCCA, GACCCC, GACCCG, GACCGC, GACCGG, GACCGU, GACCUA, GACCUC,
GACCUU, GACGAA, GACGAC, GACGAG, GACGAU, GACGCA, GACGCC, GACGCG, GACGCU, GACGGA,
GACGGC, GACGGG, GACGGU, GACGUA, GACGUC, GACGUG, GACGUU, GACUAA, GACUAC, GACUAG,
GACUAU, GACUCA, GACUCC, GACUCG, GACUGG, GACUGU, GACUUA, GACUUG, GACUUU, GAGAAU,
GAGAGA, GAGAGC, GAGAGG, GAGAUA, GAGAUC, GAGCAA, GAGCAU, GAGCCA, GAGCGA, GAGCGG,
GAGCGU, GAGGGU, GAGGUC, GAGGUG, GAGUAA, GAGUAG, GAGUCC, GAGUUC, GAGUUU,
GAUAAA, GAUAAC, GAUAAG, GAUAAU, GAUACA, GAUACC, GAUACG, GAUACU, GAUAGA, GAUAGC,
GAUAGG, GAUAGU, GAUAUA, GAUCAA, GAUCAC, GAUCAU, GAUCCA, GAUCCC, GAUCCU, GAUCGC,
GAUCGG, GAUCGU, GAUCUA, GAUCUG, GAUCUU, GAUGAA, GAUGAC, GAUGAG, GAUGCA, GAUGCC,
GAUGCG, GAUGCU, GAUGGC, GAUGGG, GAUGGU, GAUGUG, GAUGUU, GAUUAA, GAUUAC,
GAUUAG, GAUUAU, GAUUCA, GAUUCG, GAUUCU, GAUUGA, GAUUGC, GAUUUA, GAUUUC,
GAUUUG, GAUUUU, GCAAAC, GCAAAG, GCAAAU, GCAACA, GCAACC, GCAAGC, GCAAGU, GCAAUA,
GCAAUC, GCAAUG, GCAAUU, GCACAA, GCACAC, GCACAG, GCACCC, GCACCG, GCACCU, GCACGA,
GCACGC, GCACGU, GCACUA, GCACUC, GCACUG, GCACUU, GCAGAU, GCAGCC, GCAGCG, GCAGGC,
GCAGUA, GCAGUC, GCAGUG, GCAGUU, GCAUAA, GCAUAG, GCAUAU, GCAUCG, GCAUCU, GCAUGA,
GCAUGC, GCAUGG, GCAUGU, GCAUUA, GCAUUC, GCAUUG, GCAUUU, GCCAAA, GCCAAC, GCCAAU,
GCCACA, GCCACC, GCCACG, GCCAGA, GCCAGU, GCCAUA, GCCAUC, GCCAUG, GCCAUU, GCCCAA,
GCCCAC, GCCCAG, GCCCCG, GCCCGA, GCCCGG, GCCCGU, GCCGAA, GCCGAC, GCCGAG, GCCGAU,
GCCGCA, GCCGCU, GCCGGA, GCCGGC, GCCGGG, GCCGGU, GCCGUA, GCCGUC, GCCGUG, GCCGUU,
GCCUAA, GCCUAU, GCCUCA, GCCUCC, GCCUCG, GCCUGA, GCCUUA, GCCUUU, GCGAAA, GCGAAC,
GCGAAG, GCGAAU, GCGACC, GCGACG, GCGACU, GCGAGA, GCGAGC, GCGAGG, GCGAGU, GCGAUA,
GCGAUC, GCGAUG, GCGAUU, GCGCAA, GCGCAC, GCGCAG, GCGCAU, GCGCCA, GCGCCC, GCGCCU,
GCGCGA, GCGCGU, GCGCUA, GCGCUC, GCGCUG, GCGCUU, GCGGAA, GCGGAC, GCGGAU, GCGGCA,
GCGGCC, GCGGCU, GCGGGA, GCGGUA, GCGGUC, GCGGUU, GCGUAA, GCGUAC, GCGUAG, GCGUAU,
GCGUCA, GCGUCC, GCGUCG, GCGUCU, GCGUGA, GCGUGC, GCGUGG, GCGUGU, GCGUUA, GCGUUC,
GCGUUG, GCGUUU, GCUAAA, GCUAAC, GCUAAG, GCUAAU, GCUACC, GCUACG, GCUACU, GCUAGA,
GCUAGG, GCUAGU, GCUAUA, GCUAUC, GCUAUU, GCUCAA, GCUCAC, GCUCAG, GCUCAU, GCUCCA,
GCUCCC, GCUCCG, GCUCGA, GCUCGC, GCUCGU, GCUCUA, GCUCUC, GCUCUU, GCUGAA, GCUGAC,
GCUGAU, GCUGCA, GCUGCC, GCUGCG, GCUGCU, GCUGUG, GCUGUU, GCUUAC, GCUUAG, GCUUAU,
GCUUCA, GCUUCG, GCUUGA, GCUUGG, GCUUGU, GCUUUA, GCUUUG, GGAAAG, GGAACA, GGAACC,
GGAACG, GGAACU, GGAAGU, GGAAUA, GGAAUC, GGAAUU, GGACAA, GGACAC, GGACAG, GGACAU,
GGACCG, GGACGA, GGACGC, GGACGU, GGACUA, GGACUC, GGACUU, GGAGAC, GGAGCA, GGAGCG,
GGAGGG, GGAGUA, GGAUAA, GGAUAC, GGAUCA, GGAUCC, GGAUCG, GGAUCU, GGAUGC, GGAUUA,
GGAUUG, GGCAAU, GGCACA, GGCACU, GGCAGA, GGCAUA, GGCAUC, GGCCAC, GGCCAG, GGCCCC,
GGCCGA, GGCCGC, GGCCGU, GGCCUA, GGCCUG, GGCCUU, GGCGAA, GGCGAG, GGCGAU, GGCGCA,
GGCGCU, GGCGGU, GGCGUA, GGCGUC, GGCGUG, GGCGUU, GGCUAA, GGCUAC, GGCUAG, GGCUAU,
GGCUCC, GGCUCG, GGCUGA, GGCUUA, GGCUUC, GGCUUG, GGGAAU, GGGACA, GGGAGA, GGGAGU,
GGGAUA, GGGAUU, GGGCAA, GGGCAC, GGGCAG, GGGCCG, GGGCGG, GGGGCC, GGGGGG,
GGGGGU, GGGGUA, GGGUAC, GGGUAU, GGGUCA, GGGUCC, GGGUCG, GGGUGA, GGGUGC,
GGGUUA, GGGUUG, GGUAAA, GGUAAC, GGUAAG, GGUAAU, GGUACA, GGUACC, GGUACG,
GGUACU, GGUAGC, GGUAGG, GGUAGU, GGUAUA, GGUAUC, GGUAUG, GGUCAA, GGUCAC,
GGUCAG, GGUCAU, GGUCCA, GGUCCG, GGUCCU, GGUCGA, GGUCGC, GGUCGG, GGUCGU, GGUCUC,
GGUCUU, GGUGAA, GGUGAC, GGUGAU, GGUGCA, GGUGCC, GGUGGC, GGUGUA, GGUGUC,
GGUUAA, GGUUAG, GGUUAU, GGUUCA, GGUUCC, GGUUCG, GGUUGC, GGUUUC, GGUUUU,
GUAAAA, GUAAAG, GUAAAU, GUAACC, GUAACG, GUAACU, GUAAGA, GUAAGC, GUAAGG, GUAAGU,
GUAAUA, GUAAUC, GUAAUG, GUAAUU, GUACAA, GUACAC, GUACAG, GUACAU, GUACCA, GUACCC,
GUACCG, GUACCU, GUACGA, GUACGC, GUACGG, GUACGU, GUACUA, GUACUC, GUACUG, GUACUU,
GUAGAA, GUAGAC, GUAGCA, GUAGCC, GUAGCG, GUAGCU, GUAGGA, GUAGGC, GUAGGG,
GUAGGU, GUAGUA, GUAGUC, GUAUAA, GUAUAC, GUAUAG, GUAUAU, GUAUCA, GUAUCG,
GUAUCU, GUAUGA, GUAUGC, GUAUGG, GUAUUA, GUAUUG, GUAUUU, GUCAAA, GUCAAG,
GUCAAU, GUCACA, GUCACC, GUCACG, GUCAGA, GUCAGC, GUCAGG, GUCAUA, GUCAUC, GUCAUG,
GUCCAA, GUCCAC, GUCCAU, GUCCCC, GUCCCU, GUCCGA, GUCCGC, GUCCGG, GUCCGU, GUCCUA,
GUCCUG, GUCCUU, GUCGAA, GUCGAC, GUCGAG, GUCGAU, GUCGCA, GUCGCC, GUCGCG, GUCGCU,
GUCGGA, GUCGGC, GUCGGG, GUCGGU, GUCGUA, GUCGUC, GUCGUU, GUCUAA, GUCUAG, GUCUCA,
GUCUCC, GUCUCG, GUCUGA, GUCUGG, GUCUGU, GUCUUC, GUCUUU, GUGAAA, GUGAAC, GUGAAG,
GUGACC, GUGACG, GUGAGA, GUGAGC, GUGAGU, GUGAUC, GUGAUG, GUGAUU, GUGCAC,
GUGCAU, GUGCCC, GUGCCG, GUGCGA, GUGCGG, GUGCGU, GUGCUA, GUGCUC, GUGCUG,
GUGGAG, GUGGCG, GUGGCU, GUGGGU, GUGGUC, GUGGUG, GUGUAA, GUGUAG, GUGUCG,
GUGUGA, GUGUGC, GUGUGU, GUGUUG, GUGUUU, GUUAAA, GUUAAC, GUUAAG, GUUACA,
GUUACC, GUUACG, GUUACU, GUUAGA, GUUAGC, GUUAGU, GUUAUA, GUUAUC, GUUAUG,
GUUAUU, GUUCAA, GUUCAC, GUUCAG, GUUCCA, GUUCCG, GUUCGA, GUUCGC, GUUCGG, GUUCGU,
GUUCUA, GUUCUG, GUUGAA, GUUGAC, GUUGAG, GUUGAU, GUUGCG, GUUGCU, GUUGGA,
GUUGGC, GUUGGU, GUUGUC, GUUGUG, GUUGUU, GUUUAA, GUUUAC, GUUUAG, GUUUAU,
GUUUCA, GUUUCC, GUUUCU, GUUUGA, GUUUGC, GUUUGG, GUUUGU, GUUUUA, GUUUUC,
GUUUUU, UAAAAA, UAAAAC, UAAAAG, UAAAAU, UAAACA, UAAACC, UAAACG, UAAACU, UAAAGA,
UAAAGG, UAAAGU, UAAAUA, UAAAUC, UAAAUG, UAAAUU, UAACAA, UAACAC, UAACAG, UAACCA,
UAACCC, UAACCG, UAACCU, UAACGA, UAACGC, UAACGG, UAACGU, UAACUA, UAACUG, UAACUU,
UAAGAG, UAAGAU, UAAGCA, UAAGCC, UAAGCG, UAAGCU, UAAGGA, UAAGGC, UAAGGG, UAAGGU,
UAAGUA, UAAGUC, UAAGUG, UAAGUU, UAAUAA, UAAUCA, UAAUCC, UAAUCG, UAAUCU, UAAUGA,
UAAUGG, UAAUGU, UAAUUA, UAAUUC, UAAUUG, UACAAC, UACAAG, UACAAU, UACACC, UACACG,
UACACU, UACAGA, UACAGC, UACAUA, UACAUC, UACAUU, UACCAA, UACCAC, UACCAG, UACCAU,
UACCCC, UACCCG, UACCCU, UACCGA, UACCGC, UACCGG, UACCGU, UACCUA, UACCUG, UACGAA,
UACGAC, UACGAG, UACGAU, UACGCA, UACGCC, UACGCG, UACGCU, UACGGC, UACGGG, UACGGU,
UACGUA, UACGUC, UACGUG, UACGUU, UACUAA, UACUAC, UACUAG, UACUAU, UACUCA, UACUCC,
UACUCG, UACUCU, UACUGA, UACUGC, UACUGG, UACUUA, UACUUG, UACUUU, UAGAAA, UAGAAG,
UAGAAU, UAGACA, UAGACG, UAGAGA, UAGAGC, UAGAGU, UAGAUA, UAGAUC, UAGAUG, UAGCAU,
UAGCCC, UAGCCG, UAGCCU, UAGCGA, UAGCGC, UAGCGU, UAGCUA, UAGCUC, UAGCUG, UAGGAA,
UAGGAU, UAGGCG, UAGGCU, UAGGGU, UAGGUC, UAGGUG, UAGGUU, UAGUAA, UAGUAC,
UAGUAG, UAGUAU, UAGUCA, UAGUCG, UAGUGU, UAGUUA, UAGUUC, UAGUUG, UAGUUU,
UAUAAC, UAUAAG, UAUACU, UAUAGA, UAUAGC, UAUAGG, UAUAGU, UAUAUA, UAUAUC, UAUAUG,
UAUAUU, UAUCAA, UAUCAC, UAUCAU, UAUCCA, UAUCCC, UAUCCG, UAUCCU, UAUCGA, UAUCGC,
UAUCGG, UAUCGU, UAUCUA, UAUCUC, UAUCUG, UAUCUU, UAUGAA, UAUGAC, UAUGAG,
UAUGAU, UAUGCA, UAUGCG, UAUGCU, UAUGGA, UAUGGC, UAUGUC, UAUGUG, UAUGUU,
UAUUAG, UAUUCA, UAUUCC, UAUUCG, UAUUCU, UAUUGA, UAUUGG, UAUUUA, UAUUUC,
UAUUUG, UAUUUU, UCAAAA, UCAAAC, UCAAAG, UCAACC, UCAACU, UCAAGA, UCAAGC, UCAAUA,
UCAAUC, UCAAUG, UCAAUU, UCACCC, UCACCG, UCACCU, UCACGA, UCACGC, UCACGG, UCACGU,
UCACUA, UCACUC, UCACUU, UCAGAA, UCAGAC, UCAGAG, UCAGCG, UCAGCU, UCAGGA, UCAGGC,
UCAGGU, UCAGUC, UCAGUU, UCAUAA, UCAUCA, UCAUCC, UCAUCG, UCAUGC, UCAUGG, UCAUGU,
UCAUUA, UCAUUG, UCCAAA, UCCAAC, UCCAAG, UCCAAU, UCCACA, UCCACC, UCCACG, UCCAGC,
UCCAGG, UCCAUA, UCCAUC, UCCAUU, UCCCAA, UCCCAG, UCCCAU, UCCCCC, UCCCCG, UCCCCU,
UCCCGA, UCCCGC, UCCCGG, UCCCGU, UCCCUA, UCCCUC, UCCGAA, UCCGAC, UCCGAG, UCCGAU,
UCCGCA, UCCGCC, UCCGGA, UCCGGC, UCCGGU, UCCGUA, UCCGUC, UCCGUG, UCCUAA, UCCUCA,
UCCUCG, UCCUCU, UCCUGC, UCCUGU, UCCUUA, UCCUUC, UCCUUU, UCGAAA, UCGAAC, UCGAAG,
UCGAAU, UCGACA, UCGACC, UCGACG, UCGACU, UCGAGA, UCGAGC, UCGAGG, UCGAUA, UCGAUC,
UCGAUG, UCGAUU, UCGCAA, UCGCAC, UCGCAG, UCGCAU, UCGCCA, UCGCCC, UCGCCG, UCGCCU,
UCGCGA, UCGCGC, UCGCGU, UCGCUA, UCGCUC, UCGGAA, UCGGAC, UCGGAG, UCGGAU, UCGGCA,
UCGGCU, UCGGGG, UCGGGU, UCGGUC, UCGGUG, UCGGUU, UCGUAA, UCGUAC, UCGUAG,
UCGUAU, UCGUCA, UCGUCC, UCGUCG, UCGUCU, UCGUGA, UCGUGU, UCGUUA, UCGUUC, UCGUUG,
UCGUUU, UCUAAC, UCUAAG, UCUAAU, UCUACA, UCUACC, UCUACG, UCUACU, UCUAGC, UCUAGG,
UCUAGU, UCUAUA, UCUAUC, UCUAUG, UCUAUU, UCUCAG, UCUCAU, UCUCCG, UCUCGC, UCUCGG,
UCUCGU, UCUCUC, UCUGAA, UCUGAU, UCUGCA, UCUGCG, UCUGCU, UCUGGC, UCUGGU, UCUGUC,
UCUGUG, UCUGUU, UCUUAA, UCUUAC, UCUUAG, UCUUAU, UCUUCA, UCUUCC, UCUUCG, UCUUCU,
UCUUGC, UCUUGG, UCUUGU, UCUUUA, UCUUUC, UCUUUG, UCUUUU, UGAAAA, UGAAAC,
UGAACA, UGAACC, UGAAGG, UGAAUC, UGAAUG, UGACAA, UGACAC, UGACAG, UGACCA, UGACCC,
UGACCG, UGACGA, UGACGC, UGACGG, UGACGU, UGACUA, UGACUC, UGACUU, UGAGAG, UGAGAU,
UGAGCA, UGAGCC, UGAGCU, UGAGGC, UGAGGU, UGAGUA, UGAGUU, UGAUAC, UGAUAG,
UGAUAU, UGAUCA, UGAUCG, UGAUCU, UGAUGA, UGAUGC, UGAUGG, UGAUGU, UGAUUA,
UGAUUC, UGAUUG, UGAUUU, UGCAAC, UGCAAG, UGCACA, UGCACG, UGCAGG, UGCAGU, UGCAUC,
UGCCCA, UGCCCC, UGCCCG, UGCCGA, UGCCGC, UGCCGG, UGCCGU, UGCCUA, UGCCUC, UGCCUG,
UGCCUU, UGCGAA, UGCGAC, UGCGAU, UGCGCC, UGCGCG, UGCGCU, UGCGGC, UGCGGG, UGCGGU,
UGCGUA, UGCGUC, UGCGUG, UGCGUU, UGCUAC, UGCUAU, UGCUCC, UGCUCG, UGCUGC, UGCUGG,
UGCUGU, UGCUUA, UGCUUU, UGGAAC, UGGAAG, UGGAGC, UGGAUC, UGGAUU, UGGCAA,
UGGCAC, UGGCAG, UGGCCG, UGGCCU, UGGCGA, UGGCGC, UGGCGU, UGGCUA, UGGCUC, UGGCUU,
UGGGAA, UGGGCA, UGGGCC, UGGGGC, UGGGUC, UGGUAA, UGGUAG, UGGUAU, UGGUCC,
UGGUCG, UGGUCU, UGGUGA, UGGUGC, UGGUGG, UGGUGU, UGGUUA, UGGUUG, UGUAAA,
UGUAAC, UGUAAG, UGUACC, UGUACG, UGUACU, UGUAGA, UGUAGC, UGUAGU, UGUAUC,
UGUAUU, UGUCAA, UGUCAC, UGUCAG, UGUCAU, UGUCCA, UGUCCC, UGUCCG, UGUCGA, UGUCGC,
UGUCGG, UGUCGU, UGUCUA, UGUCUC, UGUGAC, UGUGAG, UGUGAU, UGUGCA, UGUGGU,
UGUGUA, UGUGUU, UGUUAC, UGUUAG, UGUUAU, UGUUCA, UGUUCC, UGUUCG, UGUUGG,
UGUUGU, UGUUUA, UGUUUC, UGUUUG, UGUUUU, UUAAAA, UUAAAC, UUAAAG, UUAAAU,
UUAACC, UUAACG, UUAACU, UUAAGU, UUAAUA, UUAAUC, UUAAUG, UUAAUU, UUACAA, UUACAC,
UUACAG, UUACAU, UUACCA, UUACCC, UUACCG, UUACCU, UUACGA, UUACGC, UUACGG, UUACGU,
UUACUA, UUACUC, UUACUG, UUACUU, UUAGAA, UUAGAC, UUAGCC, UUAGCG, UUAGCU, UUAGGC,
UUAGGU, UUAGUA, UUAGUC, UUAGUU, UUAUAA, UUAUAC, UUAUAG, UUAUAU, UUAUCC,
UUAUCG, UUAUCU, UUAUGA, UUAUGG, UUAUGU, UUAUUA, UUAUUC, UUAUUG, UUAUUU,
UUCAAC, UUCAAU, UUCACA, UUCACC, UUCACG, UUCACU, UUCAGC, UUCAGG, UUCAGU, UUCAUA,
UUCAUC, UUCAUG, UUCAUU, UUCCAA, UUCCCA, UUCCCG, UUCCGA, UUCCGU, UUCCUU, UUCGAA,
UUCGAC, UUCGAG, UUCGAU, UUCGCA, UUCGCC, UUCGCG, UUCGCU, UUCGGA, UUCGGC, UUCGGG,
UUCGGU, UUCGUA, UUCGUC, UUCGUG, UUCGUU, UUCUAC, UUCUAG, UUCUCA, UUCUCG,
UUCUGG, UUCUUA, UUCUUU, UUGAAA, UUGAAC, UUGAAG, UUGAAU, UUGACC, UUGACG,
UUGACU, UUGAGA, UUGAGC, UUGAGU, UUGAUA, UUGAUC, UUGAUG, UUGAUU, UUGCAA,
UUGCAC, UUGCAG, UUGCAU, UUGCCC, UUGCCG, UUGCGA, UUGCGC, UUGCGG, UUGCGU, UUGCUA,
UUGCUC, UUGCUG, UUGCUU, UUGGAA, UUGGAG, UUGGCC, UUGGCG, UUGGCU, UUGGGC,
UUGGGU, UUGGUA, UUGGUG, UUGUAA, UUGUAC, UUGUCA, UUGUCG, UUGUCU, UUGUGC,
UUGUGG, UUGUUA, UUGUUG, UUGUUU, UUUAAA, UUUAAC, UUUAAG, UUUAAU, UUUACA,
UUUACC, UUUACG, UUUACU, UUUAGA, UUUAGC, UUUAGG, UUUAGU, UUUAUA, UUUAUC,
UUUAUG, UUUAUU, UUUCAU, UUUCCA, UUUCCG, UUUCCU, UUUCGA, UUUCGC, UUUCGG,
UUUCGU, UUUCUA, UUUCUC, UUUCUG, UUUCUU, UUUGAA, UUUGAC, UUUGAG, UUUGAU,
UUUGCC, UUUGCU, UUUGGA, UUUGGC, UUUGGG, UUUGGU, UUUGUA, UUUGUC, UUUGUU,
UUUUAA, UUUUAG, UUUUAU, UUUUCC, UUUUCG, UUUUCU, UUUUGA, UUUUGC, UUUUGG,
UUUUGU, UUUUUA, UUUUUC, UUUUUU

TABLE 2
Imprinted regions hit by the expanded PRC2 transcriptome.

| Imprinted gene | | | | human liftOver | |
|---|---|---|---|---|---|
| targeted by | mm9 coordinates | | | coordinates (hg19) | |
| PRC2-binding | and chromosome | | MGI human | and chromosome | |
| transcript and | strand of PRC2- | | gene name | strand of PRC2- | |
| chromosome strand | binding transcript | Sequence | for mouse refGene | binding transcript | Sequence |
| Wt1 (22431)+ | chr2: 104956685− | B934762 | WT1(7490)− | chr11: 32400584− | B934864 |
| | 105023768+ | | | 32466719− | |
| Wt1 (22431)+ | chr2: 104956685− | B934763 | WT1(7490)− | chr11: 32400584− | B934865 |
| | 105023768− | | | 32466719+ | |
| Gatm(67092)− | chr2: 122410207− | B934764 | GATM(2628)− | chr15: 45644412− | B934866 |
| | 122446997+ | | | 45685240+ | |
| Gatm(67092)− | chr2: 122410207− | B934765 | GATM(2628)− | chr15: 45644412− | B934867 |
| | 122446997− | | | 45685240− | |
| L3mbt1(241764)+ | chr2: 162759200− | B934766 | | chr20: 42088449− | B934868 |
| | 162810257+ | | | 42184934+ | |
| L3mbtI(241764)+ | chr2: 162759200− | B934767 | | chr20: 42088449− | B934869 |
| | 162810257− | | | 42184934− | |
| Gnai3(14679)− | chr3: 107900216− | B934768 | GNAI3(2773)+ | chr1: 110081495− | B934870 |
| | 107959031+ | | | 110150201− | |
| Gnai3( 14679)− | chr3: 107900216− | B934769 | GNAI3(2773)+ | chr1: 110081495− | B934871 |
| | 107959031− | | | 110150201+ | |
| Mkrn 1(54484)− | chr5: 89257179− | B934770 | MKRN1(23608)− | chr7: 140155983− | B934905 |
| | 89278370+ | | | 140179369+ | |
| Mkrn 1(54484)− | chr5: 89257179− | B934771 | MKRN1(23608)− | chr7: 140155983− | B934906 |
| | 89278370− | | | 140179369− | |
| Calcr(12311)− | chr6: 3625733− | B934772 | CALCR(799)− | chr7: 93050410− | B934872 |
| | 3728615+ | | | 93230834+ | |
| Calcr(12311)− | chr6: 3625733− | B934773 | CALCR(799)− | chr7: 93050410− | B934873 |
| | 3728615− | | | 93230834− | |
| Tfpi2(21789)− | chr6: 3902594− | B934774 | TFP 12(7980)− | chr7: 93490853− | B934874 |
| | 3928353+ | | | 93527640+ | |
| Tfpi2(21789)− | chr6: 3902594− | B934775 | TFP 12(7980)− | chr7: 93490853− | B934875 |
| | 3928353− | | | 93527640− | |
| Sgce(20392)− | chr6: 4614349− | B934776 | SGCE(8910)− | chr7: 94211984− | B934876 |
| | 4707098− | | | 94294870− | |
| Peg 10(170676)+ | chr6: 4687379− | B934777 | PEG10(23089)+ | chr7: 94275257− | B934877 |
| | 4720475− | | | 94299422− | |
| Ppplr9a(243725)+ | chr6: 4843319− | B934778 | PPP1R9A(55607)+ | chr7: 94528605− | B934878 |
| | 5125660+ | | | 94935514+ | |
| Ppplr9a(243725)+ | chr6: 4843319− | B934779 | PPP1R9A(55607)+ | chr7: 94528605− | B934879 |
| | 5125660− | | | 94935514− | |
| Pon1(18979)− | chr6: 5108104− | B934780 | PON1(5444)− | chr7: 94917863− | B934880 |
| | 5153823+ | | | 94958087+ | |
| Pon1(18979)− | chr6: 5108104− | B934781 | PON 1(5444)− | chr7: 94917863− | B934881 |
| | 5153823− | | | 94958087− | |
| Pon3(269823)− | chr6: 5160851− | B934782 | PON3(5446)− | chr7: 94989184− | B934907 |
| | 5216232+ | | | 95025687+ | |
| Pon2(330260)− | chr6: 5204623− | B934783 | PON2(5445)− | chr7: 95034174− | B934908 |
| | 5258372+ | | | 95064384+ | |
| Pon2(330260)− | chr6: 5204623− | B934784 | PON2(5445)− | chr7: 95034174− | B934909 |
| | 5258372− | | | 95064384− | |
| Asb4(65255)+ | chr6: 5323385− | B934785 | ASB4(51666)+ | chr7: 95094541− | B934882 |
| | 5393021+ | | | 95179369+ | |
| Asb4(65255)+ | chr6: 5323385− | B934786 | ASB4(51666)+ | chr7: 95094541− | B934883 |
| | 5393021− | | | 95179369− | |
| Cpa4(71791)+ | chr6: 30508375− | B934787 | CPA4(51200)+ | chr7: 129922767− | B934884 |
| | 30551746+ | | | 129974483+ | |
| Cpa4(71791)+ | chr6: 30508375− | B934788 | CPA4(51200)+ | chr7: 129922767− | B934885 |
| | 30551746− | | | 129974483− | |
| Nap115(58243)− | chr6: 58845227− | B934789 | NAP1L5(266812)− | chr4: 89617066− | B934910 |
| | 58867058+ | | | 89619023+ | |
| Nap115(58243)− | chr6: 58845227− | B934790 | NAP1L5(266812)− | chr4: 89617066− | B934911 |
| | 58867058− | | | 89619023− | |
| Zim2(76637)− | chr7: 6594458− | B934791 | ZIM2(23619)− | chr19: 57285923− | B934912 |
| | 6625116+ | | | 57352097+ | |
| Zim2(76637)− | chr7: 6594458− | B934792 | ZIM2(23619)− | chr19: 57285923− | B934913 |
| | 6625116− | | | 57352097− | |
| Zim1 (22776)− | chr7: 6618153− | B934793 | | | |
| | 6659142+ | | | | |
| Zim1(22776)− | chr7: 6618153− | B934794 | | | |
| | 6659142− | | | | |
| Peg3(18616)− | chr7: 6648670− | B934795 | PEG3(5178)− | chr19: 57319764− | B934886 |
| | 6693129+ | | | 57358664+ | |
| Peg3(18616)− | chr7: 6648670− | B934796 | PEG3(5178)− | chr19: 57319764− | B934887 |
| | 6693129− | | | 57358664− | |
| Usp29(57775)+ | chr7: 6673293− | B934797 | USP29(57663)+ | chr19: 57631509− | B629991 |
| | 6929926+ | | | 57643293+ | |
| Usp29(57775)+ | chr7: 6673293− | B934798 | USP29(57663)+ | chr19: 57631509− | B629992 |
| | 6929926− | | | 57643293− | |
| Gabrg3(14407)− | chr7: 63969611− | B934799 | GABRG3(2567)+ | chr15: 27216429− | B630983 |
| | 64652167+ | | | 27778373− | |
| Gabrg3(14407)− | chr7: 63969611− | B934800 | GABRG3(2567)+ | chr15: 27216429− | |
| | 64652167− | | | 27778373+ | |
| Gabra5(110886)− | chr7: 64653038− | B934801 | GABRA5(2558)+ | chr15: 27111866− | B934914 |
| | 64775378+ | | | 27194357− | |
| Gabra5(110886)− | chr7: 64653038− | B934802 | GABRA5(2558)+ | chr15: 27111866− | B934915 |
| | 64775378− | | | 27194357+ | |
| Gabrb3(14402)+ | chr7: 64835903− | B934803 | GABRB3(2562)+ | chr15: 26788694− | B934916 |
| | 65094171+ | | | 27018223− | |
| Gabrb3(14402)+ | chr7: 64835903− | B934804 | GABRB3(2562)− | chr15: 26788694− | B934917 |
| | 65094171− | | | 27018223+ | |
| Atp10a(11982)+ | chr7: 65903701− | B934805 | ATP10A(57194)− | chr15: 25923860− | B630990 |
| | 66094160+ | | | 26108349− | |
| Snord116/Pwcr1 | chr7: 66921359− | B934806 | | | |
| (64243)− | 66941448+ | | | | |
| Snord116/Pwcr1 | chr7: 66921359− | B934807 | | | |
| (64243)− | 66941448− | | | | |
| Snrpn(20646)− | chr7: 67117999− | B934808 | SNRPN(6638)+ | chr15: 25200135− | B934918 |
| | 67159989+ | | | 25223729− | |
| Snrpn(20646)− | chr7: 67117999− | B934809 | SNRPN(6638)+ | chr15: 25200135− | B934919 |
| | 67159989− | | | 25223729+ | |
| Snurf(84704)− | chr7: 67123487− | B934810 | SNURF(8926)+ | chr15: 25200135− | B934918 |
| | 67160009+ | | | 25223729− | |
| Snurf(84704)− | chr7: 67123487− | B934811 | SNURF(8926)+ | chr15: 25200135− | B934919 |
| | 67160009− | | | 25223729+ | |
| Ndn(17984)+ | chr7: 69483233− | B934812 | NDN(4692)− | chr15: 23915288− | B934888 |
| | 69504813− | | | 23938997+ | |
| Mage12(27385)+ | chr7: 69511864− | B934813 | MAGEL2(54551)− | chr15: 23888696− | B631003 |
| | 69536525+ | | | 23892993− | |
| Mage12(27385)+ | chr7: 69511864− | B934814 | MAGEL2(54551)− | chr15: 23888696− | B631004 |
| | 69536525− | | | 23892993+ | |
| Mkrn3(22652)− | chr7: 69552478− | B934815 | MKRN3(7681)+ | chr15: 23810454− | B934920 |
| | 69575024+ | | | 23813166− | |
| Mkrn3(22652)− | chr7: 69552478− | B934816 | MKRN3(7681)+ | chr15: 23810454− | B934921 |
| | 69575024− | | | 23813166+ | |
| Peg12(27412)− | chr7: 69596756− | B934817 | | | |
| | 69619395+ | | | | |
| Peg12(27412)− | chr7: 69596756− | B934818 | | | |
| | 69619395− | | | | |
| Ins2(16334)− | chr7: 149854565− | B934819 | INS(3630)− | chr11: 2181009− | B632396 |
| | 149875612+ | | | 2182439+ | |
| Ins2(16334)− | chr7: 149854565− | B934820 | INS(3630)− | chr11: 2181009− | B632397 |
| | 149875612− | | | 2182439− | |
| Tspan32(27027)+ | chr7: 150181595− | B934821 | TSPAN32(10077)+ | chr11: 2323243− | B632402 |
| | 150215548+ | | | 2339430+ | |
| Tspan32(27027)+ | chr7: 150181595− | B934822 | TSPAN32(10077)+ | chr11: 2323243− | B632403 |
| | 150215548− | | | 2339430− | |
| S1c22a18(18400)+ | chr7: 150649693− | B934823 | SLC22A18(5002)+ | chr11: 2923512− | B934922 |
| | 150695226+ | | | 2946476+ | |
| S1c22a18(18400)+ | chr7: 150649693− | B934824 | SLC22A18(5002)+ | chr11: 2923512− | B934923 |
| | 150695226− | | | 2946476− | |
| PhIda2(22113)− | chr7: 150677452− | B934825 | PHLDA2(7262)− | chr11: 2949503− | B934924 |
| | 150698428+ | | | 2950650+ | |
| PhIda2(22113)− | chr7: 150677452− | B934826 | PHLDA2(7262)− | chr11: 2949503− | B934925 |
| | 150698428− | | | 2950650− | |
| Nap114(17955)− | chr7: 150689483− | B934827 | NAP1L4(4676)− | chr11: 2965660− | B632419 |
| | 150744994− | | | 3013607− | |
| Tnfrsf23(79201)− | chr7: 150841711− | B934828 | | | |
| | 150881776− | | | | |
| Osbp15(79196)− | chr7: 150864666− | B934829 | OSBPLS(114879)− | chr11: 3108346− | B632422 |
| | 150937867− | | | 3186582− | |
| Sdhd(66925)− | chr9: 50394450− | B934830 | SDHD(6392)+ | chr11: 111957571− | B634959 |
| | 50421921+ | | | 111966518− | |
| Rasgrf1(19417)+ | chr9: 89794612− | B934831 | RASGRF1(5923)− | chr15: 79252289− | B934926 |
| | 89934638+ | | | 79383215− | |
| Rasgrf1(19417)+ | chr9: 89794612− | B934832 | RASGRF1(5923)− | chr15: 79252289− | B934927 |
| | 89934638− | | | 79383215+ | |
| Plagl 1 (22634)+ | chr10: 12800714− | B934833 | PLAGL1(5325)− | chr6: 144257160− | B934889 |
| | 12859693+ | | | 144341048− | |
| Ctnna3(216033)+ | chr10: 62882845− | B934834 | CTNNA3(2919)−1 | chr10: 67679725− | B934928 |
| | 64475689+ | | | 69425416− | |
| Ctnna3(216033)+ | chr10: 62882845− | B934835 | CTNNA3(29119)− | chr10: 67679725− | B934929 |
| | 64475689− | | | 69425416+ | |
| Dcn(13179)+ | chr10: 96935000− | B934836 | DCN (1634)− | chr12: 91539035− | B934930 |
| | 96990784− | | | 91576806+ | |
| Ddc(13195)− | chr11: 11704105− | B934837 | DDC(1644)− | chr7: 50526134− | B934931 |
| | 11800403+ | | | 50628768+ | |
| Grb10(14783)− | chr11: 11820510− | B934838 | GRB10(2887)− | chr7: 50657755− | B934890 |
| | 11947357+ | | | 50871312+ | |
| Grb10(14783)− | chr11: 11820510− | B934839 | GRB10(2887)− | chr7: 50657755− | |
| | 11947357− | | | 50871312− | |
| Commd1(17846)− | chr11: 22789727− | B934840 | COMMD1(150684)+ | chr2: 62132803− | B638303 |
| | 22892283+ | | | 62363205− | |
| Commd1(17846)− | chr11: 22789727− | B934841 | COMMD150684)+ | chr2: 62132803− | B638304 |
| | 22892283− | | | 62363205+ | |
| U2af(22185)+ | chr11: 22862036− | B934842 | | | |
| | 22884907+ | | | | |
| U2af(22185)+ | chr11: 22862036− | B934843 | | | |
| | 22884907− | | | | |
| M1r337/Mirn337 | chr12: 67749612− | B934844 | | chr14: 47524741− | B934892 |
| (723843)+ | 67769708+ | | | 47544270+ | |
| M1r337/M1rn337 | chr12: 67749612− | B934845 | | chr14: 47524741− | B934893 |
| (723843) + | 67769708− | | | 47544270− | |
| DIk1 (13386)+ | chr12: 110681432− | B934846 | OLK1(8788)+ | chr14: 101183690− | B934894 |
| | 110708900+ | | | 101211352+ | |
| Meg3/Gt12(17263)+ | chr12: 110773827− | B934847 | | chr14: 101287762− | B934895 |
| | 110809921− | | | 101327347− | |
| 0103(107585)+ | chr12: 111507442− | B934848 | 0103(1735)+ | chr14: 102013439− | B934896 |
| | 111529304+ | | | 102036066+ | |
| Dio3(107585)+ | chr12: 111507442− | B934849 | 0103(1735)+ | chr14: 102013439− | B934897 |
| | 111529304− | | | 102036066− | |
| Htr2a(15558)+ | chr14: 75030646− | B934850 | HTR2A(3356)− | chr13: 47401097− | B934898 |
| | 75116665+ | | | 47479311− | |
| Htr2a(15558)+ | chr14: 75030646− | B934851 | HTR2A(3356)− | chr13: 47401097− | B934899 |
| | 75116665− | | | 47479311+ | |
| Kcnk9(223604)− | chr15: 72335722− | B934852 | KCNK9(51305)− | chr8: 140621242− | B934900 |
| | 72389882+ | | | 140723023+ | |
| Peg13(353342)− | chr15: 72626029− | B934853 | | chr8: 141094733− | B934901 |
| | 72650753+ | | | 141124284+ | |
| Peg13(353342)− | chr15: 72626029− | B934854 | | chr8: 141094733− | B934902 |
| | 72650753− | | | 141124284− | |
| S1c38a4(69354)− | chr15: 96815253− | B934855 | SLC38A4(55089)− | chr12: 47116054− | B934903 |
| | 96896386+ | | | 47237900+ | |
| S1c38a4(69354)− | chr15: 96815253− | B934856 | SLC38A4(55089)− | chr12: 47116054− | B934904 |
| | 96896386− | | | 47237900− | |
| S1c22a3(20519)− | chr17: 12602837− | B934857 | SLC22A3(6581)+ | chr6: 160769425− | B647595 |
| | 12710569+ | | | 160876014− | |
| SIc22a3(20519)− | chr17: 12602837− | B934858 | SLC22A3(6581)+ | chr6: 160769425− | B647596 |
| | 12710569− | | | 160876014+ | |
| S1c22a2(20518)+ | chr17: 12767054− | B934859 | SLC22A2(6582)− | chr6: 160637794− | B647597 |
| | 12831353+ | | | 160679963− | |
| Slc22a2(20518)+ | chr17: 12767054− | B934860 | SLC22A2(6582)− | chr6: 160637794− | B647598 |
| | 12831353− | | | 160679963+ | |
| Igf2r(16004)− | chr17: 12865278− | B934861 | IGF2R(3482)+ | chr6: 160390131− | B647601 |
| | 12972529+ | | | 160527583− | |
| Air/Airn(104103)+ | chr17: 12931160− | B934862 | | | |
| | 12954858+ | | | | |
| Impact(16210)+ | chr18: 13120760− | B934863 | IMPACT(55364)+ | chr18: 22006609− | B649028 |
| | 13161456+ | | | 22033494+ | |

[0390] The foregoing written specification is considered to be sufficient to enable one skilled in the art to practice the invention. The present invention is not to be limited in scope by examples provided, since the examples are intended as a single illustration of one aspect of the invention and other functionally equivalent embodiments are within the scope of the invention. Various modifications of the invention in addition to those shown and described herein will become apparent to those skilled in the art from the foregoing description and fall within the scope of the appended claims. The advantages and objects of the invention are not necessarily encompassed by each embodiment of the invention.

What is claimed is:

1. A method for selecting a candidate oligonucleotide for activating expression of a target gene, the method comprising:
selecting a PRC2-associated region within a first nucleotide sequence, wherein the first nucleotide sequence maps to a position in a first chromosome between 50 kilobases upstream of a 5′-end of the target gene and 50 kilobases downstream of a 3′-end of the target gene;
determining a second nucleotide sequence that is complementary with at least 8 consecutive nucleotides of the PRC2-associated region; and
selecting as the candidate oligonucleotide, a single stranded oligonucleotide comprising the second nucleotide sequence, wherein the oligonucleotide has at least one of following features:
a) a sequence: 5′-X-Y-Z, wherein X is any nucleotide, Y is a nucleotide sequence of 6 nucleotides in length that is not a seed sequence of a human microRNA, and Z is a nucleotide sequence of 1 to 23 nucleotides in length, wherein X is anchored at the 5′ end of the oligonucleotide;
b) a sequence that does not comprise three or more consecutive guanosine nucleotides;
c) a sequence that has less than a threshold level of sequence identity with every sequence of nucleotides, of equivalent length to the second nucleotide sequence, that is between 50 kilobases upstream of a 5′-end of an off-target gene and 50 kilobases downstream of a 3′-end of the off-target gene;
d) a sequence that is complementary to a PRC2-associated region that encodes an RNA that forms a secondary structure comprising at least two single stranded loops; or
e) a sequence that has greater than 60% G-C content.

2. The method of claim 1, wherein the single stranded oligonucleotide is up to 50 nucleotides in length.

3. The method of claim 1, wherein the single stranded oligonucleotide is 8 to 30 nucleotides in length.

4. The method of claim 1, wherein the oligonucleotide has at least two of features a), b), c), d) and e).

5. The method of claim 1, wherein the oligonucleotide has at least three of features a), b), c), d) and e).

6. The method of claim 1, wherein the oligonucleotide has at least four of features a), b), c), d) and e).

7. The method of claim 1, wherein the oligonucleotide has each of features a), b), c), d) and e).

8. A method of selecting a set of oligonucleotides that is enriched in oligonucleotides that activate expression of a target gene, the method comprising:
selecting a PRC2-associated region within a first nucleotide sequence that maps to a position in a first chromosome between 50 kilobases upstream of a 5′-end of the target gene and 50 kilobases downstream of a 3′-end of the target gene;
selecting a set of oligonucleotides, wherein each oligonucleotide in the set comprises a second nucleotide sequence that is complementary with at least 8 consecutive nucleotides of the PRC2-associated region, and has at least one of the following features:
a) a sequence: 5′-X-Y-Z, wherein X is any nucleotide, Y is a nucleotide sequence of 6 nucleotides in length that is not a human seed sequence of a microRNA, and Z is a nucleotide sequence of 1 to 23 nucleotides in length, wherein X is anchored at the 5′ end of the oligonucleotide;
b) a sequence that does not comprise three or more consecutive guanosine nucleotides;
c) a sequence that has less than a threshold level of sequence identity with every sequence of nucleotides, of equivalent length to the second nucleotide sequence, that are between 50 kilobases upstream of a 5′-end of an off-target gene and 50 kilobases downstream of a 3′-end of the off-target gene;
d) a sequence that is complementary to a PRC2-associated region that encodes an RNA that forms a secondary structure comprising at least two single stranded loops; and/or
e) a sequence that has greater than 60% G-C content; and
wherein the set of oligonucleotides is enriched in oligonucleotides that activate expression of a target gene.

9. The method of claim 8, wherein each of the oligonucleotides is up to 50 nucleotides in length.

10. The method of claim 8, wherein each of the oligonucleotides is 8 to 30 nucleotides in length.

11. The method of claim 8, wherein each of the oligonucleotides in the set share at least one of features a), b), c), d) and e).

12. The method of claim 8, wherein each of the oligonucleotides in the set share at least two of features a), b), c), d) and e).

13. The method of claim 8, wherein each of the oligonucleotides in the set share at least three of features a), b), c), d) and e).

14. The method of claim 8, wherein each of the oligonucleotides in the set share at least four of features a), b), c), d) and e).

15. The method of claim 8, wherein each of the oligonucleotides in the set share each of features a), b), c), d) and e).

16. The method of any one of claims 1 to 15, wherein the threshold level of sequence identity is 50%, 60%, 70%, 80%, 85%, 90%, 95% or 99% sequence identity.

17. The method of any one of claims 1 to 16, wherein the first chromosome is a chromosome of a first species, and wherein the method further comprises
determining that the second nucleotide sequence is complementary to a second region of a second chromosome of a second species, the second region being located between 50 kilobases upstream of a 5′-end of a homolog of the target gene and 50 kilobases downstream of a 3′-end of the homolog of the target gene.

18. The method of claim 17, wherein the second nucleotide sequence is at least 80% complementary to the second region of the second chromosome

19. The method of any one of claims 1 to 18, wherein the first nucleotide sequence maps to the strand of the first chromosome comprising the sense strand of the target gene.

20. The method of any one of claims 1 to 18, wherein the first nucleotide sequence maps to the strand of the first chromosome comprising the antisense strand of the target gene.

21. The method of any one of claims 1 to 20, wherein the PRC2-associated region is upstream of the 5′ end of the target gene.

22. The method of any one of claims 1 to 20, wherein the PRC2-associated region is downstream of the 3′ end of the target gene.

23. The method of any one of claims 1 to 20, wherein the PRC2-associated region is within an intron of the target gene.

24. The method of any one of claims 1 to 20, wherein the PRC2-associated region is within an exon of the target gene.

25. The method of any one of claims 1 to 20, wherein the PRC2-associated region traverses an intron-exon junction, a 5′-UTR-exon junction or a 3′-UTR-exon junction of the target gene.

26. The method of any one of claims 1 to 25, wherein the PRC2-associated region encodes an RNA that forms a secondary structure comprising at least two single stranded loops.

27. The method of claim 26, wherein the secondary structure comprises a double stranded stem between the at least two single stranded loops.

28. The method of claim 26 or 27, wherein the method further comprises determining that the at least 8 consecutive nucleotides of the PRC2-associated region encode at least a portion of at least one of the loops.

29. The method of any one of claims 26 to 28, wherein the method further comprises determining that the at least 8 consecutive nucleotides of the PRC2-associated region encode at least a portion of at least two of the loops.

30. The method of any one of claims 26 to 29, wherein the method further comprises determining that the at least 8 consecutive nucleotides of the PRC2-associated region encode at least a portion of the double stranded stem.

31. A single stranded oligonucleotide comprising a region of complementarity that is complementary with at least 8 consecutive nucleotides of a PRC2-associated region located in a first chromosome between 50 kilobases upstream of a 5′-end of a target gene and 50 kilobases downstream of a 3′-end of the target gene, wherein the oligonucleotide has at least one of:
a) a sequence comprising 5′-X-Y-Z, wherein X is any nucleotide, Y is a nucleotide sequence of 6 nucleotides in length that is not a human seed sequence of a microRNA, and Z is a nucleotide sequence of 1 to 23 nucleotides in length;
b) a sequence that does not comprise three or more consecutive guanosine nucleotides;
c) a sequence that has less than a threshold level of sequence identity with every sequence of nucleotides, of equivalent length to the second nucleotide sequence, that are between 50 kilobases upstream of a 5′-end of an off-target gene and 50 kilobases downstream of a 3′-end of the off-target gene;
d) a sequence that is complementary to a PRC2-associated region that encodes an RNA that forms a secondary structure comprising at least two single stranded loops; and/or
e) a sequence that has greater than 60% G-C content.

32. The single stranded oligonucleotide of claim 31, wherein the first chromosome is a chromosome of a first species, and wherein a sequence comprising the at least 8 consecutive nucleotides is located in a second chromosome between 50 kilobases upstream of a 5′-end of a homolog of the target gene and 50 kilobases downstream of a 3′-end of the homolog of the target gene, wherein the second chromosome is a chromosome of second species.

33. The single stranded oligonucleotide of claim 32, wherein the first species is human and the second species is a mouse.

34. The method of any one of claims 31 to 33, wherein the oligonucleotide has at least two of features a), b), c), d) and e).

35. The method of any one of claims 31 to 33, wherein the oligonucleotide has at least three of features a), b), c), d) and e).

36. The method of any one of claims 31 to 33, wherein the oligonucleotide has at least four of features a), b), c), d) and e).

37. The method of any one of claims 31 to 33, wherein the oligonucleotide has each of features a), b), c), d) and e).

38. The single stranded oligonucleotide of any preceding claim, wherein the oligonucleotide is up to 50 nucleotides in length.

39. The single stranded oligonucleotide of any preceding claim, wherein the oligonucleotide is 8 to 30 nucleotides in length.

40. The single stranded oligonucleotide of any one of claims 31 to 34, wherein the oligonucleotide is 8 to 10 nucleotides in length and all but 1, 2, or 3 of the nucleotides of the complementary sequence of the PRC2-associated region are cytosine or guanosine nucleotides.

41. The single stranded oligonucleotide of any one of claims 31 to 37, wherein the at least 8 consecutive nucleotides of the PRC2-associated region in the strand of the chromosome comprising the sense strand of the target gene.

42. The single stranded oligonucleotide of any one of claims 31 to 37, wherein the at least 8 consecutive nucleotides of the PRC2-associated region in the strand of the chromosome comprising the antisense strand of the target gene.

43. The single stranded oligonucleotide of any one of claims 31 to 42, wherein the PRC2-associated region is upstream of the 5′ end of the target gene.

44. The single stranded oligonucleotide of any one of claims 31 to 42, wherein the PRC2-associated region is downstream of the 3′ end of the target gene.

45. The single stranded oligonucleotide of any one of claims 31 to 42, wherein the PRC2-associated region is within an intron of the target gene.

46. The single stranded oligonucleotide of any one of claims 31 to 42, wherein the PRC2-associated region is within an exon of the target gene.

47. The single stranded oligonucleotide of any one of claims 31 to 42, wherein the PRC2-associated region traverses an intron-exon junction, a 5′-UTR-exon junction or a 3′-UTR-exon junction of the target gene.

48. The single stranded oligonucleotide of any one of claims 31 to 47, wherein the PRC2-associated region encodes an RNA that forms a secondary structure comprising at least two single stranded loops.

49. The single stranded oligonucleotide of claim 48, wherein the secondary structure comprises a double stranded stem between the at least two single stranded loops.

50. The single stranded oligonucleotide of claim 48 or 49, wherein the at least 8 consecutive nucleotides of the PRC2-associated region encode at least a portion of at least one of the loops.

51. The single stranded oligonucleotide of any one of claims 48 to 50, wherein the at least 8 consecutive nucleotides of the PRC2-associated region encode at least a portion of at least two of the loops.

52. The single stranded oligonucleotide of any one of claims 48 to 51, wherein the at least 8 consecutive nucleotides of the PRC2-associated region encode at least a portion of the double stranded stem.

53. The single stranded oligonucleotide of any one of claims 31 to 52, wherein at least one nucleotide of the oligonucleotide is a nucleotide analogue.

54. The single stranded oligonucleotide of claim 53, wherein the at least one nucleotide analogue results in an increase in Tₘ of the oligonucleotide in a range of 1 to 5° C. compared with an oligonucleotide that does not have the at least one nucleotide analogue.

55. The single stranded oligonucleotide of any one of claims 31 to 54, wherein at least one nucleotide of the oligonucleotide comprises a 2′ O-methyl.

56. The single stranded oligonucleotide of any one of claims 31 to 54, wherein each nucleotide of the oligonucleotide comprises a 2′ O-methyl.

57. The single stranded oligonucleotide of any one of claims 31 to 54, wherein the oligonucleotide comprises at least one ribonucleotide, at least one deoxyribonucleotide, or at least one bridged nucleotide.

58. The single strand oligonucleotide of claim 57, wherein the bridged nucleotide is a LNA nucleotide, a cEt nucleotide or a ENA nucleotide analogue.

59. The single stranded oligonucleotide of any one of claims 31 to 54, wherein each nucleotide of the oligonucleotide is a LNA nucleotide.

60. The single stranded oligonucleotide of any one of claims 31 to 54, wherein the nucleotides of the oligonucleotide comprise alternating deoxyribonucleotides and 2′-fluoro-deoxyribonucleotides.

61. The single stranded oligonucleotide of any one of claims 31 to 54, wherein the nucleotides of the oligonucleotide comprise alternating deoxyribonucleotides and 2′-O-methyl nucleotides.

62. The single stranded oligonucleotide of any one of claims 31 to 54, wherein the nucleotides of the oligonucleotide comprise alternating deoxyribonucleotides and ENA nucleotide analogues.

63. The single stranded oligonucleotide of any one of claims 31 to 54, wherein the nucleotides of the oligonucleotide comprise alternating deoxyribonucleotides and LNA nucleotides.

64. The single stranded oligonucleotide of any one of claims 60 to 63, wherein the 5′ nucleotide of the oligonucleotide is a deoxyribonucleotide.

65. The single stranded oligonucleotide of any one of claims 31 to 54, wherein the nucleotides of the oligonucleotide comprise alternating LNA nucleotides and 2′-O-methyl nucleotides.

66. The single stranded oligonucleotide of claim 65, wherein the 5′ nucleotide of the oligonucleotide is a LNA nucleotide.

67. The single stranded oligonucleotide of any one of claims 31 to 54, wherein the nucleotides of the oligonucleotide comprise deoxyribonucleotides flanked by at least one LNA nucleotide on each of the 5′ and 3′ ends of the deoxyribonucleotides.

68. The single stranded oligonucleotide of any one of claims 31 to 68, further comprising phosphorothioate internucleotide linkages between at least two nucleotides.

69. The single stranded oligonucleotide of claim 68, further comprising phosphorothioate internucleotide linkages between all nucleotides.

70. The single stranded oligonucleotide of any one of claims 31 to 69, wherein the nucleotide at the 3′ position of the oligonucleotide has a 3′ hydroxyl group.

71. The single stranded oligonucleotide of any one of claims 31 to 69, wherein the nucleotide at the 3′ position of the oligonucleotide has a 3′ thiophosphate.

72. The single stranded oligonucleotide of any one of claims 31 to 71, further comprising a biotin moiety conjugated to the 5′ nucleotide.

73. The single stranded oligonucleotide of any one of claims 31 to 71, further comprising one or more of the following conjugates to either the 5′ or 3′ nucleotide or both: cholesterol, Vitamin A, folate, sigma receptor ligands, aptamers, peptides, such as CPP, hydrophobic molecules, such as lipids, ASGPR or dynamic polyconjugates and variants thereof.

74. A single stranded oligonucleotide of 8 to 30 nucleotides in length having a region of complementarity that is complementary with at least 8 contiguous nucleotides of a long non-coding RNA (lncRNA) that regulates expression of a target gene, wherein 2-19 nucleotides of the oligonucleotide are nucleotide analogues.

75. The single stranded oligonucleotide of claim 74, wherein the each of the nucleotide analogues results in an increase in Tₘ of the oligonucleotide in a range of 1 to 5° C. compared with an oligonucleotide that does not have the nucleotide analogue.

76. The single strand oligonucleotide of claim 74, wherein the nucleotide analogues are selected from the group consisting of a bridged nucleotide, 2′ fluoro, and 2′O-methyl nucleotide.

77. The single strand oligonucleotide of claim 76, wherein the bridged nucleotide is a LNA, ENA or cEt nucleotide.

78. The single strand oligonucleotide of claim 74, wherein the nucleotides comprise alternating deoxyribonucleotides and 2′-fluoro-deoxyribonucleotides.

79. The single strand oligonucleotide of claim 74, wherein the nucleotides comprise alternating deoxyribonucleotides and 2′-O-methyl nucleotides.

80. The single strand oligonucleotide of claim 74, wherein the nucleotides comprise alternating deoxyribonucleotides and ENA nucleotide analogues.

81. The single strand oligonucleotide of claim 74, wherein the nucleotides comprise alternating deoxyribonucleotides and LNA nucleotides.

82. The single strand oligonucleotide of claim 74, wherein the 5′ nucleotide of the single stranded oligonucleotide is a deoxyribonucleotide.

83. The single strand oligonucleotide of claim 74, wherein the nucleotides comprise alternating LNA nucleotides and 2′-O-methyl nucleotides.

84. The single strand oligonucleotide of claim 74, wherein the 5′ nucleotide of the single stranded oligonucleotide is a LNA nucleotide.

85. The single strand oligonucleotide of claim 74, wherein the nucleotides comprise deoxyribonucleotides flanked by at least one LNA nucleotide on each of the 5′ and 3′ ends of the deoxyribonucleotides.

86. The single strand oligonucleotide of any one of claims 74 to 85, further comprising phosphorothioate internucleotide linkages between at least two nucleotides.

87. The single strand oligonucleotide of claim 74, wherein the nucleotide at the 3′ position of the single stranded oligonucleotide has a 3′ hydroxyl group.

88. The single strand oligonucleotide of claim 74, wherein the nucleotide at the 3′ position of the single stranded oligonucleotide has a 3′ thiophosphate.

89. A single stranded oligonucleotide of 5 to 30 nucleotides in length having a region of complementarity that is complementary with at least 5 contiguous nucleotides of a long non-coding RNA (lncRNA) that regulates expression of a target gene, wherein the oligonucleotide is linked to a second oligonucleotide by a cleavable linker.

90. The single strand oligonucleotide of claim 74, wherein the oligonucleotide has the structure of the single stranded oligonucleotide of any one of claims 31 to 73.

91. A single stranded single stranded oligonucleotide of 8 to 40 nucleotides in length having a region of complementarity that is complementary with at least 5 contiguous nucleotides of a PRC2-binding long non-coding RNA (lncRNA) that regulates expression of a protein-coding reference gene, wherein the lncRNA is transcribed from the opposite strand as the protein-coding reference gene in a genomic region containing the protein-coding reference gene, wherein the single stranded oligonucleotide binds to a region of the lncRNA that originates within or overlaps an exon, an intron, exon, intron-exon junction, 5′ UTR, 3′ UTR, a translation initiation region, or a translation termination region.

92. A single stranded oligonucleotide of 8 to 40 nucleotides in length having a region of complementarity that is complementary with at least 5 contiguous nucleotides of a long non-coding RNA (lncRNA) that regulates expression of a target gene, wherein the oligonucleotide has complementarity to the lncRNA in a region of the lncRNA that is outside of the transcribed region of the target gene.

93. A single stranded oligonucleotide of 8 to 30 nucleotides in length having a region of complementarity that is complementary with at least 5 contiguous nucleotides of a long non-coding RNA (lncRNA) that inhibits expression of a target gene, wherein the oligonucleotide has complementarity to the lncRNA in a region of the lncRNA that is transcribed from a non-coding portion of the target gene.

94. A composition comprising a single stranded oligonucleotide of any one of claims 31 to 73 and a carrier.

95. A composition comprising a single stranded oligonucleotide of any one of claims 31 to 73 a buffered solution.

96. A pharmaceutical composition comprising a single stranded oligonucleotide of any one of claims 31 to 73 and a pharmaceutically acceptable carrier.

97. A kit comprising a container housing the composition of any one of claims 94 to 96.

98. A composition of a single stranded RNA oligonucleotide of 8 to 20 nucleotides in length having a region of complementarity that is complementary with at least 5 contiguous nucleotides of a long non-coding RNA (lncRNA) that regulates expression of a target gene, wherein 2-19 nucleotides of the oligonucleotide are nucleotide analogues, formulated in a pharmaceutically acceptable carrier, wherein a complementary RNA oligonucleotide is not present in the composition.

99. The composition of claim 98, wherein the nucleotide analogues are selected from the group consisting of a bridged nucleotide, 2′ fluoro, and 2′O-methyl nucleotide.

100. The composition of claim 99, wherein the bridged nucleotide is a LNA, ENA or cEt nucleotide.

101. The composition of claim 98, wherein the lncRNA is transcribed from the opposite strand as the target gene in a genomic region containing the target gene.

102. The composition of claim 98, wherein the oligonucleotide has complementarity to the lncRNA in a region of the lncRNA that is transcribed from a non-coding portion of the target gene.

103. The composition of claim 98, wherein the oligonucleotide has complementarity to the lncRNA in a region of the lncRNA that is outside of the transcribed region of the target gene.

104. A method of increasing expression of a target gene in a cell, the method comprising delivering the single stranded oligonucleotide of any one of claims 31 to 73 into the cell.

105. A method increasing levels of a target gene in a subject, the method comprising administering the single stranded oligonucleotide of any one of claims 31 to 73 to the subject.

106. A method of treating a condition associated with decreased levels of a target gene in a subject, the method comprising administering the single stranded oligonucleotide of any one of claims 31 to 73 to the subject.

107. A method of upregulating gene expression, comprising: contacting a cell with a single stranded RNA oligonucleotide of 8 to 30 nucleotides in length having a region of complementarity that is complementary with at least 5 contiguous nucleotides of a long non-coding RNA (lncRNA) that inhibits expression of a target gene.

The application's sequence listing, which the Patent Office published only in electronic form, follows.

SEQUENCE LISTING (1294 sequences)

SEQ ID NO: 1 - DNA, 67515 bp, Homo sapiens
aacaaaacctaggtccggcaattcacagagataatctaatgcagggaatttgttgcaaaggtgatggaaggactgaaagagctaccagggagaattagacaaactcaaaattaagaaatgcagaaaagttgcatttaccataactacgcatagaggaacagaaggaaaaaggtgttaacacagccccggagctgagactgaaaccacagtggtctgtccagcaagaggcggagccatggaggaaacccaatcactgctggaaatggtgcctgaagggaatggcgggaggagaaaaggagggcagaaatacctgcctcctctctgccacccacctgccagtctcccacaggcgcctctcgttggctgaacctctcttgaaacaaattggcaaagcagtttaggaaacgtaatttgcatggatcaggtttccttgaaagaaacagatgaggagaagagaatggatgtaacagcaaataggcaaacaagcaacccaagatgagaatggcttgctgaagctttatgagaagtgaaaagtggattccaggaactgtgaaatggtgaaatggcatatgccatccctgtggatactgtaatcactatttgatgccccagaggggaaagggagaaaggactgtggccagagccaaggaactcaatgaatgtcaatgtttaggaatgactgaaggacaagagatgaaatgaaaggaaaagggtgttagtgttatgtcccaagcctggtctggaaagagcaagggagaggtagaatagcagcacagttaaaaggcccaagtttgagtcccagcttggacacttattagctggaggatttggaaaggtgaattagcctctgagccttggtgtataaaatggagataataatagtaccctcagtaaggctattagagttaaacaagagtgtatataaagcacttcccacagtgcctaacaacagcaatcatagcagagcacattcaatctacattctcaactctagggcatgagaaaaaggctttctccaaggttctcgctcagggttcctcgtgaggttgtagtcagctgtcagtcagagctgcagtcatctgaggcaagaggacccacttccagctcactcatgtggttgctggcaagcctcacgtccttgctggctttgggctgtgtactggaggtcctcaccaggggcctctccatagattctgacagcatggcaaccagctcccacatagcaagtgatctgagagagagagagagagagccgcagtcatctataacctgatcttagacaggagagactatcagctgggtcatctactactggtcacacagaccaaccctggtacactgtgggagggactacacaagggatggaatcccaagaggtgagggaccttttggaagctggctactacacctcttctccctcttccttgttttttctccataccgctgatgaccagctaacacattgttttttgagacacggcctcactctgttgtccaggctggagtagcagtggcaccatcacagttcatcatagccttgacctcccaggctcaagtgatcctcccacctcagcctcctgagtagctgggactacaggcacatgccactaagcctggctaattttttattttttatagagatatatgttgcccaggctggtcttgaactcctgagctcaagtgatccttctgcctcagcctcccaaagtgctgagattgcaggtgtgaggcacccggcttctaacacattgtttaccttattttgttatcatcagtgtccctacaatagaacataagaagcaagggatgtttgcctgtcttgttcactgctgtataatcggcacctagaacagtgcctgacacacagtagggcttcattaatatttgttaaatggtgagtgatgtgccaccataagaaattagcctgggccaggtgtgatgtctcacgcctgtaatcctaacactttaggaggctgaggtgggtggatcacctgaggtcaggagttcgagaccagcctggctaatatggtgaaaccctgtctctactaaaaatacaaaaaattagctgggtgtggtagcgggcacccatagtctcagctactcgggaggctgaggcaggagactcgcttgaacccgggagatggaggttgccatgagctgagatcgcaccattgcactccagcctgggcaacaagagtgaaacttcatctcaaaaaaaaaaaaaaaattagcctgagttctctcagaatatcatagcataagtcctgttcccactttctaaaaacgtttgtacttgattctcacaatctaggaggaaaacatggcagtgtttgtatccccatttcatccatgaggaaactaaaatccagggaagttcaggtcttcttgcccagggtcgaccaatggtatggtgggtctaggacaggtggccctttcttttgcatacagcctccccctgatgccccataactcccacctcatcccaccgggtgccctgctgcctggtgcagcatttagcattactggcaagtcacaatcatcacagatgagcgaagttcatagagctttcattcagcgaagccaggcaggatgggatgaaagaggggagccaagaagcctggagagaagacaccatgtgaatgctctggcctgattctcctttccctgcaaccagtgactctccactatgcaacagtgtcaggctcagagactcaagcccagtctgcctgttagtgttctataataagcagggaatgggtcaggcatggtggctcacacctgtaatcctatcactttgggaggctgaggtgggtggatctcctgaggtccggagttcgagaccaggctggcgaacatggcaaaaccctgtctcttctaaaaattcaaaaatcagccaggcgtggtggcgtgcacctgtaatcccagctactcaggaggctgaggcaagagaattgcttgaacctagggggcggaggttgcagtgagccaagatcgcaccacttcactccagcctaggtgaaacagcaaaactccaactcaaaaaaaaaaaaaaaagcagggaatggagagcaagcaattatcccccacagatgggagacggctgtgcccccgccttagactgaatcactctgaaaccccaaaataaccctttccagagtcccaggcccccagacatagacgttctctgttggacaatgcagtcccacagacggatctaggctgttcttaaagtggttttccaagtaaaggcacttgtctccccgtgaggcgagggccatcaaagctccttttccctcaacgcctaccaagccacaacctattttaacaacacacacataaattagctcagttcatcaacaagatcacctctgaatagtagatgtagaaggttgaaggatagcaacaaagatgctagttatactttcacgtggaattcctgaccctatattctggtaccatattgcctaaggcaagagacaaggcaagacgggttcctccagcaaggggcacatcaggtccctgagcactggaagaaagtagtgatggtgttgatacttgcatcaggtcagaggcagagaagagaactggcctgcagtgatggccaagggtgaaggtaggggtactggctcccctcttctcccctaactcttgtcaaggccacccactcctctgtcctgcctagaatgtgaagggaggcacccagctcagctgcagggtcctgacttcccggtgatctgcactagcctgcagtcccctgaaagcccagacctggatgtgtgtgcctggccaccaaagtggccccggggtgccctctgtgaccacaggtgtataaacatgcctcttaaaagacaccatgaccaaccatgaggccaagtgtggggctagcattcgctgatgtctgtgttttgcacatactaattcacttcatcctcatggaaatctctgaggtaaagaagtatttgctttaatttacagatgaagaaactgaaactcaggttaaaaatagaccaaggacacacaggtagttgaggggcagagcagggatttgaacactgttatgaaaattatctaaaacttggaagtaaggcaaaaagattgctttgaatatttaattcaaagttagaccagaatagtggttctcaaccaggggcaattttactccttaggggaccttttcacaatgtctggagacatttttgattgtcactattgaatgggagagcagatactactgccatctagtgggtggagaccaagaatgctgctaaaccaccttacaatgcatgggacaaccaccacgacagagttagccatgtgttgcttaacaacagggatacattctgggaaatgcatcattaggtgattttgtgatcttgcgaacatcatagagtgtacttacacaaagctagatggtctagcctactatacgcctaggctatacagtctagcctactgctcctaggctataaacctgtacagcatgttaccatactgaatactatagtcaattgtactacagtagttaagtatttatgtatctaacatatctaagcacagagaaagtacagtaaaaaaatataatcttaggggaccattatcacatatgtggtccatcactgactgaaacagcattatgcagcacatgactataatcagtagaaacatcagtaaatagtcaccattgagaaactctgttccagcacagtgtgactatgctcgacttattatttgccattaattaggtctcaaggatgtcaatttttagaagacaataaacaaaaaaattaaaataaaaaaataaacagcaagcacagtagctgatgcttttaatcccaaaactttgggaggccaaggcagcctggccaacatgatgaaacctcgtctctactaaaaatacaaatattagccaggcttggtggcacatgcctgtaatctcagctactcaggaggctaaggcagaagaattgcttgaacctgggaggcggaggttgcagtgagccgagatcacgccattgcactccagcctgggtgacaaaactccgtctcaaaataaataaataaacaaaagagaaaagaatgtcagcttgtagaaaactggtaagatgcaaatgactcttgtctaagaaagtaaccccaaagactatagttttatagacctgaaggacactacccagttgtgtatctcacttagcaatcttacgccagaatgctctttttatcactgactattatagatcagtttcttccagcttcctttaaaccagtttgccttcctgctggctccctcttgtattttgctagggctgccataacaaaataccacagactggctggcttaaaccacagaaatctattttctcagagttctggataatggaagttcaagatcaaggtgctggcagggttggtttcctctgaggcctctccctgtggcttgcagggggccgccctcttgctgcctcttcctgtggtcttttctctgtgcacatgtgttcctggtgtttctttctcattttataaagacaccactcctttcacattaggacctacacttgagacctcatttaaccttaattactttttttttttttgagacggagtcttgctctgtcgccagactggagtgcagtggcgcgatctcagctcactgcaacctccgcctcctgggttcaagtgattctactgcctcagcctcctgagtagctgggattacaggcatccgccaccatgcccagctaattttttttttctttgtatttttagttgagacggggtttcaccatgttggccaggctggtctcgaactcctgacctcaagtgatccacctgcctcggcctcccaaagtgctgggattacaggcatgagccaccatgcctggccaaccttaattacttctttaaaggctttatctccaaatatagtcatattctgagtgtcctggcagttaaaatttcaacctatggactttgggagaacacacttcagtacctaaaactccactaattatttaatctttgatgcatgctcactacaaatttgcatgagaattgtttttaactttttgaaaattatgctttgcaaatacatttgtctaagcccacaaagtctacttgtttctactatactatacttcttgcatgctggacagatagagccaattcactgagacagcagtattgcagtaaagaaacagtttaattaaggcaagggctggccacatgaaagacaagagttcattattcaaatcagtttctctgagaactcagaggctagggtttttatggataagttggcaggcagggagttagggaatgggtgctgctgattggggataaaagcatggcaaacaatcctcatgtgctgagtccaccatagggtgggggccacaggactggctgagtcatgagtcgtgagtccaagtgaagtcagttggtgcccagaatgcacagttctgaaaatcatctcaaaagacgaatcttgggttctacaatagtgatgttatttacaagagcaaacggggaagtcacaaatcttgtgacctccagcatagattatagaaaggcaagctattcctacatcttagcagaattcagacccctcccataatcctaatcttgtggcctttcattagttttacaaaggcagtttcagtccccgaaaaaggaggggctcagttttagggagggactattatcattcttgcttcaaagtgaaactatacactaaattcctcccacagttagcttggcgtggcctttgttatatgcccaggaataagtgaggacagccagcctatgagactagaagcaagatggagtcagccaagctaaatttctctcactgtcataacctttacaaaggtggtttcattaggcatattaatgcaaattccttagttaaaacaagaatgactctctaaaggctatatttcagatacatcacatgcttctttcctcttgtcccctcaacagtaagcaagaagagtatttttgtacaagagagaggcctctgcctgaagctcccttaatctgtcagatcacagatcaaaagctatcacacactgcccaagggaccctaaagggagccactctcagaaaataaatccaaacctccttttttctggccactgaaacgttcaataattagttcattatctacatcattcacatgtttaatatttattgactttggaattattgattactttgctgagtatcttatgaatttaatctatattaatattaaggtgatgtatcaaattgcattccagagtgtggatttgactctagtgccataatcagtctcctgggacaaacagctgtttctcttccctcattatagaaaaaaattgcccttggcaaatgtcaaagaacatccttttatcaatctctcttaccaatcaatccaagcaaatgcagtgggatttcttttccccagagttgaagtcacctcctgacaggaagttaagtctttaggcactgaatcatagcactgagctgaagcccaggactaagcaagaatgagtgagaatttggagacttaaggtttggtcatctgtagaggattgggttttgtcttgttttgtttttgttttggtgtcctgcaaggtttctcactgcccttcatcaggtaatatgccctgtccctgaactggccaattgtgttaccccattcccttagcaacagtgattgctactgaagaaacaggaggccaacaaagaatatcactcattcaccagtagagtgtctatgtcagagatattagataaacaggaaaactaacaattacattgcaggctgtggaaacagagagaggtacctaaggcacacctgtgggaatatgaaagtttggtttcataaaaggattctggaggaagtcacctctgacatttgagttgagtcctacaggatatgaagaaagtagccccatgttccggttactatggctgtgtaataaattacctaaaacatactggattaaagctatgaaaacatcttttctgcccagagattctgtgggcctgaaattcacatggaacacataaggcataccttgtttctgctccatgatgtctaaggattcagctggaagactgggaggctgggggctggaatttatctgaagaatgactcatttacatgtctactggttgaccctggctgttggctgagggggcctcagctctctctacattgtttctctactttggctagtttggatttcctcaaaacatgatggctggtcctcagtgtcagcatcccaaaaagagaatgccggacacagtggctcacacctgtaacctcagcaatttgggaggctgaggtgggaggttgcttgagttcaggagttcaagaccagcctgggcaacatagtgagactctgtctctaccaaaaatttttaaaattttaaaaatcagccaggtgtggttatgcacacctatagtcccagttacttaggaggctgaggcaggaggatcacttgattccaggaggtcaaggctgctgtgagctatgaccacaccactgcatttcagcctgggtaacagaatgagactctgtttcaaacaaacaaaaacccaaaaaaaaaaaaaagagagagagagggagttagaaggaagatgcatcatttttatgacctggacttggaagtcaccaagcagcacttctgcagtaccctgttggttggaatagttgtagcccaaacccgaattcgaagggaggagaatagataacatccctgggtgacaggaatgtcaaagtcccaaacagcatatgacatgtgacaaatattggtgtggccttctttggaagatccaatcttccataccaggcaaagggatggaagactaaggaacaacatgagggatagccagagagggaaaaagcatcacttgttctaggaactacaaatagcttgaagaagcaaagatgtctagatgcctcccaatatgcagagtggggtgtacagaagagagtggtaagggcgctgggagagctaaggtgggcaagagagcttcctctgtcatgctaagaaagttggaatttatcttgatggtggtgaaagcagagggctatggttagattcacatttgagatttagatttttagatttaaaatgatcaccctggtgacactggcttaactcacaattttgcccaaggcctatgctaccacagtgcttctgaaactttaaagcacattagaatcacctggaggtcttgttaaaccatggattgctgggccttgaaaccccagagattctgattcagtagatcgagaatagggcctgagaatttgtatttctaacaagtttccaggtgatgctgaggctgctggcccagcgaccacatttgataatcatagccctctgataaatcctatcaaaatatcctaatggcagagcaagggaattctggtgatatcctcccctacccataacctgacagctattaggatctgcctacttgaggctaaaagcaaccaagagaggaacagctacagtgtaccacagagtccctcaacatctttgcccacgccacggtgccccagcttcttaccaagtgtgcctgattcctcttgactacctccaaggaagtggagaaagacaagttcttgcgaagccttcgtcttctctgatatgctattctatgtctatttctttggccaaaaagatggggcaatgatatcaactttgcagggagctggagcatttgctagtgacctttctatgccagaacttgctaagcatgctagctaataatgatgtagcacagggtgcggtggctcacgcctgtaatctcagcactttgggcggccgaggcgggcggatcacctgaggtcaggagttcgagaccagcctggccaacatgatgaaaccccatctctactaaaaatacaaaaattagccaggcgtggtggtgggcacctgcaatcccagctactctggaggctgagacagaatctcttgaacccaggaggtggagattgcagtgagcagagatggcaccactgcattccagcctgggcaacaaagcaagactctgtctcaaataataataataataataactaatgatgcagctttctctctctgagtatataatgcagttctgatgatgtgaggaagggcctcactgttggtgtggcagagtctgagaccatggctggcaatgaaaacactaccctttgatgcctatgggctctccctttatggtttcaaggagggcttctcaatcttggcagaattttggactggatagttctttgttgcacaggtggggggctgtcctgcacatcacaggatgtttcatccctggcctctacctactagatgccagtagaacatacccaccccacagctgcctgttgtgacaatcaaaagcatctccagatactttgcagggggaaaatgatttctccaggcctggcatatacataacagtatttaagcagctgcctagaattaattaaacacagaaggatgtctctcatccagaatgccctggaccacctctttgataggcaatcagatcccacctcctccaccctatttttgaaggccctgtgccaacaccacttcttccatgaatacttccttgattcccccatccctagctctatataaatctcccactcaacactcacacctgttagtttacattcctcttgacacttgtcatttagcatcctaagtatgtaaacatgtctctcttcacgattcacaaagtggctttggaagaactttagtaccttcccatcttctctgccatggaaagtgtacacaactgacattttctttttttttaagacagtatcttgctatgatggccgggctggaatgctgtggctattcacaggcacaatcatagctcactgcagccttgagctcccaggctcaagtgatcctcccgcctcagcctcctgagtagctgagatcacaggcatgcactaccacactcggctcacatttgacatcctctaaagcatatataaaatgtgaagaaaactttcacaatttgcatccctttgtaatatgtaacagaaataaaattctcttttaaaatctatcaacaataggcaaggcacggtggctcacgcctgtcgtctcagcactttgtgaggcccaggcgggcagatcgtttgagcctagaagttcaagaccaccctgggcaacatagcgaaaccccctttctacaaaaaatacaaaaactagctgggtgtggtggtgcacacctgtagtcccagctacttggaaggctgaaatgggaagactgcttgagcccgggagggagaagttgcagtaagccaggaccacaccactgcactccagcctgggcaacagagtgagactctgtctcaaacaaacaaataaatgaggcgggtggatcacgaggtcagtagatcgagaccatcctggctaacacggtgaaacccgtctctactaaaaaaaaaaaaaaatacaaaaaattagccaggcatggtggcgggcgcctgtagtcccagttactcgggaggctgaggcaggagaatggcgtgaaaccgggaggcagagcttgcagtgagccgagatcgcaccactgccctccagcctgggcgacagagcgagactccgtctcaatcaatcaatcaatcaataaaatctattaacaatatttattgtgcacttaacaggaacatgccctgtccaaaaaaaactttacagggcttaactcattttatccttaccacaatcctatgaagtaggaacttttataaaacgcattttataaacaaggcacagagaggttaattaacttgccctctggtcacacagctaggaagtgggcagagtacagatttacacaaggcatccgtctcctggccccacatacccaactgctgtaaacccataccggcggccaagcagcctcaatttgtgcatgcacccacttcccagcaagacagcagctcccaagttcctcctgtttagaattttagaagcggcgggccaccaggctgcagtctcccttgggtcaggggtcctggttgcactccgtgctttgcacaaagcaggctctccatttttgttaaatgcacgaatagtgctaagctgggaagttcttcctgaggtctaacctctagctgctcccccacagaagagtgcctgcggccagtggccaccaggggtcgccgcagcacccagcgctggagggcggagcgggcggcagacccggagcagcatgtggactctcgggcgccgcgcagtagccggcctcctggcgtcacccagcccagcccaggcccagaccctcacccgggtcccgcggccggcagagttggccccactctgcggccgccgtggcctgcgcaccgacatcgatgcgacctgcacgccccgccgcgcagtaagtatccgcgccgggaacagccgcgggccgcacgccgcgggccgcacgccgcacgcctgcgcagggaggcgccgcgcacgccggggtcgctccgggtacgcgcgctggactagctcaccccgctccttctcagggcggcccggcggaagcggccttgcaactcccttctctggttctcccggttgcatttacactggcttctgctttccgaaggaaaaggggacattttgtcctgcggtgcgactgcgggtcaaggcacgggcgaaggcagggcaggctggtggaggggaccggttccgaggggtgtgcggctgtctccatgcttgtcacttctctgcgataacttgtttcagtaatattaatagatggtatctgctagtatatacatacacataatgtgtgtgtctgtgtgtatctgtatatagcgtgtgtgttgtgtgtgtgtgtttgcgcgcacgggcgcgcgcacacctaatattttcaaggctggatttttttgaacgaaatgctttcctggaacgaggtgaaactttcagagctgcagaatagctagagcagcaggggccctggcttttggaaactgacccgacctttattccagattctgccccactccgcagagctgtgtgaccttgggggattcccctaacctctctgagacgtggctttgttttctgtagggagaagataaaggtgacgcccattttgcggacctggtgtgaggattaaatgggaataacatagataaagtcttcagaacttcaaattagttcccctttcttcctttggggggtacaaagaaatatctgacccagttacgccacggcttgaaaggaggaaacccaaagaatggctgtggggatgaggaagattcctcaaggggaggacatggtatttaatgagggtcttgaagatgccaaggaagtggtagagggtgtttcacgaggagggaaccgtctgggcaaaggccaggaaggcggaaggggatcccttcagagtggctggtacgccgcatgtattaggggagatgaaagaggcaggccacgtccaagccatatttgtgttgctctccggagtttgtactttaggcttgaacttcccacacgtgttatttggcccacattgtgtttgaagaaactttgggattggttgccagtgcttaaaagttaggacttagaaaatggatttcctggcaggacgcggtggctcatgcccataatctcagcactttgggaggcctaggaaggtggatcacctgaggtccggagttcaagactaacctggccaacatggtgaaacccagtatctactaaaaaatacaaaaaaaaaaaaaaaagaagaagaagaagaagaaaataaagaaaagttagccgggcgtggtgtcgcgcgcctgtaatcccagctactccagaggctgcggcaggagaatcgcttgagcccgggaggcagaggttgcattaagccaagatcgcccaatgcactccggcctgggcgacagagcaagactccgtctcaaaaaataataataataaataaaaataaaaaataaaatggatttcccagcatctctggaaaaataggcaagtgtggccatgatggtccttagatctcctctaggaaagcagacatttattacttggcttctgtgcactatctgagctgccacgtattgggcttccacccctgcctgtgtggacagcatgggttgtcagcagagttgtgttttgttttgtttttttgagacagagtttccctcttgttgcccaggctggagtgcagtggctcagtctcagctcactgcaacctctgcctcctgggttcaagtgattctcctgcctcagcctcccgagtagctgggattatcggctaattttgtatttttagtagagacagatttctccatgttggtcaggctggtctcgaactcccaacctcaggtgatccgcccacctcgccctcccaaagtgctggaattacaggcgtgagccaccgcgtctggccatcagcagagtttttaatttaggagaatgacaagaggtggtacagttttttagatggtacctggtggctgttaagggctattgactgacaaacacacccaacttggcgctgccgcccaggaggtggacactgggtttctggatagatggttagcaacctctgtcaccagctgggcctctttttttctatactgaattaatcacatttgtttaacctgtctgttccatagttcccttgcacatcttgggtatttgaggagttgggtgggtggcagtggcaactggggccaccatcctgtttaattattttaaagccctgactgtcctggattgaccctaagctccccctggtctccaaaattcatcagaaactgagttcacttgaaggcctcttccccacccttttctccaccccttgcatctacttctaaagcagctgttcaacagaaacagaatgggagccacacacataattctacattttctagttaaaaagaaaaaaaaatcattttcaacaatatatttattcaacctagtacatacaaaatattatcattccaacatgtaatcagtattttaaaaatcagtaatgagaccaggcacggtggctcacgactgtaatcccaggactttgggaggccgaggcgagtggatcatctgagatcaggagttcaagaccagcctggccaacatggtgaaaccccatctctactaaaaactagctcagcatggtggtgggtgcctgtagtcccagctactcgggaggctgaggcatgagaatcacttgagcccaggaggcagaggttgcagtgagccaagattttgggggattctgtgacatacaaaaaaaatcagtaataagatatcttgcatactcttttcgtactcatatacttccagcatatctcaattcacaatttctaagtaaatgctctatctgtatttacttttataaaattcacaattaaaaatgaaggttcacatagtcaagttgttccaaacacacttaaatgtctcctaggctgggtgtggttgctcacacctgtaatcccagcactttgggaggctgagatgggcggatcacctgaggtcaggagtttgagaccagcctggccaacatggtgaaaccccgtctctactaaaaatacaaaaattagctggatgtggtggcactcacctgtaatcccagctactcaggaggctgaggcaggataattgcttgaacccgggaggtggtggaggttgcagtgagccgagatcgcaccactgccttccaacctgggcgacagagcgagactccgtctcaaaaaaaaaaaaaaggctcctaataactttattactttattatcacctcaaataattaaaattaaatgaagttgaaaatccaggtcctcagtcccattagccacatttctagtgctcagtagccacgggggctggtgaccaccacatgggacagcatatttagtacctgatcattggttctcagatctggctactcagcagaaccaagaatccacagaaacggcttttaaaagcacagccccacagcccccagccccagccttacctacctggaggctgggaaggactctgattccacgaggcagcctatgttttttgatggagggatgtgacaggggctgcatctttaacgtttcctcttaaatactggagacagcttcgaggaggagataactggatgtgtcttagtccatttgatggagggatgtgacggggctgcgtctttaacgtttcctcttaaataccggagacagcttcgagaaggagataactggatgtttcttagtccattttctgttgcttgtgacagaatacctgaaactgggcaatttatatggtaaaaaattttcttcttactgctctggaggctgagaagtccaaagtcaagtcccttcttgctggtggggactttgcagagtattgaggcggcaccgggcgtcatatggtaaggggctgagtgtgctacctcaggtgtctttttcttttcttataaagcctaactagtttcactcccatgataacccattaatctatgaatggattaatccattattgagggaagaaccttcatgacccagtcaccgcttaaaggccccacctctcaatactgccacatcgggaattaagtttcaacatgagtttcggaggtgacaaacattcaaaccatagcatgctgtctcttaaatgactcaataagctcctgtggcatccacttctgcatgccttgggcagcttttagacatctgtccattttcctagagggacaagaccaccacctgtgatcctatgaccttttggctttaggcctaacaagcaggttataccctcactcactttcaaatcatttttattgtcttgcagacaatttacacaagtttacacatagaaaaggatatgtaaatatttatacgctgccgggcgcggtggctcacgcctgtaatcccagcactttgggaggccgaggcaggtggatcacgagttcaggagatggagaccatcctggctaatacgatgaaaccccatctctactaaaaatacaaaaaattagccgggcgtggtgacgggtgcctgtagtccccactactcgggacgctgaggcaggagaatggcgtgaacccgggaggcagagcttgcagtgatccgagatcgtgccactgcactccagcctgggtgacagagcgagactgcatctcaaagaaaaaaataaataaataaataaatatttatactgcttataaactaataataaatgctatggtctgcatgtttgtgtcaccccaccattcatatgttaaaacctaatcaccaaagtgatattaggaggtggggcccttgggaggtgatgaggtatgagggtggagcccatatgattgggattagtgcccttctaaaatagcccaacggagcccagtgacaaggcatcatctatgaaccaggaaactggccctcaccagacaccaaagctgttggtgcattgatcttggatttcccaccctccaggactctaagaaacacatttctattgtttataagccacccagtggctggtattttgttataacatcccagactaagacaaataacaaatacttgtatccctgacaccaggttaagagatagaatttgtttgttcctctggaggcccttgtcttcaccccatcactgccctgtcctccctggaggaatctgccagcccgaattctgttcatcgtaccctccttttcttagagtttgacctcctctgtatctcccccaatccatgtattgcttatatacaaggtattctgctgtatctgttctgctatggcttgccccttttgttcaacactgtttttgtgcgtcatctgcattgatgcatgcagttgtcctttatttgttctcactgctggatagtatctggttgggtaaatatatcacactgtaaatcacactatccaggttcctttaggtgacatttggttgattgcagtgttctgttgttacgatggtgctgctgtgactgttcttgtgcatggacagaagttcctttcaggtgaatttctcagaatggaattgctgggcaaaggggcagccaataatcaactcatttgatgccaaaagtggtggtgccagttcatcctcccctgcgaggtatgggtcctgattcactcttcaagtgctgtggtttgacagggccgggggtgacaaggggacacctgggaaggaaagctgggctccctgctggccatccaggccagtccttaccagggggtaggcaatgattgggtcaagtggttcctgaccactgggcctgagacttcaggcccagaaactatctaatatttcctcaaatgcatcccatgagcaggcactgtgtgagtgagcacacacatctgaagcctcaagctaggcaagcctaccatgacttgtggtccaagggctcacgggtgacctggagttagagggagacatggctgccaggtggctttagaaagaacactcatcatggccaggtgcggtggcttacgcctgtaatcccagcactttgggaggccaaggtgggtggatcatgaggtcaggagtgagaccagcctgaccaacatgctgaaacctgtctctcctaaaaacacaaaaattagctgggcatggaggtgcacgcctgtaatcccagctactcaggaggctgaggcaggagaatcacttgaacccgggaggcggaggttgcaataagcctagattgtgccactgcattccagcctgggcaacagagcaagactccgtctcagaaaaaaaaaaaaaaaggaagaacactcatcctatgaccttgacctccaagctttgcctccctcaagcagaacagaatggagcctcccttaggcagaggcggaagtttgcctctcacctagttctccattcttttgttcagagcctgaataccctcaggctctgtacttggggtatttctgttctcttgttttatgctcacggttgtgaggtttgttgtgagtaccacgatcccttccttcagaggagtaaactgaggttccaaaaggtttagcagttgcccgaggaatattaaattggcaaaagcaggtagaatataaagcaaggagtatttggcaacggttcttttttatgattaaaaacagccgaagaaagacttctacttgtgcctttgaaggagtaactgcatttgaccttcccaccagtaacaaccatcaaatctctattaaattaaacacacacacacacaaacaaaaacagctattgtgaaggtatcagcgactaagacaactaaggtttgaggggccaggatcctggagagatggaaacttccctgaggtgagccccacattctcagacacttttccttggatgttttgagcactgctttaattcctgggaaaacaattccttccactgtgcacagactctggggccagacagcttgggttcaatcccagctctgccacttaatgtctgtgtatctgtgtaggcaagttaccctttggtgcgtcagtttcctcatctgtaaaacacaactatagttgatcctcattcgttaagagtctgtacttgttaatttgctcacttgctaaaatttgttaccccaaaatcagtacccctagccttttggggtcgtttcaaagatgtgtgcagagcggcaaaaaaatgtgagctcctccaggctcatgttcccagccaaggtccaacaaagtgctgccctgccttcttatttcagctgtcatagtgtaaactgtgtccttttcacagtctgattagtgccatgtttttcagatttttatgcttttttcttggttatttctctgttaaaattgtctccaagtgtagtgcaaagtttagcacgaggaggctgtgatgttccttacagagaaaatgcatgtgttagagaagctttgtcaggcatgagttaaggtgctgttgtcctgagatcaattaatttgttgttgttgttgtttgagacagggtctccctctgttgcccaggctgctggagtgcaatggtgtaatcatagctcactgcagcctctacctctctggctcaagcaatcctcccacctcggcctcctgagtagctgggactacaggtacaccccaccacacccagataatgtttttgatatttttttaggtggaattttgctcatcacccaggctggagtgcaatggtgcgatcctggctcactgcaacctccacctcccggattcaagcaattcttctgcctcagcctcctgagtagcacagattacaggcacatgtcatcacgccttgctaatttttgtgtttttagtagaggcggggtttcaccatgttggccaggctagtcttgaactcctgacctcaggtgatccacccgcctccgcctcccaaactgcagagattataggcacgaaccacaatgcccggcctcatgttttttatttttcaagttgaaatgaggtctctctatgttgcccaggttggtctcaaactcttgagctcaagtaatcctcccaccttggcctcccaaagtgcggggattacaggtgtgagctaccatgcccagccaagatcagtgttaatgaatcaactatatatattacataaggtgtctttaaacagaaataaggttatatattgatcgattggtaacaatgttgtgaccagcagcttacagggtacctagccttgtatttctcctataaataatttgctcgttgagtgtttgtggcaactttgtagcacataactaccaagaataaggactgtaataagagtacgtccctcacaggattgtaatgaagactgagtccatttacataaaggctgagagcagtgtcaagcagatggagaacactgtagaatgtgcgatagctctaacagtggttatcatggctgccctctcacttcttcagagacatgtgtttctaaggtctgcactctgccccaccctccccatccactgtcccccagcccgtttcctcctccacttacttcccagccctgtgccttctgccttctcttttctgagtttgctaagggcactgctggctcaagagcagtaactaacagtctctcgcctcttctctccatggcaaccagtgacctttggagaatgtaaaccttatcaccaatctcttaaagcccttcggtgccttcccaggatgacgtccagctgaggtccttggcaagacccagggcgccccctcctcgctccatcacctcccctgtcacctcccctgcatctccctactccagctgcaccactcttgtgccccagtggctcttgtctgattatttccttcatctccccagctggtcagcagagctggtggtaatcaactcagaccctgtcacctggatgtccagcagttagggactaaaaaaaatcaacaggtcacattctgtcctgcagatcatgataataagatctgtcagacagcagtcagcagtcagagccaaatcttctggacttcagcaggattctgcctcttgctatttcctgttgcctctcttagtgaccttttaagagcattgtggatgcctcccagcctcctgctaaccaccctgtaacctgaacagcctgcagcagccctgcccagtagaacttcctgatgtgatggaaatgctgtgtctgcaccactagccacatgtggccacaggattctcgaaactggtggtgcagttgaggagctgactttatattttatctcattaaatttaaatgtaaatagctacgtgtggcttgttggctagcctattggaaaacacgggcttagagagacacagggagaatcactgtaatgcactaaaagaaggtaaaaaaaaaaaaatcctaagaaatattcctaaaatactttaatatagggctgggtgcggtggctcacatccagcattttgggaagctgaggagggcagatcacttgaggccaggagttcaagaccagcctggccaacatggtgaaaccccgtctctactaaaaatacaaaaaatcgggtgcggtggcgggtgcctgtaatcccagctacgcgggaggctgaggcacgagaatcactcgaacccgggaggcgggggttgcagtgagccgagatcgtgccactgcactccagcctgggcgacagagcgagacttcatctcaaaaacaaaaaacaaaaaccaaaaaaaaaaacttcagcatgattatttaaccaaaatgcaggttagttgttcaccggatgcagagtccaattaacaagagcaaggcctggtaccaaaaaaagtgaatttactccgaaactagcttgggtgaggggtacaaagcatcctgcctttctttaaaagtgctgcttccccttggaagtagaaagtggacacttttataaggtaaggggggaagtgtgcaagggcaagtgggggggtccctctgctagttccgtgcatactctacaggacagttgacttggcaccttcctggttagtaataagctgtagcagtggccaagtgggcatgctttcagtatgccctcccagtgaatgaaagtcctgaggcaacccccaagggtggaagtgccaggccaccacccactggaggtgaaagttccgtgatgggtttgctttggtctgcgaatctactgtcatgtggagagatctgtgctctggaagagcatacagttagaaaagcttgccctgaagggaatgtatggtgaaggggaggtgaaaggttatatttgcatttctgaagggctaagtaggaaaccgggaaccaggggagaggagaagagaagagaggataattttttttaagaaaagcaacatattccctttttcttagaaaaaatggagcactcggttacaggcactcgaatgtagaagtagcaatatataaattatgcattaatgggttataattcactgaaaaatagtaacgtacttcttaactttggctttcagagttcgaaccaacgtggcctcaaccagatttggaatgtcaaaaagcagagtgtctatttgatgaatttgaggaaatctggaactttgggccacccagggtaagataaaacaccttccacgtcataggtatcttcctctctccttccctgcctctcccattagaacctggttttcttcctgagcagcaacaatcttaggcatctttccatgtgactgagtatccaccacattatttttaatgaaatagtattagattgcatggatgtgacataatccatttaacccatcccctactgttggacattcaggttgtttccagagtttcaatattattttatttaataccctaatagttagagcaggccatgctgctatcacaaatagacccaaatatttaatagctcaaaccaataacgtttgtgtcctcctctctgggcagtacagggttggcatacctcctgaagtgaattaggaactacactcattccagcttccagtttggtctttatctgtcagtgccttactgtcctctgcattgttgagtctcagtcaccttgtccaagttccattggccagaaagggctagaagcacagaagggctggaagtggcatttgttcctcactcacattctggtgggaagaacttagtggtgtggccttagctgactgtaagggaggctgggaaatatagtctagcgagtgccctggaaaaagccggcacggcattccccatggaaagctgtcaggcacggctacagtctaccccctgccaaccagtatctgcatggaccctccttccacactcagatgcatttacccccagccccaagagagccaaccgatgcccatgtggtcaccacagccacctccgagtccaagatttccaggtgacatgcagtctcctctctcccagctttaggaatggcttcttctgatctacacacagacacagacacacacacacagacacacacacacacacacacacacacacacgatggagaggggcaggataactgcaactgtaactccattcagaaaagaggcacagcactagctgcccgcagcactggagccctgctgggcagcactggatcaacctctgccctggcagaggagcatgttcctccacaaatccctgcttcagcctctcgagaggctcctccttgtctgttattttccttggccacaaggcaggcaggcagtgggaagtgtgccctcctccggggcaaggagccttcacagcccacttcctgctaataacagtttggggttccacagggtgttttaagactccagtcagctattttaggccagactcatttctctctctctctctctttttttttcttttatgaaatcacaccctgagacccaggctggagtgcagtggtgcgatctcggctcactgcagcctccgcctcccgggttcaagcaatcctcctgcctcagcctcctgagtagctgggactataggcgtgcagtgccacacctagctaatttttgtatttttagtaaagacggggtttcaccatgttggccaggctggtcttgaactcctgacctcagatgatccgcccgcctcggcctcccaaagtgctgggattactggcatgagccactgcgcccagcccagactcatttttctttgagagtaggcttttcccaaaagtaggcttctgagctattcactttcaggcagtcccatgtgccaggaaccacatccaaatttcctccgtggatgggagtctcaggctgccttatctccttgcatgtccccatgcccagctgtctcagcctaagggcaggtaccttgaagtcaagttaaacaataagattggagaccagcaatgccctcagcctggtttttgcagcaggactgagtcccttgttttggctcaatgggaagtctttgctgttcaaagccttagcttctctggctgagtgcggtggctcacgcctgtcatcctagctctttgggaggccgaggtgagcagatcactgaggccaggagttcaagaccagcctggccaacatggtgaaaccctgtctctactaaaaatacaaaaagttagccaggcgtggtggcaggcacctgtaatcccagctactcgggagcctgaggcaggagaatcgcttaaacccaggagatggaggctgcagtgagctgagatcatgccattgcactccagcctgggtaacgagcgaaattccatctctaaaaaaaagaaaaaaaaaaggccttagattctccctttgactttccacgtttgtgcagccttttatctccaatgctccatttcattccatctcctggcttattcttttcttgtcacatctactaaaagcaacaagaagccaccggtattcaggaacattctacctgtccccagagctatatgctcagtaggcatacagttggccctccaggttatctgagactcagatttccagagggctttgcatggctcacaaggtctgaagaacctctgagcctcccgcctgcggtgtctgttcattgactttgccacagtctcaaagaggcactgcatgctgcatgtttgaggtttttgctttggtggcatccatttccagcctcggcttccggcattcctcccccagcagactctctgctgctttccccttactccttctggcagttctgggaggttgcatagggcccttgcaggatgccccaagtccagctgcctctggcctctgggaagcacacccttgacctgccatgtgtaggaagacagcccgcttctgccagggcccaactctgccggcaggtagcaccttccaacctcttcactttggactttataactgtcaggtataaagtcggttgtgtccttacgtttctcaaattcttcaagacacgtcaaccagcctctcctacgcattctctccagctcagtctcaaaacacaccctttctctccagctcactctcaaaacacaccctatcaggccaaccactctttttaaaggacagctcctcaccaatccagtcaggtagccttccccacattgtatcctggaagtgggtgatggactgggtggggaagagggtcatatggcaaatctgtatgtcttacagtaattgtctagcagcccctggtgtcttactttaggccccctggaaactttcagatagtggagttgtctgatacatatcttataacctacagatattaatatatcctcacaggggcacaaaagctcttacaaggatgtttattataataatatttttattgttataatttacatgccataaaactaaccattttaaaatgtataatgcaagggtttttagtatattcacaagattgtgcagctgtcactactaattccagaacattttcattattccagaaggaaaccctattcatattagcaatcactcccccattccgcctttccctaaaacccagcaatcactaatctactttctgtctctgtggatttaaagtaattttaaatttgaaaaatagtatctataaggaaatgtatctagtcacaagcatacagcttgatgaatttgtaaaaattgaacagtcctatgaacataccctgtaagctcaagacatagaatgttaccagcccctgcaagcaagctgcctgctcacttctagtcattaacccctccctcttttccttctagtcattaacccttcagagtaactattctgattaccaatagcatagattagttctgcctgttgttttactttatataaactgtctcattaagtataaacatgtttgtgtatacttgtgtatttctttctatcacaatgatgtttgtgagattcatccatgctgttcctatagacaattctattttgcagcgtagtattccattgcatgactataccacaatttatctgtgatattacaaaggaatacttgggcagtttccagtttggggctataggatagttgtgatacaaatattttagtatagtacatgtcttttggtgaacctgggtacacatttctgttgtgtataccccttaagagtggagctgatgatcctggctaacaaggtgaaaccccgtctctactaaaaatacaaaaaattagccgggcgtggtagcgggcgcctgtagtcccagctactcgggaggctgaggcaggagaatggcgtgaacccgggaggcggagcttgcttgcagtgagccgagatcgcgccactgcactccagcctgggcgacagagcgagactccgtctcaaaaaaaaaaaaaaaaaaagagtggagctgatgggtcatagcatgtaaatgcattcaactttagtagatactgtccaacagttttccaaagtgattgtccaacttacttgcctatcagcagtatctgaaaagtctagttgcttcttttcttggccaactctttttttttttttgagatggagttttgctcttgttgcccaggctggagcgcaatggcacgtcctctgctcactgcaacctccgcctcctgggttcaagcaattctcctgcctcagcctcccgagtagctgggattacaggcatgcgccactatgcccggctaattttgtatttttagtagagacagggtttctccatgttggtcaagctggtctcgaactcctaacctcaggtgatccgcccgcctcggcctcccgaagtgctgggattacaggcatgagccaccgcgccaggccggccaactcttttttattttattttattttactttaaagacagggtttcactttgtcacccaggatggaatgcaatggcacgatcacagctcactgcagccttgacctccctggctcgggtgatccctcccacctcaggctcctgaggagctagaactacaggcatgggccatgcccagctaattttttaatttttggtagagacggggtctctgttgtctcagattcctgggttcaagtgatccttctcccttggcctcccaaagttctggtattacaggcatgagccactgcacccagcccatggccagctcttgatacgatctgtctctttcttttctttttttttttttaatttgagaagtgttaaataatctttctttgatattatacataaaccacaccaaaatgtctttcagtaagtaaaatgaaccattttagatacagaaaattctaattagattggcatagttaaggccaaaaatataaagttgacattgctaccttatcttcagcccttgcctttaagaggcaaatgaacacaaaatacaggtgaatcttgcttggttctgagacagtgaaggactttcccccagtatttaaatatatttacataaccagttacataaatctaaatattaaaaaaatctccaatagattttagatggcattcaccatctttgtgaaaagttgaacattactaatgaaatctgatcatatctttagaaggataaacagtgatagcatttactgaatcagaataactgttttttggggttttctttgagacggagttttgctcttgttgcccaggctggagtgcagtggtgccacctcagctcactgcaacctccgccccctggattcaagagattatcctgcctcagcctcccgagtagctgggattacaggctcgccccaccatgcccagctaatttttgtatttttagtagaggcgaggtttcaccatgtcagccaggctggtcttgaactcctgacctcaggtgatccacccgcctcagcctcccaaaatgctaggattacaggcgtgagccaccaggcccagcctattttttttttttttctttttttgagacggagtctcactctgtcacccaggctggagtgcagtggcacaatgtcagctcattgcaacctccacctccggggtttcagtgattctcctgtctcagcctcccaagtagctgggaactacaggcgtgcaccacaagcccagctaatttttgtatttttagtagagacagggttttgccatattggcctggctagtttcaaactcctgacctcaggtgagccacctacctcggcctccgaaagtcctgggattacagacgtgagccactgcactgcctggcccagaaaggactattaattgtagttgcctctgggaatgggggctgcctgcttctttctgtaaccccttctgtgctgtttaaatttttttttttttttttttttttgagacagagtctcgctctgtcgcccaggctggagtgcagtggcgcaatctcggctcactgcaagctccgcctcccaggttcacgccattctcctgcctcagcctcctgagtagctgggactacaggcacccgtcaccacgcccggctaattttttgtattttcagtagagacggggtttcaccatgttagccaggatggtctcgatctcctgaccgtgttatctgcctgcctcggcctcccagagtgctgggattacaggcatgagctaccacgcccggcctttaaatttttactttgggccgggcacggtgccttacgcctgtaatcctaacatttcgagaagctgaggcacgtggtggatcacttgatgtcacgagttcagaccagccactgcactccagcctgggtgacagagtgagactctgtctcaaaaaaaaaaaaaaaagaaagaaaaacttttactttttacatgttattttcatcaatttaatgaatttaaataacaaatgtataaatttgatattaataaaatggaagcatttggtaatcatgttttgggttttgtgcttcctctgcagctctctagatgagaccacctatgaaagactagcagaggaaacgctggactctttagcagagttttttgaagaccttgcagacaagccatacacgtttgaggactatgatgtctcctttggggtacctcttgacttcttttatttttctgtttccccctctaagaattttagttcactaaaatgaagaatttccctccagcagagctaagcatcaagtagcatgtagttgtaggtaggattaaaagactagggttccgggaggtgaaggttgcagtgagccaaaatcacgccactgcactccagcctgggtgacagagcgagactctgtcatagatggatggatggatggatggatggatggatggatggatagatagatagatagatagatagatagctggatagatagataagatagataagacaagactaggcttcaagctgcagtccagctctaccaggcttgttgtgactctgggcaagtcactcagcctctctgagcctcattttccagcttcagtggatacccatgaaggcaaatcagagaggggcctgagtgtgtatttgtccagcaggcagatggagggaacaacaaactagacccgtagttcttcagtagggataagataactgcccaaaagttatttagattacaaagacttgagccctgctcctgtgagacagtgatggggtaggtcgggtgcattcctgggaagcatatttttgaaaagctcacctgggattctaatgtgtatccctaggtcttattcctagagattttgattacttggtctggggtgtggcatgacctgggcagggcactgggatttttaagctccacagatgattccaatatgcagctagtatgagaacttgtttttttttgaaggagtctcactctgtcacccaggctggagtgcagtggcgcaatctcggctcactgctccgcttcctgggttcaagcagttctcctgcctcagcctcccgagtagctgggattataggcatctgccaccatgcccagctaatttttgcattttagtaaagacggggtttcaccatgttggttaggctggtctcgatctcctgacctcaaatggtccacccccatcagccttccaaagttttgggataacaggcgtgagccaccaggtccggcctggtgtgagaacttctgagttggatgaaacattagccccagatcctagaagccagggaagtgctggtctttatcgactggccaccaggtggcagatttgggcaagggtctgcctttgggtttagaattattgcttaggccttaaagtagttcttttttgccagtgggagaaaatccctcaaagatggttttctgggttggttggtttgtttgtctgtttgtttgttttttgagacagagtctccctctgttattcagcctggagtgcagtggcatgatctcactgcaacctctgcctctcgggttcaagcagttctcctgcctcaacctcccaagtagctggaattataggcacacgcccccacacccagctaatttttgtatttttagtagagacagtgtttcaccacgttggccaggctggttttgaactcctgaactcaagtaatcctcccacctcagcctcccaaagtgctaggattacaggtgtgagccaccgcgcctggctcctcaaagatgttaatcctcttgatggcaattgactaataccagaaaatgtcacgaagcgtgcattttggattcaatcatggaattgttgaggacaatcagccatcagactaaagcgatagaaatagtattggaaattgcagcgggagcactgaatggagaaggcactccacataatggaggaggcaaccaagtcttagagaaggtatcaagcctgactataaggacagtgagggaattgaaaaaacaaaaaaggagcaatggagcagggaaggattgaatgcctttcaagtagattcagtaattgctgttagcagcaaaaaatgcagtagtgcctgggcagggctttaaagtgcttgcacaggcagccctagagggccgggctgcttgggaactcttacaaactgacctaccaacttgagcatccacagcctgatcagaggtgggggagttaagggccttctctcccctagcctctactagagcctgtaactgcagggaaaccaagttgcaggctaaactctgcccacacatgcagacattgattagcaagctacaaaaacagtcatgaaacctgtttttataggattagtgaagccccagtttgaccagagtactttgcatgaatgttttgttagaagcaaatgtgccaatattctagcagctgcgtttggtttacttcttcttcttctttttttttttttttgagttgaagcctagctctgtcacccaggctggagtgcagttgtgtgatctcagctcactgcaacctctgcctcccaggttcaagcgattctcccgcctcaacctcctgagtagctgggattacagacatgtaccacaatacagggctaagttttgtatttttagtagaaatggggtttcaccatgttggccaggctggtctcaaactcctgatctcaagtgatccacccgcctcagcctcctaaagtgctgggttaacaggcatgagccacggcacctggcaaaagtcatcttttggtttacttctattgaactgaaaaagtcacaaatatatttatatttaattaaatatatttatataaaaatatggtatttagtattattatttttagagacagggcctcgctctgtcacccaggctggagtgcagtggcacaatcatagctcactgcagcctcaagcttctgggctcaagtgatcgttccacctcagcctccctagtagctgggactacaggcacatgccaccatactcggctaattattttattttatttatgggtctcgctatgtttcccaggctggtctcaaactcctggcctcaagcgattctctcacctcggcctcccaaagcaccgggattacaggtgtgtgccagcacacccagccacaaatctataaatttagaaaggaggactatttctaaagagggtcccactacctgtaggcaggaagcagagcctctggccataactgaaaaacaagcacttccaagaaggggcaaagggaacatgaatttatgctgagaggcgtagctaagcatacatattcaacagattatgggaggatctatgaatattcacaaagggaggatctatgaatatgcacacatgtggagtaagctaacgtgtgcagcatgtctcccatgttcaccttaggcagaaacttaacactaacatgtattacagggcaacaaaatgagactgcatatctacataacctagctatttggtaggctgaagcaggagcatcacttaagactgggagttcgaggcagctgtgagccatgatcgcaccactgttctccagccaggatgacagggcaagaccctgtcttagaccactctgtggtcagtggttatcaggaaggaatgctagtcagttgtgctgaaaccactaaaaaggaagggcagaattaggtgatgagttgataccagtggtgaagtgagtcttttttttttttttctttttgagatggagtcttgctctgttgcccaggctggagtgtagtggtgtgatctcagctcatcgcaacctccacctcctgggttcaagtgattctcttgcctcagcctcccgagtagctgggattacaggcgcctgccaccacgcctggctaatttttttatatttttagtagagactgggttttgccatgttgtcaggctagtcttgaactcctgacctcaggtaatccaactgctttggcctcccaaagtgctgggattacaggcagctccaaagtgctgggattacaggcatgagccaccatgcatggcctgaaataatttttttgaaagggctagtttctatttagcccttaggggaaaaaaaactaatggcagttagggagggaatagaacgagtcctgtttgaactcctttcccatcatggccaaaacttaaaattttttttagatatctctgggctccccttggccaaaagatagtttgttgagtcagttgggagcttagaattttgtttttatttctcacatcattgaatcaatttgaaccaggcgacaaaaccttctgctcccagtagtgggtcagagaaccttcctgattcctgccctgagattgtctctctgaagacaacattaggctagtaggctttccagattctgtaacccattctttcaaaggaagagatgcctatatttttctagccaattcatataccttgagtatcactcaagggcaaaattatttctaacaaatcatttactaattagcaaatgcttaagtgtagatttagaaagctaaagctatacagtggctgccatctatagtttggacttgtgattaactacattgaaatgctaactctgtaccctagagtatgaattcctgattagagtccttcaggtgctaactaatttatgtatttcatgtttgataatattattacttgagctttgtgggagagcagtcttttcctcccctgagatatagctagaagttacctcctttgtgaagccttcctagatactccaagcagacacggtccttcctttctcccttgcccagcactctgaggttgactctgtggagcactgatccctctgtgttataattgtctatttacacgtcagctaccacctataacacactgagttcctcaacagcagggacactgtccattctttgatcccagtgtctggaacagtgccaagtacatagtagggacttaataaatattgattcatatgtaaatgagacttttccaaaacatgctttcgttgatgcctctcagcatttatacaccttttaccaactcgctactggccacatagacaaatgaaagcagtaatccagatacacccaagaggacatctgttcttttttctctctgtggagtgggagacttaagtggcttcttaactggtgtgtcgtctgatcaagtggtccaggtaacaggtggatgccaatgtctggcccaggcatcaccccttactggcactggtcattacagaagacactctaccagagctgaaaggacctcttgtcactaggcagctgtggagtccgctctacttgacctagtaaaatctgcctggagactgttagagtcaccccactacctgaagttacctccaggctgacctcttttttttcccaggtggagtcctggcatcttagatattttaataaggatttgcttgttgacatgttctttattcactaaggtgtcagcatattactgtcttagaactgagggttcttcatcttttttggatcaggacctccctctaagaatctgatgactgctctggtccctctcccaataaaaacttccatactcacctgttaaaaaaaaaaaaaactttaaacaaattaacagagttttattcagcaaagaatgattcataaatcgggaaggctgcaaccagaataggttcagagagactccacggtgtgccacgtggttggagaggatttaggatttatgcacagaaaaaggaaagtgacatgcagaaaatgaaagtgagggcctggtgctggtgcggtgcctcacgcctgtaatcccagcactttgggaggccgaggcgggcagatcatgaggtcaggagatcgagaccatcctggctaacacggtgaaaccctgtctctactaaaaatgcaaaaacttagccgggcgtggtggcaggcacctgtagtcccagctacttgggaggctgaggcaggagaatggtgtgaacctgggaggcggagcttgcagtgagccaggatcccgccactgcactccagcctgggcgacagagcgagacttcatcttaaaaaaaaagaaaagaaaaaggaaaatgaaagtgaggtacagaaacagccaggttggttacagcttggtgtttgccttaaacttggtttgaacagttggccgcctttgattagccaaaactcggtgattggtacaagagtagattgcagttcactatgtacagagaagcccttagatccgaactcaaaataggtaaggaggcagttttagctacacttaagttaacatactcaggagtaccattccagcttcaagctggaagtgtctgcagccccctgagaccacttaatcccaagttaaaaacccctgctcagaggcagcatctttttttttttttttttttttttttttgagagagatctcactctgtcacccaggctggagtgcagtggcacgatctcagctcactgcaaccaccacctcctgggctcaagggattctcttgcctcagtctcccgagtaactgggattacaggcgcgtgccactatgtccagctaatttttttttttgtatttttagtagagatggggtttcaccatgttggcctggctggtcttgaactcttgacctcaagtgatccactggcctcagcctcccaaagtgctggcattagaggtgtgagtcactgttcctggcccagtgaggcaccatctcattggatatggagacaaaggatctggcttagcatcctggatttgtattttctttccaagagtccttaagtgatatctaacttttgcgagctgcagtttcctcagctatgagatgagtgacattaacctcctctcttcagatttataagaggatcaattaaaatggcataggtaaaagtgcatcctagcaagttggtatctactttagaaatgaaggaggtcatatgtatgtgaagtctccagacccaacatgccatcttatatgtgtctatttctacaagtgagctagtgacaacagtaattgctatttttgctcctacatgggtagggctgatcttgactaggaggagtcaataagactcaccagccgggcgtggtggctcacgcctgtaatcccagcactttgggaggccaaggcgggcggatcacgaggtcaggagatcgagaccattctggctaacacggtgaaaccccgtctctactaaaaaaatacaaaaaaattagctgggcgtggtggtgggcgcctgtagtcccagctactcgggaagctgaggcaggagaatggcgtgaacccgggaggcagagcttgcagtgaaccaagatcgagccactgcactctagcctgggtgacagagcgagactccatctcaaaaaaaaaaaaaagactcaccagctgtggccactgtctgtgctaattggctagtgcctgcatctcagaaactgctacatattttgactattccccctgcacttaagggcatgcacactcccaaaatagactcagattgtctaaggaataatgatgatgatgaagagaaagccctctttatctggtctatttgtagtcagttccaaaagcattaagaatttctgctgaactaatgcagctagtttctttcctgtcaccactttccttccaaaatagtttcaagatctgtgggggaaaaaatctatttacagtgaacagactggtgggaggaagttgagcattggggttttctgccctgtgtaaccttgccctaagttgggcagatggtatcacactacctggacatcatctgctcattcactatttgaccagttggtcattcattcacaaatgtcctttttgcaggagggatggaggtgctagacctgcagatgctagcatgaaaagacagatctcctgctgctaaggtgcttaaagtagtggaggtcaggggacaagcaagcagtcaggcagctctgaatgcagaggcaggaagcaccacgaggcaatgggacccacagaggggtagcagggtagaggtgagtgggtctcatgtggggagggaggaagttgactgcagagaaggtgccagggggtgaaaatagcttgagagctgtggagctagaagggctctcacatttgcttattaatatgccctttgaaaaagagtggcctgatacctggagtcactcaaaagatttccaattccgataggaaaaagtcaattttggcttcagtggttgcatgtgcaccccctgatttgctgtatgctgaggcattgtggtgatggacgcaagtgcggagaccttgagcacgcatctgcccctagttcttgccctgagtcctcgaaggaggcaggagagacatcaaggcagacaggcgccgctcatcagtgatgagaccagacctggaactcgcgtcttatactcagtcctctgccctttctgctggattgtggccccccagtatagggtgcaacacacaactggagcatttaagggccacaaagagaacaaattaccaatgattgtgtgttgattctttgagctctttttttttattattatactttaagtgttagggtacatgtgcacaatgtgcaggttagttacatatgtatacatgtgccatgctggtgtgctgcacccattaactcgtcatttagcattaggtatagctcctaaagctatccctccccccttccccctccctccaccccacaacagtccccagagtgtgatgttccccttcctgtgaccatgtgttctcattgttcagttcccacctatgagtgagaatatgcagtgtttgattttttgttcttgcgatagtttactgagaatgatgatttccagtttcatccatgtccctacaaaggacatgaactcatcattttttattgctgcatagtattccatggtgtatatgtgccacattttcttaatccagtctatcattgttggatgagctctttatctcatggaaaaataatttataaaactctgtatgagaggagtgggaaatagtattaacgggtgcggggtttctttttgggacaatggaaatagctggaattagatagtggtgatgtttgcacactttgtgaaatactaaaaactcctgaattatacagttttaagaaacttttatttatttgtttttgagagaagttctctgtgtcacccaggctgaagtgtggtggcgtgatcaccggttattgcagcctcaatctctgaggctcaagcgattctcccacctcagcctaccaagtagatgtgactataggtgcgcaccaccacacccagtgaatttgtaattttttgtaaaaacaaggttttaccatgttgcccagtctggtcttgaactcctgggcccaagcgatcctccctccttgggctcccgaagtgccaggatacaagcatgagtcaccacatgcagcctcagttttaagaaacttttaaataaatgaaatatagtcataccaaaacagtaaaaatgggtttcaggaaaaaaaatgtttttttaaacaaacttacgtattgtataatcccagcccttttaaaaaatgctttcaaaaactggcagtcaactcataaaaggacaaatacttatgattccactgatgaagtagtcaaaagtagtcaaaaatcacagaaacaccaccataaatgtataatttttattttcaattaaaaaaacatcttttttttagtcaaaatcatagaaatagaaagtagacaggtggttactaagggctatgggatggggaaattagtgtctaatgggcatagagtttcagtgttacaaggtgaaaagttctagagttatgctgcccagcagtgtgaatatactttattgttctgtacacttaacatggttaatatggtaaatttagcgttatgtgctttttactatagtaaaattaaaaaaaaaaaaaatggggccgagtgcagtagctcacacctgtaacataatcccagcactttgggaggccgaggtaggaggatcacttgaggccagaagtttgaaaccagcctggtcaatatagcgagacctcatctctacaaaagaaaaatgttaaaattagacaggtgtggtgtctgtagtcccagctctctggaggcagggactgagtcagaggatcacttgagcataggggtttgaggctgcagtgagccatgatcctgccactgctgcagcctgagcaacagagcaagaccctgttgtaaaaacaaacaaacaaaaactggcagctgatacctgagagtgaatatcttttatcgctggttaatgggattgagagaatgcttcatcttatagaaagaacagtgtctttggacccacagagacctggatttaagattagctctgccaattactgagtactctttactatgaacctctgttttcctcatctgtgaaactggaataatgaatcctaccgccaacaattgtagtcaagttggaaacaatttacacaaagtgccaaacaccaagcctggcacagtaggaaccgagtaaatagtggttaatatttttatcagtgtctgcattgctgacgtctccatcatttctatacatttgtttttgaatcagaaaaagatgttattttaaaaaaataacccagtagtgccccttgtcccattcctatcagttatattattattgttactaccctctggaatttcaataactctttgttttttgggttttttgttttgttttgctttgcttttgagacaggatctctgtcgcccagtctggtgtgtagtggtgtgatctcagctcactgcagcctcaacctcctgggctcaggtgatcctcccacttcagcctcccaagtagctgggaccacaggcgcatgccaccacacttggctaatttttgcatttttagtagagacagggttttgccatattgcctaggccggtctggaacttctgggctcaagccatctgcctgcctcggcctcccaaagtgctggaatttcaggcatgagccatgcctggcctaaatagctctctgtgtttgcaaaagtgtgttataagaatcattcagagcctctcgattggatggaggctctagaatgcacagaaaaaggctgccaccgtgtatctctgcaagtcatgcacaagatggggaacagcaggcttccccctgcttaccagttcaaatacagagaactagccctgtagctgtttctttcatatctcacccattctaaagagaccacaggccttagaagtaaaggactcttttgttgaaagagtgttttcaaatttaaatgagcatttattggtcaaagatgcaccaactagtcttttgaagaattcaaggctctttagagaaaaataaagccttggaggagtatctgagaagcttgttagatgcgtgggaagagtctggaaataaaaaacttcatctggagtttctgccttctaccaacagagctgaagctaatgctctcctaagacaagcaaagcagatggtttgcatacttccttaccttccttttacttcctctgtaatagacttgtcatgtctgatgtttgagttgacgtggtactctaatagagttagagtctgcattttttttatgtcctctagtatgttctggttgatggttgagggcaacaaaccagcagtcccagatgccagcaccaagacctgagacaggtcacttaactctccgagcttcaccaccattctcaccttgcagacctcacagggaacagggaaagctctatgagatacaacatcattatgattaatcctattctgattctgaaagcaaagctcttcctacacaaactcctatttctaaatactaaaagacatttctttatggtgtattttgtgtacttgtagaaatggaaagtgttgagataaaacatgaagcaatgatgacaaagtgctaactttttcttgttttaatttctttatgctttttttccacctaatcccctagagtggtgtcttaactgtcaaactgggtggagatctaggaacctatgtgatcaacaagcagacgccaaacaagcaaatctggctatcttctccatccaggtatgtaggtatgttcagaagtcaacatatgtaattcttaaagacttccgaaatgtgacattgtggaccatttaagaaatgtcggctgagcacagtggctgacacctgtaatcccaacactttgagaggctgaggtaggaggatcacttgaggacaggagttcagaaccatcctgggcaacatagtgagtccctgtctctgtaaagaaaataaaaataaagtcacagctgggtgcaggcttacacctgtaatcccagcactttgggaggccaaggcctgtggatcacttgagctcaggagtttgagaccagcctgggcaatgtcacaaagccccacctctactaaaaatataaaaattagccaggtgtggtggcacacgcctatagtcccaactacttggaaggctgaggttgagcctcagcctgagcccaggaggtggaggttgcagtgagccaagatcgcgccactgcactccagcctgggcaacagggccagaccctgtcccaaaaaaaaaaaaaaagtcatcgtcttatgttagcatccttgtaagtgagcctttcctgatattttgcagcctgtctcattctcagtagaaaagtttactctagttacataacttctccctgctgacaatttggatactgtaagcaggcatcaggatattaagatctgaagtgagtagcttataacttttccaaatccagcctagacagttttcctctattaaattattgccctgactttaaaagaagctacttttgaccttgtagcgtttgaacaagttgcactttgtcttcaaagcaagttaaagtttgacctctacttgttttgagcctctcaggtaaagggttatttgaattccctttgcaggttggggttgtgtaccctgtggaggtggtagagtgttatatattgctgctccagggcatttaatccctcctgccttttccattgatgtgctttcaatctagaggaataaaagattgtgttggagacacaatgtggcctgcatagcatctgaaagcctgagaacatgcagggagagacatccctcatccctcagcagcctggctgctgttgaagtggttgtaagaaagtaaaagagaaatgcccacaaaacgttctcagatccagtcattcattagcacttccaaagagagcatgttgactgtgaattgggaaagggccagataaaactagcatagaattctttgaaagactaacggtatttgcattttttaaaaattataaccttactctaccccctaacattgacatcatttttaggtaattaatattttcccatttattattctgtgatctctaatgctttgttcagaataaatagtgtgtttcctttccccacactttcatccaagaagtgtgctagagttcaacaaaaacagcactagaaatcactgtcattctaggaaggccctaattcacagattgtattggtttttagacccagttagtgtgctggaggttggaggattttaacctctgtgggccaactagcctctgtggcctcagtcattcttcctgaccctggctgtgcttgagcctgtgtgttcttatccttcatctccgggggaacgaagtggatcagctcggtccagcgatcacttttggggatcagtggctttgtagatatcgggcaggcacttaccccaaaagaactttccccatatctgaagactgaaaacgtccatatcgtatttggacacactgcccagcaatacgctctagctgtgttcagaagcatgggaatttggaaagatctgctgagcatgccgtttactgtcacagatactatcttcctcaaaaaaaaaaaatatatatatatatatgggggacggggcaggttgagactgggtgagactgaagaggtgccttggccagagcaggccacacccagagaccacaggctccccggtccacctcaggcccctccccttcctgcgccgtttccggcagatccagagtggccaccgccggatgggagtcgggggaagggaggcagagaagcgggccctgaggacaagctctcagtgcttctgtgggaagtggcggcaagacggcagctcccagcgggggatggaggccgagtcagtctgctggtcactggaggccaggatgctgcctaacacagccgtcccgctccgggcctcaccaccagggcggctctccccactcccggcctgctgcccacacagactgcggggttccgggggagcaggacccaggccgttctgcgcctgtcttcttggaaggagcaggccggagcgcgggagcgccgtgtagctgtacctgcgaaggcacaggattccgcgggaagatcccgcagtttcgggccgtcgtcattgtttttatacctgtggcaaatggcatgaccagacacacggttatgtctggagaaacccctgtagaggagcaggaggttgtggacatgctgtggcccggacagtggctgccgagcagttggagcctgcacccgcccaacttggctaaagaagtccccatactctctgtggaaaagatttccagaagctgttgtgtcaatatcaaagcctcaaaacaacaacaacaacaacaaaaacatgaaattatcaacaataaagatcatccttgagtctgctttgaaaagtagggtgaaattctgcagaggcattcaactggcaagataccaccctcatagccagatctgcaggtctcagccatcatgccagggaaaatgctccattcaccactcctcagcttctgcttctggtttcagaggtctctgtattggaggggctttaaagcaagaagggtctttacccacttactcttattcacagatgtgaatatgcaggtccagtggggaaagtgacatgtcctaagtcagaatagagtcaacaagaaaacagggcccaaaatgacttagcctctagtgtataatgggcattgatgagctactggaaatacagagatgaagaaaacacagtcccatcttcaaggagctcaatctagcaagggagacagactctttgtaggtgggaccgggcttccctgcagcagaaggaagcttgaaattggtaacgagcctcagaagggacagaggcaggccaccatgctaccctgagaggatcgcatgtggacacggggctatgacctggccctgctttgacccactagctgtgctgtagggccaggtggagcctggagtggcctgtgctaaggggctactatgagctctttccactcccccaaggcattgcataaataatgtcactttctgtttgcacagcaaaatcagggacacaattttctagaacatggggtgcctcccctccccccagcccaacagaagttctacaatgactgatgggcccttgtttttgtttgagacggaacaccccacagggttccgagtggtgatttgtggcccacaggccactggcaagtggaggcagagctgcagagccctcgggagccacagagggcctgctggccgccacgacatgccaactcagctgctgctggccctcctgtgggcggcagtgctagtgatgtgcagaatcttaggactagtgccaaggaacctataaataccctgggtgacccaggcgtgcactgctgtggtggccttcacagtcagaagatgacaagctgagaaggggagaatcggcccaaggtgagatccacagaaaggccagggccaagatgcggccagcacctcaggctggtggtggtcttacgttgaccatgccagaggccagtccttgattgctccaaaccctctgttcgagggttccaaatgaaatgagcaggtcctcgtgtcaggacctaggttagtttctgaaaaagcatgaaaagcaggcctcctgaacttccccgagtgactgatgcaaagtgcgtcctgcatgcttcacagcaccatggagaggatcttcaggggcaaactgcagactatctgaatgacggcactgaccatcagcaaaccgcagagctgcctgaccaagaaattgcgagacagaagcaatgcttgcaggcgaagaagaaggggccagacacagtggctcacgcctgtaatcccagcactttgggaggccaaggcaggcggatcacttgaggtcaggagtttgagaccagcctgggcaacatagtgaaaccctgtctctactaaaaatacaaaaaattcgccaggcatggtggcaggcacctgtaatcccagctgcttgggagactgagacaggagaattgcttgaacccaggaggcgaaggttgtaacgaactgaaatcgtgccacagcactccatcctgggcgacagagtgagactgtctcaaaaaaaggaggagaagaaggaaaggccaaggcaggaatgaaacaggccatgaatgttggagtgaagcaactggcctcctcgtgctaagcggctactgtgagttctttccactcccccaagacattgcataaataatgtcactttctgacactcaccccgctgaatgtcctgcctctgctcaagggtggtatgatggggacttggcagtggaggggaacagggaaaccagacatggtggtctccccgcttcctggctacaagtccctctgaagaaatccaaaggagtaaagagcttggagagtaggcctctgtagggtgcaagggcacagctggagacggagctcctgaggctgcagctgatgctgcccgctctgcctgaactgcaccaaaaacgtgatgaggccatagcgggagtccacggaggaggatgcctactgcccgacctctagcagagactaagcaaggtgcatgaaaacttgaaccacatgtgtcacacccatgaccactacatgaagatggcccaaaacctggcccaggaattgaagaaagactcttccaatttgctgtaagaaaatggcccagggggcaagcacggtagctcacacctgtaatcctagcactttgggaagctgacgcaggcagatggcttgagctcaggagttccagaccagcctgggcaacatggtgaaaccccgtctctaccaaaaatacaaaaattagccgggtgtggtgatgcatgcctgtggtcccagctactcaggaggctgaggtggaaggattgcctgagtctgtggggcagaggttgcagtgagctgagatcacaccactgcactccagcctgggtgacacagtgagaccccatctcaaaaaaaaaaaaaagaaagaaaacggcccaggaaggctggagggccgccgtgtccattgagagagtgctccaggcactccaaaaagaaaatgaccacaatgggaagaaaccagctgaccatgagaccaagttccaaccttttacaagtggcctgtggctcctggcgccccgcccacagctgacaggggctcagaagtgctagggggaccatgggccaccagggccaccaggagggaggcaggtaacgatgcgagggcttggatgcagaacaccagctggtttgattctgttttccctgtacctgggtcctgaatgcccagaggctcagggaaacaccagccagtgctgctgcctttaaagcacttttgactgatctcttgttaatttagcaactgttattggttgatgctgcagttgctcttattgaagtttgattgatagcattaggatggtaaggcactatttttcaaataaaggttgtttaatataaaaaaaattttgtttttttttctctcagcctttcacattggttcaaaatatctttcatctggctgcatttctgatttttgttttgttttttttttcttaattttatttatttttaattaaaaataattttttttgtcaacatggggtctcactttgttgcctaggttggtctgaaactcgtggcttcaagcaatcctcccacatcagcctcccaaagtgctggggttatgggtgtgagccactgcagcagcctgttttttttgtttgtttgttttttttaatttgacaagttttcaggtcctgtgaaatcagcagtcttacctcccaccttgcgcaccctgaggaggttgcagaataaaggagaattctagggacacgtgggcatcagtgcctgtgctcagagcacctcaggcagtgtggaggggtctagaggttactcaggctctgcctggcaacccgatagcagtatcagagtatagggccaaggggacggtccttgggcttggtgtggtttattagtccttttcctgtgaccctgatggtttggttcactcatttttatctccatactgggaacaggttcaagccccagcatttggttgataatgcaggaatccttgatacttttattgcccaagcttcccttcctggtgacctcatcctagcctcagtctttggaaaagccctccttgagtgctcaggcagactcaggtgccctttcttctgggctcccatgcactctgttcttacctccatcagggtgccacatgcactagtgttatctgctgccgtggccaatcatccatgaggccatgaggaagtggaatgtacatctggtataagaagacatggcagaagccagcctccgatctgtccacacgaatacagcattcccaaagcaacgtgcatgtgccattattcactggatgagcttgaggtggatgaactagcccaccaggctctcaatgtcatgaatttaacactgaattaagaaaaatatgttttaaaaataatagtttaggtgattgctggggtgctaggagaggaaggaatggggaataactgtttaatgggtatagttggccttgtgtatctgtgggttccacatctgattcaaccaaccgtggatcaaaatatttgaaaataaaaaacaaaacaaaaatgatacaaataaaaaccaatataacaactattaacagcatttacattgtactaggcattataagtaatctggagatgacttaaagcatacagaaggatgtgcctaggttagatgcatgtatcgtaccatttcatatcagggacttgagtacccacggattttggtatctgcagatcctggaaccccttccctatggataccaaggaacaacagcactgggtctccttttggggtgatgcagatgttttgaagctaggcagaggtagtggttgcacaacattgtaaatgtactaaatgccaccaaattattcatttttaaatggttaatgtgttatgtgaatttcaccttaacaactaataatattataggtaaggcacaagttacatctgtagcacaaaaatggccctaatttttaaaacactgctccagcatagcaggtatcacatgtgaggtagcaaaagctggagatcaaagtgtgatacctggagacttatcagtaagggtcaaatgttttttcaggttttgagaatcattcttggaattgttccagaagatatatcgtataactcttcttagatgctaagataagaaggcagatatacactagctcattttgtgttattttctagagctttactccagtcaatttcttgggggcagcatttgtggaatcagtggttcatctgaagggctgtgctgtggaattactatgcatttgttttgtcttccagtggacctaagcgttatgactggactgggaaaaactgggtgtactcccacgacggcgtgtccctccatgagctgctggccgcagagctcactaaagccttaaaaaccaaactggacttgtcttccttggcctattccggaaaagatgcttgatgcccagccccgttttaaggacattaaaagctatcaggccaagaccccagcttcattatgcagctgaggtctgttttttgttgttgttgttgtttattttttttattcctgcttttgaggacagttgggctatgtgtcacagctctgtagaaagaatgtgttgcctcctaccttgcccccaagttctgatttttaatttctatggaagattttttggattgtcggatttcctccctcacatgataccccttatcttttataatgtcttatgcctatacctgaatataacaacctttaaaaaagcaaaataataagaaggaaaaattccaggagggaaaatgaattgtcttcactcttcattctttgaaggatttactgcaagaagtacatgaagagcagctggtcaacctgctcactgttctatctccaaatgagacacattaaagggtagcctacaaatgttttcaggcttctttcaaagtgtaagcacttctgagctctttagcattgaagtgtcgaaagcaactcacacgggaagatcatttcttatttgtgctctgtgactgccaaggtgtggcctgcactgggttgtccagggagacctagtgctgtttctcccacatattcacatacgtgtctgtgtgtatatatattttttcaatttaaaggttagtatggaatcagctgctacaagaatgcaaaaaatcttccaaagacaagaaaagaggaaaaaaagccgttttcatgagctgagtgatgtagcgtaacaaacaaaatcatggagctgaggaggtgccttgtaaacatgaaggggcagataaaggaaggagatactcatgttgataaagagagccctggtcctagacatagttcagccacaaagtagttgtccctttgtggacaagtttcccaaattccctggacctctgcttccccatctgttaaatgagagaatagagtatggttgattcccagcattcagtggtcctgtcaagcaacctaacaggctagttctaattccctattgggtagatgaggggatgacaaagaacagtttttaagctatataggaaacattgttattggtgttgccctatcgtgatttcagttgaattcatgtgaaaataatagccatccttggcctggcgcggtggctcacacctgtaatcccagcacttttggaggccaaggtgggtggatcacctgaggtcaggagttcaagaccagcctggccaacatgatgaaaccccgtctctactaaaaatacaaaaaattagccgggcatgatggcaggtgcctgtaatcccagctacttgggaggctgaagcggaagaatcgcttgaacccagaggtggaggttgcagtgagccgagatcgtgccattgcactgtaacctgggtgactgagcaaaactctgtctcaaaataataataacaatataataataataatagccatcctttattgtacccttactgggttaatcgtattataccacattacctcattttaatttttactgacctgcactttatacaaagcaacaagcctccaggacattaaaattcatgcaaagttatgctcatgttatattattttcttacttaaagaaggatttattagtggctgggcatggtggcgtgcacctgtaatcccaggtactcaggaggctgagacgggagaattgcttgaccccaggcggaggaggttacagtgagtcgagatcgtacctgagcgacagagcgagactccgtctcaaaaaaaaaaaaaaggagggtttattaatgagaagtttgtattaatatgtagcaaaggcttttccaatgggtgaataaaaacacattccattaagtcaagctgggagcagtggcatatacctatagtcccagctgcacaggaggctgagacaggaggattgcttgaagccaggaattggagatcagcctgggcaacacagcaagatcctatctcttaaaaaaagaaaaaaaaacctattaataataaaacagtataaacaaaagctaaataggtaaaatattttttctgaaataaaattattttttgagtctgatggaaatgtttaagtgcagtaggccagtgccagtgagaaaataaataacatcatacatgtttgtatgtgtttgcatcttgcttctactgaaagtttcagtgcaccccacttacttagaactcggtgacatgatgtactcctttatctgggacacagcacaaaagaggtatgcagtggggctgctctgacatgaaagtggaagttaaggaatctgggctcttatggggtccttgtgggccagcccttcaggcctattttactttcattttacatatagctctaattggtttgattatctcgttcccaaggcagtgggagatccccatttaaggaaagaaaaggggcctggcacagtggctcatgcctgtaatcccagcactttgggaggctgaggcaagtgtatcacctgaggtcaggagttcaagaccagcctggccaacatggcaaaatcccgtctctactaaaaatattaaaaaattggctgggcgtggtggttcgtgcctataatttcagctactcaggaggctgaggcaggagaatcgctgtaacctggggggtggaggttgcagtgagacgagatcatgccacttcactccagcctggccaacagagccatactccgtctcaaataaataaataaataaataaagggacttcaaacacatgaacagcagccaggggaagaatcaaaatcatattctgtcaagcaaactggaaaagtaccactgtgtgtaccaatagcctccccaccacagaccctgggagcatcgcctcatttatggtgtggtccagtcatccatgtgaaggatgagtttccaggaaaaggttattaaatattcactgtaacatactggaggaggtgaggaattgcataatacaatcttagaaaacttttttttcccctttctattttttgagacaggatctcactttggcactcaggctggaggacagtggtacaatcaaagctcatggcagcctcgacctccctgggcttgggcaatcctcccacaggtgtgcacctccatagctggctaatttgtgtattttttgtagagatggggtttcaccatgttgcccaggctggtctctaacacttaggctcaagtgatccacctgcctcgtcctcccaagatgctgggattacaggtgtgtgccacaggtgttcatcagaaagctttttctattatttttaccttcttgagtgggtagaacctcagccacatagaaaataaaatgttctggcatgacttatttagctctctggaattacaaagaaggaatgaggtgtgtaaaagagaacctgggtttttgaatcacaaatttagaatttaatcgaaactctgcctcttacttgtttgtagacactgacagtggcctcatgttttttttttttttaatctataaaatggagatatctaacatgttgagcctgggcccacaggcaaagcacaatcctgatgtgagaagtactcagttcatgacaactgttgttctcacatgcatagcataatttcatattcacattggaggacttctcccaaaatatggatgacgttccctactcaaccttgaacttaatcaaaatactcagtttacttaacttcgtattagattctgattccctggaaccatttatcgtgtgccttaccatgcttatattttacttgatcttttgcataccttctaaaactattttagccaatttaaaatttgacagtttgcattaaattataggtttacaatatgctttatccagctatacctgccccaaattctgacagatgcttttgccacctctaaaggaagacccatgttcatagtgatggagtttgtgtggactaaccatgcaaggttgccaaggaaaaatcgctttacgcttccaaggtacacactaagatgaaagtaattttagtccgtgtccagttggattcttggcacatagttatcttctgctagaacaaactaaaacagctacatgccagcaagggagaaaggggaaggaggggcaaagttttgaaatttcatgtaaatttatgctgttcaaaacgacgagttcatgactttgtgtatagagtaagaaatgccttttcttttttgagacagagtcttgctctgtcacccaggctggagtgcagtggcacgatctgggctcactacaacctccgcctcctgggttcaagcaattctctgcctcagcctcccgagtagctgggattacaggtgcctgccaccacacccggctaatttttgtatttttagtagagacggggtttcaccatcatggccaggctggtcttgaactcctgacctagtaatccacctgcctccgcctcccaaagtgctgggattacaggcgtgagccactgcacccagccagaaatgccttctaatctttggtttatcttaattagccaggacacttggagtgcatcccgaagtacctgatcagtggcccctttggaatgtgtaaaactcagctcacttatatccctgcatccgctacagagacagaatccaagctcatatgttccatcttctctggctgtatagtttaaggaatggaaggcaccagaacagatttattgaaatgtttattagctgaagatttatttagacagttgaggaaaacatcagcacccagcagtaaaattggctctcaaagattttcttctcctgtggaaagtcagacctctgaggccccatccaggtagaagtactagtgcaagaagggcctctgctgtccacttgtgtttctgtgatctgtgggaacattgttaacgccacatcttgacctcaaattgtttagctcctggccagacacggtggctcacacctgtaatcccagcactttgagaggctgaggcaggtggatcacctgaggttaggagttcgaggccagcctggtcaacatggtaaaaccccgcctctactaaaaatacaaaaattagctggccgtagtggcgcacgcctgttatcccagctactcgggaggctgaggcaggagaattgcttgaacctgggtggtggaggttgcagtgagccgagattacaccactgcactccagcctgggtgacaagagggaaactccattaaaaaaatgtaattcccgtgtctgccatcttaagtgtaaaggtggctaaattatatagaaaaataagacaatatcatttcccaattacattcctttcctaccgcactctatgatgctagctgagatttttccaaaagaaaatggcttaaataaaaccctaagagaaagaaaaactttaaatccctccaaagctcaaaagtaatagaaacagatgagtttggagtcaggatttctctgtaagattgcctaggctgtgtactgcacatctccaggtgccactgttgacagagattataactacaatgtgaagtgaatggtgccactgacagttatgcaaaccgtccagagcatagccacctgatcctgctgggattcctcttgccagtccatcagcagttccccttgaaagtttcaccaaacatcccttaaatctgccctctcctgcccgtccccagtggaggtcctcatcatttttcacctgcatttttgcaggagctttcttatatccaccttcctccttttctctcagcccatcatctagctacacagtctccagggtaagctttcagaaaggcaatctcttgtctgtaaaacctaagcaggaccaaggccaagtttcttagcctgaaaaatgtgcttttctgactgaactgttcaggcactgactctacatataattatgcttttctaccccctcacactcaacactttgactccagcaatcccaaatccccagatccctaagtgtgctgtgctattttcacgtggctctcagacttggccagtgctgtttccattttggtctttattccccacatctctgcctggggggtagattctaccctgaaaaatgttcttggcacagccttgcaaactcctcctccactcagcctctgcctggatgcccttgattgttccatgtcctcagcataccatgtttgtctttcccagcactgacctaccatgtgtcacccctgcttggctgtaccttccatgaggctaggactatgtgtctcctttgttgactgctgttgccctagcatcttgcacagttccttgcacacaattagagctctataaatgtcaaataaatgtgttataattatatgtttaagatagttgttcaaataaactctaaataaccccaactccaagagtgttagcaagaaatataaattttacagaagaatggttggaggtggggagggtgtccacggagtgagttacctcacacaggcacggaaaaacttgaacctcctaaggacatttttaagctctctttcccattttctctcctggattcccattgcctggtctcatttctctcttctccaccacaccacttcctcaaaaattcctttagggtttgttcttaagcttagataggtttcccattctgaaatacaaaggcctgataattagccaacttaccttgttggggatgtggaaggcaagactctcagactccatgactcaggtatattgcaacaattaggctgaaagttccttgagagtaagtgtccaaatcttttcatgtttggttcccagggctcactacagttgttggtatatcataggcactctaatatcttcttaaagaatcaatatcattaaaatggccataactgcccatagcaatttacagattcaatgctatttctatcaaactatcaaggtcatttttgttttattttttttctttgagatagaatctcgctattgtcacccaggctggagtgcagtggcgcgatctcgactcactgcaacctccgcctcccgggttcaagtaattctcctgcctcagcctcccgagtagctgggattacacgtgcctgccaccacacctggctaatttttgtatttttagtagagacaaggcttcaacatgttggccaggctggtcttgaactcctgacctcaggtgatccacctgccttggcctcccaaagtgcagggattacagcatgagccactgtgcccggcccatggtaatttttcacagaatcagaagaaactattctaaaattcatatagcggccaggcgaggtggctcacgcctgtaatcccagcactttgggagacagaggcaggaggatcatctgaggtcaggagttcgagaccagcctgtccaacatggtgaaaccctgtctctactaaaaatacaaaaatttgccagtcgtgatggcgggcacctgtagtcccagctactcgagaggctgaggcaggagaattgcttgaacccgggaggtggaggttgcagtgagccgagatcacgccactgcactccagcctgggcaacagagtgagactccatctcaaaaaaataaataaaataaaataaaataaaattcatatagaaccaaaaaagagcccaaatagccaaagtaatcctgagcaaaaagaacaaagctggaagcatcacattacccaacttcaaactctactacaaggctatagcaactaaaacagcatggcactgctacaaaaacagacaggtagactaacggaacagaatagacaactcagaaataaagccacacacctacagccatctgaacttggacaaactcaacaatattaagtaatggggaaaggactccctattcaaaaagtagtgctgggataactggctatccatatacagaagaatgaaactagactgctacctatccccatatacaaaaattaaatcaagatggattaaagacttaaatgtaagatctcaaactaaaaaatcctagaagagccaggcgcggtggctcatgcctgtaatcccagcactctgggaggctgaggcggatggatcacctgaggataggagttcgaggccaggctggccaacatggtgaaaccctgtctctactaaaaatacaaaaattagctgggcatggtagtgtgtgcctgtaatctcagctactcgggaggctgagacaggagaatcgcttgagcctgggaggcagagtgagcccagatcgcaccattacactccagcctgggtgacaggagcaagattccatctcaaaaaaagaaaaagaaaaaaaaaatcctagaagaaaacctagtaaatgcccttcttatatcagccttgacaaagaagttatgactaaatcctagaaagcaattgcaacaaaaacaaaaatttacaagtgggatctaattaaactaaagagattctgcacagcaagagaagctatcaagggagtaaacagacagcctacagaatgggagaaaatattcacaaattatgcatctgacaaaggtctaatatccagaatctataaggaacttaaatcaacaagcaaaaaccaaataaccccattaaaaagtaggcaaaggacacgaacagacatgtctcaaaagaagaaatacaagtgaccaacgaacatgaaaaaatcctcatcatcactaatcatgagagaaatgcaaatcaaaagcacagtgagatatcatttcataccagcaagaatgactattaaaaaagtcaaaaaataacagatgttgcaagactgcagagaaaagagaacgtttatacactgttggtaggaatgtaaatacattcaaccactgtggagaacagtttggagatttctcaaagaactgaattgaactaccagtcgacccagcaatgccattattgagtatatgcccaaaggaaaataaattgttctatcaaaaagacaaatacacccatgtgttcatcacagcactattcacaatggcaaagacatgaaaccaaaccaggtgctcatcaatggtggattagattgtgtacatatataccaccatatggtacatatacactgtggaatactatgctgccataaaaaagaatgtaatcatgtattttgcagcaatatggatgtagctagaggccattattctaaacaaactaacacagaaacagaaaccaaataatgcatgttctgacttaaaagtgggagctaaacactgaatacacatgggcataaagatgggaacaatagacagtgggggctattagagaggcaagggctgaaaaactacctattcggtgccctgctcactatctgggtgacagagtcattagcactccaaagctcagcatcacacagtatacctttgtaacaaacctgcacatgtaccccctgattctaaaataaaagtcgaaggaaaacaacaaaaacaaaaagaaataactcctgagttggggtctccatctcttagttcagcctattggcagtcccctttttcaagttctaaggagcctgtactagactactcttcatttagtcccataataatccctctttcaattattttgccttcaaacctatagggaagggattggaaatgaagtttcagtcattccctaagtaaaatgtatatacatattttaattgaaacaggatttcactctgttgcccaggctggagtgcagtggtgtggtcatggctcactgcagcctcaacctcctgggctcaagcaatgcttccatctcatcctcccaagtagctgggactacaggctcgtaaattttttagagaacaaaaacacagtctttagatttaaacatgtgaaagcagaaattttaaaaatacaatgaaagagttggaagacagagttgaaattgttcagaaattacagtaaaaatactaagagataggaaatagtcaacttccaaatgagaagaatcacgaaagagagaacagaaaagatagaaaaaaaattatcaaagaaataattcaagaacatttccttaaagtgaagggcatgagattccaggtatattccacatatagaaaaatatcccatacaaaatcacattgttatgaattttcataacatgagggacaaaaaaagataatataagtaaccagagagggaaaaaataaataaacaaaacaagacaaataggtcatatacaaagtaatattcatcacaatagcttcatagttctcaataataacaaaaagcctttaaaattctggttgaagcagttcagacaatgccatcacccaaaaatatgccattttggcatactgattattattagctgaaagcacttgagaaacagcagactgtacaggaagggctttccaacctcctcttttctacctaaaaacaggctagaaaatttcccatgataaaggtgccctccctctactagaaagagaaaaacatccttatcaccagagatagggaatcaatgccaaaatggatctgaacaaacttattggaataacccttgtcttccactacttatccccaatatagctcttagtaatttccccaagcccctttgtcttgtcatttcttcacaaatttatcatttctttgtctaaaacatatataaacttgtctgctatggtgacttcttcgggtctacatttgcttgtgaggactcccaggtacatgtaaaattgtaataagacttgcgtgcttttctactgttaatctttcctgtgtcagtttaattcttaggcctagctggaaacttaagagggtagaacagaaatttttcctttcctacatggtgaagggacattctgtaataaaactagcctcaacattaaaaaaatgtgatgtaataaaaaacaaaggaaaaagaaaacaaaacagaaaagcaattaataacactaggaaacacgaggcattgtacaggataggaaacgtcctgttatgttacacaatgcaacagtgggtattgttttcatcattattataatgaaaatgctaaatagtgatttgaccaacaatccagtttaaaacatttggaggaatgtgaatgtttatggccagaaaatggggagaaaaatggttaaggaaacaaaatctcatcatctagagtgggaaggagactgataattcctaatatgaaccaaaaactcaaacttttttttttttttttgagatggggtctcgctctgtcgcccaggctggagtacagtggcacgatctcagctcactgcaacctctgcctcccaggttcaagagattctcctgcctcagcctcttcagtatttgggactacagttgcacactatgatgtctggctaatttttgtatttttagtagagatggggtttcgccatgttggccaggctggtctcgaactcctgacctcagatgatcagtccgccttggccccccaaagtgctgggattacagacatgagccattgcacctggcctgaaaactcattttatttagatatgttaagggaaatctcaaaataatcagctagaaaaattgaaaatggttgcccatgaggaggggagaactgttattatttatgtcaaataaaatttgtaggaagccattgatttggactgtgctcctgcactaggccccaatagaccaaaccacatggagtcactcttgctaaagttccacgtcaccaaaccaaagctaagtagtttatcttaccttctgggaaattaggggagagaaataatagacaaatccccaaacaggccagttttagctggcatataaggaagtcctctctgttttaaccgtattaggagagtaactttgaaaagaccgtccactttttggtccctgtttctgttttcttctgccttttctgcctataaagctaacttcctctgcccagctcactggagtaccttctctgaatttttagaagacaggctgccctgatccatgaattgcaaatgaaagccaattagatcatttaactaaattcattgtaattttgtcttttgacatttgtaaacaagccttgtagtacttgctaaacaatgggctgggcgcagtagctcacacctgtaatcctagcactttgggaggctgaggtgggtggatcacctgaggtcaggagttcgagaccagcctggtcaacatggtgaaactccgtctctactaaaaattcaaaagttagatgggcatggtagcatgtgcctgtagtcccagctactcaggaagctgaggcaggagaattgcttgaatctgggaggcagaggttgcagtgagctgagatagtgccactgtactccagcctgggcagcagagcaacactctgtctcaaaaaaaaaaacaaaaacaaaaacaaaaaaacaacttgctaaacaacatatgtttattatttggtaaattataaacaataaattcaaaactttaaaaagaaaacattttattgatagctcactgaatacaaatttataaaatattatttatgcattaagtttcagttacacattttcacccatcattacagatgtcatatggagttgctagagtatgagaagagcttcttcatcccaacagctttcaaagtgaagaggcgactcatgcctgtaatcccagcactttgggaggctgaggcgggtggttcacttgaggtcaggagtttgagaccagcctggccaacatggtgaaacctcgtctctactaaaaatacaaaaattagctgggcgtggtggcgcacacctgtaatcccagctactcaggaggctgaggcaggagaatcacttgagcccgtgaggtggaggttgaagtgagccaagatcatgccactgcactccagcctgggtaacaaagcaagattctgtctcaaaaaaaaaaaaaaaaaaaaagtgaacatctgggtcccccagatctcttcagagatatgtaatgttctcctttttccaactacataactctttaagctgggttttcttcatatactccaatgaaaacaacatattgcaacagatggaatgaagaggcaagtagaagaatccagctgttttctattaagccaaacattacaattgtcagctgaagaattctgagattcataaatttggaaagaaaagcttcatttctcataaaagattgcagcctgcagggtggccattctgacaggctaagaaatgtagtctctggccagaagccaaaaacagacactgagggtcagaagaataagatgggcatttatgctgaataggatggccaaatatacatattcaataaactacagtcatgaatattcatgaaaggagaaacatgcacatgctcaattgagcttcatgcctctccatgggacgcgtgtgcaaaaaatggcagcattagcatgatcagagggtggagttttctgtcctctgatatcaaaaggtgaaacagaggacacagaaaccctcactgcacatcctctgtaaactggccagaaccactccattgtgggcagtctgttatcaggaaggaatgctggttagttgtgcagaaactgcaaaaggaaggggcagtgtcagaccattggttgatatcagcggtgcagctcgtctttccaaagggctggtttctgtttaacctgtaggaaggaaatcctaatggcgtttagcaatggagagggtataacaacacatcatggcaagaactcagttttcaaggtttctctggggtccccttggccaagaggtggtgcatccgtttagtcagctgggggacttaggatttcatttttatttctcagagttttataaaactctaaaataattatttgacagccaggtgggagggggtccctggagaaactccaaccagcctgcctactagggtggagccttgggagtttgcagcagggaggagcctggcgcctcctcttcctatgtgaacctgggattctagcagcctggtgggaagcactgtagcaggagactctggccttgcagaggatccctgttcccctcatccctttatttccccttttcacttaataaaaccctgctttactcaccctttaaaccatctgcaagcctaaatttttgtggctgtgggatagacaagaaccttctctttagctgaactaaggaaaagtcctgcaatgatcccattcttcacaccaaatatgttttgtttcaaaagtatagttatttatcataaatatgtcattaatattgttaaatcaaatttagcctaaagctgcctccttatatagtttaagcttgacctaaaggtttctctgtacttagtgaattgtagcctacccagatgtgtaaacaagactgtgaactactcttgtgacaaacattggattttggccaatcaaaggaggtcaactcttgacactgctttcaaataaggcaaatattgagctgtaaacaatctggctgtttctatacctcacttctgttttctgtacgccacttttctgtctctgtccataaatgttcttccaccacgtggctgtgctggagtctctgaacctactctggctgaggaggctgcccaattctcaaactgttcaattaaactcggttaaatttaatttgtctaaggttttcttttaaccatataaacaagtgagtttatgattgttatgtcttttttcttttcttttttgagacaaggtcccactctgtcccccaggctggaatacagtggcatgatcacggctcactgtagtctcgcactcccaggctcaagcgatcctccatctcagcctcctgagtagttgggagtacaagtgcatgcaaccatgcctggctaattttttttttttttgtattttttgtagagatagggttttgctacattgcccaggttgatctcgaactcctgagctcaagtgatcctcttgcctcagccttccaaagtgctgggaccacaggcatgagtcaccacacccagctattatttctaaattaatgaacagatgaacattttcaaaatttctcagttttaattttaaatatgattaaaaggatagatataacacacaaacaaaagctctatggagtcctctataactcaagaatataaagggtcctgagatttttctttaaagagaaccactgcactctcctggcctactagctctccgcaatccatcctgcttctccccttggcaggagagacctgttctagaccctcaaggacccctcataacatcacctagctattatctaaggaatctttctccatttggacttcccatttttttcttccccctttaaggtccccttattcttttcatctaattttgtgtgccacctgcagagtccttcttcttcttcttctccttctccttctccttcttcttctcagagtcttgttctgttgcccaggctggattgcagtggcacgatctcggctcacttcagcctctgccttctgggttccagtgattctcctgcctcaggctcctgggtagctgggactacaggtacccaccatcatgactggctaatttttttgtatttttagtagagacggggtttcacaatgttagccaggatggtctctatctcctgacctcgtgatccggccgcctcggccttccaaagtgctgggattacaggcatgagccaccgcacccggcgactaatttttttttttttttttttttttgagacggagtctcactctgtcgcccaggccggactgcggactgcagtggcacaatctcggctcactgcaagctccgcttcccgggttcacgccattctcctgcctcagcctcccgagtagctgggactacaggcacccgccaccgcgcctggctaattttttgtatttttagtagagacggggtttcaccttgttagccaggatggtctcgatctcctgacctcatgatccacccgcctcggcctcccaaagtgctgggattacaggcgtgagccaccgcgcccggccggcgactaatttttatatttttagtagagacggggtttcgccatgttggctgggctggtcttgaactcctgacctcaggtgatccgcccgccttggcctcccaaagtgttgggattacaggcatgagccaacgcacccggcctgagtcctgcttcttccagatctggtgcccagtcctgacgccagaaagggggtcttgttccagaccccaagagtgttcttggatcttgcctgggaaagaattcagggtaagtcgcagagtataatgaagttaagatagttaattagaggctactcaattacagagtagggcatcctcagaaaacaagaggaggaaggcgctaccttaaatgtagtgcttgcttatgtaggttgtataagaattgtgtactttattacaaaggcttgtgatcagcttgtgacaggctattggtactgttattttcctgttactattgatttcagcaagaatttatgagtacactattatatttaaggcaaaacctattccttaagaatgctttttgttcttaaaatactgggacatttccataagttctgagtctttagttagcaacattaactcattccctcaatcataaacatctcatgaccaagagtgcccagttcctggggaatgtaacccagcaggtttggctttattcggcctttattcaagatggagtcactctggttaggacacctctgacagtccctggaaatccaaaggaacccttctgtgtggcacagggaatggaagaaagaaagagatgaggcaggaaaatagggtctggaggcagaaaacataagccgattcacacttcagctatgacaggaaatatcctctccatagggcgtatgcctgtaactttacttcatcctcttcatttacataggacgtatcctaagtaaccaatggaatcgtctagagggtatttaaactcccaaaaattctgtaacagggcctttgagcccctatgctcgggcccgctcccacactgtggagtgtactttcattttcaataaatcccttcattccttccttgctttctttgtgctttgtgcattttatctaattctttgttcaagacgccaggaacctggacgccctcccctggtaatagagagatgagcctttcaaatgacctgactcctttatcccagccaggtgtgtgcccgaccctgaaaggaggaatagggagggggacgttcaacccggcctcccgctctgtgttagcagcgtctggatgggtcagggtggaggtgggggtgttctaccctgctatttgctcctagagaagcttctctgcttcactagtctcacagttctaaaggcaagaacagccctagtgggatcttccaaggattttagaaaagaatgaataagggaaaaattaaaatattgcagggtgccataaaaacatcccagtaaaacaaacacctttctagatgctcattggaacgtaaatggagctcagcccccatcccttcacaccagatccagtcttcatctttgtggttcactgccccctcaccactcaggaggaaaaccccagcttctgttctggctccccttctctcacttagaatttttcaccagagtttcagaaagatttgtcaggaccactccatgcccaaggtaaaaagtgtaagtggtacaaaaaggtagaaactcatcagacccccaaagagtgtcatttaaccatacaaagccctgataaactccagggcagaagaaaaagctgcatccttgactccactggggcattcttatgtaaactaagatccaagaactgcatcaggagagaaatcaagagccctggggatgttaggatgagccctagaggtgctaagacaggttatttgaaaaaccaaaaagtagactgagattcccttccttttcagggaagaattgagacctttcctttcttactgttcagagtgggggctgataagggtaattatttcctggagccactggctactgccctgggaaggaaatccgctgggttgggggagggaggaaggcagaaccaggcattaactctccctccactacatccctttcccgtacccctcccctcctctccttccccccactccctgcccccgccctccgaaaatgacacttggcctgagaaaggaggaaggtagaataggtggacacttcccttgtcctgctccaggggtgtctcagtgacaaggagatgtgaaaaaagaaggaatcccaaggctccccttggaaagaagggagatctccaggggctttgggaagtcaggttagtactgggaaggctgaagactcccagtagatagcgttcagggctgcatttggctgcaatcctataaaatacattcttctctaaggttggatacaagcatttagaagactggccattaaaaaaataaacagtattaataatattaataatcatgagtgtcagtagtgttgaattttttctggaatcctttcccaagttgcctaatgcccagagaaggaaaataacagtgtttagtagacataaa

SEQ ID NO: 2 - DNA, 67515 bp, Homo sapiens
tttatgtctactaaacactgttattttccttctctgggcattaggcaacttgggaaaggattccagaaaaaattcaacactactgacactcatgattattaatattattaatactgtttatttttttaatggccagtcttctaaatgcttgtatccaaccttagagaagaatgtattttataggattgcagccaaatgcagccctgaacgctatctactgggagtcttcagccttcccagtactaacctgacttcccaaagcccctggagatctcccttctttccaaggggagccttgggattccttcttttttcacatctccttgtcactgagacacccctggagcaggacaagggaagtgtccacctattctaccttcctcctttctcaggccaagtgtcattttcggagggcgggggcagggagtggggggaaggagaggaggggaggggtacgggaaagggatgtagtggagggagagttaatgcctggttctgccttcctccctcccccaacccagcggatttccttcccagggcagtagccagtggctccaggaaataattacccttatcagcccccactctgaacagtaagaaaggaaaggtctcaattcttccctgaaaaggaagggaatctcagtctactttttggtttttcaaataacctgtcttagcacctctagggctcatcctaacatccccagggctcttgatttctctcctgatgcagttcttggatcttagtttacataagaatgccccagtggagtcaaggatgcagctttttcttctgccctggagtttatcagggctttgtatggttaaatgacactctttgggggtctgatgagtttctacctttttgtaccacttacactttttaccttgggcatggagtggtcctgacaaatctttctgaaactctggtgaaaaattctaagtgagagaaggggagccagaacagaagctggggttttcctcctgagtggtgagggggcagtgaaccacaaagatgaagactggatctggtgtgaagggatgggggctgagctccatttacgttccaatgagcatctagaaaggtgtttgttttactgggatgtttttatggcaccctgcaatattttaatttttcccttattcattcttttctaaaatccttggaagatcccactagggctgttcttgcctttagaactgtgagactagtgaagcagagaagcttctctaggagcaaatagcagggtagaacacccccacctccaccctgacccatccagacgctgctaacacagagcgggaggccgggttgaacgtccccctccctattcctcctttcagggtcgggcacacacctggctgggataaaggagtcaggtcatttgaaaggctcatctctctattaccaggggagggcgtccaggttcctggcgtcttgaacaaagaattagataaaatgcacaaagcacaaagaaagcaaggaaggaatgaagggatttattgaaaatgaaagtacactccacagtgtgggagcgggcccgagcataggggctcaaaggccctgttacagaatttttgggagtttaaataccctctagacgattccattggttacttaggatacgtcctatgtaaatgaagaggatgaagtaaagttacaggcatacgccctatggagaggatatttcctgtcatagctgaagtgtgaatcggcttatgttttctgcctccagaccctattttcctgcctcatctctttctttcttccattccctgtgccacacagaagggttcctttggatttccagggactgtcagaggtgtcctaaccagagtgactccatcttgaataaaggccgaataaagccaaacctgctgggttacattccccaggaactgggcactcttggtcatgagatgtttatgattgagggaatgagttaatgttgctaactaaagactcagaacttatggaaatgtcccagtattttaagaacaaaaagcattcttaaggaataggttttgccttaaatataatagtgtactcataaattcttgctgaaatcaatagtaacaggaaaataacagtaccaatagcctgtcacaagctgatcacaagcctttgtaataaagtacacaattcttatacaacctacataagcaagcactacatttaaggtagcgccttcctcctcttgttttctgaggatgccctactctgtaattgagtagcctctaattaactatcttaacttcattatactctgcgacttaccctgaattctttcccaggcaagatccaagaacactcttggggtctggaacaagaccccctttctggcgtcaggactgggcaccagatctggaagaagcaggactcaggccgggtgcgttggctcatgcctgtaatcccaacactttgggaggccaaggcgggcggatcacctgaggtcaggagttcaagaccagcccagccaacatggcgaaaccccgtctctactaaaaatataaaaattagtcgccggccgggcgcggtggctcacgcctgtaatcccagcactttgggaggccgaggcgggtggatcatgaggtcaggagatcgagaccatcctggctaacaaggtgaaaccccgtctctactaaaaatacaaaaaattagccaggcgcggtggcgggtgcctgtagtcccagctactcgggaggctgaggcaggagaatggcgtgaacccgggaagcggagcttgcagtgagccgagattgtgccactgcagtccgcagtccggcctgggcgacagagtgagactccgtctcaaaaaaaaaaaaaaaaaaaaaaattagtcgccgggtgcggtggctcatgcctgtaatcccagcactttggaaggccgaggcggccggatcacgaggtcaggagatagagaccatcctggctaacattgtgaaaccccgtctctactaaaaatacaaaaaaattagccagtcatgatggtgggtacctgtagtcccagctacccaggagcctgaggcaggagaatcactggaacccagaaggcagaggctgaagtgagccgagatcgtgccactgcaatccagcctgggcaacagaacaagactctgagaagaagaaggagaaggagaaggagaagaagaagaagaaggactctgcaggtggcacacaaaattagatgaaaagaataaggggaccttaaagggggaagaaaaaaatgggaagtccaaatggagaaagattccttagataatagctaggtgatgttatgaggggtccttgagggtctagaacaggtctctcctgccaaggggagaagcaggatggattgcggagagctagtaggccaggagagtgcagtggttctctttaaagaaaaatctcaggaccctttatattcttgagttatagaggactccatagagcttttgtttgtgtgttatatctatccttttaatcatatttaaaattaaaactgagaaattttgaaaatgttcatctgttcattaatttagaaataatagctgggtgtggtgactcatgcctgtggtcccagcactttggaaggctgaggcaagaggatcacttgagctcaggagttcgagatcaacctgggcaatgtagcaaaaccctatctctacaaaaaatacaaaaaaaaaaaaaattagccaggcatggttgcatgcacttgtactcccaactactcaggaggctgagatggaggatcgcttgagcctgggagtgcgagactacagtgagccgtgatcatgccactgtattccagcctgggggacagagtgggaccttgtctcaaaaaagaaaagaaaaaagacataacaatcataaactcacttgtttatatggttaaaagaaaaccttagacaaattaaatttaaccgagtttaattgaacagtttgagaattgggcagcctcctcagccagagtaggttcagagactccagcacagccacgtggtggaagaacatttatggacagagacagaaaagtggcgtacagaaaacagaagtgaggtatagaaacagccagattgtttacagctcaatatttgccttatttgaaagcagtgtcaagagttgacctcctttgattggccaaaatccaatgtttgtcacaagagtagttcacagtcttgtttacacatctgggtaggctacaattcactaagtacagagaaacctttaggtcaagcttaaactatataaggaggcagctttaggctaaatttgatttaacaatattaatgacatatttatgataaataactatacttttgaaacaaaacatatttggtgtgaagaatgggatcattgcaggacttttccttagttcagctaaagagaaggttcttgtctatcccacagccacaaaaatttaggcttgcagatggtttaaagggtgagtaaagcagggttttattaagtgaaaaggggaaataaagggatgaggggaacagggatcctctgcaaggccagagtctcctgctacagtgcttcccaccaggctgctagaatcccaggttcacataggaagaggaggcgccaggctcctccctgctgcaaactcccaaggctccaccctagtaggcaggctggttggagtttctccagggaccccctcccacctggctgtcaaataattattttagagttttataaaactctgagaaataaaaatgaaatcctaagtcccccagctgactaaacggatgcaccacctcttggccaaggggaccccagagaaaccttgaaaactgagttcttgccatgatgtgttgttataccctctccattgctaaacgccattaggatttccttcctacaggttaaacagaaaccagccctttggaaagacgagctgcaccgctgatatcaaccaatggtctgacactgccccttccttttgcagtttctgcacaactaaccagcattccttcctgataacagactgcccacaatggagtggttctggccagtttacagaggatgtgcagtgagggtttctgtgtcctctgtttcaccttttgatatcagaggacagaaaactccaccctctgatcatgctaatgctgccattttttgcacacgcgtcccatggagaggcatgaagctcaattgagcatgtgcatgtttctcctttcatgaatattcatgactgtagtttattgaatatgtatatttggccatcctattcagcataaatgcccatcttattcttctgaccctcagtgtctgtttttggcttctggccagagactacatttcttagcctgtcagaatggccaccctgcaggctgcaatcttttatgagaaatgaagcttttctttccaaatttatgaatctcagaattcttcagctgacaattgtaatgtttggcttaatagaaaacagctggattcttctacttgcctcttcattccatctgttgcaatatgttgttttcattggagtatatgaagaaaacccagcttaaagagttatgtagttggaaaaaggagaacattacatatctctgaagagatctgggggacccagatgttcactttttttttttttttttttttgagacagaatcttgctttgttacccaggctggagtgcagtggcatgatcttggctcacttcaacctccacctcacgggctcaagtgattctcctgcctcagcctcctgagtagctgggattacaggtgtgcgccaccacgcccagctaatttttgtatttttagtagagacgaggtttcaccatgttggccaggctggtctcaaactcctgacctcaagtgaaccacccgcctcagcctcccaaagtgctgggattacaggcatgagtcgcctcttcactttgaaagctgttgggatgaagaagctcttctcatactctagcaactccatatgacatctgtaatgatgggtgaaaatgtgtaactgaaacttaatgcataaataatattttataaatttgtattcagtgagctatcaataaaatgttttctttttaaagttttgaatttattgtttataatttaccaaataataaacatatgttgtttagcaagttgtttttttgtttttgtttttgtttttttttttgagacagagtgttgctctgctgcccaggctggagtacagtggcactatctcagctcactgcaacctctgcctcccagattcaagcaattctcctgcctcagcttcctgagtagctgggactacaggcacatgctaccatgcccatctaacttttgaatttttagtagagacggagtttcaccatgttgaccaggctggtctcgaactcctgacctcaggtgatccacccacctcagcctcccaaagtgctaggattacaggtgtgagctactgcgcccagcccattgtttagcaagtactacaaggcttgtttacaaatgtcaaaagacaaaattacaatgaatttagttaaatgatctaattggctttcatttgcaattcatggatcagggcagcctgtcttctaaaaattcagagaaggtactccagtgagctgggcagaggaagttagctttataggcagaaaaggcagaagaaaacagaaacagggaccaaaaagtggacggtcttttcaaagttactctcctaatacggttaaaacagagaggacttccttatatgccagctaaaactggcctgtttggggatttgtctattatttctctcccctaatttcccagaaggtaagataaactacttagctttggtttggtgacgtggaactttagcaagagtgactccatgtggtttggtctattggggcctagtgcaggagcacagtccaaatcaatggcttcctacaaattttatttgacataaataataacagttctcccctcctcatgggcaaccattttcaatttttctagctgattattttgagatttcccttaacatatctaaataaaatgagttttcaggccaggtgcaatggctcatgtctgtaatcccagcactttggggggccaaggcggactgatcatctgaggtcaggagttcgagaccagcctggccaacatggcgaaaccccatctctactaaaaatacaaaaattagccagacatcatagtgtgcaactgtagtcccaaatactgaagaggctgaggcaggagaatctcttgaacctgggaggcagaggttgcagtgagctgagatcgtgccactgtactccagcctgggcgacagagcgagaccccatctcaaaaaaaaaaaaaaaagtttgagtttttggttcatattaggaattatcagtctccttcccactctagatgatgagattttgtttccttaaccatttttctccccattttctggccataaacattcacattcctccaaatgttttaaactggattgttggtcaaatcactatttagcattttcattataataatgatgaaaacaatacccactgttgcattgtgtaacataacaggacgtttcctatcctgtacaatgcctcgtgtttcctagtgttattaattgcttttctgttttgttttctttttcctttgttttttattacatcacatttttttaatgttgaggctagttttattacagaatgtcccttcaccatgtaggaaaggaaaaatttctgttctaccctcttaagtttccagctaggcctaagaattaaactgacacaggaaagattaacagtagaaaagcacgcaagtcttattacaattttacatgtacctgggagtcctcacaagcaaatgtagacccgaagaagtcaccatagcagacaagtttatatatgttttagacaaagaaatgataaatttgtgaagaaatgacaagacaaaggggcttggggaaattactaagagctatattggggataagtagtggaagacaagggttattccaataagtttgttcagatccattttggcattgattccctatctctggtgataaggatgtttttctctttctagtagagggagggcacctttatcatgggaaattttctagcctgtttttaggtagaaaagaggaggttggaaagcccttcctgtacagtctgctgtttctcaagtgctttcagctaataataatcagtatgccaaaatggcatatttttgggtgatggcattgtctgaactgcttcaaccagaattttaaaggctttttgttattattgagaactatgaagctattgtgatgaatattactttgtatatgacctatttgtcttgttttgtttatttattttttccctctctggttacttatattatctttttttgtccctcatgttatgaaaattcataacaatgtgattttgtatgggatatttttctatatgtggaatatacctggaatctcatgcccttcactttaaggaaatgttcttgaattatttctttgataattttttttctatcttttctgttctctctttcgtgattcttctcatttggaagttgactatttcctatctcttagtatttttactgtaatttctgaacaatttcaactctgtcttccaactctttcattgtatttttaaaatttctgctttcacatgtttaaatctaaagactgtgtttttgttctctaaaaaatttacgagcctgtagtcccagctacttgggaggatgagatggaagcattgcttgagcccaggaggttgaggctgcagtgagccatgaccacaccactgcactccagcctgggcaacagagtgaaatcctgtttcaattaaaatatgtatatacattttacttagggaatgactgaaacttcatttccaatcccttccctataggtttgaaggcaaaataattgaaagagggattattatgggactaaatgaagagtagtctagtacaggctccttagaacttgaaaaaggggactgccaataggctgaactaagagatggagaccccaactcaggagttatttctttttgtttttgttgttttccttcgacttttattttagaatcagggggtacatgtgcaggtttgttacaaaggtatactgtgtgatgctgagctttggagtgctaatgactctgtcacccagatagtgagcagggcaccgaataggtagtttttcagcccttgcctctctaatagcccccactgtctattgttcccatctttatgcccatgtgtattcagtgtttagctcccacttttaagtcagaacatgcattatttggtttctgtttctgtgttagtttgtttagaataatggcctctagctacatccatattgctgcaaaatacatgattacattcttttttatggcagcatagtattccacagtgtatatgtaccatatggtggtatatatgtacacaatctaatccaccattgatgagcacctggtttggtttcatgtctttgccattgtgaatagtgctgtgatgaacacatgggtgtatttgtctttttgatagaacaatttattttcctttgggcatatactcaataatggcattgctgggtcgactggtagttcaattcagttctttgagaaatctccaaactgttctccacagtggttgaatgtatttacattcctaccaacagtgtataaacgttctcttttctctgcagtcttgcaacatctgttattttttgacttttttaatagtcattcttgctggtatgaaatgatatctcactgtgcttttgatttgcatttctctcatgattagtgatgatgaggattttttcatgttcgttggtcacttgtatttcttcttttgagacatgtctgttcgtgtcctttgcctactttttaatggggttatttggtttttgcttgttgatttaagttccttatagattctggatattagacctttgtcagatgcataatttgtgaatattttctcccattctgtaggctgtctgtttactcccttgatagcttctcttgctgtgcagaatctctttagtttaattagatcccacttgtaaatttttgtttttgttgcaattgctttctaggatttagtcataacttctttgtcaaggctgatataagaagggcatttactaggttttcttctaggattttttttttctttttctttttttgagatggaatcttgctcctgtcacccaggctggagtgtaatggtgcgatctgggctcactctgcctcccaggctcaagcgattctcctgtctcagcctcccgagtagctgagattacaggcacacactaccatgcccagctaatttttgtatttttagtagagacagggtttcaccatgttggccagcctggcctcgaactcctatcctcaggtgatccatccgcctcagcctcccagagtgctgggattacaggcatgagccaccgcgcctggctcttctaggattttttagtttgagatcttacatttaagtctttaatccatcttgatttaatttttgtatatggggataggtagcagtctagtttcattcttctgtatatggatagccagttatcccagcactactttttgaatagggagtcctttccccattacttaatattgttgagtttgtccaagttcagatggctgtaggtgtgtggctttatttctgagttgtctattctgttccgttagtctacctgtctgtttttgtagcagtgccatgctgttttagttgctatagccttgtagtagagtttgaagttgggtaatgtgatgcttccagctttgttctttttgctcaggattactttggctatttgggctcttttttggttctatatgaattttattttattttattttatttatttttttgagatggagtctcactctgttgcccaggctggagtgcagtggcgtgatctcggctcactgcaacctccacctcccgggttcaagcaattctcctgcctcagcctctcgagtagctgggactacaggtgcccgccatcacgactggcaaatttttgtatttttagtagagacagggtttcaccatgttggacaggctggtctcgaactcctgacctcagatgatcctcctgcctctgtctcccaaagtgctgggattacaggcgtgagccacctcgcctggccgctatatgaattttagaatagtttcttctgattctgtgaaaaattaccatgggccgggcacagtggctcatgctgtaatccctgcactttgggaggccaaggcaggtggatcacctgaggtcaggagttcaagaccagcctggccaacatgttgaagccttgtctctactaaaaatacaaaaattagccaggtgtggtggcaggcacgtgtaatcccagctactcgggaggctgaggcaggagaattacttgaacccgggaggcggaggttgcagtgagtcgagatcgcgccactgcactccagcctgggtgacaatagcgagattctatctcaaagaaaaaaaataaaacaaaaatgaccttgatagtttgatagaaatagcattgaatctgtaaattgctatgggcagttatggccattttaatgatattgattctttaagaagatattagagtgcctatgatataccaacaactgtagtgagccctgggaaccaaacatgaaaagatttggacacttactctcaaggaactttcagcctaattgttgcaatatacctgagtcatggagtctgagagtcttgccttccacatccccaacaaggtaagttggctaattatcaggcctttgtatttcagaatgggaaacctatctaagcttaagaacaaaccctaaaggaatttttgaggaagtggtgtggtggagaagagagaaatgagaccaggcaatgggaatccaggagagaaaatgggaaagagagcttaaaaatgtccttaggaggttcaagtttttccgtgcctgtgtgaggtaactcactccgtggacaccctccccacctccaaccattcttctgtaaaatttatatttcttgctaacactcttggagttggggttatttagagtttatttgaacaactatcttaaacatataattataacacatttatttgacatttatagagctctaattgtgtgcaaggaactgtgcaagatgctagggcaacagcagtcaacaaaggagacacatagtcctagcctcatggaaggtacagccaagcaggggtgacacatggtaggtcagtgctgggaaagacaaacatggtatgctgaggacatggaacaatcaagggcatccaggcagaggctgagtggaggaggagtttgcaaggctgtgccaagaacatttttcagggtagaatctaccccccaggcagagatgtggggaataaagaccaaaatggaaacagcactggccaagtctgagagccacgtgaaaatagcacagcacacttagggatctggggatttgggattgctggagtcaaagtgttgagtgtgagggggtagaaaagcataattatatgtagagtcagtgcctgaacagttcagtcagaaaagcacatttttcaggctaagaaacttggccttggtcctgcttaggttttacagacaagagattgcctttctgaaagcttaccctggagactgtgtagctagatgatgggctgagagaaaaggaggaaggtggatataagaaagctcctgcaaaaatgcaggtgaaaaatgatgaggacctccactggggacgggcaggagagggcagatttaagggatgtttggtgaaactttcaaggggaactgctgatggactggcaagaggaatcccagcaggatcaggtggctatgctctggacggtttgcataactgtcagtggcaccattcacttcacattgtagttataatctctgtcaacagtggcacctggagatgtgcagtacacagcctaggcaatcttacagagaaatcctgactccaaactcatctgtttctattacttttgagctttggagggatttaaagtttttctttctcttagggttttatttaagccattttcttttggaaaaatctcagctagcatcatagagtgcggtaggaaaggaatgtaattgggaaatgatattgtcttatttttctatataatttagccacctttacacttaagatggcagacacgggaattacatttttttaatggagtttccctcttgtcacccaggctggagtgcagtggtgtaatctcggctcactgcaacctccaccacccaggttcaagcaattctcctgcctcagcctcccgagtagctgggataacaggcgtgcgccactacggccagctaatttttgtatttttagtagaggcggggttttaccatgttgaccaggctggcctcgaactcctaacctcaggtgatccacctgcctcagcctctcaaagtgctgggattacaggtgtgagccaccgtgtctggccaggagctaaacaatttgaggtcaagatgtggcgttaacaatgttcccacagatcacagaaacacaagtggacagcagaggcccttcttgcactagtacttctacctggatggggcctcagaggtctgactttccacaggagaagaaaatctttgagagccaattttactgctgggtgctgatgttttcctcaactgtctaaataaatcttcagctaataaacatttcaataaatctgttctggtgccttccattccttaaactatacagccagagaagatggaacatatgagcttggattctgtctctgtagcggatgcagggatataagtgagctgagttttacacattccaaaggggccactgatcaggtacttcgggatgcactccaagtgtcctggctaattaagataaaccaaagattagaaggcatttctggctgggtgcagtggctcacgcctgtaatcccagcactttgggaggcggaggcaggtggattactaggtcaggagttcaagaccagcctggccatgatggtgaaaccccgtctctactaaaaatacaaaaattagccgggtgtggtggcaggcacctgtaatcccagctactcgggaggctgaggcagagaattgcttgaacccaggaggcggaggttgtagtgagcccagatcgtgccactgcactccagcctgggtgacagagcaagactctgtctcaaaaaagaaaaggcatttcttactctatacacaaagtcatgaactcgtcgttttgaacagcataaatttacatgaaatttcaaaactttgcccctccttcccctttctcccttgctggcatgtagctgttttagtttgttctagcagaagataactatgtgccaagaatccaactggacacggactaaaattactttcatcttagtgtgtaccttggaagcgtaaagcgatttttccttggcaaccttgcatggttagtccacacaaactccatcactatgaacatgggtcttcctttagaggtggcaaaagcatctgtcagaatttggggcaggtatagctggataaagcatattgtaaacctataatttaatgcaaactgtcaaattttaaattggctaaaatagttttagaaggtatgcaaaagatcaagtaaaatataagcatggtaaggcacacgataaatggttccagggaatcagaatctaatacgaagttaagtaaactgagtattttgattaagttcaaggttgagtagggaacgtcatccatattttgggagaagtcctccaatgtgaatatgaaattatgctatgcatgtgagaacaacagttgtcatgaactgagtacttctcacatcaggattgtgctttgcctgtgggcccaggctcaacatgttagatatctccattttatagattaaaaaaaaaaaaaacatgaggccactgtcagtgtctacaaacaagtaagaggcagagtttcgattaaattctaaatttgtgattcaaaaacccaggttctcttttacacacctcattccttctttgtaattccagagagctaaataagtcatgccagaacattttattttctatgtggctgaggttctacccactcaagaaggtaaaaataatagaaaaagctttctgatgaacacctgtggcacacacctgtaatcccagcatcttgggaggacgaggcaggtggatcacttgagcctaagtgttagagaccagcctgggcaacatggtgaaaccccatctctacaaaaaatacacaaattagccagctatggaggtgcacacctgtgggaggattgcccaagcccagggaggtcgaggctgccatgagctttgattgtaccactgtcctccagcctgagtgccaaagtgagatcctgtctcaaaaaatagaaaggggaaaaaaaagttttctaagattgtattatgcaattcctcacctcctccagtatgttacagtgaatatttaataaccttttcctggaaactcatccttcacatggatgactggaccacaccataaatgaggcgatgctcccagggtctgtggtggggaggctattggtacacacagtggtacttttccagtttgcttgacagaatatgattttgattcttcccctggctgctgttcatgtgtttgaagtccctttatttatttatttatttatttgagacggagtatggctctgttggccaggctggagtgaagtggcatgatctcgtctcactgcaacctccaccccccaggttacagcgattctcctgcctcagcctcctgagtagctgaaattataggcacgaaccaccacgcccagccaattttttaatatttttagtagagacgggattttgccatgttggccaggctggtcttgaactcctgacctcaggtgatacacttgcctcagcctcccaaagtgctgggattacaggcatgagccactgtgccaggccccttttctttccttaaatggggatctcccactgccttgggaacgagataatcaaaccaattagagctatatgtaaaatgaaagtaaaataggcctgaagggctggcccacaaggaccccataagagcccagattccttaacttccactttcatgtcagagcagccccactgcatacctcttttgtgctgtgtcccagataaaggagtacatcatgtcaccgagttctaagtaagtggggtgcactgaaactttcagtagaagcaagatgcaaacacatacaaacatgtatgatgttatttattttctcactggcactggcctactgcacttaaacatttccatcagactcaaaaaataattttatttcagaaaaaatattttacctatttagcttttgtttatactgttttattattaataggtttttttttctttttttaagagataggatcttgctgtgttgcccaggctgatctccaattcctggcttcaagcaatcctcctgtctcagcctcctgtgcagctgggactataggtatatgccactgctcccagcttgacttaatggaatgtgtttttattcacccattggaaaagcctttgctacatattaatacaaacttctcattaataaaccctccttttttttttttttgagacggagtctcgctctgtcgctcaggtacgatctcgactcactgtaacctcctccgcctggggtcaagcaattctcccgtctcagcctcctgagtacctgggattacaggtgcacgccaccatgcccagccactaataaatccttctttaagtaagaaaataatataacatgagcataactttgcatgaattttaatgtcctggaggcttgttgctttgtataaagtgcaggtcagtaaaaattaaaatgaggtaatgtggtataatacgattaacccagtaagggtacaataaaggatggctattattattattatattgttattattattttgagacagagttttgctcagtcacccaggttacagtgcaatggcacgatctcggctcactgcaacctccacctctgggttcaagcgattcttccgcttcagcctcccaagtagctgggattacaggcacctgccatcatgcccggctaattttttgtatttttagtagagacggggtttcatcatgttggccaggctggtcttgaactcctgacctcaggtgatccacccaccttggcctccaaaagtgctgggattacaggtgtgagccaccgcgccaggccaaggatggctattattttcacatgaattcaactgaaatcacgatagggcaacaccaataacaatgtttcctatatagcttaaaaactgttctttgtcatcccctcatctacccaatagggaattagaactagcctgttaggttgcttgacaggaccactgaatgctgggaatcaaccatactctattctctcatttaacagatggggaagcagaggtccagggaatttgggaaacttgtccacaaagggacaactactttgtggctgaactatgtctaggaccagggctctctttatcaacatgagtatctccttcctttatctgccccttcatgtttacaaggcacctcctcagctccatgattttgtttgttacgctacatcactcagctcatgaaaacggctttttttcctcttttcttgtctttggaagattttttgcattcttgtagcagctgattccatactaacctttaaattgaaaaaatatatatacacacagacacgtatgtgaatatgtgggagaaacagcactaggtctccctggacaacccagtgcaggccacaccttggcagtcacagagcacaaataagaaatgatcttcccgtgtgagttgctttcgacacttcaatgctaaagagctcagaagtgcttacactttgaaagaagcctgaaaacatttgtaggctaccctttaatgtgtctcatttggagatagaacagtgagcaggttgaccagctgctcttcatgtacttcttgcagtaaatccttcaaagaatgaagagtgaagacaattcattttccctcctggaatttttccttcttattattttgcttttttaaaggttgttatattcaggtataggcataagacattataaaagataaggggtatcatgtgagggaggaaatccgacaatccaaaaaatcttccatagaaattaaaaatcagaacttgggggcaaggtaggaggcaacacattctttctacagagctgtgacacatagcccaactgtcctcaaaagcaggaataaaaaaaataaacaacaacaacaacaaaaaacagacctcagctgcataatgaagctggggtcttggcctgatagcttttaatgtccttaaaacggggctgggcatcaagcatcttttccggaataggccaaggaagacaagtccagtttggtttttaaggctttagtgagctctgcggccagcagctcatggagggacacgccgtcgtgggagtacacccagtttttcccagtccagtcataacgcttaggtccactggaagacaaaacaaatgcatagtaattccacagcacagcccttcagatgaaccactgattccacaaatgctgcccccaagaaattgactggagtaaagctctagaaaataacacaaaatgagctagtgtatatctgccttcttatcttagcatctaagaagagttatacgatatatcttctggaacaattccaagaatgattctcaaaacctgaaaaaacatttgacccttactgataagtctccaggtatcacactttgatctccagcttttgctacctcacatgtgatacctgctatgctggagcagtgttttaaaaattagggccatttttgtgctacagatgtaacttgtgccttacctataatattattagttgttaaggtgaaattcacataacacattaaccatttaaaaatgaataatttggtggcatttagtacatttacaatgttgtgcaaccactacctctgcctagcttcaaaacatctgcatcaccccaaaaggagacccagtgctgttgttccttggtatccatagggaaggggttccaggatctgcagataccaaaatccgtgggtactcaagtccctgatatgaaatggtacgatacatgcatctaacctaggcacatccttctgtatgctttaagtcatctccagattacttataatgcctagtacaatgtaaatgctgttaatagttgttatattggtttttatttgtatcatttttgttttgttttttattttcaaatattttgatccacggttggttgaatcagatgtggaacccacagatacacaaggccaactatacccattaaacagttattccccattccttcctctcctagcaccccagcaatcacctaaactattatttttaaaacatatttttcttaattcagtgttaaattcatgacattgagagcctggtgggctagttcatccacctcaagctcatccagtgaataatggcacatgcacgttgctttgggaatgctgtattcgtgtggacagatcggaggctggcttctgccatgtcttcttataccagatgtacattccacttcctcatggcctcatggatgattggccacggcagcagataacactagtgcatgtggcaccctgatggaggtaagaacagagtgcatgggagcccagaagaaagggcacctgagtctgcctgagcactcaaggagggcttttccaaagactgaggctaggatgaggtcaccaggaagggaagcttgggcaataaaagtatcaaggattcctgcattatcaaccaaatgctggggcttgaacctgttcccagtatggagataaaaatgagtgaaccaaaccatcagggtcacaggaaaaggactaataaaccacaccaagcccaaggaccgtccccttggccctatactctgatactgctatcgggttgccaggcagagcctgagtaacctctagacccctccacactgcctgaggtgctctgagcacaggcactgatgcccacgtgtccctagaattctcctttattctgcaacctcctcagggtgcgcaaggtgggaggtaagactgctgatttcacaggacctgaaaacttgtcaaattaaaaaaaacaaacaaacaaaaaaaacaggctgctgcagtggctcacacccataaccccagcactttgggaggctgatgtgggaggattgcttgaagccacgagtttcagaccaacctaggcaacaaagtgagaccccatgttgacaaaaaaaattatttttaattaaaaataaataaaattaagaaaaaaaaaacaaaacaaaaatcagaaatgcagccagatgaaagatattttgaaccaatgtgaaaggctgagagaaaaaaaaacaaaattttttttatattaaacaacctttatttgaaaaatagtgccttaccatcctaatgctatcaatcaaacttcaataagagcaactgcagcatcaaccaataacagttgctaaattaacaagagatcagtcaaaagtgctttaaaggcagcagcactggctggtgtttccctgagcctctgggcattcaggacccaggtacagggaaaacagaatcaaaccagctggtgttctgcatccaagccctcgcatcgttacctgcctccctcctggtggccctggtggcccatggtccccctagcacttctgagcccctgtcagctgtgggcggggcgccaggagccacaggccacttgtaaaaggttggaacttggtctcatggtcagctggtttcttcccattgtggtcattttctttttggagtgcctggagcactctctcaatggacacggcggccctccagccttcctgggccgttttctttcttttttttttttttgagatggggtctcactgtgtcacccaggctggagtgcagtggtgtgatctcagctcactgcaacctctgccccacagactcaggcaatccttccacctcagcctcctgagtagctgggaccacaggcatgcatcaccacacccggctaatttttgtatttttggtagagacggggtttcaccatgttgcccaggctggtctggaactcctgagctcaagccatctgcctgcgtcagcttcccaaagtgctaggattacaggtgtgagctaccgtgcttgccccctgggccattttcttacagcaaattggaagagtctttcttcaattcctgggccaggttttgggccatcttcatgtagtggtcatgggtgtgacacatgtggttcaagttttcatgcaccttgcttagtctctgctagaggtcgggcagtaggcatcctcctccgtggactcccgctatggcctcatcacgtttttggtgcagttcaggcagagcgggcagcatcagctgcagcctcaggagctccgtctccagctgtgcccttgcaccctacagaggcctactctccaagctctttactcctttggatttcttcagagggacttgtagccaggaagcggggagaccaccatgtctggtttccctgttcccctccactgccaagtccccatcataccacccttgagcagaggcaggacattcagcggggtgagtgtcagaaagtgacattatttatgcaatgtcttgggggagtggaaagaactcacagtagccgcttagcacgaggaggccagttgcttcactccaacattcatggcctgtttcattcctgccttggcctttccttcttctcctcctttttttgagacagtctcactctgtcgcccaggatggagtgctgtggcacgatttcagttcgttacaaccttcgcctcctgggttcaagcaattctcctgtctcagtctcccaagcagctgggattacaggtgcctgccaccatgcctggcgaattttttgtatttttagtagagacagggtttcactatgttgcccaggctggtctcaaactcctgacctcaagtgatccgcctgccttggcctcccaaagtgctgggattacaggcgtgagccactgtgtctggccccttcttcttcgcctgcaagcattgcttctgtctcgcaatttcttggtcaggcagctctgcggtttgctgatggtcagtgccgtcattcagatagtctgcagtttgcccctgaagatcctctccatggtgctgtgaagcatgcaggacgcactttgcatcagtcactcggggaagttcaggaggcctgcttttcatgctttttcagaaactaacctaggtcctgacacgaggacctgctcatttcatttggaaccctcgaacagagggtttggagcaatcaaggactggcctctggcatggtcaacgtaagaccaccaccagcctgaggtgctggccgcatcttggccctggcctttctgtggatctcaccttgggccgattctccccttctcagcttgtcatcttctgactgtgaaggccaccacagcagtgcacgcctgggtcacccagggtatttataggttccttggcactagtcctaagattctgcacatcactagcactgccgcccacaggagggccagcagcagctgagttggcatgtcgtggcggccagcaggccctctgtggctcccgagggctctgcagctctgcctccacttgccagtggcctgtgggccacaaatcaccactcggaaccctgtggggtgttccgtctcaaacaaaaacaagggcccatcagtcattgtagaacttctgttgggctggggggaggggaggcaccccatgttctagaaaattgtgtccctgattttgctgtgcaaacagaaagtgacattatttatgcaatgccttgggggagtggaaagagctcatagtagccccttagcacaggccactccaggctccacctggccctacagcacagctagtgggtcaaagcagggccaggtcatagccccgtgtccacatgcgatcctctcagggtagcatggtggcctgcctctgtcccttctgaggctcgttaccaatttcaagcttccttctgctgcagggaagcccggtcccacctacaaagagtctgtctcccttgctagattgagctccttgaagatgggactgtgttttcttcatctctgtatttccagtagctcatcaatgcccattatacactagaggctaagtcattttgggccctgttttcttgttgactctattctgacttaggacatgtcactttccccactggacctgcatattcacatctgtgaataagagtaagtgggtaaagacccttcttgctttaaagcccctccaatacagagacctctgaaaccagaagcagaagctgaggagtggtgaatggagcattttccctggcatgatggctgagacctgcagatctggctatgagggtggtatcttgccagttgaatgcctctgcagaatttcaccctacttttcaaagcagactcaaggatgatctttattgttgataatttcatgtttttgttgttgttgttgttgttttgaggctttgatattgacacaacagcttctggaaatcttttccacagagagtatggggacttctttagccaagttgggcgggtgcaggctccaactgctcggcagccactgtccgggccacagcatgtccacaacctcctgctcctctacaggggtttctccagacataaccgtgtgtctggtcatgccatttgccacaggtataaaaacaatgacgacggcccgaaactgcgggatcttcccgcggaatcctgtgccttcgcaggtacagctacacggcgctcccgcgctccggcctgctccttccaagaagacaggcgcagaacggcctgggtcctgctcccccggaaccccgcagtctgtgtgggcagcaggccgggagtggggagagccgccctggtggtgaggcccggagcgggacggctgtgttaggcagcatcctggcctccagtgaccagcagactgactcggcctccatcccccgctgggagctgccgtcttgccgccacttcccacagaagcactgagagcttgtcctcagggcccgcttctctgcctcccttcccccgactcccatccggcggtggccactctggatctgccggaaacggcgcaggaaggggaggggcctgaggtggaccggggagcctgtggtctctgggtgtggcctgctctggccaaggcacctcttcagtctcacccagtctcaacctgccccgtcccccatatatatatatatattttttttttttgaggaagatagtatctgtgacagtaaacggcatgctcagcagatctttccaaattcccatgcttctgaacacagctagagcgtattgctgggcagtgtgtccaaatacgatatggacgttttcagtcttcagatatggggaaagttcttttggggtaagtgcctgcccgatatctacaaagccactgatccccaaaagtgatcgctggaccgagctgatccacttcgttcccccggagatgaaggataagaacacacaggctcaagcacagccagggtcaggaagaatgactgaggccacagaggctagttggcccacagaggttaaaatcctccaacctccagcacactaactgggtctaaaaaccaatacaatctgtgaattagggccttcctagaatgacagtgatttctagtgctgtttttgttgaactctagcacacttcttggatgaaagtgtggggaaaggaaacacactatttattctgaacaaagcattagagatcacagaataataaatgggaaaatattaattacctaaaaatgatgtcaatgttagggggtagagtaaggttataatttttaaaaaatgcaaataccgttagtctttcaaagaattctatgctagttttatctggccctttcccaattcacagtcaacatgctctctttggaagtgctaatgaatgactggatctgagaacgttttgtgggcatttctcttttactttcttacaaccacttcaacagcagccaggctgctgagggatgagggatgtctctccctgcatgttctcaggctttcagatgctatgcaggccacattgtgtctccaacacaatcttttattcctctagattgaaagcacatcaatggaaaaggcaggagggattaaatgccctggagcagcaatatataacactctaccacctccacagggtacacaaccccaacctgcaaagggaattcaaataaccctttacctgagaggctcaaaacaagtagaggtcaaactttaacttgctttgaagacaaagtgcaacttgttcaaacgctacaaggtcaaaagtagcttcttttaaagtcagggcaataatttaatagaggaaaactgtctaggctggatttggaaaagttataagctactcacttcagatcttaatatcctgatgcctgcttacagtatccaaattgtcagcagggagaagttatgtaactagagtaaacttttctactgagaatgagacaggctgcaaaatatcaggaaaggctcacttacaaggatgctaacataagacgatgactttttttttttttttgggacagggtctggccctgttgcccaggctggagtgcagtggcgcgatcttggctcactgcaacctccacctcctgggctcaggctgaggctcaacctcagccttccaagtagttgggactataggcgtgtgccaccacacctggctaatttttatatttttagtagaggtggggctttgtgacattgcccaggctggtctcaaactcctgagctcaagtgatccacaggccttggcctcccaaagtgctgggattacaggtgtaagcctgcacccagctgtgactttatttttattttctttacagagacagggactcactatgttgcccaggatggttctgaactcctgtcctcaagtgatcctcctacctcagcctctcaaagtgttgggattacaggtgtcagccactgtgctcagccgacatttcttaaatggtccacaatgtcacatttcggaagtctttaagaattacatatgttgacttctgaacatacctacatacctggatggagaagatagccagatttgcttgtttggcgtctgcttgttgatcacataggttcctagatctccacccagtttgacagttaagacaccactctaggggattaggtggaaaaaaagcataaagaaattaaaacaagaaaaagttagcactttgtcatcattgcttcatgttttatctcaacactttccatttctacaagtacacaaaatacaccataaagaaatgtcttttagtatttagaaataggagtttgtgtaggaagagctttgctttcagaatcagaataggattaatcataatgatgttgtatctcatagagctttccctgttccctgtgaggtctgcaaggtgagaatggtggtgaagctcggagagttaagtgacctgtctcaggtcttggtgctggcatctgggactgctggtttgttgccctcaaccatcaaccagaacatactagaggacataaaaaaaatgcagactctaactctattagagtaccacgtcaactcaaacatcagacatgacaagtctattacagaggaagtaaaaggaaggtaaggaagtatgcaaaccatctgctttgcttgtcttaggagagcattagcttcagctctgttggtagaaggcagaaactccagatgaagttttttatttccagactcttcccacgcatctaacaagcttctcagatactcctccaaggctttatttttctctaaagagccttgaattcttcaaaagactagttggtgcatctttgaccaataaatgctcatttaaatttgaaaacactctttcaacaaaagagtcctttacttctaaggcctgtggtctctttagaatgggtgagatatgaaagaaacagctacagggctagttctctgtatttgaactggtaagcagggggaagcctgctgttccccatcttgtgcatgacttgcagagatacacggtggcagcctttttctgtgcattctagagcctccatccaatcgagaggctctgaatgattcttataacacacttttgcaaacacagagagctatttaggccaggcatggctcatgcctgaaattccagcactttgggaggccgaggcaggcagatggcttgagcccagaagttccagaccggcctaggcaatatggcaaaaccctgtctctactaaaaatgcaaaaattagccaagtgtggtggcatgcgcctgtggtcccagctacttgggaggctgaagtgggaggatcacctgagcccaggaggttgaggctgcagtgagctgagatcacaccactacacaccagactgggcgacagagatcctgtctcaaaagcaaagcaaaacaaaacaaaaaacccaaaaaacaaagagttattgaaattccagagggtagtaacaataataatataactgataggaatgggacaaggggcactactgggttatttttttaaaataacatctttttctgattcaaaaacaaatgtatagaaatgatggagacgtcagcaatgcagacactgataaaaatattaaccactatttactcggttcctactgtgccaggcttggtgtttggcactttgtgtaaattgtttccaacttgactacaattgttggcggtaggattcattattccagtttcacagatgaggaaaacagaggttcatagtaaagagtactcagtaattggcagagctaatcttaaatccaggtctctgtgggtccaaagacactgttctttctataagatgaagcattctctcaatcccattaaccagcgataaaagatattcactctcaggtatcagctgccagtttttgtttgtttgtttttacaacagggtcttgctctgttgctcaggctgcagcagtggcaggatcatggctcactgcagcctcaaacccctatgctcaagtgatcctctgactcagtccctgcctccagagagctgggactacagacaccacacctgtctaattttaacatttttcttttgtagagatgaggtctcgctatattgaccaggctggtttcaaacttctggcctcaagtgatcctcctacctcggcctcccaaagtgctgggattatgttacaggtgtgagctactgcactcggccccattttttttttttttaattttactatagtaaaaagcacataacgctaaatttaccatattaaccatgttaagtgtacagaacaataaagtatattcacactgctgggcagcataactctagaacttttcaccttgtaacactgaaactctatgcccattagacactaatttccccatcccatagcccttagtaaccacctgtctactttctatttctatgattttgactaaaaaaaagatgtttttttaattgaaaataaaaattatacatttatggtggtgtttctgtgatttttgactacttttgactacttcatcagtggaatcataagtatttgtccttttatgagttgactgccagtttttgaaagcattttttaaaagggctgggattatacaatacgtaagtttgtttaaaaaaacattttttttcctgaaacccatttttactgttttggtatgactatatttcatttatttaaaagtttcttaaaactgaggctgcatgtggtgactcatgcttgtatcctggcacttcgggagcccaaggagggaggatcgcttgggcccaggagttcaagaccagactgggcaacatggtaaaaccttgtttttacaaaaaattacaaattcactgggtgtggtggtgcgcacctatagtcacatctacttggtaggctgaggtgggagaatcgcttgagcctcagagattgaggctgcaataaccggtgatcacgccaccacacttcagcctgggtgacacagagaacttctctcaaaaacaaataaataaaagtttcttaaaactgtataattcaggagtttttagtatttcacaaagtgtgcaaacatcaccactatctaattccagctatttccattgtcccaaaaagaaaccccgcacccgttaatactatttcccactcctctcatacagagttttataaattatttttccatgagataaagagctcatccaacaatgatagactggattaagaaaatgtggcacatatacaccatggaatactatgcagcaataaaaaatgatgagttcatgtcctttgtagggacatggatgaaactggaaatcatcattctcagtaaactatcgcaagaacaaaaaatcaaacactgcatattctcactcataggtgggaactgaacaatgagaacacatggtcacaggaaggggaacatcacactctggggactgttgtggggtggagggagggggaaggggggagggatagctttaggagctatacctaatgctaaatgacgagttaatgggtgcagcacaccagcatggcacatgtatacatatgtaactaacctgcacattgtgcacatgtaccctaacacttaaagtataataataaaaaaaaagagctcaaagaatcaacacacaatcattggtaatttgttctctttgtggcccttaaatgctccagttgtgtgttgcaccctatactggggggccacaatccagcagaaagggcagaggactgagtataagacgcgagttccaggtctggtctcatcactgatgagcggcgcctgtctgccttgatgtctctcctgcctccttcgaggactcagggcaagaactaggggcagatgcgtgctcaaggtctccgcacttgcgtccatcaccacaatgcctcagcatacagcaaatcagggggtgcacatgcaaccactgaagccaaaattgactttttcctatcggaattggaaatcttttgagtgactccaggtatcaggccactctttttcaaagggcatattaataagcaaatgtgagagcccttctagctccacagctctcaagctattttcaccccctggcaccttctctgcagtcaacttcctccctccccacatgagacccactcacctctaccctgctacccctctgtgggtcccattgcctcgtggtgcttcctgcctctgcattcagagctgcctgactgcttgcttgtcccctgacctccactactttaagcaccttagcagcaggagatctgtcttttcatgctagcatctgcaggtctagcacctccatccctcctgcaaaaaggacatttgtgaatgaatgaccaactggtcaaatagtgaatgagcagatgatgtccaggtagtgtgataccatctgcccaacttagggcaaggttacacagggcagaaaaccccaatgctcaacttcctcccaccagtctgttcactgtaaatagattttttcccccacagatcttgaaactattttggaaggaaagtggtgacaggaaagaaactagctgcattagttcagcagaaattcttaatgcttttggaactgactacaaatagaccagataaagagggctttctcttcatcatcatcattattccttagacaatctgagtctattttgggagtgtgcatgcccttaagtgcagggggaatagtcaaaatatgtagcagtttctgagatgcaggcactagccaattagcacagacagtggccacagctggtgagtcttttttttttttttgagatggagtctcgctctgtcacccaggctagagtgcagtggctcgatcttggttcactgcaagctctgcctcccgggttcacgccattctcctgcctcagcttcccgagtagctgggactacaggcgcccaccaccacgcccagctaatttttttgtatttttttagtagagacggggtttcaccgtgttagccagaatggtctcgatctcctgacctcgtgatccgcccgccttggcctcccaaagtgctgggattacaggcgtgagccaccacgcccggctggtgagtcttattgactcctcctagtcaagatcagccctacccatgtaggagcaaaaatagcaattactgttgtcactagctcacttgtagaaatagacacatataagatggcatgttgggtctggagacttcacatacatatgacctccttcatttctaaagtagataccaacttgctaggatgcacttttacctatgccattttaattgatcctcttataaatctgaagagaggaggttaatgtcactcatctcatagctgaggaaactgcagctcgcaaaagttagatatcacttaaggactcttggaaagaaaatacaaatccaggatgctaagccagatcctttgtctccatatccaatgagatggtgcctcactgggccaggaacagtgactcacacctctaatgccagcactttgggaggctgaggccagtggatcacttgaggtcaagagttcaagaccagccaggccaacatggtgaaaccccatctctactaaaaatacaaaaaaaaaaattagctggacatagtggcacgcgcctgtaatcccagttactcgggagactgaggcaagagaatcccttgagcccaggaggtggtggttgcagtgagctgagatcgtgccactgcactccagcctgggtgacagagtgagatctctctcaaaaaaaaaaaaaaaaaaaaaaaaaaagatgctgcctctgagcaggggtttttaacttgggattaagtggtctcagggggctgcagacacttccagcttgaagctggaatggtactcctgagtatgttaacttaagtgtagctaaaactgcctccttacctattttgagttcggatctaagggcttctctgtacatagtgaactgcaatctactcttgtaccaatcaccgagttttggctaatcaaaggcggccaactgttcaaaccaagtttaaggcaaacaccaagctgtaaccaacctggctgtttctgtacctcactttcattttcctttttcttttctttttttttaagatgaagtctcgctctgtcgcccaggctggagtgcagtggcgggatcctggctcactgcaagctccgcctcccaggttcacaccattctcctgcctcagcctcccaagtagctgggactacaggtgcctgccaccacgcccggctaagtttttgcatttttagtagagacagggtttcaccgtgttagccaggatggtctcgatctcctgacctcatgatctgcccgcctcggcctcccaaagtgctgggattacaggcgtgaggcaccgcaccagcaccaggccctcactttcattttctgcatgtcactttcctttttctgtgcataaatcctaaatcctctccaaccacgtggcacaccgtggagtctctctgaacctattctggttgcagccttcccgatttatgaatcattctttgctgaataaaactctgttaatttgtttaaagttttttttttttttaacaggtgagtatggaagtttttattgggagagggaccagagcagtcatcagattcttagagggaggtcctgatccaaaaaagatgaagaaccctcagttctaagacagtaatatgctgacaccttagtgaataaagaacatgtcaacaagcaaatccttattaaaatatctaagatgccaggactccacctgggaaaaaaaagaggtcagcctggaggtaacttcaggtagtggggtgactctaacagtctccaggcagattttactaggtcaagtagagcggactccacagctgcctagtgacaagaggtcctttcagctctggtagagtgtcttctgtaatgaccagtgccagtaaggggtgatgcctgggccagacattggcatccacctgttacctggaccacttgatcagacgacacaccagttaagaagccacttaagtctcccactccacagagagaaaaaagaacagatgtcctcttgggtgtatctggattactgctttcatttgtctatgtggccagtagcgagttggtaaaaggtgtataaatgctgagaggcatcaacgaaagcatgttttggaaaagtctcatttacatatgaatcaatatttattaagtccctactatgtacttggcactgttccagacactgggatcaaagaatggacagtgtccctgctgttgaggaactcagtgtgttataggtggtagctgacgtgtaaatagacaattataacacagagggatcagtgctccacagagtcaacctcagagtgctgggcaagggagaaaggaaggaccgtgtctgcttggagtatctaggaaggcttcacaaaggaggtaacttctagctatatctcaggggaggaaaagactgctctcccacaaagctcaagtaataatattatcaaacatgaaatacataaattagttagcacctgaaggactctaatcaggaattcatactctagggtacagagttagcatttcaatgtagttaatcacaagtccaaactatagatggcagccactgtatagctttagctttctaaatctacacttaagcatttgctaattagtaaatgatttgttagaaataattttgcccttgagtgatactcaaggtatatgaattggctagaaaaatataggcatctcttcctttgaaagaatgggttacagaatctggaaagcctactagcctaatgttgtcttcagagagacaatctcagggcaggaatcaggaaggttctctgacccactactgggagcagaaggttttgtcgcctggttcaaattgattcaatgatgtgagaaataaaaacaaaattctaagctcccaactgactcaacaaactatcttttggccaaggggagcccagagatatctaaaaaaaattttaagttttggccatgatgggaaaggagttcaaacaggactcgttctattccctccctaactgccattagttttttttcccctaagggctaaatagaaactagccctttcaaaaaaattatttcaggccatgcatggtggctcatgcctgtaatcccagcactttggagctgcctgtaatcccagcactttgggaggccaaagcagttggattacctgaggtcaggagttcaagactagcctgacaacatggcaaaacccagtctctactaaaaatataaaaaaattagccaggcgtggtggcaggcgcctgtaatcccagctactcgggaggctgaggcaagagaatcacttgaacccaggaggtggaggttgcgatgagctgagatcacaccactacactccagcctgggcaacagagcaagactccatctcaaaaagaaaaaaaaaaaaaagactcacttcaccactggtatcaactcatcacctaattctgcccttcctttttagtggtttcagcacaactgactagcattccttcctgataaccactgaccacagagtggtctaagacagggtcttgccctgtcatcctggctggagaacagtggtgcgatcatggctcacagctgcctcgaactcccagtcttaagtgatgctcctgcttcagcctaccaaatagctaggttatgtagatatgcagtctcattttgttgccctgtaatacatgttagtgttaagtttctgcctaaggtgaacatgggagacatgctgcacacgttagcttactccacatgtgtgcatattcatagatcctccctttgtgaatattcatagatcctcccataatctgttgaatatgtatgcttagctacgcctctcagcataaattcatgttccctttgccccttcttggaagtgcttgtttttcagttatggccagaggctctgcttcctgcctacaggtagtgggaccctctttagaaatagtcctcctttctaaatttatagatttgtggctgggtgtgctggcacacacctgtaatcccggtgctttgggaggccgaggtgagagaatcgcttgaggccaggagtttgagaccagcctgggaaacatagcgagacccataaataaaataaaataattagccgagtatggtggcatgtgcctgtagtcccagctactagggaggctgaggtggaacgatcacttgagcccagaagcttgaggctgcagtgagctatgattgtgccactgcactccagcctgggtgacagagcgaggccctgtctctaaaaataataatactaaataccatatttttatataaatatatttaattaaatataaatatatttgtgactttttcagttcaatagaagtaaaccaaaagatgacttttgccaggtgccgtggctcatgcctgttaacccagcactttaggaggctgaggcgggtggatcacttgagatcaggagtttgagaccagcctggccaacatggtgaaaccccatttctactaaaaatacaaaacttagccctgtattgtggtacatgtctgtaatcccagctactcaggaggttgaggcgggagaatcgcttgaacctgggaggcagaggttgcagtgagctgagatcacacaactgcactccagcctgggtgacagagctaggcttcaactcaaaaaaaaaaaaaaagaagaagaagaagtaaaccaaacgcagctgctagaatattggcacatttgcttctaacaaaacattcatgcaaagtactctggtcaaactggggcttcactaatcctataaaaacaggtttcatgactgtttttgtagcttgctaatcaatgtctgcatgtgtgggcagagtttagcctgcaacttggtttccctgcagttacaggctctagtagaggctaggggagagaaggcccttaactcccccacctctgatcaggctgtggatgctcaagttggtaggtcagtttgtaagagttcccaagcagcccggccctctagggctgcctgtgcaagcactttaaagccctgcccaggcactactgcattttttgctgctaacagcaattactgaatctacttgaaaggcattcaatccttccctgctccattgctccttttttgttttttcaattccctcactgtccttatagtcaggcttgataccttctctaagacttggttgcctcctccattatgtggagtgccttctccattcagtgctcccgctgcaatttccaatactatttctatcgctttagtctgatggctgattgtcctcaacaattccatgattgaatccaaaatgcacgcttcgtgacattttctggtattagtcaattgccatcaagaggattaacatctttgaggagccaggcgcggtggctcacacctgtaatcctagcactttgggaggctgaggtgggaggattacttgagttcaggagttcaaaaccagcctggccaacgtggtgaaacactgtctctactaaaaatacaaaaattagctgggtgtgggggcgtgtgcctataattccagctacttgggaggttgaggcaggagaactgcttgaacccgagaggcagaggttgcagtgagatcatgccactgcactccaggctgaataacagagggagactctgtctcaaaaaacaaacaaacagacaaacaaaccaaccaacccagaaaaccatctttgagggattttctcccactggcaaaaaagaactactttaaggcctaagcaataattctaaacccaaaggcagacccttgcccaaatctgccacctggtggccagtcgataaagaccagcacttccctggcttctaggatctggggctaatgtttcatccaactcagaagttctcacaccaggccggacctggtggctcacgcctgttatcccaaaactttggaaggctgatgggggtggaccatttgaggtcaggagatcgagaccagcctaaccaacatggtgaaaccccgtctttactaaaatgcaaaaattagctgggcatggtggcagatgcctataatcccagctactcgggaggctgaggcaggagaactgcttgaacccaggaagcggagcagtgagccgagattgcgccactgcactccagcctgggtgacagagtgagactccttcaaaaaaaaacaagttctcatactagctgcatattggaatcatctgtggagcttaaaaatcccagtgccctgcccaggtcatgccacaccccagaccaagtaatcaaaatctctaggaataagacctagggatacacattagaatcccaggtgagcttttcaaaaatatgcttcccaggaatgcacccgacctaccccatcactgtctcacaggagcagggctcaagtctttgtaatctaaataacttttgggcagttatcttatccctactgaagaactacgggtctagtttgttgttccctccatctgcctgctggacaaatacacactcaggcccctctctgatttgccttcatgggtatccactgaagctggaaaatgaggctcagagaggctgagtgacttgcccagagtcacaacaagcctggtagagctggactgcagcttgaagcctagtcttgtcttatctatcttatctatctatccagctatctatctatctatctatctatctatccatccatccatccatccatccatccatccatccatctatgacagagtctcgctctgtcacccaggctggagtgcagtggcgtgattttggctcactgcaaccttcacctcccggaaccctagtcttttaatcctacctacaactacatgctacttgatgcttagctctgctggagggaaattcttcattttagtgaactaaaattcttagagggggaaacagaaaaataaaagaagtcaagaggtaccccaaaggagacatcatagtcctcaaacgtgtatggcttgtctgcaaggtcttcaaaaaactctgctaaagagtccagcgtttcctctgctagtctttcataggtggtctcatctagagagctgcagaggaagcacaaaacccaaaacatgattaccaaatgcttccattttattaatatcaaatttatacatttgttatttaaattcattaaattgatgaaaataacatgtaaaaagtaaaagtttttctttcttttttttttttttttgagacagagtctcactctgtcacccaggctggagtgcagtggctggtctgaactcgtgacatcaagtgatccaccacgtgcctcagcttctcgaaatgttaggattacaggcgtaaggcaccgtgcccggcccaaagtaaaaatttaaaggccgggcgtggtagctcatgcctgtaatcccagcactctgggaggccgaggcaggcagataacacggtcaggagatcgagaccatcctggctaacatggtgaaaccccgtctctactgaaaatacaaaaaattagccgggcgtggtgacgggtgcctgtagtcccagctactcaggaggctgaggcaggagaatggcgtgaacctgggaggcggagcttgcagtgagccgagattgcgccactgcactccagcctgggcgacagagcgagactctgtctcaaaaaaaaaaaaaaaaaaaaaaatttaaacagcacagaaggggttacagaaagaagcaggcagcccccattcccagaggcaactacaattaatagtcctttctgggccaggcagtgcagtggctcacgtctgtaatcccaggactttcggaggccgaggtaggtggctcacctgaggtcaggagtttgaaactagccaggccaatatggcaaaaccctgtctctactaaaaatacaaaaattagctgggcttgtggtgcacgcctgtagttcccagctacttgggaggctgagacaggagaatcactgaaaccccggaggtggaggttgcaatgagctgacattgtgccactgcactccagcctgggtgacagagtgagactccgtctcaaaaaaagaaaaaaaaaaaaaataggctgggcctggtggctcacgcctgtaatcctagcattttgggaggctgaggcgggtggatcacctgaggtcaggagttcaagaccagcctggctgacatggtgaaacctcgcctctactaaaaatacaaaaattagctgggcatggtggggcgagcctgtaatcccagctactcgggaggctgaggcaggataatctcttgaatccagggggcggaggttgcagtgagctgaggtggcaccactgcactccagcctgggcaacaagagcaaaactccgtctcaaagaaaaccccaaaaaacagttattctgattcagtaaatgctatcactgtttatccttctaaagatatgatcagatttcattagtaatgttcaacttttcacaaagatggtgaatgccatctaaaatctattggagatttttttaatatttagatttatgtaactggttatgtaaatatatttaaatactgggggaaagtccttcactgtctcagaaccaagcaagattcacctgtattttgtgttcatttgcctcttaaaggcaagggctgaagataaggtagcaatgtcaactttatatttttggccttaactatgccaatctaattagaattttctgtatctaaaatggttcattttacttactgaaagacattttggtgtggtttatgtataatatcaaagaaagattatttaacacttctcaaattaaaaaaaaaaaaagaaaagaaagagacagatcgtatcaagagctggccatgggctgggtgcagtggctcatgcctgtaataccagaactttgggaggccaagggagaaggatcacttgaacccaggaatctgagacaacagagaccccgtctctaccaaaaattaaaaaattagctgggcatggcccatgcctgtagttctagctcctcaggagcctgaggtgggagggatcacccgagccagggaggtcaaggctgcagtgagctgtgatcgtgccattgcattccatcctgggtgacaaagtgaaaccctgtctttaaagtaaaataaaataaaataaaaaagagttggccggcctggcgcggtggctcatgcctgtaatcccagcacttcgggaggccgaggcgggcggatcacctgaggttaggagttcgagaccagcttgaccaacatggagaaaccctgtctctactaaaaatacaaaattagccgggcatagtggcgcatgcctgtaatcccagctactcgggaggctgaggcaggagaattgcttgaacccaggaggcggaggttgcagtgagcagaggacgtgccattgcgctccagcctgggcaacaagagcaaaactccatctcaaaaaaaaaaaaagagttggccaagaaaagaagcaactagacttttcagatactgctgataggcaagtaagttggacaatcactttggaaaactgttggacagtatctactaaagttgaatgcatttacatgctatgacccatcagctccactctttttttttttttttttttgagacggagtctcgctctgtcgcccaggctggagtgcagtggcgcgatctcggctcactgcaagcaagctccgcctcccgggttcacgccattctcctgcctcagcctcccgagtagctgggactacaggcgcccgctaccacgcccggctaattttttgtatttttagtagagacggggtttcaccttgttagccaggatcatcagctccactcttaaggggtatacacaacagaaatgtgtacccaggttcaccaaaagacatgtactatactaaaatatttgtatcacaactatcctatagccccaaactggaaactgcccaagtattcctttgtaatatcacagataaattgtggtatagtcatgcaatggaatactacgctgcaaaatagaattgtctataggaacagcatggatgaatctcacaaacatcattgtgatagaaagaaatacacaagtatacacaaacatgtttatacttaatgagacagtttatataaagtaaaacaacaggcagaactaatctatgctattggtaatcagaatagttactctgaagggttaatgactagaaggaaaagagggaggggttaatgactagaagtgagcaggcagcttgcttgcaggggctggtaacattctatgtcttgagcttacagggtatgttcataggactgttcaatttttacaaattcatcaagctgtatgcttgtgactagatacatttccttatagatactatttttcaaatttaaaattactttaaatccacagagacagaaagtagattagtgattgctgggttttagggaaaggcggaatgggggagtgattgctaatatgaatagggtttccttctggaataatgaaaatgttctggaattagtagtgacagctgcacaatcttgtgaatatactaaaaacccttgcattatacattttaaaatggttagttttatggcatgtaaattataacaataaaaatattattataataaacatccttgtaagagcttttgtgcccctgtgaggatatattaatatctgtaggttataagatatgtatcagacaactccactatctgaaagtttccagggggcctaaagtaagacaccaggggctgctagacaattactgtaagacatacagatttgccatatgaccctcttccccacccagtccatcacccacttccaggatacaatgtggggaaggctacctgactggattggtgaggagctgtcctttaaaaagagtggttggcctgatagggtgtgttttgagagtgagctggagagaaagggtgtgttttgagactgagctggagagaatgcgtaggagaggctggttgacgtgtcttgaagaatttgagaaacgtaaggacacaaccgactttatacctgacagttataaagtccaaagtgaagaggttggaaggtgctacctgccggcagagttgggccctggcagaagcgggctgtcttcctacacatggcaggtcaagggtgtgcttcccagaggccagaggcagctggacttggggcatcctgcaagggccctatgcaacctcccagaactgccagaaggagtaaggggaaagcagcagagagtctgctgggggaggaatgccggaagccgaggctggaaatggatgccaccaaagcaaaaacctcaaacatgcagcatgcagtgcctctttgagactgtggcaaagtcaatgaacagacaccgcaggcgggaggctcagaggttcttcagaccttgtgagccatgcaaagccctctggaaatctgagtctcagataacctggagggccaactgtatgcctactgagcatatagctctggggacaggtagaatgttcctgaataccggtggcttcttgttgcttttagtagatgtgacaagaaaagaataagccaggagatggaatgaaatggagcattggagataaaaggctgcacaaacgtggaaagtcaaagggagaatctaaggccttttttttttcttttttttagagatggaatttcgctcgttacccaggctggagtgcaatggcatgatctcagctcactgcagcctccatctcctgggtttaagcgattctcctgcctcaggctcccgagtagctgggattacaggtgcctgccaccacgcctggctaactttttgtatttttagtagagacagggtttcaccatgttggccaggctggtcttgaactcctggcctcagtgatctgctcacctcggcctcccaaagagctaggatgacaggcgtgagccaccgcactcagccagagaagctaaggctttgaacagcaaagacttcccattgagccaaaacaagggactcagtcctgctgcaaaaaccaggctgagggcattgctggtctccaatcttattgtttaacttgacttcaaggtacctgcccttaggctgagacagctgggcatggggacatgcaaggagataaggcagcctgagactcccatccacggaggaaatttggatgtggttcctggcacatgggactgcctgaaagtgaatagctcagaagcctacttttgggaaaagcctactctcaaagaaaaatgagtctgggctgggcgcagtggctcatgccagtaatcccagcactttgggaggccgaggcgggcggatcatctgaggtcaggagttcaagaccagcctggccaacatggtgaaaccccgtctttactaaaaatacaaaaattagctaggtgtggcactgcacgcctatagtcccagctactcaggaggctgaggcaggaggattgcttgaacccgggaggcggaggctgcagtgagccgagatcgcaccactgcactccagcctgggtctcagggtgtgatttcataaaagaaaaaaaaagagagagagagagagaaatgagtctggcctaaaatagctgactggagtcttaaaacaccctgtggaaccccaaactgttattagcaggaagtgggctgtgaaggctccttgccccggaggagggcacacttcccactgcctgcctgccttgtggccaaggaaaataacagacaaggaggagcctctcgagaggctgaagcagggatttgtggaggaacatgctcctctgccagggcagaggttgatccagtgctgcccagcagggctccagtgctgcgggcagctagtgctgtgcctcttttctgaatggagttacagttgcagttatcctgcccctctccatcgtgtgtgtgtgtgtgtgtgtgtgtgtgtgtctgtgtgtgtgtgtctgtgtctgtgtgtagatcagaagaagccattcctaaagctgggagagaggagactgcatgtcacctggaaatcttggactcggaggtggctgtggtgaccacatgggcatcggttggctctcttggggctgggggtaaatgcatctgagtgtggaaggagggtccatgcagatactggttggcagggggtagactgtagccgtgcctgacagctttccatggggaatgccgtgccggctttttccagggcactcgctagactatatttcccagcctcccttacagtcagctaaggccacaccactaagttcttcccaccagaatgtgagtgaggaacaaatgccacttccagcccttctgtgcttctagccctttctggccaatggaacttggacaaggtgactgagactcaacaatgcagaggacagtaaggcactgacagataaagaccaaactggaagctggaatgagtgtagttcctaattcacttcaggaggtatgccaaccctgtactgcccagagaggaggacacaaacgttattggtttgagctattaaatatttgggtctatttgtgatagcagcatggcctgctctaactattagggtattaaataaaataatattgaaactctggaaacaacctgaatgtccaacagtaggggatgggttaaatggattatgtcacatccatgcaatctaatactatttcattaaaaataatgtggtggatactcagtcacatggaaagatgcctaagattgttgctgctcaggaagaaaaccaggttctaatgggagaggcagggaaggagagaggaagatacctatgacgtggaaggtgttttatcttaccctgggtggcccaaagttccagatttcctcaaattcatcaaatagacactctgctttttgacattccaaatctggttgaggccacgttggttcgaactctgaaagccaaagttaagaagtacgttactatttttcagtgaattataacccattaatgcataatttatatattgctacttctacattcgagtgcctgtaaccgagtgctccattttttctaagaaaaagggaatatgttgcttttcttaaaaaaaattatcctctcttctcttctcctctcccctggttcccggtttcctacttagcccttcagaaatgcaaatataacctttcacctccccttcaccatacattcccttcagggcaagcttttctaactgtatgctcttccagagcacagatctctccacatgacagtagattcgcagaccaaagcaaacccatcacggaactttcacctccagtgggtggtggcctggcacttccacccttgggggttgcctcaggactttcattcactgggagggcatactgaaagcatgcccacttggccactgctacagcttattactaaccaggaaggtgccaagtcaactgtcctgtagagtatgcacggaactagcagagggacccccccacttgcccttgcacacttccccccttaccttataaaagtgtccactttctacttccaaggggaagcagcacttttaaagaaaggcaggatgctttgtacccctcacccaagctagtttcggagtaaattcactttttttggtaccaggccttgctcttgttaattggactctgcatccggtgaacaactaacctgcattttggttaaataatcatgctgaagtttttttttttggtttttgttttttgtttttgagatgaagtctcgctctgtcgcccaggctggagtgcagtggcacgatctcggctcactgcaacccccgcctcccgggttcgagtgattctcgtgcctcagcctcccgcgtagctgggattacaggcacccgccaccgcacccgattttttgtatttttagtagagacggggtttcaccatgttggccaggctggtcttgaactcctggcctcaagtgatctgccctcctcagcttcccaaaatgctggatgtgagccaccgcacccagccctatattaaagtattttaggaatatttcttaggatttttttttttttaccttcttttagtgcattacagtgattctccctgtgtctctctaagcccgtgttttccaataggctagccaacaagccacacgtagctatttacatttaaatttaatgagataaaatataaagtcagctcctcaactgcaccaccagtttcgagaatcctgtggccacatgtggctagtggtgcagacacagcatttccatcacatcaggaagttctactgggcagggctgctgcaggctgttcaggttacagggtggttagcaggaggctgggaggcatccacaatgctcttaaaaggtcactaagagaggcaacaggaaatagcaagaggcagaatcctgctgaagtccagaagatttggctctgactgctgactgctgtctgacagatcttattatcatgatctgcaggacagaatgtgacctgttgattttttttagtccctaactgctggacatccaggtgacagggtctgagttgattaccaccagctctgctgaccagctggggagatgaaggaaataatcagacaagagccactggggcacaagagtggtgcagctggagtagggagatgcaggggaggtgacaggggaggtgatggagcgaggagggggcgccctgggtcttgccaaggacctcagctggacgtcatcctgggaaggcaccgaagggctttaagagattggtgataaggtttacattctccaaaggtcactggttgccatggagagaagaggcgagagactgttagttactgctcttgagccagcagtgcccttagcaaactcagaaaagagaaggcagaaggcacagggctgggaagtaagtggaggaggaaacgggctgggggacagtggatggggagggtggggcagagtgcagaccttagaaacacatgtctctgaagaagtgagagggcagccatgataaccactgttagagctatcgcacattctacagtgttctccatctgcttgacactgctctcagcctttatgtaaatggactcagtcttcattacaatcctgtgagggacgtactcttattacagtccttattcttggtagttatgtgctacaaagttgccacaaacactcaacgagcaaattatttataggagaaatacaaggctaggtaccctgtaagctgctggtcacaacattgttaccaatcgatcaatatataaccttatttctgtttaaagacaccttatgtaatatatatagttgattcattaacactgatcttggctgggcatggtagctcacacctgtaatccccgcactttgggaggccaaggtgggaggattacttgagctcaagagtttgagaccaacctgggcaacatagagagacctcatttcaacttgaaaaataaaaaacatgaggccgggcattgtggttcgtgcctataatctctgcagtttgggaggcggaggcgggtggatcacctgaggtcaggagttcaagactagcctggccaacatggtgaaaccccgcctctactaaaaacacaaaaattagcaaggcgtgatgacatgtgcctgtaatctgtgctactcaggaggctgaggcagaagaattgcttgaatccgggaggtggaggttgcagtgagccaggatcgcaccattgcactccagcctgggtgatgagcaaaattccacctaaaaaaatatcaaaaacattatctgggtgtggtggggtgtacctgtagtcccagctactcaggaggccgaggtgggaggattgcttgagccagagaggtagaggctgcagtgagctatgattacaccattgcactccagcagcctgggcaacagagggagaccctgtctcaaacaacaacaacaacaaattaattgatctcaggacaacagcaccttaactcatgcctgacaaagcttctctaacacatgcattttctctgtaaggaacatcacagcctcctcgtgctaaactttgcactacacttggagacaattttaacagagaaataaccaagaaaaaagcataaaaatctgaaaaacatggcactaatcagactgtgaaaaggacacagtttacactatgacagctgaaataagaaggcagggcagcactttgttggaccttggctgggaacatgagcctggaggagctcacatttttttgccgctctgcacacatctttgaaacgaccccaaaaggctaggggtactgattttggggtaacaaattttagcaagtgagcaaattaacaagtacagactcttaacgaatgaggatcaactatagttgtgttttacagatgaggaaactgacgcaccaaagggtaacttgcctacacagatacacagacattaagtggcagagctgggattgaacccaagctgtctggccccagagtctgtgcacagtggaaggaattgttttcccaggaattaaagcagtgctcaaaacatccaaggaaaagtgtctgagaatgtggggctcacctcagggaagtttccatctctccaggatcctggcccctcaaaccttagttgtcttagtcgctgataccttcacaatagctgtttttgtttgtgtgtgtgtgtgtttaatttaatagagatttgatggttgttactggtgggaaggtcaaatgcagttactccttcaaaggcacaagtagaagtctttcttcggctgtttttaatcataaaaaagaaccgttgccaaatactccttgctttatattctacctgcttttgccaatttaatattcctcgggcaactgctaaaccttttggaacctcagtttactcctctgaaggaagggatcgtggtactcacaacaaacctcacaaccgtgagcataaaacaagagaacagaaataccccaagtacagagcctgagggtattcaggctctgaacaaaagaatggagaactaggtgagaggcaaacttccgcctctgcctaagggaggctccattctgttctgcttgagggaggcaaagcttggaggtcaaggtcataggatgagtgttcttcctttttttttttttttctgagacggagtcttgctctgttgcccaggctggaatgcagtggcacaatctaggcttattgcaacctccgcctcccgggttcaagtgattctcctgcctcagcctcctgagtagctgggattacaggcgtgcacctccatgcccagctaatttttgtgtttttaggagagacaggtttcagcatgttggtcaggctggtctcactcctgacctcatgatccacccaccttggcctcccaaagtgctgggattacaggcgtaagccaccgcacctggccatgatgagtgttctttctaaagccacctggcagccatgtctccctctaactccaggtcacccgtgagcccttggaccacaagtcatggtaggcttgcctagcttgaggcttcagatgtgtgtgctcactcacacagtgcctgctcatgggatgcatttgaggaaatattagatagtttctgggcctgaagtctcaggcccagtggtcaggaaccacttgacccaatcattgcctaccccctggtaaggactggcctggatggccagcagggagcccagctttccttcccaggtgtccccttgtcacccccggccctgtcaaaccacagcacttgaagagtgaatcaggacccatacctcgcaggggaggatgaactggcaccaccacttttggcatcaaatgagttgattattggctgcccctttgcccagcaattccattctgagaaattcacctgaaaggaacttctgtccatgcacaagaacagtcacagcagcaccatcgtaacaacagaacactgcaatcaaccaaatgtcacctaaaggaacctggatagtgtgatttacagtgtgatatatttacccaaccagatactatccagcagtgagaacaaataaaggacaactgcatgcatcaatgcagatgacgcacaaaaacagtgttgaacaaaaggggcaagccatagcagaacagatacagcagaataccttgtatataagcaatacatggattgggggagatacagaggaggtcaaactctaagaaaaggagggtacgatgaacagaattcgggctggcagattcctccagggaggacagggcagtgatggggtgaagacaagggcctccagaggaacaaacaaattctatctcttaacctggtgtcagggatacaagtatttgttatttgtcttagtctgggatgttataacaaaataccagccactgggtggcttataaacaatagaaatgtgtttcttagagtcctggagggtgggaaatccaagatcaatgcaccaacagctttggtgtctggtgagggccagtttcctggttcatagatgatgccttgtcactgggctccgttgggctattttagaagggcactaatcccaatcatatgggctccaccctcatacctcatcacctcccaagggccccacctcctaatatcactttggtgattaggttttaacatatgaatggtggggtgacacaaacatgcagaccatagcatttattattagtttataagcagtataaatatttatttatttatttatttttttctttgagatgcagtctcgctctgtcacccaggctggagtgcagtggcacgatctcggatcactgcaagctctgcctcccgggttcacgccattctcctgcctcagcgtcccgagtagtggggactacaggcacccgtcaccacgcccggctaattttttgtatttttagtagagatggggtttcatcgtattagccaggatggtctccatctcctgaactcgtgatccacctgcctcggcctcccaaagtgctgggattacaggcgtgagccaccgcgcccggcagcgtataaatatttacatatccttttctatgtgtaaacttgtgtaaattgtctgcaagacaataaaaatgatttgaaagtgagtgagggtataacctgcttgttaggcctaaagccaaaaggtcataggatcacaggtggtggtcttgtccctctaggaaaatggacagatgtctaaaagctgcccaaggcatgcagaagtggatgccacaggagcttattgagtcatttaagagacagcatgctatggtttgaatgtttgtcacctccgaaactcatgttgaaacttaattcccgatgtggcagtattgagaggtggggcctttaagcggtgactgggtcatgaaggttcttccctcaataatggattaatccattcatagattaatgggttatcatgggagtgaaactagttaggctttataagaaaagaaaaagacacctgaggtagcacactcagccccttaccatatgacgcccggtgccgcctcaatactctgcaaagtccccaccagcaagaagggacttgactttggacttctcagcctccagagcagtaagaagaaaattttttaccatataaattgcccagtttcaggtattctgtcacaagcaacagaaaatggactaagaaacatccagttatctccttctcgaagctgtctccggtatttaagaggaaacgttaaagacgcagccccgtcacatccctccatcaaatggactaagacacatccagttatctcctcctcgaagctgtctccagtatttaagaggaaacgttaaagatgcagcccctgtcacatccctccatcaaaaaacataggctgcctcgtggaatcagagtccttcccagcctccaggtaggtaaggctggggctgggggctgtggggctgtgcttttaaaagccgtttctgtggattcttggttctgctgagtagccagatctgagaaccaatgatcaggtactaaatatgctgtcccatgtggtggtcaccagcccccgtggctactgagcactagaaatgtggctaatgggactgaggacctggattttcaacttcatttaattttaattatttgaggtgataataaagtaataaagttattaggagccttttttttttttttgagacggagtctcgctctgtcgcccaggttggaaggcagtggtgcgatctcggctcactgcaacctccaccacctcccgggttcaagcaattatcctgcctcagcctcctgagtagctgggattacaggtgagtgccaccacatccagctaatttttgtatttttagtagagacggggtttcaccatgttggccaggctggtctcaaactcctgacctcaggtgatccgcccatctcagcctcccaaagtgctgggattacaggtgtgagcaaccacacccagcctaggagacatttaagtgtgtttggaacaacttgactatgtgaaccttcatttttaattgtgaattttataaaagtaaatacagatagagcatttacttagaaattgtgaattgagatatgctggaagtatatgagtacgaaaagagtatgcaagatatcttattactgattttttttgtatgtcacagaatcccccaaaatcttggctcactgcaacctctgcctcctgggctcaagtgattctcatgcctcagcctcccgagtagctgggactacaggcacccaccaccatgctgagctagtttttagtagagatggggtttcaccatgttggccaggctggtcttgaactcctgatctcagatgatccactcgcctcggcctcccaaagtcctgggattacagtcgtgagccaccgtgcctggtctcattactgatttttaaaatactgattacatgttggaatgataatattttgtatgtactaggttgaataaatatattgttgaaaatgatttttttttctttttaactagaaaatgtagaattatgtgtgtggctcccattctgtttctgttgaacagctgctttagaagtagatgcaaggggtggagaaaagggtggggaagaggccttcaagtgaactcagtttctgatgaattttggagaccagggggagcttagggtcaatccaggacagtcagggctttaaaataattaaacaggatggtggccccagttgccactgccacccacccaactcctcaaatacccaagatgtgcaagggaactatggaacagacaggttaaacaaatgtgattaattcagtatagaaaaaaagaggcccagctggtgacagaggttgctaaccatctatccagaaacccagtgtccacctcctgggcggcagcgccaagttgggtgtgtttgtcagtcaatagcccttaacagccaccaggtaccatctaaaaaactgtaccacctcttgtcattctcctaaattaaaaactctgctgatggccagacgcggtggctcacgcctgtaattccagcactttgggagggcgaggtgggcggatcacctgaggttgggagttcgagaccagcctgaccaacatggagaaatctgtctctactaaaaatacaaaattagccgataatcccagctactcgggaggctgaggcaggagaatcacttgaacccaggaggcagaggttgcagtgagctgagactgagccactgcactccagcctgggcaacaagagggaaactctgtctcaaaaaaacaaaacaaaacacaactctgctgacaacccatgctgtccacacaggcaggggtggaagcccaatacgtggcagctcagatagtgcacagaagccaagtaataaatgtctgctttcctagaggagatctaaggaccatcatggccacacttgcctatttttccagagatgctgggaaatccattttattttttatttttatttattattattattttttgagacggagtcttgctctgtcgcccaggccggagtgcattgggcgatcttggcttaatgcaacctctgcctcccgggctcaagcgattctcctgccgcagcctctggagtagctgggattacaggcgcgcgacaccacgcccggctaacttttctttattttcttcttcttcttcttcttttttttttttttttgtattttttagtagatactgggtttcaccatgttggccaggttagtcttgaactccggacctcaggtgatccaccttcctaggcctcccaaagtgctgagattatgggcatgagccaccgcgtcctgccaggaaatccattttctaagtcctaacttttaagcactggcaaccaatcccaaagtttcttcaaacacaatgtgggccaaataacacgtgtgggaagttcaagcctaaagtacaaactccggagagcaacacaaatatggcttggacgtggcctgcctctttcatctcccctaatacatgcggcgtaccagccactctgaagggatccccttccgccttcctggcctttgcccagacggttccctcctcgtgaaacaccctctaccacttccttggcatcttcaagaccctcattaaataccatgtcctccccttgaggaatcttcctcatccccacagccattctttgggtttcctcctttcaagccgtggcgtaactgggtcagatatttctttgtaccccccaaaggaagaaaggggaactaatttgaagttctgaagactttatctatgttattcccatttaatcctcacaccaggtccgcaaaatgggcgtcacctttatcttctccctacagaaaacaaagccacgtctcagagaggttaggggaatcccccaaggtcacacagctctgcggagtggggcagaatctggaataaaggtcgggtcagtttccaaaagccagggcccctgctgctctagctattctgcagctctgaaagtttcacctcgttccaggaaagcatttcgttcaaaaaaatccagccttgaaaatattaggtgtgcgcgcgcccgtgcgcgcaaacacacacacacaacacacacgctatatacagatacacacagacacacacattatgtgtatgtatatactagcagataccatctattaatattactgaaacaagttatcgcagagaagtgacaagcatggagacagccgcacacccctcggaaccggtcccctccaccagcctgccctgccttcgcccgtgccttgacccgcagtcgcaccgcaggacaaaatgtccccttttccttcggaaagcagaagccagtgtaaatgcaaccgggagaaccagagaagggagttgcaaggccgcttccgccgggccgccctgagaaggagcggggtgagctagtccagcgcgcgtacccggagcgaccccggcgtgcgcggcgcctccctgcgcaggcgtgcggcgtgcggcccgcggcgtgcggcccgcggctgttcccggcgcggatacttactgcgcggcggggcgtgcaggtcgcatcgatgtcggtgcgcaggccacggcggccgcagagtggggccaactctgccggccgcgggacccgggtgagggtctgggcctgggctgggctgggtgacgccaggaggccggctactgcgcggcgcccgagagtccacatgctgctccgggtctgccgcccgctccgccctccagcgctgggtgctgcggcgacccctggtggccactggccgcaggcactcttctgtgggggagcagctagaggttagacctcaggaagaacttcccagcttagcactattcgtgcatttaacaaaaatggagagcctgctttgtgcaaagcacggagtgcaaccaggacccctgacccaagggagactgcagcctggtggcccgccgcttctaaaattctaaacaggaggaacttgggagctgctgtcttgctgggaagtgggtgcatgcacaaattgaggctgcttggccgccggtatgggtttacagcagttgggtatgtggggccaggagacggatgccttgtgtaaatctgtactctgcccacttcctagctgtgtgaccagagggcaagttaattaacctctctgtgccttgtttataaaatgcgttttataaaagttcctacttcataggattgtggtaaggataaaatgagttaagccctgtaaagttttttttggacagggcatgttcctgttaagtgcacaataaatattgttaatagattttattgattgattgattgattgagacggagtctcgctctgtcgcccaggctggagggcagtggtgcgatctcggctcactgcaagctctgcctcccggtttcacgccattctcctgcctcagcctcccgagtaactgggactacaggcgcccgccaccatgcctggctaattttttgtatttttttttttttttagtagagacgggtttcaccgtgttagccaggatggtctcgatctactgacctcgtgatccacccgcctcatttatttgtttgtttgagacagagtctcactctgttgcccaggctggagtgcagtggtgtggtcctggcttactgcaacttctccctcccgggctcaagcagtcttcccatttcagccttccaagtagctgggactacaggtgtgcaccaccacacccagctagtttttgtattttttgtagaaagggggtttcgctatgttgcccagggtggtcttgaacttctaggctcaaacgatctgcccgcctgggcctcacaaagtgctgagacgacaggcgtgagccaccgtgccttgcctattgttgatagattttaaaagagaattttatttctgttacatattacaaagggatgcaaattgtgaaagttttcttcacattttatatatgctttagaggatgtcaaatgtgagccgagtgtggtagtgcatgcctgtgatctcagctactcaggaggctgaggcgggaggatcacttgagcctgggagctcaaggctgcagtgagctatgattgtgcctgtgaatagccacagcattccagcccggccatcatagcaagatactgtcttaaaaaaaaagaaaatgtcagttgtgtacactttccatggcagagaagatgggaaggtactaaagttcttccaaagccactttgtgaatcgtgaagagagacatgtttacatacttaggatgctaaatgacaagtgtcaagaggaatgtaaactaacaggtgtgagtgttgagtgggagatttatatagagctagggatgggggaatcaaggaagtattcatggaagaagtggtgttggcacagggccttcaaaaatagggtggaggaggtgggatctgattgcctatcaaagaggtggtccagggcattctggatgagagacatccttctgtgtttaattaattctaggcagctgcttaaatactgttatgtatatgccaggcctggagaaatcattttccccctgcaaagtatctggagatgcttttgattgtcacaacaggcagctgtggggtgggtatgttctactggcatctagtaggtagaggccagggatgaaacatcctgtgatgtgcaggacagccccccacctgtgcaacaaagaactatccagtccaaaattctgccaagattgagaagccctccttgaaaccataaagggagagcccataggcatcaaagggtagtgttttcattgccagccatggtctcagactctgccacaccaacagtgaggcccttcctcacatcatcagaactgcattatatactcagagagagaaagctgcatcattagttattattattattattatttgagacagagtcttgctttgttgcccaggctggaatgcagtggtgccatctctgctcactgcaatctccacctcctgggttcaagagattctgtctcagcctccagagtagctgggattgcaggtgcccaccaccacgcctggctaatttttgtatttttagtagagatggggtttcatcatgttggccaggctggtctcgaactcctgacctcaggtgatccgcccgcctcggccgcccaaagtgctgagattacaggcgtgagccaccgcaccctgtgctacatcattattagctagcatgcttagcaagttctggcatagaaaggtcactagcaaatgctccagctccctgcaaagttgatatcattgccccatctttttggccaaagaaatagacatagaatagcatatcagagaagacgaaggcttcgcaagaacttgtctttctccacttccttggaggtagtcaagaggaatcaggcacacttggtaagaagctggggcaccgtggcgtgggcaaagatgttgagggactctgtggtacactgtagctgttcctctcttggttgcttttagcctcaagtaggcagatcctaatagctgtcaggttatgggtaggggaggatatcaccagaattcccttgctctgccattaggatattttgataggatttatcagagggctatgattatcaaatgtggtcgctgggccagcagcctcagcatcacctggaaacttgttagaaatacaaattctcaggccctattctcgatctactgaatcagaatctctggggtttcaaggcccagcaatccatggtttaacaagacctccaggtgattctaatgtgctttaaagtttcagaagcactgtggtagcataggccttgggcaaaattgtgagttaagccagtgtcaccagggtgatcattttaaatctaaaaatctaaatctcaaatgtgaatctaaccatagccctctgctttcaccaccatcaagataaattccaactttcttagcatgacagaggaagctctcttgcccaccttagctctcccagcgcccttaccactctcttctgtacaccccactctgcatattgggaggcatctagacatctttgcttcttcaagctatttgtagttcctagaacaagtgatgctttttccctctctggctatccctcatgttgttccttagtcttccatccctttgcctggtatggaagattggatcttccaaagaaggccacaccaatatttgtcacatgtcatatgctgtttgggactttgacattcctgtcacccagggatgttatctattctcctcccttcgaattcgggtttgggctacaactattccaaccaacagggtactgcagaagtgctgcttggtgacttccaagtccaggtcataaaaatgatgcatcttccttctaactccctctctctctcttttttttttttttgggtttttgtttgtttgaaacagagtctcattctgttacccaggctgaaatgcagtggtgtggtcatagctcacagcagccttgacctcctggaatcaagtgatcctcctgcctcagcctcctaagtaactgggactataggtgtgcataaccacacctggctgatttttaaaattttaaaaatttttggtagagacagagtctcactatgttgcccaggctggtcttgaactcctgaactcaagcaacctcccacctcagcctcccaaattgctgaggttacaggtgtgagccactgtgtccggcattctctttttgggatgctgacactgaggaccagccatcatgttttgaggaaatccaaactagccaaagtagagaaacaatgtagagagagctgaggccccctcagccaacagccagggtcaaccagtagacatgtaaatgagtcattcttcagataaattccagcccccagcctcccagtcttccagctgaatccttagacatcatggagcagaaacaaggtatgccttatgtgttccatgtgaatttcaggcccacagaatctctgggcagaaaagatgttttcatagctttaatccagtatgttttaggtaatttattacacagccatagtaaccggaacatggggctactttcttcatatcctgtaggactcaactcaaatgtcagaggtgacttcctccagaatccttttatgaaaccaaactttcatattcccacaggtgtgccttaggtacctctctctgtttccacagcctgcaatgtaattgttagttttcctgtttatctaatatctctgacatagacactctactggtgaatgagtgatattctttgttggcctcctgtttcttcagtagcaatcactgttgctaagggaatggggtaacacaattggccagttcagggacagggcatattacctgatgaagggcagtgagaaaccttgcaggacaccaaaacaaaaacaaaacaagacaaaacccaatcctctacagatgaccaaaccttaagtctccaaattctcactcattcttgcttagtcctgggcttcagctcagtgctatgattcagtgcctaaagacttaacttcctgtcaggaggtgacttcaactctggggaaaagaaatcccactgcatttgcttggattgattggtaagagagattgataaaaggatgttctttgacatttgccaagggcaatttttttctataatgagggaagagaaacagctgtttgtcccaggagactgattatggcactagagtcaaatccacactctggaatgcaatttgatacatcaccttaatattaatatagattaaattcataagatactcagcaaagtaatcaataattccaaagtcaataaatattaaacatgtgaatgatgtagataatgaactaattattgaacgtttcagtggccagaaaaaaggaggtttggatttattttctgagagtggctccctttagggtcccttgggcagtgtgtgatagcttttgatctgtgatctgacagattaagggagcttcaggcagaggcctctctcttgtacaaaaatactcttcttgcttactgttgaggggacaagaggaaagaagcatgtgatgtatctgaaatatagcctttagagagtcattcttgttttaactaaggaatttgcattaatatgcctaatgaaaccacctttgtaaaggttatgacagtgagagaaatttagcttggctgactccatcttgcttctagtctcataggctggctgtcctcacttattcctgggcatataacaaaggccacgccaagctaactgtgggaggaatttagtgtatagtttcactttgaagcaagaatgataatagtccctccctaaaactgagcccctcctttttcggggactgaaactgcctttgtaaaactaatgaaaggccacaagattaggattatgggaggggtctgaattctgctaagatgtaggaatagcttgcctttctataatctatgctggaggtcacaagatttgtgacttccccgtttgctcttgtaaataacatcactattgtagaacccaagattcgtcttttgagatgattttcagaactgtgcattctgggcaccaactgacttcacttggactcacgactcatgactcagccagtcctgtggcccccaccctatggtggactcagcacatgaggattgtttgccatgcttttatccccaatcagcagcacccattccctaactccctgcctgccaacttatccataaaaaccctagcctctgagttctcagagaaactgatttgaataatgaactcttgtctttcatgtggccagcccttgccttaattaaactgtttctttactgcaatactgctgtctcagtgaattggctctatctgtccagcatgcaagaagtatagtatagtagaaacaagtagactttgtgggcttagacaaatgtatttgcaaagcataattttcaaaaagttaaaaacaattctcatgcaaatttgtagtgagcatgcatcaaagattaaataattagtggagttttaggtactgaagtgtgttctcccaaagtccataggttgaaattttaactgccaggacactcagaatatgactatatttggagataaagcctttaaagaagtaattaaggttggccaggcatggtggctcatgcctgtaatcccagcactttgggaggccgaggcaggtggatcacttgaggtcaggagttcgagaccagcctggccaacatggtgaaaccccgtctcaactaaaaatacaaagaaaaaaaaaattagctgggcatggtggcggatgcctgtaatcccagctactcaggaggctgaggcagtagaatcacttgaacccaggaggcggaggttgcagtgagctgagatcgcgccactgcactccagtctggcgacagagcaagactccgtctcaaaaaaaaaaaaagtaattaaggttaaatgaggtctcaagtgtaggtcctaatgtgaaaggagtggtgtctttataaaatgagaaagaaacaccaggaacacatgtgcacagagaaaagaccacaggaagaggcagcaagagggcggccccctgcaagccacagggagaggcctcagaggaaaccaaccctgccagcaccttgatcttgaacttccattatccagaactctgagaaaatagatttctgtggtttaagccagccagtctgtggtattttgttatggcagccctagcaaaatacaagagggagccagcaggaaggcaaactggtttaaaggaagctggaagaaactgatctataatagtcagtgataaaaagagcattctggcgtaagattgctaagtgagatacacaactgggtagtgtccttcaggtctataaaactatagtctttggggttactttcttagacaagagtcatttgcatcttaccagttttctacaagctgacattcttttctcttttgtttatttatttattttgagacggagttttgtcacccaggctggagtgcaatggcgtgatctcggctcactgcaacctccgcctcccaggttcaagcaattcttctgccttagcctcctgagtagctgagattacaggcatgtgccaccaagcctggctaatatttgtatttttagtagagacgaggtttcatcatgttggccaggctgccttggcctcccaaagttttgggattaaaagcatcagctactgtgcttgctgtttatttttttattttaatttttttgtttattgtcttctaaaaattgacatccttgagacctaattaatggcaaataataagtcgagcatagtcacactgtgctggaacagagtttctcaatggtgactatttactgatgtttctactgattatagtcatgtgctgcataatgctgtttcagtcagtgatggaccacatatgtgataatggtcccctaagattatatttttttactgtactttctctgtgcttagatatgttagatacataaatacttaactactgtagtacaattgactatagtattcagtatggtaacatgctgtacaggtttatagcctaggagcagtaggctagactgtatagcctaggcgtatagtaggctagaccatctagctttgtgtaagtacactctatgatgttcgcaagatcacaaaatcacctaatgatgcatttcccagaatgtatccctgttgttaagcaacacatggctaactctgtcgtggtggttgtcccatgcattgtaaggtggtttagcagcattcttggtctccacccactagatggcagtagtatctgctctcccattcaatagtgacaatcaaaaatgtctccagacattgtgaaaaggtcccctaaggagtaaaattgcccctggttgagaaccactattctggtctaactttgaattaaatattcaaagcaatctttttgccttacttccaagttttagataattttcataacagtgttcaaatccctgctctgcccctcaactacctgtgtgtccttggtctatttttaacctgagtttcagtttcttcatctgtaaattaaagcaaatacttctttacctcagagatttccatgaggatgaagtgaattagtatgtgcaaaacacagacatcagcgaatgctagccccacacttggcctcatggttggtcatggtgtcttttaagaggcatgtttatacacctgtggtcacagagggcaccccggggccactttggtggccaggcacacacatccaggtctgggctttcaggggactgcaggctagtgcagatcaccgggaagtcaggaccctgcagctgagctgggtgcctcccttcacattctaggcaggacagaggagtgggtggccttgacaagagttaggggagaagaggggagccagtacccctaccttcacccttggccatcactgcaggccagttctcttctctgcctctgacctgatgcaagtatcaacaccatcactactttcttccagtgctcagggacctgatgtgccccttgctggaggaacccgtcttgccttgtctcttgccttaggcaatatggtaccagaatatagggtcaggaattccacgtgaaagtataactagcatctttgttgctatccttcaaccttctacatctactattcagaggtgatcttgttgatgaactgagctaatttatgtgtgtgttgttaaaataggttgtggcttggtaggcgttgagggaaaaggagctttgatggccctcgcctcacggggagacaagtgcctttacttggaaaaccactttaagaacagcctagatccgtctgtgggactgcattgtccaacagagaacgtctatgtctgggggcctgggactctggaaagggttattttggggtttcagagtgattcagtctaaggcgggggcacagccgtctcccatctgtgggggataattgcttgctctccattccctgcttttttttttttttttgagttggagttttgctgtttcacctaggctggagtgaagtggtgcgatcttggctcactgcaacctccgccccctaggttcaagcaattctcttgcctcagcctcctgagtagctgggattacaggtgcacgccaccacgcctggctgatttttgaatttttagaagagacagggttttgccatgttcgccagcctggtctcgaactccggacctcaggagatccacccacctcagcctcccaaagtgataggattacaggtgtgagccaccatgcctgacccattccctgcttattatagaacactaacaggcagactgggcttgagtctctgagcctgacactgttgcatagtggagagtcactggttgcagggaaaggagaatcaggccagagcattcacatggtgtcttctctccaggcttcttggctcccctctttcatcccatcctgcctggcttcgctgaatgaaagctctatgaacttcgctcatctgtgatgattgtgacttgccagtaatgctaaatgctgcaccaggcagcagggcacccggtgggatgaggtgggagttatggggcatcagggggaggctgtatgcaaaagaaagggccacctgtcctagacccaccataccattggtcgaccctgggcaagaagacctgaacttccctggattttagtttcctcatggatgaaatggggatacaaacactgccatgttttcctcctagattgtgagaatcaagtacaaacgtttttagaaagtgggaacaggacttatgctatgatattctgagagaactcaggctaattttttttttttttttgagatgaagtttcactcttgttgcccaggctggagtgcaatggtgcgatctcagctcatggcaacctccatctcccgggttcaagcgagtctcctgcctcagcctcccgagtagctgagactatgggtgcccgctaccacacccagctaattttttgtatttttagtagagacagggtttcaccatattagccaggctggtctcgaactcctgacctcaggtgatccacccacctcagcctcctaaagtgttaggattacaggcgtgagacatcacacctggcccaggctaatttcttatggtggcacatcactcaccatttaacaaatattaatgaagccctactgtgtgtcaggcactgttctaggtgccgattatacagcagtgaacaagacaggcaaacatcccttgcttcttatgttctattgtagggacactgatgataacaaaataaggtaaacaatgtgttagaagccgggtgcctcacacctgcaatctcagcactttgggaggctgaggcagaaggatcacttgagctcaggagttcaagaccagcctgggcaacatatatctctataaaaaataaaaaattagccaggcttagtggcatgtgcctgtagtcccagctactcaggaggctgaggtgggaggatcacttgagcctgggaggtcaaggctatgatgaactgtgatggtgccactgctactccagcctggacaacagagtgaggccgtgtctcaaaaaacaatgtgttagctggtcatcagcggtatggagaaaaaacaaggaagagggagaagaggtgtagtagccagcttccaaaaggtccctcacctcttgggattccatcccttgtgtagtccctcccacagtgtaccagggttggtctgtgtgaccagtagtagatgacccagctgatagtctctcctgtctaagatcaggttatagatgactgcggctctctctctctctctctcagatcacttgctatgtgggagctggttgccatgctgtcagaatctatggagaggcccctggtgaggacctccagtacacagcccaaagccagcaaggacgtgaggcttgccagcaaccacatgagtgagctggaagtgggtcctcttgcctcagatgactgcagctctgactgacagctgactacaacctcacgaggaaccctgagcgagaaccttggagaaagcctttttctcatgccctagagttgagaatgtagattgaatgtgctctgctatgattgctgttgttaggcactgtgggaagtgctttatatacactcttgtttaactctaatagccttactgagggtactattattatctccattttatacaccaaggctcagaggctaattcacctttccaaatcctccagctaataagtgtccaagctgggactcaaacttgggccttttaactgtgctgctattctacctctcccttgctctttccagaccaggcttgggacataacactaacacccttttcctttcatttcatctcttgtccttcagtcattcctaaacattgacattcattgagttccttggctctggccacagtcctttctccctttcccctctggggcatcaaatagtgattacagtatccacagggatggcatatgccatttcaccatttcacagttcctggaatccacttttcacttctcataaagcttcagcaagccattctcatcttgggttgcttgtttgcctatttgctgttacatccattctcttctcctcatctgtttctttcaaggaaacctgatccatgcaaattacgtttcctaaactgctttgccaatttgtttcaagagaggttcagccaacgagaggcgcctgtgggagactggcaggtgggtggcagagaggaggcaggtatttctgccctccttttctcctcccgccattcccttcaggcaccatttccagcagtgattgggtttcctccatggctccgcctcttgctggacagaccactgtggtttcagtctcagctccggggctgtgttaacacctttttccttctgttcctctatgcgtagttatggtaaatgcaacttttctgcatttcttaattttgagtttgtctaattctccctggtagctctttcagtccttccatcacctttgcaacaaattccctgcattagattatctctgtgaattgccggacctaggttttgtt

SEQ ID NO: 3 - DNA, 43134 bp, Mus musculus
tgaacaccagcaccctgggaacttccttcatctccatcttcagtcagagggtcagaggtgacatggctccaagggagccaggcacttcctcctttgaaacttaaggagagaggtacacagggcgtttgtaaacgaggcatcaaagacagtatctcagaaagctatgtgtgtgtttgtgtacgtatttgccaacaagtctctgtgcttttgtcttctaagccccaaggtcttttagttcattctttatgcttcgtgtgtgtgtgtgtgtgtgtgtgtgtgtgtgtgtattctggggatcaatcccaggacctccttgcatgctaggcaagcactgtaccaccaagtgacacacccagtcacctcaactactttttctaagtaaagcaaacaggaggggctagggatgtgtctgcctgcagagagcttgcctagcatggattgggtttgatctcccacaggacataggccgggcagtgcaatgcatgactataatcatgatgtttggaaggtggggacaggaagttcagaacctcagtgtcacccttagccatgcagcaagtgtgaggccaatttgggacatatgagacctgtccccaaaaataaatctgacagcagggcatagcgcaatctgttgttcatcccagcacttgaaaggcagaggcaggcagatctctgtcagttcaaggccagcctggtctacatagcaagttccagaacagcctgggctacccactaagactctgtctaataagtgcataaatacaaagtaatgaatacagaattgatcacattgagtctttgggctctataagacagctcatatagtacattctaagacagccagagctacatacatagtgagactctgtcttgaagaggaaaaaaaaaaggcatgttagattgatgatgtattagaagtctagactacagagtgagctcaaggaatgggctcaaagccagcccaggaagcttaaaaattctttgtctcaaataaaaagtttaatttgggctagagaggtggctcaagggttaagaactcacgtggcctttctgagaacctaggctctgttcccagcatccacatcaggcaactcacagatttggtttccccagcttcaggggattcaaccccctcttcaagatcctgcaggcatccacatgtgtgtggtgctcactcgcacagacacgcacatgtacacaggtaaatgataaaatgcattttcattatttgtatgtctgagtaccttagttacttttctatcgttaggatgaaacaccaggaccaaaacaacttctagaggaaggatttagttgggcttacactttgtttctttgtctttctttctttgtttctttctttgtttgtttgtttctttctttctttctctctttcttccttcctttctctctctctctctctctctctctctctctctctctctctctctctctctttctttctttaattgaaggtcccgcactggtcctgcttccacaagtccattagtgcccaagatcaaggagaaaggaagaacaaccagataaggcaggaagggttatttcccgaacattccatttacacacagaactaaacaggtaagtcactattgctcttagaagtaggcagcatgggacagggagagatggggaataggagtgtatttaaaaagaacacagggggcacgttcgttatcgtattcctttctgctctttgacgctgcagaggaagcatcgctgaaggctctcgtaactctaccatcatgtctaagtccgagtctcccaaggagccagaacagctgtggaagctctttattggagggctgagcttcgaaacaaccgacaagagtctgaggagccatttagagcaatggggaacactaaccgactgtgtgggaatgagagatccaaacaccaagagatccaggggctttgggtttgtcacatacgccactgtggaagaagtggatgctgccatgaatgcaagaccacacaaggtggatggaagagttgtggaacctaagagagctgtctcaagagaagattctcagtgaccaggtgcccagttaactgtgaaaaagatctttgttggtggtattaaagaagacactgaagaacatcacctacgagattattttgagcagtatgggaagattgaagtggtagaaattatgactgacagaggcagtgggaaaaagaggggctttgcttttgttacctttgatgaccatgactctgtggataagattgttattcagaaataccatactgtgaatggccacaactgtgaagtaagaaaggctctgtcgaagcaagagatggctagtgcttcatccagccagagaggtcgcagtggttctggaaactttggtggtggtcgtggaggcggttttggtggcaatgacaattttggtcgaggagggaacttcagtggtcgtggtggctttggtggcagccgtggtggtggtggatatggtggcagtggggatggctataatggatttggcaatgacggtggttatggaggaggtggccctggttactctggaggaagcagaggctatggaaggggtggacagggttatggaaaccagggcagtggctatggtgggagtggcagctatgacagctataacaacggaggaggcagagacagctttggcggtggaagcaattttgtaggtggtggaagctacaatgattttggcaattacaacaatcagtcttcaaattttggactgaagaagggaggaaactttggaggcaggagctctggctcttatggtggtggaggccagtactttgctaaaccacgaaaccaaggtggctatggcggttccagcagcagcagtagctatggcagtggcaggaggttctaattacgtacagccaggaaacaaagcttagcaggagaggagagccagagaagtgacagggaagctacaggttacaacagatttgtgaactcagccaagcacagtggtgacagggcctagctgctacaaagaagacatgctttagacaatactcatgtgtgtgggcaaaaactccaggactgtatttgtgactaattgtataacaggttatttttagtttctgttctgtggaaagtgtaaagcattccaacaaaaggttttactgtagacctttttcacccaggatgttgattgctaaatgtaatagtctgatcatgacgctgaataaatgtgtctttttttttttaaatgtgctgtgtaaagttagtctattctgaagtcatcttggtaaacttccccaacagtgtgaagttagaattccttcagggtggtgccaagttccatttggaatttatttatggttgcttgggtggagaagccattgtcttcaaaaaccttgatgtcgttaaactgccagttactattgtaacttttaatgagtttcaccattgaaagggtcatccaagcaaggtcacaatttggttataaaatggttgttggcacacgctatgcaatatcaaaattgaataatggtatcagataaaataacagatgggaatgaaacttatgtatccattatcatgtgtactcaataaacgatttaattctcttgaaaaaaaaaaaaaaagaacacaggctcccccctaaaccgagtgcttggcctgtttcaacccaagaggaatcaaagtatcaagatctgtttgggaaggccagaccaccagggatggagggaggacagtccagagggtgggagtgaagagattgcccccacccctgctgagaatcccctacccctaaggtctggcaggaaaggggcagccctgctatacttcagagcaagtttagggctgccagatggctgctagatgctaggggggccggaggtggctcacataggcatcccctcagggagatgatagggctgccacttagtttttctaccagagttcaggggtccttaacctcctcagaagcagtttccttttaattcatgcttgattcctgtcagcttcttcttgatggcatccttggagctggtatagattgtttttgatcttgaggcaagcaccagagaagtgcccactagctggcagagcaaagagctcgggagaagcctcaactcaattgtctgaataatcagatctaagacaaaagagaagcaaacaagcacagcaaattcaaaaggcaccaagggcacccaaggggcagttccagaaacaaggacaagcaaggcaccggagtggctttggtaagaaactctggggtccaaagccagacctggcccgcaaggcttattagcagaatgctcaccttggagtttttataaggaaaacagagagttgcaagtctggcaggaaattataccctcactcccagagctgcagctggcttgaactatcctattcccactgttaggactccagagcactggtcctttcctcatggaccctcgcagcctgcaaggatgacacaagccctgtttatctccagttgaggaccaggcctgatcttgaaaagacagccataagacaacagctccgggaacagaccataatatccagaaacaaggtcttaaaacccgctcccaaagaacaaccagggaataagcacaaaaatagggaaatatcttatcttgggatgggccatctgtgctgggcagccctccctcatcctaaggttaaacgtcaatgacataggaccactggacacctgggaccccctagcacccatcagtgaaattttaaattacctaatccttctagagagttcccccagttccctataagaaggcctgtgcacctttgtctggggtcaccatctcaaaaaaactgattaatcccgattgctggttgtttctgcagaataaacgctctttgcctttgcatactgagtctggggtcttccttcagtaattttcggacccttacaagtccatccaggttgttcctgccaagtcccaaagaaagtcagaacaaatggctaactgtggggtcagcataccaaagttgaagctggacgctcactctggcacctgagtcctcttagctctttgtaccttaaccatctccagcttcccttcccccagcttctgttgccttataaccctactgttcctgccacactcttaaacgcgttctcacgaccggccaggaagaacacaacaaaccagaatcttctgcggcaaaactttattgcttacatcttcaggagccaggagcgcaagccccaagccccaaaaacgaaagcccccccccccccgcttacatctttaggagccagagcgccagagcgtcagagcgccagagcgcagagcaagagagagaatggcggaaaccccgtccccttttaaggagaattatccttcgcctaggacgcatcactccctgattggctgcagcccatggccgagaaaaggcagagtacatgtagtggaaaattactcttggcacatgcgcagattatttgtttaccacttagaacacaggatgtcagcgccatcttgtgacggcgaatgtgggggcggctcccaacaccacacactctctgggttcccttgattctcgtagtcaagttcagttgggactcttctagatgtttcttttgtcctctccctcatatctataccttggagcagtcatatcctcagttcattgggtcctctctacctgtttggctcttcctctctcccctcctttgcctaaccaacctctgatggagtgccttcatcacacctcagattgaggtggggccagtcttgtgattattcctatcactgcactcccctggttctataagacaataaactccactccttcctgcacacgactataaactcatacaatggtcagcatccttactcattgtatcattagcaaccatggggcttagatctatagacacttgacctactggtggatggataggtagctgaactagggtggggtggggtggatggaaagacaagcctgagcaagaagaaagaatagcagtgaggtagtgaaatagagattaaaactagaagtcagattaaaaacagactccttgtgatggtttgcatatgcttggcccagggaatggcactattaggagatgtgaccttcctggagtaggtgtgtcactgtggggatgggattaagaccctcattttagctgcctagaggccagtcctccactagccgctttcagatgaagacatagaactctcagctctgcctgtaccatgcctgcctggatgctgccatgttctcaccttgatgacgatggattgaacctctgaacctgtaagccagccccaattaaatattgtccttataagagttgtcttggtcatggtgtctgttcacagcagtaaaaccctaactaagacactcctgtaattgaaaatatctacggaagaaagactttacatgactatgatgtccagaatatagatacaggtaacagttgctgtccagcctggaagacaactgtggtggaaattttatgcagagatttcactgcaccggtgcttgatgtgaaagaagaaagtgtggagtctcataaaaattaaacgaagcagaaagctgcattgcctgttacaaccagagatcttggaaaggggggcggggggcggatcagagcctgggaatggtggctaaaataaggtgacttgcccagtaagaaggggaatcacagaggaaacccagtcactactggaaacccagtcactactggagataccacctgcatgggtaagacaagaaagaggggaaacagccaccagccttttctctgatgtaccactgccctccaggctataatgtctgttattgtaatgtattgtattgtaatcctcatccacccaggttgctcctgccatgtcccaaagaaactttaggacaaactgaagggagtttgggagttgttatggtttgtatatgctcagcccagggagtggcactattggaaaatgtggccctgttggagtaggtgtggccttgttggagtaggcttgtcactctgggtatggactttaacaccctcatcttagctgcctggaagcagtattctgcaagcagccttcagatgaagatgtagacctctcagttctgcctgcatcatgcctgcctggatgctgtcatgttcccactttgataatgatggactgagcctctgaccctgttatacattgccctttacaagacttgccttggtcatggtgcctattcatggcagtaaaaccctaactaagacagaaatgtaatttgcaaggatgagagtcccctattcaaaataaagcaaatcagcccaggactagcgatcagatctaggtgtgaatagtagcagagaggatcctggtaaccaggaggctgcagccaccacctgaccttccttccaggggtgaaaagatcttggtgaaggagacagagtactgtggcctggggccaaggagcttagcacaggccactatttctaatgacttgtagggctagtaaggaacagaaaggtgtgttgtgccggctagttttgtcaacttggcacaacccaggatcatctgggaagagggaacttcaactgagaaaatgcctgcatcaaacaggtctgtgggtaaatctttagggcattttcttgattactgattgatgagacccacggagtgttttctgtgctctgcagtcatgggtatagaacttgcctcttaaataccaccaagactagccacctgaccatgtgtgtgacccacacttgaggatttccatttctcacaagctgtttattctgtctttatgtaaagccctaaggcatttgctctatttgacagtgaggaaactgaaactctgagaaatgagaaatagagccagtcatggaggtgtgtgcctataactccagcactcaggagctggaggcaagcgaacagggaattccaagccagcctgggcttcctagcaagaccctgactcaaaaaaactaactataaataagaaccaagtttgaaggaatttggacaatgtcatgaaaattatctcaaacttggaagtaagaaaaagagattgctgtaagtctatagctcaaacttgcacaaagaaactgaaggggacaattttgccccagacactccaagagacgatattgcagtgtctagaaacattagagtatagcaacttaatctggagtgggcactactgccacctagtggttggagtctaggattgctgctgaaactcagactggggcaaccccacagcaaggaggtcaaagggtcatcattgagaaatcctcaaggagagcatgaccacacttgacctatgactgactactagttgtgtctccagcacatcaacatgtagagcgctgttttcaggcctttgacttctgactcggcagctaccccaggcagtacaacgtgtgtggagtctgcagcaattgggtcttcttgtcaagttctggtggacagtcgggagcaatgacaatagtctgtattgttggggagactgtttgaacctctcttaccaacagcttgtggggaggtagcttacacttggcttgtttttctttatgtggtgtcgaacccacagctttgtactattgagttagagccctaaccttaccctctcttcataaatacagatatacactggatttggggtcgtatgaccttatacaaccttagtcacttctttcaaggttctggatgcaaatacagtttggtcagaatgtattggggaatgagattttctgcagggaacttgaaggacatttcagctcattatatatctctatttcattgttaacatctgcagggcaggtggtcctgagttgtataaaaagcaggctaagcaagtcatttggagcaagctagtaagcagcactcccccgggacacacacacaccaaaacacacccccgcccatggtctctgtttcgtttcctgctgagttcctgtcctgaactcccttgtgtgtccatgagaagcatgcttctcacctgttgaatgctgtgctgtacagatacagcagctgagcccacaaagccatgtgtatttctatcacagcacagagcttccttgagggacagctgctacatctatgccaactccttaatcaatacaagccaccctctaaggctgatatctcagagctgaggatggggctcaaagatggagcacttgccatacatgccgaatgtggtgacagacacatttaaacccagcacttgagaggcagaggcagatgaatttctgtgagtctgacgccagcctggtctacagagcaagttccaggtcagtcaggattgtatagtgagaccttgtctcaaaaagcaaacaacaacaacaacaaaatccacaaataaataacatgttgttccaaccacaccacctgcctctatctttgtgacccctcagataaatctccaagaataattttggttttgtagagatgagagccctctcccaaatgctgactcctaggaccccaaggcatgctgctggaagtcaggcccagcaaataagcccaacctcctctcttctgggcatcacacatttcatagttagcaattattatttaaattagtgctgtttcttacctattctcaaaaacactcatatcagttaactgattcacacactttattaatcagtaggggttttggggttttttattttctatttttttatttttttaggtttagtttagtttttggttttctgagacaggggttctctgtgtaattctgactgttctggaactcgatctgtagaccaggctgacctcgaactcacagagatctgcctacctctgcctcctgagtgctgggattaaaggcatgcgccgccaccaccacctggcatgagtcaattctatgttaagctcacagcagtgtatcagaggcatgccagagtttggatactgagtgctaccagtctcctgggacacaaggagctgttcccagctcctcagtaaacagcgctatgtccttggcagatgttagggaggaacaccttgaacttctctgatctataagtaaatgaacaggcttacagtcccccatcgtggaagtcattgttttgggaatatgtgcaacatcacttccgaccggaatagctatcactggaactttccatgcctcttcaccagaacgtgcccctccctggtactggcttctgtggtttgaatgcttttgtcaactccatgaattcttcttgagacccttaacacacacacacacacacacacacacacacacacacacacacaccagtattggaagatgttgcctttggatgggtctgggtcatgagggctcaacccttgctatacacagggcttgttggaggcctttctgttgtgtgaggaacagcattcttctcttcctctccagaggatccatttctgttctttataatctaaccagcctcaggcagtacattacagcagcacagaatggaccatgatgctgaccggtagcgtagccctcactgttttgcagactattggcttccatggatgggcacatgatcccagagagccagttagagctgtgatattgaaactaagaaaaactccttttctaagacagagggtgtaagagccctcggaccagaaatcaggaagccagggttctaactccccttcaatcaggggggagtcacttaatatgtcagggcttccaattccatatctgaaaattagctacaggtcagagagggagaaggagaggaaggaaggagagagagaaagagagagggggagggttgcattagcagtcactacaaacttcccctttcctttgtggctttttgtgggaaatcagaagcaatagtatcccaagtcaggtggtacatggaggatgttcttaaacgctttgctgctgaccgctgctgtcattcaatccttcttgagaccctggaggcaaaagactcctctgacactgtctcttaactcttgaagctcagagttctccagtgtcataatggcaacccgagacaatgcacagactccttctcacactgacataaaagccaggagaactaccaggagtgtgaggaacctgttggggctgctgggggggaaaaaaaaaaaaacagctatgaggagaaccaatcaccagtcctgactactcctcatccaagaagcattcgggtacttcagccgggcacttccttattcctactgttgtttcagaatcccatacatgtatacaatgtgttttcgatcaaactcacctgccactcccaactcctaccgaaccaccccacccctcctcccaattttatgttcctttttaaatttttatttatttatgtgtttatttgtttatttacttatttattttgactaggtctcactatgtagctccggctgttctgaaactcactatgtagctcaagctggcctcgaactccatatacctgactctgcctctcgggtgctgggattaaaggtgtacactaccaccgctctgaatttttttttttttaaaccgactccacttagccctaacagtgtatacagtgtaggaccatccccatggagctaggacagccaatcagaggccatatcccagaagaaaactcaccctccctcatcctatagccatcagcaaccaatagttcctcggctgagcctggggctacggaagcccctcctccattcatgctgcctggtacttctattgcctaagagatgcggaatttgagatgatcgggcagttgaagctagctgttagaactagttttgttttgttttttaagcaaagctattttgatcaccagcgtatcttcagaatcacccactaccactctgtaaaattgttgtcagcgaataaacttgcaggggtcagtgtttacacactagtgctgcccaagggatacgttgcgagtttggcgcagagcaggttctgggttctggttaaaggtctgcacagggctgtagtgctggacctgcgcgcaggagcccagccgcggcgctcgggggggggggggggcgggggggggcggggggggggcacggccaccaggtggcaccaccgagtcctcgcgcggggcggagcggccgcggagctggagtagcatgtgggcgttcggaggtcgcgcagccgtgggcttgctgccccggacggcgtcccgggcctccgcctgggtcgggaacccgcgctggagggaaccgatcgtaacctgcggccgccgaggcctacatgtcacagtcaacgccggcgccacccgccacgccgtgagtacgcgcttcgccgggccgcacaccggagcgcaggccgcgcccgcccctatgccggggacgcgcagcgcgcacgcgccgagtcgctctggttgcgcgcgcgtttgggtgcagggcgcgcgcggtgtttgcgcgggcttcggaccttggcggtggggatgggaaaagacgagtttccgtaattaacacaggatgtatagcgtgtgcagcagggcgtgtttattattgtgtgcactccgaagttgcctttttcagggcgtgagactaatggggttgtggagttgctctgagcagggctttttgttgcttgtttgcctcactctgtatccctggctagcctaggattggctgagtaccccaaagtggcttcaatcctgtgatcctcctgcctcctctctgctgggatcacaggtgtagcagcagagccctagagtccagcttttggaaaatgaggggatcttggttccacgttctgactgcgcggcgctggagagccctgtgaccttggggagaccctaactgtctgggggcagggcttggctttctgttccgaggagattaaagggtaacacccattttgcgattttggcgggagaattaaactgtattcgcaaaggccttagcacttcagataagtctcggttcttagtagatgcaaagaacagaatctgttactccgtggcttgaaaagacagcagtagggtgaaggaaggctttccggagagggccgtgatagatgccaaagaacgggtctggggagcattctaggaaggggagagctatggacaaaggtggagtaggctgtgggataataatgtctacaggtttaaacccagcttaggattcttgaggtcctgtcattaaaataaaaaacaataataaaaatagggctagctttgtagctcagcagtgacatggtcacttagcgttcaagagttcttgggttctttctataacactgaaaaagaaagtttaaaaacaaaacaaacaaaagtggactggtcagagagagagacggctagggtttgaagggccgaacctgtaacccatgcttcctcaaacactttcttggatgtttactgccctgttcttcccttgcctggcgcctgacagctgggctccagttgcagctgtgcactttggatttctgcatctctgagagcctgagcaactttgtctttggcatctccgtttcctcgcctgtacaatgcaaatacagtcggtccatctttatgctcagagtctgttctcagtggctcaatatcgtttacggtccccagttgtctaccctgatgctcctacagtcactttgaaagcggcagactggccaaaagcgcaaggctcatggaaggtgtcccctcccggccgttgtccaacaaggcttgattccgctgtcacggagtgagcagatattcagtctcttcagcgaaatgcctgtttgcgtcgatgtacctgtgggagactttgtcgtttgaaagtggtccccaagcctagagccacagtaaacatagtaagattgtggaatggcttgcaaagaaaatgtatgaaagaaacacctcactcaggtgggcagtggtggcacaggcctttaatcccagtacttgggaggcagaggcaggcggatttctgagttcgaggccagcctggtctacagagtgagttccaggacagccagggctacacagagaaaccttgtctcgagaaaaaaaaaaaaaaaaaaaagaaagaaagaaagaaagaaagaaagaaaaaaagaaacacctcacttcagcatgagttataagtgttcttgcttcaagttcaaagctgacaaaccaataatatataataaataaagtgtctttagacagacatgcacaaacagaattatgcatacgcattggccatttgatagttatgaccctgagacttatagggacccaacctgtgccccctaggaacaagtaagtgagcactgcaactctatagggctaccccctccagcggatgatgatggagtaggggatagagagatggctcagcatttaagaacacttgctattcttagagaggatctgggtttgattcctggcacaaggcagcgcccaaccttctatcactccagttcttggagatctgagatcggctgccctcttctccctccaaggtcacccacatacatgctgtgtatatccatatactcaggcacacacacacaaaatacaagataattattttttttaaaaaaaagatgatcacgatgaagttcttccctcataactccatgagggagaaaaggattctgtgagtccattcagctaaagacagagcagtgccaagcagagagagacgactctcgagcacatggcagctggtgcggtgtagccatggccacttgagatacagtcagcatagctatcttagccaatggagagatgctcgatctggtgctacctaaccatgaccacctgagtgagatacagctaccacagctgtcttagtcagtgttccattgctgtgaagcgacaccatgatcaaacatttaataggggctagctttcagttcagaagtttaatccattatcattatggtgggaaagcgtggtatcaatgcaggcagacatagcaggaaatatggtggcacataggcagacacagtactggagatcagctgagaggctgcaggcagcagaaagaaagtgagacagtgggcctggcttgaacctctgagacctcaaagcccacccccagtgacacacttcctccagcaaagaaagccacacctactccaacaagggcacacctcctaatagtgtcactccctgatgaccaagcctgcaaacacttgaaggggccattcctatccaaaccaccacaaccaaggactaaatttggtttcctttcaataaattcagagagctcccgatgtctcatgaccgtcctatcagatggtccaagcttagcaggaagtcagggaggacccagagcaaaactttgggggtagacgtggggatcagtccctcagcactgtacctgagatgctgtaattggctactctcgagtataggagagccaatctataaaccatgtattgctggatcagagtagacgaagatgtggtaattagtgtttttaactttggcttctagcatttgaacctccactacctccagattctgaacatcaaaaagcagagcgtctgcgtggtgcatttgaggaacttggggacattggacaacccaaggtgagatgaaaccaccttctacctcaggcatgccttccacttcctctctcctcatatggaaaccatttctccctgggaacaaccttgagtgacgtctttcacatcactaagcatcccccatgttaccttaggtgaatggtgttactgtgtgactatcccaggcttcctttagttcattcctatggttggatatttagggtttttcccccagagtcttgttatttcccccagcatcctggttgagaaagaacgtacagctataacaaatgtaacggttctccaggctgcccaaggtttgctttccaccatgatgtgagttgaggaacctgcctccagtgacacagtgtgatgtccaagttagatcagcctgcccaggttccatttggtaggaagagttggaagcactgagaggctaaaactagtgctggtccttccctcactttgttcccgtggaccaaactcagttgcataaggaagctggaaagaagatagcaagggtcttcaggaaaacggcagtggattccctgtggagccacgatgcctcagtttacatctttactacttgcttatctataggaccctttttcatgtgcagtggtgtccccagccccagagacaccaaccaaaggcatacaggggttgctacatccactttgaagtccaagatgcctgagtgacattcagtactctaagccatagaaatgcctttgtgtctgccagtctgtgcagatctgtctctcctctttctctctttctctgtctctgtctctgtctctctctctttctctctctctctctctctctctctctctcacacacacacacacacacacacacacacaccccttcttggtttaacagaagcctttggtgttccaagcctttgattctcccttggactcttccaacatgaagctactcttccatcctgtccattccatcgccttataaagaggccacttgtctcccagctcagcatctctttggtgagcttaccgtgcaagcctggcagcttggatttgatctctgggcacatggagaggtggaaggagagaacagttccacacagttattctttacctccatgggcaagccgtggcgcgtgcacgtgcagacgctaataaataataaatgtaattaaaaaacaaaaacaaaaagacaattccagctgtcctgaagagttcctcgagacaccccaacccaccctccatcttcactctctccatttcaacctcgaaatgtccatcacagcctatcagaccaaccactgtatttagagagtagctcctaccattctggtcagtcccatagcccgtccgtgttgtgccctaccaagaggatgggctgggtaaaggatggatcagatgctgttagcacccagcagtcgctggtggcttactgtaggcccctggttacctccactggggcacaaaagcccacagaaggaaggcttaatgcattatattccttcatcctgtcgttggggatggaacccaggcctttatacttggtaattcatatctaactcccagacacttcccagtgcagcagtggttttcttgtcatagttcaggtgacatggacaccatcagaggtgatagtccttagcacctacagctgttaccactatctaattcagggagtgttcacccctcccgaaaggaattctgtgcacttcattagtcagtggtccctccgtcctactgctcccagacctactgatcaactgacctctatgggttcatagaaatgtgcaaggattttggagggtcgtgtctgtctgtccatctgcctgtctgtctgtctgtctgttttagaccgagtctctctatattgcccaggctgatgttgaactcacagtcctcctgcctcagccctggcagattgtgggagtagaacaataggctggattttgctggtgcattcctgcaatcccggcagtcggtcgccggcacgggcaggaagttagcctgcactgcagagtaacagcctgtctcaaaaagaaaagaatttttaattaaaaataaaacctgacaaactatagagaaacgttccatagggtttcagctgcatatttttcccaaaactgaattgcaagagatagagagaacacactgtgaaatcggttccagcccaagaaacagactaccaaggactggggagatgttaaaagcacttgcagctcttgcagaagactccggttgtgtgtgtgtgtgtgtgtatatatatgtatatgtatatatatatgtgtgtgtgtgtgtatatatatatatatatatatatatatatatatatatatatatatatatatatacacaagcaaacacctatacacatgctattaaataataaaagtaaatcttcaaattaggagagagagagagagagagagagagagagagagagagagagagagagactgtcagtagagcctgggcaagcaccctgctcgctccaagtctaatattaacccctttagcatagctgccattctgatctatagctgcttgaattggcttttatggttgtttattttgcacacactccatgtggctgagtaccaatgtgtctgtatgcagctcatcccatcactgtcatttgtgacatctgtcacattgctctcagagtcttagacgattctatcttgttaggtggtggtccttagctggagctcagtgcaattcttctctcctgttatcttcatacctgggcgtttcccagtttggtgctatgagatagcttcaatccaaccatgctaaaataatacacctcctgtagtgaccctgggagtttctattgtgcatattcccgagagtgggcctgaagggccacaggaaaggccacagcctgtgagcatgttccacagtggtttccaaagcaactgatctctgcctgcccctcagcagcagaaagccctgcttgccccacctcctgtgcctttcatgacatatctcatttttaaatcttctttttaaaatattaacaaagttgatcatgctcacaggtcatgtggccatctcttatgtaatcggtgcacactattttaccacttttctgttggatattcctcttattgatttgtattctggtttagtccattttcagatatatataatacaaatattttttccccactttgtgtcttgaccaacaaatatttagtaacaaaagcaatgaaaacagccccagtgtccagcaagagtggatgtgtaaaatacagaaaatataatgaactagacacagtagtagagtacacatctttaatcacagctgcttgggaaactgaggcaggagaattgtaaatccaaagccaacctgagctacctaggaagagcttgtctcagagaaaacaaacaaggtacttcgttcttatatttttaaaaatttaaaggcgtctaggagatcacagaaaagacttggcagatgtgactgcctctggcgatggtcgccatttggaaaagaggctgcttttctctgtaactcctttatgcagttaaagtttttactctgtgcatgctgggtagtttccatcaatttaaaaatataaatgaggggctggagagatggcttagtggttaagagcacttggtgctgtaccagaggaccccggttcacttctcagcacctacatggcatctcatgactgtctgtaactccaggtccaggggctctgacaccctcacacagacatgcaggcaaaacaccatgcacataaaataaaaataagtcgtttaaaaaccgataaactggggcctagcaaacacagaagtggatgttcacagtcagctgttggatggatcacagggcccccaatggaggagctagagaaagtatccaaggagctaaagagatctgcaaccctatcggtggaacaacattatgaactaaccagtaccccagagctcttgactctagctgcatatgtatcaaaaagatggcctagtcggccatcactggaaagagaggcccattggtcaggcaaactttatatgctccagtacaggggaacgccagggccaaaaaatgggaatgggtgggtaggggagtgggggggtgtgtgggggggacttttgggatagcattggaaatgtaattgaggaaaatacgtaataaaaaaaaaaaagaaaaaaaacccgataaactcaattgtcatttaagaactaaatgagctgggcagtggtggtgcacgcctttaatcccagcacttgggaggcagagacaggcggatttctgagtttgaggccagcttggtctacagggtgagtttcaggacagccaggactacacagagaaaccctgtctcgaaaaaaaaaaaaaaaaaaagaactaaatgaaaggtgagtggatgagaaaagctaggcctggtgtctctcacagctgtgacgtcaacaattctgaggctggggcaagccggagtgctgctgtgtgagtttgaaacctcccagaactacctagccagactctgcctcaagacccaggaaagataaaggtagatacatcattttggtgttaacgggaagtgacttggagaatcaaggtggctgacggagcaggaaggactgttgtgaaccctagtgcttgggtctcacccacactccatcttgctagctggttacttctgctagaaagccttttttttttttttttttttcagtttgtatgtatttattatgactgcagttggtaacattgtctggggttttccccctgcagctctctagacgagacagcgtatgaaagactggcggaagagaccctggactccctggccgagttctttgaagacctcgcagacaagccctataccctggaggactacgatgtctcttttggggtacctcttggctctgttgcgttctgtcttctccttaataacggtaacttaggctggagaggtagttcggttggtggagtgcttgcctggcatacacagaaccttgggttcaatcctcagcgccacccacagttaggcttagtagcaaatccctgtagtcctagttaactccggaagcagaggccggaggattagaaattcaaggccatctccagcaacattgcaaggttgaagggagcccaggctatagccctgggcgaggatctggatttgcaaatcttccctgtgtgtggctgagagagacttcggaactggttgaagcattagcccagccgctgtaagtgagggaagtttacatgctggccaccaggtggcaggctaagcaaggatctgcttaagcttttaccatgggagaaatatgtgtctcctcctcgtgttcttacccgttcccctcctccacactcccaatccgggcagaggttaatcctcttgagagcaattcattaataccaggaaatgtcatgaagtgtgcattttggagtgagtcatagggctatgtagggcagatggctgtcaaaagggggggggggcgggaataaaaagtactttcagattcattctttttattccttagtacgtcacatgtatgtgaaggtacatggtttatcatgacatctcccattaggtctatttctacttctaagggtgaccaggagacagccgtctttgccgttttagttcctgcagggcagggctggctaatcttcactgggcctaagcctggccagctaggatttgttctgctctgattggttggtgcgagggtctcctctgattggtcaccgttccttagcaattgcttagtagtttgtttttctctcttgtggtttgatctgtgttgaaggccaggttcccagctgagaggtgactgggtcatgaggtccctgacctaactgaagcattgatccaaggctggcgtcgtgactctgtggaccacaggggaacagtggagagtatggcaggagctgggggctgtgggaggttggaagaagtcattggcggaatgtcttcaaagatgctccttatcggtggcctctttcccctctttgcttcctggctgccatgaggaacagtttcccaccatgcccttctgccatgaggaacagtttcccaccataccctcctgccgctgtgtgccatgcctcaaccctgaaacaacacagccagccacccacggactgtgtcagtcttcccttatgttttctcaaatatttgtcacagcaaggaaagtctgcataacacagtcccttcccctgatcttaaatatacccacactcccaaaatggactcacgttggctaaagaacggcagtggggagctgaaaaccttccctgtgtaatctgcttgcagacagttctaaatgccttaatgcccctggtaagccagcatagcagctggcttatccccccccccccctcggcctttgtcatttgggatggctggaagtcctaggggaagcgtctaatcactgtagcctggctgatagccggcactgagctccgtagtctccaccttagcaaccttacccttcacttcggcagatagtaccatagggtgtctggtcactgtctgtccatgggttcatccatccacaaacataatatcattcccgtgtttgggctgaagcatgtaaaatgttgacggagtctgagattgagattgtctgttcttaggggctcaaaatggtggaaatggtggggggacagcaggccccctgacatacaagtcgatgcagaggcagttcaaagcaggagatagtctgtaaggactctgccaagtggagagccccaggtagccttcccagagccacctgcacagtcccggagcaagaggggacttcagggaggatgctggaagacagcccaagcactgcaagtcaggtctctcatgggtggctttctgcttggcttattttggttttggaacacacaactgtttaattaatatccactcctggatctctccaaagactggggatcagagagtaaattgagaacgcagtggttaggagagctgtccctggtgtggtcacctagctgtagaaggtgacaggtacaggtgtggagcccttgaggaggccaggcagatgttgggagccaagccagagtgatgcaacttgtgcaggcccaggctggttaggaaggagagcagacctggaagtcacatctggagagttagtccttggcattcatttgcgctggaccttcaggcctcgccacgggtggaacacccagggggacatttattgcctgggtaagtcagaggtgactgatttcactgagtgttagcctatagctagcagcagaaaactgtggaattgggtagagagccatgtgtttgggagaagttaacattgaatgtgtatacagggtttcagtttttacaatgtgggggtatttctgaatggctctagagtaacaatatgaatggactcaatactactccactgtgtaacttagttagttacaggcaaatttaatgtttttttttcccaaagataaaagagagaaaatatataaactagcagccgagaatgaaggttccagagggggaacgggttgcctacaagaaaaactgcttttgagcccaaacggccctgcttttcagcaactctactggttgctaatattttgctttgttttttgccaccatgaacctctttggcaaaactgagatagtgagtcctacctccacactgtggtctagttgaaaacagttaccttgtccagacacagatccaggcacacactgggctctaagtcagaggttctcaacctgtggcttgtgacccctttggcaaacctctatctccaaatatacattatgattcataacggtagaaaaattacagttatgaagtagtaacaaaaagtgttatgattgaaggtcaccacaacattaggaactgtgttgtactagaaaggttacaaacccctggcctaaataaagagagattagtatgtctgtagaaggtctgtctgggtttgttctgcctgaatgcccacatctccatcaggaacttttgtggggttggtttgtgtcgcttgtttttgtcgttgttgttgttgttgctatcttgtttcattttttgatagggtttcacgttgcccaggctggcctcaactaggatgtagccaaggatggccttgagtttctgatcttctaccacctgagccctgggattacgaagcctgacccctgtggggagggaacccagagccttgtgtgtcataggcaaggattctcccaggggagcctcagcatcagacctatctcttccttggcaaacagaggcacaaatattacaaggttgttaccttcctgaattacctaatgaaaccctatctcagagagagagagagagagagagagagagagagagagagagaagagagcactactgtcccctcccgtgtctattggttacattattatccatcccagcctctagtttatataaatggttggctgtgtttctaagagtgtgctgtgagaatccgtccaagtctcctgattggattggccctctgcagagtgcacagaaaggcgggggtgcatctgggcaacaagaggctcccacctgctttccagaagcaatacccggcccctttaaagtgtgcttagtgcctagcctttgtttcatattctgcattctaaggagactaaagccctcagagtgaagggctcctttgtggggtgctttcaaatttaaatgttcatttattgggtaaaaatggactggccagtcttttgagagtgcaaggctttttagagggaactaaagctgtatggagtctggagcactcgctggatgtctgggaagggtctggaactaacacaggtaggcctgggccgctccgtccgctcttctaagacaaacgagaaagggcatggattactttcttctccttttctgttttgcgttctgtggtgcagcctgctggcctcaaactcaccatcccccaccttagcctcccaaatcctgaccttacagattttgccaccacaatcactttctttccgtgttttcgtgatggactcaggtctgacacttggacagacgctgttagagtttagtctgcgttagtacgtgttgcggttggctagcggtcctgtttaccatggctgagatctcaggcaagacttaacttgtcttggcgaccacacaggcagagagaaagcgctatgagcttcaggcattcatcgtatgctattacgattcattcactcgtggtggctgcagagatggctccgtggttaaacgcttgctactttatcatgagaaccagagcctggatcccagcagccatatcacatcaggtggcttatagatgcctgtaactccggccctgcagctgtcctgtgtgtctctggcctctaagggcattcatgcacatacacgtgaacagaaacacgtgcataaataaacgtaaaacaaacctctgaccctaagagtaacgttcttaccatacaagctcctgtttttgagcattaaagtttgtttggttttggtgccaagaattgaacatggggtttcccaaagccagaacacactgccagtgggctgtatccccagcccccttttcttaatggtgtctgttatatccttggatacatgaaaggcattgagatatgagcatgtatatgaacgcgagtgtgtatgtgcatacgtgtgtgtgtgtgtgtgtgtttgtgtgtgtgtgtgtttgtgtatccaaacataggagcttgtatggtaaaaacattactctcagggtcagaatgggtcagaaacgtattttatttttatttatgtttatatatttacgtgtgtgtgtgtgtgtgtgtgtgtgtatcacagtactaactaatctattttttcacacttcctgccacctgaccccctaggatggcgtgctcaccattaagctgggcggggatctagggacctacgtgatcaacaagcagaccccaaacaagcaaatctggctgtcttctccttccaggtatgttcagaagtcaaaatccataaggggtaaactcatctggaatgcggtgttggggaccgtttgagagggagtcagtcactggctttgccgtgactttacggctgtctgcctcggcagggaggctggcttgtagttgaacccttctcctcattgatacccgggttgctatgcaactcaggcatcaggatgttgacaagacctgaagcagaaggaactgttcagagcctggcccagactggttttctccagtatatcattccccagaagagaaaaaccactggcttgcctttgaaaatgatacttttgccagacacagtcttaacatagctatagtcccagcactcaagaagtagaggcaagaattcaaggcctgccttggctacatagccagttcaaaggctagtctgagctatcatgtaagaccctatagcaaaagcaaataagcaaatctggtccatatagtgcgttccaggatagccagggctatccataagccacttttgttaggtacagtggcacatacctgcgattaaaaataataatcattcattcattcattcattcattaaaaagctactttgagggaactagagagatggctcagtttgctctagaaatcctgagttcatttcccagcagctacttagtggctcacaaccatctctgatgggatctgatgccctcttctggtctgtctgaagagagcgatagtgtactcacatacatacaataaataaatagatctttaaaaaaaaaaaaagctactttgaaggctgagggcatatctcagtgggagagtgcttatccagtaatctataagccctggattcagtttccaaaatggaaaggtaggaaggagaaagagggaggaattttttatattgtagtatctgagaaaacttgcactttgtcctcaaagtaagttaaactttaactcctggcctactttgaaggtctctgtaactctgctggcagagctgggctctgactctgtcacaacgggacgggacggtgatttttatcagcagccccagggcccccagcctcatgcctgcctgccccgtggcaatgcctgcagttgaaggagcagcaggatgcactgcagtcagaccctgtctcagaactaaggacttactgataagtatacagctgctgcctcagtggtctgggaacagcctagcgatgcccacagggagccttcacactaacctccctgaggctcaacagcagtactgaaggagacattttgaaggagccgtgggaaatctcagctagaagcagtgtggaattctttggaagcctaatggtattggcagtttttaaaaggtgccaaggtgtggctcagtggcaaagaacttgcctagcatgtgagagaaggccctgggttggaataccaccacaacaaacacacagcaaacaaaatggttaccactcaggctggagagatggcttaagagcccttctgctccagcacaagggctagagttcaaatcctggcatccgtgtcagggtagtcacttacaagaaactccaaggaaactctttttaaacccgtaattggagctggagagatggctcagtggttaagagcactcaccaactcctcttccagaggacccaggttcaattcccagcacccacatagcacctcacaactatctgtaattccaggtccaggagatctgacaccctcacacagataaatatgcaaacaaaacaccaatgcatataaaacaaatacatttaaaacctgtaattttaggtgctagagagatggctgagtggttaagagcgctgactgcacttccaaaggtcctgaggtcaatccccagcaaccacatggtggcccacgaccatctataaagggatctgatgccctcctctggtctgcaggtatacttgcagacagagcactcatatatcaaaacaacataaaagcagttaatttaaaaaccagattatctgttttaaaaactaatgtatatgagaggcttgggggggcgtctcataagtaaccccgcttcatcacaattacgtcataaagggggacgggcctttatatgtctgtgggtgtggatatggatgtggttgagtgtccatacctacagtagccagcagagggagccagatcttctggagctgtagtcacaagcagttgtaagcagcccagggtagtgaaagacatcaaaccagtcctgcggaagagcagcaagcgtccttaaccactgagccctctctccatcaccccggaagtaatatcatatttatccagactgtctttcacagggccatgattataacttcttatttcagaagaaaacctttgaggtcctgtggagacagaatttcctggcccccttgccatagaatgtgggggacgcctgggccccagaatctgggcgcagaaccctggacaatgtggaggggtcttgagttgttccaactctacctgagagcagggctgtggtgcaggatcaaagaacattctttggtttctcctggttttgttttgctttcatgtgaccggggtactttgtgttcagagaggtttctgctcttgtaacggaagccctgcctgtccatttgcccttttctctgtatgtccagcatttgattggcagtattaaaagccctcgtgtatctatacctacacaagatacttcccatctcttccctctaccctgccttcccaccacacctcagtctcctcatggttttgtgatgctggagatctaacaatgcggtcaccacgctgggaccgctcaagcactgtgctgctaagctgtgtccccactcttctagtgtggggttcttcgaaagttccctcgagtgttctcagtggtgaactctcagggttcattgtctgttactgtgtccactgttctccaggccatgaggagctagaacgtgagacaagggtcttatacatctggaataacaaatcatggccaacaccagctaccgatttgtccgcagtaccgtgtattagtcagcttcacatcgctaccctgaatacctgagacaagttaccgataaaagggaaaggtttctttatctcgtggttttcaaggttcagggtccaagactgaggaatgcaagggacggctactttagcctcttatacaatggtgtaccctgatgggagaatgtgtaggaacaatgtcccatcttaggatgggaagcagagaaagatcagacaggtcccccatttccttttgtggacacatcgcaatgaccccaggaagtcactcctcttaaaggtagcaaaaggaggtagtataaaaccgcatcccaaatgctttctcctctcacctgaagagtggggtagatgcagcaacagaacgggaaggaaggggacacactgatagagctctcaatttcacagctttaattttcaataaagaaaactacttttagctagaaattatggagcaagccagtaatcccaacacttgagcgataaaggcaagaaaatcaagagttcagggttatccttggctatagaaggaattggaggctagctgaggctatgggagaccctgtcgaaagaagaaagttttgttttgttggttttttgaggcagggtcttaacttgtgtgctggctggttttgtgtgtcaacttgacacaggctggagttatcacagagaaaggagccttccttgaggaaatgcctccatgagatccagctgtgaggcattttctcaattagtgatcaagggggaagggcctagcccattgtggttggtgccatccctgggatggtagtcttgggttctgtaagagagcaggctgagcaaaccaggggaagcaagccagtaaagaacatccctccatggcctctgcatcagcttctgcttcctgacctgcttgagttccagtcctgacttcctttggtgatgaacagcagtatggaagtgtaagctgaataaaccctttcctccccaacttgctttttggtcatgatgtttgtgcaggaatacaaaccctcactaagacaccttggatccctggctggcttggaatttgctggagagaccaagccagcttctgtccactaatcgctggaattaaaggcctgtaccaccatgcccagcaaagtttttaataatagcacaggtggtagccaaggctggaagaggcaaggtagctgattagtaggtattagggcttctttcagggtaataggggtgtttcggatgtagacagagttagtggcgacacagtagtgtaggttgggcattgatcagcacatccgtggtacaaaattagcatcacttcccaaacctggctgtaagatagcatctgtcctaggaaaaaaagcgatggaatgaatgtgctgcagagagtttcacgggggcggggctgtggagtgttccagaggacagactgcacagtcagtcgccctcaggaaggtgctgaggaaagcaaaggctcgcctcactgcgtgtcacgcaaagccgcacttggtctctgggtaccggcagctctggattccgttagctcttcactgaaaggaggaggcatttgtttttggttcacggtgtcagagactttagttgccgttgcctttgggcctacagtgagacagaccatggccagggagatttgatggagggaaacaggacggactccccatcgcccatccaaggcacactgccagtgacctaacacaccacgtctaggccttaccagatcaagttcccaccccctgcagtagggtcatgagctagatcgtgagcttctaaccacagctgccgtgggacttttaagattcagtccagccaaatgtggttgctgataatcccagcacttaggctgaaacagaagagtgctacaaattgaagggtagccttggctacacaagtgaggtccaggctacctgtccggggatacagataggaatctatcttcaaagacagatcgataagctgggcagtggtggccatacgcttttagttccagcactcaagaggcagagacaggtggaactctgagttcaagaccgcctagtctacagatacagttcaaagacagccagagctacacagggaaatcctatcttgaaaaacaacacaaaagtagatagatagataaatagatagatggatggatagatagatagatgcatgtatgcatgcatacatacatacatactcacacacacagattgatttagtccaaacacagtggctctcctgaagaggatcctcactaacttaccatgaatttgttttgtctcgcagcggccccaagcgctatgactggaccgggaagaactgggtgtactctcatgacggcgtgtctctgcatgagctgctggccagggagctgactaaagctttaaacaccaaactggacttgtcttcattggcctattctggaaaaggcacttgactgccagccagattccaagacattaaacactgtcaggtgaagacccccagcctcctcctgtagctgaatgtctgccttcccatacctgctcctgaagatagtcacaccgtgtgtgacagctctgtgaaaaaagtgtgttccctcccaccctgtccccggacctggctcttcatttctacagacatttgttaggattatgtcatttgctccccaacctgagacctctggtctcttagaaagtcttatatgctgggcagtggtggcgcacgcctttaatcccagcactcgggaggcagaggcaggcggatttctgagttcgaggccagcctggtctacagagtgagttccaggacagccaggactacacagagaaaccctgtctcgaaaaaaaaaaaaaaaaaagaaagaaagaaagtcttacaccacaagtgtgtccatgatataacagcctcaaaatgtcttacactgtgtgtgctaataacctacaccatgtgtgctaataacctcctgaaaaggaaaaaggctcagagggagacatgagtcgttcccactcttccattgtctctgaaaagatactctaaaagtaacttctaaatgtacccaagactccaagtatgtacacttctgagtcctgagcagcaaagagtcaaaagaaaccatcttaaaatgccctttcgtgctttgtcacctacactcggtacccaggacctggtgctattaactctgtgccttcatagtgggggtcatttacacagttggcagctacgacatggacctgagatgtctgaaaattttgaaaattgagctgggcatggtggggcatgcctttaatcccagcaatcaggtggcagaggcatgcagatatctcggtgagtttgaggccagcctggtctataaatccaggagagtcaggccaattacacagagaaaccctgtctaaggaaaatacgaagaaaatttgagctggagagatcacttagtccacacaagcatgaagactcaagtttgatcctaggcgtccacgtttaaagcccaggcatattcttcactcggaaagtggagatgaggggcttgcagcctcagcagtaagcctggggtctctgagaaacactatttcaaagaaggaaacttgcctggcttcagttgacctgtcctacacatatgtgcacatgcactagtatagacataaacatgcacacaaattcacacatgttaaataaatgcagaaataactacaggcaaggaggacagacaaaaatccctaccataaaccaaagaactaaacagtgtcatggagccgaggtctcggttatccatgagagagatgtctgtactggtacagagagcccggcccttcatttccaatctactcagggagagggtagaatatagctgatacctgacatccagtggagtggacctatcaggccatccacaaagctctccttgttcccactgggtaggtggaagaaatggtattgttcttgctactgctctgttagaatttcagatgaattcctagggagctagcagctgccccttgctctctctgctgaatccggagcaccattgccctgccttaagtgtgacaggctgcgctttgtactggaagcaacacagctccagaacacccacacggagcaactctaaactcgggtttgtttcgggttcagttcgtttctaactgaaggaaaattgagagcagggactctagcccagtgtgaaggcttgcctagcatgcagaagggccctaaagttccatccccacactacaaagggctgagagatttgtcagtgacaactcttatgcaaatgcccagcagaggctatgcagggtgaactgaacacattacatcatagacaaaacaatggaacagtgtaaacaggctaagtgactatttaagatatttccttcttcacaattttttttttagtctggtggaaatttttgagtggtgtaagtcggtgctagagagataataaataggaccatgtgtggacatgcctatgggtgtccctttgtcttcttatgaaagacacacacacaccccacaccccgcttgacccttatcagaccttcagaatgtgcacagggcgcgttctgaatgtgtatggacgttagggagtcagatgttatgggctcctcctggaccagtttttggacttcttaactttcactttatgtatttctctgactgggtttcaaggcagcctcgatcacacttaagagagagtatgaacactgtgttgtgtgagtcaagtcattctgaactccaggcatggggatgctcttctgtagtcctggcactttgaactccaaggctcaaaggtaaaagaaggatggaagtttggacttgagattttgtttggtcattgtttttgtgacattgatatgtagcccagactgacttggaatttaaaataagtctcctgcctttgtctcaaagtgctaggactacaggtgtgccaccatgcctgatgagttaaaattgtgatatacaactgcctaggttttccgatgcacagttcaagataccactatccaaagacgacagtaactgtgatggggtataaatggtgccacccaccaagaactgctcagactgaactgcagagataggagcatcgaaaattcaagcctgagccacataacaagaccctgtgtgactcatatcctagccaggcatggtagcgcacatctttaatcccagcactcagaggcagagacaggatgatctcatgagtttgaagtcagcctcgtctaagtagtgggttctaggccagccacacaaaagataaactcatattctggaagcaagctgaaaataaaccccacaccatgagccacaacacaagcctaagacccgggagtgtttcctcattccgtagtctagtcaccacagacaacattgtagctacattgctacatgttcggtctataaacactagaaagctattttgttgttattctagatttgttttctctggtgctggggattggactcagggccttagcatgctcactgaatgttttgtcgttgaactatgttcctagcttctgtgtgtgtgtgtgtgtgtgtgtgtgtgtgtgtgtgcacgtgcacatgtgttagagctaagtctaataagtttgatattttcattaaatagtcactttgtaataagccttctcacattgcacctgccccaatttaaacccattaaccacctctaaagaaaaaacaatgtctgtaagggtgaactttgtggggatccagggttgccaagggaactcactaccttccatcctgtaaggccaaagcaacaggaaatcatatcccattgaattcttggcacaggcttatcttttacaaactgaagcggctgtgtgccacacagagaggaagacggcccaacgctctgaagcttcttataaatatagacgactttttgactggggattaagttccgttggtagaatactcttgcctaatgtggacaaagttctgagttcaactccccagcactacataagtggcctggttgcccatgcctggaatcccatcccttgtgggggttacggcaggaaaatcagaaatttaagaatatagcaagttgaaggtcagcttggaatatgcacatgagagcctgtctcccactgttcaaaagaactttgactgtgtgtacatgagacattccttggagggcctggagagatggcaatgttggtaaagtgactgccacaaaagcttgaggacctaagctcagactcctagcacttggttgctagggcatggcacacccttgtcacctcagagcagacgtcatcgtgagacaggtaactctcgagttccctggccatgcgccacagattcagaaggacacccatcattctgtcaggagcctctcacctccacacgtgcacacataaataagtgtcatgtatccttggcttgtgtagtagaaccaatccaagcttatccccaactacgttacaaatatataagacttatactatggttattttatttggctttgacaattacgggagtaacccctaatctactcttcttttttttaaatattttttattacatattttcctcaattacatttccaatgctatcccaaaagtcccccataccctcccccccacttccctacccacccattcccatttttttggccctggcgttcccctgtactggggcatatacagtttgcgtgtccaatgggcctctctttccagtgatggccgactaggccatcttttgatacatatgcagctagagtcaagagctccggggtactggttagttcataatgttgttccacctatagggttgcagatctctttagctccttgggtactttctctagctcctacattgggagccctgtgatccatccaacagctgactatgagcatccacttctgtgtttgctaggccccggcatagtctcacaagagacagctacatctgggtcctttcgataaaatcttgctagtgtatgcaatggtgtcagcgtttggaaactgattatggggtggatccctggatatggcagtctctagatggttcatcctttcgtctcagctccaaactttgtctctgtaactccttccatgggtgttttgctcccaaatctaaggaggggcatagtgtccacacttcagtcttcattcttcttgagtttcatgtgtttagcaaattgtatcttatatcttgggtatcctaggttttgggctaatatccacttatcagtgagtacatattgtgtgagttcctttgtgaatatgttacctcactcaggatgatgccctccaggtccatccatttggctaggaatttcataaattcattctttttaatagctgagtagtactccattgtgtagatgtaccacattttctgtatccattcctctgttgaggggcatctgggttctttccagcttctggctattataaataaggctgctatgaacatagtagctggtctgactacctcgccagcagtgtacatcagataacttgtttctcctggccccagtgctcatggtccatctcccctcatgacagcttcctcctctctttgttgtccttccggatcctggtctctcctcgctcctctgtcttccccaaccccaaccaagtcactcaaaacctacctacctccaatccctccagcaattgcctgcagccaattttatttaaccaatgagtttttgtttgtttgtttgtttgtttgttgttgttgttttgggacagggtttctctgtgtagccctggctgtcctggaactcactttgtagaccaggcaggctggcctcgaataaccaatggttttaaatcaaggaacaaggtttgcacaacaaaatcctgtaaaggagagaattcactcctatcctagacctttgggtacagaatttagcattataatacatagcaacagaccaaacctcaacaggtttgacttaactagtgatggtactggagtagacactgaggccttgattaagggcatggaatgtgtacaggtacttacattatttttgatattgtttttcttcattcccaggaacttaatttagggtgtcacacattctaggtaaacctacctctgagctatactttcagtccagcctgcatctgctaaagacaaaatgtaaaacccaatgtcccatctcccctgatcgtgttgatgaagaaatagaatgtacacgaataggtttattgaactgtttattagaatgttgagaaaaacacccatacccactggcgacattgcctcccaaggactccttcctatctaagagaagagtcaggcataggaggccactgtaagcacaaaacttagtttacaccaggcctttgcagaccactggagtctctatgctctgccttggcatttggaagcccacttgatgttgttactgtttatctctttcaaaagaatgtgtttgaagctggacagtggtgattcctgcctttaatcccagagctcaggagacaggtaggcagatctcttgagttccaggccaccctggtctacagagtgagtttcaggatagccaaggctacacagagaaaccctgtcttgaaaaaaaaaaattcatttgtgggactgcagcaatggcttggtggttaagggtgcttggtgctgtgacagaggaccagggtcttcaattcccagcacccgtgtatagcaactctcaactgcctgtaactttagctccaggggatcagatgtcttctggcatctgcaagtacccccatatatgtagcagtgttgtgtgacaatttttttttaaggagatgcaaccctagatatggaactcatggcagaccaaagtccaaataccgccaaagtccaacttggtgaaccaatggattttattggggttacttcaggaatatggggttattatgagaacagaaatggctcaaagacagttgcatcaccaaggcccactgtagcatgggtgacagctcacaaaagctgagaaacccagatcatgctgcagagcctgcaggcagctctaaaggttagagaatgtcctttccaagagactccggtctcttccaggaagctcagctgttcctcccaagtagctggtctggtctcagagtcttctttgcatcttatctgagagagattctcagcttttattgcttactctggcaaggaggggcctagtgaatctgctcagtttccggaacttctagaggcttttctgagttttttgccttcctgtttaagacctttcttatatagtggaatgttttaatctcagaggaaactgttatacaacaggtatacattcatacacacacacacacaatatatatatatatatattcaccactcattagacagaggcaggtggatatcttgagttttgaagctagcttagtctatgtatcaagtcagaacaaccaaggctacatagtatgaccctgtctcaaaaaaacaaacaaacaaacaaacaaaaaaagacaggtggaagagtggctcagcagttcctagcaccatgtgataactcataaacctgtcactccagttcttgtgatatgactccctcttttggcaccaggcatgaacacaagcacactggcatgtgcacacacacaccacacagacacatacatacacacaaaaaaagcaaaacactgatacacataaacttctgaaaagaaacatagtatttgttacagagtcgcttgactccatcttgagctgaacatggaatttctgtgtccaaaaggattttgttcacttatttttacaaatgttaaagtgttcaaaatacaatatttatttatttattgtttatttatttatttattattagaatttggcatatctagaaaaggctagaggaagtcagaaccattcactgtgtaaaaccagggaagaaatcaacaattccaaattcttcattaggtcagggtcctgagttgagatcacatctgctacaggtgttttaagtcagaactgctgtgttttgtaactaaggagcccaaacctagacttgattagtgaagacttacaggtgtgtatgagtaacagcgttctagcagccaattggctgattctagcatgcgtgctatttggcttgtaaaaattttataaatatttcttaaatccagcctcctggttctcggaaatcagttgccttcatctgattccaagacctgtttgaacaaataaacaccttctatttccccttacaagatcacacacttaagtgtcagctgcctgtggatagatgcagagaaagcaggtcctgctgtgagtttaaaaaccagctggtaaggtgtgtctttgagctaagaaaggcccacaccgccacccccacggagcccttaagtaaccatcgcccagcagctgctaatgagggccctctttattcatcagctttcaagacagcttttcccaggggcagtttgcccattgagcgtgcctctccagtgctttaggggtaggtaaaacagggtttcccttggaggacagagtcagacacacagtaccagacccagtgacagaagttccagggtcccccaccagccaagggggaagtgagaaacagccaccgaattccttccgggagaatttgaaagtctctggatgacctaagcactttcccttctcccaacccccagggccagctcaagcggccaaacttaagactagagctctataatgccaacgtcatttgcttaaataaatcctaagaggaaagagagaccctaaaacctctaaggttaaaaaaacaagtaagcagggggctggagagatggctcagtggttaagagcactgactgctcttcccaaggtcctgagttcaaatctcggcaaccacttgttggttcacaaccatttgtaatgagatcagatgccatacttctggtgtgtctaaaaacagctgcagtgtactcatataataagtacatcttttaaaaaaaaaaaaaaagcaaataagtttagatttagaattatagtttgttttatagcccagactgagtttaaaacaatcctcctgcctctgcctcccaaatgcttggattgccggtgagccaccatgcttagcaagagttaacattgtgatgcagagctgcccagactttgcattgcacaattcaggatgccaattttcagacacgacagtaactatgatgatgccaccagaccctgcataggccatctaaagtatgtccacctcatcctgctagaccttgacttgccagtccactcacaatccatcgggttccacaaaaaacaccctccggtctgcctcagccagtaacttgctgatcaggcacccctgttaaacatcctgagtgcttaggccagagaaggctggctccaccctctccctccattcttgcactacacagtggagaggtggctcagtggttaggagtactcattattgcttctgcagattttgtggtaaatagtattgggggcttctagcccaccttagatcatttagttcccaaaataaaagacacaaaacctttctatttataataagccttaaagcactaaagctgggcagatatcaaccctctatgttattttgtctactctcccatcaataatcctgagataccagttgccacattttgtctgggctgctcctactctaactggctggccctcgtggccatgtgctcaccatccacctaccccatgcgcctcctttcttcttccctatttgtctatgctgtagaccccaaatctgaggacccaaagcccccacctacctcttttctgcccagctacaggttgtaggcacctttattcaaccaatagttttaaattaaggagtaaggtttgcacaacaaaagctggtatacatgagcattcattcctcttgaggcaactaaaccttaggatacagaatttagcaatgcagtacatagtaacagagcaatagctgaggacctgggtttggttcccagcatccacatggtggctcaaaaacatctgtaggtccagttccagaggatctgacactcgtttctgacctcctcaggcaccaggcatttatgatgcgcataaaaatgttcaagcaaaacattcatagataattcatacatatagaataaaagtaaaaaaaaaaaaatttttgcaggatacaccaaaaggtagaaaacgacccaagtcggaaggaatgctgtttaaatatacaaacaaagccctgagccacaggaggaacagagaaaaggctacgccctgagcagcagggcaggagagcttagagacgacagaaccattccattcccatctggaggagaatcaagaccttttctttcttcctgctcagagagggggcggaggagggtaattatttcttggatccagtggagtggctatctgccttcagaggaagtggaaggctgcagaagaggaaagaaaagggggtctattaatagccctggctgtgtccgaagcacagggatctacagagctggagggaagggaagcctgagcaagcagtcacttccattgctgtgcctggtggcaaggctttgacaggaagaaggaaggaatcccaagggaggcttggaaaagggggagaccccccctacatagctacagtcccccccaaaaaaacgcattcttcactagggtcagttagaagcggtgagaagtcgtttaatgtaaacaataagccaggtgtgctgttgcaaagcagtaatgctagcacttggcaaataggaggatcaccacctgaagcagaaggcagtagcgtgaagcagggggattaccaggagtgtaggtgcatagtgacttccaggacagtttgggttacagattgagattctgcctcaaacgataaaagagcagatcttggtggtgttggcctgaatcctagtgttttggagatgaaagcaggggggtgaaaagttctgggaactgaaaatacccctcctcctcggtggtcaagggtgcttgatgctcttccagcggatcagactttcttcccagcacccactttgtgcagctcacagccactgctgactgcaacccctggacatccaatagcctcttcttgtcgcggtaggcatccaggaacatgtagcatacatacacagccacacacagagacatgtaaattaaaattaaaatctggggctggagagatggctcagtaaccactgagcaccgcctgctcttccagaggtcctgagttcaattcccagcaaccacgtggtggctcacaaccacctgtaatgggatccaatcccctcttctggtgtgtttgtagacagcgacagtgtattcaaatacatcaaataaatacaccttttaaaaaaaattaaaatcttggaaaaaaaagtttgcaagaccagttttagcaacatacggggatttgagcccagcctggatgccataaaaccctgtctcaaaaaactacaataggaaggaagaggggtggttagtggttggttagaccaaaattaaagatgcataaaactcttcatgaaaaccagttattttgcttattgaagatagttttggttttttttttcatattatatattctgattatggtttcccctcccccaactcctcccagatcctccccacctctccacccacccaaatctatacccttttgttagcattccttctaggatccaccccacagttacctggcaacagccaggtatgcctgactcactacaaaaggggctgcttgccccctcctcactctcttatccatttatcctcttattctctgccccttctccctctttcctcatccccctcctccacgtttctgctctctctctctctctctctcttccctcctctctgtcccttctttccccatacccccattcccctcctccctctctctccacttgtctatgcccgcctcttctctctctctctctctctctctctctctctctctctctctctctctctctctgcctttctctgtctctactccctcctcaactcccctcccctcccctaaataaactcaattccatactatatggctgatccctcagggggaagggatgcctcaacatggacccgcaaaggcaccccccttccacctcactatacctcacctctacaaaacatatactgcctctcttcttttttttataaaacacaacacttttcttgcttactctctttaaaaaacaaacagaggcctgacaatgatggcacatgcttgaaatcccagcacttgggaggcagaggcaggtggatttctgatttccaggccagcctggtctacagagtgagttctaggacatcctgggctacacagagaaaccctgtcttgaaaatatacacacacaccaccaccaccacaacaataaccaaccaactaaagccatgcatcttaaacaatattttaaaaaattaaaataaaaaataaaaggatcaaagaaataaaacaccagagatacatatcatgtatagacacagagacacacactcatttacacacacagaaatcccatgaagacacaaaactagaaaccatgatacagcagggaaacaaaacaaaacaaaacaatggccagacaaagcattataagacaaaaatccctgcagaaatatatacaattaaacatggccatctactgttgggcgtggggcctgtccttaactgtggaaaactaattaattactttaaaatctaatttaaaaatatttttttaaagagggcgcagttttgtggggagccaaggaagccctgagtgagtgtttagtgtctgacatgggcatgcccttgggaaatcagcaaagccttcccgcttggtcagactgggaaaggtgaaaccttctagcaactgcaggctcctcctcctgggagtttaaaacctgtggctgctcacttacagacacccccaaactacctaactcctctcactgtcctgtacaatacaaatgcaccgagcagctgagtggtctgcatcacccatta

SEQ ID NO: 4 - DNA, 43134 bp, Mus musculus
taatgggtgatgcagaccactcagctgctcggtgcatttgtattgtacaggacagtgagaggagttaggtagtttgggggtgtctgtaagtgagcagccacaggttttaaactcccaggaggaggagcctgcagttgctagaaggtttcacctttcccagtctgaccaagcgggaaggctttgctgatttcccaagggcatgcccatgtcagacactaaacactcactcagggcttccttggctccccacaaaactgcgccctctttaaaaaaatatttttaaattagattttaaagtaattaattagttttccacagttaaggacaggccccacgcccaacagtagatggccatgtttaattgtatatatttctgcagggatttttgtcttataatgctttgtctggccattgttttgttttgttttgtttccctgctgtatcatggtttctagttttgtgtcttcatgggatttctgtgtgtgtaaatgagtgtgtgtctctgtgtctatacatgatatgtatctctggtgttttatttctttgatccttttattttttattttaattttttaaaatattgtttaagatgcatggctttagttggttggttattgttgtggtggtggtggtgtgtgtgtatattttcaagacagggtttctctgtgtagcccaggatgtcctagaactcactctgtagaccaggctggcctggaaatcagaaatccacctgcctctgcctcccaagtgctgggatttcaagcatgtgccatcattgtcaggcctctgtttgttttttaaagagagtaagcaagaaaagtgttgtgttttataaaaaaaagaagagaggcagtatatgttttgtagaggtgaggtatagtgaggtggaaggggggtgcctttgcgggtccatgttgaggcatcccttccccctgagggatcagccatatagtatggaattgagtttatttaggggaggggaggggagttgaggagggagtagagacagagaaaggcagagagagagagagagagagagagagagagagagagagagagagagagagagaagaggcgggcatagacaagtggagagagagggaggaggggaatgggggtatggggaaagaagggacagagaggagggaagagagagagagagagagagagcagaaacgtggaggagggggatgaggaaagagggagaaggggcagagaataagaggataaatggataagagagtgaggagggggcaagcagccccttttgtagtgagtcaggcatacctggctgttgccaggtaactgtggggtggatcctagaaggaatgctaacaaaagggtatagatttgggtgggtggagaggtggggaggatctgggaggagttgggggaggggaaaccataatcagaatatataatatgaaaaaaaaaaccaaaactatcttcaataagcaaaataactggttttcatgaagagttttatgcatctttaattttggtctaaccaaccactaaccacccctcttccttcctattgtagttttttgagacagggttttatggcatccaggctgggctcaaatccccgtatgttgctaaaactggtcttgcaaacttttttttccaagattttaattttttttaaaaggtgtatttatttgatgtatttgaatacactgtcgctgtctacaaacacaccagaagaggggattggatcccattacaggtggttgtgagccaccacgtggttgctgggaattgaactcaggacctctggaagagcaggcggtgctcagtggttactgagccatctctccagccccagattttaattttaatttacatgtctctgtgtgtggctgtgtatgtatgctacatgttcctggatgcctaccgcgacaagaagaggctattggatgtccaggggttgcagtcagcagtggctgtgagctgcacaaagtgggtgctgggaagaaagtctgatccgctggaagagcatcaagcacccttgaccaccgaggaggaggggtattttcagttcccagaacttttcacccccctgctttcatctccaaaacactaggattcaggccaacaccaccaagatctgctcttttatcgtttgaggcagaatctcaatctgtaacccaaactgtcctggaagtcactatgcacctacactcctggtaatccccctgcttcacgctactgccttctgcttcaggtggtgatcctcctatttgccaagtgctagcattactgctttgcaacagcacacctggcttattgtttacattaaacgacttctcaccgcttctaactgaccctagtgaagaatgcgtttttttgggggggactgtagctatgtagggggggtctcccccttttccaagcctcccttgggattccttccttcttcctgtcaaagccttgccaccaggcacagcaatggaagtgactgcttgctcaggcttcccttccctccagctctgtagatccctgtgcttcggacacagccagggctattaatagacccccttttctttcctcttctgcagccttccacttcctctgaaggcagatagccactccactggatccaagaaataattaccctcctccgccccctctctgagcaggaagaaagaaaaggtcttgattctcctccagatgggaatggaatggttctgtcgtctctaagctctcctgccctgctgctcagggcgtagccttttctctgttcctcctgtggctcagggctttgtttgtatatttaaacagcattccttccgacttgggtcgttttctaccttttggtgtatcctgcaaaaatttttttttttttacttttattctatatgtatgaattatctatgaatgttttgcttgaacatttttatgcgcatcataaatgcctggtgcctgaggaggtcagaaacgagtgtcagatcctctggaactggacctacagatgtttttgagccaccatgtggatgctgggaaccaaacccaggtcctcagctattgctctgttactatgtactgcattgctaaattctgtatcctaaggtttagttgcctcaagaggaatgaatgctcatgtataccagcttttgttgtgcaaaccttactccttaatttaaaactattggttgaataaaggtgcctacaacctgtagctgggcagaaaagaggtaggtgggggctttgggtcctcagatttggggtctacagcatagacaaatagggaagaagaaaggaggcgcatggggtaggtggatggtgagcacatggccacgagggccagccagttagagtaggagcagcccagacaaaatgtggcaactggtatctcaggattattgatgggagagtagacaaaataacatagagggttgatatctgcccagctttagtgctttaaggcttattataaatagaaaggttttgtgtcttttattttgggaactaaatgatctaaggtgggctagaagcccccaatactatttaccacaaaatctgcagaagcaataatgagtactcctaaccactgagccacctctccactgtgtagtgcaagaatggagggagagggtggagccagccttctctggcctaagcactcaggatgtttaacaggggtgcctgatcagcaagttactggctgaggcagaccggagggtgttttttgtggaacccgatggattgtgagtggactggcaagtcaaggtctagcaggatgaggtggacatactttagatggcctatgcagggtctggtggcatcatcatagttactgtcgtgtctgaaaattggcatcctgaattgtgcaatgcaaagtctgggcagctctgcatcacaatgttaactcttgctaagcatggtggctcaccggcaatccaagcatttgggaggcagaggcaggaggattgttttaaactcagtctgggctataaaacaaactataattctaaatctaaacttatttgctttttttttttttttaaaagatgtacttattatatgagtacactgcagctgtttttagacacaccagaagtatggcatctgatctcattacaaatggttgtgaaccaacaagtggttgccgagatttgaactcaggaccttgggaagagcagtcagtgctcttaaccactgagccatctctccagccccctgcttacttgtttttttaaccttagaggttttagggtctctctttcctcttaggatttatttaagcaaatgacgttggcattatagagctctagtcttaagtttggccgcttgagctggccctgggggttgggagaagggaaagtgcttaggtcatccagagactttcaaattctcccggaaggaattcggtggctgtttctcacttcccccttggctggtgggggaccctggaacttctgtcactgggtctggtactgtgtgtctgactctgtcctccaagggaaaccctgttttacctacccctaaagcactggagaggcacgctcaatgggcaaactgcccctgggaaaagctgtcttgaaagctgatgaataaagagggccctcattagcagctgctgggcgatggttacttaagggctccgtgggggtggcggtgtgggcctttcttagctcaaagacacaccttaccagctggtttttaaactcacagcaggacctgctttctctgcatctatccacaggcagctgacacttaagtgtgtgatcttgtaaggggaaatagaaggtgtttatttgttcaaacaggtcttggaatcagatgaaggcaactgatttccgagaaccaggaggctggatttaagaaatatttataaaatttttacaagccaaatagcacgcatgctagaatcagccaattggctgctagaacgctgttactcatacacacctgtaagtcttcactaatcaagtctaggtttgggctccttagttacaaaacacagcagttctgacttaaaacacctgtagcagatgtgatctcaactcaggaccctgacctaatgaagaatttggaattgttgatttcttccctggttttacacagtgaatggttctgacttcctctagccttttctagatatgccaaattctaataataaataaataaataaacaataaataaataaatattgtattttgaacactttaacatttgtaaaaataagtgaacaaaatccttttggacacagaaattccatgttcagctcaagatggagtcaagcgactctgtaacaaatactatgtttcttttcagaagtttatgtgtatcagtgttttgctttttttgtgtgtatgtatgtgtctgtgtggtgtgtgtgtgcacatgccagtgtgcttgtgttcatgcctggtgccaaaagagggagtcatatcacaagaactggagtgacaggtttatgagttatcacatggtgctaggaactgctgagccactcttccacctgtctttttttgtttgtttgtttgtttgtttttttgagacagggtcatactatgtagccttggttgttctgacttgatacatagactaagctagcttcaaaactcaagatatccacctgcctctgtctaatgagtggtgaatatatatatatatatattgtgtgtgtgtgtgtatgaatgtatacctgttgtataacagtttcctctgagattaaaacattccactatataagaaaggtcttaaacaggaaggcaaaaaactcagaaaagcctctagaagttccggaaactgagcagattcactaggcccctccttgccagagtaagcaataaaagctgagaatctctctcagataagatgcaaagaagactctgagaccagaccagctacttgggaggaacagctgagcttcctggaagagaccggagtctcttggaaaggacattctctaacctttagagctgcctgcaggctctgcagcatgatctgggtttctcagcttttgtgagctgtcacccatgctacagtgggccttggtgatgcaactgtctttgagccatttctgttctcataataaccccatattcctgaagtaaccccaataaaatccattggttcaccaagttggactttggcggtatttggactttggtctgccatgagttccatatctagggttgcatctccttaaaaaaaaattgtcacacaacactgctacatatatgggggtacttgcagatgccagaagacatctgatcccctggagctaaagttacaggcagttgagagttgctatacacgggtgctgggaattgaagaccctggtcctctgtcacagcaccaagcacccttaaccaccaagccattgctgcagtcccacaaatgaatttttttttttcaagacagggtttctctgtgtagccttggctatcctgaaactcactctgtagaccagggtggcctggaactcaagagatctgcctacctgtctcctgagctctgggattaaaggcaggaatcaccactgtccagcttcaaacacattcttttgaaagagataaacagtaacaacatcaagtgggcttccaaatgccaaggcagagcatagagactccagtggtctgcaaaggcctggtgtaaactaagttttgtgcttacagtggcctcctatgcctgactcttctcttagataggaaggagtccttgggaggcaatgtcgccagtgggtatgggtgtttttctcaacattctaataaacagttcaataaacctattcgtgtacattctatttcttcatcaacacgatcaggggagatgggacattgggttttacattttgtctttagcagatgcaggctggactgaaagtatagctcagaggtaggtttacctagaatgtgtgacaccctaaattaagttcctgggaatgaagaaaaacaatatcaaaaataatgtaagtacctgtacacattccatgcccttaatcaaggcctcagtgtctactccagtaccatcactagttaagtcaaacctgttgaggtttggtctgttgctatgtattataatgctaaattctgtacccaaaggtctaggataggagtgaattctctcctttacaggattttgttgtgcaaaccttgttccttgatttaaaaccattggttattcgaggccagcctgcctggtctacaaagtgagttccaggacagccagggctacacagagaaaccctgtcccaaaacaacaacaacaaacaaacaaacaaacaaacaaaaactcattggttaaataaaattggctgcaggcaattgctggagggattggaggtaggtaggttttgagtgacttggttggggttggggaagacagaggagcgaggagagaccaggatccggaaggacaacaaagagaggaggaagctgtcatgaggggagatggaccatgagcactggggccaggagaaacaagttatctgatgtacactgctggcgaggtagtcagaccagctactatgttcatagcagccttatttataatagccagaagctggaaagaacccagatgcccctcaacagaggaatggatacagaaaatgtggtacatctacacaatggagtactactcagctattaaaaagaatgaatttatgaaattcctagccaaatggatggacctggagggcatcatcctgagtgaggtaacatattcacaaaggaactcacacaatatgtactcactgataagtggatattagcccaaaacctaggatacccaagatataagatacaatttgctaaacacatgaaactcaagaagaatgaagactgaagtgtggacactatgcccctccttagatttgggagcaaaacacccatggaaggagttacagagacaaagtttggagctgagacgaaaggatgaaccatctagagactgccatatccagggatccaccccataatcagtttccaaacgctgacaccattgcatacactagcaagattttatcgaaaggacccagatgtagctgtctcttgtgagactatgccggggcctagcaaacacagaagtggatgctcatagtcagctgttggatggatcacagggctcccaatgtaggagctagagaaagtacccaaggagctaaagagatctgcaaccctataggtggaacaacattatgaactaaccagtaccccggagctcttgactctagctgcatatgtatcaaaagatggcctagtcggccatcactggaaagagaggcccattggacacgcaaactgtatatgccccagtacaggggaacgccagggccaaaaaaatgggaatgggtgggtagggaagtgggggggagggtatgggggacttttgggatagcattggaaatgtaattgaggaaaatatgtaataaaaaatatttaaaaaaaagaagagtagattaggggttactcccgtaattgtcaaagccaaataaaataaccatagtataagtcttatatatttgtaacgtagttggggataagcttggattggttctactacacaagccaaggatacatgacacttatttatgtgtgcacgtgtggaggtgagaggctcctgacagaatgatgggtgtccttctgaatctgtggcgcatggccagggaactcgagagttacctgtctcacgatgacgtctgctctgaggtgacaagggtgtgccatgccctagcaaccaagtgctaggagtctgagcttaggtcctcaagcttttgtggcagtcactttaccaacattgccatctctccaggccctccaaggaatgtctcatgtacacacagtcaaagttcttttgaacagtgggagacaggctctcatgtgcatattccaagctgaccttcaacttgctatattcttaaatttctgattttcctgccgtaacccccacaagggatgggattccaggcatgggcaaccaggccacttatgtagtgctggggagttgaactcagaactttgtccacattaggcaagagtattctaccaacggaacttaatccccagtcaaaaagtcgtctatatttataagaagcttcagagcgttgggccgtcttcctctctgtgtggcacacagccgcttcagtttgtaaaagataagcctgtgccaagaattcaatgggatatgatttcctgttgctttggccttacaggatggaaggtagtgagttcccttggcaaccctggatccccacaaagttcacccttacagacattgttttttctttagaggtggttaatgggtttaaattggggcaggtgcaatgtgagaaggcttattacaaagtgactatttaatgaaaatatcaaacttattagacttagctctaacacatgtgcacgtgcacacacacacacacacacacacacacacacacacagaagctaggaacatagttcaacgacaaaacattcagtgagcatgctaaggccctgagtccaatccccagcaccagagaaaacaaatctagaataacaacaaaatagctttctagtgtttatagaccgaacatgtagcaatgtagctacaatgttgtctgtggtgactagactacggaatgaggaaacactcccgggtcttaggcttgtgttgtggctcatggtgtggggtttattttcagcttgcttccagaatatgagtttatcttttgtgtggctggcctagaacccactacttagacgaggctgacttcaaactcatgagatcatcctgtctctgcctctgagtgctgggattaaagatgtgcgctaccatgcctggctaggatatgagtcacacagggtcttgttatgtggctcaggcttgaattttcgatgctcctatctctgcagttcagtctgagcagttcttggtgggtggcaccatttataccccatcacagttactgtcgtctttggatagtggtatcttgaactgtgcatcggaaaacctaggcagttgtatatcacaattttaactcatcaggcatggtggcacacctgtagtcctagcactttgagacaaaggcaggagacttattttaaattccaagtcagtctgggctacatatcaatgtcacaaaaacaatgaccaaacaaaatctcaagtccaaacttccatccttcttttacctttgagccttggagttcaaagtgccaggactacagaagagcatccccatgcctggagttcagaatgacttgactcacacaacacagtgttcatactctctcttaagtgtgatcgaggctgccttgaaacccagtcagagaaatacataaagtgaaagttaagaagtccaaaaactggtccaggaggagcccataacatctgactccctaacgtccatacacattcagaacgcgccctgtgcacattctgaaggtctgataagggtcaagcggggtgtggggtgtgtgtgtgtctttcataagaagacaaagggacacccataggcatgtccacacatggtcctatttattatctctctagcaccgacttacaccactcaaaaatttccaccagactaaaaaaaaaattgtgaagaaggaaatatcttaaatagtcacttagcctgtttacactgttccattgttttgtctatgatgtaatgtgttcagttcaccctgcatagcctctgctgggcatttgcataagagttgtcactgacaaatctctcagccctttgtagtgtggggatggaactttagggcccttctgcatgctaggcaagccttcacactgggctagagtccctgctctcaattttccttcagttagaaacgaactgaacccgaaacaaacccgagtttagagttgctccgtgtgggtgttctggagctgtgttgcttccagtacaaagcgcagcctgtcacacttaaggcagggcaatggtgctccggattcagcagagagagcaaggggcagctgctagctccctaggaattcatctgaaattctaacagagcagtagcaagaacaataccatttcttccacctacccagtgggaacaaggagagctttgtggatggcctgataggtccactccactggatgtcaggtatcagctatattctaccctctccctgagtagattggaaatgaagggccgggctctctgtaccagtacagacatctctctcatggataaccgagacctcggctccatgacactgtttagttctttggtttatggtagggatttttgtctgtcctccttgcctgtagttatttctgcatttatttaacatgtgtgaatttgtgtgcatgtttatgtctatactagtgcatgtgcacatatgtgtaggacaggtcaactgaagccaggcaagtttccttctttgaaatagtgtttctcagagaccccaggcttactgctgaggctgcaagcccctcatctccactttccgagtgaagaatatgcctgggctttaaacgtggacgcctaggatcaaacttgagtcttcatgcttgtgtggactaagtgatctctccagctcaaattttcttcgtattttccttagacagggtttctctgtgtaattggcctgactctcctggatttatagaccaggctggcctcaaactcaccgagatatctgcatgcctctgccacctgattgctgggattaaaggcatgccccaccatgcccagctcaattttcaaaattttcagacatctcaggtccatgtcgtagctgccaactgtgtaaatgacccccactatgaaggcacagagttaatagcaccaggtcctgggtaccgagtgtaggtgacaaagcacgaaagggcattttaagatggtttcttttgactctttgctgctcaggactcagaagtgtacatacttggagtcttgggtacatttagaagttacttttagagtatcttttcagagacaatggaagagtgggaacgactcatgtctccctctgagcctttttccttttcaggaggttattagcacacatggtgtaggttattagcacacacagtgtaagacattttgaggctgttatatcatggacacacttgtggtgtaagactttctttctttcttttttttttttttttttcgagacagggtttctctgtgtagtcctggctgtcctggaactcactctgtagaccaggctggcctcgaactcagaaatccgcctgcctctgcctcccgagtgctgggattaaaggcgtgcgccaccactgcccagcatataagactttctaagagaccagaggtctcaggttggggagcaaatgacataatcctaacaaatgtctgtagaaatgaagagccaggtccggggacagggtgggagggaacacacttttttcacagagctgtcacacacggtgtgactatcttcaggagcaggtatgggaaggcagacattcagctacaggaggaggctgggggtcttcacctgacagtgtttaatgtcttggaatctggctggcagtcaagtgccttttccagaataggccaatgaagacaagtccagtttggtgtttaaagctttagtcagctccctggccagcagctcatgcagagacacgccgtcatgagagtacacccagttcttcccggtccagtcatagcgcttggggccgctgcgagacaaaacaaattcatggtaagttagtgaggatcctcttcaggagagccactgtgtttggactaaatcaatctgtgtgtgtgagtatgtatgtatgtatgcatgcatacatgcatctatctatctatccatccatctatctatttatctatctatctacttttgtgttgtttttcaagataggatttccctgtgtagctctggctgtctttgaactgtatctgtagactaggcggtcttgaactcagagttccacctgtctctgcctcttgagtgctggaactaaaagcgtatggccaccactgcccagcttatcgatctgtctttgaagatagattcctatctgtatccccggacaggtagcctggacctcacttgtgtagccaaggctacccttcaatttgtagcactcttctgtttcagcctaagtgctgggattatcagcaaccacatttggctggactgaatcttaaaagtcccacggcagctgtggttagaagctcacgatctagctcatgaccctactgcagggggtgggaacttgatctggtaaggcctagacgtggtgtgttaggtcactggcagtgtgccttggatgggcgatggggagtccgtcctgtttccctccatcaaatctccctggccatggtctgtctcactgtaggcccaaaggcaacggcaactaaagtctctgacaccgtgaaccaaaaacaaatgcctcctcctttcagtgaagagctaacggaatccagagctgccggtacccagagaccaagtgcggctttgcgtgacacgcagtgaggcgagcctttgctttcctcagcaccttcctgagggcgactgactgtgcagtctgtcctctggaacactccacagccccgcccccgtgaaactctctgcagcacattcattccatcgctttttttcctaggacagatgctatcttacagccaggtttgggaagtgatgctaattttgtaccacggatgtgctgatcaatgcccaacctacactactgtgtcgccactaactctgtctacatccgaaacacccctattaccctgaaagaagccctaatacctactaatcagctaccttgcctcttccagccttggctaccacctgtgctattattaaaaactttgctgggcatggtggtacaggcctttaattccagcgattagtggacagaagctggcttggtctctccagcaaattccaagccagccagggatccaaggtgtcttagtgagggtttgtattcctgcacaaacatcatgaccaaaaagcaagttggggaggaaagggtttattcagcttacacttccatactgctgttcatcaccaaaggaagtcaggactggaactcaagcaggtcaggaagcagaagctgatgcagaggccatggagggatgttctttactggcttgcttcccctggtttgctcagcctgctctcttacagaacccaagactaccatcccagggatggcaccaaccacaatgggctaggcccttcccccttgatcactaattgagaaaatgcctcacagctggatctcatggaggcatttcctcaaggaaggctcctttctctgtgataactccagcctgtgtcaagttgacacacaaaaccagccagcacacaagttaagaccctgcctcaaaaaaccaacaaaacaaaactttcttctttcgacagggtctcccatagcctcagctagcctccaattccttctatagccaaggataaccctgaactcttgattttcttgcctttatcgctcaagtgttgggattactggcttgctccataatttctagctaaaagtagttttctttattgaaaattaaagctgtgaaattgagagctctatcagtgtgtccccttccttcccgttctgttgctgcatctaccccactcttcaggtgagaggagaaagcatttgggatgcggttttatactacctccttttgctacctttaagaggagtgacttcctggggtcattgcgatgtgtccacaaaaggaaatgggggacctgtctgatctttctctgcttcccatcctaagatgggacattgttcctacacattctcccatcagggtacaccattgtataagaggctaaagtagccgtcccttgcattcctcagtcttggaccctgaaccttgaaaaccacgagataaagaaacctttcccttttatcggtaacttgtctcaggtattcagggtagcgatgtgaagctgactaatacacggtactgcggacaaatcggtagctggtgttggccatgatttgttattccagatgtataagacccttgtctcacgttctagctcctcatggcctggagaacagtggacacagtaacagacaatgaaccctgagagttcaccactgagaacactcgagggaactttcgaagaaccccacactagaagagtggggacacagcttagcagcacagtgcttgagcggtcccagcgtggtgaccgcattgttagatctccagcatcacaaaaccatgaggagactgaggtgtggtgggaaggcagggtagagggaagagatgggaagtatcttgtgtaggtatagatacacgagggcttttaatactgccaatcaaatgctggacatacagagaaaagggcaaatggacaggcagggcttccgttacaagagcagaaacctctctgaacacaaagtaccccggtcacatgaaagcaaaacaaaaccaggagaaaccaaagaatgttctttgatcctgcaccacagccctgctctcaggtagagttggaacaactcaagacccctccacattgtccagggttctgcgcccagattctggggcccaggcgtcccccacattctatggcaagggggccaggaaattctgtctccacaggacctcaaaggttttcttctgaaataagaagttataatcatggccctgtgaaagacagtctggataaatatgatattacttccggggtgatggagagagggctcagtggttaaggacgcttgctgctcttccgcaggactggtttgatgtctttcactaccctgggctgcttacaactgcttgtgactacagctccagaagatctggctccctctgctggctactgtaggtatggacactcaaccacatccatatccacacccacagacatataaaggcccgtccccctttatgacgtaattgtgatgaagcggggttacttatgagacgcccccccaagcctctcatatacattagtttttaaaacagataatctggtttttaaattaactgcttttatgttgttttgatatatgagtgctctgtctgcaagtatacctgcagaccagaggagggcatcagatccctttatagatggtcgtgggccaccatgtggttgctggggattgacctcaggacctttggaagtgcagtcagcgctcttaaccactcagccatctctctagcacctaaaattacaggttttaaatgtatttgttttatatgcattggtgttttgtttgcatatttatctgtgtgagggtgtcagatctcctggacctggaattacagatagttgtgaggtgctatgtgggtgctgggaattgaacctgggtcctctggaagaggagttggtgagtgctcttaaccactgagccatctctccagctccaattacgggtttaaaaagagtttccttggagtttcttgtaagtgactaccctgacacggatgccaggatttgaactctagcccttgtgctggagcagaagggctcttaagccatctctccagcctgagtggtaaccattttgtttgctgtgtgtttgttgtggtggtattccaacccagggccttctctcacatgctaggcaagttctttgccactgagccacaccttggcaccttttaaaaactgccaataccattaggcttccaaagaattccacactgcttctagctgagatttcccacggctccttcaaaatgtctccttcagtactgctgttgagcctcagggaggttagtgtgaaggctccctgtgggcatcgctaggctgttcccagaccactgaggcagcagctgtatacttatcagtaagtccttagttctgagacagggtctgactgcagtgcatcctgctgctccttcaactgcaggcattgccacggggcaggcaggcatgaggctgggggccctggggctgctgataaaaatcaccgtcccgtcccgttgtgacagagtcagagcccagctctgccagcagagttacagagaccttcaaagtaggccaggagttaaagtttaacttactttgaggacaaagtgcaagttttctcagatactacaatataaaaaattcctccctctttctccttcctacctttccattttggaaactgaatccagggcttatagattactggataagcactctcccactgagatatgccctcagccttcaaagtagctttttttttttttaaagatctatttatttattgtatgtatgtgagtacactatcgctctcttcagacagaccagaagagggcatcagatcccatcagagatggttgtgagccactaagtagctgctgggaaatgaactcaggatttctagagcaaactgagccatctctctagttccctcaaagtagctttttaatgaatgaatgaatgaatgaatgattattatttttaatcgcaggtatgtgccactgtacctaacaaaagtggcttatggatagccctggctatcctggaacgcactatatggaccagatttgcttatttgcttttgctatagggtcttacatgatagctcagactagcctttgaactggctatgtagccaaggcaggccttgaattcttgcctctacttcttgagtgctgggactatagctatgttaagactgtgtctggcaaaagtatcattttcaaaggcaagccagtggtttttctcttctggggaatgatatactggagaaaaccagtctgggccaggctctgaacagttccttctgcttcaggtcttgtcaacatcctgatgcctgagttgcatagcaacccgggtatcaatgaggagaagggttcaactacaagccagcctccctgccgaggcagacagccgtaaagtcacggcaaagccagtgactgactccctctcaaacggtccccaacaccgcattccagatgagtttaccccttatggattttgacttctgaacatacctggaaggagaagacagccagatttgcttgtttggggtctgcttgttgatcacgtaggtccctagatccccgcccagcttaatggtgagcacgccatcctagggggtcaggtggcaggaagtgtgaaaaaatagattagttagtactgtgatacacacacacacacacacacacacacgtaaatatataaacataaataaaaataaaatacgtttctgacccattctgaccctgagagtaatgtttttaccatacaagctcctatgtttggatacacaaacacacacacacacaaacacacacacacacacacacgtatgcacatacacactcgcgttcatatacatgctcatatctcaatgcctttcatgtatccaaggatataacagacaccattaagaaaagggggctggggatacagcccactggcagtgtgttctggctttgggaaaccccatgttcaattcttggcaccaaaaccaaacaaactttaatgctcaaaaacaggagcttgtatggtaagaacgttactcttagggtcagaggtttgttttacgtttatttatgcacgtgtttctgttcacgtgtatgtgcatgaatgcccttagaggccagagacacacaggacagctgcagggccggagttacaggcatctataagccacctgatgtgatatggctgctgggatccaggctctggttctcatgataaagtagcaagcgtttaaccacggagccatctctgcagccaccacgagtgaatgaatcgtaatagcatacgatgaatgcctgaagctcatagcgctttctctctgcctgtgtggtcgccaagacaagttaagtcttgcctgagatctcagccatggtaaacaggaccgctagccaaccgcaacacgtactaacgcagactaaactctaacagcgtctgtccaagtgtcagacctgagtccatcacgaaaacacggaaagaaagtgattgtggtggcaaaatctgtaaggtcaggatttgggaggctaaggtgggggatggtgagtttgaggccagcaggctgcaccacagaacgcaaaacagaaaaggagaagaaagtaatccatgccctttctcgtttgtcttagaagagcggacggagcggcccaggcctacctgtgttagttccagacccttcccagacatccagcgagtgctccagactccatacagctttagttccctctaaaaagccttgcactctcaaaagactggccagtccatttttacccaataaatgaacatttaaatttgaaagcaccccacaaaggagcccttcactctgagggctttagtctccttagaatgcagaatatgaaacaaaggctaggcactaagcacactttaaaggggccgggtattgcttctggaaagcaggtgggagcctcttgttgcccagatgcacccccgcctttctgtgcactctgcagagggccaatccaatcaggagacttggacggattctcacagcacactcttagaaacacagccaaccatttatataaactagaggctgggatggataataatgtaaccaatagacacgggaggggacagtagtgctctcttctctctctctctctctctctctctctctctctctctctctgagatagggtttcattaggtaattcaggaaggtaacaaccttgtaatatttgtgcctctgtttgccaaggaagagataggtctgatgctgaggctcccctgggagaatccttgcctatgacacacaaggctctgggttccctccccacaggggtcaggcttcgtaatcccagggctcaggtggtagaagatcagaaactcaaggccatccttggctacatcctagttgaggccagcctgggcaacgtgaaaccctatcaaaaaatgaaacaagatagcaacaacaacaacaacgacaaaaacaagcgacacaaaccaaccccacaaaagttcctgatggagatgtgggcattcaggcagaacaaacccagacagaccttctacagacatactaatctctctttatttaggccaggggtttgtaacctttctagtacaacacagttcctaatgttgtggtgaccttcaatcataacactttttgttactacttcataactgtaatttttctaccgttatgaatcataatgtatatttggagatagaggtttgccaaaggggtcacaagccacaggttgagaacctctgacttagagcccagtgtgtgcctggatctgtgtctggacaaggtaactgttttcaactagaccacagtgtggaggtaggactcactatctcagttttgccaaagaggttcatggtggcaaaaaacaaagcaaaatattagcaaccagtagagttgctgaaaagcagggccgtttgggctcaaaagcagtttttcttgtaggcaacccgttccccctctggaaccttcattctcggctgctagtttatatattttctctcttttatctttgggaaaaaaaaacattaaatttgcctgtaactaactaagttacacagtggagtagtattgagtccattcatattgttactctagagccattcagaaatacccccacattgtaaaaactgaaaccctgtatacacattcaatgttaacttctcccaaacacatggctctctacccaattccacagttttctgctgctagctataggctaacactcagtgaaatcagtcacctctgacttacccaggcaataaatgtccccctgggtgttccacccgtggcgaggcctgaaggtccagcgcaaatgaatgccaaggactaactctccagatgtgacttccaggtctgctctccttcctaaccagcctgggcctgcacaagttgcatcactctggcttggctcccaacatctgcctggcctcctcaagggctccacacctgtacctgtcaccttctacagctaggtgaccacaccagggacagctctcctaaccactgcgttctcaatttactctctgatccccagtctttggagagatccaggagtggatattaattaaacagttgtgtgttccaaaaccaaaataagccaagcagaaagccacccatgagagacctgacttgcagtgcttgggctgtcttccagcatcctccctgaagtcccctcttgctccgggactgtgcaggtggctctgggaaggctacctggggctctccacttggcagagtccttacagactatctcctgctttgaactgcctctgcatcgacttgtatgtcagggggcctgctgtccccccaccatttccaccattttgagcccctaagaacagacaatctcaatctcagactccgtcaacattttacatgcttcagcccaaacacgggaatgatattatgtttgtggatggatgaacccatggacagacagtgaccagacaccctatggtactatctgccgaagtgaagggtaaggttgctaaggtggagactacggagctcagtgccggctatcagccaggctacagtgattagacgcttcccctaggacttccagccatcccaaatgacaaaggccgagggggggggggggataagccagctgctatgctggcttaccaggggcattaaggcatttagaactgtctgcaagcagattacacagggaaggttttcagctccccactgccgttctttagccaacgtgagtccattttgggagtgtgggtatatttaagatcaggggaagggactgtgttatgcagactttccttgctgtgacaaatatttgagaaaacataagggaagactgacacagtccgtgggtggctggctgtgttgtttcagggttgaggcatggcacacagcggcaggagggtatggtgggaaactgttcctcatggcagaagggcatggtgggaaactgttcctcatggcagccaggaagcaaagaggggaaagaggccaccgataaggagcatctttgaagacattccgccaatgacttcttccaacctcccacagcccccagctcctgccatactctccactgttcccctgtggtccacagagtcacgacgccagccttggatcaatgcttcagttaggtcagggacctcatgacccagtcacctctcagctgggaacctggccttcaacacagatcaaaccacaagagagaaaaacaaactactaagcaattgctaaggaacggtgaccaatcagaggagaccctcgcaccaaccaatcagagcagaacaaatcctagctggccaggcttaggcccagtgaagattagccagccctgccctgcaggaactaaaacggcaaagacggctgtctcctggtcacccttagaagtagaaatagacctaatgggagatgtcatgataaaccatgtaccttcacatacatgtgacgtactaaggaataaaaagaatgaatctgaaagtactttttattcccgcccccccccccttttgacagccatctgccctacatagccctatgactcactccaaaatgcacacttcatgacatttcctggtattaatgaattgctctcaagaggattaacctctgcccggattgggagtgtggaggaggggaacgggtaagaacacgaggaggagacacatatttctcccatggtaaaagcttaagcagatccttgcttagcctgccacctggtggccagcatgtaaacttccctcacttacagcggctgggctaatgcttcaaccagttccgaagtctctctcagccacacacagggaagatttgcaaatccagatcctcgcccagggctatagcctgggctcccttcaaccttgcaatgttgctggagatggccttgaatttctaatcctccggcctctgcttccggagttaactaggactacagggatttgctactaagcctaactgtgggtggcgctgaggattgaacccaaggttctgtgtatgccaggcaagcactccaccaaccgaactacctctccagcctaagttaccgttattaaggagaagacagaacgcaacagagccaagaggtaccccaaaagagacatcgtagtcctccagggtatagggcttgtctgcgaggtcttcaaagaactcggccagggagtccagggtctcttccgccagtctttcatacgctgtctcgtctagagagctgcagggggaaaaccccagacaatgttaccaactgcagtcataataaatacatacaaactgaaaaaaaaaaaaaaaaaaaaggctttctagcagaagtaaccagctagcaagatggagtgtgggtgagacccaagcactagggttcacaacagtccttcctgctccgtcagccaccttgattctccaagtcacttcccgttaacaccaaaatgatgtatctacctttatctttcctgggtcttgaggcagagtctggctaggtagttctgggaggtttcaaactcacacagcagcactccggcttgccccagcctcagaattgttgacgtcacagctgtgagagacaccaggcctagcttttctcatccactcacctttcatttagttctttttttttttttttttttcgagacagggtttctctgtgtagtcctggctgtcctgaaactcaccctgtagaccaagctggcctcaaactcagaaatccgcctgtctctgcctcccaagtgctgggattaaaggcgtgcaccaccactgcccagctcatttagttcttaaatgacaattgagtttatcgggttttttttcttttttttttttattacgtattttcctcaattacatttccaatgctatcccaaaagtcccccccacacacccccccactcccctacccacccattcccattttttggccctggcgttcccctgtactggagcatataaagtttgcctgaccaatgggcctctctttccagtgatggccgactaggccatctttttgatacatatgcagctagagtcaagagctctggggtactggttagttcataatgttgttccaccgatagggttgcagatctctttagctccttggatactttctctagctcctccattgggggccctgtgatccatccaacagctgactgtgaacatccacttctgtgtttgctaggccccagtttatcggtttttaaacgacttatttttattttatgtgcatggtgttttgcctgcatgtctgtgtgagggtgtcagagcccctggacctggagttacagacagtcatgagatgccatgtaggtgctgagaagtgaaccggggtcctctggtacagcaccaagtgctcttaaccactaagccatctctccagcccctcatttatatttttaaattgatggaaactacccagcatgcacagagtaaaaactttaactgcataaaggagttacagagaaaagcagcctcttttccaaatggcgaccatcgccagaggcagtcacatctgccaagtcttttctgtgatctcctagacgcctttaaatttttaaaaatataagaacgaagtaccttgtttgttttctctgagacaagctcttcctaggtagctcaggttggctttggatttacaattctcctgcctcagtttcccaagcagctgtgattaaagatgtgtactctactactgtgtctagttcattatattttctgtattttacacatccactcttgctggacactggggctgttttcattgcttttgttactaaatatttgttggtcaagacacaaagtggggaaaaaatatttgtattatatatatctgaaaatggactaaaccagaatacaaatcaataagaggaatatccaacagaaaagtggtaaaatagtgtgcaccgattacataagagatggccacatgacctgtgagcatgatcaactttgttaatattttaaaaagaagatttaaaaatgagatatgtcatgaaaggcacaggaggtggggcaagcagggctttctgctgctgaggggcaggcagagatcagttgctttggaaaccactgtggaacatgctcacaggctgtggcctttcctgtggcccttcaggcccactctcgggaatatgcacaatagaaactcccagggtcactacaggaggtgtattattttagcatggttggattgaagctatctcatagcaccaaactgggaaacgcccaggtatgaagataacaggagagaagaattgcactgagctccagctaaggaccaccacctaacaagatagaatcgtctaagactctgagagcaatgtgacagatgtcacaaatgacagtgatgggatgagctgcatacagacacattggtactcagccacatggagtgtgtgcaaaataaacaaccataaaagccaattcaagcagctatagatcagaatggcagctatgctaaaggggttaatattagacttggagcgagcagggtgcttgcccaggctctactgacagtctctctctctctctctctctctctctctctctctctctctctctctcctaatttgaagatttacttttattatttaatagcatgtgtataggtgtttgcttgtgtatatatatatatatatatatatatatatatatatatatatatatatatatatacacacacacacacatatatatatacatatacatatatatacacacacacacacacacaaccggagtcttctgcaagagctgcaagtgcttttaacatctccccagtccttggtagtctgtttcttgggctggaaccgatttcacagtgtgttctctctatctcttgcaattcagttttgggaaaaatatgcagctgaaaccctatggaacgtttctctatagtttgtcaggttttatttttaattaaaaattcttttctttttgagacaggctgttactctgcagtgcaggctaacttcctgcccgtgccggcgaccgactgccgggattgcaggaatgcaccagcaaaatccagcctattgttctactcccacaatctgccagggctgaggcaggaggactgtgagttcaacatcagcctgggcaatatagagagactcggtctaaaacagacagacagacagacaggcagatggacagacagacacgaccctccaaaatccttgcacatttctatgaacccatagaggtcagttgatcagtaggtctgggagcagtaggacggagggaccactgactaatgaagtgcacagaattcctttcgggaggggtgaacactccctgaattagatagtggtaacagctgtaggtgctaaggactatcacctctgatggtgtccatgtcacctgaactatgacaagaaaaccactgctgcactgggaagtgtctgggagttagatatgaattaccaagtataaaggcctgggttccatccccaacgacaggatgaaggaatataatgcattaagccttccttctgtgggcttttgtgccccagtggaggtaaccaggggcctacagtaagccaccagcgactgctgggtgctaacagcatctgatccatcctttacccagcccatcctcttggtagggcacaacacggacgggctatgggactgaccagaatggtaggagctactctctaaatacagtggttggtctgataggctgtgatggacatttcgaggttgaaatggagagagtgaagatggagggtgggttggggtgtctcgaggaactcttcaggacagctggaattgtctttttgtttttgttttttaattacatttattatttattagcgtctgcacgtgcacgcgccacggcttgcccatggaggtaaagaataactgtgtggaactgttctctccttccacctctccatgtgcccagagatcaaatccaagctgccaggcttgcacggtaagctcaccaaagagatgctgagctgggagacaagtggcctctttataaggcgatggaatggacaggatggaagagtagcttcatgttggaagagtccaagggagaatcaaaggcttggaacaccaaaggcttctgttaaaccaagaaggggtgtgtgtgtgtgtgtgtgtgtgtgtgtgtgagagagagagagagagagagagagagagaaagagagagagacagagacagagacagagaaagagagaaagaggagagacagatctgcacagactggcagacacaaaggcatttctatggcttagagtactgaatgtcactcaggcatcttggacttcaaagtggatgtagcaacccctgtatgcctttggttggtgtctctggggctggggacaccactgcacatgaaaaagggtcctatagataagcaagtagtaaagatgtaaactgaggcatcgtggctccacagggaatccactgccgttttcctgaagacccttgctatcttctttccagcttccttatgcaactgagtttggtccacgggaacaaagtgagggaaggaccagcactagttttagcctctcagtgcttccaactcttcctaccaaatggaacctgggcaggctgatctaacttggacatcacactgtgtcactggaggcaggttcctcaactcacatcatggtggaaagcaaaccttgggcagcctggagaaccgttacatttgttatagctgtacgttctttctcaaccaggatgctgggggaaataacaagactctgggggaaaaaccctaaatatccaaccataggaatgaactaaaggaagcctgggatagtcacacagtaacaccattcacctaaggtaacatgggggatgcttagtgatgtgaaagacgtcactcaaggttgttcccagggagaaatggtttccatatgaggagagaggaagtggaaggcatgcctgaggtagaaggtggtttcatctcaccttgggttgtccaatgtccccaagttcctcaaatgcaccacgcagacgctctgctttttgatgttcagaatctggaggtagtggaggttcaaatgctagaagccaaagttaaaaacactaattaccacatcttcgtctactctgatccagcaatacatggtttatagattggctctcctatactcgagagtagccaattacagcatctcaggtacagtgctgagggactgatccccacgtctacccccaaagttttgctctgggtcctccctgacttcctgctaagcttggaccatctgataggacggtcatgagacatcgggagctctctgaatttattgaaaggaaaccaaatttagtccttggttgtggtggtttggataggaatggccccttcaagtgtttgcaggcttggtcatcagggagtgacactattaggaggtgtgcccttgttggagtaggtgtggctttctttgctggaggaagtgtgtcactgggggtgggctttgaggtctcagaggttcaagccaggcccactgtctcactttctttctgctgcctgcagcctctcagctgatctccagtactgtgtctgcctatgtgccaccatatttcctgctatgtctgcctgcattgataccacgctttcccaccataatgataatggattaaacttctgaactgaaagctagcccctattaaatgtttgatcatggtgtcgcttcacagcaatggaacactgactaagacagctgtggtagctgtatctcactcaggtggtcatggttaggtagcaccagatcgagcatctctccattggctaagatagctatgctgactgtatctcaagtggccatggctacaccgcaccagctgccatgtgctcgagagtcgtctctctctgcttggcactgctctgtctttagctgaatggactcacagaatccttttctccctcatggagttatgagggaagaacttcatcgtgatcatcttttttttaaaaaaaataattatcttgtattttgtgtgtgtgtgcctgagtatatggatatacacagcatgtatgtgggtgaccttggagggagaagagggcagccgatctcagatctccaagaactggagtgatagaaggttgggcgctgccttgtgccaggaatcaaacccagatcctctctaagaatagcaagtgttcttaaatgctgagccatctctctatcccctactccatcatcatccgctggagggggtagccctatagagttgcagtgctcacttacttgttcctagggggcacaggttgggtccctataagtctcagggtcataactatcaaatggccaatgcgtatgcataattctgtttgtgcatgtctgtctaaagacactttatttattatatattattggtttgtcagctttgaacttgaagcaagaacacttataactcatgctgaagtgaggtgtttctttttttctttctttctttctttctttctttcttttttttttttttttttttctcgagacaaggtttctctgtgtagccctggctgtcctggaactcactctgtagaccaggctggcctcgaactcagaaatccgcctgcctctgcctcccaagtactgggattaaaggcctgtgccaccactgcccacctgagtgaggtgtttctttcatacattttctttgcaagccattccacaatcttactatgtttactgtggctctaggcttggggaccactttcaaacgacaaagtctcccacaggtacatcgacgcaaacaggcatttcgctgaagagactgaatatctgctcactccgtgacagcggaatcaagccttgttggacaacggccgggaggggacaccttccatgagccttgcgcttttggccagtctgccgctttcaaagtgactgtaggagcatcagggtagacaactggggaccgtaaacgatattgagccactgagaacagactctgagcataaagatggaccgactgtatttgcattgtacaggcgaggaaacggagatgccaaagacaaagttgctcaggctctcagagatgcagaaatccaaagtgcacagctgcaactggagcccagctgtcaggcgccaggcaagggaagaacagggcagtaaacatccaagaaagtgtttgaggaagcatgggttacaggttcggcccttcaaaccctagccgtctctctctctgaccagtccacttttgtttgttttgtttttaaactttctttttcagtgttatagaaagaacccaagaactcttgaacgctaagtgaccatgtcactgctgagctacaaagctagccctatttttattattgttttttattttaatgacaggacctcaagaatcctaagctgggtttaaacctgtagacattattatcccacagcctactccacctttgtccatagctctccccttcctagaatgctccccagacccgttctttggcatctatcacggccctctccggaaagccttccttcaccctactgctgtcttttcaagccacggagtaacagattctgttctttgcatctactaagaaccgagacttatctgaagtgctaaggcctttgcgaatacagtttaattctcccgccaaaatcgcaaaatgggtgttaccctttaatctcctcggaacagaaagccaagccctgcccccagacagttagggtctccccaaggtcacagggctctccagcgccgcgcagtcagaacgtggaaccaagatcccctcattttccaaaagctggactctagggctctgctgctacacctgtgatcccagcagagaggaggcaggaggatcacaggattgaagccactttggggtactcagccaatcctaggctagccagggatacagagtgaggcaaacaagcaacaaaaagccctgctcagagcaactccacaaccccattagtctcacgccctgaaaaaggcaacttcggagtgcacacaataataaacacgccctgctgcacacgctatacatcctgtgttaattacggaaactcgtcttttcccatccccaccgccaaggtccgaagcccgcgcaaacaccgcgcgcgccctgcacccaaacgcgcgcgcaaccagagcgactcggcgcgtgcgcgctgcgcgtccccggcataggggcgggcgcggcctgcgctccggtgtgcggcccggcgaagcgcgtactcacggcgtggcgggtggcgccggcgttgactgtgacatgtaggcctcggcggccgcaggttacgatcggttccctccagcgcgggttcccgacccaggcggaggcccgggacgccgtccggggcagcaagcccacggctgcgcgacctccgaacgcccacatgctactccagctccgcggccgctccgccccgcgcgaggactcggtggtgccacctggtggccgtgccccccccccgcccccccccgcccccccccccccccgagcgccgcggctgggctcctgcgcgcaggtccagcactacagccctgtgcagacctttaaccagaacccagaacctgctctgcgccaaactcgcaacgtatcccttgggcagcactagtgtgtaaacactgacccctgcaagtttattcgctgacaacaattttacagagtggtagtgggtgattctgaagatacgctggtgatcaaaatagctttgcttaaaaaacaaaacaaaactagttctaacagctagcttcaactgcccgatcatctcaaattccgcatctcttaggcaatagaagtaccaggcagcatgaatggaggaggggcttccgtagccccaggctcagccgaggaactattggttgctgatggctataggatgagggagggtgagttttcttctgggatatggcctctgattggctgtcctagctccatggggatggtcctacactgtatacactgttagggctaagtggagtcggtttaaaaaaaaaaaaattcagagcggtggtagtgtacacctttaatcccagcacccgagaggcagagtcaggtatatggagttcgaggccagcttgagctacatagtgagtttcagaacagccggagctacatagtgagacctagtcaaaataaataagtaaataaacaaataaacacataaataaataaaaatttaaaaaggaacataaaattgggaggaggggtggggtggttcggtaggagttgggagtggcaggtgagtttgatcgaaaacacattgtatacatgtatgggattctgaaacaacagtaggaataaggaagtgcccggctgaagtacccgaatgcttcttggatgaggagtagtcaggactggtgattggttctcctcatagctgtttttttttttttcccccccagcagccccaacaggttcctcacactcctggtagttctcctggcttttatgtcagtgtgagaaggagtctgtgcattgtctcgggttgccattatgacactggagaactctgagcttcaagagttaagagacagtgtcagaggagtcttttgcctccagggtctcaagaaggattgaatgacagcagcggtcagcagcaaagcgtttaagaacatcctccatgtaccacctgacttgggatactattgcttctgatttcccacaaaaagccacaaaggaaaggggaagtttgtagtgactgctaatgcaaccctccccctctctctttctctctctccttccttcctctccttctccctctctgacctgtagctaattttcagatatggaattggaagccctgacatattaagtgactcccccctgattgaaggggagttagaaccctggcttcctgatttctggtccgagggctcttacaccctctgtcttagaaaaggagtttttcttagtttcaatatcacagctctaactggctctctgggatcatgtgcccatccatggaagccaatagtctgcaaaacagtgagggctacgctaccggtcagcatcatggtccattctgtgctgctgtaatgtactgcctgaggctggttagattataaagaacagaaatggatcctctggagaggaagagaagaatgctgttcctcacacaacagaaaggcctccaacaagccctgtgtatagcaagggttgagccctcatgacccagacccatccaaaggcaacatcttccaatactggtgtgtgtgtgtgtgtgtgtgtgtgtgtgtgtgtgtgtgtgtgttaagggtctcaagaagaattcatggagttgacaaaagcattcaaaccacagaagccagtaccagggaggggcacgttctggtgaagaggcatggaaagttccagtgatagctattccggtcggaagtgatgttgcacatattcccaaaacaatgacttccacgatgggggactgtaagcctgttcatttacttatagatcagagaagttcaaggtgttcctccctaacatctgccaaggacatagcgctgtttactgaggagctgggaacagctccttgtgtcccaggagactggtagcactcagtatccaaactctggcatgcctctgatacactgctgtgagcttaacatagaattgactcatgccaggtggtggtggcggcgcatgcctttaatcccagcactcaggaggcagaggtaggcagatctctgtgagttcgaggtcagcctggtctacagatcgagttccagaacagtcagaattacacagagaacccctgtctcagaaaaccaaaaactaaactaaacctaaaaaaataaaaaaatagaaaataaaaaaccccaaaacccctactgattaataaagtgtgtgaatcagttaactgatatgagtgtttttgagaataggtaagaaacagcactaatttaaataataattgctaactatgaaatgtgtgatgcccagaagagaggaggttgggcttatttgctgggcctgacttccagcagcatgccttggggtcctaggagtcagcatttgggagagggctctcatctctacaaaaccaaaattattcttggagatttatctgaggggtcacaaagatagaggcaggtggtgtggttggaacaacatgttatttatttgtggattttgttgttgttgttgtttgctttttgagacaaggtctcactatacaatcctgactgacctggaacttgctctgtagaccaggctggcgtcagactcacagaaattcatctgcctctgcctctcaagtgctgggtttaaatgtgtctgtcaccacattcggcatgtatggcaagtgctccatctttgagccccatcctcagctctgagatatcagccttagagggtggcttgtattgattaaggagttggcatagatgtagcagctgtccctcaaggaagctctgtgctgtgatagaaatacacatggctttgtgggctcagctgctgtatctgtacagcacagcattcaacaggtgagaagcatgcttctcatggacacacaagggagttcaggacaggaactcagcaggaaacgaaacagagaccatgggcgggggtgtgttttggtgtgtgtgtgtcccgggggagtgctgcttactagcttgctccaaatgacttgcttagcctgctttttatacaactcaggaccacctgccctgcagatgttaacaatgaaatagagatatataatgagctgaaatgtccttcaagttccctgcagaaaatctcattccccaatacattctgaccaaactgtatttgcatccagaaccttgaaagaagtgactaaggttgtataaggtcatacgaccccaaatccagtgtatatctgtatttatgaagagagggtaaggttagggctctaactcaatagtacaaagctgtgggttcgacaccacataaagaaaaacaagccaagtgtaagctacctccccacaagctgttggtaagagaggttcaaacagtctccccaacaatacagactattgtcattgctcccgactgtccaccagaacttgacaagaagacccaattgctgcagactccacacacgttgtactgcctggggtagctgccgagtcagaagtcaaaggcctgaaaacagcgctctacatgttgatgtgctggagacacaactagtagtcagtcataggtcaagtgtggtcatgctctccttgaggatttctcaatgatgaccctttgacctccttgctgtggggttgccccagtctgagtttcagcagcaatcctagactccaaccactaggtggcagtagtgcccactccagattaagttgctatactctaatgtttctagacactgcaatatcgtctcttggagtgtctggggcaaaattgtccccttcagtttctttgtgcaagtttgagctatagacttacagcaatctctttttcttacttccaagtttgagataattttcatgacattgtccaaattccttcaaacttggttcttatttatagttagtttttttgagtcagggtcttgctaggaagcccaggctggcttggaattccctgttcgcttgcctccagctcctgagtgctggagttataggcacacacctccatgactggctctatttctcatttctcagagtttcagtttcctcactgtcaaatagagcaaatgccttagggctttacataaagacagaataaacagcttgtgagaaatggaaatcctcaagtgtgggtcacacacatggtcaggtggctagtcttggtggtatttaagaggcaagttctatacccatgactgcagagcacagaaaacactccgtgggtctcatcaatcagtaatcaagaaaatgccctaaagatttacccacagacctgtttgatgcaggcattttctcagttgaagttccctcttcccagatgatcctgggttgtgccaagttgacaaaactagccggcacaacacacctttctgttccttactagccctacaagtcattagaaatagtggcctgtgctaagctccttggccccaggccacagtactctgtctccttcaccaagatcttttcacccctggaaggaaggtcaggtggtggctgcagcctcctggttaccaggatcctctctgctactattcacacctagatctgatcgctagtcctgggctgatttgctttattttgaataggggactctcatccttgcaaattacatttctgtcttagttagggttttactgccatgaataggcaccatgaccaaggcaagtcttgtaaagggcaatgtataacagggtcagaggctcagtccatcattatcaaagtgggaacatgacagcatccaggcaggcatgatgcaggcagaactgagaggtctacatcttcatctgaaggctgcttgcagaatactgcttccaggcagctaagatgagggtgttaaagtccatacccagagtgacaagcctactccaacaaggccacacctactccaacagggccacattttccaatagtgccactccctgggctgagcatatacaaaccataacaactcccaaactcccttcagtttgtcctaaagtttctttgggacatggcaggagcaacctgggtggatgaggattacaatacaatacattacaataacagacattatagcctggagggcagtggtacatcagagaaaaggctggtggctgtttcccctctttcttgtcttacccatgcaggtggtatctccagtagtgactgggtttccagtagtgactgggtttcctctgtgattccccttcttactgggcaagtcaccttattttagccaccattcccaggctctgatccgccccccgcccccctttccaagatctctggttgtaacaggcaatgcagctttctgcttcgtttaatttttatgagactccacactttcttctttcacatcaagcaccggtgcagtgaaatctctgcataaaatttccaccacagttgtcttccaggctggacagcaactgttacctgtatctatattctggacatcatagtcatgtaaagtctttcttccgtagatattttcaattacaggagtgtcttagttagggttttactgctgtgaacagacaccatgaccaagacaactcttataaggacaatatttaattggggctggcttacaggttcagaggttcaatccatcgtcatcaaggtgagaacatggcagcatccaggcaggcatggtacaggcagagctgagagttctatgtcttcatctgaaagcggctagtggaggactggcctctaggcagctaaaatgagggtcttaatcccatccccacagtgacacacctactccaggaaggtcacatctcctaatagtgccattccctgggccaagcatatgcaaaccatcacaaggagtctgtttttaatctgacttctagttttaatctctatttcactacctcactgctattctttcttcttgctcaggcttgtctttccatccaccccaccccaccctagttcagctacctatccatccaccagtaggtcaagtgtctatagatctaagccccatggttgctaatgatacaatgagtaaggatgctgaccattgtatgagtttatagtcgtgtgcaggaaggagtggagtttattgtcttatagaaccaggggagtgcagtgataggaataatcacaagactggccccacctcaatctgaggtgtgatgaaggcactccatcagaggttggttaggcaaaggaggggagagaggaagagccaaacaggtagagaggacccaatgaactgaggatatgactgctccaaggtatagatatgagggagaggacaaaagaaacatctagaagagtcccaactgaacttgactacgagaatcaagggaacccagagagtgtgtggtgttgggagccgcccccacattcgccgtcacaagatggcgctgacatcctgtgttctaagtggtaaacaaataatctgcgcatgtgccaagagtaattttccactacatgtactctgccttttctcggccatgggctgcagccaatcagggagtgatgcgtcctaggcgaaggataattctccttaaaaggggacggggtttccgccattctctctcttgctctgcgctctggcgctctgacgctctggcgctctggctcctaaagatgtaagcgggggggggggggctttcgtttttggggcttggggcttgcgctcctggctcctgaagatgtaagcaataaagttttgccgcagaagattctggtttgttgtgttcttcctggccggtcgtgagaacgcgtttaagagtgtggcaggaacagtagggttataaggcaacagaagctgggggaagggaagctggagatggttaaggtacaaagagctaagaggactcaggtgccagagtgagcgtccagcttcaactttggtatgctgaccccacagttagccatttgttctgactttctttgggacttggcaggaacaacctggatggacttgtaagggtccgaaaattactgaaggaagaccccagactcagtatgcaaaggcaaagagcgtttattctgcagaaacaaccagcaatcgggattaatcagtttttttgagatggtgaccccagacaaaggtgcacaggccttcttatagggaactgggggaactctctagaaggattaggtaatttaaaatttcactgatgggtgctagggggtcccaggtgtccagtggtcctatgtcattgacgtttaaccttaggatgagggagggctgcccagcacagatggcccatcccaagataagatatttccctatttttgtgcttattccctggttgttctttgggagcgggttttaagaccttgtttctggatattatggtctgttcccggagctgttgtcttatggctgtcttttcaagatcaggcctggtcctcaactggagataaacagggcttgtgtcatccttgcaggctgcgagggtccatgaggaaaggaccagtgctctggagtcctaacagtgggaataggatagttcaagccagctgcagctctgggagtgagggtataatttcctgccagacttgcaactctctgttttccttataaaaactccaaggtgagcattctgctaataagccttgcgggccaggtctggctttggaccccagagtttcttaccaaagccactccggtgccttgcttgtccttgtttctggaactgccccttgggtgcccttggtgccttttgaatttgctgtgcttgtttgcttctcttttgtcttagatctgattattcagacaattgagttgaggcttctcccgagctctttgctctgccagctagtgggcacttctctggtgcttgcctcaagatcaaaaacaatctataccagctccaaggatgccatcaagaagaagctgacaggaatcaagcatgaattaaaaggaaactgcttctgaggaggttaaggacccctgaactctggtagaaaaactaagtggcagccctatcatctccctgaggggatgcctatgtgagccacctccggcccccctagcatctagcagccatctggcagccctaaacttgctctgaagtatagcagggctgcccctttcctgccagaccttaggggtaggggattctcagcaggggtgggggcaatctcttcactcccaccctctggactgtcctccctccatccctggtggtctggccttcccaaacagatcttgatactttgattcctcttgggttgaaacaggccaagcactcggtttaggggggagcctgtgttctttttttttttttttcaagagaattaaatcgtttattgagtacacatgataatggatacataagtttcattcccatctgttattttatctgataccattattcaattttgatattgcatagcgtgtgccaacaaccattttataaccaaattgtgaccttgcttggatgaccctttcaatggtgaaactcattaaaagttacaatagtaactggcagtttaacgacatcaaggtttttgaagacaatggcttctccacccaagcaaccataaataaattccaaatggaacttggcaccaccctgaaggaattctaacttcacactgttggggaagtttaccaagatgacttcagaatagactaactttacacagcacatttaaaaaaaaaaagacacatttattcagcgtcatgatcagactattacatttagcaatcaacatcctgggtgaaaaaggtctacagtaaaaccttttgttggaatgctttacactttccacagaacagaaactaaaaataacctgttatacaattagtcacaaatacagtcctggagtttttgcccacacacatgagtattgtctaaagcatgtcttctttgtagcagctaggccctgtcaccactgtgcttggctgagttcacaaatctgttgtaacctgtagcttccctgtcacttctctggctctcctctcctgctaagctttgtttcctggctgtacgtaattagaacctcctgccactgccatagctactgctgctgctggaaccgccatagccaccttggtttcgtggtttagcaaagtactggcctccaccaccataagagccagagctcctgcctccaaagtttcctcccttcttcagtccaaaatttgaagactgattgttgtaattgccaaaatcattgtagcttccaccacctacaaaattgcttccaccgccaaagctgtctctgcctcctccgttgttatagctgtcatagctgccactcccaccatagccactgccctggtttccataaccctgtccaccccttccatagcctctgcttcctccagagtaaccagggccacctcctccataaccaccgtcattgccaaatccattatagccatccccactgccaccatatccaccaccaccacggctgccaccaaagccaccacgaccactgaagttccctcctcgaccaaaattgtcattgccaccaaaaccgcctccacgaccaccaccaaagtttccagaaccactgcgacctctctggctggatgaagcactagccatctcttgcttcgacagagcctttcttacttcacagttgtggccattcacagtatggtatttctgaataacaatcttatccacagagtcatggtcatcaaaggtaacaaaagcaaagcccctctttttcccactgcctctgtcagtcataatttctaccacttcaatcttcccatactgctcaaaataatctcgtaggtgatgttcttcagtgtcttctttaataccaccaacaaagatctttttcacagttaactgggcacctggtcactgagaatcttctcttgagacagctctcttaggttccacaactcttccatccaccttgtgtggtcttgcattcatggcagcatccacttcttccacagtggcgtatgtgacaaacccaaagcccctggatctcttggtgtttggatctctcattcccacacagtcggttagtgttccccattgctctaaatggctcctcagactcttgtcggttgtttcgaagctcagccctccaataaagagcttccacagctgttctggctccttgggagactcggacttagacatgatggtagagttacgagagccttcagcgatgcttcctctgcagcgtcaaagagcagaaaggaatacgataacgaacgtgccccctgtgttctttttaaatacactcctattccccatctctccctgtcccatgctgcctacttctaagagcaatagtgacttacctgtttagttctgtgtgtaaatggaatgttcgggaaataacccttcctgccttatctggttgttcttcctttctccttgatcttgggcactaatggacttgtggaagcaggaccagtgcgggaccttcaattaaagaaagaaagagagagagagagagagagagagagagagagagagagagagagagagagaaaggaaggaagaaagagagaaagaaagaaagaaacaaacaaacaaagaaagaaacaaagaaagaaagacaaagaaacaaagtgtaagcccaactaaatccttcctctagaagttgttttggtcctggtgtttcatcctaacgatagaaaagtaactaaggtactcagacatacaaataatgaaaatgcattttatcatttacctgtgtacatgtgcgtgtctgtgcgagtgagcaccacacacatgtggatgcctgcaggatcttgaagagggggttgaatcccctgaagctggggaaaccaaatctgtgagttgcctgatgtggatgctgggaacagagcctaggttctcagaaaggccacgtgagttcttaacccttgagccacctctctagcccaaattaaactttttatttgagacaaagaatttttaagcttcctgggctggctttgagcccattccttgagctcactctgtagtctagacttctaatacatcatcaatctaacatgccttttttttttcctcttcaagacagagtctcactatgtatgtagctctggctgtcttagaatgtactatatgagctgtcttatagagcccaaagactcaatgtgatcaattctgtattcattactttgtatttatgcacttattagacagagtcttagtgggtagcccaggctgttctggaacttgctatgtagaccaggctggccttgaactgacagagatctgcctgcctctgcctttcaagtgctgggatgaacaacagattgcgctatgccctgctgtcagatttatttttggggacaggtctcatatgtcccaaattggcctcacacttgctgcatggctaagggtgacactgaggttctgaacttcctgtccccaccttccaaacatcatgattatagtcatgcattgcactgcccggcctatgtcctgtgggagatcaaacccaatccatgctaggcaagctctctgcaggcagacacatccctagcccctcctgtttgctttacttagaaaaagtagttgaggtgactgggtgtgtcacttggtggtacagtgcttgcctagcatgcaaggaggtcctgggattgatccccagaatacacacacacacacacacacacacacacacacacgaagcataaagaatgaactaaaagaccttggggcttagaagacaaaagcacagagacttgttggcaaatacgtacacaaacacacacatagctttctgagatactgtctttgatgcctcgtttacaaacgccctgtgtacctctctccttaagtttcaaaggaggaagtgcctggctcccttggagccatgtcacctctgaccctctgactgaagatggagatgaaggaagttcccagggtgctggtgttca

SEQ ID NO: 5 - DNA, 52 bp, Homo sapiens
ggtgtgaggattaaatgggaataacatagataaagtcttcagaacttcaaat

SEQ ID NO: 6 - DNA, 59 bp, Homo sapiens
gacccagttacgccacggcttgaaaggaggaaacccaaagaatggctgtggggatgagg

SEQ ID NO: 7 - DNA, 45 bp, Homo sapiens
atctactttctgtctctgtggatttaaagtaattttaaatttgaa

SEQ ID NO: 8 - DNA, 47 bp, Homo sapiens
gagagacatcaaggcagacaggcgccgctcatcagtgatgagaccag

SEQ ID NO: 9 - DNA, 371 bp, Homo sapiens
aaaatggggccgagtgcagtagctcacacctgtaacataatcccagcactttgggaggccgaggtaggaggatcacttgaggccagaagtttgaaaccagcctggtcaatatagcgagacctcatctctacaaaagaaaaatgttaaaattagacaggtgtggtgtctgtagtcccagctctctggaggcagggactgagtcagaggatcacttgagcataggggtttgaggctgcagtgagccatgatcctgccactgctgcagcctgagcaacagagcaagaccctgttgtaaaaacaaacaaacaaaaactggcagctgatacctgagagtgaatatcttttatcgctggttaatgggattgagagaa

SEQ ID NO: 10 - DNA, 4052 bp, Homo sapiens
cgtctcagcactttgtgaggcccaggcgggcagatcgtttgagcctagaagttcaagaccaccctgggcaacatagcgaaaccccctttctacaaaaaatacaaaaactagctgggtgtggtggtgcacacctgtagtcccagctacttggaaggctgaaatgggaagactgcttgagcccgggagggagaagttgcagtaagccaggaccacaccactgcactccagcctgggcaacagagtgagactctgtctcaaacaaacaaataaatgaggcgggtggatcacgaggtcagtagatcgagaccatcctggctaacacggtgaaacccgtctctactaaaaaaaaaaaaaaatacaaaaaattagccaggcatggtggcgggcgcctgtagtcccagttactcgggaggctgaggcaggagaatggcgtgaaaccgggaggcagagcttgcagtgagccgagatcgcaccactgccctccagcctgggcgacagagcgagactccgtctcaatcaatcaatcaatcaataaaatctattaacaatatttattgtgcacttaacaggaacatgccctgtccaaaaaaaactttacagggcttaactcattttatccttaccacaatcctatgaagtaggaacttttataaaacgcattttataaacaaggcacagagaggttaattaacttgccctctggtcacacagctaggaagtgggcagagtacagatttacacaaggcatccgtctcctggccccacatacccaactgctgtaaacccataccggcggccaagcagcctcaatttgtgcatgcacccacttcccagcaagacagcagctcccaagttcctcctgtttagaattttagaagcggcgggccaccaggctgcagtctcccttgggtcaggggtcctggttgcactccgtgctttgcacaaagcaggctctccatttttgttaaatgcacgaatagtgctaagctgggaagttcttcctgaggtctaacctctagctgctcccccacagaagagtgcctgcggccagtggccaccaggggtcgccgcagcacccagcgctggagggcggagcgggcggcagacccggagcagcatgtggactctcgggcgccgcgcagtagccggcctcctggcgtcacccagcccagcccaggcccagaccctcacccgggtcccgcggccggcagagttggccccactctgcggccgccgtggcctgcgcaccgacatcgatgcgacctgcacgccccgccgcgcagtaagtatccgcgccgggaacagccgcgggccgcacgccgcgggccgcacgccgcacgcctgcgcagggaggcgccgcgcacgccggggtcgctccgggtacgcgcgctggactagctcaccccgctccttctcagggcggcccggcggaagcggccttgcaactcccttctctggttctcccggttgcatttacactggcttctgctttccgaaggaaaaggggacattttgtcctgcggtgcgactgcgggtcaaggcacgggcgaaggcagggcaggctggtggaggggaccggttccgaggggtgtgcggctgtctccatgcttgtcacttctctgcgataacttgtttcagtaatattaatagatggtatctgctagtatatacatacacataatgtgtgtgtctgtgtgtatctgtatatagcgtgtgtgttgtgtgtgtgtgtttgcgcgcacgggcgcgcgcacacctaatattttcaaggctggatttttttgaacgaaatgctttcctggaacgaggtgaaactttcagagctgcagaatagctagagcagcaggggccctggcttttggaaactgacccgacctttattccagattctgccccactccgcagagctgtgtgaccttgggggattcccctaacctctctgagacgtggctttgttttctgtagggagaagataaaggtgacgcccattttgcggacctggtgtgaggattaaatgggaataacatagataaagtcttcagaacttcaaattagttcccctttcttcctttggggggtacaaagaaatatctgacccagttacgccacggcttgaaaggaggaaacccaaagaatggctgtggggatgaggaagattcctcaaggggaggacatggtatttaatgagggtcttgaagatgccaaggaagtggtagagggtgtttcacgaggagggaaccgtctgggcaaaggccaggaaggcggaaggggatcccttcagagtggctggtacgccgcatgtattaggggagatgaaagaggcaggccacgtccaagccatatttgtgttgctctccggagtttgtactttaggcttgaacttcccacacgtgttatttggcccacattgtgtttgaagaaactttgggattggttgccagtgcttaaaagttaggacttagaaaatggatttcctggcaggacgcggtggctcatgcccataatctcagcactttgggaggcctaggaaggtggatcacctgaggtccggagttcaagactaacctggccaacatggtgaaacccagtatctactaaaaaatacaaaaaaaaaaaaaaaagaagaagaagaagaagaaaataaagaaaagttagccgggcgtggtgtcgcgcgcctgtaatcccagctactccagaggctgcggcaggagaatcgcttgagcccgggaggcagaggttgcattaagccaagatcgcccaatgcactccggcctgggcgacagagcaagactccgtctcaaaaaataataataataaataaaaataaaaaataaaatggatttcccagcatctctggaaaaataggcaagtgtggccatgatggtccttagatctcctctaggaaagcagacatttattacttggcttctgtgcactatctgagctgccacgtattgggcttccacccctgcctgtgtggacagcatgggttgtcagcagagttgtgttttgttttgtttttttgagacagagtttccctcttgttgcccaggctggagtgcagtggctcagtctcagctcactgcaacctctgcctcctgggttcaagtgattctcctgcctcagcctcccgagtagctgggattatcggctaattttgtatttttagtagagacagatttctccatgttggtcaggctggtctcgaactcccaacctcaggtgatccgcccacctcgccctcccaaagtgctggaattacaggcgtgagccaccgcgtctggccatcagcagagtttttaatttaggagaatgacaagaggtggtacagttttttagatggtacctggtggctgttaagggctattgactgacaaacacacccaacttggcgctgccgcccaggaggtggacactgggtttctggatagatggttagcaacctctgtcaccagctgggcctctttttttctatactgaattaatcacatttgtttaacctgtctgttccatagttcccttgcacatcttgggtatttgaggagttgggtgggtggcagtggcaactggggccaccatcctgtttaattattttaaagccctgactgtcctggattgaccctaagctccccctggtctccaaaattcatcagaaactgagttcacttgaaggcctcttccccacccttttctccaccccttgcatctacttctaaagcagctgttcaacagaaacagaatgggagccacacacataattctacattttctagttaaaaagaaaaaaaaatcattttcaacaatatatttattcaacctagtacatacaaaatattatcattccaacatgtaatcagtattttaaaaatcagtaatgagaccaggcacggtggctcacgactgtaatcccaggactttgggaggccgaggcgagtggatcatctgagatcaggagttcaagaccagcctggccaacatggtgaaaccccatctctactaaaaactagctcagcatggtggtgggtgcctgtagtcccagctactcgggaggc

SEQ ID NO: 11 - DNA, 4059 bp, Homo sapiens
aaaaaatacaaaaactagctgggtgtggtggtgcacacctgtagtcccagctacttggaaggctgaaatgggaagactgcttgagcccgggagggagaagttgcagtaagccaggaccacaccactgcactccagcctgggcaacagagtgagactctgtctcaaacaaacaaataaatgaggcgggtggatcacgaggtcagtagatcgagaccatcctggctaacacggtgaaacccgtctctactaaaaaaaaaaaaaaatacaaaaaattagccaggcatggtggcgggcgcctgtagtcccagttactcgggaggctgaggcaggagaatggcgtgaaaccgggaggcagagcttgcagtgagccgagatcgcaccactgccctccagcctgggcgacagagcgagactccgtctcaatcaatcaatcaatcaataaaatctattaacaatatttattgtgcacttaacaggaacatgccctgtccaaaaaaaactttacagggcttaactcattttatccttaccacaatcctatgaagtaggaacttttataaaacgcattttataaacaaggcacagagaggttaattaacttgccctctggtcacacagctaggaagtgggcagagtacagatttacacaaggcatccgtctcctggccccacatacccaactgctgtaaacccataccggcggccaagcagcctcaatttgtgcatgcacccacttcccagcaagacagcagctcccaagttcctcctgtttagaattttagaagcggcgggccaccaggctgcagtctcccttgggtcaggggtcctggttgcactccgtgctttgcacaaagcaggctctccatttttgttaaatgcacgaatagtgctaagctgggaagttcttcctgaggtctaacctctagctgctcccccacagaagagtgcctgcggccagtggccaccaggggtcgccgcagcacccagcgctggagggcggagcgggcggcagacccggagcagcatgtggactctcgggcgccgcgcagtagccggcctcctggcgtcacccagcccagcccaggcccagaccctcacccgggtcccgcggccggcagagttggccccactctgcggccgccgtggcctgcgcaccgacatcgatgcgacctgcacgccccgccgcgcagtaagtatccgcgccgggaacagccgcgggccgcacgccgcgggccgcacgccgcacgcctgcgcagggaggcgccgcgcacgccggggtcgctccgggtacgcgcgctggactagctcaccccgctccttctcagggcggcccggcggaagcggccttgcaactcccttctctggttctcccggttgcatttacactggcttctgctttccgaaggaaaaggggacattttgtcctgcggtgcgactgcgggtcaaggcacgggcgaaggcagggcaggctggtggaggggaccggttccgaggggtgtgcggctgtctccatgcttgtcacttctctgcgataacttgtttcagtaatattaatagatggtatctgctagtatatacatacacataatgtgtgtgtctgtgtgtatctgtatatagcgtgtgtgttgtgtgtgtgtgtttgcgcgcacgggcgcgcgcacacctaatattttcaaggctggatttttttgaacgaaatgctttcctggaacgaggtgaaactttcagagctgcagaatagctagagcagcaggggccctggcttttggaaactgacccgacctttattccagattctgccccactccgcagagctgtgtgaccttgggggattcccctaacctctctgagacgtggctttgttttctgtagggagaagataaaggtgacgcccattttgcggacctggtgtgaggattaaatgggaataacatagataaagtcttcagaacttcaaattagttcccctttcttcctttggggggtacaaagaaatatctgacccagttacgccacggcttgaaaggaggaaacccaaagaatggctgtggggatgaggaagattcctcaaggggaggacatggtatttaatgagggtcttgaagatgccaaggaagtggtagagggtgtttcacgaggagggaaccgtctgggcaaaggccaggaaggcggaaggggatcccttcagagtggctggtacgccgcatgtattaggggagatgaaagaggcaggccacgtccaagccatatttgtgttgctctccggagtttgtactttaggcttgaacttcccacacgtgttatttggcccacattgtgtttgaagaaactttgggattggttgccagtgcttaaaagttaggacttagaaaatggatttcctggcaggacgcggtggctcatgcccataatctcagcactttgggaggcctaggaaggtggatcacctgaggtccggagttcaagactaacctggccaacatggtgaaacccagtatctactaaaaaatacaaaaaaaaaaaaaaaagaagaagaagaagaagaaaataaagaaaagttagccgggcgtggtgtcgcgcgcctgtaatcccagctactccagaggctgcggcaggagaatcgcttgagcccgggaggcagaggttgcattaagccaagatcgcccaatgcactccggcctgggcgacagagcaagactccgtctcaaaaaataataataataaataaaaataaaaaataaaatggatttcccagcatctctggaaaaataggcaagtgtggccatgatggtccttagatctcctctaggaaagcagacatttattacttggcttctgtgcactatctgagctgccacgtattgggcttccacccctgcctgtgtggacagcatgggttgtcagcagagttgtgttttgttttgtttttttgagacagagtttccctcttgttgcccaggctggagtgcagtggctcagtctcagctcactgcaacctctgcctcctgggttcaagtgattctcctgcctcagcctcccgagtagctgggattatcggctaattttgtatttttagtagagacagatttctccatgttggtcaggctggtctcgaactcccaacctcaggtgatccgcccacctcgccctcccaaagtgctggaattacaggcgtgagccaccgcgtctggccatcagcagagtttttaatttaggagaatgacaagaggtggtacagttttttagatggtacctggtggctgttaagggctattgactgacaaacacacccaacttggcgctgccgcccaggaggtggacactgggtttctggatagatggttagcaacctctgtcaccagctgggcctctttttttctatactgaattaatcacatttgtttaacctgtctgttccatagttcccttgcacatcttgggtatttgaggagttgggtgggtggcagtggcaactggggccaccatcctgtttaattattttaaagccctgactgtcctggattgaccctaagctccccctggtctccaaaattcatcagaaactgagttcacttgaaggcctcttccccacccttttctccaccccttgcatctacttctaaagcagctgttcaacagaaacagaatgggagccacacacataattctacattttctagttaaaaagaaaaaaaaatcattttcaacaatatatttattcaacctagtacatacaaaatattatcattccaacatgtaatcagtattttaaaaatcagtaatgagaccaggcacggtggctcacgactgtaatcccaggactttgggaggccgaggcgagtggatcatctgagatcaggagttcaagaccagcctggccaacatggtgaaaccccatctctactaaaaactagctcagcatggtggtgggtgcctgtagtcccagctactcgggaggctgaggcatgagaatcacttgagcccaggaggcagaggttgcagtgagccaagattttgggggattctgtgacatacaaaaaaaatcagtaataagatatc

SEQ ID NO: 12 - DNA, 4045 bp, Homo sapiens
tcagcctcctgagtagctgggactataggcgtgcagtgccacacctagctaatttttgtatttttagtaaagacggggtttcaccatgttggccaggctggtcttgaactcctgacctcagatgatccgcccgcctcggcctcccaaagtgctgggattactggcatgagccactgcgcccagcccagactcatttttctttgagagtaggcttttcccaaaagtaggcttctgagctattcactttcaggcagtcccatgtgccaggaaccacatccaaatttcctccgtggatgggagtctcaggctgccttatctccttgcatgtccccatgcccagctgtctcagcctaagggcaggtaccttgaagtcaagttaaacaataagattggagaccagcaatgccctcagcctggtttttgcagcaggactgagtcccttgttttggctcaatgggaagtctttgctgttcaaagccttagcttctctggctgagtgcggtggctcacgcctgtcatcctagctctttgggaggccgaggtgagcagatcactgaggccaggagttcaagaccagcctggccaacatggtgaaaccctgtctctactaaaaatacaaaaagttagccaggcgtggtggcaggcacctgtaatcccagctactcgggagcctgaggcaggagaatcgcttaaacccaggagatggaggctgcagtgagctgagatcatgccattgcactccagcctgggtaacgagcgaaattccatctctaaaaaaaagaaaaaaaaaaggccttagattctccctttgactttccacgtttgtgcagccttttatctccaatgctccatttcattccatctcctggcttattcttttcttgtcacatctactaaaagcaacaagaagccaccggtattcaggaacattctacctgtccccagagctatatgctcagtaggcatacagttggccctccaggttatctgagactcagatttccagagggctttgcatggctcacaaggtctgaagaacctctgagcctcccgcctgcggtgtctgttcattgactttgccacagtctcaaagaggcactgcatgctgcatgtttgaggtttttgctttggtggcatccatttccagcctcggcttccggcattcctcccccagcagactctctgctgctttccccttactccttctggcagttctgggaggttgcatagggcccttgcaggatgccccaagtccagctgcctctggcctctgggaagcacacccttgacctgccatgtgtaggaagacagcccgcttctgccagggcccaactctgccggcaggtagcaccttccaacctcttcactttggactttataactgtcaggtataaagtcggttgtgtccttacgtttctcaaattcttcaagacacgtcaaccagcctctcctacgcattctctccagctcagtctcaaaacacaccctttctctccagctcactctcaaaacacaccctatcaggccaaccactctttttaaaggacagctcctcaccaatccagtcaggtagccttccccacattgtatcctggaagtgggtgatggactgggtggggaagagggtcatatggcaaatctgtatgtcttacagtaattgtctagcagcccctggtgtcttactttaggccccctggaaactttcagatagtggagttgtctgatacatatcttataacctacagatattaatatatcctcacaggggcacaaaagctcttacaaggatgtttattataataatatttttattgttataatttacatgccataaaactaaccattttaaaatgtataatgcaagggtttttagtatattcacaagattgtgcagctgtcactactaattccagaacattttcattattccagaaggaaaccctattcatattagcaatcactcccccattccgcctttccctaaaacccagcaatcactaatctactttctgtctctgtggatttaaagtaattttaaatttgaaaaatagtatctataaggaaatgtatctagtcacaagcatacagcttgatgaatttgtaaaaattgaacagtcctatgaacataccctgtaagctcaagacatagaatgttaccagcccctgcaagcaagctgcctgctcacttctagtcattaacccctccctcttttccttctagtcattaacccttcagagtaactattctgattaccaatagcatagattagttctgcctgttgttttactttatataaactgtctcattaagtataaacatgtttgtgtatacttgtgtatttctttctatcacaatgatgtttgtgagattcatccatgctgttcctatagacaattctattttgcagcgtagtattccattgcatgactataccacaatttatctgtgatattacaaaggaatacttgggcagtttccagtttggggctataggatagttgtgatacaaatattttagtatagtacatgtcttttggtgaacctgggtacacatttctgttgtgtataccccttaagagtggagctgatgatcctggctaacaaggtgaaaccccgtctctactaaaaatacaaaaaattagccgggcgtggtagcgggcgcctgtagtcccagctactcgggaggctgaggcaggagaatggcgtgaacccgggaggcggagcttgcttgcagtgagccgagatcgcgccactgcactccagcctgggcgacagagcgagactccgtctcaaaaaaaaaaaaaaaaaaagagtggagctgatgggtcatagcatgtaaatgcattcaactttagtagatactgtccaacagttttccaaagtgattgtccaacttacttgcctatcagcagtatctgaaaagtctagttgcttcttttcttggccaactctttttttttttttgagatggagttttgctcttgttgcccaggctggagcgcaatggcacgtcctctgctcactgcaacctccgcctcctgggttcaagcaattctcctgcctcagcctcccgagtagctgggattacaggcatgcgccactatgcccggctaattttgtatttttagtagagacagggtttctccatgttggtcaagctggtctcgaactcctaacctcaggtgatccgcccgcctcggcctcccgaagtgctgggattacaggcatgagccaccgcgccaggccggccaactcttttttattttattttattttactttaaagacagggtttcactttgtcacccaggatggaatgcaatggcacgatcacagctcactgcagccttgacctccctggctcgggtgatccctcccacctcaggctcctgaggagctagaactacaggcatgggccatgcccagctaattttttaatttttggtagagacggggtctctgttgtctcagattcctgggttcaagtgatccttctcccttggcctcccaaagttctggtattacaggcatgagccactgcacccagcccatggccagctcttgatacgatctgtctctttcttttctttttttttttttaatttgagaagtgttaaataatctttctttgatattatacataaaccacaccaaaatgtctttcagtaagtaaaatgaaccattttagatacagaaaattctaattagattggcatagttaaggccaaaaatataaagttgacattgctaccttatcttcagcccttgcctttaagaggcaaatgaacacaaaatacaggtgaatcttgcttggttctgagacagtgaaggactttcccccagtatttaaatatatttacataaccagttacataaatctaaatattaaaaaaatctccaatagattttagatggcattcaccatctttgtgaaaagttgaacattactaatgaaatctgatcatatctttagaaggataaacagtgatagcatttactgaatcagaataactgttttttggggttttctttgagacggagtttt

SEQ ID NO: 13 - DNA, 4047 bp, Homo sapiens
agtgtctgcagccccctgagaccacttaatcccaagttaaaaacccctgctcagaggcagcatctttttttttttttttttttttttttttgagagagatctcactctgtcacccaggctggagtgcagtggcacgatctcagctcactgcaaccaccacctcctgggctcaagggattctcttgcctcagtctcccgagtaactgggattacaggcgcgtgccactatgtccagctaatttttttttttgtatttttagtagagatggggtttcaccatgttggcctggctggtcttgaactcttgacctcaagtgatccactggcctcagcctcccaaagtgctggcattagaggtgtgagtcactgttcctggcccagtgaggcaccatctcattggatatggagacaaaggatctggcttagcatcctggatttgtattttctttccaagagtccttaagtgatatctaacttttgcgagctgcagtttcctcagctatgagatgagtgacattaacctcctctcttcagatttataagaggatcaattaaaatggcataggtaaaagtgcatcctagcaagttggtatctactttagaaatgaaggaggtcatatgtatgtgaagtctccagacccaacatgccatcttatatgtgtctatttctacaagtgagctagtgacaacagtaattgctatttttgctcctacatgggtagggctgatcttgactaggaggagtcaataagactcaccagccgggcgtggtggctcacgcctgtaatcccagcactttgggaggccaaggcgggcggatcacgaggtcaggagatcgagaccattctggctaacacggtgaaaccccgtctctactaaaaaaatacaaaaaaattagctgggcgtggtggtgggcgcctgtagtcccagctactcgggaagctgaggcaggagaatggcgtgaacccgggaggcagagcttgcagtgaaccaagatcgagccactgcactctagcctgggtgacagagcgagactccatctcaaaaaaaaaaaaaagactcaccagctgtggccactgtctgtgctaattggctagtgcctgcatctcagaaactgctacatattttgactattccccctgcacttaagggcatgcacactcccaaaatagactcagattgtctaaggaataatgatgatgatgaagagaaagccctctttatctggtctatttgtagtcagttccaaaagcattaagaatttctgctgaactaatgcagctagtttctttcctgtcaccactttccttccaaaatagtttcaagatctgtgggggaaaaaatctatttacagtgaacagactggtgggaggaagttgagcattggggttttctgccctgtgtaaccttgccctaagttgggcagatggtatcacactacctggacatcatctgctcattcactatttgaccagttggtcattcattcacaaatgtcctttttgcaggagggatggaggtgctagacctgcagatgctagcatgaaaagacagatctcctgctgctaaggtgcttaaagtagtggaggtcaggggacaagcaagcagtcaggcagctctgaatgcagaggcaggaagcaccacgaggcaatgggacccacagaggggtagcagggtagaggtgagtgggtctcatgtggggagggaggaagttgactgcagagaaggtgccagggggtgaaaatagcttgagagctgtggagctagaagggctctcacatttgcttattaatatgccctttgaaaaagagtggcctgatacctggagtcactcaaaagatttccaattccgataggaaaaagtcaattttggcttcagtggttgcatgtgcaccccctgatttgctgtatgctgaggcattgtggtgatggacgcaagtgcggagaccttgagcacgcatctgcccctagttcttgccctgagtcctcgaaggaggcaggagagacatcaaggcagacaggcgccgctcatcagtgatgagaccagacctggaactcgcgtcttatactcagtcctctgccctttctgctggattgtggccccccagtatagggtgcaacacacaactggagcatttaagggccacaaagagaacaaattaccaatgattgtgtgttgattctttgagctctttttttttattattatactttaagtgttagggtacatgtgcacaatgtgcaggttagttacatatgtatacatgtgccatgctggtgtgctgcacccattaactcgtcatttagcattaggtatagctcctaaagctatccctccccccttccccctccctccaccccacaacagtccccagagtgtgatgttccccttcctgtgaccatgtgttctcattgttcagttcccacctatgagtgagaatatgcagtgtttgattttttgttcttgcgatagtttactgagaatgatgatttccagtttcatccatgtccctacaaaggacatgaactcatcattttttattgctgcatagtattccatggtgtatatgtgccacattttcttaatccagtctatcattgttggatgagctctttatctcatggaaaaataatttataaaactctgtatgagaggagtgggaaatagtattaacgggtgcggggtttctttttgggacaatggaaatagctggaattagatagtggtgatgtttgcacactttgtgaaatactaaaaactcctgaattatacagttttaagaaacttttatttatttgtttttgagagaagttctctgtgtcacccaggctgaagtgtggtggcgtgatcaccggttattgcagcctcaatctctgaggctcaagcgattctcccacctcagcctaccaagtagatgtgactataggtgcgcaccaccacacccagtgaatttgtaattttttgtaaaaacaaggttttaccatgttgcccagtctggtcttgaactcctgggcccaagcgatcctccctccttgggctcccgaagtgccaggatacaagcatgagtcaccacatgcagcctcagttttaagaaacttttaaataaatgaaatatagtcataccaaaacagtaaaaatgggtttcaggaaaaaaaatgtttttttaaacaaacttacgtattgtataatcccagcccttttaaaaaatgctttcaaaaactggcagtcaactcataaaaggacaaatacttatgattccactgatgaagtagtcaaaagtagtcaaaaatcacagaaacaccaccataaatgtataatttttattttcaattaaaaaaacatcttttttttagtcaaaatcatagaaatagaaagtagacaggtggttactaagggctatgggatggggaaattagtgtctaatgggcatagagtttcagtgttacaaggtgaaaagttctagagttatgctgcccagcagtgtgaatatactttattgttctgtacacttaacatggttaatatggtaaatttagcgttatgtgctttttactatagtaaaattaaaaaaaaaaaaaatggggccgagtgcagtagctcacacctgtaacataatcccagcactttgggaggccgaggtaggaggatcacttgaggccagaagtttgaaaccagcctggtcaatatagcgagacctcatctctacaaaagaaaaatgttaaaattagacaggtgtggtgtctgtagtcccagctctctggaggcagggactgagtcagaggatcacttgagcataggggtttgaggctgcagtgagccatgatcctgccactgctgcagcctgagcaacagagcaagaccctgttgtaaaaacaaacaaacaaaaactggcagctgatacctgagagtgaatatcttttatcgctggttaatgggattgagagaatgcttcatcttatagaaagaacagtgtctttggacccacagagacctggatttaagattagctctgccaattactgagtactctttactatgaacctctg

SEQ ID NO: 14 - DNA, 4371 bp, Homo sapiens
aaagtagtggaggtcaggggacaagcaagcagtcaggcagctctgaatgcagaggcaggaagcaccacgaggcaatgggacccacagaggggtagcagggtagaggtgagtgggtctcatgtggggagggaggaagttgactgcagagaaggtgccagggggtgaaaatagcttgagagctgtggagctagaagggctctcacatttgcttattaatatgccctttgaaaaagagtggcctgatacctggagtcactcaaaagatttccaattccgataggaaaaagtcaattttggcttcagtggttgcatgtgcaccccctgatttgctgtatgctgaggcattgtggtgatggacgcaagtgcggagaccttgagcacgcatctgcccctagttcttgccctgagtcctcgaaggaggcaggagagacatcaaggcagacaggcgccgctcatcagtgatgagaccagacctggaactcgcgtcttatactcagtcctctgccctttctgctggattgtggccccccagtatagggtgcaacacacaactggagcatttaagggccacaaagagaacaaattaccaatgattgtgtgttgattctttgagctctttttttttattattatactttaagtgttagggtacatgtgcacaatgtgcaggttagttacatatgtatacatgtgccatgctggtgtgctgcacccattaactcgtcatttagcattaggtatagctcctaaagctatccctccccccttccccctccctccaccccacaacagtccccagagtgtgatgttccccttcctgtgaccatgtgttctcattgttcagttcccacctatgagtgagaatatgcagtgtttgattttttgttcttgcgatagtttactgagaatgatgatttccagtttcatccatgtccctacaaaggacatgaactcatcattttttattgctgcatagtattccatggtgtatatgtgccacattttcttaatccagtctatcattgttggatgagctctttatctcatggaaaaataatttataaaactctgtatgagaggagtgggaaatagtattaacgggtgcggggtttctttttgggacaatggaaatagctggaattagatagtggtgatgtttgcacactttgtgaaatactaaaaactcctgaattatacagttttaagaaacttttatttatttgtttttgagagaagttctctgtgtcacccaggctgaagtgtggtggcgtgatcaccggttattgcagcctcaatctctgaggctcaagcgattctcccacctcagcctaccaagtagatgtgactataggtgcgcaccaccacacccagtgaatttgtaattttttgtaaaaacaaggttttaccatgttgcccagtctggtcttgaactcctgggcccaagcgatcctccctccttgggctcccgaagtgccaggatacaagcatgagtcaccacatgcagcctcagttttaagaaacttttaaataaatgaaatatagtcataccaaaacagtaaaaatgggtttcaggaaaaaaaatgtttttttaaacaaacttacgtattgtataatcccagcccttttaaaaaatgctttcaaaaactggcagtcaactcataaaaggacaaatacttatgattccactgatgaagtagtcaaaagtagtcaaaaatcacagaaacaccaccataaatgtataatttttattttcaattaaaaaaacatcttttttttagtcaaaatcatagaaatagaaagtagacaggtggttactaagggctatgggatggggaaattagtgtctaatgggcatagagtttcagtgttacaaggtgaaaagttctagagttatgctgcccagcagtgtgaatatactttattgttctgtacacttaacatggttaatatggtaaatttagcgttatgtgctttttactatagtaaaattaaaaaaaaaaaaaatggggccgagtgcagtagctcacacctgtaacataatcccagcactttgggaggccgaggtaggaggatcacttgaggccagaagtttgaaaccagcctggtcaatatagcgagacctcatctctacaaaagaaaaatgttaaaattagacaggtgtggtgtctgtagtcccagctctctggaggcagggactgagtcagaggatcacttgagcataggggtttgaggctgcagtgagccatgatcctgccactgctgcagcctgagcaacagagcaagaccctgttgtaaaaacaaacaaacaaaaactggcagctgatacctgagagtgaatatcttttatcgctggttaatgggattgagagaatgcttcatcttatagaaagaacagtgtctttggacccacagagacctggatttaagattagctctgccaattactgagtactctttactatgaacctctgttttcctcatctgtgaaactggaataatgaatcctaccgccaacaattgtagtcaagttggaaacaatttacacaaagtgccaaacaccaagcctggcacagtaggaaccgagtaaatagtggttaatatttttatcagtgtctgcattgctgacgtctccatcatttctatacatttgtttttgaatcagaaaaagatgttattttaaaaaaataacccagtagtgccccttgtcccattcctatcagttatattattattgttactaccctctggaatttcaataactctttgttttttgggttttttgttttgttttgctttgcttttgagacaggatctctgtcgcccagtctggtgtgtagtggtgtgatctcagctcactgcagcctcaacctcctgggctcaggtgatcctcccacttcagcctcccaagtagctgggaccacaggcgcatgccaccacacttggctaatttttgcatttttagtagagacagggttttgccatattgcctaggccggtctggaacttctgggctcaagccatctgcctgcctcggcctcccaaagtgctggaatttcaggcatgagccatgcctggcctaaatagctctctgtgtttgcaaaagtgtgttataagaatcattcagagcctctcgattggatggaggctctagaatgcacagaaaaaggctgccaccgtgtatctctgcaagtcatgcacaagatggggaacagcaggcttccccctgcttaccagttcaaatacagagaactagccctgtagctgtttctttcatatctcacccattctaaagagaccacaggccttagaagtaaaggactcttttgttgaaagagtgttttcaaatttaaatgagcatttattggtcaaagatgcaccaactagtcttttgaagaattcaaggctctttagagaaaaataaagccttggaggagtatctgagaagcttgttagatgcgtgggaagagtctggaaataaaaaacttcatctggagtttctgccttctaccaacagagctgaagctaatgctctcctaagacaagcaaagcagatggtttgcatacttccttaccttccttttacttcctctgtaatagacttgtcatgtctgatgtttgagttgacgtggtactctaatagagttagagtctgcattttttttatgtcctctagtatgttctggttgatggttgagggcaacaaaccagcagtcccagatgccagcaccaagacctgagacaggtcacttaactctccgagcttcaccaccattctcaccttgcagacctcacagggaacagggaaagctctatgagatacaacatcattatgattaatcctattctgattctgaaagcaaagctcttcctacacaaactcctatttctaaatactaaaagacatttctttatggtgtattttgtgtacttgtagaaatggaaagtgttgagataaaacatgaagcaatgatgacaaagtgctaactttttcttgttttaatttctttatgctttttttccacctaatcccctagagtggtgtcttaactgtcaaactgggtggagatctaggaacctatgtgatcaacaagcagacgccaaacaagcaaatctggctatcttctccatccaggtatgtaggtatgttcagaagtcaacatatgtaattcttaaagacttccgaaatgtgacattgtggaccatttaagaaatgtcggctgagcacagtggctgacacctgtaatcccaacactttgagaggctgaggtaggaggatcacttgaggacaggagttcagaaccatcctgggcaacatagtgagtccctgtctctgtaaagaaaataaaaataaagtcacagctgggtgcaggc

SEQ ID NO: 15 - DNA, 55 bp, Homo sapiens
gcctaagattgttgctgctcaggaagaaaaccaggttctaatgggagaggcaggg

SEQ ID NO: 16 - DNA, 24 bp, Homo sapiens
cttgttgatcacataggttcctag

SEQ ID NO: 17 - DNA, 4055 bp, Homo sapiens
acccaggctggagtgcaatggcatgatctcagctcactgcagcctccatctcctgggtttaagcgattctcctgcctcaggctcccgagtagctgggattacaggtgcctgccaccacgcctggctaactttttgtatttttagtagagacagggtttcaccatgttggccaggctggtcttgaactcctggcctcagtgatctgctcacctcggcctcccaaagagctaggatgacaggcgtgagccaccgcactcagccagagaagctaaggctttgaacagcaaagacttcccattgagccaaaacaagggactcagtcctgctgcaaaaaccaggctgagggcattgctggtctccaatcttattgtttaacttgacttcaaggtacctgcccttaggctgagacagctgggcatggggacatgcaaggagataaggcagcctgagactcccatccacggaggaaatttggatgtggttcctggcacatgggactgcctgaaagtgaatagctcagaagcctacttttgggaaaagcctactctcaaagaaaaatgagtctgggctgggcgcagtggctcatgccagtaatcccagcactttgggaggccgaggcgggcggatcatctgaggtcaggagttcaagaccagcctggccaacatggtgaaaccccgtctttactaaaaatacaaaaattagctaggtgtggcactgcacgcctatagtcccagctactcaggaggctgaggcaggaggattgcttgaacccgggaggcggaggctgcagtgagccgagatcgcaccactgcactccagcctgggtctcagggtgtgatttcataaaagaaaaaaaaagagagagagagagagaaatgagtctggcctaaaatagctgactggagtcttaaaacaccctgtggaaccccaaactgttattagcaggaagtgggctgtgaaggctccttgccccggaggagggcacacttcccactgcctgcctgccttgtggccaaggaaaataacagacaaggaggagcctctcgagaggctgaagcagggatttgtggaggaacatgctcctctgccagggcagaggttgatccagtgctgcccagcagggctccagtgctgcgggcagctagtgctgtgcctcttttctgaatggagttacagttgcagttatcctgcccctctccatcgtgtgtgtgtgtgtgtgtgtgtgtgtgtgtctgtgtgtgtgtgtctgtgtctgtgtgtagatcagaagaagccattcctaaagctgggagagaggagactgcatgtcacctggaaatcttggactcggaggtggctgtggtgaccacatgggcatcggttggctctcttggggctgggggtaaatgcatctgagtgtggaaggagggtccatgcagatactggttggcagggggtagactgtagccgtgcctgacagctttccatggggaatgccgtgccggctttttccagggcactcgctagactatatttcccagcctcccttacagtcagctaaggccacaccactaagttcttcccaccagaatgtgagtgaggaacaaatgccacttccagcccttctgtgcttctagccctttctggccaatggaacttggacaaggtgactgagactcaacaatgcagaggacagtaaggcactgacagataaagaccaaactggaagctggaatgagtgtagttcctaattcacttcaggaggtatgccaaccctgtactgcccagagaggaggacacaaacgttattggtttgagctattaaatatttgggtctatttgtgatagcagcatggcctgctctaactattagggtattaaataaaataatattgaaactctggaaacaacctgaatgtccaacagtaggggatgggttaaatggattatgtcacatccatgcaatctaatactatttcattaaaaataatgtggtggatactcagtcacatggaaagatgcctaagattgttgctgctcaggaagaaaaccaggttctaatgggagaggcagggaaggagagaggaagatacctatgacgtggaaggtgttttatcttaccctgggtggcccaaagttccagatttcctcaaattcatcaaatagacactctgctttttgacattccaaatctggttgaggccacgttggttcgaactctgaaagccaaagttaagaagtacgttactatttttcagtgaattataacccattaatgcataatttatatattgctacttctacattcgagtgcctgtaaccgagtgctccattttttctaagaaaaagggaatatgttgcttttcttaaaaaaaattatcctctcttctcttctcctctcccctggttcccggtttcctacttagcccttcagaaatgcaaatataacctttcacctccccttcaccatacattcccttcagggcaagcttttctaactgtatgctcttccagagcacagatctctccacatgacagtagattcgcagaccaaagcaaacccatcacggaactttcacctccagtgggtggtggcctggcacttccacccttgggggttgcctcaggactttcattcactgggagggcatactgaaagcatgcccacttggccactgctacagcttattactaaccaggaaggtgccaagtcaactgtcctgtagagtatgcacggaactagcagagggacccccccacttgcccttgcacacttccccccttaccttataaaagtgtccactttctacttccaaggggaagcagcacttttaaagaaaggcaggatgctttgtacccctcacccaagctagtttcggagtaaattcactttttttggtaccaggccttgctcttgttaattggactctgcatccggtgaacaactaacctgcattttggttaaataatcatgctgaagtttttttttttggtttttgttttttgtttttgagatgaagtctcgctctgtcgcccaggctggagtgcagtggcacgatctcggctcactgcaacccccgcctcccgggttcgagtgattctcgtgcctcagcctcccgcgtagctgggattacaggcacccgccaccgcacccgattttttgtatttttagtagagacggggtttcaccatgttggccaggctggtcttgaactcctggcctcaagtgatctgccctcctcagcttcccaaaatgctggatgtgagccaccgcacccagccctatattaaagtattttaggaatatttcttaggatttttttttttttaccttcttttagtgcattacagtgattctccctgtgtctctctaagcccgtgttttccaataggctagccaacaagccacacgtagctatttacatttaaatttaatgagataaaatataaagtcagctcctcaactgcaccaccagtttcgagaatcctgtggccacatgtggctagtggtgcagacacagcatttccatcacatcaggaagttctactgggcagggctgctgcaggctgttcaggttacagggtggttagcaggaggctgggaggcatccacaatgctcttaaaaggtcactaagagaggcaacaggaaatagcaagaggcagaatcctgctgaagtccagaagatttggctctgactgctgactgctgtctgacagatcttattatcatgatctgcaggacagaatgtgacctgttgattttttttagtccctaactgctggacatccaggtgacagggtctgagttgattaccaccagctctgctgaccagctggggagatgaaggaaataatcagacaagagccactggggcacaagagtggtgcagctggagtagggagatgcaggggaggtgacaggggaggtgatggagcgaggagggggcgccctgggtcttgccaaggacctcagctggacgtcatcctgggaaggcaccgaagggctttaagagattggtgataaggtttacattctccaaaggtcactggttgccatggagagaagaggcgaga

SEQ ID NO: 18 - DNA, 4024 bp, Homo sapiens
gaaggggaggggcctgaggtggaccggggagcctgtggtctctgggtgtggcctgctctggccaaggcacctcttcagtctcacccagtctcaacctgccccgtcccccatatatatatatatattttttttttttgaggaagatagtatctgtgacagtaaacggcatgctcagcagatctttccaaattcccatgcttctgaacacagctagagcgtattgctgggcagtgtgtccaaatacgatatggacgttttcagtcttcagatatggggaaagttcttttggggtaagtgcctgcccgatatctacaaagccactgatccccaaaagtgatcgctggaccgagctgatccacttcgttcccccggagatgaaggataagaacacacaggctcaagcacagccagggtcaggaagaatgactgaggccacagaggctagttggcccacagaggttaaaatcctccaacctccagcacactaactgggtctaaaaaccaatacaatctgtgaattagggccttcctagaatgacagtgatttctagtgctgtttttgttgaactctagcacacttcttggatgaaagtgtggggaaaggaaacacactatttattctgaacaaagcattagagatcacagaataataaatgggaaaatattaattacctaaaaatgatgtcaatgttagggggtagagtaaggttataatttttaaaaaatgcaaataccgttagtctttcaaagaattctatgctagttttatctggccctttcccaattcacagtcaacatgctctctttggaagtgctaatgaatgactggatctgagaacgttttgtgggcatttctcttttactttcttacaaccacttcaacagcagccaggctgctgagggatgagggatgtctctccctgcatgttctcaggctttcagatgctatgcaggccacattgtgtctccaacacaatcttttattcctctagattgaaagcacatcaatggaaaaggcaggagggattaaatgccctggagcagcaatatataacactctaccacctccacagggtacacaaccccaacctgcaaagggaattcaaataaccctttacctgagaggctcaaaacaagtagaggtcaaactttaacttgctttgaagacaaagtgcaacttgttcaaacgctacaaggtcaaaagtagcttcttttaaagtcagggcaataatttaatagaggaaaactgtctaggctggatttggaaaagttataagctactcacttcagatcttaatatcctgatgcctgcttacagtatccaaattgtcagcagggagaagttatgtaactagagtaaacttttctactgagaatgagacaggctgcaaaatatcaggaaaggctcacttacaaggatgctaacataagacgatgactttttttttttttttgggacagggtctggccctgttgcccaggctggagtgcagtggcgcgatcttggctcactgcaacctccacctcctgggctcaggctgaggctcaacctcagccttccaagtagttgggactataggcgtgtgccaccacacctggctaatttttatatttttagtagaggtggggctttgtgacattgcccaggctggtctcaaactcctgagctcaagtgatccacaggccttggcctcccaaagtgctgggattacaggtgtaagcctgcacccagctgtgactttatttttattttctttacagagacagggactcactatgttgcccaggatggttctgaactcctgtcctcaagtgatcctcctacctcagcctctcaaagtgttgggattacaggtgtcagccactgtgctcagccgacatttcttaaatggtccacaatgtcacatttcggaagtctttaagaattacatatgttgacttctgaacatacctacatacctggatggagaagatagccagatttgcttgtttggcgtctgcttgttgatcacataggttcctagatctccacccagtttgacagttaagacaccactctaggggattaggtggaaaaaaagcataaagaaattaaaacaagaaaaagttagcactttgtcatcattgcttcatgttttatctcaacactttccatttctacaagtacacaaaatacaccataaagaaatgtcttttagtatttagaaataggagtttgtgtaggaagagctttgctttcagaatcagaataggattaatcataatgatgttgtatctcatagagctttccctgttccctgtgaggtctgcaaggtgagaatggtggtgaagctcggagagttaagtgacctgtctcaggtcttggtgctggcatctgggactgctggtttgttgccctcaaccatcaaccagaacatactagaggacataaaaaaaatgcagactctaactctattagagtaccacgtcaactcaaacatcagacatgacaagtctattacagaggaagtaaaaggaaggtaaggaagtatgcaaaccatctgctttgcttgtcttaggagagcattagcttcagctctgttggtagaaggcagaaactccagatgaagttttttatttccagactcttcccacgcatctaacaagcttctcagatactcctccaaggctttatttttctctaaagagccttgaattcttcaaaagactagttggtgcatctttgaccaataaatgctcatttaaatttgaaaacactctttcaacaaaagagtcctttacttctaaggcctgtggtctctttagaatgggtgagatatgaaagaaacagctacagggctagttctctgtatttgaactggtaagcagggggaagcctgctgttccccatcttgtgcatgacttgcagagatacacggtggcagcctttttctgtgcattctagagcctccatccaatcgagaggctctgaatgattcttataacacacttttgcaaacacagagagctatttaggccaggcatggctcatgcctgaaattccagcactttgggaggccgaggcaggcagatggcttgagcccagaagttccagaccggcctaggcaatatggcaaaaccctgtctctactaaaaatgcaaaaattagccaagtgtggtggcatgcgcctgtggtcccagctacttgggaggctgaagtgggaggatcacctgagcccaggaggttgaggctgcagtgagctgagatcacaccactacacaccagactgggcgacagagatcctgtctcaaaagcaaagcaaaacaaaacaaaaaacccaaaaaacaaagagttattgaaattccagagggtagtaacaataataatataactgataggaatgggacaaggggcactactgggttatttttttaaaataacatctttttctgattcaaaaacaaatgtatagaaatgatggagacgtcagcaatgcagacactgataaaaatattaaccactatttactcggttcctactgtgccaggcttggtgtttggcactttgtgtaaattgtttccaacttgactacaattgttggcggtaggattcattattccagtttcacagatgaggaaaacagaggttcatagtaaagagtactcagtaattggcagagctaatcttaaatccaggtctctgtgggtccaaagacactgttctttctataagatgaagcattctctcaatcccattaaccagcgataaaagatattcactctcaggtatcagctgccagtttttgtttgtttgtttttacaacagggtcttgctctgttgctcaggctgcagcagtggcaggatcatggctcactgcagcctcaaacccctatgctcaagtgatcctctgactcagtccctgcctccagagagctgggactacagacaccacacctgtctaattttaacatttttcttttgtagagatgaggtctcgctatattgaccaggctggtttcaaacttctggcctcaagtgatcctc

SEQ ID NO: 19 - DNA, 52075 bp, Homo sapiens
cctgtaataccagctacttgggaggctgaggcaggagaatcgcttgaacccaggaggtggagatttcagtgagccgagattgcaccactgcactccagtctgggtgacagagcaagacttcatctcaaagaaataaataaataaaaaacaaggccgggcatggtggctcatgcctgtaatccagcactttgggaggctgaggctgaggtgggcagatcacctgaggtcaggagttcaagaccagcctggccaacatggtgaaaccccgtctctactaaaaatacaaaaattagccaagcgtggtggtgggcgcctgtaatcccaactacttgggaggctgaggcaagagaatttcttgactctgggaggcaaaggttgcagtgagccgagactgcaccactgcactctagcctgagcaacagaacaagactctgtctcaaaaaaaaaaaaaaaaaaaaaacatacaaaccgaatttccattccacatactactcttgctgttttaccacttggacaagactgcttgctggtacataagttctggaacacttccttgcagcagtctggctgagccttggtatttaaaagaaatttacctaccagcctggctataattgacataatcctattaaatacttgccttttatgaacatatatcacatgacataagtttttgtcaaatactttttttttggtcaaagactgtagccttataccactcaagggggctgttagggtagcttatgaatggatatttcatacagagttacgtatttaacccatttcctgtttagaaaataaaagtggccaggcgccgtggctcacgcctgtaatcctagcactttgggaggccgaggtgggtggatcacgaggtcaggagatcgagaccgtcctggctaacatggtgaaaccccgtctctactaaaaatacaaaacattagccgggcatggtggcaggcgcctgtagtcccagctactcgggaggctgaggcaggagaaaggcatagacccgagaggcggagcttgcagtgagccgagatcatgccactgcactccatgcactccagcctgggcgacagagtgagactccgtctcaaaaaaaaaaaaagaaaaaaagaaaaaaaaagtgcagctggctgccagcgctcatttaattttacataaacacactctgaggttgacgcaaattaattttcaatgtgaaaatacacaaactgttcttagagttatttctaaacagaacttgtctctaatcctaatataatggaaatgtatataatgttacattaggattagaggcaagagtattcttggggcaaacgggaaatgggttagtatatacttgaagtaatataaccacatctaacctgatttcatgatatattggaatttttggttgcaagcaacaggatcagattaatgaacttactgataaaaatcttatttgaaagaatgagagactccagagtcatggaaaagttgaggactcaaggctttggaaaggtcaagaattgtaacagtttcaggtatcttaagagtaggtgttatgaggtgtttgtttttgtttttttttcttacagtgctgatatcaggttgaacttctgacatgtatatttagtttttatgtcacttggagtgcctccaactgaagttacatgggttaggtacccatccctcagcaagaggagggcaagttgatggtaaaaccaactctagtaaggagtaggtggtcccctgtattagtccgttctcatgctgataataaagacatactcgagactggataatttataaaggaaagaggtttaattgactcacagttgtgtatggctggggaggcctcaggaagcttacaatcatggcagaaggggaagcaaatacatccttcttcacatgatggcaggaaggagaagtgcaaagcaaaaggggaaaagccccttatgaaaccatcagatctcctgagaactcactcactatcatgagaacagcatgaaggtaaccacccccatgattcaattacctcccaccaggtccctcccatgacacatgggaattataggagctacaattcaggatgagatttgggttggggacacagccaaactatatcatcccccaaaaaatttagggttctttgccaaaaggaagggagaatggatgctgagcagactaaaataatatattttaatccctcttattgaaaagctaagactaaatttttaaaattgtatgtttttgtttttttgagacggagtgtcgctctgtcgcccggctggagtgcagtggcgcgatctcagctcactgcaacatccacctcccgaattcaaacaattctcccacctcagcctcctgagtagctgggactacaggagcataccaccatgcccagctaatttttgtatttttagtagagatgaggtttcaccatattggtcaggctggtctcgaactgacctcaggcaatctacccaccttggcctcccaaagtgctgggattacagacatgagccaccacgcccagctaattctgtattttaagtagagacggggtttcaccatgttggtcaggctggtctcgaactcctgacctcaggtgatccgccagccttggcctcccaaagtgctgggattacaggcgtgagccaccgagcctggctgtatttttaaatacaaaaatttgccaggtattgtgatgggtgcctgtaatctcagctactcgggaggcagaggccggagagtcacttgaacccaggaggttgcagtgagctgagatcacaccactgcactgcagcctgggtgacagaatgagactccatctaaaaaaagaaaaaaatgtattttttaaaatacatgatatggcaaatcataaaggtggtaagcatctgaagtgtgagaaataatcatgcagcttatgcagtttttgtctctaccaatctttcaaaccctcaaactgcaatgcttgctcattatagaaaatctgggaaaatacagtaagttctaaatttccataaattctaaatagcatctctttgaaaactaactccttgggcatttatcccagtgaaatgataataaacagccagcatttgaaatgtatatttcaatgactcgtatatgaatactatgttcagatcacaataaaggacatttccagcaccctcttagataatgcctcccatctgattatcaccatagattagttttgcctgtttttgaattttttgtaaatgggatcacacggtatgtgctgtagtgagcctagcttgatttgctcaacgttacgtctaaaagaattctctattttgctgctatgcagcagttcagcctttttcactgttgtgtagcattctgttatatgaatataccataatttagttactctacatttcatggacctttgaattgctcccactttggggctgttatgaataatgctaccgtaacatttttgtatatcttatgatggtcttaaacacgctatctactgagtatatgccaggaatggaattgctgggtcatagggtgtgtgtctatacacacacatacacacattttttagtaggtaccatcaaacaattgcatttttgttgtttttgttttagtttgtttttaatgaccataccattttaccaccagcaataaaggaaggttccattgctccataccagcattaggtattatcagtccttttatctttaaccatattggtgggaggtagtggtatctcattgtagtcttaatttacttccatatacttaatttaaatacactcaatttatatacacacacgtatactctctcagccttcagtaagccagtctcattcccctgaactaaccaatgttaataatggtatgcttctctcagtgctcatgcaaacatgcatacacacacatacacataaataaggggtgtgggaatgtatttgattctgagagctgctgtaacaaattaccacaaacttagtggcttaaaacaacagaaatatttctgttcacagttctggaggccagaaatctgagagcaagatgtcagctgggccacacctccctctgaaggctccaagggagaatccttgctttcctcttccagctgctggtggctccaggtattacttggcttatggcagcataactcctatctctgcctttgtctttgtggtcttcttttctgtcttcttcccttctttttatgaggacttttgctgttggatttaggttccattctaacctaggatgatctcatttggaaatccttaatttcatctacaaaaactgttttcccaaataggtcacattcacgcatatcagatggacagatgtatcattttggggtccaccattcaacccactacaaggagttttttaaacaaaaataggaaacttagatgtaacttagcactttttttttttttttttgagatggagtctcactctgtcaccagactggagtgcagtggtgccatctcagctccatgcaacctctgcctcctgggttcaagcagttctcttgcctcagcctcctgggtagctgggattacaggcacgcgctgccacacccaggtaatttatttattttttttttgagacagagtctcgcactgttgcccaggctggactgcagtggcgtgatctctgctcactgcaacctccgcctcccgggttcaagcgattctccagcctcagcttcctgagtagatgggattacaggcgcctgccaccacgcccagctaattttttgtattcttagtagagatggggtttcaccatgttggccaggctggtctccatctcctgacctcgtgattcacccgcctcggcctcccaaagtgctgggattacaggcgtgagtcacagcccccggccataatttagcactttaaaaaataatagccatgttgggccaggcgtggtggctcatgcctgtaatctgagcactttgggagaccaaggcgggtagatcccttgtgcccaggagttcaagaccagcctgggcaacatggcgaaaccccatttctactaaaaatacaaaaattagctggggcgaggggataggccgagttccgggtgtaagggggccattagggagagcagagcgaggcagctgatcttccggattgggggccttgcccggaagctggacctcacggagatgaaacggaagatgcacgaggatatgatctccatacagaactttctcatctacgtggccctgctgcgagtcactccatttatcttaaagaaattggacagcatatgaagattggacatcacatgtgaatgcatgatatgaagagcctggttacagtttctactgttctctgcaagtaaataggcccagaaaggtataagagactctttgaatggacataaaaattctgcttgttaagaacaagttgagctctggtaactgatcttaatagctaaaatataaaaatatttgggaagtctgaaatgaggtctcctggccctggtgtgcccttaatgcctgtgacagttggcctctgtgaatattggtataattgtaaataatgtcaaactccattttctagcaagtattaataattaagggaagtatgtctgaaatggcactgtcttgtcagtcatttctgtttacccttctgtctggagtgtatttgtgaagagtcccttataacttatgttttatggacatcagcacataaccacaatgacattgaagcacaggatcattagtctatattttattttattattttatttatttatttatttatttttgagatggagtcttgctctgtcgcccaggctggagtgcagtggcacaatctcggctcactgcaagctctgcttcccaggttcacgccattctcctgcctcagcctcccgagtagctgggactacaggtgcccaccaccacacccggctaattttttgtacttttagtagagatggggtttcactgttttagccaggatggtctcgatctcctgacctcatgatccacccgccttggcctcccaaagtgctgggattataggtgtaagtcaccatgcccagcccattagtctatatttttaagtaaacataccaattaagaaagaagccaaaaaccaaaattagccaggtgtggtggcacgtgcctgtagtcccagctacttgggaggctgaggtgtgaggatcacttgaactcaggaggcagaggttgcagtgacccaagatggtgccactgcactccagcctgggtgacagagtgagaccctgtttccacaaaaagaaaaaaaaaatagccgtgcctgtacttcagtacttacaaatttaactttagtatagatgtacagtaatttattcaatcatttccttactcatagacaattaggatgttgcaacttttgccactacaaacaattctgcgatgtggattatcgtacttattcccatttattggtgctttcatttctataagaatggatttttaaagatagaattccttgggaatagttatgtcaaagccaaatataatatagagacaaatctctaaaaacattttatttggtaagcaagagctgcaattcatggcatacacacagaccaggctgatcattggtatgatcaggagaataaagggaaggttgcggccaggtgtgatagctcatgcctgtaatcccagcactttgggaggccgaggcgggcagatcacctgaggtcaggagtttgagaccagcctgaccaacatggagaaactccgtctctactaaaaatacaaaattagttgggcatagtggcgcatgcctgaatcccagctactcaggaggctgacacaggagaaatgcttgaacccgggaggtgaaggttgcagtgagccgagatcgcgccattgcactccagcctgggcaacaagagcaaaattccatctcaaaaaaaaaaaaagagaaggttccgggttttatgagaaagaacagtattacatactgttttggaagaaagctcattcacactagagcttgtgggagctagcaagctctgattggtgagcgatggtggtaggtaaaaccagtcttagagtcatggcagttcattttagcagctattaggtaaaactggtcttagggatacagaaggctggttcagcagttggacttgtggaaaatttaattcttgaagcagatgctgtgtgccccgaatgcttcttccccctggcccttcaactctgatttagttgagtatttcaagaatgacccaatttatgtaatcaactttcacaggtatacatgtcttaaactttaaacagatgttttgggttttgttgttgttgtttttgagacggagtctcactctgttgtccaagctggagtgtagtggtgtgatctcggctcactgcaacctccgcctccagggtcaagtgattctccagcctcagcctcctgaatagctgggattacaggcgcccgccaccacgcccagctaatttttgtatttttagtagagatggggtggggtttcaccatgttggccaggctggtcttgaactcctgacatcaagtgttctgctcacctcagcctctgaaagtgctgggattacaggcgtgagccactgcgcccggcagtctttccttcttttttttttttttttttttttttttaatgacatggggtcttactttattactcaggctggtctcaaacttctggcctcaagggatcttcccaccttggcctcccaaattgctgggattacaggcataagtcatcatgcctggctacaaacagatattttcaataagaggataaaagttcatttccccatactttgctaacatcaaatgttattaattcctaatagttttgccaaactgagaggaaaatggtatgttagtttttctgggttttctttctttttaattttttttcttttttattcatcgcaacactattcacgatttttttattttttattttatttatttatttttttttttttgagacaaggtctccctatgttgcccaggctggtcttgtacccctgggctcaaaggatcctcctgcctcagcctcccaaagtgctaggattacaggcatgagtcaccacgcctggttcacaatttctttttgtttttaccaaaggcaggtatattcctgaaattttttgtttttttgttttttttttgagatgaagtctcaccctgtcactcagactggagtgcactggcacgatctcagctcactgcaacctccgcttcctaggttcaagcgattctcctgcctcagtcttcaaagtagctaggattataggcgccgcaaccatgctcagctaatttttgtatttttagtagagacaggatttcaccatgttggccagggtgatctcaaatcctgacctcaagtgatccgcctgcctcagcctcccaaagtgctgggattactggcatgagccaccgtgccaggccctgaaatgttatcttagttattaatttgcaattccttggctctagaggttgggcatcttctcagatctctagtggacatttggattttctttttggtgaactgtccagtttttctctctgctttacaatctttattatatgcaatcttcacatgtaggtactaccatttttttagtttgtttttgaaacagcatattgctctgttgcccaggctggagcacggtggcaaaaacatggcttactgcagcctttgacctccttggctcaagtactcctcctgtctcagcctcctgagtagctggtaccacaagcccataccaccatgcccagctaatttatttttgtagagatggggcctgaccatgttacttgggctcaaatgatcctctcccactcagcctcccaaagtgctaggattacaggcatgagccaccatacttggcccttttttttttttttttttttttttttttgagacagagtcttgctctgtctcacaggctggtgtgcagtggcacgatctcagctcattgcaacctccacctcccagtttcaagtgatttttgtgcctcagcctccctagtagctgagattacaggcatgcaccaccatgcctggctgactttcatatctttagtgttgccatgttggctaggctggtctcaaactcctgacctcatgtgatccacctgcctcggactcccacagtgctgggattacaggtgttagccaccaccccgacattatttgaaacttttattttatcatgagagagttccaggagtcaactgaagacagatttttggtatgaaaattacatatgcaaaaagactgattccagtacatgaaattaaattcaacatttacattaaatgccttcaaatatggtaaaatggtttcttttggcagtttacctcattatgttttgaatgatttgtctatcatatgaaataacttttataaatatagtaactcaggcctgggcacagcggctcaagtgggaggactgcttaagcaaccgagtttgagaccagcgtggacaacatggggagaccccttctctcccaaaaaatagctgagcatggcagcgcactgttaaaggaaacagagtttctttggtgggtgattaaaatgttctggagttagatagtggtgatggttgcacaaccttgtgaatatattaaggtttccgctcaatctaccattcaattgtactctctaaaatgattaattctatagtatatcaattatatctctaaataataaaaacaaaaagaaatggctgggtgcggtggctcatgcctgtaatcgcagcactttgggaggctgaggcgggcggatcacaaggtcaggagtttgagaccaacctgaccaacatggcaaaaccccgtctctactaaaaatacaaaaattagctgggcgtggtggcacacgcctgtaatcccaggtactcgggaagctgagacaggagaatcacttgaacccgggaggcagaggttgcagtgagccactgcactccagtctgggtggcagagcgagactccgtctcaaaaagaaaaaaattaaaaaacaaaaagaaacctggttctatattttgtttaaatttatttttttaaccatcatgtaatatgtccacgtaatttgtttaaattttgacatcaaatgcaattgtgagaatttttatgattcagaaaaatctaagcaagctttataaaaacatacttttttttttacttttttttttttttctgagacacagcctcactctgtcgcccaggctggagtgcaggttttcatgtttatctgtgagatgtacctttggcacattactttcctgacatgagatttaaaatttttttttttatcttgtgacaatttaacttttttgacacataaaaattgtacatatttatttgtttgagatggagtcgcactctgtcactcaggctggagtgcagtggcgtgatcttggctcactgcaacctccgcctcccgagttcaagagattctcctgcctcagcctcccaagcagctgtcattacaggcctgcaccaccacacccggctgatttttgtatttttaggagaaacagggtttcaccatgttggccaggctggtcttgaactcctgacctcaagtgatccacccaccttggcctcccaaagtgctgggattataggcatgagccaccgtaccagacccctaaaaattgtatatatttaaggtgtaccatttgatgtttagatatacattgtgaaatgattacattccacatattacctctacggagttaccatttttgtacacttggtcaacatcatcccattctccccttcctccacagatatttcttgtatactatatagaagccaagggtattttgggggaagagctcaaagttcctttcgtggagttaaaaatatatatatactatgtacatataagccatttagcaaccctagatgcttaataaagaatactggaggcccggtgtggtggctcacacctgtaatcccagcactttgggaggccgaggcggtcggattacgaggtcaggagttcaagaccagcctggccaacatggtgaaaccccatctttactaaaaatacaaaaattagccgggtgtggtggtgggcgcctgtaatcccagctactcggggggctgaggcaggagaattgcttgaacctgggaggcagaggttgcagtgagctgagatcacgccactgcattccagcctgggtgacagagcaatactctgtcgcaaaaaaaaaaaagaatactggaggctgggcgaggtggctcacacctgtaatcccagcattttgggatgccagaggcgggcggaatatcttgagctcaggagttcgagaccagcctacacaatatgctccaaacgccgcctctacaaaacatacagaaactagccgggtgtggtggcgtgcccctgtggtcctagctacttgggaggttgaggcgggaggatcgcttgagctcgggaggtcgaggctgcaatgagccgagatggtgccactgcactctgacgacagagcgagactccgtctcaaaacaaacaacaaataaggttgggggatcaaatatcttctagtgtttaaggatctgccgccttccttcctgcccccatgtttgtctttccttgtttgtctttatatagatcaagcaggttttaaattcctagtaggagcttacatttacttttccaagggggagggggaataaatatctacacacacacacacacacacacacacacacacacacacactggagttcgagacgaggcctaagcaacatgccgaaaccccgtctctactaaatacaaaaaatagctgagcgtggtggcgcacgcctatagtcctagctactggggaggctgaggtgggaggatcgcttgagcccaagaagtcgaggctgcagtgagccgagatcgcgccgctgcactccagcctgagcgacagggcgaggctctgtctcaaaacaaacaaacaaaaaaaaaaggaaaggaaatataacacagtgaaatgaaaggattgagagaaatgaaaaatatacacgccacaaatgtgggagggcgataaccactcgtagaaagcgtgagaagttactacaagcggtcctcccggccaccgtactgttccgctcccagaagccccgggcggcggaagtcgtcactcttaagaagggacggggccccacgctgcgcacccgcgggtttgctatggcgatgagcagcggcggcagtggtggcggcgtcccggagcaggaggattccgtgctgttccggcgcggcacaggccaggtgaggtcgcagccagtgcagtctccctattagcgctctcagcacccttcttccggcccaactctccttccgcagcctcgggacagcatcaagtcgatccgctcactggagttgtggtccgcgtttttctacgtcttttcccactccgttccctgcgaaccacatccgcaagctccttcctcgagcagtttgggctccttgatagcgttgagtggaggccctgccgcgacttggcagtagcttattttgttcactcctctctggctggtgtgggggaggtgggggcattaggccagggtgaagcaggggaaccacttaggagtctgttaagatgatctgaacttcagaacaagatgttattaacagagtgaaagtatttggattctgggtatattttgaaatcggaggcaacaggtttttcagatagattcgataacggaggttatcctgaatagttgaaaagataaagttgccttttgctgaggtgggaaagagaagattgccagtagagcaggtttctcaggagttcagtcttgggcatagcatggtaggggtgaatttggctggagtgagttggagagtaggagaagagaaatccaaggcaacatttgaccagcctgggcaacatagtgtgactccgagtctgcaaaaattagacgggtgttgtggtgcgcgtctgtggtctcagctacctggaaggttcaggccttggaaggctcagggaggtggaggctgcagtgatctgtgattgcgcctctgcactccagcctgggcgacagagccagaccctgtcttaaaacaaaataaacggccgggcgcggtggctcaagcctgtaatcccagcactttgggaggccgaggcggccggatcacaaggtcaggagatcgagaccatcctggctaacacggtgaaaccccgtctctactacaaatacaaaaaattagccgggcgtggtgacgggcgcctgtagtcccagctactcgggaggctgaggcaggagaatgtcatgaagccgggaggcggagcttgcagtgagccgagatcgcgccactgcactccagcctgggcgatagagcaagactccgtctcaaataaataaataaataaataaataaataataaaaacatcggtaggcatatttcaaggaattctatttaaaaaaaatttttttagagacaagttcgctctctgtggcccaggctggagtacagtggcatgatcctagcccatggcagcgttgatctcttggcctcaagcgaccctcctttggagtcgctgggcctaaaggagtgagccaccacgaaattttattataaatggagggtagagaaattgggcaataaatggagggggaagtgagttaagaggaattttaattatgtgtgtgtggttttaaaagaggggggtcttgctctgttgcccaggctgctggggtgccagtggcgcaatcatgaatcactacagccttggactcctggcctcaagctatcctcccacctctgcctcccaaagtactgggattactagtgtgagccactgcactaagataggagcaacatgtttcagcatgtttgtgggttgataggaaagatgagaatgggaaagttgatgtcggaaagaagacaatggctagagcaatgtcctagagtaggtaagaagggatggatttggcctttgttggaaacattagcggttcttttggtgacagctatatagttaacacatctatgatacgtgaatgggcagataggatggcaggagattttgaaagttctcttgattcttactgttctcttagtgaaagaagcaaggttatcagctagaagctgggatgggagaggaaagagaagatgggaagtagatagttctttagaagagtgggcaagggttggactagggaagtttagtggaaatattgctaggcaacataaagagcctacttgagattcgtggtcatgagttgaaggagaccagacagcaagattgtgtatgagggcacccacagagtaaatggagagttgaaattaatgcagttgtgattttaccacgtggatatgaagaagtgagggggagaagtacaaaggagttctcttaatgattgaccatggaatttaagctggctaagaaaggaagtgagaggccgggcgcggtggctcacgcctgtaatcccagcactttgggagactgaggtgggtggattacctgaggtcaggagtttgagaccaacctggccgatatggcgaaaccccatctctaataaaaatacagaaaaattagccgggaatggtggcaggtgcctgtaatcccagctactcaagaggctgtggcaggagtatcccttggacccaggaggtggaggttgcagtgagccgagatcacgccactgtactccagcctggacgatatagtgagacttcacctcaaaaaaaaaaaaaaaagaaaggaagtgaggattttaagaccctgagagacagtttaaaaagtgggaggatcggccgggcgctgtggctgacacctgtaatcccagcactttgggaggccgagttgggcagatcacaaggtcaggagttcgagaccagcctggccaatatggtgaaaccttgtctctactaaaaatacaaaaattagccgggcatggtgtcacgtgtctataatcccagctactcgggaggctgaggcagaaaaattgcttgaacctgggaggcagaggttgcagacagctgagatcactccattgcactccagcctgggcaacaagagcaaaactttgtctttaaaaaaaaaaaaaaaaaaagaatacaaaaattagccgggcgtggtggcgcgtgcctataatcccagctacttgggaggctgaggcaggagaatcagttgaacacgggaggcgaggtttgcagtgagccgagattgcgccactgcactccagcctgggcgacagagcaggactcctcttggaaaaaaaaaattagctgggcatggtggcaggtgcctgtagtctcagctactagggaggctgaggcaggaaaatcacttgaacccgggatgtggagtttgcagtgacccgagatcgtgccactgtactccatcctgggcgacaaaatgagactctgcctcaaaaaaaaaaaaaaaaaaaaaaaaagtgggaggatcaatgtactgccagtcctaatgaagtggaatgattgtccccatcaaatcactagtaggagtaagttgcagagcctagaaggtgatggttaagagagtgggattcttgaaactgcatttatggagaggttgtggttattggttataataaataaatacagttgaagtgagtgagtagctgagatttggggatgtatcagttcattcttacactgctacaaagacatacctgagaccaggtatttataaagataagaggtttaatcagctcacagttctgctgcctgtacaggcttctcttgtggaggcctaaggaaacttacagtcatggtggaaggtgaaggggaaacaagcacagtcttcacatggccagcaggagagagagagaagggggaagtgctacatactttaaaacaaccagatcttgtgagaacgcttatcaggaaacagcacttggggatggtgctaaatcattagaaatcacccccatgatccagtcgcctcctaccatgcccacctccaacactggggatcacaattcagcatgagatttgggtaggaacacagagctgcaccacatcagaggatgtacaagattgtggtggagaggagtttagagacctgcaaatatagggtaattgaagggatcatctacatggatatttaaatcaccaaaaattatgacaggagtagtgttggagagagaactgcgatgtaaacattaaggaatgaggaagagtgactcggtaggctgtaggtgactgcaataggaaacgataatagactgtgagtctggtgacaagattttccttctttctttttttccccccccccgagacagggcctctttttgttgcccaggtgggagtgcagtggcgcgatcacggctcactacaacctcctcccaagctcaagggattctcccacttcagcctctcaagtagctggaactacaggtgctgaccaccatgcctggctactttttgtcaggattttcaaggctgggaattttgagaggggaatggaggagaataatctgaaagtgcaagtaaggagcagggaagatttcttttttcttttttttttttttttttgagtcggagtctggctcagtcgcccaggctggagtgcagtggcgagatctccgctcactgcaagctccgcctcccgtgttcacgccattctcctccttcagcctcccgagtagctgggactacaggcgcccgccaccacgcccagctaattgtttttttgtatttttagtagagacggggtttcaccgtgttagccaggatggtctcaatctcctgactttgtgatccgcccaccccggcctcccaaagcgcttgggattacaggcgtgagccaccgcgccagccagagcagggaagatttcttccccacatctccagtaggtacagtgatatgaagtgtgtggaggagaaaagaggaaacatctatcatttgagatggctgcgaaaggaaaaggcatcctcagggagctagattttacttagagcaagaaatgaagggatgattcagaggttaaaagagtggattttatgaattactcaagggagcacagtggaagtttcaggaagtggtaggagaaggtagaagatggcagggtgttgggaataatttgagaaatctgagctactggaaatgactgagaatcagatataaaggcagtcctggtggtccgttctggctgccgttgctgtgtaacgaatctgccaaaacttagtggcttgaaacaacaaagaacattttattatctctcattgtttctgtgggttaggaatttgtgagagccgtgctgggcagttttcgtgcggctgtctcgtggttgcacctacatagttgctagagctacagtagctggggactgagcagctagggattggcaggctatctctttttttcatgtagtctcatgaagatttctttatgtggtttcaatgtgtgggctggtttggatttccttatagcatggtggcctcagttggattgctgttttgtgatccttttcatccctccttgtcctgtccccagacaaccactgatctactttctgtcaccatagattagcctgcatttttaagaatttttataaacgtggaatgatagagtaccttttttgtcacgtttcttttatttatcatagctattttgattttcatccattttattgctgagtagtatcccattgcatgtatatactatactgtattcattcgcttgcttgtgaacatttgggctttttccagtttgggactgttaacaagtagagccactatgaatattagtgtataagacttcatatagccaaggctggcagatcgcttgagcccaggagtttgagaccagcctgggaaacatggtgaaacctctatttttattttaaaatcaaaaattaaaaattttctataaaaaattttaaagaagactttgtatagacatacgctttcatttttcttgagtgaatacttaggtctcagggtagatgtattttaagtctttaaggagctgtcaaactcttcctcaaagtggtggttgtaccatgttactttttaatataacagagattaattgagcaaagaaaaattcaaaagttggacagcccccacaactaaataggttcagaacagctcccccattttgcattttgaccagcaatgtatgaaagttccatttgctcagtgtccctgcaaacacctggtatggtcagtctttttaattttaggcattataatagatatagtggcttcttgtgattttaattagcatttcctaatgaccagtgctgctgttgatcatttcatgagtgtatttgccatccgtatatcttttttggtgaagtgtctattcaaatcatttgggttttttttttttttgttttttttttttggagacagtgtctcactctgtcacccaggctgttgtgcagtggtgcaatcacacagcctactgcagcctccacctcctgcgctcagtcttcttgtctcagccttctgagtagctgaaattacgagcacacgccacaatgcctggctaattttttaaaattttgtagaaacaaggtctcattatgttgcctgggcttgtcgtgaactcctgggctcaagcaatcttcctgcctcagcctcccaaagattgggattgcaagtatgagccactgcacccggccaacttacccatcttttaattgaatttttttgttgttgaggtttgagagttcttcatgtttgctgggtacaatatctttatcagataggtaacttgcatgtattttctcccggtttacactttggtttttcattttgttaacaacgtctttttaagaacagaaaatcttaattttgctgaaatctaatttttcagttttttctttgatggttttgagagaggaggtaaaaaaagactaggtaagccgatagttagacagagtcctcggtagaacttcccttctaacaaaaagcagcccaagaaatcacttctcttctaacaaggagcagcctggaagatcgggctgtaaacatgtataaggaagcagctctggcacagagggggagcttcctgggtaatcagcaagcttcacatacgtaaggtgggtatgtgaagtaaacacagtatgtgaagtaaacacagtggaccttagtacatactcagataaggaagctggaagcttgcatgttgtgagttgttggggttgcctgcagctgcacggagagaaaggggtacctggggccaggcatgtccaccatggtggctccacctccccttatttagcacatgcacaataggaaagagataagcaatgtggagtagctcaggccaaggacctgcctgcataataaaaggttggggtgggggatgccagagattcacgctctgtgcagatggcaacacctggtcctaactggttttttgctccctatgtgtagataagctacccccttcccattagctcatttataaaaatgcttgcatttcactgtggaatgggaactcttttcaggacctctctctgcaggagagagctagtctctttcttttgcctattaaacttctgctctagcctcacacccttggtgtgtcagcgtccttgatttcctcagcgtgagaccaagaacctcgggtgccaccccaggcaacaaggccatttcagtttgttcttttgttataggcaatccatgatcacagatttttctctcttttttttttttacacagtttagagttttagttttacacttaggtctgtaatccattttgtattaattcttatatgtggctcagtgtaggtggaaatttggtttgtttttgcataaggatttccaatagttttaccaccatttcttgaaactactatgctttctctattaaaccacatttgtaactttagttaaaatcagtcacatatatcacagggctatttctgactctcaattctgttacattgtctattagtgtatattgatgtcagtactacacttttaattactattgcttcagggtatgtcttgtaaaccaaaaataaaattataggccccccccgcccctgcacaaccaactgaatggacccatcctctcagccaagggcattccaaaattaacctgaaaaactagttcaagccatgatgggaagggggagttggacatgtctcatcacaccctactaccttttggaattactgatagaacagactcttaaagtctgaaaagaaacatttacaacctaccctctctgaagcctgctacctgggagcttcatctgcatgataaaaccttggtctccacaaccccttatggtaacccaaacattcctttctgttgataataactctttcaactagttgccaattagaaaatctttaaatcttcctatgacctagaaacctccctacccccactttgagttgtcctgcctttcctgacagaactcatgtacatcttacatatattgattgatgcctcatgtctccctaaaatgtataaaacaaagctgtaccccaccaccttggggacatgtcatcaggacctcctgtggctgtgtcataggagcgtctttaactttggcaaaataaactttctaaattgattgaaacctgtcttagctacttctggtttacagtcttaaagttagataatgtaaattgtccagctttggtttatttttgtccttagtagttccatataaattttagaatcagcttttcaatttaatacactactttcctcttagatccacaattaaatatatttgatgctaacaattctgttttatgtttttcgttttttttttttgagacaagagtttcgctcttgttgcccaggctggagtgcagtggcgcgatcttggctcaccacaacctccacctcccaggttcaagcaattcttctgcctcagcctcccgagtagctgggattacaggcatgcgccaccacgcccggctaattttgtatttttagtagagacggggtttcaccatgttgatcaggctggtcttgaactcctgacctcaggtgatccacccacctcggcctcccaaagtgttgggattacaggcgtgaaccaccatgcctggccagttctgttatttttaaaacccaagtttccctggtcatatcttggttggatgaagcgtattttcaatagattaccctggaaaggctagtgagtacggtattcttctacattttagacttttcttagtcttgctacttcaaggacagctaggctgcatataaaattcttggctcatactttttccccataaatttctatgagaaagtctaatgataactgattttctttattttgtaacttagtctttttgcttagaggctctctgaggatgggagggggttcttcctcccatccctaggaatttttcttttttttaaattcctaatcactagaccaccaggaagattgtttgttttgttttgtttttattcttcagggaccccatttatacatacgttaaataaatactgtttgccaatgtatcaaccattttgcttcttatttatttttgttcctttggttctttttcatggctttgctttggtgctccttagattttcagtcagatgtatttgtccttgggtaccttgtaatcagtattaccttttcttctgtcgctttgttttctgttcgttttgaaattacttgtttcctggtctggcaataacagttgagatatgaggagtttgagctgccatctgtctatgtatcttgctttaagactgcactcttctattgatatcactggccttgattttgtgatttctttatttcttcaggaccacccttcattttctactgtttgcttcctttttttttgagatggagtctcactctgtcactcaggctggagtgcagtgatcttggctcattgcaacctctgcctcccgggttccagcaattctcctgcctcagcctcccaagtatctgggactacaggtgtgcaccaccatgcccggctaagttttgtatttttaatagagacggggttttgccacattggcaggctggtctcaaactcctgatgtcaagtgatccacccaccccacccacctctgcatcccaaagtgctgggattacaggaatgagctgccgtgcccagcctcccccctacccccctttttttctttcgagacagagattataggtgtgagccactggacccagcctgtttttattccttttaccaaatctccaaggaatatcttcccttccaagtgcgaatgtaaccttaagtcagttaacctctttgtgattacttttcttatctgcaaagtgacttaatgatcttaagtactttttttttttgagacagggtctcactgtcaccctggctggagtgcagtggcacgatctctgatctccactcactgcaatctcctcttccctggttcaagcggccctcccaccttagccttctgggtagctgggactacagatgtgaaccaccacgcccagctaatttttgtactttttgtagagatggggttttgccatgttgcccaggctgggattattaagtactttttatcatacagcaagattgacattttatattggaatacatttgtctctatataacggagattaacaggaaaatgacaagcctgggtgcggtggctcatgcctgtaatcccagcactttgggaggctgaggtgggaggatcacttgaggtcaggagttcgagaccagttttgccaagatgatgaaagcccatgtctactaaaaatacaaaaattagcccagcttgatggtgggcgcctataatcccagctatttgagagactgaggcaggagaatcacttgaacctgggcggcagaggttgcagtgagccgagatcatgccactgcactccagcctgggtggcatagcgagactcttgtctcaagagaaaacaaaacaaaacaaaaaaaaaacaggaaaatgacaaaaagtaatattacaactcagtgaattttataacaaacttttttggaattcattgactaatactataccaaatccaaaatactctctagtataccaaatccaactctaccctatagtataaattggattctatttggacttgtctcactaatccctcatacagtgtgttttattttttattgaagtaaaaaaatttgtcattttaaccatttttaagtatatagttcagtaatattaagtatgttcatgttgttgcgcaatagatcttcggaagtttttcgtcttgcaacctgaaactctacccattagcaaattcccatttctccttacacttagcccttggtaatcatcattcttttttttttttttttgagatggagttttactcttgttgcccaggctggagtgcaatggtgcaatctcgactcaccacaacctccgcctcccaggttcaagcaattctacctcagcctcccgagtagctgggattacagtcatgcaccaccacgcccggctaattttgtatttttagtagagaaggggtttctccatgttgaggctggtctcgaactcctgacctcaggtgatctgcccacctcggcctcccaaagtgctgggattacaggcgtgagccactgcgcctggcccattctttctaattctataaatttgactacttagttaccttacataaataaattcttatagttagtgttatttttgcttccatgccttttttgttgttgttcatgctcttacttggaatgcgttctattttgtctacctatgcacatcctgttgggttttttttttttttgggggttttttttgtttttttttgtttttttttcccagacaaggtctcaatttgttacccaggctggagtgcagcggcgccatctccactcactgcatcctcaacttcctgggcccaggtgatcctctcgcctcagcccctgcaggtagctgggactataggcatgtgccaccatgcccagctaaatttggtttttttgtttgtttgtttttgagacagagtctcactctgtcacccaggctggagtgcagtggcacaatctcagctcactgcaatctctgccgcccgggttcaagtgattctcctgcctcagcctcccaagcagctgggattacaggtgactgccaccacgccagctaagttttgtagttttagtagagatggggtttcaccttgttggccatgctggtctcgaactcctgacctcgtgatctgcctgcttctgcctcccaaagtgctggaattacaggcatgagccaccacgcccggccagaatttttgtatttttagtagacacaaggttcttaccctgttgcctaggctggtctggaagtcctggactcaagcaattcacctgccttggcctcccaaaatgctgggattacaagccaccatgcccggcctaaatcctgttgttttgttttgttttattttgttttgttttgttttgtttgttttttgagacagagtctcgctatgtctctcaggctgtagtgcagtggcgcgatcttggctcactgccacctctgcctcccaggttcaagtgattctcctgcctcagcctcccaagtagctgggattacaggcatgtgctactatgtccggctaatttttgtatttttagtagagacagggtttcaccatgttggccaggctggtctcgaactcctgacctcgtgatccacccacctcggccacccaaagtgctgggattacaggcgtgagtggtttttatttcttaggccggtttcctccatatgatcttgcagtagacattaatttctttcctttttaattaaaatactgtttgtatttcacattttgatgtttgttaagatttgttttatattgttttttgttttgtcttgtgtgatagtcttaaatccctagttagataataactggagagtaccatgtttctatatatctctcagtgacttgcacagtgctagcagatagtgctaaaaaattatttattattattattattttgttattgttgttgttgttgttagacagggtcttcctctgtcacccaggctagagggcaatgggatgatcatagcttactgcagcctccaacaactgggctcatgtaattctcctgcctcagcttcccaagtagctgggattacaggcatgagccaccatgtctggacaaaaatatttccaggtgcagtggctcatgcctgtaattcccacacttgggaggccgagcgaggctggaggatcacttgagcctaggagttcaagaccagcttggctaagatggcgagaccccgtccctacaaaaaattttaaaaactagccaggcatggtggcatgcacctatattcccaactactcagtgggctgaggtgggagggtcatttgaacacaggaatttgaggggagaaaaaaagaagagagaaagagaagtgaaggaaggaagaaaggaaggagggagggagagaagaaagaaacgaaagaaaggaaaagaaaaggaaggaaagaaaattggtaccaggaaagcaggaaagggaaatggaagtaaaaaaataataataataataaaatgaaaattggttagtcactattaacaatttgtatccttataatctggaaacattataatttcaaaagaaaaaatattctttggatcataggttctgaggtcagaacagcattcccgtagtctagatgaagtcaagttttatctgatcttaattgaaataaatatagctggccttgaacaaatctactcatggtatgtggataggaattaaattgtaggggcattcacttgatggcattcattcttagaacatttacctatgtctagcttttggagtaaagtcacataacctctaaccaggtaagtttcctgtggctttatttaggattttaaatactcattttcagtgtaattttgttatgtgtggattaagatgactcttggtactaacatacattttctgattaaacctatctgaacatgagttgtttttatttcttaccctttccagagcgatgattctgacatttgggatgatacagcactgataaaagcatatgataaagctgtggcttcatttaaggtatgaaatgcttgcttagtcgttttcttattttctcgttattcatttggaaaggaattgataacatacgataaagtgttaaagtacatgttattcagttttcattttgaagattagatggtagtatgagttagttaaatcaggtgatatcctcctttagaagttgatagcctatatatgtcatcctttgtggaggcaatttaaataaaatttaaaacatttattcctggctgggtatggtggctcactcctgtaatcccagcactttgagaggctgaggcgggtggatcacctgaggtcaggagtttgagaccagcctggccaacatggtgaaaccccgtctttactaaaaatacaaaaattagccaagcatggtggcacgtgcctgtaatcccagctgcttgggacactgaggcaggagaattgcttgaacctggggggcagaggttgcaatgattgcaccactgcactccagcctgggcgatagagtgagactccatctcagaaaacgaacaaacaatgtattccttttagtatttttacattgtatcaaactatggaagtcctctaattgagattaataagaaaaagacaatctgaattataattttaaacatttaacaagcatgtagtaaaataatgatgaagataaatagcattagtacagcaattaatatttgtagcatgctgacagtgctctgtgtgcgtttcatatattaaattactctaatcatcccaaatcctgtaagttgggtatcaattcaagtgttcctattgggtaggaatatacagttcttttaggaaatgtagtatggttctgtgtctcaaacaggacacttacacagttggccaacatcatcaccttctccattctctgagatgtttagtcttactgagcactaaatatgggtcatcaatagtccagactaccttgagcaaacaatagtccagactaccttgagcaaacagagcatatactcatacagtgtataaagagcaccaagcatacagatttcatgtctttctcatagttactcttgtaacatgagctaaagatcagacctctatgtcacctttgtaactgatttctagatttttttttttttttgagatggggtcttgccctgtcacccaggctggagtgtagtggcgtgatcatgcctcattggagccttcaactcatgagctcaaacaatcctcctacctcagcttcctgagtagttgggaccacaggtgtgtgccaccacacccagctcatttttgtattctttgtagagatgcagtctcaccctgttgcccacgctggcctggaactcctgagctcaaaagatccctccgccttgaccttccaaagtgctgggattacaagcatgaaccactgcacccggcctagatttttaaatgtgctttccagtatacactgaaactagaagtcgactaaagaattaccaagagaattctataaaatagagattgaaatggggctcgatgtgggatgggttggtgatattgcagggagaagtaatctgagtaaaggaggaaaagaactgatttgggaaaacgatagttttagtagtgagtttgagtatgaattaagttgagattgaatttgaattaagttgaggttgaatatgaattaagttgaggttgagtttgaggtatgaattaagatgtgaaattgatcattggaaatgttagattgagaaaagtcacagctggattaatagcttcagaagtgtgtttgcagacagttgcaactaaagtaataagaatagatggccttggccgggcgcggtggctcacgcctgtaatcccagtactttgggaggctgaggcgagcaaatcacgaggtcaggagttcaagaccagcctggcccacatggtgaaaccccgtctttattaaaaatacaaaaattagctgtgcacagtggtgcacgcctgtaatcccagctactcgggaggctgagacaggagaatcgcttgaacctgggaggtggaggttgcagtgagctgagatcagtgtgactgcactccagcccggtgacagagtgagactctgtgtaaaaaaataaaataaataaaataatggccgtaagcaagtaaagaaggatggccagctcttattgggaatgcctaaatctaaggcttgatcagaagtaatgaaaccgttggggccctacattgctatgacatccaaagggccatgaatatcaggaagaaagataattaacagggtctaatgttacagagaggttgagagcaaggagatttgattaaaagggtctttagagctgatgtcaggtgtatgatgcctttaagagcagtttttatagtgcagggggtggtcaaaagagaaaataggtgctttctgaggtgacggagccttgagactagcttatagtagtaactgggttatgtcgtgacttttattctgtgcaccaccctgtaacatgtacatttttattcctattttcgtagcatgctctaaagaatggtgacatttgtgaaacttcgggtaaaccaaaaaccacacctaaaagaaaacctgctaagaagaataaaagccaaaagaagaatactgcagcttccttacaacaggttattttaaaatgttgagatttaacttcaaaggatgtctcattagtccttatttaatagtgtaaaatgtctttaacttaagtgattagtacagtgtttctattgacatatacttatacaacttcaaaaacaactattaaattttctgttatttaggaacatgcatattagtcatgaaagtataaagaattagatgggaatgataaatgctaaaatcaggacatgtgttccatttgtgaatggaaggcagggagaaggtgccgtttggaaggagtacccaagagccgtaagctgaattggcagtgttttacatcttaagctgagagatagatttttttttcccctttttctttaaaaactctaaaactgttaattccaaggaacccagaagtctaggtagattatttctgctagttaaaagcagtagtcctgaaagctgaatattttggtgtcttttgagccaactttagtttcatcattaccaagggggaagagagctaacagttgatgagcacttgctctaggccagtccagagtgctgggcaccatacgcattttatctccctcccgctattcacaacaaatatgggaggtagtttatattatagccatctaataagatggggaaactaagactcaaagagattcagaaacttgtccatgattataaatgtaagagagttggaattcagatttatgtatttagaccccaagcctttctcattacatcattttgccttccaaatctctaccctctatccttcacctccccactgatcaaaacgagatgatagtttgccctcttcaaaagaaatgtgtgcatgtatatatctttgatttcttttgtagtggaaagttggggacaaatgttctgccatttggtcagaagacggttgcatttacccagctaccattgcttcaattgattttaagagagaaacctgtgttgtggtttacactggatatggaaatagagaggagcaaaatctgtccgatctactttccccaatctgtgaagtagctaataatatagaacaaaatgctcaagaggtaaggatacaaaaaaaaaaaaattcaatttctggaagcagagactagatgagaaactgttaaacagtatacacagttgtcagtttgatccaccgaggcattaattttttcttaatcacacccttataacaaaaacctgcatattttttctttttaaagaatgaaaatgaaagccaagtttcaacagatgaaagtgagaactccaggtctcctggaaataaatcagataacatcaagcccaaatctgctccatggaactcttttctccctccaccaccccccatgccagggccaagactgggaccaggaaaggtaaaccttctatgaaagttttccagaaaatagttaatgtcgggacatttaacctctctgttaactaatttgtagctctcccatgaaacttttgtagcttaaatacacaagaattttttgaaaaggaaataagataatgatgcaaaatagttaattttttaaaaaaatgttagacactgcagtggatgcaacaaaatactttatatgaaagatttatccagttaacttttgtggagtattaggtattagactaataattagcacacttacttaagttagaaagtataataatgcgccggacgcggtagctcacgcctgtaatcccagcactttgggaggccaaggtgggcggatcacaaggtcaggagatcgagaccatcctggctaacacggtgaaaccccatctctactgaaaatacaaaaaaatttgccgggcgtgatggcgggcacctgtagtcccagctactcgggaggctgaggcaggaggatggtgtgaaccccggaggcagagcttgcagtgagtcaagatcgtgccactgcactccaacctgggcgacagaatgagactccatctcaaacaaaaaaacaaaacaaaacaaaaaaaagtgtaataataatttatcattagctggatgatatgctgttgtttcccatgtcacctgtataagatatgtaaaataagaacacattatttacatctaatatagataaaatcctgaggcgctctcagattgttttgtagagttcaaatgtaaatattgttttcatttatggtccttttggttataagtaacagaaatcaactctaaaaagatttttattataggttagattatgtcatggaaccttaaggcttgtccctttctagttcttttgtgtaaagcggtgatttcttccatggagggaatggtatttaggcaattttttttttttttcgagatggagtcttgctctgtcgctcaggctggagtgcagtggcaccatttcagctcactgcaacttccacctcctgggttcaagtgattctcctgcttcagcctcccaagtagctgagattacaggcacccgccaccacacccggcttattttgtatttttagtagagatggggtttcaccatgttggccaggctggtcttgaactcctgacctcaagtgatctccccaccttggccttccaaagtgctaggattacaggcgcctagcctaggcagtcattttcaaaaaacaagcatgactcaccaaaagttttaagattttctgtgataatgttcttattgaggcttacattatattacagtttcttgaatctaaaatgatgtaccctcttaggatatatacatcatgcttcattggtctcagggggctgatttttataaggagagatttgctagttttcacaatatgtcctctaagttggcatgtatagctaaacaggctttcataaaaatatacaatttagttaatgaaatttgggatatagtcttttatgattgaaataattttgctaaatagactgtctctgatttattaggtaatcaccactcttattttgttttacttccttaatgtctacatagaaaggaaatgagaaaaatccagaggttgtcatttgacttatgagtctgtttgacttcaggatttggtacatgaaatttcacttaatctttttgatatgtataaaacaaatattctgggtaattatttttatccttttggttttgagtcctttttattcctatcatattgaaattggtaagttaattttcctttgaaatattccttatagccaggtctaaaattcaatggcccaccaccgccaccgccaccaccaccaccccacttactatcatgctggctgcctccatttccttctggaccaccagtaagtaaaaaagagtataggttagattttgctttcacatacaatttgataattagcagaatagaggattgtaaaatgtcattgtagaacatcccttgggccagattctaatgggtagaaatttgaactaaacctctgggttttgtttgtttttaatgcctttctgttacccagatgcagtgctcttgtagtcccaagtctaagctctaggttgccttctttcctggcagaagttggtgtctatgccataaggaggtagttcctgttagaagggatttaattataccttatataaggaattagtgtttgcccttctaggtatagttggatgttagcttctgatgtaaactggatttctttttctttctctctctttttttttttttgttttggaggcagagttttgcccttgtaccccaggctggagtgcagtggtgtgatctcagctcacagcaacctccgcctcctgggttcaagcaattctgcctcggcctcccaagtagctgggattacaggcgactgccaccacacccggctaatttttgttttattagtagagatggggtttcaccatgttggccagactgatcttgaactcctgacctcaggtgatccacccgccttggcctcccaaagcgctgggattacaggcgtgagctgccgcacccagctgtaaactggatttctaatggtagatttttaggtattaacaatagataaaaagatactttttggcatactgtgtattgggatggggttagaacaggtgttctacccaagacatttacttaaaatcgccctcgaaatgctatgtgagctgtgtgtgtgtgtgtgtgtgtgtgtgtgtattaaggaaaagcatgaaagtatttatgcttgattttttttttttactcatagcttcatagtggaacagatacatagtctaaatcaaaatgtttaaactttttatgtcacttgctgtcttttcgtcctcgttaaatttaattttgttggtcttttgttgttattggttggttttctccaaatgctagctatgttaagaaatttaaggccaggtacagtggctcatgcctgtaatcccggcattttagaaggctgaggcaggaggatcacttgagctcaggagtttgagaccagtctgggcaacatagcaagacctcgtctttgtttaggggaaaaaaaagaaatttaagtaggagattatataagcaaaaatacaattaatttccagcattcactatataatataaatctccagactttacttttttgtttactggatataaacaatatctttttctgtctccagataattcccccaccacctcccatatgtccagattctcttgatgatgctgatgctttgggaagtatgttaatttcatggtacatgagtggctatcatactggctattatatggtaagtaatcactcagcatcttttcctgacaatttttttgtagttatgtgactttgttttgtaaatttataaaatactacttgcttctctctttatattactaaaaaataaaaataaaaaaatacaactgtctgaggcttaaattactcttgcattgtccctaagtataattttagttaattttaaaaagctttcatgctattgttagattattttgattatacacttttgaattgaaattatactttttctaaataatgttttaatctctgatttgaaattgattgtagggaatggaaaagatgggataatttttcataaatgaaaaatgaaattcttttttttttttttttttttttgagacggagtcttgctctgttgcccaggctggagtgcaatggcgtgatcttggctcacagcaagctctgccttctggattcacgccattctcctgcctcagcctcagaggtagctgggactacaggtgcctgccaccacgcctgtctaattttttgtatttttttgtaaagacagggtttcactgtgttagccaggatggtctcaatctcctgaccccgtgatccacccgcctcggccttccaagagaaatgaaatttttttaatgcacaaagatctggggtaatgtgtaccacattgaaccttggggagtatggcttcaaacttgtcactttatacgttagtctcctacggacatgttctattgtattttagtcagaacatttaaaattattttattttattttattttttttttttttttgagacggagtctcgctctgtcacccaggctggagtacagtggcgcagtctcggctcactgcaagctccgcctcccgggttcacgccattctcctgcctcagcctctccgagtagctgggactacaggcgcccgccaccacgcccggctaatttttttttatttttagtagagacggggtttcaccgtggtctcaatctcctgacctcgtgatccacccgcctcggcctcccaaagtgctgggattacaagcgtgagccaccgcgcccggcctaaaattatttttaaaagtaagctcttgtgccctgctaaaattatgatgtgatattgtaggcacttgtatttttagtaaattaatatagaagaaacaactgacttaaaggtgtatgtttttaaatgtatcatctgtgtgtgcccccattaatattcttatttaaaagttaaggccagacatggtggcttacaactgtaatcccaacagtttgtgaggccgaggcaggcagatcacttgaggtcaggagtttgagaccagcctggccaacatgatgaaaccttgtctctactaaaaataccaaaaaaaatttagccaggcatggtggcacatgcctgtaatccgagctacttgggaggctgtggcaggaaaattgctttaatctgggaggcagaggttgcagtgagttgagattgtgccactgcactccacccttggtgacagagtgagattccatctcaaaaaaagaaaaaggcctggcacggtggctcacacctataatcccagtactttgggaggtagaggcaggtggatcacttgaggttaggagttcaggaccagcctggccaacatggtgactactccatttctactaaatacacaaaacttagcccagtggcgggcagttgtaatcccagctacttgagaggttgaggcaggagaatcacttgaacctgggaggcagaggttgcagtgagccgagatcacaccgctgcactctagcctggccaacagagtgagaatttgcggagggaaaaaaaagtcacgcttcagttgttgtagtataaccttggtatattgtatgtatcatgaattcctcattttaatgaccaaaaagtaataaatcaacagcttgtaatttgttttgagatcagttatctgactgtaacactgtaggcttttgtgttttttaaattatgaaatatttgaaaaaaatacataatgtatatataaagtattggtataatttatgttctaaataactttcttgagaaataattcacatggtgtgcagtttacctttgaaagtatacaagttggctgggcacaatggctcacgcctgtaatcccagcactttgggaggccaaggcaggtggatcacgaggtcaggagatcgagaccatcctggctaacatggtgaaaccccgtctctactaaaagtacaaaaacaaattagccgggcatgttggcgggcaccttttgtcccagctgctcgggaggctgaggcaggagagtggcgtgaacccaggaggtggagcttgcagtgagccgagattgtgccagtgcactccagcctgggcgacagagcgagactctgtctcaaaaaataaaataaaaaagaaagtatacaagtcagtggttttggttttcagttatgcaaccatcactacaatttaagaacattttcatcaccccaaaaagaaaccctgttaccttcattttccccagccctaggcagtcagtacactttctgtctctatgaatttgtctattttagatattatatataaacggaattatacgatatgtggtcttttgtgtctggcttctttcacttagcatgctattttcaagattcatccatgctgtagaatgcaccagtactgcattccttcttattgctgaatattctgttgtttggttatatcacattttatccattcatcagttcatggacatttaggttgtttttatttttgggctataatgaataatgttgctatgaacattcgtttgtgttctttttgtttttttggttttttgggttttttttgttttgtttttgtttttgagacagtcttgctctgtctcctaagctggagtgcagtggcatgatcttggcttactgcaagctctgcctcccgggttcacaccattctcctgcctcagcccgacaagtagctgggactacaggcgtgtgccaccatgcacggctaattttttgtatttttagtagagatggggtttcaccgtgttagccaggatggtctcgatctcctgacctcgtgatctgcctgcctaggcctcccaaagtgctgggattacaggcgtgagccactgcacctggccttaagtgtttttaatacgtcattgccttaagctaacaattcttaacctttgttctactgaagccacgtggttgagataggctctgagtctagcttttaacctctatctttttgtcttagaaatctaagcagaatgcaaatgactaagaataatgttgttgaaataacataaaataggttataactttgatactcattagtaacaaatctttcaatacatcttacggtctgttaggtgtagattagtaatgaagtgggaagccactgcaagctagtatacatgtagggaaagatagaaagcattgaagccagaagagagacagaggacatttgggctagatctgacaagaaaaacaaatgttttagtattaatttttgactttaaattttttttttatttagtgaatactggtgtttaatggtctcattttaataagtatgacacaggtagtttaaggtcatatattttatttgatgaaaataaggtataggccgggcacggtggctcacacctgtaatcccagcactttgggaggccgaggcaggcggatcacctgaggtcgggagttagagactagcctcaacatggagaaaccccgtctctactaaaaaaaatacaaaattaggcgggcgtggtggtgcatgcctgtaatcccagctactcaggaggctgaggcaggagaattgcttgaacctgggaggtggaggttgcggtgagccgagatcacctcattgcactccagcctgggcaataagagcaaaactccatctcaaaaaaaaaaaaataaggtataagcgggctcaggaacatcattggacatactgaaagaagaaaaatcagctgggcgcagtggctcacgccggtaatcccaacactttgggaggccaaggcgggtgaatcacctgaagtcgggagttccagatcagcctgaccaacatggagaaaccctgtctctactaaaaatacaaaactagccgggcatggtggcgcatgcctgtaatcccagctacttgggaggctgaggcaggagagttgcttgaactgagaaggcggaggttgcggtgagccaagattgcaccattgcactccagcctgggcaacaagagcgaaactccgtctcaaaaaaaaaaggaagaaaaatatttttttaaattaattagtttatttattttttaagatggagttttgccctgtcgcccaggctggggtgcaatggtgcaatctcggctcactgcaacctccgcctcctgggttcaagtgattctcctgcctcagcttcccgagtagctgtgattacagccatatgccaccacgcccagccagttttgtgttttgttttgttttttgttttttttttttgagagggtgtcttgctctgtcccccaagctggagtgcagcggcgcgatcttggctcactgcaagctctgcctcccaggttcacaccattctcttgcctcagcctcccgagtagctgggactacaggtgcccgccaccacacccggctaatttttttgtgtttttagtagagatggggtttcactgtgttagccaggatggtctcgatctcctgaccttttgatccacccgcctcagcctccccaagtgctgggattataggcgtgagccactgtgcccggcctagtcttgtatttttagtagagtcggggtttctccatgttggtcaggctgttctccaaatccgacctcaggtgatccgcccgccttggcctccaaaagtgcaaggcattacaggcatgagccactgtgaccggcaatgtttttaaattttttaaatttaaattttattttttagagaccaggtctcactctattgctcaggctggagtgcaagggcacattcacagctcactgcagccttgacctccagggctcaagcagtcctctcacctcagtttcccgagtagctgggactacagtgataatgccactgcacctggctaatttttatttttatttatttatttttttttgagacagagtcttgctctgtcacccaggctggagtgcagtggtgtaaatctcagctcactgcagcctccgcctcctgggttcaagtgattctcctgcctcagcctcccaagtagctgggattagaggtccccaccaccatgcctggctaattttttgtactttcagtagaaatggggttttgccatgttggccaggctgttctcgaactcctgagctcaggtgatccaactgtctcggcctcccaaagtgctgggattacaggcgtgagccactgtgcctagcctgagccaccacgccggcctaatttttaaattttttgtagagacagggtctcattatgttgcccagggtggtgtcaagctccaggtctcaagtgatccccctacctccgcctcccaaagttgtgggattgtaggcatgagccactgcaagaaaaccttaactgcagcctaataattgttttctttgggataacttttaaagtacattaaaagactatcaacttaatttctgatcatattttgttgaataaaataagtaaaatgtcttgtgaaacaaaatgctttttaacatccatataaagctatctatatatagctatctatgtctatatagctattttttttaacttcctttattttccttacagggtttcagacaaaatcaaaaagaaggaaggtgctcacattccttaaattaaggagtaagtctgccagcattatgaaagtgaatcttacttttgtaaaactttatggtttgtggaaaacaaatgtttttgaacatttaaaaagttcagatgttaaaaagttgaaaggttaatgtaaaacaatcaatattaaagaattttgatgccaaaactattagataaaaggttaatctacatccctactagaattctcatacttaactggttggttatgtggaagaaacatactttcacaataaagagctttaggatatgatgccattttatatcactagtaggcagaccagcagacttttttttattgtgatatgggataacctaggcatactgcactgtacactctgacatatgaagtgctctagtcaagtttaactggtgtccacagaggacatggtttaactggaattcgtcaagcctctggttctaatttctcatttgcaggaaatgctggcatagagcagcactaaatgacaccactaaagaaacgatcagacagatctggaatgtgaagcgttatagaagataactggcctcatttcttcaaaatatcaagtgttgggaaagaaaaaaggaagtggaatgggtaactcttcttgattaaaagttatgtaataaccaaatgcaatgtgaaatattttactggactctattttgaaaaaccatctgtaaaagactggggtgggggtgggaggccagcacggtggtgaggcagttgagaaaatttgaatgtggattagattttgaatgatattggataattattggtaattttatgagctgtgagaagggtgttgtagtttataaaagactgtcttaatttgcatacttaagcatttaggaatgaagtgttagagtgtcttaaaatgtttcaaatggtttaacaaaatgtatgtgaggcgtatgtggcaaaatgttacagaatctaactggtggacatggctgttcattgtactgtttttttctatcttctatatgtttaaaagtatataataaaaatatttaatttttttttaaattagctgtatctgtgattgtatttcttttttgcatattattttgccctttggcccatattttgatatggatgccaccatagcattttgtgtatgtgcatgtgtattcccacttaatgtcacatttttcatgtctttacatattcttatttttgtttgtttttgagacagagtctcgctctgctgcccacgctggagtgcagtggtgcaatctcagctcactgcaacctgtgctatccgggttcaagcggttctcgtgcctcagccacgtgagtagttgggattacaggcatgtggcaccatgccccactaagttttgtatttttagtagagatggagtttcaccatgttggccaggctggtctcaaactcctgccctcaagtgattcgaccaccctggcctcccaaagtgctgggattacagccgtgagccaccgcacacggcctctctatttatttctatacatagcttttcacattatattatgtttatatattgtttatatctgtatttcctctttcattagagaaaaggtagtacatcttattcttcatggtgtctacaatatctggcagtttttggaagtcaagcgtgagcttagagcatagactggtgggattgtcaaagaagagggcaactggaagagaactgtcagttatttttggatcagtctttaattcatcatgacgggttaggcattagttgtatttcttgctaattttgaagaagacttattaacaaatcctacattaggtaaatggttttgaaagttgagttaatcataatggtgtttgacctaggactatttttaggccctatttatcttaatatcgaataatgaagcagcttcccccttagatatagacagaaaacatcaaagccaccacactacctggctggatttatcctagtaataaaatcaaaactgagctagttctctggctttcattgtaataattgtccttgtggttgtaaggaatctagatgaaaattacatggtctgttctacagccacagctgtacctacattcagaagacagacaaaagttgctgtgtttgaagagatccttcattaagggatcagacagagattactttgagacatattctaagtttaacttttctgcagggttgccattaacagaaataaactacagagttaatttctttttgtttttgatacagtctaactctcacccaagctggagtgcagtggcgcaatttcagctcactgcaacctctgcctcccaggttcaagcaattctcctgcctcagcctcccgagcagctgggactacaggcatgtgccactatgcctggctaatttttgtatttttagtagtagagacgtggtttcgccacgttggccaggctggtctggaactcctgaccccaggtaatccacctgcctcggcctcccaaagtgctgggattacaagcttgagccactacgcctgacccagagttaactttttaaaaaagtttttatgaacttaagtcttgtgatgtttgaaataatggattcaatttagacatcaaattccagaagttactaagagcagctgggcgcggcagctcacacctgtaatcccagcactttgggaggccgaggcgggtggatcacctgagatcaggagttccagaccagcctggccaacatagtaaaaccctgtctctactaaaaatacaaaaattagcccggcatggtggcacgcgcctgtagtcccagctacttgggaggctgaggcaggagaattgcttgaacccgggaggtggaggttgtggtgagccgagattgtgccactgtactcaagcctgggctaaaaagcgagactccgtctcaaaaaaaaaaaaaaaaaaaaaaaaaaaaaaaaaaaaaaaaaaaaaaaaaacaaaacacgttactaagagcaactctgggccaggcacggtggcttacacctgtaatcccagcattttgggaggacgagacaggcggatcacttgagcccaggagttcaagaccagcataagcaacaacgcaaaacccctgactctacaaaaaatgaaagaattagcaaggcatggtggtgcatgcctgtagtcccagctactggagaggctgaggcaaaaggatcacttgagtacaggaggttgaggctgtataatgagccatgttcacaccattgcacttcagcctgggcaacagactgagaccctgtctcaaaaaaaaaaaccaaaccaaagcaacaaacaaaaaacaagagcaactctgcttctgtacacttttttttttttttggtagtgacatgatctatgttgcccaagctggtctcgagttcctgggttcaagccattctcccacctcgggctcccaaagtgctaggattacaggcatgaatcaccatgcccagcccttctgtacacttttcacagtgtacccttttgtgttttttaaaatgtttgtgtatacatttattgtgaatttttaaaaaacatgtaattaaggccaggcatggtggctcatacctgtaatcctagcactttgagaggctgaggtgggtggatcacctgaggtcggtagttcgagaccagcctggcccaacatggtgaaaccccatctctactaaaaatacaaaaaaaaaattagctcggcatggtggtgggcgcctgtaatcccagctactggagaggctgaagcatgagaatcacttgaacccaggaggcggaggttgcagtgagccaagatcatgccactacactccagcctgggtgactcagtgactgtctcaaaaagaaaaaaagtaattaagttctgtcatgatatatcatcattaccctttttgaacttttaaaattttttatctttagaggtaattcatataatgttcttcaatagataagtgcttttctgtcaatatatcttggagaacacaccatatcagtatttaaaactctcattcttcctatttctccacatcctctccagcacccgttgtttcctgactttttaatgattgccattctaactggtgtgagatggtatcttattgtggttttgatttgcatttctctgatggccagtgatggtgagcattttttcatgtgttttttagctgcataaatgtcttcttttgagaagtgtctgttcatgtccttcgcccactttttgatggggttgtctgtttttttcttgtaaatttgtttgagttcgttgtagattctggatattagccctttgtcagatgagtagattgcaaaaattttctcccattttgtaggttgcctgttcactctgatggtagtttcttttgctgtgcagaagctctttagtttaattagatcccagttttggcttttgttgccgttgcttttggtgttttagacatgaagtccttgcccatgcctatgtcctgaatggtaatgcctaggttttcttctagggtttttatggttttaggtctaacatttaagtctttaatccatcttgaattaatttttgtataaggtgtaaggaagggatccagtttcagctttctacatatggctagccagtttcccagcaccatttattaaatagggaatcctttccccattgcttgtttttctcaggtttgtcaaagatcagatagttgtagatatgcggcgttatttctgagagctctgttctgttccattggtctatatctctgttttggtaccagtaccatgctgttttggtcactgtagccttgtagtatagtttgaagtcaggtagcgtgatgcctccagctttgttcttttggcttaggattgacttggcgatgcgggcttttttttggttccatatgaactttaaagtagttttttccaattctgtgaagaaagtcattggtagcttgatggggatggcattgaatctgtaaattaccttgggcagtatggccattttcacgatattgattcttcctacccatgagcatggaatgttcttccatttgtttgtatcctcttttatttcattgagcagtggtttgtagttctccttgaagaggtccttcacatcccttgtaagttggattcctaggtattttattctctttgaagcaattgtgaatgggagttcactcatgatttggctctctgtttgtctgttattgctgtataagaatgcttgtgatttttgtacattgattttgtatcctgagactttgctgaagttgcttatcagcttaaggagattttgggctgagacaatggggttttctagatatacaatcatgtaatctgcaaacagggacaatttggcttcctcttttcctaattgaatacccgttatttctttctcctgcctaattgccctggccagaacttccaacactatgttgaataggagtggtgagagagggcatccctgtcttgtgcgtgttttcaaagggaatgcttccagtttttgcccattcagtatgatattggctgtgggtttgtcatagatagctcttattattttgagatacgtcccatcaatacctcatttattgagagtttttagcatgaaggattgttgaattttgtcaaaggccttttctgcatctattgagataatcatgtggtttttgtctttggttctgtttatatgctggattacatttattgatttgcgtatgttgaaccagccttgcatcccagggatgaagcccacttgatcatgctggataagctttttgatgtgctgctggattcggtttgccagtattttattgatgatttttgcatcaatgttcatcaaggatattagtctaaaattctcttttttggttgtgtctctgcctggctttggtatcaggatgatgctggcctcataaaatgagttagggaggattccctctttttctattgattggaataatttcagaaggaatggtaccagttcctccttgtacctctggtagaattcggctgtgaatccatctggtcctggactctttttggttggtaagctattgattattgccacaatttcagagcctgttattggtccatttagagattcaacttcttcctggtttagtcttgggagggtgtatgtgtcgaggaatttatccatttcttctagattttctagtttatttgcgtagaagtgtttatagtattctctgatggtagtttgtatttctgtgggatcggtggtgatatcccctttatcattttttattgcgtctatttgattcttctctcttttcttctttattagtcttgctagcggtctatcaattttgttgatcctttccaaaaaccagctcctggattaattttttgaagggttttttgtgtctctatttccttcagctctgctctgattttagttatttcttgccttctgctagcttttgaatgtgtttgctcttgcttttctagttcttttaattgtgatgttagggtgtcaattttggatctttcctgctttctcttgtgggcatttagtgctataaatttccctctacacactgctttgaatgtgtcccagaaattctggtatgttgtgtctttgttctcgttggtttcaaagaacatctttatttctgccttcatttcgttatgtacccagtagtcattcaggagcaggttgttcagtttccatgtagttgagtggttttgagtgagtttcttattcctgagttctagtttgattgcactgtggtctgagagacagtttgttataatttctgttcttttacgtttgctgaggagagctttacttccaactatgtggtcaattttggaataggtgtggtgtggtgctgaaaaaaatgtatattctgttgatgtggggtggagagttctgtaaactggttcaaccattgtggaagtcagtgtggtgattcctcagggatctagaactagaaataccatttgacccagccatcccattactgggtatatacccaaaggactataaatcatgctgctatgaagacacatgcacacgtatgtttattgcggcactattcacaatagcaaagacttggaacgaacccaaatgtccaacaatgatagactggattaagaaaatatggcacatatacaccatggaatactgtgcaaccataagaaatgatgagttcatgtcctttgtagggacatggatgaaattggaaatcatcattctcagtaaactatcgcaaggacaaaaaaccaaacaccgcatgttctcactcataggtgggaattgaacaatgagaacacatggacacaggaaggggaacatcacactctggggactgttgtggggtggggggaatggggagggatagcattaggagatatatctaatgctaaatgacgagttaatgggtgcagcacaccagcatggcacatgtatacatatgtaactaacctgcacattgtgcacatgtaccctaaaacttaaagtataataataaaataaaataagaaaaatgcaaaaattaaaaatttaaaaaaaagctctcattcttttaagcacttacaggatattcttacagatgtgtaccacgcttaatgaattgagctcttgtggatgagagtttaatttgtttctaatcatttgttatttaatagtacagtcagcatctttaggattaagtatctagaattagaactactgtgttgaagaggctattgcatttaaattgttttttttttttttttgatacggagtcttgctctgttgcccaggctggagtgcaatggcgtgatctcagctcaccgcaacctccgcctcccaggttcaagcagtgctcctgcctcagcctcctgagtagctaggattacaggcacacgccaccatgcccggctaatttttgtatttttttagtagagacggggtttcaccatgttggccaggctgatcttgaactcctgaccttgtgatctgctcgccttggcctcccaaagtgctgggattacaggcatgagccaccgtgcccgacctacatttaaattgtaaataaaagtttgctaaattgttttcagtagaggttatattaatctatatttataccaacatggagagtttgtttcctgcaaaatagccaataatttatcaaacctttgaatctttgtcaattgaatagttaaaaatgattatctcatatttgtacatttttattttattgtgaagttcagcaccttttcatgtgtttaagaacttttaattttctgttgtttatatcgtcttcccattaccattttaactatttgtttttattttcagagtttttgcttataaaattttatttacagtcaattctctttatttgtagaatctgtatttgtaaaggcacctacttgctaaaatttatttgtaacctaacatcaatactcatggcagtttcatggtttttcatggacatacacagaggtgaaaaatttgagaaccttatccagatattcccagctggggttgaacagtgctcagttttttgtgtagctttcttattataaacaagtgtccttttcgaaagcagtttatatagttctacatttttcacatttttgtgccttctgtttgtgattttactgtttaaagtgattcccaagcattgtgctgaagtgctatatagtggtattccaaggtgcatgcgggctgtgaggtgccttagagaatacatgtgttagataacctttgtttagtcatgagttatagtgctgttgagtgggagttagatgatgatgagtcatcactatttattattatattttttgagatggagtctcactctgtcacccaggctggagtgcaatggcataatctcggctcactgcaacctcctcctcccgggttcaaacgattctcctgcctcagtcttctcagtagctgggattataggcacccgccactgcacccagcataatttttgtatttttagtagaggtggggttttaccatgttgggtaggccagtcttgaactcctgacctcaagtgatccacccaccttggcatcccagagtgctgggattacagatatgagccaccatgccaggtctatatttattaaataatgtgtctttaaacagaaacagatataaaacaagcttacgtatttataagttggtgaaaatgtgaccaaaggcttacaagaacctaaccctgtatttctgttaggagcaatggctcagtattcactaatttgcgtgtttgtggcaacttcatagaacataactacctcaagtaatgagaattgactgcattctttttcaagtcattttataaacaatttacagaagaataaagggatggtgaaaattaactttgttagcaattttaatgagaatccaaatataggagacccacattttttcccatattttcccagttttgaatgtttatgtatacctaaaaggcattacatcctttgaaagcagctgtcattatgcatgaatctggaacatacctacctttaaatacggattttggatttcaaatgcatctctactatgttctaccttattatttgtattcttcatgaactcactttgtcaaaatgcaatactttttgttttttaatttatttttattttttgtagaaatagggtctcactgtgttgcccaggctggccttgaacacctggcctcaagtgatcttcctgccttccaaagtgctggggacggtaggcatgagccaccacacctgtccaaactgcaatacttctgaaaactttagggctcatagttttgttgaagtgatagatgatggctatattctttgttacataacagcaaaacatttttgtttttacatttataaataccaattagaatgactttcagtggattggttttcatttttcacatcatctttaccttcctgttactttgtgtacatatctgtctttcatacttgtccacttacaaactttttcaagtaaattctggtgttacaagcataaaagatgaaagaacgttgtcacatggtcacttgtccttttagcaattatgcgatgattcaactgttctaggtacaactagagggagagtatcccaggcaagggagataacaaatagaaaggccctaagacacaagtgtatttaacatgtttggggaacaacaaggagttaatcgtggctggagtggaagtaaggaggagagattaaggagatggagctaagagaggtagtcaagggccaggccatatgtcagcgatagtaaggtcttcagcatttacttttttaagctgggagtccatggaaaggttttgaacccaaggtatagcatgatctgacttacagaaagagacttctgattgctgtgttgaaaatacaccataggtttgaagggaggaaacaggctgactagttagagccagtgtgggtagtggtggttggatctgagtatattttccaagtggagccaccaggatttttcagtagattgattacatgtggtgtatgaaagaggagtgtcaagtgtaactccgagatttttggcttatgcaactggaaaaataaagttagaatttaatgagatggaggtctgcataaggagtacttttgtggcaggaaagaaattgggttttgaacatgtgaaaattgagatgcccattagtagaagttggatgtgaataaagagtccaggccaggtgcaatgcctcatgcctgtaatctcagcactttgggaggccaaggcaggagaatcatgtgagcccaggagttcaagaccagactgggcaacaaagtgagaccccgtctatattataaaataaaaaaatagttcagaggagaggtctgggctagagatggaaatgtagaagttagtaaatttaaagctgttgaactagaggagatagctgaggaagtgcattcaaatagagaagatgtcagaggagaactttggggttctctcagtggttagagataggatatgaggaaaaacagtgcaggagactaaggaggagctctcattgagttaggaaaatcaagagggatgccctggaagccaaatgaaggcagtgttttgaggaagaggggtgatgggccatgtgaaagccaataggtcacatgctgctaatgggtcaactaaagtgaggactgagaagtattcaccaatttagcaatgtggagctcattggtgaccctcataagagctgtgttggtggaatggaggaggtaaaatcctggagggagagaacataagaatgagagaacagttgacagtgcatgtaaacaactctttcacggaactttgtatttctgaatttttgtttatttggctattaataaaatcatatctgatatagctttattttagtaaggtttgtttttgtgggacttcagttgtgtatacacatataatatgtgtgtgtatgtatgtgcgtatggtgttttgatgtaaaatttattattgtgggtcatggttaaaaaaaaagcttgagaatgaggagttagatcaagaaatagaaggaaagttgacataagaagttgtggatgtaggagattctaccatgtagacacagtggaaggatttagggagttggagcaggttgggatatgtgatcagaaagcgggagtttagctctctcacttgcccctgcttttaccatgtgatgtgtctgctaccccttcaccttccaccatgactgtaagcttcctgaggtctccctagaagccaagcagatgccagcaccatgcttcctgtaaagcctgcagaaccatgagccaattaaacctctttgtaaattacccagtttgaggtatttctttatagcagtgcaagaatgccccaatacagaaaattggtaccgagaagttgggcattgctataaagatacctgaaaatgtggaaacagctttggaactgggtaatgagtagtggttggaagagtttacagggctcagaagaagacaggaaaatgagggtaagtttcaaacttttttttttttttttttttttttgagacggagtcttgctctgtcgcccaggctggagtgcagtggcgtgatcttggctcactgcaacctctgcctcccgggttcaagtgattttctgcctcagcttcccaagcagctggggttacaggcatgcaccaccatgcctggctaatatttttgtatttttagtaaggatggggtttcaccatgttggccaggctggtctcgaactcctgacctcaagtgattcacccacctcgacctcccaaagtgctaggtttacaggcgtgagccaccgctcccggcaagtttggaacttcttagagactagataagtggttgtgaccaaaatgctgatggtgatagggacagtgaagtccaggttgacaaggtctcaaaaggaaacgaatttattgggaactggagcaaaagtcacacgttatgccttagcaaataacttggctgcattctgcttgtgtcctagggatctgtggaagtttgaacttaaaaactatgacctagcgtatgtggcagaagaaatttctaagcagcaaagcattcaagatgtggccttctgctactaacagcctgtgctcagatgtgggggcaaatgaatgacttaaatttggaacttacatttaaacaggaagcagagcctaaaagttgggaaattttgcagcctagccaggtggtaaaaaaaaaaaccattttctccaaggaattcaagcaggctgtggagcaaccacttgctgatatttgcataactgaaagggatccaagtggtaatatccaagacaatggggaaaaggcctcaaaggcatttcagagacctatggggcagcccctcctgtcataggccctgaagccaaggaagactgaatattttcctgggctgagcccagggccctgttgccctgtgcagcctcagaacactgctccctgcatccagatggctccaactccagcaggggctcaaaggggcctaggtacagcttgggctgttactttggagggcataagccatagccttcacagcttccattaggtggtaagcctgcaggcacacagaatgcaaaaatggtgaattcttggtagcctctgcctggatttcagaggatgtatggaaaagcctgggtg

SEQ ID NO: 20 - DNA, 52073 bp, Homo sapiens
cctgtaataccagctacttgggaggctgaggcaggagaatcgcttgaacccgggaggtggagatttcagtgagccgagattgcaccactgcactccagtctgggtgacagagcaagacttcatctcaaagaaataaataaataaaaaacaaggccgggcatggtggctcatgcctataatccagcactttgggaggctgaggctgaggtgggcagatcacctgaggtcaggagttcaagaccagcctggccaacatggtgaaaccccgtctctactaaaaatacaaaaattagccaagcgtggtggtgggcgcctgtaatcccaactacttgggaggctgaggcaagagaatttcttgactctgggaggcaaaggttgcagtgagccgagactgcaccactgcactctagcctgagcaacagaacaagactctgtctcaaaaaaaaaacaaaaaaaaaaacatacaaaccgaatttccattccacatactactcttgctgttttaccacttggacaagactgcttgctggtacataagttctggaacacttccttgcagcagtctggctgagccttggtatttaaaagaaatttacctaccagcctggctataattgacataatcctattaaatacttgccttttatgaacatatatcacatgacataagtttttgtcaaatacttttttttttggtcaaagactgtagccttataccactcaagggggctgttagggtagcttatgaatggatatttcatacagagttacgtatttaacccatttcctgtttagaaaataaaagtggccaggcgccgtggctcacgcctgtaatcctagcactttgggaggccgaggtgggtggatcacgaggtcaggagatcgagaccgtcctggctaacatggtgaaaccccgtctctactaaaaatacaaaacattagccgggcatggtggcaggcgcctgtagtcccagctactcgggaggctgaggcaggagaaaggcatagacccgagaggcggagcttgcagtgagccgagatcatgccactgcactccatgcactccagcctgggcgacagagtgagactccgtctcaaaaaaaaaaaaagaaaaaaagaaaaaaaaagtgcagctggctgccagcgctcatttaattttacataaacacactctgaggttgacgcaaattaattttcaatgtgaaaatacacaaactgttcttagagttatttctaaacagaacttgtctctaatcctaatataatggaaatgtatataatgttacattaggattagaggcaagagtattcttggggcaaacgggaaatgggttagtatatacttgaagtaatataaccacatctaacctgatttcatgatatattggaatttttggttgcaagcaacaggatcagattaatgaacttactgataaaaatcttatttgaaagaatgagagactccagagtcatggaaaagttgaggactcaaggctttggaaaggtcaagaattgtaacagtttcaggtatcttaagagtaggtgttatgaggtgtttgtttttgtttttttttcttacagtgctgatatcaggttgaacttctgacatgtatatttagtttttatgtcacttggagtgcctccaactgaagttacatgggttaggtacccatccctcagcaagaggagggcaagttgatggtaaaaccaactctagtaaggagtaggtggtcccctgtattagtccgttctcatgctgataataaagacatactcgagactggataatttataaaggaaagaggtttaattgactcacagttgtgtatggctggggaggcctcaggaagcttacaatcatggcagaaggggaagcaaatacatccttcttcacatgatggcaggaaggagaagtgcaaagcaaaaggggaaaagccccttatgaaaccatcagatctcctgagaactcactcactatcatgagaacagcatgaaggtaaccacccccatgattcaattacctcccaccaggtccctcccatgacacatgggaattataggagctacaattcaggatgagatttgggttggggacacagccaaactatatcatcccccaaaaaatttagggttctttgccaaaaggaagggagaatggatgctgagcagactaaaataatatattttaatccctcttattgaaaagctaagactaaatttttaaaattgtatgtttttgtttttttgagacggagtgtcgctctgtcgcccggctggagtgcagtggcgcgatctcagctcactgcaacatccacctcccgaattcaaacaattctcccacctcagcctcctgagtagctgggactacaggagcataccaccatgcccagctaatttttgtatttttagtagagatgaggtttcaccatattggtcaggctggtctcgaactgacctcaggcaatctacccaccttggcctcccaaagtgctgggattacagacatgagccaccacgcccagctaattctgtattttaagtagagacggggtttcaccatgttggtcaggctggtctcgaactcctgacctcaggtgatccgccagccttggcctcccaaagtgctgggattacaggcgtgagccaccgagcctggctgtatttttaaatacaaaaatttgccaggtattgtgatgggtgcctgtaatctcagctactcgggaggcagaggccggagagtcacttgaacccaggaggttgcagtgagctgagatcacaccactgcactgcagcctgggtgacagaatgagactccatctaaaaaaagaaaaaaatgtattttttaaaatacatgatatggcaaatcataaaggtggtaagcatctgaagtgtgagaaataatcatgcagcttatgcagtttttgtctctaccaatctttcaaaccctcaaactgcaatgcttgctcattatagaaaatctgggaaaatacagtaagttctaaatttccataaattctaaatagcatctctttgaaaactaactccttgggcatttatcccagtgaaatgataataaacagccagcatttgaaatgtatatttcaatgactcgtatatgaatactatgttcagatcacaataaaggacatttccagcaccctcttagataatgcctcccatctgattatcaccatagattagttttgcctgtttttgaattttttgtaaatgggatcacacggtatgtgctgtagtgagcctagcttgatttgctcaacgttacgtctaaaagaattctctattttgctgctatgcagcagttcagcctttttcactgttgtgtagcattctgttatatgaatataccataatttagttactctacatttcatggacctttgaattgctcccactttggggctgttatgaataatgctaccgtaacatttttatatatcttatgatggtcttaaacacgctatctactgagtatatgccaggaatggaattgctgggtcatagggtgtgtgtctatacacacacatacacacattttttagtaggtaccatcaaacaattgcatttttgttgtttttgttttagtttgtttttaatgaccataccattttaccaccagcaataaaggaaggttccattgctccataccagcattaggtattatcagtccttttatctttaaccatattggtgggaggtagtggtatctcattgtagtcttaatttacttccatatacttaatttaaatacactcaatttatatacacacacgtatactctctcagccttcagtaagccagtcccattcccctgaactaaccaatgttaataatggtatacttctctcagtgctcatgcaaacatgcatacacacacatacacataaataaggggtgtgggaatgtatttgattctgagagctgctgtaacaaattaccacaaacttagtggcttaaaacaacagaaatatttctgttcacagttctggaggccagaaatctgagagcaagatgtcagctgggccacacctccctctgaaggctccaagggagaatccttgctttcctcttccagctgctggtggctccaggtattacttggcttatggcagcataactcctatctctgcctttgtctttgtggtcttcttttctgtcttcttcccttctttttatgaggacttttgctgttggatttaggttccattctaacctaggatgatctcatttggaaatccttaatttcatctacaaaaactgttttcccaaataggtcacattcacgcatatcagatggacagatgtatcattttggggtccaccattcaacccactacaaggagttttttaaacaaaaataggaaacttagatgtaacttagcactttttttttttttttttgagatggagtctcactctgtcaccagactggagtgcagtggcgccatctcagctccatgcaacctctgcctcctgggttcaagcagttctcttgcctcagcctcctgggtagctgggattacaggcacgcgctgccacacccaggtaatttatttattttttttttgagacagagtctcgcactgttgcccaggctggactgcagtggcgtgatctctgctcactgcaacctccgcctcccgggttcaagcgattctccagcctcagcttcctgagtagatgggattacaggcgcctgccaccacgcccagctaattttttgtattcttagtagagatggggtttcaccatgttggccaggctggtctccatctcctgacctcgtgattcacccgcctcggcctcccaaagtgctgggattacaggcgtgagtcacagcccccggccataatttagcactttaaaaaataatagccatgttgggccaggcgtggtggctcatgcctgtaatctgagcactttgggagaccaaggcgggtagatcccttgtgcccaggagttcaagaccagcctgggcaacatggcgaaaccccatttctactaaaaatacaaaaattagctggggcgaggggataggccgagttccgggtgtaagggggccattagggagagcagagcgaggcagctgatcttccggattgggggccttgcccggaagctggacctcacggagatgaaacggaagatgcacgaggatatgatctccatacagaactttctcatctacgtggccctgctgcgagtcactccatttatcttaaagaaattggacagcatatgaagattggacatcacatgtgaatgcatgatatgaagagcctggttacagtttctactgttctctgcaagtaaataggcccagaaaggtataagagactctttgaatggacataaaaattctgcttgttaagaacaagttgagctctggtaactgatcttaatagctaaaatataaaaatatttgggaagtctgaaatgaggtctcctggccctggtgtgcccttaatgcctgtgacagttggcctctgtgaatattggtataattgtaaataatgtcaaactccattttctagcaagtattaataattaagggaagtatgtctgaaatggcactgtcttgtcagtcatttctgtttacccttctgtctggagtgtatttgtgaagagtcccttataacttatgttttatggacatcagcacataaccacaatgacattgaagcacaggatcattagtctatattttattttattattttatttatttatttatttatttttgagatggagtcttgctctgtcgcccaggctggagtgcagtggcacaatctcggctcactgcaagctctgcttcccaggttcacgccattctcctgcctcagcctcccgagtagctgggactacaggtgcccaccaccacacccggctaattttttgtacttttagtagagatggggtttcactgttttagccaggatggtctcgatctcctgacctcatgatccacccgccttggcctcccaaagtgctgggattataggtgtaagtcaccatgcccagcccattagtctatatttttaagtaaacataccaattaagaaagaagccaaaaaccaaaattagccaggtgtggtggcacgtgcctgtagtcccagctacttgggaggctgaggtgtgaggatcacttgaactcaggaggcagaggttgcagtgacccaagatggtgccgctgcactccagcctgggtgacagagtgagaccctgtttccacaaaaagaaaaaaaaaatagccgtgcctgtacttcagtacttacaaatttaactttagtatagatgtacagtaatttattcaatcatttccttactcatagacaattaggatgttgcaacttttgccactacaaacaattctgcgatgtggattatcgtacttattcccatttattggtgctttcatttctataagaatggatttttaaagatagaattccttgggaatagttatgtcaaagccaaatataatatagagacaaatctctaaaaacattttatttggtaagcaagagctgcaattcatggcatacacacagaccgggctgatcattggtatgatcaggagaataaagggaaggttgcggccaggtgtgatagctcatgcctgtaatcccagcactttgggaggccgaggcgggcagatcacctgaggtcaggagtttgagaccagcctgaccaacatggagaaactccgtctctactaaaaatacaaaattagttgggcatagtggcgcatgcctgaatcccagctactcaggaggctgacacaggagaaatgcttgaacccgggaggtgaaggttgcagtgagccgagatcgcgccattgcactccagcctgggcaacaagagcaaaattccatctcaaaaaaaaaaaagagaaggttccgggttttatgagaaagaacagtattacatactgttttggaagaaagctcattcacactagagcttgtgggagctagcaagctctgattggtgagcgatggtggtaggtaaaaccagtcttagagtcatggcagttcattttagcagctattaggtaaaactggtcttagggatacagaaggctggttcagcagttggacttgtggaaaatttaattcttgaagcagatgctgtgtgccccgaatgcttcttccccctggcccttcaactctgatttagttgagtatttcaagaatgacccaatttatgtaatcaactttcacaggtatacatgtcttaaactttaaacagatgttttgggttttgttgttgttgtttttgagacggagtctcactctgttgtccaagctggagtgtagtggtgtgatctcggctcactgcaacctccgcctccagggtcaagtgattctccagcctcagcctcctgaatagctgggattacaggcgcccgccaccacgcccagctaatttttgtatttttagtagagatggggtggggtttcaccatgttggccaggctggtcttgaactcctgacatcaagtgttctgctcacctcagcctctgaaagtgctgggattacaggcgtgagccactgcgcccggcagtctttccttcttttttttttttttttttttttttttaatgacatggggtcttactttattactcaggctggtctcaaacttctggcctcaaggaatcttcccaccttggcctcccaaattgctgggattacaggcataagtcatcatgcctggctacaaacagatattttcaataagaggataaaagttcatttccccatactttgctaacatcaaatgttattaattcctaatagttttgccaaactgagaggaaaatggtatgttagtttttctgggttttctttctttttaattttttttcttttttattcatcgcaacactattcacgatttttttattttttattttatttatttatttatttttttttgagacaaggtctccctatgttgcccaggctggtcttgtacccctgggctcaaaggatcctcctgcctcagcctcccaaagtgctaggattacaggcatgagtcaccacgcctggttcacaatttctttttgtttttaccaaaggcaggtatattcctgaaattttttgtttttttgttttttttttgagatgaagtctcaccctgtcactcagactggagtgcactggcacgatctcagctcactgcaacctccgcttcctaggttcaagcgattctcctgcctcagtcttcaaagtagctaggattataggcgccgcaaccatgctcagctaatttttgtatttttagtagagacaggatttcaccatgttggccagggtgatctcaaatcctgacctcaagtgatccgcctgcctcagcctcccaaagtgctgggattactggcatgagccaccgtgccaggccctgaaatgttatcttagttattaatttgcaattccttggctctagaggttgggcatcttctcagatctctagtggacatttggattttctttttggtgaactgtccagtttttctctctgctttacaatctttattatatgcaatcttcacatgtaggtactaccatttttttagtttgtttttgaaacagcatattgctctgttgcccaggctggagcacggtggcaaaaacatggcttactgcagcctttgacctccttggctcaagtactcctcctgtctcagcctcctgagtagctggtaccacaagcccataccaccatgcccagctaatttatttttgtagagatggggcctgaccatgttacttgggctcaaatgatcctctcccactcagcctcccaaagtgctaggattacaggcatgagccaccatacttggccccttttttttttttttttttttttttttttttttttttttgagacacagtcttgctctgtctcacaggctggtgtgcagtggcacgatctcagctcattgcaacctccacctcccagtttcaagtgatttttgtgcctcagcctccctagtagctgagattacaggcatgcaccaccatgcctggctgactttcatatctttagtgttgccatgttggctaggctggtctcaaactcctgacctcatgtgatccacctgcctcggactcccacagtgctgggattacaggtgttagccaccaccccgacattatttgaaacttttattttatcatgagagagttccaggagtcaactgaagagagatttttggtatgaaaattacatatgcaaaaagactgattccagtacatgaaattaaattcaacatttacattaaatgccttcaaatatggtaaaatggtttcttttggcagtttacctcattatgttttgaatgatttgtctatcatatgaaataacttttataaatatagtaactcaggcctgggcacagcggctcaagtgggaggactgcttaagcaaccgagtttgagaccagcgtggacaacatggggagaccccttctctcccaaaaaatagctgagcatggcagcgcactgttaaaggaaacagagtttctttggtgggtgattaaaatgttctggagttagatagtagtgatggttgcacaaccttgtgaatatattaaggtttccgctctatctaccattcaattgtactctctaaaacgattaattctatagtatatcaattatatctctaaataataaaaacaaaaagaaatggctgggtgcggtggctcatgcctgtaatcgcagcactttgggaggctgaggcgggcggatcacaaggtcaggagtttgagaccaacctgaccaacatggcaaaacccagtctctactaaaaatacaaaaattagctgggtgtggtggcacacgcctgtaatcccaggtactcgggaagctgagacaggagaatcacttgaacccgggaggcagaggttgcagtgagccactgcactccagtctgggtggcagagcgagactccgtctcaaaaagaaaaaaattaaaaaacaaaaagaaacctggttctatattttgtttaaatttatttttttaaccatcatgtaatatgtccaggtaatttgtttaaattttgacatcaaatgcaattgtgagaatttttatgattcagaaaaatctaagcaagctttataaaaacatacttttttttttacttttttttttttttctgagacacagcctcactctgtcgcccaggctggagggcaggttttcatgtttatctgtgagatgtacctttggcacattactttcctgacatgagatttaaatttttttttttatcttgtgacaatttaacttttttgacacataaaaattgtacatatttatttgtttgagatggagtcgcactctgtcactcaggctggagtgcagtggcgtgatcttggctcactgcaacctccgcctcccgagttcaagtgattctcctggctcagcctcccaagcagctgtcattacaggcctgcaccaccacacccggctgatttttgtatttttaggagaaacagggtttcaccatgttggccaggctggtcttgaagtcctgacctcaagtgatccacccaccttggcctcccaaagtgctgggattataggcatgagccaccgtaccagacccctaaaaattgtatatatttaaggtgtaccatttgatgtttagatatacattgtgaaatgattacattccacatattacctctacagagttaccatttttgtacacttggtcaacatcatcccattctccccttcctccacagatatttcttgtatactatatagaagccaagggtattttgggggaagagctcaaagttcctttcgtggagttaaaaatatatatatactatgtacatataagccatttagcaaccctagatgcttaataaagaatactggaggcccggtgtggtggctcacacctgtaatcccagcactttgggaggccgaggcggtcggattacgaggtcaggagttcaagaccagcctggccaacatggtgaaaccccatctttactaaaaatacaaaaattagccgggtgtggtggtgggcgcctgtaatcccagctactcggggggctgaggcagaattgcttgaacctgggaggcagaggttgcagtgagctgagatcacgccactgcattccagcctgggtgacagagcaatactctgtcgcaaaaaaaaaaaagaatactggaggctgggcgaggtggctcacacctgtaatcccagcattttgggatgccagaggcgggcggaatatcttgagctcaggagttcgagaccagcctacacaatatgctccaaacgccgcctctacaaaacatacagaaactagccgggtgtggtggcgtgcccctgtggtcctagctacttgggaggttgaggcgggaggatcgcttgagctcgggaggtcgaggctgcaatgagccgagatggtgccactgcactctgacgacagagcgagactccgtctcaaaacaaacaacaaataaggttgggggatcaaatatcttctagtgtttaaggatctgccttccttcctgcccccatgtttgtctttccttgtttgtctttatatagatcaagcaggttttaaattcctagtaggagcttacatttacttttccaagggggagggggaataaatatctacacacacacacacacacacacacacacacacacactggagttcgagacgaggcctaagcaacatgccgaaaccccgtctctactaaatacaaaaaatagctgagcttggtggcgcacgcctatagtcctagctactggggaggctgaggtgggaggatcgcttgagcccaagaagtcgaggctgcagtgagccgagatcgcgccgctgcactccagcctgagcgacagggcgaggctctgtctcaaaacaaacaaacaaaaaaaaaaggaaaggaaatataacacagtgaaatgaaaggattgagagaaatgaaaaatatacacgccacaaatgtgggagggcgataaccactcgtagaaagcgtgagaagttactacaagcggtcctcccggccaccgtactgttccgctcccagaagccccgggcggcggaagtcgtcactcttaagaagggacggggccccacgctgcgcacccgcgggtttgctatggcgatgagcagcggcggcagtggtggcggcgtcccggagcaggaggattccgtgctgttccggcgcggcacaggccaggtgaggtcgcagccagtgcagtctccctattagcgctctcagcacccttcttccggcccaactctccttccgcagcctcgggacagcatcaagtcgatccgctcactggagttgtggtccgcgtttttctacgtcttttcccactccgttccctgcgaaccacatccgcaagctccttcctcgagcagtttgggctccttgatagcgttgagtggaggccctgccgcgacttggcagtagcttattttgttcactcctctctggctggtgtgggggaggtgggggcattaggccagggtgaagcaggggaaccacttaggagtctgttaagatgatctgaacttcagaacaagatgttattaacagagtgaaagtatttggattctgggtatattttgaaatcggaggcaacaggtttttcagatagattcgataacggaggttatcctgaatagttgaaaagataaagttgccttttgctgaggtgggaaagagaagattgccagtagagcaggtttctcaggagttcagtcttgggcatagcatggtaggggtgaatttggctggagtgagttggagagtaggagaagagaaatccaaggcaacatttgaccagcctgggcaacatagtgtgactccgagtctgcaaaaattagacgggtgttgtggtgcgcgtctgtggtctcagctacctggaaggttcaggccttggaaggctcagggaggtggaggctgcagtgatctgtgattgcgcctctgcactccagcctgggcgacagagccagaccctgtcttaaaacaaaataaacggccgggcgcggtggctcaagcctgtaatcccagcactttgggaggccgaggcggccggatcacaaggtcaggagatcgagaccatcctggctaacacggtgaaaccccgtctctactacaaatacaaaaaattagccgggcgtggtgacgggcgcctgtagtcccagctactcgggaggctgaggcaggagaatgtcatgaagccgggaggcggagcttgcagtgagccgagatcgcgccactgcactccagcctgggcgatagagcaagactccgtctcaaataaataaataaataaataaataaataataaaaacatcggtaggcatatttcaaggaattctatttaaaaaaaatttttttagagacaagttcgctctctgtggcccaggctggagtacagtggcatgatcctagcccatggcagcgttgatctcttggcctcaagcgaccctcctttggagtcgctgggcctaaaggagtgagccaccacgaaattttattataaatggagggtagagaaattgggcaataaatggagggggaagtgagttaagaggaattttaattatgtgtgtgtggttttaaaagaggggggtcttgctctgttgcccaggctgctggggtgccagtggcgcaatcatgaatcactacagccttggactcctggcctcaagctatcctcccacctctgcctcccaaagtactgggattactagtgtgagccactgcactaagataggagcaacatgtttcagcatgtttgtgggttgataggaaagatgagaatgggaaagttgatgtcggaaagaagacaatggctagagcaatgtcctagagtaggtaagaagggatggatttggcctttgttggaaacattagcggttcttttggtgacagctatatagttaacacatctatgatacgtgaatgggcagataggatggcaggagattttgaaagttctcttgattcttactgttctcttagtgaaagaagcaaggttatcagctagaagctgggatgggagaggaaagagaagatgggaagtagatagttctttagaagagtgggcaagggttggactagggaagtttagtggaaatattgctaggcaacataaagagcctacttgagattcgtggtcatgagttgaaggagaccagacagcaagattgtgtatgagggcacccacagagtaaatggagagttgaaattaatgcagttgtgattttaccacgtggatatgaagaagtgagggggagaagtacaaaggagttctcttaatgattgaccatggaatttaagctggctaagaaaggaagtgagaggccgggcgcggtggctcacgcctgtaatcccagcactttgggagactgaggtgggtggattacctgaggtcaggagtttgagaccaacctggccgatatggcgaaaccccatctctaataaaaatacagaaaaattagccgggaatggtggcaggtgcctgtaatcccagctactcaagaggctgtggcaggagtatcccttggacccaggaggtggaggttgcagtgagccgagatcacgccactgtactccagcctggacgatatagtgagacttcacctcaaaaaaaaaaaaaaagaaaggaagtgaggattttaagaccctgagagacagtttaaaaagtgggaggatcggccgggcgctgtggctgacacctgtaatcccagcactttgggaggccgagttgggcagatcacaaggtcaggagttcgagaccagcctggccaatatggtgaaaccttgtctctactaaaaatacaaaaattagccgggcatggtgtcacgtgtctataatcccagctactcgggaggctgaggcagaaaaattgcttgaacctgggaggcagaggttgcagacagctgagatcactccattgcactccagcctgggcaacaagagcaaaactttgtctttaaaaaaaaaaaaaaaaaaagaatacaaaaattagccgggcgtggtggcgcgtgcctataatcccagctacttgggaggctgaggcaggagaatcagttgaacacgggaggcgaggtttgcagtgagccgagattgcgccactgcactccagcctgggcgacagagcaggactcctcttggaaaaaaaaaattagctgggcatggtggcaggtgcctgtagtctcagctactagggaggctgaggcaggaaaatcacttgaacccgggatgtggagtttgcagtgacccgagatcgtgccactgtactccatcctgggcgacaaaatgagactctgcctcaaaaaaaaaaaaaaaaaaaagtgggaggatcaatgtactgccagtcctaatgaagtggaatgattgtccccatcaaatcactagtaggagtaagttgcagagcctagaaggtgatggttaagagagtgggattcttgaaactgcatttatggagaggttgtggttattggttataataaataaatacagttgaagtgagtgagtagctgagatttggggatgtatcagttcattcttacactgctacaaagacatacctgagaccaggtatttataaagataagaggtttaatcagctcacagttctgctgcctgtacaggcttctcttgtggaggcctaaggaaacttacagtcatggtggaaggtgaaggggaaacaagcacagtcttcacatggccagcaggagagagagagaagggggaagtgctacatactttaaaacaaccagatcttgtgagaacgcttatcaggaaacagcacttggggatggtgctaaatcattagaaatcacccccatgatccagtcgcctcctaccatgcccacctccaacactggggatcacaattcagcatgagatttgggtaggaacacagagctgcaccacatcagaggatgtacaagattgtggtggagaggagtttagagacctgcaaatatagggtaattgaagggatcatctacatggatatttaaatcaccaaaaattatgacaggagtagtgttggagagagaactgcgatgtaaacattaaggaatgaggaagagtgactcggtaggctgtaggtgactgcaataggaaacgataatagactgtgagtctggtgacaagattttccttctttctttttttccccccccccgagacagggcctctttttgttgcccaggtgggagtgcagtggcgcgatcacggctcactacaacctcctcccaagctcaagggattctcccacttcagcctctcaagtagctggaactacaggtgctgaccaccatgcctggctactttttgtcaggattttcaaggctgggaattttgagaggggaatggaggagaataatctgaaagtgcaagtaaggagcagggaagatttcttttttcttttttttttttttttttgagtcggagtctggctcagtcgcccaggctggagtgcagtggcgagatctccgctcactgcaagctccgcctcccgtgttcacgccattctcctccttcagcctcccgagtagctgggactacaggcgcccgccaccacgcccagctaattgtttttttgtatttttagtagagacggggtttcaccgtgttagccaggatggtctcaatctcctgactttgtgatccgcccaccccggcctcccaaagcgcttgggattacaggcgtgagccaccgcgccagccagagcagggaagatttcttccccacatctccagtaggtacagtgatatgaagtgtgtggaggagaaaagaggaaacatctatcatttgagatggctgcgaaaggaaaaggcatcctcagggagctagattttacttagagcaagaaatgaagggatgattcagaggttaaaagagtggattttatgaattactcaagggagcacagtggaagtttcaggaagtggtaggagaaggtagaagatggcagggtgttgggaataatttgagaaatctgagctactggaaatgactgagaatcagatataaaggcagtcctggtggtccgttctggctgccgttgctgtgtaacgaatctgccaaaacttagtggcttgaaacaacaaagaacattttattatctctcattgtttctgtgggttaggaatttgtgagagccgtgctgggcagttttcgtgcggctgtctcgtggttgcacctacatagttgctagagctacagtagctggggactgagcagctagggattggcaggctatctctttttttcatgtagtctcatgaagatttctttatgtggtttcaatgtgtgggctggtttggatttccttatagcatggtggcctcagttggattgctgttttgtgatccttttcatccctccttgtcctgtccccagacaaccactgatctactttctgtcaccatagattagcctgcatttttaagaatttttataaacgtggaatgatagagtaccttttttgtcacgtttcttttatttatcatagctattttgattttcatccattttattgctgagtagtatcccattgcatgtatatactatactgtattcattcgcttgcttgtgaacatttgggctttttccagtttgggactgttaacaagtagagccactatgaatattagtgtataagacttcatatagccaaggctggcagatcgcttgagcccaggagtttgagaccagcctgggaaacatggtgaaacctctatttttattttaaaatcaaaaattaaaaattttctataaaaaattttaaagaagactttgtatagacatacgctttcatttttcttgagtgaatacttaggtctcagggtagatgtattttaagtctttaaggagctgtcaaactcttcctcaaagtggtggttgtaccatgttactttttaatataacagagattaattgagcaaagaaaaattcaaaagttggacagcccccacaactaaataggttcagaacagctcccccattttgcattttgaccagcaatgtatgaaagttccatttgctcagtgtccctgcaaacacctggtatggtcagtctttttaattttaggcattataatagatatagtggcttcttgtgattttaattagcatttcctaatgaccagtgctgctgttgatcatttcatgagtgtatttgccatccgtatatcttttttggtgaagtgtctattcaaatcatttgggttttttttttttttgttttttttttttggagacagtgtctcactctgtcacccaggctgttgtgcagtggtgcaatcacacagcctactgcagcctccacctcctgcgctcagtcttcttgtctcagccttctgagtagctgaaattacgagcacacgccacaatgcctggctaattttttaaaattttgtagaaacaaggtctcattatgttgcctgggcttgtcgtgaactcctgggctcaagcaatcttcctgcctcagcctcccaaagattgggattgcaagtatgagccactgcacccggccaacttacccatcttttaattgaatttttttgttgttgaggtttgagagttcttcatgtttgctgggtacaatatctttatcagataggtaacttgcatgtattttctcccggtttacactttggtttttcattttgttaacaacgtctttttaagaacagaaaatcttaattttgctgaaatctaatttttcagttttttctttgatggttttgagagaggaggtaaaaaaagactaggtaagccgatagttagacagagtcctcggtagaacttcccttctaacaaaaagcagcccaagaaatcacttctcttctaacaaggagcagcctggaagatcgggctgtaaacatgtataaggaagcagctctggcacagagggggagcttcctgggtaatcagcaagcttcacatacgtaaggtgggtatgtgaagtaaacacagtatgtgaagtaaacacagtggaccttagtacatactcagataaggaagctggaagcttgcatgttgtgagttgttggggttgcctgcagctgcacggagagaaaggggtacctggggccaggcatgtccaccatggtggctccacctccccttatttagcacatgcacaataggaaagagataagcaatgtggagtagctcaggccaaggacctgcctgcataataaaaggttggggtgggggatgccagagattcacgctctgtgcagatggcaacacctggtcctaactggttttttgctccctatgtgtagataagctacccccttcccattagctcatttataaaaatgcttgcatttcactgtggaatgggaactcttttcaggacctctctctgcaggagagagctagtctctttcttttgcctattaaacttctgctctagcctcacacccttggtgtgtcagcgtccttgatttcctcagcgtgagaccaagaacctcgggtgccaccccaggcaacaaggccatttcagtttgttcttttgttataggcaatccatgatcacagatttttctctcttttttttttttacacagtttagagttttagttttacacttaggtctgtaatccattttgtattaattcttatatgtggctcagtgtaggtggaaatttggtttgtttttgcataaggatttccaatagttttaccaccatttcttgaaactactatgctttctctattaaaccacatttgtaactttagttaaaatcagtcacatatatcacagggctatttctgactctcaattctgttacattgtctattagtgtatattgatgtcagtactacacttttaattactattgcttcagggtatgtcttgtaaaccaaaaataaaattataggccccccccgcccctgcacaaccaactgaatggacccatcctctcagccaagggcattccaaaattaacctgaaaaactagttcaagccatgatgggaagggggagttggacatgtctcatcacaccctactaccttttggaattactgatagaacagactcttaaagtctgaaaagaaacatttacaacctaccctctctgaagcctgctacctgggagcttcatctgcatgataaaaccttggtctccacaaccccttatggtaacccaaacattcctttctgttgataataactctttcaactagttgccaattagaaaatctttaaatcttcctatgacctagaaacctccctacccccactttgagttgtcctgcctttcctgacagaactcatgtacatcttacatatattgattgatgcctcatgtctccctaaaatgtataaaacaaagctgtaccccaccaccttggggacatgtcatcaggacctcctgtggctgtgtcataggagcgtctttaactttggcaaaataaactttctaaattgattgaaacctgtcttagctacttctggtttacagtcttaaagttagataatgtaaattgtccagctttggtttatttttgtccttagtagttccatataaattttagaatcagcttttcaatttaatacactactttcctcttagatccacaattaaatatatttgatgctaacaattctgttttatgtttttcgttttttttttttgagacaagagtttcgctcttgttgcccaggctggagtgcagtggcgcgatcttggctcaccacaacctccacctcccaggttcaagcaattcttctgcctcagcctcccgagtagctgggattacaggcatgcgccaccacgcccggctaattttgtatttttagtagagacggggtttcaccatgttgatcaggctggtcttgaactcctgacctcaggtgatccacccacctcggcctcccaaagtgttgggattacaggcgtgaaccaccatgcctggccagttctgttatttttaaaacccaagtttccctggtcatatcttggttggatgaagcgtattttcaatagattaccctggaaaggctagtgagtacggtattcttctacattttagacttttcttagtcttgctacttcaaggacagctaggctgcatataaaattcttggctcatactttttccccataaatttctatgagaaagtctaatgataactgattttctttattttgtaacttagtctttttgcttagaggctctctgaggatgggagggggttcttcctcccatccctaggaatttttcttttttttaaattcctaatcactagaccaccaggaagattgtttgttttgttttgtttttattcttcagggaccccatttatacatacgttaaataaatactgtttgccaatgtatcaaccattttgcttcttatttatttttgttcctttggttctttttcatggctttgctttggtgctccttagattttcagtcagatgtatttgtccttgggtaccttgtaatcagtattaccttttcttctgtcgctttgttttctgttcgttttgaaattacttgtttcctggtctggcaataacagttgagatatgaggagtttgagctgccatctgtctatgtatcttgctttaagactgcactcttctattgatatcactggccttgattttgtgatttctttatttcttcaggaccacccttcattttctactgtttgcttcctttttttttgagatggagtctcactctgtcactcaggctggagtgcagtgatcttggctcattgcaacctctgcctcccgggttccagcaattctcctgcctcagcctcccaagtatctgggactacaggtgtgcaccaccatgcccggctaagttttgtatttttaatagagacggggttttgccacattggcaggctggtctcaaactcctgatgtcaagtgatccacccaccccacccacctctgcatcccaaagtgctgggattacaggaatgagctgccgtgcccagcctcccccctacccccctttttttctttcgagacagagattataggtgtgagccactggacccagcctgtttttattccttttaccaaatctccaaggaatatcttcccttccaagtgcgaatgtaaccttaagtcagttaacctctttgtgattacttttcttatctgcaaagtgacttaatgatcttaagtactttttttttttgagacagggtctcactgtcaccctggctggagtgcagtggcacgatctctgatctccactcactgcaatctcctcttccctggttcaagcggccctcccaccttagccttctgggtagctgggactacagatgtgaaccaccacgcccagctaatttttgtactttttgtagagatggggttttgccatgttgcccaggctgggattattaagtactttttatcatacagcaagattgacattttatattggaatacatttgtctctatataacggagattaacaggaaaatgacaagcctgggtgcggtggctcatgcctgtaatcccagcactttgggaggctgaggtgggaggatcacttgaggtcaggagttcgagaccagttttgccaagatgatgaaagcccatgtctactaaaaatacaaaaattagcccagcttgatggtgggcgcctataatcccagctatttgagagactgaggcaggagaatcacttgaacctgggcagcagaggttgcagtgagccgagatcatgccactgcactccagcctgggtggcatagcgagactcttgtctcaagagaaaacaaaacaaaacaaaaaaaaaacaggaaaatgacaaaaagtaatattacaactcagtgaattttataacaaacttttttggaattcattgactaatactataccaaatccaaaatactctctagtataccaaatccaactctaccctatagtataaattggattctatttggacttgtctcactaatccctcatacagtgtgttttattttttattgaagtaaaaaaatttgtcattttaaccatttttaagtatatagttcagtaatattaagtatgttcatgttgttgcgcaatagatcttcggaagtttttcgtcttgcaacctgaaactctacccattagcaaattcccatttctccttacacttagcccttggtaatcatcattcttttttttttttttttgagatggagttttactcttgttgcccaggctggagtgcaatggtgcaatctcgactcaccacaacctccgcctcccaggttcaagcaattctacctcagcctcccgagtagctgggattacagtcatgcaccaccacgcccggctaattttgtatttttagtagagaaggggtttctccatgttgaggctggtctcgaactcctgacctcaggtgatctgcccacctcggcctcccaaagtgctgggattacaggcgtgagccactgcgcctggcccattctttctaattctataaatttgactacttagttaccttacataaataaattcttatagttagtgttatttttgcttccatgccttttttgttgttgttcatgctcttacttggaatgcgttctattttgtctacctatgcacatcctgttgggttttttttttttttgggggttttttttgtttttttttgtttttttttcccagacaaggtctcaatttgttacccaggctggagtgcagcggcgccatctccactcactgcatcctcaacttcctgggcccaggtgatcctctcgcctcagcccctgcaggtagctgggactataggcatgtgccaccatgcccagctaaatttggtttttttgtttgtttgtttttgagacagagtctcactctgtcacccaggctggagtgcagtggcacaatctcagctcactgcaatctctgccgcccgggttcaagtgattctcctgcctcagcctcccaagcagctgggattacaggtgactgccaccacgccagctaagttttgtagttttagtagagatggggtttcaccttgttggccatgctggtctcgaactcctgacctcgtgatctgcctgcttctgcctcccaaagtgctggaattacaggcatgagccaccacgcccggccagaatttttgtatttttagtagacacaaggttcttaccctgttgcctaggctggtctggaagtcctggactcaagcaattcacctgccttggcctcccaaaatgctgggattacaagccaccatgcccggcctaaatcctgttgttttgttttgttttattttgttttgttttgttttgtttgttttttgagacagagtctcgctatgtctctcaggctgtagtgcagtggcgcgatcttggctcactgccacctctgcctcccaggttcaagtgattctcctgcctcagcctcccaagtagctgggattacaggcatgtgctactatgtccggctaatttttgtatttttagtagagacagggtttcaccatgttggccaggctggtctcgaactcctgacctcgtgatccacccacctcggccacccaaagtgctgggattacaggcgtgagtggtttttatttcttaggccggtttcctccatatgatcttgcagtagacattaatttctttcctttttaattaaaatactgtttgtatttcacattttgatgtttgttaagatttgttttatattgttttttgttttgtcttgtgtgatagtcttaaatccctagttagataataactggagagtaccatgtttctatatatctctcagtgacttgcacagtgctagcagatagtgctaaaaaattatttattattattattattttgttattgttgttgttgttgttagacagggtcttcctctgtcacccaggctagagggcaatgggatgatcatagcttactgcagcctccaacaactgggctcatgtaattctcctgcctcagcttcccaagtagctgggattacaggcatgagccaccatgtctggacaaaaatatttccaggtgcagtggctcatgcctgtaattcccacacttgggaggccgagcgaggctggaggatcacttgagcctaggagttcaagaccagcttggctaagatggcgagaccccgtccctacaaaaaattttaaaaactagccaggcatggtggcatgcacctatattcccaactactcagtgggctgaggtgggagggtcatttgaacacaggaatttgaggggagaaaaaaagaagagagaaagagaagtgaaggaaggaagaaaggaaggagggagggagagaagaaagaaacgaaagaaaggaaaagaaaaggaaggaaagaaaattggtaccaggaaagcaggaaagggaaatggaagtaaaaaaataataataataataaaatgaaaattggttagtcactattaacaatttgtatccttataatctggaaacattataatttcaaaagaaaaaatattctttggatcataggttctgaggtcagaacagcattcccgtagtctagatgaagtcaagttttatctgatcttaattgaaataaatatagctggccttgaacaaatctactcatggtatgtggataggaattaaattgtaggggcattcacttgatggcattcattcttagaacatttacctatgtctagcttttggagtaaagtcacataacctctaaccaggtaagtttcctgtggctttatttaggattttaaatactcattttcagtgtaattttgttatgtgtggattaagatgactcttggtactaacatacattttctgattaaacctatctgaacatgagttgtttttatttcttaccctttccagagcgatgattctgacatttgggatgatacagcactgataaaagcatatgataaagctgtggcttcatttaaggtatgaaatgcttgcttagtcgttttcttattttctcgttattcatttggaaaggaattgataacatacgataaagtgttaaagtacatgttattcagttttcattttgaagattagatggtagtatgagttagttaaatcaggtgatatcctcctttagaagttgatagcctatatatgtcatcctttgtggaggcaatttaaataaaatttaaaacatttattcctggctgggtatggtggctcactcctgtaatcccagcactttgagaggctgaggcgggtggatcacctgaggtcaggagtttgagaccagcctggccaacatggtgaaaccccgtctttactaaaaatacaaaaattagccaagcatggtggcacgtgcctgtaatcccagctgcttgggacactgaggcaggagaattgcttgaacctggggggcagaggttgcaatgattgcaccactgcactccagcctgggcgatagagtgagactccatctcagaaaacgaacaaacaatgtattccttttagtatttttacattgtatcaaactatggaagtcctctaattgagattaataagaaaaagacaatctgaattataattttaaacatttaacaagcatgtagtaaaataatgatgaagataaatagcattagtacagcaattaatatttgtagcatgctgacagtgctctgtgtgcgtttcatatattaaattactctaatcatcccaaatcctgtaagttgggtatcaattcaagtgttcctattgggtaggaatatacagttcttttaggaaatgtagtatggttctgtgtctcaaacaggacacttacacagttggccaacatcatcaccttctccattctctgagatgtttagtcttactgagcactaaatatgggtcatcaatagtccagactaccttgagcaaacaatagtccagactaccttgagcaaacagagcatatactcatacagtgtataaagagcaccaagcatacagatttcatgtctttctcatagttactcttgtaacatgagctaaagatcagacctctatgtcacctttgtaactgatttctagatttttttttttttttgagatggggtcttgccctgtcacccaggctggagtgtagtggcgtgatcatgcctcattggagccttcaactcatgagctcaaacaatcctcctacctcagcttcctgagtagttgggaccacaggtgtgtgccaccacacccagctcatttttgtattctttgtagagatgcagtctcaccctgttgcccacgctggcctggaactcctgagctcaaaagatccctccgccttgaccttccaaagtgctgggattacaagcatgaaccactgcacccggcctagatttttaaatgtgctttccagtatacactgaaactagaagtcgactaaagaattaccaagagaattctataaaatagagattgaaatggggctcgatgtgggatgggttggtgatattgcagggagaagtaatctgagtaaaggaggaaaagaactgatttgggaaaacgatagttttagtagtgagtttgagtatgaattaagttgagattgaatttgaattaagttgaggttgaatatgaattaagttgaggttgagtttgaggtatgaattaagatgtgaaattgatcattggaaatgttagattgagaaaagtcacagctggattaatagcttcagaagtgtgtttgcagacagttgcaactaaagtaataagaatagatggccttggccgggcgcggtggctcacgcctgtaatcccagtactttgggaggctgaggcgagcaaatcacgaggtcaggagttcaagaccagcctggcccacatggtgaaaccccgtctttattaaaaatacaaaaattagctgtgcacagtggtgcacgcctgtaatcccagctactcgggaggctgagacaggagaatcgcttgaacctgggaggtggaggttgcagtgagctgagatcagtgtgactgcactccagcccggtgacagagtgagactctgtgtaaaaaaataaaataaataaaataatggccgtaagcaagtaaagaaggatggccagctcttattgggaatgcctaaatctaaggcttgatcagaagtaatgaaaccgttggggccctacattgctatgacatccaaagggccatgaatatcaggaagaaagataattaacagggtctaatgttacagagaggttgagagcaaggagatttgattaaaagggtctttagagctgatgtcaggtgtatgatgcctttaagagcagtttttatagtgcagggggtggtcaaaagagaaaataggtgctttctgaggtgacggagccttgagactagcttatagtagtaactgggttatgtcgtgacttttattctgtgcaccaccctgtaacatgtacatttttattcctattttcgtagcatgctctaaagaatggtgacatttgtgaaacttcgggtaaaccaaaaaccacacctaaaagaaaacctgctaagaagaataaaagccaaaagaagaatactgcagcttccttacaacaggttattttaaaatgttgagatttaacttcaaaggatgtctcattagtccttatttaatagtgtaaaatgtctttaacttaagtgattagtacagtgtttctattgacatatacttatacaacttcaaaaacaactattaaattttctgttatttaggaacatgcatattagtcatgaaagtataaagaattagatgggaatgataaatgctaaaatcaggacatgtgttccatttgtgaatggaaggcagggagaaggtgccgtttggaaggagtacccaagagccgtaagctgaattggcagtgttttacatcttaagctgagagatagatttttttttcccctttttctttaaaaactctaaaactgttaattccaaggaacccagaagtctaggtagattatttctgctagttaaaagcagtagtcctgaaagctgaatattttggtgtcttttgagccaactttagtttcatcattaccaagggggaagagagctaacagttgatgagcacttgctctaggccagtccagagtgctgggcaccatacgcattttatctccctcccgctattcacaacaaatatgggaggtagtttatattatagccatctaataagatggggaaactaagactcaaagagattcagaaacttgtccatgattataaatgtaagagagttggaattcagatttatgtatttagaccccaagcctttctcattacatcattttgccttccaaatctctaccctctatccttcacctccccactgatcaaaacgagatgatagtttgccctcttcaaaagaaatgtgtgcatgtatatatctttgatttcttttgtagtggaaagttggggacaaatgttctgccatttggtcagaagacggttgcatttacccagctaccattgcttcaattgattttaagagagaaacctgtgttgtggtttacactggatatggaaatagagaggagcaaaatctgtccgatctactttccccaatctgtgaagtagctaataatatagaacaaaatgctcaagaggtaaggatacaaaaaaaaaaaaattcaatttctggaagcagagactagatgagaaactgttaaacagtatacacagttgtcagtttgatccaccgaggcattaattttttcttaatcacacccttataacaaaaacctgcatattttttctttttaaagaatgaaaatgaaagccaagtttcaacagatgaaagtgagaactccaggtctcctggaaataaatcagataacatcaagcccaaatctgctccatggaactcttttctccctccaccaccccccatgccagggccaagactgggaccaggaaaggtaaaccttctatgaaagttttccagaaaatagttaatgtcgggacatttaacctctctgttaactaatttgtagctctcccatgaaacttttgtagcttaaatacacaagaattttttgaaaaggaaataagataatgatgcaaaatagttaattttttaaaaaaatgttagacactgcagtggatgcaacaaaatactttatatgaaagatttatccagttaacttttgtggagtattaggtattagactaataattagcacacttacttaagttagaaagtataataatgcgccggacgcggtagctcacgcctgtaatcccagcactttgggaggccaaggtgggcggatcacaaggtcaggagatcgagaccatcctggctaacacggtgaaaccccatctctactgaaaatacaaaaaaatttgccgggcgtgatggcgggcacctgtagtcccagctactcgggaggctgaggcaggaggatggtgtgaaccccggaggcagagcttgcagtgagtcaagatcgtgccactgcactccaacctgggcgacagaatgagactccatctcaaacaaaaaaacaaaacaaaacaaaaaaaagtgtaataataatttatcattagctggatgatatgctgttgtttcccatgtcacctgtataagatatgtaaaataagaacacattatttacatctaatatagataaaatcctgaggcgctctcagattgttttgtagagttcaaatgtaaatattgttttcatttatggtccttttggttataagtaacagaaatcaactctaaaaagatttttattataggttagattatgtcatggaaccttaaggcttgtccctttctagttcttttgtgtaaagcggtgatttcttccatggagggaatggtatttaggcaatttttttttttttttcgagatggagtcttgctctgtcgctcaggctggagtgcagtggcaccatttcagctcactgcaacttccacctcctgggttcaagtgattctcctgcttcagcctcccaagtagctgagattacaggcacccgccaccacacccggcttattttgtatttttagtagagatggggtttcaccatgttggccaggctggtcttgaactcctgacctcaagtgatctccccaccttggccttccaaagtgctaggattacaggcgcctagcctaggcagtcattttcaaaaaacaagcatgactcaccaaaagttttaagattttctgtgataatgttcttattgaggcttacattatattacagtttcttgaatctaaaatgatgtaccctcttagaatatatacatcatgcttcattggtctcagggggctgatttttataaggagagatttgctagttttcacaatatgtcctctaagttggcatgtatagctaaacaggctttcataaaaatatacaatttagttaatgaaatttgggatatagtcttttatgattgaaataattttgctaaatagactgtctctgatttattaggtaatcaccactcttattttgttttacttccttaatgtctacatagaaaggaaatgagaaaaatccagaggttgtcatttgacttatgagtctgtttgacttcaggatttggtacatgaaatttcacttaatctttttgatatgtataaaacaaatattctgggtaattatttttatccttttggttttgagtcctttttattcctatcatattgaaattggtaagttaattttcctttgaaatattccttatagccaggtctaaaattcaatggcccaccaccgccaccgccaccaccaccaccccacttactatcatgctggctgcctccatttccttctggaccaccagtaagtaaaaaagagtataggttagattttgctttcacatacaatttgataattagcagaatagaggattgtaaaatgtcattgtagaacatcccttgggccagattctaatgggtagaaatttgaactaaacctctgggttttgtttgtttttaatgcctttctgttacccagatgcagtgctcttgtagtcccaagtctaagctctaggttgccttctttcctggcagaagttggtgtctatgccataaggaggtagttcctgttagaagggatttaattataccttatataaggaattagtgtttgcccttctaggtatagttggatgttagcttctgatgtaaactggatttctttttctttctctctctttttttttttttgttttggaggcagagttttgcccttgtaccccaggctggagtgcagtggtgtgatctcagctcacagcaacctccgcctcctgggttcaagcaattctgcctcggcctcccaagtagctgggattacaggcgactgccaccacacccggctaatttttgttttattagtagagatggggtttcaccatgttggccagactgatcttgaactcctgacctcaggtgatccacccgccttggcctcccaaagcgctgggattacaggcgtgagctgccgcacccagctgtaaactggatttctaatggtagatttttaggtattaacaatagataaaaagatactttttggcatactgtgtattgggatggggttagaacaggtgttctacccaagacatttacttaaaatcgccctcgaaatgctatgtgagctgtgtgtgtgtgtgtgtgtgtgtgtgtattaaggaaaagcatgaaagtatttatgcttgattttttttttttactcatagcttcatagtggaacagatacatagtctaaatcaaaatgtttaaactttttatgtcacttgctgtcttttcgtcctcgttaaatttaattttgttggtcttttgttgttattggttggttttctccaaatgctagctatgttaagaaatttaaggccaggtacagtggctcatgcctgtaatcccggcattttagaaggctgaggcaggaggatcacttgagctcaggagtttgagaccagtctgggcaacatagcaagacctcgtctttgtttaggggaaaaaaaagaaatttaagtaggagattatataagcaaaaatacaattaatttccagcattcactatataatataaatctccagactttacttttttgtttactggatataaacaatatctttttctgtctccagataattcccccaccacctcccatatgtccagattctcttgatgatgctgatgctttgggaagtatgttaatttcatggtacatgagtggctatcatactggctattatatggtaagtaatcactcagcatcttttcctgacaatttttttgtagttatgtgactttgttttgtaaatttataaaatactacttgcttctctctttatattactaaaaaataaaaataaaaaaatacaactgtctgaggcttaaattactcttgcattgtccctaagtataattttagttaattttaaaaagctttcatgctattgttagattattttgattatacacttttgaattgaaattatactttttctaaataatgttttaatctctgatttgaaattgattgtagggaatggaaaagatgggataatttttcataaatgaaaaatgaaattcttttttttttttttttttttttgagacggagtcttgctctgttgcccaggctggagtgcaatggcgtgatcttggctcacagcaagctctgcctcctggattcacgccattctcctgcctcagcctcagaggtagctgggactacaggtgcctgccaccacgcctgtctaattttttgtatttttttgtaaagacagggtttcactgtgttagccaggatggtctcaatctcctgaccccgtgatccacccgcctcggccttccaagagaaatgaaatttttttaatgcacaaagatctggggtaatgtgtaccacattgaaccttggggagtatggcttcaaacttgtcactttatacgttagtctcctacggacatgttctattgtattttagtcagaacatttaaaattattttattttattttattttttttttttttttgagacggagtctcgctctgtcacccaggctggagtacagtggcgcagtctcggctcactgcaagctccgcctcccgggttcacgccattctcctgcctcagcctctccgagtagctgggactacaggcgcccgccaccacgcccggctaatttttttttatttttagtagagacggggtttcaccgtggtctcgatctcctgacctcgtgatccacccgcctcggcctcccaaagtgctgggattacaagcgtgagccaccgcgcccggcctaaaattatttttaaaagtaagctcttgtgccctgctaaaattatgatgtgatattgtaggcacttgtatttttagtaaattaatatagaagaaacaactgacttaaaggtgtatgtttttaaatgtatcatctgtgtgtgcccccattaatattcttatttaaaagttaaggccagacatggtggcttacaactgtaatcccaacagtttgtgaggccgaggcaggcagatcacttgaggtcaggagtttgagaccagcctggccaacatgatgaaaccttgtctctactaaaaataccaaaaaaaatttagccaggcatggtggcacatgcctgtaatccgagctacttgggaggctgtggcaggaaaattgctttaatctgggaggcagaggttgcagtgagttgagattgtgccactgcactccacccttggtgacagagtgagattccatctcaaaaaaagaaaaaggcctggcacggtggctcacacctataatcccagtactttgggaggtagaggcaggtggatcacttgaggttaggagttcaggaccagcctggccaacatggtgactactccatttctactaaatacacaaaacttagcccagtggcgggcagttgtaatcccagctacttgagaggttgaggcaggagaatcacttgaacctgggaggcagaggttgcagtgagccgagatcacaccgctgcactctagcctggccaacagagtgagaatttgcggagggaaaaaaaagtcacgcttcagttgttgtagtataaccttggtatattgtatgtatcatgaattcctcattttaatgaccaaaaagtaataaatcaacagcttgtaatttgttttgagatcagttatctgactgtaacactgtaggcttttgtgttttttaaattatgaaatatttgaaaaaaatacataatgtatatataaagtattggtataatttatgttctaaataactttcttgagaaataattcacatggtgtgcagtttacctttgaaagtatacaagttggctgggcacaatggctcacgcctgtaatcccagcactttgggaggccagggcaggtggatcacgaggtcaggagatcgagaccatcctggctaacatggtgaaaccccgtctctactaaaagtacaaaaacaaattagccgggcatgttggcgggcaccttttgtcccagctgctcgggaggctgaggcaggagagtggcgtgaacccaggaggtggagcttgcagtgagccgagattgtgccagtgcactccagcctgggcgacagagcgagactctgtctcaaaaaataaaataaaaaagaaagtatacaagtcagtggttttggttttcagttatgcaaccatcactacaatttaagaacattttcatcaccccaaaaagaaaccctgttaccttcattttccccagccctaggcagtcagtacactttctgtctctatgaatttgtctattttagatattatatataaacggaattatacgatatgtggtcttttgtgtctggcttctttcacttagcatgctattttcaagattcatccatgctgtagaatgcaccagtactgcattccttcttattgctgaatattctgttgtttggttatatcacattttatccattcatcagttcatggacatttaggttgtttttatttttgggctataatgaataatgttgctatgaacattcgtttgtgttctttttgtttttttggttttttgggttttttttgttttgtttttgtttttgagacagtcttgctctgtctcctaagctggagtgcagtggcatgatcttggcttactgcaagctctgcctcccgggttcacaccattctcctgcctcagcccgacaagtagctgggactacaggcgtgtgccaccatgcacggctaattttttgtatttttagtagagatggggtttcaccgtgttagccaggatggtctcgatctcctgacctcgtgatctgcctgcctaggcctcccaaagtgctgggattacaggcgtgagccactgcacctggccttaagtgtttttaatacgtcattgccttaagctaacaattcttaacctttgttctactgaagccacgtggttgagataggctctgagtctagcttttaacctctatctttttgtcttagaaatctaagcagaatgcaaatgactaagaataatgttgttgaaataacataaaataggttataactttgatactcattagtaacaaatctttcaatacatcttacggtctgttaggtgtagattagtaatgaagtgggaagccactgcaagctagtatacatgtagggaaagatagaaagcattgaagccagaagagagacagaggacatttgggctagatctgacaagaaaaacaaatgttttagtattaatttttgactttaaattttttttttatttagtgaatactggtgtttaatggtctcattttaataagtatgacacaggtagtttaaggtcatatattttatttgatgaaaataaggtataggccgggcacggtggctcacacctgtaatcccagcactttgggaggccgaggcaggcggatcacctgaggtcgggagttagagactagcctcaacatggagaaaccccgtctctactaaaaaaaatacaaaattaggcgggcgtggtggtgcatgcctgtaatcccagctactcaggaggctgaggcaggagaattgcttgaacctgggaggtggaggttgcggtgagccgagatcacctcattgcactccagcctgggcaacaagagcaaaactccatctcaaaaaaaaaaaaataaggtataagcgggctcaggaacatcattggacatactgaaagaagaaaaatcagctgggcgcagtggctcacgccggtaatcccaacactttgggaggccaaggcaggcgaatcacctgaagtcgggagttccagatcagcctgaccaacatggagaaaccctgtctctactaaaaatacaaaactagccgggcatggtggcgcatgcctgtaatcccagctacttgggaggctgaggcaggagaattgcttgaaccgagaaggcggaggttgcggtgagccaagattgcaccattgcactccagcctgggcaacaagagcgaaactccgtctcaaaaaaaaaaggaagaaaaatatttttttaaattaattagtttatttattttttaagatggagttttgccctgtcacccaggctggggtgcaatggtgcaatctcggctcactgcaacctccgcctcctgggttcaagtgattctcctgcctcagcttcccgagtagctgtgattacagccatatgccaccacgcccagccagttttgtgttttgttttgttttttgttttttttttttgagagggtgtcttgctctgtcccccaagctggagtgcagcggcgcgatcttggctcactgcaagctctgcctcccaggttcacaccattctcttgcctcagcctcccgagtagctgggactacaggtgcccgccaccacacccggctaatttttttgtgtttttagtagagatggggtttcactgtgttagccaggatggtctcgatctcctgaccttttgatccacccgcctcagcctccccaagtgctgggattataggcgtgagccactgtgcccggcctagtcttgtatttttagtagagtcgggatttctccatgttggtcaggctgttctccaaatccgacctcaggtgatccgcccgccttggcctccaaaagtgcaaggcaaggcattacaggcatgagccactgtgaccggcaatgtttttaaattttttacatttaaattttattttttagagaccaggtctcactctattgctcaggctggagtgcaagggcacattcacagctcactgcagccttgacctccagggctcaagcagtcctctcacctcagtttcccgagtagctgggactacagtgataatgccactgcacctggctaatttttatttttatttatttatttttttttgagacagagtcttgctctgtcacccaggctggagtgcagtggtgtaaatctcagctcactgcagcctccgcctcctgggttcaagtgattctcctgcctcaacctcccaagtagctgggattagaggtccccaccaccatgcctggctaattttttgtactttcagtagaaacggggttttgccatgttggccaggctgttctcgaactcctgagctcaggtgatccaactgtctcggcctcccaaagtgctgggattacaggcgtgagccactgtgcctagcctgagccaccacgccggcctaatttttaaattttttgtagagacagggtctcattatgttgcccagggtggtgtcaagctccaggtctcaagtgatccccctacctccgcctcccaaagttgtgggattgtaggcatgagccactgcaagaaaaccttaactgcagcctaataattgttttctttgggataacttttaaagtacattaaaagactatcaacttaatttctgatcatattttgttgaataaaataagtaaaatgtcttgtgaaacaaaatgctttttaacatccatataaagctatctatatatagctatctatatctatatagctattttttttaacttcctttattttccttacagggttttagacaaaatcaaaaagaaggaaggtgctcacattccttaaattaaggagtaagtctgccagcattatgaaagtgaatcttacttttgtaaaactttatggtttgtggaaaacaaatgtttttgaacatttaaaaagttcagatgttagaaagttgaaaggttaatgtaaaacaatcaatattaaagaattttgatgccaaaactattagataaaaggttaatctacatccctactagaattctcatacttaactggttggttgtgtggaagaaacatactttcacaataaagagctttaggatatgatgccattttatatcactagtaggcagaccagcagacttttttttattgtgatatgggataacctaggcatactgcactgtacactctgacatatgaagtgctctagtcaagtttaactggtgtccacagaggacatggtttaactggaattcgtcaagcctctggttctaatttctcatttgcaggaaatgctggcatagagcagcactaaatgacaccactaaagaaacgatcagacagatctggaatgtgaagcgttatagaagataactggcctcatttcttcaaaatatcaagtgttgggaaagaaaaaaggaagtggaatgggtaactcttcttgattaaaagttatgtaataaccaaatgcaatgtgaaatattttactggactctattttgaaaaaccatctgtaaaagactgaggtgggggtgggaggccagcacggtggtgaggcagttgagaaaatttgaatgtggattagattttgaatgatattggataattattggtaattttatgagctgtgagaagggtgttgtagtttataaaagactgtcttaatttgcatacttaagcatttaggaatgaagtgttagagtgtcttaaaatgtttcaaatggtttaacaaaatgtatgtgaggcgtatgtggcaaaatgttacagaatctaactggtggacatggctgttcattgtactgtttttttctatcttctatatgtttaaaagtatataataaaaatatttaatttttttttaaattagctgtatctgtgattgtatttcttttttgcatattattttgccctttggcccatattttgatatggatgccaccatagcattttgtgtatgtgcatgtgtattcccacttaatgtcacatttttcatgtctttacatattcttatttttgtttgtttttgagacagagtctcgctctgctgcccacgctggagtgcagtggtgcaatctcagctcactgcaacctctgctatccgggttcaagcagttctcgtgcctcacccacgtgagtagttgggattacaggcatgtggcaccatgccccactaagttttgtatttttagtagagatggagtttcaccatgttggccaggctggtctcaaactcctgccctcaagtgattcgaccaccctggcctcccaaagtgctgggattacagccgtgagccaccgcacacggcctctctatttatttctatacatagcttttcacattatattatgtttatatattgtttatatctgtatttcctctttcattagagaaaaggtagtacatcttattcttcatggtgtctacaatatctggcagtttttggaagtcaagcgtgagcttagagcatagactggtgggattgtcaaagaagagggcaactggaagagaactgtcagttatttttggatcagtctttaattcatcatgacgggttaggcattagttgtatttcttgctaattttgaagaagacttattaacaaatcctacattaggtaaatggttttgaaagttgagttaatcataatggtgtttgacctaggactatttttaggccctatttatcttaatatcgaataatgaagcagcttcccccttagatatagacagaaaacatcaaagccaccacactacctggctggatttatcctagtaataaaatcaaaactgagctagttctctggctttcattgtaataattgtccttgtggttgtaaggaatctagatgaaaattacatggtctgttctacagccacagctgtacctacattcagaagacagacaaaagttgctgtgtttgaagagatccttcattaagggatcagacagagattactttgagacatattctaagtttaacttttctgcagggttgccattaacagaaataaactacagagttaatttctttttgtttttgatacagtctaactctcacccaagctggagtgcagtggcgcaatttcagctcactgcaacctctgcctcccaggttcaagcaattctcctgcctcagcctcccgagcagctgggactacaggcatgtgccactatgcctggctaatttttgtatttttagtagtagagacgtggtttcgccacgttggccaggctggtctggaactcctgaccccaggtaatccacctgcctcggcctcccaaagtgctgggattacaagcttgagccactacgcctgacccagagttaactttttaaaaaagtttttatgaacttaagtcttgtgatgtttgaaataatggattcaatttagacatcaaattccagaagttactaagagcagctgggcgcggcagctcacacctgtaatcccagcactttgggaggccgaggcgggtggatcacctgagatcaggagttccagaccagcctggccaacatagtaaaaccctgtctctactaaaaatacaaaaattagcccggcatggtggcacgccctgtagtcccagctacttgggaggctgaggcaggagaattgcttgaacccgggaggtggaggttgtggtgagccgagattgtgccactgtactcaagcctgggctaaaaagcgagactccgtctcaaaaaaaaaaaaaaaaaaaacacgttactaagagcaactctgggccaggcacggtggcttacacctgtaatcccagcattttgggaggacgagacaggcggatcacttgagcccaggagttcaagaccagcataagcaacaacgcaaaacccctgactctacaaaacatgaaagaattagcaaggcatggtggtgcatgcctgtagtcccagctactggagaggctgaggcaaaaggatcacttgagtacaggaggttgaggctgtgtaatgagccgtgttcacaccattgcacttcagcctgggcaacagactgagaccctgtctcaaaaaaaaaaaccaaaccaaagcaacaaacaaaaaacaagagcaactctgcttctgtacacttttttttttttttttggtagtgacatgatctatgttgcccaagctggtctcgagttcctgggttcaagccattctcccacctcgggctcccaaagtgctaggattacaggcatgaatcaccatgcccagcccttctgtacacttttcacagtgtacccttttgtgttttttaaaatgtttgtgtatacatttattgtgaatttttaaaaaacatgtaattaaggccaggcatggtggctcatacctgtaatcctagcactttgagaggctgaggtgggtggatcacctgaggtcggtagttcgagaccagcctggcccaacatggtgaaaccccatctctactaaaaatacaaaaaaaaaattagctcggcatggtggtgggcgcctgtgatcccagctactggagaggctgaagcatgagaatcacttgaacccaggaggcggaggttgcagtgagccaagatcgtgccactacactccagcctgggtgactcagtgactgtctcaaaaagaaaaaaagtaattaagttctgtcatgatatatcatcattaccctttttgaacttttaaaattttttatctttagaggtaattcatataatgttcttcaatagataagtgcttttctgtcaatatatcttggagaacacaccatatcagtatttaaaactctcattcttcctatttctccacatcctctccagcacccgttgtttcctgactttttaatgattgccattctaactggtgtgagatggtatcttattgtggttttgatttgcatttctctgatggccagtgatggtgagcattttttcatgtgttttttagctgcataaatgtcttcttttgagaagtgtctgttcatgtccttcgcccactttttgatggggttgtctgtttttttcttgtaaatttgtttgagttcattgtagattctggatattagccctttgtcagatgagtagattgcaaaaattttctcccattttgtaggttgcctgttcactctgatggtagtttcttttgctgtgcagaagctctttagtttaattagatcccagttttggcttttgttgccgttgcttttggtgttttagacatgaagtccttgcccatgcctatgtcctgaatggtaatgcctaggttttcttctagggtttttatggttttaggtctaacatttaagtctttaatccatcttgaattaatttttgtataaggtgtaaggaagggatccagtttcagctttctacatatggctagccagtttcccagcaccatttattaaatagggaatcctttccccattgcttgtttttctcaggtttgtcaaagatcagatagttgtagatatgcggcgttatttctgagggctctgttctgttccattggtctatatctctgttttggtaccagtaccatgctgttttggttactgtagccttgtagtatagtttgaagtcaggtagcgtgatgcctccagctttgttcttttggcttaggattgacttggcgatgcgggctcttttttggttccatatgaactttaaagtagttttttccaattctgtgaagaaagtcattggtagcttgatggggatggcattgaatctgtaaattaccttgggcagtatggccattttcacgatattgattcttcctacccatgagcatggaatgttcttccatttgtttgtatcctcttttatttcattgagcagtggtttgtagttctccttgaagaggtccttcacatcccttgtaagttggattcctaggtattttattctctttgaagcaattgtgaatgggagttcactcatgatttggctctctgtttgtctgttattgctgtataagaatgcttgtgatttttgtacattgattttgtatcctgagactttgctgaagttgcttatcagcttaaggagattttgggctgagacaatggggttttctagatatacaatcatgtaatctgcaaacagggacaatttggcttcctcttttcctaattgaatacccgttatttctttctcctgcctaattgccctggccagaacttccaacactatgttgaataggagtggtgagagagggcatccctgtcttgtgcgtgttttcaaagggaatgcttccagtttttgcccattcagtatgatattggctgtgggtttgtcatagatagctcttattattttgagatacgtcccatcagtacctcatttattgagagtttttagcatgagggattgttgaattttgtcaaaggccttttctgcatctattgagataatcatgtggtttttgtctttggttctgtttatatgctggattacatttattgatttgcgtatgttgaaccagccttgcatcccagggatgaagcccacttgatcatgctggataagctttttgatgtgctgctggattcggtttgccagtattttattgatgatttttgcatcaatgttcatcaaggatattagtctaaaattctcttttttggttgtgtctctgcctggctttggtatcaggatgatgctggcctcataaaatgagttagggaggattccctctttttctattgattggaataatttcagaaggaatggtaccagttcctccttgtacctctggtagaattcggctgtgaatccatctggtcgtggactctttttggttggtaagctattgattattgccacaatttcagagcctgttattggtccatttagagattcaacttcttcctggtttagtcttgggagggtgtatgtgtcgaggaatttatccatttcttctagattttctagtttatttgcgtagaagtgtttatagtattctctgatggtagtttgtatttctgtgggatcggtggtgatatcccctttatcattttttattgcgtctatttgattcttctctcttttcttctttattagtcttgctagcggtctatcaattttgttgatcctttccaaaaaccagctcctggattaattttttgaagggttttttgtgtctctatttccttcagctctgctctgattttagttatttcttgccttctgctagcttttgaatgtgtttgctcttgcttttctagttcttttaattgtgatgttagggtgtcaattttggatctttcctgctttctcttgtgggcatttagtgctataaatttccctctacacactgctttgaatgtgtcccagaaattctggtatgttgtgtctttgttctcgttggtttcaaagaacatctttatttctgccttcatttcgttatgtacccagtagtcattcaggagcaggttgttcagtttccatgtagttgagtggttttgagtgagtttcttattcctgagttctagtttgattgcactgtggtctgagagacagtttgttataatttctgttcttttacgtttgctgaggagagctttacttccaactatgtggtcaattttggaataggtgtggtgtggtgctgaaaaaaatgtatattctgttgatgtggggtggagagttctgtaaactgcttcaaccactgtggaagtcagtgtggcgattcctcagggatctagaactagaaataccatttgacccagccatcccattactgggtatatacccaaaggactataaatcatgctgctatgaagacacatgcacacgtatgtttattgcggcactattcacaatagcaaagacttggaaccaacccaaacgtccaacaatgatagactggattaagaaaatatggcacatatacaccatggaatactatgcaaccataagaaatgatgagttcatgtcctttgtagggacatggatgaaattggaaatcatcattctcagtaaactatcgcaaggacaaaaaaccaaacaccgcatgttctcactcataggtgggaattgaacaatgagaacacatggacacaggaaggggaacatcacactcttgggactgttgtggggtggggggagtggggagggatagcattaggagatatacctaatgctaaatgaggagttaattggtgcagcacaccagcatggcacatgtatacatatgtaactaacctgcacattgtgcacatgtaccctaaaacttaaagtataataataaaataaaataagaaaaatgcaaaaattaaaaatttaaaaaaaagctctcattcttttaagcacttacaggatattcttacagatgtgtaccacgcttaatgaattgagctcttgtggatgagagtttaatttgtttctaatcatttgttatttaatagtacagtcagcatctttaggattaagtatctagaattagaactactgtgttgaagaggctattgcatttaaattgttttttttttttttttgatacggagtcttgctctgttgcccaggctggagtgcaatggcgtgatctcagctcaccgcaacctccgcctcccaggttcaagcagtgctcctgcctcagcctcctgagtagctaggattacaggcacacgccaccatgcccggctaatttttgtatttttttagtagagacggggtttcaccatgttggccaggctgatcttgaactcctgaccttgtgatctgctcgccttggcctcccaaagtgctgggattacaggcatgagccaccgtgcccgacctacatttaaattttaaacaaaagtttgctaaattgttttcagtagaggttatattaatctatatttataccaacatggagagtttgtttcctgcaaaatagccaataatttatcaaacctttgaatctttgtcaattgaatagttaaaaatgattatctcatatttgtacatttttatcttattgtgaagttcagcaccttttcatgtgtttaagaacttttaattttctgttgtttatatggtcttcccattaccattttaactatttgtttttattttcagagtttttgcttataaaattttatttacagtcaattctctttatttgtagaatctgtatttgtaaaggcacctacttgctaaaatttatttgtaacctaacatcaatactcatggcagtttcatggtttttcatggacatacacagaggtgaaaaatttgagaaccttacccagatattcccagctggggttgaacagtgctcagttttttgtgtagctttcttactataaacaagtgtcctttttgaaagcagtttatatagttctacatttttcacatttttgtgccttctgtttgtgattttactgtttaaagtgattcccaagcattgtgctgaagtgctatatagtggtattccaaggtgcatgcgggctgtgaggtgccttagagaatacatgtgttagataacctttgtttagtcatgagttatagtgctgttgagtgggagttagatgatgatgagtcatcactatttattattatattttttgagatggagtctcactctgtcacccaggctggagtgcaatggcataatctcggctcactgcaacctcctcctcccgggttcaaacgattctcctgcctcagtcttcccagtagctgggattataggcacccgccactgcacccagcgtaatttttgtatttttagtagaggtggggttttaccatgttgggtaggccagtcttgaactcctgacctcaagtgatccacccaccttggcatcccagagtgctgggattacagatatgagccaccatgccaggtctatatttattaaataatgtgtctttaaacagaaacagatataaaacaagcttacgtatttataagttggtgaaaatgtgaccaaaggcttacaagaacctaaccctgtatttctgttaggagcaatggctcagtattcactaatttgcgtgtttgtggcaacttcatagaacataactacctcaagtaatgagaattgactgcattctttttcaagtcattttataaacaatttacagaagaataaagggatggtgaaaattaactttgttagcaattttaatgagaatccaaatataggagacccacattttttcccatattttcccagttttgaatgtttatgtatacctaaaaggcattacatcctttgaaagcagctgtcattatgcatgaatctggaacatacctacctttaaatacggattttggatttcaaatgcatctctactatgttctaccttattatttgtattcttcatgaactcactttgtcaaaatgcaatactttttgttttttaatttatttttattttttgtagaaatagggtctcactgtgttgcccaggctggccttgaacacctggcctcaagtgatcttcctgccttccaaagtgctggggacggtaggcatgagccaccacacctgtccaaactgcaatacttctgaaaactttagggctcatagttttgttgaagtgatagatgatggctatattctttgttacataacagcaaaacatttttgtttttacatttataaataccaattagaatgactttcagtggattggttttcatttttcacatcatctttaccttcctgttactttgtgtacatatctgtctttcatacttgtccacttacaaactttttcaagtaaattctggtgttacaagcataaaagatgaaagaacgttgtcacatggtcacttgtccttttagcaattatgcgatgattcaactgttctaggtacaactagagggagagtatcccaggcaagggagataacaaatagaaaggccctaagacacaagtgtatttaacatgtttggggaacaacaaggagttaatcgtggctggagtggaagtaaggaggagagattaaggagatggagctaagagaggtagtcaagggccaggccatatgtcagcgatagtaaggtcttcagcatttacttttttaagctgggagtccatggaaaggttttgaacccaaggtatagcatgatctgacttacagaaagagacttctgattgctgtgttgaaaatacaccataggtttgaagggaggaaacaggctgactagttagagccagtgtgggtagtggtggttggatctgagtatattttccaagtggagccaccaggatttttcagtagattgattacatgtggtgtatgaaagaggagtgtcaagtgtaactccgagatttttggcttatgcaactggaaaaataaagttagaatttaatgagatggaggtctgcataaggagtacttttgtggcaggaaagaaattgggttttgaacatgtgaaaattgagatgcccattagtagaagttggatgtgaataaagagtccaggccaggtgcaatgcctcatgcctgtaatctcagcactttgggaggccaaggcaggagaatcatgtgagcccaggagttcaagaccagactgggcaacaaagtgagaccccgtctatattataaaataaaaaaatagttcagaggagaggtctgggctagagatggaaatgtagaagttagtaaatttaaagctgttgaactagaggagatagctgaggaagtgcattcaaatagagaagatgtcagaggagaactttggggttctctcagtggttagagataggatatgaggaaaaacagtgcaggagactaaggaggagctctcattgagttaggaaaatcaagagggatgccctggaagccaaatgaaggcagtgttttgaggaagaggggtgatgggccatgtgaaagccaataggtcacatgctgctaatgggtcaactaaagtgaggactgagaagtattcaccaatttagcaatgtggagctcattggtgaccctcataagagctgtgttggtggaatggaggaggtaaaatcctggagggagagaacataagaatgagagaacagttgacagtgcatgtaaacaactctttcacggaactttgtatttctgaatttttgtttatttggctattaataaaatcatatctgatatagctttattttagtaaggtttgtttttgtgggacttcagttgtgtatacacatataatatgtgtgtgtatgtatgtgcgtatggtgttttgatgtaaaatttattattgtgggtcatggttaaaaaaaaagcttgagaatgaggagttagatcaagaaatagaaggaaagttgacataagaagttgtggatgtaggagattctaccatgtagacacagtggaaggatttagggagttggagcaggttgggatatgtgatcagaaagcgggagtttagctctctcacttgcccctgcttttaccatgtgatgtgtctgctaccccttcaccttccaccatgactgtaagcttcctgaggtctccctagaagccaagcagataccagcaccatgcttcctgtaaagcctgcagaaccatgagccaattaaacctctttgtaaattacccagtttgaggtatttctttatagcagtgcaagaatgccccaatacagaaaattggtaccgagaagttgggcattgctataaagatacctgaaaatgtggaaacagctttggaactgggtaatgagtagtggttggaagagtttacagggctcagaagaagacaggaaaatgagggtaagtttcaaactttttttttttttttttttttttttttttttgagacggagtcttgctctgtcgcccaggctggagtgcagtggcgtgatcttggctcactgcaacctctgcctcccgggttcaagtgattttctgcctcagcttcccaagcagctggggttacaggcatgcaccaccatgcctggctaatatttttgtatttttagtagggatggggtttcaccatgttggccaggctggtctcgaactcctgacctcaagtgattcacccacctcgacctcccaaagtgctaggtttacaggcgtgagccaccgctcccggcaagtttggaacttcttagagactagataagtggttgtgaccaaaatgctgatggtgatagggacagtgaagtccaggttgacaaggtctcaaaaggaaacgaatttattgggaactggagcaaaagtcacacgttatgccttagcaaataacttggctgcattctgcttgtgtcctagggatctgtggaagtttgaacttaaaaactatgacctagcgtatgtggcagaagaaatttctaagcagcaaagcattcaagatgtggccttctgctactaacagcctgtgctcagatgtgggggcaaatgaatgacttaaatttggaacttacatttaaacaggaagcagagcctaaaagttgggaaattttgcagcctagccaggtggtaaaaaaaaaaaccattttctccaaggaattcaagcaggctgtggagcaaccacttgctgatatttgcataactgaaagggatccaagtggtaatatccaagacaatggggaaaaggcctcaaaggcatttcagagacctatggggcagcccctcctgtcataggccctgaagccaaggaagactgaatattttcctgggctgagcccagggccctgttgccctgtgcagcctcagaacactgctccctgcatccagatggctccaactccagcaggggctcaaaggggcctaggtacagcttgggctgttactttggagggcataagccatagccttcacagcttccattaggtggtaagcctgcaggcacacagaatgcaaaaatggtgaattcttggtagcctctgcctggatttcagaggatgtatggaaaagcctgggtgtccaagcagaaccctgctgcaggagca

SEQ ID NO: 21 - DNA, 24970 bp, Homo sapiens
aggatgagagcttagagtcagctttgacttaaagaaaacaaacaaaagtgtgtatttttgcacatgaattgttgactgaggttcatgcccacacgatttgtttaacgtgtgacttttccaagtccctgacagccaagactgcctgaactcacggcccaacgccccaacgcatagtaagtgctcggtcaatatttcctgagtcgagtgaatgggtagttttggaagtcaaatcttggaagagcatttctctgtttcctccgggcagaccctgcaggcatcagctccaggaggcattcgtcctgacggtcccctaaaccctgctgacacatgagcagacactgcacaactgcactggcggtttctgtccagacaggcactccctctgtggtgagaaatacctctgaagttgcctagcatcttggggctccttgcccatctttagaattttcaagtgccccaagctattgtgaatgtgttcaatgtttatattccaagcagcttgaatctatgccttgcaaaaatgcaagttggaaagttaattcattcctttatgtcaaggtaattgcagtttcaccctaatcctctcttgtcaaagacatttctacaatgcagggagttatcttttacaagagacacttcaaggtgatttaataacaacacttgctatgagtcacattttccctgtagtcatctactcttcagcttgggagagcagggcttcaagtacagaagagagaaggcatttggctagtcacataacccacttacacacgctcagccaaatgtacaccttcaagagaaaaagaaagccctaatgagcacttgtggtaactaaggtgctaaacgagatctttccaagcaatgctatttttgtttgtttgctttagggcaagctatattcactcagtgctttgaaacttaagacacgtatgaatttcatgactgcggacaaagaggaaatttgatatggagattaattattaattcaacatttactgagcccctactatgagctgtgctaggggcttggctacaacagcacacaggcttgcctgccagctgccctcaccaagctagtggtccagcaggactgcagatgtcaaacaaataacaaaggccaaagatgtctctttctctctctgtctgtgtctcttttaaatgcaaaactataaatttattttatatactcctttttacttcatctgcatgataaaaggaatacagatgtattttttaatgtaaccaaattcccatctcactgcgcagtaggaaaaagtctacccactcctcacagtttctagttctcccctcacagtggagctcatcaaaaggcagaggacattggctgggacgtgaccaggtttcaggcaatttgggagtgaaaggccagcaggcagctttatcttgaagactgttcagctccacagggtgacagattctcccaccaaccatgtctctgtcagcctcagcccaagagaaaattgagctgaataagagaggtctcagtggaaattatattggaaagactcaccataatggcttcctgaaaaaaatacataaacaaaacacatttttccatccaaattaaacaagtaggtcaagagggcaactttgccaagtgccacttactcccacctccagctggaattttctgggcatgccagcactggtgttacttgccgtaggcagattctctacccatacttacaaaaatccacaccagctacttctgatggagttcttagcgtgcctctttcaactggatttctaaacaaggaacaatgtaattggcaggtaataacaggctaacaggattgtcttaacagatactggtgccttttcagttcagactttcaccagccaagaggttctatacaaaagatccacacatcagagccatgtgatgagaggccaaaacactggagagctgtaaccctgaatgaaggagtcaggtttacatattgattcaaaaaaaaattgctactcttatccctgtgtgacatcatgctttgaatatgatcattgaagatgttacttggagtgcagctaccttgaaccctcggtgaaatgaaatgggatagaaaggagtaagattgttgggggctttaactaccgttccacacttttgaaagttagaaaaacaaagagcaacagcagctgcctctgtgttggtaatcatattttccaccagcaactggctcccattggttggagccaatcctttgctgtaacagaggatctaagctgccaagagaaggtcctcatgttcagatagagcaatagagcggagcatttgaaatgaggagcttcacaccagtcccctgtaggtctgagtgcctgaggctccctgcaatgcgtgcacacagtcattatgctgctccacagaaagagatgggagctggatgagtccttccctgatgacttgtatgagctaatgatcctaccggaaatagaaaaaaaaaagaaaagaaaaaacactagtcatgtgatttcaagacagtgacaaaagcttaagctgaggttgccacaaaaggttgtgggaaggggtgtggtctataggcatgggtgcagccagggctgagaacgactagttagctgaaaacagctgcttttcttcaccaaaatatatgggtgaataatgcaccctgttttccagggggataatgcaaacaagtgctctgtcaaggtaatttttgtattccacagggatggcggggccatgtggggaaccacagctgtggagtggggatgtagtattgcttagagccaggtgtgtgggtcccaaagcagatgtcagtgcttaaaattagtaggaatgggagagccatgcctagatctttgctctgagatacagtcgtagtacccaaaaaagaagttccggtagtgggaaatgtagatttagagctgggctgtttgacgggaaggcagggaatggcttatgcaccagcagaaagccagtttccaccttgcatatccagtgaggttgccacagggccatgaccttcattcctggggtgccctgccctcagctcattgggtgtctgtgtggctagagtttggttctgtgtgaggagcaacttggaggggggaatggactttagctcaattcaaccaacatgactgtatattcactcggcatcaggtactgggatttcaaaaaactggacattgatgtagcacactgataatggagccaaaatctaaaccactctggaaaatccagggtgaccactgtacttaagtgccacaaatagctattttgcataatcaaagctttgggcttgaaggctttgttcatgcttttgctgctcactcatgacctttctcaggaattagtgctgccatatgttggagatttacctgtattagattttcacatgcatgagactcgatccttggcttcaactcagcaaatgtctatctctctagggcttcctatccaaatctttccagtctttcaaatgcctgtctgggagaagaagaattttggactttcaaaacaaaagctaagaaaggcctagtgagccccagtggtatgaacccatcctgtgctcattcgcattctactcagactttctgccatagcaatctgtttgttgtaacccaaccacacttctagcaaaaggtaacatttggggaccctgctctaacaaatttagagtaacccaattccatgttttctgcactgagcaacatgtacaactatcaccttgaaaattatgctggatctcagttactgagtcacatctgtccgagattagtagccccgagggctgggatgcttagtgctagtttcatattagaatcatctgagaagcttgaaaaagtgttggtacctggcaccccaccaccaaagattctaatttaattgttcttggttgggacaatgttttcttttaatctttgctaggcttcataatattactgctaatcagttttagagagtgagtgcttataaccaaactcccagcctggtttactacagcccctgtatttcctccttgatgccatttagcaatgacccatggacttttgatgactggacatctttagttctctggatggaaatctgaagatgaaggagaccttctgtgccaaatagaagcctgagatttttagtgaaactaacatacgtcatctggtcttcgtgaaacgattctgaggtttctaagaatttcccacaacactgaagattggtggcttagagtttattgacccccaaagaaaagggtatgtttgactgtgagatacagttgtccttgccattttcaagatattacccactgtctttgtattgaattaccttaaaagtattgactcatagaagcaacccacatggttaaacccaactttaatccaaaagtcttggtcatcaacaaggttttctccaactatagaaaaatgtgctccccaaatttgccacattctcattctctccatgtaacaaaaaagaaacaaactcttcattgtctggcccacttggatctttttatctcaaataattttttaaaaaatgcttatgttggcttggcttggtgactcatgcctgtaatcccagcactttgggagcccaaggcaggaggatcatttgagtccaggagtttgagaccatcccggggaacatggcaaaacattgtctctaaaaaaaaaaaaaaagccaggaatggtgatgcatagctacagtatcacctgagcctgggaagttgaggctgcagtgaaccaaatcgcaccactgtactctagcctgagtgatagagtgagaccatgtctcaaaaaaacaaacacacaacaacaaaaaatccaaaaaccagcttattttgagggttgggggaaataaatgacgaaggctagattcattttggactcaattctagctcctcagggaactttgaatgtatgccattcttgatatttatatttaatcccgactaggaaagagggaagtccaagattgctggatttttgtctctccatgccatttaggaatatctcaagactctttccactggagttgaaaaacaccaggtcctagttctgagttacttctgatactgaggtgttcctcctaggttttcagtacattttgtttacatctctacgtgtttcattgtcttatttttgttagctgggtttgtttcctgtctgcctcccatgaggtccttcagggctgaggctgaatcttttctcctaaatgcatccaatctgaacccaaagtcggtactcaaatgtgtgacaataaatgaagacacaaatgaatgatgtatcaactccccccaaagctagctgcaaggagcctagctgtaggacaagagggaaaggccgtggccacaagggagtaaccatgcgcggagcctggactacagagatttattgctaaggctcatgcttttgcctccatttgcccaccgttgttttgtcagtcaatgtctgtagttgttgaataacattcatttatacattatttagtaggtgtaatcaaagtccccatgatcacggccctgcttttaaaacttgcctcttatctgtaaacacatttcctgagctgctctatcttttcatcttgtctaggtgatctatagcaatatcccagaacctgcctattttctttttaattccctgatggattataaatagcctcttctaaacctccccaaagctttgacggcaaattcctgctttctaaattactatccacctcttgctccgcactcagaccccttcaggaggctgtcctccttccccagggcagacacaaaagccttctacacttccctggcgtcatgctaaaggaacactatggcaacgaccaatgtttggaacgattgcagccgaacacacacatcgctcactgcttcaaatgcttaatagcggtgattaaagaagagaaatctggcataaaagaatggcgggagaagaaagcaaatgagagagaacaatgagtgacaggagaaaaggaaggagtgaggagagacctgagggaaacctgggagaacagaaatgaagacaagaagggaaaagggaacaatggggaccagagtgcaccccggcctgctttctttgaccttaggccctgcacatttgctaaaacacccaagtctgtcaaaccaccactgaagcaaatgctgttagaagaggcaacgtggctggaaagaactcggtgctctgtgatgccccatggatcctttctattctgcagataagagagagaaaaagccccattgcctaacttcctggattgcagagaaactgctgggcacatggtggatccggggacccaccgttctcaagaacttgctgtaatgggcaccttggatgtacacttacgaaggattgtgtttccaagacacttcctcctccactcaaaatttgctcatacttgcaaacaggaatcatcttctacccaaacccccatgaccatctctcaggccagagttgagcagccaggttgcccttctctgagcttgactctttctgtgtattaattttcaatttcaagtcacaacgtaatccattaagaagcacttattctcagcaaacctcttgagcaggctctcatttgctatttctcagtataaactcattcctaccttccggttcagtgttgacactaaatttggcacagtggctcagcacccaccttcatccctgcatcaatctccagttggttttctcatgcctccacaccatcaaaatcagcctcggcttttctgaatctccatggggcttagcagatggggtggcacttcataaatccagtctatgcaaagctgttagcaaaaatgcacagagggcagcctctcggccttctgtgggtatgctctgagctgctccaaaggtatccttaaacatggtatcattttgagcctctaaactctaaatagctaagccttctctacaatttatgccccttggcatccctgaaagtgggtaaaccgcactggttttgagtgaacatcctttaaaaaaaactcaatttcttaggatccaagtctatatgattgaaggacacagaaatgtacaaacgtgttcccaaaggcttgatgctgtgtaattgtaggcccctcttccctggagttaatctttattgtgagtttaccatgttccaggcattgtgctgattttcaggcattatctcatttgatccacccccaaactccagaatgatctttaaaacagaaatcagatgatgatgcttctcagcacagaactctccagtggctgtctcacttggaggaaaagtaaagtcctactgtgggctgtcatgaggcccctgtgagctctctgatggtgttttctagagaatcacctttcagttctgcactctagctggtcttgcggttgccctcatttgtcaactaactcccctctctcccctatgcttgtcttttttactctcaaatgtcatcttctcagggagaagatggctgcccagtgtacattgtacctcatctcctccccacatcccattcgttgctcacattctcttcatttcacccccactgtcaacctgctacatatttgtttactgtctccaccaactagaaagtagctggagaaggacaggacttctgttcactttgaatccccaggacctacaagaatggtgttttcaataaaacattttttagtaaataaatgcattaaagtattcttcttatctccattttacagttgagaaacaggtttagggaggttaattaactaaggtcttagagccagtaagtacaactagtactatgggctcaccaaccgctattcccaagttcaaaatgtcttttttcgcaagttcaaaatgtctttttgggaaatatttttgccatgctcattcaattgggggtgatttgaccaaagtgggaagctgagatggaacaagatgaacaagaaatcaccgggaggctgggtctggaatctgctatgcacactcacactcctccagactcacttatcttgtagggtctcctcacgtcactcttgacatcgaccaaattcaatcctttattaaatatacaccatagcattaaagtgcaggacagataagatcatataaattttttgacattttgaggaacaatgtgacactgctattaatatttgtaagtatcttggaaccatttactagatgcaatgtttgtgtgagggaaaagattatataaaatgagacacatcaacctcaaatacactagtctgtaaactcctagagggtagctactgtgctatattctccctgattagcaccaagaatgatctattgtaggcattcgataaatgttattgaatggataaatatctttggaaatgaaattttagttttgtctgcaagagcagatttggatagtggcatcttttccaggccaggcaatgacacacagttgtatgaaaacaatgccagggcagggtcagttacatttgaaagaaagtcataatcccagtggaaagttttacagatgaaatatatagttgcatggaatatcctgttataagagagaaacctggacagaatctgccacctcagtgctgggagggaatatatgttgttgaaatgtggcctccaaacagccagtcaggaggtgggttgctctccagccattaaaaacatcccagaggccaggcacggtggctcatacccataatcctaacactttgggaggccgagttgggcagatcacttgaggtcaggagttcgagaccaagcctggccaacatggtgaaatcctgtatctacaaccccgtctgcactaaaaatacaaaacttagctaggcgtggtggtgggtgcctatagtcccaactactcaggagactgaggcaggagaattgcttgaaccagggaggcggaggttgtagtgagctgagatcacaccattgcactccagcctggtcaaaagaacaagaccctgtctcaaacaaaaacaaaaacaaacaaacaaaaaaaacccaaaaccaaaaacaaaaccatccctgagggaaagacaaatggccatgatttacaaccagaaagttgaattggtgaagccataaacaagcagtctaaaaaaatcccagctgagactttttctctatataatctcttcttcctgccccatcaggcctcagagctctgccatatttcccttcaggggaggagaaggaagccccactgaggaacaaaatttccacaagtacccctgcttccttgggtttgtccaagtgcctgggatatcaggaagtgccttcaggtatccagcacttttggttcaagaaacaatataattccttatccaaccaccaaactcctaaagggaggaaggccagccttcaaagtggacagccatccagatgacattctagattcctcctactgacctggcaacacagggaacctctacttgagtgagcgcaggacatcgtgactagcttccaataaatacaatatggcaaaagtgatgggatattatttccatgattaggttataaaagactattacttccatctttctagcagacttttttttttatttttgagacagagtctttctctgtcaccaggctggaatgcagtggcgcgatctcggctcactgcaacctctgcctcccaggttcaagtgattctcctgcctcagcctcctgagtagctggggctataggcgcgtgccaccacatccacccaatttttatatttttagtagaaacggggtttcaccatgttggccagggtggtctcgatttcttgacctcgtgatccgcccacctcggcctcccaaactactgggattacaggcgtgagccaccacgcctggccagcagactctcttactggctttaataaagcaatctggcagtttgggaagcccaggtggcaagaaactgagcgtgtccttcagccaactgccagcaaggaactggggccctcagtccaacagcccatgataaaactgaattctgccaacaatcactaagcgaacttggaaacaccatgccccagttgaaccagtaacttggtttcatccataggaaaggccctgagctgcaagatctagccaagccatatctagattacacagaaactgtgacataataaatatgtattgttttaagctgctgacttttgagggcaatttgttacacagcaatagataatccaatataataaaaatgtaatgaaaactcagtgagatacacatgcaaagattcttgttaaaagtgtgaagcttgggatcataggatacttacagtagatactctctggaggagaagtatggggtcctacttcacaatgcaaagctgttcatgctattccaacctccacccccactatagctgcccatttatccactaaatcaagcacgagttccttagtctagcaacaaggtctgacatcatgtggtctctgcctatttctccaattttatctcctgctttcctaccacttgcactccgcctttaagtcataccaaactacatgtagttgccccaaatgctgtatacttttctctttttccctactgttccctctgcctagaatgccttcctgtacaggttcagttacaagcatctttggtgctctgtagaactccattcaaatccttacactgtcctctcaactctcttataccacatgtccacctgtcttataacctttggtttctttgtctaatacctctctagctgtaagctctgtattgagcctcttcttcaacctgggatcctcagagctagtttgcagtctggcaaatcacttcagtcaacaactaacgaaagaataactgtgggatggacgtgccagaaggagaaacaattatttattggcttaactgtaatttataccatgctattgaaataataggcagtgtaaaggacctacattcaggaaggttagtagcatacaaaattaaaagccacatagaaggatgaaaaagcaaatctgccaaacagtaggcatgtttgtcacaatgaaggattacatttcatcctaagtttgccatcagacaagcaagaaaattccaaggaattatgaatttgcctacaccttccaattgggttcatcctcaaaattcctccattaagacaaaagaaaggcttccacatggtttgtgaaaattattcaggtttccatgctatatatcagttctactcaccttcctggtgtaccaaatcagttcaaagagaaagaggaggggattttaaaatgaatatcttatttttatgcccttcaggaaatctgccttcctccccatttgttaccaactaaaattgacaaactgacccagagttaaatcaacttagggatcactcaaggagtgaaaccaaccaccttttcataaagaaatgctcagagaagaaggtagcaattacactttatcagagaaaatgtctttcttacaaagtatagccatcaagtggagatgtttgatgatccttttaaaatatctttaaatcagaagtaacttagcatggatgcccttcattttgaagaaagagaaaatatttgatgatttgatgattcatcaaaaatttgtttctatgcaacaggcttattgttatgagggatttcaatgcaaaattaataatcagccttggaaaagaaatgccttgaatcctataaaactgagatgacttaaaaagttctattcctgctcagtcaacttactgaaaaccaccatcatctttgatcaacagaagggaatatatccaaaagctaagctaaaatctctctttctttaggtcataaatcaactctgcaatcaagactacggagagtccgtgccacgcagatggctttgagttttataaattggttaggtgtggggacatgatcaatagtttgatgatttgactaagtaaaatgtgctgaaaaaaaccacctgtagggaggactcagatgactctgcacaaacattcttgaacttgaaaatccaaactgttagtcatattgagactaacaaagttaatatatgccaccaaaggagaaggctatatcatctcagggaaacaatttttgactgtgcttagtatttaggaaataatgcattcattgaaaggtaaaactggcagtaggcttacgatggcaatgggcagtgccagcagtggctgtggcatcctggagcaggaagatttggtgcatttctagtgcagcataggccagagtgacgtttctgacatttgggatgctacagcactgatagaagtggatgataaagctgtggcttcatttaaacaggctctaaagaatgatgacatttgtgaaacctcagataaaccaaaaagcatgcctaatagaaaacctgctaagaagcataaaggccaaaaaaagaatactgtaactttcttgaagtagtggaaagttggggacaaatgtcctgccatttggtcagaagacagctgcatttactctgctaccattgcttcagttgatatgaagagagaaagctgtgttgtgatttacactggatatggaaatagagaggagcaaatctgtctgatctactttcttcaacctctgtagctaataatataggacagaatgctcaaaagaatgaaaatgaaagtcaagattcaatggatgaaagtgagaactccaggtcctggaaacaaaccatttagcatcaggtcagaagctactccatggaattctgagaccacgaaagccaggtcaggtctcaaattcagtagcccaccacccacaccaccctgcttcccctcatgcttgctgcctccatttccttctggaccaccaaaaattcccccaccacctcccacaggtctagattttcttgatgatgttaatgttttatgaagtatgctaatctcttggtacattaagtggctatcatactggctattatacagggctcaagcaaaattaaaaagagggagagtgctcacgttccaattaatgagtaaatatgccattattataaaagtgaatcttacttttgtaaaattttatggtttgtggaaagcaaatgtcttggaatatttttaaatttaaaatgttaaaaagttgaaaggttaatgtaaaacagtattaaagacattctgataccaaaactattagataaaaggttgagctacatccctactagaattctcatggtatcaaagtatcacctcaccaaaaacttactggttggttgtgtggaaaaaatatacttttacaataaagagttccgtaggctctgatgacattttacatcactagtagtcagaaaaaacagacatgttttctgacctgtgatgcggtatgacctacgcatactgcactggtacactctatgacctgtgaagtgctctggtcaaaaaactttaactgaaatttaatcaggcctttagatctaatttcctgtttgcaggagatgctagggatagagcaacaagttaaatgacaccactaaagaaacgatcagacagatccagaatatagaatgttatagaagataactggcctcattgcttcaaaatatcagtgttgccaaaaataaaaataaaaaaaggtggaacgggtaactcttccagattaaaagctacttaagagacatcataacctaatgcaatgtggaatctttgattaaacctaagggggctgagaaaatttgaatatggactagattttgaatactagaccattattgctaattttatgagctgtgagaaggatgttgtagtttataaaagaatgccttcatttgcatactgatttaagaatgaggtgttatagtgtcccttaaaatgttttaaaatggttttgcaaaatgcgcatgaagcatatatggcaaaatgttaatgaatctaactggtgtgtatatgggtgttcaatgtgctattttttcctattttctgtatgtttaaaagtatatatatatttttaaattaaaaaggcaacactgaaacaagaataaacagttttcttcttacgctagaattgctacaaatttgattatgtaaaagaaactttaaaaagttatacttggtgtgggtttgctgaatcaggacagaccaaagctttcagtgccaatagttgtctccctcagagaaaattcgattggtgcattcttctggtttactgttgtccagattgagttttatttgatttgactttttcttatctacagtgctttagaggacttcttcatctttttttattgataacttaccagacaacctaacaggcaactatatctactatccaggcagccatcaacacacagaaaggctgaggagaatcaatcagggaccaaaacattccatgccaccagcatataaccttgcccttcatacactcccaacccagcctcaggaatactggccacaagggaaaatcagccaaatgctggagctgagaatgcgggttagtttgctctaagtaagtaaaggcacagctttaagttctttgtagcactccactacacaatgtttcctacaactctctgataagaattacctgaagcatgtgtgttaagcctgcagctttctagggacagcccccagagtctgggtcagaaagcctggaatggagacagccctcagaaatctacatttgtgacaaggaaaacagaatcctgatagctaaaagtgccaaaagattgttgctaggatggcagcccccaaacatagctgcacgctagaatcaccaaaggaacgttcacaattcagtaggacttactgaataaggatccctggcagtgggaaccaggactttattttttacactcccaccttgactgcatattagaataatctggggagcatttgaagatgccagtatccaaggcctcatgcaaaacgactgactcagaacctctcaaagaggagtagtttgtaaaagctccttaggtgatgaaaccagaccacagctcagcatatggaaaacactgaattgagtgctttaagatgaagctgggattatcagcttttaatctttattctccaagccagagcagcaaaaaggaactatacatcgactttgggacccacttagctgggctggtgctccaggctgctcgctgtgcatagctttaagttgaaccattgattcaggtctctctaaaaagcctatgaaattcagatcaaattaaaaagtgtcccatctgtaatgggaataaggaggctgggagcccagaaatggtgttcagtctgtctgccagttaaggatttccatatagcttcaaagaagttctaaccacatgatgacattgttgctcaggagtgaagagattctactaccagcaaaatggaaaggaaatactctggacacagcagctatattttcacagggtcctcaggatagtggtcggcacatggtaggcactcagtaaatatctcacgaatgattcccattaccatggctaaaacatgagtcttttaagatgtcttactgtggatctgtctccaacttcggaagaaattgccaccacagtcatcatcatgaattatgttactatgaataactggaactagcagcaaattgctttaattttaatgtgggccaaataagttctgcttagatatttaaatagactttacttaaacattctgaaggatggagatttcaaagctggcacctccctacctgtgaggcataataatggttccccaaagatgactactttctactccctagaacctgtgaatatgttacagtacctggtaaatgagcaaagttaaggattttgagctagggaaatgttcctagattatctgtgtggtcccaagataattcaagtttcattagaagatgaaagaaagactgcatggtggctcatggcctgcaatcccaacactttggaaggccaaggcaggagaatggcttgaggccagaagttcaagaccagcttgggcaacatggcaagaccctatatctacaaaaaataaattagcggggtgtggtggtgcatgcttatagtcccagctactaggaaggctgaggtgggaggatcgcttgaacccaggaagtcgagactacagtgagctgtgatcacgccactgcattctagcctgggtgacagagcgagaccctgcctcaggggaaaaaaaaatgatggaagacagacacagttcagacagagagagtggaagaagctatgcttctagctttgaagatagaggaagggccatgagccaaggaatgcaggtggcctctagaagatgaaaaaggtagagaaatggattctcccccagaaaagacactggaagaaatgcagccttgttgacagtttgattttaacccagtgaaactcactttacacttctgacccctgaagttgtaagaaaataaatctgtgttattttaagccacaaagtttatggcaatttgttacaacaataggaaactaacacatcacacaatatttaagagaaaaaaataatttggagaataatagtgactacattagcatttctttgcatttcaacatagcaaagggctacatttgtatcctctataagatgatgtggctagccacatccctttcaaaactgtgatatggcttttaagagtataatggtgaaataaaggttactgagatgcttgctataaataaaatcacagactatacaataaaatgaccatttctatgtggtatatgtgccttaagaaaaagtgacatcattctaaggtcttgtacatggtaaataaatgagtagaacgtctggctaaccaagatcacaacttgggcttactccggtgaatgcccaacactctctagagaatggcttcccacgcaaataccactcaccaaaggtgtaaggcactgctgcataaagatgacagtgatgctcatactgcatacccacccttctccagaaggcactatacaaccatgtttgaaagggcgtgctctcacactgtccttcctatgatccagggcactattcatgacatgtttgtgtaggctcaggaagtgtgtagtcatgcaagggggcaaaccagtgggttgaaaaggggcttgaacctatgacctcagcttcaccagtgttacctctagcaattgagctcatcaggtggaaatgggttcaactctatcagtcctatgtggcccagctctgaggcaagagacctggctccctttcattccaatgggctgaaaacagctttgaaggagcagcagtcagttacatagctgatgactgccctgcaagaatgtgcacctgaggaagggcaatgatcacaataggctgaagacactcggggctgaatggcaaacagcaccagtgtaatcctacatattggcaaaattctccaccaactagagaatagagaattgtttcatcagactccaacagcatcatgactaccatttattaagcactttactgtggaccaggcacagtgtgctaagtgtgctacaaacatctaattttaacaatcaccttaaacagaggtccattgttcatctcatctcacaaatgagaaaaccaaagtgtgggaaagtatgttgttttaaggttatatggctaggagtgacagacctggcattcaaaaccaaatctttctgcctctaatgttatactacctttaatacagtagcagaataagacacacttttaaggaaagaggcagcagagaattggcatcaaggtagcaacttacttgcaagccaaggaagatatttatttacggccatttatttaatcggttcatcattttttgagcatttggtctacgctaggaattgtgcccatacgacttggaatcaccaaaatatcaaagggtatcaggtagtaggacttggagacacagtgaaaacctacaaagttccagaacatgctctaacagggagaggacctgccagctgagcaattccaccctggacatggcagcggcagccagaatgacttggcaggtgacaatgaagaggtagcatctcaaacaaaggtgtcaagtttgaggaaaacaaacacaacctcaacatgcaacaggctcaggaaatggggccagagaccccaaatatggaatgcgcccttcttccttgcaggactgatgttcaataccggcctattcacctgttcaactgataggctaacacaagggcgggggtgaggaaggaagggctggcttggagaccacatcacctgcaaagcctcttcagcaacactgacaacgccctttaaaccctggatcctgtgggcctacccttaatatgagggagatgctcaattgttaccacaaagcagcagctgtcaaggttcagaacacaatatcccaaaatatggcaccttggcatactgagtattttaaactgaaggaaactgacaaaactcagaagcagaaagagcactctttttgccacatttctcccatgaagattggtcatttaaaaatttttctgtgctgggcgtggtggctcatgcttgtaatcccagcactttgggaggccgaggcaggtggatcacctgaggtcaggagttcaacaccagcctggccaacatggtgaaacctcgtctctactaaaaatacaaaaagttagccgggcgtggtggcagacgcctgtaatcccagctattcaggaggttgaggcaggagaatcacttgaatccgggaggcggaggttgcagtgagccaagatcaggccactgcactccagcctggtcaacaaggcgagagtccttctaaaaaatttctgacttacctcacctgaaaggaggtcaaaaagatcctcattccaaaggagtcctgccctataccctgaggtcagaagaatctgaacaatcaggccttgctaagtgcccccagtttattaccattaggtcataccgcctttatggatacttccgtacgactgtccattcttcatcaaagttaagcataaaaatggagcttcctctgggtctcttggaccttcatttctaatggctcccatgtcacacaaaactttggttgaatctgctctgcttctctcttgttaatctatttttaatgtaggggtgtcagccatgaaccttgcaatgggtgaagaaagatattttttctaccctacacagcccaaccaaaccatatgcatcataagtgcatatgataaaagtgatggaaagagaaatctgaaggtatactttcagttccacatgtcccaaagtgttttcctcgaaactacagtgaccacatgccctgatttgccaaagacagctttgatttattcatgttgtcctgggatgattattaatagtgtcccatttccttctcaaaaatgttccagtttgccagatctagtggtatggacctgtagtcccaactacttctgagaccaaagcgggaggttcacttaagcctaggagttcaagaccatagcatgttattatgtgcctgtgaatagctactgcactacagccctggcaacgtagagaaatcctgtatgtaaaaaaaaaaaaaaaaaaaaaaaaaaaattccagtttggccaaaaagttacatggttagctaatccagaaaaccacttctagagatagtaatagccgtgttgtccttctctgaaactgtgctacccaaactatgttataaaccttgaagaatgaaatacagtttaaaaacgattttgaggctgggcgcggtggctcaggcctgtaatttcagcactttgggaggcagaggcaggcggatcacaaggtcaggagatcaagaccatcctggctaacacggtgaaaccccgtctgtactaaaaatacaacaaaaaattagccaggcgtggtggcgggcacctgtagtcccagctacttgggaggctgaggcaggagaatggcgtgaacacggcaggtggtacttgcagtgagccgagatcgcgccactgcactccagcctgggtgactgagccagactccgtctcataaaaaaacaataaaataaaataaaaactattttgataaagaaacattattttaaatgccaaacagctattattatcttgcataactactattgtgttacatactgtttgggaaatattgcattaaataaagttaaacaagtttgactattggtggaacatgtggctttccaagatttaatattttagtacgtcatgaattgccaagagggtcatatactgggcaatttttccaaacttaaacgcaaaaccatttctcatgaaatgtcaaaagaggttcatgttccacaaaatgctcccacattttcatttgataaatagaggtgtctcgtatgtcttggacttgttctaggtcctggaatcagcagtgaacaaaccaaacttcttgccctcaggtgcttctgttctagtgggggagacagataataaacatggaaacaaataagtattgtaatttggaaaacaatgatttatcccccaactgattcaaagtcaaaactcccgacatctaacaattctgagggatattcatgaagcagcctgtcttcagatgtgagttggcaatgatttgtgtctctcaaaagccatcgtcgggcatcgtgtttcctgaataaaagaagcttcccttaagaagtctccgcctttgaactaagcgcgcttcatttggcattctcattagtatagatgtgcttttgggggagtccacctttatttagattgcttgtggaccgtattcgtgtgtacctttaatttaatgctatttcctgtcctagctagaccgaggtgttatttaaaacagcgtccctttcaaaagagatgttaataggtgcttagcacccagggaatacattccaacaaatgaagagttatacattctatgccacacatcccatcccctagggctggggtggcgagagacaagaaggttcatacacacacacagacacacacacacacacacacacacacacacacacacacacacacacactcctaccctctgattggttctgtgcagaatagagactcacatttaaatgaataagccaagttaaaactttccatcctggaacaaagcaaaaggaaagcctctttatgttgcagggactatagatgccacgggctgagcctgtcccaaagcttccctccactgctcaaaaactaagccatcttgctgcgtttagcacttctcaccagaccacccacccagacacggatacacaaaccacatgtgtgaggaatgctgttcggctaggaaatcagtatcagtatttcaaccttgttacttgcacagacggcccttttagtgcgactcatttgttttatcttttcaatagctttgattattttcttttaatggcctggatttatccttttctacccttttgaagcctcagaactctgtggtggggactgcatggggtgggagacatgactacatgattaaggggaaaatgagcaaataacgttgtctttactcaccatctatctcccactccttgtgggcacctcccattccatgcggactgccgagtgccctagtagtcaccctgaattgttataaaagtggactcaaggagccttctcattcaggtcgaagactatttgtgctgttatttaagagccatagggcccagttatcattatcagagtgttttctggtttgtgccgtatatttctctcactagctcctagggaccacattggttacccttctttaattaaggggaaattaagaccaagaggctaagctgagagccaaaggcaatttaacaacctctggaaaaaattggaaacgcctctacagaaggggaccgcataaacaggaaggtatggatactattacctggcagagaaagcagaagctttgaaatgtgctccgtgttttctatttgggtggtatccctggcaaggaaaccaataaaatacccttagttgttctactaatcagaataaaacaagaccactagttttggagacttatttccctgaattagcaaccagagaggtctgggggtcaggcttggttatctgtcatctctctccaggtttccttgcatatcgaaatggggccataaattggagagacaggaaacaaattattggggaaaaccatgtggtgcagtgcacccctgggtgagtgtgcttcagcagggcctggggctgatcttgaccctttctatacagtggagaaggtgtaaggccattattttaaataaaattgagtatctatgccacaacaagggaacagattagtccaatccaagtatggtcattagaaagttctactgccaccccaacccatctgggactgatgcttccacacctaaactcagtttcgggttgataagagacaaagcagtcccctctaatcccctaaatggcttgtcagcctgaatgaagataaagtcagtttctcaaatttgatgtaaatctccttactattaagtaagagcatcacatccaattccttggttatttaccaaactgaatgtattttattctctttgttgtagtagttgttctccttcctgtctaatcaaggtagcagttcttgctgtgaaagtaaatgcagggactttgtaagatcgactctctctggctatagcacattgtttctgaacaaaaccctccaaagaaataggggggaaagaaaaaataccgggcacacatagcccagtttatgccaaaaaatgtatcccaccacttcttgttccaatctttgcagagttttaaaaatattatatatatactggctttaggacacagaagatggtgttagacatgagggactcctaaaatgaatgaggcatggactctctgccttcagctggttttggacacattgtcctctctctggatgtctcagatctccccatctattcttctttagaaacagcatcacttcttgagaaaaggctaggggctaatttttcctgtatgcaaaataaagccaaactttggtcaaatgactctcagcaaatcagtacaattatacattttaaaaaaggtgctgaaacagattatatgagtttaagtaaaacacctatttctatcaatctgtacttacatttcaacatggattttagagaagggaaatacatcttacagtgtgccttgaattcacacaaaagcatgtacacatacacaatgtatctttcaacataactacacatacacagtccattaaaaagatactgacagatttataaaatgtattggccttgcactgttaatctcaataatacattttcacttaatttatttttgcactgcatggtagctctggccaccattaaggatctgtcagcatttccatcataactctattttcagaatactggagtacaagtgccaaaatacacatttacagtttacagacagcggtggctttgtcttccttttaaattgacttcttcactgcatctttacaaggaatattcagggatggcagtgcctacataataaaaagcatcatataaaacaaaagaggtcaaaagatgtagacttccagcccgagactaaactaaaccatgggaattgactccttaacattcactgcagctgtagtagtctctacatcatattcatagttttagagcaacagtccaaagcaagattactctgataatatatatgtgtatatatatatatatatgtatatataaatataggagcagtacatagcattagtacacaaaacgctaaaggtggaaagtaataagcatacagcaaattactccagagcagatcacttctacagtgacaaaaataaacacgagccaccaaacagacactgactgtttccaacactggacatccaactccattaagtaggcaaagttaaaacatttaagagtaaagtctctcttaaacaaatatattaactacatttgtggagcttgaagtagtaaataggatgttatacaggcctaaaattgtttcttctcttttttttaaagattaggtgggcctgtaaaagatatcggcaaaaaaaaaaaaaaaaaaaaaaaaaaaaaaattttgaagaaactttttagtggaagaaaaccaatattactggctctttccaccaaaaggtgaatattcagattagagagatttaaattgcctagcaatttaaaatgtttaagacactctcttaagagatatttttttcctgatctgaagtttttatagtcttccctaccttgacactatatgaacgcatttatagacatacctatttgtctgtattaagattgagagagaggcagattatgctgaggatggtgaagtaactgcaaaatattgttgctaacatgactgttacatccgaagacagaaggaaccccaaacccaccaacacacatcctgctgcaaaaccagaggcaaaagctaagttataagggggcagaggggcaggagctctgtacatatattttttcccctggctgatcactgaggaaaaattttttaaaagtttatcatactctggctggttcaaaccatattcacatttacccaattaattttatttgaaacatctatttatatatgtacaccaaagaaattaaaccctgccattttccctttgtgcttaagaaaccagagccactgttagggtactcacatgtcaaagatattcttaataggcttcaaagttgggtgtatataaatgtgacagaactgaaggggttactttaagagaggtattaaaactacttgaaattaattcaaagggatctttttatttctgtatttaaaaattagatgagagcaagattaccacttcaaaaaaaataacgtaactctcagtcttaattttgtgaaaaacttactttgctatcttgatgagtagaagatggataagtttttctgaactttatcaatttacaaacttacattttaggatattctgaagaaattaactttattacctaattttcaagtctaaagtttatcatataatagctgtccttcttatcattatttttgtttggtcatttcttatcttacctagcttcttggttagtaacttaaaggaaaaaatttttacattggcaaatcatattttttgccccacaatttagttacagaaataaaaatggcccaaactacatatatacgtttctagttaaactacacagatatattaaatcacataaacttctggcttgatcagaatatgtgttagcagttaga

SEQ ID NO: 22 - DNA, 52071 bp, Homo sapiens
caggcttttccatacatcctctgaaatccaggcagaggctaccaagaattcaccatttttgcattctgtgtgcctgcaggcttaccacctaatggaagctgtgaaggctatggcttatgccctccaaagtaacagcccaagctgtacctaggcccctttgagcccctgctggagttggagccatctggatgcagggagcagtgttctgaggctgcacagggcaacagggccctgggctcagcccaggaaaatattcagtcttccttggcttcagggcctatgacaggaggggctgccccataggtctctgaaatgcctttgaggccttttccccattgtcttggatattaccacttggatccctttcagttatgcaaatatcagcaagtggttgctccacagcctgcttgaattccttggagaaaatggtttttttttttaccacctggctaggctgcaaaatttcccaacttttaggctctgcttcctgtttaaatgtaagttccaaatttaagtcattcatttgcccccacatctgagcacaggctgttagtagcagaaggccacatcttgaatgctttgctgcttagaaatttcttctgccacatacgctaggtcatagtttttaagttcaaacttccacagatccctaggacacaagcagaatgcagccaagttatttgctaaggcataacgtgtgacttttgctccagttcccaataaattcgtttccttttgagaccttgtcaacctggacttcactgtccctatcaccatcagcattttggtcacaaccacttatctagtctctaagaagttccaaacttgccgggagcggtggctcacgcctgtaaacctagcactttgggaggtcgaggtgggtgaatcacttgaggtcaggagttcgagaccagcctggccaacatggtgaaaccccatccttactaaaaatacaaaaatattagccaggcatggtggtgcatgcctgtaaccccagctgcttgggaagctgaggcagaaaatcacttgaacccgggaggcagaggttgcagtgagccaagatcacgccactgcactccagcctgggcgacagagcaagactccgtctcaaaaaaaaaaaaaaaaaaaaaaaagtttgaaacttaccctcattttcctgtcttcttctgagccctgtaaactcttccaaccactactcattacccagttccaaagctgtttccacattttcaggtatctttatagcaatgcccaacttctcggtaccaattttctgtattggggcattcttgcactgctataaagaaatacctcaaactgggtaatttacaaagaggtttaattggctcatggttctgcaggctttacaggaagcatggtgctggcatctgcttggcttctagggagacctcaggaagcttacagtcatggtggaaggtgaaggggtagcagacacatcacatggtaaaagcaggggcaagtgagagagctaaactcccgctttctgatcacatatcccaacctgctccaactccctaaatccttccactgtgtctacatggtagaatctcctacatccacaacttcttatgtcaactttccttctatttcttgatctaactcctcattctcaagctttttttttaaccatgacccacaataataaattttacatcaaaacaccatacgcacatacatacacacacatattatatgtgtatacacaactgaagtcccacaaaaacaaaccttactaaaataaagctatatcagatatgattttattaatagccaaataaacaaaaattcagaaatacaaagttccgtgaaagagttgtttacatgcactgtcaactgttctctcattcttatgttctctccctccaggattttacctcctccattccaccaacacagctcttatgagggtcaccaatgagctccacattgctaaattggtgaatacttctcagtcctcactttagttgacccattagcagcatgtgacctattggctttcacatggcccatcacccctcttcctcaaaacactgccttcatttggcttccagggcatccctcttgattttcctaactcaatgagagctcctccttagtctcctgcactgtttttcctcatatcctatctctaaccactgagagaaccccaaagttctcctctgacatcttctctatttgaatgcacttcctcagctatctcctctagttcaacagctttaaatttactaacttctacatttccatctctagcccagacctctcctctgaactatttttttattttataatatagacggggtctcactttgttgcccagtctggtcttgaactcctgggctcacatgattctcctgccttggcctcccaaagtgctgagattacaggcatgaggcattgcacctggcctggactctttattcacatccaacttctactaatgggcatctcaattttcacatgttcaaaacccaatttctttcctgccacaaaagtactccttatgcagacctccatctcattaaattctaactttatttttccagttgcataagccaaaaatctcggagttacacttgacactcctctttcatacaccacatgtaatcaatctactgaaaaatcctggtggctccacttggaaaatatactcagatccaaccaccactacccacactggctctaactagtcagcctgtttcctcccttcaaacctatggtgtattttcaacacagcaatcagaagtctctttctgtaagtcagatcatgctataccttgggttcaaaacctttccatggactcccagcttaaaaaagtaaatgctgaagaccttactatcgctgacatatggcctggcccttgactacctctcttagctccatctccttaatctctcctccttacttccactccagccacgattaactccttgttgttccccaaacatgttaaatacacttgtgtcttagggcctttctatttgttatctcccttgcctgggatactctccctctagttgtacctagaacagttgaatcatcgcataattgctaaaaggacaagtgaccatgtgacaacgttctttcatcttttatgcttgtaacaccagaatttacttgaaaaagtttgtaagtggacaagtatgaaagacagatatgtacacaaagtaacaggaaggtaaagatgatgtgaaaaatgaaaaccaatccactgaaagtcattctaattggtatttataaatgtaaaaacaaaaatgttttgctgttatgtaacaaagaatatagccatcatctatcacttcaacaaaactatgagccctaaagttttcagaagtattgcagtttggacaggtgtggtggctcatgcctaccgtccccagcactttggaaggcaggaagatcacttgaggccaggtgttcaaggccagcctgggcaacacagtgagaccctatttctacaaaaaataaaaataaattaaaaaacaaaaagtattgcattttgacaaagtgagttcatgaagaatacaaataataaggtagaacatagtagagatgcatttgaaatccaaaatccgtatttaaaggtaggtatgttccagattcatgcataatgacagctgctttcaaaggatgtaatgccttttaggtatacataaacattcaaaactgggaaaatatgggaaaaaatgtgggtctcctatatttggattctcattaaaattgctaacaaagttaattttcaccatccctttattcttctgtaaattgtttataaaatgacttgaaaaagaatgcagtcaattctcattacttgaggtagttatgttctatgaagttgccacaaacacgcaaattagtgaatactgagccattgctcctaacagaaatacagggttaggttcttgtaagcctttggtcacattttcaccaacttataaatacgtaagcttgttttatatctgtttctgtttaaagacacattatttaataaatatagacctggcatggtggctcatatctgtaatcccagcactctgggatgccaaggtgggtggatcacttgaggtcaggagttcaagactggcctacccaacatggtaaaaccccacctctactaaaaatacaaaaattatgctgggtgcagtggcgggtgcctataatcccagctactgagaagactgaggcaggagaatcgtttgaacccgggaggaggaggttgcagtgagccgagattatgccattgcactccagcctgggtgacagagtgagactccatctcaaaaaatataataataaatagtgatgactcatcatcatctaactcccactcaacagcactataactcatgactaaacaaaggttatctaacacatgtattctctaaggcacctcacagcccgcatgcaccttggaataccactatatagcacttcagcacaatgcttgggaatcactttaaacagtaaaatcacaaacagaaggcacaaaaatgtgaaaaatgtagaactatataaactgctttcgaaaaggacacttgtttataataagaaagctacacaaaaaactgagcactgttcaaccccagctgggaatatctggataaggttctcaaatttttcacctctgtgtatgtccatgaaaaaccatgaaactgccatgagtattgatgttaggttacaaataaattttagcaagtaggtgcctttacaaatacagattctacaaataaagagaattgactgtaaataaaattttataagcaaaaactctgaaaataaaaacaaatagttaaaatggtaatgggaagacgatataaacaacagaaaattaaaagttcttaaacacatgaaaaggtgctgaacttcacaataaaataaaaatgtacaaatatgagataatcatttttaactattcaattgacaaagattcaaaggtttgataaattattggctattttgcaggaaacaaactctccatgttggtataaatatagattaatataacctctactgaaaacaatttagcaaacttttatttacaatttaaatgtaggtcgggcacggtggctcatgcctgtaatcccagcactttgggaggccaaggcgagcagatcacaaggtcaggagttcaagatcagcctggccaacatggtgaaaccccgtctctactaaaaaaatacaaaaattagccgggcatggtggcgtgtgcctgtaatcctagctactcaggaggctgaggcaggagcactgcttgaacctgggaggcggaggttgcggtgagctgagatcacgccattgcactccagcctgggcaacagagcaagactccgtatcaaaaaaaaaaaaaaaacaatttaaatgcaatagcctcttcaacacagtagttctaattctagatacttaatcctaaagatgctgactgtactattaaataacaaatgattagaaacaaattaaactctcatccacaagagctcaattcattaagcgtggtacacatctgtaagaatatcctgtaagtgcttaaaagaatgagagcttttttttaaatttttaatttttgcatttttcttattttattttattattatactttaagttttagggtacatgtgcacaatgtgcaggttagttacatatgtatacatgtgccatgctggtgtgctgcacccattaactcgtcatttagcattagatatatctcctaatgctatccctccccattccccccaccccacaacagtccccagagtgtgatgttccccttcctgtgtccatgtgttctcattgttcaattcccacctatgagtgagaacatgcggtgtttggttttttgtccttgcgatagtttactgagaatgatgatttccaatttcatccatgtccctacaaaggacatgaactcatcatttcttatggttgcacagtattccatggtgtatatgtgccatattttcttaatccagtctatcattgttggacatttgggttcgttccaagtctttgctattgtgaatagtgccgcaataaacatacgtgtgcatgtgtcttcatagcagcatgatttatagtcctttgggtatatacccagtaatgggatggctgggtcaaatggtatttctagttctagatccctgaggaatcaccacactgacttccacaatggttgaaccagtttacagaactctccaccccacatcaacagaatatacatttttttcagcaccacaccacacctattccaaaattgaccacatagttggaagtaaagctctcctcagcaaacgtaaaagaacagaaattataacaaactgtctctcagaccacagtgcaatcaaactagaactcaggaataagaaactcactcaaaaccactcaactacatggaaactgaacaacctgctcctgaatgactactgggtacataacgaaatgaaggcagaaataaagatgttctttgaaaccaacgagaacaaagacacaacataccagaatttctgggacacattcaaagcagtgtgtagagggaaatttatagcactaaatgcccacaagagaaagcaggaaagatccaaaattgacaccctaacatcacaattaaaagaactagaaaagcaagagcaaacacattcaaaagctagcagaaggcaagaaataactaaaatcagagcagagctgaaggaaatagagacacaaaaaacccttcaaaaaattaatccaggagctggtttttggaaaggatcaacaaaattgatagaccgctagcaagactaataaagaagaaaagagagaagaatcaaatagacgcaataaaaaatgataaaggggatatcaccaccgatcccacagaaatacaaactaccatcagagaatactataaacacttctacgcaaataaactagaaaatctagaagaaatggataaattcctcgacacatacaccctcccaagactaaaccaggaagaagttgaatctctaaatggaccaataacaggctctgaaattgtggcaataatcaatagcttaccaaccaaaaagagtccaggaccagatggattcacagccgaattctaccagaggtacaaggaggaactggtaccattccttctgaaattattccaatcaatagaaaaagagggaatcctccctaactcattttatgaggccagcatcatcctgataccaaagccaggcagagacacaaccaaaaaagagaattttagactaatatccttgatgaacattgatgcaaaaatcatcaataaaatactggcaaaccgaatccagcagcacatcaaaaagcttatccagcatgatcaagtgggcttcatccctgggatgcaaggctggttcaacatacgcaaatcaataaatgtaatccagcatataaacagaaccaaagacaaaaaccacatgattatctcaatagatgcagaaaaggcctttgacaaaattcaacaatccttcatgctaaaaactctcaataaatgaggtattgatgggacgtatctcaaaataataagagctatctatgacaaacccacagccaatatcatactgaatgggcaaaaactggaagcattccctttgaaaacacgcacaagacagggatgccctctctcaccactcctattcaacatagtgttggaagttctggccagggcaattaggcaggagaaagaaataacgggtattcaattaggaaaagaggaagccaaattgtccctgtttgcagattacatgattgtatatctagaaaaccccattgtctcagcccaaaatctccttaagctgataagcaacttcagcaaagtctcaggatacaaaatcaatgtacaaaaatcacaagcattcttatacagcaataacagacaaacagagagccaaatcatgagtgaactcccattcacaattgcttcaaagagaataaaatacctaggaatccaacttacaagggatgtgaaggacctcttcaaggagaactacaaaccactgctcaatgaaataaaagaggatacaaacaaatggaagaacattccatgctcatgggtaggaagaatcaatatcgtgaaaatggccatactgcccaaggtaatttacagattcaatgccatccccatcaagctaccaatgactttcttcacagaattggaaaaaactactttaaagttcatatggaaccaaaaaaaagcccgcatcgccaagtcaatcctaagccaaaagaacaaagctggaggcatcacgctacctgacttcaaactatactacaaggctacagtgaccaaaacagcatggtactggtaccaaaacagagatatagaccaatggaacagaacagagctctcagaaataacgccgcatatctacaactatctgatctttgacaaacctgagaaaaacaagcaatggggaaaggattccctatttaataaatggtgctgggaaactggctagccatatgtagaaagctgaaactggatcccttccttacaccttatacaaaaattaattcaagatggattaaagacttaaatgttagacctaaaaccataaaaaccctagaagaaaacctaggcattaccattcaggacataggcatgggcaaggacttcatgtctaaaacaccaaaagcaacggcaacaaaagccaaaactgggatctaattaaactaaagagcttctgcacagcaaaagaaactaccatcagagtgaacaggcaacctacaaaatgggagaaaatttttgcaatctactcatctgacaaagggctaatatccagaatctacaacgaactcaaacaaatttacaagaaaaaaacagacaaccccatcaaaaagtgggcgaaggacatgaacagacacttctcaaaagaagacatttatgcagctaaaaaacacatgaaaaaatgctcaccatcactggccatcagagaaatgcaaatcaaaaccacaataagataccatctcacaccagttagaatggcaatcattaaaaagtcaggaaacaacgggtgctggagaggatgtggagaaataggaagaatgagagttttaaatactgatatggtgtgttctccaagatatattgacagaaaagcacttatctattgaagaacattatatgaattacctctaaagataaaaaattttaaaagttcaaaaagggtaatgatgatatatcatgacagaacttaattactttttttctttttgagacagtcactgagtcacccaggctggagtgtagtggcatgatcttggctcactgcaacctccgcctcctgggttcaagtgattctcatgcttcagcctctccagtagctgggattacaggcgcccaccaccatgccgagctaattttttttttgtatttttagtagagatggggtttcaccatgttgggccaggctggtctcgaactaccgacctcaggtgatccacccacctcagcctctcaaagtgctaggattacaggtatgagccaccatgcctggccttaattacatgttttttaaaaattcacaataaatgtatacacaaacattttaaaaaacacaaaagggtacactgtgaaaagtgtacagaagggctgggcatggtgattcatgcctgtaatcctagcactttgggagcccgaggtgggagaatggcttgaacccaggaactcgagaccagcttgggcaacatagatcatgtcactaccaaaaaaaaaaaaaagtgtacagaagcagagttgctcttgttttttgtttgttgctttggtttggtttttttttttgagacagggtctcagtctgttgcccaggctgaagtgcaatggtgtgaacatggctcattatacagcctcaacctcctgtactcaagtgatccttttgcctcagcctctccagtagctgggactacaggcatgcaccaccatgccttgctaattctttcattttttgtagagtcaggggttttgcgttgttgcttatgctggtcttgaactcctgggctcaagtgatccgcctgtctcgtcctcccaaaatgctgggattacaggtgtaagccaccgtgcctggcccagagttgctcttagtaacgtgttttgttttttttttttttttttttttttttttttttttttttttttttttttttgagacggagtctcgctttttagcccaggcttgagtacagtggcacaatctcggctcaccacaacctccacctcccgggttcaagcaattctcctgcctcagcctcccaagtagctgggactacaggcgcgtgccaccatgccgggctaatttttgtatttttagtagagacagggttttactatgttggccaggctggtctggaactcctgatctcaggtgatccacccgcctcggcctcccaaagtgctgggattacaggtgtgagctgccgcgcccagctgctcttagtaacttctggaatttgatgtctaaattgaatccattatttcaaacatcacaagacttaagttcataaaaacttttttaaaaagttaactctgggtcaggcgtagtggctcaagcttgtaatcccagcactttgggaggccgaggcaggtggattacctggggtcaggagttccagaccagcctggccaacgtggcgaaaccacgtctctactactaaaaatacaaaaattagccaggcatagtggcacatgcctgtagtcccagctgctcgggaggctgaggcaggagaattgcttgaacctgggaggcagaggttgcagtgagctgaaattgcgccactgcactccagcttgggtgagagttagactgtatcaaaaacaaaaagaaattaactctgtagtttatttctgttaatggcaaccctgcagaaaagttaaacttagaatatgtctcaaagtaatctctgtctgatcccttaatgaaggatctcttcaaacacagcaacttttgtctgtcttctgaatgtaggtacagctgtggctgtagaacagaccatgtaattttcatctagattccttacaaccacaaggacaattattacaatgaaagccagagaactagctcagttttgattttattactaggataaatccagccaggtagtgtggtggctttgatgttttctgtctatatctaagggggaagctgcttcattattcgatattaagataaatagggcctaaaaatagtcctaggtcaaacaccattatgattaactcaactttcaaaaccatttacctaatgtaggatttgttaataagtcttcttcaaaattagcaagaaatacaactaatgcctaacccgtcatgatgaattaaagactgatccaaaaataactgacagttctcttccagttgccctcttctttgacaatcccaccagtctatgctctaagctcacgcttgacttccaaaaactgccagatattgtagacaccatgaagaataagatgtactaccttttctctaatgaaagaggaaatacagatataaacaatatataaacataatataatgtgaaaagctatgtatagaaataaatagagaggccgtgtgcggtggctcacggctgtaatcccagcactttgggaggccagggtggtcgaatcacttgagggcaggagtttgagaccagcctggccaacatggtgaaactccatctctactaaaaatacaaaacttagtggggcatggtgccacatgcctgtaatcccaactactcacgtggctgaggcacgagaaccgcttgaacccggatagcacaggttgcagtgagctgagattgcaccactgcactccagcgtgggcagcagagcgagactctgtctcaaaaacaaacaaaaataagaatatgtaaagacatgaaaaatgtgacattaagtgggaatacacatgcacatacacaaaatgctatggtggcatccatatcaaaatatgggccaaagggcaaaataatatgcaaaaaagaaatacaatcacagatacagctaatttaaaaaaaaattaaatatttttattatatacttttaaacatatagaagatagaaaaaaacagtacaatgaacagccatgtccaccagttagattctgtaacattttgccacatacgcctcacatacattttgttaaaccatttgaaacattttaagacactctaacacttcattcctaaatgcttaagtatgcaaattaagacagtcttttataaactacaacacccttctcacagctcataaaattaccaataattatccaatatcattcaaaatctaatccacattcaaattttctcaactgcctcaccaccgtgctggcctcccacccccaccccagtcttttacagatggtttttcaaaatagagtccagtaaaatatttcacattgcatttggttattacataacttttaatcaagaagagttacccattccacttccttttttctttcccaacacttgatattttgaagaaatgaggccagttatcttctataacgcttcacattccagatctgtctgatcgtttctttagtggtgtcatttagtgctgctctatgccagcatttcctgcaaatgagaaattagaaccagaggcttgacgaattccagttaaaccatgtcctctgtggacaccagttaaacttgactagagcacttcatatgtcagagtgtacagtgcagtatgcctaggttatcccatatcacaataaaaaaaagtctgctggtctgcctactagtgatataaaatggcatcatatcctaaagctctttattgtgaaagtatgtttcttccacataaccaaccagttaagtatgagaattctagtagggatgtagattaaccttttatctaatagttttggcatcaaaattctttaatattgattgttttacattaacctttcaactttttaacatctgaactttttaaatgttcaaaaacatttgttttccacaaaccataaagttttacaaaagtaagattcactttcataatgctggcagacttactccttaatttaaggaatgtgagcaccttccttctttttgattttgtctgaaaccctgtaaggaaaataaaggaagttaaaaaaaatagctatatagacatagatagctatatatagatagctttatatggatgttaaaaagcattttgtttcacaagacattttacttattttattcaacaaaatatgatcagaaattaagttgatagtcttttaatgtactttaaaagttatcccaaagaaaacaattattaggctgcagttaaggttttcttgcagtggctcatgcctacaatcccacaactttgggaggcggaggtagggggatcacttgagacctggagcttgacaccaccctgggcaacataatgagaccctgtctctacaaaaaatttaaaaattaggccggcgtggtggctcaggctaggcacagtggctcacgcctgtaatcccagcactttgggaggccgagacagttggatcacctgagctcaggagttcgagaacagcctggccaacatggcaaaaccccatttctactgaaagtacaaaaaattagccaggcatggtggtggggacctctaatcccagctacttgggaggctgaggcaggagaatcacttgaacccaggaggcggaggctgcagtgagctgagatttacaccactgcactccagcctgggtgacagagcaagactctgtctcaaaaaaaaataaataaataaaaataaaaattagccaggtgcagtggcattatcactgtagtcccagctactcgggaaactgaggtgagaggactgcttgagccctggaggtcaaggctgcagtgagctgtgaatgtgcccttgcactccagcctgagcaatagagtgagacctggtctctaaaaaataaaatttaaatttaaaaaatttaaaaacattgccggtcacagtggctcatgcctgtaatgccttgcacttttggaggccaaggcgggcggatcacctgaggtcggatttggagaacagcctgaccaacatggagaaaccccgactctactaaaaatacaagactaggccgggcacagtggctcacgcctataatcccagcacttggggaggctgaggcgggtggatcaaaaggtcaggagatcgagaccatcctggctaacacagtgaaaccccatctctactaaaaacacaaaaaaattagccgggtgtggtggcgggcacctgtagtcccagctactcgggaggctgaggcaagagaatggtgtgaacctgggaggcagagcttgcagtgagccaagatcgcgccgctgcactccagcttgggggacagagcaagacaccctctcaaaaaaaaaaaacaaaaaacaaaacaaaacacaaaactggctgggcgtggtggcatatggctgtaatcacagctactcgggaagctgaggcaggagaatcacttgaacccaggaggcggaggttgcagtgagccgagattgcaccattgcaccccagcctgggcgacagggcaaaactccatcttaaaaaataaataaactaattaatttaaaaaaatatttttcttccttttttttttgagacggagtttcgctcttgttgcccaggctggagtgcaatggtgcaatcttggctcaccgcaacctccgccttctcagttcaagcaactctcctgcctcagcctcccaagtagctgggattacaggcatgcgccaccatgcccggctagttttgtatttttagtagagacagggtttctccatgttggtcaggctgatctggaactcccgacttcaggtgattcacccgccttggcctcccaaagtgttgggattaccggcgtgagccactgcgcccagctgatttttcttctttcagtatgtccaatgatgttcctgagcccgcttataccttatttttttttttttgagatggagttttgctcttattgcccaggctggagtgcaatgaggtgatctcggctcaccgcaacctccacctcccaggttcaagcaattctcctgcctcagcctcctgagtagctgggattacaggcatgcaccaccacgcccgcctaattttgtattttttttagtagagacggggtttctccatgttgaggctagtctctaactcccgacctcaggtgatccgcctgcctcggcctcccaaagtgctgggattacaggtgtgagccaccgtgcccggcctataccttattttcatcaaataaaatatatgaccttaaactacctgtgtcatacttattaaaatgagaccattaaacaccagtattcactaaataaaaaaaaaatttaaagtcaaaaattaatactaaaacatttgtttttcttgtcagatctagcccaaatgtcctctgtctctcttctggcttcaatgctttctatctttccctacatgtatactagcttgcagtggcttcccacttcattactaatctacacctaacagaccgtaagatgtattgaaagatttgttactaatgagtatcaaagttataacctattttatgttatttcaacaacattattcttagtcatttgcattctgcttagatttctaagacaaaaagatagaggttaaaagctagactcagagcctatctcaaccacgtggcttcagtagaacaaaggttaagaattgttagcttaaggcaatgacgtattaaaaacacttaaggccaggtgcagtggctcacgcctgtaatcccagcactttgggaggcctaggcaggcagatcacgaggtcaggagatcgagaccatcctggctaacacggtgaaaccccatctctactaaaaatacaaaaaattagccgtgcatggtggcacacgcctgtagtcccagctacttgtcgggctgaggcaggagaatggtgtgaacccgggaggcagagcttgcagtaagccaagatcatgccactgcactccagcttaggagacagagcaagactgtctcaaaaacaaaaacaaaacaaaaaaaacccaaaaaaccaaaaaaacaaaaagaacacaaacgaatgttcatagcaacattattcattatagcccaaaaataaaaacaacctaaatgtccatgaactgatgaatggataaaatgtgatataaccaaacaacagaatattcagcaataagaaggaatgcagtactggtgcattctacagcatggatgaatcttgaaaatagcatgctaagtgaaagaagccagacacaaaagaccacatatcgtataattccgtttatatataatatctaaaatagacaaattcatagagacagaaagtgtactgactgcctagggctggggaaaatgaaggtaacagggtttctttttggggtgatgaaaatgttcttaaattgtagtgatggttgcataactgaaaaccaaaaccactgacttgtatactttcttttttattttattttttgagacagagtctcgctctgtcgcccaggctggagtgcactggcacaatctcggctcactgcaagctccacctcctgggttcacgccactctcctgcctcagcctcccgagcagctgggacaaaaggtgcccgccaacatgcccggctaatttgtttttgtacttttagtagagacggggtttcaccatgttagccaggatggtctcgatctcctgacctcgtgatccacctgccttggcctcccaaagtgctgggattacaggcgtgagccattgtgcccagccaacttgtatactttcaaaggtaaactgcacaccatgtgaattatttctcaagaaagttatttagaacataaattataccaatactttatatatacattatgtatttttttcaaatatttcataatttaaaaaacacaaaagcctacagtgttacagtcagataactgatctcaaaacaaattacaagctgttgatttattactttttggtcattaaaatgaggaattcatgatacatacaatataccaaggttatactacaacaactgaagcgtgacttttttttccctccgcaaattctcactctgttggccaggctagagtgcagcggtgtgatctcggctcactgcaacctctgcctcccaggttcaagtgattctcctgcctcaacctctcaagtagctgggattacaactgcccgccactgggctaagttttgtgtatttagtagaaatggagtagtcaccatgttggccaggctggtcctgaactcctaacctcaagtgatccacctgcctctacctcccaaagtactgggattataggtgtgagccaccgtgccaggcctttttctttttttgagatggaatctcactctgtcaccaagggtggagtgcagtggcacaatctcaactcactgcaacctctgcctcccagattaaagcaattttcctgccacagcctcccaagtagctcggattacaggcatgtgccaccatgcctggctaaattttttttggtatttttagtagagacaaggtttcatcatgttggccaggctggtctcaaactcctgacctcaagtgatctgcctgcctcggcctcacaaactgttgggattacagttgtaagccaccatgtctggccttaacttttaaataagaatattaatgggggcacacacagatgatacatttaaaaacatacacctttaagtcagttgtttcttctatattaatttactaaaaatacaagtgcctacaatatcacatcataattttagcagggcacaagagcttacttttaaaaataattttaggccgggcgcggtggctcacgcttgtaatcccagcactttgggaggccgaggcgggtggatcacgaggtcaggagattgagaccacggtgaaaccccgtctctactaaaaataaaaaaaaattagccgggcgtggtggcgggcgcctgtagtcccagctactcggagaggctgaggcaggagaatggcgtgaacccgggaggcggagcttgcagtgagccgagactgcgccactgtactccagcctgggtgacagagcgagactccgtctcaaaaaaaaaaaaaaaataaaataaaataaaataattttaaatgttctgactaaaatacaatagaacatgtccgtaggagactaacgtataaagtgacaagtttgaagccatactccccaaggttcaatgtggtacacattaccccagatctttgtgcattaaaaaaatttcatttctcttggaaggccgaggcgggtggatcacggggtcaggagattgagaccatcctggctaacacagtgaaaccctgtctttacaaaaaaatacaaaaaattagacaggcgtggtggcaggcacctgtagtcccagctacctctgaggctgaggcaggagaatggcgtgaatccagaaggcagagcttgctgtgagccaagatcacgccattgcactccagcctgggcaacagagcaagactccgtctcaaaaaaaaaaaaaaaaaaaaaagaatttcatttttcatttatgaaaaattatcccatcttttccattccctacaatcaatttcaaatcagagattaaaacattatttagaaaaagtataatttcaattcaaaagtgtataatcaaaataatctaacaatagcatgaaagctttttaaaattaactaaaattatacttagggacaatgcaagagtaatttaagcctcagacagttgtatttttttatttttattttttagtaatataaagagagaagcaagtagtattttataaatttacaaaacaaagtcacataactacaaaaaaattgtcaggaaaagatgctgagtgattacttaccatataatagccagtatgatagccactcatgtaccatgaaattaacatacttcccaaagcatcagcatcatcaagagaatctggacatatgggaggtggtgggggaattatctggagacagaaaaagatattgtttatatccagtaaacaaaaaagtaaagtctggagatttatattatatagtgaatgctggaaattaattgtatttttgcttatataatctcctacttaaatttcttttttttcccctaaacaaagacgaggtcttgctatgttgcccagactggtctcaaactcctgagctcaagtgatcctcctgcctcagccttctaaaatgccgggattacaggcatgagccactgtacctggccttaaatttcttaacatagctagcatttggagaaaaccaaccaataacaacaaaagaccaacaaaattaaatttaacgaggacgaaaagacagcaagtgacataaaaagtttaaacattttgatttagactatgtatctgttccactatgaagctatgagtaaaaaaaaaaaatcaagcataaatactttcatgcttttccttaatacacacacacacacacacacacacacacagctcacatagcatttcgagggcgattttaagtaaatgtcttgggtagaacacctgttctaaccccatcccaatacacagtatgccaaaaagtatctttttatctattgttaatacctaaaaatctaccattagaaatccagtttacagctgggtgcggcagctcacgcctgtaatcccagcgctttgggaggccaaggcgggtggatcacctgaggtcaggagttcaagatcagtctggccaacatggtgaaaccccatctctactaataaaacaaaaattagccgggtgtggtggcagtcgcctgtaatcccagctacttgggaggccgaggcagaattgcttgaacccaggaggcggaggttgctgtgagctgagatcacaccactgcactccagcctggggtacaagggcaaaactctgcctccaaaacaaaaaaaaaaaaagagagagaaagaaaaagaaatccagtttacatcagaagctaacatccaactatacctagaagggcaaacactaattccttatataaggtataattaaatcccttctaacaggaactacctccttatggcatagacaccaacttctgccaggaaagaaggcaacctagagcttagacttgggactacaagagcactgcatctgggtaacagaaaggcattaaaaacaaacaaaacccagaggtttagttcaaatttctacccattagaatctggcccaagggatgttctacaatgacattttacaatcctctattctgctaattatcaaattgtatgtgaaagcaaaatctaacctatactcttttttacttactggtggtccagaaggaaatggaggcagccagcatgatagtaagtggggtggtggtggtggcggtggcggtggtgggccattgaattttagacctggctataaggaatatttcaaaggaaaattaacttaccaatttcaatatgataggaataaaaaggactcaaaaccaaaaggataaaaataattacccagaatatttgttttatacatatcaaaaagattaagtgaaatttcatgtaccaaatcctgaagtcaaacagactcataagtcaaatgacaacctctggatttttctcatttcctttctatgtagacattaaggaagtaaaacaaaataagagtggtgattacctaataaatcagagacagtctatttagcaaaattatttcaatcataaaagactatatcccaaatttcattaactaaattgtatatttttatgaaagcctgtttagctatacatgccaacttagaggacatattgtgaaaactagcaaatctctccttataaaaatcagccccctgagaccaatgaagcatgatgtatatatcctaagagggtacatcattttagattcaagaaactgtaatataatgtaagcctcaataagaacattatcacagaaaatcttaaaacttttggtgagtcatgcttgttttttgaaaatgactgcctaggctaggcgcctgtaatcctagcactttggaaggccaaggtggggagatcacttgaggtcaggagttcaagaccagcctggccaacatggtgaaaccccatctctactaaaaatacaaaataagccgggtgtggtggcgggtgcctgtaatctcagctacttgggaggctgaagcaggagaatcacttgaacccaggaggtggaagttgcagtgagctgaaatggtgccactgcactccagcctgagcgacagagcaagactccatctcgaaaaaaaaaaaaaattgcctaaataccattccctccatggaagaaatcaccgctttacacaaaagaactagaaagggacaagccttaaggttccatgacataatctaacctataataaaaatctttttagagttgatttctgttacttataaccaaaaggaccataaatgaaaacaatatttacatttgaactctacaaaacaatctgagagcgcctcaggattttatctatattagatgtaaataatgtgttcttattttacatatcttatacaggtgacatgggaaacaacagcatatcatccagctaatgataaattattattacacttttttttgttttgttttgtttttttgtttgagatggagtctcattctgtcgcccaggttggagtgcagtggcacgatcttgactcactgcaagctctgcctccggggttcacaccatcctcctgcctcagcctcccgagtagctgggactacaggtgcccgccatcacgcccggcaaatttttttgtattttcagtagagatggggtttcaccgtgttagccaggatggtctcgatctcctgaccttgtgatccgcccaccttggcctcccaaagtgctgggattacaggcgtgagctaccgcgtccggcgcattattatactttctaacttaagtaagtgtgctaattattagtctaatacctaatactccacaaaagttaactggataaatctttcatataaagtattttgttgcatccactgcagtgtctaacatttttttaaaaaattaactattttgcatcattatcttatttccttttcaaaaaattcttgtgtatttaagctacaaaagtttcatgggagagctacaaattagttaacagagaggttaaatgtcccgacattaactattttctggaaaactttcatagaaggtttacctttcctggtcccagtcttggccctggcatggggggtggtggagggagaaaagagttccatggagcagatttgggcttgatgttatctgatttatttccaggagacctggagttctcactttcatctgttgaaacttggctttcattttcattctttaaaaagaaaaaatatgcaggtttttgttataagggtgtgattaagaaaaaattaatgcctcggtggatcaaactgacaactgtgtatactgtttaacagtttctcatctagtctctgcttccagaaattgaatttttttttttttgtatccttacctcttgagcattttgttctatattattagctacttcacagattggggaaagtagatcggacagattttgctcctctctatttccatatccagtgtaaaccacaacacaggtttctctcttaaaatcaattgaagcaatggtagctgggtaaatgcaaccgtcttctgaccaaatggcagaacatttgtccccaactttccactacaaaagaaatcaaagatatatacatgcacacatttcttttgaagagggcaaactatcatctcgttttgatcagtggggaggtgaaggatagagggtagagatttggaaggcaaaatgatgtaatgagaaaggcttggggtctaaatacataaatctgaattccaactctcttacatttataatcatggacaagtttctgaatctctttgagtcttagtttccccatcttattagatggctataatataaactacctcccatatttgttgtgaatagcgggagggagataaaatgcgtatggtgcccagcactctggactggcctagagcaagtgctcatcaactgttagctctcttcccccttggtaatgatgaaactaaagttggctcaaaagacaccaaaatattcagctttcaggactactgcttttaactagcagaaataatctacctagacttctgggttccttggaattaacagttttagagtttttaaagaaaaaggggaaaaaaaaatctatctctcagcttaagatgtaaaacactgccaattcagcttacggctcttgggtactccttccaaacggcaccttctccctgccttccattcacaaatggaacacatgtcctgattttagcatttatcattcccatctaattctttatactttcatgactaatatgcatgttcctaaataacagaaaatttaatagttgtttttgaagttgtataagtatatgtcaatagaaacactgtactaatcacttaagttaaagacattttacactattaaataaggactaatgagacatcctttgaagttaaatctcaacattttaaaataacctgttgtaaggaagctgcagtattcttcttttggcttttattcttcttagcaggttttcttttaggtgtggtttttggtttacccgaagtttcacaaatgtcaccattctttagagcatgctacgaaaataggaataaaaatgtacatgttacagggtggtgcacagaataaaagtcacgacataacccagttactactataagctagtctcaaggctccgtcacctcagaaagcacctattttctcttttgaccaccccctgcactataaaaactgctcttaaaggcatcatacacctgacatcagctctaaagacccttttaatcaaatctccttgctctcaacctctctgtaacattagaccctgttaattatctttcttcctgatattcatggccctttggatgtcatagcaatgtagggccccaacggtttcattacttctgatcaagccttagatttaggcattcccaataagagctggccatccttctttacttgcttacggccattattttatttattttatttttttacacagagtctcactctgtcaccgggctggagtgcagtcacactgatctcagctcactgcaacctccacctcccaggttcaagcgattctcctgtctcagcctcccgagtagctgggattacaggcgtgcaccactgtgcacagctaatttttgtatttttaataaagacggggtttcaccatgtgggccaggctggtcttgaactcctgacctcgtgatttgctcgcctcagcctcccaaagtactgggattacaggcgtgagccaccgcgcccggccaaggccatctattcttattactttagttgcaactgtctgcaaacacacttctgaagctattaatccagctgtgacttttctcaatctaacatttccaatgatcaatttcacatcttaattcatacctcaaactcaacctcaacttaattcatattcaacctcaacttaattcaaattcaatctcaacttaattcatactcaaactcactactaaaactatcgttttcccaaatcagttcttttcctcctttactcagattacttctccctgcaatatcaccaacccatcccacatcgagccccatttcaatctctattttatagaattctcttggtaattctttagtcgacttctagtttcagtgtatactggaaagcacatttaaaaatctaggccgggtgcagtggttcatgcttgtaatcccagcactttggaaggtcaaggcggagggatcttttgagctcaggagttccaggccagcgtgggcaacagggtgagactgcatctctacaaagaatacaaaaatgagctgggtgtggtggcacacacctgtggtcccaactactcaggaagctgaggtaggaggattgtttgagctcatgagttgaaggctccaatgaggcatgatcacgccactacactccagcctgggtgacagggcaagaccccatctcaaaaaaaaaaaaaaatctagaaatcagttacaaaggtgacatagaggtctgatctttagctcatgttacaagagtaactatgagaaagacatgaaatctgtatgcttggtgctctttatacactgtatgagtatatgctctgtttgctcaaggtagtctggactattgtttgctcaaggtagtctggactattgatgacccatatttagtgctcagtaagactaaacatctcagagaatggagaaggtgatgatgttggccaactgtgtaagtgtcctgtttgagacacagaaccatactacatttcctaaaagaactgtatattcctacccaataggaacacttgaattgatacccaacttacaggatttgggatgattagagtaatttaatatatgaaacgcacacagagcactgtcagcatgctacaaatattaattgctgtactaatgctatttatcttcatcattattttactacatgcttgttaaatgtttaaaattataattcagattgtctttttcttattaatctcaattagaggacttccatagtttgatacaatgtaaaaatactaaaaggaatacattgtttgttcgttttctgagatggagtctcactctatcgcccaggctggagtgcagtggtgcaatcattgcaacctctgccccccaggttcaagcaattctcctgcctcagtgtcccaagcagctgggattacaggcacgtgccaccatgcttggctaatttttgtatttttagtaaagacggggtttcaccatgttggccaggctggtctcaaactcctgacctcaggtgatccacccgcctcagcctctcaaagtgctgggattacaggagtgagccaccatacccagccaggaataaatgttttaaattttatttaaattgcctccacaaaggatgacatatataggctatcaacttctaaaggaggatatcacctgatttaactaactcatactaccatctaatcttcaaaatgaaaactgaataacatgtactttaacactttatcgtatgttatcaattcctttccaaatgaataacgagaaaataagaaaacgactaagcaagcatttcataccttaaatgaagccacagctttatcatatgcttttatcagtgctgtatcatcccaaatgtcagaatcatcgctctggaaagggtaagaaataaaaacaactcatgttcagataggtttaatcagaaaatgtatgttagtaccaagagtcatcttaatccacacataacaaaattacactgaaaatgagtatttaaaatcctaaataaagccacaggaaacttacctggttagaggttatgtgactttactccaaaagctagacataggtaaatgttctaagaatgaatgccatcaagtgaatgcccctacaatttaattcctatccacataccatgagtagatttgttcaaggccagctatatttatttcaattaagatcagataaaacttgacttcatctagactacgggaatgctgttctgacctcagaacctatgatccaaagaatattttttcttttgaaattataatgtttccagattataaggatacaaattgttaatagtgactaaccaattttcattttattattattattatttttttacttccatttccctttcctgctttcctggtaccaattttctttccttccttttcttttcctttctttcgtttctttcttctctccctccctccttcctttcttccttccttcacttctctttctctcttctttttttctcccctcaaattcctgtgttcaaatgaccctcccacctcagcccactgagtagttgggaatataggtgcatgccaccatgcctggctagtttttaaaattttttgtagggacggggtctcgccatcttagccaagctggtcttgaactcctaggctcaagtgatcctccagcctcgctcggcctcccaagtgtgggaattacaggcatgagccactgcacctggaaatatttttgtccagacatggtggctcatgcctgtaatcccagctacttgggaagctgaggcaggagaattacatgagcccagttgttggaggctgcagtaagctatgatcatcccattgccctctagcctgggtgacagaggaagaccctgtctaacaacaacaacaacaataacaaaataataataataataaataattttttagcactatctgctagcactgtgcaagtcactgagagatatatagaaacatggtactctccagttattatctaactagggatttaagactatcacacaagacaaaacaaaaaacaatataaaacaaatcttaacaaacatcaaaatgtgaaatacaaacagtattttaattaaaaaggaaagaaattaatgtctactgcaagatcatatggaggaaaccggcctaagaaataaaaaccactcacgcctgtaatcccagcactttgggtggccgaggtgggtggatcacgaggtcaggagttcgagaccagcctggccaacatggtgaaaccctgtctctactaaaaatacaaaaattagccggacatagtagcacatgcctgtaatcccagctacttgggaggctgaggcaggagaatcacttgaacctgggaggcagaggtggcagtgagccaagatcgcgccactgcactacagcctgagagacatagcgagactctgtctcaaaaaacaaacaaaacaaaacaaaacaaaataaaacaaaacaaaacaacaggatttaggccgggcatggtggcttgtaatcccagcattttgggaggccaaggcaggtgaattgcttgagtccaggacttccagaccagcctaggcaacagggtaagaaccttgtgtctactaaaaatacaaaaattctggccgggcgtggtggctcatgcctgtaattccagcactttgggaggcagaagcaggcagatcacgaggtcaggagttcgagaccagcatggccaacaaggtgaaaccccatctctactaaaactacaaaacttagctggcgtggtggcagtcacctgtaatcccagctgcttgggaggctgaggcaggagaatcacttgaacccgggcggcagagattgcagtgagctgagattgtgccactgcactccagcctgggtgacagagtgagactctgtctcaaaaacaaacaaacaaaaaaaccaaatttagctgggcatggtggcacatgcctatagtcccagctacctgcaggggctgaggcgagaggatcacctgggcccaggaagttgaggatgcagtgagtggagatggcgccgctgcactccagcctgggtaacaaattgagaccttgtctgggaaaaaaaaacaaaaaaaaacaaaaaaaacccccaaaaaaaaaaaaaacccaacaggatgtgcataggtagacaaaatagaacgcattccaagtaagagcatgaacaacaacaaaaaaggcatggaagcaaaaataacactaactataagaatttatttatgtaaggtaactaagtagtcaaatttatagaattagaaagaatgggccaggcgcagtggctcacgcctgtaatcccagcactttgggaggccgaggtgggcagatcacctgaggtcaggagttcgagaccagcctcaacatggagaaaccccttctctactaaaaatacaaaattagccgggcgtggtggtgcatgactgtaatcccagctactcgggaggctgaggtagaattgcttgaacctgggaggcggaggttgtggtgagtcgagattgcaccattgcactccagcctgggcaacaagagtaaaactccatctcaaaaaaaaaaaaaaaagaatgatgattaccaagggctaagtgtaaggagaaatgggaatttgctaatgggtagagtttcaggttgcaagacgaaaaacttccgaagatctattgcgcaacaacatgaacatacttaatattactgaactatatacttaaaaatggttaaaatgacaaatttttttacttcaataaaaaataaaacacactgtatgagggattagtgagacaagtccaaatagaatccaatttatactatagggtagagttggatttggtatactagagagtattttggatttggtatagtattagtcaatgaattccaaaaaagtttgttataaaattcactgagttgtaatattactttttgtcattttcctgttttttttttgttttgttttgttttctcttgagacaagagtctcgctatgccacccaggctggagtgcagtggcatgatctcggctcactgcaacctctgccgcccaggttcaagtgattctcctgcctcagtctctcaaatagctgggattataggcgcccaccatcaagctgggctaatttttgtatttttagtagacatgggctttcatcatcttggcaaaactggtctcgaactcctgacctcaagtgatcctcccacctcagcctcccaaagtgctgggattacaggcatgagccaccgcacccaggcttgtcattttcctgttaatctccgttatatagagacaaatgtattccaatataaaatgtcaatcttgctgtatgataaaaagtacttaataatcccagcctgggcaacatggcaaaaccccatctctacaaaaagtacaaaaattagctgggcgtggtggttcacatctgtagtcccagctacccagaaggctaaggtgggagggccgcttgaaccagggaagaggagattgcagtgagtggagatcagagatcgtgccactgcactccagccagggtgacagtgagaccctgtctcaaaaaaaaaaagtacttaagatcattaagtcactttgcagataagaaaagtaatcacaaagaggttaactgacttaaggttacattcgcacttggaagggaagatattccttggagatttggtaaaaggaataaaaacaggctgggtccagtggctcacacctataatctctgtctcgaaagaaaaaaaggggggtaggggggaggctgggcacggcagctcattcctgtaatcccagcactttgggatgcagaggtgggtggggtgggtggatcacttgacatcaggagtttgagaccagcctgccaatgtggcaaaaccccgtctctattaaaaatacaaaacttagccgggcatggtggtgcacacctgtagtcccagatacttgggaggctgaggcaggagaattgctggaacccgggaggcagaggttgcaatgagccaagatcactgcactccagcctgagtgacagagtgagactccatctcaaaaaaaaaggaagcaaacagtagaaaatgaagggtggtcctgaagaaataaagaaatcacaaaatcaaggccagtgatatcaatagaagagtgcagtcttaaagcaagatacatagacagatggcagctcaaactcctcatatctcaactgttattgccagaccaggaaacaagtaatttcaaaacgaacagaaaacaaagcgacagaagaaaaggtaatactgattacaaggtacccaaggacaaatacatctgactgaaaatctaaggagcaccaaagcaaagccatgaaaaagaaccaaaggaacaaaaataaataagaagcaaaatggttgatacattggcaaacagtatttatttaacgtatgtataaatggggtccctgaagaataaaaacaaaacaaaacaaacaatcttcctggtggtctagtgattaggaatttaaaaaaaagaaaaattcctagggatgggaggaagaaccccctcccatcctcagagagcctctaagcaaaaagactaagttacaaaataaagaaaatcagttatcattagactttctcatagaaatttatggggaaaaagtatgagccaagaattttatatgcagcctagctgtccttgaagtagcaagactaagaaaagtctaaaatgtagaagaataccgtactcactagcctttccagggtaatctattgaaaatacgcttcatccaaccaagatatgaccagggaaacttgggttttaaaaataacagaactggccaggcatggtggttcacgcctgtaatcccaacactttgggaggccgaggtgggtggatcacctgaggtcaggagttcaagaccagcctgatcaacatggtgaaaccccgtctctactaaaaatacaaaattagccgggcgtggtggcgcatgcctgtaatcccagctactcgggaggctgaggcagaagaattgcttgaacctgggaggtggaggttgtggtgagccaagatcgcgccactgcactccagcctgggcaacaagagcgaaactcttgtctcaaaaaaaaaaaacgaaaaacataaaacagaattgttagcatcaaatatatttaattgtggatctaagaggaaagtagtgtattaaattgaaaagctgattctaaaatttatatggaactactaaggacaaaaataaaccaaagctggacaatttacattatctaactttaagactgtaaaccagaagtagctaagacaggtttcaatcaatttagaaagtttattttgccaaagttaaagacgctcctatgacacagccacaggaggtcctgatgacatgtccccaaggtggtggggtacagctttgttttatacattttagggagacatgaggcatcaatcaatatatgtaagatgtacatgagttctgtcaggaaaggcaggacaactcaaagtgggggtagggaggtttctaggtcataggaagatttaaagattttctaattggcaactagttgaaagagttattatcaacagaaaggaatgtttgggttaccataaggggttgtggagaccaaggttttatcatgcagatgaagctcccaggtagcaggcttcagagagggtaggttgtaaatgtttcttttcagactttaagagtctgttctatcagtaattccaaaaggtagtagggtgtgatgagacatgtccaactcccccttcccatcatggcttgaactagtttttcaggttaattttggaatgcccttggctgagaggatgggtccattcagttggttgtgcaggggcggggggggcctataattttatttttggtttacaagacataccctgaagcaatagtaattaaaagtgtagtactgacatcaatatacactaatagacaatgtaacagaattgagagtcagaaatagccctgtgatatatgtgactgattttaactaaagttacaaatgtggtttaatagagaaagcatagtagtttcaagaaatggtggtaaaactattggaaatccttatgcaaaaacaaaccaaatttccacctacactgagccacatataagaattaatacaaaatggattacagacctaagtgtaaaactaaaactctaaactgtgtaaaaaaaaaaaagagagaaaaatctgtgatcatggattgcctataacaaaagaacaaactgaaatggccttgttgcctggggtggcacccgaggttcttggtctcacgctgaggaaatcaaggacgctgacacaccaagggtgtgaggctagagcagaagtttaataggcaaaagaaagagactagctctctcctgcagagagaggtcctgaaaagagttcccattccacagtgaaatgcaagcatttttataaatgagctaatgggaagggggtagcttatctacacatagggagcaaaaaaccagttaggaccaggtgttgccatctgcacagagcgtgaatctctggcatcccccaccccaaccttttattatgcaggcaggtccttggcctgagctactccacattgcttatctctttcctattgtgcatgtgctaaataaggggaggtggagccaccatggtggacatgcctggccccaggtacccctttctctccgtgcagctgcaggcaaccccaacaactcacaacatgcaagcttccagcttccttatctgagtatgtactaaggtccactgtgtttacttcacatactgtgtttacttcacatacccaccttacgtatgtgaagcttgctgattacccaggaagctccccctctgtgccagagctgcttccttatacatgtttacagcccgatcttccaggctgctccttgttagaagagaagtgatttcttgggctgctttttgttagaagggaagttctaccgaggactctgtctaactatcggcttacctagtctttttttacctcctctctcaaaaccatcaaagaaaaaactgaaaaattagatttcagcaaaattaagattttctgttcttaaaaagacgttgttaacaaaatgaaaaaccaaagtgtaaaccgggagaaaatacatgcaagttacctatctgataaagatattgtacccagcaaacatgaagaactctcaaacctcaacaacaaaaaaattcaattaaaagatgggtaagttggccgggtgcagtggctcatacttgcaatcccaatctttgggaggctgaggcaggaagattgcttgagcccaggagttcacgacaagcccaggcaacataatgagaccttgtttctacaaaattttaaaaaattagccaggcattgtggcgtgtgctcgtaatttcagctactcagaaggctgagacaagaagactgagcgcaggaggtggaggctgcagtaggctgtgtgattgcaccactgcacaacagcctgggtgacagagtgagacactgtctccaaaaaaaaaaaacaaaaaaaaaaaaaacccaaatgatttgaatagacacttcaccaaaaaagatatacggatggcaaatacactcatgaaatgatcaacagcagcactggtcattaggaaatgctaattaaaatcacaagaagccactatatctattataatgcctaaaattaaaaagactgaccataccaggtgtttgcagggacactgagcaaatggaactttcatacattgctggtcaaaatgcaaaatgggggagctgttctgaacctatttagttgtgggggctgtccaacttttgaatttttctttgctcaattaatctctgttatattaaaaagtaacatggtacaaccaccactttgaggaagagtttgacagctccttaaagacttaaaatacatctaccctgagacctaagtattcactcaagaaaaatgaaagcgtatgtctatacaaagtcttctttaaaattttttatagaaaatttttaatttttgattttaaaataaaaatagaggtttcaccatgtttcccaggctggtctcaaactcctgggctcaagcgatctgccagccttggctatatgaagtcttatacactaatattcatagtggctctacttgttaacagtcccaaactggaaaaagcccaaatgttcacaagcaagcgaatgaatacagtatagtatatacatgcaatgggatactactcagcaataaaatggatgaaaatcaaaatagctatgataaataaaagaaacgtgacaaaaaaggtactctatcattccacgtttataaaaattcttaaaaatgcaggctaatctatggtgacagaaagtagatcagtggttgtctggggacaggacaaggagggatgaaaaggatcacaaaacagcaatccaactgaggccaccatgctataaggaaatccaaaccagcccacacattgaaaccacataaagaaatcttcatgagactacatgaaaaaaagagatagcctgccaatccctagctgctcagtccccagctactgtagctctagcaactatgtaggtgcaaccacgagacagccgcacgaaaactgcccagcacggctctcacaaattcctaacccacagaaacaatgagagataataaaatgttctttgttgtttcaagccactaagttttggcagattcgttacacagcaacggcagccagaacggaccaccaggactgcctttatatctgattctcagtcatttccagtagctcagatttctcaaattattcccaacaccctgccatcttctaccttctcctaccacttcctgaaacttccactgtgctcccttgagtaattcataaaatccactcttttaacctctgaatcatcccttcatttcttgctctaagtaaaatctagctccctgaggatgccttttcctttcgcagccatctcaaatgatagatgtttcctcttttctcctccacacacttcatatcactgtacctactggagatgtggggaagaaatcttccctgctctggctggcgcggtggctcacgcctgtaatcccaagcgctttgggaggccggggtgggcggatcacaaagtcaggagattgagaccatcctggctaacacggtgaaaccccgtctctactaaaaatacaaaaaaacaattagctgggcgtggtggcgggcgcctgtagtcccagctactcgggaggctgaaggaggagaatggcgtgaacacgggaggcggagcttgcagtgagcggagatctcgccactgcactccagcctgggcgactgagccagactccgactcaaaaaaaaaaaaaaaaaagaaaaaagaaatcttccctgctccttacttgcactttcagattattctcctccattcccctctcaaaattcccagccttgaaaatcctgacaaaaagtagccaggcatggtggtcagcacctgtagttccagctacttgagaggctgaagtgggagaatcccttgagcttgggaggaggttgtagtgagccgtgatcgcgccactgcactcccacctgggcaacaaaaagaggccctgtctcggggggggggaaaaaaagaaagaaggaaaatcttgtcaccagactcacagtctattatcgtttcctattgcagtcacctacagcctaccgagtcactcttcctcattccttaatgtttacatcgcagttctctctccaacactactcctgtcataatttttggtgatttaaatatccatgtagatgatcccttcaattaccctatatttgcaggtctctaaactcctctccaccacaatcttgtacatcctctgatgtggtgcagctctgtgttcctacccaaatctcatgctgaattgtgatccccagtgttggaggtgggcatggtaggaggcgactggatcatgggggtgatttctaatgatttagcaccatccccaagtgctgtttcctgataagcgttctcacaagatctggttgttttaaagtatgtagcacttcccccttctctctctctcctgctggccatgtgaagactgtgcttgtttccccttcaccttccaccatgactgtaagtttccttaggcctccacaagagaagcctgtacaggcagcagaactgtgagctgattaaacctcttatctttataaatacctggtctcaggtatgtctttgtagcagtgtaagaatgaactgatacatccccaaatctcagctactcactcacttcaactgtatttatttattataaccaataaccacaacctctccataaatgcagtttcaagaatcccactctcttaaccatcaccttctaggctctgcaacttactcctactagtgatttgatggggacaatcattccacttcattaggactggcagtacattgatcctcccactttttttttttttttttttttttttgaggcagagtctcattttgtcgcccaggatggagtacagtggcacgatctcgggtcactgcaaactccacatcccgggttcaagtgattttcctgcctcagcctccctagtagctgagactacaggcacctgccaccatgcccagctaattttttttttccaagaggagtcctgctctgtcgcccaggctggagtgcagtggcgcaatctcggctcactgcaaacctcgcctcccgtgttcaactgattctcctgcctcagcctcccaagtagctgggattataggcacgcgccaccacgcccggctaatttttgtattctttttttttttttttttttaaagacaaagttttgctcttgttgcccaggctggagtgcaatggagtgatctcagctgtctgcaacctctgcctcccaggttcaagcaatttttctgcctcagcctcccgagtagctgggattatagacacgtgacaccatgcccggctaatttttgtatttttagtagagacaaggtttcaccatattggccaggctggtctcgaactcctgaccttgtgatctgcccaactcggcctcccaaagtgctgggattacaggtgtcagccacagcgcccggccgatcctcccactttttaaactgtctctcagggtcttaaaatcctcacttcctttcttttttttttttttttgaggtgaagtctcactatatcgtccaggctggagtacagtggcgtgatctcggctcactgcaacctccacctcctgggtccaagggatactcctgccacagcctcttgagtagctgggattacaggcacctgccaccattcccggctaatttttctgtatttttattagagatggggtttcgccatatcggccaggttggtctcaaactcctgacctcaggtaatccacccacctcagtctcccaaagtgctgggattacaggcgtgagccaccgcgcccggcctctcacttcctttcttagccagcttaaattccatggtcaatcattaagagaactcctttgtacttctccccctcacttcttcatatccacgtggtaaaatcacaactgcattaatttcaactctccatttactctgtgggtgccctcatacacaatcttgctgtctggtctccttcaactcatgaccacgaatctcaagtaggctctttatgttgcctagcaatatttccactaaacttccctagtccaacccttgcccactcttctaaagaactatctacttcccatcttctctttcctctcccatcccagcttctagctgataaccttgcttctttcactaagagaacagtaagaatcaagagaactttcaaaatctcctgccatcctatctgcccattcacgtatcatagatgtgttaactatatagctgtcaccaaaagaaccgctaatgtttccaacaaaggccaaatccatcccttcttacctactctaggacattgctctagccattgtcttctttccgacatcaactttcccattctcatctttcctatcaacccacaaacatgctgaaacatgttgctcctatcttagtgcagtggctcacactagtaatcccagtactttgggaggcagaggtgggaggatagcttgaggccaggagtccaaggctgtagtgattcatgattgcgccactggcaccccagcagcctgggcaacagagcaagacccccctcttttaaaaccacacacacataattaaaattcctcttaactcacttccccctccatttattgcccaatttctctaccctccatttataataaaatttcgtggtggctcactcctttaggcccagcgactccaaaggagggtcgcttgaggccaagagatcaacgctgccatgggctaggatcatgccactgtactccagcctgggccacagagagcgaacttgtctctaaaaaaattttttttaaatagaattccttgaaatatgcctaccgatgtttttattatttatttatttatttatttatttatttgagacggagtcttgctctatcgcccaggctggagtgcagtggcgcgatctcggctcactgcaagctccgcctcccggcttcatgacattctcctgcctcagcctcccgagtagctgggactacaggcgcccgtcaccacgcccggctaattttttgtatttgtagtagagacggggtttcaccgtgttagccaggatggtctcgatctcctgaccttgtgatccggccgcctcggcctcccaaagtgctgggattacaggcttgagccaccgcgcccggccgtttattttgttttaagacagggtctggctctgtcgcccaggctggagtgcagaggcgcaatcacagatcactgcagcctccacctccctgagccttccaaggcctgaaccttccaggtagctgagaccacagacgcgcaccacaacacccgtctaatttttgcagactcggagtcacactatgttgcccaggctggtcaaatgttgccttggatttctcttctcctactctccaactcactccagccaaattcacccctaccatgctatgcccaagactgaactcctgagaaacctgctctactggcaatcttctctttcccacctcagcaaaaggcaactttatcttttcaactattcaggataacctccgttatcgaatctatctgaaaaacctgttgcctccgatttcaaaatatacccagaatccaaatactttcactctgttaataacatcttgttctgaagttcagatcatcttaacagactcctaagtggttcccctgcttcaccctggcctaatgcccccacctcccccacaccagccagagaggagtgaacaaaataagctactgccaagtcgcggcagggcctccactcaacgctatcaaggagcccaaactgctcgaggaaggagcttgcggatgtggttcgcagggaacggagtgggaaaagacgtagaaaaacgcggaccacaactccagtgagcggatcgacttgatgctgtcccgaggctgcggaaggagagttgggccggaagaagggtgctgagagcgctaatagggagactgcactggctgcgacctcacctggcctgtgccgcgccggaacagcacggaatcctcctgctccgggacgccgccaccactgccgccgctgctcatcgccatagcaaacccgcgggtgcgcagcgtggggccccgtcccttcttaagagtgacgacttccgccgcccggggcttctgggagcggaacagtacggtggccgggaggaccgcttgtagtaacttctcacgctttctacgagtggttatcgccctcccacatttgtggcgtgtatatttttcatttctctcaatcctttcatttcactgtgttatatttcctttccttttttttttgtttgtttgttttgagacagagcctcgccctgtcgctcaggctggagtgcagcggcgcgatctcggctcactgcagcctcgacttcttgggctcaagcgatcctcccacctcagcctccccagtagctaggactataggcgtgcgccaccacgctcagctattttttgtatttagtagagacggggtttcggcatgttgcttaggcctcgtctcgaactccagtgtgtgtgtgtgtgtgtgtgtgtgtgtgtgtgtgtgtgtagatatttattccccctcccccttggaaaagtaaatgtaagctcctactaggaatttaaaacctgcttgatctatataaagacaaacaaggaaagacaaacatgggggcaggaaggaaggcggcagatccttaaacactagaagatatttgatcccccaaccttatttgttgtttgttttgagacggagtctcgctctgtcgtcagagtgcagtggcaccatctcggctcattgcagcctcgacctcccgagctcaagcgatcctcccgcctcaacctcccaagtagctaggaccacaggggcacgccaccacacccggctagtttctgtatgttttgtagaggcggcgtttggagcatattgtgtaggctggtctcgaactcctgagctcaagatattccgcccgcctctggcatcccaaaatgctgggattacaggtgtgagccacctcgcccagcctccagtattcttttttttttttgcgacagagtattgctctgtcacccaggctggaatgcagtggcgtgatctcagctcactgcaacctctgcctcccaggttcaagcaattctcctgcctcagccccccgagtagctgggattacaggcgcccaccaccacacccggctaatttttgtatttttagtaaagatggggtttcaccatgttggccaggctggtcttgaactcctgacctcgtaatccgaccgcctcggcctcccaaagtgctgggattacaggtgtgagccaccacaccgggcctccagtattctttattaagcatctagggttgctaaatggcttatatgtacatagtatatatatatttttaactccacgaaaggaactttgagctcttcccccaaaatacccttggcttctatatagtatacaagaaatatctgtggaggaaggggagaatgggatgatgttgaccaagtgtacaaaaatggtaactccgtagaggtaatatgtggaatgtaatcatttcacaatgtatatctaaacatcaaatggtacaccttaaatatatacaatttttaggggtctggtacggtggctcatgcctataatcccagcactttgggaggccaaggtgggtggatcacttgaggtcaggagttcaagaccagcctggccaacatggtgaaaccctgtttctcctaaaaatacaaaaatcagccgggtgtggtggtgcaggcctgtaatgacagctgcttgggaggctgaggcaggagaatctcttgaactcgggaggcggaggttgcagtgagccaagatcacgccactgcactccagcctgagtgacagagtgcgactccatctcaaacaaataaatatgtacaatttttatgtgtcaaaaaagttaaattgtcacaagataaaaaaaaaaattttaaatctcatgtcaggaaagtaatgtgccaaaggtacatctcacagataaacatgaaaacctgcactccagcctgggcgacagagtgaggctgtgtctcagaaaaaaaaaaaaaagtaaaaaaaaaagtatgtttttataaagcttgcttagatttttctgaatcataaaaattctcacaattgcatttgatgtcaaaatttaaacaaattacgtggacatattacatgatggttaaaaaaataaatttaaacaaaatatagaaccaggtttctttttgttttttaatttttttctttttgagacggagtctcgctctgccacccagactggagtgcagtggctcactgcaacctctgcctcccgggttcaagtgattctcctgtctcagcttcccgagtacctgggattacaggcgtgtgccaccacgcccagctaatttttgtatttttagtagagacggggttttgccatgttggtcaggttggtctcaaactcctgaccttgtgatccgcccgcctcagcctcccaaagtgctgcgattacaggcatgagccaccgcacccagccatttctttttgtttttattatttagagatataattgatatactatagaattaatcattttagagagtacaattgaatggtagattgagcggaaaccttaatatattcacaaggttgtgcaaccatcaccactatctaactccagaacattttaatcacccaccaaagaaactctgtttcctttaacagtgcgctgccatgctcagctattttttgggagagaaggggtctccccatgttgtccacgctggtctcaaactcggttgcttaagcagtcctcccacttgagccgctgtgcccaggcctgagttactatatttataaaagttatttcatatgatagacaaatcattcaaaacataatgaggtaaactgccaaaagaaaccattttaccatatttgaaggcatttaatgtaaatgttgaatttaatttcatgtactggaatcagtctttttgcatatgtaattttcataccaaaaatctgtcttcagttgactcctggaactctctcatgataaaataaaagtttcaaataatgtcggggtggtggctaacacctgtaatcccagcactgtgggagtccgaggcaggtggatcacatgaggtcaggagtttgagaccagcctagccaacatggcaacactaaagatatgaaagtcagccaggcatggtggtgcatgcctgtaatctcagctactagggaggctgaggcacaaaaatcacttgaaactgggaggtggaggttgcaatgagctgagatcgtgccactgcacaccagcctgtgagacagagcaagactctgtctcaaaaaaaaaaaaaaaaaaaaaaaaaaaagggccaagtatggtggctcatgcctgtaatcctagcactttgggaggctgagtgggagaggatcatttgagcccaagtaacatggtcaggccccatctctacaaaaataaattagctgggcatggtggtatgggcttgtggtaccagctactcaggaggctgagacaggaggagtacttgagccaaggaggtcaaaggctgcagtaagccatgtttttgccaccgtgctccagcctgggcaacagagcaatatgctgtttcaaaaacaaactaaaaaaatggtagtacctacatgtgaagattgcatataataaagattgtaaagcagagagaaaaactggacagttcaccaaaaagaaaatccaaatgtccactagagatctgagaagatgcccaacctctagagccaaggaattgcaaattaataactaagataacatttcagggcctggcacggtggctcatgccagtaatcccagcactttgggaggctgaggcaggcggatcacttgaggtcaggatttgagatcaccctggccaacatggtgaaatcctgtctctactaaaaatacaaaaattagctgagcatggttgcggcgcctataatcctagctactttgaagactgaggcaggagaatcgcttgaacctaggaagcggaggttgcagtgagctgagatcgtgccagtgcactccagtctgagtgacagggtgagacttcatctcaaaaaaaaaacaaaaaaacaaaaaatttcaggaatatacctgcctttggtaaaaacaaaaagaaattgtgaaccaggcgtggtgactcatgcctgtaatcctagcactttgggaggctgaggcaggaggatcctttgagcccaggggtacaagaccagcctgggcaacatagggagaccttgtctcaaaaaaaaaaaaataaataaataaaataaaaaataaaaaaatcgtgaatagtgttgcgatgaataaaaaagaaaaaaaattaaaaagaaagaaaacccagaaaaactaacataccattttcctctcagtttggcaaaactattaggaattaataacatttgatgttagcaaagtatggggaaatgaacttttatcctcttattgaaaatatctgtttgtagccaggcatgatgacttatgcctgtaatcccagcaatttgggaggccaaggtgggaagatcccttgaggccagaagtttgagaccagcctgagtaataaagtaagaccccatgtcattaaaaaaaaaaaaaaaaaaaaaaaaaagaaggaaagactgccgggcgcagtggctcacgcctgtaatcccagcactttcagaggctgaggtgagcagaacacttgatgtcaggagttcaagaccagcctggccaacatggtgaaaccccaccccatctctactaaaaatacaaaaattagctgggcgtggtggcgggcgcctgtaatcccagctattcaggaggctgaggctggagaatcacttgaccctggaggcggaggttgcagtgagccgagatcacaccactacactccagcttggacaacagagtgagactccgtctcaaaaacaacaacaacaaaacccaaaacatctgtttaaagtttaagacatgtatacctgtgaaagttgattacataaattgggtcattcttgaaatactcaactaaatcagagttgaagggccagggggaagaagcattcggggcacacagcatctgcttcaagaattaaattttccacaagtccaactgctgaaccagccttctgtatccctaagaccagttttacctaatagctgctaaaatgaactgccatgactctaagactggttttacctaccaccatcgctcaccaatcagagcttgctagctcccacaagctctagtgtgaatgagctttcttccaaaacagtatgtaatactgttctttctcataaaacccggaaccttctctttttttttttttgagatggaattttgctcttgttgcccaggctggagtgcaatggcgcgatctcggctcactgcaaccttcacctcccgggttcaagcatttctcctgtgtcagcctcctgagtagctgggattcaggcatgcgccactatgcccaactaattttgtatttttagtagagacggagtttctccatgttggtcaggctggtctcaaactcctgacctcaggtgatctgcccgcctcggcctcccaaagtgctgggattacaggcatgagctatcacacctggccgcaaccttccctttattctcctgatcataccaatgatcagcctggtctgtgtgtatgccatgaattgcagctcttgcttaccaaataaaatgtttttagagatttgtctctatattatatttggctttgacataactattcccaaggaattctatctttaaaaatccattcttatagaaatgaaagcaccaataaatgggaataagtacgataatccacatcgcagaattgtttgtagtggcaaaagttgcaacatcctaattgtctatgagtaaggaaatgattgaataaattactgtacatctatactaaagttaaatttgtaagtactgaagtacaggcacggctattttttttttctttttgtggaaacagggtctcactctgtcacccaggctggagtgcagtggcaccatcttgggtcactgcaacctctgcctcctgagttcaagtgatcctcacacctcagcctcccaagtagctgggactacaggcacgtgccaccacacctggctaattttggtttttggcttctttcttaattggtatgtttacttaaaaatatagactaatgggctgggcatggtgacttacacctataatcccagcactttgggaggccaaggcgggtggatcatgaggtcaggagatcgagaccatcctggctaaaacagtgaaaccccatctctactaaaagtacaaaaaattagccgggtgtggtggtgggcacctgtagtcccagctactcgggaggctgaggcaggagaatggcgtgaacctgggaagcagagcttgcagtgagccgagattgtgccactgcactccagcctgggcgacagagcaagactccatctcaaaaataaataaataaataaataaaataataaaataaaatatagactaatgatcctgtgcttcaatgtcattgtggttatgtgctgatgtccataaaacataagttataagggactcttcacaaatacactccagacagaagggtaaacagaaatgactgacaagacagtgccatttcagacatacttcccttaattattaatacttgctagaaaatggagtttgacattatttacaattataccaatattcacagaggccaactgtcacaggcattaagggcacaccagggccaggagacctcatttcagacttcccaaatatttttatattttagctattaagatcagttaccagagctcaacttgttcttaacaagcagaatttttatgtccattcaaagagtctcttatacctttctgggcctatttacttgcagagaacagtagaaactgtaaccaggctcttcatatcatgcattcacatgtgatgtccaatcttcatatgctgtccaatttctttaagataaatggagtgactcgcagcagggccacgtagatgagaaagttctgtatggagatcatatcctcgtgcatcttccgtttcatctccgtgaggtccagcttccgggcaaggcccccaatccggaagatcagctgcctcgctctgctctccctaatggcccccttacacccggaactcggcctatcccctcgccccagctaatttttgtatttttagtagaaatggggtttcgccatgttgcccaggctggtcttgaactcctgggcacaagggatctacccgccttggtctcccaaagtgctcagattacaggcatgagccaccacgcctggcccaacatggctattattttttaaagtgctaaattatggccgggggctgtgactcacgcctgtaatcccagcactttgggaggccgaggcgggtgaatcacgaggtcaggagatggagaccagcctggccaacatggtgaaaccccatctctactaagaatacaaaaaattagctgggcgtggtggcaggcgcctgtaatcccatctactcaggaagctgaggctggagaatcgcttgaacccgggaggcggaggttgcagtgagcagagatcacgccactgcagtccagcctgggcaacagtgcgagactctgtctcaaaaaaaaaataaataaattacctgggtgtggcagcgcgtgcctgtaatcccagctacccaggaggctgaggcaagagaactgcttgaacccaggaggcagaggttgcatggagctgagatggcaccactgcactccagtctggtgacagagtgagactccatctcaaaaaaaaaaaaaaaaagtgctaagttacatctaagtttcctatttttgtttaaaaaactccttgtagtgggttgaatggtggaccccaaaatgatacatctgtccatctgatatgcgtgaatgtgacctatttgggaaaacagtttttgtagatgaaattaaggatttccaaatgagatcatcctaggttagaatggaacctaaatccaacagcaaaagtcctcataaaaagaagggaagaagacagaaaagaagaccacaaagacaaaggcagagataggagttatgctgccataagccaagtaatacctggagccaccagcagctggaagaggaaagcaaggattctcccttggagccttcagagggaggtgtggcccagctgacatcttgctctcagatttctggcctccagaactgtgaacagaaatatttctgttgttttaagccactaagtttgtggtaatttgttacagcagctctcagaatcaaatacattcccacaccccttatttatgtgtatgtgtgtgtatgcatgtttgcatgagcactgagagaagcataccattattaacattggttagttcaggggaatgagactggcttactgaaggctgagagagtatacgtgtgtgtatataaattgagtgtatttaaattaagtatatggaagtaaattaagactacaatgagataccactacctcccaccaatatggttaaagataaaaggactgataatacctaatgctggtatggagcaatggaaccttcctttattgctggtggtaaaatggtatggtcattaaaaacaaactaaaacaaaaacaacaaaaatgcaattgtttgatggtacctactaaaaaatgtgtgtatgtgtgtgtatagacacacaccctatgacccagcaattccattcctggcatatactcagtagatagcgtgtttaagaccatcataagatatacaaaaatgttacggtagcattattcataacagccccaaagtgggagcaattcaaaggtccatgaaatgtagagtaactaaattatggtatattcatataacagaatgctacacaacagtgaaaaaggctgaactgctgcatagcagcaaaatagagaattcttttagacgtaacgttgagcaaatcaagctaggctcactacagcacataccgtgtgatcccatttacaaaaaattcaaaaacaggcaaaactaatctatggtgataatcagatgggaggcattatctaagagggtgctggaaatgtcctttattgtgatctgaacatagtattcatatacgagtcattgaaatatacatttcaaatgctggctgtttattatcatttcactgggataaatgcccaaggagttagttttcaaagagatgctatttagaatttatggaaatttagaacttactgtattttcccagattttctataatgagcaagcattgcagtttgagggtttgaaagattggtagagacaaaaactgcataagctgcatgattatttctcacacttcagatgcttaccacctttatgatttgccatatcatgtattttaaaaaatacatttttttctttttttagatggagtctcattctgtcacccaggctgcagtgcagtggtgtgatctcagctcactgcaacctcctgggttcaagtgactctccggcctctgcctcccgagtagctgagattacaggcacccatcacaatacctggcaaatttttgtatttaaaaatacagccaggctcggtggctcacgcctgtaatcccagcactttgggaggccaaggctggcggatcacctgaggtcaggagttcgagaccagcctgaccaacatggtgaaaccccgtctctacttaaaatacagaattagctgggcgtggtggctcatgtctgtaatcccagcactttgggaggccaaggtgggtagattgcctgaggtcagttcgagaccagcctgaccaatatggtgaaacctcatctctactaaaaatacaaaaattagctgggcatggtggtatgctcctgtagtcccagctactcaggaggctgaggtgggagaattgtttgaattcgggaggtggatgttgcagtgagctgagatcgcgccactgcactccagccgggcgacagagcgacactccgtctcaaaaaaacaaaaacatacaattttaaaaatttagtcttagcttttcaataagagggattaaaatatattattttagtctgctcagcatccattctcccttccttttggcaaagaaccctaaattttttgggggatgatatagtttggctgtgtccccaacccaaatctcatcctgaattgtagctcctataattcccatgtgtcatgggagggacctggtgggaggtaattgaatcatgggggtggttaccttcatgctgttctcatgatagtgagtgagttctcaggagatctgatggtttcataaggggcttttccccttttgctttgcacttctccttcctgccatcatgtgaagaaggatgtatttgcttccccttctgccatgattgtaagcttcctgaggcctccccagccatacacaactgtgagtcaattaaacctctttcctttataaattatccagtctcgagtatgtctttattatcagcatgagaacggactaatacaggggaccacctactccttactagagttggttttaccatcaacttgccctcctcttgctgagggatgggtacctaacccatgtaacttcagttggaggcactccaagtgacataaaaactaaatatacatgtcagaagttcaacctgatatcagcactgtaagaaaaaaaaacaaaaacaaacacctcataacacctactcttaagatacctgaaactgttacaattcttgacctttccaaagccttgagtcctcaacttttccatgactctggagtctctcattctttcaaataagatttttatcagtaagttcattaatctgatcctgttgcttgcaaccaaaaattccaatatatcatgaaatcaggttagatgtggttatattacttcaagtatatactaacccatttcccgtttgccccaagaatactcttgcctctaatcctaatgtaacattatatacatttccattatattaggattagagacaagttctgtttagaaataactctaagaacagtttgtgtattttcacattgaaaattaatttgcgtcaacctcagagtgtgtttatgtaaaattaaatgagcgctggcagccagctgcactttttttttctttttttctttttttttttttgagacggagtctcactctgtcgcccaggctggagtgcatggagtgcagtggcatgatctcggctcactgcaagctccgcctctcgggtctatgcctttctcctgcctcagcctcccgagtagctgggactacaggcgcctgccaccatgcccggctaatgttttgtatttttagtagagacggggtttcaccatgttagccaggacggtctcgatctcctgacctcgtgatccacccacctcggcctcccaaagtgctaggattacaggcgtgagccacggcgcctggccacttttattttctaaacaggaaatgggttaaatacgtaactctgtatgaaatatccattcataagctaccctaacagcccccttgagtggtataaggctacagtctttgaccaaaaaaaaagtatttgacaaaaacttatgtcatgtgatatatgttcataaaaggcaagtatttaataggattatgtcaattatagccaggctggtaggtaaatttcttttaaataccaaggctcagccagactgctgcaaggaagtgttccagaacttatgtaccagcaagcagtcttgtccaagtggtaaaacagcaagagtagtatgtggaatggaaattcggtttgtatgttttttttttttttttttttttgagacagagtcttgttctgttgctcaggctagagtgcagtggtgcagtctcggctcactgcaacctttgcctcccagagtcaagaaattctcttgcctcagcctcccaagtagttgggattacaggcgcccaccaccacgcttggctaatttttgtatttttagtagagacggggtttcaccatgttggccaggctggtcttgaactcctgacctcaggtgatctgcccacctcagcctcagcctcccaaagtgctggattacaggcatgagccaccatgcccggccttgttttttatttatttatttctttgagatgaagtcttgctctgtcacccagactggagtgcagtggtgcaatctcggctcactgaaatctccacctcctgggttcaagcgattctcctgcctcagcctcccaagtagctggtattacagg

SEQ ID NO: 23 - DNA, 52073 bp, Homo sapiens
tgctcctgcagcagggttctgcttggacacccaggcttttccatacatcctctgaaatccaggcagaggctaccaagaattcaccatttttgcattctgtgtgcctgcaggcttaccacctaatggaagctgtgaaggctatggcttatgccctccaaagtaacagcccaagctgtacctaggcccctttgagcccctgctggagttggagccatctggatgcagggagcagtgttctgaggctgcacagggcaacagggccctgggctcagcccaggaaaatattcagtcttccttggcttcagggcctatgacaggaggggctgccccataggtctctgaaatgcctttgaggccttttccccattgtcttggatattaccacttggatccctttcagttatgcaaatatcagcaagtggttgctccacagcctgcttgaattccttggagaaaatggtttttttttttaccacctggctaggctgcaaaatttcccaacttttaggctctgcttcctgtttaaatgtaagttccaaatttaagtcattcatttgcccccacatctgagcacaggctgttagtagcagaaggccacatcttgaatgctttgctgcttagaaatttcttctgccacatacgctaggtcatagtttttaagttcaaacttccacagatccctaggacacaagcagaatgcagccaagttatttgctaaggcataacgtgtgacttttgctccagttcccaataaattcgtttccttttgagaccttgtcaacctggacttcactgtccctatcaccatcagcattttggtcacaaccacttatctagtctctaagaagttccaaacttgccgggagcggtggctcacgcctgtaaacctagcactttgggaggtcgaggtgggtgaatcacttgaggtcaggagttcgagaccagcctggccaacatggtgaaaccccatccctactaaaaatacaaaaatattagccaggcatggtggtgcatgcctgtaaccccagctgcttgggaagctgaggcagaaaatcacttgaacccgggaggcagaggttgcagtgagccaagatcacgccactgcactccagcctgggcgacagagcaagactccgtctcaaaaaaaaaaaaaaaaaaaaaaaaaaaaaaagtttgaaacttaccctcattttcctgtcttcttctgagccctgtaaactcttccaaccactactcattacccagttccaaagctgtttccacattttcaggtatctttatagcaatgcccaacttctcggtaccaattttctgtattggggcattcttgcactgctataaagaaatacctcaaactgggtaatttacaaagaggtttaattggctcatggttctgcaggctttacaggaagcatggtgctggtatctgcttggcttctagggagacctcaggaagcttacagtcatggtggaaggtgaaggggtagcagacacatcacatggtaaaagcaggggcaagtgagagagctaaactcccgctttctgatcacatatcccaacctgctccaactccctaaatccttccactgtgtctacatggtagaatctcctacatccacaacttcttatgtcaactttccttctatttcttgatctaactcctcattctcaagctttttttttaaccatgacccacaataataaattttacatcaaaacaccatacgcacatacatacacacacatattatatgtgtatacacaactgaagtcccacaaaaacaaaccttactaaaataaagctatatcagatatgattttattaatagccaaataaacaaaaattcagaaatacaaagttccgtgaaagagttgtttacatgcactgtcaactgttctctcattcttatgttctctccctccaggattttacctcctccattccaccaacacagctcttatgagggtcaccaatgagctccacattgctaaattggtgaatacttctcagtcctcactttagttgacccattagcagcatgtgacctattggctttcacatggcccatcacccctcttcctcaaaacactgccttcatttggcttccagggcatccctcttgattttcctaactcaatgagagctcctccttagtctcctgcactgtttttcctcatatcctatctctaaccactgagagaaccccaaagttctcctctgacatcttctctatttgaatgcacttcctcagctatctcctctagttcaacagctttaaatttactaacttctacatttccatctctagcccagacctctcctctgaactatttttttattttataatatagacggggtctcactttgttgcccagtctggtcttgaactcctgggctcacatgattctcctgccttggcctcccaaagtgctgagattacaggcatgaggcattgcacctggcctggactctttattcacatccaacttctactaatgggcatctcaattttcacatgttcaaaacccaatttctttcctgccacaaaagtactccttatgcagacctccatctcattaaattctaactttatttttccagttgcataagccaaaaatctcggagttacacttgacactcctctttcatacaccacatgtaatcaatctactgaaaaatcctggtggctccacttggaaaatatactcagatccaaccaccactacccacactggctctaactagtcagcctgtttcctcccttcaaacctatggtgtattttcaacacagcaatcagaagtctctttctgtaagtcagatcatgctataccttgggttcaaaacctttccatggactcccagcttaaaaaagtaaatgctgaagaccttactatcgctgacatatggcctggcccttgactacctctcttagctccatctccttaatctctcctccttacttccactccagccacgattaactccttgttgttccccaaacatgttaaatacacttgtgtcttagggcctttctatttgttatctcccttgcctgggatactctccctctagttgtacctagaacagttgaatcatcgcataattgctaaaaggacaagtgaccatgtgacaacgttctttcatcttttatgcttgtaacaccagaatttacttgaaaaagtttgtaagtggacaagtatgaaagacagatatgtacacaaagtaacaggaaggtaaagatgatgtgaaaaatgaaaaccaatccactgaaagtcattctaattggtatttataaatgtaaaaacaaaaatgttttgctgttatgtaacaaagaatatagccatcatctatcacttcaacaaaactatgagccctaaagttttcagaagtattgcagtttggacaggtgtggtggctcatgcctaccgtccccagcactttggaaggcaggaagatcacttgaggccaggtgttcaaggccagcctgggcaacacagtgagaccctatttctacaaaaaataaaaataaattaaaaaacaaaaagtattgcattttgacaaagtgagttcatgaagaatacaaataataaggtagaacatagtagagatgcatttgaaatccaaaatccgtatttaaaggtaggtatgttccagattcatgcataatgacagctgctttcaaaggatgtaatgccttttaggtatacataaacattcaaaactgggaaaatatgggaaaaaatgtgggtctcctatatttggattctcattaaaattgctaacaaagttaattttcaccatccctttattcttctgtaaattgtttataaaatgacttgaaaaagaatgcagtcaattctcattacttgaggtagttatgttctatgaagttgccacaaacacgcaaattagtgaatactgagccattgctcctaacagaaatacagggttaggttcttgtaagcctttggtcacattttcaccaacttataaatacgtaagcttgttttatatctgtttctgtttaaagacacattatttaataaatatagacctggcatggtggctcatatctgtaatcccagcactctgggatgccaaggtgggtggatcacttgaggtcaggagttcaagactggcctacccaacatggtaaaaccccacctctactaaaaatacaaaaattacgctgggtgcagtggcgggtgcctataatcccagctactgggaagactgaggcaggagaatcgtttgaacccgggaggaggaggttgcagtgagccgagattatgccattgcactccagcctgggtgacagagtgagactccatctcaaaaaatataataataaatagtgatgactcatcatcatctaactcccactcaacagcactataactcatgactaaacaaaggttatctaacacatgtattctctaaggcacctcacagcccgcatgcaccttggaataccactatatagcacttcagcacaatgcttgggaatcactttaaacagtaaaatcacaaacagaaggcacaaaaatgtgaaaaatgtagaactatataaactgctttcaaaaaggacacttgtttatagtaagaaagctacacaaaaaactgagcactgttcaaccccagctgggaatatctgggtaaggttctcaaatttttcacctctgtgtatgtccatgaaaaaccatgaaactgccatgagtattgatgttaggttacaaataaattttagcaagtaggtgcctttacaaatacagattctacaaataaagagaattgactgtaaataaaattttataagcaaaaactctgaaaataaaaacaaatagttaaaatggtaatgggaagaccatataaacaacagaaaattaaaagttcttaaacacatgaaaaggtgctgaacttcacaataagataaaaatgtacaaatatgagataatcatttttaactattcaattgacaaagattcaaaggtttgataaattattggctattttgcaggaaacaaactctccatgttggtataaatatagattaatataacctctactgaaaacaatttagcaaacttttgtttaaaatttaaatgtaggtcgggcacggtggctcatgcctgtaatcccagcactttgggaggccaaggcgagcagatcacaaggtcaggagttcaagatcagcctggccaacatggtgaaaccccgtctctactaaaaaaatacaaaaattagccgggcatggtggcgtgtgcctgtaatcctagctactcaggaggctgaggcaggagcactgcttgaacctgggaggcggaggttgcggtgagctgagatcacgccattgcactccagcctgggcaacagagcaagactccgtatcaaaaaaaaaaaaaaaacaatttaaatgcaatagcctcttcaacacagtagttctaattctagatacttaatcctaaagatgctgactgtactattaaataacaaatgattagaaacaaattaaactctcatccacaagagctcaattcattaagcgtggtacacatctgtaagaatatcctgtaagtgcttaaaagaatgagagcttttttttaaatttttaatttttgcatttttcttattttattttattattatactttaagttttagggtacatgtgcacaatgtgcaggttagttacatatgtatacatgtgccatgctggtgtgctgcaccaattaactcctcatttagcattaggtatatctcctaatgctatccctccccactccccccaccccacaacagtcccaagagtgtgatgttccccttcctgtgtccatgtgttctcattgttcaattcccacctatgagtgagaacatgcggtgtttggttttttgtccttgcgatagtttactgagaatgatgatttccaatttcatccatgtccctacaaaggacatgaactcatcatttcttatggttgcatagtattccatggtgtatatgtgccatattttcttaatccagtctatcattgttggacgtttgggttggttccaagtctttgctattgtgaatagtgccgcaataaacatacgtgtgcatgtgtcttcatagcagcatgatttatagtcctttgggtatatacccagtaatgggatggctgggtcaaatggtatttctagttctagatccctgaggaatcgccacactgacttccacagtggttgaagcagtttacagaactctccaccccacatcaacagaatatacatttttttcagcaccacaccacacctattccaaaattgaccacatagttggaagtaaagctctcctcagcaaacgtaaaagaacagaaattataacaaactgtctctcagaccacagtgcaatcaaactagaactcaggaataagaaactcactcaaaaccactcaactacatggaaactgaacaacctgctcctgaatgactactgggtacataacgaaatgaaggcagaaataaagatgttctttgaaaccaacgagaacaaagacacaacataccagaatttctgggacacattcaaagcagtgtgtagagggaaatttatagcactaaatgcccacaagagaaagcaggaaagatccaaaattgacaccctaacatcacaattaaaagaactagaaaagcaagagcaaacacattcaaaagctagcagaaggcaagaaataactaaaatcagagcagagctgaaggaaatagagacacaaaaaacccttcaaaaaattaatccaggagctggtttttggaaaggatcaacaaaattgatagaccgctagcaagactaataaagaagaaaagagagaagaatcaaatagacgcaataaaaaatgataaaggggatatcaccaccgatcccacagaaatacaaactaccatcagagaatactataaacacttctacgcaaataaactagaaaatctagaagaaatggataaattcctcgacacatacaccctcccaagactaaaccaggaagaagttgaatctctaaatggaccaataacaggctctgaaattgtggcaataatcaatagcttaccaaccaaaaagagtccacgaccagatggattcacagccgaattctaccagaggtacaaggaggaactggtaccattccttctgaaattattccaatcaatagaaaaagagggaatcctccctaactcattttatgaggccagcatcatcctgataccaaagccaggcagagacacaaccaaaaaagagaattttagactaatatccttgatgaacattgatgcaaaaatcatcaataaaatactggcaaaccgaatccagcagcacatcaaaaagcttatccagcatgatcaagtgggcttcatccctgggatgcaaggctggttcaacatacgcaaatcaataaatgtaatccagcatataaacagaaccaaagacaaaaaccacatgattatctcaatagatgcagaaaaggcctttgacaaaattcaacaatccctcatgctaaaaactctcaataaatgaggtactgatgggacgtatctcaaaataataagagctatctatgacaaacccacagccaatatcatactgaatgggcaaaaactggaagcattccctttgaaaacacgcacaagacagggatgccctctctcaccactcctattcaacatagtgttggaagttctggccagggcaattaggcaggagaaagaaataacgggtattcaattaggaaaagaggaagccaaattgtccctgtttgcagattacatgattgtatatctagaaaaccccattgtctcagcccaaaatctccttaagctgataagcaacttcagcaaagtctcaggatacaaaatcaatgtacaaaaatcacaagcattcttatacagcaataacagacaaacagagagccaaatcatgagtgaactcccattcacaattgcttcaaagagaataaaatacctaggaatccaacttacaagggatgtgaaggacctcttcaaggagaactacaaaccactgctcaatgaaataaaagaggatacaaacaaatggaagaacattccatgctcatgggtaggaagaatcaatatcgtgaaaatggccatactgcccaaggtaatttacagattcaatgccatccccatcaagctaccaatgactttcttcacagaattggaaaaaactactttaaagttcatatggaaccaaaaaagagcccgcatcgccaagtcaatcctaagccaaaagaacaaagctggaggcatcacgctacctgacttcaaactatactacaaggctacagtaaccaaaacagcatggtactggtaccaaaacagagatatagaccaatggaacagaacagagccctcagaaataacgccgcatatctacaactatctgatctttgacaaacctgagaaaaacaagcaatggggaaaggattccctatttaataaatggtgctgggaaactggctagccatatgtagaaagctgaaactggatcccttccttacaccttatacaaaaattaattcaagatggattaaagacttaaatgttagacctaaaaccataaaaaccctagaagaaaacctaggcattaccattcaggacataggcatgggcaaggacttcatgtctaaaacaccaaaagcaacggcaacaaaagccaaaactgggatctaattaaactaaagagcttctgcacagcaaaagaaactaccatcagagtgaacaggcaacctacaaaatgggagaaaatttttgcaatctactcatctgacaaagggctaatatccagaatctacaatgaactcaaacaaatttacaagaaaaaaacagacaaccccatcaaaaagtgggcgaaggacatgaacagacacttctcaaaagaagacatttatgcagctaaaaaacacatgaaaaaatgctcaccatcactggccatcagagaaatgcaaatcaaaaccacaataagataccatctcacaccagttagaatggcaatcattaaaaagtcaggaaacaacgggtgctggagaggatgtggagaaataggaagaatgagagttttaaatactgatatggtgtgttctccaagatatattgacagaaaagcacttatctattgaagaacattatatgaattacctctaaagataaaaaattttaaaagttcaaaaagggtaatgatgatatatcatgacagaacttaattactttttttctttttgagacagtcactgagtcacccaggctggagtgtagtggcacgatcttggctcactgcaacctccgcctcctgggttcaagtgattctcatgcttcagcctctccagtagctgggatcacaggcgcccaccaccatgccgagctaattttttttttgtatttttagtagagatggggtttcaccatgttgggccaggctggtctcgaactaccgacctcaggtgatccacccacctcagcctctcaaagtgctaggattacaggtatgagccaccatgcctggccttaattacatgttttttaaaaattcacaataaatgtatacacaaacattttaaaaaacacaaaagggtacactgtgaaaagtgtacagaagggctgggcatggtgattcatgcctgtaatcctagcactttgggagcccgaggtgggagaatggcttgaacccaggaactcgagaccagcttgggcaacatagatcatgtcactaccaaaaaaaaaaaaaaaagtgtacagaagcagagttgctcttgttttttgtttgttgctttggtttggtttttttttttgagacagggtctcagtctgttgcccaggctgaagtgcaatggtgtgaacacggctcattacacagcctcaacctcctgtactcaagtgatccttttgcctcagcctctccagtagctgggactacaggcatgcaccaccatgccttgctaattctttcatgttttgtagagtcaggggttttgcgttgttgcttatgctggtcttgaactcctgggctcaagtgatccgcctgtctcgtcctcccaaaatgctgggattacaggtgtaagccaccgtgcctggcccagagttgctcttagtaacgtgttttttttttttttttttttgagacggagtctcgctttttagcccaggcttgagtacagtggcacaatctcggctcaccacaacctccacctcccgggttcaagcaattctcctgcctcagcctcccaagtagctgggactacagggcgtgccaccatgccgggctaatttttgtatttttagtagagacagggttttactatgttggccaggctggtctggaactcctgatctcaggtgatccacccgcctcggcctcccaaagtgctgggattacaggtgtgagctgccgcgcccagctgctcttagtaacttctggaatttgatgtctaaattgaatccattatttcaaacatcacaagacttaagttcataaaaacttttttaaaaagttaactctgggtcaggcgtagtggctcaagcttgtaatcccagcactttgggaggccgaggcaggtggattacctggggtcaggagttccagaccagcctggccaacgtggcgaaaccacgtctctactactaaaaatacaaaaattagccaggcatagtggcacatgcctgtagtcccagctgctcgggaggctgaggcaggagaattgcttgaacctgggaggcagaggttgcagtgagctgaaattgcgccactgcactccagcttgggtgagagttagactgtatcaaaaacaaaaagaaattaactctgtagtttatttctgttaatggcaaccctgcagaaaagttaaacttagaatatgtctcaaagtaatctctgtctgatcccttaatgaaggatctcttcaaacacagcaacttttgtctgtcttctgaatgtaggtacagctgtggctgtagaacagaccatgtaattttcatctagattccttacaaccacaaggacaattattacaatgaaagccagagaactagctcagttttgattttattactaggataaatccagccaggtagtgtggtggctttgatgttttctgtctatatctaagggggaagctgcttcattattcgatattaagataaatagggcctaaaaatagtcctaggtcaaacaccattatgattaactcaactttcaaaaccatttacctaatgtaggatttgttaataagtcttcttcaaaattagcaagaaatacaactaatgcctaacccgtcatgatgaattaaagactgatccaaaaataactgacagttctcttccagttgccctcttctttgacaatcccaccagtctatgctctaagctcacgcttgacttccaaaaactgccagatattgtagacaccatgaagaataagatgtactaccttttctctaatgaaagaggaaatacagatataaacaatatataaacataatataatgtgaaaagctatgtatagaaataaatagagaggccgtgtgcggtggctcacggctgtaatcccagcactttgggaggccagggtggtcgaatcacttgagggcaggagtttgagaccagcctggccaacatggtgaaactccatctctactaaaaatacaaaacttagtggggcatggtgccacatgcctgtaatcccaactactcacgtgggtgaggcacgagaactgcttgaacccggatagcagaggttgcagtgagctgagattgcaccactgcactccagcgtgggcagcagagcgagactctgtctcaaaaacaaacaaaaataagaatatgtaaagacatgaaaaatgtgacattaagtgggaatacacatgcacatacacaaaatgctatggtggcatccatatcaaaatatgggccaaagggcaaaataatatgcaaaaaagaaatacaatcacagatacagctaatttaaaaaaaaattaaatatttttattatatacttttaaacatatagaagatagaaaaaaacagtacaatgaacagccatgtccaccagttagattctgtaacattttgccacatacgcctcacatacattttgttaaaccatttgaaacattttaagacactctaacacttcattcctaaatgcttaagtatgcaaattaagacagtcttttataaactacaacacccttctcacagctcataaaattaccaataattatccaatatcattcaaaatctaatccacattcaaattttctcaactgcctcaccaccgtgctggcctcccacccccacctcagtcttttacagatggtttttcaaaatagagtccagtaaaatatttcacattgcatttggttattacataacttttaatcaagaagagttacccattccacttccttttttctttcccaacacttgatattttgaagaaatgaggccagttatcttctataacgcttcacattccagatctgtctgatcgtttctttagtggtgtcatttagtgctgctctatgccagcatttcctgcaaatgagaaattagaaccagaggcttgacgaattccagttaaaccatgtcctctgtggacaccagttaaacttgactagagcacttcatatgtcagagtgtacagtgcagtatgcctaggttatcccatatcacaataaaaaaaagtctgctggtctgcctactagtgatataaaatggcatcatatcctaaagctctttattgtgaaagtatgtttcttccacacaaccaaccagttaagtatgagaattctagtagggatgtagattaaccttttatctaatagttttggcatcaaaattctttaatattgattgttttacattaacctttcaactttctaacatctgaactttttaaatgttcaaaaacatttgttttccacaaaccataaagttttacaaaagtaagattcactttcataatgctggcagacttactccttaatttaaggaatgtgagcaccttccttctttttgattttgtctaaaaccctgtaaggaaaataaaggaagttaaaaaaaatagctatatagatatagatagctatatatagatagctttatatggatgttaaaaagcattttgtttcacaagacattttacttattttattcaacaaaatatgatcagaaattaagttgatagtcttttaatgtactttaaaagttatcccaaagaaaacaattattaggctgcagttaaggttttcttgcagtggctcatgcctacaatcccacaactttgggaggcggaggtagggggatcacttgagacctggagcttgacaccaccctgggcaacataatgagaccctgtctctacaaaaaatttaaaaattaggccggcgtggtggctcaggctaggcacagtggctcacgcctgtaatcccagcactttgggaggccgagacagttggatcacctgagctcaggagttcgagaacagcctggccaacatggcaaaaccccgtttctactgaaagtacaaaaaattagccaggcatggtggtggggacctctaatcccagctacttgggaggttgaggcaggagaatcacttgaacccaggaggcggaggctgcagtgagctgagatttacaccactgcactccagcctgggtgacagagcaagactctgtctcaaaaaaaaataaataaataaaaataaaaattagccaggtgcagtggcattatcactgtagtcccagctactcgggaaactgaggtgagaggactgcttgagccctggaggtcaaggctgcagtgagctgtgaatgtgcccttgcactccagcctgagcaatagagtgagacctggtctctaaaaaataaaatttaaatgtaaaaaatttaaaaacattgccggtcacagtggctcatgcctgtaatgccttgccttgcacttttggaggccaaggcgggcggatcacctgaggtcggatttggagaacagcctgaccaacatggagaaatcccgactctactaaaaatacaagactaggccgggcacagtggctcacgcctataatcccagcacttggggaggctgaggcgggtggatcaaaaggtcaggagatcgagaccatcctggctaacacagtgaaaccccatctctactaaaaacacaaaaaaattagccgggtgtggtggcgggcacctgtagtcccagctactcgggaggctgaggcaagagaatggtgtgaacctgggaggcagagcttgcagtgagccaagatcgcgccgctgcactccagcttgggggacagagcaagacaccctctcaaaaaaaaaaaacaaaaaacaaaacaaaacacaaaactggctgggcgtggtggcatatggctgtaatcacagctactcgggaagctgaggcaggagaatcacttgaacccaggaggcggaggttgcagtgagccgagattgcaccattgcaccccagcctgggtgacagggcaaaactccatcttaaaaaataaataaactaattaatttaaaaaaatatttttcttccttttttttttgagacggagtttcgctcttgttgcccaggctggagtgcaatggtgcaatcttggctcaccgcaacctccgccttctcggttcaagcaattctcctgcctcagcctcccaagtagctgggattacaggcatgcgccaccatgcccggctagttttgtatttttagtagagacagggtttctccatgttggtcaggctgatctggaactcccgacttcaggtgattcgcctgccttggcctcccaaagtgttgggattaccggcgtgagccactgcgcccagctgatttttcttctttcagtatgtccaatgatgttcctgagcccgcttataccttatttttttttttttgagatggagttttgctcttgttgcccaggctggagtgcaatgaggtgatctcggctcaccgcaacctccacctcccaggttcaagcaattctcctgcctcagcctcctgagtagctgggattacaggcatgcaccaccacgcccgcctaattttgtattttttttagtagagacggggtttctccatgttgaggctagtctctaactcccgacctcaggtgatccgcctgcctcggcctcccaaagtgctgggattacaggtgtgagccaccgtgcccggcctataccttattttcatcaaataaaatatatgaccttaaactacctgtgtcatacttattaaaatgagaccattaaacaccagtattcactaaataaaaaaaaaatttaaagtcaaaaattaatactaaaacatttgtttttcttgtcagatctagcccaaatgtcctctgtctctcttctggcttcaatgctttctatctttccctacatgtatactagcttgcagtggcttcccacttcattactaatctacacctaacagaccgtaagatgtattgaaagatttgttactaatgagtatcaaagttataacctattttatgttatttcaacaacattattcttagtcatttgcattctgcttagatttctaagacaaaaagatagaggttaaaagctagactcagagcctatctcaaccacgtggcttcagtagaacaaaggttaagaattgttagcttaaggcaatgacgtattaaaaacacttaaggccaggtgcagtggctcacgcctgtaatcccagcactttgggaggcctaggcaggcagatcacgaggtcaggagatcgagaccatcctggctaacacggtgaaaccccatctctactaaaaatacaaaaaattagccgtgcatggtggcacacgcctgtagtcccagctacttgtcgggctgaggcaggagaatggtgtgaacccgggaggcagagcttgcagtaagccaagatcatgccactgcactccagcttaggagacagagcaagactgtctcaaaaacaaaaacaaaacaaaaaaaacccaaaaaaccaaaaaaacaaaaagaacacaaacgaatgttcatagcaacattattcattatagcccaaaaataaaaacaacctaaatgtccatgaactgatgaatggataaaatgtgatataaccaaacaacagaatattcagcaataagaaggaatgcagtactggtgcattctacagcatggatgaatcttgaaaatagcatgctaagtgaaagaagccagacacaaaagaccacatatcgtataattccgtttatatataatatctaaaatagacaaattcatagagacagaaagtgtactgactgcctagggctggggaaaatgaaggtaacagggtttctttttggggtgatgaaaatgttcttaaattgtagtgatggttgcataactgaaaaccaaaaccactgacttgtatactttcttttttattttattttttgagacagagtctcgctctgtcgcccaggctggagtgcactggcacaatctcggctcactgcaagctccacctcctgggttcacgccactctcctgcctcagcctcccgagcagctgggacaaaaggtgcccgccaacatgcccggctaatttgtttttgtacttttagtagagacggggtttcaccatgttagccaggatggtctcgatctcctgacctcgtgatccacctgccctggcctcccaaagtgctgggattacaggcgtgagccattgtgcccagccaacttgtatactttcaaaggtaaactgcacaccatgtgaattatttctcaagaaagttatttagaacataaattataccaatactttatatatacattatgtatttttttcaaatatttcataatttaaaaaacacaaaagcctacagtgttacagtcagataactgatctcaaaacaaattacaagctgttgatttattactttttggtcattaaaatgaggaattcatgatacatacaatataccaaggttatactacaacaactgaagcgtgacttttttttccctccgcaaattctcactctgttggccaggctagagtgcagcggtgtgatctcggctcactgcaacctctgcctcccaggttcaagtgattctcctgcctcaacctctcaagtagctgggattacaactgcccgccactgggctaagttttgtgtatttagtagaaatggagtagtcaccatgttggccaggctggtcctgaactcctaacctcaagtgatccacctgcctctacctcccaaagtactgggattataggtgtgagccaccgtgccaggcctttttctttttttgagatggaatctcactctgtcaccaagggtggagtgcagtggcacaatctcaactcactgcaacctctgcctcccagattaaagcaattttcctgccacagcctcccaagtagctcggattacaggcatgtgccaccatgcctggctaaattttttttggtatttttagtagagacaaggtttcatcatgttggccaggctggtctcaaactcctgacctcaagtgatctgcctgcctcggcctcacaaactgttgggattacagttgtaagccaccatgtctggccttaacttttaaataagaatattaatgggggcacacacagatgatacatttaaaaacatacacctttaagtcagttgtttcttctatattaatttactaaaaatacaagtgcctacaatatcacatcataattttagcagggcacaagagcttacttttaaaaataattttaggccgggcgcggtggctcacgcttgtaatcccagcactttgggaggccgaggcgggtggatcacgaggtcaggagatcgagaccacggtgaaaccccgtctctactaaaaataaaaaaaaattagccgggcgtggtggcgggcgcctgtagtcccagctactcggagaggctgaggcaggagaatggcgtgaacccgggaggcggagcttgcagtgagccgagactgcgccactgtactccagcctgggtgacagagcgagactccgtctcaaaaaaaaaaaaaaaataaaataaaataaaataattttaaatgttctgactaaaatacaatagaacatgtccgtaggagactaacgtataaagtgacaagtttgaagccatactccccaaggttcaatgtggtacacattaccccagatctttgtgcattaaaaaaatttcatttctcttggaaggccgaggcgggtggatcacggggtcaggagattgagaccatcctggctaacacagtgaaaccctgtctttacaaaaaaatacaaaaaattagacaggcgtggtggcaggcacctgtagtcccagctacctctgaggctgaggcaggagaatggcgtgaatccaggaggcagagcttgctgtgagccaagatcacgccattgcactccagcctgggcaacagagcaagactccgtctcaaaaaaaaaaaaaaaaaaaaaagaatttcatttttcatttatgaaaaattatcccatcttttccattccctacaatcaatttcaaatcagagattaaaacattatttagaaaaagtataatttcaattcaaaagtgtataatcaaaataatctaacaatagcatgaaagctttttaaaattaactaaaattatacttagggacaatgcaagagtaatttaagcctcagacagttgtatttttttatttttattttttagtaatataaagagagaagcaagtagtattttataaatttacaaaacaaagtcacataactacaaaaaaattgtcaggaaaagatgctgagtgattacttaccatataatagccagtatgatagccactcatgtaccatgaaattaacatacttcccaaagcatcagcatcatcaagagaatctggacatatgggaggtggtgggggaattatctggagacagaaaaagatattgtttatatccagtaaacaaaaaagtaaagtctggagatttatattatatagtgaatgctggaaattaattgtatttttgcttatataatctcctacttaaatttcttttttttcccctaaacaaagacgaggtcttgctatgttgcccagactggtctcaaactcctgagctcaagtgatcctcctgcctcagccttctaaaatgccgggattacaggcatgagccactgtacctggccttaaatttcttaacatagctagcatttggagaaaaccaaccaataacaacaaaagaccaacaaaattaaatttaacgaggacgaaaagacagcaagtgacataaaaagtttaaacattttgatttagactatgtatctgttccactatgaagctatgagtaaaaaaaaaaaatcaagcataaatactttcatgcttttccttaatacacacacacacacacacacacacacagctcacatagcatttcgagggcgattttaagtaaatgtcttgggtagaacacctgttctaaccccatcccaatacacagtatgccaaaaagtatctttttatctattgttaatacctaaaaatctaccattagaaatccagtttacagctgggtgcggcagctcacgcctgtaatcccagcgctttgggaggccaaggcgggtggatcacctgaggtcaggagttcaagatcagtctggccaacatggtgaaaccccatctctactaataaaacaaaaattagccgggtgtggtggcagtcgcctgtaatcccagctacttgggaggccgaggcagaattgcttgaacccaggaggcggaggttgctgtgagctgagatcacaccactgcactccagcctggggtacaagggcaaaactctgcctccaaaacaaaaaaaaaaaaagagagagaaagaaaaagaaatccagtttacatcagaagctaacatccaactatacctagaagggcaaacactaattccttatataaggtataattaaatcccttctaacaggaactacctccttatggcatagacaccaacttctgccaggaaagaaggcaacctagagcttagacttgggactacaagagcactgcatctgggtaacagaaaggcattaaaaacaaacaaaacccagaggtttagttcaaatttctacccattagaatctggcccaagggatgttctacaatgacattttacaatcctctattctgctaattatcaaattgtatgtgaaagcaaaatctaacctatactcttttttacttactggtggtccagaaggaaatggaggcagccagcatgatagtaagtggggtggtggtggtggcggtggcggtggtgggccattgaattttagacctggctataaggaatatttcaaaggaaaattaacttaccaatttcaatatgataggaataaaaaggactcaaaaccaaaaggataaaaataattacccagaatatttgttttatacatatcaaaaagattaagtgaaatttcatgtaccaaatcctgaagtcaaacagactcataagtcaaatgacaacctctggatttttctcatttcctttctatgtagacattaaggaagtaaaacaaaataagagtggtgattacctaataaatcagagacagtctatttagcaaaattatttcaatcataaaagactatatcccaaatttcattaactaaattgtatatttttatgaaagcctgtttagctatacatgccaacttagaggacatattgtgaaaactagcaaatctctccttataaaaatcagccccctgagaccaatgaagcatgatgtatatattctaagagggtacatcattttagattcaagaaactgtaatataatgtaagcctcaataagaacattatcacagaaaatcttaaaacttttggtgagtcatgcttgttttttgaaaatgactgcctaggctaggcgcctgtaatcctagcactttggaaggccaaggtggggagatcacttgaggtcaggagttcaagaccagcctggccaacatggtgaaaccccatctctactaaaaatacaaaataagccgggtgtggtggcgggtgcctgtaatctcagctacttgggaggctgaagcaggagaatcacttgaacccaggaggtggaagttgcagtgagctgaaatggtgccactgcactccagcctgagcgacagagcaagactccatctcgaaaaaaaaaaaaaaattgcctaaataccattccctccatggaagaaatcaccgctttacacaaaagaactagaaagggacaagccttaaggttccatgacataatctaacctataataaaaatctttttagagttgatttctgttacttataaccaaaaggaccataaatgaaaacaatatttacatttgaactctacaaaacaatctgagagcgcctcaggattttatctatattagatgtaaataatgtgttcttattttacatatcttatacaggtgacatgggaaacaacagcatatcatccagctaatgataaattattattacacttttttttgttttgttttgtttttttgtttgagatggagtctcattctgtcgcccaggttggagtgcagtggcacgatcttgactcactgcaagctctgcctccggggttcacaccatcctcctgcctcagcctcccgagtagctgggactacaggtgcccgccatcacgcccggcaaatttttttgtattttcagtagagatggggtttcaccgtgttagccaggatggtctcgatctcctgaccttgtgatccgcccaccttggcctcccaaagtgctgggattacaggcgtgagctaccgcgtccggcgcattattatactttctaacttaagtaagtgtgctaattattagtctaatacctaatactccacaaaagttaactggataaatctttcatataaagtattttgttgcatccactgcagtgtctaacatttttttaaaaaattaactattttgcatcattatcttatttccttttcaaaaaattcttgtgtatttaagctacaaaagtttcatgggagagctacaaattagttaacagagaggttaaatgtcccgacattaactattttctggaaaactttcatagaaggtttacctttcctggtcccagtcttggccctggcatggggggtggtggagggagaaaagagttccatggagcagatttgggcttgatgttatctgatttatttccaggagacctggagttctcactttcatctgttgaaacttggctttcattttcattctttaaaaagaaaaaatatgcaggtttttgttataagggtgtgattaagaaaaaattaatgcctcggtggatcaaactgacaactgtgtatactgtttaacagtttctcatctagtctctgcttccagaaattgaatttttttttttttgtatccttacctcttgagcattttgttctatattattagctacttcacagattggggaaagtagatcggacagattttgctcctctctatttccatatccagtgtaaaccacaacacaggtttctctcttaaaatcaattgaagcaatggtagctgggtaaatgcaaccgtcttctgaccaaatggcagaacatttgtccccaactttccactacaaaagaaatcaaagatatatacatgcacacatttcttttgaagagggcaaactatcatctcgttttgatcagtggggaggtgaaggatagagggtagagatttggaaggcaaaatgatgtaatgagaaaggcttggggtctaaatacataaatctgaattccaactctcttacatttataatcatggacaagtttctgaatctctttgagtcttagtttccccatcttattagatggctataatataaactacctcccatatttgttgtgaatagcgggagggagataaaatgcgtatggtgcccagcactctggactggcctagagcaagtgctcatcaactgttagctctcttcccccttggtaatgatgaaactaaagttggctcaaaagacaccaaaatattcagctttcaggactactgcttttaactagcagaaataatctacctagacttctgggttccttggaattaacagttttagagtttttaaagaaaaaggggaaaaaaaaatctatctctcagcttaagatgtaaaacactgccaattcagcttacggctcttgggtactccttccaaacggcaccttctccctgccttccattcacaaatggaacacatgtcctgattttagcatttatcattcccatctaattctttatactttcatgactaatatgcatgttcctaaataacagaaaatttaatagttgtttttgaagttgtataagtatatgtcaatagaaacactgtactaatcacttaagttaaagacattttacactattaaataaggactaatgagacatcctttgaagttaaatctcaacattttaaaataacctgttgtaaggaagctgcagtattcttcttttggcttttattcttcttagcaggttttcttttaggtgtggtttttggtttacccgaagtttcacaaatgtcaccattctttagagcatgctacgaaaataggaataaaaatgtacatgttacagggtggtgcacagaataaaagtcacgacataacccagttactactataagctagtctcaaggctccgtcacctcagaaagcacctattttctcttttgaccaccccctgcactataaaaactgctcttaaaggcatcatacacctgacatcagctctaaagacccttttaatcaaatctccttgctctcaacctctctgtaacattagaccctgttaattatctttcttcctgatattcatggccctttggatgtcatagcaatgtagggccccaacggtttcattacttctgatcaagccttagatttaggcattcccaataagagctggccatccttctttacttgcttacggccattattttatttattttatttttttacacagagtctcactctgtcaccgggctggagtgcagtcacactgatctcagctcactgcaacctccacctcccaggttcaagcgattctcctgtctcagcctcccgagtagctgggattacaggcgtgcaccactgtgcacagctaatttttgtatttttaataaagacggggtttcaccatgtgggccaggctggtcttgaactcctgacctcgtgatttgctcgcctcagcctcccaaagtactgggattacaggcgtgagccaccgcgcccggccaaggccatctattcttattactttagttgcaactgtctgcaaacacacttctgaagctattaatccagctgtgacttttctcaatctaacatttccaatgatcaatttcacatcttaattcatacctcaaactcaacctcaacttaattcatattcaacctcaacttaattcaaattcaatctcaacttaattcatactcaaactcactactaaaactatcgttttcccaaatcagttcttttcctcctttactcagattacttctccctgcaatatcaccaacccatcccacatcgagccccatttcaatctctattttatagaattctcttggtaattctttagtcgacttctagtttcagtgtatactggaaagcacatttaaaaatctaggccgggtgcagtggttcatgcttgtaatcccagcactttggaaggtcaaggcggagggatcttttgagctcaggagttccaggccagcgtgggcaacagggtgagactgcatctctacaaagaatacaaaaatgagctgggtgtggtggcacacacctgtggtcccaactactcaggaagctgaggtaggaggattgtttgagctcatgagttgaaggctccaatgaggcatgatcacgccactacactccagcctgggtgacagggcaagaccccatctcaaaaaaaaaaaaaaatctagaaatcagttacaaaggtgacatagaggtctgatctttagctcatgttacaagagtaactatgagaaagacatgaaatctgtatgcttggtgctctttatacactgtatgagtatatgctctgtttgctcaaggtagtctggactattgtttgctcaaggtagtctggactattgatgacccatatttagtgctcagtaagactaaacatctcagagaatggagaaggtgatgatgttggccaactgtgtaagtgtcctgtttgagacacagaaccatactacatttcctaaaagaactgtatattcctacccaataggaacacttgaattgatacccaacttacaggatttgggatgattagagtaatttaatatatgaaacgcacacagagcactgtcagcatgctacaaatattaattgctgtactaatgctatttatcttcatcattattttactacatgcttgttaaatgtttaaaattataattcagattgtctttttcttattaatctcaattagaggacttccatagtttgatacaatgtaaaaatactaaaaggaatacattgtttgttcgttttctgagatggagtctcactctatcgcccaggctggagtgcagtggtgcaatcattgcaacctctgccccccaggttcaagcaattctcctgcctcagtgtcccaagcagctgggattacaggcacgtgccaccatgcttggctaatttttgtatttttagtaaagacggggtttcaccatgttggccaggctggtctcaaactcctgacctcaggtgatccacccgcctcagcctctcaaagtgctgggattacaggagtgagccaccatacccagccaggaataaatgttttaaattttatttaaattgcctccacaaaggatgacatatataggctatcaacttctaaaggaggatatcacctgatttaactaactcatactaccatctaatcttcaaaatgaaaactgaataacatgtactttaacactttatcgtatgttatcaattcctttccaaatgaataacgagaaaataagaaaacgactaagcaagcatttcataccttaaatgaagccacagctttatcatatgcttttatcagtgctgtatcatcccaaatgtcagaatcatcgctctggaaagggtaagaaataaaaacaactcatgttcagataggtttaatcagaaaatgtatgttagtaccaagagtcatcttaatccacacataacaaaattacactgaaaatgagtatttaaaatcctaaataaagccacaggaaacttacctggttagaggttatgtgactttactccaaaagctagacataggtaaatgttctaagaatgaatgccatcaagtgaatgcccctacaatttaattcctatccacataccatgagtagatttgttcaaggccagctatatttatttcaattaagatcagataaaacttgacttcatctagactacgggaatgctgttctgacctcagaacctatgatccaaagaatattttttcttttgaaattataatgtttccagattataaggatacaaattgttaatagtgactaaccaattttcattttattattattattatttttttacttccatttccctttcctgctttcctggtaccaattttctttccttccttttcttttcctttctttcgtttctttcttctctccctccctccttcctttcttccttccttcacttctctttctctcttctttttttctcccctcaaattcctgtgttcaaatgaccctcccacctcagcccactgagtagttgggaatataggtgcatgccaccatgcctggctagtttttaaaattttttgtagggacggggtctcgccatcttagccaagctggtcttgaactcctaggctcaagtgatcctccagcctcgctcggcctcccaagtgtgggaattacaggcatgagccactgcacctggaaatatttttgtccagacatggtggctcatgcctgtaatcccagctacttgggaagctgaggcaggagaattacatgagcccagttgttggaggctgcagtaagctatgatcatcccattgccctctagcctgggtgacagaggaagaccctgtctaacaacaacaacaacaataacaaaataataataataataaataattttttagcactatctgctagcactgtgcaagtcactgagagatatatagaaacatggtactctccagttattatctaactagggatttaagactatcacacaagacaaaacaaaaaacaatataaaacaaatcttaacaaacatcaaaatgtgaaatacaaacagtattttaattaaaaaggaaagaaattaatgtctactgcaagatcatatggaggaaaccggcctaagaaataaaaaccactcacgcctgtaatcccagcactttgggtggccgaggtgggtggatcacgaggtcaggagttcgagaccagcctggccaacatggtgaaaccctgtctctactaaaaatacaaaaattagccggacatagtagcacatgcctgtaatcccagctacttgggaggctgaggcaggagaatcacttgaacctgggaggcagaggtggcagtgagccaagatcgcgccactgcactacagcctgagagacatagcgagactctgtctcaaaaaacaaacaaaacaaaacaaaacaaaataaaacaaaacaaaacaacaggatttaggccgggcatggtggcttgtaatcccagcattttgggaggccaaggcaggtgaattgcttgagtccaggacttccagaccagcctaggcaacagggtaagaaccttgtgtctactaaaaatacaaaaattctggccgggcgtggtggctcatgcctgtaattccagcactttgggaggcagaagcaggcagatcacgaggtcaggagttcgagaccagcatggccaacaaggtgaaaccccatctctactaaaactacaaaacttagctggcgtggtggcagtcacctgtaatcccagctgcttgggaggctgaggcaggagaatcacttgaacccgggcggcagagattgcagtgagctgagattgtgccactgcactccagcctgggtgacagagtgagactctgtctcaaaaacaaacaaacaaaaaaaccaaatttagctgggcatggtggcacatgcctatagtcccagctacctgcaggggctgaggcgagaggatcacctgggcccaggaagttgaggatgcagtgagtggagatggcgccgctgcactccagcctgggtaacaaattgagaccttgtctgggaaaaaaaaacaaaaaaaaacaaaaaaaacccccaaaaaaaaaaaaaacccaacaggatgtgcataggtagacaaaatagaacgcattccaagtaagagcatgaacaacaacaaaaaaggcatggaagcaaaaataacactaactataagaatttatttatgtaaggtaactaagtagtcaaatttatagaattagaaagaatgggccaggcgcagtggctcacgcctgtaatcccagcactttgggaggccgaggtgggcagatcacctgaggtcaggagttcgagaccagcctcaacatggagaaaccccttctctactaaaaatacaaaattagccgggcgtggtggtgcatgactgtaatcccagctactcgggaggctgaggtagaattgcttgaacctgggaggcggaggttgtggtgagtcgagattgcaccattgcactccagcctgggcaacaagagtaaaactccatctcaaaaaaaaaaaaaaaagaatgatgattaccaagggctaagtgtaaggagaaatgggaatttgctaatgggtagagtttcaggttgcaagacgaaaaacttccgaagatctattgcgcaacaacatgaacatacttaatattactgaactatatacttaaaaatggttaaaatgacaaatttttttacttcaataaaaaataaaacacactgtatgagggattagtgagacaagtccaaatagaatccaatttatactatagggtagagttggatttggtatactagagagtattttggatttggtatagtattagtcaatgaattccaaaaaagtttgttataaaattcactgagttgtaatattactttttgtcattttcctgttttttttttgttttgttttgttttctcttgagacaagagtctcgctatgccacccaggctggagtgcagtggcatgatctcggctcactgcaacctctgctgcccaggttcaagtgattctcctgcctcagtctctcaaatagctgggattataggcgcccaccatcaagctgggctaatttttgtatttttagtagacatgggctttcatcatcttggcaaaactggtctcgaactcctgacctcaagtgatcctcccacctcagcctcccaaagtgctgggattacaggcatgagccaccgcacccaggcttgtcattttcctgttaatctccgttatatagagacaaatgtattccaatataaaatgtcaatcttgctgtatgataaaaagtacttaataatcccagcctgggcaacatggcaaaaccccatctctacaaaaagtacaaaaattagctgggcgtggtggttcacatctgtagtcccagctacccagaaggctaaggtgggagggccgcttgaaccagggaagaggagattgcagtgagtggagatcagagatcgtgccactgcactccagccagggtgacagtgagaccctgtctcaaaaaaaaaaagtacttaagatcattaagtcactttgcagataagaaaagtaatcacaaagaggttaactgacttaaggttacattcgcacttggaagggaagatattccttggagatttggtaaaaggaataaaaacaggctgggtccagtggctcacacctataatctctgtctcgaaagaaaaaaaggggggtaggggggaggctgggcacggcagctcattcctgtaatcccagcactttgggatgcagaggtgggtggggtgggtggatcacttgacatcaggagtttgagaccagcctgccaatgtggcaaaaccccgtctctattaaaaatacaaaacttagccgggcatggtggtgcacacctgtagtcccagatacttgggaggctgaggcaggagaattgctggaacccgggaggcagaggttgcaatgagccaagatcactgcactccagcctgagtgacagagtgagactccatctcaaaaaaaaaggaagcaaacagtagaaaatgaagggtggtcctgaagaaataaagaaatcacaaaatcaaggccagtgatatcaatagaagagtgcagtcttaaagcaagatacatagacagatggcagctcaaactcctcatatctcaactgttattgccagaccaggaaacaagtaatttcaaaacgaacagaaaacaaagcgacagaagaaaaggtaatactgattacaaggtacccaaggacaaatacatctgactgaaaatctaaggagcaccaaagcaaagccatgaaaaagaaccaaaggaacaaaaataaataagaagcaaaatggttgatacattggcaaacagtatttatttaacgtatgtataaatggggtccctgaagaataaaaacaaaacaaaacaaacaatcttcctggtggtctagtgattaggaatttaaaaaaaagaaaaattcctagggatgggaggaagaaccccctcccatcctcagagagcctctaagcaaaaagactaagttacaaaataaagaaaatcagttatcattagactttctcatagaaatttatggggaaaaagtatgagccaagaattttatatgcagcctagctgtccttgaagtagcaagactaagaaaagtctaaaatgtagaagaataccgtactcactagcctttccagggtaatctattgaaaatacgcttcatccaaccaagatatgaccagggaaacttgggttttaaaaataacagaactggccaggcatggtggttcacgcctgtaatcccaacactttgggaggccgaggtgggtggatcacctgaggtcaggagttcaagaccagcctgatcaacatggtgaaaccccgtctctactaaaaatacaaaattagccgggcgtggtggcgcatgcctgtaatcccagctactcgggaggctgaggcagaagaattgcttgaacctgggaggtggaggttgtggtgagccaagatcgcgccactgcactccagcctgggcaacaagagcgaaactcttgtctcaaaaaaaaaaaacgaaaaacataaaacagaattgttagcatcaaatatatttaattgtggatctaagaggaaagtagtgtattaaattgaaaagctgattctaaaatttatatggaactactaaggacaaaaataaaccaaagctggacaatttacattatctaactttaagactgtaaaccagaagtagctaagacaggtttcaatcaatttagaaagtttattttgccaaagttaaagacgctcctatgacacagccacaggaggtcctgatgacatgtccccaaggtggtggggtacagctttgttttatacattttagggagacatgaggcatcaatcaatatatgtaagatgtacatgagttctgtcaggaaaggcaggacaactcaaagtgggggtagggaggtttctaggtcataggaagatttaaagattttctaattggcaactagttgaaagagttattatcaacagaaaggaatgtttgggttaccataaggggttgtggagaccaaggttttatcatgcagatgaagctcccaggtagcaggcttcagagagggtaggttgtaaatgtttcttttcagactttaagagtctgttctatcagtaattccaaaaggtagtagggtgtgatgagacatgtccaactcccccttcccatcatggcttgaactagtttttcaggttaattttggaatgcccttggctgagaggatgggtccattcagttggttgtgcaggggcggggggggcctataattttatttttggtttacaagacataccctgaagcaatagtaattaaaagtgtagtactgacatcaatatacactaatagacaatgtaacagaattgagagtcagaaatagccctgtgatatatgtgactgattttaactaaagttacaaatgtggtttaatagagaaagcatagtagtttcaagaaatggtggtaaaactattggaaatccttatgcaaaaacaaaccaaatttccacctacactgagccacatataagaattaatacaaaatggattacagacctaagtgtaaaactaaaactctaaactgtgtaaaaaaaaaaaagagagaaaaatctgtgatcatggattgcctataacaaaagaacaaactgaaatggccttgttgcctggggtggcacccgaggttcttggtctcacgctgaggaaatcaaggacgctgacacaccaagggtgtgaggctagagcagaagtttaataggcaaaagaaagagactagctctctcctgcagagagaggtcctgaaaagagttcccattccacagtgaaatgcaagcatttttataaatgagctaatgggaagggggtagcttatctacacatagggagcaaaaaaccagttaggaccaggtgttgccatctgcacagagcgtgaatctctggcatcccccaccccaaccttttattatgcaggcaggtccttggcctgagctactccacattgcttatctctttcctattgtgcatgtgctaaataaggggaggtggagccaccatggtggacatgcctggccccaggtacccctttctctccgtgcagctgcaggcaaccccaacaactcacaacatgcaagcttccagcttccttatctgagtatgtactaaggtccactgtgtttacttcacatactgtgtttacttcacatacccaccttacgtatgtgaagcttgctgattacccaggaagctccccctctgtgccagagctgcttccttatacatgtttacagcccgatcttccaggctgctccttgttagaagagaagtgatttcttgggctgctttttgttagaagggaagttctaccgaggactctgtctaactatcggcttacctagtctttttttacctcctctctcaaaaccatcaaagaaaaaactgaaaaattagatttcagcaaaattaagattttctgttcttaaaaagacgttgttaacaaaatgaaaaaccaaagtgtaaaccgggagaaaatacatgcaagttacctatctgataaagatattgtacccagcaaacatgaagaactctcaaacctcaacaacaaaaaaattcaattaaaagatgggtaagttggccgggtgcagtggctcatacttgcaatcccaatctttgggaggctgaggcaggaagattgcttgagcccaggagttcacgacaagcccaggcaacataatgagaccttgtttctacaaaattttaaaaaattagccaggcattgtggcgtgtgctcgtaatttcagctactcagaaggctgagacaagaagactgagcgcaggaggtggaggctgcagtaggctgtgtgattgcaccactgcacaacagcctgggtgacagagtgagacactgtctccaaaaaaaaaaaacaaaaaaaaaaaaaacccaaatgatttgaatagacacttcaccaaaaaagatatacggatggcaaatacactcatgaaatgatcaacagcagcactggtcattaggaaatgctaattaaaatcacaagaagccactatatctattataatgcctaaaattaaaaagactgaccataccaggtgtttgcagggacactgagcaaatggaactttcatacattgctggtcaaaatgcaaaatgggggagctgttctgaacctatttagttgtgggggctgtccaacttttgaatttttctttgctcaattaatctctgttatattaaaaagtaacatggtacaaccaccactttgaggaagagtttgacagctccttaaagacttaaaatacatctaccctgagacctaagtattcactcaagaaaaatgaaagcgtatgtctatacaaagtcttctttaaaattttttatagaaaatttttaatttttgattttaaaataaaaatagaggtttcaccatgtttcccaggctggtctcaaactcctgggctcaagcgatctgccagccttggctatatgaagtcttatacactaatattcatagtggctctacttgttaacagtcccaaactggaaaaagcccaaatgttcacaagcaagcgaatgaatacagtatagtatatacatgcaatgggatactactcagcaataaaatggatgaaaatcaaaatagctatgataaataaaagaaacgtgacaaaaaaggtactctatcattccacgtttataaaaattcttaaaaatgcaggctaatctatggtgacagaaagtagatcagtggttgtctggggacaggacaaggagggatgaaaaggatcacaaaacagcaatccaactgaggccaccatgctataaggaaatccaaaccagcccacacattgaaaccacataaagaaatcttcatgagactacatgaaaaaaagagatagcctgccaatccctagctgctcagtccccagctactgtagctctagcaactatgtaggtgcaaccacgagacagccgcacgaaaactgcccagcacggctctcacaaattcctaacccacagaaacaatgagagataataaaatgttctttgttgtttcaagccactaagttttggcagattcgttacacagcaacggcagccagaacggaccaccaggactgcctttatatctgattctcagtcatttccagtagctcagatttctcaaattattcccaacaccctgccatcttctaccttctcctaccacttcctgaaacttccactgtgctcccttgagtaattcataaaatccactcttttaacctctgaatcatcccttcatttcttgctctaagtaaaatctagctccctgaggatgccttttcctttcgcagccatctcaaatgatagatgtttcctcttttctcctccacacacttcatatcactgtacctactggagatgtggggaagaaatcttccctgctctggctggcgcggtggctcacgcctgtaatcccaagcgctttgggaggccggggtgggcggatcacaaagtcaggagattgagaccatcctggctaacacggtgaaaccccgtctctactaaaaatacaaaaaaacaattagctgggcgtggtggcgggcgcctgtagtcccagctactcgggaggctgaaggaggagaatggcgtgaacacgggaggcggagcttgcagtgagcggagatctcgccactgcactccagcctgggcgactgagccagactccgactcaaaaaaaaaaaaaaaaaagaaaaaagaaatcttccctgctccttacttgcactttcagattattctcctccattcccctctcaaaattcccagccttgaaaatcctgacaaaaagtagccaggcatggtggtcagcacctgtagttccagctacttgagaggctgaagtgggagaatcccttgagcttgggaggaggttgtagtgagccgtgatcgcgccactgcactcccacctgggcaacaaaaagaggccctgtctcggggggggggaaaaaaagaaagaaggaaaatcttgtcaccagactcacagtctattatcgtttcctattgcagtcacctacagcctaccgagtcactcttcctcattccttaatgtttacatcgcagttctctctccaacactactcctgtcataatttttggtgatttaaatatccatgtagatgatcccttcaattaccctatatttgcaggtctctaaactcctctccaccacaatcttgtacatcctctgatgtggtgcagctctgtgttcctacccaaatctcatgctgaattgtgatccccagtgttggaggtgggcatggtaggaggcgactggatcatgggggtgatttctaatgatttagcaccatccccaagtgctgtttcctgataagcgttctcacaagatctggttgttttaaagtatgtagcacttcccccttctctctctctcctgctggccatgtgaagactgtgcttgtttccccttcaccttccaccatgactgtaagtttccttaggcctccacaagagaagcctgtacaggcagcagaactgtgagctgattaaacctcttatctttataaatacctggtctcaggtatgtctttgtagcagtgtaagaatgaactgatacatccccaaatctcagctactcactcacttcaactgtatttatttattataaccaataaccacaacctctccataaatgcagtttcaagaatcccactctcttaaccatcaccttctaggctctgcaacttactcctactagtgatttgatggggacaatcattccacttcattaggactggcagtacattgatcctcccacttttttttttttttttttttgaggcagagtctcattttgtcgcccaggatggagtacagtggcacgatctcgggtcactgcaaactccacatcccgggttcaagtgattttcctgcctcagcctccctagtagctgagactacaggcacctgccaccatgcccagctaattttttttttccaagaggagtcctgctctgtcgcccaggctggagtgcagtggcgcaatctcggctcactgcaaacctcgcctcccgtgttcaactgattctcctgcctcagcctcccaagtagctgggattataggcacgcgccaccacgcccggctaatttttgtattctttttttttttttttttttaaagacaaagttttgctcttgttgcccaggctggagtgcaatggagtgatctcagctgtctgcaacctctgcctcccaggttcaagcaatttttctgcctcagcctcccgagtagctgggattatagacacgtgacaccatgcccggctaatttttgtatttttagtagagacaaggtttcaccatattggccaggctggtctcgaactcctgaccttgtgatctgcccaactcggcctcccaaagtgctgggattacaggtgtcagccacagcgcccggccgatcctcccactttttaaactgtctctcagggtcttaaaatcctcacttcctttctttttttttttttttgaggtgaagtctcactatatcgtccaggctggagtacagtggcgtgatctcggctcactgcaacctccacctcctgggtccaagggatactcctgccacagcctcttgagtagctgggattacaggcacctgccaccattcccggctaatttttctgtatttttattagagatggggtttcgccatatcggccaggttggtctcaaactcctgacctcaggtaatccacccacctcagtctcccaaagtgctgggattacaggcgtgagccaccgcgcccggcctctcacttcctttcttagccagcttaaattccatggtcaatcattaagagaactcctttgtacttctccccctcacttcttcatatccacgtggtaaaatcacaactgcattaatttcaactctccatttactctgtgggtgccctcatacacaatcttgctgtctggtctccttcaactcatgaccacgaatctcaagtaggctctttatgttgcctagcaatatttccactaaacttccctagtccaacccttgcccactcttctaaagaactatctacttcccatcttctctttcctctcccatcccagcttctagctgataaccttgcttctttcactaagagaacagtaagaatcaagagaactttcaaaatctcctgccatcctatctgcccattcacgtatcatagatgtgttaactatatagctgtcaccaaaagaaccgctaatgtttccaacaaaggccaaatccatcccttcttacctactctaggacattgctctagccattgtcttctttccgacatcaactttcccattctcatctttcctatcaacccacaaacatgctgaaacatgttgctcctatcttagtgcagtggctcacactagtaatcccagtactttgggaggcagaggtgggaggatagcttgaggccaggagtccaaggctgtagtgattcatgattgcgccactggcaccccagcagcctgggcaacagagcaagacccccctcttttaaaaccacacacacataattaaaattcctcttaactcacttccccctccatttattgcccaatttctctaccctccatttataataaaatttcgtggtggctcactcctttaggcccagcgactccaaaggagggtcgcttgaggccaagagatcaacgctgccatgggctaggatcatgccactgtactccagcctgggccacagagagcgaacttgtctctaaaaaaattttttttaaatagaattccttgaaatatgcctaccgatgtttttattatttatttatttatttatttatttatttgagacggagtcttgctctatcgcccaggctggagtgcagtggcgcgatctcggctcactgcaagctccgcctcccggcttcatgacattctcctgcctcagcctcccgagtagctgggactacaggcgcccgtcaccacgcccggctaattttttgtatttgtagtagagacggggtttcaccgtgttagccaggatggtctcgatctcctgaccttgtgatccggccgcctcggcctcccaaagtgctgggattacaggcttgagccaccgcgcccggccgtttattttgttttaagacagggtctggctctgtcgcccaggctggagtgcagaggcgcaatcacagatcactgcagcctccacctccctgagccttccaaggcctgaaccttccaggtagctgagaccacagacgcgcaccacaacacccgtctaatttttgcagactcggagtcacactatgttgcccaggctggtcaaatgttgccttggatttctcttctcctactctccaactcactccagccaaattcacccctaccatgctatgcccaagactgaactcctgagaaacctgctctactggcaatcttctctttcccacctcagcaaaaggcaactttatcttttcaactattcaggataacctccgttatcgaatctatctgaaaaacctgttgcctccgatttcaaaatatacccagaatccaaatactttcactctgttaataacatcttgttctgaagttcagatcatcttaacagactcctaagtggttcccctgcttcaccctggcctaatgcccccacctcccccacaccagccagagaggagtgaacaaaataagctactgccaagtcgcggcagggcctccactcaacgctatcaaggagcccaaactgctcgaggaaggagcttgcggatgtggttcgcagggaacggagtgggaaaagacgtagaaaaacgcggaccacaactccagtgagcggatcgacttgatgctgtcccgaggctgcggaaggagagttgggccggaagaagggtgctgagagcgctaatagggagactgcactggctgcgacctcacctggcctgtgccgcgccggaacagcacggaatcctcctgctccgggacgccgccaccactgccgccgctgctcatcgccatagcaaacccgcgggtgcgcagcgtggggccccgtcccttcttaagagtgacgacttccgccgcccggggcttctgggagcggaacagtacggtggccgggaggaccgcttgtagtaacttctcacgctttctacgagtggttatcgccctcccacatttgtggcgtgtatatttttcatttctctcaatcctttcatttcactgtgttatatttcctttccttttttttttgtttgtttgttttgagacagagcctcgccctgtcgctcaggctggagtgcagcggcgcgatctcggctcactgcagcctcgacttcttgggctcaagcgatcctcccacctcagcctccccagtagctaggactataggcgtgcgccaccaagctcagctattttttgtatttagtagagacggggtttcggcatgttgcttaggcctcgtctcgaactccagtgtgtgtgtgtgtgtgtgtgtgtgtgtgtgtgtgtagatatttattccccctcccccttggaaaagtaaatgtaagctcctactaggaatttaaaacctgcttgatctatataaagacaaacaaggaaagacaaacatgggggcaggaaggaaggcagatccttaaacactagaagatatttgatcccccaaccttatttgttgtttgttttgagacggagtctcgctctgtcgtcagagtgcagtggcaccatctcggctcattgcagcctcgacctcccgagctcaagcgatcctcccgcctcaacctcccaagtagctaggaccacaggggcacgccaccacacccggctagtttctgtatgttttgtagaggcggcgtttggagcatattgtgtaggctggtctcgaactcctgagctcaagatattccgcccgcctctggcatcccaaaatgctgggattacaggtgtgagccacctcgcccagcctccagtattcttttttttttttgcgacagagtattgctctgtcacccaggctggaatgcagtggcgtgatctcagctcactgcaacctctgcctcccaggttcaagcaattctgcctcagccccccgagtagctgggattacaggcgcccaccaccacacccggctaatttttgtatttttagtaaagatggggtttcaccatgttggccaggctggtcttgaactcctgacctcgtaatccgaccgcctcggcctcccaaagtgctgggattacaggtgtgagccaccacaccgggcctccagtattctttattaagcatctagggttgctaaatggcttatatgtacatagtatatatatatttttaactccacgaaaggaactttgagctcttcccccaaaatacccttggcttctatatagtatacaagaaatatctgtggaggaaggggagaatgggatgatgttgaccaagtgtacaaaaatggtaactctgtagaggtaatatgtggaatgtaatcatttcacaatgtatatctaaacatcaaatggtacaccttaaatatatacaatttttaggggtctggtacggtggctcatgcctataatcccagcactttgggaggccaaggtgggtggatcacttgaggtcaggacttcaagaccagcctggccaacatggtgaaaccctgtttctcctaaaaatacaaaaatcagccgggtgtggtggtgcaggcctgtaatgacagctgcttgggaggctgagccaggagaatcacttgaactcgggaggcggaggttgcagtgagccaagatcacgccactgcactccagcctgagtgacagagtgcgactccatctcaaacaaataaatatgtacaatttttatgtgtcaaaaaagttaaattgtcacaagataaaaaaaaaaatttaaatctcatgtcaggaaagtaatgtgccaaaggtacatctcacagataaacatgaaaacctgccctccagcctgggcgacagagtgaggctgtgtctcagaaaaaaaaaaaaaagtaaaaaaaaaagtatgtttttataaagcttgcttagatttttctgaatcataaaaattctcacaattgcatttgatgtcaaaatttaaacaaattacctggacatattacatgatggttaaaaaaataaatttaaacaaaatatagaaccaggtttctttttgttttttaatttttttctttttgagacggagtctcgctctgccacccagactggagtgcagtggctcactgcaacctctgcctcccgggttcaagtgattctcctgtctcagcttcccgagtacctgggattacaggcgtgtgccaccacacccagctaatttttgtatttttagtagagactgggttttgccatgttggtcaggttggtctcaaactcctgaccttgtgatccgcccgcctcagcctcccaaagtgctgcgattacaggcatgagccaccgcacccagccatttctttttgtttttattatttagagatataattgatatactatagaattaatcgttttagagagtacaattgaatggtagatagagcggaaaccttaatatattcacaaggttgtgcaaccatcactactatctaactccagaacattttaatcacccaccaaagaaactctgtttcctttaacagtgcgctgccatgctcagctattttttgggagagaaggggtctccccatgttgtccacgctggtctcaaactcggttgcttaagcagtcctcccacttgagccgctgtgcccaggcctgagttactatatttataaaagttatttcatatgatagacaaatcattcaaaacataatgaggtaaactgccaaaagaaaccattttaccatatttgaaggcatttaatgtaaatgttgaatttaatttcatgtactggaatcagtctttttgcatatgtaattttcataccaaaaatctctcttcagttgactcctggaactctctcatgataaaataaaagtttcaaataatgtcggggtggtggctaacacctgtaatcccagcactgtgggagtccgaggcaggtggatcacatgaggtcaggagtttgagaccagcctagccaacatggcaacactaaagatatgaaagtcagccaggcatggtggtgcatgcctgtaatctcagctactagggaggctgaggcacaaaaatcacttgaaactgggaggtggaggttgcaatgagctgagatcgtgccactgcacaccagcctgtgagacagagcaagactgtgtctcaaaaaaaaaaaaaaaaaaaaaaaaaaaaaaaaaaaaaaggggccaagtatggtggctcatgcctgtaatcctagcactttgggaggctgagtgggagaggatcatttgagcccaagtaacatggtcaggccccatctctacaaaaataaattagctgggcatggtggtatgggcttgtggtaccagctactcaggaggctgagacaggaggagtacttgagccaaggaggtcaaaggctgcagtaagccatgtttttgccaccgtgctccagcctgggcaacagagcaatatgctgtttcaaaaacaaactaaaaaaatggtagtacctacatgtgaagattgcatataataaagattgtaaagcagagagaaaaactggacagttcaccaaaaagaaaatccaaatgtccactagagatctgagaagatgcccaacctctagagccaaggaattgcaaattaataactaagataacatttcagggcctggcacggtggctcatgccagtaatcccagcactttgggaggctgaggcaggcggatcacttgaggtcaggatttgagatcaccctggccaacatggtgaaatcctgtctctactaaaaatacaaaaattagctgagcatggttgcggcgcctataatcctagctactttgaagactgaggcaggagaatcgcttgaacctaggaagcggaggttgcagtgagctgagatcgtgccagtgcactccagtctgagtgacagggtgagacttcatctcaaaaaaaaaacaaaaaaacaaaaaatttcaggaatatacctgcctttggtaaaaacaaaaagaaattgtgaaccaggcgtggtgactcatgcctgtaatcctagcactttgggaggctgaggcaggaggatcctttgagcccaggggtacaagaccagcctgggcaacatagggagaccttgtctcaaaaaaaaataaataaataaataaaataaaaaataaaaaaatcgtgaatagtgttgcgatgaataaaaaagaaaaaaaattaaaaagaaagaaaacccagaaaaactaacataccattttcctctcagtttggcaaaactattaggaattaataacatttgatgttagcaaagtatggggaaatgaacttttatcctcttattgaaaatatctgtttgtagccaggcatgatgacttatgcctgtaatcccagcaatttgggaggccaaggtgggaagattccttgaggccagaagtttgagaccagcctgagtaataaagtaagaccccatgtcattaaaaaaaaaaaaaaaaaaaaaaaaaagaaggaaagactgccgggcgcagtggctcacgcctgtaatcccagcactttcagaggctgaggtgagcagaacacttgatgtcaggagttcaagaccagcctggccaacatggtgaaaccccaccccatctctactaaaaatacaaaaattagctgggcgtggtggcgggcgcctgtaatcccagctattcaggaggctgaggctggagaatcacttgaccctggaggcggaggttgcagtgagccgagatcacaccactacactccagcttggacaacagagtgagactccgtctcaaaaacaacaacaacaaaacccaaaacatctgtttaaagtttaagacatgtatacctgtgaaagttgattacataaattgggtcattcttgaaatactcaactaaatcagagttgaagggccagggggaagaagcattcggggcacacagcatctgcttcaagaattaaattttccacaagtccaactgctgaaccagccttctgtatccctaagaccagttttacctaatagctgctaaaatgaactgccatgactctaagactggttttacctaccaccatcgctcaccaatcagagcttgctagctcccacaagctctagtgtgaatgagctttcttccaaaacagtatgtaatactgttctttctcataaaacccggaaccttctcttttttttttttgagatggaattttgctcttgttgcccaggctggagtgcaatggcgcgatctcggctcactgcaaccttcacctcccgggttcaagcatttctcctgtgtcagcctcctgagtagctgggattcaggcatgcgccactatgcccaactaattttgtatttttagtagagacggagtttctccatgttggtcaggctggtctcaaactcctgacctcaggtgatctgcccgcctcggcctcccaaagtgctgggattacaggcatgagctatcacacctggccgcaaccttccctttattctcctgatcataccaatgatcagcccggtctgtgtgtatgccatgaattgcagctcttgcttaccaaataaaatgtttttagagatttgtctctatattatatttggctttgacataactattcccaaggaattctatctttaaaaatccattcttatagaaatgaaagcaccaataaatgggaataagtacgataatccacatcgcagaattgtttgtagtggcaaaagttgcaacatcctaattgtctatgagtaaggaaatgattgaataaattactgtacatctatactaaagttaaatttgtaagtactgaagtacaggcacggctattttttttttctttttgtggaaacagggtctcactctgtcacccaggctggagtgcagcggcaccatcttgggtcactgcaacctctgcctcctgagttcaagtgatcctcacacctcagcctcccaagtagctgggactacaggcacgtgccaccacacctggctaattttggtttttggcttctttcttaattggtatgtttacttaaaaatatagactaatgggctgggcatggtgacttacacctataatcccagcactttgggaggccaaggcgggtggatcatgaggtcaggagatcgagaccatcctggctaaaacagtgaaaccccatctctactaaaagtacaaaaaattagccgggtgtggtggtgggcacctgtagtcccagctactcgggaggctgaggcaggagaatggcgtgaacctgggaagcagagcttgcagtgagccgagattgtgccactgcactccagcctgggcgacagagcaagactccatctcaaaaataaataaataaataaataaaataataaaataaaatatagactaatgatcctgtgcttcaatgtcattgtggttatgtgctgatgtccataaaacataagttataagggactcttcacaaatacactccagacagaagggtaaacagaaatgactgacaagacagtgccatttcagacatacttcccttaattattaatacttgctagaaaatggagtttgacattatttacaattataccaatattcacagaggccaactgtcacaggcattaagggcacaccagggccaggagacctcatttcagacttcccaaatatttttatattttagctattaagatcagttaccagagctcaacttgttcttaacaagcagaatttttatgtccattcaaagagtctcttatacctttctgggcctatttacttgcagagaacagtagaaactgtaaccaggctcttcatatcatgcattcacatgtgatgtccaatcttcatatgctgtccaatttctttaagataaatggagtgactcgcagcagggccacgtagatgagaaagttctgtatggagatcatatcctcgtgcatcttccgtttcatctccgtgaggtccagcttccgggcaaggcccccaatccggaagatcagctgcctcgctctgctctccctaatggcccccttacacccggaactcggcctatcccctcgccccagctaatttttgtatttttagtagaaatggggtttcgccatgttgcccaggctggtcttgaactcctgggcacaagggatctacccgccttggtctcccaaagtgctcagattacaggcatgagccaccacgcctggcccaacatggctattattttttaaagtgctaaattatggccgggggctgtgactcacgcctgtaatcccagcactttgggaggccgaggcgggtgaatcacgaggtcaggagatggagaccagcctggccaacatggtgaaaccccatctctactaagaatacaaaaaattagctgggcgtggtggcaggcgcctgtaatcccatctactcaggaagctgaggctggagaatcgcttgaacccgggaggcggaggttgcagtgagcagagatcacgccactgcagtccagcctgggcaacagtgcgagactctgtctcaaaaaaaaaataaataaattacctgggtgtggcagcgcgtgcctgtaatcccagctacccaggaggctgaggcaagagaactgcttgaacccaggaggcagaggttgcatggagctgagatggcgccactgcactccagtctggtgacagagtgagactccatctcaaaaaaaaaaaaaaaaagtgctaagttacatctaagtttcctatttttgtttaaaaaactccttgtagtgggttgaatggtggaccccaaaatgatacatctgtccatctgatatgcgtgaatgtgacctatttgggaaaacagtttttgtagatgaaattaaggatttccaaatgagatcatcctaggttagaatggaacctaaatccaacagcaaaagtcctcataaaaagaagggaagaagacagaaaagaagaccacaaagacaaaggcagagataggagttatgctgccataagccaagtaatacctggagccaccagcagctggaagaggaaagcaaggattctcccttggagccttcagagggaggtgtggcccagctgacatcttgctctcagatttctggcctccagaactgtgaacagaaatatttctgttgttttaagccactaagtttgtggtaatttgttacagcagctctcagaatcaaatacattcccacaccccttatttatgtgtatgtgtgtgtatgcatgtttgcatgagcactgagagaagtataccattattaacattggttagttcaggggaatgggactggcttactgaaggctgagagagtatacgtgtgtgtatataaattgagtgtatttaaattaagtatatggaagtaaattaagactacaatgagataccactacctcccaccaatatggttaaagataaaaggactgataatacctaatgctggtatggagcaatggaaccttcctttattgctggtggtaaaatggtatggtcattaaaaacaaactaaaacaaaaacaacaaaaatgcaattgtttgatggtacctactaaaaaatgtgtgtatgtgtgtgtatagacacacaccctatgacccagcaattccattcctggcatatactcagtagatagcgtgtttaagaccatcataagatatataaaaatgttacggtagcattattcataacagccccaaagtgggagcaattcaaaggtccatgaaatgtagagtaactaaattatggtatattcatataacagaatgctacacaacagtgaaaaaggctgaactgctgcatagcagcaaaatagagaattcttttagacgtaacgttgagcaaatcaagctaggctcactacagcacataccgtgtgatcccatttacaaaaaattcaaaaacaggcaaaactaatctatggtgataatcagatgggaggcattatctaagagggtgctggaaatgtcctttattgtgatctgaacatagtattcatatacgagtcattgaaatatacatttcaaatgctggctgtttattatcatttcactgggataaatgcccaaggagttagttttcaaagagatgctatttagaatttatggaaatttagaacttactgtattttcccagattttctataatgagcaagcattgcagtttgagggtttgaaagattggtagagacaaaaactgcataagctgcatgattatttctcacacttcagatgcttaccacctttatgatttgccatatcatgtattttaaaaaatacatttttttctttttttagatggagtctcattctgtcacccaggctgcagtgcagtggtgtgatctcagctcactgcaacctcctgggttcaagtgactctccggcctctgcctcccgagtagctgagattacaggcacccatcacaatacctggcaaatttttgtatttaaaaatacagccaggctcggtggctcacgcctgtaatcccagcactttgggaggccaaggctggcggatcacctgaggtcaggagttcgagaccagcctgaccaacatggtgaaaccccgtctctacttaaaatacagaattagctgggcgtggtggctcatgtctgtaatcccagcactttgggaggccaaggtgggtagattgcctgaggtcagttcgagaccagcctgaccaatatggtgaaacctcatctctactaaaaatacaaaaattagctgggcatggtggtatgctcctgtagtcccagctactcaggaggctgaggtgggagaattgtttgaattcgggaggtggatgttgcagtgagctgagatcgcgccactgcactccagccgggcgacagagcgacactccgtctcaaaaaaacaaaaacatacaattttaaaaatttagtcttagcttttcaataagagggattaaaatatattattttagtctgctcagcatccattctcccttccttttggcaaagaaccctaaattttttgggggatgatatagtttggctgtgtccccaacccaaatctcatcctgaattgtagctcctataattcccatgtgtcatgggagggacctggtgggaggtaattgaatcatgggggtggttaccttcatgctgttctcatgatagtgagtgagttctcaggagatctgatggtttcataaggggcttttccccttttgctttgcacttctccttcctgccatcatgtgaagaaggatgtatttgcttccccttctgccatgattgtaagcttcctgaggcctccccagccatacacaactgtgagtcaattaaacctctttcctttataaattatccagtctcgagtatgtctttattatcagcatgagaacggactaatacaggggaccacctactccttactagagttggttttaccatcaacttgccctcctcttgctgagggatgggtacctaacccatgtaacttcagttggaggcactccaagtgacataaaaactaaatatacatgtcagaagttcaacctgatatcagcactgtaagaaaaaaaaacaaaaacaaacacctcataacacctactcttaagatacctgaaactgttacaattcttgacctttccaaagccttgagtcctcaacttttccatgactctggagtctctcattctttcaaataagatttttatcagtaagttcattaatctgatcctgttgcttgcaaccaaaaattccaatatatcatgaaatcaggttagatgtggttatattacttcaagtatatactaacccatttcccgtttgccccaagaatactcttgcctctaatcctaatgtaacattatatacatttccattatattaggattagagacaagttctgtttagaaataactctaagaacagtttgtgtattttcacattgaaaattaatttgcgtcaacctcagagtgtgtttatgtaaaattaaatgagcgctggcagccagctgcactttttttttctttttttctttttttttttttgagacggagtctcactctgtcgcccaggctggagtgcatggagtgcagtggcatgatctcggctcactgcaagctccgcctctcgggtctatgcctttctcctgcctcagcctcccgagtagctgggactacaggcgcctgccaccatgcccggctaatgttttgtatttttagtagagacggggtttcaccatgttagccaggacggtctcgatctcctgacctcgtgatccacccacctcggcctcccaaagtgctaggattacaggcgtgagccacggcgcctggccacttttattttctaaacaggaaatgggttaaatacgtaactctgtatgaaatatccattcataagctaccctaacagcccccttgagtggtataaggctacagtctttgaccaaaaaaaaaagtatttgacaaaaacttatgtcatgtgatatatgttcataaaaggcaagtatttaataggattatgtcaattatagccaggctggtaggtaaatttcttttaaataccaaggctcagccagactgctgcaaggaagtgttccagaacttatgtaccagcaagcagtcttgtccaagtggtaaaacagcaagagtagtatgtggaatggaaattcggtttgtatgtttttttttttgttttttttttgagacagagtcttgttctgttgctcaggctagagtgcagtggtgcagtctcggctcactgcaacctttgcctcccagagtcaagaaattctcttgcctcagcctcccaagtagttgggattacaggcgcccaccaccacgcttggctaatttttgtatttttagtagagacggggtttcaccatgttggccaggctggtcttgaactcctgacctcaggtgatctgcccacctcagcctcagcctcccaaagtgctggattataggcatgagccaccatgcccggccttgttttttatttatttatttctttgagatgaagtcttgctctgtcacccagactggagtgcagtggtgcaatctcggctcactgaaatctccacctcccgggttcaagcgattctcctgcctcagcctcccaagtagctggtattacagg

SEQ ID NO: 24 - DNA, 24970 bp, Homo sapiens
tctaactgctaacacatattctgatcaagccagaagtttatgtgatttaatatatctgtgtagtttaactagaaacgtatatatgtagtttgggccatttttatttctgtaactaaattgtggggcaaaaaatatgatttgccaatgtaaaaattttttcctttaagttactaaccaagaagctaggtaagataagaaatgaccaaacaaaaataatgataagaaggacagctattatatgataaactttagacttgaaaattaggtaataaagttaatttcttcagaatatcctaaaatgtaagtttgtaaattgataaagttcagaaaaacttatccatcttctactcatcaagatagcaaagtaagtttttcacaaaattaagactgagagttacgttattttttttgaagtggtaatcttgctctcatctaatttttaaatacagaaataaaaagatccctttgaattaatttcaagtagttttaatacctctcttaaagtaaccccttcagttctgtcacatttatatacacccaactttgaagcctattaagaatatctttgacatgtgagtaccctaacagtggctctggtttcttaagcacaaagggaaaatggcagggtttaatttctttggtgtacatatataaatagatgtttcaaataaaattaattgggtaaatgtgaatatggtttgaaccagccagagtatgataaacttttaaaaaatttttcctcagtgatcagccaggggaaaaaatatatgtacagagctcctgcccctctgcccccttataacttagcttttgcctctggttttgcagcaggatgtgtgttggtgggtttggggttccttctgtcttcggatgtaacagtcatgttagcaacaatattttgcagttacttcaccatcctcagcataatctgcctctctctcaatcttaatacagacaaataggtatgtctataaatgcgttcatatagtgtcaaggtagggaagactataaaaacttcagatcaggaaaaaaatatctcttaagagagtgtcttaaacattttaaattgctaggcaatttaaatctctctaatctgaatattcaccttttggtggaaagagccagtaatattggttttcttccactaaaaagtttcttcaaaatttttttttttttttttttttttttttttttgccgatatcttttacaggcccacctaatctttaaaaaaaagagaagaaacaattttaggcctgtataacatcctatttactacttcaagctccacaaatgtagttaatatatttgtttaagagagactttactcttaaatgttttaactttgcctacttaatggagttggatgtccagtgttggaaacagtcagtgtctgtttggtggctcgtgtttatttttgtcactgtagaagtgatctgctctggagtaatttgctgtatgcttattactttccacctttagcgttttgtgtactaatgctatgtactgctcctatatttatatatacatatatatatatatatacacatatatattatcagagtaatcttgctttggactgttgctctaaaactatgaatatgatgtagagactactacagctgcagtgaatgttaaggagtcaattcccatggtttagtttagtctcgggctggaagtctacatcttttgacctcttttgttttatatgatgctttttattatgtaggcactgccatccctgaatattccttgtaaagatgcagtgaagaagtcaatttaaaaggaagacaaagccaccgctgtctgtaaactgtaaatgtgtattttggcacttgtactccagtattctgaaaatagagttatgatggaaatgctgacagatccttaatggtggccagagctaccatgcagtgcaaaaataaattaagtgaaaatgtattattgagattaacagtgcaaggccaatacattttataaatctgtcagtatctttttaatggactgtgtatgtgtagttatgttgaaagatacattgtgtatgtgtacatgcttttgtgtgaattcaaggcacactgtaagatgtatttcccttctctaaaatccatgttgaaatgtaagtacagattgatagaaataggtgttttacttaaactcatataatctgtttcagcaccttttttaaaatgtataattgtactgatttgctgagagtcatttgaccaaagtttggctttattttgcatacaggaaaaattagcccctagccttttctcaagaagtgatgctgtttctaaagaagaatagatggggagatctgagacatccagagagaggacaatgtgtccaaaaccagctgaaggcagagagtccatgcctcattcattttaggagtccctcatgtctaacaccatcttctgtgtcctaaagccagtatatatataatatttttaaaactctgcaaagattggaacaagaagtggtgggatacattttttggcataaactgggctatgtgtgcccggtattttttctttcccccctatttctttggagggttttgttcagaaacaatgtgctatagccagagagagtcgatcttacaaagtccctgcatttactttcacagcaagaactgctaccttgattagacaggaaggagaacaactactacaacaaagagaataaaatacattcagtttggtaaataaccaaggaattggatgtgatgctcttacttaatagtaaggagatttacatcaaatttgagaaactgactttatcttcattcaggctgacaagccatttaggggattagaggggactgctttgtctcttatcaacccgaaactgagtttaggtgtggaagcatcagtcccagatgggttggggtggcagtagaactttctaatgaccatacttggattggactaatctgttcccttgttgtggcatagatactcaattttatttaaaataatggccttacaccttctccactgtatagaaagggtcaagatcagccccaggccctgctgaagcacactcacccaggggtgcactgcaccacatggttttccccaataatttgtttcctgtctctccaatttatggccccatttcgatatgcaaggaaacctggagagagatgacagataaccaagcctgacccccagacctctctggttgctaattcagggaaataagtctccaaaactagtggtcttgttttattctgattagtagaacaactaagggtattttattggtttccttgccagggataccacccaaatagaaaacacggagcacatttcaaagcttctgctttctctgccaggtaatagtatccataccttcctgtttatgcggtccccttctgtagaggcgtttccaattttttccagaggttgttaaattgcctttggctctcagcttagcctcttggtcttaatttccccttaattaaagaagggtaaccaatgtggtccctaggagctagtgagagaaatatacggcacaaaccagaaaacactctgataatgataactgggccctatggctcttaaataacagcacaaatagtcttcgacctgaatgagaaggctccttgagtccacttttataacaattcagggtgactactagggcactcggcagtccgcatggaatgggaggtgcccacaaggagtgggagatagatggtgagtaaagacaacgttatttgctcattttccccttaatcatgtagtcatgtctcccaccccatgcagtccccaccacagagttctgaggcttcaaaagggtagaaaaggataaatccaggccattaaaagaaaataatcaaagctattgaaaagataaaacaaatgagtcgcactaaaagggccgtctgtgcaagtaacaaggttgaaatactgatactgatttcctagccgaacagcattcctcacacatgtggtttgtgtatccgtgtctgggtgggtggtctggtgagaagtgctaaacgcagcaagatggcttagtttttgagcagtggagggaagctttgggacaggctcagcccgtggcatctatagtccctgcaacataaagaggctttccttttgctttgttccaggatggaaagttttaacttggcttattcatttaaatgtgagtctctattctgcacagaaccaatcagagggtaggagtgtgtgtgtgtgtgtgtgtgtgtgtgtgtgtgtgtgtgtgtgtgtgtctgtgtgtgtgtatgaaccttcttgtctctcgccaccccagccctaggggatgggatgtgtggcatagaatgtataactcttcatttgttggaatgtattccctgggtgctaagcacctattaacatctcttttgaaagggacgctgttttaaataacacctcggtctagctaggacaggaaatagcattaaattaaaggtacacacgaatacggtccacaagcaatctaaataaaggtggactcccccaaaagcacatctatactaatgagaatgccaaatgaagcgcgcttagttcaaaggcggagacttcttaagggaagcttcttttattcaggaaacacgatgcccgacgatggcttttgagagacacaaatcattgccaactcacatctgaagacaggctgcttcatgaatatccctcagaattgttagatgtcgggagttttgactttgaatcagttgggggataaatcattgttttccaaattacaatacttatttgtttccatgtttattatctgtctcccccactagaacagaagcacctgagggcaagaagtttggtttgttcactgctgattccaggacctagaacaagtccaagacatacgagacacctctatttatcaaatgaaaatgtgggagcattttgtggaacatgaacctcttttgacatttcatgagaaatggttttgcgtttaagtttggaaaaattgcccagtatatgaccctcttggcaattcatgacgtactaaaatattaaatcttggaaagccacatgttccaccaatagtcaaacttgtttaactttatttaatgcaatatttcccaaacagtatgtaacacaatagtagttatgcaagataataatagctgtttggcatttaaaataatgtttctttatcaaaatagtttttattttattttattgtttttttatgagacggagtctggctcagtcacccaggctggagtgcagtggcgcgatctcggctcactgcaagtaccacctgccgtgttcacgccattctcctgcctcagcctcccaagtagctgggactacaggtgcccgccaccacgcctggctaattttttgttgtatttttagtacagacggggtttcaccgtgttagccaggatggtcttgatctcctgaccttgtgatccgcctgcctctgcctcccaaagtgctgaaattacaggcctgagccaccgcgcccagcctcaaaatcgtttttaaactgtatttcattcttcaaggtttataacatagtttgggtagcacagtttcagagaaggacaacacggctattactatctctagaagtggttttctggattagctaaccatgtaactttttggccaaactggaattttttttttttttttttttttttttttacatacaggatttctctacgttgccagggctgtagtgcagtagctattcacaggcacataataacatgctatggtcttgaactcctaggcttaagtgaacctcccgctttggtctcagaagtagttgggactacaggtccataccactagatctggcaaactggaacatttttgagaaggaaatgggacactattaataatcatcccaggacaacatgaataaatcaaagctgtctttggcaaatcagggcatgtggtcactgtagtttcgaggaaaacactttgggacatgtggaactgaaagtataccttcagatttctctttccatcacttttatcatatgcacttatgatgcatatggtttggttgggctgtgtagggtagaaaaaatatctttcttcacccattgcaaggttcatggctgacacccctacattaaaaatagattaacaagagagaagcagagcagattcaaccaaagttttgtgtgacatgggagccattagaaatgaaggtccaagagacccagaggaagctccatttttatgcttaactttgatgaagaatggacagtcgtacggaagtatccataaaggcggtatgacctaatggtaataaactgggggcacttagcaaggcctgattgttcagattcttctgacctcagggtatagggcaggactcctttggaatgaggatctttttgacctcctttcaggtgaggtaagtcagaaattttttagaaggactctcgccttgttgaccaggctggagtgcagtggcctgatcttggctcactgcaacctccgcctcccggattcaagtgattctcctgcctcaacctcctgaatagctgggattacaggcgtctgccaccacgcccggctaactttttgtatttttagtagagacgaggtttcaccatgttggccaggctggtgttgaactcctgacctcaggtgatccacctgcctcggcctcccaaagtgctgggattacaagcatgagccaccacgcccagcacagaaaaatttttaaatgaccaatcttcatgggagaaatgtggcaaaaagagtgctctttctgcttctgagttttgtcagtttccttcagtttaaaatactcagtatgccaaggtgccatattttgggatattgtgttctgaaccttgacagctgctgctttgtggtaacaattgagcatctccctcatattaagggtaggcccacaggatccagggtttaaagggcgttgtcagtgttgctgaagaggctttgcaggtgatgtggtctccaagccagcccttccttcctcacccccgcccttgtgttagcctatcagttgaacaggtgaataggccggtattgaacatcagtcctgcaaggaagaagggcgcattccatatttggggtctctggccccatttcctgagcctgttgcatgttgaggttgtgtttgttttcctcaaacttgacacctttgtttgagatgctacctcttcattgtcacctgccaagtcattctggctgccgctgccatgtccagggtggaattgctcagctggcaggtcctctccctgttagagcatgttctggaactttgtaggttttcactgtgtctccaagtcctactacctgataccctttgatattttggtgattccaagtcgtatgggcacaattcctagcgtagaccaaatgctcaaaaaatgatgaaccgattaaataaatggccgtaaataaatatcttccttggcttgcaagtaagttgctaccttgatgccaattctctgctgcctctttccttaaaagtgtgtcttattctgctactgtattaaaggtagtataacattagaggcagaaagatttggttttgaatgccaggtctgtcactcctagccatataaccttaaaacaacatactttcccacactttggttttctcatttgtgagatgagatgaacaatggacctctgtttaaggtgattgttaaaattagatgtttgtagcacacttagcacactgtgcctggtccacagtaaagtgcttaataaatggtagtcatgatgctgttggagtctgatgaaacaattctctattctctagttggtggagaattttgccaatatgtaggattacactggtgctgtttgccattcagccccgagtgtcttcagcctattgtgatcattgcccttcctcaggtgcacattcttgcagggcagtcatcagctatgtaactgactgctgctccttcaaagctgttttcagcccattggaatgaaagggagccaggtctcttgcctcagagctgggccacataggactgatagagttgaacccatttccacctgatgagctcaattgctagaggtaacactggtgaagctgaggtcataggttcaagccccttttcaacccactggtttgcccccttgcatgactacacacttcctgagcctacacaaacatgtcatgaatagtgccctggatcataggaaggacagtgtgagagcacgccctttcaaacatggttgtatagtgccttctggagaagggtgggtatgcagtatgagcatcactgtcatctttatgcagcagtgccttacacctttggtgagtggtatttgcgtgggaagccattctctagagagtgttgggcattcaccggagtaagcccaagttgtgatcttggttagccagacgttctactcatttatttaccatgtacaagaccttagaatgatgtcactttttcttaaggcacatataccacatagaaatggtcattttattgtatagtctgtgattttatttatagcaagcatctcagtaacctttatttcaccattatactcttaaaagccatatcacagttttgaaagggatgtggctagccacatcatcttatagaggatacaaatgtagccctttgctatgttgaaatgcaaagaaatgctaatgtagtcactattattctccaaattatttttttctcttaaatattgtgtgatgtgttagtttcctattgttgtaacaaattgccataaactttgtggcttaaaataacacagatttattttcttacaacttcaggggtcagaagtgtaaagtgagtttcactgggttaaaatcaaactgtcaacaaggctgcatttcttccagtgtcttttctgggggagaatccatttctctacctttttcatcttctagaggccacctgcattccttggctcatggcccttcctctatcttcaaagctagaagcatagcttcttccactctctctgtctgaactgtgtctgtcttccatcatttttttttcccctgaggcagggtctcgctctgtcacccaggctagaatgcagtggcgtgatcacagctcactgtagtctcgacttcctgggttcaagcgatcctcccacctcagccttcctagtagctgggactataagcatgcaccaccacaccccgctaatttattttttgtagatatagggtcttgccatgttgcccaagctggtcttgaacttctggcctcaagccattctcctgccttggccttccaaagtgttgggattgcaggccatgagccaccatgcagtctttctttcatcttctaatgaaacttgaattatcttgggaccacacagataatctaggaacatttccctagctcaaaatccttaactttgctcatttaccaggtactgtaacatattcacaggttctagggagtagaaagtagtcatctttggggaaccattattatgcctcacaggtagggaggtgccagctttgaaatctccatccttcagaatgtttaagtaaagtctatttaaatatctaagcagaacttatttggcccacattaaaattaaagcaatttgctgctagttccagttattcatagtaacataattcatgatgatgactgtggtggcaatttcttccgaagttggagacagatccacagtaagacatcttaaaagactcatgttttagccatggtaatgggaatcattcgtgagatatttactgagtgcctaccatgtgccgaccactatcctgaggaccctgtgaaaatatagctgctgtgtccagagtatttcctttccattttgctggtagtagaatctcttcactcctgagcaacaatgtcatcatgtggttagaacttctttgaagctatatggaaatccttaactggcagacagactgaacaccatttctgggctcccagcctccttattcccattacagatgggacactttttaatttgatctgaatttcataggctttttagagagacctgaatcaatggttcaacttaaagctatgcacagcgagcagcctggagcaccagcccagctaagtgggtcccaaagtcgatgtatagttcctttttgctgctctggcttggagaataaagattaaaagctgataatcccagcttcatcttaaagcactcaattcagtgttttccatatgctgagctgtggtctggtttcatcacctaaggagcttttacaaactactcctctttgagaggttctgagtcagtcgttttgcatgaggccttggatactggcatcttcaaatgctccccagattattctaatatgcagtcaaggtgggagtgtaaaaaataaagtcctggttcccactgccagggatccttattcagtaagtcctactgaattgtgaacgttcctttggtgattctagcgtgcagctatgtttgggggctgccatcctagcaacaatcttttggcacttttagctatcaggattctgttttccttgtcacaaatgtagatttctgagggctgtctccattccaggctttctgacccagactctgggggctgtccctagaaagctgcaggcttaacacacatgcttcaggtaattcttatcagagagttgtaggaaacattgtgtagtggagtgctacaaagaacttaaagctgtgcctttacttacttagagcaaactaacccgcattctcagctccagcatttggctgattttcccttgtggccagtattcctgaggctgggttgggagtgtatgaagggcaaggttatatgctggtggcatggaatgttttggtccctgattgattctcctcagcctttctgtgtgttgatggctgcctggatagtagatatagttgcctgttaggttgtctggtaagttatcaataaaaaaagatgaagaagtcctctaaagcactgtagataagaaaaagtcaaatcaaataaaactcaatctggacaacagtaaaccagaagaatgcaccaatcgaattttctctgagggagacaactattggcactgaaagctttggtctgtcctgattcagcaaacccacaccaagtataactttttaaagtttcttttacataatcaaatttgtagcaattctagcgtaagaagaaaactgtttattcttgtttcagtgttgcctttttaatttaaaaatatatatatacttttaaacatacagaaaataggaaaaaatagcacattgaacacccatatacacaccagttagattcattaacattttgccatatatgcttcatgcgcattttgcaaaaccattttaaaacattttaagggacactataacacctcattcttaaatcagtatgcaaatgaaggcattcttttataaactacaacatccttctcacagctcataaaattagcaataatggtctagtattcaaaatctagtccatattcaaattttctcagcccccttaggtttaatcaaagattccacattgcattaggttatgatgtctcttaagtagcttttaatctggaagagttacccgttccacctttttttatttttatttttggcaacactgatattttgaagcaatgaggccagttatcttctataacattctatattctggatctgtctgatcgtttctttagtggtgtcatttaacttgttgctctatccctagcatctcctgcaaacaggaaattagatctaaaggcctgattaaatttcagttaaagttttttgaccagagcacttcacaggtcatagagtgtaccagtgcagtatgcgtaggtcataccgcatcacaggtcagaaaacatgtctgttttttctgactactagtgatgtaaaatgtcatcagagcctacggaactctttattgtaaaagtatattttttccacacaaccaaccagtaagtttttggtgaggtgatactttgataccatgagaattctagtagggatgtagctcaaccttttatctaatagttttggtatcagaatgtctttaatactgttttacattaacctttcaactttttaacattttaaatttaaaaatattccaagacatttgctttccacaaaccataaaattttacaaaagtaagattcacttttataataatggcatatttactcattaattggaacgtgagcactctccctctttttaattttgcttgagccctgtataatagccagtatgatagccacttaatgtaccaagagattagcatacttcataaaacattaacatcatcaagaaaatctagacctgtgggaggtggtgggggaatttttggtggtccagaaggaaatggaggcagcaagcatgaggggaagcagggtggtgtgggtggtgggctactgaatttgagacctgacctggctttcgtggtctcagaattccatggagtagcttctgacctgatgctaaatggtttgtttccaggacctggagttctcactttcatccattgaatcttgactttcattttcattcttttgagcattctgtcctatattattagctacagaggttgaagaaagtagatcagacagatttgctcctctctatttccatatccagtgtaaatcacaacacagctttctctcttcatatcaactgaagcaatggtagcagagtaaatgcagctgtcttctgaccaaatggcaggacatttgtccccaactttccactacttcaagaaagttacagtattctttttttggcctttatgcttcttagcaggttttctattaggcatgctttttggtttatctgaggtttcacaaatgtcatcattctttagagcctgtttaaatgaagccacagctttatcatccacttctatcagtgctgtagcatcccaaatgtcagaaacgtcactctggcctatgctgcactagaaatgcaccaaatcttcctgctccaggatgccacagccactgctggcactgcccattgccatcgtaagcctactgccagttttacctttcaatgaatgcattatttcctaaatactaagcacagtcaaaaattgtttccctgagatgatatagccttctcctttggtggcatatattaactttgttagtctcaatatgactaacagtttggattttcaagttcaagaatgtttgtgcagagtcatctgagtcctccctacaggtggtttttttcagcacattttacttagtcaaatcatcaaactattgatcatgtccccacacctaaccaatttataaaactcaaagccatctgcgtggcacggactctccgtagtcttgattgcagagttgatttatgacctaaagaaagagagattttagcttagcttttggatatattcccttctgttgatcaaagatgatggtggttttcagtaagttgactgagcaggaatagaactttttaagtcatctcagttttataggattcaaggcatttcttttccaaggctgattattaattttgcattgaaatccctcataacaataagcctgttgcatagaaacaaatttttgatgaatcatcaaatcatcaaatattttctctttcttcaaaatgaagggcatccatgctaagttacttctgatttaaagatattttaaaaggatcatcaaacatctccacttgatggctatactttgtaagaaagacattttctctgataaagtgtaattgctaccttcttctctgagcatttctttatgaaaaggtggttggtttcactccttgagtgatccctaagttgatttaactctgggtcagtttgtcaattttagttggtaacaaatggggaggaaggcagatttcctgaagggcataaaaataagatattcattttaaaatcccctcctctttctctttgaactgatttggtacaccaggaaggtgagtagaactgatatatagcatggaaacctgaataattttcacaaaccatgtggaagcctttcttttgtcttaatggaggaattttgaggatgaacccaattggaaggtgtaggcaaattcataattccttggaattttcttgcttgtctgatggcaaacttaggatgaaatgtaatccttcattgtgacaaacatgcctactgtttggcagatttgctttttcatccttctatgtggcttttaattttgtatgctactaaccttcctgaatgtaggtcctttacactgcctattatttcaatagcatggtataaattacagttaagccaataaataattgtttctccttctggcacgtccatcccacagttattctttcgttagttgttgactgaagtgatttgccagactgcaaactagctctgaggatcccaggttgaagaagaggctcaatacagagcttacagctagagaggtattagacaaagaaaccaaaggttataagacaggtggacatgtggtataagagagttgagaggacagtgtaaggatttgaatggagttctacagagcaccaaagatgcttgtaactgaacctgtacaggaaggcattctaggcagagggaacagtagggaaaaagagaaaagtatacagcatttggggcaactacatgtagtttggtatgacttaaaggcggagtgcaagtggtaggaaagcaggagataaaattggagaaataggcagagaccacatgatgtcagaccttgttgctagactaaggaactcgtgcttgatttagtggataaatgggcagctatagtgggggtggaggttggaatagcatgaacagctttgcattgtgaagtaggaccccatacttctcctccagagagtatctactgtaagtatcctatgatcccaagcttcacacttttaacaagaatctttgcatgtgtatctcactgagttttcattacatttttattatattggattatctattgctgtgtaacaaattgccctcaaaagtcagcagcttaaaacaatacatatttattatgtcacagtttctgtgtaatctagatatggcttggctagatcttgcagctcagggcctttcctatggatgaaaccaagttactggttcaactggggcatggtgtttccaagttcgcttagtgattgttggcagaattcagttttatcatgggctgttggactgagggccccagttccttgctggcagttggctgaaggacacgctcagtttcttgccacctgggcttcccaaactgccagattgctttattaaagccagtaagagagtctgctggccaggcgtggtggctcacgcctgtaatcccagtagtttgggaggccgaggtgggcggatcacgaggtcaagaaatcgagaccaccctggccaacatggtgaaaccccgtttctactaaaaatataaaaattgggtggatgtggtggcacgcgcctatagccccagctactcaggaggctgaggcaggagaatcacttgaacctgggaggcagaggttgcagtgagccgagatcgcgccactgcattccagcctggtgacagagaaagactctgtctcaaaaataaaaaaaaaagtctgctagaaagatggaagtaatagtcttttataacctaatcatggaaataatatcccatcacttttgccatattgtatttattggaagctagtcacgatgtcctgcgctcactcaagtagaggttccctgtgttgccaggtcagtaggaggaatctagaatgtcatctggatggctgtccactttgaaggctggccttcctccctttaggagtttggtggttggataaggaattatattgtttcttgaaccaaaagtgctggatacctgaaggcacttcctgatatcccaggcacttggacaaacccaaggaagcaggggtacttgtggaaattttgttcctcagtggggcttccttctcctcccctgaagggaaatatggcagagctctgaggcctgatggggcaggaagaagagattatatagagaaaaagtctcagctgggatttttttagactgcttgtttatggcttcaccaattcaactttctggttgtaaatcatggccatttgtctttccctcagggatggttttgtttttggttttgggttttttttgtttgtttgtttttgtttttgtttgagacagggtcttgttcttttgaccaggctggagtgcaatggtgtgatctcagctcactacaacctccgcctccctggttcaagcaattctcctgcctcagtctcctgagtagttgggactataggcacccaccaccacgcctagctaagttttgtatttttagtgcagacggggttgtagatacaggatttcaccatgttggccaggcttggtctcgaactcctgacctcaagtgatctgcccaactcggcctcccaaagtgttaggattatgggtatgagccaccgtgcctggcctctgggatgtttttaatggctggagagcaacccacctcctgactggctgtttggaggccacatttcaacaacatatattccctcccagcactgaggtggcagattctgtccaggtttctctcttataacaggatattccatgcaactatatatttcatctgtaaaactttccactgggattatgactttctttcaaatgtaactgaccctgccctggcattgttttcatacaactgtgtgtcattgcctggcctggaaaagatgccactatccaaatctgctcttgcagacaaaactaaaatttcatttccaaagatatttatccattcaataacatttatcgaatgcctacaatagatcattcttggtgctaatcagggagaatatagcacagtagctaccctctaggagtttacagactagtgtatttgaggttgatgtgtctcattttatataatcttttccctcacacaaacattgcatctagtaaatggttccaagatacttacaaatattaatagcagtgtcacattgttcctcaaaatgtcaaaaaatttatatgatcttatctgtcctgcactttaatgctatggtgtatatttaataaaggattgaatttggtcgatgtcaagagtgacgtgaggagaccctacaagataagtgagtctggaggagtgtgagtgtgcatagcagattccagacccagcctcccggtgatttcttgttcatcttgttccatctcagcttcccactttggtcaaatcacccccaattgaatgagcatggcaaaaatatttcccaaaaagacattttgaacttgcgaaaaaagacattttgaacttgggaatagcggttggtgagcccatagtactagttgtacttactggctctaagaccttagttaattaacctccctaaacctgtttctcaactgtaaaatggagataagaagaatactttaatgcatttatttactaaaaaatgttttattgaaaacaccattcttgtaggtcctggggattcaaagtgaacagaagtcctgtccttctccagctactttctagttggtggagacagtaaacaaatatgtagcaggttgacagtgggggtgaaatgaagagaatgtgagcaacgaatgggatgtggggaggagatgaggtacaatgtacactgggcagccatcttctccctgagaagatgacatttgagagtaaaaaagacaagcataggggagagaggggagttagttgacaaatgagggcaaccgcaagaccagctagagtgcagaactgaaaggtgattctctagaaaacaccatcagagagctcacaggggcctcatgacagcccacagtaggactttacttttcctccaagtgagacagccactggagagttctgtgctgagaagcatcatcatctgatttctgttttaaagatcattctggagtttgggggtggatcaaatgagataatgcctgaaaatcagcacaatgcctggaacatggtaaactcacaataaagattaactccagggaagaggggcctacaattacacagcatcaagcctttgggaacacgtttgtacatttctgtgtccttcaatcatatagacttggatcctaagaaattgagttttttttaaaggatgttcactcaaaaccagtgcggtttacccactttcagggatgccaaggggcataaattgtagagaaggcttagctatttagagtttagaggctcaaaatgataccatgtttaaggatacctttggagcagctcagagcatacccacagaaggccgagaggctgccctctgtgcatttttgctaacagctttgcatagactggatttatgaagtgccaccccatctgctaagccccatggagattcagaaaagccgaggctgattttgatggtgtggaggcatgagaaaaccaactggagattgatgcagggatgaaggtgggtgctgagccactgtgccaaatttagtgtcaacactgaaccggaaggtaggaatgagtttatactgagaaatagcaaatgagagcctgctcaagaggtttgctgagaataagtgcttcttaatggattacgttgtgacttgaaattgaaaattaatacacagaaagagtcaagctcagagaagggcaacctggctgctcaactctggcctgagagatggtcatgggggtttgggtagaagatgattcctgtttgcaagtatgagcaaattttgagtggaggaggaagtgtcttggaaacacaatccttcgtaagtgtacatccaaggtgcccattacagcaagttcttgagaacggtgggtccccggatccaccatgtgcccagcagtttctctgcaatccaggaagttaggcaatggggctttttctctctcttatctgcagaatagaaaggatccatggggcatcacagagcaccgagttctttccagccacgttgcctcttctaacagcatttgcttcagtggtggtttgacagacttgggtgttttagcaaatgtgcagggcctaaggtcaaagaaagcaggccggggtgcactctggtccccattgttcccttttcccttcttgtcttcatttctgttctcccaggtttccctcaggtctctcctcactccttccttttctcctgtcactcattgttctctctcatttgctttcttctcccgccattcttttatgccagatttctcttctttaatcaccgctattaagcatttgaagcagtgagcgatgtgtgtgttcggctgcaatcgttccaaacattggtcgttgccatagtgttcctttagcatgacgccagggaagtgtagaaggcttttgtgtctgccctggggaaggaggacagcctcctgaaggggtctgagtgcggagcaagaggtggatagtaatttagaaagcaggaatttgccgtcaaagctttggggaggtttagaagaggctatttataatccatcagggaattaaaaagaaaataggcaggttctgggatattgctatagatcacctagacaagatgaaaagatagagcagctcaggaaatgtgtttacagataagaggcaagttttaaaagcagggccgtgatcatggggactttgattacacctactaaataatgtataaatgaatgttattcaacaactacagacattgactgacaaaacaacggtgggcaaatggaggcaaaagcatgagccttagcaataaatctctgtagtccaggctccgcgcatggttactcccttgtggccacggcctttccctcttgtcctacagctaggctccttgcagctagctttggggggagttgatacatcattcatttgtgtcttcatttattgtcacacatttgagtaccgactttgggttcagattggatgcatttaggagaaaagattcagcctcagccctgaaggacctcatgggaggcagacaggaaacaaacccagctaacaaaaataagacaatgaaacacgtagagatgtaaacaaaatgtactgaaaacctaggaggaacacctcagtatcagaagtaactcagaactaggacctggtgtttttcaactccagtggaaagagtcttgagatattcctaaatggcatggagagacaaaaatccagcaatcttggacttccctctttcctagtcgggattaaatataaatatcaagaatggcatacattcaaagttccctgaggagctagaattgagtccaaaatgaatctagccttcgtcatttatttcccccaaccctcaaaataagctggtttttggattttttgttgttgtgtgtttgtttttttgagacatggtctcactctatcactcaggctagagtacagtggtgcgatttggttcactgcagcctcaacttcccaggctcaggtgatactgtagctatgcatcaccattcctggctttttttttttttttagagacaatgttttgccatgttccccgggatggtctcaaactcctggactcaaatgatcctcctgccttgggctcccaaagtgctgggattacaggcatgagtcaccaagccaagccaacataagcattttttaaaaaattatttgagataaaaagatccaagtgggccagacaatgaagagtttgtttcttttttgttacatggagagaatgagaatgtggcaaatttggggagcacatttttctatagttggagaaaaccttgttgatgaccaagacttttggattaaagttgggtttaaccatgtgggttgcttctatgagtcaatacttttaaggtaattcaatacaaagacagtgggtaatatcttgaaaatggcaaggacaactgtatctcacagtcaaacatacccttttctttgggggtcaataaactctaagccaccaatcttcagtgttgtgggaaattcttagaaacctcagaatcgtttcacgaagaccagatgacgtatgttagtttcactaaaaatctcaggcttctatttggcacagaaggtctccttcatcttcagatttccatccagagaactaaagatgtccagtcatcaaaagtccatgggtcattgctaaatggcatcaaggaggaaatacaggggctgtagtaaaccaggctgggagtttggttataagcactcactctctaaaactgattagcagtaatattatgaagcctagcaaagattaaaagaaaacattgtcccaaccaagaacaattaaattagaatctttggtggtggggtgccaggtaccaacactttttcaagcttctcagatgattctaatatgaaactagcactaagcatcccagccctcggggctactaatctcggacagatgtgactcagtaactgagatccagcataattttcaaggtgatagttgtacatgttgctcagtgcagaaaacatggaattgggttactctaaatttgttagagcagggtccccaaatgttaccttttgctagaagtgtggttgggttacaacaaacagattgctatggcagaaagtctgagtagaatgcgaatgagcacaggatgggttcataccactggggctcactaggcctttcttagcttttgttttgaaagtccaaaattcttcttctcccagacaggcatttgaaagactggaaagatttggataggaagccctagagagatagacatttgctgagttgaagccaaggatcgagtctcatgcatgtgaaaatctaatacaggtaaatctccaacatatggcagcactaattcctgagaaaggtcatgagtgagcagcaaaagcatgaacaaagccttcaagcccaaagctttgattatgcaaaatagctatttgtggcacttaagtacagtggtcaccctggattttccagagtggtttagattttggctccattatcagtgtgctacatcaatgtccagttttttgaaatcccagtacctgatgccgagtgaatatacagtcatgttggttgaattgagctaaagtccattcccccctccaagttgctcctcacacagaaccaaactctagccacacagacacccaatgagctgagggcagggcaccccaggaatgaaggtcatggccctgtggcaacctcactggatatgcaaggtggaaactggctttctgctggtgcataagccattccctgccttcccgtcaaacagcccagctctaaatctacatttcccactaccggaacttcttttttgggtactacgactgtatctcagagcaaagatctaggcatggctctcccattcctactaattttaagcactgacatctgctttgggacccacacacctggctctaagcaatactacatccccactccacagctgtggttccccacatggccccgccatccctgtggaatacaaaaattaccttgacagagcacttgtttgcattatccccctggaaaacagggtgcattattcacccatatattttggtgaagaaaagcagctgttttcagctaactagtcgttctcagccctggctgcacccatgcctatagaccacaccccttcccacaaccttttgtggcaacctcagcttaagcttttgtcactgtcttgaaatcacatgactagtgttttttcttttcttttttttttctatttccggtaggatcattagctcatacaagtcatcagggaaggactcatccagctcccatctctttctgtggagcagcataatgactgtgtgcacgcattgcagggagcctcaggcactcagacctacaggggactggtgtgaagctcctcatttcaaatgctccgctctattgctctatctgaacatgaggaccttctcttggcagcttagatcctctgttacagcaaaggattggctccaaccaatgggagccagttgctggtggaaaatatgattaccaacacagaggcagctgctgttgctctttgtttttctaactttcaaaagtgtggaacggtagttaaagcccccaacaatcttactcctttctatcccatttcatttcaccgagggttcaaggtagctgcactccaagtaacatcttcaatgatcatattcaaagcatgatgtcacacagggataagagtagcaatttttttttgaatcaatatgtaaacctgactccttcattcagggttacagctctccagtgttttggcctctcatcacatggctctgatgtgtggatcttttgtatagaacctcttggctggtgaaagtctgaactgaaaaggcaccagtatctgttaagacaatcctgttagcctgttattacctgccaattacattgttccttgtttagaaatccagttgaaagaggcacgctaagaactccatcagaagtagctggtgtggatttttgtaagtatgggtagagaatctgcctacggcaagtaacaccagtgctggcatgcccagaaaattccagctggaggtgggagtaagtggcacttggcaaagttgccctcttgacctacttgtttaatttggatggaaaaatgtgttttgtttatgtatttttttcaggaagccattatggtgagtctttccaatataatttccactgagacctctcttattcagctcaattttctcttgggctgaggctgacagagacatggttggtgggagaatctgtcaccctgtggagctgaacagtcttcaagataaagctgcctgctggcctttcactcccaaattgcctgaaacctggtcacgtcccagccaatgtcctctgccttttgatgagctccactgtgaggggagaactagaaactgtgaggagtgggtagactttttcctactgcgcagtgagatgggaatttggttacattaaaaaatacatctgtattccttttatcatgcagatgaagtaaaaaggagtatataaaataaatttatagttttgcatttaaaagagacacagacagagagagaaagagacatctttggcctttgttatttgtttgacatctgcagtcctgctggaccactagcttggtgagggcagctggcaggcaagcctgtgtgctgttgtagccaagcccctagcacagctcatagtaggggctcagtaaatgttgaattaataattaatctccatatcaaatttcctctttgtccgcagtcatgaaattcatacgtgtcttaagtttcaaagcactgagtgaatatagcttgccctaaagcaaacaaacaaaaatagcattgcttggaaagatctcgtttagcaccttagttaccacaagtgctcattagggctttctttttctcttgaaggtgtacatttggctgagcgtgtgtaagtgggttatgtgactagccaaatgccttctctcttctgtacttgaagccctgctctcccaagctgaagagtagatgactacagggaaaatgtgactcatagcaagtgttgttattaaatcaccttgaagtgtctcttgtaaaagataactccctgcattgtagaaatgtctttgacaagagaggattagggtgaaactgcaattaccttgacataaaggaatgaattaactttccaacttgcatttttgcaaggcatagattcaagctgcttggaatataaacattgaacacattcacaatagcttggggcacttgaaaattctaaagatgggcaaggagccccaagatgctaggcaacttcagaggtatttctcaccacagagggagtgcctgtctggacagaaaccgccagtgcagttgtgcagtgtctgctcatgtgtcagcagggtttaggggaccgtcaggacgaatgcctcctggagctgatgcctgcagggtctgcccggaggaaacagagaaatgctcttccaagatttgacttccaaaactacccattcactcgactcaggaaatattgaccgagcacttactatgcgttggggcgttgggccgtgagttcaggcagtcttggctgtcagggacttggaaaagtcacacgttaaacaaatcgtgtgggcatgaacctcagtcaacaattcatgtgcaaaaatacacacttttgtttgttttctttaagtcaaagctgactctaagctctcatcct

SEQ ID NO: 25 - DNA, 38494 bp, Mus musculus
tgtggcccggacacagtggctcccccgcccccacttatcttgagcttgtttgtctcagtaacattgtagctttatcctctagacccttttcatgagctggttcaccttgagccagtttcagtggttaatctatataacctatctttatggaaaatgccatttgtactttcctaaaagggtttgtttttttgtttttttgagacagggtttctctgtgtagccctggctgtcctggaactcattttgtagaccaggctggcctcgaactcagaaatctgcctgcctctgcctcccaagtgctgggattaaaggtgtgcgccaccaccgcccggctgctaagagttttaatgtagacagctcttaagctttgttgtgtacatgggactgagttaattatcaccaggaaacttttttccagatggtgctgacttaaatatgcctagatttacccagttgtaaattctcaaagtttgaactgacactggcctttttatctcacacagttgttaactttgctcgccttggtagtcacagaaacctccacaccttaagtatcactttcttttcctttatttatttatttatttatttatttccaggcagggtttctctgtatagcccagactgtcctggaactcactctgtagaccaggctggcctcgaacttagaaatccgcctgcctctgcctcccaagtgctgggattaaaggcgtgtgccaccacgcccggctttcctttcctttatgatagtcattgtgtttatatgtatgtgtgtgcgtgtgcgtgtgtgtgtgtgtgtgtgtgtgtgtgtgcatgcatgcatgaatgcgtgcttcaagtaattataagtgtacacacgtgtgtgtgagggaatgtagaggccagaggttggtagcaagtgtcttttcccccatcactctccaccttgtatttttgacagcatctctcactaaataagaagctcatccctctggctagattggcagactgatctacctgtctaagccccgcccttccagcactgaggttagatgcagaccaccgtgccctgctttttatgtgaattttgtggaggttctaaactgagagcctggtgcttgcacagcaggaactttaataactaagacacctccacagccccagtgactttactaatacagcaaggagcttgccttcagtttctgttagctcagtgatcctgaaatgagtcagacacagttctaaatgcagcacctgccttgaccccacctatctaggtaggaccctgagcagccaagccccactcctccagtcacctacactgcagtggctgaggcctagaattggtacataggctgctggttgcagttcaggcccatgccctgagccagccacacaggggcttggagctggactcatgcaagttttccaatagaaaaaaggtcactcgtaggagacaaaggaaaacacccagcttggaaacacaaaagccgctgttttttggtttgtttgtttgtttgtttgtttttctacagtacgcccctcatatgaataaaagaaccagaaactactgcagtgtcctgaacggaacagcagagggagacaaagacatggaaaactccaaataatagggttggaagttgaaattttggaaagaaatagacacataaagatgataaaaacaataaagactttttggacatgaagtaacactattttgaacagttgaaaatagttactacctagaattggtagtgatcttagcctcccctgtattggaaccactgggtgaaccaccacactcgcctgaggatgctgaatgcgtacctatatagtgtatgtaaaaatatggagtcatacacctgtggatgagtccctggatttgatgtctagtgtcattaaatactatgttttctgttttgagggtttgtttttttttttttttaaagaagaggatgtatgtataagcattcatctgtcccaggttagcctggaacttcctgtgtatagagtcagacctgaaacttctgaccctcctgtttctccctcccgagagcctgggttatgggactgcaccacctcattcagcaaccactaaatattaaaaaaacatttaaaagtatatgtgtaagtatgggtcccactaactcatggatcatctagctctggtggtagttcatacttacatgacacatgaagattcaaccagggagacaaaagggttaaaaaatttcttcaaataccacatattttaagcattgactatttgatttgaggcttttaaaaactggatagttataattccagcactcaggaaatggaggcaagaggatcaagagctccaagtcttctgggctgtgtgtcagcttaaagaccatccctggctacaagccttgtaacattgatattgtagtcctaggtgtgtaggaaacttcctacatgcacagaggcaatggcaggtggattcctctgagttgaatgccagcatggtctgcatggtgagtgcaagggcagccagggctacacagtgagactctcgtttcaccaaatgaaagaactttgagattattttcccagggctgtcataacaatagcatgattcaaaggtctgacttgaatgcttttccagtctttgcttttctgtttgtctacatccataaaaatggaaaagcatgggtgtgtatgtcttctgtgaatgtaccaagagggttatagataggaaacaacaagagcattgagtcagttttcttgtgaaaacttgataccttttctttatttcagggattcagagatcatgcaacaaaagcagaagatagccaatgagaagaaatctatgcagacaacagaaaaatgatgactggctttttggaaaacctgggtgctattgccagtgggtgcatcatacgctctaagattaaaatttcacagtgactaatcattatatgtgttataacttgtccttataaaactattttaaactttactcttcagcctatcttaatgtgatgttttaagaccatcaaaaaataaagtactgaccttgcatgtaacattattggtgaatattatttttattaaaagagaacatgaatgtaatttattaaataggtaatataatacttacatttgcattgctaggaccatggtacctcacaaggatcagctgaggaggaacaaattgtctcatggttttggaggatttcactccttcatagaaaggagaacagaacagagaggctcggttcatggtggtaggagcacaccctactcttcacatcgaatcagaaattcatgcctggacaggaacctggttaacagtcaaagtcctgtccccaatggcctacttcttccagtgagccccatctcctaaaggtcctatagcctcccaaaacaaggccaccagctgaggaacaagcactcgaactatgaactctgcgagatactggagatgtaagcaacaatgagtagtgcgattcaggactagaatctctcatgtgaatctagaattttggtatatagacttcgttaagtagtttaattttgtgtttttgtttttgttttctgaaacaatctctttctgtagcccaggctagccttaaacacctaacaatcctcctgccttgggatgtgagttctaagatcataagtgtagccacagtgctagccttaaagatctttaactttctgtttgttatacattttcttaaacttaggggagtcatcgctcaccttccaccacgtggctcccaggaattgaactcagagcatggtggcaagtgcctctgtcaactaagctacctcactgcccacccttaactgtgcacgtgcgtgcatgtgtggtgatggccccagtggaggtcaaagggtacacgtgaggagtcaagggttccatgtgaggagttagttcttaccctctgcctcgtgccgtgttcctgctgctgctccattgtcctcccggcagttctatgtccacctcccactgcagcacgaaagctcagagcacaggtgcgtggcaccacatcaacttcttaacgtggcttctggaagctgagctcggatcgtcaagctcctgttttcctctttaccagctgagcccttatctccagttttctctgataaggttggggtatatagcaactttacattgcttgccctagttcagtttccaacaccacacacagaagttccatttatatataagtgttggtttgtaaccagctgcttcactccaagaatttacactagaacaaaccaggaagatcaactaaatgggtaggcactaaatgaggaatcagcaagagtagaattgaactgagtaaataaattaaataataatttaaaacaaccgagccaggtatagtgtcttacacatgtaatctcagactcgggaggcctcagcaggatgactgacatgagtttggggccagagagtgagacactgtttcaaacaaactggggcaggacaggtgactcagcagttaaaagcatgtattgcacaggatctgagcacagtttccagctcctggagttctgttcccagcacccatgtcaggcagctcaaactatctgttaactccaactccagggtgatctgacacttccggcctctgtgggcacttgcattcatatggaagtcagtctggcttttctctacctgctctagctcccaaataaggacatggaagccctatatttattgaaaaacttgtagcattatacctgggcagatgctcatttattgtaaccctattctaacctgtctatggctgcctactacccagccgtgccccattacttgctatcttagtctccacctggctgcacctcctccatcagtatcctcatggtgactccccatcaaactcctctggtccccaccagagacacgatcactgggatcagaaatcctgcctcctcctctcctacccaaccattggctgattggctctttattaaataatcggacgtgatggaaaatttttgcataacgttgtaacagaagatgcttgaaaattccagtatctagattgcaaccagatgtctgggcatggtaatgagcatctgaatacacagtgcacaaaaccatcccccaacacacacacacacacacacacacacacacacacacacacacacgactgtggtggtttgaatatgcctgacccatttggaggtgtggccttgttgaagttggtgtgtcactgtgagcttaggctttatgagcctcatcctagctccctggaagccagtcttctcctgtttgtcttcagaataagatgtagaactctcagctcatcctacatcatggctgcctggacaaagacatgcttctgtcttggtaatggactgaacctctgaatttgtaagccagccccaattatatgttatctgtatgagagttgctttcttcatggtgtctgttcatagcagtaaaatcctaaaacagaagttggtaccagggactggggttgtcttagttagggttttactgctgtgaacagacaccatgaccggggcaactctcataaggccaacatttaatttggattggcttacaggatcagaggttcagtccattatcaaggcaggagtccacacccacagtgacatatctatttcaataaggccacacctcctaatagtgccactccccaggccaagcatatacaaaccatcacattccactccctggtccccaaaggccagttcaaatgcatgagtctatgggggccatgcctaaacatagcaaaatttaaaagcacatttagtccaacttccaaagtctccatagtttatagcagtctcaacagtgttaaaagtccaaggttcaaagtctcttctgagattcatccaatcacttaacttaaatacccaaagcaagacaggaaaccattgggccaactccaaactctgaatctccatatctgatgtcaaagccgtcttgagatctccaactcctttttcatctttgttgactgtggtaaagttctttttcctgggctggttccactccctgttagctggtttcctcagcaggtatcccatggctctggcatcttgaatatcttggggtctccacgtcaacttcagcttcacagcttcttgttccattgtctgggatctacacgtgatcttctgggctcctccaaatggctggtgtcacttttccagctttgccctctgtagcactctaggctctggttgactccactccactggacccccttattctataacattatcaccagctttctgttttccaactccttcactgcctaagctcagctgagataagcttatacatggtagcccatgcctaagagccactgaaaccaaacttggtagtaaatgctcccaatcccaggaaaagctgatgcaataggatgataacaaatttgaggctgggatacgtatcaaaaccctgtctcaagacaacaaaaaccactgaagaagcagaatgacaaacatcttatattctatgaaagcctaaattgaaaaattatttaaaacttcatacaggttttaacttacacgttcattttttaatttttattttatttttattttttttccatttttattgggtatttagctcatttacatttgtaatgctataccaaaagtcccccatacccacccacccctactcccctacccacccacgctccctttttggccctggcattcccctgtactggggcatataaagtttgcaaatccaaagggcctctctttccagtgatggccaactaggccatcttttgatacatatgcagctagagtcaagagctccggggtactggttagttcataacattgttccacctatagggttgcagatccctttagctccttggctactttctctagctcctccattgggagccctgtgatccatccattagctgactgtgagcatccacttctgtgtttgctaggccccgggatagtctcacaagagacagctacatctgggtcctttcaataaaatcttgctagtgtatgcaatggtgtcagcgtttggatgctgattatggggtggatccctggatatggcagtctctacatggtccatcctttcatctcagctccaaactttgtctctgtaactccttccatgggtgttttgttcccaattctaaggaggggcatagtgtccacacttcagtcttcattcttcttgagtttcatgtgtttagcaaattgtatcttatatcttgggtatcctaggtttggggctaatatccccttatcagtgagtacatattgtgtgagttcctttgtgaatgtgttacctcactcaggatgatgccctccaggtccatccatttggctaggaatttcataaattcattctttttaatagctgagtagtactccattgtgtagatgtaccacattttctgtatccattcctctgttgaggggcatctgggttctttccagcttctggctattataaataagactgctatgaacatagtggagcatgtgtccttcttaccagttggggcatcttctggatatatgcccaggagaggtattgctggatcctccagtagtactatgtccaattttctgaggaaccgccagactgatttccagagtggttgtacaagcctgcaatcccaccaacaatggaggagtgttcctctttctccacatcctcgccagcatctgctgtcacctgaatttttgatcttagccattttgactggtgtgaggtggaatctcagggttgttttgatttgcatttccctgatgattaaggatgttgaacattttttcaggtgcttctctgccattcggtattcctcaggtgagaattctttgttcagttctgagccccattttttaatggggttatttgattttctgaagtccaccttcttgagttctttatatatgttggatattagtcccctatctgatttaggataggtaaaaatcctttcccaatctgttggtggtctttttgtcttattgatggtgtcttttgccttgcagaaactttggagtttcattaggtcccatttgtcaattctcaatcttacagcacaagccattgctgttctgttcaggaatttttcccctgtgcccatatcttcaaggcttttccccactttctcctttataagtttcagtgtctctggttttatgtgaagttccttgatccacttagatttgaccttagtacaaggagataagtatggatcgattcgcattcttctacatgataaccaccagttgtgccagcaccaattgttgaaaatgctgtctttcttccactggatggttttagctcccttgtcgaagatcaagtgaccataggtgtgtgggttcatttctgggtcttcaattctattccattggtctacttgtctgtctctataccagtaccatgcagtttttatcataattgctctgtagcaaagctgtaggtcaggcatggtgattccaccagaggttcttttatccttgagaagactttttgctatcctaggttttttgttattccagatgaatttgcaaattgctccttctaattcgttgaagaattgagttggaattttgatggggattgcattgaatctgtagattgcttttggcaagatagccatttttacaatgttgatcctgccaatccatgagcatgggagatctttccatcttctgagatcttctttaatttctttcttcagagatttgaagtttttatcatacagatctttcacctccttagttagagtcacgccaagatattttatattatttgtgactattgagaagggtgttgtttccctaatttctttctcagcctgtttattctttgtatagagaaaggccattgactcgtttgagtttattttatatccagctacttcaccgaagctgtttatcaggtttaggagttctctggtggaatttttagggtcacttatatatactatcatatcatctgcaaaaagtgatattttgacttcctcttttccaatttgtatccccttgatctccttttgttgtcgaattgctctggctaatacttcaagtactatgttgaaaaggtagggagaaagtgggcagccttgtctagtccctgattttagtgggattgcttccagcttctctccatttactttgatgttggctactggtttgctgtagattacttttatcatgttaaggtacgggccttgaattcctgatctttccaaaacttttatcatgaatgggtgttgtcaaatcttgtcaaatgctttttctgcatctaacgagatcatcatgtggtttttgtctttgagtttgtttatataatggattacattgatggattttcgtatattaaatcatccctgcatccctggaataaaacctacttggtcaggatggatgattgctttaatatgttcttggattcggttagcgagaattttattgaggatttttgcatcaatattcataagagaaattggtctgaagttctctatctttgttgggtctttctgtggtttaggtatcagagtaatagtggcttcataaaatgagttgggtagagtaccttctacttctattttgtgaaatagtttgtgcagaactggaattagatcttctttgaaggtctgatagaactctgcactaaacccgtctggtcctgggctttttttggctgggagactattaataactgcttctatttctttaggtgatatgggactgtgtagatggtcaacttgatcctgattcaactttggtacctggtatctgtccagaaatttgtccatttcgtccaggttttccagttttgttgagtatagccttttgtagaaggatctgatggtgttttggatttcttcaggatctgttgttatgtctcccttttcatttctgattttgttaattaggattttgtccctgtgccctttagtgagtctagctaagggtttatctatcttgttgattttctcaaagaaccaactcctcatttggttaattctttgaatagttcttcttgtttccacttggttgatttcacccctgagtttgattatttcctgccatctactcctcttgggtgaatttgcttcctttttttttctagagcttttagatgtgttgtcaagctgctattatgtgctctctcccgtttcttcttggaggcactcagagctatgagtttccctcttagaaatgctttcattgtgtcccataggttttgggtacgttgtggcttcattttcattaaactctaaaaagtctttaatttctttctttattccttccttgaccaaggtatcattgagaagagtgttgttcagtttccacgtgaatgttggctttccattatttatgttgttattgaagatcagtcttaggccatggtggtctgataggatacatgggacaatttcaatatttttgtatctgttgaggcctgttttgtgaccaattatatggtcaaatttggagaaggtcccgtgaagtgctgagaagaaggtatatccttttgttttaggataaaatgttctgtagatatctgtcaggtccattcgtttcataacttctgttagtttcactgtgtccctgtttagtttctgtttccacgatctgtccattgatgaaagtggtgtgttgaagtctcccacctttattgtgtcagatgcaacgtgtgctttgagctttactaaagtgtctttaatgaatgtggctgcccttgcatttggagcgtagatattcagaattgagagttcctcttggaggattttatctttgatgagtatgaagtgtccctccttgtcctttttgataactttgggttggaagtcgattttatcagatattaaaatggctactccagcttgtttcttcagaccatttgcttggaaaattgttttccagcctttcactctgaggtagtgtctgtctttttccctgagatgggtttcctgtaagcagcagaatgttgggtcttgtttgtgtagccagtctgttagtctatgtctttttattggggagttgagaccattgatattaagagatattaaggaaaagtaattgttgcttcctgttatttttgttgttaaagttggtgttctgttcttgtggctgtcttcttttagttttgttgagggattatcttcttgttttttctagggcgtggttcccgtccttgtattggtttttttctgttattatcctttgaagggctggattcgtggagagataatgggtgaatttagttttgtcgtggaatactttggtttctccatctatggtaattgagagtttggctgggtatagtagtctgggctggaatttgtgttctcttagtgtctgtataacatctgtccaggctcttctggctttcattgtctctggtgaaaaatctagtgtaattctgatagggttgcctttatatgttacttgacctttttcccttactgcttttagtattctatctttatttagtgcatttgatgttctgattattatgtgtcgggaggaatttcttttctggtccagtctatttggagttctgtaggcttcttgtatgttcatggtcatctctttctttagatttgggaagttttcttcaataattttgttgaagatgtttgctggtcctttgagttgaaaatcttcattctcatccactcctattatccgtaggtttggtcttctcattgtgtcctggatttcctggatgttttgagttaagatctttttgcattttccattttctttgattgttgtgccgatgttctctatggaatcttctgcacctgagattctctcttccatctcttgtattctgttgctgatgctggcatctatggttccagatttctttcctagggtttctatcttcagcgttgcctcactttgggttttctttattgtgtctacttccctttttaggtctagtatggttttgttcatttctatcacctgtttggatgtgttttccggtttttctataaggacttctacctgtttggttgtgttttcctgtttttctttaaggacttgtaactctttagcagtgttctcctgtatttctttaagtgagttattaaattccttctttatgtcctctaccatcatcatgtgaaatgcttttaaatccaggtctaccttttcaggtgtgttaggatgccctggactgggcgaagtgggagtgctgggttctgatgatggtgagtggtcttggttcctgttagtaggattcttacgtttacctttcgccatctggctatctctggagttagttgttatagttgtctttgtttagagattgttcctctgttgattttgttaccctctactagcagacgtgggagactagctctctcctctgagtttcagtggtcagagcagtctctgcaggcaagctctcctcttttagggaaggtgcacagttatctggtgtttggacctcctcctggctgaagatgaaggcccaaaacaggatctttcccagaagctgtgttgctttggccaggaaggtggccggttttctggagccgaagatgtcaccgcctcctcatttttttaaattgcaggtttttgtggttttgagacattgtttcagtgttctgttgggtaaatatcccctaatttagctaaggcactctgccttttaccagctcagtaggatgtgtttcccagatactctgtccatgtccgcagctgggaacattctcttaacaaacgatctacacccacatcactatcagtgtgcccctggtccaattttattttgttaaatcctggaacacaagaacccacaaatctcactgggcgcttttgggatgccctattgtctatgccctattccaagatcccctaaattgtagaaaacagtgggttttgccaggctgtgccctgccctgggagagtccatcatagtttgagacaggggctcgctgcaaacctctgactggcctggaacttcgtatgtagaccaggctggccccaactcatacctgcttgcctctggaaactccaccctacaagcagcttctgactccatcttgagggaggtgactgaaacctctgggtacaccagaaatagcaccatctgccaggacttatctagttttttgtttgttttctacaggctgataggtggcttattcctgagtcaatctgtaaatttattgggataaatcaaaactatggtggcacatgggatatcgaaattctatcaggaaaatcagactcaggaatttaccagatatgccagatgaaggaaatggtcgactccccttacctcaaccttgggcccattacaaaacagacacctaacactgcaaaaggcccgataccaacccatcgtctaataattggtgtgtgcatcaagaaccagcaaacacaggatgcccttattgtgaaggttcatcccaaactcgggaagctgaggtagcaaaggccagcctaggctatatagcgaggctgacttgaaaaatgaaaagaaaagggctggagggaggaaaataaattggaagaaaacagagggaaaggttaaaaaaaaaaaaaagaactagaagacaggtggaggggagaaagagaaaagacagatgtgggaggagtgagttggaagcgtgtaggaggtctctggctgcctccgggccaccgtactcttccggtcccagaagccccatgacggaagtcgtcattgagtgagcccggcagcgtccgtggtagcaggccatggcgatgggcagtggcggagcgggctccgagcaggaagatacggtgctgttccggcgtggcaccggccaggtgaggtcgcggctcggcgctagcactcggagcgctgcccgagaccgaggcggtgcgagctcgggccacatccgcaggcggctcctggtgcagctcgggcgccggcgaggctgtgagccacgctttggtcctgtgtgactgtgaggggatgtgcaggaacggggacaggctggctgaagcaaggcaaccagataggagccattggaaagctccagatttaggtcaggatgaagatgttcacagggactttagactaaaatgctggttttctggatccagttttgtaaccggaaagaccaagtgttgcaaacaacagttgataaagtttgagagagagggataactaaagttgcccggagtagttgaaagttgctattgactgcattgcattcaaatgtatacgacagcagatccgaggcagggttggtggtgcacgcataattacatgcacaaacacttgggagatgggggccggagggtcgggagttcaagatcctcggttacagcgtgaattccggaccagcctaaattacagggagactgtagaagtaagataaacactggtaagtacgagggcaaatcagagccaagttggtggactgtgcatgtgatcagtcccagctcctgaggcaggaatgtgaagttgagtctagcctgggaaacaacatactccatctaacgaagtttaaaacattaggacctcggtcgtcttatggtatggcaactgatttctgcttggggcttggggtgggagaagagaattctgggcagctttgggcagtgctgcatttccttctttgggggacagcccagcaattcctattctgaataaagctttgccctttgtcctcaggggagccctggcggtctggttctctccttaaaaccacaaggttcctgtgctaatttgtcatcgtggtaacttcttcatgcccagggtgatgggtcatgtttacaatctcaggggtaatcttattgattgcagcttctttcttgttgctgttttgttgttttgagacaggtctcacagggtagccttaggagacttggaactctccatgtaagccaggctggcatcaaactcaaggagattgccccgtctcagccccccctcccgcccccatttgaatcagggacacattccataacctaaattggcctggaattcaatatgctagactggcctggagctcttggcaaccctactgtctccagctccgggatattgggattgtagattatagatatgagccattttaatttgtagttcatggttttgtttttgtttgttggtgtgcttgtttgtttgttgggatagagttttatgttgtagtctatgctgtctgggaacccactatagcccagaccagttttgccttggcagtcctctgcttctactgagtacattgaggctttcttaggtgctaggatctctgtgttcgtgcgtggtgactttctagaaatgtatctgcctgtaacacacactctgagtgtctgggctgtaggcattgctgggggttgatctagggactttgagctacttccccagtacttcctattatctgttttttattaagcacatctatctataacttattttttattttttctccctcttcagagtgatgattctgacatttgggatgatacagcattgataaaagcttatgataaagctgtggcttcctttaaggtatgaaatggttaatcatttttttccttatttcctcaggtcatacattttgtaaagaaagagagagaagaaaaataaacttgagcacattgaggctttcttaggtggtgggacctgttatgttagaaagtagtgactttttaaaaatatatccctccatgacacatagatcttatttatttatttatttatttatttactgttttcatagcatgctctaaagaacggtgacatttgtgaaactccagataagccaaaaggcacagccagaagaaaacctgccaagaagaataaaagccaaaagaagaatgccacaactcccttgaaacaggtgatagattgatttaaccagggtcctgcccggcctgaggggcggcatgctgcttctgtttggagtgtcccagagctgtggatgaattagcaaacgcacacatacacacacaggcgtgtgcgcacacacatgtgcaggctgggcattaaaaccagagctctctgcattctgagtatgtgctgtgtagctgatatgcaactcaaccccccccccccccccacacacacacacaagttcaacaattataaaaattactagggtaactcaaaacttgtggtaactgggtctgctattgaaagcagaagacctgggggtatagtgtaccagcaaagtacctggctggttacaggcccagcctgtgtgcctgtgtgtccctgaccagacccacattgagtcagcacaaaaccctatagactagaggtctcattctctcctctcttcttttctctctctctctctctctctctctctctctctctgagtttttttgtaaagtgaatagtttgatgcctccttccattcattatttccaaagggaaagggtgtctacatttggtgaacacttgcttttctttgactaagaacactggatttgtcatacacgtttggtctcttttgttcttaatgacacgtttcggtggtggaatacattatagccattcatcaggccgggaaaaggagatgcaggtgactaagaacagtgtttataatgaagtgaatgggaggactggaattacacttggagaactgggttatggtttgttcttttcagaagaaggaatgttgcgtgtccataactttcttttcttttgtagtggaaagttggtgacaagtgttctgctgtttggtcagaagacggctgcatttacccagctactattacgtccattgactttaagagagaaacctgtgtcgtggtttatactggatatggaaacagagaggagcaaaacttatctgacctactttccccgacctgtgaagtagctaatagtacagaacagaacactcaggaggtgaggccccgaaagatgtccattcctgaaagtggacactaagtaaggaaaaagcattagaatcagttgtcacgttgacgcacgaaggcgttgaatgacattctcattctctctggttctccttttgctggaacgcaaggtcggggccataggaatgcttgtcggtgccctgcctttgcataatacaatgtttccttttctttttaaagaatgaaagtcaagtttccacagacgacagtgaacactcctccagatcgctcagaagtaaagcacacagcaagtccaaagctgctccgtggacctcatttcttcctccaccacccccaatgccagggtcaggattaggaccaggaaaggtaaatgttctgttgagaaaaatatatatgtaggcaggaatgagtgtggggagcctaactcttcattgagtaatggatagctttcctgtgaaccaggagcttccgggcctgcgtctggaaagaggaaacgcacagtgaagtaagaggctccctgcactgccatggctggctggcatgtaactggtacactttcctttttacagacttttatgacactatagtgtgtgcatgaggaccacacagaggaaggaaagagctgctcttataagctggcttctgacttccacacatcctcgttcctccatctataaatgatgggggattacaggaatgtgccagccaccacaccttgtttatcccagagcatagtacagggttaaagtgtgaacactttgtatggctcttttggttgtaagtagtagaagtcaacttaagaagaattgtattataagctaggttatggctagaagaaccttaactagcttgttgtgttttgttgtttgttttgtactaagtagcagtattttcccttagagggcatggtatttagataattcgtgcatgtttgtgtgtgtgcgcgtgcatatgtgtgctgtatgtgggaaggaactagtgccagtggcagccagaggtctacactgagcatcttcctcaatcactctctaccttattttctggggcagatcgtgtcagtgaacgtggagcttgctggttcagccagcctggcctgccagagccccagggatcctgtctccatctccccagtgctagggctaagaatatgttctgccttgccttgttgctatgtgggtgctggggacccaagctcaggcctctcttttcacccctagatagtaatttgtaaaaattaagtatagcacctcttcaggctttctctgagaagtgagtagagtagaagtgagcactggagatacggcgaggagaggattactgagtttgggaccagcctggcctccatagagacagttttgaaaaaaaaaaaaaaaaagacaaaactaaaacgtaaactgaaaacaactgatgcaaggtggtgccgtgggtaaaggcatctgctgccagcccgccggcctgagcgagttccctgcagtctcttggtagagagagaaaaatgattcccaaaggttgtctctgggttccacatgagcactgtggtacacacttgtactggctagttttgtgtcaacttgacacagctggagttatcacagagaaaggagcttcagttgaggaaatgcctccatgagatccagctgtaaggcattttctcaattagtgatcaagggggagagaccccttgtgggtgggaccattcctgggctggtagtcttggattctataagagagcaggctgagcaagccagggaaagcaagccagtaagacatccttccatggcttctacatcagctcctgcttcctgacctgcttgagttccagtcctgacttcctttggtgatcaacagcaatgtggaagaataagccgaataaaccctttcctccccaactgctcttggtcatgatgtttgtgcaggaacagaaaccctgactaagacaatgctccatacatgcatgtgcacacaactaaattaattaatgttttagaaaatttaaacaaccaaagattttctgtgataattttctaattaaaggttacattgtgctgggtggtgagatggctcagtggttaagagcactgactgctctactgaaggtcccgagttcaaatcccagcaaccacatggtggctcacaaccatccgtaaaaagatatgactccctcttctggtgtgtctgaagacacctacagtgtacttacatataataagtaaataaatctttttaaaaaaaaaaaaaggttacattttgccaggttgtggtggcgcacgcctttaatcccagcacttgggaggcagaggcaggtggatttctgagttcaaggccagcctggtctacagagttccaggatagccagagctatacagagaaaccctgtctcaaaacaaaacaaaaaaaaaaaaaaacaaacaaaaaaaggttacattgtattagagtttcttgaatctggagtgatcaaattctataaaatatatcttgtctttttggtagtttttacaatgtactctagcatatataagtaacagaatctctaaaactttttctttcctcagtttacacttatttatttggggtgggtactgtatacttaatggaagtaaaaggacaacgtatggaagtgggttctcttcctttgcgtgggtcctgggagttgaactcaggccgccagtcctgcccacaagtaccttttatctgctgagccgtcttgtggacccagtaacaggatatctacaaaaatatgtgatagtgggggaagaatgtattcctgtgattagactatcttggtaaatacattgtctctggtcgactgagtcattacagatctttactgtgattttactttctaaatgtttatatagaaaagcaacggaaaacaatgtacgatttgcgttaagatttgcttcatttgtagttacgtatatgtgtacatgtctgtgtgtgggctagtacatatgatgcagatgccgttaactgctgagccatctctccagttcttacttctcttacattggttttgaatactctttctttcagtgacggaagggatttttccttaagatactaacttggaaatattctttatagccaggtctaaaattcaacggcccgccgccgccgcctccactaccccctccccccttcctgccgtgctggatgcccccgttcccttcaggaccaccagtaagtacacaagagctgaggttacacttttatatacagttagtaattgttttagaatataggtaattggagtgcgttaccttaggccacccctaaggttggattctaatgagtaaaaatgtaaacctctggttttgtctggaaggccctctgttacccagatggtctctcccagtctcactgccaagctctgcttggtgtggttcccccctcactggttggtatccagtttcctgctgctggtttctgttagaaaggactgtcctcagtatacagaggcgacagatactatgtcccttggagtacttgaatgagagtctccgagcctgtactttctcaggggcttgcctcttgtcattgtttgttttcatcctaatggaggtttttggtttgtttggttttcaagaccaggtttctctgtggaccagccctggctgtcctagaacaggttgggccttaactcacagagatctgcctgcttctgcctccctagtgctgggattaaaggcctgcgccaccactgcttggccctaatagaagttttatagtagttttatttttagatattaacagtagttaaaaggatatttgggggcagactgtatttgagtgggagacaggcagatgttctactctaaatctttccttatggtgtccttaaaaatactgtgtgtgtgtgtgtgtttgtgtttgtgtttgtggaaagacttgagtctctgttttgtgtcttatgcatagcttcataatggaacaaaatagtccattcatactattaaatgtcaactggttttaatttttgttagatttgttggtcttttcttattttttcttctttaaagatttattattctacataggtagactgtaactgactttagactcaccagatgaggatgtcagatctcattacacatggttgtgagccaccatgtggttgctgggatttgaactcaggaccttcggaagagcagtcagtgctcttaccggctgagccatcttgccagccctggccttttcttattatggttggctttcttccagtgctagattcaaaaattaaatagaagtatctcattgagtttaggaaaaggttcagttaataattcattattctctgtgtaaagtgaatccctgggtttcagtatttccctaatcctaagtggattttttccatttgcagataatcccgccaccccctcccatctctcccgactgtctggatgacactgatgccctgggcagtatgctaatctcttggtacatgagtggctaccacactggctactatatggtaaggactccctgggaactgccagacatgctctttgcagttgtacaacttttggtgatgagtcttgcacctagagccagctcctacataactaaaatgtggtttgttctatagtgcttaaaaacgttaagtcagttttaagaccactttaacatttaaaaatggacaatacttctttcatcattcctcctgagtgtgattgcaactcatttcaaatgtctgcttttgttatcttgtctggtctttttcaagacactgtttctctgtgtagccctggttgtcctggaactcactctgtagaccaggctggtcttgaactcacagagatccacctgcctctgcctccctcccaagtgctaggattaaaggcgtgcaccaactcccagctcatttcaaactccttgattggcagtaattctagcactcagaaagctaaaacaggtagattacaagttccaggctagcatggatacacagggagccgctatcccagcagcaaaccatgtaacagtgggaagggaggcttaatgctgctaggttattttaattgtactttaaaatgtaagtgaaacctaaattagttcctagactgtttttctgctttggggatgatgatttttgttttcccattgtgagattggatcttgctgtattcttcaagctggccttgaactctggaatccccttaccctagccccccgaggaacagggactgcatgtgtgcaccatcattcctggacatacttgctctgccgtggatagagtcttacactgactcgtttggccaggtttcccaggtgttggagatcgcaccctggggcttgggcatcctgggcaagccccaccactgagctgtatctcagcctggccagtttttgaagtttaatgtttcgttggtaagcttgatctacattctttttttattttttatttttatttttttttatgattcttgactctttttttttcaaaacttattgtttattgtgggaaaatacacagtatcttcaggggatggaatttatgttgttggaatgaaagttgtttatactgaatagattttcttcccatagtttcatatggaattgagttgcatggcagttatggcctgtagagacctttaaaatcacaaatcaaagtgccattttaatcgtggtacttttatggcagcttctgcaactcctctggatatgtctagtccaagaggacactttggttcatttcggatgtcttctacatcatgtaaaacgcccaagccagcacgtactctttcagttccattccatgtagccgtgatgccattgtcagtgcacagtcctggagggggggcacaacaacgtgcactgtgctgcatttgcgatgatttccagtgcttttcgggtgtacaagtcacttgcaacacctccagatacaaccagattacgtattatgtttgttaaggtccaggcggcagggacactacagaaggggatgctgagtaatacaataggaagcggccaactcccaaagcatatgtcagccacgtatcacggctgttcattacacgagtattggggtttacctcactgtgggcaactccaacattcatgtttgctcggccaccagctcctggcaggtcacaggacaattcctgcagcagccacagtaggtcctcatgctcgagcttaatctacattcttgtgtatagttatcgctctgttacctcccattgtatagatatgaaagcattctgtttatccattctactattaatgactgcttatgttgtgatttgggccagtaaaaatgtttctggggttggagagatggtatagcagttaagagcaatggctgttcttctggaggacccaacttccattcccagttcccatagggctgctcccaacagcgctcaccctggccggtacttttaactccagtcctaagaagctcttgttaggtagccatgctccttaaagtagtcacgccaactcagagctaaccagagaagtgcttccctttaggagcatcatctgtgtgtgtgcgttgatggcatttcactagattagtttgcttaacttaaaatatcaacatatgcccttaagacgtgtgggaagtgtgtgtccttgagtgtgaagatctgagggttttacctttggaaggagtagacaagcttgtcagtcaggctttccagttgcccgagacttgtgacgatctcactgacttccacgagcagttcatagcccttacagagtgtgaccaagccacagtgtttgcctgcccagtcaggatggtggcggcagcgccatggtggtcgctgctcacctctgcggttctgtcttgtagaaattcaagcagaacaagaatgagtaagagtggtggtgttattgcaagaacgtaaatgtgctctagctttggtcttcattggtaccaagacaccttcagtacatctctggctgttgagatgtaaatgtagatgcactgtgtagcctagggtggccttccaatcacagcagtcctcttgtattagctttctagttgctgatggtacaagtgtgtgccaccatgcttgctttggatcaatcactgttaaagtatattggaatgctataaactactttttaaaatacataaacttattttcagatgaaactaaataaagttagcatgcctcatgaaatacactgttcggttgttctagtagtgctggagatcaaacccagggccttgcgcatgttaggcaagatctctagcagcagactgttcccattctcatggttttctgtgtcaggtcttcctgtcatagctcagcctttctccagccaggctggccttaaaatcaaagtcctcttgctttggtctcctaagcactgggattattaggtacatatcactaagttgggcgaaagggctatttgtttcgttgtattctcttttgcttttttaaaaaagagacaaggctagccttgaactcacagagatcctcttgccctgatttccaattcctggaattacagacatctgccacatctcccaacacgaggcagagtctgctgtgtcccaggcagttttagactcatcatgtatctgaagatgactttgaactccgggtcctccttcctcctcatctcagggctggactgcccatgcatcaccaagcttggcatccagccgggcttgaattgttcactcacacatttatttagtataccctgcttagctttttatatgctctctttacagggtttcagacaaaataaaaaagaaggaaagtgctcacatacaaattaagaagtaagtctgtcattttaaaagctaattttaccttttgtataatttttagtttgtgtaaaaagagtgttttgaacatttgaaaattgatgtttatgtaaaactatactaaagacattgtatttatgtgtagtgtgtgtgtgttgagggtgggggtgcgtggctgacagaagaggacattggatcccgtgagcttgagctgcgtgtggttgtcagcttgtcatggtgctgggacctgaactcagagtctagaagaacagtgagtgctttttaaccactgagccctctctccagccctgctaaagtctgccaaaaatagattaactattgaattatcctcacatgatcaaatactcatggtgtcagaaggccttgaactccgtgttagcctgcctcggtctccatagcatgaggattatagacatgcagctctgtacctggtttaaaatctggtttagggtgtgaagttaattgcagtgtcattggcctggcaggcttgagtttttgtgtgggatgtggtagtagggattgaacccagggccccacacataaggaagcattctgccactgagccgtatcaccagatccatgggtagtttttatgttaaacttctgtgtgtgtgtgtgtgtggaggttttgcctacatgtatgtttatgtgccatgtacatgcctgatgctcttgaggctagaagaggatacgggatttcgtaaaactggagttatatgtaggtggttataagttgcccaaatctactaacaagactagtaagtgctattaaccactgagccatctctccagacccatcccctcttttaatacatgatgcagtatgcagtatactgcattattgtcttagtctattgctgtgaagagacaccatgaccaaggcaactctcataaaagaaagcttgctacagtttccgagggctagtccatgagcatcatggcaggaagcagacaggcaggctctggagtggtggctgtatatatggagtttttattgtaactttctggaggcctaatattttgagttcatttttaactttaaaggcatgtaacattctaatccaggtgtctaatttctagttctactaccccccccccccaaacaaagctggttatattgttgcagtcactttagtgaactaaacattagtgaaaagtttaacacatgatttgataatttgtaatatgtttaaattctaataggagaggtcaaatatagtacttcttaattttttaaattaatgttcacatttatttattttggtttttttctagacagggtttctctgtatagccctggctgtcctggaacccactttgtagaccaggctggcctccaactcagaaatcctcctgcctctgacttccaagtgctgggattaaaggtgtgcaccaccactgcccagctaatatatttttattttttgcattctatataaaaaatatttgggaactggtaaggtgcttcagaggccaaaggcctgatgacctgagtacactccccagggtggaagaagagaaccagttcttactagttgtctctgacctccacactcacacacatacatgcacacacaatttttatttatttattgtcattttataactgcccagagttttttctttcaaattcaggttcagctctgtctcaggagatggggtgtcggtgtccctggtcgacaagaacagacgtctcctcgtcatcagtggactcttggctaagtggtgtcgtcatcagcatctccccgctgtgggagtccatccatcctaagtcagcagcagagcgtgcctggggcgtgagcagttggagggaccgaccagtggagtgtgcgtgtcggaaggcagtctacccagtcgtgactgagcacaaatgtgcaattgtcattttcttagcatgtcaagatttttattaatgcctttagaattaaataaaagtccttttttgaaatcttgactttatagatattttcctttgggatatatacagtgaagttgagtttgtttaaagatacaaaaagaaaactagtcagacttattacttgggtaaaagggcaatttctgaaggtagaataaattgatactccaagtttggggaacaaaagctagctcatgtcaccggggctatactggccagtcaggaaccaaggcgtgttgtggttttgttttgtatgtttgtgtgccttgctgcatgcatgtgtgagtgtgtgtgtgtgtgtgttttgtccatggctcatatgtggaggtcagagaacaacttgggaagtcatttctctctttctatgtaggttttagggattgaattcaggtcatctggtggcaggcgcctttacctgttgagccatcttaccagcccagttcttcatttattgaaacagtcttgttgtcagcctggcttacttgtaatacacagtcctcttggctcagcctcccaaatgctggcctcaccacagcagcaaatgcaactactaccacaccctcactgtgttctgtccgttagaagccatgttgttctctttgcaccttcccctgtttgtctttctagtctcctcctctccccctgatgtcccttacctcatcatgaatactgcctacaccaattacccatgccattctccgcccccgcccccgcccccctcccccacggccttggccatgtaccatgtagattcttatggtaaggattgatgtcttcagcacccaggcttctccctggtttatttgcctttgaaggaagaagtaaatgtgatcagctggagatggaacccatcgatacaccatttgacgacgtgtgcaaggcactggggtttgatctccactattataaaaacagagcatggtcaatgctatctttgcctaagttttagctaggtaaactaaattaattcagttccccatgtgcctatcatttagccatcaagtaagtactatcaaattaatgaatacctacctagtaagtaactttgcaaatatgttctcatttgagcttttagaagaaatattggctattatagattcaacataacttagttaattttcaggttaaatttaattattaagacactcagttaaccttctaaccagacattagttattaacactaattttaactctctttagcgcccaaaacatttatctggactgaggcctttcattccagcaaatactcaacattatttcaatgctgggaattgctctcagcaaagctagaagggtgcatcgtatgtcggcatgtaatgtagtcccagctactttgaaagctgaggtagtaggattcatccttcgagaccagcctggccaacataaggaaaccacagctaatacagtaataacagagagaggcagtggagatggctccgtggatgaaagcatggggaaaggacagaggtggggatcactgcaggatcactgtgagttgctggccatcagcctagcccaaagccataggttccaggttctcaagggaataatgcaggcagtgacaaagacaccgatgaagatctttgtgcgtgtggaaacaggcatatgcatactcatgtgtactctatcatcttacacacaacatggaaaatagcctatggggagttgttagaaagatttagtttggctcacagttctgggggttcagggctgatttatttggtgcgctgagcttgaatcaggcataatattccaagaggcaacaaaagcatgatttctgcatatcttgtgtgtgtgttcatacttggcctctcaggaagccaccaggattcagtgggaacttcatcttgatgactgtactggctagttttgtgtcaacttgacacagctgcagttatcacagagaaaggagcttcagttgaggaaatacctccatgagatccatctacaaggcattttctcaattagtgatcaagggggaaaggccccttgtgggtgggaccatctctgggctggttgtcttggttctataaaagagcaggctgagcaagccagaggaagcaagccagtaaagaacatccctccatggcttctacatcagctcctgctttctgacctgcttgagttccagtcctgacttcccttgctgatgaacagcagtatggaggtgtaagccgaataaaccctttcctccccgacttgcttcttggtcatgatgtttgtgcaggaacagaaaccctgactaagacaatgactttatcctaaataccttctaaaggccccagctgcaaacacagtagattaagtcccactcctagaggctcatagtggggattgcattttaacatacattatttgggaaatactcaaaccatggaatgagagaacatagttaaaggaaaaggctcttgtataagaatgtgtgtggagcagggcaggggtgtcgtacacctttagtcctagtgctggggaggcagagcctggtggacctctgagttggaggccagcctggtctgcagagtgagttccaggacagtgggggttacacagataaacctagacttgaaaaactaagaatatgaatgaaatattcaagaaccagcaaggccagagtgagaggaagtagagataggagataggaagaagcaggagcaagggtcaggtcatatgtagatgatggtgaggttgacagcgttggccttgagctgggagttcagagaagagggaggcacaggtagagatgatctgacctccaggaggatcctctgggtgtgactgcatggtggaaatacactgatttcacagaagtgggctggccacgtgggactgtgtattttgcaagtggaattgccaggatttgtcagtagattatatgtggtgtaagagaagctaaggataactaactccaggggtttcactaagcacctgcaggggtgaagcgggagtttcggggggtgaaagtctacacaaagagtacctcagtgaagagttagcgttggagatgtggattgccagtgtccattggagttctattaacagagtgcagggctagagctgtagacggaggagatagtgtggacatggagcttaaagccatttggcaggatgaggtggtccaggctgtgtataacacagagacaaagccaggagaactcagatcctccaggggttagaggagaaacagcagagggtcgagctggagctctctgcggaaagcaggggtcattgatgctccaagggctcctggcaggagcaggtgcgtcctggaggccagggaggagccccatctgtagctcagctgctgctgacaggacagatatgataaagtctgcagcgcagtcattgactaaaccaatgtggaggtcagaggtcactggtgatgctacgagccagtgtggaggtcgcagtgatgctaaagcagctattttggtgagatggagatggcaaaagcttgggcgaagagaatgtaagcaggaaagacacttatcagtgatcgtaaggaactcttccaacaaaaagttggtttttttttccagacttgttatatttggagcttaataaaatcacatttgatatctatttgtgtgagtttacaattatttttgtcacctgtttcagttatgctctatgtgcactacgatgaaaaattgatttcttgggttgttttgttttttttaacttaaaaataaagcggatgtcctaagaaggtgcaaactgttctgcccatttgacagattcagggagctggaatacggaggatgtggtcaggggccgatgcagctttggcgttttccttttaagtgttgaggaacaaacaagaccactgaattctttttagaactgtttctttattgaaaaaaaaaaagactttaaaagttttcttttatgggtatgggcattttgtctgcatatgcgtgtgtaccatgtatttgtctggtattcagtgagtccagaaaaggacattgggtcttagaaccggagttagagctgtttgtaagctaccatgctggtaatggaaactgtgcctgggtcttctgcaagaatcactacggcttttaaccactgagccatctttccagcccctctttccttttcatgggcagtgctagtcatcaaacccaggccctcacacatgctggaccgccgagcagcctgcctccccaactcttcctctactttattttgagaccgtgtctctctagattgatcaggctggcctcaacttgtgtttctcctgcctcagccttcagagtagctaggtttaaacacatgtactactgcatacagcctacctaggtttttttccacccgcgctactcaatgagttaagtcagttgccaagttattgtctcctgtttctaaattgagtatttatgatgtaacaggcttcctgttctgaactcctctccccagtcatccctgcatgcacagaggatgctgccgagacactgagggaggtccttgcagcaccagctctagccacaggcaccttgtgtcacacgcagtggctggcagcactagcattctgaggtctcttgcagccaaatactgcccagcagctcctagcagcttcatggccctagtgagctttgttgtcatggctttgtcctgcaaggcacagctcagattgctcagtattgtttgtgttgttattcaatttaatgtttatcctttatatgcccctgcctgtgaccctggaatactgtcttagttagggttttactgctgcaaacagacactatgatcaagacaactcttaatatgaacaacatttaattggggctggcttacaggttcaggcgttcagtccagtatcattatggtggaaagcatggcagcatccagacaggcatggtgggggtggggagggagcttaagagttctacatcctgttctgaaggcagttaggagtagactgacttccaggaatctaggaagaatgcctcaaagcctacccccaccacaacatactccttccaacaaggccatacttcctaatagtgtcactccctgggccaagcatattcaaactctagttagtgccagggaaatgttagtgatctgcatctccccccccccaaggtgtaacctgggggtgcaggtctgttgggggaataacctggagatgttggtcctgttaagagtgtaacctggagatgctggtcttgttgaggattagcctagagactagagctaggtttgggttttgttggggagtaatttggaaactagtgctgggtaccaggcctgttagtttacctgagttcaaacttaggccaggttctctaaaatggagtctgaacttaaaagatgtggcctctcaaaaccaccacaaatacaatttcttatgttgtagtaacctcccaaccatgaaattatttttgttgctacttcataagtaattttgatattgttatgattcataaatatttatgtttttttgaaggtcttaagtgacccctgtgaaaagatcatctgaccctcaaaggggtcaagacctacaggctgagaaccactgctctatagaaaaacatgtttcgccacatgcaacttgtcttcatgattgtgtatagcctgaactcagaagaacttttctcaggtagtttttcttaactctcagagtataaactgtctgatgctctgaataaagctgactattgcatgagactttagtctgcctcatttattggctctattctcccaagtcctactgcctctagagaggtgatagttatgaaatgacaaataattatcacaatcaagttaatatacccagaaattcttgcaagattaaatgacatacccagaacagagtaaatttccaacaaaattataaagctatcttaatatatgaaaaagcctctggaacaaaaacagttttctctaagccaattccccccccccccccaattagatgagagatggcataagcaagcaaggccacacaagactggtgtacatgcaaaagccctgcaaaaactaaagagcatctcctggggggagggtgagctgtagccatggtaaagtcaactcctgatcatcctgtatagagctgactcaatccttaaactggccatttcttacgtatatgaattattccttccacagtgtagtttttacatagagcaatgttcctttccccaggccctttctgttgaccttgataatggagggttctctgtatgaacttgactaaagctctaatctttatacaaggactgccaaggcacagctcctcatagttcaatgtagatatgcaggctctcaaacagttaccagtctgatgcagttcaagaatatttttgtgcatgcaatagtaaacaatttggttttgatttgggtctagagtcaagtcttgttacataacccaggctggactcaaaactctttttttttttttaaaagatttatttaatgtatatgagtacactgtagccatcttcagacataccagaagagggcatcagatcccattacagatggttgtgaaccaccatgtggttgctgagaattgaactcaggacctctagaagatcacggtgctcttaagcactgggccatctctccagccccggctcaaactcttgatccccctgctcaggctcctaagtactaggattgcaccatgcctgtctagagtgaaatgtactagaaaatcaggtttttggacctgccagtaatcttccacttcatccttcacttctgaatgacaggagagaatggcactacccacctccagtgaacagtcaagcgtttggactgagggtgtctttccttcacatcattaatcacttttatgtcctcttcatccaggagccaactgagcatcccgagcctggtgaggctgggcagtcgggacacacactgacccagagccttgacagtgatggcctgaatttgaatgcattctgggatatgcctggaaatgtccaggtttttcaggtttggcaggttgtccaggacttgaaagaaatttctgtatccttcctctgtaatcttgtgattcagtgtaaggtctaagttctcaagtttttggaagcctcccctggttgctcccttggctggaaagaaagcaaccaaaatattatgaagaaaaagccttgagcaaagcttacaaggttatttgtaagtaatctcacacccaccaccagtgaaagcatgaaccacaagagcaggtcccactacatagctctggatagcctacaactcacttagatagcggaggctggtctagaactcacatctgcctacctgtgccttttgacagttgggattaaaggcagtgtgtcacaatgtttaactttaaacatgttttaaggagtgttctttgaaagccctaaacagcagcctcgttgatagggaacaaggccatactgcaagggcaaagcagaaaccaggatgttgagcacagagaatttttggaaacctaccgtctgggcaacgtgaaattctgtacttacaggacatatgccaaggcaggaacaggttacagtacaagaaactgagaaattgtgggaacagtgtctttccttttgcagagaaagcttgtcctctcactgtgactgttttccggtttgcctaaatagcttcctggtgacttagagctctggaggaattgtgggtaagttctgaactaaagtccatgacgggaagtggggacctagaagttttagttgcaaaactctgttccctaatttgtgcaaatattacatttgatttcaccaagaatctctgtgagcttggctttaaagacaaaagtcctaagtaagatgtttcaactgtgtcctaagtagggctggtcagtgatagtcacttttctgacaaaggaagaaagaaagaaagggagggagggagggagggagggagggagggagggagggaggaaggaaggaaggaaggaaggaaggaaggaaggaaggaaggaaggaaggagggaaggaaggaaaatcttaaaagctactaaatagcaggaaaacacacctcaccattaaggacatcatagcacaagaacagcggatactgacaactaaagaaaaaaagtgatgcaggccagaaacctaagtgaaagtaactccaaaatagaatgcacagaagtatcattaaaattcagaaaagtcatgactagctaacccagagtagaagaaatgctaccagagtccttcaggcaggagcaaaggggacactggtgagaggaaatgtgggggttcagaagtagcctcagcagccgccttgtggtgtggatcgatgcattgcagccggcagaaacagtgactgcagcactcagggaaggagctgaaaggttactgcaaggtggtcaccagttgggctccacaggagaccttgtctcaaaaacagcaacagtaacacataagagaatcaataaatctagcttgtaaatgctaaaccacagaactgtttgaaatactaatcgaagggttgaaatggatgtaaaaactaaaataatctttatttttacattttgtgtgtgtgtgtgtgtgtgtgtgtgtgtgtgtgtgtgtgtgtgtgtatgtgtgtgtgtgtatgtatgcctctatgccacagcatgtttatggaggtcagaggacaattttagacagttaattttcttctttgaccttgtggggtcaaacacaagtcttgaggctagacgaaaagcccccttacctgctgagccatcttgacaacccagataaatagaaattaaatattccagaggtacctacctgactcataaagtggtaaaagtatgcattcatatattagtttatgttttttttcttcaaatttcaaaccttattattcaagataacactgaaagaggaaaacgtggagctggaactctgtatggctacgtaagccttgatttctgaagcaggaggatggctatggattcaaagccaacttgacttcacattgtgaatttgaagccaggctgggctacagagtagaccctacctaaccaccccctgaagaataaggtaataaatgtggaaatcaaaaagcagagggaaaacctcatattgtacagaagaaataaagaaaccaatatcaagtaaaaattcagagggctgacacacccctgtcatcttagttctggggaagttgaagcaggaggatcctaagatgaggaccatcaaggactacatagtaagttaaagaagtccagactagactattaacccacagacactgtctaaaagaaacaggtaaaaaaaattaactatattaacaatataatacagtaaaataatatagtatattaaatataaataaaaaattaatggattgggtttttattttaaaatttctgtgcgtgtgtgagtgtgtctaagtgtgggtgtgaatgtgtgtaagtgtgtgtgtgtggaataccatgcacatgtagatgtgggtgtttgtggagaccagaggttaatggtggatgtcttctcagttggtctccactgcagagagaacatcttatgtctgcatggatgtggcgcctgtcaataataaatctgacagcctatggtgaaagcaggaaccaggaggtgaaacatcctggcggcagaaaggattctgggatagtgtgaggagattcacccagggaacacgtgacaagccagacgcatagtacttgaaaaacaggtaaccagccacttggcagaatataggtcagaataaatgggttatattaagttatgatctagtgaaagaagagcctggtagtacggccaaggtatttgtaaatatattttgaatatatgggagcatgggattggtaggaagaaccaggcataacttctatactccacctaactttttaagaccagttttcactaaacctggagctcaaagattccactattttgtctggttagtaagtgccaaggattcccctgccctcagctctacagtgtctcctcttttggatgcttttttcatatcacacctagggcttcattgcacagtctgggagcactgggcagatgaagccagttttgcaaccccagatttgtatcaggtcttacttagatgattgtgaatttttgttgttgttgttgttattctgagacaagacctcttgtagcacatactggccccttgcttactacgtggccaagaatgatgacttggatgatgaatatcctcttgtttctacctcttgagttctgggcttacagatgtgtactcttataacgactatgcctgcttgtatgtcatgctagggcttcgtgcatgctaggcaagcattttaccaactgaactccttcctagagtcaacctttaagcctaactatgtaattgtggaagagactcgtcttgaattttggtacatagattaaaaggcaggcaaaagacatgcaaatgatactgggcacctatcttagcatacaagaagtgatcgcaaggcaagaggtgtcaccacaggtaaagagcactggcctaccagaaagaccttacaactctgcatgggctgtgtgtctcacttgaagatgtaaaagcaagtagagctatgaggaaggtgggcaaggtgacagagatctaccagttgatgatttagttggggatagagcatgggattctggcattggtggtgacctgtgttctaattctggtaaaatcagataaaatccctaagaccctgaactggagaatcctgttcagctccagcctacagacttgtacagcttcttacatatattgtaaatactcaggtaataaaatgagtaccctgccaggtttgtgaaacaccaactatcacacagccttgactgagcttggtgcaggggtagaacactggcctagagagtgaggcattgggttcagttcccagcactgggaaaacaagaccacaggctggatgcttctacagctccctgaagaggctgttgcctttcccagtctgaccaggatgaaccagagtctgcggaagggcacgagaggaagcagcaggaaggaggacatgaggaagtagggtgaacagttgtctttatagacacttgcagcaggcagctccaacgattctgctggcttctgcacatgggaaccccttcgacactcaccaatttccagtacactgtcgtcatccagagtctctgcaaagacaagaactcggagacatgggagctgcagacactgccggacaatcagtttggccacttggtgaatcccgtccccagtgggaacgaacagtttctccaggttcctgagagaacccagagcctgggctgtgggagacacaagagagccatcctcaggagctgttccattgtgagcagcttatgacttacaaggtctgtcgtctaaggaggtcccacctagcacaggccctcctcatcctgtcctctccaagggcaggagaaggggtcagcacagagctgctccctgctgctctctgccgctgcttcctccatcctcccccaacctgtccgttcacccaagtcctcactgtctctccattcccacttcctctcccacagccaggcttcctctggctgcaggtcactttactgactccacaatgccttcatcccacccttctttaccaccccaccctctgccagcacctcaatgatttcaggctgaggagacccacactagacactaaagcatgttccaccactgtgacagccctccttcccaagtacactctgctcagcaggatagtctgtagatcacatgatcactaagtctacctctgaagccccatagaaactattctgaaaactttctagcatggaccaatggtccagatttatctttggctttccctgtttcagctcttgaatgaagcatgtctccacagaccctaattcttttaggaaagagcatttagaaatcaagtccagggattcgggcagttgatacattgcttgcttagcatgcttgagaccctcggcgaagggataacctcttgtgcactgtgtggaagcagcacctgtcaaagaaaagctgatggcctcttagcaaaaggtgggaagtacaaggttctgggtaagagattgcaactctgggagatagtcagacatgagagattcatctcgaactctgagg

SEQ ID NO: 26 - DNA, 38494 bp, Mus musculus
cctcagagttcgagatgaatctctcatgtctgactatctcccagagttgcaatctcttacccagaaccttgtacttcccaccttttgctaagaggccatcagcttttctttgacaggtgctgcttccacacagtgcacaagaggttatcccttcgccgagggtctcaagcatgctaagcaagcaatgtatcaactgcccgaatccctggacttgatttctaaatgctctttcctaaaagaattagggtctgtggagacatgcttcattcaagagctgaaacagggaaagccaaagataaatctggaccattggtccatgctagaaagttttcagaatagtttctatggggcttcagaggtagacttagtgatcatgtgatctacagactatcctgctgagcagagtgtacttgggaaggagggctgtcacagtggtggaacatgctttagtgtctagtgtgggtctcctcagcctgaaatcattgaggtgctggcagagggtggggtggtaaagaagggtgggatgaaggcattgtggagtcagtaaagtgacctgcagccagaggaagcctggctgtgggagaggaagtgggaatggagagacagtgaggacttgggtgaacggacaggttgggggaggatggaggaagcagcggcagagagcagcagggagcagctctgtgctgaccccttctcctgcccttggagaggacaggatgaggagggcctgtgctaggtgggacctccttagacgacagaccttgtaagtcataagctgctcacaatggaacagctcctgaggatggctctcttgtgtctcccacagcccaggctctgggttctctcaggaacctggagaaactgttcgttcccactggggacgggattcaccaagtggccaaactgattgtccggcagtgtctgcagctcccatgtctccgagttcttgtctttgcagagactctggatgacgacagtgtactggaaattggtgagtgtcgaaggggttcccatgtgcagaagccagcagaatcgttggagctgcctgctgcaagtgtctataaagacaactgttcaccctacttcctcatgtcctccttcctgctgcttcctctcgtgcccttccgcagactctggttcatcctggtcagactgggaaaggcaacagcctcttcagggagctgtagaagcatccagcctgtggtcttgttttcccagtgctgggaactgaacccaatgcctcactctctaggccagtgttctacccctgcaccaagctcagtcaaggctgtgtgatagttggtgtttcacaaacctggcagggtactcattttattacctgagtatttacaatatatgtaagaagctgtacaagtctgtaggctggagctgaacaggattctccagttcagggtcttagggattttatctgattttaccagaattagaacacaggtcaccaccaatgccagaatcccatgctctatccccaactaaatcatcaactggtagatctctgtcaccttgcccaccttcctcatagctctacttgcttttacatcttcaagtgagacacacagcccatgcagagttgtaaggtctttctggtaggccagtgctctttacctgtggtgacacctcttgccttgcgatcacttcttgtatgctaagataggtgcccagtatcatttgcatgtcttttgcctgccttttaatctatgtaccaaaattcaagacgagtctcttccacaattacatagttaggcttaaaggttgactctaggaaggagttcagttggtaaaatgcttgcctagcatgcacgaagccctagcatgacatacaagcaggcatagtcgttataagagtacacatctgtaagcccagaactcaagaggtagaaacaagaggatattcatcatccaagtcatcattcttggccacgtagtaagcaaggggccagtatgtgctacaagaggtcttgtctcagaataacaacaacaacaacaaaaattcacaatcatctaagtaagacctgatacaaatctggggttgcaaaactggcttcatctgcccagtgctcccagactgtgcaatgaagccctaggtgtgatatgaaaaaagcatccaaaagaggagacactgtagagctgagggcaggggaatccttggcacttactaaccagacaaaatagtggaatctttgagctccaggtttagtgaaaactggtcttaaaaagttaggtggagtatagaagttatgcctggttcttcctaccaatcccatgctcccatatattcaaaatatatttacaaataccttggccgtactaccaggctcttctttcactagatcataacttaatataacccatttattctgacctatattctgccaagtggctggttacctgtttttcaagtactatgcgtctggcttgtcacgtgttccctgggtgaatctcctcacactatcccagaatcctttctgccgccaggatgtttcacctcctggttcctgctttcaccataggctgtcagatttattattgacaggcgccacatccatgcagacataagatgttctctctgcagtggagaccaactgagaagacatccaccattaacctctggtctccacaaacacccacatctacatgtgcatggtattccacacacacacacttacacacattcacacccacacttagacacactcacacacgcacagaaattttaaaataaaaacccaatccattaattttttatttatatttaatatactatattattttactgtattatattgttaatatagttaattttttttacctgtttcttttagacagtgtctgtgggttaatagtctagtctggacttctttaacttactatgtagtccttgatggtcctcatcttaggatcctcctgcttcaacttccccagaactaagatgacaggggtgtgtcagccctctgaatttttacttgatattggtttctttatttcttctgtacaatatgaggttttccctctgctttttgatttccacatttattaccttattcttcagggggtggttaggtagggtctactctgtagcccagcctggcttcaaattcacaatgtgaagtcaagttggctttgaatccatagccatcctcctgcttcagaaatcaaggcttacgtagccatacagagttccagctccacgttttcctctttcagtgttatcttgaataataaggtttgaaatttgaagaaaaaaaacataaactaatatatgaatgcatacttttaccactttatgagtcaggtaggtacctctggaatatttaatttctatttatctgggttgtcaagatggctcagcaggtaagggggcttttcgtctagcctcaagacttgtgtttgaccccacaaggtcaaagaagaaaattaactgtctaaaattgtcctctgacctccataaacatgctgtggcatagaggcatacatacacacacacacatacacacacacacacacacacacacacacacacacacacacacacacaaaatgtaaaaataaagattattttagtttttacatccatttcaacccttcgattagtatttcaaacagttctgtggtttagcatttacaagctagatttattgattctcttatgtgttactgttgctgtttttgagacaaggtctcctgtggagcccaactggtgaccaccttgcagtaacctttcagctccttccctgagtgctgcagtcactgtttctgccggctgcaatgcatcgatccacaccacaaggcggctgctgaggctacttctgaacccccacatttcctctcaccagtgtcccctttgctcctgcctgaaggactctggtagcatttcttctactctgggttagctagtcatgacttttctgaattttaatgatacttctgtgcattctattttggagttactttcacttaggtttctggcctgcatcactttttttctttagttgtcagtatccgctgttcttgtgctatgatgtccttaatggtgaggtgtgttttcctgctatttagtagcttttaagattttccttccttccctccttccttccttccttccttccttccttccttccttccttccttccttcctccctccctccctccctccctccctccctccctccctccctttctttctttcttcctttgtcagaaaagtgactatcactgaccagccctacttaggacacagttgaaacatcttacttaggacttttgtctttaaagccaagctcacagagattcttggtgaaatcaaatgtaatatttgcacaaattagggaacagagttttgcaactaaaacttctaggtccccacttcccgtcatggactttagttcagaacttacccacaattcctccagagctctaagtcaccaggaagctatttaggcaaaccggaaaacagtcacagtgagaggacaagctttctctgcaaaaggaaagacactgttcccacaatttctcagtttcttgtactgtaacctgttcctgccttggcatatgtcctgtaagtacagaatttcacgttgcccagacggtaggtttccaaaaattctctgtgctcaacatcctggtttctgctttgcccttgcagtatggccttgttccctatcaacgaggctgctgtttagggctttcaaagaacactccttaaaacatgtttaaagttaaacattgtgacacactgcctttaatcccaactgtcaaaaggcacaggtaggcagatgtgagttctagaccagcctccgctatctaagtgagttgtaggctatccagagctatgtagtgggacctgctcttgtggttcatgctttcactggtggtgggtgtgagattacttacaaataaccttgtaagctttgctcaaggctttttcttcataatattttggttgctttctttccagccaagggagcaaccaggggaggcttccaaaaacttgagaacttagaccttacactgaatcacaagattacagaggaaggatacagaaatttctttcaagtcctggacaacctgccaaacctgaaaaacctggacatttccaggcatatcccagaatgcattcaaattcaggccatcactgtcaaggctctgggtcagtgtgtgtcccgactgcccagcctcaccaggctcgggatgctcagttggctcctggatgaagaggacataaaagtgattaatgatgtgaaggaaagacaccctcagtccaaacgcttgactgttcactggaggtgggtagtgccattctctcctgtcattcagaagtgaaggatgaagtggaagattactggcaggtccaaaaacctgattttctagtacatttcactctagacaggcatggtgcaatcctagtacttaggagcctgagcagggggatcaagagtttgagccggggctggagagatggcccagtgcttaagagcaccgtgatcttctagaggtcctgagttcaattctcagcaaccacatggtggttcacaaccatctgtaatgggatctgatgccctcttctggtatgtctgaagatggctacagtgtactcatatacattaaataaatcttttaaaaaaaaaaaaagagttttgagtccagcctgggttatgtaacaagacttgactctagacccaaatcaaaaccaaattgtttactattgcatgcacaaaaatattcttgaactgcatcagactggtaactgtttgagagcctgcatatctacattgaactatgaggagctgtgccttggcagtccttgtataaagattagagctttagtcaagttcatacagagaaccctccattatcaaggtcaacagaaagggcctggggaaaggaacattgctctatgtaaaaactacactgtggaaggaataattcatatacgtaagaaatggccagtttaaggattgagtcagctctatacaggatgatcaggagttgactttaccatggctacagctcaccctccccccaggagatgctctttagtttttgcagggcttttgcatgtacaccagtcttgtgtggccttgcttgcttatgccatctctcatctaattggggggggggggggaattggcttagagaaaactgtttttgttccagaggctttttcatatattaagatagctttataattttgttggaaatttactctgttctgggtatgtcatttaatcttgcaagaatttctgggtatattaacttgattgtgataattatttgtcatttcataactatcacctctctagaggcagtaggacttgggagaatagagccaataaatgaggcagactaaagtctcatgcaatagtcagctttattcagagcatcagacagtttatactctgagagttaagaaaaactacctgagaaaagttcttctgagttcaggctatacacaatcatgaagacaagttgcatgtggcgaaacatgtttttctatagagcagtggttctcagcctgtaggtcttgacccctttgagggtcagatgatcttttcacaggggtcacttaagaccttcaaaaaaacataaatatttatgaatcataacaatatcaaaattacttatgaagtagcaacaaaaataatttcatggttgggaggttactacaacataagaaattgtatttgtggtggttttgagaggccacatcttttaagttcagactccattttagagaacctggcctaagtttgaactcaggtaaactaacaggcctggtacccagcactagtttccaaattactccccaacaaaacccaaacctagctctagtctctaggctaatcctcaacaagaccagcatctccaggttacactcttaacaggaccaacatctccaggttattcccccaacagacctgcacccccaggttacaccttggggggggggagatgcagatcactaacatttccctggcactaactagagtttgaatatgcttggcccagggagtgacactattaggaagtatggccttgttggaaggagtatgttgtggtgggggtaggctttgaggcattcttcctagattcctggaagtcagtctactcctaactgccttcagaacaggatgtagaactcttaagctccctccccacccccaccatgcctgtctggatgctgccatgctttccaccataatgatactggactgaacgcctgaacctgtaagccagccccaattaaatgttgttcatattaagagttgtcttgatcatagtgtctgtttgcagcagtaaaaccctaactaagacagtattccagggtcacaggcaggggcatataaaggataaacattaaattgaataacaacacaaacaatactgagcaatctgagctgtgccttgcaggacaaagccatgacaacaaagctcactagggccatgaagctgctaggagctgctgggcagtatttggctgcaagagacctcagaatgctagtgctgccagccactgcgtgtgacacaaggtgcctgtggctagagctggtgctgcaaggacctccctcagtgtctcggcagcatcctctgtgcatgcagggatgactggggagaggagttcagaacaggaagcctgttacatcataaatactcaatttagaaacaggagacaataacttggcaactgacttaactcattgagtagcgcgggtggaaaaaaacctaggtaggctgtatgcagtagtacatgtgtttaaacctagctactctgaaggctgaggcaggagaaacacaagttgaggccagcctgatcaatctagagagacacggtctcaaaataaagtagaggaagagttggggaggcaggctgctcggcggtccagcatgtgtgagggcctgggtttgatgactagcactgcccatgaaaaggaaagaggggctggaaagatggctcagtggttaaaagccgtagtgattcttgcagaagacccaggcacagtttccattaccagcatggtagcttacaaacagctctaactccggttctaagacccaatgtccttttctggactcactgaataccagacaaatacatggtacacacgcatatgcagacaaaatgcccatacccataaaagaaaacttttaaagtctttttttttttcaataaagaaacagttctaaaaagaattcagtggtcttgtttgttcctcaacacttaaaaggaaaacgccaaagctgcatcggcccctgaccacatcctccgtattccagctccctgaatctgtcaaatgggcagaacagtttgcaccttcttaggacatccgctttatttttaagttaaaaaaaacaaaacaacccaagaaatcaatttttcatcgtagtgcacatagagcataactgaaacaggtgacaaaaataattgtaaactcacacaaatagatatcaaatgtgattttattaagctccaaatataacaagtctggaaaaaaaaaccaactttttgttggaagagttccttacgatcactgataagtgtctttcctgcttacattctcttcgcccaagcttttgccatctccatctcaccaaaatagctgctttagcatcactgcgacctccacactggctcgtagcatcaccagtgacctctgacctccacattggtttagtcaatgactgcgctgcagactttatcatatctgtcctgtcagcagcagctgagctacagatggggctcctccctggcctccaggacgcacctgctcctgccaggagcccttggagcatcaatgacccctgctttccgcagagagctccagctcgaccctctgctgtttctcctctaacccctggaggatctgagttctcctggctttgtctctgtgttatacacagcctggaccacctcatcctgccaaatggctttaagctccatgtccacactatctcctccgtctacagctctagccctgcactctgttaatagaactccaatggacactggcaatccacatctccaacgctaactcttcactgaggtactctttgtgtagactttcaccccccgaaactcccgcttcacccctgcaggtgcttagtgaaacccctggagttagttatccttagcttctcttacaccacatataatctactgacaaatcctggcaattccacttgcaaaatacacagtcccacgtggccagcccacttctgtgaaatcagtgtatttccaccatgcagtcacacccagaggatcctcctggaggtcagatcatctctacctgtgcctccctcttctctgaactcccagctcaaggccaacgctgtcaacctcaccatcatctacatatgacctgacccttgctcctgcttcttcctatctcctatctctacttcctctcactctggccttgctggttcttgaatatttcattcatattcttagtttttcaagtctaggtttatctgtgtaacccccactgtcctggaactcactctgcagaccaggctggcctccaactcagaggtccaccaggctctgcctccccagcactaggactaaaggtgtacgacacccctgccctgctccacacacattcttatacaagagccttttcctttaactatgttctctcattccatggtttgagtatttcccaaataatgtatgttaaaatgcaatccccactatgagcctctaggagtgggacttaatctactgtgtttgcagctggggcctttagaaggtatttaggataaagtcattgtcttagtcagggtttctgttcctgcacaaacatcatgaccaagaagcaagtcggggaggaaagggtttattcggcttacacctccatactgctgttcatcagcaagggaagtcaggactggaactcaagcaggtcagaaagcaggagctgatgtagaagccatggagggatgttctttactggcttgcttcctctggcttgctcagcctgctcttttatagaaccaagacaaccagcccagagatggtcccacccacaaggggcctttcccccttgatcactaattgagaaaatgccttgtagatggatctcatggaggtatttcctcaactgaagctcctttctctgtgataactgcagctgtgtcaagttgacacaaaactagccagtacagtcatcaagatgaagttcccactgaatcctggtggcttcctgagaggccaagtatgaacacacacacaagatatgcagaaatcatgcttttgttgcctcttggaatattatgcctgattcaagctcagcgcaccaaataaatcagccctgaacccccagaactgtgagccaaactaaatctttctaacaactccccataggctattttccatgttgtgtgtaagatgatagagtacacatgagtatgcatatgcctgtttccacacgcacaaagatcttcatcggtgtctttgtcactgcctgcattattcccttgagaacctggaacctatggctttgggctaggctgatggccagcaactcacagtgatcctgcagtgatccccacctctgtcctttccccatgctttcatccacggagccatctccactgcctctctctgttattactgtattagctgtggtttccttatgttggccaggctggtctcgaaggatgaatcctactacctcagctttcaaagtagctgggactacattacatgccgacatacgatgcacccttctagctttgctgagagcaattcccagcattgaaataatgttgagtatttgctggaatgaaaggcctcagtccagataaatgttttgggcgctaaagagagttaaaattagtgttaataactaatgtctggttagaaggttaactgagtgtcttaataattaaatttaacctgaaaattaactaagttatgttgaatctataatagccaatatttcttctaaaagctcaaatgagaacatatttgcaaagttacttactaggtaggtattcattaatttgatagtacttacttgatggctaaatgataggcacatggggaactgaattaatttagtttacctagctaaaacttaggcaaagatagcattgaccatgctctgtttttataatagtggagatcaaaccccagtgccttgcacacgtcgtcaaatggtgtatcgatgggttccatctccagctgatcacatttacttcttccttcaaaggcaaataaaccagggagaagcctgggtgctgaagacatcaatccttaccataagaatctacatggtacatggccaaggccgtgggggaggggggcgggggcgggggcggagaatggcatgggtaattggtgtaggcagtattcatgatgaggtaagggacatcagggggagaggaggagactagaaagacaaacaggggaaggtgcaaagagaacaacatggcttctaacggacagaacacagtgagggtgtggtagtagttgcatttgctgctgtggtgaggccagcatttgggaggctgagccaagaggactgtgtattacaagtaagccaggctgacaacaagactgtttcaataaatgaagaactgggctggtaagatggctcaacaggtaaaggcgcctgccaccagatgacctgaattcaatccctaaaacctacatagaaagagagaaatgacttcccaagttgttctctgacctccacatatgagccatggacaaaacacacacacacacacactcacacatgcatgcagcaaggcacacaaacatacaaaacaaaaccacaacacgccttggttcctgactggccagtatagccccggtgacatgagctagcttttgttccccaaacttggagtatcaatttattctaccttcagaaattgcccttttacccaagtaataagtctgactagttttctttttgtatctttaaacaaactcaacttcactgtatatatcccaaaggaaaatatctataaagtcaagatttcaaaaaaggacttttatttaattctaaaggcattaataaaaatcttgacatgctaagaaaatgacaattgcacatttgtgctcagtcacgactgggtagactgccttccgacacgcacactccactggtcggtccctccaactgctcacgccccaggcacgctctgctgctgacttaggatggatggactcccacagcggggagatgctgatgacgacaccacttagccaagagtccactgatgacgaggagacgtctgttcttgtcgaccagggacaccgacaccccatctcctgagacagagctgaacctgaatttgaaagaaaaaactctgggcagttataaaatgacaataaataaataaaaattgtgtgtgcatgtatgtgtgtgagtgtggaggtcagagacaactagtaagaactggttctcttcttccaccctggggagtgtactcaggtcatcaggcctttggcctctgaagcaccttaccagttcccaaatattttttatatagaatgcaaaaaataaaaatatattagctgggcagtggtggtgcacacctttaatcccagcacttggaagtcagaggcaggaggatttctgagttggaggccagcctggtctacaaagtgggttccaggacagccagggctatacagagaaaccctgtctagaaaaaaaccaaaataaataaatgtgaacattaatttaaaaaattaagaagtactatatttgacctctcctattagaatttaaacatattacaaattatcaaatcatgtgttaaacttttcactaatgtttagttcactaaagtgactgcaacaatataaccagctttgtttggggggggggggtagtagaactagaaattagacacctggattagaatgttacatgcctttaaagttaaaaatgaactcaaaatattaggcctccagaaagttacaataaaaactccatatatacagccaccactccagagcctgcctgtctgcttcctgccatgatgctcatggactagccctcggaaactgtagcaagctttcttttatgagagttgccttggtcatggtgtctcttcacagcaatagactaagacaataatgcagtatactgcatactgcatcatgtattaaaagaggggatgggtctggagagatggctcagtggttaatagcacttactagtcttgttagtagatttgggcaacttataaccacctacatataactccagttttacgaaatcccgtatcctcttctagcctcaagagcatcaggcatgtacatggcacataaacatacatgtaggcaaaacctccacacacacacacacacagaagtttaacataaaaactacccatggatctggtgatacggctcagtggcagaatgcttccttatgtgtggggccctgggttcaatccctactaccacatcccacacaaaaactcaagcctgccaggccaatgacactgcaattaacttcacaccctaaaccagattttaaaccaggtacagagctgcatgtctataatcctcatgctatggagaccgaggcaggctaacacggagttcaaggccttctgacaccatgagtatttgatcatgtgaggataattcaatagttaatctatttttggcagactttagcagggctggagagagggctcagtggttaaaaagcactcactgttcttctagactctgagttcaggtcccagcaccatgacaagctgacaaccacacgcagctcaagctcacgggatccaatgtcctcttctgtcagccacgcacccccaccctcaacacacacacactacacataaatacaatgtctttagtatagttttacataaacatcaattttcaaatgttcaaaacactctttttacacaaactaaaaattatacaaaaggtaaaattagcttttaaaatgacagacttacttcttaatttgtatgtgagcactttccttcttttttattttgtctgaaaccctgtaaagagagcatataaaaagctaagcagggtatactaaataaatgtgtgagtgaacaattcaagcccggctggatgccaagcttggtgatgcatgggcagtccagccctgagatgaggaggaaggaggacccggagttcaaagtcatcttcagatacatgatgagtctaaaactgcctgggacacagcagactctgcctcgtgttgggagatgtggcagatgtctgtaattccaggaattggaaatcagggcaagaggatctctgtgagttcaaggctagccttgtctcttttttaaaaaagcaaaagagaatacaacgaaacaaatagccctttcgcccaacttagtgatatgtacctaataatcccagtgcttaggagaccaaagcaagaggactttgattttaaggccagcctggctggagaaaggctgagctatgacaggaagacctgacacagaaaaccatgagaatgggaacagtctgctgctagagatcttgcctaacatgcgcaaggccctgggtttgatctccagcactactagaacaaccgaacagtgtatttcatgaggcatgctaactttatttagtttcatctgaaaataagtttatgtattttaaaaagtagtttatagcattccaatatactttaacagtgattgatccaaagcaagcatggtggcacacacttgtaccatcagcaactagaaagctaatacaagaggactgctgtgattggaaggccaccctaggctacacagtgcatctacatttacatctcaacagccagagatgtactgaaggtgtcttggtaccaatgaagaccaaagctagagcacatttacgttcttgcaataacaccaccactcttactcattcttgttctgcttgaatttctacaagacagaaccgcagaggtgagcagcgaccaccatggcgctgccgccaccatcctgactgggcaggcaaacactgtggcttggtcacactctgtaagggctatgaactgctcgtggaagtcagtgagatcgtcacaagtctcgggcaactggaaagcctgactgacaagcttgtctactccttccaaaggtaaaaccctcagatcttcacactcaaggacacacacttcccacacgtcttaagggcatatgttgatattttaagttaagcaaactaatctagtgaaatgccatcaacgcacacacacagatgatgctcctaaagggaagcacttctctggttagctctgagttggcgtgactactttaaggagcatggctacctaacaagagcttcttaggactggagttaaaagtaccggccagggtgagcgctgttgggagcagccctatgggaactgggaatggaagttgggtcctccagaagaacagccattgctcttaactgctataccatctctccaaccccagaaacatttttactggcccaaatcacaacataagcagtcattaatagtagaatggataaacagaatgctttcatatctatacaatgggaggtaacagagcgataactatacacaagaatgtagattaagctcgagcatgaggacctactgtggctgctgcaggaattgtcctgtgacctgccaggagctggtggccgagcaaacatgaatgttggagttgcccacagtgaggtaaaccccaatactcgtgtaatgaacagccgtgatacgtggctgacatatgctttgggagttggccgcttcctattgtattactcagcatccccttctgtagtgtccctgccgcctggaccttaacaaacataatacgtaatctggttgtatctggaggtgttgcaagtgacttgtacacccgaaaagcactggaaatcatcgcaaatgcagcacagtgcacgttgttgtgccccccctccaggactgtgcactgacaatggcatcacggctacatggaatggaactgaaagagtacgtgctggcttgggcgttttacatgatgtagaagacatccgaaatgaaccaaagtgtcctcttggactagacatatccagaggagttgcagaagctgccataaaagtaccacgattaaaatggcactttgatttgtgattttaaaggtctctacaggccataactgccatgcaactcaattccatatgaaactatgggaagaaaatctattcagtataaacaactttcattccaacaacataaattccatcccctgaagatactgtgtattttcccacaataaacaataagttttgaaaaaaaaagagtcaagaatcataaaaaaaaataaaaataaaaaataaaaaaagaatgtagatcaagcttaccaacgaaacattaaacttcaaaaactggccaggctgagatacagctcagtggtggggcttgcccaggatgcccaagccccagggtgcgatctccaacacctgggaaacctggccaaacgagtcagtgtaagactctatccacggcagagcaagtatgtccaggaatgatggtgcacacatgcagtccctgttcctcggggggctagggtaaggggattccagagttcaaggccagcttgaagaatacagcaagatccaatctcacaatgggaaaacaaaaatcatcatccccaaagcagaaaaacagtctaggaactaatttaggtttcacttacattttaaagtacaattaaaataacctagcagcattaagcctcccttcccactgttacatggtttgctgctgggatagcggctccctgtgtatccatgctagcctggaacttgtaatctacctgttttagctttctgagtgctagaattactgccaatcaaggagtttgaaatgagctgggagttggtgcacgcctttaatcctagcacttgggagggaggcagaggcaggtggatctctgtgagttcaagaccagcctggtctacagagtgagttccaggacaaccagggctacacagagaaacagtgtcttgaaaaagaccagacaagataacaaaagcagacatttgaaatgagttgcaatcacactcaggaggaatgatgaaagaagtattgtccatttttaaatgttaaagtggtcttaaaactgacttaacgtttttaagcactatagaacaaaccacattttagttatgtaggagctggctctaggtgcaagactcatcaccaaaagttgtacaactgcaaagagcatgtctggcagttcccagggagtccttaccatatagtagccagtgtggtagccactcatgtaccaagagattagcatactgcccagggcatcagtgtcatccagacagtcgggagagatgggagggggtggcgggattatctgcaaatggaaaaaatccacttaggattagggaaatactgaaacccagggattcactttacacagagaataatgaattattaactgaaccttttcctaaactcaatgagatacttctatttaatttttgaatctagcactggaagaaagccaaccataataagaaaaggccagggctggcaagatggctcagccggtaagagcactgactgctcttccgaaggtcctgagttcaaatcccagcaaccacatggtggctcacaaccatgtgtaatgagatctgacatcctcatctggtgagtctaaagtcagttacagtctacctatgtagaataataaatctttaaagaagaaaaaataagaaaagaccaacaaatctaacaaaaattaaaaccagttgacatttaatagtatgaatggactattttgttccattatgaagctatgcataagacacaaaacagagactcaagtctttccacaaacacaaacacaaacacacacacacacacagtatttttaaggacaccataaggaaagatttagagtagaacatctgcctgtctcccactcaaatacagtctgcccccaaatatccttttaactactgttaatatctaaaaataaaactactataaaacttctattagggccaagcagtggtggcgcaggcctttaatcccagcactagggaggcagaagcaggcagatctctgtgagttaaggcccaacctgttctaggacagccagggctggtccacagagaaacctggtcttgaaaaccaaacaaaccaaaaacctccattaggatgaaaacaaacaatgacaagaggcaagcccctgagaaagtacaggctcggagactctcattcaagtactccaagggacatagtatctgtcgcctctgtatactgaggacagtcctttctaacagaaaccagcagcaggaaactggataccaaccagtgaggggggaaccacaccaagcagagcttggcagtgagactgggagagaccatctgggtaacagagggccttccagacaaaaccagaggtttacatttttactcattagaatccaaccttaggggtggcctaaggtaacgcactccaattacctatattctaaaacaattactaactgtatataaaagtgtaacctcagctcttgtgtacttactggtggtcctgaagggaacgggggcatccagcacggcaggaaggggggagggggtagtggaggcggcggcggcgggccgttgaattttagacctggctataaagaatatttccaagttagtatcttaaggaaaaatcccttccgtcactgaaagaaagagtattcaaaaccaatgtaagagaagtaagaactggagagatggctcagcagttaacggcatctgcatcatatgtactagcccacacacagacatgtacacatatacgtaactacaaatgaagcaaatcttaacgcaaatcgtacattgttttccgttgcttttctatataaacatttagaaagtaaaatcacagtaaagatctgtaatgactcagtcgaccagagacaatgtatttaccaagatagtctaatcacaggaatacattcttcccccactatcacatatttttgtagatatcctgttactgggtccacaagacggctcagcagataaaaggtacttgtgggcaggactggcggcctgagttcaactcccaggacccacgcaaaggaagagaacccacttccatacgttgtccttttacttccattaagtatacagtacccaccccaaataaataagtgtaaactgaggaaagaaaaagttttagagattctgttacttatatatgctagagtacattgtaaaaactaccaaaaagacaagatatattttatagaatttgatcactccagattcaagaaactctaatacaatgtaacctttttttgtttgtttttttttttttttgttttgttttgagacagggtttctctgtatagctctggctatcctggaactctgtagaccaggctggccttgaactcagaaatccacctgcctctgcctcccaagtgctgggattaaaggcgtgcgccaccacaacctggcaaaatgtaacctttttttttttttaaaaagatttatttacttattatatgtaagtacactgtaggtgtcttcagacacaccagaagagggagtcatatctttttacggatggttgtgagccaccatgtggttgctgggatttgaactcgggaccttcagtagagcagtcagtgctcttaaccactgagccatctcaccacccagcacaatgtaacctttaattagaaaattatcacagaaaatctttggttgtttaaattttctaaaacattaattaatttagttgtgtgcacatgcatgtatggagcattgtcttagtcagggtttctgttcctgcacaaacatcatgaccaagagcagttggggaggaaagggtttattcggcttattcttccacattgctgttgatcaccaaaggaagtcaggactggaactcaagcaggtcaggaagcaggagctgatgtagaagccatggaaggatgtcttactggcttgctttccctggcttgctcagcctgctctcttatagaatccaagactaccagcccaggaatggtcccacccacaaggggtctctcccccttgatcactaattgagaaaatgccttacagctggatctcatggaggcatttcctcaactgaagctcctttctctgtgataactccagctgtgtcaagttgacacaaaactagccagtacaagtgtgtaccacagtgctcatgtggaacccagagacaacctttgggaatcatttttctctctctaccaagagactgcagggaactcgctcaggccggcgggctggcagcagatgcctttacccacggcaccaccttgcatcagttgttttcagtttacgttttagttttgtctttttttttttttttttcaaaactgtctctatggaggccaggctggtcccaaactcagtaatcctctcctcgccgtatctccagtgctcacttctactctactcacttctcagagaaagcctgaagaggtgctatacttaatttttacaaattactatctaggggtgaaaagagaggcctgagcttgggtccccagcacccacatagcaacaaggcaaggcagaacatattcttagccctagcactggggagatggagacaggatccctggggctctggcaggccaggctggctgaaccagcaagctccacgttcactgacacgatctgccccagaaaataaggtagagagtgattgaggaagatgctcagtgtagacctctggctgccactggcactagttccttcccacatacagcacacatatgcacgcgcacacacacaaacatgcacgaattatctaaataccatgccctctaagggaaaatactgctacttagtacaaaacaaacaacaaaacacaacaagctagttaaggttcttctagccataacctagcttataatacaattcttcttaagttgacttctactacttacaaccaaaagagccatacaaagtgttcacactttaaccctgtactatgctctgggataaacaaggtgtggtggctggcacattcctgtaatcccccatcatttatagatggaggaacgaggatgtgtggaagtcagaagccagcttataagagcagctctttccttcctctgtgtggtcctcatgcacacactatagtgtcataaaagtctgtaaaaaggaaagtgtaccagttacatgccagccagccatggcagtgcagggagcctcttacttcactgtgcgtttcctctttccagacgcaggcccggaagctcctggttcacaggaaagctatccattactcaatgaagagttaggctccccacactcattcctgcctacatatatatttttctcaacagaacatttacctttcctggtcctaatcctgaccctggcattgggggtggtggaggaagaaatgaggtccacggagcagctttggacttgctgtgtgctttacttctgagcgatctggaggagtgttcactgtcgtctgtggaaacttgactttcattctttaaaaagaaaaggaaacattgtattatgcaaaggcagggcaccgacaagcattcctatggccccgaccttgcgttccagcaaaaggagaaccagagagaatgagaatgtcattcaacgccttcgtgcgtcaacgtgacaactgattctaatgctttttccttacttagtgtccactttcaggaatggacatctttcggggcctcacctcctgagtgttctgttctgtactattagctacttcacaggtcggggaaagtaggtcagataagttttgctcctctctgtttccatatccagtataaaccacgacacaggtttctctcttaaagtcaatggacgtaatagtagctgggtaaatgcagccgtcttctgaccaaacagcagaacacttgtcaccaactttccactacaaaagaaaagaaagttatggacacgcaacattccttcttctgaaaagaacaaaccataacccagttctccaagtgtaattccagtcctcccattcacttcattataaacactgttcttagtcacctgcatctccttttcccggcctgatgaatggctataatgtattccaccaccgaaacgtgtcattaagaacaaaagagaccaaacgtgtatgacaaatccagtgttcttagtcaaagaaaagcaagtgttcaccaaatgtagacaccctttccctttggaaataatgaatggaaggaggcatcaaactattcactttacaaaaaaactcagagagagagagagagagagagagagagagagagaaaagaagagaggagagaatgagacctctagtctatagggttttgtgctgactcaatgtgggtctggtcagggacacacaggcacacaggctgggcctgtaaccagccaggtactttgctggtacactatacccccaggtcttctgctttcaatagcagacccagttaccacaagttttgagttaccctagtaatttttataattgttgaacttgtgtgtgtgtgtggggggggggggggggttgagttgcatatcagctacacagcacatactcagaatgcagagagctctggttttaatgcccagcctgcacatgtgtgtgcgcacacgcctgtgtgtgtatgtgtgcgtttgctaattcatccacagctctgggacactccaaacagaagcagcatgccgcccctcaggccgggcaggaccctggttaaatcaatctatcacctgtttcaagggagttgtggcattcttcttttggcttttattcttcttggcaggttttcttctggctgtgccttttggcttatctggagtttcacaaatgtcaccgttctttagagcatgctatgaaaacagtaaataaataaataaataaataaataagatctatgtgtcatggagggatatatttttaaaaagtcactactttctaacataacaggtcccaccacctaagaaagcctcaatgtgctcaagtttatttttcttctctctctttctttacaaaatgtatgacctgaggaaataaggaaaaaaatgattaaccatttcataccttaaaggaagccacagctttatcataagcttttatcaatgctgtatcatcccaaatgtcagaatcatcactctgaagagggagaaaaaataaaaaataagttatagatagatgtgcttaataaaaaacagataataggaagtactggggaagtagctcaaagtccctagatcaacccccagcaatgcctacagcccagacactcagagtgtgtgttacaggcagatacatttctagaaagtcaccacgcacgaacacagagatcctagcacctaagaaagcctcaatgtactcagtagaagcagaggactgccaaggcaaaactggtctgggctatagtgggttcccagacagcatagactacaacataaaactctatcccaacaaacaaacaagcacaccaacaaacaaaaacaaaaccatgaactacaaattaaaatggctcatatctataatctacaatcccaatatcccggagctggagacagtagggttgccaagagctccaggccagtctagcatattgaattccaggccaatttaggttatggaatgtgtccctgattcaaatgggggcgggagggggggctgagacggggcaatctccttgagtttgatgccagcctggcttacatggagagttccaagtctcctaaggctaccctgtgagacctgtctcaaaacaacaaaacagcaacaagaaagaagctgcaatcaataagattacccctgagattgtaaacatgacccatcaccctgggcatgaagaagttaccacgatgacaaattagcacaggaaccttgtggttttaaggagagaaccagaccgccagggctcccctgaggacaaagggcaaagctttattcagaataggaattgctgggctgtcccccaaagaaggaaatgcagcactgcccaaagctgcccagaattctcttctcccaccccaagccccaagcagaaatcagttgccataccataagacgaccgaggtcctaatgttttaaacttcgttagatggagtatgttgtttcccaggctagactcaacttcacattcctgcctcaggagctgggactgatcacatgcacagtccaccaacttggctctgatttgccctcgtacttaccagtgtttatcttacttctacagtctccctgtaatttaggctggtccggaattcacgctgtaaccgaggatcttgaactcccgaccctccggcccccatctcccaagtgtttgtgcatgtaattatgcgtgcaccaccaaccctgcctcggatctgctgtcgtatacatttgaatgcaatgcagtcaatagcaactttcaactactccgggcaactttagttatccctctctctcaaactttatcaactgttgtttgcaacacttggtctttccggttacaaaactggatccagaaaaccagcattttagtctaaagtccctgtgaacatcttcatcctgacctaaatctggagctttccaatggctcctatctggttgccttgcttcagccagcctgtccccgttcctgcacatcccctcacagtcacacaggaccaaagcgtggctcacagcctcgccggcgcccgagctgcaccaggagccgcctgcggatgtggcccgagctcgcaccgcctcggtctcgggcagcgctccgagtgctagcgccgagccgcgacctcacctggccggtgccacgccggaacagcaccgtatcttcctgctcggagcccgctccgccactgcccatcgccatggcctgctaccacggacgctgccgggctcactcaatgacgacttccgtcatggggcttctgggaccggaagagtacggtggcccggaggcagccagagacctcctacacgcttccaactcactcctcccacatctgtcttttctctttctcccctccacctgtcttctagttcttttttttttttttaacctttccctctgttttcttccaatttattttcctccctccagcccttttcttttcatttttcaagtcagcctcgctatatagcctaggctggcctttgctacctcagcttcccgagtttgggatgaaccttcacaataagggcatcctgtgtttgctggttcttgatgcacacaccaattattagacgatgggttggtatcgggccttttgcagtgttaggtgtctgttttgtaatgggcccaaggttgaggtaaggggagtcgaccatttccttcatctggcatatctggtaaattcctgagtctgattttcctgatagaatttcgatatcccatgtgccaccatagttttgatttatcccaataaatttacagattgactcaggaataagccacctatcagcctgtagaaaacaaacaaaaaactagataagtcctggcagatggtgctatttctggtgtacccagaggtttcagtcacctccctcaagatggagtcagaagctgcttgtagggtggagtttccagaggcaagcaggtatgagttggggccagcctggtctacatacgaagttccaggccagtcagaggtttgcagcgagcccctgtctcaaactatgatggactctcccagggcagggcacagcctggcaaaacccactgttttctacaatttaggggatcttggaatagggcatagacaatagggcatcccaaaagcgcccagtgagatttgtgggttcttgtgttccaggatttaacaaaataaaattggaccaggggcacactgatagtgatgtgggtgtagatcgtttgttaagagaatgttcccagctgcggacatggacagagtatctgggaaacacatcctactgagctggtaaaaggcagagtgccttagctaaattaggggatatttacccaacagaacactgaaacaatgtctcaaaaccacaaaaacctgcaatttaaaaaaatgaggaggcggtgacatcttcggctccagaaaaccggccaccttcctggccaaagcaacacagcttctgggaaagatcctgttttgggccttcatcttcagccaggaggaggtccaaacaccagataactgtgcaccttccctaaaagaggagagcttgcctgcagagactgctctgaccactgaaactcagaggagagagctagtctcccacgtctgctagtagagggtaacaaaatcaacagaggaacaatctctaaacaaagacaactataacaactaactccagagatagccagatggcgaaaggtaaacgtaagaatcctactaacaggaaccaagaccactcaccatcatcagaacccagcactcccacttcgcccagtccagggcatcctaacacacctgaaaaggtagacctggatttaaaagcatttcacatgatgatggtagaggacataaagaaggaatttaataactcacttaaagaaatacaggagaacactgctaaagagttacaagtccttaaagaaaaacaggaaaacacaaccaaacaggtagaagtccttatagaaaaaccggaaaacacatccaaacaggtgatagaaatgaacaaaaccatactagacctaaaaagggaagtagacacaataaagaaaacccaaagtgaggcaacgctgaagatagaaaccctaggaaagaaatctggaaccatagatgccagcatcagcaacagaatacaagagatggaagagagaatctcaggtgcagaagattccatagagaacatcggcacaacaatcaaagaaaatggaaaatgcaaaaagatcttaactcaaaacatccaggaaatccaggacacaatgagaagaccaaacctacggataataggagtggatgagaatgaagattttcaactcaaaggaccagcaaacatcttcaacaaaattattgaagaaaacttcccaaatctaaagaaagagatgaccatgaacatacaagaagcctacagaactccaaatagactggaccagaaaagaaattcctcccgacacataataatcagaacatcaaatgcactaaataaagatagaatactaaaagcagtaagggaaaaaggtcaagtaacatataaaggcaaccctatcagaattacactagatttttcaccagagacaatgaaagccagaagagcctggacagatgttatacagacactaagagaacacaaattccagcccagactactatacccagccaaactctcaattaccatagatggagaaaccaaagtattccacgacaaaactaaattcacccattatctctccacgaatccagcccttcaaaggataataacagaaaaaaaccaatacaaggacgggaaccacgccctagaaaaaacaagaagataatccctcaacaaaactaaaagaagacagccacaagaacagaacaccaactttaacaacaaaaataacaggaagcaacaattacttttccttaatatctcttaatatcaatggtctcaactccccaataaaaagacatagactaacagactggctacacaaacaagacccaacattctgctgcttacaggaaacccatctcagggaaaaagacagacactacctcagagtgaaaggctggaaaacaattttccaagcaaatggtctgaagaaacaagctggagtagccattttaatatctgataaaatcgacttccaacccaaagttatcaaaaaggacaaggagggacacttcatactcatcaaagataaaatcctccaagaggaactctcaattctgaatatctacgctccaaatgcaagggcagccacattcattaaagacactttagtaaagctcaaagcacacgttgcatctgacacaataaaggtgggagacttcaacacaccactttcatcaatggacagatcgtggaaacagaaactaaacagggacacagtgaaactaacagaagttatgaaacgaatggacctgacagatatctacagaacattttatcctaaaacaaaaggatataccttcttctcagcacttcacgggaccttctccaaatttgaccatataattggtcacaaaacaggcctcaacagatacaaaaatattgaaattgtcccatgtatcctatcagaccaccatggcctaagactgatcttcaataacaacataaataatggaaagccaacattcacgtggaaactgaacaacactcttctcaatgataccttggtcaaggaaggaataaagaaagaaattaaagactttttagagtttaatgaaaatgaagccacaacgtacccaaaacctatgggacacaatgaaagcatttctaagagggaaactcatagctctgagtgcctccaagaagaaacgggagagagcacataatagcagcttgacaacacatctaaaagctctagaaaaaaaaaggaagcaaattcacccaagaggagtagatggcaggaaataatcaaactcaggggtgaaatcaaccaagtggaaacaagaagaactattcaaagaattaaccaaatgaggagttggttctttgagaaaatcaacaagatagataaacccttagctagactcactaaagggcacagggacaaaatcctaattaacaaaatcagaaatgaaaagggagacataacaacagatcctgaagaaatccaaaacaccatcagatccttctacaaaaggctatactcaacaaaactggaaaacctggacgaaatggacaaatttctggacagataccaggtaccaaagttgaatcaggatcaagttgaccatctacacagtcccatatcacctaaagaaatagaagcagttattaatagtctcccagccaaaaaaagcccaggaccagacgggtttagtgcagagttctatcagaccttcaaagaagatctaattccagttctgcacaaactatttcacaaaatagaagtagaaggtactctacccaactcattttatgaagccactattactctgatacctaaaccacagaaagacccaacaaagatagagaacttcagaccaatttctcttatgaatattgatgcaaaaatcctcaataaaattctcgctaaccgaatccaagaacatattaaagcaatcatccatcctgaccaagtaggttttattccagggatgcagggatgatttaatatacgaaaatccatcaatgtaatccattatataaacaaactcaaagacaaaaaccacatgatgatctcgttagatgcagaaaaagcatttgacaagatttgacaacacccattcatgataaaagttttggaaagatcaggaattcaaggcccgtaccttaacatgataaaagtaatctacagcaaaccagtagccaacatcaaagtaaatggagagaagctggaagcaatcccactaaaatcagggactagacaaggctgcccactttctccctaccttttcaacatagtacttgaagtattagccagagcaattcgacaacaaaaggagatcaaggggatacaaattggaaaagaggaagtcaaaatatcactttttgcagatgatatgatagtatatataagtgaccctaaaaattccaccagagaactcctaaacctgataaacagcttcggtgaagtagctggatataaaataaactcaaacgagtcaatggcctttctctatacaaagaataaacaggctgagaaagaaattagggaaacaacacccttctcaatagtcacaaataatataaaatatcttggcgtgactctaactaaggaggtgaaagatctgtatgataaaaacttcaaatctctgaagaaagaaattaaagaagatctcagaagatggaaagatctcccatgctcatggattggcaggatcaacattgtaaaaatggctatcttgccaaaagcaatctacagattcaatgcaatccccatcaaaattccaactcaattcttcaacgaattagaaggagcaatttgcaaattcatctggaataacaaaaaacctaggatagcaaaaagtcttctcaaggataaaagaacctctggtggaatcaccatgcctgacctacagctttgctacagagcaattatgataaaaactgcatggtactggtatagagacagacaagtagaccaatggaatagaattgaagacccagaaatgaacccacacacctatggtcacttgatcttcgacaagggagctaaaaccatccagtggaagaaagacagcattttcaacaattggtgctggcacaactggtggttatcatgtagaagaatgcgaatcgatccatacttatctccttgtactaaggtcaaatctaagtggatcaaggaacttcacataaaaccagagacactgaaacttataaaggagaaagtggggaaaagccttgaagatatgggcacaggggaaaaattcctgaacagaacagcaatggcttgtgctgtaagattgagaattgacaaatgggacctaatgaaactccaaagtttctgcaaggcaaaagacaccatcaataagacaaaaagaccaccaacagattgggaaaggatttttacctatcctaaatcagataggggactaatatccaacatatataaagaactcaagaaggtggacttcagaaaatcaaataaccccattaaaaaatggggctcagaactgaacaaagaattctcacctgaggaataccgaatggcagagaagcacctgaaaaaatgttcaacatccttaatcatcagggaaatgcaaatcaaaacaaccctgagattccacctcacaccagtcaaaatggctaagatcaaaaattcaggtgacagcagatgctggcgaggatgtggagaaagaggaacactcctccattgttggtgggattgcaggcttgtacaaccactctggaaatcagtctggcggttcctcagaaaattggacatagtactactggaggatccagcaatacctctcctgggcatatatccagaagatgccccaactggtaagaaggacacatgctccactatgttcatagcagtcttatttataatagccagaagctggaaagaacccagatgcccctcaacagaggaatggatacagaaaatgtggtacatctacacaatggagtactactcagctattaaaaagaatgaatttatgaaattcctagccaaatggatggacctggagggcatcatcctgagtgaggtaacacattcacaaaggaactcacacaatatgtactcactgataaggggatattagccccaaacctaggatacccaagatataagatacaatttgctaaacacatgaaactcaagaagaatgaagactgaagtgtggacactatgcccctccttagaattgggaacaaaacacccatggaaggagttacagagacaaagtttggagctgagatgaaaggatggaccatgtagagactgccatatccagggatccaccccataatcagcatccaaacgctgacaccattgcatacactagcaagattttattgaaaggacccagatgtagctgtctcttgtgagactatcccggggcctagcaaacacagaagtggatgctcacagtcagctaatggatggatcacagggctcccaatggaggagctagagaaagtagccaaggagctaaagggatctgcaaccctataggtggaacaatgttatgaactaaccagtaccccggagctcttgactctagctgcatatgtatcaaaagatggcctagttggccatcactggaaagagaggccctttggatttgcaaactttatatgccccagtacaggggaatgccagggccaaaaagggagcgtgggtgggtaggggagtaggggtgggtgggtatgggggacttttggtatagcattacaaatgtaaatgagctaaatacccaataaaaatggaaaaaaaataaaaataaaataaaaattaaaaaatgaacgtgtaagttaaaacctgtatgaagttttaaataatttttcaatttaggctttcatagaatataagatgtttgtcattctgcttcttcagtggtttttgttgtcttgagacagggttttgatacgtatcccagcctcaaatttgttatcatcctattgcatcagcttttcctgggattgggagcatttactaccaagtttggtttcagtggctcttaggcatgggctaccatgtataagcttatctcagctgagcttaggcagtgaaggagttggaaaacagaaagctggtgataatgttatagaataagggggtccagtggagtggagtcaaccagagcctagagtgctacagagggcaaagctggaaaagtgacaccagccatttggaggagcccagaagatcacgtgtagatcccagacaatggaacaagaagctgtgaagctgaagttgacgtggagaccccaagatattcaagatgccagagccatgggatacctgctgaggaaaccagctaacagggagtggaaccagcccaggaaaaagaactttaccacagtcaacaaagatgaaaaaggagttggagatctcaagacggctttgacatcagatatggagattcagagtttggagttggcccaatggtttcctgtcttgctttgggtatttaagttaagtgattggatgaatctcagaagagactttgaaccttggacttttaacactgttgagactgctataaactatggagactttggaagttggactaaatgtgcttttaaattttgctatgtttaggcatggcccccatagactcatgcatttgaactggcctttggggaccagggagtggaatgtgatggtttgtatatgcttggcctggggagtggcactattaggaggtgtggccttattgaaatagatatgtcactgtgggtgtggactcctgccttgataatggactgaacctctgatcctgtaagccaatccaaattaaatgttggccttatgagagttgccccggtcatggtgtctgttcacagcagtaaaaccctaactaagacaaccccagtccctggtaccaacttctgttttaggattttactgctatgaacagacaccatgaagaaagcaactctcatacagataacatataattggggctggcttacaaattcagaggttcagtccattaccaagacagaagcatgtctttgtccaggcagccatgatgtaggatgagctgagagttctacatcttattctgaagacaaacaggagaagactggcttccagggagctaggatgaggctcataaagcctaagctcacagtgacacaccaacttcaacaaggccacacctccaaatgggtcaggcatattcaaaccaccacagtcgtgtgtgtgtgtgtgtgtgtgtgtgtgtgtgtgtgtgtgtgtgttgggggatggttttgtgcactgtgtattcagatgctcattaccatgcccagacatctggttgcaatctagatactggaattttcaagcatcttctgttacaacgttatgcaaaaattttccatcacgtccgattatttaataaagagccaatcagccaatggttgggtaggagaggaggaggcaggatttctgatcccagtgatcgtgtctctggtggggaccagaggagtttgatggggagtcaccatgaggatactgatggaggaggtgcagccaggtggagactaagatagcaagtaatggggcacggctgggtagtaggcagccatagacaggttagaatagggttacaataaatgagcatctgcccaggtataatgctacaagtttttcaataaatatagggcttccatgtccttatttgggagctagagcaggtagagaaaagccagactgacttccatatgaatgcaagtgcccacagaggccggaagtgtcagatcaccctggagttggagttaacagatagtttgagctgcctgacatgggtgctgggaacagaactccaggagctggaaactgtgctcagatcctgtgcaatacatgcttttaactgctgagtcacctgtcctgccccagtttgtttgaaacagtgtctcactctctggccccaaactcatgtcagtcatcctgctgaggcctcccgagtctgagattacatgtgtaagacactatacctggctcggttgttttaaattattatttaatttatttactcagttcaattctactcttgctgattcctcatttagtgcctacccatttagttgatcttcctggtttgttctagtgtaaattcttggagtgaagcagctggttacaaaccaacacttatatataaatggaacttctgtgtgtggtgttggaaactgaactagggcaagcaatgtaaagttgctatataccccaaccttatcagagaaaactggagataagggctcagctggtaaagaggaaaacaggagcttgacgatccgagctcagcttccagaagccacgttaagaagttgatgtggtgccacgcacctgtgctctgagctttcgtgctgcagtgggaggtggacatagaactgccgggaggacaatggagcagcagcaggaacacggcacgaggcagagggtaagaactaactcctcacatggaacccttgactcctcacgtgtaccctttgacctccactggggccatcaccacacatgcacgcacgtgcacagttaagggtgggcagtgaggtagcttagttgacagaggcacttgccaccatgctctgagttcaattcctgggagccacgtggtggaaggtgagcgatgactcccctaagtttaagaaaatgtataacaaacagaaagttaaagatctttaaggctagcactgtggctacacttatgatcttagaactcacatcccaaggcaggaggattgttaggtgtttaaggctagcctgggctacagaaagagattgtttcagaaaacaaaaacaaaaacacaaaattaaactacttaacgaagtctatataccaaaattctagattcacatgagagattctagtcctgaatcgcactactcattgttgcttacatctccagtatctcgcagagttcatagttcgagtgcttgttcctcagctggtggccttgttttgggaggctataggacctttaggagatggggctcactggaagaagtaggccattggggacaggactttgactgttaaccaggttcctgtccaggcatgaatttctgattcgatgtgaagagtagggtgtgctcctaccaccatgaaccgagcctctctgttctgttctcctttctatgaaggagtgaaatcctccaaaaccatgagacaatttgttcctcctcagctgatccttgtgaggtaccatggtcctagcaatgcaaatgtaagtattatattacctatttaataaattacattcatgttctcttttaataaaaataatattcaccaataatgttacatgcaaggtcagtactttattttttgatggtcttaaaacatcacattaagataggctgaagagtaaagtttaaaatagttttataaggacaagttataacacatataatgattagtcactgtgaaattttaatcttagagcgtatgatgcacccactggcaatagcacccaggttttccaaaaagccagtcatcatttttctgttgtctgcatagatttcttctcattggctatcttctgcttttgttgcatgatctctgaatccctgaaataaagaaaaggtatcaagttttcacaagaaaactgactcaatgctcttgttgtttcctatctataaccctcttggtacattcacagaagacatacacacccatgcttttccatttttatggatgtagacaaacagaaaagcaaagactggaaaagcattcaagtcagacctttgaatcatgctattgttatgacagccctgggaaaataatctcaaagttctttcatttggtgaaacgagagtctcactgtgtagccctggctgcccttgcactcaccatgcagaccatgctggcattcaactcagaggaatccacctgccattgcctctgtgcatgtaggaagtttcctacacacctaggactacaatatcaatgttacaaggcttgtagccagggatggtctttaagctgacacacagcccagaagacttggagctcttgatcctcttgcctccatttcctgagtgctggaattataactatccagtttttaaaagcctcaaatcaaatagtcaatgcttaaaatatgtggtatttgaagaaattttttaacccttttgtctccctggttgaatcttcatgtgtcatgtaagtatgaactaccaccagagctagatgatccatgagttagtgggacccatacttacacatatacttttaaatgtttttttaatatttagtggttgctgaatgaggtggtgcagtcccataacccaggctctcgggagggagaaacaggagggtcagaagtttcaggtctgactctatacacaggaagttccaggctaacctgggacagatgaatgcttatacatacatcctcttctttaaaaaaaaaaaaaaacaaaccctcaaaacagaaaacatagtatttaatgacactagacatcaaatccagggactcatccacaggtgtatgactccatatttttacatacactatataggtacgcattcagcatcctcaggcgagtgtggtggttcacccagtggttccaatacaggggaggctaagatcactaccaattctaggtagtaactattttcaactgttcaaaatagtgttacttcatgtccaaaaagtctttattgtttttatcatctttatgtgtctatttctttccaaaatttcaacttccaaccctattatttggagttttccatgtctttgtctccctctgctgttccgttcaggacactgcagtagtttctggttcttttattcatatgaggggcgtactgtagaaaaacaaacaaacaaacaaacaaaccaaaaaacagcggcttttgtgtttccaagctgggtgttttcctttgtctcctacgagtgaccttttttctattggaaaacttgcatgagtccagctccaagcccctgtgtggctggctcagggcatgggcctgaactgcaaccagcagcctatgtaccaattctaggcctcagccactgcagtgtaggtgactggaggagtggggcttggctgctcagggtcctacctagataggtggggtcaaggcaggtgctgcatttagaactgtgtctgactcatttcaggatcactgagctaacagaaactgaaggcaagctccttgctgtattagtaaagtcactggggctgtggaggtgtcttagttattaaagttcctgctgtgcaagcaccaggctctcagtttagaacctccacaaaattcacataaaaagcagggcacggtggtctgcatctaacctcagtgctggaagggcggggcttagacaggtagatcagtctgccaatctagccagagggatgagcttcttatttagtgagagatgctgtcaaaaatacaaggtggagagtgatgggggaaaagacacttgctaccaacctctggcctctacattccctcacacacacgtgtgtacacttataattacttgaagcacgcattcatgcatgcatgcacacacacacacacacacacacacacacgcacacgcacacacatacatataaacacaatgactatcataaaggaaaggaaagccgggcgtggtggcacacgcctttaatcccagcacttgggaggcagaggcaggcggatttctaagttcgaggccagcctggtctacagagtgagttccaggacagtctgggctatacagagaaaccctgcctggaaataaataaataaataaataaataaaggaaaagaaagtgatacttaaggtgtggaggtttctgtgactaccaaggcgagcaaagttaacaactgtgtgagataaaaaggccagtgtcagttcaaactttgagaatttacaactgggtaaatctaggcatatttaagtcagcaccatctggaaaaaagtttcctggtgataattaactcagtcccatgtacacaacaaagcttaagagctgtctacattaaaactcttagcagccgggcggtggtggcgcacacctttaatcccagcacttgggaggcagaggcaggcagatttctgagttcgaggccagcctggtctacaaaatgagttccaggacagccagggctacacagagaaaccctgtctcaaaaaaacaaaaaaacaaacccttttaggaaagtacaaatggcattttccataaagataggttatatagattaaccactgaaactggctcaaggtgaaccagctcatgaaaagggtctagaggataaagctacaatgttactgagacaaacaagctcaagataagtgggggcgggggagccactgtgtccgggccaca

SEQ ID NO: 27 - DNA, 32 bp, Homo sapiens
caatatgtcctctaagttggcatgtatagcta

SEQ ID NO: 28 - DNA, 429 bp, Homo sapiens
ggagtgtatttgtgaagagtcccttataacttatgttttatggacatcagcacataaccacaatgacattgaagcacaggatcattagtctatattttattttattattttatttatttatttatttatttttgagatggagtcttgctctgtcgcccaggctggagtgcagtggcacaatctcggctcactgcaagctctgcttcccaggttcacgccattctcctgcctcagcctcccgagtagctgggactacaggtgcccaccaccacacccggctaattttttgtacttttagtagagatggggtttcactgttttagccaggatggtctcgatctcctgacctcatgatccacccgccttggcctcccaaagtgctgggattataggtgtaagtcaccatgcccagcccattagtctatattt

SEQ ID NO: 29 - DNA, 44 bp, Homo sapiens
ctggttacagtttctactgttctctgcaagtaaataggcccaga

SEQ ID NO: 30 - DNA, 41 bp, Homo sapiens
atattggtataattgtaaataatgtcaaactccattttcta

SEQ ID NO: 31 - DNA, 27 bp, Homo sapiens
cataaccacaatgacattgaagcacag

SEQ ID NO: 32 - DNA, 4032 bp, Homo sapiens
cttcacctccccactgatcaaaacgagatgatagtttgccctcttcaaaagaaatgtgtgcatgtatatatctttgatttcttttgtagtggaaagttggggacaaatgttctgccatttggtcagaagacggttgcatttacccagctaccattgcttcaattgattttaagagagaaacctgtgttgtggtttacactggatatggaaatagagaggagcaaaatctgtccgatctactttccccaatctgtgaagtagctaataatatagaacaaaatgctcaagaggtaaggatacaaaaaaaaaaaaattcaatttctggaagcagagactagatgagaaactgttaaacagtatacacagttgtcagtttgatccaccgaggcattaattttttcttaatcacacccttataacaaaaacctgcatattttttctttttaaagaatgaaaatgaaagccaagtttcaacagatgaaagtgagaactccaggtctcctggaaataaatcagataacatcaagcccaaatctgctccatggaactcttttctccctccaccaccccccatgccagggccaagactgggaccaggaaaggtaaaccttctatgaaagttttccagaaaatagttaatgtcgggacatttaacctctctgttaactaatttgtagctctcccatgaaacttttgtagcttaaatacacaagaattttttgaaaaggaaataagataatgatgcaaaatagttaattttttaaaaaaatgttagacactgcagtggatgcaacaaaatactttatatgaaagatttatccagttaacttttgtggagtattaggtattagactaataattagcacacttacttaagttagaaagtataataatgcgccggacgcggtagctcacgcctgtaatcccagcactttgggaggccaaggtgggcggatcacaaggtcaggagatcgagaccatcctggctaacacggtgaaaccccatctctactgaaaatacaaaaaaatttgccgggcgtgatggcgggcacctgtagtcccagctactcgggaggctgaggcaggaggatggtgtgaaccccggaggcagagcttgcagtgagtcaagatcgtgccactgcactccaacctgggcgacagaatgagactccatctcaaacaaaaaaacaaaacaaaacaaaaaaaagtgtaataataatttatcattagctggatgatatgctgttgtttcccatgtcacctgtataagatatgtaaaataagaacacattatttacatctaatatagataaaatcctgaggcgctctcagattgttttgtagagttcaaatgtaaatattgttttcatttatggtccttttggttataagtaacagaaatcaactctaaaaagatttttattataggttagattatgtcatggaaccttaaggcttgtccctttctagttcttttgtgtaaagcggtgatttcttccatggagggaatggtatttaggcaattttttttttttttcgagatggagtcttgctctgtcgctcaggctggagtgcagtggcaccatttcagctcactgcaacttccacctcctgggttcaagtgattctcctgcttcagcctcccaagtagctgagattacaggcacccgccaccacacccggcttattttgtatttttagtagagatggggtttcaccatgttggccaggctggtcttgaactcctgacctcaagtgatctccccaccttggccttccaaagtgctaggattacaggcgcctagcctaggcagtcattttcaaaaaacaagcatgactcaccaaaagttttaagattttctgtgataatgttcttattgaggcttacattatattacagtttcttgaatctaaaatgatgtaccctcttaggatatatacatcatgcttcattggtctcagggggctgatttttataaggagagatttgctagttttcacaatatgtcctctaagttggcatgtatagctaaacaggctttcataaaaatatacaatttagttaatgaaatttgggatatagtcttttatgattgaaataattttgctaaatagactgtctctgatttattaggtaatcaccactcttattttgttttacttccttaatgtctacatagaaaggaaatgagaaaaatccagaggttgtcatttgacttatgagtctgtttgacttcaggatttggtacatgaaatttcacttaatctttttgatatgtataaaacaaatattctgggtaattatttttatccttttggttttgagtcctttttattcctatcatattgaaattggtaagttaattttcctttgaaatattccttatagccaggtctaaaattcaatggcccaccaccgccaccgccaccaccaccaccccacttactatcatgctggctgcctccatttccttctggaccaccagtaagtaaaaaagagtataggttagattttgctttcacatacaatttgataattagcagaatagaggattgtaaaatgtcattgtagaacatcccttgggccagattctaatgggtagaaatttgaactaaacctctgggttttgtttgtttttaatgcctttctgttacccagatgcagtgctcttgtagtcccaagtctaagctctaggttgccttctttcctggcagaagttggtgtctatgccataaggaggtagttcctgttagaagggatttaattataccttatataaggaattagtgtttgcccttctaggtatagttggatgttagcttctgatgtaaactggatttctttttctttctctctctttttttttttttgttttggaggcagagttttgcccttgtaccccaggctggagtgcagtggtgtgatctcagctcacagcaacctccgcctcctgggttcaagcaattctgcctcggcctcccaagtagctgggattacaggcgactgccaccacacccggctaatttttgttttattagtagagatggggtttcaccatgttggccagactgatcttgaactcctgacctcaggtgatccacccgccttggcctcccaaagcgctgggattacaggcgtgagctgccgcacccagctgtaaactggatttctaatggtagatttttaggtattaacaatagataaaaagatactttttggcatactgtgtattgggatggggttagaacaggtgttctacccaagacatttacttaaaatcgccctcgaaatgctatgtgagctgtgtgtgtgtgtgtgtgtgtgtgtgtgtattaaggaaaagcatgaaagtatttatgcttgattttttttttttactcatagcttcatagtggaacagatacatagtctaaatcaaaatgtttaaactttttatgtcacttgctgtcttttcgtcctcgttaaatttaattttgttggtcttttgttgttattggttggttttctccaaatgctagctatgttaagaaatttaaggccaggtacagtggctcatgcctgtaatcccggcattttagaaggctgaggcaggaggatcacttgagctcaggagtttgagaccagtctgggcaacatagcaagacctcgtctttgtttaggggaaaaaaaagaaatttaagtaggagattatataagcaaaaatacaattaatttccagcattcactatataatataaatctccagactttacttttttgtttactggatataaacaatatctttttctgtctccagataattcccccaccacctcccatatgtccagattctcttgatgatgctgatgctttgggaagtatgttaatttcatggtacatgagtggctatcatactggctattatatggtaagtaatcactcagcatcttttcctgacaatttttttgtagttatgtgactttgttttgtaaatttataaaatactacttgcttctctctttatattactaaaaaataaaaataaaaaaata

SEQ ID NO: 33 - DNA, 4032 bp, Homo sapiens
ttcacctccccactgatcaaaacgagatgatagtttgccctcttcaaaagaaatgtgtgcatgtatatatctttgatttcttttgtagtggaaagttggggacaaatgttctgccatttggtcagaagacggttgcatttacccagctaccattgcttcaattgattttaagagagaaacctgtgttgtggtttacactggatatggaaatagagaggagcaaaatctgtccgatctactttccccaatctgtgaagtagctaataatatagaacaaaatgctcaagaggtaaggatacaaaaaaaaaaaaattcaatttctggaagcagagactagatgagaaactgttaaacagtatacacagttgtcagtttgatccaccgaggcattaattttttcttaatcacacccttataacaaaaacctgcatattttttctttttaaagaatgaaaatgaaagccaagtttcaacagatgaaagtgagaactccaggtctcctggaaataaatcagataacatcaagcccaaatctgctccatggaactcttttctccctccaccaccccccatgccagggccaagactgggaccaggaaaggtaaaccttctatgaaagttttccagaaaatagttaatgtcgggacatttaacctctctgttaactaatttgtagctctcccatgaaacttttgtagcttaaatacacaagaattttttgaaaaggaaataagataatgatgcaaaatagttaattttttaaaaaaatgttagacactgcagtggatgcaacaaaatactttatatgaaagatttatccagttaacttttgtggagtattaggtattagactaataattagcacacttacttaagttagaaagtataataatgcgccggacgcggtagctcacgcctgtaatcccagcactttgggaggccaaggtgggcggatcacaaggtcaggagatcgagaccatcctggctaacacggtgaaaccccatctctactgaaaatacaaaaaaatttgccgggcgtgatggcgggcacctgtagtcccagctactcgggaggctgaggcaggaggatggtgtgaaccccggaggcagagcttgcagtgagtcaagatcgtgccactgcactccaacctgggcgacagaatgagactccatctcaaacaaaaaaacaaaacaaaacaaaaaaaagtgtaataataatttatcattagctggatgatatgctgttgtttcccatgtcacctgtataagatatgtaaaataagaacacattatttacatctaatatagataaaatcctgaggcgctctcagattgttttgtagagttcaaatgtaaatattgttttcatttatggtccttttggttataagtaacagaaatcaactctaaaaagatttttattataggttagattatgtcatggaaccttaaggcttgtccctttctagttcttttgtgtaaagcggtgatttcttccatggagggaatggtatttaggcaatttttttttttttttcgagatggagtcttgctctgtcgctcaggctggagtgcagtggcaccatttcagctcactgcaacttccacctcctgggttcaagtgattctcctgcttcagcctcccaagtagctgagattacaggcacccgccaccacacccggcttattttgtatttttagtagagatggggtttcaccatgttggccaggctggtcttgaactcctgacctcaagtgatctccccaccttggccttccaaagtgctaggattacaggcgcctagcctaggcagtcattttcaaaaaacaagcatgactcaccaaaagttttaagattttctgtgataatgttcttattgaggcttacattatattacagtttcttgaatctaaaatgatgtaccctcttagaatatatacatcatgcttcattggtctcagggggctgatttttataaggagagatttgctagttttcacaatatgtcctctaagttggcatgtatagctaaacaggctttcataaaaatatacaatttagttaatgaaatttgggatatagtcttttatgattgaaataattttgctaaatagactgtctctgatttattaggtaatcaccactcttattttgttttacttccttaatgtctacatagaaaggaaatgagaaaaatccagaggttgtcatttgacttatgagtctgtttgacttcaggatttggtacatgaaatttcacttaatctttttgatatgtataaaacaaatattctgggtaattatttttatccttttggttttgagtcctttttattcctatcatattgaaattggtaagttaattttcctttgaaatattccttatagccaggtctaaaattcaatggcccaccaccgccaccgccaccaccaccaccccacttactatcatgctggctgcctccatttccttctggaccaccagtaagtaaaaaagagtataggttagattttgctttcacatacaatttgataattagcagaatagaggattgtaaaatgtcattgtagaacatcccttgggccagattctaatgggtagaaatttgaactaaacctctgggttttgtttgtttttaatgcctttctgttacccagatgcagtgctcttgtagtcccaagtctaagctctaggttgccttctttcctggcagaagttggtgtctatgccataaggaggtagttcctgttagaagggatttaattataccttatataaggaattagtgtttgcccttctaggtatagttggatgttagcttctgatgtaaactggatttctttttctttctctctctttttttttttttgttttggaggcagagttttgcccttgtaccccaggctggagtgcagtggtgtgatctcagctcacagcaacctccgcctcctgggttcaagcaattctgcctcggcctcccaagtagctgggattacaggcgactgccaccacacccggctaatttttgttttattagtagagatggggtttcaccatgttggccagactgatcttgaactcctgacctcaggtgatccacccgccttggcctcccaaagcgctgggattacaggcgtgagctgccgcacccagctgtaaactggatttctaatggtagatttttaggtattaacaatagataaaaagatactttttggcatactgtgtattgggatggggttagaacaggtgttctacccaagacatttacttaaaatcgccctcgaaatgctatgtgagctgtgtgtgtgtgtgtgtgtgtgtgtgtattaaggaaaagcatgaaagtatttatgcttgattttttttttttactcatagcttcatagtggaacagatacatagtctaaatcaaaatgtttaaactttttatgtcacttgctgtcttttcgtcctcgttaaatttaattttgttggtcttttgttgttattggttggttttctccaaatgctagctatgttaagaaatttaaggccaggtacagtggctcatgcctgtaatcccggcattttagaaggctgaggcaggaggatcacttgagctcaggagtttgagaccagtctgggcaacatagcaagacctcgtctttgtttaggggaaaaaaaagaaatttaagtaggagattatataagcaaaaatacaattaatttccagcattcactatataatataaatctccagactttacttttttgtttactggatataaacaatatctttttctgtctccagataattcccccaccacctcccatatgtccagattctcttgatgatgctgatgctttgggaagtatgttaatttcatggtacatgagtggctatcatactggctattatatggtaagtaatcactcagcatcttttcctgacaatttttttgtagttatgtgactttgttttgtaaatttataaaatactacttgcttctctctttatattactaaaaaataaaaataaaaaaataca

SEQ ID NO: 34 - DNA, 4429 bp, Homo sapiens
ttaccaccagcaataaaggaaggttccattgctccataccagcattaggtattatcagtccttttatctttaaccatattggtgggaggtagtggtatctcattgtagtcttaatttacttccatatacttaatttaaatacactcaatttatatacacacacgtatactctctcagccttcagtaagccagtctcattcccctgaactaaccaatgttaataatggtatgcttctctcagtgctcatgcaaacatgcatacacacacatacacataaataaggggtgtgggaatgtatttgattctgagagctgctgtaacaaattaccacaaacttagtggcttaaaacaacagaaatatttctgttcacagttctggaggccagaaatctgagagcaagatgtcagctgggccacacctccctctgaaggctccaagggagaatccttgctttcctcttccagctgctggtggctccaggtattacttggcttatggcagcataactcctatctctgcctttgtctttgtggtcttcttttctgtcttcttcccttctttttatgaggacttttgctgttggatttaggttccattctaacctaggatgatctcatttggaaatccttaatttcatctacaaaaactgttttcccaaataggtcacattcacgcatatcagatggacagatgtatcattttggggtccaccattcaacccactacaaggagttttttaaacaaaaataggaaacttagatgtaacttagcactttttttttttttttttgagatggagtctcactctgtcaccagactggagtgcagtggtgccatctcagctccatgcaacctctgcctcctgggttcaagcagttctcttgcctcagcctcctgggtagctgggattacaggcacgcgctgccacacccaggtaatttatttattttttttttgagacagagtctcgcactgttgcccaggctggactgcagtggcgtgatctctgctcactgcaacctccgcctcccgggttcaagcgattctccagcctcagcttcctgagtagatgggattacaggcgcctgccaccacgcccagctaattttttgtattcttagtagagatggggtttcaccatgttggccaggctggtctccatctcctgacctcgtgattcacccgcctcggcctcccaaagtgctgggattacaggcgtgagtcacagcccccggccataatttagcactttaaaaaataatagccatgttgggccaggcgtggtggctcatgcctgtaatctgagcactttgggagaccaaggcgggtagatcccttgtgcccaggagttcaagaccagcctgggcaacatggcgaaaccccatttctactaaaaatacaaaaattagctggggcgaggggataggccgagttccgggtgtaagggggccattagggagagcagagcgaggcagctgatcttccggattgggggccttgcccggaagctggacctcacggagatgaaacggaagatgcacgaggatatgatctccatacagaactttctcatctacgtggccctgctgcgagtcactccatttatcttaaagaaattggacagcatatgaagattggacatcacatgtgaatgcatgatatgaagagcctggttacagtttctactgttctctgcaagtaaataggcccagaaaggtataagagactctttgaatggacataaaaattctgcttgttaagaacaagttgagctctggtaactgatcttaatagctaaaatataaaaatatttgggaagtctgaaatgaggtctcctggccctggtgtgcccttaatgcctgtgacagttggcctctgtgaatattggtataattgtaaataatgtcaaactccattttctagcaagtattaataattaagggaagtatgtctgaaatggcactgtcttgtcagtcatttctgtttacccttctgtctggagtgtatttgtgaagagtcccttataacttatgttttatggacatcagcacataaccacaatgacattgaagcacaggatcattagtctatattttattttattattttatttatttatttatttatttttgagatggagtcttgctctgtcgcccaggctggagtgcagtggcacaatctcggctcactgcaagctctgcttcccaggttcacgccattctcctgcctcagcctcccgagtagctgggactacaggtgcccaccaccacacccggctaattttttgtacttttagtagagatggggtttcactgttttagccaggatggtctcgatctcctgacctcatgatccacccgccttggcctcccaaagtgctgggattataggtgtaagtcaccatgcccagcccattagtctatatttttaagtaaacataccaattaagaaagaagccaaaaaccaaaattagccaggtgtggtggcacgtgcctgtagtcccagctacttgggaggctgaggtgtgaggatcacttgaactcaggaggcagaggttgcagtgacccaagatggtgccactgcactccagcctgggtgacagagtgagaccctgtttccacaaaaagaaaaaaaaaatagccgtgcctgtacttcagtacttacaaatttaactttagtatagatgtacagtaatttattcaatcatttccttactcatagacaattaggatgttgcaacttttgccactacaaacaattctgcgatgtggattatcgtacttattcccatttattggtgctttcatttctataagaatggatttttaaagatagaattccttgggaatagttatgtcaaagccaaatataatatagagacaaatctctaaaaacattttatttggtaagcaagagctgcaattcatggcatacacacagaccaggctgatcattggtatgatcaggagaataaagggaaggttgcggccaggtgtgatagctcatgcctgtaatcccagcactttgggaggccgaggcgggcagatcacctgaggtcaggagtttgagaccagcctgaccaacatggagaaactccgtctctactaaaaatacaaaattagttgggcatagtggcgcatgcctgaatcccagctactcaggaggctgacacaggagaaatgcttgaacccgggaggtgaaggttgcagtgagccgagatcgcgccattgcactccagcctgggcaacaagagcaaaattccatctcaaaaaaaaaaaaagagaaggttccgggttttatgagaaagaacagtattacatactgttttggaagaaagctcattcacactagagcttgtgggagctagcaagctctgattggtgagcgatggtggtaggtaaaaccagtcttagagtcatggcagttcattttagcagctattaggtaaaactggtcttagggatacagaaggctggttcagcagttggacttgtggaaaatttaattcttgaagcagatgctgtgtgccccgaatgcttcttccccctggcccttcaactctgatttagttgagtatttcaagaatgacccaatttatgtaatcaactttcacaggtatacatgtcttaaactttaaacagatgttttgggttttgttgttgttgtttttgagacggagtctcactctgttgtccaagctggagtgtagtggtgtgatctcggctcactgcaacctccgcctccagggtcaagtgattctccagcctcagcctcctgaatagctgggattacaggcgcccgccaccacgcccagctaatttttgtatttttagtagagatggggtggggtttcaccatgttggccaggctggtcttgaactcctgacatcaagtgttctgctcacctcagcctctgaaagtgctgggattacaggcgtgagccactgcgcccggcagtctttccttcttttttttttttttttttttttttttaatgacatggggtcttactttattactcaggctggtctcaaacttctggcctcaagggatcttcccaccttggcctcccaaattgctgggattacaggcataagtcatcatgcctggctacaaacagatattttcaataagaggataaaagttcatttccccatactttgctaacatcaaatgttattaattcctaatagttttgccaaactgagaggaaaatggtatgttagtttttctgggttttctttctttttaattttttttcttttttattcatcgcaacactattcacgatttttttattttttattttatttatttatttttttttttttgagacaaggtctccctatgttgcccaggctggtcttgtacccctgggctcaaaggatcctcctgcctcagcctcccaaagtgctaggattacaggc

SEQ ID NO: 35 - DNA, 4044 bp, Homo sapiens
ctattttgctgctatgcagcagttcagcctttttcactgttgtgtagcattctgttatatgaatataccataatttagttactctacatttcatggacctttgaattgctcccactttggggctgttatgaataatgctaccgtaacatttttgtatatcttatgatggtcttaaacacgctatctactgagtatatgccaggaatggaattgctgggtcatagggtgtgtgtctatacacacacatacacacattttttagtaggtaccatcaaacaattgcatttttgttgtttttgttttagtttgtttttaatgaccataccattttaccaccagcaataaaggaaggttccattgctccataccagcattaggtattatcagtccttttatctttaaccatattggtgggaggtagtggtatctcattgtagtcttaatttacttccatatacttaatttaaatacactcaatttatatacacacacgtatactctctcagccttcagtaagccagtctcattcccctgaactaaccaatgttaataatggtatgcttctctcagtgctcatgcaaacatgcatacacacacatacacataaataaggggtgtgggaatgtatttgattctgagagctgctgtaacaaattaccacaaacttagtggcttaaaacaacagaaatatttctgttcacagttctggaggccagaaatctgagagcaagatgtcagctgggccacacctccctctgaaggctccaagggagaatccttgctttcctcttccagctgctggtggctccaggtattacttggcttatggcagcataactcctatctctgcctttgtctttgtggtcttcttttctgtcttcttcccttctttttatgaggacttttgctgttggatttaggttccattctaacctaggatgatctcatttggaaatccttaatttcatctacaaaaactgttttcccaaataggtcacattcacgcatatcagatggacagatgtatcattttggggtccaccattcaacccactacaaggagttttttaaacaaaaataggaaacttagatgtaacttagcactttttttttttttttttgagatggagtctcactctgtcaccagactggagtgcagtggtgccatctcagctccatgcaacctctgcctcctgggttcaagcagttctcttgcctcagcctcctgggtagctgggattacaggcacgcgctgccacacccaggtaatttatttattttttttttgagacagagtctcgcactgttgcccaggctggactgcagtggcgtgatctctgctcactgcaacctccgcctcccgggttcaagcgattctccagcctcagcttcctgagtagatgggattacaggcgcctgccaccacgcccagctaattttttgtattcttagtagagatggggtttcaccatgttggccaggctggtctccatctcctgacctcgtgattcacccgcctcggcctcccaaagtgctgggattacaggcgtgagtcacagcccccggccataatttagcactttaaaaaataatagccatgttgggccaggcgtggtggctcatgcctgtaatctgagcactttgggagaccaaggcgggtagatcccttgtgcccaggagttcaagaccagcctgggcaacatggcgaaaccccatttctactaaaaatacaaaaattagctggggcgaggggataggccgagttccgggtgtaagggggccattagggagagcagagcgaggcagctgatcttccggattgggggccttgcccggaagctggacctcacggagatgaaacggaagatgcacgaggatatgatctccatacagaactttctcatctacgtggccctgctgcgagtcactccatttatcttaaagaaattggacagcatatgaagattggacatcacatgtgaatgcatgatatgaagagcctggttacagtttctactgttctctgcaagtaaataggcccagaaaggtataagagactctttgaatggacataaaaattctgcttgttaagaacaagttgagctctggtaactgatcttaatagctaaaatataaaaatatttgggaagtctgaaatgaggtctcctggccctggtgtgcccttaatgcctgtgacagttggcctctgtgaatattggtataattgtaaataatgtcaaactccattttctagcaagtattaataattaagggaagtatgtctgaaatggcactgtcttgtcagtcatttctgtttacccttctgtctggagtgtatttgtgaagagtcccttataacttatgttttatggacatcagcacataaccacaatgacattgaagcacaggatcattagtctatattttattttattattttatttatttatttatttatttttgagatggagtcttgctctgtcgcccaggctggagtgcagtggcacaatctcggctcactgcaagctctgcttcccaggttcacgccattctcctgcctcagcctcccgagtagctgggactacaggtgcccaccaccacacccggctaattttttgtacttttagtagagatggggtttcactgttttagccaggatggtctcgatctcctgacctcatgatccacccgccttggcctcccaaagtgctgggattataggtgtaagtcaccatgcccagcccattagtctatatttttaagtaaacataccaattaagaaagaagccaaaaaccaaaattagccaggtgtggtggcacgtgcctgtagtcccagctacttgggaggctgaggtgtgaggatcacttgaactcaggaggcagaggttgcagtgacccaagatggtgccactgcactccagcctgggtgacagagtgagaccctgtttccacaaaaagaaaaaaaaaatagccgtgcctgtacttcagtacttacaaatttaactttagtatagatgtacagtaatttattcaatcatttccttactcatagacaattaggatgttgcaacttttgccactacaaacaattctgcgatgtggattatcgtacttattcccatttattggtgctttcatttctataagaatggatttttaaagatagaattccttgggaatagttatgtcaaagccaaatataatatagagacaaatctctaaaaacattttatttggtaagcaagagctgcaattcatggcatacacacagaccaggctgatcattggtatgatcaggagaataaagggaaggttgcggccaggtgtgatagctcatgcctgtaatcccagcactttgggaggccgaggcgggcagatcacctgaggtcaggagtttgagaccagcctgaccaacatggagaaactccgtctctactaaaaatacaaaattagttgggcatagtggcgcatgcctgaatcccagctactcaggaggctgacacaggagaaatgcttgaacccgggaggtgaaggttgcagtgagccgagatcgcgccattgcactccagcctgggcaacaagagcaaaattccatctcaaaaaaaaaaaaagagaaggttccgggttttatgagaaagaacagtattacatactgttttggaagaaagctcattcacactagagcttgtgggagctagcaagctctgattggtgagcgatggtggtaggtaaaaccagtcttagagtcatggcagttcattttagcagctattaggtaaaactggtcttagggatacagaaggctggttcagcagttggacttgtggaaaatttaattcttgaagcagatgctgtgtgccccgaatgcttcttccccctggcccttcaactctgatttagttgagtatttcaagaatgacccaatttatgtaatcaactttcacaggtatacatgtcttaaactttaaacagatgttttgggttttgttgttgttgtttttgagacggagtctcactctgttgtccaagctggagtgtagtggt

SEQ ID NO: 36 - DNA, 4041 bp, Homo sapiens
gctgggtcatagggtgtgtgtctatacacacacatacacacattttttagtaggtaccatcaaacaattgcatttttgttgtttttgttttagtttgtttttaatgaccataccattttaccaccagcaataaaggaaggttccattgctccataccagcattaggtattatcagtccttttatctttaaccatattggtgggaggtagtggtatctcattgtagtcttaatttacttccatatacttaatttaaatacactcaatttatatacacacacgtatactctctcagccttcagtaagccagtctcattcccctgaactaaccaatgttaataatggtatgcttctctcagtgctcatgcaaacatgcatacacacacatacacataaataaggggtgtgggaatgtatttgattctgagagctgctgtaacaaattaccacaaacttagtggcttaaaacaacagaaatatttctgttcacagttctggaggccagaaatctgagagcaagatgtcagctgggccacacctccctctgaaggctccaagggagaatccttgctttcctcttccagctgctggtggctccaggtattacttggcttatggcagcataactcctatctctgcctttgtctttgtggtcttcttttctgtcttcttcccttctttttatgaggacttttgctgttggatttaggttccattctaacctaggatgatctcatttggaaatccttaatttcatctacaaaaactgttttcccaaataggtcacattcacgcatatcagatggacagatgtatcattttggggtccaccattcaacccactacaaggagttttttaaacaaaaataggaaacttagatgtaacttagcactttttttttttttttttgagatggagtctcactctgtcaccagactggagtgcagtggtgccatctcagctccatgcaacctctgcctcctgggttcaagcagttctcttgcctcagcctcctgggtagctgggattacaggcacgcgctgccacacccaggtaatttatttattttttttttgagacagagtctcgcactgttgcccaggctggactgcagtggcgtgatctctgctcactgcaacctccgcctcccgggttcaagcgattctccagcctcagcttcctgagtagatgggattacaggcgcctgccaccacgcccagctaattttttgtattcttagtagagatggggtttcaccatgttggccaggctggtctccatctcctgacctcgtgattcacccgcctcggcctcccaaagtgctgggattacaggcgtgagtcacagcccccggccataatttagcactttaaaaaataatagccatgttgggccaggcgtggtggctcatgcctgtaatctgagcactttgggagaccaaggcgggtagatcccttgtgcccaggagttcaagaccagcctgggcaacatggcgaaaccccatttctactaaaaatacaaaaattagctggggcgaggggataggccgagttccgggtgtaagggggccattagggagagcagagcgaggcagctgatcttccggattgggggccttgcccggaagctggacctcacggagatgaaacggaagatgcacgaggatatgatctccatacagaactttctcatctacgtggccctgctgcgagtcactccatttatcttaaagaaattggacagcatatgaagattggacatcacatgtgaatgcatgatatgaagagcctggttacagtttctactgttctctgcaagtaaataggcccagaaaggtataagagactctttgaatggacataaaaattctgcttgttaagaacaagttgagctctggtaactgatcttaatagctaaaatataaaaatatttgggaagtctgaaatgaggtctcctggccctggtgtgcccttaatgcctgtgacagttggcctctgtgaatattggtataattgtaaataatgtcaaactccattttctagcaagtattaataattaagggaagtatgtctgaaatggcactgtcttgtcagtcatttctgtttacccttctgtctggagtgtatttgtgaagagtcccttataacttatgttttatggacatcagcacataaccacaatgacattgaagcacaggatcattagtctatattttattttattattttatttatttatttatttatttttgagatggagtcttgctctgtcgcccaggctggagtgcagtggcacaatctcggctcactgcaagctctgcttcccaggttcacgccattctcctgcctcagcctcccgagtagctgggactacaggtgcccaccaccacacccggctaattttttgtacttttagtagagatggggtttcactgttttagccaggatggtctcgatctcctgacctcatgatccacccgccttggcctcccaaagtgctgggattataggtgtaagtcaccatgcccagcccattagtctatatttttaagtaaacataccaattaagaaagaagccaaaaaccaaaattagccaggtgtggtggcacgtgcctgtagtcccagctacttgggaggctgaggtgtgaggatcacttgaactcaggaggcagaggttgcagtgacccaagatggtgccactgcactccagcctgggtgacagagtgagaccctgtttccacaaaaagaaaaaaaaaatagccgtgcctgtacttcagtacttacaaatttaactttagtatagatgtacagtaatttattcaatcatttccttactcatagacaattaggatgttgcaacttttgccactacaaacaattctgcgatgtggattatcgtacttattcccatttattggtgctttcatttctataagaatggatttttaaagatagaattccttgggaatagttatgtcaaagccaaatataatatagagacaaatctctaaaaacattttatttggtaagcaagagctgcaattcatggcatacacacagaccaggctgatcattggtatgatcaggagaataaagggaaggttgcggccaggtgtgatagctcatgcctgtaatcccagcactttgggaggccgaggcgggcagatcacctgaggtcaggagtttgagaccagcctgaccaacatggagaaactccgtctctactaaaaatacaaaattagttgggcatagtggcgcatgcctgaatcccagctactcaggaggctgacacaggagaaatgcttgaacccgggaggtgaaggttgcagtgagccgagatcgcgccattgcactccagcctgggcaacaagagcaaaattccatctcaaaaaaaaaaaaagagaaggttccgggttttatgagaaagaacagtattacatactgttttggaagaaagctcattcacactagagcttgtgggagctagcaagctctgattggtgagcgatggtggtaggtaaaaccagtcttagagtcatggcagttcattttagcagctattaggtaaaactggtcttagggatacagaaggctggttcagcagttggacttgtggaaaatttaattcttgaagcagatgctgtgtgccccgaatgcttcttccccctggcccttcaactctgatttagttgagtatttcaagaatgacccaatttatgtaatcaactttcacaggtatacatgtcttaaactttaaacagatgttttgggttttgttgttgttgtttttgagacggagtctcactctgttgtccaagctggagtgtagtggtgtgatctcggctcactgcaacctccgcctccagggtcaagtgattctccagcctcagcctcctgaatagctgggattacaggcgcccgccaccacgcccagctaatttttgtatttttagtagagatggggtggggtttcaccatgttggccaggctggtcttgaactcctgacatcaagtgttctgctcacctcagcctctgaaagtg

SEQ ID NO: 37 - DNA, 4027 bp, Homo sapiens
tatcagtccttttatctttaaccatattggtgggaggtagtggtatctcattgtagtcttaatttacttccatatacttaatttaaatacactcaatttatatacacacacgtatactctctcagccttcagtaagccagtctcattcccctgaactaaccaatgttaataatggtatgcttctctcagtgctcatgcaaacatgcatacacacacatacacataaataaggggtgtgggaatgtatttgattctgagagctgctgtaacaaattaccacaaacttagtggcttaaaacaacagaaatatttctgttcacagttctggaggccagaaatctgagagcaagatgtcagctgggccacacctccctctgaaggctccaagggagaatccttgctttcctcttccagctgctggtggctccaggtattacttggcttatggcagcataactcctatctctgcctttgtctttgtggtcttcttttctgtcttcttcccttctttttatgaggacttttgctgttggatttaggttccattctaacctaggatgatctcatttggaaatccttaatttcatctacaaaaactgttttcccaaataggtcacattcacgcatatcagatggacagatgtatcattttggggtccaccattcaacccactacaaggagttttttaaacaaaaataggaaacttagatgtaacttagcactttttttttttttttttgagatggagtctcactctgtcaccagactggagtgcagtggtgccatctcagctccatgcaacctctgcctcctgggttcaagcagttctcttgcctcagcctcctgggtagctgggattacaggcacgcgctgccacacccaggtaatttatttattttttttttgagacagagtctcgcactgttgcccaggctggactgcagtggcgtgatctctgctcactgcaacctccgcctcccgggttcaagcgattctccagcctcagcttcctgagtagatgggattacaggcgcctgccaccacgcccagctaattttttgtattcttagtagagatggggtttcaccatgttggccaggctggtctccatctcctgacctcgtgattcacccgcctcggcctcccaaagtgctgggattacaggcgtgagtcacagcccccggccataatttagcactttaaaaaataatagccatgttgggccaggcgtggtggctcatgcctgtaatctgagcactttgggagaccaaggcgggtagatcccttgtgcccaggagttcaagaccagcctgggcaacatggcgaaaccccatttctactaaaaatacaaaaattagctggggcgaggggataggccgagttccgggtgtaagggggccattagggagagcagagcgaggcagctgatcttccggattgggggccttgcccggaagctggacctcacggagatgaaacggaagatgcacgaggatatgatctccatacagaactttctcatctacgtggccctgctgcgagtcactccatttatcttaaagaaattggacagcatatgaagattggacatcacatgtgaatgcatgatatgaagagcctggttacagtttctactgttctctgcaagtaaataggcccagaaaggtataagagactctttgaatggacataaaaattctgcttgttaagaacaagttgagctctggtaactgatcttaatagctaaaatataaaaatatttgggaagtctgaaatgaggtctcctggccctggtgtgcccttaatgcctgtgacagttggcctctgtgaatattggtataattgtaaataatgtcaaactccattttctagcaagtattaataattaagggaagtatgtctgaaatggcactgtcttgtcagtcatttctgtttacccttctgtctggagtgtatttgtgaagagtcccttataacttatgttttatggacatcagcacataaccacaatgacattgaagcacaggatcattagtctatattttattttattattttatttatttatttatttatttttgagatggagtcttgctctgtcgcccaggctggagtgcagtggcacaatctcggctcactgcaagctctgcttcccaggttcacgccattctcctgcctcagcctcccgagtagctgggactacaggtgcccaccaccacacccggctaattttttgtacttttagtagagatggggtttcactgttttagccaggatggtctcgatctcctgacctcatgatccacccgccttggcctcccaaagtgctgggattataggtgtaagtcaccatgcccagcccattagtctatatttttaagtaaacataccaattaagaaagaagccaaaaaccaaaattagccaggtgtggtggcacgtgcctgtagtcccagctacttgggaggctgaggtgtgaggatcacttgaactcaggaggcagaggttgcagtgacccaagatggtgccactgcactccagcctgggtgacagagtgagaccctgtttccacaaaaagaaaaaaaaaatagccgtgcctgtacttcagtacttacaaatttaactttagtatagatgtacagtaatttattcaatcatttccttactcatagacaattaggatgttgcaacttttgccactacaaacaattctgcgatgtggattatcgtacttattcccatttattggtgctttcatttctataagaatggatttttaaagatagaattccttgggaatagttatgtcaaagccaaatataatatagagacaaatctctaaaaacattttatttggtaagcaagagctgcaattcatggcatacacacagaccaggctgatcattggtatgatcaggagaataaagggaaggttgcggccaggtgtgatagctcatgcctgtaatcccagcactttgggaggccgaggcgggcagatcacctgaggtcaggagtttgagaccagcctgaccaacatggagaaactccgtctctactaaaaatacaaaattagttgggcatagtggcgcatgcctgaatcccagctactcaggaggctgacacaggagaaatgcttgaacccgggaggtgaaggttgcagtgagccgagatcgcgccattgcactccagcctgggcaacaagagcaaaattccatctcaaaaaaaaaaaaagagaaggttccgggttttatgagaaagaacagtattacatactgttttggaagaaagctcattcacactagagcttgtgggagctagcaagctctgattggtgagcgatggtggtaggtaaaaccagtcttagagtcatggcagttcattttagcagctattaggtaaaactggtcttagggatacagaaggctggttcagcagttggacttgtggaaaatttaattcttgaagcagatgctgtgtgccccgaatgcttcttccccctggcccttcaactctgatttagttgagtatttcaagaatgacccaatttatgtaatcaactttcacaggtatacatgtcttaaactttaaacagatgttttgggttttgttgttgttgtttttgagacggagtctcactctgttgtccaagctggagtgtagtggtgtgatctcggctcactgcaacctccgcctccagggtcaagtgattctccagcctcagcctcctgaatagctgggattacaggcgcccgccaccacgcccagctaatttttgtatttttagtagagatggggtggggtttcaccatgttggccaggctggtcttgaactcctgacatcaagtgttctgctcacctcagcctctgaaagtgctgggattacaggcgtgagccactgcgcccggcagtctttccttcttttttttttttttttttttttttttaatgacatggggtcttactttattactcaggctggtctcaaacttctggcctcaagggatcttcccaccttggcctcccaaatt

SEQ ID NO: 38 - DNA, 41 bp, Homo sapiens
agcatgatagtaagtggggtggtggtggtggcggtggcggt

SEQ ID NO: 39 - DNA, 4041 bp, Homo sapiens
aacacagtgaaaccctgtctttacaaaaaaatacaaaaaattagacaggcgtggtggcaggcacctgtagtcccagctacctctgaggctgaggcaggagaatggcgtgaatccagaaggcagagcttgctgtgagccaagatcacgccattgcactccagcctgggcaacagagcaagactccgtctcaaaaaaaaaaaaaaaaaaaaaagaatttcatttttcatttatgaaaaattatcccatcttttccattccctacaatcaatttcaaatcagagattaaaacattatttagaaaaagtataatttcaattcaaaagtgtataatcaaaataatctaacaatagcatgaaagctttttaaaattaactaaaattatacttagggacaatgcaagagtaatttaagcctcagacagttgtatttttttatttttattttttagtaatataaagagagaagcaagtagtattttataaatttacaaaacaaagtcacataactacaaaaaaattgtcaggaaaagatgctgagtgattacttaccatataatagccagtatgatagccactcatgtaccatgaaattaacatacttcccaaagcatcagcatcatcaagagaatctggacatatgggaggtggtgggggaattatctggagacagaaaaagatattgtttatatccagtaaacaaaaaagtaaagtctggagatttatattatatagtgaatgctggaaattaattgtatttttgcttatataatctcctacttaaatttcttttttttcccctaaacaaagacgaggtcttgctatgttgcccagactggtctcaaactcctgagctcaagtgatcctcctgcctcagccttctaaaatgccgggattacaggcatgagccactgtacctggccttaaatttcttaacatagctagcatttggagaaaaccaaccaataacaacaaaagaccaacaaaattaaatttaacgaggacgaaaagacagcaagtgacataaaaagtttaaacattttgatttagactatgtatctgttccactatgaagctatgagtaaaaaaaaaaaatcaagcataaatactttcatgcttttccttaatacacacacacacacacacacacacacacagctcacatagcatttcgagggcgattttaagtaaatgtcttgggtagaacacctgttctaaccccatcccaatacacagtatgccaaaaagtatctttttatctattgttaatacctaaaaatctaccattagaaatccagtttacagctgggtgcggcagctcacgcctgtaatcccagcgctttgggaggccaaggcgggtggatcacctgaggtcaggagttcaagatcagtctggccaacatggtgaaaccccatctctactaataaaacaaaaattagccgggtgtggtggcagtcgcctgtaatcccagctacttgggaggccgaggcagaattgcttgaacccaggaggcggaggttgctgtgagctgagatcacaccactgcactccagcctggggtacaagggcaaaactctgcctccaaaacaaaaaaaaaaaaagagagagaaagaaaaagaaatccagtttacatcagaagctaacatccaactatacctagaagggcaaacactaattccttatataaggtataattaaatcccttctaacaggaactacctccttatggcatagacaccaacttctgccaggaaagaaggcaacctagagcttagacttgggactacaagagcactgcatctgggtaacagaaaggcattaaaaacaaacaaaacccagaggtttagttcaaatttctacccattagaatctggcccaagggatgttctacaatgacattttacaatcctctattctgctaattatcaaattgtatgtgaaagcaaaatctaacctatactcttttttacttactggtggtccagaaggaaatggaggcagccagcatgatagtaagtggggtggtggtggtggcggtggcggtggtgggccattgaattttagacctggctataaggaatatttcaaaggaaaattaacttaccaatttcaatatgataggaataaaaaggactcaaaaccaaaaggataaaaataattacccagaatatttgttttatacatatcaaaaagattaagtgaaatttcatgtaccaaatcctgaagtcaaacagactcataagtcaaatgacaacctctggatttttctcatttcctttctatgtagacattaaggaagtaaaacaaaataagagtggtgattacctaataaatcagagacagtctatttagcaaaattatttcaatcataaaagactatatcccaaatttcattaactaaattgtatatttttatgaaagcctgtttagctatacatgccaacttagaggacatattgtgaaaactagcaaatctctccttataaaaatcagccccctgagaccaatgaagcatgatgtatatatcctaagagggtacatcattttagattcaagaaactgtaatataatgtaagcctcaataagaacattatcacagaaaatcttaaaacttttggtgagtcatgcttgttttttgaaaatgactgcctaggctaggcgcctgtaatcctagcactttggaaggccaaggtggggagatcacttgaggtcaggagttcaagaccagcctggccaacatggtgaaaccccatctctactaaaaatacaaaataagccgggtgtggtggcgggtgcctgtaatctcagctacttgggaggctgaagcaggagaatcacttgaacccaggaggtggaagttgcagtgagctgaaatggtgccactgcactccagcctgagcgacagagcaagactccatctcgaaaaaaaaaaaaaattgcctaaataccattccctccatggaagaaatcaccgctttacacaaaagaactagaaagggacaagccttaaggttccatgacataatctaacctataataaaaatctttttagagttgatttctgttacttataaccaaaaggaccataaatgaaaacaatatttacatttgaactctacaaaacaatctgagagcgcctcaggattttatctatattagatgtaaataatgtgttcttattttacatatcttatacaggtgacatgggaaacaacagcatatcatccagctaatgataaattattattacacttttttttgttttgttttgtttttttgtttgagatggagtctcattctgtcgcccaggttggagtgcagtggcacgatcttgactcactgcaagctctgcctccggggttcacaccatcctcctgcctcagcctcccgagtagctgggactacaggtgcccgccatcacgcccggcaaatttttttgtattttcagtagagatggggtttcaccgtgttagccaggatggtctcgatctcctgaccttgtgatccgcccaccttggcctcccaaagtgctgggattacaggcgtgagctaccgcgtccggcgcattattatactttctaacttaagtaagtgtgctaattattagtctaatacctaatactccacaaaagttaactggataaatctttcatataaagtattttgttgcatccactgcagtgtctaacatttttttaaaaaattaactattttgcatcattatcttatttccttttcaaaaaattcttgtgtatttaagctacaaaagtttcatgggagagctacaaattagttaacagagaggttaaatgtcccgacattaactattttctggaaaactttcatagaaggtttacctttcctggtcccagtcttggccctggcatggggggtggtggagggagaaaagagttccatggagcagatttgggcttgatgttatctgatttatttccaggagacctggagttctcactttcatctgttgaaacttggctttcattttcattctttaaaaagaaaaaatatgcaggtttttgttat

SEQ ID NO: 40 - DNA, 4044 bp, Homo sapiens
tttaaaaaacacaaaagcctacagtgttacagtcagataactgatctcaaaacaaattacaagctgttgatttattactttttggtcattaaaatgaggaattcatgatacatacaatataccaaggttatactacaacaactgaagcgtgacttttttttccctccgcaaattctcactctgttggccaggctagagtgcagcggtgtgatctcggctcactgcaacctctgcctcccaggttcaagtgattctcctgcctcaacctctcaagtagctgggattacaactgcccgccactgggctaagttttgtgtatttagtagaaatggagtagtcaccatgttggccaggctggtcctgaactcctaacctcaagtgatccacctgcctctacctcccaaagtactgggattataggtgtgagccaccgtgccaggcctttttctttttttgagatggaatctcactctgtcaccaagggtggagtgcagtggcacaatctcaactcactgcaacctctgcctcccagattaaagcaattttcctgccacagcctcccaagtagctcggattacaggcatgtgccaccatgcctggctaaattttttttggtatttttagtagagacaaggtttcatcatgttggccaggctggtctcaaactcctgacctcaagtgatctgcctgcctcggcctcacaaactgttgggattacagttgtaagccaccatgtctggccttaacttttaaataagaatattaatgggggcacacacagatgatacatttaaaaacatacacctttaagtcagttgtttcttctatattaatttactaaaaatacaagtgcctacaatatcacatcataattttagcagggcacaagagcttacttttaaaaataattttaggccgggcgcggtggctcacgcttgtaatcccagcactttgggaggccgaggcgggtggatcacgaggtcaggagattgagaccacggtgaaaccccgtctctactaaaaataaaaaaaaattagccgggcgtggtggcgggcgcctgtagtcccagctactcggagaggctgaggcaggagaatggcgtgaacccgggaggcggagcttgcagtgagccgagactgcgccactgtactccagcctgggtgacagagcgagactccgtctcaaaaaaaaaaaaaaaataaaataaaataaaataattttaaatgttctgactaaaatacaatagaacatgtccgtaggagactaacgtataaagtgacaagtttgaagccatactccccaaggttcaatgtggtacacattaccccagatctttgtgcattaaaaaaatttcatttctcttggaaggccgaggcgggtggatcacggggtcaggagattgagaccatcctggctaacacagtgaaaccctgtctttacaaaaaaatacaaaaaattagacaggcgtggtggcaggcacctgtagtcccagctacctctgaggctgaggcaggagaatggcgtgaatccagaaggcagagcttgctgtgagccaagatcacgccattgcactccagcctgggcaacagagcaagactccgtctcaaaaaaaaaaaaaaaaaaaaaagaatttcatttttcatttatgaaaaattatcccatcttttccattccctacaatcaatttcaaatcagagattaaaacattatttagaaaaagtataatttcaattcaaaagtgtataatcaaaataatctaacaatagcatgaaagctttttaaaattaactaaaattatacttagggacaatgcaagagtaatttaagcctcagacagttgtatttttttatttttattttttagtaatataaagagagaagcaagtagtattttataaatttacaaaacaaagtcacataactacaaaaaaattgtcaggaaaagatgctgagtgattacttaccatataatagccagtatgatagccactcatgtaccatgaaattaacatacttcccaaagcatcagcatcatcaagagaatctggacatatgggaggtggtgggggaattatctggagacagaaaaagatattgtttatatccagtaaacaaaaaagtaaagtctggagatttatattatatagtgaatgctggaaattaattgtatttttgcttatataatctcctacttaaatttcttttttttcccctaaacaaagacgaggtcttgctatgttgcccagactggtctcaaactcctgagctcaagtgatcctcctgcctcagccttctaaaatgccgggattacaggcatgagccactgtacctggccttaaatttcttaacatagctagcatttggagaaaaccaaccaataacaacaaaagaccaacaaaattaaatttaacgaggacgaaaagacagcaagtgacataaaaagtttaaacattttgatttagactatgtatctgttccactatgaagctatgagtaaaaaaaaaaaatcaagcataaatactttcatgcttttccttaatacacacacacacacacacacacacacacagctcacatagcatttcgagggcgattttaagtaaatgtcttgggtagaacacctgttctaaccccatcccaatacacagtatgccaaaaagtatctttttatctattgttaatacctaaaaatctaccattagaaatccagtttacagctgggtgcggcagctcacgcctgtaatcccagcgctttgggaggccaaggcgggtggatcacctgaggtcaggagttcaagatcagtctggccaacatggtgaaaccccatctctactaataaaacaaaaattagccgggtgtggtggcagtcgcctgtaatcccagctacttgggaggccgaggcagaattgcttgaacccaggaggcggaggttgctgtgagctgagatcacaccactgcactccagcctggggtacaagggcaaaactctgcctccaaaacaaaaaaaaaaaaagagagagaaagaaaaagaaatccagtttacatcagaagctaacatccaactatacctagaagggcaaacactaattccttatataaggtataattaaatcccttctaacaggaactacctccttatggcatagacaccaacttctgccaggaaagaaggcaacctagagcttagacttgggactacaagagcactgcatctgggtaacagaaaggcattaaaaacaaacaaaacccagaggtttagttcaaatttctacccattagaatctggcccaagggatgttctacaatgacattttacaatcctctattctgctaattatcaaattgtatgtgaaagcaaaatctaacctatactcttttttacttactggtggtccagaaggaaatggaggcagccagcatgatagtaagtggggtggtggtggtggcggtggcggtggtgggccattgaattttagacctggctataaggaatatttcaaaggaaaattaacttaccaatttcaatatgataggaataaaaaggactcaaaaccaaaaggataaaaataattacccagaatatttgttttatacatatcaaaaagattaagtgaaatttcatgtaccaaatcctgaagtcaaacagactcataagtcaaatgacaacctctggatttttctcatttcctttctatgtagacattaaggaagtaaaacaaaataagagtggtgattacctaataaatcagagacagtctatttagcaaaattatttcaatcataaaagactatatcccaaatttcattaactaaattgtatatttttatgaaagcctgtttagctatacatgccaacttagaggacatattgtgaaaactagcaaatctctccttataaaaatcagccccctgagaccaatgaagcatgatgtatatatcctaagagggtacatcattttagattcaagaaactgtaatataatgtaagcctcaataagaacattatcacagaaaatcttaaaacttttggtgagtcatgctt

SEQ ID NO: 41 - DNA, 14 bp, Homo sapiens
cagcattatgaaag

SEQ ID NO: 42 - DNA, 444 bp, Homo sapiens
gtaagtctgccagcattatgaaagtgaatcttacttttgtaaaactttatggtttgtggaaaacaaatgtttttgaacatttaaaaagttcagatgttagaaagttgaaaggttaatgtaaaacaatcaatattaaagaattttgatgccaaaactattagataaaaggttaatctacatccctactagaattctcatacttaactggttggttgtgtggaagaaacatactttcacaataaagagctttaggatatgatgccattttatatcactagtaggcagaccagcagacttttttttattgtgatatgggataacctaggcatactgcactgtacactctgacatatgaagtgctctagtcaagtttaactggtgtccacagaggacatggtttaactggaattcgtcaagcctctggttctaatttctcatttgcag

SEQ ID NO: 43 - DNA, 585298 bp, Homo sapiens
gaaatctccaaaggaaggagtaatattccttcaataagagtggaaagatgttgggcacagcaagacaacaggtgccttttaggattcctactcaaccactaaggctcaactcaggtgtcacttcttggtactgcccattcctgtcctttctattgggttatgtgtccctctcctggctcatgttacattttggctgtactggtgtaccctattaatttataattgtctatctatgtgttggtctttctcacgagacagtgagctctttgaaggtaaccactgtggcctatcccatttgcatatcctgctttgcagcagataatggaagttccaggaatgttttcaataaagaatgaatgaagacaatcacaaaatggcagccaatcctcttgagttaagagaaaggggaaaggaacataataaaagtaaaaagtaccagatttggtggtaaatgctttatgttaactaactcatttgattctcacaacacttgcagaaggtattactctttctactttacaggtaggaagctaaaggttaagttccacaagcttacatggctaatagccttcaatatcataatgagtacttaggtaactaaaatctagaccagttctctttcggctacgctcgctttcttcccccaccttctcccctcttcttctggttaacaatgaactcatgtaacatagggatcttctcttttcacttctcagtaatttggacactttcccccaatagattgttttattttacctaaaggtattccctgatcagctttgtatctttcatttgcttctttgtaaaatcagagggttggccgggggcagtggctcacgcctgtaataccagcactttgggaggctgaggcgggcggatcacgaggtcaggagatcgagaccatcctggctaacaaggtgaaaccccatctctattaaaaatacaaaaaattagccgggcatggtggtgggcgcctgtagtcccagctactcgggaggctgaggcaggagaatggtgtgaacccgggaggcagagcttgaagtgagccgagaccacgccactgcactccagcctgggagacagagcgagactctgcctcaaaaaaaaaaaaaaaaaaaaaaaaaaaaaaaaattcagagggttgatggaaagactctgtaaaatctttttcagcaacaacattataaaattatacaaattaaattaagccaagaaaaatttataagtaggataaactcagcgtagactgtgttttgttcagttttccccgaaggtggtgctctgggtttcccatcctccaccctctctgcgtctcttccttctctttttggcgcttcctttattctcccattttgatcaatcagttgctcttctctgcccaacaacttagtgcttttattttgcccttagcttctttggattccacatttcagctcctgtattctcaatattcctgtcctccttgtcctctcatcattaaactttctcttcagagcctcatttcctcagaactgggccatgcttcctaccacctgtgcaggttaaattgccaggaatagtcctagggttttaccaattgtaggtaacctccagggtggtccgaatcgaatgaaacacttgaattcaaagagataaagctaatcacgggtatttcataattatgattgattcagtatggatttttttttggtagggcaatttcttgacccctccaatcatccaaagtggcctatttaaggccagcaccccagggcacaggggctcaaagtgtggctcctcagctattctgatctaaagctaaggcatgttaaacctgcagcttcctgggccccaccaggcctagtcaatcagaatttctggggaatggcaatcaatctgaatttaaaatatattctctgggtaattcttgagtgcattaagttgtaaggaactcagcctttgtactatttattttctaaaagtttcatgtgctattattttttgtttcttcaattctattacaaaaatttatatgataaaattttatcaactcgcacacatactagacgtttgactgaagaatttaccaacaatactcagcaaaaatccagtatctattacacacaagctccagatttatactttttttacctgaaaaatataagaaaggctaaattccctaaactttcctcctctcttaaatgcttgtatgtggggctttaattatagtcaataccaaaggtaaagctaaaggagtgtcttgtttttttatacattgtgtattttcccctgtttctactgtttaaagaaaaactgcatttatatagtcttgcacaaagtttagtagcaaatgttttccttttggttcttatattaggatgcagttccctgtatgggaataatatttatgtgaatcatgtctatatacactatacacacatatacatatatctttatatatgaatctatatatacactactcatatcataattttctcctttgtcaaaggctttctatcctgcagtgacactaactccattttccttaattttcacagttctgtggtgacagcagggcaattctgactttgggttaccagtagacccagggccacattcctattattctctccagatgttctacagcgatctgatctttgggatgagcagacaaaaccccactgagcatccttgttgcaggcccattaccttagaggcctgtctccaccgtgcctcacctagattctctggatataaaggaagatcacactgtgctttatggaaatatagccctctgtggtcaagatcgcccaccaaatgtggtttccctaccaaataaagaaagtgttgggggacaggaccagcacaggaccagcttgagatctcttgatcgttccatcaacaagaattccgccctccctccctcccttcctcttccttccctccctccctcctttatttctctctttctctctttctttctttctgacagtcttgctctgtcacccaggctggagtgtagtagcgccatcttggctcactgcaacgtctgccccggggtttaagcgattctcatgcctcagcctcctgagtagctgggattataggcatgtgccaccacgcccagctaatttttgtatttttagtagagacagagtttctccatgttggccaggctgatctcgaactcctgacctcagatgatccacctgtctcgacctcccaaagtgctgggatcacaggtgtgagccactgcacccagtcaacaagaatttctttagcctcttttgctcattacctacaaagagcatcagtctctgcctggagagaagggctagaaacagatagggcacaggtccccaggtaactggctgtaagccactatggctgatatgcggggcaggtcactcctgcacagaaggtggcttgttggcctcctgttccatctcttacaggcgttgaggaagctcgactaaacatctcctcacagcttacaatcccagaaatcataggaccctaaacgtgcgtttttcaaaatttttgagctaaaatgatgtattactttgtaaattgtgaaaagtgtcacaaatattaatttaagtgacaacatcatcaaacactccaatgtggccttattatctattttgaaggagaaaatctgagtttcatcaactcaaccaggatacagtgagtgataagcaacttttggtgtctgcaaaatgatcagttaaaaaaaacctgggggctgggcacggtggctcatgcctgtaatcccagcactttgggaggccccgtctctactaaaaatacaaaaaattagcagggcgtggtggtgggcgcctgtagtcccagctactagggaggctgaggcaggagaatggcgtgaacccaggaggcggagcttgcagtgagcgagatcgcgccactgcactgcagcctgggcaactgagagagacactgtcaaaaaaaaaaaaaaaagaaagaaagaaagaaagaaaaaatcctggagtccctctatgtgaccatactcagctagcacttgatctgttcttttcttatggcatttatctcccggatcttgtatatacttacttgtttacatgtcttatctcacctactacattccaagttctttaagggtaagatcactatcagatttatctttgctttacccacagaaccagcaaacctgacagccctaaactgatgcttgttaaatgaatgaatgaagtgaatgaataaaatcatacccatttcaagttaatcctttggattttatttggcttatacgtagaaaatcatcaaaaggaaggaaactgtcctagaaaccttacaaggaagagtctcttttgggaatctcctacctgccccctccctggagcacttagggatggatgggggaaactttcactataacaaaaggcgagtaaactctttctgaaaattagtttaaggcccctagtggtttaatctttactgccgcgtaaattaactcaaatattaagccagcaataaaccggcgctccagtatcaaccatccttttctctgttaatacgaactaggaactcaggttgctgttttctttcccctcccacgtgtgctgatcgtgtaaaagaatcacaggaacacacgagcaatgaaatgtgtaaataagaaaaatgcacacacatcacgagctcatttcttcccagatattttttggtcaacctctcaagcttggaacaggctctataacagatgtgcgtttgtgtgtgcatattggaaaacagaaaaataaggtcagcgcaaacactacttgtaatacaaactaatgtaagagaaaacttctttttcaatattaacaacgacactagagaaataatgtaaaataaatatacggttggaactaggggtaaaaaaaaaatcagcaacgtcagcaaactgagatggggtgagttggaaggcagattggaatttatctcttaaaaaaatatcaccctaactagagacctgttttgcctaaggggacgtgactcacattttcggataatctgaataaggggaattgtgtctgctcgaggcatccattctggttcggtctccggactcccggctcccggcacgcacggttcactctggagcgcgcgccccaggccagccaagcgccgagccgggctgctgcgggctgggagggcgcgcagggccggcgctgattgacggggcgcgcagtcaggtgacttggggcgccaagttcccgacgcggtggccgcggtgaccgccgaggcccggcagacgctgacccgggaacgtagtggggctgatcttccggaacaaagttgctgggccggcggcggcggggcgagagcgccgagggggagccggagcgctgcagaggcgcgggccggagggctggcgctgatctgcacccttctcatctggagagcggacccctggctgcccggaggcgagccccttcccggggggtgggggcggcaacgcgcgacccagcggtcctgcgccccaccctccctcctccgcctccagcgctcggctccaacaaaggggcaggcccgcagcggggaggaggaggaggagccgccgaaggagcgagcctctctcgcgcacaaagttgtggagtcgtttttcctcggagcagggaagcgggcagcagcagccggccgcgggctttctcccgccgaggggcgaggaggagcctctggctccagaagccgattggggaatcacggggagcggcgccccccttcttttgggtcatttctgcaaacggaaaactctgtagcgtttggcaaagttggtgcctgcgcgccccttccaggtttgcgctttgactgttttgtttttggcggaactaccaggcaggaagattgcacaagtaaggggcgttttcagtcgggtgtcaatttctctttctttctttctttttttaaaatttcggttcgtgtctgcttctccaagctttatttttttttttaaatacatcgcaccaccaaactaacactcgcacacacccccgcggttactccgtgtcaaactcctagaggagcccttggccagctcggggtgcggcggtggcgaccggcaggcgaggaggcccgcgggcagcaggtaagcccatgcattattgaagcctcgggctggtaatgtgactacagcccccgagggaatggggcgggggccgggaggaggatggctctttctgtggttcttccgcctgggatcggcgtcccgagctgcttcccaagtcccagagtcgaagatgggagtaacttttgcgtgccctttcctcggggcctcagtttagctccccgcggtgcgagagagaatgccggaggcgtggagagctcgggcgtggaggtccttgggatccgtactagttgtgaacgatccaaacttatctgaccagctctgtgctgcctccctgctcccctaatcttcctccccgccggggtgacagagtcgccctccgtgcatcgcgcggtgcagggcgctgggccagtgatttgcaagaggggacgtggcctcttaggagagtctgtcacagacacccgggcccggggaaggcggggctccggcggtgtccacaggagagggtgggcagagggtggctgtgtggtcggcggccagcggagcgcttcccagccagccgcccggcggggaacgtgcttgacctctgggtggttgctgctcccaagggtggggctccggagagtgtggcgcgatcgccaagctccctggcagcggccctggagagactgaggggacaggaggaggggggcgccccattggtgtgtagtcccgcgcagtcgccggctctccttttccggactctggggatctcttgctgcaactgacaaggtaattcatgccccgctttggcccggggtccgaggctgtggttgctcaaggccacttaaaaaccaacaaagcaccaattgaaggctgtgcaactttcagatggcaggttgttcaaaggattttttcctccaagcctcagattatgaaagggactcattccagtgcgtttttcgaggaggagggagaaaacgttgcccgacctccgagagagctgtgggaccagcactttattttacaaggaactgcagagctcgggttctaactccacggccccgctctctgaggtgttcaggacagggcctcctctttcccagccttcaggtcagccggatcaccagggccttgcgggccagttccccctgccgcggttgggagggtcagtgcagcggtcgccgcggccagagcgcgcggagctcgggggaggccggattccctaggtctgagccgaccctcccggccgcccggccgggcggcagcgaccgcatccattcctttgtaagttgcaccggcctcaggaagtcgatctgggccctcccggttcgttggcggtgggcgtgggagacgcagcctgcggatagctcagggtcaggggagaggtggaggaatgcgaagcttgtgggtagttctgcggtgacggacagggttggcgtggaaccattccccgccccttttaccagcctttatgggaccgatgagacaactctttaactctcctttgggtgtttacctaaaatttattggctctgtaaacagtattaatcacagtagtattaaccttccctggagcgcttccgagtgtaaatggcagttcttggcactcaccgttttcttttactgtgtttcaagcagagcagcaaactcttgtccgcttggcttccttttctactatctcaatcgttcctaggttttggttcctatagtaaattaatgaatagtgtttgcattacacagcatttccatcataatgcacactgttggatatatatgtgctatatacataaaatatagtacaaaataaaaattatatacatatattcattgtataattcctaaaatcttaaaaaattgaaacattagttttgtctttaaggctgtcaccttatgtttattttttaaacaccttatgtttatttcatacactcttgcttggtggtccatatgacagccggaagcgttctgaagggagagttagtgaatatcgacttgactggattggtttcagtaagaacatctggcttttacagaatatcatttgagggaagggaaatctagggcagaggtaacaataaattgcatttgtatagggcttgaagcttctaaagcaacatctcattcattgattctcagtttctcacctagccttctgtgaagatggtgttccctccattttataggtgtggaagacggagggtcacactgggatgcattgttcgtggtgaaactttgattctgtctcctgagaaccaaagattctgcatttggcaattagaaggagtcatcctttgccttaagtgtactcaaattcctctggccattaatggcaagtaacctcagtggctatcactatttaaatagccttctgttattcttctttctccccattttcctctgtactctgatcaccttttctgctgtatctttgcaacctgtaagggattttcattatcaagaagagaaaaatttgaaaaatcaccttgaggagagtggcaagtgaaacattatagtgaagaagtgttactgataatgggcaaatggaataaagtagtgtgtaaacagttgacttttctcttttatgggtgaataaaggctttgggtagcatagaagtggagatcttggctaagaccaatagtgaagaaaagcattagacttactgctccaaagtgatacactgtagttctttccaggaaagagaatttttccctgggcaaacttaattttccatgataaacttttatagacattcttctgaacaaagtttttgattcttgaatataataaaatacacttaagaatttagcaaatcctttatagttatgtacttgaatgaaagaatgtaatcatataataatccataaatttttagcagtagtagagcctataaaaaatgaaaaaagttttttagactctcataaaatctgtcagattgatgatccaatcctttatatccaactctctctctctctcttttttttttttttttttttgagatggagtctcacccactcggtcgtcaaggctggagtgcagtggcagcgatcttggcccactgcaacctttacctcctgagttcaatcaattcccctgcctcagcctcctgagtagctgggattacaggtgtttgccaccatgcctggctaatttttatatttttagtagagacagggtttcgccatgttggccaggctggtctcaaactcttgacctcaagtgttagccaggttggtcttgaactctggacctcaagtgatctgcctgcctcagcctcccaaagagctgggattacaggcatgagccaccatgctgggcccaactctctttttgtcatctccgcttatataactcagaggcatttcaagctctgcaaatccaaatcacattgatgattcctttctcccagcctgctatcctcagtgttgcccagctcaatgactcacacttcacctaattgcctaagccaaaattggggagtcattttgcacattttgcacattggatatgaatctctcatatccaatcaattcccaaatcctattgactttctttgatatctaaatatcccacatattcacccatttctttctatctactcttgtttagaccacacttgtttcctgcatataatattacaatagaaagaatagcacaataaacacccagatgtcctttttattttattttattttattatttaaaatttttatttacatggagtagagacaaggtctcaccatgttgcctaggctgatctcaaacttctgggctcaagtaatcctctcgcttaagcttcccaaagtactgggattacaggtgtgagccacctcgcctagacccagatgccctttaacaagttttcccacttactttattttttttgagatggaattttgcccttgtcacccaggctggagagtaatagcacaatttcggctcactgtaaccaccgcctcctggattcaagtgattctcctgcctcagcctcccaagtagctgggattacaggcacctgccaccacacccagctaatttttgtatttttttttaagtagagatggggtttcaccatgttggccaggctggtctcgaactcctgaactcaggtgatgcacctgccttggcttcccaaagtgctgggattacaggcgtgagccaccttgcccggcctagttttcccacttattttacaatacttactgcatttttctgtctgtctgtgtgtatgcatatatacatctacatacatatatcaacctaaatatacctatatcagtatagacagatatatgctattctgtttgaacttaagttgaagataccatcacacttcattgctaaatatttcaccacatgtctcttacaatcaaagacattctcctgcaacaataccataattaatgttaaagaaatttaacattgatacaataatattgtctaatacatagtccaaattcagatttttcaaatgatcctcaaatgttttattttaaaattctgaattcaatcaaagattacatttcattgtcatgtctatttagtctcctttaattcacaaagctccccctctcccaggtaattttggttttcaagacgctgacagttttgaagaaaccaggccatttcttttgaaaactagccacagtctagatttgtctgctcatgagaagattcacgttcaacatcttggcaaggatattgtgtagatgatgtggtgattttccattcaattgcatgatgccccatgattggttatgtgaattttgatcacttggttaagattaggaatttttccccaacatattactatgaaaaaattctcagacatacagaagagttgcaagaaattttcattcagcattcatatacccatgagctaggttccttaatttgcattttgctatattctgccatagtcttcactggttccccacatattactgtggtctacctacaagccacaatcgtctttttttttttttttttttttttttttttgagatggagtctcactctcgttgcccagggtggagtgcagtggcgtgatctcagctcactgcaacttccacctcccaggttcaagcaattctcctgcattagcctcctgagtagctgggattacaggtgcacaccaccatgcctggctaattttttttttttttttgtatttttagtagagacagggtttcactgtgctggccaggctggtctcgaactcctgacctcgtgatccacctgcctcggcctcccaaagtgctgggattacaggcatgagccaccgtgcccgtcccttgacgatcttttaaaaaggccaatttgaccatgttggttccctccttcgaaccatctactggctccccattgctcttcagataaagacacaaacccttgacctgttctccatggtcctatccctggtcctgcccagcttcttcacctggttcaacaggtacacttgtctcttggctgtcttctttccagaaacactggcttgtgctccattctttgactgctccatgattctttctgccacttcacataggaagctcttaccttttctctttctgtttccctttttggctaattaaattcttgtcatctttaaaggcttggctcaaatgtctcttcaagaaagccttctctaattgcccagggcaggtcagactcctctgctgtgtgctcttaatactctgtgcttctcctttgtatgatttgtagtctgtcagtattgtaatgaaataattcattatgtaattaattgcttagtgtgcataagcgccgtaatggcagaggctatgtctcttgttcatagtcataacaccattgcctggcttggtgctttacacgtggtaggcactcaataaatatttggtgaatgaatagttactacgaataactatataaaatatataaatacattttttcaagtcagtactttcccttttccttttaggtattgatgtcaagctgaaccatcgtaggaagttgaaagccttagaaagaggacttggtaaagtttttggattatcttgaaactctggcaagatggccaagtatggagaacatgaagccagtcctgacaatgggcagaacgaattcagtgatatcattaagtccagatctggtaggtaaaggaagctcaagaaagctatggatttttatgtatttagaaaacctatgtttcttggattgatttgcattgttcttgcaagaacttcttggaggtgaagttcttttaagaaactgaattctgacaaatgactataattttgtaaaaggtatatgtaaaaggtataatatctctgagtgtcctatcctttctcaacccaattttgtgcttagtgaaactgctgcttgtagctaaaggttgttcatttggaagactactccattaaaataaaatacgaccgaacatttctctttctattttctggaaattgaagggattatatgcttaatgtaggaagtgccacagtttctggcaggaaagatctttcacagtttgatttcattaccatatatcctcacccccatccctgttcatagccattgataggccaacaggtgtcctaccttgaaatatcttatgagccttctcaaggtaaaattttcacctaggtaatctaataaaccagactcagacagattcatggttttcacacgaacagttaaattggggtcctcaggataccaccccctcctccaatctttttatataaccgagtgctttttgactctggctgtacagatgaatcaactggggagttttaaaaaacgcagatgcattggctccattccagacccattgaataaaaatttctgtatttttaaaaagcttcaaatatgattctgagacaaactcaaaggggagatatttttgaacaggcagaacacttctcagccttgaaaattacacagaactccaccctgagtgtgaacactatacttaagtaactttgaaaagttactttgaggtataaaattacatccagtgtcactttaaagacaaaaaaggaacccaaagcctgtttttgctgtgtgaaccatctttatgttctgttaggagcttgtttcttattatgtgaaactgtagaaatacacagtgaaaataagatctaaattaactgtcttaaaatacacattttcctccatgataccggtgttggttgattgataaagattttagttattacagatttggctgtaaatatgtagcaactattgtgtagcttgacgggtcttttgaaggtatagcttaatatcttgttttaaaatatgctttgaggatgttctcttcctgtaaaattctttttgttttaaatgttttagtggtataaggtactacaaaaatgtaagggattattaatatcatcttaggagtacggaatacatattcagacatatgtaaatataacagaggaaaatggaagagagacgatttaatgtctccatactagtcattttctataaattgtgaggaggtatattcctaaatagttttctgagtcagccttcattctagtaagacctttgatatttataacttgtactttagccgtgtccataaaagagtaattatctaatttcagaaataccgtgtatatataatgaacatataaactcccaaactattttaatttaaaattatcttttaaaaaggctgatgaacctaaaatattgctggagaacaatttggcaaaaatgataacatgtttttaacacatgcatatcaattaactgagtaattctgtttctagagtttttccctaggcaatacataaaaaggtacactcaagaaattgatcacagtatcatttataatagaaaacattgtaaacaccatgaaaatctaatattaggaattggttagatcattatttcccaaagtatttcgaaaagatcaaaagttctaggattgttaatgtgtaattcacaaaaggatgttatggtcaaatagctttaggaaatagttgtttaaacctattattctgtttctttactctagcacatctgaacagatcatacatgatctcagtagaggtaactaaattagggtatatccataaagtagaagattaagcattcataaaaagtgatacagatgtgtgtgatgtgtgtgtgtgtgtgtgtgtgtatgaatatagaaatgtgttcttgatatagtaagtaaacaagtatgtattatatgaagtcatttatatgaaaaatgttttttaaaaatttagtgaagtatacaataaatgttaatagtggtcatcttggcatttgagattattacttttttttttgctgatttatattttctaaagttcttcaatgaacccacattactgagttcttatatttttaaagattatcaaattgcttagagtgtttagatgccaaggttatgactattactttttttgtggtggcatctacttcaaaacacactgaaaatttagttgttacatagctcagatatgaatcacattcttttggctgaattatgttgcaaaagccagtagataaatttggatttgaatggacccattagtcccaatctggcttcctctaagggactttttttgattcttttaaggcaaatgcttactatacagaggtaatatttcatggtactctaaaacttacatattttaagagatttttagtttagattaagtcataggaattgtctacatatcatatatgtattttaaagatcctctgtctacatgctgtatgccaaattggttgcttttccattttttaaaagggaatactttcctttaggaaaattttgatcctcatctgctcttccaggtttcttttttggggggaaattggatgaaagtggggggacggagagtgtggtttctgctctccaaatcctcgagtttggacaatccaaaaggctggcataattaaattggcataataaaaatgtctatgcattttatgttaagttattgtgattatttttattgtcctcacttagtattactttgtttcatgccattttgaatattataattttttaaattttataattttaaagccatttctaccatctaaacagaaataggaagttgtcaagggtacgtaatgaagtagtttcataaatacaaagccatgtatttatttatggttgtagtatacttgccttgggtttgggtgagtgttagaaaggaactggaaagaatttgatctataatgaccaaggatttggtgttgggtaaaagtagacctgtctttctctaacttaaaagcacatatgccaagttcatcatcaagtactgtattattaacagccttaattagtaggctttagaaagttcaacaagttagtaaatattttgaaacaataggccaagactaagaatttttaaaaagtgaaatttattgccagtagagtgtgtgatgcagaaagtactgcttggaacattttaaacatgaaataataaaatggtttgggatgcatatacaatcgaagaatatcctcactgctatttcattcaataattaacatacattaaagctagtaacacagaataagtcatccttttctgttgctgtcagtgttgttgtggttttatcccagagccctgtagaaagagtagacctcagggctaaggacagtgtgtcagctggctccatgtggagttcttgacagtttgggattatagactctcagctgggaaagaactgtttgatgaatgaaatagttgggcaagcttcacatttttggataattcaatgtgttcttcaagcgaccttgggctggaagcctgtgtgtaacaattttatcatttcttcctttgcattttctcttcttgtctaatcttaggatctaattgttgagggaaccttaaacgccctataacccagccattcctgtgatgtgctcacccagtctctgtttgcacacctccaatgatggcatctcactgctgctgctgatgatgacgattctagcaacttacactaattgaacacattctgtgtgcagatgtggtgctaacagtttaatcctcacaaccgccattttgcagatgataaatgtgagccatactgaagtgatttgtggcactggacttctttctatttctccaaaggcccagtgtgtcttcctcagggcctttgcacatctctcttcttccatctttgcctggctggttccttcttgtcatttagatgtaggcctaatgtcacctcttcagagatcttccttgctgactttagaaagtagctctcccagtcactcttgactgcatctctgtatttacgttccctgtgttgttcttagcactctctggtaccttttctggtactgtgtgttcattaatagccttcccactagaacagggctccccaactcccagggcctggactggtaccagtccgttgcctgttagggaccaggtggcacagcaggaggtgagtggtggctgagcaagcactaccgcctgagctctgcctcctgtcagatcagcggcagcattagattctcataggagtgagactctatggtgaaccgcacatgcgagggatctaggttgcctgctccttatgagaatctaatgcctgatgatctgaggtagaacagtttcatcccaaaaccatccccctcatcccttggaaaaattgtctgccatgaaactggtccctggtgccaaaaaggctggggactgctgcactttaattaactccccaagagcagggaccaatacatccctggtactgagcccaatgcctggctcataataggtgagcaataaatgtttattcaatgataaaggctacagagtctggaagtgccagagctggcatttgaactcagatgatctgactctagaaaccctgcatttgacctctatggagtgcccagtctcctaactcacaagacattttattccattgctgctcggtgactcttcttcattttgtgcctaattctgtcccttacacattttgcactgtattaattgtatttatacagctcttctatctctttttttgtagttttcaggggtgggaccctggactgtgaggtagagctcctctggaccccaggttagtatctcagagccctgacaagggaaggccaattgtaagagacacagcctactgcttctgggccagttgcatcctttcttgatttttggctctagtctctgtcattctctgttgagttagcaaaggggaaaataccagaggacaaacagtcctttgggtggaagatagagaaatggataatgtgtttctgacatgaattcctttttctcttttcttctgactactgctcaaggcttttaacgagctgaagttaaaaaaaaaaaaggtagtggatttcataaggactgacatttggcacagtgtaggtcctggtccgatgcccagataggtatctgtggtactgaaagagttggttgaggagtgtaggggaaggaagcaaagggttggttgaggagtgtaggggaaggaagcaaagagagaccagtgaaataaaaataaaacaaattattaaatatgaaatattataccaggttacatttatagcaagcctcctgaaaatctgctatgtttggaaagtaaacttgcttaacaagattcaattttatgaaaattctgaggaggattaccttatttgtttatctttctgaggcctttcttgaggaaagacagtggttaagttgtatttaggcagtcatcggtctatttctttcttttatgtttaaagcagtatctgtgaggggatttttctaaacagctcaagggactgtgaaaaaatagttcattttttgtttctcctgaagctttccttggctggaatacctgtgctttgaagggaggtctttgagcaggtttgtttttttccatgagccctggggatttgtagtgatagacagtaaccctgatggaaattcaactctggcagagaagggcagctattcttgtcctgcttgtaaagatattctccatgttgttacctcattatgctgaagtagtgcaatcatgagaaagtttttttgtattaatgtgattctcatgacctgttactatggttgtgaaacttttagaggagatccattcccgactggaaaacgtgaattgctgaggatgattctaagcaaaggaagtacgttaattatatagacagaacagagaactcaattttattgaaccttatttgtacccagaagtttgaactagatgctgatatgatgatttttctgggaacaagtcaacatgcaagactatttgagcagctgtaaatattagttaaaatttaatctaaagcaatggagaaagggtactctgctgaagtggtttcagatgcattggctggatttttttttctccccttaaattgtgtggaggcatagacatttactatgttatatttttatctttttatatgccttaactgtttaataataaatagacttatttcaatatttgaaatgtgaggcagtatgagttcttaatgtatacttactctcgagatgatggctcttggactgagaaattgaaaccaggtcccagtcctttcgcttttacttcctgtgacactggatttgcacatgtcaattccaggaagcaggtagtttccagcatccatgtggttttccaatctttgcatttgtgcctttaaacaaccaaatacctgacgtttattaatatcctgtggggctcttctatcagaagcacattctcttggcccggttcataagggaaatgtctgtgtatgcgcatctggcagctaagattaaggtttacagtggtataacctcaccttcacttttaagaaattaagtttaaaaaaaatgcagatctgtctttcatagcagtggagctcaacaacacatagagcatgagagtcacattttttgtgtgaatattttcgaatgagccttttttggtatgtggacgggtggctagttacattcagttcaatccttttaacatttaattatggaacaaaatcttttttcaaagtgtagagaaaagcatataagggcatttctgatgtagcagaggaatccaataaaaaatatgactttgtgtctctaaagtggtacagctttgaaattaacacatctgtataatttcaaaagtatgatctctttagatctttttctttaatttcatagtcttaatttttgcaaatttcttcaactccattctctaattaagattttggtatacaatatttatatgcaaaagatttttggtgcaggaaataacattttgaggttgatactaattgatttgttcacttgcccctcaaaggctacgtgtgagtcatgttatttaacattgatccagtcaatatgtagatttatgcacatgcttttattttgaaaactaggttttgagcttctcacatatggagttcctaattcaagctttatgtcagaaccacccttctgggtccagactcagatatgtggggtggggtcccagcatctggagttttaacaagttctgtgggctattctctttagtgctcttaatttatagacaaggaaggcaggtttaaaagtcatagaaccaaagtgaaaatgatctgcattttagaggagcaaggaaagctacaacgtttattatttctacttataaacacttccctttaaataatttgaaaagataatagatttcatgatgttgggcattttttcttttacactgtattttgaagagtttgggttgtgttgggtgaagttaaaagtgaggaaagtgggtcaggagagtgatgaaacctggtgcatttcttattttggcccattgaaccagaagatgataccaatatatctagtgccgacatatttctccactgcgctccttagttattgctgcagtgtgttcaaggtcttcttgctgtgagtgtaacatcacatcttgaactctttttctagggaatgcatcagcttagagtccgctgatgcattcattataaaaatgtattgtgtatattttctattacattatttcaaagacagacgtgtttttgaatcatggtgggaaaaaaactcctcacattcaacctctatgctagttttcttatcttaagggggggtggttagagaaatgtattatatatgtattaatatttgcctccctgttttttaattctaaataggtgacatatttaatataactatgcttgcttttgaaataatttgcctaccattctttaaaatgagtgaattttaaaagatgtatagtgatttttatgtgaagatgaattaaagagttaagtgacatagaccaccgtagcattttccctatggatctgtaaaaacagcccaaaagtcttgtgatttttttttttttttgagccgtagtcttcctcttgctctgttgcccaggctggagtgcagtggtgccatctcagctcactgcaacctctgcctcctaggatcaagtgattctcccacctcagcttcatgagtagctgggactacaggtgtgtgccaccatgcctggctaatttttgtatttttggtagagatggggtttcaccatgtcagccaggctggtctcgaacttctgacctcaagtgatctacccacctcagcctctcaaagtgctggaaatacaggcatgagccatggttcccggcctcttgtgatatccttatattcagttaaccaaaccaaatcaagtcaaataacaaaccccaaaccttttatagaccttgagttatttgcagatctttggggttatttacctgtcttttgagctttaatcttttacctctttgaagatacaggaagggatctttatttcttctttgataaaataaccttcagagtgacttgagatacggaattgcttctttgtatatcattgtgtggtatttgagatcacatctcaaaatttaatgagacctgctcctcaggcagttttaagattaaggatcaaaaagggagccactggaaaggtgtgagtggctggtaatctatgttagaacagagactttggtgcagaggttggccatgttcatatgtggagtaagttttcatgaaacaggaggaagccttttcttatttgaaactaagaaactgcaaaataaaagtaataaaataccccgaagcaaatagactttaaaacaacatttggtcctaagttgtatatgaccaatttcttaaagtgattgttatattgccagttttgaaattatattatcttttaaaatttaaaatgtaaatattgtctcaggggtgggaggatgaatctccatcttatttagtgttaaaggctcctggacttaccctaaagcccagctttttcggtggggggctcataaataaaactgtgtgtgttctagtttactctgttacctcatctagttcctttaggtgattagaaaatgccgtattagcaaatataaaaaggtttacttttgtgtttttacatgtgaaatcaatggccagttctataatgttaacatatcagacccttaattatatattaactcccattttgatagtttgtatagaaaaatcagagttgacttgaattatttgaacttgcatacgctttttcaagatacgtaacgtgttgtaaattagaagagtgttggtgttttcggaacacatgcatatgcttgctgtctcagggcagccttgttgggcatttggtgtcagacataccttattctgagggccttggcatcaaggcagattgctcagagagggggtctctctgcatatatgtctaagggagacatttagggaagtctcatgccatcctatctttctttctttctttttttttttttttttttttttttgagacagggtcttgctccattgcccaggctggagtgcagtgactcaatttcagccctccgcctcccaggttcaagtgattcttctgcctcagcctcccaagtagctgggattacaggtgcctgccaccatgcttggctactttttgtatttttagtagaagtggagtttcaccacgttgccgaggctggtcctgagctcctaacctcaagtgaaccgcctgccttggcctcccaaaatactggattacaggcgtgagacactgctcatggccaccatcctactttctaacagcactgccccaccctccccctcgccccaaaaaccaccatgaaggaggcagagggcaccaggtgaagactgcccatggtccttttcttacctctgtgacttcgcttgttttgtgttctgggcttgattgttctccttctccctgcgtccccagttttgcaacctccatctttaaaacatcagcatcagtgccaccaggtgttctgctctctgtgctatctgcatgccagaatcaatctttcccacgtgttcactcttcatttctgtttgtggcccttctggcttgtgtatgtctatatgccttttttcatctgactttctgatgctagcctttagcttagtctccacacacacagtaagtgcttaacaaagacttgtggccgtgtgcagtggctcatgcctgtaatcccagcactttgggaggctaaggtgggtggatcatctgaggtcaggagttcgagaccagcctggccaacatgctgaaacctcgtctctactaaaaatacaaaaatcagccaggcgtggtggcactcacctgtaatcccagctacttgggaggctgaggcaggagaatcgcttgaactgggaggcagaggttgtagtgagacgagattgtgccaatgcactccagcctgggcaacagagtgagactctgtctcaaaaaaaaagacttgctatgccttttaatggttttaaaaattacacttgcttacatacatacctcattcattcagcaaatggttattgttcattcattgttagatgctgggctcagagataagcaagacccacctctgttcttaagatgctctcaggctagttggaaagaaagacatcaataaacatccccacacaaaccagggacacatggagggaggaaggatgtcttgctttggttggaatgagggtaggtttgagtaagagagcgtgaaagaggcaaggaatttgaggtgtgccttgaaggatgtgtaagaggcaacgctgtggacagtgtgggaagaacattgcagatgatgagaaaagagcaaggcatttgaagtctgtccctggtaactgagtgtggctggggtaatggggatgatgggagaagctggggtcagatttcgaaagcccttttgaagcagggtttatttgatctttccctgtaagaagccactacaggattttaggtgagttaatgactagctcagaactgtttttcagaaagataacttggctggcagcaggaaagatagatttggaaggtagcagagttagggggaggcagggaacaggtaagagttgtgaaaaaattgaggttaaggagtataaggacttggaccagagtggtacaagaggagactgagcaggggaaaggatgtgaaaagtggttagcagttagtaacagggtgtgcaaagcctcaatgtaaacttcgcctttgtgggatttgttagttagtaacagtatgtttaaagcctctaggtaaatttcacctttgtgggactttttagtaacagtatctataaagccgcaatgtaaacttcaccttggtgggatttgctttatgttttcaatgaggtatgtagtttttcaaatcgtactgtaattcagattttcaacactttcggttattagctttttctctagaattttcttgatcaatttcttaaccgtttacagttacttctacttcttactgaagttgactactgctgtttttctcacagtacctcttggtcagtttatatggggaacttcaaattcagttcagctgcaataggatctgtatttttttctatatatattctgagagaagggtcatgctttaggaaaaagttgatgaaaatgagaaaagagatggtttattcatgtctatgcagtatactattaacagttctttgaaaaagtagcaaagaaaggtaatgttaatctcatcttaaatgaaggtaaaactcttgcacagctaagagaaaatctatatactaaaagagtttggaaaactacttcagaggaactttaattaaagagtagtctaatgtgatgctgtgaagataatgccatcctctattagtaatttcagcttcaacaaataggatagaataaatgcaaattaaaaataaattaggagcagatgttgagaaatatcttacatttagggaattcttaagtggtagaagggccctggagttcagttaataaagctgggatgctcagaaattataataattcaggtaacaaatgctttccttaatgtgatgctctgctgtggaggttttgggaatagaagaaagaagaggctgttattgtcatactgtttgtaagttcatctttctttacattcagtggataactaaaatctactatatatgctgatatttcagaaatggtggttcccttaaccttcaagaaaaaacaaaagctctcatttgtaaacacttgcaagcattcttgggttgtctcttggtggtacccaagtttttgctttggccggtaagagacttttgcatagtactttgttgccttgcctctacaacatgttaggcttgtggattggcgcatggtgaataagacacagttccagttgtcgactgtctgtcacctagagagggcaggtacacaggaatttaagaaaacagattaaacaggcagttacacagttgtaaaagtaaaaacagcacagattgctgtgtgagctcacgggagtggtacctgacatcccagggcttcaaggaaggcatcttggaagagtggatatctaagctgagatctgaaagaatgagtggggatgtggggaggctgttaagacagagggagttgatgacaagaggtttggaggtgagaattgtgaggttttcaatatggctaaagcaggatgctggagaatgaagctgagaagagtgttataagccatctttaggagtttgagttgtatcctaagcataatggtgaatctttgaaagggctttaaaattaaaaaaatttatatttatatatttatcatttttaaaattctgaagtattcaatctaaaaaaatgtacaggaaatgatatatcagatatgctcgtgccctcatttgaaatttatcagctgttaatgttttgacttttttttttttttgaaatggagtttcactcttgttgcccaggctggagtgcaatggcgcgatctcggctcactacaatctccccttcctgggttcaaacaattcttgtgcctcagccacccgaatagctgagattacaggcatataccatcatgcccagctaattttttttgtatgttttgtagagacatggtttcaccatgttggccaggctggtaatgttttgacgtatttgatttaggttgtattttaaagagctaattatgtcagcatagataaatcttaaaaacaatttgactacaaacaaaaatcaggttgcacaatgtattgaatggtactgtatataaagctcatatacctgcagaaattgccctgcagtgtttatgtattcatattataaatatatagcaaaatacaaaaatttttatggaaattataaacactagatttctttagagatagtgagagaggaggttcttcagttttatctataatatttaattcctcaatgaaaatagaaatagaatcttaaattaatatgaaataatgctgatttgtgaactgagtgatgactgtcttaagcccagttccttggaagtaggatttgagacagagatttgtgtgcacttgagaacaattcctgttaatgaaagaaatgagggaagaaggactgggccagggaaaagctgaagtgtagttgagttacagcagggccaccattggatccatagggaatgctggtgctgggatggcccttcagagatttcccaacttgaggcaatgtgttgagcctggggacctttgccttgaccagtaggcttttggctgaccctgggaaggaggtgaggtgaaaatctgggcaaggtaacttggccaagggcagttcctggacggatgctcagctatgagccctcagctgctgggggaatgaatttgtgcattgccttgcctgaaaggcagatctggataggagattcactgcagtcatggaccttgtaccattttcttttgcctattattgtctatttctatgtctgaaagatatgacatattaaataaaaaaagcttccaatttctaggagcagtattcaccgaactacttccctgacacatacatacctcacaccctgcacacaccacacaccacaaaccgtagctgtaatatcaggttacatactttctgttttattttcccttttctctgtgtttttggttacttgagatggcctcctctctctcactcctggtttgggaaggccttgcttcctctgaaagcttgtgagcagagggctgatctgatcagatttgctcttctgagtggtgctctagaagccacgtggagcatggatggtgtggggtgtgtgctggatgaggcaagcctggggttctggaggacctttgggtggctgtcacagttagaggataagaggtattgaagccaaaactgagattgaggtagctgggaaggaggagaggggagagtttagaagctttaggtaggaggcagacctgataggacatggtggtggtcttcagatgatgggtggtggatgggatggagagagaagcctggtttttgactttaacactcgcaaatgaagcctttctttctaggttttgtggagagggcagtgcataaggggatagtaagtgaagttctagattgagttttgaggtgcctggagatatctgggaaaaatatgtaatatatatatttctcttacatgtatgagactggcttgggctggggtctgcccttgaaaactggcagctggagtcttgagtactttcctgagtcattttttgagctctttgcaagataatgttaaaaattcaagaggccgggtgtggtggatcatgcctggaatcccagcactttgaaaggccgaggcgggcggatcacctgaggtcaggagttcaagaccagcctggccaacatagtgaaaccctacctctactaaaaatacaaaaaaaaaaaaaattacctgggcatggggtcgcgcacctgtagtcccagctactcaggaggctaaggcatgggaataatttgaacctgggaggtggaggctgcggtgagtcaatatcacatcactgcactccagcctgggtggcagagtgtgactctgttgaaaaaaaaaaaaatcaagaactgttgcatattttatttatctttgtattttctgagatatttttgactgaccctaaaatgagcatctggatggtagatgacggcagcggaagatgaagaattaagaagtggtttttgatttgtaatattttttagtagatattattagttgatgccgcagttgttgactgtatttatctcccaagggcataggaagcccccttgcagatattactctacctagcctgactgggtgtttggggagggagagaagaggttaacaataaatcctgcaatatgtgcagaagtttttacacttgtgtttctgcatattttcttagaaaaagggtccacagttttcattatattctcaaaggagacctatgacttaatgaaaagttaagtcttgttagaggaagagtgacatattatagggttatgtcttcataatgtttctttttttctgaaattagattggcagtccaatacgctggcacgaactgagggtctcacacttttgctgtaactcaaattctggtccttactttacttctactgccttaaagccactcaaacaaaagacctgattgctagaattaggttgagaagacacaaagtttgaagggcaaaatttctgataatgtttgacccagttttgcatataatgtatttttatttgttgatgaatatttcccttttgttgctaaaagtggcaaataatcagacatagattactaattaacagtctgcctcagttttttttttttttaattaatgaaacttgggcttcatcaagctcaggtggaatggatatcacagtgctttattttttctgacatcaaaagaaatttctttgtcaaagtgtagacatgtttgttgtgactgccttttgtgtgggttcttttctcccagccctctcctactacaggagagagagataatggccctttgctcctcattccgcattcagaccagattccccagctgcaatctcctgccatcggattgcatcaccaactcaacctaattggtgagatgtcactccctccctccaccgctcactctcatttctcagtgagtttagctctgtcactctctctaaaagttactcttgttttagtgatttgggtgtaaacattgatgatccttctaatactctgtcctcttaatttctctaagttctctttctagtgatcttgtctcccagtgtggtgggtatattctggctagaccaggtcattgtttatggtggcagcccctctgtcatctgaatttaagcgtcccattttttcggtactagcatggctcactgcaacctccgcctcctgggctccagcaatcctcccaccctcgggtagctggggctataggcatgtgccaccacgcctggctaatttttgtatttttttttgtagataagaggtttcaccatgttgcccaggctggtctcaaactcctgggctcaagcaatccatccacctcagcctcccgaagtgttgggattacaggtgtgagccaccatgcccggctgactttgcctactcttgccctaagaaaattgaagcaaaccaaagaggaatccagaaacttcaataccacatctatcctcaaccagaacccacccaaggccaccctaaccgtgtacattgtacccatcctcctttacttactcaaagtcacctcccttctctcttctgcatccctatgatttcccctttagtggatccgcttacaaacatgctattgtttttcttctagcaaaactttactttgatcccacctgtctctgtagctaccacgccattcctctggtcccctttatgaaagagctcctcaaagattgtatgtaccaacatttgcagttcgtctcctttcattccctcttaagaccactcaaatcaggcagaccccctaccagtccagtaaaactgctcttgtcaaagttattagggacctccttgttgctaaatccagtagcctgttctcagtccttaccttattccacctctcaatagcatcaacactgctgatcactccctcctccatgactctttcttcatttggcttctaggacaccccacacgctcctggtttcccacccattatcttttgctgattcttcctcttaacgttggagggcccaggacccagtccttggacctcctctctgtccccactgttgccgtttgtcatctcaccagtatcctggtttaaatactatctgaatgctggctcaaatttctatctctagcccagacctcttcctctgaactgcatacttgcatttccagttgtttacttcacatcttctatgttcagatctgaaaatctgaactcctgatctcccgtaaaccccaaagctgatcccacagtcttgcttgtctcagataaaggcaatgtgattcttccaattgccccagttttggagtcatctttgtagtcctttctttctcgtatacccacatccaatgcagcagatcctgctggttctattttcctaatactgaatttatacagaatccggtcatattttacgatctccactgctactgtcctggtctaggggaccattgctttttctggaattgcctccttacttgtctctctgcttcctcccttggcccatggaggctggtctgaaccccacagtagagggatccttttcaaatcagaagtggatatgttgcttcaggtttccaagtctgcagtgactccccattccagttgtaataaacgcgaaagaccttacagtgatctacaggaccctgtttatcctgcctggcttcatctccccttactagtttgtgctcattatatgaggcaggcacctcccaggtcagggcctgagccctcttctagcagataaccttgtggctaactccctcctctcagagagctactgtgccagtcaattaaaatagcaaatccttccctcattagccctctccacccactttatcctgtttcattttttcccatagcacttactggattatgctgattgtctttttccactagaatgcaggtattttgtctaggttgaatcactagtatctagaacagtgcctgacacatagtatgtgctcaataaatacacgtgtgcagaagcaaatcacatttttcattgctttccacaagtgtgagcctgggctacatagtgaaaccccatctctacaaaagatataaaaattggtctgggtgcagtggctcatgcctgtaatcccagcactttgggaggctgaggcaggcggatcacctgaggttgggagttggagaccagcctggccaacatggagcaaccctgtctctacttaacatacaaaattaaccaggcatggtggctcatgcctgtaatcccagctactcagtaggctgaggcaggagaatcgcttgaacctgggaggcggaggttgcagtgagctgagatgagccattgcactccagcctgggtaacaagagtgaaactccgtctcaaaaaaaaaaaaaaaaaatggctgggcatggtagtgcatgcctgtggtcccagctacctgggaggccgaggtggggagacagggatcactgggcgtggcggggggtggggggcgtgcctgtaatcccaactactggggaggctgaggcacaagaatcgcttgaacccaggaggcagaggttgcattgagctgagatcgtgctactgcacgccagcctggataacagagcaagatgctgtctcaaacacaaacaaacaaacaaaaaacaaacaagtgtgcaatccctgagaaaaatatcagttcaatctttgttgatctttattgtcccgattgattagctgcatgtcagcctttgactgtgtttcccagatgctcacgacagatcgatcacttgatgttgttttcaacaggcagtcatgaaatgagcagactgaggtcagtgtagtatagatatttgtcagcgtggttgccaactgcctttcctcttctaagattgccctttattgtgtgattatattacatttttagttggcatgaaaatgcccatttagtgaaatgatgaggatcttcctgggggaagaattctggcgtaagaagctttcttcagattactaagcactctaaaaggtcccaggttatggggctctggaaagtaacgatgcgaatacttcacttggttatgtgatttttatttttgccttggaagtctttctgcaaacaagtcttccagtggaggctcattttaggaatgtgacgatgcattgctgataggtaggatgtggctttctatacagcagagtttggggggtgggactggcaggtgagtagctcaacccaggcttctgagggtccttcatgtcttttggaacacaatttgaaaatcactgctttaattgctaaattctagaaaacctggatgccctatttaaaaaaagagcttagcttagtgtcaaagaggaactaggttccagttttagctctgcagatcaccagctgtgtgaccttgaatatgtcactcaagctgtctgcacaattaattgatttgtttgtaaggtaaggagtatggactagatgacctcacactgatcactttctaagctccagaaaacctaattgttaatgcttaattgtgcgagctgtgctcgggaagggctgtgttctagtaccttcttcctcatcactgtcatttcagtattatctacactgatcttcacaaatattctgcacacttggattctaacctgcaatattgctgttggggttatagaaatatagattatatgatggtatttagggtaagcatttttatctctaaaatgagttagatatcaaggatggcatggtattagattacacaatatttgaaaagaataataagaaaaatcctgcaggatttaaaaatcttattagtactcttctgtagaaatactttagggaatggttcagacagtatcaggtgctgtgggtgtaagcatggccacctgctagctctgtgaacctggacaaatggcttagctgctctgtgcctgagtaaagtagagatagtaatagcatcaacctcctcgtgttgtaaaaagtaagtgaattaacatatataaagcaatttggggccaggcgcggtggctcatgcctgtaatcccagcactttgggaggccgagacgggtggatcacgaggtcaggagatcgagaccatcctggctaacacggtgaaaccccgtctctactaaaaatacaaaaaattagccggcctgatggcaggcgcctgtagtcccagctactcggaaggctgaggcaggagaatggtgtgaacccaggaggcggagcttgcagtgagccgagattgcgccactgcactccagcctgggtgacagagcaagactccatctcaaaaaaaaaaaaaaagcaatttggaacatagaagcactcaagaaatgtaagccgttacctccatacaaataattattataatgtgggtttatttctttccagtcttttaaaataagcatgtaaaaatagttttaatcatattgcactaggaagatttgtttttgtttcttaaatatatacagaatttccctttttctgcttctttatatttaataacaagacattctaggatagactaagccttttcatggctaattgtcctgtggaattcttttagtttttctcttccatgtttatatatttgatatgattttctggtagaattcttgaaaaaataactgcatcacacagtagctctcctctcccattttattttattttacttgctgaggctggatattatattcttttggctgaagtcaccatagtggattcatacaactaatttccagccagtttatgtagatcatttgcaaatgtattagttacagagaggctccaggggtgtaccaaagaaacctcaaaatacagtggctcaaataaaatcagagtttatttctttctctccttacagttcagagttggtgggtgatggagggtgggaaggtggctccgcttcatatggtctctcagggatcctggttccttctctcttgttctgcctttccaaagtgttgttccattttcttgatgaggcttgcccctcaacactatgtcaagttctagtccaaggaaagagaaaagagaagtaaaaaataagcaattttttaaaacgtgcatggccctcaggttgcattcctgatttcttttcacatcccactggctgctgcttagccacgtggactcatcttgctgcaagggaggttgagaaatatggcttgtgctgagctagaactgtggggatggaggagaagagcaggtttctgatactgaaaaaaaaaaaaagaaaagaaaatagaaaggagaatggataataataaatatacatatgctttgatcacaatttcatgggccaagtttgagtttggaattttccaagtcctcagattctatgacagaacatggtggtggagagagctgccccctggctccagtttgcagactttcccctttgtctgcccatgctggctccatttggcactgggaagggctttgcacccaagtttgtggtcagttggccaagcacccatggtctcccactcttccccacttgcaaacagtagtgtggtccacccttgcttgggaaagagcccagtgctcatttgagcagtgagtactaggaccctgtgcctctagaccgtgctttaggacttgcatatccccttggtcctctgatttctctatttctgggggagagatggggatggaagagggtagagtgaggccctctaaaagtcaggatttaaggcaaggtccttgcttgtctaggtctacaggtgatgctacaaagagaatgttacattgattcagttcttaaaattttcccttttcctcatgcttctgtttcattaatattcatatttactttttataatatacatgttatgtctttaatacactaggagtagaatatttgtaatgaaatggagtgctgttttaatggatgagaaaggtagggaggggctcagagagggaggctggagaatattcacttatttagcttaatgttttcaacagcttaaaaaaagagaaaaaacaacctttgagtggcccttgtgattaaatggcagtttgcccagactagagggagccagcgttgggaataaaaactaagattcactttgaaaatctagaaaaaaaaaatgactacacaagtcataagaatgtgcttgatggcttgggttgtctgagtgcaagtgaagtagggcgcaggcctggtttccgcattccctgtctgctcagccttttagctcctaaccccatccactccctagagctggccagcccagacccaggacctggatgctgacctcttcagggcggagctgttgctgtgctcagacatcgtgacaacttgttgatgggaaatgtagctgaaagtctagcacaaaaagctgctcttgggttggccagcgaacctccttcatggtaaaactccccatcccttatccaaatccttgggaccagatatgcttcagaatttatgatttttctttttcccatttcagaaaggctatggcccatatgccctatgttacataaagcctccagaggagtttgggacagtaccctatcatccaatatcttcatcattctgcagaaaatgtatgaatatttacactaagtggaacacaaacagggttataaatagcctcaggtcagttcaggtcacgttttgctgccaaatgggttatggaaaaagcctttggtttccagagcttttcagatcctggcattgtggataagggattgtgcacctggtatggtgactgctttctcagtgtccatttggtgccattttacatgtattgcatttgaagtactcacaacaaaaatacctatgtatatatatacctctctctatatatttttttccttatttatttatttatttatttaacagctaaggaaacaggtttcatgagctcgaatggcttacacaagatcaagaggagatgatctcctttgcaaacagaggccaggacccagggcctgggcacttagtgggctataagagtttctaatttgcttgtttgaagcattggaacataagccagcctgcagaatcctgtttcacatttaatggtagctgaaagacaatactgcagtaaaagtgccataggatgtaattatcctaacattgtttcttaagaaaagacatcttaagttcaaccagcggggtcaggaagtggggtccctggcctgaacagtggcttatcttccttcctggatggctggcaggggcagtaggtcagtcagggcactgttccaggacccagtggcagtgtgggcagcactgtggtgagatgggaagagaggaaggaaggttcgggtgcttgatgtgcattgaaggggtcagggaagggggaattggctactggctgaggttctgacactagttggacagggcccgatgccaaactcttgttcttgttctcacctagaaattgccattagttagtgctgctgctgggcattattttaacttagaccaaggcagcccttttgcgtgggcaattagataacggcgcccactctggagagacacagtctgatggacacactacttcgtgggctgtgcctttgtgcaaagcaaaaggtgttctttcctccgtgccgctgtgctggctggatttcagcgtcgtttttcaccttggcctcgtgcctttatgcagtggacagatttcaggcagcttggcattagtaggaatctacctgaaaagcactttatatgtgtttgaatccttggcatgatctggtgatgatctggcagaataggtattaccatgatttgccagatgagaacgtcatggcgctgtgaactgctgaaggtcgcctcggctccattgctatctggacaggactgttccctgtacactccctctttcaaaatggaagaggcagctagaggatttcaggatacatttccctcagttgtttccttctgcactaccttctcatctttcatggttgtattaaaagtggggcctggcacagtggctcacgtctgtaaccccacactctgggaggccgaggcaggaggattacttgaggccaggagttcgagactaggctgggaaacacagtgagaccctgtctctgcaagaaaacaaaaaaagtctctaaaaaacaaaacaacggatagactgatgttggttcctatttggatatgtgtggcaattggtggctcttactgaccccatagctctcattcaggtggtttgtgtgatagtgggcacaatgttgttgccaattgagttgaaaatgctgtcatgttgaaagaaaacatcggaaatgagagggtctgggtaaatatattagtagtatagctgttgctttgtttgcagtctcttcacttacattactttcatttaaaattaaccataatctgttaaacttttacttccaataatgtatgggttcaggagtcttagccaaagtcaatgtttttcacaggaagtatctggatatacattaacttttaaaattgtaaccagttagtttcactataaaagttagcaaagtgtgaatgaattgatcgcttgctaatctggagcacacaagggaaattaattttagatggagaaaatatttcctaaaataacagagggaggcagagagctaggtgtatgtgttgggcctttcaaatatattatttcatttactccctaccataattttatggggaagatataattgtcagtgtttcatagatgaggatatgcttgttattagttaggacttagagtaagttttttatcatatttaaaaaatgccccatctaattctgaattcttacagagagccacataggaagtaggattttgaaaaagcaaaaatcaacaacaatgcagagaggaagaaatgagtggattggtaagataaggccatgggtagttcacagaaactgcttgctttctctaacatgcttgctccctttggtaaactttggatgcatatttgtctcaaagtgtcatattagacaaagcaataagaaaatggttagttttaagattgacataattcataaattctcacaaatacatttgatgaaataaggcagtttgtgtttctcctggtcctgaggacccccaaaactcagaacctcataaataggacagcgaatgatatggaggaagctatttcttcagctacatgtgataatctagatgaatagaactctcatttgtggcatcccatattgtaaaccagttacagtacagaaaatcattttaaaaaaagagagattgcaggaagttcgccaacgatttgccttaatcctgaagccaatttaaacattccaatctgatatatatatttattttagtttattttttttgagatggagtcttgctcttttcggagtgcagtggggccatctcggctcactgcaacctctgcctctcgggttcaagcaattctcctgcctctacctcctaaatagctgggattacaggcacccaccaccatgcctagctaatttctgtatttttaatagagatggggtttcaccatgttggccaggttggtctcgaactcctgacctcaagtgatccacccacctcggcctcccaaagtgctgggattacaggcatgagccaccgcgcccagccccaatctggtatcttgataaattaccaaattgttgtaatagagattagtaccttctcttacctttctttttataaattaattttttaaaatagtcctcagactttcctgtcaaggaaccctttgatagttgatcatattgcatggtactttttccattgctttatgtaaatttctgctctcacagtcagtaaatctgaacataagcatttctttctgggctttgttctgtcctttcctttcctggaaatagcttccagatgggattgttttcttttgacaaacctcacgactgtatgtttcaccattttttgacctattatctctttttgagtttcattttcggcttaggtactctgcttgtaggattttttttttaacaccctgtgatatatactgaaaatactttgcactgttaagagcctgtacaataatactgttaacgatgaagtgctgtggacttctctgtaactcccaattcttcaaaggaaaattttccttcagtgtattccatctttcttacttcttcaagtttatttagggaataccaagaaataaagtgttgcttagtttaattcctttataatgtctttatttttatttatttatttattttctgagatggagtctcattctcttgcccaggctggaatgcagtggtgggatctcaactcactgcaacctctacctcctgggctgaagtgattcttgtgcctcagcctcctgagtagctgggattacaggtgcctaccactacgcctggctaattttattttattttatttttgagaccgagtttcgctctatcgcccaggctggagtgcagtggcgtgatcttggcttactggaacctctgcctcccgggttcaggtgatcctcatgcctcagcctcccgagtagctgggattataggcacttgccaccacgcctggctaatttttgtatttttagtagagatggggtttcatcatgttggccaggctggtcttgaactgctgacctcaagtgatctgcctgtctcgggctcccaaagtgctgggattacaggcgtgagccactgcacctggcctataatgtctactgaaaataaatctagctgggcatgttggctcatacctgtaatcccagcactttggccggcgtaggcaggcagattgttggagctcaggagttcaagaccagccttagcaacatggtgaaactcctctctacaaaaaatacaaaaattagctgggtgtgatgccagcacctgtggtcccagctacttgggaggctgaggtggagggatcacttgagccttggaggtcgaggctgcagtgaactatggtggtaccactgcactccagcctggttgacagaatgagaccctgtctcaaaataaaacaaacaaaaataaatttgcttaaaatttttttgaattaaagttaatttttataatatttagttaggtttttttttttcctcattattctttcacatttttccaggttaaggtacatgaattttactcttttaatgttgtggcccagggtagtctgtctgccaatcaggctgttaagttgtgggtctgacattttccttggaaatgctgtttctgggcatgttagactttctgtacttgtgtgttgccttttggcagagacttcgacacttaaggatttgttgataaaatgacaaattgtttcatgaggcatttacttggtactagacatttagatgattgtttctcggaataacttggttgactaacatctttctgcttcctgtcgtcatgatcacttctgcaaaggacgaagcctagtacattttctggtagaatcttatataccataagatttagttgaaacattgtatgtttctatcttcagtttttggtcccaagttattttaagtaattttttctttttctgttgcccaggctggagtgcagtggcgccatctcggctcactgctaccttgatctcctgggctcaaatgatcctcccatctcaaccttcagagtagctgggaccacaggcacatgccaccatgcccagttaatttttatactttttgtagcgacaggctggtctcaaactcctgagctccagtgatccacctgcctcaccctcccaaagtgctgggattataggcatgggtcaccatgcccagacttaagtacatttttttttttttttgagacggagtcttgttctgtcacccaagctggagtgtaatggtgtgatcttggctcaccgcaatgtccgcctcctaggttcaagcaattctcctgtctcagtctcctgaatagttgggattacaggcacgtgccaccacgcccggctagtttttgtatttttggtagagacgggctttcaccgtgttggccaggcttgccttgaactcctgacctcgtgatccgcccgcctccgcctcccaaagtgctgggattacaggcgtgagccactgtgcctggtctttaagtaaatttttaaaggtgtaaattctgcagactcggataaaaataattattctattgtgtcttaacagatcgttataattgtgaagattaaatgagttcaaagtatttggctaatattgttaggggctgttgcttttgttattattattactattactattacgtcctggcttcattcctgctctctctttccctctttgcatcattgcctctgactatctccaggctgctgatagtgagaggggccgtctcccaatccaggttaccaggtctggatgaatggactctgacccacttttctggccactggaattttgcctttgtgaatattataaatagtaatatgtatacaaagaatgattatgaaataatcaattataaattggttggaatgtgtctgatgctcagacatacacacacaatttgacattctggttagatttctctgtgcaggaagcaagggaacaacagagcagtgagaaatcaaaggagagaagggtattctggggcaaaggacagtttccataggtagaattacagaggtaaaaccattaatcaaaaaaaactagtgcaccactcactcgatttttccaccccttcctttcagtcgtggtctgagctttcgcattcaggttgaagatgaactagcatgtgcctcatttaatactgggaacttttatttacctgagtctgctttttgaaatctgttaagtgttgagtttctatttgcaccttattcaccagatttacttattgtctttccctgctaatggggatggagtggggggaggtgctcgtggcaggcactcagacaagctcgctgtgcagcagtggctctgagggcacagctgtttggaatcagctgatcattttcaagcatctctagctcatcatattaaacacagttgcacacgtttagtggttgcttaattttaacctgaaacactgtatgaaataatttgatgtataagaagtattgtagtgataagaagagtagcttaatggtttttcatgttttctatgccagccactatttaaccgttttactatttacaaacacacacacacacacacaaccatatacacccatatctgggtatatgtgtttgtctatatacatacatatatgtgcatgtacacacatatataaattcatttgatcctcacaataaccctataaaagaggcacttctattttcgcctttttacagtcaggaagccaaggcagagagtgggtaagtagcttgcccaacacgggtaatgagggacagaggtggagtttaaacccaagtagctgtgccatatcttttttttttttttttttttttttttgagacagagtctcgctctgtcatccaggctggagtgcagtggcgtgatctcggctcactgcagcctctccctcccgggttcaagcgattctcctgcctcagcctcctgagtagctgagattacaggtgtgtaccaccatgcccggctaatttttgtatttttagtagagacagggggtttcaccatgttggtcaggctggtttcgaactcctggcttcgtgatctgcccacctcggcctcccaaagtgctaggattacaggcctgagccactgtgcctggccttttttttttttttgagatggagttttgctctatttcccaggctgaagtatagtggcgtgatctccactcattgcaacctccgcctcgggttcaagcgagtctcctgcctcggcctcccgagtagctgggattacaggtgcctacattcacgcctggctgatttttgcatttttagtagagatggggttttaccatgttggccaggctggtcttgaacttctgacttcaagcgatccacccgcctcggcctcccacagtcctgggattacgggcgtgagcacccggctgcccatactcttaatcactaccctggagtagttctcagtgctgagcctctaactccaagcaaatgataattaaataattaccacaatatgcccaaagttattttattacaagcaaatttatgaaatgatgcagttttttttcacatggaaactggtttcttttgtttaccttggatggatgtttgtttgggagttggctgttttcatttgttaaataaatattttagttgggtgtttgtgtagcaagtgatcttggtggctccctgcagtgtgtcctgcactggtgagcacctggtgagcattcactgaatgtgtctgatggatttaccacactcatctgtgaacctgtagctcagctaatccccctaaatctgtgagtggcccttctcagctgccctgcaggggactttgtggagcaggaatttattttgaccagcaaactacccttgtgactcatcaccaagagcttctatcattctctagcaggatttggaaattaaagacactttgactcagaaatatcttccacacagggactcattaaatgaaactaacatcctggtgggcaaagtgtaggagaaatagtaaaagtggatttcggccgggcgcggtggctcacgcctataatcccagcactttgggaggccgaggtgggcggatcacgaggtcaggagatcgagaccatcctggctaacacatcctggtgaaaccccgtctctactaaaaatataaaaaattagccaggcgtggtggcgggctcctgtagtcccagctactcgggaggctgaggcaggagaatggcgtgaacctgggaggcggagcttgcagtgagccgagattgcgccactgcattacagcctgggtgacagagtgagactccgtctcaaaaaaaaaaaaaaaaatggatttcatgggccattggaagtcactgtcttaagcagtgctttgtacctggggactccatccatgtgtaaaggattagtgagcaggatacacatagggaaatgtgtagggagtgtgtgattctgatctttttagaggcaaatccagtttaaatgtggagagtggcactattttggcttcctagcaattccaggtctaatgcttacatttaagtaacaaagatgtttgcattgatgaagcataaccttggcaattcttaaatttggggattggattgactatatatatgcccttcagtaagctattaaatcatcatgaccactaggtaaatggtggattaactactataaagattatttatgagtattccaacatcattcatctccatccccttatcaagattaatagacaaattattatcatttgaatgagagccagaagagccctccctccctccaattaatgatgggctggaaaagagcaaggagatcactttttgtgataatctgttttaaatgttaggggattttaaacattcttacatcagaatccatgaagcacaacattaatatttattttgcttaaaagtttgcagtcatttagtagcaattacttttatcttttccttaagctttctcaaaaacattaaggtttaaagaaaataaaagaacactttattaaaatttctctctttctcttccttgttctctctttctcttgcttgtttttttggtcatatattaaacatatatcacgatatgggcaaaatattttttacaagcttcttgactgccaggggattaatcaaactggctgtatgtgtccttttaaaccaagtaatttgggcgaaagcttgcaattttatgaatatgctggaaaatcttacctttattagcttgagaagttttctccatccttaggtagccaaagacaattttactcggttttgtggggaacattggtatcagaggtgaagttctttctgatctgcaaggtggccttgaaattatttctgtatttcaccatattactatcaacaacatttgttttcctttcagccaggatgagaattgctatctgttttcagaacttggaggcagacctttaggggtcagagaaagctgagcatttgggttctagaaacctttacactgggtgtatttttatttcattgttaatatctcgatatagatttgctttaatacatataggtgaactttgagcttctgtatttattttggcatacatttttagagattaaatttatttaaatttttaataaaacattaatgcaatttaggatttttagtacatgaagtaaaagtaagtctgcatcgaggtccccaaaaagcaactgtaatttggctgtattgatttaccaagtctaaagtaaaatttcacatttgaaaataaaggaaaggaaatgtaattttatgctatgactataaaatttctctctataggaaatcactgcatatttcaaattggacttaatcataaagagaataattaactgacagttacagctgatgttattaatattactgtaaaaagtctgggtttggccataaagtatttagcaagactaccttttggaattcaagactatgagaaccacgtcttgcttgcacactgctccatgtgaaactcagtgccaggctcatggaaatgggaccattttaggagtcttcctgtgtataaattaaagagagcagaacttacagttaaaagtggtagagcaatttgtgtttatcattgcttgctgtcatgttgctactataattacaataagagaacaaaaaggaataaactcctgtggtcaaatggaagtggaaatgaaataaccattgatggggaagaaagacgatggtggagtggctttcttatgcatctcacagattttgcaagccctctgattgaaagttgccaggattgtttgaggttggttcaggggaaagtgggagaagtttgaagctgaaaactgagagtttggttgagaatctttaaacagcacactttgactctcagagctttccccttcttcctcacctgcacaggagaacagagatttatatattttttctggaaaaactgaattccaacttgggatccttagcccagagagcatggcaaggctctgaatagacatcaggaagattaactgacaccaggaggtgccccagttcctgaagctatacctgtctgctatagcttgaagtgtcccccgaatttcatgttttggaaatttaatccccagtgcaacagtgtttggaggtggggcctaaaaataggtgattaggtcatgagagctctgctctctttcttgaatggattaatgtcattattgcagaagtgggttagttatcttgagaatggccttgttataaaagtgagtttgactctctcttgcttacttgctgtcagtgtatcctgccctttcacctttttccatgggatgatgtagcaagaaagccctcagtagatgccagtgccatgcttttggacttcccatcctccagatccttgagccaaataaatttctgttcattataaattacccagtctgtggcattctgttgcagtagcatagaatggactaagacagcctcccatcgctgatcagccaccaattaaagagtgcttttactgggagtacagtatagttacagcacgtaaattgattaccttactttgagcccaccagttggtaggtgacacccaagcctatgcattgttgagcctcattttgaaatgggaggggctgctaggagtcagcagatgtttgaaagcctccaccagtagaccttatattaacacaaacaaaaggaaggagccacttaggggaaataggaatgtggcctgtatcctcagagaagtaggaaaataattgtgtctttgaaacaagaacagaatgtgataaaaaaaaaatcagagaataagaaagagatcttggaaattaaaagtgtgatatcagaaataagatctcaagtagagattggaagagtggatataaaagtgataagtaaaaaaagtcttatagataatgtctgacttgcaatcaggaaggagtttataagcatagtatttagaaatgcataatctattgtcagaagaaacagataacagaggaaaggggatgcccaagcctgctgcattgtgttatcatcttattttattgaaaacaaacttaagtgcatttattacttggataaaaattgagaaatatataatgagatagactgtagaaatcattttattaaaacattttattgatagtacagaaaatgctgtactgttactttttttggcaatttcataaagctctgtgaataacatggtcccttagttttttttttttagtagccctcttttctcagcaccaaattcttgctgttgttaggcatagtcatcctaatattttttatactttctgccaggcctgagaagcttcatggctttagaaatcatctaaatcatcacattgtgtgtgtggctgtaaatatccaaattattttgaggcaagtttctcctctgatgtgacggccatgtattttccatattgctgatgatgatgggagtgttttctctgagacattttacacttgtggtatatttagctcactagtaatgaattacaaatgcaaggaacttggaatcctgaatgaatactaggagcgagccgactttcaagctgaaatggtctctttccaacattttctggctgatacaccacttttaatagtaagtggcttccttctgctcttctccatcacttgcaaccatggatggctgttgtggtaacacggaccctcacagaatcttagatctggtagatgctttaaggggccaaccagtccagttattttcccctatccctgaggaatcccactcaaggagggagaaaatgattttctcaagatgcacctgttcctatgagatgactaggggtccaaacttggcattctttctgcgtctctaggccacctggacctgaaggacagttctgactttccttcaaatctcatgccgttgttgatgctcgtctggtggatttgtacctgagaagggatgtttcgggagggattttaggcttctgtctgctgtgtgaagccgagggggttttgtgaatattctgtaagagatgtgacgcctgtggatgaaagcagacagatcaggccgaccttggcttggagtctaagttttagagacagaaaacagggagggggtgaaggagaggggaaatgggaggaggagaaggaggaggggtgccaggatcatttcttttcctgttacgcattttccttttggcgggagagagtgagaaagctcctgaatgtaactggagctgctgaactgaactggtcagaacctgtcctaatttgtgtaaaagaaatgctgtggtatttattcttccagagaagcccacataacgcaaccagggcctgctggctgcccttgaggttctgcagagcttggttttggtgtcttctctgagcctgttttctgctgaggcagcccctgggtgttgcccactggcctaactccctccaggctcggcctttcgcctctcatcaaagctcttttttccctggattttaatggttggctgattaaagtagttcatagtaaggtgttaattataactctttccggtggttatgtgcatatattcacagagttgttacagaagtaaggggactgggctgctcatggtggctcatgcctgtaatcccagcgctttgggaggccgagtgggtggatctcctgaggtcaggagttcgagaccagcctggccaacatggcaaaaccccgtctctactaaaaataacaaaaattagctgggcatggtggcgggtacctggaatcctagcaactcgtgaggctgaggcgggagaatcacttgaacccgggaggtggaggttgcagtgagccgagatcacaccattgcactccagcctgggcaacaagggcgaaactccgtctcaaaacacaaaacaaaacaaaacaaagcaaaacgaaacaaaaaacaacggaagttagatggggctgaatttccaactgctaggctagaactaggacaacactgtgagggaaatcggagtgtaatacattccgcaaccccacctgtctactatcgcaaccccacctgtctgctatcctccctttgcaagcccagggccttgatggttcaaggatgagtctttctagaaaaaagggagagaagtttctttccttttttttttttaaacaaaagaaaaacaaacatgtttattaagatatgcgtagtgcatacacatgggagtacccagacatgagtaattcaaagggttggttagaactgggcttatctagcatcttaacaaaggaacgataactttttagagaggtgatgaaacaaaggaaaatgactttaagcttccaggtgttaccagaagtttcatcaaatcaagaatattcttaggagtgtcaggggtgtctaatagttgagctgttaagtaactcttaaacttgttaatgtctcttgggaatttcttcttttagagttgttttgtattaaaaccaaggaaataaatatctttatttgttttaaaaatagtatcttaatttattaattttgtttattttgcaaagtctttttaaggaaatattatttccttttacaatgagtaaaaatacattcattcagaacaaaatataattgtttcttggtgcatcagatgtttatatctcatgatagtgatctgttaatagatcagggtttttattctttatcttcatccccccttcattgcccccatagactcctttggcagtttagtgaagccagacaaatttttttttgagacaaagtctcactctgttgcccagcctggagtgcagtggtgcgatcttggctccctgcaacctctgcctcccaggttcaagcgattttcctgcctcagtctcccaagtagctgggattacagttgcaagccactgtacccagctaattttttgtatttttggtagagacggagttacaccatgttggccagcctgatcttgaagtcctgacctcaggtaatccccctgcctcggcctgcaaaagtgctaggattacaggtgtgagccaccgcacctggccttttttttttttttttgagatggagtctcactctgtcacccaggctggagtgtaggggggcgatctcggctcactgcaacttctacctctcgggttcaagcgattctcctgcctcagactcccgagtagctgggactacaggcgcacgccatcatgcccagctaatttttgtatttttagtaaagacaagatttcaccatgttggccaggatggtctcgatctcttgaccttgtgatccgcctgcctcggcctcccaaagtgctgggattacagatatgaggcaccgcacccagcctgacaaatatttttaaatgcataaaatagagtacatggtattccatgcatacagttaccaaaatactgaaaaagtctgtgagagagtagtatttgctgtttcattagtgtgttcagtaagaacttctagcatctctaacctctctactcttctgaaataacaacgagccaaatggtattttcaagatacctgctagagttgtaaggtgatgtgaaaatggttatgatttttgctggtgacacagtcaaagctaccactaataatgtgttttgtgatctgccatcacaatggaaggaaatgcaaatttctgttagaggtcagtgaaaagatctaattgcttttcctgtccaagttcatggaccccctgcctggtaataacccctgataaagatgatggcttaaaatgagtatttgtttccttaaacctcagcagtggcagcagtgtgccacagagtgtttcaaaagagacaacaattttaaatggaaagtagtcttgggtgaatgccccatatggcaggcactgcactgggtgtagttgacaaaactgatgagctctatgatggcatctggcctcttgagtgtgtagactagtacgagaaccagacatcaaattgcagagcatacaaatagttgtttaactgcttagagggtagacattctgcagtgctgtcatggcaaatcactcggggacttcatagggacctggaatgagtgatagtttgagtggtcagggaaggccttcttgaggaatctattcaagtccatagttcaaggtggtggagggcactggctgaaggcagagctgtgtgcaggctctaagctggcagaacttggcccacagaaagcctgattgaggccggtgattgggagtgaagtgagcagagggctgtggattaaaattggcagaaagatgcagtctgcatttcactcagtagtatttcttatcctgattgaaggggcatggtttacctcttagtttgagggcatgtattatttagtgcattaatggatggatccctaaaagcattaggaattagtctggagtatgtaggttgaaaaataggttataaaattgatgagaacaagctctcttgcaagagttagaaacataaaaacaaatttttctaaagctaaattccttaacatttttcctcactcagatttctatttggcttgaatctaaggaaaacctgagaagagaggaagtgcttggcttctctgtataccaagcagtttcaacagtggtgtttgtagaaatgcataccttgctgttcctaggcagataagtgttgtcacacgtcttcagattttaaggcgacaggctccacacctggcagaggctcagacagagcagaccaggattgggctattcacagaggcaggaatgtgaccattctggtccgggcagttggggaggaactcatctatccacggttcccatactgtttggccctgtttttcaatttgactccatcaaagcacattctccagccgaggggtacacatccctttgtgacttcagaaatcatgcactgttggtttgggagtcttaactacatttggaggacacgctgagccgacgagaaatggaagtgagatctgaatccacaaacggagacggcagacagtcacaggcaggtaaagactcattgagaatgtggctacttaaattttgtccacctgttcattgaaaggaagccgaggcatgactctccgccaataattagtgtgaaaattactgagttaacagattctaaattattttgtcctctgggtgacctaggaagtttttaaaagacgttttttctaaataatgtcatgaaataagatagttacatgtaaagaatctaacaaggtcagtcattaaaaacattttctaaatatgatttattttgcttactaaccttgtaaatcatctaggataggaccactgtcagcctcagagcctggcacagaacttggcacttaatgcgtgtttgttgaatatgaatggattgggtccagtgtctaatgatacgctatgaaagttattccatcacttctccgtgatggaaaaagatttaccgaaaagtgtctgttgtatgaaagtcatatggggtagaaattaaactgtaaatgagttaaggagctgtaaccttggcgctattccaaatctccaacaattgagtagttaattagtgcccctgcatccatttaatttgtccatttatctcttggttcgttcactgtcatttatttctctctgctggtgccaagttacgtgataggctgctgggaggcagacaagcaagatctctgcttgcaggctttcaaacgcagcgattcagcagcgtggtaagacgtgtgctcatgatacatactatgtgctgtgggaccacaggtcaggaaggataaactcccggagttttgctcttcctcagagggtcaaggaatgtttcccagagaagtgacttgcaaagtggtagagaggaatgtggaagggaagaattccaggctgaggagaaagtgtttggaaaggcaaatattcagtgaatcatatggtgagatgccattttcaaatgtataatgcacctccttgctcactgtccatcattgccccatccagccacactggtcagctttcagctctgggaacaacctctgtttacagggtctttcctccacctggaataccggcccccagctcttggctatctccttctcctccttctgggattgggcattggatgaaattgcacctgcttagagaagcctgtcctgacacccacctgaagtagattttgtgctgttgtctccaccatccacacttgtcaccattgctcattgcttttgttcacttgtttgtttactttagtgttgataggtccccaagactgtgctctccatatgggcagggaccaaggttgtcttgttcacgattgtgtccatagtgccttgtacggtgcctgttctgtagggatgatagatccttgtgaatgaatgaatgagtgaatgaatgaatgaaaaggcggagtcacttaaaagaacaaaagcatttgtaatagacttgctattcctgtttattctttgaaatttgaggtaattcttaactagccacttaggatctccattaagaaccctagtcaagacctttgggtattacctcaaagtaaaacaaagtgggagtattttggatctttggaagttaacttgaaaaaatctaaggattctttaaattgaatatatagggaagagagaactcctactcagaatacttaagttacaaacacaagaaaaattcatagattaaaaaaattgaacaaagagtatcattaagtcaaaccgtttttaatagtaattttgtaaagttatttatgacactattttttatgtatattctcagttctctaaaacctgataattttggtgatttactcttatctgtgctttgaacactttattcttataattaatatcattatttttaacttactgaaacctttcaacttacgtaatcagtaatgttctcatgctgatattaaccttttatttatttatttatttatttatttatttatttatttatttatttgagatggagtctcattctgtcactcaggctggagtgcagtggtgcgatcttggctcactgcaacctccacttcccggattccagccaattctcctgccttagtctcccaagtagctgggattacaggctcccaccaccacacgtggctaattttcgtatttgtatttttagtagagatggggttttgtcatgttggccaggcctgtctcgaactcctgacctcaggtgatccacccacctcggcctcccaaagtgctgggattacaggtatgagccactgagctcagcctgatattaaccttttaattcaatacagtcttcccataacagaccttctcccattgatgggctcatttttattgctctttgttctctactgattctgtcagtttttagagcccataaaatagcttcatttctataccgtcttattcacattcagatttttcatatagcatgtcacacacagtataagacattttccataacatattatgagttgatgatttctgtcatgttgaagaagatcatacagcaacacttatcttgtaaattctcttataatgccaggtaaaaaaaatgttatgtgaaatggcacattgaaagaaaggaaaatctaaaggtggattgcttaaatgattgtgattgtttttcccattggatcttctgcagatgagaattccctgcatagatcacccaaggggtggcagatcgggcttctcagtttcagccaggggtggacggtttgcatctcctgatgtgttcatcaacaacatgatgaagccagtgtccttggctactgattccaaccttttgttctgttcttggagaaatggggaaaaagatacacttatatactagtgtagattttggttatctttatttgtgaagaaaattttttgtttacctctcattttattcattcgttcagtaaatatctcattttattcattcgttcagtaaatatttatccacccacctactatgtgctaggcactgtgatagtcactaggtattaaaaaagtacattgatgatcgatgctaagattattttcaaactattttaagagaggactcctaaattaaaagaaattatgtatcaacagacaaatgcccttttatttttttccctacaaaattgctgctggctagagaatgatgatgatttgcacttctgacatcattgcctaatgttgggtttctgtgcctgggctctttatgctgtggaggcaaatggtgctttgagtgtcttaatttcaccggaatgctgcacctgttgctggctattcttgcatatgaaatccagaccctagagtcacttgctttcatttccttttcctcctccctctttccggtgtgtgtttggggggggtgggggtggtgaggcagggtgggggcagcagattagtagcttctgtgaagagtaaccaccttcctgttccgtcaaggctatgattttagcgcccccgggagtggtagtgttgcgtcactctgtcatctgtcgccgaaagactcataatccgggcagcctcaagagtttgaggcgtgggtttgtgcccgagtttggggttctaggggaggggtgaagtggaacaggctttcagcagctgctgccgccacctgatacctggaaccttactgctattgaggaacatgtatttcctcttggcttcatttgctgtttggctatgactgaggaagacaggaggtattgcatagtatcatttactttcataaacataactttgacatctctaggcttcatgttggttcaggcaatgctctcgaaagccagggagctgctttgcaagatgcatgctatggctgaaggaacggctcaatagctgggagctggccctgaggtttaaatccactcacagcacgaatttggtgttttactttgtgtcctgaaacctcaataacctcatttttcaagtgagagttgaaatattgacacaacttaacttttaagaattttgaaggcatcagtgaaaataaattgaacgaactttgaagttcagagatctctaaaagtgaatacagaccaaattatatcctgatgatcaagtaggaacatccgtagttccagtactatagttcattgacaacctccagaaagttacggtagtctaacattccttatttaaaaccaactttgccatgtttaatttatttatacttttatagatagacagatttactactggacattctctggcagagaaaaatttcatggaaagtgaagtttaatgtgaaatggcacataagtggtcctgacttgcaaactcaggaatggcttgttgaccactgtcctggaataagagagcccagctttgttcttgtcttatttctggatcgccctttctcctttgtaccttctgacattgtttctgagttccctcctcccatctgccacccgctcctttgcaactctgtagagcattttaataacaggttgtttgtgcctgtcttgcctctgcagcactcactcccacctgtttcctcagcctctgacttctcctttcccctttttggcatgctctgacctgcctccgtagttgaacccgattcctgaggcaatgatatggcaggtccctcaactctccatctatagcacttgccttgcctggcctgggaaccggctctttcactgctgtactgcatggaacagagtaggcactgcttaaacctatcagctgcctggctctctcaaatgctctttccaggaactctggcactgtgaacccactgctgaatctcgtggctcataaataaactctcaagtgataattgtgacttgaattctctagttcttacctgaccacctcttaatatcatcctggaactgtctttatatcatcttggaaaccctggagctgatttgaaatacctctggtcagttcctcagcatcagttctgtctaatgaacacctatattcttcattgtctcctcactcttggctctaagttgtcacaagtagatgattatgtctcattcccaagtagagataggacacatgagagtgggtgggtgtgcccatagtttagacaggactatctttgtgtggtaccagctgcggcaggatctacagatgactcacacatgttaatacccacatcttctgagtggccaacatcctcagatttgcatgtgggcatttgcaagaggaagcacacagatgctgtgatcagggctgagatgcctacaggtgtgtctgctgggctgcggcaggtggtggccagtggaagacaggttgtaggtagggaaagtgttgcctcatggagggtgatcctgatatggtgggaacttcaatccagactccgacatcgccacgggcaagctgaatgacagtaaacaaccttcagggcttggggacgtcagcacactcacctgtggagagccagccagaagacaggcagtggcacaagttttctgaggtagagattgtgactgtaggtgaccaaggaacaaaatattatgaagaccacattggggttcataggctggtggccctgtaggacacttggacacattttttttcctgccaacaccaaagaataatttctaggtgtctcttcttcacaccttcccatgaagcttgaaagttctagagctcactagaaactagaaaaattttccttactatgacagcaagtgtgcttcgagaaaactcacttgctgacctttgttccacagcccagcaggttgccacctgatttataaaaacagattatggagacagtccagaaaaattactccctctttcttttttttttaaagtaatattttaaaattcctttctttttgaagtatttgggttgtttttatcaatttcgttcactgttgccttaaatgacaattcttgcctccctgaagaactcttggccttcattcctgccactacagtgagaagttctaagctggaagggccatcccagggatgactgctttaagcagccagtcatgtagggttgcgcctgtggccctggcagattggaccctgtttctaccaagtggtggcatcacttggcttccatgtagtgtttttctgttctcctgcagatcgctgtcagccactggaggcctcacccactgggttccagacagctgccacttctgtttagaagcaacactgccagtgagaaaccctgccacacacaacacacacagacacacacacacagactcacacacagagacacacacacacagacacacacacacagacacacacacacacaccacacacacacacacacacacacacatgtgagaggagggccaccctgggaggaaaccctgaattctcccctcttagcacactccttctatctactccttctatctcctggtagagggagaagctgtgtgcccctattactacctctctttacctcctcattaagggctttggtgcgattattgtctcccttttaatctcactacttgcatgcagctttcttgagaaaggttataatttaatcctgaaatacaacttctaggagttttctttttaattcatcattccaagtaggtgtctttgtctgtttccacattagaaaatgaaaccaatacttaaatatgatttccctgcttttattggcagctatttaagatctatgtctgaggtctggctccgtgtggtttggaatactttattgttattattattattattttgagatggagtcttgctctgtctcccaggctagagtgcagtggtgtgatctcagcccactgcaacctctgcctccctggttcaagtgattcccatgcctcaccctcctgaatagctgggattacaggcacacgccaccacgcctggctaatttttgtagttttagtagagatggagtcttaccatgttggccaggctggtctcgaactcctgacctcaggtgatccacccgcctcagcttcctaaagtgctgggattataggcatgagccattgcgcccagcctggaatattttctaagctctttgatgatggcggcttcgatttaactctctctgacttaattctgttgattataatgtcattcaatcccattagtatactcatatggaaacaaaggcatgatttcagattttatttatatcttcatgctttggaaaaacaatttcatgagaaatcactcagcccatgaagtaccatccttgacattacttttttgggtttgcttgtttttaaaacagtttttattggcttttgctttttataattttttgaaccataccaacagtcgcataatgagtatttttagacatgtgcttttaaaatcatgtgaaaattcttttaatgtcaacatgaagagttttgtttataatcattgctgtgatcaagaactgaggtagaatttcctagctggacacaaatgggttaaaaaaaaaacccgacatgctctttgattattggataagttgtattctaaacaatattactctgatgaagatattaaggggagttaattagattgtgagactcttgaggacagttgatgcctttttcatttttgcattcttcttgggtgccgtgtagttgatcagtatagtcatgggacttagttctgattgtagggagctgtgtgaactgcatgaagcagacgagactccatcctcgcatgggaaacctttaaggattttgaagctgggcaggtgcaggttaatagaaagatcactctgggctctgtaggagagtgatttggagagaagagcccctagaggcccagggaacattgcaggtggctctgccaggagaccaggtagaagatgtggtgagggtgggcgggagatggatgaaactgtggatttcgtaggtacagattcatcatccttcatctgtagctacactattgaagaagacctccgaaaaccagaaggtgttttatttgtagttcatttggcaagaaaacttgagtttgacctgaactcatttggtgttgaagcctgacttgaacagctgggactcttttaaagtccttatgtatgtcaggcatccttcataaacatatgtatttactgcagggctattaatgtgtttgattaggggaaattgccctggatcttgctgttttttgttttcactgtaatatatgacttgtgctatataacttttctcaaatgggaagagttctggttcagcagcacctctggccctagggttttggaaaagaggttgtgaaactctttgacatgtgtttacaggataaggttgatgaaactgactgataagaaatggaggcaagatctatggaagaaaagaacatttctggaaagactcaaaagttaatgatgacactgcctcattaacactgaagggaagtagaactttaggaggggtcagaaatattcattagataggcatgattcattgaaaaggatgcatcttgaatttttgaagtattgcttgtatgtgatcttggattgaattgtagaccagaaaaagggggcaattgcagaaatttgaaaaagacctatagattagttcatagatttgcatctatgtgaattgtctggttttcatcattgtactctggttatgtaagatggtaatatttgaggaagttggatgaagggaacatgagaactctgtgtactcttttcttttttttttaaccacttcttttataagtctaaaattatttcaagataaaactttgaaaaataagaaaaagaggtgtttgtcatatcagggaacagtatcattcatgatgcttttaggtagagagtatctatgagcagaagtctagttttctaggagaattcaaagtctagaagtgcaaatcgagtagaatttcagtcaggccttcaccccctcccaattttttctttttaaaaaagctgacctggtttctattgtaagattatctttttatattctgatctgagaaaaatgcttgactgtagcgtaatcatataaagaagagttctaggccaggcgtggtggctcacgcctataatcccaggactttgggaggccaaggtggacagatcgcttgaggtcaggagtttgagaccagcctgaccaacaaggtgaaagccgtctctactagaaatataaaaattagccgggcatggtggtgcccacccataatcccagctactcgggaggctgtggcaggtgaattgctggaatctgggaggcggaggttgcagtgagctgagatcacaccactgcactccagcctgggcgacataacaagactgcgactgcgtctcaagagaaaaaaaaagaagagttataaaatggagagctcatgggaagtgccataacttgtcctttgcatttagtctccctggtgttggagggtgtggtttggctctagttcttgttggtagctctgcagggcgaggtatagttgtattagttaggactgacagttataatatgatgttcaaagccaagaaggtttacagataacagggaagaatgaagaagatgtgtacccttcatggccaaggtcagcttgcctggattttgtggggctgatgctgctgggtgtatatttcctccgtggagagaggattagtttctgaattcctttgcttccctctctaacttcaacattacctcctgtagtttcagctaatttgttctgtaattctctctccactccaattctttctttccttttttgatgagagtagacctaggctggcagccagttgctattgagctataatagagctagtggtatgaacaaaatttgattactgctgtcaacactagattgaataagaaagcgcataccctagacagatacttgcaacataaatggtctattgatttcacaagaactagaaaatgaggccaccgtgtaatctagcagaagaatggatctgtgaatagagtgggtcctgacattgcacaacagttttcaaaagcgcccccctattgatctttttagaagaatcttcagataaactgattttagcttctgattttcctcaccatcaagtgtttacagaaacttcaatgaagcctttgcacttgtgtgtgttcaatggtttgcttttcctacatagaatctagtttggaagttatattggctgttacagaccttgtttgctcctgagctatcatgatatttccacttagcttaatatgaatgttttagaagtttcccactatggaaagttctatttgacatatgaaagttcaacggtcaatttcatagtcagctccacggcaagaaataaataagacaatggattacagagtatagccttgggacatgggaaattttttagaagatggatgagtcatattattaatacatgttgcaaggcccaaggccttacatcaaaaaataaggaaaaaagtttttattttttaaagttaatagccttctgatattttctttgttgtactttgtatagtttttgttctgtttagttttggggggatcaaaaaataaatcctaagatagaatgttttaggaaaaaggtaattaacatcattgtacatgaatttgctcaaacacagtaaggtctgaaaaaaaaagatctctttgatgttgatttgtttgaataattactattctcccagtactgcacttttgagagggaaggagaaattgttgctagtgtctaaattttaacttgtcttccttggctaccttcaaaatttgagatccttaatcttaaatcacatctggtctaacaattcttcctataaacagttatgactatttactgacaaaaggctgcttttattgtgcctgtttctatttcagaggaagacacataaagacaggtggaaagaactgatttgtaaagattgaaatgtcatatttacattcagaatttcatttccttaccagttttcagaagaaccctttggtagaggaagcagggccaacttctttcacagcctcttactatagatagaagtatgaaggccagcaatatttagctggtatgaacccatacagctgtaccaggaacaatgttgaaagtctttgattcctattggaaaatagccactgttaaagatggacaccttcaggacctcacttcagcattgtagccagtatccgttctgactaggtggtgcccacgcctcactggctgttctgtattttgaatatttagtcctgattctagaaatgacatttttgggctatggataaaagatgggtttcgatagccattaaggaaatgcaaatcaaaccacagtgaaatgtcacttcatacccagcaggatggcaataataaaaaagacaaataataacaaatattggtgaggatgtggagaaatgggtatccacatacactgctagtgggaatgtaaaaggatgcaactttggaaagctgtctggcagttcttccaaaggttaagcatagggttgccatatgactcagcaattctacttctgggtacacacatacacacacacacacacacacacacacacacacccgccacacccaagagacatgaaaatgtatgcccacatcaaaaacgtgtacacaaatgctcatagcagaattattgatattagctgaaagataaaaacaacccaaatgttcatgaactgataaatacataataaaatatggtctatcaatacaatggaatattttaaaaataaatgaaatacccatacataatacaacatgcatggacttcaaaagcattatgctaagtgaaataagctagtcacaaaaaaccatatactgtatgatttcttttatatgaaatgtacagaataggtaactctatagagactggaagtagattttagtggttgccttgggctaagggatgggggtcgattgtggtgatggttgtagaattctttgacaatactaaaaatcattaaattatacagtgtaaatgagctaattgtataatatatgaattatatatcaataaagtttgatgcaaaaaaagatcaatgggtattgactatgggacatcatctgtatcactgtgcttttcccggtctccctccctgtgacagtcctagaagacaggtgaagtcagcccgtccattttacagatttggagactgaggcttagagagagagagagagtattttgccagagtcatacagctactagtctaaggaaaatgcagagatgaggaggaggagcataggggaggtactgttagtttctcttttctgtatcatagtacagtagcaggatgagagacacctttgaattcaaacctgtgtgtatcctgacaaagatacatattctatgaaaagtctttgctaataagtagaagatttctatttcacaacaagcaagaaaaagaatgagagaaggactagaaagtagatgtgatcatatgaataatgattttccttgctttttgcatgtatgtggtggacacatgcagaagtgacagcaggagttcgagaccagcctgaccaacatggtgaaatcccgtctctactaaacacacacacacacacacacacacacacacacacacacacacacacaatagccgggcatggtggtgggcacctgtaatcccagctacttgggaggctgaggcacaagaatgacttgaacccaggaggcggaggttgcagtgagctgagatcatgccattgcactccagcctgggtgacgagtgaaaaaaaaataatgataataaagagagcaaggtgaccacaaaagagaataggctggaaaaatttgtctaaatggtggcctcttctcttatagctgcatatggttaagtttattttttccctagtagcgaattctaagggatgaagaagaaatccttttcagttttacttccccaaggtgtgtataactactatagtgaaataataagtccaatttattctttgaagtatagttaatatgtaacgaaactcctaaggccagttgtatacccagggcaaacgccttctaacatctttatttatctacgcagtgggtagggaggtgggtggagtgccccttcccagctgatactgtcaaaacaggaagcaaagttataatctctgtcataggaacatgaatagaggcccttagttgtgactattaaaaaaacaaaaaacctgcctaaggagttttcactgactacaaagtgtaacttcctctctggtgtttagaggaggtggggttaggtttagtcagatcctctcatgggaaaaataaaagccaccaaaaaaaaaaaaaaaaaaaacccaaaataacacaggacatcccagtgtgcagttcgaaggctgcttttgttgtccacttcctccacatctttttcctcatcatctaagcagatgtaggtgatgagcggcctggcagccaccacgtttcattggaaaaagtgcagattggatttgccagggcatgtagctctccaggcttgcaagcgattaccaggtaagtttgtcaacttgcacgactcccagccagtgaggttttcttaagaaacgtctatgaagacagggttctttcattcagttttgttaagtaacaaagcttaggaccaggctggtgacgggaacagacagcctgtctttcctgctgccacgtctgttgtggaccctcaagagtagagaccaacgctgtctgcttcacacttctcttcaggaagtgataattcaccagagttattagtttctttggaagaagccttccaggatccctatatttgtggtagcaaatatgcttcactttacctccctgtattttcaaaatagcttactctgtgctgtttactgccatctagagaagaagcctcctttgtggtgttgagtattggtagacctcatcccatattgtatttgatttactctgttggctaaaaaggcattttacttcttgaaatatttagttttgacctgagaaaggggagaataaaacgtttgtactttgggggacagtatgagtgctggggtttctgtttcagtgcaggcttgtctatgagacatgcatatgcataacttcatgcagggaaagtgtcgtgcacttttctctcgctgaagtttacttccggggtgacttagtttttctgatcagtttagatgttcatatcttgtttaatgtatacatgtgtgtactggttgtatgagcttttggaggggaaaaaccccaagtgatgtgttttattcgatcatacatatcatgcatgaatgttgtcactatgaaaaaactttgagactggttggttttctttttcaatgttttcctttcttgtggaattactctttccctcttaatgttttccttcttagcttcagtgaatgaggtggtaaggggttgtagcgttgtctctgcagagcaaattcaaaccaaaatgattggagcagcccatattttcttagtgaattgggtttcttgaacaagtggcataggagactggtgtgctacaattctcatcattaactgttacttctttcttaaataaccatgtgatcccaacacaacatcaaaatacctctcagggacctgaattaaaactccacgcgggccaggcacaatggctcatacctgtaatccaagcactttgggaggctgcggcatgaggatcacttgaggcctggagttcgagaccactctgggcaacacagggagattccatctctacaaaaaatttaaaaatcagccaggcatggtggcatgtgcctgtggtcccagctacttaggagactgaggtgggaggatagcttgaacctaggagtttgagactagtgagccacgatcatgccgctgcattccagtttggacaacagagggataccttgtctcaaaaacctgcataggggcagcaattgcaggcttgtggcctttcgaagatttcctttgattgtcactaaatcctctctctttccccaccattaagagtctctgtggtcagctagtcttcatcaaagggtcttgctacaaagggtctagggtaaccttaatgattgaaatcagaagacagctagaagaaaagtacaaacaaacctttaaataataagcaggctttggccgggggcggtggctcacgcctgtaatcccagcactttaggaggccaaggcaggcggatcacctgaggtcaggagttctagaccagcctggccaacatggtaaaaccttgtctctactaaaaatacaaaaattagtcgggcgtggtggcacgtgcctgtaatcccagctacttgggaggctgaggcaggagaatcacttgaacctgggaggtggaggttgcagtgagccaagatcacaccattgcactccagcctgggtgaaagagcaaaactctgtctcaaaaaaaaaaaaaataaaataaaaaagcaggcttttaaatgagtagctacagtgttaaatatatttaaatgctgtgctggttgagttctggttcatttagataacattctttcctgccctatgaccaatcaaaaggctttaggaaaatagcatttttaaaattaaaatgtatttcagtgcatgttattttaataaaaatagaaaaccaatgtgtacatgatttccaatttcacaagggcctagattctcctctcatcagttgctattgaactgatttttttgtgtgtgtccatagtgtaggctctttagtcatcttgttagaaataaggacattaaatttaatgttaaaaataatattttcagccaggcacaatggctcatgcttgtaatcccagcactttgggagcccgaggcgggcagatcacctgaggtcaggagttcaggccaggagcctggccaatgtggtgaaacatcgtctctactaaaaatacaaaaattagctgggtgtggtggtgggtgcctgaaatcccagctacttgggaggctgaggcaagagaatcgcttgaacccgggaggcgggggttgcagtgagctgagattgcgccactgcacttcagcccgggcatcagggcgagactctgtttaaaaaaaaaatagatctctatctctatcactatctctctgtctatctatgtatcatctatctatctatctatctatctatctatcatctatctatctatcgatctctatctttatccagctgtatcatcattttcactagatgctaacaataatataactgagataaaccaaagtttcaaaacaagcttgaaaatgtgaaatgaataatttggaggcgggactggccatttaggcatctatgaaggcccagatgactcatgtctggaaattgccactgctcaggaaaccactcctgggagccctgctcgttttgccatccttcctgctttcttgcctgctgacaggactctatgtcagctgtttcctttttagatggaagggttaaaagattcactacttgggtcccccattagaatcaccaacatgcttgtgccccacagtcagagatcgtgacttgattggactgaggccctgctctgtagcttgtcaaaagccagccaagggtgtccaatgtggagggtacaggggaatgtattcgtcccccactagactgaaagctccatgggagggagtagaggcagctttgttactgctgcctcctagcacctgaatgtgtgcctgatgtgcagaagaggctcagtagctgcttgtggaatgaatgaatgaattagttcctttgagtaacaggaagttggaagaagattggacagaggcttagttatggtctttgctgatgtaggagagtgtgctatgttaggctgaacagtggctgtcatcttggaagacactccaggaaaaggtcacaggggaacaggtggctgatctgggggaatgctgaacagacctctcagaagagacaaggctccagggcagtggtgtccttatgaggcaaggcaggttgagaactttgggaaagagaatttcatcaggggctgagtgtgtgtgtgtgaatgtggatgtgaggccagatggggacactcctgggagaatctcctgaactgtggcttattctttgttttttttttttgtttttttttttgagactaagtctcgctgtgttgcccagcctggagtgcagtgacacagtcttagctcactgtagccttgacctcccaggctcaagtgatcctcccacctcagtctcctgagtagctgggactataggtatgtgctcccatacctggctaatttttaatagtttttctgtagagatgggatctcactatgttgcccaggctggtcttgaactcctgagctcgagtgatcctccctcttggcctcccaaaatgctgggattacaggcctgagccaccatgcccagccgtgactcactcttaaaggagctcaagtcttttgtgttggaactccaggaggttgacgaccacactcatctattcagtcagcatttgctaggtacctagcacacgcccagctctggggaggtatggggatataaaaatgaaggtgatttgattcttcccccgtggaggttaggacctggaaaggatggtgtgtgaagtgaatgctaggtttgctggtggctgaaaggaaggaacgttgtcatctttgtcatatgttagggattgccagacccaccagttgactatatccaaataaaggaacacagaatttggagtgatcacagggcagtgagatttgtctgggaagatatcttaggactcgtgaattttttgcagatcttaataattatagagaaaatgagtaggtggttaggaagaccaggtaactataacttacagaggtgagagaatgagaattgttaagttgggagaaaaagagtagaaagagcgacatgtgaaagaaaagaatcggccggtgcggtggctcatgcctgtaatcccagcactttgggaggccgaggcgggcagatcacctgaagtcgggagttcaagaccagcctgaccaacatggagaaaccctgtctctattaaaaatacaaaatgagccgggcctagtggcgcatgcctgtaaacccagctactagggaggctgaggcaggagaattgcttgaacctaggaggcagaggttgtggtgagcagaggttgcgccattgcactctagcctgggcaacaagagcgaaactccatctcaaaaaaaaacaaaaacaaaagaaaagaatcttgggtggagaaaatgagaaatgggattaacatggtactgagcagttcttttttttttgttttgagacggagtctcgctctgtcgcccaggctggagcgcgtgatgggatctcggctcactgcaagctcctcctcccgggttcacgccattctcctgcctcagccttccgagtagctgggactacaggcgcccgccatcacgcccggctaattttttgtatttttagtagagacggggtttccccgtgttagccaggatggtctggatctcctgacctcgtgatccgcccgcctcagcctcccaaagtgctgggattacaggcatgagccacggcgcctggccctgagcagttctttaagggatgagacttggccctcaagatctgggtttccattacccctgccatcgtcagggtaagtcactgaacctctgagaaggggactcccaaccaggaggatcacaggatctcccaaccagggaggatgccccgggagagtgtggtcaggattcatgatgttacacattttaaagttctttgcaagctatagtaatagttccaggtaaataaatggaataataaattctgtaaaaattataaaaacctagtctgttgataatgggctcttttaggtagagtctagggtaggaaatcaaacattatattcatcatggtacttgaaatatatttaagctgaagctgtgcactccatcatgtttttgatatatttttccttggcattacttgaaaggcatgctcatgaaactggatttggatctgtttcatgttttcacttgcgttctctgacccctacttagagggcaccaggtgcttcctattctaaccgtttgcaaattcaagacttggttggagggccattcaggggactggtgtggggttagataggatctggacacagcgactccctcgctcctgctccagtattttgaccttaatttgaacagttcaatgaactggcaactgaagtcgttttttcccactgaactagacctttcattgttttgcagaggaagatgactcatagccaggttctaccattgtgctaaagtgaaattttagtctaggactaaaggaacacaggccaaactttctgtctgagctgcagagtattgaaacttagattgtgagctgggcaggaattcctgtggccctctgtgtggagttgctctcaaggaaaaggagcatttaaatacgtttttgactccaaatttaatttttagtaatatagttcaaatgtcctttaaaatatcttaagtaatcagactgttttctaaaaaaaaaaaaaatgtaatgcaaaatgaaaattctacaaagtagaaaactgtcatttccttcctctctccaaaaccattgttaatagtttcgtttcttctgctacccttgttttctatgaatgtaaaaatgtatgcctctatgggtgagcatggcttttcttttttgaaccaaaattgaaaccatcctgatttagtggcatcccacttaaaacattattaaaaactacctgtgtacatgtatcttcgcttacttgggcaattgctggggcaaatatgcttttactgttaaatcgtcatctacaacagatgacatgtagagagatgaaatgtagtctatagttgtttgaacttgcatttctttttttgtggaactgaacttctctgcatatgtttattggctctttggacaaattcgtcagtgatttggcttttcatgcattgctcattttcttttgttgcttggatccctgacttttatactcttaatgattccaagggaaattcctacaaaatggcagatttgggaggacttatttgaatttcttttgagttctaaaatggttaactgctaccttaaaagatagatattattttcagatatctaggacagaggtttgagtctttggacttagattctatagtattttctttctttttttggctgatatggaagacgtcatcatcccaaactgtgctgagactagtagttatttagatacactattttattacattttcgtatactgataaattatttccatatggatggtaagtcccagatttatttatgaaaaaaaccattttttatatattttatggaacatggagttagcagaaagatgctgtggagttaggcttaaaattaagccctaactattctgcctcctgttttggggctgttgtcagtctttaaaggtacatctttgtaaaattttttgaacataacttgacagattgcaagaaggattataataaatggtgtctgtttgtgttagagtatttcaagtcagtacaggaaaaaatacatttagatgctaagtgaagataagacattagtttaaatgaggccccgtatgcaccatcatattgaaaatttaccagtgtgtcctcgtccttcaatttagattcgttagtgatttttcacatcaaagcattgaagctgtaattctatgttgggttcatttaaccacagatccagtaaatggcaggaaatagagagctatacaggacagcaaatggcctgcagttgtgtggaggatatctttgtggcaagatgccccagatgttttgctgttttcaaagtttgctatcatttgttcagaaaggttttcattgcttgcaagcaagcaggcaagcaaaggaaaagggcacgcagccgcctcccctatgattctgtgctctttgcctttgatgccttatataaaaagctttatttagtctgcagagaggttatttctccaaatagaggtgaactgtcatagtagtctggaaacgtgatagatttcagttgaatgccgctgatccaaatactctgaaaggctgggctgtgtggcacttgtaagataggcaccttgcacagattcttccaggtcacttgcacatatcgccagtagaaatacctcatcagatagcgatccacttggcactctgagaagcaactcctatcacaccgacactgctacttttctcctggctcagccagtctcttgctgggaacctgctgccagagttagtcacttggcttctgccctggcctattttcttgttgacttctggattctgtgcctttagcttctccttggactcattggccattactctctttctggtgttagtagctcctagactgtgtttgacagaagaaatttattcccctagcaaattcactttctactgaggtaactctaacccacccatgcaatctagcatctgccaatactctgagacccactgattgttaatcagtatttattatctaactctgagtaacgagtgttatagcaggaaaagtagaatcttttttgtgtgtgtacgaatgtggtttaagggacttttggggatagaggagaaataaacaccttgaaatgaattattatattttacctttgcccatgtgaattctttaaaataattattaaattctcactttgcttatatgcattaaaaatttcatagtgatggtatttaaagagggaggttatggacattttgcaagttggttgaggcaatagttctcatttcccttttcatgtcccacgggacatgtcatatctgtctgcctccctcctatgcatttctcctgctgttgcaaggagaatcttatgttttatgatgaaaatttatttggtgactaagtgaagtgtgcactattcttttaaaaagtccttgagattgcattctgtatatttgctgaatttgttactaggccttacgctgcaacatttctgagtaatcaaatctaaataaaaataaaaggtcgttcaaggtaaatctatgtcttgattactgaaataaagtattgacatttatttcccataatttgggaagttattcagtaaataatatttgcctggtgttttataatgaatcatttttatcatattgggtttgtgttaggaagactgtcagcattgattttccagtagttttctaaattttctcatctatttatgtttcttcttcttctttttctttttttctttgagacagggtcttgctctgtcaaccaagctagagtgtaatggcatgagctaggttcactgtagcctcgatctccgggggtcaagcagtcctcccacctcagcctcctgagtagctgggattacaggcatgtgccaccacgctcagctcatttttcggattttttttttatttgggtaagagtctcgctctgttgcccaggctggagtgcagtggtgcgatctcagctcactgcaacctccccttcccaggttcaagcgattcccttacctcagcctcccgagtagctgggactacaggcgcatgctaccatgcctggctaattttttgtatttttagtagagatggggtttcaccgtgttagccaggaacgtcttgatctcctgaccttgtggtccacctgcctctgcctcccaaagtgctgggattttaggcgtgaaccaacgtgcccggcccttctgatttttttttttttttttaaatagaaacaaggtctcactattcccaggttagggtcttgaacttctgggcccaagtaatccttctgccttggcctcccaaagtgctgggataacaggcgtgagccactgtgcctggctatttatgtttcctaattactgcagtgctcatgtttctgtcagcttcaactatgccacacatgactaggaattagaaataagaaaacagtaaccagcctggccaacatggcaaaaccctgtctctactaaaaatacaaaaattagctgggtgtggtggtgagtgcctgtaatctcaactacttgggaggctgagggacgagaatcgcttgaacctgggagtcggaggttgcaatgagctgagatactgccattaaactccagcctgggcaacagagcgagactgtctaaaacaaacaaacaaacacacacaaaaacaaaaacaaaaaaaccaaggagccaaaaataaatgactcagtgaacatttattgagcaactgtggtttgctgggtgctgcggtcgttgttgtgaaggtgctgggatgttttaaagttggttttaaacttaaggattctacttactggcagcctagaaccactgcatatgccttgcagagatgatgatggacacttgtgtcctcacctgtgcagtgcaggcacatcagtgaagagccttagattctcattttgcaactgttttcacacttgggtatcggtttctagatctaaagcagtaaatgagaaaggcagtgggtgtgaatgctgctataaactgacaccctgacaataacgatatgcttgttgacaggctgattgcagaggagatgaaaaaataaagggcagaacaaaaaagtctcaaagctctgccccctgcgtcagtaggaagctgtattttgctactcaagtagactaacattggagaaataattagcaagtgaaaaagttcttccaccgaaaggacaatgcaagttaaggcaggtagtctggttttctgtgctgcagcatccaaccacgttctagaatcctgttttcatattttgttggacccaactggattaaaacaaagcccctttctctggctgggtagtggcccgagttaggcagtttccagtgctctaattggtactttggagccagtgtccagtgactttcagaagcagggtaaatgttcttggtattgagcagttctctgctggatgccgggcctgtcctcatggttcatgctgcccttagatcatcagccattcactcctatggtcggtcaaggacaccttctctaggaattctctgctgacttccaagtgtgggttgggtgcccctcttctctgctttctccttccctgcttggattaaattcagagattctaagatgtcttcatctgtcacaacattcatgatggatgttacccatcagtgtttttgaaaacgaggtctatctctgcacggtgttgaaagataggtggaacttatcttttaataatctcttcaggtggtcattgtgtatgtttgagaacctctcctttagaccatgagcctgaagaaagtcctgttcttgtctttgaatctttaaaccttccctagctcctggcacgttttttagttgctcagattttttgttgtagttcagtgaatgaggtagaattctggtaatttttttgttgttgttcggtgaatgagatataattcctgttaaaaaatgtgtggaaagcaggtatgcctatggaatccaaatccagcaatgtgatcaaaagccgcttgaaggattttcgaacatttttcatttctttcttttttttgagacagagtctctgtcaccttggctggagtgtagtggtccaatctcggctcactgcaacctgggctcaagggatcctcctacctcagcctccagagtagcagggactaaaggcatgcaccaccatgtcccactagtttttgtatttttggtagagatggggactccctatgcttctcaggttggtcttgaactcctgggctcaagtgatatacctgcctctgcttcccaaagtgctgggactataggcgttagccaccatgcctggcccattttttcttattgttttgtaaatcaacattatgtgaaacctaaaatttaatatggatatacaaaaatagcttttttattttcttgcccaagaaaataaactgtatctttattatttatatttttgccgttttgaaataagccttttattttagaataattttacatttatagaaaagttgcaaagatggtatgtaaagttccccagttaccactttttgccactgttacccagttttccccactgttaacatcttgttacccagttttccccactgttaacatcttacattactatgttacgttgatcacacttagtgaactgatatcaggattgttattattaaaggctttaagagttattgttgaagatttataaatttatagatgaaataatatttagaacataccaaattttgaattagaaatattttaaaatttgaattctttgattttaagaattaaaacttttgaattcttatatgtagtcatagttgggaatatatccacaaagcaagtagaccaattcttgtgagaatgattctgaaacaggtttttcagttgtcattagccttctggaacctcaaaagggggaaggttactttcaaaggctaacattcatttaatctatctgtagtactccatatgaatgacaatcattacttatcgacatctcaggttttgttagatatgatatttgttttaattatttatggtatattcaggcagaggtgctattcaaaatatttaacaggttggcataggcctcaaccacccagactgctgttcaagtaatcagaagggatgctggctggtgaatgtgtcagtcctattaactgacacatttctattaatgtctaaaatgtcctaaaaatgtctccagatattgccagatgtctcgtaggtggcaaaatcacttctggttgagaactcctgatataaagcagttagaacaggctggcactgctctagtaactgctttctaaatattcactattattattgttgttggtatctttcatttgttatttctgataacttttaaacatacactgcttagccccagcactttgggacgtttaggtgggtggatcacttgaggtcaggagttcgagactagcctggctaacatggtgaaaccccatttgtactaaaattacaaaaattagttgggtgtggtggcgaatgcctgtaatcccagctacttgggaggctgaggcaggagaatcacttgaatctgggaggtggaggcagaggcggaggctgcagtgagctgagattgcaccactgcattctgtcttgggcgacagagcaagactccgtctaaaatatgaataaataaataaatatatgtgtgtgtgtgtatgtgtgtgtatatatacatatgtgtgtgtatatatacacacacacatactgtttatcaagacatattaggatttctttatagttaaatcaccacatgcataaaaaataaagttacatttttttgtaagatttactcagaatttgttggagacccatagcctgttgtaggaagaaatgtaagttctatttttgagggagattttcagccttttttacttgccctcacctgccatgttcctgacactgcagcctcgagaaaggtttgagactgttggagcacatgggtgtggaatttgtagaccacttgttcttccagacttcctcacacccacccatagcctgcttttagttgatagtggctcagcaagggtaggagcctgtactttggctcataccaaattcccctcatttccgcacgatgatatgttattagtattctgatccctgttatttgttaagttaagctgtgcttcaggaatctcagaagatcacagcattttgttttcagtgacttcatttcataatatatgctctgggcaggtgagactagacttagagacattgaagcccaacaatttaatatccacaaatagtgttttatttgtagtcttcctatcctttcctcttcggtgttctagaaacagatgcttacattgtgtaaacactccttctgttactgattctatggtatccattttcctattaacaggatgaagattttgttttttcatcctcaagtctacaagaacggaatagtcagtgggatatgaggatcagataaaaatccccccactttagaatcactgatcttagtacttcctgcagaaactctgacagccttattttttttcctcctttgaatccacgtaggtgtttttgggaaacatttatttgctgatattggttggtaataataattgttatttttatttcaaataagatgctgctggtaaaattattgtgaagtctactcaacttagtaaacttatatcaaaagccaggttttacatctggtagaacagagatagtcaattccttgctgtagggagaggaagggtaggagcctgtggctccctccccgccatcttgtccccaaccattcttatacactagtttgattcaagcacttgagctttggagccagactgcctgaatttggattcagctacttttacctgggcaaactgcttaactttaaatgtctgtgctctttgctgaaaaatgtggacaatagaagcatctatcttatatggatattgtgggtattagactatatggtagtccatttaagaaacgttcagtaaatgttgctcatagtaacagcaataatgttactactcctaatatgactgctacttttgataaatttagaataacagtttaaattaccatatatattaaaactatgtgacagtctaaattatcttaacagttgaaataccataacagtgtgtatacacacacacatacatacacacacactttgtataatggagctgctaaaatgaatcaggtttagctgaattgaaatttgattctttttgcctatttgctataggtgatagtgagccatgaaataagtaaaatacagaaggaggtagatacaacatttagattttttagccttacgtgaaacagttatggcttcagaatttaaagcaccaacatttggtggggtcccatggaaatttttattcctaatttcttaatattaaccatcttcttcatattctattaactcttgtgttgtttaaaaaacattccagtattctttctttctttagttttttgagatgggggtctcactatgttacccaggaaggccttgaactcctgggctcaagtgatcctcccacttcagtctcctcagaagaagattccagtattcttatcttcattgttgagtgctttttcttttaaaaattgcaataacattttaaaaattagaaaagaaagaagcatccatttctatttctaccatattaatacaacagtaactttcatttgttattttcccatctagtctttatactcatacttaaaaataattggaattatgtaatatttctaattttagttctggtgttttcgtttgacattacttcataagcattttccatttttttctgttaggtagttataccatcatttatttaatggttttcctgtttttgtttttagtttacttctagtttcaacattatggataatagtacagcgaaaattatctttattgatctgtaaaatggagataatacaagtactccagggctgttgtaaggattatatgaggggatagatataaggcaggtttgtccaccgtgagacagttccattttgctgtggaagctgtcctgtgctttggggatgctggacagcatacctggccgcttttccccagtggtgacaaacaaaaatgtctccagacattgccaggtgtcttgcaggggcaaaaccactcccagctgagaacccctgatataagtcagtagaacagcctggcactgatctgatgagtgcagtgtaaatacttgctactattattattgttgttggcaccatccttcatttcaggtattcatttctgataaattcccagaaatagaatttatgggatgagaggttagttttagggtttctgatacgcccttcagaggactgtaacacgtttaacgtcatcagtttatacaaatatgccagtatctctgaggcccagccagtattgaattgtgagtacccaaaatactgttttgtcttcaatttctgtaattactagccatgatgagcatctattatattttttttatttgcattgccacatttgaagattctggtaaaaacctttgtctacgcatcgttttttttttttttcttttttagttactctgccattcaacagttaaagttgaaattcatccctcagtagctaagcctgtattacatttcatcgcttgatgtttaacagcctctgagtagaacattgattgagatccttttggattattgtgtttttcccagtgttgctgcataatatgaaaccttccaaaatttgaatataaggataattttgtggaaaagaattcaactttgtattcagtgatatatgtcctgtaacagaaatgattgcctctggtttcagtacccttttatttctcttttcttttcttttttcccttcccttcccttcccttcccttcccttcccttcccttcccttcccttcccttccctcccctcccctcccctccccccttccttccttccttcttttttcctttcctctcttttctctctttcctttcttttctttccttcttcctttcttcctttctttgtgtctcacttggtcacccaggctggagtgcagtggcatgatcttggctcaatgcaaccttcacctcacgggttcaagggattctcctgcctcagcctcccgagtagctgggattacaggtgcctgccaccatgcctggcgaatttttatatttttagtagaaacggggtttcaccatgttggccaggctggtctcaaactcctgacctcaagtgatccatccaccttagcctctcaaggtgctgggattacaggcttgagccactgcaccagacctggtttaagtacccttttggagataaccccaatcctagctgtagcagaggctgctattgaccccactccctgctgtcagtacttctggtgcactgggacttccagctgcccacaccggcatgcctttgcctgagggcattctctggctggaaagttcacactcagggctggcaggaagtgtcagcgcccagcaacccatagccagtgactgctgctgtagtataaattctccagctctcttgcatctcaggtcgcctacttttgagatgaacattttacactgcatctccaagttcccagttgggttgtgatcgaatggtaacttgcttgataatgacctttttattattggccacctttccttctttgtctcctttctctactccctagcagtgtttcctgggatcacttctgaaataaactacttatatttgaatccttgtctcagggtctgcttcttgggggaaggaccaaactaagatattattagccaacttttcttttgactttgattgatgaaagaagaggaaagatcagaccaggagaacagaaatattttgaagacctttctgtataaaaagtaatgaatttaacttcaccgattcaagagacaggacagtaaatattcttgttatgctgcttcccagggtgtcctaagaaagagtcttcagattgtactatgggattaaagccatggcagatggcacttaatgtccctgactaatgtgactttccacccactttctttacaccatagtttgactcaggggcttgctggatttcagaaagactagcttgtagtttgtggctaaaaagactggctgatgttaggaagggggagaaacaccttatgtgttgctctactaattttgtccttgattttgagctaattattaatgctccagggaaaaattttagcttggcaggcagggaaatattagtttcaattgtgagcttaatccagagggctatgtttgagttaaaaccatccaggagtcttccagggaagtccagaatcttccagggaagaccaggtggatctatttctggatgctaaaaggggcattgcggggctgataaggaaataagtcccttgttctttaaaaaaaaattatttatttatttatcttttttagagacagtgtctcactctgttacccaggctggagtgcaatggcatgaccatggctcatgcagcctcaaccttctgggttcaagtgatcctccctcctcagtttcccaagtagctgggaccacaggtgtctgaaaccacacctggctaattttctttctttctttcttttttttttttttgtagagatggggtctcgctatgttgcccaggctggtcttgaactcctgggcttaagtgatcctcctactttggtctcctaaaagtgctgagattacagatgtgagacacctcacccagccagaactgcctgtttcattagagagacacaagtcaattcctggaatttttttttcctttttgctgccactttcttacttaaaagaataaaaatcaaagccaaattcatcatagtaatcataataatggcaacaacaacaaaaaaaggagtaaaatagagttgtgaatgtttgctttgttattaaacatatcaactcattggagctgatttatataaagttaaatcctgctagaatagctggattccttcctacatgggtggggtgggaatgctgagatcctggtgtgggcattccatgccagggtagaaatttcctgctcaggcacttagtgaaggagccaactgagggaggataggtgatgtgcccgcccatccggtggcacccagtgacctgtgcacaccaccccccatctgcccaggacccagccatgttgttcattgtacccttttcagactgctgacctccaggagcacttgtcttaaagtcacatagctgtatttttcctctccagaaaaattttgaatgtattttctaaatagctgaggtcattgcatggtcttcagtgaacttagctacaagtgaatgtgacctggagtgacccagagtgagtgctggccagcataggtttcacattttctgtgtgaaagttcttcttttgttgtttgtgattaataactggatgggatataaagccaaatgatttcattgttgaacacagacttgaaggtcatgagaaactgcctgttcaaattacactttgccaagacatggaaaaaggtctgcatcaacacctgaatagttttagaaatacggtagagaaggaaaaaaatgacatgccacttgttatgtgatgtgaaagttgatttccacgcgatgcaatatcttgggtccttacaacatctgacctatgaggctgatgagtttgcactgagtcaggactttaaaacaaaggtgtattgaggacctactgtgtgccaggtcatttagaatgagtttttatgctaagtaatgtgttatatttatgcttattttgttaagtgctcagtttctcttaggttttgtattatgtgggtttgctattttttaaaaaaatatttttaattttttgggtatggtttgctatttgaaatatgattttgaataagtttctcagtacatagcacttttaattttatgtttttaaaagattttttaatggttatacataataattgatggacacacaatagtatttaaatctaaaaatagagaaaccatggcacacaaaacacagtatcttacagaactgtattatttgcttcttttctatgtgttttctaggcttttgagtcagatgttaggaaagagtctgtccatctttaattttctcacttcgagaagcactgaaatatttctatacatatgtccattggtatagcgacctaacacaactttaaaatcattttgaaattgacgcacagagagcttggttttccagaactggtgaggtgtaagatggttgaggactgacttggcctggtcggacctgtttctttgtagcattattactatttgtttattttccacctgggccttacatcttccctctcaagacagcgtctaggtcccaactcagttggtaggaatttgtgcagtagcaaacctgcagatgggcagagatacaaactcactcaactcacattacagtctttccctgtctaaaacaaacaagaaaacaaaacaaaaaagggagagatcatataggcgtgtatatatacaatattttgttatagataaggaacaaagtaccatatgaattcaaaaggtgagggtgggatgggtttagagctgggagagaaaccatctaaagccttcatgaaagggggtaccatttgctgtggatactgatggcaatgttggggctggaggaaaatgttccaggtagagggcacagaattaatagggggtagctataaaaagcatgctgaataccatgctaggtaggcatttagccctgtagcatatagatgtatctgaatttaaaggcagtgggtgatgttcggaggtttggagcataagatattttgtgatcagaagaaggtgaatctgtcagaggtgtttaggaagcaaatacaagggtagatagtatgggaggttattgtagtaccttgagagaatgctattgaggacctggatgttgaggttggtagcctgggaatatctgggctctgttgatgaattaaattgagttatggcaaagctctcttcgtggatttcaatatttgcgattccactgcttaaagctgagctcactcttcttttcggtgtaactgtgatggaaggaacttgcgtgtgagagtctccctcttgttgggtctgtgctattggtttgttgattaggaactcaattggtacctgcagaaattgcctctgattgggacctgcttctccccactgtctcccttatgtttccccctgagaggtaaaaggagtgatttgggtcaaatgtcctttgttttgggttggtttgtgtgggatgactcctggtgtagattttgtgtgtgggtgctaatgtacttatagccagctggggctagaagctcaggcacccacagctttgctctccccacttcgcgtttttacttctgattttctgtttcccaatttgtgattcacaggcagggatgactgactgagaagcgttgcagatgagtccgtgtatttgtttcattttgtgattgtttcaaattagcacaaatttgatggcttaaaacaacacaactttactatcttacatttctgaaggttagaagtctgacacgggtcttactgagctaaaatgaaggtgttgacagggccatgttccttctggaagctccagaggagactcctttccctggtcttttccagcctccacaggctgcccatgtttcttggctcatggctctctttagtcttcaaaaccaacagtggtgggctgagtccttctcatgtggctcgttgctcgctctgctattcaactctcttccttttccacttagaaggccccttgtgatttcactgggcacaccaggctaacccaagataaccttctatcctaaagtcagttgattagcaaacaatactttcatctgcaacctcaatttaccccttgctgtgtaacctaaggtactcacaggacatgggcctcttttgcaagtggagaggaagaagatgtattattctgcttgccacattgcgtagctcttgattttcacttcttttaaaaaagaacatctgcagaaagaattgagagtggtggataattctccaatcattcctgctttctcctgaaataaatttcatgcctttcttttagcagttgatttaataattaattttaaaaataatgttagaagaagcttttcctgttcatgtgtgtgttatgatgcatatgtttgtctgatgaaggggaaaaagggaaggaatgactcaagtactttcaactttagggccagcctaggattggaattctggagtagatcatgaggaggagatggtcaactttcttgtgacaaaagcatgtacataaaccacttaggattctccacttttcacattttattctgaaattgcatgcttcagttaatgtgatttaatggttttctctcagtgtcattggcaggattgttactaagcgacaaacattcaccacagtgttcaaatgtacttgggaagaaaatgagtagccaaactaaaagtgggatttaaataactccaattttatgaaaagtgaagaagttcagagattacttaaggtatttttttggtgatctgtggattcaatgatcatttcgttcatggaaggaagttttatttttatttttttctgagactgagtcttgctctgtcacccaggctggagtgcagtggcgtgatctcggctcactgcaacctccgcctcctgggttcaagtgattctcctgcttcggcctcctgcatagctgggactgcaggcatgtgtcatcacgcctggctaatttttgtatttttagtagagactgggtttcgccatgttggccaggctagtcttgaactcctgacctcaggtgttccacccgtctcggcctcccaaagtgctgggattacaggcgtgagccaccgcacctggcctgggaatttattttcattaacttaaaatattatggcagctgatagagatgtatgtgcatcgcattctatttctgacacaataaacagcgtaatcgtcacatgaatataaaagttgatgtgttaaagcagtacagctcatgtttattcacttgaaagccaggagagtatacccgtgggagatgttgctatcaataaatttttacctatatatattttaactttgattttaagttctggggtacgtgtgcaggtttgttatagaggtaaacttgtgtaataggggtttgttgtactgattatttcatcacccaggtactaggcctaatagccattggttatttttcctgattgtctccttcctcccatcttccagcctctggtaggtcccatgtctgttgttcccctctatgtgtccatgtgttttcatcatttagctgccacttaaatgtgagaacatgcggtatttgatttttcgttcctgtgttagcttgctaaggatgatggccttcagtttcatccatgtttctgcaaataacatgatctcattctattttatggctgcacatattctgtggtgtatatgtaacacattttctttatccagtctaccattgatgggcatttaggttgactccatgtctttactgttgtgaatagtgctgtagtgaacatacacatgcatgtgtcatcatgatggaatgatttatattcctttgggtttatacccagtaatggcatttctgggttgaatggtctttctgttgttaggtctttgaggaattgccacactgcttttcacaatggttggactaatttacactcctaccaacagtgtgtatgtgttgctttttctctgccacttcgccagtgcctattattttttgactttttgataatagccattctgagtgatgtgagatggtatctctacttgcattttttttttgtctctttgttttttgtttagatggactctcgctctgtcatccagactggagtgcagtagcgcaatcttggctcactgcaacctccatctcccgggttcaagtgattctcctgcctcagtgtccagagtagctgggactacaggcgcgtgccatcacacccggctaattttttgtatttttagtagagatggggtttcaccatgttggccaggatggtcttgaactcctgacctcaagtgatctgcctgcctctgcctcccaaagtgctgggattacaggtgtgagccactgtgcccggcccctctacctgcgtttttaataaaggattatacatgagtcaaggatttgttaaaaaaaaaaaaaaatccttccaagataattatacatacattactcagaactgtcactttttttggttaattttacagatgtgaattttattttatagatatgttctttttatgactttcctcaattattatatagacaatgcagttgttgaataatatctaaattatttagaataatagaatattttctattatgcatttctgaaaaactcaagttactgttagaattaagtaaggattttgtcgtagacaaacagatgtagcgatagcatagtaacctactaggttagatactgcctgaatcttttgttcttatatggataaattctacgagcttttatttttcaaggagaaacttatcttcaagaagacagtaatttgttggcggggggcgaccaggagaaaaatcctaagaatgtgaaaacccctatataaggagaagtttctgtttctttctctttttttgagatggagtttcactcttttgcccaggctggagtgcagtagtgcgatctcggctcactccaacctctgccttctggtttcaagtgattctcatgcctcagccttccgagtagctgggattacaggcacccgccaccacgcctggctgatttttgtatttttagtatagatggggtttcaccatgttggccaggccggtatcaaactcctgacctcatgatctgcctgccttggccttctgaagtgctgggattacagccgtgagccactgcaccccgccttctgtttcctttattactgataatccttagtgatctaaagactgagatcctataagcttgttgctactttcccttttcatgtctcataaaaagccatggtacaggctgttgggaattatcacgtggacattgaagataacctaattctggccattgatttcttcagtttctttatcctgcagtgtgtagaagaaagaaaactgtgacatatatcaaaccagaaagacatatgacattaaaggaataacaagcctggcacagagtagatgctcaataaatattttttaaagcaatggaccaaataatttgttggtatatgttaatttgttaatttttatatgctagattccttgttttttggccttaggaaagagaaacatatctttaccattaaggaatatacatgataagcatggctgggtggctcaggcctgtaatcccagcgctttgggaggccgaggtaggcggattgcctgagatcaggagttttagatcagcctgaccaacatgatgaaaccccatctctactttaaaaatgcaaaaattagctgggtgtggtggtgcacgcctgtagtcccagctactcaggaggctgaggcaggagagtcgcttgaacctgggaggaggaggttgcagtgagcccaaatcatgcccttgcactccagcctgggcaactccgtcgcaaaaaaagaaaaaaaaaggattataaatgaataaatgataaggttttttaaagttagggtccgtttagtggcagtttggaaattacagatcaggatctaagagagctctaatgacagttcttttgtgacttacaaggtgtctttttactgtgtttgacttaagggattttgttttgtttggtttatcttttaatttctgttttgacctttcataaaatgagaccttatagaattctcttaagatagtgttcataaactttttttggattgagaggtctttaaaaaaattgatgtggaggttatagaatttctgcctgtgctcaaattcacatatgtgaggacatgcattatttttctcataactttaagaagtttgggaagtcactaaaacttacccagatctgttcattcgttcatttgattcatatttgtttattcatttctatggcttataaggtttgtaggaccatctgacagagtgctacccttagttgttttctttctttttaaatacaatattgtgtagttgtattttaaaagtcaaacatttcatcacataaaaattataacctgggctgggcatggtggctcacgcctgtaatcccagcactttgggaggctgaagtgggcagatcacgaggtcaagagatcgagaccatcctggccaacatggtaaaaccccgtctttactaaaaatacaaaaattagctgattgtggtggcgcgtgcctctagtcccagctactgggaggttgaggcaggagaatcgcttgaacctaggaggttgaggttgcagtgagctgagatcgtgccactgcactccagcctggcaacagagcgagactctgtctcaaaaaagaaaacaaaacagaaaacaaattacaccctactcctagtggggaaccctctgatatggtttggttgtgtccccacacaaatctcatcttgaattgtatctcccataattcccacatgttgtgggaggaaactggtgggaggtaattgaattatgagggcaggtttttcccgtgctattcttgtgatattgaagtctcatgagatctaatggttttataaagggcagttcccctgcacatggtctcttgcctgccaccatgtaagacatgcctttgctcctccttcaccttctgccatgattgcaaggcctccccagccatgtggaactgtgagtccattaaacctctttttctttataaattacccagtcttgggtatttcttcacagcagtatgaaaatggactaatgcaagaaatttgtactggtagagttgggtactgctaattaagatacctgacaatgtggaagtgactttggaactgggtaacaggcagagctttgaagaacttggagggcttcccaggaagatgttaatccccaagacagtggggaaaatggctccagggcatgtcagaggtcttcacggcagcccctcccatcccaagccaggaggtctaggagggaaaaatggtttagtgggccaggcccagggccctgctgctttgtgcagtcctgggacttggtgccctgtgtcccagccatggctacaaggggccaacgtatagctcaggccgttgattcaaagggtgcaagccccaaccctgggaggcttatgcatggtgttggacctgtaggtgcacagaagtcaagaattgaggtttgggaacctccacttagatttcagaggatgtatggaaatgcctggatgtccaggcagaggtgtgttgcaggggcagagccctaatggagaacctctgctagggcagcgtggaagggacacgtgaggtgggagcccccgcacagaattcccactggggaactgcctaatggagctgtgagaagagggccatcatccttcagaccccagaatggtagatccactgacagctaacatcgtgcacctggaaaagccacagacaatgccagcccgtgaaagcagccaggagggtctgtaccctgcaaaaccacagggtcggagctgcccaagaccatgggaacccacctcttgcatcagcattacctggatttgagacatggagtcaaaggagatcattttggagctttatgatttgactgtcctcctggatttcagacttacatggggcctgtattcgtactgaaaatcaagatcaagtgagcttttgcccttttgctccatgggatgtttctgtcctccctgagctcaccttaagacacctgcattactgtttgacaggtgtactgccccagtcaaactccccacctagcactgtccccagtcccctgactcatccctgcaagggggcctcccacttattctacacctctcatgtctcttcactgtgccagaatagagtcaagttcaacagggtcttctctccccactgactttttttgtttatgtgcatttactaacgtgagtattaaaatatgaatttatattgcctatttttaataaatacaagatgatattatttatattgtttacaggttttgtttttccttagctaaatatactgaattcctttccatgccagtattagtagatctagcatgcttttttaaatccccctattacccattatttaccatgaacctaattctacagacatactaaagttctttgcagattaacttttatttattttatttatgtgcttatgtttttgagacggagtttcacttttgttgcccaggctggagtgcaatggcgcaatctcggctcaccgcaacctccgcctcccaggttcaagcaattctcctgcctcagcctcccgagtagctgggattacaggcacgcaccaccacacctggctaattttgtatttttagtagagatggggtttctccatgttgaggctggtcttgaactcctgacctcaggtgatctgccgtcctcggcctcccaaagcgctgggattacaggcatgagccactgcgcctggccgcagattaacttttatatttcacatagctggtggcagaaataagggtagaagaaggagtgacagattggagtgatatcttagttgctaaaactctgctttgttcatcatctcagagagtgggtgcgtagggctggggaggcatacattctgaaaagagggggttgttgactaagaaataggcctccacctaacaaaacacccactgtgactatttacaatgtttgcatctcagcaaaaataccatttgtattctgaattcctttgtttcaactacataactcaataagaaagaaagtttcctacaattgaaaagaatagacagtgtttaaaggccaagttttgccttccttttaaggctgaatgtgctttattttaagccactcttcctcctcaagttaagaagggccttctggtatttctgtgcaaagcaccagtaatactgtttctttttaagttaatcatttttaatcctgcttattttatttagtgcctattgctatagcatctaatgagctcagcgcttctgacagtatgtcctatggatgcctgggggcagattgcctgggttggactctgctccagttcttattagttgtgtatgtcagctctgttttcccatctgttaaatgggatagtaatagccacaataatacctcatggctgttgtgaggattaaaataagaaaatgcaagtgaaagacagtccagaggatgggagaaaatatttgcaaattaggtatctgctaaaggtctagtatccgcaatagataaagaagtctttttattttttattttatttttttttgagatggagtcttgctttgtcacccagactggagtgcagtggtgtgatctcggctcactgcaacctctgcctcccaggttcaagcgattctcctccctcaacctcccaagtagctggtattacaggcatgcaccaccatgcctggctaattttggctaatttttctatttttgtagagacgtgtttcagcatgttggcccggctggtcttgaactctggacctcaggtgatatgctcaccttagcctcttaaagtgctgagattataggcgtgagtcatcatgtccagccaagaattcttataactcaacaatctaaagacaacccaattgaaaaatgagcaaaggaatagatatttctccagaaaagataaacaattggctaataattattgcccatgaaaagatggtcaacatcattagtcacttagggaaatgcaaatcaaaaccatagcgaaatttttctactttgtgcccactggtatggctgtaataaaaatggaaagaaatacgtgttggcaaggatgtgggaaaattagaaccttatattgcttgtgaaaatgtaaaatagtgtagcagttttggaaaatattttggcagttctacaaaaagttaagctttgagttatcatataactcagtaatttctctctaagttttctgcccaagaaaactgaaaacatatgttcacacaaaaacttgtacatggatattcataacagcattattcataataggcaaaaagtggaaacaaccaaaatgcccatcagccgacgaatggatcaacaaaatatggtcatttcatataatggagtattattcagccatacaggaaatacaggactgatacaagctgcaacatgcatgggccttgaaaacataatgctaagtgaaagacgtctggcacaaaaggtgacatatcctatgattccatttatatgaaatgtctgccactggaaaatccataaagagagaaagtaggctagtggtttattagggctcagaggctggcagggaatgggggagtaactgctaatgggtttctttctggggtgatgaaagtgtctggaattaagattggatgattgtcgcacaactttgtgcatacagtaaaaaaccacagaatcgtacatccgttaaatccggatggattttatggcgtgtgaattacatcccaatgacaaaaaataggataatagctgggaggtggtaccatgcccctaacatggtaagcactctatgtgttagttatttctgctgctgctgtcatcattttcattgttactacaaaatcaattccattcattattcctaaaaatatcaatttcttatggttatattatttctagttcttttcttcaaattacacaaatattagccactcagtgcttgcagaatattttcaaaggtctgcatttgtgaacaggtcctgggatggagagcctttgaattaccgtgggtgtatgtgttatccatttgcttacactgcatcttcttactataaaataaagtacttcttggcagatcatatggcatttatagatttttcttcttactttcttttatttgatttatataattgggtactctcaactcccgtgatggagagaaagcaaagaaaccaagaataggataacgctatggaatgcctcaatcttcttttagttttttatttttggttgaataattttagtttagttcatggaataaggtaaatattttacatttgttaataactccatactttgttctaggttcagtggcttacaaaaatatgtataacaaaacaaaattaaaaaatgaatcagtagagacaaaaagagcatggatgttaaaatgtaactaaaagatgccctgcacggtggctcactcctgtaatcccagcactttgggaggccaaggcgggcggataacttgaggtcaggagtttgagaccagcctggccaatatggtgaaaccccatctctactaaaaacacaattttttttttttttaggtggagtctcactctgtcaccaggctggagtgcagtggcgtgatctcggctcattgcaacctccgcctcccgggctcaagtgattctcttgcctcagctcccagagtagctgggactgcaggcacgtgccaccacacccagctaatttttgtatttttagtagagatgaggtttcaccatgttggtcaggctggtcttaatctcctgacctcgggatccgcccgcccctgcctcccaaagtgctgggattacagttgtgagctaccgcgcccagccttaaaaatacaaaaattaactgggtgtggtggcctgcgcctgtaatcccaggtacttgggtgactgaggcaggagaatcacttgaacctgggaggcggaggttgcagtgagctgagattgtgcctctgcactccagcctgggtgacagagtgagactccatctcaaaaaaaaaaaaaaaaaaagtaactaaaaggaaatacttaaaaaatactggaattcctcaatcttgatgaactatcctttccatgttttctcccatagttaaacaaggagtttttacttcttttgggcagtagctacatagtatgagacttctagtagtgcactatgctaacatcatcacacttgaatgttttttgaaaatattttacgtaaaatacatgtcccagatggactctattctttagttggttatctagaattaacatttggattatgtttgctaaatgcgtcagccatatcctaagcgctgtgatccttttagaactattaacagatgagactggggggcattttatggttataagagctaaatgatatttatgcaagtgtgtaaacattaataactcagcgtttataagcatgttagaatatttgattatggctagggaaatgcatattagctatctagcacagatctaaaagtgatctgggctatacctttcatttctggatttctttccttaagcttaaagggtgttctaatttcattattatcaatctcaagatcatttcacagtttcctggtggttgggtgtcatggtgactttttgttttccaggctctttgtttggatatgtggccttgtttgagttgtctttgattgctatatatctgtacccttgtttgcttttgcctggctactgattctcagtgtttcactttgacctttgataaagctgtgactctgattcatttttaggggggattcacctcgttggtggaatctagccttgccctgccaggcggctgcctgggtgttgcttgctggttggaatgtatccattgaaggccttagatgttggagtccttgcttcctagctccacctctttgtttcagggcaccactcttctggtctagtgcacagcctggtctctgtcaatcagcacgttctgcctggcgttttatggcatgttttcttcccccccacatagggtagcagcctttttataagttgtaatgggtttttgatacccactgtcatttttcttttcttttttttgagacagggtttcactctgtcacccaggctgaatgcagtggcacgatcacagcttcctgcagtcttgaactctgggactcaggcagtcctcccacctcatcctcccaagtagctgggactacaggtgtgcaccactattcccagttgctttttttaaaaaagttttttgggtcgggccgggtggctcacgcctgtaatcccagcactttgggaggccgaggtgggtagatcacgaggtcaggagttcgataccagcctggccaacatggtgaaacctggtgtctactaaaaatataacaattagctgggtgtggtggcgtgtgcctgtaatcccagctactcaggaggctgaggcaggagaatcgcttgaactcgggaggcgtgagttgcagtgaactgagatcatgccactgcactccagcctggtgacagagcgacactctgtctcaaaaaaaaaaaaaaagttttttgtagagacagaggcctcactatgttgcccaggctgatcttgaactcctggactcaagcaatccgccctcctcggcctcccaaagtgctgggattataggtgtgagctaccatgcccaggcttcccagtgtcattctgatttgaatttttctagaaagatttctagaatttttctagaatgattattgtatcctaaacatttatagcattatgttctttactttttattgcttagaaaaaaatagtttagttactactggtaatttgcaaattaaagaattatgtataaaattgctataggtgcctgtggttaaattcttttaccaagatttcacttctagagaactgaagaatttaccaaagtaaaaatggtctaactttattacttggtttatagaaatgaataaatcatagttaatagtacagtatattaataatactgtgctctaagctacagattagaaaaatatgcaccctgtttgtcacaataaatggagtgaccaaagctatagtatttcaaatctgtgactattatatatttttctataccaagtcacttctttttttgtttgtttgtttttgggacagagtcttgctctgtcacccaggctggagtgcaatggtgtgatctcagctcactgcaacctctaccttctgggttcaagtgattctcgtgcctcagcctccccagtagctgagattacaagcgtgcaccaccacacctggctaatttttgtatttcaatagagaaagggtttcatcatgttggccaggctggtcttgacctcctggcctcaagtgatctacctgcctcagcctcccaaagtgctgggattacaggtgtgagccacggtgcccggcctgtaccaagtaacatttctttctgtgtgcaggaatatacatgtgcttgttacagagttgagtttatcatattctatcaccatgtatttcccataaatctattaagttaaaatctgtgccacttatcaaagtttggagtgattacatatatatacataaccctatatgatctttgaattcagagccttgatgctagcctgagagtctgtgtgtatgaatgcaggtggcaagagtgaggcatggattgttgctattttttctaccggagtgccattattaacagtttcttttctgtatagtcactgtgaacactgttgtggggctgctccctgtgtgtggctctgcctcagaacccacagagtcggctggctcccagacctactctgtctctggttacaagtcagtgtcttatttactggaagttaaaagacagggcactgttgatttacactgtgcttcagcatgcccttattagtatttcttggttcttccatcagtgagtctctgatttcttcaccaaaaaataatcttgcagagagtcatgatcaaccctgtttttataaaacactgagctttggaaagggaaatgattactcatcacaactctaaacactaggataaaatgttcccatttagatcaatcaggggccaatttaattttctaatgaactttagaattgcttttgtggtctgcctttagggactattattataccagcttttcttctttttaatgtttctagaagtcaattttcatctttgccaagaattaaaggatccttaaacatgtggaaaagatgagaaaaacagtcagtggatcatcttgatgatgatggtcttgcaattttgcagaaggttgaaaaggcaatacatataacagattcatgttctttctattgaaatggacaagttagaggtctagattgaatacactctgtgtttagacttaataaacactttcaataagcttattcaatattttttaaattgacaacctgtattgggaactgcatatactatagagatcaaagttgacatttcttgccctcttgggcttacccaaaacaatatgtaatcaaattaagataagtactgggtgcacaaggaaggaaaacaggttgcctttagagactggaggagtcgtccagaagtccgctctgaagagaagatgtttaaaattaaacctgcaatgttcgtctgaattaagcaggttgagaacagggtgaaggaggcaggcatagcagcatgaaccaatatcccgaggcaggaaagggctgggtttgtcagagtaacatgaaggtcagtgtgctggagcaaactgaggagggtgagtgtttcaagacaaggcttggcataggagtggtcagatgattcagggccatatgaaccatgttaatttagttgttccaaagttcagagagttgattagaaggaataagaagagaatttaggagacagtgtcagaaggttattggctttaggctggaggcaagagatgacagtagcttggactgggggttgacagtggaactgaagagatgtggatggactcaagctgtatttaggaattagaaccaacaaaagttgatagaagggttagattgtggtattagaagaaaggattcatttcagcatcctggcatgaaccagtgaatggatgaaagtgcttttccgtagttgggaaagactagaggcagaatagatttgagagagaagcaacagttcagttttttgatgggttaaggttgaaatgagtctgtgagctatctcagtggagatgtcaagtaggtggttagttacatagtatgtgtttatctcttgctgcataataaattattatgaaacttagcagcaaatctatattagttatctattgctctgtaacaagtcaccccaacattggtgctttaaaacagcaaatatttattatctcatgcagtttccttggccaggaattttgaagtggtttagctaggtgattccagtccagggtctgtcatgagattgcactcaagatgctggccagggttgccatcatctgaagcttgaccgaggctagaggatctgattccaagatggcttatgtacatggcttttggcagaaggtctcagttccctgctggttctcggtcgaaggccacagtttctcgccacgtgggcctctctctagggtgcttgagtgtcttcatgacatggctgtgagcttctcttagagtgagagagatatgaaagaatgcaaaggggaagctgtaatacttttagtctcaaaagtccgactcatcacttctgccatattctattcagtagaagtgagtcaccaatttcagcccatactcagtgggtggggaattaagccccccgcttgaatagacagccaccaaataatttctgaatgtattttaaaaccaccacacatgattttgtaattgagaagaaaggtttgggctggaaataagacattaggagttttgcacatagatgctgtggagtgagtagatgcgtgaccacttagtaaaagtgtgaagaggtccaagactgatcctttaggaaatctaacttgtagaggatctgctgtggaggagtggaggagaaggaagaaatggaatctgggaagatgagaagaatttttcaggcagggagtgttctattctgtggaagcctactggaatgtgtatttgactttcatttttaagaatttattctctgaatgaatgaagaatgaataaataaatgtcatgtatatgttcaaaattttaattctaagtatgattgttattgaaatgcttataaaattaagaatggaaatcagcattaggaatgcataataacagagtgggagatattggtaaaaaattatttaatgtccagacaataaaatacctatgaagctttaaaatgacattattaaagaatgtgcactgtaataaaaacagatttataaagtattttaaataaatataaaatactatgtaaggaagaagcagacaaaaatgtctaggaggatgtatataaacctgttaatactggttatctctgggcagagggaaaatgggtggtttaagtttccttcctttggtttgtctaaatcttccttaataaatggaaattgcttttgtaataaaatgtttgaaaatatcccctcccaaaataaagaaaaataatgaaaataatgatagttgaaactcaattgaggggcccggcatattggctcatgcctgcaatcccagcaccttgagaggctgaggtgggaggattgcttgaggtcaggagtttgagatcagcctgggcaacacagcaagactccatctctaaaataatttttttaaaatattagctgggcttggtggctcatgcctgtagtctgaaccactcaggaggctgaggtgggaggattacttgagcacaagtcaaagctacagtgagctatgattgtgccattgcactccagcctgaagcctcaaaaaagaaaaaaaaacttgattgagaaaaattaaagtacaacatttggctctgaacttcctggcagccaagacaaaatgatacaaagaagatctctgatctttgtcaagacaccctgctttatgcctggtccccaaagtgagcagaagtgaggcaccttgccctctaaagcaattcctttctttttttctttctttttttttttcatttgaaggatttcttttttaaacttttattttaagttaaggggtacatgtgtaggtttgtttcatgggtaaatgtgtgtcacaggatgggggtttgtttacggattatttcatcatccaggtattaagcctagtatccattagttatttttcgtgatcgtttccctccccccaacctccaccctccaatagaccccagtgtatattgttccctgctatatatccatgtgttgtcatcatttagctcccacttaaaagtgagaaatgtggtatttggctttctgttcatatgttaatttgctaaggataatggcctccagctccatccatgtccctgcaaacaacatgatctcattccattttatggctgcatagtattccatagtgtgtatatgccacattttctttatccaatccaccactaatgggcatttaggttgattcaaagtctttgttactgtgctgcaatgtctttgtaacagagcaatttatattcctttgggtgtataccctgatatggcttgtctgtgtctccacccaaatctcatcttgaattcccaggtattatgggagggacccagtgggagtaattgaatcatggaggcaagtctttcccatgctgttcttgtgatagtgaataagtctcacgagaactgatggttttataaagaggcgtttccctgcacaagctctctctttgcctgctgccatccatgtaagatgtgacttgctcctccttgccttccaccatgattgtgaggcttccccagccacatggaactgtaagtccattaaatctctttctttggtaaattgcccagtcttgggtatatgtttatcagcagtgtgaaagcagactaatacatactcagtaatgggattgctgggtcaaatagtatttctgtctttaggtctttgaggaattgctatgttgtcttccacagtgtttgaactaatttacactcccaccaacagtgtgtaagtgttcctttttttcttcaacctcgctagcatcttttattttttgcctttttaataatagccattctgactggtgtgaaatttatatcattgtgtttttggttggcatttctctaatgatagtgatgttgagctttttttaatatgcttggccacatgtatgtcttcttttatttaaagcaatttcacataagctacagcgatgttcttaagtcttgggaaaacagagggcatactttaaaatgtaggttctgtgaaggcagttgtgcaggcacagggtagattcctatatgtggcttaggtaagctttgtgatgatttggtataacaaagtggtaaagtttttattatcttgagaatacagcagttggtattcccttagaccagattccttcacatctctggatgactgggctgcacctgattccttaagcctggctggagtcaaggagtctgtattctaagacaattctccaggggattctgatgttttgctacatctgggaatttgtgcagtgtactattctttttgaccatgatgacagttgggttttattgagaattaaccatgtggctcttgccgcatgctgattattatctttaattctcataacaattgtttaagggttgcatttttaccctctttgtatataggagaaaaataaattgttcaagacataaagcagtcaaaaagcagttccataaagtagttgggagctgagttttaccttataaggctgttgggatcaaatgagataatgtgtacaaagtggttagccctgtgtctggcacatagaaagtgtttaataaatgtcagttttattatgagaaaacatgattcatggatggagactctgatagcatccttagtgcatgcatctccctattccagtcatctgtccttcagtgttacgttttagatcagagttataggacatgtcaggcttattttatcttattttcttttatgagacaggttctcactctgtctcccaggctaaagtgcagtggtgtgatcatggctcactgcagcctcgaactcttgggttcaagtgatcctcccaccccaccctcccaagtagctgggaccacaggcatatgccaccacacccagctaatttttgtactttttgtagagacagggttttaccattttgcccaggctggtctcgaactcctgggctcaagtgatccactcgccttagcctcccaaagtgttgggattacagacatgagtcattgcgcccaggccatttcagcctgtttaacattccttttgcagagctggaacatccaactccaacttgtagaccagaaatactcctgaatttctttcctcagacttatctcagtggcaccagattgagttaggattgagtttagctgcaagtaagagaaacccttttacgatagattaactaagaaagaactcatttttctcaagtaagcttcagtctgtaggtaggcaacccagggctggttacctgctcagggaaactggcagcttctgtcttcctggaggaagcagaaaggcccagggcaagatgttcatgccagccaagtctgttaatttttatcagggaaataatagttctcctgggtcttccacccaatatacttctcccctcctctgggcggaattgagccaaatggttatctctagttgcaaggcaaggtgaatattttaactggccaccttgctacagggaaaaaaaatgggattaatcttgtaagtgagaaggagagaaaggatgcttgagtaggcaactagcagtgtgtaccatagtgagttccagcaaatagttctatcttaaataccatgtctagaggcatgatcagagtgaaaacaattctgattctagaattcaggttacctgtaattatattctgaaagaatgataggttgaaaatatgagtattaaaagacaaaattggaaccaagtacaatttctccatttgtcttataggggaatatatgaaaagttgagataaattaatctcttttcttcaaaaaaataacactgtgaaatgaacatgaaaaatgtttattgcatctggtttttttcctctatgttttatttcagtaaaatacagataacataaaatttattattttagccatttgaaatgtacatacatcttgttatataaccatcactaccatcgttctcctgaattcttttcttgttgaaaaactgaaaatatatacccattaaaccaggggtccccaagccctgggccacaggtcgctactagtctgttgcctgttaggaggcgagtcacacagcagggggtgagcggtgggtaatcgagcattacctcctgagctctgcctcctgtcagatcagcagcggcattcgattctcataggagcacgaaccctattgtggactgtgcatgtgagggatgtaggtcgtacactccttattagaatctaactaatgcctgatgatctgtggtgaaacagtttcatcccgaaaccactcccccactgcctcccccactgccccgcccatggaaaaattgtctttcacaaaaccggttcctttttggtgccaaaaaggttagggaccgccacattaaacaacaactcctcactcctctctcctcctagcccttggcaaccaccattttactttcactattctaggtacctcatgtaagtggaatcataccatagttttctttatgtgactggctgtgtcacttagcacactgtcctccatgttcatccatgttgtagcatgtgtctgaatttcctttctcttcaaggctggttattattccattttatgtaaatatcacattttgctaattaattgatctgtttgtggacacttgggttgcttccatcttttagcttttgtgaatagcgttcctattaacatggatgtacaaatatctctgagattctgctttcagttcttctggttatatcattgcatatgctttttactcagatcccgtttctccttgacataaccctaggtaatggtagttagcttactcttatcttgagggaaatgctaaagttttgaggaaagatcattcatccaaatctttttgtttgattgactcttgctaacctccaagaaaaatttgtgatcacgagttatattttatacagtccataggttcagggaagggagtaattctagtgttcctaaaagatgccattgcagtgctgtaatgcagaaaaacgctaggttttggggtgtccttaggaaggagacaagaaagaaaacagagaacgttatccttcctttgcaaagccatgttgactgtgcacatggattacgatctgagattctggtctcctacttaaatgatttaacagtggaaggtattctagtgaaggaaacccaagtcccggagcgaatgcatttgttacttttgtaaaactgactaaggtgatcagtactcttcagtctaaaaatatgaaagtggaaagaagacatacttaccagctataagcttatttcagaaaagcaaacataaacttattcttctaaccttcaacagttatctggactttttgatgcttaaaagaccagcaaatgttcaagacaaatgagaggaagagctattttacactgaagatataattagcaagtttgcagtacccagtgatagtatagactgaatttacaaattttttcttttaaaggcaataaatgtcagactcacagtagactattaaataaagacagtgctgccagaactctatttttttttttttttcttttgagacggagtcttgctctttcgctcaggcttgagtgcagaggtgcgatctcggctcagtgcaacctccgcctcttaagttcaagtgattctcctgcctcaacctcctgagtagctgggattacaagcgcacaccaccacacctggctaatttttgtatttttagtagagacaaggtttcatcatgttgaccaggctggtcttgaacttttgacttcagatgatccacctgcctcagcctcccaaagtgctgggattataggcatgagccactgtccccggcccagaaccctaatttttaacagtgacaagaagttaacatgaaggaagtcattaggaaagtgagtggcctgtaaatgaagtttcttgcgcttttgctcaggcaatggattttatctgtccccctcatccaaccctacctgaatgagctttttaattaaaaaattcattagtaaggctgggagcagtggttcatgcttgttatcccagcactttgtgtggtgtaggcgggcggactgcttgagccccggagttcgagaccagccagggcaacatggcgaaacctcgtgtctacagaaaaatacaaaaattagccaggcatgttggcacatgccctccaggtacctgggaggcagaggtgggagaatcgcttgagcctcggaagttgaaggctgcagtgagccgtgatcatactactgcactcaagcctaggtgacagagtgagactctgtctcaaacaaacaaacaaaaagtattagtagtttatgtgaaccttttcatagttatgaaaattaaaaataagaatatgtatttttcaatatgagactaaacctttcaattattttatttattaacttccaatttatacccttttaggcaaagagttctgtgatttatgggccaatttttaaactgtgatgtccatgggaagaaatttttagccctgagttttgaaggggaatgcagtgttcctttctgacttgtttttcctgcttattataaatatttatcttggacaaaggattgcattttagcggatgtgcaattttacaaatttaattattaaaatgactcttcttcctttttttatgatcttacattttgtttttaacttgtcatggcggatattaaaacactccaaataaagacaaaaaaactcaatataaaaaaaaaccaaaaaccacttccgaaatactccattttttcttatttaaaaaaatgctatttatagtagtagttggcatttcatcaaagtacataagcaaaggacagatactcctcattttttcccaggtttctattctttttctgaaagtgagtaaaatattaggctttggagaaagtctaggtagtttggtgtgatctgttggtagcattttgttttgccttaatcttctatttttttcttcccattttatttatttatttttttgagatggaggctcattcactttgtcgcccaggctggagtgcagcggcgcgatcttggctcactgcaacctccgcctcctgggttcaagagattctcatgtctcagcctcctgagtagtggaaattacaggtacgtgccaccatgcctggctaatttttgtatttttagtagagatggtgtttcaccatattgtccacttcttgaactcctgaccttaagtgatcctcctgccttggcctcccaaagtgctgagattacaggcatgagccaccatgcccggccttcttcccattttaataactaatgattttgccttaaaatacttgaatttattgcaaaaggtgtattttaaatgattcagctccctcttccacggtgtttctgtagtgaatagactggaagctgggaagaaagtgacctccataaacacagttattttacattatttctctctctgaagagagaattagcactctttttcacttccaagtggaaaacccactggacaggcaggtgcaaataaagcaatgtaaaccggcaagtttcatttttagaaatatgtgggctttatccagtttaggagcttagctcccgatacatttctgtctcccatcctttgggatttgggagctttttttgtttttggttgagtgttggcatctacagtatctcccttcctcctagatccttcctgtctgcatgtaaatacagatatgcagaagtctcccttattcttaccatcctccaccaaagcagacagacccgcagacagacagaccttgtgtcagcccagtttattttttagctgacaaattctcttcctttcctacttgtcctcattaaagtggagaaaaatacaccttttacaagatgggtgcattaaagaaaaaatgttacagaaggtattacgtatttattacaaacttagaaaatatggctaacaaataatagaatataagagtcactcagaatcttctaacgtacagatacagtgctaacattttggctcttggctttctgtcatacgtacacttacgtataagtgaagcactgtgtatattctttaatgacctgctttattaccccttaatacattgtgaaaatccttccatgtctttccatattcattatatgtatctgaatatcatttttttaaccttttgtgtttttttttagagacagggtcttactttgttgtcccactggagtacagtggcacaaccatagcttactccagcctcaaactcctgggttcaagcgattgtcccaccctagcctccagagtagctgggactacaggtgtggaccattctgcctggctaatattatttatttatttatttatttatttatttatttatttgagacaggatctcactcacccaaactggagtgcagtggtgtgatcacggctcactgcagcctccacctccccagattcaggtgatcttcccacctcagccacctgagtagctgggaccatggcgtgtgctaccatgccatgtgctaccacacctggctaagttttgtatcattttgtagagatgaggttttgccatgttgcccaggctggtggctcaagcagtccacccacttgggcctcccaaagtgctgggattacatgcatgagccaccttgccctacccgctagtatcctttttaatgcatgaaaatatacttttaaacagttctcatggatggacactgggaaagctagatgcctgtgagagtttgagctcctcagtgtgaagaccctctcctgtctgctctaatgttgcattttcctggtatgaaccctgaatatctgacagaggtctcagttaatttagaaagtttattttgctaagattgagagtgtgtgcctgtgacacagcctcaggaggtcctgatgatatgttcccaaggtggtcagagcacagtttggttttatacattttagggagacatgagacatcaatcaacatatgtaagatgaacattggcttggtctggaaaggcaggacaactcgaagtggggacggggcttccaggtcataggttaataagagacaaatggttgcattcttttgaatatctgattagcctctccgaaggaggcaatcagatatgcatttatctcagcgagcagaggggtgactgaataaaacgggaggcgggtttgccctaagcagttcccagcttgacttttccctttagcttagtgatttttggggccccaccgtttattttcctttcacactgggcttgcttgataagtttacctgagtatgctgctaatctctcacattttttggtgcaaagaggaatttctttccttaatcaatttctttctgtgcttaaaaaaattttttttgcactttttattttttaatggagagacaccattctttaagttaccaaagtctgagaagtttttgcacatccctttctccttcattactcttttttttttccccccctgagacggggtctggctgtgttgcccaggctggagtgcagtggcatgatctcggctcactgcaacctctgtctcccaggttcaagcgattctcccgcctcagcctcctgagtagctgggattgcaggcgtctgccaccacgcacagctaatttttgtatttttgctagagacagggttttaccatgttggccaggctggtcttgaactcctgacctcagatgatccgcccatcctggcctcccaaagtgctgggattacaggtgtgagccactgtgcccagcctttccttcattactcttataataattcagtagtccagtcccagcatgggggtgggggacttggagtaatattggtcaaagaatatagtttgacaggaggaataacttcaagagatctattgtacaaggtgatgattatagttaataacaatttggtgtatacttgaaaatagcatagagagcagattttaagtcttctcatcacaaataaatggtaaatatgtgaggcaaaagcactaataaataaaattttgtctcttaagagccatagagtctaattgagaatagaacgggagacacgctgtataataatgatcatgcccatccacctcaccacgtcccagcagcaaccttctctcttcaattcaatacctattgcatccacctccccctttcttgtctcattacttctctactctttcaggctcgctgatgtctagcacgggcaattctaataagcctcaaactggcttactttcttccggcctccctccccatgagtccatttttcatgttaatctcactaaagcacccttctgatcatgtcacgctcttgctcaggaaaagccaatggcccacattacctgctcatttaaccccttgctgtggccttcaaagtcctctgcaatttaactgcagcctgttccaaaattcagtggcatcacagctctgataaaaaaccacccagccaaaggaacctcttcacagttgtgtctgcatcatgtttttaggactttgctgcagctgttctctcttctacaaatgcctttctaaccatttttacgtgccccaaacatagtaattcaagatctagctcaaatgcaacctgttcctcaaatctttccgtgatccccttttcatccccatcaagacatatttgtctatgaatttatgaatgtatctgtacctgatatattagttataattttctgttgtcttagtcccttccccactcatcccaggccactggaccacagcttccttgaaagcaacatctggatctcttttgggactgacacatagtagatgctctgtaaatgttactatttctttgtacagtgtttttcacaaaatagttgtacaactaattgttatatttaataacaattagtcatttagactagaaaatataaaacttaagacaacaaacataacaaagagttggaaatattcccagttcttttttttttttgacacaaggtcttgctcagtcacctaggctggaatgcagtggtgcattcacaattccctgcagcctcaaactcctgggctcaagcaatccttccacctcagcctcttgaataagtggtactacaggcatgtaccaccatacccagacacttttttgattttttgtagggacagagtctccctgtgttacccaggctgatcttgaactcctgagctcaagagatccttcctggaggccacccaaagggctgagattacagatgtgagccacttgcctggtccccagttcttattatgtcagtttatttgactagaagtcttacaaaatgacctaagccaatttgattatgcgtaattataaattatggcttttttttgattggtaatgttggctcccaatgccactgtcttcctataagggtcataataaaggcaagtttcagaccaaatcctgccattaacattggcattcattaagcaatcattattcgcaagtaggctcgaaaaacagttcatacagcttgcatgtaaagttggtaagctgcagctctgtgtcatttttgttttttttgagacagagtctctctctgccgcccaggctagagtgcagtggtgcaatctcggctcactgcaagctccgcctccggggttcacaccattcttctgcctcagcctccccagtagctgggactataggcatgcaccaccacacccatctaatttttgtatttttacaaaaatacagggtttcacctgttagccatgatggtctcgatctcctgacctcgtgatctgccctccttggcctcccaaagtgctgggattacaggcgtgagccactgtgcccgacagctctgtgtccttttgaaggtcatagttaaagtaaatgcagcaatattctagagctgtataatttggtgcattgggtgctgagttcctgaactgtagctagtctgaattgaaataatgctgtaaatgtaatatacacacaggatttcaaaggcttagtaagaaaaaaagactataaaatatattttcaagatgttttaaaatattgagtatatgttgaaatgataatgttttggagatattgggttaaatagtacatattactaaaaattcattttacctgttttttaatgcggcttttaaaattatgtatgtgactttcattatctttttattagacaatgttgtcttagggagaggatttagtcttataatcagcagcagataactaaaatcctccagccaatggctgaacataggacctttagggatctagcctcccagactcactagatttttatattctgtttaatcagtggtggggcatgtctagaaaatattttgaccaatccttgttcattgaataacactaaaatcaacagtgggagaatatttctaacattctaattatgccaattattaagccacagtaaaagcacatttctcatattcattaattaacaaagtctctggtgttgatgaaaataaagataactgatgcctttgtagtggtccactctggagtttagcctttctaattaaattatagctgaacttctctggaatgttatactggcttggcacaaatgtgagcctctagtgtggtttgcacactggaatatgtgtgtcttactgtgatcttggcaagcttttgtagtggttaaggcacccaagatagcatcctacctgtctcttttcttagcgttcctttcataattcttctttttgactttataaaagaaagtcatacctctcactctcctcaaattttactgtgctgcattgctgtgaggcatcaaacaagaggacaatttaagaatgcaaaacaaagagcaatcctttacaaattttttaaatggctggtgcttgttgcatccagggcaaggctttgtgtccagctgccatccatccatccatccatccatccatccatccatccatccatccatccattcatccatccatccatccctttatcttagaaagagaattctgaagtgagatgttatttggaaacacctataacatggtttttaaatccaaaaccaagtcagactcctcttgtcagaaaataaatctgctttggctgattagtttgacagtgaggactagttttgccaattaggtaccagaggaggcattttctattaattgaatgagctaaatttgcaactccttaacaacatgctagaaattacatctttttcacgatttaaatttatgataaatatcagttctcaactttaaaatgtgcatggaaattcttttggaagttcacgaacaagagtgtttgaagcttctgacttaaactagtttaacacaagcatattacactttgtatgttgaaatcttctaaagtatattatagacattatataggaagttttaagaagaaaaagaaacgatggaaaaaggcaatccagaagagaaatggtagaaagagactgacccacatggtgcagggagcccagactggtacagcaggatggctctgtggctgagaattccaagatggcggcctgtgtcatgacacgtcagagaagggtgttgaaaaagaatattcagtgacgcaggatggagggaggtttgaatgttcaaaaaagtagaacaggcagaaggaggtgggttctgaaaatgaagaggagagaaagagggggagagtctttgctccaatgattctccaaatgatggggtgtagtaaagaaggcttggcagatttgtttgaggggatgttcattgtggcccttaaggttatgtaaacttttgtagatgtctaatcctgacgagctggagacactttctctttgacccatgagttttttgaggttgcattgttctttgatgctacctggagactctcctgtctggaagaatggaaagatcagtgctttaatgtatgtggattgctgttgtctgggtcttgtctatctcaaggtgttgtatgggctctgacacacagaggactaaattgaagtaaggaagcaagccaaactgtattattgctggtccattttatccattggagttgttggcttcagaatgtcatcattggcttttacaatgctcattcactgcttgatgcttttcaatttattattgaattatcatatatatgtgtattagtctcttcttatgctgctaataaagatatgctggagactaggtaatttataaagaaaaagaggtataacggactcatagttccacgtggcaaagggacgtctctcatggcagcaggcaagagagaatgagagccaaaggaaaggggaaaccccttataaaaccatcagctctcatgagacttattcattaccacaagaacagtatggggtaaaccacctccatgatttatcttctaccaggttcctcccataacccatgggaattatgggagctataattcaaaatgagatttgtgtgaggacacagacaaaccatatcaatatgtattctctcacaatatattttttatttgactatgatgacccggtgtcatgatcttagaagacacatggcatacagtgaaaggtttcctacattagctctatagaaaacatagcattcctatatatgcatctggagagatatttgggtaaagtattgttctctttttctttggatattttatacatttttttgtttgaaaattgctgtttcttggatattatattgttttattctgtgaatttatgaggaagatccctcataacatgaggaaaataatgaaataaataaagtaattaaaatgagaaaaatattatttgaataattagcagtcttacaaggacatatttttgctgctattttgacaagtagaacttgtcatgagaaagtctgaaggtcaaatcactggaatggtttttacattcaaaatgttttccccattttttttccaggcttatacatctagaattatatgttaatgagatagttgctttttcttgagatttctgcagacagtttgtagaacataatagatgtttatttgataataataaagtgaggaatttaatttcatagaaattttctttcataagtttagccttttgtcaatcaataaaaaaatgttttctgttggcttttcatgacagtgactcatatcattatgactaattcactgtgtcctaaataatccctccttgttctatgacatttctagcaattttaatgaaaatcttcactccaggacaaaaattcaaagtgaagtgtttgtatgtaaggtttacaatctctaccaccataaatggagtctgtttttctgcatttgcaacacatataatatggttgatagaaaagatgttgagtttttttttttttttttgcaaaatatatttctagaggaaaagtttcaaacagtgtcggatgcctgtaaatcttagaaacattctttcagtttaagtttaggcgctctagaaagtgcaagtagaaaaacattatctcctatattcctatgcattgtttaaaaaaacttgagtttgttgaaaagaaaacaggttaagaagtaaataaactaaaattagaagatggaattaatggttacatttaattctgaaaataactattttgagagtaaatcaatcatttggcaatatggtgtggattaaatgtgaaaaagcaatttctgaatcccagctacttcaggttagcatgctgttaaacttgaactcattcagaaagtcttcaggaggtgtctaagtttgggggttttgttaggtagtttctgtgttttcaaagtcagtcttacactaggatggctatacatttttttttaaaggaaaataacaaatattagtgaggatatggagaaattggaactctcatgcattatggtgaaaatgtaaaatgatgcagccactatgggaaatagtttgctggttcctcaaaaatctaaacatagaattactgtatattaacctagcaatttcactcctgcatctacacccaaaggaactgaaatcgggaactcagatacttgtacaccagtgttcattgtgacattgttcataatagccaaaaagtggtcaactagtgctcatctttagacaaatggataaagaaactgtagtttatacacacaatggaatattttttacccttataaaagaatgaagttctgatacaagctacaacatggatgaaaccttgaaaacattatgctaaatgaaataagccagacccaaaaggacaaatattgtatgattccacttacatgacatatcttaaataggcaaatgcatagaaacggacagtagattagctattaccaggggctggtgggtatggggacttattgcttaatgacagcagagtttatgttcagtgtgatgaaaaagttttgggactagatagtggttatggttgtataacactgtaggtgtaactaatgccactgaattgtatgattaaaaatgactgaaatcacaaatattgttatgtattttaccacaattaaaaaaaatctattaatatgccaaaaacgattgaattgtaaactttaattgggtgaattatatagtaggtgaatttaaatgggtaaattgtatggtaggtgagttctatggtaggtgtgtggatgaattgtatggtaggtgaattttatacctccataaaacaggtttttaaaaagaggcagtcttgtgagtaggaggagagctaggtaaggagacatgaatcttgatttgatttatggcaccatccaactgcatgtcatgaggggtaagtccttgacctctctggtcacaggatggaatcccatcaggcaccctcttatatacttcctactcctgtcctctgtggctccgtgatagtaaggtggatagttttggtgggttaggttggttctcagctggaacaaatatgttcctctggccaggcacagtggctcatgcctgtaatcccagcactttgagaggccaaggtgggtggatcacgaggtcaggagttcgagacaagcctggccaagatggtgaaaccccgtctctactaaaaatacaaaaattagccaggcttggtggcacacgcctataatcctagctacttgggaggctgagggaggagaaccgcttcaacctgggaggcagaggttgcagtgagccaagatcacaccattgcactccagcctgggcaataagagcgaaactcggtcttaaaaaaaaaaaatgttcctctgatgctgaacatgatataaattctaaatgcagtccagatgtggctgtagacattctaggatcccaaggctccataattgccttcagttttgggcagagtggatgggtcattgggtcatgctagcagagcatgtgcttgcttaaggaggttgatttttttcagataatctcgattttattacaagaacatttttaaagcatatattttaactccatacccttcttctcttttatgggcatatacagttttcaggattgaaaacttctgaaatttggattgtcttagccttattttgacatcattagatgttatagccctctgtgttttcttgtagataccaaaattatattaaacatgttcttttttgtgaggtattgagtctgaggctgaaatgaagaggtattgactaggcttattctatctagaatgtccttcccatctttgcatgaaccatacttcatctatttttcaagatatattttaaagccttctttccattaaattatctttaacctcctcctacatggaagtgcattgaacacaggctccacagtcagttagacctggttctctctgtggcccagcatttgctgggtgggtgatgctggacaattcatttaacttctgcctcagccttctcctttgacaagtggagttgttttcctttcccttctcacttccaccatttccacctctccttgccttagggcagagaggagttaccagcagaaagactggcagcattgcctgctgtctcctgctcaccattgctgatgattggcatttgtatttcaatatggcgtccgtgctctggaaaggaataatctggaaagatgactgggaagtagatggtttgcctgtgtcatcaccacgttttccctgttccctggggtggtgtacctgctcttgcaatattctctaatttctggatgaacctggctttggaaggtactgtgctgtaggtttttccaggagttttgtttgctttggagtttcttaacaaccatcattgccttggaggctttgtcaacattttgggcttccttgtcctcaatagatttgcttgttgggccacacttgtgccttttcacttattctcaccagggacttccttcactgggcatctggctgggattcttcttgcattaatgcacactcaagggcctctgaagaacatcatggaagcatgtgctggcatttttttccctccaattattggttatccaggacagtgatattacttcaattgttcaggctagtctggatatcaggatcattatctttatggcaggccaggttattatgaagaagcacccaggagctatgatacatacacagcagtacggagagaaaaagaacagcttgtgagagcatgaagagccagcccctgggatcaagaaaataccaggaatagctcactgccctgcgggcttcttctctcagaagaaatgagactataatggcttcacaggtttgatagccagtgaggtgacacagcatcttgggaagacatggtccacttgtgttattattgcccatcggattcattccccaagcaactagttcattgtaaactaaagcaaaacatatcgttaaaaaaaaaaaatcaacttgtatttagctttttacagagtgaagtgaaactctgttttaaatgcggtttttagctttaataacgtcaaggtttaaatgtggcaaactcacaaaaatatcatttgaaatgttaattatctaaacttcttgtacacttaggtagttttgacaattctgaaaactacatttttaattttggcttttttaaggtcctctgaggatgtcggattttgaaagaaactcagggaggttaaacatttctgtttgagagcagtctgtatcctgttggctttgtttctttgtctacatacatatttataatattttacagattattatataatatttattattcccatttgacattttaataaatattgtttgaataaatgaattagtgtttgggtgtgattgggtgtgatgaaacaagagagcataatggcataactaagtgtgagtggcagaattatattgggagtgattcacatgtagggcccacaaaaagaagaaatgagaatatgatctgaaatgcttttgttacttccaaaataataatctttgctaacgagagattggctttctagggtgtgttaagttttgcatttgtgaaagaggccttaataaaatcaatccaagtttaaaatcatccaataagagatttctttcttggctaaaggtctaggtgctactttcctgaataataagctgcactttagggaactcatgttatgttagtgtcagccaactggacactcttaaattgcttcaaatggtgtactagaggataatgctttctctctaataacagtagagttttagaggtgatttgtgtgctttcataggggaaacaactcctaatttctctgccacatttccagtttaggatttaaattgatatatgttgctacgttctgctaaaacaattttccatacccatttgagctggtgaagtgaaaacattttgaaaccagtttccttgaagatttatcaagcagttttgttgatgtgtcttgctatacttcttttacctatcacagaaataaaatcccaggctaggcagcagtgaaggcctttggatctgtgtgagcatgtcaaaagcattttaagaagagcaaaatatttagaggaagaatttgggaaagcagccttaagggatttaacacatttttcttcttctaattcagtctcgtgttcatccctctaatggagaaaggtcattaatggataagatttgctaagccagcaaaggcttttagaaacaaaatggttttcaaaaatccaagcctaaggaaaacagggtttgaatttgggagcttgaaagaatacatttagagaaggtgtatatgcagtgtaaattatattcattcacttaatattatacatatatatttataatcaagttatagtatgtttgttgcattcttacacatttttgttttggagaagttaaaataacgaattggcttgataatgaagattgaaataatttcagactgtggaagttctgtataaatttctaggcagacaaaatggctgatcagaatagcatgacggagttttagttgtcctgttactcgtctgctatttttacgtgcccgagatctgggccaagattgtttaccttaattgttgtgatgtggaggttagtaagtgtgtgaaatttgttacatttcaatctcataattgaaaagccacaggcaaattcttgttcttttactgaattcctgtctagtagaaaataagaagtatgtgtgtttgtatgtgtgtgtgtgtctgaaaaaaggaaaatgcaaactagtctttgaaatatgtactcccttttccccatttttaactgtatcaagagaatgaatgcggaagtgtgtttataaactttgaagtatttttgaaacatttggatgttagaaaatgtatcgtttacaggcaaataatttgtctgttacttagacttatattctgacattgacttgacccataaaataaagactattgttgaaatattatcttactcatttttacaaacataagaatgggaatccataaattttatttcatttcatatgtgataaaatggaaagattattatcattgatagggtaatagtgctcatttctttgcccactttatatctggggagaaacctacatagtattagatattttaatatgtttttgaaataagaaagttaaatgctccggaaacaggttaagaaaatgtaaaatgtagtaagatttctctcttagaattttttccatttttatggccccaaattcttaagttgtgtgaatgttatcaaattaagataatttaatacttatttatgacctttctatatttttttattcatgggattaaatgaaactgcatataacaagatttatgaaaataaatcctttttaaggtagtgggacaaataattggattttccaaatgccctaaacactgatttttaatattaaattcattttggtgaggctggtatatccccccttcaggttgatgtgtggtggtagccttatattctgagtataatctctactgtgtccctctttgatatgaagatggtaaagggtcattcactgtgtaagcaagttctcttggttaataaatggcttatgtggccttgatcagataatataaagcttgaaatagggatcgttgctgtctttgctgtcctttcttgaaggaaggtcacctctgagcaccattaatatcaaggagtttcttaaacagcagttttgttttctataccacttgctcccttagtgtcttggagttggtctccaattacctttatggatttgtaaaagtgcatttttttttttctgaagctgctgctatatttattctgggaatgaccttttaattacaaactctccttccacaagggggtaaggaccgaagaccacaaactgggtgaagtggtaggcgaacctctaatgatcctagcagaggttcgtgagcaggtctgtatttaatgtggaactgacactggagggccaagcacacctgggcttcctccattattattttgctgctctgatgtgggaggcagcccagcagtataaaaggtggcaaaggaggcaggacacacatatggatggagccacacctttctgcactgtcgcagatacgccttggacagctttctgaacaactgatagagattgtgaaaatgctgttttgtaggatttaagccaacaatgactcttttactggctttaatagaaaatcgtggagtgatggaagagtatgatttgaagaggtccaatgaatatttatttatctaccttgcttacacttttactgtaatcattataacaacgagctgaacaccagctcttcgtcaagtgcttttcatttatattcactaacctttacaatactcttgcaagctaggtattatttatccccattttacagatgagaactgtgaggaaaagcgatgttataatgacccaaggtcacacaataaatggattgggacaccgtctatttggttctaaagagaaagtccttttctctttttgttagccacatggactccttgtatgtaaccaaatccttctacccatatttcaaaagttcagggtggtcagtcttttaaagtaacttttcttttttttatggctcagaaaatgaatttgtaatcaaaaccaaaacggataatggttttaaattcttctgatttttctacctgtaaaagttcgtatagatcaagatcattaaaacctcatgccaatcttactacaggaaaatgggttacaagattgaccataaaccttatactgtcattctagagggtgtaggaccagtatgaagagggaggaagtcacgaattcctgagtttttattggataactttaatttttgtttttagcatgctgacattttgattatgctgaaattttacttgcacaaaatgtagcagaaagtgctacgggtactagctggaaagtagggctctgatttgatccgataaacctggatttggtcactgatggcaggactccggggtttagggtgagacaacctggtcccttgggaaaggtgcccgagcctccctctgttgtaggcagtgttgggctccataagtgtaccgggcagtcatcacattctgcattagctccgcctcattgtgctcaaggagctcgactaataggactattttaaactctccaggatagagataaccttatttggtgctttactaaaggtacagactctcatactttttccttctctttctttttccattccacagatgaacacaatgacgtacagaagaaaacctttaccaaatggataaatgctcgattttcaaaggtaactgagactttcaaaaacttcgatggttcagatgccgcattctgattgaaggagtttggttggaagtgcagtgaattttccccaggaaatgtcacctagccgaagtcttctgagtatgcagatacatttgttgttcctttattctgtcctaaaatatgtttaaacggaaattctcatgcacatagtttatgggacgctattgacttttacctggccttctccagatatctaaggcagcagttagctgctttcgattctgtgaatcctgggtacatcttggaaaagaatatatcattgggaaaatttttgagttctcttggttaagaggatgatgatttcattttgcctggttaaaaccaaatgttataattcaggcagtctttctaccctgtcagaaatatttatggatttttattcttgtggatgtggctaataatatttatctgccttgtgggttgttttttcttgtgtacttccttaattcctcccccaccccaaagatctactcttagcatttctaaccatttagaacataatcaatgctttgagcaatattttttcataggggcagagcatgctgaagagaggaattgtcagtgctattttcaaatctgttctaatatgattatctattagttattggtgttggaattttgtgcactaagcctgaggtaggaggagagttttcaggataacagattgtttaggactcttctacaacaagatgaaaaatagaagtttctcagagaaacactgttgtggtcttttaaatagtataaaagctattttaatgaagagttgcttttcaaaatttttggttgcttttcaaaagttgtaaaggtcagagagacaaacattggtatttcttgaggaaaaatgaggatatcttaaggttactttgagtagcagcatagtttaaaaaatgctccacgtcccaatatttatagttggttatttgatttcactgctttttgggctttgcgagtttatcttgaggggtattttatcttgcctgtgagtatgtaaggaacatgaaaaccaactttgacagagggttaaaaatacagagaattagaacataaaggtgcttgcataattggcagttatatgtgtaggattattccaaatcacatgcaggtgtgttttggtaaattttagtttgttttattccagagacacaggtaacatatgtgcatctcgggcttgacatgaataaaaacttttgaactattcatctgcatgtgaccattttccagagaatgtagttttagcaactgggagtctggatatgaggtgttttattccagtggtcttatgattgctcataaaagtaagattatttttcctggttattcacgaggataacacagtaattgtttagatagaacaagtgaagcagtttttagcagcttaatttagtctttggggaagaattgccttagaactaattttgaagattgttttgaaagcattaaacttggtagacctaagtttagagagcatttgaaactgggtaaattactttttacctatttatgaaaatggagagaaataggtagtaaaataggacatggaaagggtttgtagaggaagagagatgacaactgagacagaataattgaaaagaaatttctcaatatttatggtgggtcattgacacctttaaaaagacctcaaagaaaacaaaatctggtagtaccagactagtttattaaatgaacttgatatttaaatttgtgcatttataatgtctattattttgcaattaaatggggctttaagtcccatgtaaattgtttgccctggaatatttgtatttcttaccaagatactggaaaagacttggtaatttttatcatttttagtaaaagttatagttagttttagctaaaagcttctctattagtgtttggagatggtagtttctaagctcagcttctgtgttagtgtttggagatggtgtttggagaaaaactaccaaacgtgggatgactctgaaaacttttattttcatctagcaagaaatcaaaacctagaaggaatttatctgagaaattatgaatatttggagatgggaagctcatggcagtgacactaaacatccacattattttttctttcttctggctgtcttaagaccataagttggattgcttccaattggggatagtgaaagagggagtaacacatttctagactgggagatttccatagactcccatgtggcttaactcttgctgagctggggaaagaccgtattcatgcctggtattactaggtaatgcgaggatagaacaagaaaaaaaaataaatcccgttgaagggaacgaattttttttttcatttttaaaaatccatgtcctttggtacattgtggtgggttttacaatataatttttcagtgggtccactacttccctacagtgtgggttcctaaacagagcaacaggacctctgtgctgagaaatccaaacagacactgatggcaccttctgccatttaggaatttgttttaaaacagacatttgtctagatatttcctttgtggcctcctccccatcaaaagtcaatcaaacatcgagccttgttaattccaatacctacatatattcaaaattgtccacttactctatgtagagtgacacgtctcttttccaaggcattgttatttgtattagaaaaaatggtgagagactttacaatgggcaaaaaactagtgggtgtcctgttagctcaggcatctgaattatctctgcctttaattacttttgagctactttacgactaggtaagttgtggaaaataggtatgcaaatgattcttatccataaaaatgaaaattatttgtaaagcagttaattattactccttggatagaccagtttttgcatctattgcaaatctatttcagttttcatttttcttgtgtaaaacatgtgtttttaaaaattttcccctgaactggttgtaacagcttactgggtccctcattaattaatgagttaaataaatctttgacagacattattatcacattggtttgagagttatgactttaccttgttggaaaattatccttgaatacatggaccactgtgataatctgctaattggttcttccattccatgctccaccttctccatctccctttcctttttttttcttttctttttttttttttttttttttgagacacagtctagctctgttgcccagtctggagtgcagtggtgcaatcttggctcattgcagcctgcagcctctgcctcccaggttgcagcgattctcctgcctcagcctccctagtagctgggattatgggcgcatgtcaccatgcccagctaatttttgtatttttagtagagatggggtttcaccatgttggctaggctggtttcaaactcctgacctcaagtgatccgcctgcctcgacctcccaaagtgctgggattacaggcgtgagccaccacgcccggcctccccttccattttcaagagagtatctacggtgcttctaaagggtaaacctgaatacctttttctcttctgtaagctctttcgttgggtgcccattttcctttttttaaaaaacacaattaaaaattgaaattgtataatttttggtatatagtgtgatgttttggtcttacttggttcttaaagctctaaatagctgcctcccaatttactcctaattttattttactttcctctcgctccctcattttgctccagccacacggcctttgcttaccatcccggtgggccctccctggcctttgcacacagtcctttctctatctcttcctggccagctcctaccccttcctgcttgtctgagcttaaatgttgcttcctgaaggatctcttttctgagctcccagactagggtagataagctgtatactctcaaagtgttatgatttgaagcacttaccatactgtaatttaaatagttgccagccttttttcctaggttagacataaactctgtgggtgcagggactttctatttgcttattggcatatcttttggcatttagtaggtatccagtaaactatttgtaggcttaataaataaatgaatgacaatgacatagacatacattgaatatgcctaattctatatgttcataagccacttggggatggttgcattggagagacaggagtagagtttaggactgagtgcaacatggcatgaattgtgctaagtcctggatatgaatacaatgcatcaggacttttgctgcattattgacaaaaataaacaaatccagctatccaaactttccctatttacctgatttcttggagttgtgctgcagtgattgttaaataaccacttggacttaatgcatattattgttttatttacccaatacaattcttcacatagggtctaactattaaattcactgtgaagaaaaataagacttaaaacttaaagccagaacaattcttttcttgataagggatttggtaaagaacttgagaataatatcagtctaaaaccatcttttaatttgtaactgtaaatgaatatacagtaaccaagacagtgctcactcaaaatatgtattctttttgctgcaaatccttgtgaacatatcatggagtatacagtgctttggaattcaggatcctgagaagtcatagtgtagagtaaattatggctcttggatttttaaaagttatgaagagctcagaaaaagtgattatctaaaaaaagctaaaaattaggaaattaaacacttatttctggatatcctgctcatttatttatgacctcaggcaaattattagtcaattttttcagatcacctggtctacatttccatagccataagacgcaatcgatcattattaccttccttatatcgtgaagaaatattgaggcattgctgagaagtgtataggagatgataattacttaggaatgcaaaataaaaaccctatcatatacctcgaatctgtgatagtcctgatctgtggatccgtgccacacgtaaacagaaaagggaaaaagcactggctcattaagcccgcgttcttccattgtatggtgtgtatgacttgagtgttttgccccttctaaatttcagagcctctggcttgttagccggccggtctcccaagggaggcagcaaaggcctcattgctttgctttgggaaatttgctctgactttgagcctgcattttctttggctgactttcagagctgctcatctggcagagctgaaaacatacaaattgcagaagttcttttatccatttggtgagatggttctctaaagaggcttcacaaataaaggttaggtagaaaatatgcaaaattaaaaatgctgaacttgagtttgtgcaaatccctgcttttctcttttctaagacacagatgagccaagttttcatgtaagttacaattccaaccttgaaattcaaattgacagaacgtaagagaggaaagccatgaagcattttttatggattccaatatggagagctattaagatgttttcctttaggagacagtgagacattgcttttagattgttttcctacttttttcatgttggaagttaataatcactaaaataagggtgggaaaagatgtggagggagatttgtacaggaggtgcaataaaaggagcccaaacccttttccacctctagatattcagtcttctctttagtactgtaaagaggctgacaggcttcctgtgtgaagataaatcccatctatagtagaggcttgagcttgaagagttacacattgggtctgccattggtttatttcatgagtatgcatatggcaactcaactgattgttttaggagccatacacattcaagtggttccttaaaaagaaatgtgaatttgtgtctattcactaatacctctaaaaagaaaacaataaaatgtactccatattcttaaacaccagcttccagatactttggctatacttatgcaagctttgttgttgttgctgtttgttttgttttcattcaatttgaatttttaaaatttgatttttgtctcaaaattgtttgtaaaatgaacttcaccttggttaaaactaaaaacaaatgattaaaattaaaactgtcaagtattatttaatatgctatgctttgatgagtacttaatacagggttttgattcagcctattggtattcataattgtgaagcaaatttggtagtctttgtaattgacgatcagtttagaaattgatcaactgggaggaaatgacttttcacccttcacttaggaaggagtgagcaggaccaccttccttgtgctttcccattcagcctcttgtggccccaccatctctagcttcagagatgggctctggtggtgcagggaagggtgggcttatgccagggtgggaagtaaggtatcaagaggggattgctgagaggtagtggttgaggggagagaatctctacctattacacagagcaaggagacactggacccatttccagctgtatctggcctgggaagcttttagctgcaattgccacaggtaaccatccaccagccatgaggggagtcacacttagggggaagctgacatttatttttgttattatttgttggagaaataaaaaaccctgccaacactggtacctctggttaccaacatagaatacagagaaaacacaatttacaattaagtgtgcatgtatggttaagtgcatgcaggcagttggctaaagacgtcaaagtctggacagaatttcacacaaatattcagtaaagtgggagaaagaacaatgaacacttgtctctgtgagagacaactagatgtgccttgttgtgatagtctcttgtccaccttctcaacaactcctgtgtttaacttagcttgaaaaactggagactggatttatctatttcctgaccaaaaaaattgggtctattttgttttaaggagacaccctaagggaagggaaggagcagtgtacctgcctctcctttatatatattgaacaaaggaactttgattttatttacctttacactatcataatcagtgctattaccagtgcctcaccctagtctcatggaagcctatcttttgaaggactgccttcttcaaacatttctactgtattgccagttgtgtatacatggaataagctatattgtttcctgagtttgcctacagaccttgcctggtatgcataaagagtcagagctttttatttatttatttatgttgttttatttccataggttttggggggaacaggtggtgtttggttacatgagtaagttctttaacggtgatttggtgaggttttgatgcacccatcacccgagcagtatacactgtacccgatttgtaaaattttatccctcacccccactcccacctgcaccccccgcccaggtccccaaagtccattgtatcattcttatacctttggatcctcacagcttagctcccacttatgagtcagaacatatgatgtttggttgcccattcctgagttacttcacttagaataatggtctccagtttcatccaggttgctgcagataccattatttcattcctttttgatggctgaatagtattccatggtgtgtatatgtgtgtgtgtgtgtgtgtgtgtgtatatacacaccacaatttctttattcactcattgatcgatgggcatttgggctggttccatatttttgtaattgcaaattgtgctgctataaacatgcatgtgcaagcatctttttggtataatggctccttttccaaatgcctacctctgatgggcatttgggctggttccatgtttttgcaattgtgaattgtgctgctataaacatgagtgtgcaagcatcttttttgtataatgacttcttttcctctgggttgatacccagtaatgggattgctggatcaaatggtagttctacttttagttctttaaggaatctccacactgtattccatagtggttgtactagtttacatttccagcagcgttcccttttcactgcatcctcgccaacatctattggtttttgattttttgattacagccattcatgcaggagtgaagtggtatggcattgtggttttgatttgcatttccctgatcattagttatgttgagcattttttcatattcttgttgcccatttgtatatctgcttttgagaattgtccattcatgtccttagcccattttcttttttacttgctaatttggagtcagagcttattcagcctccagccctcacctgattgtccgtggagtatgctagtggcccctgcctctggccgccaggtatctgagccccacagtggtttcttatcatcccagattttatcatcactataccggtaacttaccaaaatcgaggtaaacattctgttacatgtctgtatgacttgtgattccctgaaagatattacttggtttggcatgtgttttacagtattttatagttctgaaggtaggtgcacatttactgattcggagtgttctctgcacatttacagtaaacactgtaaatcattgctctgtagttaatgaggcatactctgtgatgaccagcaccatctgtttctcttgtctttctctcttcctcttcttctctccctccctccttccaagcaagcttctaaatggaatctttttcaattcttagcaacttatgctgaccacccagaattcttaaagaggacggctgagagatctgcagtcactaattgtttaagtgactggagcacattttgctggttttctgttgtcgaggtgtggaaggaactcattaggcattattgcagtgccctcattttactttcagtcttctctgtggaaagcaatgctgtgtttgttcttttaccacagagttgaatcataaaagtaaatactacatatcatacagtcttcatttcgttgattcaactacacattttataattgagatgaacctaattttatcattttgcttaatcttgactagagacagcattctttttaaaacatctattatttgttttatgcagtaatacataaactttgtaaaaattagataaatcaataaatccaaagaaaattgttcaaactacttttaattccactaccaagagaaaaagtgtagcattttgttgtataatggtttaaaaatgtattatcatataaatatattatcattaactaagatgatgtacatagtgcttactgatgcattattgattattaagaaattgaaaaattacaagaatgtaaaagatgctacatttgtgtcagtgttgaaattggggttcatgagttaaagattctaatttgaaaaggtttagaaatgttgcattaaattatttctttttgaatttttaaattaaccaacttcttgcaaaaaacagatgaggagggagagagagagaccataaaatttacaatgttatcagatgcttgggcatcattttgaactatcaggggcatcagattaatctcaaattaatctgaggagagtgtgaatatattatggtatatacactatatatgtttgtgtgtgtgtgtgtgtatatatatatatatacacacaccatacacacacacacacacacacacacacacagtaaacaatgggactggtaattgaattaactagagtgtctcaaatcctgttttgaaaatagggtgtaaataaataatagaataatcagtgtcgaagggctcaaatttgttattcgtttgtaagatgacactcatcagacatgttacttttgaaagcatttaaaatctgttatcttccaactgtttttattatatgcagttataacttgattgctgataatgggtttaggtaagtcataggacagattctgtctccctgctgtatctgtttctttgtacaattttggcagcaccaagctagatttgcaaattcaccttaacgtgtttgccatattatgttagtactgttttttgtttaaatctacagtcatgtgtcacataaggatgttttactcattgatggaccacatatatgatcgtggtcccagaagatgataatgaagctgaaaaattcccatagcttagtgatgctgtaactgttataagggcatagcacaatgccatttactcgagtgtattagtctgttcttatgctgctactaaagacatactccagactgggtaatttataaaggaaagaggtttaattgacccacagttccacatggctgggaggccatggtgagaagcaaaggaggagcaaagtcacgtcttgcatggcgtcaggcaagagagagagcatgtgcagggaactaaccataagatctcatgagacttgttcactatcatgagaacagcacaggaaagacccacccccatgattcacttatctcccactgggcacctcccatgacacgtgggaattataggagctacaattcgagagttgggtggggacacagccaaactgtgtcatcaggtatttgtggtgatgctgttgtaaacaaacctactgtgctttcagttgtagaaatgtctagcacatacacttatgtacagtacataatacttggtagtgataaccaacaactgtgttactggcttatgtatttattataaatttatcattatttaattaatttatttattttgatatggagtcttgctctgttgcccaggctgaagtgcagagatacaattatggctcactgcaacctctacctcccctgttcaagcgattcttctgcctcagcttcctgagtagctgggattacaggcatgtgccaccacgactggctaatttttgtatttttagtagagacgggatttcaccatattggcaggctggtctcgaactcctgatctcatgatctgcccgccttggcctcccaaagtgctgggattgcaggtgtgagccactgtgtctggtccattattttagagggtactcctactcattaaaaaaaaaaaaagttaactacaaaacagcctcaggcagttccttcaggaggtgtcccagaagaaggcatcggtatcataggagatgacagctccatgtatgttattgcccctgaagaccttccagtgggacaagatctggaggtggaagacagtgatattattgatcctcaccctgtgtaggcctaggctaatgtgtatgtttgtgtcttagtttttgacaaaaaagtttgaaaactaaaaaaatacagttttaaaaattgaaaaagccttgtagaataaggacaaaatgaaacagaatattcttgcacagatgtgtgatgtgtttgtgttttaagctgttattataaaagtcaaaaaattaaagaaattgaaaaatttataaagtaatctaaggtttattattgaagaaagaaaaatattttaaaaataaatttagtgtagcctaagtgtacagtgtttataaggtcaacagtagtatacagtaatgtcctaggccttcacattcatttaccactcacccagagcaatttctagtcctgtacgcaccattcatgttaagtgtcctatacaggtgtactatatcttttttttttttttcgtttgagacagcgtatctctctgttgcccaggctggagtgcagtggcgcagtcttggttcactgcaacctccgcctcccaggttcaagcgattctcctgcctcagcctcctgcgtagctgggattacaagtgtgcaccaccacaaccagctaatttttatgttttaggagagatgggtttcaccacgttagccaggatggtctccaactcccaacctcaggtgatccacccgccttggcctcccaaagtgctgggattacaggcatgagccactgtatccagcctaaaatcttttatatcatattttgactgtaccttttctgtgtttagatacataaatacttaccatgtgttacagttgcctgcattattcagtacagtagcatgctctataggtttgtagcctaggagtgatatgctataccatctagcctaggtatattgtaggctattccatctcggtttgtgtaaatatactctatgatgtttgcacaatgatgaaatcacctaaggatgcatttctctgaatgtatccctgtccttaagtgactcatgactgtatttggaatctgagtgccgtgaagtcaagagctgctttcaccagccttgattttcgcatactgtatgacagaaagtaggcactgatctatctctctactggaaaatccaaggcccaattctgcatctgatttgttattgatacaaagaattagaatttcactcttttaagaaatccaaactgcactttctaaatcttactttcttattcaattttttgtagatttttttctattactactactattgctgaaaaacatgatctgtggtagaaatattaataattgtgctttgagagtattgaagtagggtaagaataatacagtatcagatcagagagagggtgggaccagatctcacaagatttttatttggagtttggattggatttgcctgtaatggatgcccattagggtaaatcagggaaattgacacaatgtggtctgcacattaaaattggaattattctggctcttacgtagaagcaaagagatcagttggctggagctggagttcaggcaatagataatggcggtttgggctagagttgacacaatgaccatggtaagaagtggtcatgtttgggatgtgtttttggaagtggaaggacagggctggtgggtaggttagaggtggagaagaagtgaaaggaaatgaatcaggaatgactcctttgtttttggcctgagcaagagtcattatttcttgatatgtgatgtatttgcaattaatcatattctgtagtccgtggatgtgtgtgtgtgtatgtgtgtgtgtgtgtgtgtgggtgtgtgcatatttgtgtgtggcctttctccagagttgaccagttccttaaggcattcctctttgattaatcctatatttcacctatatgtggtcatgctctatgcagaaattgctcatcggtcaccctatgacctggtgtgcctgtagacaagatctatttgtttagcacagtgttttaggaaattacagttaccaggaggttatacatataaattcagatttccaccttctttttaaaaatgagaagttctgcccacagtgaacctgaattcccatatggccacccttagctagaactgagcaggagctgccacttgagcctgcagagccagctgattctccagatgtgcctggggctcatcaggtttgcttccctcacatgtgtcatcactgcagttgtttgcagcccttgctccccgctagacccccctggcttctccccttgcattgtgctgaccgttcgcctttgtgctctaacattttaaaatccagcagcagtagtgtcccagccgcaagcatgagtgctggtctcacttgtcaaaatggtgatggtagagggagatgagacttggggacagccaaagctggccacgccagggctgtagtatctgtcatctagagttgtgtcatgtggttgtttactttttttaaagttaaatgtgacccaaggcttatatacccttcaagttcaagactgttcatttataccattttgtatttattggaaaactatggaaactctcttgagaataaggagaatgacctgaacttggcatttctgcagggccaagcacaaaggaggtattcactaaatatttgtccaaatgcattattcaactgtattctctttgtcagagaagtctctgcaaatgagtctttgcaaagatttcaaaattgaaataagaggttaactgtcaggatgaatcagtttttatttttattcatagatgacttctgacatttccaagctgtttcacagagtggatcccaagtttacagcttgtgataccaaagcaccagacacgctttaaagtggtgtactagaaaaaaaaatagtctgcattttgaattcatcaaaatgtagtatatatcttgttgctctctttggggggccactaaatatatcccacccactccagtgattaaatatttttttccctacatatcccagtccagtgatgaaatattttcttccctatctgtcctagtcctgtgtcttcataattttagtagcagtatagcacagatgttgaaaacatagatttagagccagattttgtggtatcagatcctggttctgcctctcatttgttaagtcacctccacatcagtttcttcgcctgtagaatgaagaagatgatgctgtttttctcgaaatactattataaggaaataaataatacatctaaataatacaactaaatctttataagtctcttagaacatatgatacatagtaaatgcttgctatcattatgtctaagaacatttcatatttctactgcctgtttccgtatggcctatgagctgagaatggtttttacagctttaggtggttgcaaaaaaatcaaaagaagagtaatattttgtgacatgtgggaattatgtgaaattcaaattttagtgtctataaataaagtttcattggaagatagtcattccaattggtttatttgtttatgtattctctatggctgctttcactttacaacaaaaggtagttaattgtttttgaatgagatatgttcctgcaggtcatcatatgacatattaatgaaacctgagacttgtgagatctttctctgtgaattgacactaccatgttctcatgttcagggcctgcttttgccttcctgcttgagatgaagaagtgcttagttgttgtctcagtcctttcagatattgttgatattttattacacttttctgccaatagaaaacactaaagttatgcttgtgatatagtcacatcaaccatttaatgaacatctgtcatcttagtttaacaggtaaacaaatagatgcagaaaggccaagtaacttgcccaaaattctatggccaataagaggcttcttgtttacagatgaggtcattaatggacatccataattatttataatatgaataaatatttatatttctttttttttttttgagatggagtctcgctctgtcacccaggctggagtgcagtggcgtgatcttggctcactgcaagctctgcctcccaggttcatgccattctcctgcctcagcctcccgagtagctgggactacaggcgcccgccaccacgcccggctaattttttttttttttttgtatttttagtagagacgggatttcactgtgttagccaggatggtctcgatctcctgacctcgtggtccgcccgcctcggcctcctaaagtgctgggattacaggcgtgagccatcgtgccaggcctgtatttcttttatataatgctgtttttgttgttgttgtttgtttgtttgtttgtttttttgagacagagtcttgctgtgttgcctaggttgtagtgcagtggcatgcagtctccatctcctctgggttcaagcaattttcctgcctcagtctcccaagtagctgggattacaggtgtgcaccaccacacccagccaatttttgtatttttagtagagatggggttttgccacattggccaggctggtctcgaattcctgctcaagtgatcctctcgcctcggcctcccaaagtgctgagattacagacatgagccaccgtgcccagccagttgttttatattatactattttttggaaagtggagagtggatttgagaagggtttcaggctgcccaggtgttatattagctgcccttgccatcatcagtattttctaagatcctttctatgcctatataaccccatttgtttctcccatgcgctttacctatataatatatttttgctatgcctaagacctgaaagtgaattcggttatttgttggctattttgcagaattgtacttctggttgggtgggggagggggattagacgtaggcaggtgacgaaggccacttctgcccattgcttttactgacagtgggtagcaagtcctcaggggactttcccctcaaggggaaattaccccttacccggcttcctgaagttctgcctctggaaagtggcccctgcatcttgcacatctctgtgttattttgattgatggagaaaatctctttgtccctgaatctatcgctgcctgtgaaaaaggcagctgggaacagaaaagcagctttgtttcagatatgaataagtaacagtgtattctttactgattctgtggtgaaaatttactgcactttccctcatctgaagtatatgaatgatgaaaaaggcacatgctaaaaattatgagttggctatacctaatacctgtttaaaaacagatagagggaggggaacaagggttgaaaaactacctactgggtactgtgttcactacttgggcaatggggtcattcgagacccaaacctcagtgtcacacaacatacccatgtaacaaacctgcatatgaactccctgaatctgaatgttttaaaagataattaaattatgccttgtaaaaaactaaataaagtctagttcaagggtcagctcctgtctgaagcctttgcccactccctggcttgcagtggtcttggggtctctctctcctctgtgcttctatagcactggcacacttttctattccagaccttacacatcgcactgtaattgttattttctaaaaaagagtatcacttccactgaatggtaagctgttgagtgtgcagaaatatggaatctttattcatctttgtaattcaggtctcttcaggtacacacacttgtgcgcacacagacacagacacacacacacacacacacacacaataaaaacagataaggaatcacgagggaaggaaggaaggaataatgccaaattttaggaaacttcagaatggctccttcttccccctcctccatttcaaactcagagtaaagttttgcttcatatgaatgatatgtatatattttttaaagtgagaaatgaagaagataaaagaagtattggttaaaaaatatctattattgacaggaagtgggactgttcatctctgtggagattttattatataaggcagtaattcgatacaagataatacaacatttattaaatattacattgtattctgtagttctcagggcattttcttataatattctattatttgatctttacagtgacttttgatttaaaaggttaggtagctgagccaggttcaccaggtagttaaaggtcaaactggacttaaagccgaggcttcctgattttctatgcggtgatcaccccattgcataataattcattgtatcacagacaggcaaggatctaccaaacttacagtgaatggagtgggattttctggcatcagacactagagcaggattatctgtgggagttgatgctatttatcaggaaaaagagtttagaaattctataagctttgtcagttaaaatcttggactggtactagttttaagcacaaaaagtatttaattgttaagcccaaagtgccttaagtgttaagaaattaataaccagaaatacagactgaacacctcagccctgaaattgatgaccaaatcacgtactcccataatggaaaggctggaagacattgtcacactgtgatgtgagacgcagtgatgaagtgacagtccttatacttttagttggcctctgcacccggatgttgtaggctcatttacatttttaatgcgtctcgttatcattgctttctcaggaacatatgccatactcaaggcctattattttgtcgtttattgttctttcttccactttactgtatatttgtgtgaaattatgtccagactttgtagtgtttttgttttttgagatggagtcttgccatgttgcccaggctggagtgcagtggcacgatcttggctcactgcaaccttcacctcctgggttcaagcaactctcctgcctcagcctcccgagtagttgggattgcaggtgcctaccgccatgcccggctaatttttgtatttttactagagatgaggtttcaccatattggccaggctggtctcaaacttctgagcttgcctcggcctcccaagtgctggaattacaggcatgaaccacgatgcccaacagcttgatttgctttctttgtaaggaaaaatgcaatttatttcagcttaaaatattctttatgggatttaaaaatttctgtatttgtacttgttctttctataaaagacaaatttgggccgggtgcagtggctcacgcctgtaatcccagcactttgggaggccgaggtgggcggatcatgaggtcaggagatcgagaccatcctggctaacatggtgaaaccccatctctactaaaaatataaaaaattagctgggcgtggtggcgggcgcctgtagtcccagctactcgggaggctgaggcaggagaatggcgtgaaccctggaggcggaggttgcagtgagctgagatcactccactgcactccagcctgggcgacagagtgagactctgtctaaaaaaaaaattaattaattaaaataaataaataaataaaaacccccaaaagacaaatttggatagtctgcagatcatccacaacattttaattgagcaaaaaatgaagccactcatttatttgcccaggtatatatggagtttctgctgttggcataccccatattttatttgtgtttttcttttacagagtgggaaaccacccatcaatgatatgttcacagacctcaaagatggaaggaagctattggatcttctagaaggcctcacaggaacatcactggtgagcaagtcatctttgtaaacaacggagtctccggtcattgctgatacttgatgacccagtgtgggtacccattaaagtgaaagtatccattttactttacgttcaaatgtaaaggctgaaattcggaacatttttaacaaagcattttaatgagtgctttgatacaacaacattttggctcttctgagggctctgtttttattgaagataaaattaccttaaatgtttattgctctgagacagcccaggatgagagaattacaaaaaagaatggatttatagagaggacacaatgttttgaacagtagagtctggagacaaacacatttaagagttaaatattttttaaaacagttgttaaggctgggcgcggtagctcacgcctgtaatcctagcactttgggaagccaaggtgggcggattgcctgagctcagcagttcgagaccagcctgagcaacatggtgaaaccccatctctactaaaatacaaaaaattagctgggtgtggcggcatgtgcctgtaatcccaggtactcaggaggctgaggccaggagaattgcttgaacacaggaggtggaggttgcagtgagccgagattgcgccactgcactccagcctgggcaacagagtgagactccgtctcaaaaaaaaaaaaaagttgttaaaaactatgacatctattttttattcagattttcaggattatattttgttgatttattttttaaatacaactctattattttatgtgtggggtactccaaactcatgcagataaaactgccaataaagaggatgcatgtatgggtacaaatgttaactctagaggtagaattactatcacagtacagagagatgcactcctgaagatgaatttctttcttgcagaagtgtgggatgtcattctctctctttgccctccaggtagtgggtagacaactgttagacaggctgattcctctctcagataaggttctggccagtgaagtagaaagaagctgcataggttatctttccccagatgggaattccctgccttccgagggctcttgcaatgctacctggagcctgggatggtgcctctgaatcctccttgctctgttcacatctgtgcagaataaagaggacacaatttctctaaaatccttctgcagccagaccaattaagagaaaggaagctttgttcatagagcactggtttccaaacttgtctgcacattagaactacaggcaatcttttaaaaatcccaagtccagaccacaccctagacccattaagccacactctttgggggtggggttggacagaggtattggtgtttttatgaagctgcctaggagatttcaacgtgcatgcaagttagggaactggtatcttaagatgttgttagttgagggattttcatactgtgaacaccagcttccagggtggtaacctgagacctcagccagatctcctgcctctgaggggccctgtacgctgagcttcacttctgtgtgtatctcagtgctagtgttagtcaggcatatggagggacaatcagttttacttgcttttttgttttattttccagccaaaggaacgtggttccacaagggtacatgccttaaataacgtcaacagagtgctgcaggttttacatcagaacaatgtaagtgtgtaatgtgagttctgggggtctgtgctgccatcagcattatttattgtgaaactcaccaactgcttgatgcattggcatccactgattcttgcaaacattttttcttatgagaaatactgaactttttctgtgagtgaagaaacagtcatgtgctttttctgatggctgtattgatctgtagtataaataatacatttttgagatttaagcttacctgattctctaaaatgaaatttctcttatctctcacttatactgctgtccaaatgtgctaaaataaaaacctggagttctgtgaagaaattgtcttaaaagcgtttttgtttttgttttttgttttgtcttaataggtggaattagtgaatatagggggaactgacattgtggatggaaatcacaaactgactttggggttactttggagcatcattttgcactggcaggtggggaaatttccaatcactttttaatagagatggaaaatgtgttgtttgtcttttagtttcttaaggctgccgtaaccaagtaccacaagctgcttggcttgaacaacagaaatttgttgtctcccagttctggaggccagaagtccaagatcaaggcatcagcagggttggtttttcctgagggctctgagggagactctgatccaggccttgcccccaaattctggtggtttgtctgcaatttttgcagttccttggcctgtgataacatagctccagtgttgacgtggtgttctccctgtgtgcatatctgtcaaatttcctctttttgtaaggacatcagtcatattggatttagggcccacattactcctgtatgacctcattctaactagtgacatctgcaatgaccttatttccaaatagagcccctctctgaagtactgagggttaggacttcaacatattaattttagagaacataattcaactcataacaattttcaatggaagaggctgacaaaatgccctattttcctggcatagggaaaaaagtacctacctttcttatgttaaattttaaaaagggacataatttcacatctagaaaagttgcaggaatagttcaaagaattcccaagtacctttcactcacatttcctaaatgttaccagttgtctatatttcatttgtactctctctcagtctgcctaaaatatttagtgtgtattttctaacgccatggcattctcctaaaaacaagaactctcttatgtaaacacaatagcatattggtataataatatgagatgtaaaatattgatatttaaaatgccaattattgattattaaatatgaaaacttagtatataattattaaaatcaagaaaataacattgaaataatacaattatgtaatctacagatcttaagattttgtcagttgtcccaataatatccttagtagcaaaagaaaatctgagatcatgcattacatttatttttcatgtctctttagtcctctttaatctggaagtttttgagtctttgtatttcatgatattgatatttttgaagagtgctggctagttattttgtagaatgtctctctcagtgggcttgggcttggctgagctttccttatgattaagttcaggttgttcacttttggcagggacgtcacaaaagtgacgtgagttcttcttagtgcatcatatcggggataggtgatatctgttctttttctggcagtgttaactttgattgtttggctaaggtggtatttaccaagtttcttccctgtaaattgactaccctttgttattaaaagtatcgggtggggatatactttgagactgtataaatatttagtttttatcaaacttttagcacccgttcataatttttgcctggaccagctattattatgatgcttgatagataatgattttctaatttcattaatccttctacattagttggtgttctacttgtaaagaagagcttccccttgtttcttgtttctctatcttatctctctctccattcatttattcatttatgtatcagtatagattcatggacatttgcataggtttatgatcttttactagtactcatttcagtgttcaagtcatcctagatttggccagtgtgagccccttaaattggctcctgtgtcccttagatagatctatgtcattctttgagcactttcttaaaacatatttactaatttagaataatactataaaatgttagttctagagtataatcgtgattgcagtcaggaaagatactttattttgtagtcactcaaaagtttttcctttctcatttttgtagaaaataaaatttaattgaaaaggtctttgtaaacacatagagttaaatatgactttctatgactgtgaaagttatgttcattgtaaccaaacatagtacaagtattgcttaagatatagaaaacacagtaatgtataaaagtgaggtaaaaatcacctcaaattctagtcccccaaaataatcactgttaaaatgtattgctctagtgtctacagaaaaatctgaagtaaaatgaatgccagttacctgatccataatggttaattagtgcaatattgctttttcaaggacttcattgaagtaagttgaagtaaattactgaagtattagttatggacaggcctggtttctcttacataggtgaaagatgtcatgaaggatgtcatgtcggacctgcagcagacgaacagtgagaagatcctgctcagctgggtgcgtcagaccaccaggccctacagccaagtcaacgtcctcaacttcaccaccagctggacagatggactcgcctttaatgctgtcctccaccgacataagtgagacattactctatctagaagtgggctttacaaattcatgtctcctctctgtccctttgctgccaccactactccctgaagccccttctccagtgccactgctctcctttctgcacatgttctaccaaaaccttaagaaaagaaatatcatggaagaaaactacccatcaggtttttatttccttaggacttaaatgctgcaatacaaggtccatagtttctcctgcatatttatgaatttaaaaaatatgaaataattcacaaagttcaaccccactcattcagcactaactgataatgtatacaaaaaattgtgttagcttttcttctcaaactgaaagtaaaactctgtaaattcaatgcattcccaattaaaaatagccaaattgtctttaatgaaacttgtgaacagattctaattatataaaagacgaggcccaagaatagccagtagacttctgaggaagaatcaggctgaaatactttccaaaaagaaaccaaaactatgaagctatattaattaagactatgcagtactatcaatatacacaccaatataagctgaaccatatgaaattgccgacatgtgagtgtttttgctatataagaatggtgttttcatatggttcaacctaataaaattaagaactcagaaattgctccattacacaggaaaatctgatatacgcttgagctgacattgcagattaatagatgatttggacaattgattacccatatataaataaatgtattggatctttacttcaccacactaaaaaaaaaataataatttctacatggatcagggatttaaatgccaaaggcaaaatttgttatattttattgttgtaaatgattacttttctcaaatttcacttcctctatgtttttttgctggtatataaaagtgcaatagacttttctacgtcttatatctggaaacttaatcagttcttacaaattttagtaagtttgtctctagattgtaggtttcttggaggaggagggattagaatgtcctagaattatgatccttttatttcttctgttttcttttttgttctctattgtgccttgtccttcaatgcaatgttgatttgaattggtgatagtgggcagaatttttgttgttgataataaaaggagtgcttttagtgttttaccataagaatgatagtttttgtagcttttttggtacactttttatgaggttaaaggaggttgccctaggtttttagttggttaagggattttatcaagaaactgtagaattttagccaatataccattccatttattaattaattgattcaacaaatacgtgtggggtgccttttatgtgctagacacagggtatacagcagagaacaaaacaggcaaaaatcttagttctcgtggagcttatgttccaacagagggagacaagacaataataaagttgtgtagtatatagaaatgtacacacactgaaggaaaatacatcagacaagagcagaggaggcacttggcatcggagagggcagtggctgcagtgacctgagtggggggagtaatgggagatgaattcagggagggaagtgggggaagtgcatcccagaaggtgggtgggtctaacatgcaagaacagacacagaataaagaaaatgattaacttttggataagtcaaagcaacaataatgtccaatttgtgagattaaaagaaaatcaagatagaaatgaaatacagtcctagacaatatagtagtagcatggaagcaggggattggagggaaactcttccaaggcttttgttttaggaatatcctgagaacagattagagctagattttgtgttctgctaatcttgatcttttaattgaagaatttagtccattaacattgattatgattatttatatatttaggttcatttttaccgcatagtgtgagctgctcatttttcttattttttctgtggttttttttttttttactttcttatctctttttgtatcggtaggtttccctttacccccttttcttcttctactctttgggaaacattatatactacttctagtcttaatggttaccacagaaaatagcagtcctatttagctaatacaagacccttggaaagtattatctgttattttcatatttgtgaattaatttcaagtatgtatttgacaagcctttgggatataaaaataaactcaaaaaaacctcacaaataaaaataatctaaaactaaaatgtattagattataacaatgcctactttgtttccacatatttcatcttcattgcattttatttgcatggttttcagacctgatctcttcagctgggataaagttgtcaaaatgtcaccaattgagagacttgaacatgccttcagcaaggctcaaacttatttgggaattgaaaagctgttagatcctgaaggtattgtccagtatttaatttccaccttgattttgctttacagttttgcattcttgaaaagcagtgtttctttgtccttttaaaaatgaattatgagacttgaagaaccttttcctttttggagtataggtgcgagtcattttattactgacacttattaatacttttgtacttagcagtttgtgggatcttttaggtagaaatttaactacagcactggacaatagttaatctaaattaagtaagagttaaagttttaagaaaatgtaattattagataaattcagtatctggttagtccaataaaatgcatttttatgtgagcatcttgcatgtgatgtaaagactttagttataaatgttgcaggattgaattctagacttattttcatagtatgaataaagtctgtatctttatcttaaatggtaacatatggtagcttatctttgaccattttggggaggcttttagggaagactttaaaaaatgagatactgaacaaaaataagtaatcccttttgcctttgtctcatatattatgaagtggcaatttactggtattgcaaagattatatattaggtattgtttatgggtactaaggagagttattttatatctaatattgagcaattcacatattttggacacctaatttaagctggttcttatattcttccacttttagatgttgccgttcagcttcctgacaagaaatccataattatgtatttaacatctttgtttgaggtgctacctcagcaagtcaccatagacgccatccgtgaggtagagacactcccaaggaaatataaaaaagaatgtgaagaagaggcaattaatatacaggtacaggtaacattttattaagatgtttggcttgccgtatttgttttctcctaggtactagataaaaacacttttagagggtttttttcttgactgagaacatcttggtttctcagcttacatttgcataagaagttcagcttagcagttagcattctgtcacatgtgtgtaatagaacaccataactcaatggactttattaagaaggaaaatactttatttcacccagcaaaactgggctgttgctcatgctgctgcatgacatgctgggaatctatgttttcacatcatctggttgccagcttttatttctgtcatgtgctaaagatggtttttctcatatcagcctagttttttttctaagtactaattgtctttctttttttgccattgagaaaagattttttttccattatatatctcacaagggctatcaaaatgtaagccttattttccctttcctttaggaggagtaatgtatggtaaactacttggtgagcttttcatgaagggattacgatgatttcattcatcaggatataaatgaatttttaaagagagaaataaaatcataatttattttcttccttagttctactgtttgaatcaatccatatttaatctcattctgttttagtctagccagtccttgtaattcataagatgagagaatcttaagaattggaccttagaagtcacttggttcaacattctagtgaccaagcaaccaagacatacatgtagatttcaaaattataagaactacatttcagagagaaagaaagcttctctggatggaccttaaattcatcctgttgctacttgttttgggttgttacttaaactctcaatcacagttttgtctgcaaaatgtggttaaaaccaccaacttcataaagataatgaattcaaagtatctaaaatgacattaataaacactcaacaagcaacagctatcattattatcatttttcttcttgatttgttttggcattctcatttaacagatttctttaaaaaatattatttaattcccatattatgatactagtcttgaattgacatagcatcttttttttccatcctctgagattcagagaatttacttattcttttaaattttctttgggtaatatgtacccatccttttatttcccccgtttcaaaaatagtgtgatttatagaaaaagaaaaaaatttactgaaaagaaaggattgagaaatgaggcctgattgtgaacccagggctctcttttgtagtgaatatcaaatgatgctgaggaaaattcctaacttactataattgaaaaaaatgctaggaagtatttgcctctaaaagtatagttattattctacattaatgatgcacctttttagttggctcagatgatcttctgagtttgttacagggttttagattcatttccttattgcattttgttagaaggaggagatattttatttagttcttatagttaagggccttctctcttaaaaaggaaggagacttcatttacttttcatgatgtgtagataaaataatcacttctgtttagggctcagcgtggcatgataagaacttcagaaaacatttgctatttgattaagtgcaagtgtattaacacctcttcatttgcaagctttcattagtgtcttagaggctgaattacgttaattgaaaactaaaatgtgatcaagttttaatcatctctctgacatagcttgccatctgctactctcctaatagtcagacttcttctgccctgttctttctacaaacatacgctggtggtcaatgaataattcctgcatttctctttaaatatccgtcagttgaaagtttcctcatgtgttcgaattaataccgtctgaacatttgtgtttagatagtgccttccttctcgacctcatggatgctggtgcctatctcagtgacctttggctggtcactaactttcctggttcttagaaattctcattatagtatagaggtttggagctaaatgatctccaggggttattttagctctacagttttaggattttttgtccataacttaactcatttttctttctctgtctttggcaccatctgtcttttaattatccactgtttcgactctgtgctgattggttcatttcttaactcatatattcagtttcctggattcttcaagccttcctccaaaatgtcttttgtgtgtgttttcattttattgcagccttcatactcatttttattttatttttttagtattatactttaagttttagggtacatgtgcacaacatgaaggtttgttacatatgtatacatgtgccacgggtggtgtgctgcacccattaactcgtcctttagcattaggtatatctcctaatgctatttaaagacttcattttctcctatagtttacaagctgtggcctacctctgctactctgccctgcagttagagtggacttttcccccaagactcttgttcatgcaggttcccctctgttaaatgcttctgcacccaccattatatggcagcctgcacatttttcctcagtttaaatggagccttttcagagaagtcttttctgattaatctatcaaaatacaactctctgtctctctctctctttctgtcactctatcttggtttcttactatcacagtatttttgtaaactgtgttaagaattttaaattgtatcttaagagcattgggaaagccagtgaaaggttttcagcaggtacgtcttatgatggcattacatttttgaaagatcattctggctgctgtgtgagaaatggactgtggattgtgaaggtgagagtgttgggtgggggaaaacaggaaagtaaagacacttgttagcaggtattccagttcagaagatggatgtgtgtggttgtggaaatggaaaggtctggatggatttgagataagtcttttttttttttaatatatattttttattgatcattcttgggtgtttctcgcagagggggatttggcagggtcacaggacaatagtggagggaaggtcagcagataaacaagtgaacaaaggtctctggttttcctaggcagaggaccctgcggccttccgcagtgtttgtgtccctgggtccttgagattagggagtggtgatgactcttaacgagcatgctgccttctagcatctgtttaacaaagcacatcttgcaccgcccttaatccatttaaccctgagtggacacagcacatgtttcagagagcacagggttgggggcaaggtcacagatcaacaggatcccaaggcagaagaatttttcttagtacagaacaaaatgaaaagtctcccatgtctccttctttctacacagacacggcaaccatccgatttctcaatcttttccccacctttcccccctttctattccacaaaaccgccattgtcatcatggcccgttctcaatgagctgttgggtacacctcccagacggggtggtggccgggcagaggggctcctcacttcccagtaggggcggccaggcagaggcgcccctcacctcccggacggggcggctggccgggtggggggctgaaccccccacctccctcccggacggggcggctggcctggcgggggctgacccccacctccctcccggacggggtggctgccgggcggagacgctcctcacttcccagacggggtggctgccgggcggaggggctcctcacttctcagacggggcggttgccaggcagagggtctcctcacttcccagacggggtggctgccgggcagaggggctcctcacttctcagatggggcggctgccgggcggaggggctcctcccttctcagatggggcggttgccaggcagagggtctcctcacttctcagacggggcggccgggcagagacgctcctcacctcccagacggggtcgcggccgggcagaggcactcctcacatcccagatggggtggcggggcagaggcgctccccacatctcagaagatgggcagtcgggcagagatgctcctcacttcctagatgggatggcggccgggaagaggtgctcctcacttcctagatgggatggcggccgggcagagacgctcctcactttccagactgggcagccaggcagaggggctcctcacatcccagacgatgggcggccaggcagagacgctcctcacttcccagacggggtggcagccgggcagaggctgcagtctcggcactttgggaggccaaggcaggcggctgggatgtggaggttgtagcgagccgagatcacgccactgcactccagcctgggcaccattgagcgctgagtgaactagactccgtctgcaatcccggcacctcgggaggccgaggctggcggatcactcgcggtcaggagctggagaccagcccggccaacacagcgaaaccccgtctccaccaaaaaaatacgaaaaccagtcaggcgtggtggcgcgcacctgcaattgcaggcactcggcaggctgaggcaggagaatcaggcagggaggttgcagtgagccgagatggcagcagtacagtccagcttcggctcggcatcagagggagaccgtggaaagaggggagggggagggggagggagagggagcgaagttttgaaggaaggtcagaattacttatgtattaaatgtggaagatgaaggagagagaagctggggctggctcccaggtttgtagctggagtacctagttgcagggaggagccatctactgagttggagaagtctgaggaggaacaagctttggaagaaagtaaaggttttgaatatggacatggtttaatatgcctaggaggcgctgaagtagagatgtgaaaatagtgggatatgagagtttggaatccagactcctaggtggttctagatgttctttaaatccaataggagtagatgagattactcagacacagtatacagtggggagaaaaaagagcctagaacttaattttgaggagattcattacttatgagtcagcagctgctgttgaaccagcaggaaaccagggcagtgtcacagaagcagggaaacaagcttctgaaagctcaagttgctcagccttgaggagtgctaccaaggtctgaagcaaggaacgtgggtggccagctctccgggcttacttgggacagttctggtttggatttgttgtttgagcacagttatcatcaaaaatactctagtttgttggttaattatatggtcaccctgaagatgatgctagaaaggtccgtttggcaatgggaaggttattgatgacattggtaaaagccttttcagttgagtcatggggcaaatagcaagttgaagttaaagggaatgttaacaaaccatagctgttaaatacttgagcattttttgtattgttctctatacgtttctgtacatttgaaatattgtacttaaaaatcatgcatgagagttgataaagtagagacagaatgtaggcaagtcttcaagaaatcttgctctgaaagggaacaaaagaactagggagagtcaatttggttataagctcttaaagtatatatggaaatactcagttatttagaaagaggttgatagaaatttattccatgagccctaaaaggccatcagataaaccagagggcaactgcctaagaaaaatacaatcagtacagcagcctgtgtggctgtcttttagtgtctaaaatgcaatgctaaaatgcagttcagcaaaagcaatttacctaagggtcaaggcagaattctcacctttctttttctttaaattacagaaaaggcctaacacgttccagctcctctacgaaactttcctgttttagcctttgttgaactcaaatatcatgccttgttgggaccatggcatttacttttctaatagctgttcttcaatttctgttcagaagtgattcatgtgggttctctgtccctaactatattagaatctccttgagtacagaattcatgagtgcatgctgcttttatactctttgctaccctagtgcacttactcaatgcttctaactcattcatggcagtgcccatttggctcctgagaattggattagtgcctaagacagagtggtgggtactttgggttcgccatacagtgtgagtttgctgaacacctcttgctttgatgattagtgtgggtttttcttggctttgtttttacagagtacagcgcctgaggaggagcatgagagtccccgagctgaaactcccagcactgtcactgaggttgacatggatctggacagctatcagattgcgttggaggaagtgctgacctggttgctttctgctgaggacactttccaggagcaggatgatatttctgatgatgttgaagaagtcaaagaccagtttgcaacccatgaagtaaatatctgtagtttcttagcagggtgtgtcccccacgggacctgagccttaatcagggactctactctcctatttgttatctactgaattctgttctttggaaaggtcaatggtttatttcaggaactgtgatatttaaatagtgctttgtcacaaaattggtatgggtgattaaactgtgcctcagaattagattttagattttagtctccttgtgtgttttggagagccactgatgaaaatcattgcatagtactgctcagttctgaagtgcattgttatatttcaaaagcaaacgagtgaaccaatacaccaaatctttaagatttgagtgttccctaggaaatgattattctttttaattgcatgattaagcaaatgtcatacccagggttcctgtattttttcatatcataaaagtttcctgctcctttgaggacatactatattgcagcatagtgaatttcactatatggagatttcttttggttaaatttttcttttgtatagttatgtgaattgacagatcttatttgttgttttggatagaaaataatataagtggtaatatctcttaaacagttcctcttgggtgagtatggtattttattttatatatatatttatatatataataaataaatatatatttatatataaatatatataaataaaaataaatatatattttattttatatataaataaaatatataaataaatatatataaataaaatatataaatatttttatatataatctatttatatattatatatgtatatgtatatgtgtgtgtatatatatatatttataatttttttttttttaacagagtcttactctgtcacccaggctggagtgcagtggcacaatcttggctcactgcaacttctacctcctggcttcaagtgattctcctgcatcagcctcccaagtagctgggactgcaaacatgtgccaccacgcccggctaattttttgtgtttttagttagagacggggtttcaccttgttgtccaggctggtcttgaactcctggcctaggtgatccacctgcctcagcctcccaaaatgctgggattataggtgtgagccaccacacccagccttttattttatttatttagaattccatgttcatgatctatgagtagcatagtcagcatttactttaaaatagctggtattatcagatgcatcattgcttgctttgagctatttctcttttaacttatggcaggtgtttattcctattttcagagattaaaaaatgtggtcaatgtctattttatttgcgctctactaggctacctttttctgcatcactgacatttaggttaggcattagcaatttgttcagtcttccttttttttttttgcactgagtagctcacaaattataacaatgtccctttctaggcttttatgatggaactgactgcacaccagagcagtgtgggcagcgtcctgcaggcaggcaaccaactgataacacaaggaactctgtcagacgaagaagaatttgagattcaggaacagatgaccctgctgaatgctagatgggaggctcttagggtggagagtatggacagacagtcccggtgagtggaaagccaagaaatgcacttaattccacaggctgctttgcacagttgagctctagtagatgtctgcatgtctgtgaaagcgagatgattacagaacttgccttggaaaagtaagactcttttctacgggtaatattgctggaattctgcatgatctttgtttcccctttgatgtgttagccacaccaaaagataaaagttggaatacagaatttaacaaaaaggaaaaagaggataggcatggtggctcatgcctgtaatcccagcacttgggaggccaacgcggatggatcacttgaggccaggagtttgagaccagcctgggcgacatggcgaaactccgtctctactaaaaatacaaaaattagctgggcatggtgggccatgcctgtaatcctagctacttgggaggttgaggtatgaggatcgcttgaactcaggagacagagattgcagtgagctgagattcagccactgcactccagcctgggtaacaaagtgagactgtctccaaaaaaaggaaaagacatttcataggggcagttacttatttgcaatgttaagattagctaaacattaacttggtgtgaagacaggactatggagtattgatctacttttccattttgtgacttttattttaaagctttctcatggtttattttatttcatgtattgtgtcttaaggagcaaactgcattcattgccacttccacctatttaataagcaggaattcctgattgaagaaacaatgattctgatatgaatacagggtgctgctttttgcattctttgtctgcatttaatgaactccatttaggacaaaataaaagtttactttcctggcttctatatttaaagactaaatgctaccttgaatgtttagacaagggtgtcttcccttgccctgtatctccggtgcccagaatgtatatttgactttgcaaagggaaaaggcttgtaggaataatgctgtgttccccacggacaggctgcacgatgtgctgatggaactgcagaagaagcaactgcagcagctctccgcctggttaacactcacagaggagcgcattcagaagatggaaacttgccccctggatgatgatgtaaaatctctacaaaagctgctagaagaacataaagtaaatctgtctcatatttcttcgataccttatcaaatatgaaagagcagcacttagcatctcagaggctgatgacatctatcgttaacatgaagttgggacacttcttcagggttgtcttcatttagcagctcacagggtggaattgatagagatgagacttttctgagccagggataaaagggcacggtaaaattttatatgtgatgtgcagttttcttttgaaagtacatagctttcatacaactggagaagggttcttttggccctctaagtggctaagaacccaagcatgttggcgttcacatggtgtgtgggtgaagagcaaattcttcgtctatgattcaggaaagcgtcaggcattaagttaggaaccaaaattgggtgggcaatttaatttggtcacaagtctaggagataaacttttcatagtcaagataaggaaagatagaataaaatatgctctctgtaaattgaagacttttattgatcagtgaaacattgaggtaactaatatgtaaaactttaggaatacattaaacacaactctgagaagcatttgagaacactattgatagtatttaaataaattttctttctttctttcttttttttgagatggagtcttgctctgtcacccaggctggagggcaatggcaaaatctcagctcactgcaccctctgcctcctgggttcaagtgattctcccacctcagtctcccaagtagctgggactacaggcgtgtgccaccacacccagctaattttttgtattttttgtatttttagtaaagtcagggtttcaccatgttggccaggctggtcttgaactcctgacctcaagtgatccgcctgccttgggttcccaaagtgctgggattacaggtgtgagccaccatgcccagcctataaattttctatacacatgtatccaatgactatgctcttcccatggaaaaggcgagagaatctaaggtgtccatacttctttaactgctttattgggtagctaatcagagtaacttttgactatcgtgtagcattctacttatctctttatactgtcctacactagataaaatgatctctgacttggtttatttaagctctggacttttttgctttaccacttctacatttttgtattaattcctagtatggacactcaactcctttatgctataaattctgagggagggccagaacttgaataaaagtggtgatatctccatttgcagtctgttataacactgcatcctcaaactgcctttgttgataatggaatgtaaagatgtataataggattagtttcattagtagaacagttagggtaatgattggaaatttaaatatgatgcctcattaactgtccttaattactattgacaactgagtgcgttttaaataggtaaatgtgaaagtagaaataatggtttatcttaatttttttctctagagtttgcaaagtgatcttgaggctgaacaggtgaaagtaaattcactaactcacatggtggtcattgttgatgaaaacagtggtgagagtgctacagctatcctagaagaccagttacaggtaagagtgctgtaaagttggataatcctgagggacctgtggtctgagacccaattacatattgcccttgttcttcatgtcctttctcattctttatccagaagggtagaaaaacctacctttgattgtacttctcagttggggttctacagtgtgtgggctacaggagtacccaggtattgattcctttacttcagctcttggggtgaatggatggggctggttgcagtccccagcttccttgtgcataatgacaagatttggaagcacagtgtattagtccgttttcacactgctgataaagacatacctgagactgggaagaaaaagaggtttaagggacttacagttccatgtggctggggagacctcacaatcatggtggaagggaaggaggagcaagccacattttatatggatggtggcaggcaaagagagggagcttgtgcagggaaactcctttttttaaaaccatcagacctcgtgagacttactcactatcacaagaacagcaagagagagacctgcgcccatgaatcaattacctcccactgggttcctcacttaaaatgtgggaattgtgggagttacaattcaagatgagacttggatggggacacaagcaaaccatatcattccacccctggcctctcccaaatcttatgtcctcacatttcacaaccaatcatgctttcccaacagtacccccaaagtcttaactcatttcagcattaactcaaaagtccacagtccaaagtctcatctgagacaaggcaagtcccttccgcctatgagcctgcaaagtcaaaagcaagttagttacttcctagctacaatgggggcacaggcaaagagtaaatacatctgttccaaatgggagaaactggccaaaacaaaagggctacagtccccattcaagtatggaatacggtggggtagtcaaatcttaaagcttcaaaatgatctcctttgacttcatgtttcacatccaggtcacgcctatgcaagaggtaggttcccatggtcttgggcagtgctgcctctgtggctttgcgggaaatagccccctcctggctgctttcatgggtcagtgttgagtgtctgcggcttttccaggtgcatagtgcaagctgtcagtggatctaccaccctggggtctggaggacagtggccgtcttctcacagctccactaggtggtgccacagtagggactctgtttgggccacatttcccttctgcactgccctagcagaggttctccatgagagccccacctctgcagcaaacttctgcctggacatccacgtgtttccatacatcctctgaaatctaggtggatgttcccaaacctcaattcttgacttctgtgtacccgcaggctcaacaccacatggaagctgccaaggcttgtggcttgcacctttgccatggcctgagctgtacctttgccccttttagtcatggctggagcagctgggatgcagggcaccaagtacctagccacaaggcacggggaccctgagcccagcccacaaaaccattttttcctcctaggcctctgggcttgtgatgggaggggctgatgtgaagacctctgacatgcctggagatgttttccgcattgtcttggtgattaacttttgcctctttgttacttatgcaaatttctgcagccagcttgaatttctcctcagaaaatgagattttcttttctattgcattgtcaggctgcaaatttctcaaacttttatgatctgtttcctttataaaactgaatgcctttaacagcacccaagtcatctcctgaatgctttgctgcttagaaatttcttccacaggtaccctaaattttcccacatttttctgtcttcttctgagctctccaaatgtttccaacctctgcctgttaccgagttccaaagtcacttctacattttagggtatcttttcaacagcaccccactctactggtaccgatttactatattagtccattttcatgctgctgataaaaacatacctgagactgggaagaaaaagaggtttaatggacttacagttccacatcgttggggaggcctcacaatcatggcagaagggaaggaggagcaagtcacgatttacatgcatggtggcaggcaaagagagagagcttgtgcagggaaactcccttttgtaaaaccatcagatctcgtgagacttattcactataatgagaacagcatgggaaagatctgcccccatgcttcaattacctcccaccaagttcctctcaaaaaatgtgagaactgtggtagttataatgcaagatgagatttggatggagacacaggcaaaccatatcacacaggagctgatcttattaagtgatccactgacttcttctcagaagcacttgaggagcttgttaaaatgtagattcctaggctctacccactacctaaatctaggtgagggagggatgcagtgaatttgcaatgtaagaaaaatcatgtgcatagtaaagtttgagaatttcacctagtaggattcaatatctcagtgttttcggtagattaatatgtgaatttcaacaacagttttggaaacctcccaaaattgcttctttttgcacaaaggcaatagtgtatctttacaagtctttaacagataaatttattggtatttcatttgaacaatacttggattttctggtaagacgttgccaatttatttaaatatgatgcctcattaagtgaggcaatccaaactgtaatttcatcacgtgaggtccttttgcttttgtgatatttaaagtcagccagaggttctaagacttgtatgcagtagttagttattataacctgagagctaagtattcatgccttgactatttagcagtaaggaatctgagattcagagaggttaagtagtcctcctgagatttaaatagacaatgagttatcatgctgagactggaaatctatcttctggctcttaagttttctccccctttgtactatgaaaagcttattctcatattaagtatcaaaatagtataatatgaattaaataattcttgttcacatgtatatagtacaaaaataaattttaacatttgttaatcattatttgtaaaattgtaataaaatgattttgggagaaaataatcatgaagagtgattttttataattaataaaatttatttagtattgctgatactagtaagattctattgctaatttatgtaacttatggggaatttttttatggatcacataatgtaaacagaacaaatcatttgatttttttattgtctcataaaaattctcttattcaaaacaggttttataagttaaacatttttcataattttggtaccacagatgaaaattttcttggcatgtaaaagagagttaaggaatataacagacatgctggtttttttagctaaaaatttgaaaaatttgaagcacaaaaagtagatatgtttgttttattttttaataatatgtaaaaatgtcatattctcataaaaaccacaatgaaatagaaagagcaggtttggagtcaaagattcagaggatacagttctattatgttagtttctagctatgtgaaatcatttgttcaattctatggaaattagtttttctgattcatacatttctaggcctagtctgttattttaaagcaatttttataaaaatactttttataagttgttattctataataaagaacaatggaaatcatgaatttcttcaaggattgtgataactctctcttaaggctgtgttgacaaaggatggtttctcctttttctagaaacttggtgagcgctggacagcagtatgccgttggactgaagaacgctggaataggttacaagaaatcaatatattgtggcaggaattattggaagaacaggtatgaaactgttttccataaggggcaaaataaatggtgaaaagtaacccatcttttattgtgactttagaataaagttgccttgtttacttttctttgaaaggaaaatatataaataattattttaaagatcaaatttctatccagtttataactgatcatgaagcttattcacagagattgtgtcatttggctccattaatttgacctgttttcattacttggaatgttagtacttagaagatatgctattttcatgatttgtttgacatcatagttattagtggatttgtgttgggtgatgtatttgaatttgtatcaacacaatgcctagcatataatttgtgctcagtaaataatgagtaatgaatccactcaacacactgtgaactttaattccctagattttttcttgatttttaacaagtattgaaattaatgagaaaatattatttagtcacacctttgatttaacactggattaattgcatattttttccactaagtgttatcacagcaaatgaatctgttgtacaaagctgccaccttaatttttcaataggactggtggctctttgcctgttctctgtctttccagaaaagcaaccattgaaacaaaatacaaataaacaaaacttttctccccaaatgccaaacagttgtggtttaaaaaataagtagatactggccgggcagggtggctcacgcctgtaatcccagcactttgggaggctgaggcaggtggatcacttgaagtcaggagttcaagactagcccggccaacatagtgaaaccccgtctccactaaaaatataaaaataagccaggtgtggcggtgggtgcctgtaatcccagctactcaggaggctgaggcaggagaattgctggaacccaggaggcagaggttgcagtgagccgagactgtgccactgcactccagcctgggagacaagagcgagactccctctcaaaaaaaaaaaaaaaaaagcaaatactctattcccacatctctcagtgtccattttgattcttttaaatgcatttcatttccatctataagaagcaactatattctcttcaggggaaaaaactcaagtgtgtgatgttttgtggcttactaaatatggtggcagatagttgcagaatttgtccaaatataaattgttaatgactacttccccccccgccctcaatctgtggtcagatttttcttattaggaatcacaaaagggacctgattctgatttatgaaatgtttacatttcatgttacaaatatttacatttcactttataaatatttatgtttattgtgaaccttgtatttaggccaaaaagtctcagaatagttaaaattttacttcaataatgacagtagaaaggctgggcgcggtggatcacgcttgtaatcccagcactttgggaggccgaggcgggcagatcacttgaggtcagaccaacatgttgaaacctgtctctactaaaaatgcaaaaaattagccaggcctgcagtgggcacctgtaatcccagccactcaggaggctatggaggcaggagaattgcttgaacccaggaagcagaggttgcagtgatccgagatggcaccactgcactccagtctgggtgacagagtgagactctgtctcaaaaaataaaaataatagtaatagtaataattgcagtagaagacatcgattgctagagaaaaccattgtgttactcttctatccagtaaagtaattgcaaatttggaaataattttaatttgatgataaaaaacagtttaaaaatagagtgctagtatttcagtcacttgtaccactttaggttttaaactgacctttcatcgtgttctataatgatctgacattttaactataccttttgtgtgtgtgtgtgtactgtctacatgttctgtctgatggcatcattatttatgtgcatatcttaccagcctcactagactgaggacagtatccattggggggtgaaatatagaggcaaggaatagttgttaaatatttaattcataaataaaattgctgagaaagaattgattccgttgcaaatacagaaccaagttgttttcctccctactaaatagaaaagggtttccaccctaaatgctacattttgggagaaattatcacaatgtagctacggttgttttccatcccttcttcaggattatctctctacatgactgaatatcctctgcttagaaaacacacattgttgtccaatgaagttgaaaaatctttatatgggctttgggtgctcttcagactccctcctttaatcataattgctgttgaaccttgaatgctagtgtggatttcctacatgatgccatggaaaacactggttttggggtgtggaccctggacccagctctgccattaactatccaagtgatctgggacatgtaacttgacttctctttccttcctttctaaaatgaggggctgggacaagacaatctccgagcttacttctgcctctaggaagttgtaatgtaattcctttggagacttgcatagttggattttcccttttccctccacctatctccttgagaattaggtttagttccctaggtatgaggctaatgtctgattgttctgttacaaatctgagaaggataatattttaaagaaaggtatctttctgggtcatttgtgcctcagacttaggtgtttgaaggccttcttatccccatgtaagggtgaagcctctaataaaataaaagttagaaatttggatgcatgatttaattgaattaccaaatgattttgcagataaagttcaacttttgttattacttgtagtgcttgttgaaagcttggttaaccgaaaaagaagaggctttaaataaagtccagacaagcaacttcaaagaccaaaaggaactaagtgtcagtgttcgacgtctggctgtaagtgatggggttgtcagcatctgtgttgtaagcctatgatatcttaatgttttatagctaatggttagtagaatttagtgaatgcagattacagctcattacctagcattagactgctgccctgtaacaatctggaaccacgagtcttaccttttagcatagtgaactgcaaagcatgtacattttactataaaagatacatgtttaaaatttttggctggggaacagaaagacaaagtcctgttaaaaagagtcatctaataaatatctgaaatactagattttgaaggaagacatggaaatgaagcgtcaaacattggatcagctgagtgagattggccaggatgtgggacaattacttgataattccaaggcatctaagaagatcaacagtgactcagaggaactgactcaaagatgggattctttggttcagagactagaagattcctccaaccaggtactttttgatttggatcatatgttgtgccatgaagtaaacatttaaaatttaaatgttcaggttagttttaatttgtatgaaataaactaaaaagttgtttccttacacctgatgaaaaattgacatgtgaaaatcaccttcagttttctaaagtaagttttaatagattatcttaatatcctataatttaatttatagtaactgattatacttagccaataaataatcttaacatcttaaatcttaagtaatcttattaatcttaaaaatattttaatgaattagtcaaacataaaacattggtttgtagacagatattcttagcagcattatttataatagccaaaaagtggaacaactcaaatatccatacacagatgaatggataaacaaaatgtggtgtatgcatacaatattatctgataatacaaaagaacgaagtattgacacatgctacaacatagatgaaccttgaaaacactatgctaagtataagaagccaatcgcaagattatatacgctatgattccattcataggaaatgtccacaaggggaaaatccacagagatagaaagtaaatgcatggttgccactggtgggagtggggaatggggagtgttggtttatggctatgggatttctttttggggtgataaaatgttctggagacagactgtgaggatgattatacaactgtataaatgtgctaataaccattaaattgtgtatttcaaagaaagaattttatagcatgtgaattacatctcaatgaagctgttataaacattgaaattttggatggcttttatttcaggtgactcaggctgtagcaaagctggggatgtctcagattcctcagaaggaccttttggagactgttcgtgtaagagaacaagcaattacaaaaaaatctaagcaggaactgcctcctcctcctcccccaaagaagagacagatccatgtggatattgaagctaagaaaaagtgagaagagatagagaaattgttcaaatccaatattgcacatactatattttctacttggtgcctattttgtactaatcattaatcataggcaaatctagacataataagtattattattatgaaaagtcaactactgaaccactcactgcccctgtcttctgaatattctacttggcactagctaagcatccaaattttcttggatgattttatttatcctgtgttcaattgggagaactttgtgatcgaagctttctttcttcctttcccattattctccttggaaggatatgattgtccatgactgtctttttattctttctttcactgtcacaactcgacagtgacctcctcagtctttgaatatagcttccccagtttttattgtcagaaagtgcaggggatccttaaccattcctattaacatggtttccagacccttttatatcttctgtctgctctagaaaccactattggtttgccttaaaatggactaccccaataatcgagggccttaaatgactgcttaatgcagtgcctagtttaaaatatatgcttaaaaaatggcagctcatttccacttctcttcccctggtgctgctgtggtggtggtttttaccagctcgcggtacagtggacagtcatttcctagaatgtagacacctgttcctgtgacctgcgatcattgcatcactcttgcccatattgagagcagatgctgactgagtctccaaggtcattggaaacgtgcgatttttagatggccgtctcttctctgaaatattaaatagaaagctgctgttaagatgacaggaggaacatatccctgtttgagcaataccttgaccccagatatttatctagagcatcacaaaatccctcacattttacagggaaaatctaccttgatgaaaagataaaatattcatagttcaccagaaacactttaagcaaagtttctcacaagaatcagcaataacgacttgtgccactgcttaatgtatcgagaagctctgtggggagggtactagttaagaagacagtcttggtttgaatcccagcctcaccctttgttagctttgtgacatgggacagttactgaaaacctctgtgagctcagtaccttcatctctaaaggggataataatagtgtatactttttagggtgctggtgaggattccttgagttaataatagacataaaacacttagaaaggggccgggtagaaggccagcaatcagtgatcgtgactcctcttgttcctccttgctgtggttttgaccaaccttctcaacacctctcaaacctgtcctttcgtcttccttcccactgttactatcttagttgtgactcccgttgctttcacagcctgttctcgactcgtctctctttaatgccttctcctcagtgaacactaaaggataaatagaatcatgtcagttccatgcatagaactctcccttggctctcaactgcctttgggttaagtccaaactccttaatatgtcctgcagggccttcttgtagctggtccatgtgattcttggccacatcgtcaattgtccctcccttgtgagttcagtactcattattccagacacgcctaactaatacttgcagtttgcaaaatgtgatcttccctttctctgctttcccttggcaagggaaactcctcagtgtaatgctgttgttctcctttaggaagccatccatgccccaattggattagaagccactcctgtgaattcctggaattagcacctagcaaattcttttgttattgcctgttactttccattgcttactagactagaagctccttgggagctgagatttgtatctggttcactttcatatcaagagcccagcccagtgcctgacatttagtaaggctcaatcattacatattgaacaaaagaagatgttaactttagtaatgtctgtacttgttctttgctgattatctaaccaactctggtttttattatctataagcatttataaaaatacaagtgattccttataaaggtgaaaattgttttaatatgtaaagttttaaaaatttttatttaaggccaggcatggtgggtcatgactgtaatcacagcactttgggaggccaaggcgggccgatcatgaggtcagcctggccaacatggtgaaactctgtctctactaaaaatacaaaaattagctgggtgtggtggtgggcacctataatcctagctactcgggaggctgaggcaggagaatcctttgaatctggaggcggaggttgcagtgagccgagatcgtgccattgcactcaagcctgggtgacagggcgagactccatctcgaaacaacaacaacaacaacaaattatttaattattttcttcaattgtttattaaccctataatattattactcttttcatacttttagttgtaaatatatgatctcattttgcatggttaccctatttctgggttgctgtttttgggggagtgataaaaagacatattcctgatgagcatttgagttgctctttctggagtcaagtaaaacagtagaaggaaacatgacaaatggtcacctctgaatcttcaaacaggtttgatgctataagtgcagagctgttgaactggattttgaaatggaaaactgccattcagaccacagagataaaagagtatatgaagatgcaagacacttccgaaatgaaaaagaagttgaaggtaaaaaacataaaccacatatatcctagtgcataaaatagttcatcatgctggattttctgctggcataaagacattatggaattcaaaagcctcctgtaaaataaatgtaggcagaaggtagcttttagtacattgtagtgaattttgaatccattcatgctagctgtcatcagatccctatttggaggacgttttttttttttcatctttgtcagtcactgagatgtacagtgaggaatacttcttatggtgatccagttagtggtactactttttagttagtttagatcacccttaatctggtatctaataatttatgactctatattaacattatgctgaagatgttttgccttcggaatacaacaaactattttaaatcaaaaagtgtattcaatatattttctttagagttgtaaaaaataaatacaattaaaaggtgtgggatcttagccctgccgctttccatgcttatgtgtgtttctgaagagtgtgatgggaacttgcagagcttttttgtcctgggtgctcatacgtctcctacacattactgcattaactatttgggcacctgggtagagaatctatagtctagtctcctgccatcttaagaggtagcaaaaaatcaacttgtaaaaagtagataattgcctttttctccagttcgatggtgacttttacattgatctttagttagacaaaataaacggtgtttcttagagtctcttactaatattccttgatctttgactataagaaggttgttctacctagtcacagtaaactttgtgaaaatcaaagtaggatagctgaatttatttgatagcacttacatgtaaacaatttagaattgggattcttctctggattgtctggttgaagtaatatgggttgctcagaagttgtgattgtgttatgatggatactatttgaatagtatataaatatgaataatatataaatatcagttggggatggaggaatgagagaaaattcaaataccgagttgtgtgcacatatagttgtgtttttgtgtgtatacatgattttacttgcttcattcttactagttctggaaagaattttgtcttgggagtatcaaactatagagataaaaaaaataatgaaattaggagccattcctcaacataaagaacaaaatgtgggttgggcttgccatggctcacgcttataattccagcacaaggcaggaggattgcttgagcccaggagtttgagaccagcctgggcaccatagggagacccccgtctctacaaaaagtaaaaaaaaaaaaaaatttgtggggcgtgagcttgcacttgtaactccaactactcgggaggctgagataggaggatcctttgagcccaggaggttgaggctgcagtgagccatgattgtgccactgcaccccagcctgggtgacagagtgacaacctgcctcaaagaaaaaaaaaaaaaaaaggaacaaaatgctttggtttgggttctaaagcatatttactattttcattatttaaaaattatgtatgaaatatgattgtgcttgaagtttgcattgaaccctagacttaatataacccaaacaaataatactgagcctcaaaatatttctatccattttttctgttttctttcttttgagatgggagttttgctctgttgcccaggctggagtgcagtggtgcaatctcggctccctgcaacctctgcctcccgggttcaagcaattctcatgcctaagcctcctgagcagctgggattataggcacacgccaccacgcttggctaatttttgtatttttagtagagttggggtttcaccatgttggccagactggtctcaaactcctgacctctagtgatccacccccctcagccttccaaagtgttgggattacaggtgtgagccaccatgcccagcctatccttttttcttgttagttaatttttgttcaacaacttctgtcataacacattcaattcttttgactcaaaccattatttttatggcatggcgtactcagggtatgtatgtgaatagatatcctggatctaaaacataattttaattatttccttctaataggagcttataattatgaggtacattttttttcttacaaaagaaaccaatgctttttagttgctatgattacgtttgaatttaccttttcagatttaaaaagaatgtaggagggccattcaacttaaacatttaaaacagcaacattatattgagaagaaagtttgcaatattcttatgttgggacttcatttgcaggcattagaaaaagaacagagagaaagaatccccagagcagatgaattaaaccaaactggacaaatccttgtggagcaaatgggaaaaggtaagatccttgatttttttcccctatatttttcagatggtggcatcgaataatattacagtttgccctattaaatattttgctttaatactcgaatcctcttttggctagataaatggttttcaaaaatgtttttaggcagcagaatctttaaaaatgaaattttattctgaagctgattgtaaaaaagcagataaaagcaaagttgttctgattttatatggggtcggggctggataccctgattagcagaacagttaaaacccactagcatagtatattttaaaactgtatcctttgggtttatatattgggaatttgtttgcagggtggtagcaaaagaaaactttacttggcaacatttgggaaacgaagttacgttaaattcattaagggtatttgatttttgataacttttaatgcattatatttatttactacagtatttttatagttaagtttgataaggtgttacttatatatgaaatttttaaatgctcccaagacttttttttttgctgtagctcccagtgactcagaataagctaaagattaatattcttgatgtgcagttttgcatatgaatctctctttgttctagagaaatgttgaaagacatttcttgcactccatgtacgttggtctaataatggtaagcactttggaaggctgctgtagctctccttgacacctgtacagatacctatacagaattaggaatattagtttgacaagaatcttaaaagcagtagcatttaattttttattgtttgactttttgttatggaaaatataactgtataaaagcaaatagaatactataatgaacttccttgtatcagttacctagtttagtaattgacaatattctgccattcttgaattatctatacctttactcgttcctcagcctctcaattattactatttttacagttttcttggaagtaaaatttacttacattgaaatacatgacttagctgtgctgttttgacaaatagatatacctgtgtaacctacacacacacatcactgtagaaaatttccatctttccagaaatttctcttttgggttagtcaccttcctccctccagaaaacaactgttcatgttgttttgaccttagattattttgcctccagcctttaacaaatatgtttatttatttagtatgtatactggatatgtgtatacacacacacacacaaacacacagaaacatatatacacacacaaacatatatagatatatacacatacacacaaaatatggaatgtataccatgtggacagtgtatgtccatttattttgaaattatgcaaatgtattatcaatccatttattattaataaatgttaatttctttctttaaataaattaaatagaatagtatttaatattttctttcaaaatccattctagcagattgtcttagttgtccttcctgtgggcatcccacttggaggttactctttccagtatttacttgaagagatccagagacacaaacagatgataacttcccttgagattcattcaataattataatgcattggatgttgaatttatttcctttacaagcatagattttttacttctacctcagcattgtacctggtgactctgactttatctgatgtgaatatgggataatttcttgaatctgtgtactgaatttactcccatttctgtcaggttttcagcagtgtggcagaattatgaagatgggggagacttgatgtagatgagaagttggtgcgaggtgatgttatagtgagaataacagtgattgggggaatgggcaaacttggattctcctgtccttttctagtttcttatccttgggaaagtcttggaacccttgtttctttgccttggtgtctggaaaatgagggagtttattagctgactcttagctgttagtttatcaggtgactattagtttattagctgactataggctttggtccataaaattctaccataaatgggtcctaaatagacacattctggacattgagttcacatgaaagtgctacttgcaaaaggccaaaggcaacactggagaatagttgacatggggcttttgtcacctaatgtatacttgcccaatttcataggaaaccttttatagtttgtattatcatgttttttcaagcattggtggaattagaaatgcattcattagaggaccctaattcttttttgttttaaagatgcatctattaaaaaattttttttaggacaacagtgggaagctgagaaatgggggagctgaactggataaagtctgtgtgttccagttcagttagggaggcatgtcaaattcttcagtaaaacccatatttgaataatcacgtcactgtttttctgaaaccagttccatcaaaaagcccaccatagccaattctgataggtctttcctgcctaatgcattttacataagttttgaggtatctcatagagcatagaaacaattttagaaaataaaatagcgtgaggctgggcgcagtggctcacacctgtaatcccagaactttgggaggccgaggtgggtgggtcacgaggtcaggagatcaacaccatcctgggcaacatggtgaaacctcgtctctactaaaaatacaaaaattagctgggcatggtggcacatgcctgtaatctcagttactcaggaggctgaggcaggagaatcgcttgaaccagggagtcggaggttgcagtgagctgagattgcaccactacactccagcctggtgacagagcaagactctgtctcaaaataataataataataataataataataataataataataataaataaaatagtgtgtttcatttgactttcatagctgatatacttggttttcttcgtttagcttatcttgttcctagagctcttcatctagtaaaatacagtagagtagttgggcatctggataatgtggctttatgaatcaatgcccattgtggttgcctaagcatataagcccaggaagtttggtgaaggtcctatgttttgtaaacgtttcccttgattccaatagtgatagactgagaagtgtaaagtcaagtgagactgagtggcaggaatgtgttctatgttctcccttttagacaattaataaagtgatcttctgttgattttgccttttgactagtcaccttctaagaactctgtgttttatagaaatagaaaattttaaactctggatctctgggagtaaaacaactatttttaaagacaatgtgcagttttccttttataagatgtaaattgtgtttgaatcattaccgggcatcactgtaaccagcaatatctcaggattagagaaagggagattcagatgtttaaaattggtttaaagaggcaaaatgaatggcttgtaagacattgtcagtgaaaaaataactgaagttgttttaaccgcccttgttcttgaagtgagcacctctttccagttttctagatgagtagtggtaattttccatctcagaaattttatttacctacttaattttcttccttgattagtatgaattgtccaacataaagatgatgtggctggtgttactattcctttgcctgcctagaatagaaatgatggggcaggggcatgacccatatctccattgttcatattgttaggaaaatggtgatttgttttgtatactctccccattaacaggggtaatgcagcatggcttgtggtgtgaatgctttgcttatgtctcatattctcttacctgagagatggtggtgaacagtgaacttctgcaattgacataggtgacacattcaaatgacagcatgatatgccctcatttatgattttcagtagacacagtgtattataaaaattttcaaagttgcattgtctgtggatcatacatgactttttgtttttatgcctttgttttttagttcaagctctcattatcctggattttgatcatatatgtttataaagcaggattgttttattgctttcctactcaataaaaatgtgaagccatccttttggtatgcatgttttcctccgaatagaaagattcctttgaagatttcccatactttttcatagtcattttagaggatttgaaggtattttagattaagggaaggactatgataaaacctattattatatatgactttattatttttaggaacattctctacttttcaaaaatatcggacaaataaaatgataagatttcagtaataaaaatggtggcattgttttccctgatgtgtttctaaagtagatcatcttattgctgcctcagtcttttggtatttgcttatttatgtgcaaggtctccagtgggcttgctgatgcttctagagcctggctgctggcttaatattcctgcactcaccaggttgcttcccagcataaggcatcctcgccattcattttttaatttatatgacactgtgctttggtcaccaagacctgagctgcctcctagtttttctagccagctttctttttttcttaggacaaagggtcttctttctgaagtcgggcctagacagatcaaggtagttgatcttatttcactggttcaggtgataaactagcagagtagaagcatggcatggatggaaacatatattatctagaaaaggcagtggctgaagttctactgatgtgcctgaatcgttattttaaaatgtctttcttctttgttcaaggaattgaaataaacatcattatttttaagtgcatcattataaatttttgttgttgtattaaaagggacttaagaaagtgatcattatgtgtgacattgcctcactattctgagtgttagaatgttcagaataaattcaagacacattttgtaatatatagactgtttgcttgtttttcatgtctgcatagaaggccttcctactgaagaaataaaaaatgttctggagaaggtttcatcagaatggaagaatgtatctcaacatttggaagatctagaaagaaagattcagctacaggaagatataaatgcttatttcaagcagcttgatgagcttgaaaaggtcatcaagacaaaggaggagtgggtaaaacacacttccatttctgaatcttcccggcagtccttgccaagcttgaaggattcctgtcaggtaaggagccaacggtctggaaagtggaggaattctatgtgcagttccagagttaaggagggcttctcgtatcatgaactttaagttaatgctgccctgattaacttcctgtgaggatgttcatcttcagtgagttgtgtgaccgtattttctcttccttagcgggaattgacaaatcttcttggccttcaccccaaaattgaaatggctcgtgcaagctgctcggccctgatgtctcagccttctgccccagattttgtccagcggggcttcgatagctttctgggccgctaccaagctgtacaagaggctgtagaggatcgtcaacaacatctagagaatggtaaacccaacaattttaaaatctcctgtctcagtttgccttaatgtaaacatgactcccaacatttagaacttgagtacacttgcttgctttgcaccaaccttctccattttcctttgtgcctgtattgttcaaagtcttaaagtcttctgtattcagattcttttccagattcacacctttttgtaaacatacaagcaagtttcacattctctaaaattgtgtcagtaggatataataataatttttttttttgtagctacaggatctcactctgtcacccaggctggagagcagtggtgcaatcatagctgcagtcttgacctcctgggtttcagtggtccttctgcctcagcctactgagtagctgggactacaggcatgcaccaccatgcctggctggttttttatttttagtagagccagggtctagctatgttgcccacgctggtctagaactcctgggctcaagtgatcttcccacctcagcctcccaaaataacaggtgtaagccattataacaggtgatataacagcctcccaaaataacaggtgttaggcaaaataacagatgttagcctcccaaaataccagggataacaggtgtcagccattgtacctgacctggatataatgatttttaaagattttttttttttttttttttgagaaacaggtgcaatttcttcctttggttgaggaggccacttaatatcattgctaggaggatcaaaatgaatgatcccttacttctgtttcctcaaaatagttaaagttttggcagtctcatactgtcttttaaaagaaatcatattccactgtcagattcagaaaaattttagagttcttacttttggaatacacttggttttggaaggttcactgttaaagattttgaaagctcatccctcctacgttacactatttacttcctagctgccatttgagttaggaactgtgttgcattgtgcattattttgtgaaatgcattgagcattgtgtgaaatgctccacatgtaacccagcctaacttcagcaattgtagattgtgtgatgactggaagtgtctgtatgtgtgcatgctaggcaaatgtgtcgtattgcctttcttctgaaagtgcatctggacagcatgtctttgttccttgaattcagttatgtgaaatatgtctttgagggtacctctttctccacttattggtacaagctgtgctttcacttttgacaaggatcagtaggcagtttaacttttgctgctagttggtttcacctctttgtgcttcaagagaactcacttcctttccacgcaagtgttacttctgtgatatttttacattagtgactgaggtagacactgttccagctggctgttcagtcattatttctcagggtacctgggcagcatggtggcagtatttccatataatctcctccactctggacctgggtttgtctacacggtggagcttacagcaagactggttgaagggatctttgttttcttttattctttgtgtagctgttaaggaagaggagattatatggaacaaaagggacattgttgttccatcttcagagagacatttcatcatgaagaaatgaagaaaaattatagtgggttagttaatatttcaaacgtcaacatccgcaggaatgaagtcactgtctgactctcagaaatgccaatggaatgatctatgttgttaattaacagagacccttttacattttaatcatggggtctcctttgccatgtattggaattcatttaggataatggtctatgtaataatattggttcctaatatgattttttcaaactaaatatttttaaataaacagaactgaagggccaacctggacatgcatatctggaaacattgaaaacactgaaagatgtgctaaatgattcagaaaataaggcccaggtgtctctgaatgtccttaatgatcttgccaaggtggagaaggccctgcaagaaaaaaaggtaacatatatcttccatgttagaactctagcgcttcttctaatatctcctcttacatattttgaaatgttttttcagagattaaaaaaaaagttggtcagttttgttcatcattggtgcaaaaatgtgtttatgatttgagggttagtttgacctcacataaaagaaagtacagttattaaaaattttttcatagaagaaaagcatattttctccttctgctgtgattagcttaaaattctcaacctgttcataaaatctgctaaaatatctttatgaaatgaggactatcagttgacgtgttgatgtatacttttttctgcatcgaataggaatgtttccgaggtcatttagttgagtagccttatggctctgtgctattagatgaaaaggagagcagccattgagcactgcacacttggcccacactgggtttgctgttcccttggtttttagggttgagaatacactgtattgcccacacacaactcatgaagaaaaagctttaatttttatgattatgcctatttttttcatgagtttttcatgttttgttttgttttgttttttgatttccaacttttattttaagttcaggggtacttgtgcaggatgtgcaggtttgttaaatgggtaaacgtgtgtcatggtagtttgctgcactacgtattaagcccagcatccattagctcttcttcctgatgctttccctcccaccatgccccaccctccaacagaccccagtgtgtgtttttccccaccatgtgtccgtatgttctcattattcagctcccacttataagtgagaatatgcggtatttttttttgttgtttctgaattagtttgccgaggataatggcttccagctccatccatatacctgcaaaggacatgatcttgttcctttttatggctgcatagtattccatggttgatatgtaccacattttctttaagtagtctatcattgatgggcatttgggttgattccttgtccttgctattgtgaattgtgctgcaatgaacatagtgtgcatatatctttataacagaatgatttgtattcctttgggtatatacccagtgagattgctgggtcaaatggcatttctggttttaggtctttgaggaatcaccacactgtcttccacagtggttgaactaattcacactcccacccactgttctttttagataaaaatgctttctaatgcattttaaagtgacttttgactttatatagcccattttactatatctgtgcagacacatttttgtgcatatttttaatcttttaaaactttttccagacccttgatgaaatccttgagaatcagaaacctgcattacataaacttgcagaagaaacaaaggctctggagaaaaatgttcatcctgatgtagaaaaattatataagcaagaatttgatgatgtgcaaggaaagtggaacaagctaaaggtcttggtttccaaagatctacatttgcttgaggaaattgctctcacactcagagcttttgaggtaaatccagaggccactgggagtttaagtttattacggggtaaatagtaattatcttataagattcacgtatttattatttaaatattttacattctttctagatccccatttattatgtatttaagttgggacttatcaaagatgtacttttaatgtgctagagagcacatttatttccttttgcctggaagcaaagtcaaaagtagagtaaactggaccttgaagataagagaaaattgcttaaaaatggtcaaaataatgtttcaggcatggagggcctgtgtgaaatacagactgttgattagattatagtagtaacttggttggggtggtagaaatagcccaggtagtagtaaattgctgaatacatgaaactactttttgcaggtttttgacatttgaagtcaaaagtcagagataggccattgacagtgtcagagtgggaaggcaaatcgttccagggacatgaaaattcagaaacaggatccttcactacacctgaaaatgttgacagatgcagcagtgataaagtttaagaggaaaggataaatgtgaggatgtataaggagagagtcaatgtcaatagaagtcagtgtcagattttaacattctgcctgtgagaaagatggagaagcagagtttccaggtcacctggtattttaataggaaagttctgggtggagaatgaaccaatcacactctctccctgcaaggcttcctatcctccagtgactccttaccttggtctttttttttttttttccccatcagtcagggatctttgtcttttttaaatttcttattcaccgatgtatgccaagatgtactcataactagagcaatgcctggcacagagaaggcatccaatcaatatttttcaacgaatgaaatgaaattagcaataggagatttagatttggatatatctctgtatatctatctatctatatatatagatagatagattctcttggaagctaaatccaaatatgtgtagatatatatctatatatatagggagatgtctctgtatatatgcatatacatctttatttatatagagagaatctaaatccgaatctatatatatttagatgtagatccaaatatatgtagatacaatatatatatctacatatatttggatctacatctaaatattatatctacatatatttggatctagatctaaatatatatagatttggatttagatgctaagcaaatttgcataaggaatattgcccccaaaaagtgaaaagattgaaagcgaagacaaaaattaatgaaaatgtatgttttgaaaatcaaagtcagagaacacgtggtagaagaggagctggaagacctcacagattagtgtggaagggatccagccagattctctgagtggaccactgaatttggaggggcgttctttgactcaggaactaatgggtagttccaatgaatgatcagcagaagatacagatggaggggttgtgtgtgtgtgtgggtagctgtgtgtgatggtagtgacaggaggtagtttttctctaggtgtaagtgcagttctagatggagatctcattcaaataaaccagtaattatggagagaaatgtgttttgtgtggcttagtgtttttgactcatttacttttttttttttgagatggagtcttgctctgttgccccaggctggagtgccatggtgcaatcttggcttactgcaacttcagcctcccgggttcaagcagttctcctgcctcagcctcctgattaactgggactacaggcacatgccactatgcccggctaaggttttatttttagtagagatgaggttttaccatgttggccaggctggtctcaaactcctgacctcaggtgatccaccctcctcggcctcccaaaatgctaggattacagacatgagccaccatgcctggcccattttactttgcgatggtcccacttctcgttgtgtattatgagttgcaattgttcccggctttcaaaatgagcattggccttttctataattctaaagtttttggttatggtcccagcattgtattatcagtgattctcaaccggggtgattttaccctccagaggatacttgttaatttctggaaacatttctgttgtcagaactgtgggagaagacttccagtgggtagaggccagggatgcagctaaacatcccaccatgtacaggacagcctcacaacaaaataatcatctggctccaaatgtcactagtgccaaagtttagcaatgccagatgaaacattccccatcttttcaaaagatcatccctttgttttcagatttaagtccaaagtataaatggagattaacctcagagttagtcttcttttgactcttaaaagtatatcttagggttagctaaatgtatgctactatttcaatatggagcttaaagagaataaatattctcccaaaatacaaaagagtcctgtggttatagtaatccagctttaagctttggtgggttgttgctattaatgtagcaaatccaggcactaaaagtggtcacttggaaatatttatttccattaaaaatatccaacatcaagggtgtgtgtctggatatgtaagtgtttgttgttacagtagcagatttgtaatgtccagtactttttttatttgcttcttgtgtactaactgcaagattgtggttaaggaatacagtgtctatatttcttaattgtataacttcttcattgaaatacatgttttatcttaaattcaaaagaaaactccttttttttgctttgtaggaattgctggttacttaactactcatgatttacttgggaaaactttaaattccacaccctcaaattattagataattataataaatatttatttgcagattatcattgttttccctttttcaatgacctgatatatgattttttaggcatttaattatttttgtctttaaggcatgaagcacagtaggttttagattcaatgccaattcataataatgttttgtaggaacaaaatagttaactcgtttatttttaaaatgcatttttcattacatgagtagtacttgaagcctacacattgtgaagaaattgaataccacagaaatacttacagtgaacatttagagttccttttcttccccaataccattttctttcctgggggcagctaatattaacagtggatccttgtacatacaagttagacaagaacaattgacaaatattgctaattccaatcattttcccccacactgtggaaagaaatgatattggaactctgtgaaggacatttaaatccatagtccagatagagtttggaagtgaatcccactacttaataacatctttcattgatacagcacatttaaactttgaaagtgttttcatggccatgtgcttgcttttttctgctatccttcaatatttgtaagaggctgttagttgtgtgcgaatttcagttttctgttatttgttggcattgcagtgtttttcctcatttgcctgcatttcctttgtctccatagctggttccttttgtgcatgttgagattggacctacatatttttattcattgtgttatgcccaaatacattcttaagttctttttatttgtgccatgccaaagcaataacctccattcctgtacttacgaggtaaaatattcattgttactttttacaaactactataccccttccaggtgacaaaacatttgaaaatacatgaaatgggtatttcttttttccattattgattttactgactggattttcatgtgaatcatggggataacatattataaaatcctaagaggctgcttatatatctctcctcaccagtagtaatatctttggatttaggggctgcaaagtatttcatattacgtacttccttttccttattcaagagctcctgccctatgtataactgggaaatgaaagatgtccccaaggcacacacaaaactgtcttctattttccagcgctcctgccttttcaggctcctcctccaggcccttccttctgggttcaggctctcatgcaatctctttccctgaaaatttcattaccctttaaatctgattcccacttcctgtctcttctctctggaattcatctttcacaccaataccagagttgtacttctgaaaggatctggttgtcttcaccattaatacaaattaataccaagtgccattaatacaaaatgtccctttcttgccctgaagccctccctgcatctccactgtgagctgagtcaggtggggagaatacggtgggtcaccaaagaccatcctagactattgcctttctctgaaaatgtcatgtacttgctaggaattcacatccctcctcctcctgtctgctcatctgtcttcagcccagctcatcactacacccatagctagataatcgttccctcctctgtgattcgactgtgtgtcatttacaccttcacaatgacccatctcaggccgtcttttattatggtgagaaatgtgtgtctctcttcccacgaggcatgagctctttgagggttggatccctgtcaggcatagagcaagttagcagatgtgaatgtaattgatgtgtccggcctctctagtgagagtggatttatacagtctaaagcctggttatcctaagtggcaggacacctgtgtagtcatgcctcttccttcaactgttgaacagtcaaaggcacacatgaatggacttgctctgacccggaatctggaggggggcgtgctggagctccaacaggcagaaccaggttttgagagtactttggaaagcattttagggtaaaaatgcaatactttctaagagtaatattagtacggatgatttaacccttcttaggtaacatataattgatataattatctcataagggtttgagttttttttctcatttgtgaacacattttactttactgaagggaatattcatatattcccttccttagatttaagaaccttattagtttttaataagtgtagtagcagtgtcattgtttgtcttccctactaagtgagagagcacattttcaaggttgtgtttttgaggttattgagtattataaagtgaaacaaaataggaacctggctgccttaaattactgttttaattctggcttcacactatttttttttttttctggtctatgtcttaaaaagctgtggacattccgacagatgggggaggagcaaaagaaaatgccaagaatttagctgtaatcaagtctccagaggtagttgtgtaccttgcaatcttactgtcttaaatccagatttaccaagctttaaattacctccatccttaggtcacaggatgggggatgggaaatgaggtgagatagggtcagaggaattgttttaatgaccttgctgttccttgtccgtgatcccatagcaggttgttgcccatctgaaatgcttagaaatcattgcttttgagcagtgatggtccatgtagactttgacccttccatactagaatatttgatattttgattttcaaaaaatactgtattcgtaattttatattcatttgaatatttgtgagtaaaaataggtatgagaaatggctgccccagattagtacttagtttatttttttttgcatgtgaaataatgacatttgctttagaaatttactaacagtttttatatttcgttttggtttgtaagaactgaagtcccttaaagaaatgtgtgtgtgtgtgtgtgtgtgtgcatgcgtgtgttctgtaagcagatggaggtgaagaaaaaaatcgtcattattgtagattagaagcttgtaagtgcatcagctgagtaatttttaaatggacagagaaacactattttcatgtgagctctttgacgatctttgtaatcaacctctttgttgtggtggaattgacttaaagatgagcagacttttggtatgtttgaaaagcacaggaaacatctgctacaggttgattgtgacaatattttgctcagggaaaggggagataagatagggagagtggaaggcagagtagagctccctgtcttctgccttcacccatacaggtacaggtggtaggtagcattgatctttgggacttgataacccttcccgcgcggtgtgccacgaggtggaaacgccgagtgaatctgctgctgccaggcacttctaaaggatgggcctttccttctgtaccaattccttcccatgagctgtatttggccaggtctagccagatatataagcagtagccatttgaaacagttactttgaaacagttacaggatagaacaagcattaatgttggcagcaattaaaaaagtgaaacccatgcttatgcaaacacatgctcatcctggctgttcattcctgtggtgcctctgatgggacataaacaccaaaacttggatgtggtaactcttttatggtctcaatcttggtcataataaagcagttggttttgtagatcttagtataataatcgctaccatttagtgcattcttctatgtgggagtctctgtttttcagaacaaccagacaagatagttgttatgattccagtttcacaatgagttattaaggctcaaagaaaaattagtttctcaaggccccatggctaggcaggtgctgagcttggtagtcagacctcagcatttctttatatgggcacactgtctcttttagagcacagtgtggttagaattacatgcaggatttttagtagtgaaaatattatagtgtggctttacaggttcccttctattccctttgtcacttttgggatgatccattggcctacatggcttctctgtctgtttctttcctttttttttttagtatttattgatcatttttgggtgtttctcggagagggggatttggcagggtcataggacaatagtggagggaaggtcagcagataaacatgtgaacaaaggtctctggttttcctaggcagagggccctgccgccttccgcagtgtttgtgtccctgggtacttgagattagggagtggtgatgactcttaacgagcatgctgccttcaagcatctgtttaacaaagcacatcttgcaccgcccttaatccatttaacccttagtggacacagcacatgttccagagagcacggggttgggggcaaggttatagaccaacagcatcccaaggcagaataatttttcttagtacagaacaaaatggagtctcctatgtccacttccttccacacaaacacagcaacaatccgatctctccttcttttccccacacttcccccccttctattccacaaaactgccatcgtcatcatggcccgttctcaatgagctgttgggtacacctcccagacggggtggcggccgggcagaggggttccccacttcccagatggggtggccgggcagaggcgccccccacctcccagacggggcggctgccgggcggagacgctcctcacttcccagatggggtggctgccgggcggaggggctcctcacttaccagatggggtggctgctgggcggaggggctcctcagttcccagacggggtcgcggccgggcagaggcgctcctcacatcccagatagggcggcggggcagagacgctccccacatcccagatgatgggcggccaggcagagatgctcctcacttcctagacaggatgacggccgggaagaggcgctcctcacttcccagactgggcggccgggcagagacgctcctcacttcttagacggggtggcggccgggcagaggctgcaatctcggcactttgggaggccaaagcaggcggctgggaggtggaggttgtagcgagccgagatcacgccactgcactccagcctgggcaacattgagcactgagtgagtgagactccgtctgcaatcccggtacctcgggaggccgaggctggcagatcactctcggtcaggaactggagaccagcccggccaacacggcgaaaccccgtctccaccaaaaaatacaaaaaccagtcaggcgtggcggcgcgcacctgcgatcccaggcactcggcaggctgaggcaggagaatcaggcagggaggttgcattgagccgagatggcggcaggacagtccagccttggctcggcatcagagggagaccgtgcaaaggggagagggagacgagggagggggagagggagggggagagggagggggagggggcgagggagggggagggggagagggagagggagagggatctgtttcttttctctttctttttttctcatgtcagagggagagaaggaacagatacatgtgaattgcatgtgccctgatgggtctgcgtgtattagagagagggtgggaaggagggaggagggaaggctgttgaggccataaaacttcctcatatgccagtgactggagtagttaaggccacttactcaagtcaaagccaattgtggttaaaacttccttgaaatataatgcttccatataaattttgaaaattttggctgaggagactatcagttttccttattcaaactagagttaatgaatttcccagttatacagcagtaatgcattctttaaaagtgcagaatggagattagcagtgcaagaatctgtggtgacaagttaaacggagaatttttaaagtcattttatgaactctgtgaatgtattcacactttctctctttttgcacttctgtcttttttggatgccccactctacccgtcctgagcatgtcttcccaagaagccttctatgctaagaccttgaaatgctggagcaaacacagaagtgacctgtaaccaactgaaaatatataagggtagcatggacctgtgggaatagtgtcagacaggctggagaagagaggaggaagcagcttggggaaagtgtgcaatggaactgaaaggctttcaaagctgtgccaagaataaacgagatgcagaagtgcttagacaggatggtataatattaatggaagacacagagaaacctagctagataagcactttttacttgccatcttcatcagagaatggccttcaaaactacaaagtatagaatagtcattactgagagtgctttagagcctgaacttaggaccacaagcaaaaccactcagagctcctccagatgcataaatctacatcccaagtgggatttttacccttgatctcagggtcatttacgtcataatcttgtgagaaattaccagaaaaatggagatggaggaatgtcctaattaagaggaaacattagtttttagaagcagaagatataaagtaagtttgatgtcagttcctagccaaactgtaagataaataaccgactagagatcttatatgtgcttaggaaagaatgtcgtggtcaccaggaatcaacatggataccaataataggccttgcccagactcatttcctttaagtactactttcttttctttttttttttttttggaggaggaagcctagattattagatacacagagtgataacatctcacatttgaagatgctctctcatttagttcaaataatgctcacaaatgaacattcttggcaagtcttgatttcaccaaagtatttgagataatctctgataaccttatataaactagttagatctttgtgatcaattcaaacattataaggatcagaatagttggttctgggtggcatattttaaggacattaaaaattgatgtagtttccagagcgtgttgatcagagtagtgagcaatacctaaatatcatgtcctacagacatcatggaaggaattgggaacatgtaatcagtagaagaccagagaaaaacatggcagttgcccacctatggaaagaaatgacaatgattttggtattggagctcaaaagctaaaattgcatctacttacttgcattttttttttttttttgagacagagtcttgctctgtcgccaggctggagtgtagtggtgccatcttggctcactgcaacctctgcttcccagtttcaagctattctcctgcctaagccaccccgagtagctgggactacaggtgccccaccacgcccccagctaatttttgtatttttaatagagacggggtttcaccttgttggccaggatggtcttgatctcttgacctcgtgatccgtagcctgggcctcctaaagtgctgggattacaagcgtgagccaccgtacctggcccttatttgcattctttaaggcctggttccaatgttaccttctctctaaagtctctttctctttgcaaaatgtttgctttcacatttgtctttgaacccctatcgccatacacagtagctggattttatatatatagtaggtgcttaataaatgttggatgaaatattggagctgaacggggactgtcttgagttctcagataaaaaggcatccaaaagcagaaatgagaaccatctattgtattccctctaccgtgctatttgtttattcctgctctgagttactaactttagagaaaaattgttctaaattatatcagagcaaaatattttatagctgataaaacctagaaatgcattttttccctgtaatttgcattttaaatcataactattgcttgcatttaagcaaaaagagctagcgtttggaaatttttagagtggttactaacctgtcatctcttgaggattttagtcaagaatgaagaaaataatcattttcaaatttggaaggtttagaaaaagaaataacataaatgaaagcgatgctatcggagctttaaaaagttcctttgttccagtggcggtagatcttgagatgtagtaggctgaacgtcacgaagtaatatccccctctgttatcatgttcgattaggccgattcaacagtcattgagaagtggatggatggcgtgaaagacttcttaatgaaacagcaggctgcccaaggagacgacgcaggtctacagaggcagttagaccagtgctctgtgagttctgctgatctggggaacttgtcataaataacattttgttctttttctatgttatttgctgctattattaaaattgtgagaatatagcatagcattacatctagataaaatatctttcatcataaagcttttatgactttatagctaataaaagaatgacagattcttcaagtttttatttctggacgtggttatagaattttgagaggttatagaatagagaacaagaacaattttggttcattaggagtcattgtatattgcatttcttgtgccacatggtgaggatttaagaaaaacatatttaacaaatgaatttgagaagtgtctgttcatcaaattcatttaagtatgtttttcttaaatcctcaccatgtggcacaagaaaagcaatatacaatgactccatgttgtgcacgtgtaccctagaacttaaagtgttaaaaaaacaaaaaacaagaaatgaatttgctagtaatagtgcatgcagtttatatttggtgaaatcatcaggcttctctacattaattaaaaggctattcccttctgagagtcaagtatttccagtctaatttggcagatggctatatcaagcacccaggtgaaatgagtttcttaaggcacaatatttcttaagtagttagaagtactgactcttaagcagtctgcttgtgtaatatttgcagggagataagcagacaaactataattatggcatccacttatatagtaatgaactcaacatgcatcttttatgtgtttaggcatttgttaatgaaatagaaacaattgaatcatctctgaaaaacatgaaggaaatagagactaatcttcgaagtggtccagttgctggaataaaaacttgggtgcagacaagactaggtgactaccaaactcaactggagaaacttagcaaggaggtgagtttttcaactttactacctacggttttcaggagatgtagactgtagcttctctcagctgactaaatgtattatgacccatccagtttgaaaaacgatggtctagaataactccagcatgggtagtgagctggggccaaaaaaaaaggcatcattttttaaattaagagagggtgctgattgtccagtttggctcagggcttatccattcttgtcttaaatctggcttgaaacacatttatgacacttgctttacccctaagacatttgagtgggaccatttatttacttagcaaatatttcttaatcagttgccacctgtcaagcatcattctaggcactgcaggtacagcattgaacaaggaagaagaaactcctcttaaggagcttacattctagtgaggcagatggataatgaataatatcatggaggagtagcaaggagttagggctaggtgggttatttcaaataggatggtcagggaaggactttctgagatggggatgtttgaataaagaactgagtaaagtaagagatgagccttgtaaggttcagataagaacattcaggcgtggagaatagcaggctttaaaactctgtggtgggaatgaacttggtctgtttaataaagaatgaaggcagtgtagctggaataaaacagagaggagttagtgagttggagaatgggaatatttgaggttagaggtaggcagaggatggattagctatggccttggaggaaaggacttgggatttatttcaagtatgatattacacagaaagcaattggaaggttttgaacagggaagtgacatgtgatatagatcttttaaggtcactctggctttttgttttgtttccttttttttagcaacagtatcttgttgtatcacccaggctggagtgcagtggcacaatcctagcttactgcagccttgaactcctgggctcaagcagtcctcctgcctcctgggtagctggaactatagatgttcaccactatgcctagataattttagaaatatttttgagccagatgcagtggtgcatgcttgtaatcccagtactttgggaggctgaggtgggtggattgcctgagctcaggagtttgagaccagcctgggcaacatggcaaaaccttatctctataaaaaatacaaaaattagccgggcatggtggtgtgcgcctatagtcccagctacttaggaggctgaggtgggaggatggcttgagcccaggggatggaggttgcagtgagctgagactgcaccactgcactccagcctgggcgaaagagccagatcctgtcttaaaaaaaaaacaaaaattgtagagatggggttcttagaggctgaggcaaaaggatggcttgaggtcagcagtttgagaccagatgccagtctggtcagatgctgctgacctcaagcaatcctcctgcctcagcctcccaaagcgtggagatcacaggcatgggccattgcactcggcctctctctggttttcatgtgaatagtttgctctgggaaggcaggaatgaaaacagaaagaattcttataaggttactgcaggcttggagagagaggatggacccatacactagggaggcttaacgaagtagtgatggagggcatgagaaatattaggtttgaaaataaagaagagacctaaggaaagaattggatgtgtgatagaagaaaaagtgaatggtcaaggatgactcaggatttttacaaagcttccactttgtgtgaattgtggtgtcatttactgcaataacgaaggagaagcttctgtgggtgtaggtgaaatgatgactaccattctggaagggttaaatttgatgctagaagctaaggaggaaaaatcagtaacggggaatgtggggtcccaaatgctaggtggagaaaacttttcacagggcctaatgctgaggattgcaggggccaatcaaaacagaaaatcgagctttaaatttgataagaaggaggcatttaataaccttgagaaagcagggtcaatgaactggtgggaaaaaagtcatagtggatagttcgaggagggtatgggaactgaggagctgggacaccaagcataaccaactttgagaaatttctgtcttcaggggagcagagaaatgggtgggtgctggtgatgggaatccaaagaggtggttttgttatttttaataatgagagatattaaatgagagatattaataagaggacctcactttagaaaaaaaatgatggtgcagaaagagattgagataggagaatttatcaagtgaagtctgtgattatgcgaggatgagatccaccgtctaagtgaagatgttgctagagatatggtttctccgtggtaatggaagggaggaaatgatatgggaacagtagaactgggaggtattctttcccaattgctttgatttttattagtggaataatagtgaggctatatatagctgaagtgagtgacaaagcagtgaaaaatagaagtcaatatgaaatataggcttaccccacagtcacgtaaatagtacgtatttcttaataaaatgcttttggctaatgtttgtatcagaaaaatttatatttgcataactgaatattttgctttgtgtttattgttttacccaacttattttgaacatgttcaaatgtaaagaaaagttaaagaatgataaaaaggaacagctgtatatccatccattcagagacttgctaatgttttaccacatttgctttctctctctctgcctttctctttatacacacacacacacacacacacacacacgcacacaccctttttttttggtacttttgaacagtaagttgaaaacatcatgacacttcacccctaaatactctagcatgattttccaagcatgaaggcattcttctgcaaaaccacaatactatgatcacacttaagaaactaataatgttatactctcatctcttatcctagctaaattcaaatttttctcaatgtgctataatctgatggcatgtgccttaaggaactggggtttttgaggaaatagaaaatggtttggaagtggcaatgaggatcaaggaaggtgataattagaagtttgtatctctatctatctatctatctatctatctatctatctatctatccatccatccacatacatatggtgacaaataattcattgtgaattactgattcaaaatacaggaataaatatatgggaaatttaaagtgtcctcaggaaggaggtaaccacatgtgtgaataattatctagagcatttccagactattgcattgcattgactagtacaaatgttgaagtagttttggacaaacataattttgccaaattttcattttgctaaaaagaacaggcatataaaacaaatcaacaaacaaagatagtctatttcatctattatattcatgatatcctgaaaaaaaggaacattttaatgccaaaaaatagaaagtatatattctcaggataattaaagataattttgagggtgttttgttgttgttaagcttatggtagtgtctttattttcttcatttctttttggatctgtgaaaattatattgctgactagtgttcaagaagtacacatacagagaattttctggaaatggggcccaagaatctctgtctctctctttctctttctgtgtgtgtgcatgtatttttatgaaaagctgaccaggttaacctgatgatcagccaggcttgggaatgggattgtgagtgttgctggcatcagctccttggttaccctgtggggacagtggaagaaaagctcttgtttggtcctgtctatttttatgccggagatcctgtttggagggagggactgggaaagcctctgtctcttgcttaactctaacttctgtgagaaccatccagctcctgtgctggcctttggttactatccacctagcagccaagcaggccctggcagggtggccactactgtggcgtttaatttgagcatgaggctgaacctgccaagtagaggttggactgtgactgcagaacggcgccttctctcacagtagaagtcagtttgtcgttatggggaggagtgctctgaaaatatttctagacttctccaaaatttttaactaagttactgaatcagaatcagacaactatctattttttactgtaacttttttgtgtctgtgtggcatatacaaacatagtagacatcaaaaccaaaattttatagagcggtgtcttatgacatctttaatagcagcctctccctccctgctttttaaaagtgaaatcttaatgggaagtgcagttaaaaagaagaaaatggacattttgattgcttctaggggttttttttttttttttttttttgagacagagtctcgctctgttccctgggttagagtgcagtggtgcgatctcggctcactgcaacctctgccacccaggttcaggcaattctcccgcctctacctcccaagtagctgggactacaggcatgcaccaccatgcctggttagtttttgtatttttagtagagatggggttttgccatgttggccatgctgatctcaaactcctgacctcaggtgatccccctgccgtggcctcccaaagtgctgggattacaggtgtgagccaccaagactgactggcttctagattttttgtttttgctttcttttttcttttttccattataagtagtgctacattaaatttacttcatatatgtgcttttactgttatagattagattcctacatctgggattacagtcaacagttatgcattgtcaaaattataatagctatttcgagataagagtattatccaaatgtggtgtggaatcccagtcttaagattattttcattactgcttatattccacagcgttagcatgagatgtatgagattttatctgaattttaaagcatgcaattcgttgtggaaagttattactgtgcctttaaatattaagagctaaaacttgacattgaacacattaacatttgtttatttgggggaatggcttttcctttgtagatcgctactcaaaaaagtaggttgtctgaaagtcaagaaaaagctgcgaacctgaagaaagacttggcagagatgcaggaatggatgacccaggccgaggaagaatatttggagcgggattttgagtacaagtcaccagaagagcttgagagtgctgtggaagagatgaaggtgaggcggggacgaccagtgccaacaggcttcatgcctccctcctccctttaaaaccagcacatcaatcatctgtctatctgtcaaacactatgtgcatgtagcatctttcacagtaggtttttgaattaaaaaaacataacagggtagctgctctaattttagcaggggaagaaagccaggagtccacatatttggcttggcccatgagttgagtccatgagggcccatgagacaagctcttaagttagacctttgggaggctacagagaatgacttaaaaacctctggtagtgggcatgaggaagaatgatcatttttttttaattggggtaaatacatataacattggtcagcttaatttttaagtgcacaatccagtggcattaattgcattcatcactatttccaaacattttcacaaagagttattttttgtaaggggaacaaaagagacctcccaagttgtctgaggtttattcttattttcctgttactaatcttccagttaatacatacggcacatatgaacactgacgtttcattagagcaggtaggaatagcggtaggaatgcatcggggagttcatattagttggatccactggatacatttcctgtaaacttgtactcctctgtcgatagtcttgaacactctctttttatatataataaaagaactgggcatcattcccaaatttctaacacagcttcaactgtccttgaatgttcaagccaaaggagatggtgttttcaaagcttttttttcctgtaagcttaagcaacacagtgactaatgttttacctcaaagttaacttacctagaagtgtaactaaagcaaaaatctgtgatttttttcaaaaaagggattatatgacattcatacattattatacatgaatcaaagtaaatatgacaggagacttgttggaagttgttttttcactaaaacatcttttttagtgtagctctttttgaaagatttaaaaatactcagtacataaggtattttaaaataggctaccatgttaagaattgtctcatttattgtctttctttacactattggcattgtagttctgtggattttaaaagttgctatagatgagatttgagaaaaatgatatttaaatatttgattgggcaacattttatttatttttattctttcaaacagccattaggacttacaaaaccactacacttaattactttcccccaatctaaggaagttcaaaaccattaagtagtagagaaaagtaaaggggaaagtgaaagactgttttatttgtatttattgccattaaaagtaatggcataaactgcaattacttttgcaccaacctgataggttgattttcctgaatgtcagattgtttatcttagcactgagaaacagctatttctggatcagatcatctcagtctaactttatcattgaaatgctattaattagcagaaggatacatgtgcctatgttctataattttttaaaaagcttaaattatttagagaacttttaaagatacttctaccatagtgtacctcaatttttgtgaaaatatatttatcacagtgtaatctgctcagccctccagtgataatgaaaattcactcacttaaattctgatcttggacccagactttgaaaatacttcatgtcagtaaacatactttggataacttacgttaacactgctgttatgaaatgaaaacatttgtgggagctgagtacattggatgcatgagtgaaatttcagagttagcattcttatttcaaaaacgctcaactgggctgggtgcagtggctcacgcctctaatcccagcactttgggaggccaaggtgggtggatcacctcaggtcaggagtttgagaccagccccgccaacatggcgaagcctcatctcgactaaaaaatatgaaaattaggtaggcatagtggtgggtgcctgtaatcacagcttctcgggaggctgaggcaggagaatttcttgaactgggaggcagaggttgtagtgaacaagactctatctcaaaaacaaaaacaaaaacaaaaccccacaaagaaccattcactgttacctaaataatgttctattttggcagttagaatcatccagatgttttaactttggtttaattcttgaaaaaaaaagaaagaaaagaaattggttactgagaaagggagacgtttttcaagttcatccatcctttcttggaacagagggcaaaagaggatgtgttgcagaaggaggtgagagtgaagattctcaaggacaacatcaagttattagctgccaaggtgccctctggtggccaggagttgacgtctgagctgaatgttgtgctggagaattaccaacttctttgtaatagaattcgaggaaagtgccacacgctagaggtatgctattattattattgttgttattattattattattattattattattattttcagtgatgtatttctgagatccaaactctgtaatgttttggccattttcaaatcttggagaaaacttctcttttctttcaaattctggattataaagaaaaaatagttcttgggaaatagtttgataaaaatgaaagaggggttaaaaacaggagaccaaaatctgtccctaattatcagaaggttcttgggcaagtcattttgtatattcaaactttactttttttataggtgcaatccaggttttcatgtaacagatgatctgtagggcctattccagtccaaaaattgcagagcacatttcaagcctctcttttgttttgttttgcctggttgagtacatagagaggaattattttcttttgagtggtgtctaaagttcaagagtcacctgaaggaaaaatagaacttaaatatgtgacagttttactgggtcttagataaaataccttttttttttctccctggccattacacgtaaaatgtagatgagtctatgaaatttttttaaactaagagtgaggttttgcttgtttgtttttatagtagtatgacttttgttattgcttgttggaagatttaagaaggctttcaatttacaacaatttaatttacattcaatttgacgtaaaacaaatatttgtattgtggcaaatcttgaaatggtaaaaaatggcaactgcaatatttaacctaaattcattcattactttgatcattcattcatttgtaaattcattcgtttcttgttctaaaccaattttgtgctaagataaatatatatcattgaggcaagttagtaagaaagctacttgatttgggatctgtctgcttcttggaagtggtcttctttgagtcattttttctttcccataagaaaagaggttgtgcttgcatctgagcagatttttggtctgctttttgcttgtggaaattgggggactagaacctcttttcttttattctaattcagtggctggaaaattatggctgaggattttgttttgttttgtttgagacagggtcttgctctgtcacctatgctggagtgcagtggtatgatcacagctcactgtaacctcaaactcctgggctcaagtgaccttcctgcccccgcttcctgagtagctatgactccagccttgcaatgccacacctggctaattatttttaaattttttttgtagagatgggggtcttgctatgttgcccaagttggtctggaactcttgggctcaagccatcctcctgccttggcctaccaaagtcctgggattaaaggcattagccactgcacccggactggctgagggtttaaatctaacttgtagtttggttttggatacctggttaactgagaatagtttatacatttctcaagggttgtacaacacatacccccctccaagaagaatctgtgataggaagcaaatgtgtcctcccaaaacctaaaatatttactggctggccctttgtagaaaaatgtactgctccttgatctggtaagcatacttcatatggagagtggaccggcaggtgccttcactcatttatgtaaaccagaagatgcctccactcattcagtacattcaagacgacaagcccaggaggcatccagctgagttctttctcctaaacttaccactcaaataagttcctcttataataagggattataaatttataaatgtttccacccactacacaacccctgggtccctgctctggaaacctcagaggggaatgagtgatcaaaaccaacacagtaagaacagtataactccagttttggtaaaatgtggctctcttatattgacatgtcctcatgaatttagaaaaaagttgggaaggctacattgcaaacttttacatcagttagctccaagttggaattgggtggggcccaggagatttcaattttctatgaaattattttttaaaaatttacaattgggagcaattttttcattttgttcaaaaaccaaactttttttttttttttttttttttttttgagatggagtttcactcttgttacccaggctggagggcagtggcgtggcctgggcttactgtaacctctgcctcccaggttcaagtgattctcctgcctcagcctcccgagtagctgggattacaggtgcctgccaccatgcccagctagtttttgtatttttagtagagatggggtttcaccatgttggccaggctggtcttgaactcctgacctcatgtgatccacctgccttggcctcccaaaatgctgagattacaggtgtgaaccaccgcacttggtctttaaaaaacaaactaaataatgtttctctcctgtttttcttactaattatatagttctatttttgacatttaaatcagatcatggaatttattttaaagagtgaggcagcctcttgcccactctttgctccccacccttcaccaactggtctcatatgattttgttgattattttattttattttatttgagatggagtcttgctctgttgcccaggctggaatgcagtggtgcaatctcagctcaccgcaacctccgcctcccgggttcacgccattctcctgcctcctccagagtagctgggactacaggcatccgccaccacacccggctaatatttttatatatatatatatatttttagtagagacagggtttcaccgtgttagccaggatggtcttaatctcctgacctcatgatctgcctgcttcagcctcccaaagtgctgggattacaggcgtgagccaccacgcctggccgattttattttatttttttgaagtttcaactccatcagttctgaattcctaggtatactcacatccaaatgaaattattagcgattaaagagaatgtgtagtactagagatacgatgtgtgaaatggctttttgtctaatttaaaatttttcatgctttaggaggtctggtcttgttggattgaactgcttcactatttggatcttgaaactacctggttaaacactttggaagagcggatgaagagcacagaggtcctgcctgagaagacggatgctgtcaacgaagccctggaggttggaacccgtgatctccacggcatttctctttgctgtgatgaggccacacgtgtattacaatgaggaatgtaatgctttacgcaggcaaatgcatttgcttcctcagtggttttcaatgtcacttgcattttcttccatagcctgaagtgtttatacaatcatgtgtatttagattattggtgacccattatatcagcctcaagacgtggttagctgtttgacatcttacattttagacatgttgaagcactctagtggttttccagtttattttagtaggccctggacaaagctctgccatatgttattaggacaactgctctcttgtttcatcaacaagttatttttactcactaaacacagcactgacagtttataggggattcctgtctcttaccttcagatgctagaagttaagacagtggttgagccatgggatcttgtcgtaggagcttgtcttcaagcctggatttgaactccttgaggccaagaaatgtacccgatgctttgttattcctcagttcccagcacagtgtgtagcacatgttaacttaataaccgtttcttaaatgaaatacagtgcaaagagggtaggtttgcttaacaaaaaagaaaagggaagggggtagataggcttttaaaaatgtcatggtaccatgtgggaactgagtggacaactggattaaaggtcagaaatgagtaaaatgtggcacttacattccaggagacggatgctctgctagagaaaagatgtcacttctcaaatatagcagagtgagagacagagtgaatgaaaaatatgaaaagcttaatttttttcctaatgtaagagtgaatacgtatatattcttgaaatatggaaaataaagaaaagtataaagcaaactctaagataaacattttaaaacagtttgtagatttcttcctaattattatcttttatgtatgcatactagaaggtagtatattggatcaaaggctttggagtcttttatttacttatttatctttttatttgagatggaatcttgctatgttgcccaggctggagtgcaattgcatgattttggctcactgcaacctccacctcctgagttcaagcaattctcatgcctcagcctcctgagtagctgggatcacaggcgtgtgccactaccccagctaattttgtatttttagtagagatggggttttaccatgtcggccaggctgggctcgaactcctgacatcaggtgatccacccgcttcggcctcccaatgtgctaggattagaggtgtgagccatcgcacttggccaggctttggagtcttaaagctttagagccatgttggaatcttagctcttcttttgactgtgtgtatgtaggcaagtaatttaacctttctgagcttcaattttccaatctgtaaactgggaatgctatttagcccatatggttaattagatttatgtatataaaaagtgtgtatataaaacaatgcctcttattctgcatatattgtaggaaaatgactacttatttttagtaatataattaataaaagttgagatcattttgcttgtatagtactgttctctgcctttgaactttgtgtcatgagcatttccccatataattaataattatttttaactttttattattcatttatttattgtttagagacatagtctcgctctgttgcccaggctggagtccagtggtatgacagctcactgcagccttgaactcttgggctcaagtgatcctcctgcctcaccctcccataattaataatagttgaaattatttttgtgaaattatatcatatatcacttgtgctaatttctcaattttatgcattttttaatcccatgatggatatttttgtgaattagtaatttacttaacttttggtcctgttacttaggtagatttttagaaaatataattacttgtttaacaaatagacattttggggatccttgataccttttgccttagtaaatgcattattatttttttttcccatctccattccagtctctggaatctgttctgcgccacccggcagataatcgcacccagattcgagagcttggccagactctgattgatggggggatcctggatgatataatcagtgagaaactggaggctttcaacagccgatatgaagatctaagtcacctggtaagagttgggacatacatgggtgttgattaggtattgatgaagtggagctggccctaagctccatatcatagagctttaatgttggaaaaatctttaatgttggttaaagttggtaaccaatgctaacaggggcattgagggtattgaaatattcagaaaggaagaatagatctaacactctaagacagaactggatgattaaaaaaattatttttgagattacttctacttacaaacatttaattttcattaaggatcatatgatagctgtatataagaacaacaactcatactatcctagtaaatattagggccatgatatttcacataagctgctgtgaaagccatagtctcttagttcatatccaggttgtaacatacatattcgtatcacaaattagagaaagaacatttcttttataggaaggttgggtatgaatattaggtgcttccaaacacatattaaataataactgttgatgttcagcccatgaataacatcaagcttaacccaaaagtgctgtaaatagtagtttgatatgtatgtacacctatagaatttgttttaggctttggaaaaaaagagactctgatgtttgtgtattgatagacatttttcttatgttttatattcttaattggcagacattgctgattcctaaaaatgctttaaaattataataaataacacatttttatcttctgtttaatgcatcttatgggaaacctttacatttttgtatttcaacattatatatagaaagaagtaataattagtaattcagctgcatggtacataagatcctagtgggacattttcactgttatcattagtaattattatttatttataaagaaagctaaagtcttggatgaaagcttttatggtcttttcttagtggccagaatatatatattctgctatttatatttgtgttgggcaactaatgattcaatttctcctttgtgcaggcagagagcaagcagatttctttggaaaagcaactccaggtgctgcgggaaactgaccagatgcttcaagtcttgcaagagagcttgggggagctggacaaacagctcaccacatacctgactgacaggatagatgctttccaagttccacaggaagctcaggtattgccgtgcatttgagggcttttgagctgtaaagagagcttttgtaattgcctcctcaactataagagaacccctcctgctctccaaaaccgagagtcaatgggaaagattgaccttacttacagggcagcatttgggttttggagttctcttgctttctatgtgagactctggcaaaagtcttatatagtttattttattttattttattttattttatttatttatttgagacagaatcccactatgtcacccaggctggagtgcagtggcacgatcttggctcactgcaacctccgcctcctgggttcaagtgactctcctgcctcagcctcccgaataactgggactacaagcacgcgccaccacgcccggctaattttttgtagttttagtagagacggggtttcgccatgttggccaggctggtcttgaactcctgacttcaagtgatctgcctgcctcggcctcccaataatttttgtatttttagtagagacggggttttgccatattgtccaggctagtctcaaactcctgacttcaggtgatccaccttcctcggcctcccaaaatgctgggattacaggcgtgagccactgtgcctggctgaaaagtcctgtatattttaaattgtagttttcttagctgtgaagttgggacaattccttccttataaataagttgtgaacattagaaacgacaaatgcaaagcccttagcaggtgcgtcatgtacaatagtcataccatgcagtgggccatattattattattatacaaaaacgtattattattattttttagacggattctcactctgttgcccaggctagagtgcagtggcgcgatctcggctcactgcaaactctgccccacaggttcaagcaattctcctgcctcagcctcccgagtagctgggattataggcgcccgccaccgtgcccagctaatttttgtatttttagtagagatggggtttcaccatcttggccaggctggtcttgaactcctgatgtcgtgatccacccgcctcggcctcccaaagtgttgggattacaggcataagccaccgcacctggcctacaaaaacttattaaagcttctgtggaggtcaacattatgtaaaatacgatatcatgtattacacaacgatatagaacttttgtattgtctctttttatacttaagtaaaaaaaaaaggacatcctctcccctttccaatctctttttagaaaatccaagcagagatctcagcccatgagctaaccctagaggagttgagaagaaatatgcgttctcagcccctgacctccccagagagtaggactgccagaggaggaagtcagatggatgtgctacaggtaaagaaggccaggagcttccttttacttttcaacttgttgggaattttcttcaaaaaagagaaagaattgattacttgggcaccgtttgtattctttgtgatgtaaaccatgggatgggagtgatgatgtgttgaaggttgcatcctagggcagcagaaacaaattgttgcatgtgtggaaaaatatgaaatctgattttgatagctgagatgagaaacaagagagtgagccagatttagaagttagctttatatacactttttctttaatgcagagcctctgtcagtatcgtgtggctgatgctgtgggcaggccgagcatgaattggatgcagcatcatttagttctttcatggttgatatgacattgactttcactctgaacttgtgatgaagggcattttgagttctaggttcctgaactatctttttgaacatgaagttttaattccagtgaggtcagctttatctaaatttcttatccaaatctattacttctgagattgagacactgagtgttgtaatttttgacactgggctatgcagttcacttaggtgatcgggtaccctcactgagattcattaggagttttttattttgggtcatatttctgaatttttttcttttggtactttatggtacaaatttttagtagtatctgttatgctcatgatgagagagataatcatcctgatgggaattgcatattttcatttctgcaaacagaggaaactccgagaggtgtccacaaagttccagcttttccagaagccagctaacttcgagcagcgcatgctggactgcaagcgtgtgctggatggcgtgaaagcagaacttcacgttctggatgtgaaggacgtagaccctgacgtcatacagacgcacctggacaagtgtatggtgaggcttttgggtgattggcacatccagtggctttttcagcagctgttatggcttggtctagcaagtacatgcctagtgtgtccagtgatcactagtctacagtgtgctaaacataaggattgatgatggaaaacgtgttaaaaaataagaagtgtggtctttccctccaaagaaattagaagagataagagagatagctaaggaaactagaatagacatgtatataacatgatgacaaaaaccaaaacaaaagaaatacagcttaatcaccatgtgaagttaggagggcttcagcagagtgtgactaataagcaaagttttcaaggataaatttgaattagctagaagaaccatacttagaatggatatcgtaaaaattccattttctaggaaaataaaaatttcaatagaaatttaaaccttaagataggaaagaagaaatgatatataaggccttattacttttttagtcttgaactttataattcaattgaatagaaatttaaaaataatgtggctaaggggacacaatcttagaattagtgttctgcttgagaatcacagaacttaagatgagactctttaggacaggagaggtatagggacagttctttgtgcttttcaaaacaaaggataaattttaatatatatgtgcatgtatgtaagtatttatttgattattgtgacataatggtaatcagagaaagtgctgtccttgacttcatggaacatacatagttcaggggtctgttacatgacagcgtcctatgagatgttgagatgatgatgtataggtgtcaagagaagctgtttagaataaagctttttggtttcaggtaactaggaagaagacagctctgaatttgacctacagaactacgatttctttttttatatttaaatttatttttatttttaatttttgaagacttttaggttcaggaagtacatgtgcacgtttgatacatggatatattgtatgatgctgaggtttgggcttcgactgaacccatcacccaaataataaatgtagtacccaattggtagtttttcagctcttgcccctttcctccttccctccttttggagtcccattgtctttgctttccatctttatgtgcatgtgtgcccattgtttaactcccacttataagtgagaacatttagtatttggttttctgttcctgaattaatttacttaggataatggccttgagctgcattcatgctgctgcaaaggacatgatttcattttttatggctgtgtagtgttccgtggtgtatttgtaccacgttttctttatccattcccccattgatgggcacctagattgatgacatgtctttgctattgtgtgtagtggtgtgataaacacgggagtgcatgtgtccttttggtagaacgattatcctcctttacttatatacccagtaataggatttctgggttgaataataattctatgtttagttctttgagatatttccaaactgctttccctaggggctgaactgatttacaatcctaccaacagtgtatggtgttcccttttctctgcagccttgccagcatctgttgttttttgactttttaataatggtcattcagactggtgtgagatagtatcttattgtggttttgatttgcatcagaaatctgtttacttatagttatatacatcttgatatatcgagttttgtattttttatcatacaaattatatatgttcattgtggtagacttagtacttctgagaaatagaaataaatgttaataattccaaatccaacagacagcagtagccagtgttggcttgttttagtcataacatgcaagattttttaaaaatgtaattttaattgtgataaacattctgtttttagtcctaatgttttcccattttatgtaggaaaaatatttatattatcaagtactttcataagcatttgtctgagattttgaaagaatgagcataaactctattagtttattttcttgtcagatttgaagaagttattacaagcttgatttcatttgactcgaccttcagaccaaatctgagaaagatgatggcctttgatcaccatagttaggtcttggctgtcaatctgtgtaagctgtggtctgacatgatgccagttggcaagttgtcaccacagtgtgtaatttgtctttttctttgtttgttttaaagaaactgtataaaactttgagtgaagtcaaacttgaagtggaaactgtgattaaaacaggaagacatattgtccagaaacagcaaacggacaacccaaaagggatggatgagcagctgacttccctgaaggttctttacaatgacctgggcgcacaggtgaggagagcagccccacagctcatctctctgtctctctctctctctctctcaatctctctctctctctcgttctctctcatgtatttttaaatttcattttttggaaaatgcatgtttgaaaattatgagattcatacgtgttttcaatttattgtaataattgttatatttctttaaatgtatgtggtaatattacagtgattcatagttacatagaaatttatttttggctaggcacagtggctcacgcctgtaatcccaggtctttgggaggctgagtcaggtaatggcttgagcccaggggtttgagaccagcctgggcaacatgatgaaaccttgtctctacaaaaaaatacaaatgaaaacctccaaaaacaaaacaaatttccaaaaaaaaattagccatggtggtgagtatctgtagtcctagctacctgggaggctgaggtgggagagctgcttgaacctgagaggcagaggttgcagtgagctgagatcacaccactacactccagcctaggaacagagtgagacactgtttttaaaaaaaatttatttttaatatttaattcaggctaatatttatactttcaatggctactgatattccataaattattctaaggatactacaagtaatatatgttcattgtggtagacttagtgtgtctggaattggtgggttcttggtctcactgacttcaagaatgaagctgtggaccctcgtggtgagtgttacagctcttaaggtggcgcatctggagtttgttccttctgatgttcggatgtgcttggagtttcttccttctggtgggttcatggtcttcctggctcaggagtgacgctgcagacctttgcagtgagtgttacagctcttaaggcagcgcatctggagttgttcgttcctcccagtgggcttgtggtctcgctggcttcaggagtgaagctgcagacctttgcagtgagtgttacagctcataaaagcagtgtggacccaaagagtgagcagtagcaagatttattgcaaagagcaaaagaacaaagcttccacagtgtggaaggggacccgagcgggttgccactgctggctcgcgcagcctgcttttattctcttatctggccctacccacatcctgctgattggtagagacgagtggtctgttttgacagggcgctgattggtgcgtttacaatccctgagctagacacaaaggttctccatgtccccaccagattagctagatacagagtgtggacacaaaggttctccaaggccccaccagagtagctagatacagagtgttgattggtgcattcacaaaccctgagctagacacagggtgctgattggtgtgtttacaaaccttgagctagatacagagtgccaattggtgtatttacaatcccttagctagacataaaggttctctaaggccccaccagagtagctagatacagagtgtggattggtgcactcacaaaccctgagctagacacagggtgctgattggtgtgtttacaaaccttgagctagatacagagtgccgattggtgtatttacaatccctgagctagacataaagactctccacgtccccaccagacccaggagtccagctggcttcacccagtggatcccgcacccgggctgcaggtggagctgccttccagtcccgcaccgtgggcttgcactcctcagcccttgggtggtcaatgggagtgggcgccgtggagcagggggtggcactcatcagggaggctccggccgcacaggagcccatggagggggtgggaggctcaggaatggcgggctgcaggtcccgagccctgccccgcaggaaggcagctaaggcccggtgagaaattgagcgcagcgccggtgggctggcactgctgggggacccagtacaccctccacagccgctggcccggtgctaagtccctcattgcctggggccggcagggccagcctgctgctccgagtgcggggcccgccaagcccacccggaactccagctggcccacaagcgtggcgcgcagccccggttcccgctcgcgcctctccctccacacctccctgcaagctgagggagtgggctctggccttggccagcccagaaaggggttcccacagtgcagcggtgggctgaagagctcctcaagtgctgccaaagtgggagcccaggcagaggaggcgccgagagcgagcgagggctgtgaggactgccagcatgctgtcacctctcattagtacttcaaagaaatacaagggaaaaaataaatgttaataattccaaatttcaatggatagcagtagccggtgttggcttttttctagtcgcaacatgtaagatttttctaagtgtaattttaattgtgagaaacattctgtttttagtcctaatgttttcccatttcatgtaggaaaaatgggaaataataatccctgtaaaaactcaagttgttggtccttagatttctaaattgaacagtctaccgagaaatgttaaaacatcagggctctagtaaataaccagtggcaagaagttcacattaatctaccaggatttgaaatcctggcaagaaatatctctaatttgggcattttagtgaatccatgcaggagttgttgagcatttactgtgagtgaatgaatttttgccctgaaaccaggagagcaaagaatgtgtggaagtgtgaaaccttaataggtaatattgaaaacccatgtttgatagtattttggatcctccttcagttaggaaatattaactacttccagttgaggtaatattgaagtttctatataagcccagagaaaaatagctgaaattttgttttcagttgaaatcagaacgaccagtttatactttttctgggtgattttgatctcacttctgcaagcttagattgttgatgtgatacattttgatgtattacatgtctggaacacacaccttagagcttctttttggaattatacagctggttattcgttaaatattattatatttattcactgactgggcattttatgaatggaatggtattgctggtttttgcactaattctccaattgtgactataattttagtattaattaattttatcatttaaagtttcactcaatcgagattttactctgtgtcaggaattatacaaggagacagtgatgaggaaagatataaattatctcgttgtctaatggaacttagggtagtgaaagagaaaaacattgagtagttacatgagatgatgtcacattatcagtctgaagagttatgaagaatgtacatggttctttaagagtataggtaaaggggggtttcacccagtcttgtgttaggaaggcttccctgaggaggtgatgcataagccgagatctgaagtctgggtaggagtaacctgggtgaaacgaggagatttctagactgataaaacagtatatataaaagctctaaggcaggaggcagtgtggtacatttatgtggctagagcagagagagccagtgtgaggaacatggtgctagggagataggattagacaaaatcctgccaatgtcatagagtttgtgttacagattaaaatctgtgtcttaagcagttactgcacaggttttagtaggcaaattacatactcagatatgtcttttaaaggattactcactgcattttggaagaggaattggagggaggctggagtggatgtgaggagactggtttcgaagtcattgtacacttggtgagagatggtcgtaccttgaactaggatggagagtggagatggagtgagtgaattgatttcagacatatgtaggaagtgaaatcaacaggacttggtccaggaggagagatgaaggatgacccctgggtttctggcttgatgatgtggatggtgtggccattgagatgggtgctgtaagaaaagatagaggaccgggtgcggtcgcttatgcctgtaatctttgcacgttgggaggccaaggtggtggatcacctgaggtcaggagtttgagaccagcctggtcaacatggcaaaaacccgtctctactcaaaaaaaaaaaaaaaaaattagctgagtgtggtagtatgtgcctgtaatcccagctactcgggaggctgaggcaggagaatcacttgaacctgggaggctgaggttgcagtgagtcaagattgtgccactgcactccagcctgggcaacaagagtgaaaactctgtctcaaaaaaaaaaaaaggtagaagcatgcagaaatcacaggtatgtattggacatgttgacattttaagtacctttgagaatgttaattggaaatgtcgggtactcacatgattattcaggtctggagaatatatctggactgaagaggtggattttatgagtcatctgcatagaggtcataattaaagtaatcagggatgatagattgtctaggaacaggatatagtgaaagaagagggccctcaaccaagtcttaagaattacatcatttagtaagaaatctcaggaagatgagcttgcaaaagaaactaatgtaagtagcaagaagtggtagggacacagttgagtactaggtctggaaagctaggggaagatggtattttgacagagtgcagttacctgttttggatattttgaaagttaaatatgatgtccacataaacatattaattagatcagttgccattggggtcattattgaacttagcaagggcaatgtctgggagtgatggtggtagaagccagaatggcatggctcaatccaaagattgtaccaccctggccttggccttaacctctttaagtttcattttcattatccataaagtagaaagaggctttgtgaattttattgcatacgtgtgtaagattccttagcacaacacggaagctgtattaagagcttggtaaatgttagttaagttcatttgttttctgtcaacaacaatgagagcaaaataataataaggtttggtttgtatagtcgtgtactgcattttaagttaaagtggttaattataaaacatataattgtgaaaatggtgctattttcccctcaagttactataataccgtatttttccttcatggagaggattctaagatatcttatgttcaaaattataatagatactagtgatttttcaactttatttctgcccttttatgtgtgtttttctcgcttaatacacataacaatcttttttttttttgagacggggtcttgctctgttgcccaggctggagtgcagtggcaggatcacggctcactgcagccccagcctccagggctcaagcgattctcccacctcagcctactgaccagctggaactacgagcacgcaccaccatactggctaattttttgtattttttacaaaatgaggtctttcattttgtagaaaatgaggtcatgtttcccaggctggtcttaaactcttggactcaaaagatttgcctgcctcggcctcccaaagtgctgggattatagacatgagccactgtgcccagcctcataccaatcttttgagggctatacctctgccagtatcacttaggaaattaatgatagagctaagatgaaaacccaggattgcctggcacttaaccactacagcatattgcctccttgcagaaatgcaagcttagaggattctaaggtgctaagacaaaggttatgtatgtcttgggggttatatatgaatcagtttggatctttagttaacattctgattcattctcatttatgttcattcccatctcagtctcagtctctccctgcctctctccgtctcaggtgacagaaggaaaacaggatctggaaagagcatcacagttggcccggaaaatgaagaaagaggctgcttctctctctgaatggctttctgctactgaaactgaattggtacagaagtccacttcagaaggtctgcttggtgacttggatacagaaatttcctgggctaaagtaagttgcagttcagatgaaacaccagcatgatgccagcgtaacatggcatttgttcgggcgacctggttggataccatgtccctccattttatattaaatctagccttttcttttttgcattgtttttccacttctctgtcctaagaaaaaatattttaaaaataatgattatattttattttctttataatttctacttttagattaaggggtacacatataggtttgttacatggatatattgtgtaatgctgaggtttggggtatgaatgatcccatcacccaggtagtgagcatagtacccactaggtagtttttcagctcatgcctccctctgtttctcgcccctctactagtccccagtgtttatcgttcccttctttatggccttgcgtacccaatgtttagcccccacttgtaagcgagaacgtggtaattggtttcccattcctgcattaattcacttaggataatggcctccagctgcaaccatgttgctgcaaaggacatgatttcattcttttttatggttgtatggtactccatggtgtatatgtatcacattttctttatccaatccaccattgatgggcacctaggttgatgacatgtccttgctcttgtgaatagtgctgatgaacatatgagtgcatgtgtctttttggtagaacagtttattttcctttgcctatatacccagtaatcagatttctgggtcagtaatcagaattctgtttgaagttctttgagaaatttctaaactgctttccacagaggctgaactaatttacattcccaccaacagtataaaagtgttcctttttctctgcaaccttgtcaacatctgttattttttgactttttaataatagctattctaaatggtgtgagatggtatctcattgtggtttcaatttgcatttctctaatgttagtgatgttgagcattttttcgtgtgttgttggctgctagtatgtcctttttgaagtgtctgttcattttatttgcccactttttaatggggttatttgtaaaacagctcttttaataagatatttttatcctgattccaaaagcattacattcatggatcatcaaggcctttataggtattatttttatatagtacttaaaagcctaattcaccacctttaaaatcaatgacacatatttacagagtgtttacaaagaattgtgctgagtttaattcttctttaataacattttaaaaccaataagtaatctttctattgcaaactttcagatgtaaagaacttaggaatagaattttaaaaaatcaatacaagagttttctttaaccctgtactttgaaatcacagagattagaaagttgatttgctggttctggcttctgcagtagagaaagaattgaatggaacatgagtggttcttttaacaaggcattctgttttcctaaatctctttcctgagaaagaagcgagtatactagtgggaagtgctgaatataaatgatcaatactgtgactgatgtttatataaagccacaagtatcagtttgacaccctctacagctctacacgtttgctgtgggccttgaggagaaggtgctgagaggttgtggggtgacacaactcctgcttactttgaatgctctgtggagatgacagctgggagaaagttaagatagtagacactggaaagactattctcagtttagaaaaaagctcatgaaaagcgtgatcatgccatgagcagtgtgagtgtaaaggaagtgaagaaaggaatgtatgagggaaatgagcattgcaagtcatcggtgtgttgtggttgaatgcaaaacaaaggcaccaaactttattgttgttaaatttaagtttttcaaggacatattatcatcctcgtgcagtatactttgaaaatcattactttttaaattagtaacataagtaatagaagctatttgaatgaaatttgcctagtgtaatacaaaaaaacaggagcaaaaatcacctataatcaaacaatgctattttttttcatttttttgagcacatttcgatgtgcacatgcaaaagcatatatttaaaaataaattttgttgtaactagtatttattgaccttcttttaaaaacttacatctttggcatttttctttacctatacttgtttttatatagcatattagagatatgcatagtatttcattcttaatttttttattttctcatttctctattcatgtccatttaaattattaccattttcattattatagataacgctatggtgaatatattaaaccatatcatacattcataattatttcctgaggataaattcttaaccctaaaagtattgatcaagggacaggaatatatccatttttaagtcttatacatattatgcaattgttcttcagaaatagtgcacctaccacatgcgaatgagaatttctacttgacatcatgttttggttatttaattagaacatttttgacaagtttataggtcttctatagcgctgttaaaaataccgctttttactctaattctgaccattttttatcaccaaattggtcttttaatttggagctttttatctgttctgattatcaatgcttagtgagttgtgtttgattgcaaacaaatttttttattactgtagcttccttttttgtttttttaagttttattttttttttgaaaaaaagtaaatccttctgaatattttttaatgaacaaaatccatctttttcttcattatttctgcctttagtgcttagaaagaccacctcaactccaggttcatttaattattcactttttttttctactagcttttttccttttttttaattgttatactttaagttatgggatacatgtgcggaacgtgcaggtttgttacataggtatacacgtgccatggtcatttgtctcactcatcaacccgtcatctacattaggtatttctcctaatgctacccctcccctagccccccagcccccaacaggacccagtgtgtgatgttaccctccctgtgtccatgtgttctcattgttcaattcccacttatgagtgagaatatgtggtgtttggttttctgttcctgtgttagtttactgagaatgatggtttccaacttcatccgggtccctgcaaaggacatgaactcacatttttaatagctacatagtattccatggtatatatgtgccacattttctttatccagtctaacattgatgggcatttgggttgattccaagtctttgctattgtgaatagtgctgcaataaatatacgtgggcatgtctttagagtagaatgatttataatcctttgagtatatacccggtaatgggatttctgggtcaaatgatatttctggttctagatccttgaggaatcacctcttccataatggttgaaataatttacactcccaccaacagtgtaaaagcattcctatttctccacatccactccagcatctgttgtttcctgactttttaataatcgctattctacctggtgtgagatggtatctcattgtagttttgatttgcatttctgtaatgaccagtgatgatgagctttttttcatatgttttttggccacataaatgtcttcttttgagaagtgcctgttcatatccttcacctactttttgatggagttgtttgtttttttcttgtaaatttgttgaatttccttgtagattcaggatattagccctttgtcagatggatagattgcaaaaactttctcccagtctctaggttgcctgttcactatgctggtactttcttttgctctgcagaagctctttagtttatagatcttatttgtcaattttggcttttgttgccgttgcttttggtgttttaatcatgaagtctttgcccatgccagtgtcctgaatggtattgcctaggttttcttctagggtttttatggttttaggtcttacgtttaagtctttaatccatcttgagttaatttttgtataaggtgtaaggaaggggtccactttcagttttctgcatatggctagcctgttttcccaacaccatttattaaatagggaatcctttccctattgcttgtttttgtcaggtttgtcaaagatcagttagttatagatgtgtggtgttatttctgaggcctctgttctgttccattggtctatatatctgttttggtaccagtaccatgctgttttggttactgtagcctgatagtgtagtttgaagtcagctggatgcctccagctttgttctttttgcttaggattttcttggctatatgggctctttttgtttccatatgaaatttacagtgtttttttctaattctgtgaagaaagtcaatggtagcttgatgggaatagcattgaatctaaaaattactttgagcagtatggccattttcacagtattgattcttcctatccacgagcatggaatgtttttccatttgtttgtatcctctcttatttcattgagcagtggtttgtagttctccttgaagagctccttcacatcccttgtaagttgtattcctagctatttaattctctttgcagcaattgtgaatgggagttcactcatgatttggctctctattattggtgtataggaatgcttgtgattttttgcacattgattttgtatcctgagactttgctgaaattgcttatcagtttaaggagtttttgggctgagactgtggggttttctaaatatacaattatgtcatctgcaaacagagacaatttgacttcttctcttcctatttgaatacgctttatttctttctctttcctgattgccctggccagaacttccaatactatattgaataggagtggtgagagagggcatccttgtcttgtgccagttttcaaaaggaatgctttcagcttttgcccattcaatatgatattggctgtgggtttgtcataaatagcttttattattttgagatatgttcagttaatacctagtttattaagtgtttttagcatgaaggggtattgaattttatcaaaggccttttctgcatctattgagataatcgtggtttgtgtcattggttctgcttatgtgatggattacgtttattgatttgtgtatggattacatttattgatttgcattgaactagccttgcatcccagagatgaagccgacttgatcatggtggatacactttttgatatgctgctggattcagtttgccagcattttattgaggattatcacattgatgttcatcagggatattggcctgaaattttcttttttttgttttgtctctgccaggttttgttatcaggatgatgctggcctcataaaatgagttagggaggagtccctctctttctattgtttggaatagtttcagaaggaatggtaccagctcctcttagtatctctggtagaattcagctgtgaatccatctggtcctgggcttttgttggttggtaggctattaattattgcctcaatttcagaacttgttgttggtctattcagggattcaacttcttcctggtttagtcttatgagggtgtatgtgtcctggaatttacccatttcttctacattttctagttcatttttgtggaggtgcttatagtatcttctgatggtagtttgtatttctgtgggatcattggtgataccccctttatctttttcttgtgtgtgactatttgattcttctctcttttcttctttattagtctggctagtggcttatctattttattaatcttttcaaaaaaccagctcctggattcattgaattttttgaagggttttcgtgtctctatctcctttagttctgctctgctcttggttatttctgtcttctgctagcttttgaatttgtttgctcttgcttctctagttcttttaattagggtgttgattttagatctttcctgctttctcatgtgggcagttagtgctatgaatttccctctaaacactgctttagctgtgtcccagggattctgttatgttttgtctttgttcccattggtttcaaagaacttctttacttctgccttaatttcgttatttacccagaagtcattcaggagcaggttgtgcagcttccttgtagttgtgcggttttgagtgcgtttcttaatcctgagttctaatttgattgcactgtggtctgagagactgtttgttacgatttctgttcttttgcatttgctgaggagtgttttacttccaattatgtggtcaattttagaataagtgctatgtggtgctgagaagaatgtatattctgttgatttggggtggagagttctgtatatgtctactaggtccacttggtccagagctgagttcaagtcctgaatatccttgttaattttctgcctcactgatctgtctaatattgccagttgggcgttaaagtatccccctattattgtgtggaagtctaagtctctttgtaggtctctaagaacttgctttatgaatctgggtcctcctgtattgggtgcatatatatttaggatagttagctcttcttgttgcattgatccctttaccattctgttatgcccttctttgtcttttttgatctttgttagtttaaagtctgttttatcagagactaggattgcaacccccgcattttttttttttttgctttccatttgtttggtaaatattcctctatccctttattttgagtctatgtgtgtctttgcacaagagatgggtcccctgaatacagcacacggatgggtcttggctgtttatccagtttgccagtctgtgtcttttaattggagcatttagcccatttacatttaaggttaatattgttatgtatgaatttgatcctgtcattatgatgttatctggttattttgcccattagttgatgcagtttcttcatagtgtccatggtctttatattttggtatgtttttgcagtggctggaactggtttttcatttccgtatttagtgcttcctttgggagttcttgtaaggcaggcctcatggtgacagaatatctcagcatttgcttgtctgtaaaggattttatttctccttcgcttatgaagcttagttcagctggatatgaaattctgggttgaaaattcttttctttaagaatgttgaatattagcccccattctcttctggcttgtaggttttctgcaaagagatctgcattagtctgatgggcttctctttgtgggtaacctgacctttctctctggctgcccttaacattttttccttcatttcaaccttggtgaatctgacgattatgtgtcttggggttgctcttcttgaggaggagtatctttgtggcattctctgtatttcctgaagttgaatgttggcctgtcttgctaggttcggggagttctcttgcataatatcttgaagtgtgttttccaactttgttccattcttcttgtcacttttgggtacaccaatcaaatgtaggtttggtcttttcacatagtctcttatttcttggaggctttgtttgttcattttcattattttttctctaatcttatcttcacactttattttattaagttgatcttcaatctctgatatgctttcttccgcttgatcgattcagctattgatacatgtgtatgcctcatgaagttttcgtgctgtgttttcagcttcatcaggtcatttatgttcttctctaaattggttagtctagttagcagtttctgtaacctttttttcaaggttcttagcttccttgcattgggttagaacttgctcctttagcttggaggagtttgttattacccactttctgaagcctacttctgtcaattcatcaaactcattctccatccggttttgttcccttgctagcaaggagttctgattctttggaggagaagagacatcctggtttttggaatttacagcatttttgcgctggtttttcctcatcttcgtggatttatctacctttgatctttgatgttggtgaccttcgaatggggtttttgcatggtccttctttttgttgatgttaatgttgttgctttttgtttgttagttttccttctaacaggcccctctgctgcaggtctgctggagtttgctggaggtccaccccagacctgtttgcctgggtatcatcaggggaagctgcagaatagcaaagattgctccctgctccttcctctggaagcttcgtttcagaggggcactcacaagataccagctggagctctcctatattaggtgtctgttgacccctgctgggaggtgtctcccagtcaggaggcacaggggtcagggacccacttgaggaggcaatctgtcccttagcagagttcgagctctgtgctgggagatccgctgctctcttcagagccagcaggcaggaacatttaagtctgctgaagctttgctcacagctgccctttcccccaggtgctctgtcccaggcagatgggagttttctctataagccccttgctggggctgccacccttctttcagagatcagacagtctggctacagttgcttttctgagctgtggtgggttctgcccagtttgaacttcctggaggctttgtttacactgtgaggggaaaactgcctactcaagcctcagtaatggtggatgcccctctcaccaccaagctccagcattccaggtcgacttcagactgctgtcctggcagcgagaatttccagccgttggatcttagcttgccgggctccatggggatgggatctgctgagctagaccacttggctccctggcttcagtcccctttccaggggagtgaatggttctgtcttgctggtgttccaggcaccactggggtgtgaaaaaaaacaaacaaacaactcctgcagctagcttggtgtctccccaatcggctgcccagtttagtgcttgaaacccagggccctggtgatgtaggcacctgagggaatctccgggtctgtaggttgtgaaggccttgagaaaagtgtagtatcttggctggatagcaccgtacctcacggcacagtccctcatggcttcccttggctaggggagggagttccccaacctcttgcgcttccctggtgaagcgacaccctccgtgggctgcacccactgtctaaccagttccagtgagatgaaccaagtacctctgttggaaatgcagaaatcacctgcattctgttttggtcttgctgggagctgcagactggagctgttcctgtttggccatcttgccagccacctcctctgctagctcttttatagtttcatctttttacctttaatgcattaatctttccagtatttattttggtgtatttcgtgaggtaaggctctaaccttctttccaaaaggataaccaattatcttagtgctattggttgagtaattaaccttgtccccatggatttgacatgctaagttcatatattcttattttcctgttgcctttcgttgttttctgctccactgatctggccccatgaaatgtaccagtttttagaatgtttagccatgttttatagtatattttaactgcagttaatgggttccctctctttatgcttcatttttggtatatatcttatatgaactttagaatttttattgttaaattcttaaattctattggaaattttgatttgaattgccttgaattcatacatttgtgtagtgcagaattgatatctttgttatattaattctattcggtaacatatatgtctcatttttgtcctaaattctttcacattcctacataatgttttgatttttttctttataaacattattcatatatgcacaggagtttattcctacatatctatttttattgctatgtaaaaatatacttttcggtttttttacagagtgcttattgttggtacataggtgatattgattttatatattcaatttttaaacatccatgttcatatactcataaattcaatttgtttttcagctgattctcatagcttttttaggtaaagactcaaagcaatgaaaaatttgtttcttttggaacaatatgctcttaagtttccatttaatcttatttcagaattgaaatgataaagatgatatatacaagtcacaaattcacagcacattctcttcattagagtaaatcaaatgaaacatcagtatatattaataaccaccatctttttatcactgtcttttcagatttaaggaacatgcagatttcaccacattttaatgtatttgcacttaaagattatgtaaaattattttcaatgcaaagcttaaataaataatattttcatttctgaatactgtttttattccataacttaaatataactattttcaatgtaatcttttttactgtaaaaaagtatgtgtactatttagatgtaattacttgtagttcattattttttatagttcttaaatgctattctagtcaatcagtacatgcccactgaagaaatgaaagattcttattaataattgctgagagcatagctattgggtatcctttattttctccccccttgctagagaataatattggaaagtagtatttcagttctgtcataaatatgccagtaattgacatggccaagtgagtgtttaaacctggactcatttgtgaatttgtaattggtatgctttccaaggtgtgatttaatgtagaaatataaacttgagctccttaaaatgattggtttaaatgttgatttaaaaaatggtcaataatagtagcagtagggtagatacatgcatattgctttttgattgaaagagctttgtagttttaattgtggaactcatgctctctctataattctgtgactatatactttgcctggtgaaacttacgaatgtgccgatcactttatcatcataccatccagagtattatctttgcacttatgacagttgtaagaccaaagcttagacttgctgctctcttgtgagttacttacatgaaatgtttttttgtaatgtttattcagtatattatatgtgaaatcacccagctgtaagatgttatccttgcaagtacctatagtacacatcgatagtttcctctggtaatctaggagataaattcattgtgaatttttttaagttgtgagttctaggatccttctgctttgccagcttgtagttactgaaaatgaaattgagcctttacatttagagtgatgatgaaggtaattggcattcatatgtaataaatggatttatatttaaataaatgaaataattgctttcccacagctgagtgtgttacactcactggtatttgttgaattacacattttgttttccatttggaacttaagaattctcactatgttaataagtttgggaattttgtaaactttgacattgtaaattatatagggagtcatggactactttgtatatgtggcagaaaagtttttaataatttaaggttgtatatacttttataatattctgaagcatcaagtaggtcttggtgtttttattttctagaatgttctgaaggatctggaaaagagaaaagctgatttaaataccatcacagagagtagtgctgccctgcaaaacttgattgagggcagtgagcctattttagaagagaggctctgcgtccttaacgctgggtggagccgagttcgtacctggactgaagattggtgcaataccttgatggtatgtctcaggaaaaagtaaatgatgaaatcttctcctctcttctagttattttttaaatgaatacaactttgattaaatttcaaatcctgtttactgtgtgtcacagtgatgttttgcttgtgaattaatttcattagactaggttttattttttctttggaaaggtaataactagaaagaatttacagtgtttctaaatattcatgatctgcatggaatgaggtactttcatattttagtaaatgcaccttatttgtttcattttaatgatttcatattgtatttgattttcgtactatcagaagctatttttatataaaatcttcatagtgtttgaataatggcatactggttaagagcacaggctctagcatctgacggcctatgtaaaaattttcattactagcttggtaacactggtaaagttacttaaacattctctaaacctcagttgtttaatttgtaaaatggacattattatatctatctcatacagttttgcaatgattgattatgagccttaaacatgtagtgctcttaaataactatatgcaaaacaaccaattttagattttgctatgattataattattaaatattgtatatgtgttagtctttggttatgccactgctctgtaaatttgcatctcatggaaatagttaccatttaatttttatatggttttatgttcctatgatactaattgtgaatatatggccaccccaccctcccctgctgaggaaggcattgtcatttataattttttttaattctgaaatacctgagataggacttttatcaaatttatagaattactaggtaatggatagagacataaaaaatacattatcatgtgtttgaatatttatttaaattcctcaggatgtgtagggcagtgaagagcatgggctttgctcttgatctctaacagatttatatccacagtccatgacttattatctgtttaactttagctaagttacttaatgttactaagcttaaatttccatatatacagaatgagaacaaaagtatatacctaacagagttgttaaatattgaatataatagtgaatatgagattcttggcacatagaatatgctcattaaatattttatatattaatttttaattactagctttatttcacattcttatggcccttatttctgtattcttcagtctacacctttcaaactctccattcaagcagtatctttctagtgctgttagaacatttgatttacctgcttaataggggtaaacaagtctggcactcatcagttcttcctacttagaatccagatcactgttgatattttctcatatcatttattagttcacattttctttttttaaaaatgtttattttaagttcaggggtacaagggcaagtttgttttatttttatattgtttatttgttcactttttttttttttctgaggctgggtgtcagtctgtcacccatgctggagtgcagtggtatgcaacctcgacctccccaggctcaggtgatccttccacctcagccttgagagtagctgggactacaggcatgcgccaccacacccggctaatttttttattttttgtagagagggggtttcaccatgttgtccaggctggtcttgaattcctgaggtcaagtgatcctcccatcagggcctcccaaagtactggattacaggcgtgagccaccacacccagcctacattttcttttttcaactatgtttcatattatagattaatgatttctttctttgtaaaaacttttactgtctaagcattttccagtttcttttatcccacaaaatataattgctaaaggttaatttcatcataagtctcgttaccctttttggtcacactctaacttcttgccttagattaactgtttttcccagtcataatctgcttaactcttgcttctgttttcaaatctgttctgtcaagcacatttcatgtcctgcttcagtacatcttgctgtggtctgtgccagatgtaatattaagggctggtgatactgaggtaaggatacaaaggcactgtcctttgagcagagcatacagaatctttttcaattcatattttcatcattttaaaaaattattccttaaatgagttttttaaaaatatgggccaggtgtggtggcgcacacctgtaatcccagcactttgggaggctgaggaaggtggatcacaaggtcaagagatcaagacttcctggccaacatggtgaaaccccgtctctactaaaaatacaaaaattagctgggtatggtggtgcaagcctgcagtcccagctactcgggagactgaggcaggagaatcacttgaacctgggaggtggaggttgcagtgagctgagattgtgccactctactccaggctggtgacagagcaagactccatctcaaaagaaaaaagaaaaaaagattgaagagggcaaatcagatcagttgtaatataagaataaggaataagagatgaacttgcattgaaattgaaaaagaaactttcaccttttattctacttcaactttttattgtgctgaggtctaaatcaaataaatttaaaaagtgttaagcaccatagatgtgcatttttaggaataagatgagttattcactgaagaagagctctgcaggaaggtgaaagctctcctttaaattcatggtacagtttgctctttgaaggtcttttaaatctcttttaagattatcatcttaaatatttcatatggttatgtaagcattttattaattcctttgtagaaccatcagaaccagctagaaatatttgatgggaacgtggctcacataagtacctggctttatcaagctgaagctctattggatgaaattgaaaagaaaccaacaagtaaacaggaagaaattgtgaaggtagcaaacacagacatcagtaacgcttttgggagtggcatgttttgttgtcatgttttctcttctggaatgctctaagttacttagctctcattcctcccaagcattagattcattaacatttattttgatgggagaaactgagacaataagagacaaaataagagacgaacttgaaattgaaagacttgtaagagatttcagcacaatcaaccggagtaagacctattcacataagatgccaatgagtcttgctgattgctgacttttgtattctccattgagtgctgcttacttctgtattctccagtgagtcttacttacttttgtattctccaatgagtctgtcttacttctgtactctccaatgagtcttacatacttttgtattctccagcgagtcttacttctgtattttccaatgagaattacttacctctgtgttctccaatgagtcctatgtgaacagctctcacctggttgattatgctgaaatctcttactggggatcccagatatttatttaaactacctttccttctgtataagcatcacactcatgtttgggtttgatttttcccatgagataattttgtgttttcttataattagcgtttagtatctgagctggatgatgccaacctccaggttgaaaatgtccgcgatcaagcccttattttgatgaatgcccgtggaagctcaagcagggagcttgtagaaccaaagttagctgagctgaataggaactttgaaaaggtgtctcaacatatcaaaagtgccaaagtgagtaattatgcttttagagtaaaccatttttcctatgggtatgtatctaaatgatagtcatacagtacatacatcaacaattttgttttattattttaattttattgttttctctctctgtcaccgaggctggagtgcagtggcatgagctcactgcaacctccgccttctgggtgcaagctattctcctgcctcagccacccaagtagctgggatttccggcaactgccaccacacccagctaatttttgtgttttttttaggagagatagggtttcaccatcttggccaggctggtcttgagctgctgacctcaagtgatctgcccgccttggcctcccaaagtgctggaattacaggtgtgagctgctgcacccggccaacaatttttaaattaaaatgtttttaatcactttttctttgaatggagcatttgtccgtatttatttgtgattgtgcatatgaaggagagaaaacaagcaattagtattgaagaaaataacctatttgagaaaaggtttcaaagactcagtcaaaggttagaattggttatgaaatgatgaaactaattcccaagctagggatgaatattaaaccctttattttatggtcacactctatatatgtcttcacattgcacacaccacagaacttgtttttttttttgttttatatgacgacaaatctaaaagttacagataatttcacagtttaatcctaatgtaggaaagtactacctgattttataaatttaataaagagctttagacatttaattaacagggtaataaataggacctttatgagagtgctagttttcccacacttagccaaccccagatggtatttatctgcatttagttttattaaaattgttttattgagttttatttaaacaaatataaaatttttctacgtagatgttatctgaaaagatgacattgagaaatatgcacttctttgacgtttgtgtatgaaaatccaaggggaattctactgaggaaacttaactgggagacattctgtgaggtgtccctgccctgggggctgggtggctgttcttcctttctgtggccatggtaaggatagtttctggatcatggccatagtttcctgctatgctcgcatgtggtctccaaatccacgccacaacactctgggcagccacaatgaattgcaatactacgtcacatccctggctagagtttggagaaaacgggtcattcagagaagtctgaattggtaaaatcattgccatataaatgaatgaaacaaaagttagctgagctgaatagaaaagtcagttaaaaaagtgttagtttctctcttgacaccccatctctctgattaatgatggaaagtcaaattaaaaatctattttcagagaattcttttccttctacagttgctaattgctcaggaaccattataccaatgtttggtcaccactgaaacatttgaaactggtgtgcctttctctgacttggaaaaattagaaaatgacatagaaaatatgttaaaatttgtggaaaaacacttggaatccagtgatgaagatgaaaaggttggttcaaggagatttcaaaaccatggtggtctcatttttcttctctattaatttcatttttacatcaagatgtttgcccatataatctgtcaaacatgatgaaacagattcaaatgtgattttttgatgtgtgtcaatgtaagagtcacatgattcatgtgcttaaaaagaaaatagactcagtttctgaactagacataatccttagtattatctaatgtttgctaaactctctttgagacattttatcttcaaatataaaatatatttaaaaaaaacataaattttttgatcgttcaggttaacatatcttgacgtatactatactaagtaggttagttttcctccttaggagttgataggaagtgaccttatgcatttttcttttgagtcattttttttttccttttaaaaatttagatggatgaggagagtgcccagattgaggaagttctacaaagaggagaagaaatgttacatcaacctatggaagataataaaaaagaaaagatccgtttgcaattattacttttgcatactagatacaacaaaattaaggtattatgattggagagtctctgttgcatttaaataccttacttaactcttgccattcagatgtgtgatgctgcatcacagatgctttaaaacacaccagttggaatatcatctcctcctttctagtgtgtgttactagatgtgttcatatttttggatggtgcagaactcaaaatggaaatgtaaaaccttattattggccatctcttttggatttctgattatgttatcaaacctaaaagagatctatctatttcagaagtggcttcctccaattccatattttatttgtgaaggtcttgtctatgtcaaaaaaaatttctagtttaaaaataactcagtttgtgaaagtgatgtaatatgatttatattctagtaaagattcactaccagctccctttttatttctttatatttttcttttttttttttaaagatggggtatctctatgttgcccaggctgatcttgaactcctaggctcaagtgatcctcctatgtcagtctcccaagttgctaggactacaggtgtgtgggccaccatatccagctccagctcttttttaaacggcaatctttctagctgcattttaagtgtgctgttgttccctggggtccgttctttggtagttccttctagaacgatttttatttgatgactttggaaattaagtagatcgattatggtactgtatttttactgtaccttttctatgtttagatatgtttagatacataaatacttccaactgtgtttcagaattgcctatagtattcagtacaataacgtgctgtaaagttttagcctaggagcaattgactataccacacagcctaagtgtgcaggaggctgtaccatctaggtttgtgtaagggcactctatgatgtttgtatgacaatgaaataacctagagacacatttctcagaacatgtccctgttattaagcaatgcatgactatactttaaaaactagccattctctcaaggctgaagcctcaacatccttcttaactatttcttgttcctcacatatcttctcacatcacactgagtaggcattaaaactgttgagactgcttgaagcaacatacaggtttgaacgtgaagttagatattgctctaccagctgcttgttttatgaccatcagaaagtgccttagcttattttacttcactatcctttccataatttagactaatgattttctcccatgatattatatcccatggacatattcttatgtctgttttttctcactctagcatgtcctttgtctcttcctcacagttattctccccaaagtcatggctgatcatgtcattccttcatcgaagaaactgtttaggaaaatattgcaaaatacagaaaaagctttaaatgcaaggtctgtcaatataacgacatacaaagtcttcagtctgacccctggctccttatgtctttgatgtgctgtcacttcccatgtagtacagctatgctggtttttctttacattttcctaaacacatcatgtgccttagcacatctgggaacttattaattttattccgattccctagagtgagttttgtctttttaggttagctgaaaaatgcgttatcttttaaaactcagctccatttttatttctaacttctgtcagattatattatagttctctgctttattgtgactttttaaagtatctttcttccctaatgcttctccaagttcaggcaatatctttttcatctttgggtccgaaatcagaaattattactggcacaaaatagaaataagttttaagcttttaatacataaataaatttgtttgttaaaagtactaatatatactatacaagctaatttcattctggctttactaacattggtaggcgaactatgttacaaacttcaaatctatagttttcaaacttatatgattcttaagtgtgaacatgagaattactgtgggggagctttaaaaaaactacagtgcccaaatctaattcctgaaacaggtaaatcagaatctctcaggacctaggtgtgggcatttacaaaaacaaaacacaaaacatttgtagatgattttaatgtacaattaggattgagaagcactagtttacaggactcattgtcttacctgaaatatatgttaagtgaccttttccaatttgtttactagagtattactgtttttaaattatgtatgagcactttataaagatattaaccacttgccataattgctataaaatattatcttattgatatttatcttctaattattttatctttaagatataaccatttaaaatttttgtttagccacaggtgactatgttttcccttagtgatttttcaggggtttctgttttgggatctaaaaagttttcatcctccagaaagttgatgaatattcaattctgtttagttccaggtttttcctatggtttggtaaaaacaaaacttagaaatttaataaaacactcacttaaaaatctctttaatctttgctatatgatgtgagctacgtcatgtaacactgtctcatttaagtactgacctctagtatatttgtgtttctgtgtccttggagaattctttaaaaataaaattgtccagaagtaaagtctcggtcagatctcgaggacatttttttagtcctagggcattttgattgatcactctcttgggggaaaaaaatctattttgggaatacagaaagcacatgtttaagtcttgaacggccttgctgcttctgcaagagtgggaaggctcagaaaaatcctggattgtcctatagtctgaaaagaaaaagaggcagtcttaatgaatgggaattttttaaacttggatctttatgatacctactaacctccctagtttattctaaagcttcaggtacacgtggtcttgcagaatgacaatccgttatgtaactgaagaagcagcacaggaattccagtcttgcagtagtagctgaggtataaaagtggctcccaacatttacctaatggagcagattaaaaaacaaatgtggcatgtattatctagtggtgctaaatgaggaaagtactacaaaggtaaatgtccctacaagcataataaagtagttggatgtctggagttttttggtcttttggaaaacagatgacctttcagcaaaatcttggttaatggatgggaagccaagaaggaaaacgggtcccactttcctcttttactttttcgacatgattactcaacctagaaatactttcattgggctattttcttttccttaaagttaagagggagaacaattgagcctagttttctgatcttccaaaataaaaacactggcttatttgaaatgaaaatccaaaagaattatttttgattttttcttttcttaaaaaatacttagcatctttttattcataactggtttctgggtagatatgttatttatttcagcattcttttatatttgcttaaaacacagaatttgtttccttagacatatgggtaaatatctagaaatgctttctgactaaaatttaaacttgcggcattaggataataaaattaatcttggagacaagtgtaattagttctgttgttaaagtcaagaaatgtatagacctgcttctaacctggctatccagaactaccctcaaatgatggacgcagtagtttaacaaattctaggaggcaataatgcagtcctctaggttcaacaccatgttatccactcaatgattttagtcatgagtcttggattcctttagagattggattgtaaccattttcaagatcactaactgaattaacatgcatttgtgatcgttttacctatcatcttgaatttacagatgattatcattttttagaagttcaacataggagaagtgaaagtgtcaaggaaggtaccttaattcatgagcagctgcagtttggccctttgcaagtggtaatacgtagcacttattaaattgtggccatctaggagtaaagggtttgaactcctgaaggactggcggtccatcccagagagcactttattgtttagaaagctctgagaagagggccgggcatggtggctcatgcctgtaatcccagcactttgggaggctgaggtcagctgatcacttgaggttaagagttcgaggccagcctggccaacatggtgaaaccccatctctactaaatatataaaagttagctgggcatgatggtgcatgcttgtaatcccagctactcaggaggctgaggcagaagaatcgcttgaacctgggaggcagacggtgcagtgagccgagatcacagcactgcactccagcctgggaggcagagcaacactctgtcctgcacccccccaaaaaaataaaaatgaaaaagaaagctctgagaagaggatccagaaaatctatattagggcagatgagtagtccatagagcctcaagtctgtctaaatatgacacttcatgatctattttctaatgtaggatattcctgctctataatattattctcagagattaagattacatactgaattacctggatattactttaatcaaaaccctttgtgcatttcatgttgtgttatggaaacatgtttaacttgcttatatttttagcaatgaggtccaattttaaaattgtgatatttttaaaagagtgaaataatgtatcaaaatgttttatttcatacaaaactttgtgattggcaggatattctcattctttcaacaactcaagaaaggaattgttgttttttgtttgctaactgagtttagatggcatagatcttaaagcctgtcaaattaataacatacttatactgtttaatatcatgctgcagatgaaaattaggatacagattgttaaggttttctgttgcaaggtaggtttataatataaaatattaaaactaagttttaaaaatttggttcatgatattgcattccttcacacaatagtcttgttattattcattgtgggggtattttaagagatatatatatatatatatatttttttttttgctgtttttgtaggcaatccctattcaacagaggaaaatgggtcaacttgcttctggaattagatcatcacttcttcctacagattatctggttgaaattaacaaaattttactttgcatggatgatgttgaattatcgcttaatgttccagagctcaacactgctatttacgaagacttctcttttcaggaagactctctgaaggtagacctctgggcactgtgtttgaatggccacagttaatgtagaagtagaggaagaaatttgttcttgtgcctacttagatggtctatatcttttacaatttgtgccaggggattaataatatgtatgactagtaaagctttcctatattgtcaaagaaaatatattaaattttgaatttttaaaaagtgggtatggattgttaaatgtgcacagttataaattatttgcaacatcagagccttgtttaaaattaaacagagacatagaccaccttcctgtcttataaactagattgtcagttgatgttaattgtcagcatttatcaggcaatctataatggtttaaaattggccagttgaggtatggaatggcatcttgattgtaagttaattaaacttaaattctagcaaggcattttcatgtaacttgattgcatttatatgtaaaatcacaataaattcactgataatatggatttgatagtgcattcctctcatttaaactaacattattagatatttgaaaatatcactatttccagcttcaaatgcctcattacctatagagaatgttactgaagcctttcatgtgttctgtacaaatgctactattgtgaggactttttttcctgccttgagtatattatgtagcatattccacacactttggttaaaacagagtatcatttaaaaaaaaaaagttttcagttttcatgattaacaatgattatgtctcattattatttcaaatgagtgttctacaatataaatatctggtcatctgtgattcctttttttgttactttgctggattttgttaatctatgacaatatatttttagaatatcaaagaccaactggacaaacttggagagcagattgcagtcattcatgaaaaacagccagatgtcatccttgaagcctctggacctgaagccattcagatcagagatacacttactcagctgaatgcaaaatgggacagaattaatagaatgtacagtgatcggaaagggtatgtgtaaatgaaattaatatttaatttaaaaaaatgcctgcaagttcatgggcgtgaagaagatcatgtggacactgagattaatgagaacatgtttcatatccttgtaggatgccctattatttttttttcttttaagaaggagtcttgctctgtcacccaggctggggtgcagtggcatgatctcagctcactgcaacatttgcctcccaggttcaagcaattctcctgcctcagcttcccaagtagctgggattacaggcgcacaccaccacgcctggctaatttttgtatttttagtagagatggggtttcaccatgttggccaggctggtattgaactccggacctcaggcagtccgccttgccttggcctcccaaaatgctgggattacaggtgtgagccactgcacccggccttatgccctgtttaataaattgtgatgagtatagttccttaaaggaggaatgtgatcatgtatagatgaccatttataacataatatcttaatgatatggaagcacttctaatttttagtgtctaaatagtgtccattctctttaaaaaaactaaagaaatttttcattaatgttcactttctcagcacacttgatgattaatgtgagtgaagaacagaggcagctacagataattagaatccatatatagtaccaaactcttttttatagccttctgtttaaatgaatgcttttgagccttcttactagattttgaccaggactattaataggtagaaatgaaaacaggcaagatttttgccagtagctgtggatgtgatggaaaggcaaataagttatgaaataacccagtggaaagcgctgtataagaggaaagggagcacagaataatacattgggtaacttgagagacatacgcacaaaaactaggcatcatgttccttctctttttttctattttagcctacatatttcaatgtgactaatccttgaaaagatagcttttagtggcctttggtatattcctttgtttggattttacaaattttctctttgtacctttggagaacattcttttacatacatctttatccatacttatatttcattaggcttgatcattagatgaagacaaatttctttaaaaataatgacattttaaacccctgtattatatcatgaaattggttactatacccctgccaacagtatttgtaaaaatatccttctttttgagcccttactaacattgacaggttttttttttattatttaaaaaaactttgccagtttaatagtgatagattacatctcaattttattttcatttttaaatttttagtgctactaatttttgtacgtcaattttgtatcctgaaactttgctgaatttatttaccagttctaggagctttttggatgagtctttagggttttctaggtatatgatcatgttaccagcaaacagtaacagtttgagttccttttaaccaattcggatgccctttatttctttctcttgtctgattgctctgtctaggacttccggtactatgttgaatgcaagtggtgaaagtgggcatccttttcttgttccagttctcagggggaatgctttcaatttttcctcattcagtataatgttggctatgggctaaaagtcatagatggcttttattacctgaaggtatgttccttctatgccaattttgctgagaattttaatcataaagggatgctagattttgtcagaggctttttctgagtctgttgaggtgatcatgtgatttttgttttaattctgtttatgtggtgtatcacatttattgacttgtgtatgttaaaccatccctgcatccctagtatgaaacccacttgatcatggtttattgtctttttgatatactattggattcagttagctagtattttgttgaggatttttgcatctatatcagggatttggtctgtagttttcttttttgttatgtcctttcctggttttggtattagggtaatactggcttcatggaatgatttagggaggattccctctttctctatcttttggatagtgtcagtaggattggtaccaattcttctttgaatgtctgatagaattcagctctgaacccatcgggtcctgggcttttttttgctggtaattttttaatcatgattttaatcttgctgcttgttattggtctgtttagagtttctatttcttcctggtttaatttaggagggttgtatatttccaggaatttatccatatcctctaggttttctagtttatgcatgtaaaaatgttcataatagccttgatcttttgtatttctatggcatcagttgtaatatcacccattttgtttctgattgaactgatttggatcctctctcttttcttggttaatctcaccaatagtctgtaaattttatttatttttttagagaaccagctttttgtttcatttttttttgtatttttgtttatttgtttcattttcatttagctctgctctgatcttggttatttttttttcttctgctgggcttgggtttggtttgttcttgtttatctagttccttgaggtgtgactttagattgtctatttgtgctcttttagactctttgatgtaggcatttaatgctatgcacattcctcttagtaccgcttttgccatatcccaaaagttttgataggttgcgtcactattatcgttcagttcaaagaatttttaaatttccatcttgatttcattgatgacccaatgatcattcaggagcaggttatttcgtttccatatatttgcatggttttgagggttcccttcagacttgatttccaatttcattccactgtggtctgagagagtacttgatgtaattttagttttcttaaatttgttgagacttgttttgtggcttatcacatggtctatcttggagaatattccatgtgttcatgaatagaatatatattctgcagttgttgcatagaatgttccgtaagtatctgttaagtccatttgttctagggtatagtttaattccattgtttctttgtcgactttctgtctgggtgacttgtctagtgctatcagtggagtattgaagtccaccactgttaatgtgttgctgtttatttcatttcttaggtctagtagtaattgttttacaaacttgggagctccaatgttaggtgcatatatatttaggatataatttcctgttggactagtctttttatcattatataatgtccttctttgtcttttttaactgctgttgctttaaaatttattttgtctgatataagaatagctactcctgcttgcttttggtgtccatttggatggactgttattttgcacccctttgccttaagtttatgtgagtttttatgtgtcgggtgagtctcttgaagacagcagttacttggttggtgaatttttatccattcttctattccgtatcttttaaatgaagcatttaggccatttacattgaatgttattattgagatatgaggtactattctatttatcatgatatttgttgcctcaataccttggtttttttttttttttcattttgttattgttaataggttctttgagatctatgctttattgttgttgttgttgacaggtcttcttctgtcacccaggctggagtgcagtggcatgatctcggcttactgcaacctctgcctctcaggttcaagcagttctctgcctcagcctcccatgtagctggggctacaggtgcccaccaccatgcctggctaattttttttgtattttttagtacaggtggggtttcactgtgttagccaggctgacctcaaactcctgacctcaggtgatccacctgcctcagcctccgaaagtgctgggattacagacgtgagccaccacacctggccaagatttatgcttcaagaagattctattttgttgtatttctaggatttgtttcaagacttagagctccttttagcaattcttgtagtgctggcttaatagcagcaaattctctcagtatttgtttgaaaaagactatctttccttcatttatgaagcttagtttcactggatacaaaattcctggcttgtaattgttttgtttaaggaggctgaagataggaccccaatctcttctagcttataaggtttctgctgagaaatcttctgttaatgtgatagattcttctttataggttacctgatgcttttgcctcacaactgtcaatattctttccttcttattgactttacgtaacctgatgaccatgtgcctaggcaatgatctttttgcgatgagttttccaggtgttctttgagatttttgtatttggatatctagatctctagcaaagccgggaggttttcctcaattattcctgcaaatatgttttagatacttttggatttctcttttacttgggaacacaaattattctttggtcttttaacatattcccaaacttcatggaggctttgttcattttttaaaattcttttttctttttctttgtcagattgggttaattcaaaagccttgtctttgagctctgaggtttcttctacttgttcgaatttattgctgagactttccagtgcattttgcatctctctgagtgtgtccttgatttccaaaagttgttttatttatgctgtttatttcactcgagattttttccttcatatgctgtgtcattgttttgatttctttaagttggacttcacctttcactggtgtgtccttgattggtttaataatcgaccttctgaattctttttctggcaattcagagattttgtcctggtttggatccattgctggtaagctagtgtgatttttttttttttttttttttgagatggagtcttactctgttgcccaggctggagttgcaatggcacaatctcagcccactgcaacctccgcctcccaggtttgagtgattctcctgcctcagcctcctgagtagctgggattccagacacgcatcaccacaccagcttatttttgtatttttagtggagacagggtttccccatgttggccaggctggtcttgaactgctgacctcaggttatctgcctgccttggcctcccaagttgctgggattacaggcatgagccactgcccccagcctagtgtgatctttttgggtattttaaagaaccttgttttgtcatattaccataattgtttttctggtttcttctcatttgggtagagcatgtcagagggaagatctgggaatcagtggctgctgtcctgattcttttgtcccatgaaatgcttccttgatgtagtgctctcctccttcccctagggatggggcttcctgagagctgaactgcagtgattattatttatcttctgaagctagccatccagcacagctactgggtgctgagcgggtactgggaagtgtctgcaaagagtcctgtgatgtgatgtgatctgtcttcaggtctctcagctgtggataccagcacctgctctggtggaagtaacaggggagtgaagcggcctctgtgagagtccttggttgtattttggttaagttcgctggttttctgttggttggcccccagccaggagatggtgcttacaagagagcatcagctgcagtagcatagagaggattaggcggcaggcagggccatagagctcctaagaaattatcttctttgtctttggctactggggcgagtagagaaagaccatcaggttgggcagggttaggtgctgagtcagactctccttgtgcatggcttgttgtggctgctatgggggatgggggtgtggttcccaggccagtggagttatgttcccagggggattatggctgcctctgctgcatcacacaggttgccagggaagtgagggaaagcgtgcagttgcaggcctcactcagtttccatgcagcccacggcccaaaaggccagtcttagtcctatcaggaaccccttccgccacccccacacccccactggcccaacagcattgggtttatttccaggcagctggtgagcagggttgagaacttgccccaggtgacaagtctcccagctgagaacgcaagctgatctccagttcctcggctctcccatgcagcatgcagcagcattccacctccttcaaagggtctgtagattctctcagttttcctggtatgttcctgcggtagttcttggaacaaaagtccactatgtgtctgcacatgctgctgtttgtctgagtgggagctgcaagttagaccttcctcctatccaccatttttttttctctctgtcactgatgatacattctaagtttaatgtttgtattttcaaagtctttagatctttggaacagtcttatagcatctcgaatttggaaattgtgattgttgtgtagttattgtgaatttttgcaaatgataatgagtgtcaatatcacctcatagtgccttttttttaagtgcttttctttttccatgctcaatagaaaattgctttactgtgggcagtattagcaaaatgttaaaagtaattttcatggagaaagacgatatacacattatttaggggttattgatattaggagccattttatttaaaaaatatatattttattaatattgttaagatctcagagatcacttctaaaactcagctccattactcttaaacaaaaagataggagaaaaaattatttaggatcctggtccaataaagcttttcctttttatgcttatttcatgtatcctgaatataacaagcactgggttttactttgccatctttaaaagagtttggtttaaacagaaatctcaatagccctctgtcttattgcataacgggctctgcatgcaatttcatactttgctgtatttaggtaaatgggaccctcaggaccagtcattacccgaagtacattaatctgctcaggcagccgttataagataacatagactgggtagcttaaacaacagacatttactttcccacagttctggaggctggaagttcaagatcaaggtgccagtagatttggtgtctagtgaggtctctcttactggcttgcagatggccaccttcttgctgtgtcctcacatgagagagctctgtggtgactcttccacctattataaggacaccagtcctttcagactagagccccacacttatgacctcatttaaccttatttgtgtcctggaaagctctatctctaagtacagtcacactgtggggttagggcttcaacataagaattttgattggacataattcagtatataacatatagatagaggggtatacgggcattttgaagtgttttggccttttgtgctttattcttgccgggaactaagtgttctggtagtaaaacaacatatttttccccaagaaaataatgaatcatattttatatttcacagtatttaaatgttaaatgtataaagttggatgcgttaacatgcctacaactaatcgatcctgatttttcaagccagaaaaggctgcatctttttagttaaaaagctgctcgagtgtgtgtgtgagtgtgtttgtgagtgtgtatgtgagtgtgcatgtgtgtatacgtgagtgtgcatgtgtgtgtgtatgagagagaggatttggtagctggtggtgtgagcagattgctttgcccttgttatgatgcatatatctctaggaggaattattacctgtatcccactacgaaaattggttttgtggagcaataggctgtgaattcagttgtttgaggtctttctgtttaaatgaaatttgattttcttttttagaaaaatggctttaggcagtcctggaaaatttggaaacctattttattttgtgtattgtcctctagttgttttgacagggcaatggaagaatggagacagttccattgtgaccttaatgacctcacacagtggataacagaggctgaagaattactggttgatacctgtgctccaggtggcagcctggacttagagaaagccaggatacatcagcaggtgagtgctttctgttagaggagggggactgcacatatggttagtgtatgcctgttaagacagatttcagaagtagggacaaaatatattaatttttcagaagtcaatggacaatttgtaatttttgttccaattcttgttaccagttataaaagtttaagaaattggtcaatcacaattttcaatcaggatttcaaagaaatttaaataaaaatactccttggtggctaatgtgaaaaacaattttatttaaacaattttatatttagaataaaatttgtaaactgttatgcctaagactataccaagaacagaaaaaatatttgcatgcctcacctctgttttttgtacttaaacacttaggcatctcatttttctttgtatcattgataattatcataaagtaaattattctggagcgacagcagggcagctgctcatgtaagtctaattcagtcttgggaaaatataacacaaagttagttctgataacaataggtctttaaaaataatggtagaaagcacacgcaatttcaattctaccattgataaaaatattttctcttttattaagttttttaaatgtattttatttagaaggacatgacaatttaaagataattcatttgtttttcttataaatgtgttaatgtggccgggcgcggtgcctcacacttgtaatcccagcattttgggaggctgaggtgggcggattatgaggtcaggagatcgagaccatcctggctaacatggtgaaaacccatctctactaaaaatacaaaaaattagccgggcatggtggaacgcacctgcagtcccagctactcaggaggctgaggcaggagaattgcttgaacctgggaggcagaggttgcagtgagccaagatcgtgccactgcactccagcctgggtgacagagcaatactgtgtcaataaataaataaataaataaataaatgtgttaatgcatttttcttatttttggagttacagataagtgtttaaatttgacttgaaaatattcattcaatctgttacttaaacatttgtagaccagtgtattagtctgttctcatgctgctaataaagacatacctgagactgggtaatttataaaggaaagaggtttaattgactcatagttcagcatggctgaggaggccacaggaaacgtccagtcatggtggaaggggaaagaaacatgtccttcttcatatggcggcaggagagagaagtgctgagcaaagtgggggaaaagtcccttataaaaccatcagatcactctcactagaacaacacgagggtaaccacccctgtgattcagttacctcccactgggtccctcccttggcatgtggggattatgggaggtacaattcaagatgagatttgggtggggacacaaccaaaccatatcaaccagtgaagcaatatcttagtaaaatgtgcatttaggtttacttgtatgtggtaggacacaaggatataaggatttattggggtatataattttttaaagcaatgccttcaagcacttgcttgaaagaagatgagcaattcattttcatcaaacatgattgatgcttatgctttaatgtaaacagctgttattcattttagttattaagctgccctatttccttgtattttgcctgatgacattcatgaaggtgggttagatttcaaaataaatttcatttagcatgttcattgaaatgtaattaaattgttttaaaatgccttttttttctaacataaaatatctttccaggagtttgtttctttcacacttaaattgataccacaatacttgggtggattcattgcatcagaatcatttacttattagtgaaactaatcttgagttgtgctctgttacaggaacttgaggtgggcatcagcagccaccagcccagttttgcagcactaaaccgaactggggatgggattgtgcagaaactctcccaggcagatggaagcttcttgaaagaaaaactggcaggtttaaaccaacgctgggatgcaattgttgcagaagtgaaggataggcagccaaggtgatttagctatgattgtttgcaggcacaggagtgaacatattttggatagaatcttttaagatgcaatctaatgagttcttttattgtttgacattataataggaattttactgacatttaagacctccactgcccacgttctcccttcctgtatttttaggctgtccataaagtctcacttttctactcaaatgctacatatgtaaaaaccaaacacctttattccttttatttacaactgcttattatgatatggtgattatgatgggaatttaaagtagttgaaataactgaaactccaggtttcaggtttgaaggtctgggttcaagatcagaccttccctttgcttatttcctgattgagcctaccttagtaatacgtctcactaagttattttggtgtcaaatgttgtgttctattcatgctttgccaataataaagttcttcatctatgtaatataatataatataatatagtattattaatttttatgtcagattatgttacagtgactcagattttatttgggcatcttccagttgcaaatttgttttgcaattggaatataatgcccaacactatagacactttccatatttaaaattatttgacattattttctgagacagtcaagatttatgaatgatttctactttgtttcatatattccgtcattaatgatcttttttgtttgtttgtttcttgttggtagtttagggttaaaaactccacgatttttttttctgttaattttaactctgttgatgaagtattattttagtgataagctatcattttgtgaaaggccaatctaatactttatcaggtccagtattattatgcaacctaaaatattcaagtatcatgtgacctacagttgcttttcatttaaaaaatctattattttgtgtgttttggtaagagacaaataataattagtacgttttggttgagagattaccacatggcagagagagtatctggcaccttgcacacattgccttgtttaggagtcatgactcacctcttaggggactgttaagccttgtacagctttagaaactgaggctaagagaggcgaggttaagtaacttgtccaagatctcatagaaagtaagtgatcatactgtcttatgctctcaatattatgctgtacgaacttggaaagagcacagaactctctggccaaagtgtcttcctctggaaatgagaactatgatatcaccacagaggactgtcatgaggattaaatgcaatagtgtttggaaaatgtgcatgccttgactattcatagtaaacacttaaagtatctatttcttatgaaagcaagttatcttagaacttattctctaagcatattgctgaattttgccaatgattgattaatgacttgatcgatatttattgagctctatgtttagcactgaagatacaagtatgattaggaactcaaagactaagaagaagaaaatgatgaaagaaaacatcattaaaaagataaagtgtcacagaggcagatatgatgcgctgtggaatttaagtgtcacagaggaagcatgccgaagctgagttttaaagcatttatagcaattttctataaatttcttctagggagggccttctaggcagaagaagtaaaacagcagaggtgggaggcataaatagcatcgtcgtgtgagagatctgcaaaggattgaaaggagaggagggttcaatgaccaggggaaggattggaaaatgaggtcccataagatcttatatgtcatgctattcagtttgcatggagggtcttagcttgaaatgatttatctcctagacctttattggttttttgagacagagtctcgctctgtcacccaggctagagtgcagtggcgtgatctcagctcactgcaacctctgcctccccggctcaagcaattctcgtgcctcagcctcctcagtagctgagatgacaggtgcctgtcaccatgcctggctaattttcatatttttagtagagatggcatttcaccatgttggccaggctggtctggaattcctggcctcaagttgatctgctggccttggcctctcaaagttctggaattacaggcatgagccactgagcctatcctctcttatacctttttaaggaaaaacatgtacctgctgggagggttttaacaataaatgcagaaattcttctaaaggtagatatctgtggagtgtggtaattacagctcctaaaactaataaggtgaagctaatacgtgtttttactcattttttggaagtgaaaagaataatgaatctcttccccaacagcttatattttgactaaaacaatatttgtctttgtaaattaacgctaaacttcaccttaggttggtagtctatattaaattgggaccattttgggtagattgtatatatgttgttaacaaagtaattgagaattatcacacagttcaatttgtttttgtattgagtgcctgtagttaagtatttgcatagttcagcaacctgcagagttatttcttcccttttttggagacaaggtcttgttctgatacccaggctggagtgcaatggtgcaatcgtagctcactgcatccttgagcccctgggctcaagcaatcctctcaccctagtcttctgagtagttggggctgcaagtgtgtgctaccacacccagctgatttttaaattgtttgtaaaaataaggtcttgccatgttgtccaggctggtctcgaactcctaggctcaagtgatcctcctgcctcagtctctcaaagtgctgggattacagccgtgagccaccatgcccagtgggttattccttagtgagcaattgtttcttctgttagaacatgaatttataatttgtttttactcttggggataatatttaaaatgtagattatatttagctaatttgcagatgaaaatattgggtgactcaaatatatcttattgaaatcactttataatgctagttttcttcatagttctgttttgaaagtactaaattagtcatgatcttgaaacattggacgtgaaatttcaactcttttttagaaacaaaggcctataatagtattttgggtgtttccaaagttgtcatttaagttaaatacttttcactatggagggtagattacttgttttagtcttagtaattagtgctgttgctgtatttatttatttttaatcttaaaggagcattctttcttgatggatacttaaaaattatgattttgtagtgattttcatttttttaaacattatacatcaaatattgactgtttattaaatatagaagtattatctaatattttattacatgtattgcacgattatgtgagaacttttgtgattaaaaatgaaaactcctagctgcaaaaacataaattcttattaggaatgatacaatacaatttatttaaaaattgcattcagtttttaaaccagcagttaattatagcagctataaaaataaagataccaccaggcttttaatagctttcaaatccttttaaaaaacacataatcttatttgtcatatgagttctaatcatattcctctcttctgacagatggtttatattcttataaatgttattcttataacactataaagatctaattgaggcagttccttttttatattcatttgactgttttccttgcatcatttaaaatttttgctttgtttttttctatatctctttttgtaacagtgctctattcaaatataatagttattttaataaacaagccaaattcacatgtttcttgtcttccctaatacttgtaagattctcccattcttgataccttgctttgttcttattctttctgttctatgaataaagcagagtaatagttaccacctaatgtgataacatgtcatataatgattcctttcaatattcgtgaaacactcaaagagaattatgctttttccctattattttagataaagacatttttcatgttttaaaaaatttccattatgttgcggagtggtatctaactgtaaaaaaggcttttgtattcaatttctacataactttttatgatgagggaagataatattctttagtttcaatgtttttgaatttaactaaggaaaaaagcttcttggtctattattaagcaatctttatattgtagaatatatacattgtttcacttaaaatatatattaaaataattattagaaattatttattttgggaaatatttagtcaggatattcaaagcaaatatgtaaggttctgcttaattggacagtttttcctcaatatttttaaataatatattcttttaggctaaaaggagaaagtaagcaggtgatgaagtacaggcatcagctagatgagattatctgttggttaacaaaggctgagcatgctatgcaaaagagatcaaccaccgaattgggagaaaacctgcaagaattaagagtaagttgtttatttctgtctatatgccttttggtgcccgaacattatacttcagagtcacatactgcgtgtctcaagaagaaaagggaaaagaaactttgtactttttggtaaatgtggtgaacctgaaagaggaatatcttttattttttaaagagcagttataattttggtcttgcagagcttaaacttcacttatgtaaaaagaacaaactattatggtgtcagtattagaccaaaggtttttaggatattgtaaactgaccttatcattttaaaatacaatagggctatgaaatatcgttttttgtttttagatttggaagaaaattactgattattgtctataaagctgcaaaactcaactttatagataatcagtaattatcagagtgacttgctgaggaacaaaatgcagcttgcaataggtttagtgtcatggttgtattaatcagattttctttgttggtttgcaactaacaagtattgtttatagttgtatatgtatataatctataaaaattcatacatatatagatgtataaatatatccaaatatccataaattttgtattcataaatatttattttttgtgttaagaattaaaatacttgttgcagaacactcagcataatgtgctcacatttttttttaaaaaaagaaattgtgggctgggtgtggtggctcacgcctgtaatcccagcactttgggaggccgaggcgggtggatcacaaggtcatgagatcgagaccatctggctaacatggtgaaaccccatctctataaaaatacaaaaaaaaattagctggccgtggtggcaggcgcatgtagtctcagctactcgggaggctgaagcaggagaatggcatgaacccaggaggcagaggttgcagtgagccgagatcgtgccactgcactccagcctggctgacagagcgagactccgtctcaaaaaaaaaaaaaaaaaagaaattatgagtgtgtattcatacatgtacaagcataagtgtgtgtgaaaggttacttactaattcagagattttgtctataaaggagtatgattgaagcattttgagaaagaaacattgaataatgatgaaaaatattttgtggaacatatattaagttttctttttaaaatgtgacaatatctaacaagcttccttttttacctaaaaatttcagtggtttttttgggaatgtctcttttgtaaacaatttgaggagagttagaaaaggtggaacagtatattaggatggagtagcaaggaggagataagaacagaatgttaaattagcagtgtaaaaataatatatgacccggttaagagacagtgagtaccagagagcccgtttgtgcacaggagtgcaaaaatacacacagaaggcatgtgctcactcccttcctagttatcatttgttagcatgagcttaagcttcttataagtttattttttcacttaacaaattagaaagttacatttgtaataataccaaaaaggtttctaatacagttcttgaattttcccttatctgactaccttctaaccacacctatcttttaacttctccaggacttaactcaagaaatggaagtacatgctgaaaaactcaaatggctgaatagaactgaattggagatgctttcagataaaagtctgagtttacctgaaagggataaaatttcagaaagcttaaggactgtaaatatgacatggaataaggtgtgtgtaaagttactatcacacatttctcatatttattgattttgttgtcagagatgtgggatcatgtaactgctttactttcaagtatgtccaaatggggcaaattttactaaagcttactaatgtttatattttttatctgtcatagacagaggcatatattctagaagaatactttttattttatacagaactctttggcctaggggatttatacattatatactacattaaataatgaatatatgttggaattagtaagaaaattccagtgatgatattctgaaaatgaagaccttaaaatagcattctgagccgggtgtgttggctcatacctgtaatcccaacactttgagaggccgagatggggggaatcacatgagtccaggagtttgagaccagcctggccaacacagtgaaaccccatctctactaaagatagaaaaatttgccaggcgtagtggcacacgcctgtaatcgcagctacttgggaggccgaggcacgagaattgcctatacctgggaggtggaggttgcagtgagctgcagtcacaccactggaccccagcctgggtgagacagggagaccctgtctcaaaaaaaaaaaaaagaaataaataaagaaaatagcatcctgattttgcacatgacttttcacacatgtatgtttattttcaatgatttttttcattaaatatatatttactaggttccagtgaaatgtaatggcatgtgactacaaatacaactaatatctttccctcctaccattattttttttttgccattgaaacggttaaaagtagataaagtcatagatatcttttttgtttgacctggtacacaccatttcagagtatgacgtctgtataggacattgaatggatatgtctctgtccttggtttggatggactccatatcagtcattttctctctcatcctctttaaatggtagccattatcctatagctaatgatgcaggtgctttattgatctggtctctctgattgggaatcactgcctgttgagtcactgtgattcacacatgtgtatctctggtctggacctttctccatactctaaacttgtgtatgcaactacctgctcaacatctctccttaaatgtctaataggcacctcaaactaacatacacaatcgagcttttgatatccctctcccttctgtgccttaatatacatctcccaccttagtcaatggaagtttcatcttattattacttaagtcagaaatattggagtcaatcctatggtatatgaattctatcacaaaaagaaacaaagaaaacccccaaaccaaaaactatacctcagtcaccattagcagcttttccttcaaaatacgtatctactggatggatggtttattggatagccagatggctatgtgtgataaggcaaatgtagcagaagtttgacagttgtagatgtcagagggcacatagatatttcctctacaattctttcgacttttcttaggtcaaaaaatatcatacatttgactgcttcttacaacccccattgccactaacttgtttcaagcctgccatcatctcttgtcttgatgactacaaaggctgccccactcatctcccctgcttcttcctttgccctttgttattctgttctagacaaagcagccaatatgattggttaaaacataattcagatcaagtgacttatctgagcaaagtccaccaatggttttctatcttgctcagggtgaaagccaaaatgcttttttggcttatgaggcttctcatggcctggcgtcctgtgatctctcctacaatatccactgctctctctcccctacactcctttccagacatgttaggtcctgtgtcacttgccagaaaggttgtccatattcagtcggagcacacatatttatttaacacaaagggtatcagtgggtattctgcagaaaagggcacagttgttaatttgggtgcactatgtcagacaaagctagagctttggttattgcagaatttcatgtaaattttaatataattcactttggtgaattatgaatgtctaagaccaacaatgctcattgtgcagaaaatctcaacaaacataatttgggaaattctaacatggtttatttcattcattcatacagtcattcattcactcaataggtttttattggagtctcactttctgccaggtatcattttaagagataggaatgcattaaagagtgtggcattccttctaactcaaagagcttatcatggatgagaccagcagacaaccaattataacatccaggtagtgatgggtacataaaggtggagcacctgcttggctttgaggggtagctgtggaaggttttgttgaaaagatcacattctggttaatttacgaaggatgaataagtattggtcgggtgaagaatgagggaaagtgcagtgtagagagaagtggcaaatgaaagtgtctagaagagacagagaatgagcacagtgtatataggtccaggaagtagcccactgtagaatggaaggctgagggatgttctcagagatgagatcctggaggactcactgtgcatcacaaggaatttgagctccatgttgcaaacaatctaccactttgagggtagtgggcagctattgatgggttttaagcagaggaaagtcatgtttttgaaatattgctatagcttcactacggagatagatgaagtgatcctaagaattgatatagaaagatgagttagaatcttcagaagagtttatgaaacgggtgtcagggaagatagggataaggaattcagatgtggacatatctgaatatctagttcacagagagggctggactgaagatatgttttgggcagtctttagcctctcaaaactccatttgattcctgaaatctttggaaaccaggactcagggagagcccagggtgaagggcaagaagagcaacacagctgccctgaaggatattggtatttgatggatgggcagaggaaaaggagttggtgaaggaaattcaggagagccagccagagaggtaggaggaaagccagaattgcagagtaataacagaattcaagggagggggagtggacggcattaactggtgcacaggggtcaggacagctaaggactggttggtgtttttgatagcaatgtcagtggagttaggggctcaaacaagattgcaatggagagtgaaggtagagccagaagtttaggtcgttaggggaagaaaagtagcagagctgccattcagaataacacctcttcttttgaactacagtcatctttatttacgtagtattcttctctttctgtttgtcctgatgcggtagatttgcagagaggtgcctaccaccctgaaggaatgcatccaggagcccagttctgtttcacagacaaggattgctggtaagatatgtttatctttaacaaagttttttaaaaaatcagtatgtaaaattttgtgatatgagcctcatacatgaattagaaagacttagaaacgtcgtgccattttctttatttaatctactttcaatgatttggaaagaacatcttctttaaacccaagacacatttggctgcccagtgtgggtaaggcatttgttctcgcggcagataaggctggcctttctctggactccagtgctacctgggcatccacaggtcctgccgaagggaagatgagaggctaggtgcaaaaactggggactagttttctgggtccaggcagcttttcaggaaatcagctataacttgttgtgttaacatgagcttggttaacatatgtaattagaccctgatcatgactgagaacaaaaggcttagatatcctgggaagcaggtgggggatggatatttagaagcattctccaacctaggagacaaatacttctcacttggatgtggagaaagaagaatgttttctcactatttccttctctctttatccagattagatcgcaggctcctgccccatagccactgttgccactgccttgcaagttttctgaaccatcatgccctgctcttcctctgttgagtcacctggcaaaaccgcaaatgtgaccaactctaactgtccactcactccctgacagctgcttctgctgattctttttattgctcctccccgcttttttcttctcccttgtccttctcctcctccttgacttccatgtccaccttctactttctacctcttctctcgtcctccacctctacctcttctacctcttttttttgggagggttctttttatttctcttattcctcttatttttcttttcttttccttctcttcctcctcctcccctcaagttttgaaaaaagtgatgacagacaatatattttttttcatttttcgagattgcaagctaattgaggaccaagtttgtgttttttattacttgtatttctggaaatttgcacaaaaagtacctggggcctgatcaagtttcttgattaatattcagaacacttgagttgacatttgggtactgctgctttgcaaatacaggctcaactccataatcatagggaaagaatttgatgcattttataaaatcgtcatgggttatcttactttttaaaacctctatatggtaaaggagcagggaaaatttgaatacatatttagaagtataaaaagctaacagcaaagctacaacttccattaggtggatggctcatttttaacaggatattcgtccttgggataggcctgagacctgaagctaatcttagtatgtctctctcctcctacgcagtgttttaattcagttccttctttttaacattttatttagaaaataaaattaaccattttaaagtgaacaatttggtgacatttaatgcattcacaatgttgtacaaccactatttctatctagttccaaaatatttctatcactccaaactaaaacctcttactcattaagcagtttcttcccattccctcctactcccagcccctggcaaccaccgatctgcattctgtttccatggatttctctattctggatatttcatataaatggagtcatacgatgcttcttttacttagcataatgtttttgaggttcatccttgccaacaccttgccgactgtactcatttcagagctatgactattcatttcaaataagcactcagcgctaagagacagtcctaccgtactttcttctgagtactccttggtactcatttctcaactagtgacctcatctcattttcaaaagaaaaaaaaaacctttttcgttttcccaccagagaatccatcaagctacctgcggctgtacccatatactttacacacttccttcctattcagtgaaagggttattatctcttttcctaagaccagctcctccacttatgcataggatcccatattctctgggctgcttacgtatcctctttctctgatagctactagatcatccttattgccataccttttgaagcatgtagctctagtctactcatttaaactgatgtacagtattacataacattggatatactacaatcctctaaattctcttttctacctatgcttaccagtcccagaactgtagacatttttttttagatgattcacccagtccttaggccaataaacttgtagtcaacctcaactcttctctggaattaatattcaatccatcagcaagtagcatcatttccatgttccattccacctacttccgtggtcttgaacacccttatctttctatctagattattggaatatgctcctaactcataatcctgattttattcttgcctcagtacttctccatgacctattcctctgatagcagatagagtgattcttttaaacgagtttgattgtgtcgtttctttgttcacagtcttttaatcacttccatccacataaatgagttccaaagtctggccttagtccagaacaccatgcatatctgcctgtctctttaatcacatttcttactacttttccctttgttcattctgtttcaaatacactggtcttcttgctgtttcaaacatgccaagaacgtaatcatttctggtctttgtgcttggtgttccttcttcttgtcttccccaaatgttcttctcttagatattttcatgtttcacatactcacttcctttagttctccttcagatatccctttctagaatagccctttcttgcccacaatatctcagatacaccctgtctctgtcttcttgtattgattttacttcataacacacatccattttcctgatagaatgcaagctctggcagggcacggtggctcatgcctgtaatcccagtgctttgggaggccaaggcgggtggatcacctgaggtcaggagttcgagaccagcctggccaacatggtgaaactctgtttctactaaaaatacaaaaattagctgggcgtggtggcgggcgcctgtaatcccagctacttgggaagctgaggcaggagaatcgcctgaacccaggaggtggaggttgcagtgacccaagaccgtaccattgcactccagcccaaactttgtcttgcacactctcatgcctgcagcgtctagaatagccccttacacataataggttcttaataggtatttgatgaattaaaacaatgaattttttttatctacaaaaaaagttaaagtgaagatggggcagaaggatgtgtgagatattctgtagggtgtatatctagtgatggaatcactgggtttagcatatgggtgccttctacttcactagctgccattagggtgctgtctggattacttggcccagtttacactgacactggctgtgtgtaatgggttcttattgttctacagcattaccagcacctcaacactttgctctcaggacccctttacacttgtaaaaattattgaggaccctcaaatagcttttgcttttgtgagtgatagttatccgtatttacctaactagaaaaattttccattaattcatttattaagttgtttaaaaataataataaagccattatatgttaacaaaaatagcatgtttttgtaacattagcataagatgctgggcacagtgaatcatgtctataatcccagcagtttgggaggctgaggcaggaggatcacttgagcccaggagtttgagaccagcctgggtaacatagggagaccctgtctctacaaaaaattaaaaataaaaaaaattagccaggcttggtgatgcaggcctgtagttccaactaatcaggaggcagtggtgggaggatcacttgaactcaggaggttgaggctgcaatgagctgtgttcgtgcctctgcttcccagcctgggtgacagagtgagcccctatctcaaagaaaaaacaaacaaacaaacaaacaaacaaacaactctgttttctaaaacaaacaaaatcctggaaaagctgcagttttatattttttgaaatctcttaaatgtctagtttaatagaacacagctgtattcttatttctgcttctgcatttggtctcttgtgatgtcacgttatgtagacttagataaaacacactgtacacgtgggagagactgagcctaaaaaggcaaataatgtgctgatgataatagtgtaggcatcttaacctagagcttctcagatgtcacttttctgatggtggtcctgtggatgtagggtatttcattttaatttgtactatctcagttatagaagaggtcagacatttatttcacatttttatgtttattgccttttttatttcctcttttgtggattgtctttagatgattttttaagttttagaaaaagtattttggctatcagttctttgtctgcaatgggcattgcaaataccatctcctttcatctttcaaaggcttttaaaatctttacttatggtgctctttggaattcttaaccattaatggtttattaatagcttcccttttttgtgttttgtttgagagctacttcagtcctctgaagtaataaaagtattccttatttttaactaacaattttgtttttcatatttaggtccttaatccactaagaattaatttttctatggtgtatgtgaggttaaaatcagtcccatcatttccctgctgcagccgtggtgactcacttaattgaacagtaaattcttcttcattgatctgtaattcagtctctgccaaggtcagatttctctgccacctacacattgtgactcttctcttctgttggtctctttaaatgtctcagtctataatatactgagttaataattattagctaaataatataacttaatatctgggagggcatattcctctatcaaaaaataatttgactgttttttgtccttttctcttcaatattaattttataaccagaaatttgaattaatgattttgttacattcaagcctgttgggatttttattaggattgtgctgaatttacagattggctatacattttagaaaattatttaagcctcatctaatatatcatacctgaagtaggttacagatagttttaattactaattcaactacttattgtatcaaaaccaatcaatttggcaatgaatattaaatacatacttttttttgtattttctgactcagtaattctacttgggaaatctatgctaagatagagatcagaaatgtgcaaaatactctacatgaaaagatattctttgcaagttttttaaaaaattaaaataaaatttcaggagcaatctaaatatccaagggttaaataaaagtgaatatgggtataggttattacataggtattcataattgtgtttactaagaataaaatatgctcacattataaagttaaatgaaaaaaataaaaaattatgaataagttggctttataattaaaatcatcttgccaaaataaaataatacttccagttctcccacatttgtacttttaatttttctcagtgtcagtgctgattatgttatagaatgttgcaaaactgttttgttggcttgatagctaccaaagacatatggatattacaggtaataccatagccatttcagtatgaaaaaataacctcttagaattttttttacttaaactaaattttatttaaatacacatacacgtgtcaccatgacaccaccataattaaaacatcctgttgattaatttctcttttgctacatttttcatttcagctcatcctaatgtccaaaaggtggtgctagtatcatctgcgtcagatattcctgttcagtctcatcgtacttcggaaatttcaattcctgctgatcttgataaaactataacagaactagccgactggctggtattaatcgaccagatgctgaagtccaacattgtcactgttggggatgtagaagagatcaataagaccgtttcccgaatgaaagtaggtgcatagtgtaaaagcttgtcatggaaacgccacaacccagaggtagaccagatctgtttgaatcccttttgtttatcctaaactatgagagaatgaggtttaaaaaattctgtatctgtcaaacaaccattcagggctaactacaaagcatagagcttttcttgcatttatactgttgtgatatgatcaggtttactgacttaaactaaagacccagtgcatttttaaaatctaaaactgataccgtaaagctaggcacattagtataaatataagctggcgttagcatttcatgcctgttgtgtgatgtaggataatctcctaaagtgcctttgcaacttatatttcataatgagattaatttctgattttaaaagtgaatatctcctataactttactactatacatgtaccatctaatattcatttgtaaaaattctttttccctatttagtgtgtgctaagttctgggctgtgagtggtacaaggatactgacaagaatattctaggtagaaattgggaaactacaatgaaataataataacagctcttgctaaattttattaagtgcttcatgtgtgctggtcatttttctaagtattgtacacgttatctcattcaattctttaatagtcttgtgagataggtactgtttttatccccacattacaaataagtccacaccgaggcagaggcactgagtgcatatgagttgacaaattactgtagcaaggcaagagtctaataaaagcctcaggagaagtacaggcaacctgttgggggagccaggatgaggaaggggatcacttctccagtgatggaaagcaaactgtgtgggattttggcatctgggacaaagtggtgacattcctggtatagggaacagagtgaataaagtcatgtggtacaggaggcacaaaggacagtagggccaacatttgtgcaattaagaaatacagtgtgaaacaaggcaggaaaagcagctcaaattccctttgtgaaggagcctgcaggctgtgcaaagccctttggatttttagtctgtaagcaattggtaaacatcttccttcccatttctttttctttttaaaattgtgtttatgaactcatgataaccgtgctctgctttagtagaagactaggatggattggaggcaagaaatgcataaatcaaggcaaagagccctttctgaaatgactaagatgatgctgttgcaattagcagaaataaggaatagaagaaattgagtgtgaatgagggtttgagtgatttagtttcagacgtgttgtggtggggagtccttatgccatttagaaggaagtgatcagtattcattaccatgtgccctgggatttaggattgaaagttgtgagcaatccatttagaagtaatatttgacaccaaaggagtagctggaatctacaaaacgggtgaatttgtaaagaggaaggactgggaaaaagtcatttgccactatttgtattttttgtaaattgctttctagtctctatgactgtcattagttctgtactgaaaacacatgattttcctgatgttgttaccatttctcccatatttattagcactgagagacaaaccatctacagcagcagtttttcgtgtctaagaggatttaatttatagttattcctcttagcacttttctgtgtcacccccaaccctatgacattagtttgtgttcgtacctgacacagaacagatatgcaagtcatcatcagcagcaataactgctaatgttttcagggcatttttcagcttttgaagggattttctttgtttaatgtcctcagactggatgtaattgagctgtcagtattttattatttcttttttgtgaaaacaaaaacacagagaggtaaagctccttgcctggtgactcaggtgctaaatggaagaactgagatttgaatgcaggatccttgactttaaatcatgcactcattttctgccacgttgctgatgcttcactatgccatagaggaggaaaacaacgacaactttgatgtcagcacaactgttttgcttattattcttctcatatggcttattaacctatccgaataatcatttctacttaacagattacaaaggctgacttagaacagcgccatcctcagctggattatgtttttacattggcacagaatttgaaaaataaagcttccagttcagatatgagaacagcaattacagaaaaatgtaagttttttaaaaaaagttatgtattatcatccactttccctgcaaatggtgacacacacacacacacacacacacacacacacaaacacattttcaaagattattcaactagaaagtaatagtgtttaatatttgttactctttatttatacagaaatgtagctttcccttgtttttatgttttgtgaacattgttacaataaccttatgaagtccttaattattaacatcacgactcttaagtaattacttacacattgggttttcttctcttaacttaggctttcttttagaggaataaaaaaaggttaaaggaactcacaagaatgcaaatcctttctctcattatactttattctctaaaatcaggtcttactgtgtcttttaactcaacccaaaattcagtccacaaatatttattgagcaactactatgtgcttatgtgactggcattaatttggggatactttagttataaatgagagaaaacaacaacaaaaaataaacatacaaaacaatagcaaacaaagatccttgcttggggtttgcattctagctcagaagcatctaggttctacaaacccttcttagtgggaatgtactaccaatagcaaacgaagtctaaattctcaagagtgacacctagggattgtcacaatctgctgccactaccccttttctcacttcagccctcagcccggcctgtaattatgctgttattccttaaaatatcctgacatttcctagtcttcttacctttatttgcattattttatttctcttggccttttcttcccaggtgcaattctacgcagcagctaaaatgtcatcccctttgtgacatctttccctcctcttctggtccctggtgaatgttaatttctatttttagttccttctatggcctttccccccattgctttattatagatcttacaactactttaattgtctctctcttccatagattgtgaatatccgtctttctgcccttgggcctttaacagtgccaatacaaattaactacctaataaatatttgtgacaaaatataaactggaaggataaatcctaatatttgtcaagggaagaaagtcagctactctccctgtaaaaagtatgttttgatttcaaaatagtcatggtagcaacagggttattataggagatacattagaaaagaacttttaatgtctaacagtgttggcttatttttactaaatacatcattttccttcttttctctttttatgaatggatggattgtgcctattatggaactttggagtgagctggtttccctcacatcacaggggagctcctctgctctagtgataccaaactattgacaagccatttccagtttgctttttctatcatcttgatgttttcttttaattattattttttccatcacctctctttttgtccaaaacttctttcaggtgtttgtttttttgttttacaagacttctcctaaatatcttccctttcccattgaatgtacacactctattttctctctatatataaatatttctgtgtgtgtagaggttctataaccttcatcactcctcattatatgaaaaacccttcccagggggaatgtattgctaccaatagtaacctcgttttagggcttaactcacaatgaatgggataatttgcctatttcttatgataaacctgtgatatttactctcgcttgatgtctttggtttcatttgtttactgttaaaggattctattagtaatagaattggtcataagtactttatgtaactttttaactgacaagagaacattatgatagatttggcctctcttccttaagtttaaaacttaagcaatttatttaaacagctaagacagaatgaaacagattgtctcattgagcaagttttaaagaatgatgacatgtaagtataacttaaggcctgaacagccttgttgatagcttttttgttttttgagatggagtttcactcttgttgcccaggctggatgcaatggtgcaatcttgactcactgcaacctctgcctcctgggatccagcgattctcctgcctcagcctcccaagtagctgggattacaggcacctgccaccatgcccagctaatttttatatttttagtagagacagggtttcaccatgttggccaggctggtcttgaacttctggcttcaggtgatccacctgcctcggcctcccaaagtgctgggattacaggtgtcagccactgcacccagccagttgatagcttttatgtttcactataaccatatattatcccaagaactttgccaaagtgttccatgataactcagctggaatgttatcttgtagttacgttcctcttgggcctggtacttaactatagcctttctttttgtctgatatccaaagcatctttcagcagcgtggttttaacattctacctacttattatcagcaggttcttgcggatattctaagttattgtttattagtacctcagttcaagattatgaactaactctgaagtgattaataaaaaatttaagtttccagccgggtgcgttggctcatgcctgtaatcccaacactttgggaggccgaggcagacagatcacgaggtcaggagttcgagacctggccaacatggggaaaccctctctctactaaaaatacaaaagtagccgggtgtggtggcacacacctatagtcccagctacatgggaggctgaggcaggagaatcacttgtacctgggggcggaggttgcagcgagctgaaagccaggatcgtgccactgcactccagcctgggcgacagagcaagactctctctcaaaaaaaaaaaaaaaaaaagtttccttagatctgtctgtccttaaaaccttgttaaaaatagagaaaggagaagagagaaagcttgaggagaaatagaaagagagagaaggtgataatgagtgaaaggaatgaacaataataaaagaggaaggacaagagccagtatggaatttttatgatgaagagctgctgggtgcacagttcatgagtctcttttacttttagcatttctcttgaacttgaatatataaaattccttttagagagttttcctgctacagtaaaacaaatgcaaaaaaaaattcttacacagttcagtttcttctaaaatcaagactgccttagaaaattctcctttgagggtaacaggtgactatctctctgtcttaaagttctgtcatgaagtactgttaaaccctaccttcatcaaaccaggtctataaatacaactgtaaatacaaaattaaatagaacagtattttctttataattgtttggcagtatcagtttataatagtagatatttttttgggagttgttttagagcactgaaaataagagttcaagatttttttttctcaaacaccgtttcagaaatatatcaattgtataggatggcagatgtatattaaaattccttcaaaatgtgtttatcagcttgccttcttctgtttatagacttatttgtgatacatttgatatatgatattttttctttctcctgagggttacatgttgggatttttttttcttttataatgctaccctcagtggaaagggtcaagaaccagtgggatggcacccagcatggcgttgagctaagacagcagcagcttgaggacatgattattgacagtcttcagtgggatgaccatagggaggagactgaagaactgatgagaaaatatgaggctcgactctatattcttcagcaagcccgacgggatccactcaccaaacaaatttctgataaccaagtaagactcatcagatattttttggcagtattgttttgttggatatactttttttctattgttcactgtaattcttaacaataggaccctgccatgttttttcctaagttcttagagtgtctaatgaaatttatatgaagaatttgatctggaagatttttttcgaaaaatttctggaggcataacaagtaagaatatgcatgtctccgagatttatagctcactgactttttgcaagtgaaacacaccctcaaatcagcatctagaaagagaacactttcaagattccaggaaccctcttttgctcccttctgtactgtattagtctgttctcacattgctataaataactacctgagactgagtaatttatgaagaaaggagatttaattgactcacagttcatttgagggctactgtagtgaagcatgactgggaggtaccaggaaacttaaaatcatggtggaaggcaaaggggaagcaggcaccttctttacaaggcagcaagacagagagagatagaagggagaagtgccacacattttatttatttattggagacattgtctcactctgccgcccaggctggaatgcagtggcactatctcagctcattgcaacagccacctcttgggttccagcgattcttgcctcagccttccaagtagctgggatgacaggcgtgcaccaccatgcccagctaatttttgtattttctgtagagacggggttccgccatgttgcccaggcttgtctgcaattcctgagctcaagtaatctgctcactttggcctcccaagtgtcacacactgttaaaccatctgatcttgtgagaactcactatcacaagaacagcacaggggaaattcatccccatgatccagtcacctcccaccaggctcctccttcgattggacatgagatttgggtggggacacaaatccaaaccatattacttacttaccctgaaggttatttttattaataagtttttccaagactttcatttgaggactactatagtgaacaaatcagataagtaagtttagtttcctttaatgactttttaaccaaactgttttatcaatttcgtaatagcagacatcttttttgtcatcagttcagttatagagttgataatattgaacaactatggtatttttaaaagtgcttttaagattctctgtataaaattataaaatattcttgaattggaggttttagttgtgaggttatagtttggtataacatttatttgcccttcagctagcctaagatggaagtgtatatttgtgaagaatttaagaaagtatatgtagaaaacaatcgaaaatgtggaagtatgtttttattctccacaaatgcagactttacttggttacagttttaaaagcaagtggccagttatatgcatttctggatcattctgtgtgtttgtgatactgctgactgtttccaccaaatgactcccaagtaatagtgaagcccctggccccttaactagaggaatacaattaaaagtgatgtcagtgtttcagttatcatattagaacattattttttaatcagcagtgtgattcttttcttctgaaaccttaggctgatttaaaatcttcccaattgctacaaaaagcattatattaaaggtttcagttgtcatttagatttcatggtgagtaccttgatccagagactctcagaggctgaaaaactatgtcaaagaaccaatgccagtggacaaattcagcatcagtttggctattcaagcaaactctcagtaaaccttgcttggcagcttgatccattcaagtggttatctttgtaaacacaccttgtgatccaggggcaagagatggaagacgtccatgttgttgattcttcacgtttctccaggcatgtatgcaggaactgtctctgtattcagtcctttatgacgcatgtccgtgtaaggatcagagaggtacagcagaaggaatgaaaaagacaaatggtttgaggaaggaaaatatctcaaaaagaaaatgataataatcttgtaatattgtcatctatgtactcgatcactttcttggacatgtttcttttcacttctactaattttggtttaagcttacatataacaaaagggtttgcccccagtctgttttcatcctgtgatatctgtatctaaagcatgtcaaaatctgctgggagtaccattgttttgattatactaattactgagtgaccaagtctaacaaacagacctgcacttgcacctcagatactgcttcaagaactgggtcctggagatggtatcgtcatggcgttcgataacgtcctgcagaaactcctggaggaatatgggagtgatgacacaaggaatgtgaaagaaaccacagagtacttaaaaacatcatggatcaatctcaaacaaaggtaagtctaaggccctggcaggtaaatgtatattgtcaagttgagaatttgatggctttggctttctcgtggaaacctgccaaacatgtggctactacaagtacattttattattatgtatttttatactgtgatgttctgagttagtattatcatacttagtacagaatgtatgcttatacaatatgtttttgaatttttacaatggagttttttattttatttttttaaatcagcctaaaccttgccaatgattatgtgttctgattgtcttacgctctcagtattatctagaatacactttgtagtcttctgatggtaaggagtgcaggtgtttacagatgcatcagggtaatggtatccctaaaggtaattggaatagcgtgctatttgggtggggcatcctaagttgaggaccagacacacatggatccaacactagatccctgaaataatctatgtgcatttaggattttagttaatttactatcttttttcccattactttgtctagtcagagtatttggaacagcccaaaatagaatatgtgtttacaagagaattttctgtcacttgaatcacttgaacacctagaatttgagaaactataaacagtgattagcatctctttaagactgcatatttatattcatcattagtaaaaaaagatgtttacatcatgcatatagtactgggaatgcctgtgtctaggtgaaattacgcacatctttattaaaatgcaactgtcttaaaaccaatttggtatcaaaacacatctattttgacgtgaataaaatgggtattagagcactttatattcctgatatattcctgctaataaagtatggctaagcatttaataacattttgacatggatacgttttatacacttccagagtgttatttttagttacaatctctgaagctctgaaaactcaaagaagagggttatgatggcacaatgtgaggttgaatgtgttgttagatataccttggatactggagaaaataagactgggttagcaaagacaaaacttcacaagtggttaaagcagagtggctataatattggtctttctaacattttactacaacttttctcttttattataataggttatttggatttagtaaggatatcataactcaggcagggaagaaggtgaattaaaaacagctttaaccttaagagatagcattaggagatatacctaatgttaaatgtgagtcaatgggtgcagcacaccgacatggcacatgtatacatatgtaacaaacctgcacgttgtgcacatgtaccctaaaacttaaagtataataataataattaaaaaaaagaaaagacctacaatcagacaaagcaggttagagaatttctttatggccatctccaagacagaaaggtaggggaagactcctgccttcaggagagaaagaaggaggtgaaagggcaggagaaggtcacagagagagattgttttctgaggcctgcttctgagccctgaggcaccccaatattagaacaaaaggctataacaagtgttatgggagttatgttgcaggaactgtggatgaaaacatatacgtattacagtaagtacgatgaataaaaattatttgcataatatagctaacataaaaaaaagagatatagtccttaaatatgctctgtctttgtgtttccaaaaattccatgtataagagttaggactttgttttccttgtaaacttaacaaaaaatttatccgttaggaatgtgtggcctgctttatttagcacctccaattcttcttcttattttttttttttgcttttactttgtaaatattttaagacagcctacagcagtagttggattagatggaagaggcaattaaaaatgaattatattgcaaggtgatttttcgtttatcatagctaagacaattacaatgttccagtttctttgtagttacaagtggttgtccttattgtgttttctctctgcattttccggggggtggaaataagtaattatattaatatttagacatgatttagatatattgttatctataaaacagggaaaacagagcaaaactggctcataggatcccttcgtgaatgataactagggcttctatatgtaaagagagttttctcttttaaacccagtgaactttacaatttttaactattttaaatggacatctttgtagaatatataaatctttctttgccttcttaaagcttgtgaatgtatatttaacttttttctgaattcttggtagtattgttgcaaagatagaattaaggaactttaatggatacgagtgaccttagagttcttctgaaccagtgtttctcaacctttctttacattatcgcttccctaaggagcctgtgtagactcatcttcccatgaaattttaataccatgatatactgtgtactgtatggttgtgctttatacataaaaagaatacattttttcaccctccccctgaaaagaaataaccatttattacctgtgttgagaatacatggtctaatctaatattctcaggctcagagaagttaagtgacatgttcaaagtcatgcaacacagtcaggatgatatttttctatactaaatggtaatgctcttcatgctgtgagttctgaagaattggcagtaaatttattcaggctgctatactttgtgagatttggggctttgttttgtgcgtataaattttgagtgtcgtctcattgtcaggcactgtactgacctcttcacacacatcatttcatttaatcttcacaacaactgcaggagagaggtagcattttcatcagtcctatgttaatgaataaactgaagtacagagaagttaaggaattactcaagactacacagcttataatggcagagttgggattggaattcaagcttgactggcaagccaggctcttattgtctctaaaaacagtttcatttttgttctttgaatcagactgtcagccgttgctgacattcttggtgactgctttgtgtacccgcctctcagttctgtctgtaattccgcttactgattcttatctgtgttgagtttagaagccatatcagatgaaagatacggggccttttttatgcataatgtaatgcactccagtacgtggccatcacaccccgtctaatggctgctgagaggcctttttaccatggctgccctcttatcttccagcctgttctttatatacatcattgtcagccaaattctggaggggtgaagggttgttatatttgcacatggaatactgtgcagcataatgtgtgaagttcaatatcagctttcaaaggaaatgttttgtatgaattgcagttagcctaaataatttagctattcacaattataagtccacaatcccttatctacaatgccaaaatctaaaaacagctttgataacagaaatctttgaattaccatgcagctctttattaaagtctttatttattctggttagtatgaatagcctttttccttgctgcagaaatattaatgtgtttgattgcttccccagaccctgttcaggggtagtaattaatatagttactttcataatattagttttctaatgttcaaaaataatattacttctgaaacgcaactgaatcctgattttttggattctttgaaaagtaggcctgtctctaatgtttctaactaatctatatatcctgaccactactttttttacttatcactttttttccttccatctcttaatgctaattaacaaattttctagtgccagttgagatagtgattgttgaaatgtgtttatagcacagtcagtgtggatgcctgatttgggtctaaaatgctattttagctgtatatattttggcactccagggcaaaaataacattatatatatatatatatatatatatatatatatatatatatatatatatatatatacatacacacacacacgtatacacacctgtgtaacacacatgtatatatacatacacatatatgtgtgtgtttatacacacacatatacacacacatataactgtgtgtatagacgtgtttgcacatgcatgtatatacaggtatgtatatatatgcacactcatgtatatacacacatagttatctacactgaagtattgtaaaggaaatgagacagtataactgtgtgctataaatagtttcttagaaatcactaattactctgtgtttttctccttgtccttatcgcattttaccttgcctatgttaaggtatttctaggtttgtacaggcagaacagaaagcactgagtgtaaggtatatggggcaatccttggttaaaagcccatcttaggcacttgccttctgtgctaacctataggaagttatttcaactcaccgagtcaccatttccttgattctaaagtggagaacatgtctaatatgtggggttattgtgatatcaaaagttatgtgtaaaagttcttggtaggtagtatatgcttaagaaaaagatgcccaaagtgtcatcatatgctctttcatataatgtctttctgataagtccacttcctttagtcaaatgcacagtactttctggggttaaattagcagaaggttgagtcattatcagttgtttgtccatagtcatttctaactctttctactttaattaatgataaaatacttctttgtctgcttttctgagtgcagtatagatattctaaaattttattaacagatgaaatttcttaaaaaatgcagtttccttggtttgcagaattatcacagttgctgaatttaccttgcaattaagcattttctgccaaagcaaaagtccaaccatcctgggaagaaaagatacggaatttaaaaagacacaattatttatttaaaaaaatattttattttattttattttatgttccaggatacatgtgcaggacatgcaggtttatgacataggtaaatgtggtggtttgctgcatctatcaacccattacctaggtagtaagtccagcattcattagctatatatcctgatgctctcccttctcctgcccccttcctacaggccccagtgtgttgttcccctccctgggtccatgtgttctcattgttgagctcacatttataagtgagaacatgcggtgtttggttttctgttcctgcattagtttgcggtggataatggcttccagttccatccatgtcccagcaaaggacatgatctcattcctttttatggctgcataatattcctcggtatataggtaccacattttctttatccagtccatcattgataggtatttgggttgattccatgtcttagctattgtgaacagtgctgcaatgaacatacacatacatgtatctttataatagaatgatttatattcctgtgggtatatacccagaaatgggattggtgggtagaatggtagttctgttgttaggtctttgaggaatgccacactgtcttccacaatggttgaattaatttacattctcaccaacagcattaaagccttcctatttctccacagcctcaccagcatctgttgtttcttgactgtttaataattgccattctgactagcatgagatggtatcccattgcggttttgatctgcatttctctaatgctcagtagtgttgagctttttttcatatgtttggtcacataaatgtcctcttttgagaagtgtctgttcataagacacaattatttaatgtgggagcacaaatacagatttattcagtaagataactttattttcttcttttgaaatgctattatctttctcattaatatttattaattaataatggccagctagacatgtggaatgtatatagttttcaaaaggttatttaaatattgtgtatagtaaagactgattttgtaactattctgaaaacaggttaagtttcaaaaatttaattttgattgactttccaagtaattttgttgtatatttggaagcttctattatatctgttattactttttcagtaatgatgtttattgtccctatagattaataaaaatgaagcttttttcagcatttattctttgtccaatttggtcaattccttttaacagtgatcagtagaagatacttatattgggattgtttcataaggcctgatatcagccaggctcaaccttcaagctcttaaaaatgaatgctgtagcagctgtcattcccgaatgaatgggcttaggtgaaaagtacaggtagccttatcctcctagcatgcccaccaatatgaggttcagagatttgggtcagtcaacttgatttatcctctcggaagcttacttctttccctgaaaatcacctttatttttcaacttgttttgtttattttctttgctaggatttgatttttagttttcccttccaagctgggaataaagctggccaaaaagagaagggtaaaaattatagtcttctatattttcctcttctgttacgttgttttaatatttcaagtatcattttattactttttttaaaaaacaattgccaacaatgtctttgtgataaatgcctatgaatgttaatgttttcattttgtaaatatcaaactcaagcatgcggatattttctcagcacatttagctccatatcaaacaaactaaagagccaatgcccacagaaacaatgcccacagtctttgtttttgttttcatttgtttctttttccattaattgattaatcaaccagttaaacaagtatttatttagcttcctatttgccaagctctgtgaccagccctaaagattcaaccataaatacacctcattcctgctcccaggaagctgacattgcatagggggagcctgcaatgtacgtaagtggtaaataggaaaataatacataattataggaggttgttttggaggtaagagaaattaaagaggtgctatgtaagagagggacttaactgaggcaaatttagaaagcataacttggtggcatttgagctggttctgaaggttaagaaggaaccatctgaagaaaattacagagtgaacagcaaatataaaagtcatgaggcaggaaagagcacagcatgtggttgcaatataatgaatatgatggtaagagcttgagatgcggtaggagaggaaggcagaggccagatcatgctgagctttgtaagacatggggtattagtccgttttcatactgccataaagaactgcctgagactgggtaatttataaaggaaagagttttaactgacttatagttcagcatggcaggggagacctcaggaaacttacaatcatggcggaaggtgaaggggaagcaaggcaccttcttcacaaggtggcaggaagagaattgctgagtgaagggggaagagctccttataaaactatcagatcttgtgaaaactcactcattatcacgagaacaacatgggggaaaccatccccattatccaattatgtccacctggtctctcccttgacacatggggatataggggttataattcaaggtgagatttgggtgtggatacaaaacctaatcatatcacatgggaaggagtttggatattaaaagtacaatagaaagctattggaattgttaaggaagggagtgacactgtctaatgtgtatatatattaaaatttaatctctctggatcttatgtggataataggttgctagtgggtatagtagaataattgcgaagatcagaaaggaagtgatggttgtggtccaactgggacatggtggtccccgtggctactgtatgccagcaatgatggaaataagatgttagatttgcgatatgccttggaagtagaaaagacattttggtggattagatatatgccttaagggcttggaaacaatccaagatggtattttgtaaaaggatgagtggtggtaccattcaccgaattgggaaaggatgtgggagttttggaagaacaaaaattgcaagttggattttgttaagtttgagatgcctgttagatatctaagtatataggttaaataggcaattatgtatgttaatctggaactcagatgttctggacctcagatatgaattgagagttctcagcattcacattggaggttgaacatgtgggactggatgagatcaccagggaaggagtgaagatgaagaagagaggggtatgcttaactgagtccataaggcctagggtttggtgattgaacaaaaaaggaggaaggagcaaaagggactcagaaaaaatttccaatgaagtgaaaaaacgcagatttgtcatgttcagaaatagagggaggagaatatctcttagaggaaatggagagaggagaatgtttctaagaaagaatgatctactggattgaattgggctgaataaccaaataggatgacacagcacactattttggtaattccacagcttggacattcctggtgattttggaaagagcaatttggaggaagtaatgtggctggaagctagagagtgagatgaaggtgaagaagtagaaacagtttgtggaaacaactttagagaagtttgtgtgaagagggacagagattttaggtagtgcttagtgtgggggctgtaaggttaagagagtcgattgacttttctgttaaaatggattatagtaaagcatgtttgtgtgcctatgagaatgacccactagatgagagactgatgattaaatgcagaggggacaaaggaaggaggacaggaaggctttgagaagataagaaagtgagatttagagaattgggtttggtaagaactggaatgcatttttcattatgaccagaaaagtcaacgagaaggtgagtttagatgtacgtgaactagaccattagtggtggaagatgaaaggttctccatgcaagaactgagctttatgatctatcgagcacattgtcagtgaagttggaggtaggactaagagaagttggaagagagaggattgggtgtaagttcagatctttgtgagtgggatggagagtttcctagggtaaatatatggtattgctgggcagtaatgagtgcctatttgtggtttatattattaaatgtaaggaaaggtagccctgttgaactactctttaatagcattcatctactcaatgaggcaatgaagaagaatgcagatggaagtgggagaaagatggagcagggaagagtaagatctttggaaatgagaggagaacaggattgcctgtggtccataatagtgtctaatgtgtccctttctctgggtggtgtcattcctcactagagctatggcttggcaaacagaccttaagttggatttcaaacttcacttcctcattgaggcagtggtcaacctctatatacagtgcccctgaacctgaagctcagtataggaacagagtggatacatgtgttgtgctttctacagtgggattttgcctggaagatgggtgaacaataacctggaggtagcagtggggagcagggaggacccttattccagcttctcaaactgaggcataaaggatctgagagaaaaaggaaaagacttcatgaaaagtttgcagggaaccccatgcagtagctcatgtctgtaatccagcactttgggaggctgaggcaggtgaatcgcttgagtccaggagttccagactagcctgggaaatatggcaaaacctcatctctacaaaaaatacaaaaatcagctgggtgtggtgacacatgcctgtggtcccagctactagggaggctgaggtggtaggttcgattgagcctaggaggtggagattgcagtgagctgtgatcacaccactgcactccagccttggcgacagaaccagactctggaaaaaacaaaaagtttgcaggagaaataatggccctatggaaactggtttcagtgaagacaaaaagggattggcctggggagatggaaggtacagcagagtctgctgatcctagaagaggagctctagagcatggtggaagaagggttggggagtgtgttggagcagactggggaaggtattggagttatgattcaatattggttgactaatgaagaccaaatatctggtagtgacttagctaaaggggaaataggatgtggtgagggaaatcctctcaaagaaatggctctgtggtcttgactatttatttcctgacaatcacagccccaagagagatgctcctttgggttcacaaggctgtgggcagggatcatggggtagcagcaggggattgtgaaatgaagactgactcttctttcaactgcatttttccccacagcatgctttaatgtatttcccaggtgaatattatttaaaagaacaaaattaccttgtgaaggtgctcactgaaaagtttaaggtattgtttcattgtaagttttctacctgccactcaaactactgatgctgctgtttttcattctaaaagagataaatgtatttaaatattatattaatgtaaaggtcaccttttgagcacaccaaaatttggcaacacacattgatgggtttcctgagatgctcttttcattaaactctttaaaaagagagacatatctattcatgttcaaatactcttttgaccaattataagtaaatgcacaattgattaaataatatatcttgtagcttaaaatatcaagtattatttaacatctttaaaataacattttaaaaaggcaagtatgtcatgttttattgtgttacaaaatgattataggctatagggtgtcatagctgcttttattacaaaaatatcttttaaaagctaagcgtttacatttaaaaaaaatcctacttccctttactgtaaagtgttataaatctgtcacccgtggatgtccttaaatcttttttgggaagctatttatatttttacttggtgtcatttcttgcagtaaagacttttatagtctgttgcttcttctgtttgaagtaaaaaaaaaaattatttctgctaatgttacccttctaaacttaaaatgttgtatctttaggtttttagtctgtgttctttgtgatttgtagatttaacaaaagatttagaaaaaaatttctttgcctttgtcttctagccacaaattcctaagcttaaaatcatttcttttcctgtaacagcattccttcccttgtattatctcgttatttttctcaatacgtcctctagctgtgttctgatctttcttgagacgtagcagtcagaactgccaaatatgaaatctacattgagaatcatagacgaatgcaagttcagtgctggatgcgatcttagaactcttccacattaatgcttcccaaccttttttgcgatcggcacactactcatctattcccgccagtcatctttcgtttacatgcagcaattcttaatgaagctgaatttgaaactagggatggaggtgagagtggaggaacacttctagtaggttttgtgattcctgtgatggattatgtagttttaaaaggatctctggagattttgaaatgggtaatttactgatccagtacaagccccttattttaaggatgaaaaaaataaattggagatttgaaatgatttaccccaagccatacagctagtaaatggtggaggtgatagaattaggtcattgtcttttgagagcagtgtacacaaatggcattaaaggtggtatattcacctgtgtaataaagtatgaatacgtgttcctgagactctaatttcagtgattttattgacttatgatattatgataaatcatgtggagttccttgagaatggataaaaaatcttgtaatattgagtataccatactctagcctagggtctaatttttaaaagtaagaaaaaataaactggaggtggaggaaacaactaagctatagtctattagaaattttatataaattatattaatttcaaaaatcagaatataaaataacatgtataagctatgattttaaacttaaacacatacattcattataataatatgaagacaatttgcactgctataagtagggtttgacttttagtatagtcattatgtttagtagttaagtttatgataaaaatttgataccagctatatatgcattaaaaaaaaattccaggacacttatcattaaatttcacatttgcatgcaataagcaaaattaattgcctagtatttcaccaaattcatacatgaggttagggaaaatatttactgagtattcactatatcttgatacatttatatgtgtatatctcatttcctccttcaaatattgctgcaatatggagatgttattcctattgctgtataagtttattcaataaatacttgttgagtttctactgtatgtaggtcctggtcctattgggtgcactgatgagcaacagctttaaacaggcaagaaaacaattgcttactgtcatgatcagagatacaatgaggaaggcagaaaagtgtcccccaaagtgattattctggattttctgggtgagccccatttcatcccaggagtccttaaaggtggaggaggtggcagaagagtggttcagagagatgtgatttgacgactttacctgctgttgctggatttgaaggtggaagaagtggctatgagtcaagcaatgtggcaacctctagaagttggaaaagaagaggaaccagattcacccctagaccctccagaaataaatgcagccctgctgataacttgattttagtctagtggagacccgtgttgatcactgacaaaactgtaagataataaacttgtgttgttttttaccacaaagtttgtggttatttatgatagcagcaatgaaacaccaatagccatggtaggggaaactatgggatgccttggggaaggtaccatggttttggaaagtgtttgcacccaggtctggatggtcagtagaagttaactaggtgggatggagaaaattagtggaggctggaggaaaggagcaggaggatatttaaggtaaaaaaaagtaaaatgtagaggtctggatgcgacagaggcagtgaccactcagaggattaataattggttcatttttatagataaataacatatgaagtgtgaagtggggagatgcctcctggggaggtgagccagagtcagatgatggaaaacctgtgtatcaggcaaagtttagggatgatgaagacaatccttgcccaagcgctcatggctagtgagcaatggagctttgtctaccttaatccaaaatccatatttttttacttatataaccaacaaagtagacatctcttacaaaacaactaaaatttgtttttctgaaagtttcatacaaagtgaatattttttaaagtagtatctcttttctcactgatgatcagtagataatttgtcaatgggtggtctagcttctggattgagaatgttccactggtcaccaaagtgtgctgctgaagttactttacccagtggaatactgtctgaggccaagtgctcatggtcccttagctcacttttcctttgaagtatgaccgtaggttgtctacctcccctcgtagccttgtcctttatacttgctaggtatttaaatatctgtcatataagaagaatcatctgcctttacacttaggtttcttggacatttgcatccttttccctagtttggacattctcagggtttaatagaattaatctgtaatgatctctttttacattagctgttgccatataacctattatgtgcatatgaatattcttaaataataaaaaagaattctgattatgggaaatgaaggtgtttgaccttactaaattttttaatgactaaattttatatattgaatgttcttaaaggagaatcacctgtgtgtagtggattgattgcatatgtgcactcctttaatctttgttttctagtgcctttttagcacagccttcatttggctattcttaatgttttttctgttgatgttttaaaaatggaaaatatgggcagggtttggggaaggataaaacaccaccaacaacaactactcaaattctagtgggtaacttctaaattttaaaaattaaaattcacctatgattacaaaaaaaccaacaaccactaagcactgaaaggtttataacagaatatagttcttttccctcgactcactgcagtccccttcctagaggcaactattctccttaccttcttctatcatttttacatttccatattctaaataaaatgggtatgccatcatctttcaattctttagtattagaaattgtctgctgatatcctattttggtaaatacataggaagttgcttagggatgctactgttcttttccctgcttcgccattgaattttaggtaaatacatatacagtgttgacattattttgcttgtccaaacattattaccagctaaaaactgaggtttactgtaattttgtttcctatgtgtttgttttacctgaaattaataattgccttatttttatatgcctagttttctttgcacctattgctaatccctcccacattttccagtgacctgacagtacaattttccacaaagccagtcacattcagcaggctatcacttctaatattgttccttggtccttggtgacctctcttctggagacatgctttctaggcctgctgcacagccatcatgctgggtatttgctttgctcctagtttagaatccctgttgcttggatctcatggaagttttgtgttattcgtttgtttttgccttttttgtttgtttgttttggtttggtttatttgttttcttcttggggcgatttcctcattttgtctgagtgtatcctttgtaagttttgtcacgttaaaacaggaatacagagtggtggcaacgctgaagacagcccatacctgctccagtttggattcagaccctcttttctgtgatctcctctcaccattaacaggagagcccctttgcttcttcctgggctggatctcttttttatgcttctcatatcttcctccttcttgatttgcaaactgagttctgtgggggatatctaggagcttcttgaaaaatggtatgtaggagttattttttataattagctcaattattatttttagtttttttaaaaaaatttttactttaagttctgggatacatgtgcagaatgtgcaggtttgttacataggtatacatgtgcgtggtggtttgctgcacctatcaacctgtcatctaggttttaagccccgcatgcattaggcatttgtcctaatgctctcccttcccttgccccccaccccctgacaggccccggtgtgtgatgtttccctccctgtgtccatgtgttctcattgttcaactcccacttataagtgagaacatgcagtgtttggttttatgttcctgtgttagtttgctgagaatgatggtttccagcttcatccatgtccctgcaaaggacatgaactcattcttttttatggctgcatagtattccatgttgtatatgtgccacattttctttatccagtctatcattgatgggcatttgggttggttcccagtctttgctattgtaaatagtgctacagtaaacatacatgtgcatgtgtctttatagtagaatgatttataatcttttgcatatatacccagtaatgggattgctgggtcaaatggtatttctggttctagatccttgaggaatcaccacactgtcttcacaatagttgaactaatttacactcccaccaacagtgtaaaagcattcctatttctccacatcctctccagcatctgttttatcccgactttttagtaattgccattctaactggtgtgagatggtatctcattgtggttttgagctttttttcatctgtttgttggccgcataaatgtcttcctttgagaaatgtctgttgatatccttcgcctactttttgatttggtagtttgattttttcttgtaaattgtttaaccgtaggagctaattttaaagacatagcatggccgggcacagtggctcagcctgtaatgccagtacttttggaggctgaggcaggcagatcacttgaagttgggagttcaagaccagcctggccaacatggtgaaaccctatctctactaaaaaaaaaaaatacaaaaatttgctgggtgtggtggcacatccctgtagttccagcactttgggaggccgaggcgggccgatcacctgaggtcaagagtttgagaccagcctagtcaacatggtgaaatcctgtctctattaaaaaaatacaaaaattagccaggtgtagtggcaggcgccaataatcccaactacttgggaggctgaggcaggagaattacttgaacttgggaggtagaggttacagtgagctgagatcacaccactgcactccagccttggtgacagagcaagactccatctctagaataaaataaaataaaataaaataaaggaatattatggaaagattgtcatttggtaaatacttgtataaataggactcaggaatatgaaggtataaaaagttctgctgaaatgcagtttatagaatgggtggaaagatacgaaaactatataatgtagttaaaatacaatttaagaatgaaacaagatcatcattcaaggcctttttccaggattcatgtgattaatcattgtttgaagaggattattgaccttttacgaactcataacaaggatactgaactgggatggaatattctggaagaggtagtccttaacccttaaaggagtcgtaggattgtggtaggattgtgataaatggagagggtcagcaagacatttttatgtggatataacattttcgtgtggacacaatattaagaatattctagagaaaaaggagcacaccactattacctaaacagagtattgaagaaaactaggggataaagtttgagaagtaaactgggatcaattatggaggaaattaaattccaggcgaggaaatttgaactgattctgcaggttaagaagtaagtgctaggatgaggttgatgacattcaagaatgtcatataaacagaatgttagtatgtagtctttagtgtctggtttctttgacttagcagaatgcatgtgagattccatgcatgttgttgcatgtatcagtagtttgcttatatttattgtggaatagtattccattgtatccctgtaccaaactttctttatccgtatgtaataccagttggtatttgggttgtattcagtttttggccattaccaataaggctgctatatacactggcatacagattttatgtagacatatggtggttttttttgttgttgtttgtttgtttttgagacagtttcactctgtcacccagactggggtgcagtggcacaatcttggctcactgcaacctctgcctcctgaattcaagcaattcttactgcctcagcctcctgagtagctgggattacaggcatgccccaccatgcccagctaatttttgtatttttagtggagaaggaatttcactatgttgtccaggctggtcctgaactcctgacctcaagtaatctgcctgccttggcctcccaaagtgctgagactacaggcatgagccactgtgccccacctagacatatgtttttgtttctcttggataaatatctaggggtaagattgctgagttgtatcactaatgcatggttaactttacaaaaaactgccagctgtttttcaaaatggctgtacttttacctgcaatgtatgagagttgcagttactccacattcctgccaacccttggtatagtcattttcttaaagccgttttaacatgaagtaatgtctcattgtggtttgaatttacatttctctaatgattaatgtgctgagcatattttcatttgtttatttgtcatctaaacatcttctatggtaacgtataggtttaaatcttttgcccattttttaaaatgatatgttaaaaaaagatactgcatcattataaaataaaaaaaatgccaaaaagtacaaataggaaagtaaaccaacttaaatcccagcacccaaaaataactgtttgaatattaagttaatattccagacatttctccctctatgtatatatacagatagaaggacggatggatggatgaatggatggacagagagaaaaaatacgtgtaaataaagtctattagatatgctgatttttactgtgatacaatttgtatacagtagtccccccttatctgtggttttgcttgctgtggtttcagttacctgtggtatatacaaaaagaaatcttgagaaagagagagatcacattgacggaagttttacacagtatattgttatgattgttctattttattattagttattatcatcaatgtcttactgtgcctaatttatattgtaaaaataggtatgatgcatgggaaaaaacatggtatatataaggtttggcactatctggggtttcagacattcactggggatgttgaaatgtatcccctacagatcaggagggactgctgtatcacaaaattcatcaggatttttagtatattcaccatgttgggcaaccatcactactcttaatttcagaaaatttatcatcctccaaagaaaccccataccattagtagtcagcctccattgtcctccaccatgcaatcctaggcaacacctaatctactttctctatatatatgaatttacctattttggaaattttgtataaatggaatttcaccatatctggccctttgtgtttaacttctttcacttaacatagtgttttcaaagttcatccatattgtaacacgtgtcagtacttcattcctttttatgggtgaataatagtctatgtataaatatagtgtattttgtttattaatttctgtctcaatttaggttgattctactagttggccattatagataatgctgctacaaacatttgtgtacaagtttttctgtggaaatatttccagttctcttggatttaaatacctaggagtgaaattatcgatactaatttttaaaattgagttgttttcttattatagagctctgaagaatataaagttttaaatgttgaatttacaggtgtgtgtatctcttaactcatataactccaagatagctctgtgttctaattttgatgtagatttaatgaagggtttatagaagctcatttgtccaatgcattctaaatattactaaataagaaaccaacttgtatatatatgaattgtttaaaatatataaaatcagctgcttcaattatttttattttgtcttaaatatttcttcagatattatttcttcctagaattcatttagccactgactgtaggagtatttgttgatactgtctttatgtaagtcaacacaaaaggtaattgtattgacttacataaaggcagtatcaacaaatattcgtatagtcgctgactgtatgaatatttaatccttaaaggagtggtaggattcagtgactgaatgaatagaattgccttttgtattgacctacaacatatgggggaataatttaacttacaattatgagctgtaaaatgtagttataattattttatgatatggatgtgattttaatatttttatggctctccccctttcactcttctcagaattcacatgatccctccactaaggattattcaagacacacatacagataaatctcccagttacctatggtgacttgaataaaaggtcctttgggggctgcctgttagttttttatttaggggatgcgtgatgtggaatgtcacaacactgtaagtaatggagccgtgctgtcatattgttactttcagtattgctgacagacagaacgccttggaggctgagtggaggacggtgcaggcctctcgcagagatctggaaaacttcctgaagtggatccaagaagcagagaccacagtgaatgtgcttgtggatgcctctcatcgggagaatgctcttcaggatagtatcttggccagggaactcaaacagcagatgcaggtaagtgcatgggaaaccacaccagtacctgtgtttgccctgtgtgcttttgatccctctgcatgcaaatgtgttacccttaaaaggtgaagttgtcactttattctcttatgaaatccgtgctctcctgtgaataataggtttcttgaaataagctctattagatatttttacttaatgttagaggggaaaaaacccaccttgttttatggaagtaataattgtttatttagagttagaggctcacagctattctgctttttgtcattttaagccctattatggttagctttattgaatcctaaattataagggcattttcccttaatgtgaagttgtttctttctccatttattatacatacttaatataaaagctgcaaaagctctatggcttagtttataactaagaatattaggcttgatgatattacttttatgtcattagcttgataactgtgattgtatatgtagtctgaggttcaaatatttcttctacacaaaatgtgctaatataaaacttttcatttataaacattataaggaatcttatgaaatacgtctgaatctttttttgccctcaagtagttctgcttcagtactcttgaaccttccagttcaaaatctgattcatgcggagtgtggtgcctcacgcctgtaatcccagcactttgggaggccaaggtgcgtaggtcacctgaggtcaggagtttgagaccagcctggccaacatggtgaaaccccatctctactaaaaatacaaaaattagtcgggcgtggtggtgcgcacctgtagtcccagctacttgggaggctgaagcatgagaattacttgaacccaggaggtggaggttgcagtcagccaagatcgcactactacacttcattctaggtggcagaacgagactctgtccactcccaaagaaacaaaacaaaaacctatttcaatggggaagtctccttgtcaaccatagtattacatctgattactttataccatgccatgctcacatcagtttgacaactattatttctgatgtacctgtgaacacgtgttccattgtcttttgttgttgttgttttgttgcccaggctggagtgtagtggtgcaatctcagcttgctacaacctctgcctcctgggttcaagtgattctcatccctcagccacctgagtagctgggattacaggtgtgctccaccatgcctggctagtttttgtatttttagtagagatggggtttcaccatgttggccaggctggtctcaaactcttgactttaagtgatccacctgcctcggtctcccgaagtgctgggattacaggcctgagccaccgtgcctggcctccattgtcttttgatacatgtctctgcttgtcccagttggtcacatggttcttcaagggcagagattatattatctgtattgttgcctacgcagtgccctgtgtgcaaatcctaagtgaatactgactgctgtccttggaccttgactcaccgttatgaaactcagcattgaaaccttttttaaatccgttcttaggaactcttttctctgaaaacatgaaaaagaccattttgtaaaatgtcaacaaatgtgtggatctggatgaaggatacagagtctttctttgaactactctgattcttacaattgttctttaagtttgaaattattttcactgaaaagttacacaatttgaaaaacagatctttttggaatgagcttatttataaattgtccctgtgcatgaaaactcatggtgttttactgttgagttcttaagattcatttgttgaaaatttctgtttaaatacattgctgcttctatcttattcattgcgcaatacattttgtgacttggtaatgagtgtgaccaggcaagtatcaaaattaaatctgttcctttgactcactcttttgagcctcatgaggtcactataaatgttaattgataaaatatttagccatcatctgtattttaggaggtcatagaggactctaagtgtggatagatgctagattatttatttttttatgatttaaacaagaaaaagcctgacctataaatgctcacagttagttaacttatgcaatggtttaatttcagtagctatctaggctgtgcacttgagtaggtaacagtttatacacaatgaataaaggaggctttaaatgaaccctggtaatgagcaccagcaaaacacaggcctattctagagtttaatgatgtcttctgacatattttatcttaggatatattcttaccatagctaagactcttctcaatatttaatgaatattcaaacagtggaagacaaatgtaaatagaaatgtttaaaatctttcaaaataaaaatatctaagcacaggattacttatggcaaacagcatcaagaaagggtgctgataaaaatattaaaatacattataatgctttataaaatataatacattattactttagtgttgctaaaaatagtctcttttggctggtagaaagtaataaagaggacatttactaagagtccactaaaattcctttgtttaaagataaatatgtacatttatgtttagaatgtttcacattacggtaattcgcatgatttttcactcccttgctttgttattaaatgctcttaattttaaagtgttctctccattctatttttaaaaaagttccatggttttattttcagcaccttatagatagaagattgttagagatttagtaccttttactgagtttttctgaggcaagagaattttaatttttttatggtgttgtatattaatgattctccttttgtatgagtaaacagacatttaaaatagaaacttgtttggaaatggagagacgtttgttggagaaaatgactgtacagaagcatggcaaatcataacagaaaagttctggtggcatggtggtggcagtggtggtggtggtgctggtggtgcacagtctttgtgcactaaggaagatggaataaggagctccgtgtatctttgctgcatgcacaggatgtgtatgtagaactacttagctgacacattcgctgtttatacttgcttcatgtcttatgacaaccagatccaaggccatgggagtatttcaggaagataaagcagtttattctatgctcagtttaaggtgaatcttgggtgaattttgataaggataggtctaaagcacatggaagatgattaacttttgggagtatgctatgatacatgccattcttttaaggatggatgatgatttggatttatgtatctatgtttcattgccctgctgcaaggctgttaggatttattccccagcagaagccttttggcaagagaaaagccgattctttggagccctgcaggagagacaagctccttgagaactgagcagtccagctcatagagggtcttaaatgccatgcaagtatttatattttaatccagtggcaatgaagagaagtcataaaggatagtaacaagagtgatgcaatgggatttttgctttataggaatttagctgatggtatgaggaatggacttgaactagacaagagtgacagaagagaggcctgttaggatactcatgtagccatccaggctacaggtaataattaccagaaaggagacaatggcaggggtagtagatctaatgactcaatagtatacatagactgaggaaggggaaaggcagattgccaagtggtgttagagcctaagactgggaacatagaagaaaatgtcagagcagggttgcaagttagcgggaaatgtgtggggatggcaaatttcatctgttttgactttgttgaaatgaagcattggagtaacatccaggaggaattgcctggtatgcagttgtcactgtgaatctatattcagataagagtatttggccaaagatgcagaaactttattttttgcttttgtatgaaagcccattattgacttccaactagtttattagttcaagtgcatttattcttaatgtgcatgttcatattctaaaagattgttattcttttaattatatttaaaaatttcagctttacatttggcattaccaattaattgaaatgctctgattctttgctgggtaaaatcctgagttctgctgcctttctggagtggtgttgtcatgggtggctggttttgctctctaataatttacgttttaggattattacacttttatctcctatgtttgcttttagcctcattttcatcgtcttgttccatagatgcagactttgattatagattgttttagattttctcctgtgcccagctgcatgcttagcactgtgtttgaggggtgaatgcctatctcatggggacttcatctgctggttctaggacaggaattatagcttcatacttatttaataacaactttcttggcatataattcacatactgtacagttcattcatttaaattttacaattcatttgtttctagtctattcacgattgtacgaccatcaccacaatcaagttagaacattttcattacctcagaaagaaaccccttccctttactagcaatttcccattcctccccgccaattccctcccctctgaacaatcactaatctatttctatctatttgccaaataccttaacattttatactctatcctttgaatatgttctccacttttggctttacacagatatggtgacattgttagcctcaccagagggaggcagtgtagattctcagtatggacctgcagggaaaaaagatacaggcagaagtccacagaacactgcctgatgaacacagttctataagacccaataaagtcggcaaagcactgcttgataaacaccgttctgtaagacacaatataggactttaaatcgttgtaacatgaaggactaagaaaggcaaatgaagtaaaggaggaaaaacaaatacttgaaaatactgcatttcttttaaagaatcatgacaacattagacagaggtgaaattgcagcattagcccggttaccagtttgagcaggacactgataatgagcaacatctgggttctatttctggctgtgctctttgacccagtcatttaatcatccagggttattttgcacatctcctgatagtactttaccccagttgatatttgcaatgatgttcaggctgcagtagagaatatgtctcaagtgtgtgtatatatatacacatagaaccccaaaattatgtactggatttttatatgatataattatggcctcatatttcctattcataaaattaaaacagctttatggcaaatacaatgagatcatgaagatgctgtctaaggggaaatgtggcaatttggaatgttcagtagtcaattacagacttttaattttttattcacttagctgtttaattagacaaatcctaacctattccatttctaatggctttccttctaggcaggcagatgagaatccactggatcgctctgcttttagggtgtcttagtcatataacccctgcaagtattttttgttttgctttatttttgttgttttgttttgttttaggtgattttgggctgagatctgtctgggggtgattttttagcacttaatgtatgggctgttgtcatcagagtcaggtgtacccttctgctcttctcaagatttataacagggtctcctgttcactaattcacagagcacagctagagctgcatttattgggtagtgaacatatccctctttagagacggtgaatgctctgttctctcttaatagaaaccagctacagggcatgcaccgtggtggtggcagtgatatgttgaatccctgttcccaggggatgtccgctttctatctgcagctttaatgtttcacttaatatcctctttggctactgagcgcactcctctcccgcagccggcagcgcttggctgctcgacaacttccttcatttctggccatgccgggctgagcaagtgctgcctgtgagcatctgctggggggctttctctgtggcgtttgtctgtgttttttaaattgagaagttgaaggaataccagcctcctttttcctagaacctaaccccctgtatctttcaaatgctttcctggaaacgagcatgctcagagaactgacaaatcattgtccagtgaccgggaggaaatgatcgttgctcttcatttataatgcaaattctgaggtgtctccagaagtgtggtaaacttaaaatgatggctgtggtgagaacgtctctgcagaaagttgtggttttgttgcatcgcttacaaaggatggcagtttcttctcctcggtatcagaagctctgtaaggtaactgagtgattgaaaataaggatctcgggtgtctgacagttctactgtttctcaggctctaaaaactaatctttcaggttcttatcaaggaaagattccctttcttagtaactgattgtgaaagctgttaaagtgaattgcataattacattttgtttaaaaatctaaaacaggttttagttttagtacatagtttcttttgcaattgacacaatcttgtcttctgagatgggctagtgaaatgtttggagaaaatatgatgcaaaactactacattcattaagacctgttacctctctggtactttgcagtatcttaatagtgaatggcacattaatcttatgtaaattttagtaaaattaaaagaagagtgccaaataatctttcagtagatttttaaaaaatgttccattgttttatagctaattgctttttcaattaaaacaattaaaagacattttaaaaaaatgatcagactgaatttcatcataaaacatcccctatattcttaaatctccatatattatagttacacttgaagaatttaatttcacttggatggatgaattaagtagacttactggagacaacttgtttgacagttgcaaatttctaatactacgtcatcccgaacataaaccattcaatcagctgctgtatttttttaagtcagctgttatatgtttgatcatagttttgttttattcaaactatgttgatactatgtcattacttttgtcaaaattagagtgttttgatataaaaggagagagttataatagcaatttttacactaccgcagtactatattcctccttcctatcatatttttagtaccgttctcaagaatgtatcttgttgctctgttagctgcccaaactcatttgtgatcaaaacaactgcctctaagaaaatattatttttctgatgatatacagtatggcatgtccaggcatctagatgatgcttatatggcagcagattgaggtgggaagcagtattccattaactttattatatcacactgtaatttcttacaatttggccaattagatatattgctgtctggaaactttttttttttccggaagttttgggagacagattcaggtagtggggtattcttttcagaaatacttacaagagttttatttgcataagaagttaattaaaacttaatggagcttaattaattcagttacaaagatttgtaaacctagttatttcaatgtgttgtgttttgctctacttcagtggataagtttattctggtaaaacatttatgtttttcatgaaaaggcaattttgataatagataagaaaagctcattcactaattcatgctatttaatttttttaactaccagtatgaatgtataaagctttcttttttttaagagcagggtcattttcctgatccgtttgtgtgtgtactttcacaaaaccaaatatttttctaaagtcgaaggtattaagttagtgcaaaagatgaaacagcagaagtcaagtattggagaaagttgctaattagtttgctaattctaccgcaaataggcacaagttaagtcactgaagtcattggataaattaccatcagaagtgctttttgggaagacttcttgatttataatttcctaaagataccatgaaaatttaaatgtttagaataaatgttacttatttcatttagagaattaaaatttacattatttgctgttgaaatactatcttccacgtattctttcccatatgcaaaattaacaactgcctgattaacgcaatgagaaatgtacaattccagtacattgcagcaggtgtcagtataaggcagtgacataggagattttgcctaaagaactggaaatccagattaggaagcggcacaattactatgaaataaataaactagtaacagataaattttatttgtgtggttatattttgaaaactgatctaagttattgagctatattaatgtaatgaaatgaaaatttagttgtagacttaaatattaacagttgccatctcaaatattgatagaggtagctataccaaccaaaaatacttaattgtattttaattatcaatagtccatgtgtcatacctaaaagtttaaatgggtttgacatttatttgctttaagacactgtaaattcccttcccattaaattgtaaatgctgtcttgactttctccttattcctcccacattctctaaatttagtttcttagaaaaaaatgctttaagtttgtgtatctccataaaaatacagaaacagtctattgtaaatacatgtagagaccaaaatgaatgagaataaaatgtggcataatctgagggaaatttgactatttaaaattcatattggcattttgaaattcagtgtctgaatatttttatcttcttttaaattcctcttgaggatcattctttttatgtattatttgtttagtcttttgttagacttttccctctgtggcagctcgtcttttctgcttattttcatacttctcttgtttgtcagaagatagtgtgtgtgttacacgagtagatacttgtgtagaatattctcattttgtgggttttcttgtatgtttcaaagagaagggaggaatgaaaaaaggcatgtcacagctctcagagttaaaatatactcccctcccacaatctatttacacattcacgtgtattttttgcctttaaaaatatttcttctcggttatacatccaataaaatttgagcaggaagcaaaaacgtaagtgctgcttacttggagatataattagcagcattgaaattgccctgatgacctaaaatcaccctacactggatgctaattttctcagatatggttttgtttgcttagtttctttaaaattttcatgcctataaaataatttttcttttagtagagcacagtagaaaaaaagctgatgtaaatgatttgaaaaataatattgaatttaatttgtttttattgttacgtgattactttggggtgttttatatcatgaagtctttagattagaactgggttatttgtgttaatgttaaatcagaagagatttttgtaagtcctccttatttttttcttagtgccaatttctgtaaaatatttagcaattgagggcatggtaaaaagcagtttcctgtaaagtagattgggatatgaacattatagaaaaatgagaaaaatttaaaaatatttagtgctgtaaattgactccttcgtgactcaagcattttagaaaatgttgatttaagtgatataacttctatttgcttgaatgtatatgtaaatcattttagtttaagtggttttagtcaccccccaaactattctgatcatatttcttcagcaaaaatcttttaaacatctagctgtatatagatgtgtattcatttaaaaattatacatatatgccatggtgaaatcatgtattaaatattagtagtgtataattttgttcttactttctactgttgcctttttgtaccacagttgattctttttctctatgtggtatacacaacacgattttggtgactagtcatttacatacagagtgaaactatggctattcttagcctggccttctagggggcttgagctttcagtgtggtgctgatctcaaagtcttccccggaatactgtgtcttctgtggtattaaagcaactacttctgaatattctgtgaaaaatagaagagaccagaagattccacctgggaagtcacgattgaccagtgatgtctacaaaaggcttgctttgtggctgtgtgtgtgtgttttcatgtgtggacgtggacaacacagaactatgtagttgcttgtagtgctaatgagtaaatagataatgaacatgaaggcacattaatctctcagcaggtttttatgttcactgatgaagtaaggtcacatattatttttcatctacatgtacagctccctgtatttagaggtagttaaggttgagtatgtggttttttagaagacactgaatggagtggtgtattttcgaccggttgaattttgtattttttactctcaaacatttccccacctttttttcacaggagaaccctgctctccttggacaattaaatcctgaagtgatccagggcaatggagatttactttaacatgatctgattgttgagatgtgtgtattttaaggtcaactcttggattccctcagtttctctcaataaccaactcatacatagattgtttgaaccatggagctcagagtcatgaccctctagtctgcaagttagaattcccacttgatcatatgagttgtctcttcttggcttcatgagaaagtcttggttagattagtacagaaactgtgtgaaggttgaggtttaatggagaaaaatggcgtatgtagatgggtttgcctccatctaaccctctctatggatgctgtaggtgtgtttcctgggagctgtatggatacccacacagactactttctctactctgcgtttgtttctgcacttcctagtcaggtcaagattacagacaaaagtgagacgggatcaaggagaaaacacctgcacccctgcctgccactatcagacatgattcctgtggcttccaagagcacaagtgccattttagaaagctcttggacctctgttttgctgtagttccccaagttgatatgtgttgtcaaaattatgtttttaaaaagttatccaattaactaacattttcttaatcagaaaactcatgctatcaatgacttggataaagtcaatataattagctaaaaacagtataattagatctgatgcaatgctttgtcactcacttaaagaataactaatacattctataaggtagcattttaaaattcttttatagccaagatatcattatcattggtgtatgtctagaagtgtaatactagtacaaatccggaacaaatagaaggtccttctgagatggagttgaagtagtattaaggatacggataaaaggtctcttttatttgtagagtattatttgataattgtaacttaaagggttgatgatttgtgttttcctagaggcaaagtttattaaatttcaagtggaaatttcctagctgtaggtactgctagattttaaatgtgcagacatagctccttcctcttactcttaactgtgatcactaccaacttctcttagtatatttggtagtttatttttagttctctaaaataagtaattagtagagttcctaccatagagataaaagaatgtagaaaatgttatgccttggtagctttctcagtttcacaaagcttattcatttctgggcgaggtaaatgagtccaaataattgaaattggaaaggatgtgaagtgcatcagagggttgcttttcatttttcatcttctagtttgttcagttctgtggaactctaaaaagattaatttataacaaagctcacttataaaagcagacagtgccttttagtgcttaataaataataggcttatgtgaaagtatggcttcataaagttaagcaagaattttggaaaaacatcaaatggaagaagatgttgaactgtttgcacaatagacaactattttgtttttattttaacagaattgagagaaaaatggctgactacaacaatagaataactgttagctgttatgatgggaaaatatcttgatactgctagtacagtttccttacatttttagtattttagagtttacaatgtgttttctcatatattacatcattaataaatgtaatattaacaatattatattatcttgtgtccttaagagatagataggaaagaaatttgttttgcaagtcagcaagtgaaggaacatgccagtagttagttgctcagctagtatgcggtgcagcttgtgttcaacatagattttctgcttcaatagccagtgtctctctacctgtaattttagatagagaatttttggaattatattgggataaaatgggtcactcagtatagaagatatagaaagagagattacattaactaagtaatagatattgttttgttctgaattatttccatatgcatttccttgtctaaagaaatttcacctgcagtctcctttaaaacatgagctggagcatgagaacattccatgttcctttaaaacatggaattctggagaatgaggagatgttggaaatcatctgattcaaccatttcattttggacataaggaaacagagatagtctataatggatgttttattgctgacagctttttttttttctttttttgagacagggtctctgtcacacaggctggagtacagtggtgctatcatggctcactgcagccttgacctcctgggctcaagctatcctcccgcctcagcctctcgagtagctgggatcacagctactgtgcatgccaccacaccgggctaatttttttgtattttttttgtggagacagggcctcactatgttgcgccggctggtctcaaactcctgagctcaagcaatctgcctgcctcggccttccaaagttcctgacagttttgagcaggtggctatgtacttgttttcctagaagtttaaaagtaaggaaatatattcttttcaaaactatttcgatgttcgatgttcaagtattggctatataatgttaaggaaataaagatttttaaaaatgagttcattttgcactttgataagaaagatggattgggtcatttccatccatattaaaatagttggttctggtttttgatttataacttaatttggtttgattcttaacagtacaaacgttaaattatgtgttcattgaacccagttctccatacccacatgtagttttttatcattatatttaaaaggacataatagctccctaagaaagaaactgaaaggagtcaactaacttaacagactgagttgtttaaaataagaaatatgtatatatttttaaaaaatttaattcaaagaacatgtattgaatggctgtcatgcatcagagatatgtgctaagcagcataaatgtaaaatgcagtgttgcattttccatgggaaacaaggaagtacaaatatgttgttctgaggaattttagtcgttcacacgagtctagcgtgagactaaattcaaacagttctggctttgccacttaccagttatgtaaccttggcaaatccttccacatctctgtgtttcagttcccttttcagaagatagggttggaattagtctctctctctctctcaatctacacacacacacacacacacacacacacacacgcacatgcacacacacacacacacataaggttgttgtaggagttaaataagttaatattgataaaatggtaaaaacaaagcctggcacatatctgctatgtgggttggctactgttgttaccgttaccactattggtaggattattctcccaccttgattgagtgtggatcaaatgagatgatccacctgacatgcctagcacagtctcatgtctcttggttgtggtgatggcatcataatcttcattatctttatctctgaagtaacccttacatcttaacaaggatgttcacattacagtcgcccagagaatttttccaaaggattcatgcccctgcagactttgactcactggggttcagatgcaccctggtcaccccactgcgaagatgccataaactcctgctttcaacagtgaaggagaaaataaatctttgaaattttccctggggttgttattttctctgagtctcagcttgaggaaatgcaagaaaaaacttcccttgaccagtggggcttgtgatagaagatcctgtaggatgctcctcaatttatgaagccttttctggattatagattaggctctgagatggcccctaaaaatctagttaacccacaaagaaactgatataatgctgattgacataaaacctcatattaaaaagaatcctattccattgccagaaactaaacaaagcaaaggaaagaagtcgtctttactgtgagtgatacaggaggaaaaacaaacatggttgcttagtagaggatggaaagaaatactgagaattttaaatgtacttctggaaagtatacattttaagaattatgctttttggtgccatcagttttgagtctaaactcaccccccaaaatccgaatttagtattcttggtataaatctagtattaattatagccggaaaaaaaaagttcttgattcttggctcaaaaattttataaaatgaagaattttcctttttcttcagggtaaatgttgcaagagttaaagaggtagagaaaagggggaacttttttagttgaaaacattatctgattgtgtatttactctgggttcagaattttaaaagtctagagtgtagctgcacctaccctggcatcctgcaggctagggtggttgtaatatagaagtacgggaaatgcaatttgctctgtagctttattctaggattttatagccttccttttacactttacacatcgtgaatgctttgtaggtcatgaatgctttttttatgtcttatattgtgacttttttaaaacaatgtaaataaaattctattgagtggctgcaccataatttattcagggaacccactatggttaggtaactaggttgttaccaatgttctcatgataaataattctatgatccttatacatcattaagtgcatcctgattatgtccagggtacgttattagaatagcataactggaccaaaaggaccagaacaatgaaaagctttttaaatttttaaatttttttttttattttttagacaagagtcttgctgtcaccaggctggagtgcagtggagtaatctcagctcactgctacttccacctcccaggttcaagtgattctcctgcctcagtctcccaagtagctgggactacaggcgtgcaccaccacttccagctaatttttgtatttttagtagagacggagtttcaccatgttggccatgatagtctcgatctcttgacctcgtgatccccctgcctcagcctcctaaagtgctgggattacaggtgtgagccaccgtgcccagccaatgaaaagcttttgatatttattgccggatttccatcttgcaaggtagcacctgtttacataaccactaccagcttgaatgcctgatttcttgtatcctcacagacaataggcaataccaattaaaaatattttatgaagttgttagatgaaaatcataaccctgttatagaatataaacggaaacctagtcaagttgaatgatttacctgtgtgggatcaaatattctatcccagaactgtctgaatttcagatactgagaacccagtcactgtagtttctaaaatgggatgcaacaaatacagtataataaaactagaagttgtttgaacacagaagaaggggcagtaaaatctgaatttaaaatgtcagagaagtgttagtactaatatggatcttgaggagtagatagaattttagtagagcagaaaactctgcgaatagactgaatgagtaaacttgttaccagaatgcaaagtcttgactgggagctgtccacgttcttggcgcaatgaacaaagaattgaacaaaatgcacaaacaaagcaacaaaagaatgaagcaatgaaagcacagattttttgaaagaaaagtacactccacagagtgggaatgggcttgagcaggtggcccaaaagccctgattgcaatttgctttagggattttattaaactaaaaaaatttggtgacacccctaggtacccttagaggcctccaattggttacaacaccctatatgaaagaaggattggcctgtgaccaatcataggctgaagtgaagccttggcttgcgaccaatcagaggctgaaggtaagctttggcctgcaaccaatcagaggcatttcccatttgtaggctagggtagagggattttgtaaagaggggagtctctggcctcttctcacttgggcatggagagatggggttttccttttggcccaattccaagaactcagccatgacttggccttaggctgcctgtctccagaccctattcttctgcctcagacatggagcacaaaagtatgctgattgtattcagagaacattgggtacttgtccatcataaatgtctacaaagttcattcatttacatttttatattaataaaaaagttgcccttttgattgccagctatgtatgccagatctttttgactgtttccaaaatttagttcattttcaaaggaaaaatatttgtgaatattggagatactcaaacacagacagcatttccaaaaaggaattctaaaaaagaaattgcataatatttgtatctttaaaataaggacataattcttcagaatgcctcttttaaaggaaacagccttcttttggatgtaagtcagtttggtatgggagtgacaaaaatgttatacttttatgttatgacttagttgatgagggaattacacaatatttcaagcaaaaatgaaaaataattcacagtagaagtcagtctgtctagaattaaattatagatttgtagaacattagagtttatggaaattgtagaaatgaccaatttccttattttataaatagggaagcagtgccttaacatctatgtagagctttgctcttaaagtgctttaatatattttttttgtgctgcccaaggtcacacaacccactggtactccatatttaagctcccaggagattactgtagtatctttcactacatcttatgtgcatttatttttgtggaacttgtatttaactttgcctggtactataattagctatttatttctttttgaccttctgaattgtaaactcttgaatttgggactataccttgttttctagttctgtggacaaaacagtatttgtaaatattgaataaataaaccaaatttcaatttttccttagatttaaaaattagtacagtaaagcagaagttctatatactttgactttagtttttttcttttcaaaatagtcttattgatatataattcatgtaaaagtcacttttaaaatgtacaattcagtgcttttggcatgttcacagggttgtgcagccatcactataatctaattttagagcacttttgtctcttcttaaaaagaaatccctcacactcatgagcagtcatttcctatttcttcccaccgcactgccccagccctaggcaaccctgaacactttctctttttaatattagattgacagtaagattttgaaaccatgggattaggtaaaagtcatggaaatataattctaattcattgtgataaatttactactttatcttagagaatttgatagttttgagttttcttagtactatctagggcagcttatgttaaatgctatgtaaatcatatctataaaatatgcacagtaatgtacttttaatagaaattatttagaatacagtacaagtaaagtataatgggaaaaatgctgaatttggaatcacaagatctagatttgattccttacttgtttgatcttatgtaatacccaagtgacatatcagtcctcagttttgtcttctagacagtgggaataatttacattccacatattttagaaagctgttataggaccagtgtattaatgtttatgaatttgctatgcagagctggagtattatggaaatcgaaatattaaatttcctatgaataaaaacaacaaataacaatcaatgacaatatttacctacatttgagtttctcaccatgcactgctgaaatgcgttttgaaaacagtgactaactcaaacttctgtgtgtctcaactgaggcggaagaatgttgaatactaaccaccttaggtctttctgcaatgcagggtcagttcatttttcttctttcctggggcacacagccagcttccatattgaggtacattctctgccagtaaaatcatactatttccaaacaacttagattcaaactggggctacataaaagggtccatgtcttcagagcaggactaatagcccctgagtctgcagcatctagtcaaatgaagtattttgaagtctttattcaatccagaattagggcagccataattttaaaaatctatacattagtaatcttagatgctgggaaggcttgaagaaggaagatctttcttgaatttcaataataattaaacattctggtaaatctcaagtggctttgcataatatgttttttgagagtgtgattttgataggtagtgaataacctgaattaatgaccataatgactgagtgctgttttgcattaattcttgaaacaaaacctagattgcttcattacatggcctgtctttgtggaagatccttatacggtgtggtggtaaagaaaggggaacatttgctctattttgaagtaattgcttctaatggaagcctaatgacctattatgcttatttctaaaagctgagcagtaagcttgataggaagctagagaaagattggagaaattatgtcatataaaccaaaatttcaggaagttgcatgtggttgagaatcagtacctcattagacaacttaataattcaatagtttacttatgccaaatgtcatccttactttaaaagctggagtgatttctagaaatgtgtccacatccttgcgggttagggtacggggcagcttctggccagctgtcgtccaggtgtcttatggtttttccgagtttcatatgcagatcaaacagggcagtgagagtagagttttcctgtgggtattgaaatggtaacatttaataacctatggtgactttggatattctcaagtttagcttcctgattttttcaagatcaggagacagaagcttaaaagagttaatcctataggattaattagtagtggcaatgaccaaactgcgatgatatggatatattccatttttgggtttcatgggactgtactaccaaagtgtattttatatgtttctaatttggactattgacatcaaatgaatcaaatagttggagtaaatgatttacttgaaggtggttccaaaaattaattaatgaaatgtatctctttagataaaacacatatggtaacatcttaacagctgttgagtctggttgtcagtatatgggtatttattttactcttttttcaattattctgtatgcttgaatatttttatgataaaatgtcttataggtaacaacaaccctattctaataaaagcttgtcagattacttgagcccttgcatactttactgttgagcatcataaaagaacttgaaatgcttttgtttttggattcttcatgtttcaacttcagatggtgacaagtgcaaaatggcttaaaagtgccttggctaggcacagtggctcacacctgtaatcccagcactttgggaggccaaggtggacagatcatgaggtcaggagattgagactatcctggctaacatggtgaaaccttgtctctactgaaagtgcaaaaaattagccggatgtggtggcacatgcctgtagtcccagctactggggaggctgaggcaggagaattgcttgaacctgggaggcgaaggttgcagtgaaccgagattgtaccactgcactccagcctgggcaacagagtgagactgtctcaaaaaaaaaaaaaaaaagtgccttaacttacctggcaataaacatttattgagtctgcagctttcattcatttagctcatttacatttaactgaaacacatttaaaaattcattttttccttttgcaaaagctaggcatgcctactataaaagtttgcaacttttcaaagcatgaaatatgtagagttgataccctcatttattatattttactaattcctgtagagatgagcaacaaaattgtcctttatgaaagctgtcattctctaaaattcgatatagtaggaaagttggtgtgtaaccttatttaacaaggcttgcaactgataacttttgttgagacaggcatgggggcccttcttttggtgttgacataatatctttttgtctttcttattcatcaaggttagtagaaagttgtcaagtttctattcttaagctctagaactatcctggtctttatctatgaaagaagcataaactttgtcaaaggaatgatttactcataataagtcaatgtgaagcccattcataactatacctttttgttttgcttttctcatttctctgagtcattacttaaagctggtgctttataatttgacttaatcacatatggtgtgattcttttagcacacatactgttgtttttaaatcattacattttaaacttctttatatctagaatttttacactgccagataacctgaattttcccctgcttatctggtgaaagaatgataggaattacaatgtttgaaacatagggttgttccttatttactgaaaattatatggaacaacatatatcattctggcttccaaggatgaatctgtgaacgaaaagagtcaaactctgtaatatttgaagagatttattccaagccaaatatgagtgaccatggcccatgacacagccccaggagatcctgataacatgtgcccagggtgatcagggtgtagcatggttttatacattttagggagaaaatagacgtccatcaatacgtgtaagatgtacattggtttggtccaaaaaggcgggacaacttgaagtggcttccatgtcgtaggaggattcaaagattttctgattggcagttggttgaaagagttcatctaaagacctggaatcaatcgaagggagtgtctgggttaagataaggggttgcagagaccaaggttcttattattgcagatgaagcctctagttagcaggcttcagagagaatagattgtaaatgtttcttatcagacataaaaacgtaccagactcttaattaattctctcctggatagggaaaaagacctggaaagggaaggggattctctatggaatgtagattttccccagaagagacagctttgcaggggtatttcaaaatatgtcaaagaaatatattttggggtaaaatacttacatttctttcagggcctgctatctgtcatgttgatatcttgttactagagagagtctgttttgtcaatcataaggtcgctgtattaatgttaatgctagtcagctgtgcctgaattccaaagagaggaagttataatgaggcatgtccaaccacccattcccatcacggcctgaactagtgtttcaggtttactttagaatgcccttggcccagaggagggatccattcagttggttgggggccatagaattttacttttggtttccaaatcagaatgaatattgctagactagaaataactcaaaggttgttggagaattttaaaatgtatttatttatttatgacatctagtttgtgctcttgattaattgctcttgattaacctccctcgtctttaaattaaatcaaaattagcaaatatttattgcggtctaggagaaatctcatttaaggcacaaagcactgtgtaaagcagtagaatgttttctttactaataaaggacagaaattgaagaccaggaattaaccagcccatgtatttcctgatatatacctgatttagtacaggtgtatttggggaaatggggtggttggttagggctggaagaaagtgaggaagagtactcaattaagtagttctcttgatattattttatattgaaaaaatctttaagaggttaaacaaataattaaggtaattaacgaagcagtgagggacacactgggttggaggcgggaggttattattctggacatacctttaactgtgaggagtgaaatggatatgtcaactatgctgaaacttgttttttttaaatctctaagttgattttgtaaggtataaaaaatgttttttagaaaaacctctgaatgtcaaagaagtataatgacagcttgaatatgcatatacagcaaatcacttataattttgtttggcaaatgaaaatagatttcattagctttaaaatagcatttacacttttactcttggatatattaaaaagaaagtgcacattttgtaaaatgtagtagaaaggaaggaagaagaaaataaaacttaccagttaaccatactattcagaagggaatattattaatgtcttactttcatttcactcttcttttctgtgtgtacacaggcatacccccatcttatcacacatagctttactgtgctttccagctgtagcatttttacaaattgaaagtttgtggcaaccctctgtgaaacaagtctatcagtgttgtttttccaacagcatgtactttgtgtctctgtgtcacagtttggtaactcttgcaatatttcgaactttttcattattattatatattattttacccagtgatcagtgatctttgatgttactattgtaattgttttgggcacctcaagccacacccatataagatgctgaacttaatcgataaatgttgtgtgtggtctgactgttccatcaacacaccattcccatctcacactttccttgggcctccctattccctgagacataacaatattgaaattagaccagttaatatccttacattggcctccaagtgtttaagtgaaaagaagaattgcacaatgctcactttaaataaaaagctagaaatgattaagcttagcaaggaaggactgtccaaagtcaggataggtcaaaagccaggcaggcctcttgcatccaacagttggccaagttgtgaatgcaaaggaaaagttcttgaaagacatttaaagtgctactccagtgaaaacacaaataataagaaagcaaaatagccttactgttgatagtgagaacattttagtggtctggatagaagatcaaaccagtcacaacatttccttaagccaaagcctaatccagagcaatgccctaactctcttcaattctatgaaggctgagagagttaaggaagctacagaagaaaagtttgaatctagaagaggttggttcatgaagtttaagaacagaaaccatcttcataacacaaaagtacaaataataagcagcaaatgctgatgttgaagctgcagcaagttatccagaagatggagctaagataatagatgaaggtggctacactaaacaacaaattttcaatgtagatgaaacagcagctttcaattagatgtcatctggcactttcatagctagagaggagaagtcagtgcttaacttcgaagcttcaaatgacaagactgtcttgttagtggttaatgcagctggtgactttaatttgaaaccattgctcacctaccattccgaaaatcctagggcccttaagaattatgtgaaatctattctatctgtgctcaataaatggaacaacaaagcctggatgacagcacacctgtttgcagcatgatttaatgaatattttaagctcaatgttgagacctactgctcagaaaaaaagattcttttcaaaatattactgctattgacaatgtactggtcaaccaagagctctgatggagagtaatgctattttcatgcctactaactcagtatccattcttcagcccatggatcgagatgatattttgattttcaagtcttattatttaagaaatgtttcataaagctatagctgctaaagatagtaattcctttgatggatttgggcaaagtaagttgaaaagcttctggaaatgattcactgctctagatgctattaagagcattcttgattaatggcaggaggtcaaaatagtgacatttacaggagtttggaagaagttgattcctaccctcatggatcattttgcggggttcaagagttcagtgaaggaaataactacagctgtggtggaaatggcaagagaagtagaattagaagtggagcctgaggatgggaatgaattgctgcaatctcgtggtaaaacttgaattgttggaaagttgcctctaatggatgagcaaaaaaagtggtttcttgagatggaatctactcctggtgaagatgctatgaacattatggaaatgacaatgacagatttagaatactacacaaacttagtaaagtagtggctttgagaggcttgagaagaacaaatccagttgtgaaacaagttctaatgtggacaaaatgctaccgagacatctttcatgaaaggaagattcaataaatggggcagacaggaagaatcagtgaatggagcagacatcattgctgtcttattttaagaaaatgtcagtcaacccttaactgagcaaccatcaaatcagggcaagaccctctaccaacaaaaaggttatgacttgctgaaggcccagatagacaatcgttagcatttttttttgcaataaaatattttaaaattaaggtatgtacagtaagtccttccttaacattgttgataggttcttggaaactacgactttaagcaaaatgtcatataacaaaaccagttttatcatgagtcaattgatataaagaagagttaaattcctacagcattttttttttatttttcttttgagactgagtttcactctgttgtcaacgaggctggagtgcaggggtacgatcttggctcactgcaacctccgcctcccaggttcaagcaattctcctgcctcagcctgctgactaactgggacttcaggcacgcaccaccagtcccggctgattttttttttttgtatttttagtagagatggggtttcaccatgttggccaggctggtcttaaactcctgacatcatgtgatccacccgccttggcctcctaaagtgctggaattacaggcgtgagccactgtgcccggcctcctacagcatatttctcatcacaaaagatcaccaaacttctaaataaagaccaaaatacttctaaaacattgaattgtaagctatgcatacatttaagaaagactagtaaatacaagtgagatacttatttacccagttttaggtgaatcaatgagtgatgtctgtcatagtggtgggagtagattaataaaggaacaaatgtttgcaaagtgaaaattctcagtatcgcctcctcccaccatgcaattccaaaacaatcacaaacaagcactactcactgaacactgaacactttcagtgcagactccatacagacaggggccctgactggaagcattgttttttctcatcaatattataatgaaagaatgttgaattaaatgacattgaatgaaacaacattattctaggacctgctgtgtattatttttcttagacataatgctattgcacacttaatagagtagtttagtgtaaaatagcttttttatgcactgggaaaccaaaaaaattgtgtgactcatttgctttgttgtggtgatgtggaacgaaacctgcaatgtctctgagatacgcctgtatgcatgtaaagcatctttgcacaaatttagaattgtcttttatagaattccttttgtttttatgaattttttttgtttgattctccctaatagtactttataagcatatttgtatttctttaactattttatgtcatatttttagggcagtggtaaacattctgttgcattttgtgttctggacaaatagctttctgattttgatcttataaggttgcaatgaattttttatgcatatcttttactgtaacaaatgattgtgttttgttaggataggtttctctgtgtatgtgctggatcaaaggttatacattgcgaggtggctttccagaaaggctgtcccaatgtctactcctatagcatatgagaacactcatctcgccatactctgattagccttgaattttataatttttatatctttgttaatttgagcattttatgcatcagtgattacttgtaagaattttttgttatatttattgaccctttgtccatgacaaattgtttatttcctttgaggtggtatacgtgtgtttgatgtttcaacacgtggttaacatctctttgatgttaagaaatgccaattactaggaagcagttctgtcatcgaagtaatgaggtatatttttccctaagtatttgagaacaaaatttcagtctttatcgtaaaaactttcgatatttcatgaaaaaagtagacattccaatgatttattaaaaatacctagtcattgatatatccattagttcctaaaaagaaagcagaagttacaagaatgggcccagcattattaaaataactagtatttttaagggaatttacttttatattttaattaattcagaaatggtctagtcaactcttgacacagcagtggtatatcaatactcagagcctcatatgatttccatcaaataaaatgtttgaattataggggtgtgtttgaaatatgatgctttccagaatatgaattctacctctgcatcctgtctccatttttctgcttccttgtaattccagatccactgggctttaaaattagatactgttttacatttgattatgttactttcgaggtctatgagcccttttcacatctaggcagtagaaacagtaagtcatatctctgagctcgtaaggtaaaccatgcatggccatgtcttacccagcacattgcctacacatgtataaggtatgccatatatgctgtagttatactccgtgtggccttctgaaaagccatataggattatgagagaaaaagaagagtgtgaagtggggcaacttccactcaattatgaatgatgttgcctgaagaaatcaattagctgattttaaggctttaaagaattaaaaattgcatgttgttactatacttcataaaattctaggccgatctgcaagattatgaaactgactttagactaatataatttgtttaaactcaggagctttgtataaatgaattattattattcagctaatggtgtgttctttctatcatgaagaagttgtctttttctgtcatgtgtctccccagtacaatatgtggaatactttgtaattttttttcaactttgaatattaaagtttgatagcataaaaaggccaggcgtggtgactcatgcttgtaatcccagcactttgggaggctgaggaaggtggatcacctgaggtcaggagttcgagaccagcctggccaacatggtgaaacccgatctctactaaaaaatacaaaaattagccgggcatggtggcaggcatctgtaatcccagctactggggaggctgaggcaggagaatcacttgaacgcgggaggcagaggttgcagtgagccgagattgcaccgttgcactccagcctgggtgacaagagcgaaactcggtctcaaaataaataaataaatgaaaaataaacgacaaaaaaaaatcactaaagtttgcaaatattttatctgagcctagtctcatatttatggaagaatccacttctcacgatatatcgttggcttccctgcagctctctgttgctattgagtaaaactctattgccttgaaaaagttattctaattactaatgaacacagatctctctttggaatgtcttggtcattaccccttggatcttaggctaatggtatcacctttgtaccaggtcataggaccttctcagttaatcctattttccatgacagttatatatccaaaacagcacggtacaaaatttttaacaaaattaaatttttcatgcatcaaaattttatagcacatctgccaaaggtttgctatacacagaatcacagccctgatatccagcattggcatataataggtatgcaagagtacttgatgagatgaattaggatagaatagaactaccagtttgctaggcagggcattgataatagaacttcctttgctgtttcattatgaaactccaattccaggtctgttcccactcttatttcattgtgaccgaataacttttccattaccattcagttttgacaagagataacctgtcaattatttgtataaaattacttagaagtgaatcaatattctgtttattgtgtcacctctactttaaaacgctacagtcctatttcttgcagctaatctcagaatctgttaacttcagtgtgggtgccatttttttttttttttggtatttcatgttttgtatctaacaactgaacttaatacttaagtataaagtaagaaatcttcatttcagattttcatagtataaatgcaggctaagtttcctgatatctgggatatttagaaattaagcagaagaaattattttgaggattttatgacagctttttactcttattttaaattctccttatctttctttgtaaatgtttgcatttttgagttactaaaaataattttcaagttttgtacctgtcttagtggcatttatgtccatactgcaaaaactctttcttggaaatttaatatagtatatgttttgtgatttttttcatgtcttaacattttaatttgaggttatttgcttgttataaccaaatggaaatatattctaattgtaccttgtcgacctgaaatgtgacaatgcagtgattggtgatcataaatgaacttagttttattcagtactatttgtaaaacaatgtttgacattgggaagttaaacaactgatctctttgttattttgatgtgatgacatcatcctacacaaaacacaacttcaaatcatatgcagcttatccatgcacagatgtaattaccaatacaaaccaaaagagagagcaagaaagagagcgagctagagggtgtctatgacctataataattagcattttcagtaacaacatctgttgctgacaatattggcagtagcacaggaaaaagcaatcattaaaattagctaatgctcagtttaagtgctacacaatgtactgacattttcaatattttcattagttttgcattttctcattccagtaagtatctgttttcaagtttgcatgaatgccttgtattatattaaaaatgtttctcagaccttctctcaaattgatctgggtcttaaagcagtatttccagtgggtcaaagtagcactgatgcaaactcttagaaatatagtatccaacactctcgaattggattctataaatttgatcttacataatttagatactgaattagaaattctccataacctgcaacacacattttcctaaaatctcattgtcttagctttcttgagtttttatcctggaatttctgtttgaggtgtaagtgccaatattaactttaaaaatttagtgaagtgtaagtcaattagaataattttacaggtgacctgcaattcctcgctcagagagagatctgttacccaggatgcttcaggtgaacgcctgtaaggaggagagaagtgaggggctgtggctccaccacatgatgtccttggcctcattgtacatcctttacccatttatttgctggtttgtaaatatgttaaagtgaaagaagaaaagtaattttctctttaaaggtaaaactcactagtgaatcaacatttgaatcatttactaagatacataaacaaatatggagtctgcaaaattgcttatgagaatcaatgttgagccagaaattatgtttctgcaaatattttgatgagctgaaatattttctatgtatgtcttgttaatcctgtctttaacaaactggatctctgttgaaccctattctgggagatagtgtgtactgtgaaagtgatttctgtggcccagtttggaaaattctgcaaattatgctttcctttggagctgcacgatgcacattatatttttaaggctatgggaagttctgctatttaactttgttcatctcaatattctctaaacatcttctcatgtcaatattttctaaacatcttcttttcttctgaaccaacttttaccatggaaataagtttaggaaatgctctttctgctataccaacatttcactgataatcttgtttgagaaaatttgcaaaaaggaccataggtttcactgggtaaaggctatttgtctgattttttgggcactttgaaactttgatgacattatcctggtgggcttgtacactagacttcatcagtacacttagagatggacactcatcatcatgatcaaaattcaccaaaaacttctgtataaactacagtacattttttcattattttggtagtttcttgtccaaagactgttgtgcccatgaatctgtataacttagaaggtcagagataaactggaagagattgaaacaagaacaaggactgatgaaataaccttgctttagagtgaccttgttttgttttatttgggactgtctcagcattagcattgaaatcctcttgctctgagaaacccctcagtcccagataaagcaggctggtcaatcactctactgccttctaacacaaatcttgtgttccccagatttcattttcatctctccacactaatgtgattgttaattttgtgtgttaacttggttaggccatggtatccggatttttgttcaaactagatgttttatgcagttattttttagagatgagattaacatttaaatcagtcaacttctagtaaagcggattatcctccataatgtgggtgggtctcatccaatcagttgaaggccttaatagaaaaagactgacctcctcagaagaaaagggaatcctactagcagatggcctttggacttgaagagcagctcttccctgggtctccagtctgctgacttattctgcagattttggatttgtcaagcctttgcaatcatgtgagccaatttcctaaaataaatctcatcagcaaggtggtagaatagaagttatcgggcctcattctctgttcccctctctcccagaaattcaactaacaactatcatcaggcaagaataccattgtgaataacccagaacttgagacatccacttgaccacagaactgagaaaagctgtggctgaacaataagcggaacagttttctttgactgtaccacccctcccccaagctgggacagtggcacacacagagaatttccctagacccatggtttctacagggggaaaagtgaattggaggaggatattccatttcctcgccattttgggtccctttgtgggagggagatatgtgaaggacatgaaaaagttcttgtgtggctattttagaaagtacttgagataggttttatctcagacatccacacacgacctctctatgtgctttgctggctgcaatttgtttgggtttgagaagagtaatttcatcttggtatctgcaacttttatactacaaagtaaaaacctatagtagttgcacaaagtataaaaagaaaggattcaaaacatacaaccacagaaaaccagaaaaaccacaaaggaagacagtacagaggaagaaggaaacaaaggatctaaattagaaatcaaattccaaaacggcagtagcaattcttacctatcagtaactgccttgaatgtaaatggattaaattcttcaataaaataaccaagactggctcaatggatggggaaataaagaatagattaaactctctattataaaaagatacagagtagccaaatggattaaagaaaaagtaaggtctaatcacatgttgcctagtagagacttgctttcctaataagcatgtacatagaaagtgaaggggtgaaaaaagatatttcacacacatggaaacccaaggagagccaggggagctatacttatatcagacaaaatagatttaaagtcaaaaaccataaaagatacaaaggaggctatcacataatgataaaaaggtattaattcacagacataattgtaaacgcatatgaatgcaacattagagagcacctaaatatataaagcaattataaaatgacctgaagggatacgtagactgcagtgctaagatagcaagggaccacagcatcccactttgaacagtggacagattatccatacagaaaatcagtatagaaactttggacttgaattgcagtatagaccaaatagacctaacagcacattccattccacagcaacagaatacacgttcttcttaagtgaacataaaataatctccagaatagatcagatgttaggccacaaaacaaaccttagcaaatgtaagagtattgaaatcatatcaagtgttctttcagatcacagtgggataaaaccagaaatcaataacaggagaaatcttggaaaataaacaaatatgtggaaattaaacaatatgctcctaaacagccactgggtcacagaaaaaattagaatgaaattttaaaatgccttcagacaaagaaaaatggaaacacagcataccaaaacttatgggatgcagcaaaattagcagaaagggggaaatttatagcaataaatgcctatatcaagaaagaagaaatatcatgaataaacaatctaatgttacacctcaaggaacaataaaaagaagaacaagctaatctgaaagtgaccagaaggaaggaaagaacaaagatcagagccaaaataaatggaatacagactagaaaaataaaagaaaaatttcaacaaaactaagagattcttttttgaaaaaaaaaaaatcaacagaccattagctagactaaccaagaaaaaaaaaaagacccaaagaagtaaatatcagaaatgaaaaaggagatattacaattgatactcccaaaatacaaaggatcataagaactgaacaattatacagcaactaattgaataacatagaagaaatgaataaatttctagacacacacaacctatcaagattaatcatgaagaaggagaaaacctgaacagaccaataataagtaagaagattgaatcagtaataaaaattctcccaccaaagaaaagcccagaattggatgactcctctactgaaatctaccaaatattaatgaagaactaataccaattctaagcttttctagaaaatcaaagtagacagaatacttccaaactaattttacaaagctagcaatacaaaagctagacaagcccaggcatggtggcttacgcctgtaatcccagcactttgggaggccaaggtgggagaatcacctaaggtcaggagtttgagaccagcctggccaacatggtgaaaccccgtctctactaaaaatacaaaaattagccgggcgtggtggcacttgcctgtaatcctagctacttgagaggctgaagcaggagaatctcttgaaccttggaggcataggttgcagtgagccgagattgcaccattgcactccagcctcggggacaagagcaagactttgtttcaaaaaaaccaaaccaaaccaaaccaaaacaaacaagaaaacaatagggcaatctccataatgaatacaggtgaaaaaaccctcaacaaactattagcaaaccaaattcaggagcacataaaaagagtcatttaccatgatcattgggatttatccccaggatggaaggatggcccaacatatgcaaatcaataaatgtgatacatcacagtaacaaaatgaattacaaaaaccatatgttcatcgcgataaatgcagaaaaagcattagaagcatttgaccaaattcaacaccctttcataataaaaactctcaacatattagctgtagagggaatgtacctcaacacagtaaaggatgtatagacaaacatttagctaacatcattcccagtggtaaaaagttgaaagcttttcctctaagatcaggggcaaggcagggatgcccactatcacaacttctgttcagcatagtactggaagtcctagccagagcgattagggaagggaaagaaattaaaggcattcttacaggaatggaagaaatgaaattgtctccatttgcagatgtcatgatcttctgtatagaaaaccctaatgattccactaaaaaacttctaggactgattaataaagttgcaggatacaacatcaacatataaaaatcagcagtgttttcatatacctatgacaaattatccaaatagaaaattaagtaaacaatcccatttacagtagcaacaacaacaaaatacttaggtataaatttaaataaagaggtaaatgactgtgtactgacaactataaaacgctggtgaagaaaaattaaagaaaacacaaataaatggaaagatattctgtgttaatggattagaagacttcatattgtgaaaatttccatactacccaatgtaatttacatatttaacacaatctttgttaaaattccagtgtcattttttacagaaatagaaaataatcctcaaatttgtatgaatccacaaatgattctaaatagctaaaacaaatctggagcaagcaaacaaacaaaaaacaaagctggaagcctaacattccttggttataaaacatgttataaagagactgtaatcagaacagcatagtactgtcataaaatcggcatgcaattccacgttgatccatggaacaagatagaaaacccacaaataaacccacacatttatagtcaactgatttttgacaaaggtgccaggaacacacaatgggtaaaggacagtttcttcaatgcattatgttggaaaaactggatatccacatgtaaaagaatgaaagtagacccctatcttacaccataggcaaaaatcaacttcaaatggattaaagacttaaatataagacctgaaactgtaaaattcctagaagaaaacatggggaaaaagtttcctgacattggttaaggcaatgatttttttaatatggccgttcaccagcaaaaataggcaaatgggattgaatcaaactaaaaagcttctgcacagcaaaggcagcaatcaaagtggagagataacctacagaaggggagagaatatttgcaaaccgtacatctgataaggggttaacagccaatatatataagcactcaactcagcaagaaaacaaataaactgatttaaaaattgacaaagtacctgaacagacatttcccaaaagtagatacagaaatgatcatcaggtacaggaaaaaatgcttagcatcactaattacttgggaaatgcaaagcaaaaccacaatgagatattacctcaccccagttagaatggctgttgtcaaaaacatgaaagataactggtgttggagaagatacagagaaaaggaaaagaactcatatattgtgagtgggaatgtaaattagtatagccattatgtaaaatggtatgaaggttcttaaaaaggtaaaaatagaaatacatacaaccaagtaatcccacttctgggtctttatatccaaagaaactgcaatcagtgttaaagggatatttgcactctcacgttcattgtagcattattcacaatagccaagatatggaaacaacaacaaaacatccattaacagatgaatggataaagaaaatgtggtatatctccataatggtatactattcatcctttacaaatggtgtaaatcctgtcatttgtgatagcataaatgagcctggaagtcattatgtaaagagattaaagtcctttgtaaagaatgataaatactgcctgatatcacttatctatggaatctaatacatttgaattaatagaagtagacagtagaactatggttatcagaagcttggtgggtgagggagggagagaaggaaggggaaattgttgatcaaaggctacaaagtttcagatagataagaggatttatggcaaaccaaggagagacatgaatgaaaagagtggctaccaaccaaatcaacaataatgtgttatgtatttcaaaatttctaagagaataaatttgagatgtcttatcaagaaatgacaggtaagcaaggagatgaatcggttaattagtttgattgatcatgccgtgttgtatccatgtatcacattgtatcccataaatgtgtaccactatggtttttcaattacaaaacaaaaacaaaaacactaaatgcatgttgtatgatttcattcatatcacattttagaaaggcaaaattatggttatggaaagcagttcaattgttgacaggggcttgagaattgactacaaagggacatgaaaggactttctagagtgttaaaaatgacctatatgctgattgtggtggtggtcccgctactgtatacatttgccacgactcatcagattgtgtacttaaaattttattttaaattaattatacttcaataaagctgacaagaaacccctccccaaagaaaactgaggaaggaacttataaaaaatagtgatatgattctcttgtattttgtaaaattaaatatatatacacgcattaaaatgtgttctaatgcatgtatgcaaacatatatattttcaaaacactattttattttatcttttcccatactaaaagtactcatcagattgtcattgatttcttctttcctcctctcacctgtgactgtgggaaagaatgattctctcattatgagtcagagccttttttttccttttctgaatttatagtaacgactcaacactagaagtctcagcagcttggtttgcctgtcattaattttaccaatggttgcaggtgtagcctgaaagaataggtataatgctggtatgtaatgctttctcctgcttctaaaaggtgctgtggggaggtgttgaatgagattcatggtggtaaacaagaatataaattcaaatattatcttaaaacagaaacagtaaagcatggagaaaagatccagctgattctagaaagagcaaatgaagaagaaacaagagtgaaaagagtggctaccaaatcataggaaaaaatacaggagtcccaggaccttcccccaaggacagattcctgggaaggtttccagtgagtttttgaacctaaccgctaggttaaatacatccctttagtctcagctcatcttcctaattaagtacaaattcgaaaataattgtaaggttttctcagatatgtgatggattacatgtcagttgcatcacattcttcaagcaaagtaaatgaatgaatgaacaagggaatgaataaacaaaaggagctagatattccctgaacattgcaagcttcctttggcctgtggtgcttccattaccagcagcacttcagttagaatgatccctatgaattaacttgtaaatgaggaggtcaaatgtgcttttgcacagtggtgttaaatatgtggatgaataaattctttcttgtactttgggctatggagtctatgtagggttagaaatataggctttttctaagttgttctcctcttaggaaagttatttacatgataattaaagaagtttagaagcaattcctgaccttaaacaaagataacgtgtagctttcaatatatgaacctttaagaaaccctcaacatttcaaaggcacaaattagagcattagtctaaataacaaacccccctctttcccgatattcatttatagggtataaaatacttgacagaaaagttgagatacagaaaagatgctaaatttcatgaaacattgttatgaatcaattacagacattttagtttatttaaaacagtttgtttgtaactgttcagaaatacttacattgaaagaatgtccacaaagcactagatctgtagtttcagtggagagtcagtattatatattataatattataaaatgacacacttctcaatggcgcagcttcctagaagtcatttcctatattacttggccataatcactattaattcagtttcataaatgattggacatgatcttttaattctgagccttcataaatatgatttcctctgtctgtttagactgttttctttaggagtccacttgtctaacttcagttgccatctcaggcattacttctcctgggaagcctatctcactgcctttccctttagacacctggactaggagtttctctgtgctcatatgataccctttaggactttttcattcagttagtttctgaatcctttagctcaaaccagaacactctaagtcacgcttgattgctcattttttcacctaccctatgtattcctatttgttgtacctcagctagcacattggtctctgcctccaaagtatattcttaatcatctgtctctcttcattttcatggttaatccatcaaagccatgccattttatccagacaaatggagtagccatctaagtgttgtttttgcttctagtatttgaagcaaatacataacataagttatggaagcaaatacataacatgacataaaccaagtcatgtcagttctctgcttgaaacaacccaaaggctcccattacacttataataaaatctaaaccccttacgctgccctaccaggtcctacatgatcaggcagggccatttgtctctctgacattttaaaaatttttaaccatcactcctgtcccctggcccactgtatttggctcttttctcttccttgtacataccaagccttcctaccacaggacctttgcactagtgtctcattatcttgaaacagttttcactgatctccatgttgtaactccttctcggcagtagcattggaccctaaggatgtacaatgttttatactgtgtttaattcagttactctgaattagataagcagtgggccttaacagcatacaggtgaaatcttgaataatttaacaagtattgattctgaactattgttaaataattcacacagttaattataattaccattattgcttaagaactacttaataaagcagggtttgtggctagaatttaaagacaatttgttggatacctttaatctatagaaatgtataataaagatgagagaaataactgttagcgaatcctttggattaagctacaagccattataatttgcagtagcaagccttgtaatgctaatgacaaatataagtcagtttgtttcctatgcactcatggatcagtggttacttcggaaatttgtgttttgtctgatagttttttttttttttgaaaagcccttttttaaaaaagattttaaaaataaaggtgaatttcacacaatctaaaattaaccaaagtgaacatctttggtagccttttactttgatttttatgtatattattatagttatttaatagcctctaaaaatacccagaatggcttaccacttccttttcaagaaaagaattctttagtctccccaaatcttatgcccactggctcattgtacagtctctctgaattctatgccagttccgctcttataaattgtgagcctgtgtttcttgtgccaggttctattccaggcgcaggtgggcatcagtgcagccagcccgccatagcgttctaccacctggtgtagaaatctgttaggaatacgggaagactatttgtggcctttattgactatcctttgcctttgaatccgtgagcagaaatctattattgaataaagtcccatgaattcaattcaaaccctgcattattgattttcaagcagaacttgtgccataatactgttatactgtagttggttacattcagggtcaatagaaatgatttcttgagatatcagtggataattttcattgggattagtcaggaatgtgttctgtcttccatctgtctgcacattgtgagttcttaatgatttgatgcctcttttggctgaattatatccaccataccatcactctggtgagcaaaaagagaagcattctgtattatacaaatgatatgtttagaaacataactaagaatgtttttaatcacccactggcctacccatccaatccctgctatcaattaactattctgaaaccatcatcatgatttcacatgatatttcctctatttaaagtagtgtaactgtaagtcacctcaatttggtatccaggtttgcgtttggcaataaattcctcttggcagcttcagcaagttatatttcttaatactggatctgctgaggttatgtttatggagaccagaactatgagtattgatttatgtttgctttgaacatcttccagtctaaagtcattgtggctatgctttgttgatgaactgcaggagattgcccttgggattgcattgagtgaacttggcccctgtacttcttcagatcatttcaggagagttgaggtggacttctctttaggaaggtgttcttttttttcagctcttcgtaaatgtccatcagtcttgctctgcatagccaagctgttgaagcatgatcaccttgcattgaataagctgcacagagctactgttctaccggggagtatgcttgcaggggagcataatctcaaatttactgctacccactcggtaccatgcagagcttgcttgggagttcagggaggattgtttgaaatgggcagttcaactattcttccagataatcaaaaaagccatccctcgatttagcagaacattgagaaatcctttcctttgactgtattgtattgtttctctaaaagcttgctttgattaaattgcacctgggtgtttaaaaagagaatacatgtgagtgttaatgcacttacattgtaattcagatggatcttttttgcaaactaaattaaaaggtacagagaccattcagagaagccatctgtcactatttgaaagttataattagggtcataatttttaatgtcattgtcatacattggaaaatggaagctttgggatatccactggaggttttacctctcctctacaatgccacactaaatttggaaatttattcagctgaaattttttcaagtttaaatattatatttactttttattgatgatactactaagtacagtgcttccttgagtgtattccttaataaatatttcttcaatttgtttgaatattttgccacaaaccagtctttagcttgacatttgaatttaatcttccatgtattaactaggcatgtacaaaacacatgcttatttattaggcatgcactaactgtactttggttacaggctaaaagactttagagttggttttcaaaatctatttgcttcaaagaatcttagtagtcagtagttaaccaagaaactttaaaaaaatgagccccattttaattttatttacccatctagctattcatttatttgacagatatttatttttgtgcctactatgtacttggcacaatgataaccttttcccagttcttttactctgttattattgtttaaagtttggaaattaaaatactctatattatatgctatattagttaaagctaagcatggtgctgtatcattaaacacaacaataacagccaaataaagttagaacacaccaaatatgttttatttacatgcaaatatttaaaatgatatatttaggtatagtatttaacaacttttatgttcctcacatcagaatttatattctttcaacaagagcctttttaaagataaggattaaattgaccatgcataactttgatgtgattaagctatttgatcttttaaatagaatcattcgattttgctgacacttagcaatagcccattattttagatataatttctttgtgatcatagtaagtttagagtcatagatgactccctcgaggtcttagtagcatattatgaatttggtatctatgtgattaaataagcacaacaaaattcatatcaaattggtcgataaacacatttttaatattgtgccagactatcattattaatttttaaatcaatatgtagtagtatgaccacaatgtcatattcattagtaaagtacagctgttttttatgccatcaggattatttggcatttaagcagtgccttctactttaaatgatgccattatcctttgaggactctgcctatcaatttggtcagtctagaaatgcaactcattatagaatgaagctgaatagttactgaagcagaatacaactttacaacctcttaaaccagaatatgggagaagcccaatttacctttaaaacttttgggtgtctacacagaaaaaggtgttaatgtgccttgtgaaatttctcaatggtgaatacattttttattctatgtgatttatttctggagatgtacattaatctttgtgaagttgctgtggaatttggttgggtttgtcaaaatgtgtcaaaaatgtgaaatatcccagttctactaattttctaacacaaagttagatggacaaagttagatgacaaagaagaagacaaagttagatggactccataggagagaagaggacttaaaaatgatgccttaatatctgcccccattttgaaagtgaaattttgcggataatgtttctattgcagttgagttagaaataaggaagcattttaaaaccaggtggatgattcaacactagaccacccaggaagggcattccttctgtaataggaaaggtctttaaacctggagtaccacatcacatgtaatgtgtaagtgtggatatttctggagctctcccagatatccagtgtgtctgcatgaatgtgtctctctttatcttttttgttaaggatgcaaatggagagttatatattggattcctcttgcatcactttagatgccttctgtttatattgagcctggcttatttggagttagcttgtaaatttaatgagatcattgtgatggccatgattgcagaatggaaaatgtcactactatgtgccagtttgcttaaatcatttttaagtacccacctgtgctgctaaactctccatttgcattttattggctactatgtttttgctccagagcgggttcctttaactctgatgcctgggtaaattaatcggggtgtgcatgccattgcccttttagcttctgctcctgttctaataaaggctccatctgcttaattggtagacttacaggcctttcttatttcaaaaaatcactttgaaaaaaagcatagcttctcaagggaaagaagaaccagaactcttgaaaaatgtattatttgggagatgttaaatttctgccatcactgtgctgagatgtatgtagtcaatgagaaacagcatccaagataatactggttttcttactactttttttccatctcttgtacatctctatgtctgtatttcatgaaaacctaccttctctaataaaggtgtggtgagctggggacaagacaactctggggatttacctgttatagacaaactctttactttttttctttttgatctggctgccttcttggtgatattactatgagaatgaggagggaattaaggattattgtaaagtgaaatagcagctttgaggtctgaaacactgagggagaagaaggaaaagaagagacatggtaaggattctaaggaggcctgaagatatctgggattcccattctttttgtccacagcatacttaggttggtcaggtgtaagtgaggagagcttgcatagtaagagcagctccagtgtggtattagtagggttaatgattgagtgtgtgatttacagtattggatctaagggtatcatgaagtcagactgtaaccttggacaaactagttaacctctttgggccccagtctctccatctacaaaatgagagtaattaatggtggtattacctcttagggttgttgtcaagattaaatgagctattacaggtaaagtgcttagaaaaacgcctatttgtaatattcatttttactaataactgttattaggagtgggaatagcaatttcagtgagttataaaacattgattatgaaccattttagagaacgatagttgttttattgctaatgtgaacaaaccatactgtatatgaaactttttatggttctccagagaaaccatgtatttttttctgactttgtacctatccttttgcttggatgcctttcttctagaaagttttactgatccttcagggcccatatcaaatgtatcttatcagtgaattgtctctcatccctttcagacagaatgagtttacgccctatcttgggctcccatagcacttatctcgctatgatgcaattctcttctcagatttgtatattctctccttgatggcaatgcagagtcttctcatagtgttaataataacatatgtagcctgtgtatgtgaaacaggtggatgttgctgatacttaattaggaaaggtatagtgattctcatcgtgttcacaagtcagactctccttatacctcaatcactgccgtatcttttaccttgcatatgagacccccagtataagagtgtaataactatctgattcatttgctagtaatgctgaagggaattgttaagctgatctgtttggtttatggaaaagatgtttattcttcctacgccttctcttttttctcctttgcctcctccttttgtccttttccacctcctcttcctccttgtcctcctttttcttccttctctctccctcttctcctttttttggttataattagtttatttaaagctcttgcttatttttgctcatccttaatataaatagatcttcattgtattcgtgacatgttttatcacattcttcatgaaattttaataaacagttgaatattttctattatttatacatatgtgtaatattactcttctcaaatataccattgaatgagtgttttatcttacaatagatggtatccatttttttttgttgtttttttttttttttttttttggagacggagtcttgctgtgtcgtccaggctggagtacacgatcttggctcactgccacctccgcctcccaggttcatgcaattaattctcctgcctcagccacccaagtagctgggattacaggcatatgccaccatacctggctaatttttgtatttttattagagatggggttttaccatgttggccaggctggtatctaactcctgaccgcaagtgatctgcctgccttggcctcctgaagtgctgggattacaggtgtgagccactgtgccaggctggatggtatcttctaatcaagaaaagatataagtatttttatgacatcaaatttaagaataatagccagttatatatttgtgggatcatgtgataagaaaaatatattggtttactattttagatggaataataatgtgtcttttctgatatctttacaagaatgttagaaatcatctgtattgtaatgttgttttaccttatccaaggggaaataaagcatgaacatttataggcttttatttataaatggacttttaaaatatgttttctcacaaagaggaaatttagctctagaaaacaggaaaggattgtaggaactcccatctgcattggaaagtgactgtcactctcgtattggacaatgattgttgcagatgatacctgtttcattctggatcacctttgtttttaaaatgagacataactaattaacagaagagcaagattattggcaactccattaatattagtatagagacagtgctagcaacatggcattttaaagaattacagtggcagttctcccaatcagccagatttcttccagaaaattataaaggaatctcctagataaacttattttcccactggtgttactttatcagcctaagtagtagctctgtaaatagaggactgaacacttgagtttgggtcctgattttgtaattagctgtgtgaattggatcaagtcgtttagattctctgggcctcaatttcttcatctgtaatatgagaaaggtcgaaataattgatttagcaatatattttatcaatcagaaatattagtgatgtcagtgaagcttgtgtatataaattcattttttcaatcatttaaggaacttagatataaaatacacctttaattcacctttggaaattttttacaaagtgttttatttgcaaatgacagtgatagtaagagttaatgtttaaggctattttgtaaatgactttaaatgattctaagtacttgttactcttaactacgctgtttcattcatacattgaaatagatcccctttggaacactggggaagattgaagattgcttttaatttcattatggcacacagaatttagtgaagaaaaatggtagtcctctttcagatagattactaagtcagctgtttggaagtcttggtgtaaaaatgtcttagagctttgcaagttacagagatagaaaatgtatttaattttaatatttctaattcactatttgctttgttagtatttagatttcagtgcttaaaaaattattcacgggattttttcccttcattcaacaacaggttctatagcacatcttgggaaaattatcctgcattggtaggggactgaaagacaggaagatgaaaaatacatgatacctttaataatttttgaattttgaattttggaattttagagggcagataaaactatatctctggggcaataaaagaagacaagtagaagaaagtaatcattgagagagaggaacaaagtcttacagtaattcagatttgggagattatttctatttgggaaaattggccaccaggtagatgttttatgctgggttcctaaaggtagaaatggtgggaaagaaagaaaatgacattgagggcagaggggacagcttgattagtggcttgggaatgggatgaagccagtgttgccaagtagtgtctgttaaaaggagcatattgggaaaatgaggacagaaaggtaaaattaggtcagataatacaggattttgagttcttgtcaaagaatatgaacttgagtctagatttgagtatattactgaaggtttttgagcaagggagggcattactgtgctttagaaagattaatctggccacaatttataatgtaatacagaaaagtaataggtggaaagaagagggagaccaggcacgacgacagtaagagcttagacaagagtcagccaacaaccgaagaatggaaatgtcactgaaaatggaaaagcagaagtagatgtgggcagtttgaattggtagaaaatagccactgatacctggttatcatgggtgtgcgagaggggagggaacatttggagatacttccaaaatttcagttcagaagatcagaagggtggccgggggccattaccaggaagagtgaagtgagggtaaggttgactggggctgggcagaaggggcaatgggaaggagatgaggagttttcggcttcattgacatcctggcagctaagtcagctctccagctagaaatgtgcagcaggcagtggtgatacagtactaagataggataggaagtcaggtctttacgagagcatttcagtaaatagccttaggaacttagattaaaaatcaatgcttgatgaggcagtgagtctagatcgtttttgacagtgaaatcaaataccatgaatacgttgagggagtaatgagacagagatttctttttagaaaagagagcggaatgtgttttctctgagggcagagtcagaagagaggacaagatgaccattataacagaggaaaatagtgcttctgaaattccatttcactttccacagcagtggctaaaattgaaattaaggcactctaatggctactaacattgaattattggattggcaataaaggccctaatgaagtactttcattaggaagaaaatatccacacgtctggaagaaatagtgtgatgccccctgtaaagaaaccagtgaatgtaacgtttcaaatatggagcagccacagcagacttctgtaattctaggtcaacaatgaattaatagaatcagtttcttgttaaaataactgtcttttgccttcatcaatattttagatacccttactggctacctgtcttatggaaagctatgtaattatactattttgagttggatttttatggtttatgctttccatggaaatttgatgggataatctgtttgtgaggtatttatctgcatatttgattccttaacttacctgcgacttcttgactttgttggttttcagaattaaaaacttgaaagaattttgtttattttggcatgtaaagaatactggtctaaaatcacaaccattagaattcatttagatttttcaaaggaagtggttgaaaagccggaggactgagataaattggtgccatgttcagtgagaagctggcaaatttatgaaggaatgtgctaatgcaaatacttatgaattgatttgctctacatattttccctagggccccttagtcctctattacttattagaatctttaccttctgtaccacagaagtaaacctaaagcacagccttactaagattgtttttgctttcatggggccagttgaatatatttcatcttccttttatgtgacaaaaataattgagaaacatcaaatgatgtttaattgttttgaaaacataaacaaaactggagattttataaagccttgttctaagcttgaaaagaaggaaaaaaaatcagtttctggctgaaaagtttctgttgacactggaccgatcaaacagttttctttcagacaatatttctatagctgtatcacagaaattaggggctgacagtgaccagtagtttattttcattgcctcatactttcaaagaaagcaaatatggacttgtatagttattaattaaaaatatgttaagcagtgatgggtgtttatttaaagaattcatgcaaatcttgatttacatttttaaactagtctattatctctcaccttttcagtttgtttaccatggtactgcaaaaattatttcaacaaacatctgaaaaactctccttatcacagggtcagtaataaatagtttgttatcccaagcatggctttcagagacgtctgcaggttttctgggcacaaagtatcactccaatctcctttaaatcagtttccctctcgcaactggtcaagggccagactagagaagaacccaaatgacattccgacctcaaacgtgaatccgctttcctccccgcctttctgcatttctccaattctactccaccttcatgagttagaaataattcctcttttaaggcagaaaaatcggtagatttggttacagtgggtttgcacatgtccacagctgcctacaggccactcagtttcccccaacactgagattgctgcctctgtagcaagtttgtgttgtggcttttcttttttcttttgagacggagtctcgctctgtcgcccaggctagagatgcagtggcacaatttcggctcgctgcaacctctgcctcccaggttcaagcaattctcctgtctcagcctcccgagtagctgggactacaggcaagcgccaccacgcccacctaatttttgtacttttagtagagatggcgtttcaccgtgttggccagaatggtctcgatctcttgaccttgtgatccacctggtgttgtggcttttcttatacacaaatcacagtctgcgtttgtgttacctgcatgtctcttttaggcatttcagtttgcagcctctggtttatatcttatgtctttgtagatcattgagaaataagatttgatatatacaaacaaaacactgacctagttttaggccccattcagtaaccttttgccctacctgtgtgtgtgtgtgcactacgcggcagatggggggttagggggctggggaggagcatggcacagtgggaggatgaatgggataggagggtggggtggggtagggttgggggtagagttgtctccaagaggaagatgttgggtacagttgtgctttgcacaagggcattacatctaaatggtgtcattcccattgtaaaggccaaagcattgtcaaagggagtaatagctgttacattcatttatcggtttactttctgtttcttcatgtgattcagataagaggcgtttttaataatattgataacccttatctttctgtctttgaattcattgctctattttgtaactctgttaatatgatctttttaaaaactatggtgaaatatacaaaatatggcattttaaccattttaagtgtacaaatcagtggcattagaaacatttacagtggtgcaactatcaccattagccatctctggaatttttttattatctcaaacggaaactctgttcccattaaacagtaattccccacttcctccttccctccaatccctggtaatggccactctactttctgtacctgagaatttgactactcttaccttatacaagtggaattatacaatatttgtctttttgtgactggcttatttcattagcataatgtcctgaaggttcatccaggttgtagcacatttctgcatttccttctgtgtttttttttttttttttttttgaggtggagtctcgctctgtcacccaggctagagtgcagtggcatgatctcagcttactgcaacgtccgtctcccgggttcaagcgattctcctgcctcagcctcctgagtagctgggattatgggtgtacaacaccactcccggctaattttttgtagttttagtagagacggggtttcaccatgtcggtcaggctggtctcgaactcctgacctcgtgatccacccgcctcggcctcccaaagtgctgggattacaggcgtgagtcaccttgcctggccaattttcttcttttttaaggctaattattatgcatatatcacattttgcttatctctttatcatctatgggtacttgggttttgacttcttggctattgtgaataatgctgctatgaacattggtgtacaagtatccgttttagtctctgctttcatttctttggggtctatataaacatgacgttttaatcagatattttattcacctctcaaagctcttgttccagtgttcacttcctttgaaaaatctgtatgaatatagtattcttttattattgtactcctgagaggagggtgttagccccttttttttgaaatgtgtgcagaactccagtgcttaaaacttccaccagaaaccattggtttctatcccacaagaattccactgaaatgcttctctttggaagccctactgagctgtttaaactgtgtttctttagaacttccaacattttcagcttttccttgactttttctctaatagacatgctttagttaaagctccttcattctgagttgttctgtgaactagatttcatggtttactaactcatatcctaaatagaatcatccaaaagaacgcatagaaacattctgttgattccattttggttggtatgtgactattaagggttcttacagtatggtgaatctcagattcctcagggggctccctgaggctgaggatgatagatctgacgattcacaactctcatctctttgggatacattggtcattgttacagagttaaactgcccgggcagataggaggttctggagttgagggctggtttaactgatcagggcatttaacctgtgtggcattggacctgtaaaatatgacaaatctttgggctggaggaataaggttctgcaactgttaaatttgattaatgattaccctgtgtatggaaaattgattattacattggtagctctctttatgaaattttcttttattctgagcatggccaatagcagtacttatccacattcttgaaaatctttccctttgactgtgacatacaaatcttcattgcttaccttgaatcttaatatcatgcgtgagcaaagtgttagcatatttgcttatttgctcttacttatttttcagaaggtgctacatagtttaaaaaaaaaaagcaaaaaggatgtgtagtaaaaaatctagtgtactgcgtcctaaatgacgcatcatgaccatagactgtcaccgcccttgcaagaggcagccaccgatgccagtttcttgtgtgctcttccagagatacttgctgtattgtcttttattttaaagtgtggcatacatacaggaaagtatgtaaaacatacatggacagcatgaagaatcataattaaaacaatcactattccaagttattgctgatccttagaagctgtctgtgcctccttgatcagatcccccttcttctctcaaaaagtaacctctattctgagtcttgtgattccatgtccagcaaggaagcagggatgttgcatcctaaatgcctaagtgtttaagtctagagactaattcctttaagcattgttggattgttcctggtgcttttgaactccaatgtagatgttgtcatgtaatcactgtgctcctcatctgagctgaaactttgcttctgctttagccatggcatgatttagatatgtgaaagataattccatctcctttgtaatttaatttatttgtgtcattttaggcatattgcatacctgctaatgtagaatggagatctagaatatggaagacagtttaaaacattttaaagcattcaaatgtggcattctggccgggcgtagtggctcacgcctgtaatcccagcactttgggaggctgaagcaggcggatcatgaggtcaggagattgagaccatcctggctaacatggtgaaaccccatctctactaaaaatacaaaaaaaaattagccaggcgtggtggtgggtgcctgtagtcccagctactcgggaggctgaggcaggagaatggcatgaacccaggaggcggagcttgcagtgagccgagatctcgccactgcactccagcctgggtgacagagcgagactccatctcaaaaaataaataaaaaatgaagtggcattctgattgggagttactaagcatatatattataggaaggattaacactcaaaaggagagcttagtcttgttaattttcatgctttgctgagggcctgtgtattagcctgttctcaccctgctaataaagacatacctgacactgggtgatttataaaggaaagaggtttaattaactcacagttccacatggctggggaggcctcacaatcgtggtggaaggcaaaggaggagcaaagtcacgtcttgcatggcggtgggccagagagtgtgtgaggggaactccccttcataaaaccatcagatctcgtgagacttattcactattatgagagcagcatgggaaaaacctttccccctgattcagttacctcccacaatacgtggggattattacaattcaaggtgagatttggatggggacacagagccaaaccatatcatcctgatacaaaacaggtcattaataaatatttattgaatagaattgagctggagagtttgttatatgcatatttaagttactctgcataccattaatatgtttcctcggtttgtagtcctgaagattaggcttgagttcagtatttatctgcttatgtgtcctgtgctgcaactgtcaccctccttgtccctcattcagccctgctctttcacaataaccaccccaagaagacttttcagatttttttttcatctgcatgtaaaaaaaagaagaagaaagaagatacttttattattttggttttggttcttctctcttccctgctttgccttcccttcatacatgcagtggtattagcggtcatgtcccctgaccttggttgaggcaaagcagagggtgtcatatcagttgcagtggaaagatccttctctgtccttgtctgtagctgaacctgctaagtgatattcccttctagtatgaggatggagtacaagtttttgaggttgcattgctgaaggtaaaaccaaaagagagagagagagaaagagagagtgagtgtgtgtgtgtgagagagagaggtgtgtgtgtgtgtgtgtgtgtgtgtgtgtgtgtaactattcttttgaagatgacttggaactattcctaagtaacctcctgtctggcattcactaatttcacctggccaactccagcaatgctgatcttaggatatcttattgtatagcttatattccaaatattggaggaaagagagggagtttggaaagaagttttagtttagagagctcttaaagtactcttggctcatcattctttaaattccaaaaatgactaatttgtggggatacataattaaggaagaaaaggttttgtgagggaaaggagtagcagggagtgctgagagcttggcgtatgtattggaaaattgtggtaacttaacaggtaatcaaggatgttgagagaggtgcttgtcatcatttcaaaagagcgtagaatattttatttcattttgtctactgtggatcggttctcctctcatttacttcttttcacatttcatatttgggagggctttgggctctatcttctatttccttctattaaaaaaagttttataagttattccacttggcattcggaacacaataatgtcatacttcactgaggcatactaatgctctggaaagaaagaaaaagaaggaaaattaatttagagggaatggaggctaaattttccatggtgaagaaattctgaccttttctgagttatcgtaaaagactgacattgctaccctttggatgttaagaaaaagtctttcagataccttggcttgtaagggacctgggaagcgccagggtccatcaaaaatgtaaagacatttattagaacatgcatatccgaaagctttctgaattctgtggggaccatctagcttttacatgatcttgagggaaccaaagttgtactgagaaaacccagtttcctcttaattccatcctatgtgaaaacaacttaagtctcaactgcactaagttatgaaaatggatcctctttttttaacatttggtttttggttattcatattgtctatattctgttctataattgtatccaagtgttaaaatatattttataaatatactgacactgaaaaagaaatcaaaagctgagaaacgtttgtgaatatggctggagagtctcagtaagatgggggacatctcctcaaattgaagatctgggaagtaagtaatagaaacttacagacagattgaggtgcagttttttttctacttttttttcctgaaaatttcagaaatatgagaagtgaaataatagcaaacatgactcagacctttataaattgtctttcttgacagcagagatgtacaattttgtaaaatattgtcctcagtcttgaactgcagaaactcctttctctgatacctgcggtcttatttaatttttacatcttaacagcaagagcatacccgtgatttgttttcacaaatgttagaaatactgtgtaagaatagacttatttttatattgtaaacttttactttttttttttttttgagactgagttttgctcttgttgcctaggctggagtgcaatggcaagatcttggctcactgcaacctccgcctcccgggttcaagcgattctcctgcctcattctctcaagtagctgggattataggcatgcaccaccatgcctggctaattttgtatttttagtagagacagggtttctccatgttggtcaggctggtcttgaactctcaacctcaggtgatctgcccgctttggcctcccaaagtgctgggattacaggcatgagccaccatgcctggcccaacttttacctttttaaagtatgtttttaaacaaccaataatatttggcataatttagtattttgccagtgcttcattgcttatgtgcaatgaggcatttaacaaaataaattggacatatatatttataattattttacctattccgtcagatagtacatttcttaaggagtaaggaaacttgaaatataactcactacttctcctttttttttttttttttcctgagacggagtcttgctctgtcacccaggctgaagtgcaatggcgcgatctcggcgcactgcaagctccgcctcccgggttcacgccattctcctgcctcagcctcctgagtagctgggactacaggcacctgcaaccacgcccggctaatattttgtattttttttagtaaagacggcgtttcaccgttttagccagaatgatctcgatctcctgacgtcgtgatccgcccgccttggcctcccaaagtgctgggattacaggcgtgagccaccgcgcccggcctgcttctccattttgttcacaaaatattttttcctcagaagtgtggcattgaatgatgtattgttttgtagtgagtacattatctcagtgaacacacaatttctttcagatagtcaccagagtagtcatcaaaaggaaaagcaatctaagtaccatttaatgggctgcactacactaatattctatttgatgaattaactgcatgtttttagttatctgttagactagttttcattcttttccttcccttcggtatgataaattcttttaaaatggttttattcaatcccaggaaactgaaaatacttgaaaaaataatattttgcaatttgtcagaaaatatttcctcactacttgactggtaatctcaagcatgattagtatagtgtttcctatgagctagaaggtttttggattagatgtgcaggaataggcattctgcctgcttttaaatgtctagctgcacagctgagcaaaaaagcccaacctggcagtcagaacaggctgcccaggggaactcctattgttcagccccattcaggcaaactataagatcacgcatagtgtccgagccggtgctggtgcctagtgagaacatggacagtccaggcatgggatgtgtggatatgctgccttcgcagtgatcaagaattcaggattttagagcccagtaaatagctcatgagaacttgggtttagaaaatctgaactgctgggccaccctgaagtatcttgaattgaggagcttgggtgaagaagtcctggtatcagttgggggcccttcagatgagctgccaccttgtgactgtccgtcagggtcatcttttggccatccctggttagcgttgccatgtgggtgacaactaggagactttacttgaatgttcccacagatgcatggctgggatggcgtaagttcttttctgtttctggcagcaatggctcaggattagggtttatgaggttaagattaacggagacaatagaagagaatcttgacttgataatatgttttttattttgtaaaagctttgttgcaatataattcatattccaagtaatgtacccattgaaattgtgcatttcagtggtatttagtgtatttatagagctgtacaaccatcaccaccctgtagctattatctccgcatccctacttctccctagctgctggaaaccttgggtctactttctgtttgccattctgagtatttcatataaatagaatcctacagtttatagtgctttaatgactgtcttttttcacttaggatcatgtgtttaaggtttgttcatgttgtagcttttgtggtactttcctttctcttcattgataaataatattccactgtgtggataggctacattttgtttgtccactcatcagtcgatgggcatttgggttgtttccatattttggctattccgaataatgctgctatgaacatttatgtgcaagtttttgtgtggttttattcctcttgagtagaactgctaggcctgttaatatgtttttagtcttttgtgtatatatgggaatattgtcacctagtatgaaatggtttttaaaggcaatcaacaatctaaaacctccagttatttgtgtgtttttttttttttttttttttggagacatgagacagggttttactgtgtcacccaggctagagtccaagtagtatgatctgggctcactacagccttgacctcctgggctcaagcgatcctcccacctctgcctactaagtagctgggaccacaggcacacaccaccacctctggctaattttcctattatttgtagatacagggtttcgccacattaccaaggctgctctccaactctgaggcttcagtgatttgcccaccttggcctcccaaagtgctagaattaagggcgtgagccaccatgcccagcctgcaatgtccttttctgaattcatagacttctcagtattacttagcagctagcctttttttttctttttttttttttttcttttcttttttttttttttttttttttgagagggagtcttactttgttacccaggctggagtgcagtgacacgatatcagctcactgcaacttctgcctctcgggttcatgagatcctcccacctcagcctcctgagtagctgggactataggtgcatgccaccacgcctggctaatttctgtatttttagtagagatgacgttatgccatttggccaggctggtcttgaattcctgacttcaagtgatctgcctgccttggcctcccaaagttctgggagtacaggtgtgagccatcgtgcccagcctaggcccccctgctgcctttaaaaaaaatttaataattcacattattgaaatatttaaacctagtcattctttcctttggctgtgacttcttagaaaattattattttttttaaatatatgaatgtggtgacttttgacactgtatttgggtgtttatttataatttatatgtatgaattttaagtaccctagaattgagtgtaatagtgatagtatttttaaaagtggaaatttttaaggtatagtatgttgcaaatttttaataaaagtttctattccatcgaagtgtaagccgtcatgatttgtttcatactttcttatgcttgtaattagagaaaatgtggcacatatacaccatggagtactatgcagccataaaaaatgagttcacgtcccttgcaaggacatagatgaagctggaaaccatcattctcagcaaactcacacaggaacagaaaaccaaaccctgcatgttctcactcataagtgggagttgaacaatgagaacacatggacacagggagaggaacatcacacactggggcctgtcagggggtggggggctaggggagggagagcattaggagaaatacctactaatgtagatgatgggttgataggcgcagcaaaccgccatgacatgtgtatacctatgtaacaatcctgcacgttctgcacatgtatcccaggacttaaagtataataaaaaaaaaatagttttaagctggtttctctaagaaagttttcctttgataatgaagataacaaagaagatagattttagcagcagaagtattcttttcctcatatttccagacattttaatacatatttgcagacattgtaatagtcatctttatagctcactccagtgctatacattgggattatagttgcttgcagtatagcatttacatcttccttattcttttttcttcgttcattctctctttcttgaactctcattctctctctcactggtcttgtgaaagaacatgattggatttctgctttgagctatctttaagtttgattacaaactgtaacagagtagccttgaggttttttttattggtaactattttgtgatgaggtggttgaaatcgtgcttctttcttgatttttgtttgtttgtttgtttgttttttgagacggagtcttcattgacacccagcctgaagtgcagtgatgtgatcttggctcactgcaacctctgctgcctgggctcaggaaatcctcctgcctcattctcccaagtagctgggaccacaggtgcatgccaccacacccggctagttttttgtatttttggtagagacagggtcttgccatgtggcccaggctgctcccaaactcctgagctcaagcaatctaactgcctcgtccctccaaagtgctgggattacaggcgtgagccactgcgcccagccaagtgcttcttgatttctatcatattgtgatgttcagaatctaatgtagttatgtggcccttacgttactctgccctgtactatcttctttattattttacattcatttatattatacttctaaattataaaataaaattatagtttaatataaactatatataaatctaatatagatttttacactatgaaataatgcacgtttcttgaaagagcaactatagtagtagatacatgttataacgtgcaacgtctcctgccctgggattcttcctaagtaccacacccagaataaccactgtttcttatacagctttccagaaaattttatgtatttttatacaagcacttgtattcacatacacgttgtttaaaaaaaaaaaaagaaatggtgtttttctgtacgtggcatatgtttcaacatcttgccttttcccctccaccctaatggacattgggtaatgatgtaactaatttctgcttttctgttagctttggcagccagggagctccaggctcatttacacttgctgggagccctgtgctcaattataattgcctacgatagcctccactttctgatttaatgttcttctttttctgaatttttaaaaaaatctttttaaaaagttttattatggcttctttacgtgagccttttaaacaacttgagtgaataggaggattcaggaattatggctcatagaagagacatatttaaccttatgcatcagacattgttagacactacgctgtatttgtatagcttcagtgtttggtagctctagatatcaagatagtatttaggaaattttcttttccaacatgttagttagttctgaaataccccaaatggttaatgtagtttataaactccgaaaagctttttatctaatgagagcactgttttaaaaaaaccactaatgattttctagttgaaacatttgaaacaattttgaagtacaggggacttttctttaaaacagtgctcattatactcggaagataagctcttgagcatctgtcatccttgttgatgtattcatactgtttttattctttgaaatgtatttaaatagaaaaaatagttcatgttttttgtcattctttcagactgcagtgttttgttttgaatgtggtgaaattggttttattcctcttgggactgcttatctctagggcctggatgcttcctttaaatagggattcacaggtagtaaatcattagaatttttgtttaacagtgaaagaagtcacttaacataggtctgtcatagttctgtctttgtcactgtatgtagaatttcatagtgatacaacatccattttcttagcaaaaagttaggtctagggtatatctgtttggaaaattacatcagaattgattttcaattaatcaaagttactaaatagtgctctgagttaccagtggtatttaaaattaattttggaagttgcacacatactttatgtgtattttctttttcttgtatgagagaatgatatatattaaattgtagttattgcttataatccttttagaaggcaatggggctactcaaggaggctgaggtgggaggatcgcttgaggccaggaattcaagaccagcatgagcaacataacgagaccccgatctctaagaaattttttaaaaaaagttagtcaggaatggctcatgcctgtagtcctagctacctgggtggctgaggtgggaggattgcccaggacttcaaggctgcagtgaactatgatcttgccactgcactccagcctaagggacagaatgagactttgtttctaaaaaataaaataaaataataaaaataaaagaaaaggaaggcaatgatgttctgcatcagtgacaacagcatgggcattgccaagatctttgatgaccttactgcttacctctccccagattttacataattttatcttcctgtcccattgtacactgacaatactctccttcaagtgtcctcacctcttgatttgtcatatactcttaattttattgctacatttggccatttttttcactttttttctttgttcactttcctttgctccatacttaactaattttccagatttctgtccttaaatctctttcattttcactggatatactcttcccaggcttcccaggcttctgtaacaatctatttgctttgtctccatcccataactctccctgagctctaaattattatatgcaactgctcactggacatacaagttcgtgattcaacagaccctttaaaactcaaatctgtttcccttagtatattcccttgtttgttaatcttgctcagttacccaagccagaaatttaggtatcattcttgaatacattgtttctcttcctttccacacccgatcaatcaaatacacagtcttattgcttcttactttttttttttcttatcttattgcttttattttcagtatttttttgaatcatgaagctgtataaacagacaaggtgatctgtgttgtgttagggctgtctgtgccatgttgctgtgggagtttctatatggaagaggggcattaacaaagctttgaaatgccaaagcagactttccagggaagagcgtctgcagataattctgaagaatgtgttgatagtatcttggccacagggccatgaggcattatcaggggcaggagagagggaggctattcccaggaaaggctccagcatgtgccagagatgatgcagacaacattaagatttgaaaaaatggcccagtgaacaaagtgtttttggttttgagagagagagagattgagagacagagagagagagagaaaccaagggatcatgatagttatagtcaaatagaggaaggattatcttttgaaaatgtgttggttctgtgatacaagaggaagctaagacatatcgtggaaacatctcccccctccaccttaatatcaagaacaaattgtggaatctaatgttaatgagaagtagttccccactgtgtcagatgcgcaaagagaaattggaatatacttatcaagtatattatagatggaattgaattattgtaaagagtagattagagaggaccgccaaagtccagtcccaaacatgatacattaagtgtatcccttagtataataccaaggaaccccaaaagctttacagtgtctaaactctattttacgtcttcctaaactgatatcgtacattcaatttatatatttctgtactaagatcatgaatttagagtttattgagaaattgccagaaaaaaatgtgttaagtttttatcccttaaagagtatctcataacttacagatttgagcagggaggtatataatcaggagtacagtttatgtttgtttattcaaagctctgatctcatgaaaattgctatataaatgcttgttttaacaactgttattattaggggtttgtatgaaagtctgccaacttggtcccaatatttatattataaattaaaatgttttgaaaagaactgcttctcaactgtgatcctcattgtttttgaaacctaaaatatactaatttttaatttttgtagttgaaatagtttttaatgccagcagtcttttggttatcagtttcatttgaagaccagaagttcctgaacaaagaatatttatttcagattaataagtaaataaagtgaaataaaagatttttttcctttgaaattgaggaagatcagttattagtagtacaaactgtgcactagattgtatcttagggttcctaactcattcttaccaatgataataactctgaacccaagaatatctgagacagttctcaattaatttaaaaagtttattttgccagggttaaggatgcacctatgacacagcctcaggaggtcctgaggacatgtacccaaggtagttggggtacagcctgcttttatacattttagggagacataatacatcaatcaatacatttaagatttacattggttcgatctggaagggtgggacaactcaaaatggagggacgggtgcttccaggtcataggtagatttgaaaattttctgattgcctattggttgaaagaattattcaatgtagaaaagaatgtctgggttacaataaggggttgtgaagactaaagttttatcctgctggggaagcctccaagtagcaggcttcagagagaacagattacagatgtttcatatcagacttaaagtctgtgttgatgttaatgctggaggggtgtaatgaggcatgttgaccccctcttccatcttggcctgaactagtttttcaggttaactctggaacgcccttggccaagaggattggtccattcagatggttaggggggcatgtagagttttattttgggtttacataacccattatggaaatgattccttggccctaaggtaattatagattctggatgccatgcttatattaagtagataccaaaatgctacttttagagtttgagtttctcttacgtttttagaaattcaattgagtagaactcgttattaaggaaaaaatactcaagacccgaataatattgccatgaataaagcggttgattagtgattggttgactttatgcttttcagttcacagaaatattgctgaggaatcttgacacaggcaatgcaagtgtttacatgaatatgaaattagcaactatatttagctataattaaaatctagtaaggtatgtaaaacctgtttgtctttgactagaacttattccaagttaatgagatctcaaacaaggcatagagtgtatgtccctttttgaaaagatgatgatattttcttaattactgtctgtgtttgggctggccaattttgacccagttaaaaagctgcaaaagcgtggtctgaacttctctttttattatggctaattttcctttaatttagactacttatacaaatacccagtattatgagccagcaaaattaacaggtgtggatttaatatgtagtgtgggtccacagagattatattcgttgtataaagcctaattttttgtcttagttgtccttgtcatgtttagatcttatttcaagccatttctttttcattttctgataatctgatttcattgtcaccttaatatcttctttttttgtgtttgcaatcttttgtttttctaactctaatcccaagaggcaaaagtaatacattttgagggatttttgagaagttttgtgcttgccttccccttgttcagataagttgtgctgcaaatggctccattcctcctgttttgtactagtgacaggaaagttcgtctagagataaaatgtcacaaatctgtccacctcctctactctctcaggggactctacaacgtcacgttttcttaactatttaatttgtaatgccttctttattttggggaaattacaaaatagtgacacagtctccccagcccaagaaggaggagattttttttccccagtagggcggttgttttattttgactatatagtcttccctagaattgggggaataaatattggtatggttttttaatattgatttccctgggtagattatatttctgactgtaaaatatattattggatgtgcttctcaaatagattttacataatcagagaaattttgaccatgagcctaatttaatacttttttgctccttctgagtttacataaactttttatttttccatggagtttatcagaatcccaaatcctctgcttcagtcttcctttcatcctgatcttcaggatatttttcctggagttattattgttattttatagtatctatatagctactattttatagtagtatctactattttataatagattgtcctggaaaacctaccggtgcatgagagaaaagttcaaggctaaacttaaaggtactgggtagtcaacagctcatgtctctatcagaaaatgatggagactagaaagtaacatacatgagtggttatcattttaaaactagagaaagagtcatggaagttggtaggggggactttaaaggtgaaagtttagattatggtctatcagagaggaatggaaaataatgtattttaaggagactgtaagtatccaaagtataagttaaggtttaaaatattacatttgagtaaaacaagaagaaaagagtttaacgttttcctgtaagagagtaggttgtattggatagtcatgttgttcagatttttatttattttgtaaatagttttgttttgttaaaaatttgtgttaattgggccgggcacggtggttcatgcctgtaatcccagcactttgggaggctgaggcgggcagatcacctgaggtcaggagttcaagaccagcccggccaacatggtgaaaccccatctctactaaaaatacaaaaattagccaggcatgggggcaggcacctgtaatcccagctacttgagaggctgaggcaggagaatcgcttgaacccgggcggtggaggttacaatgagcccagaccatgccattgcactccagcctggacaagagtgaaacaccatctcaaaaaaaaaaaaaaatttgttaattttgctgaggtggtcctgagactggatcaaaaattgcagcactatattcttctagaaacatgcacacgttttttaaaattgctttacctgcacaattgagttcatgatatttctgtcgtgtcgcatttgtaatgtagttaattattttcatcatcttcctgaaaaaggcaaaatcgatgggaaatttttcttcttaatattgaatcacgtatgactaatttatatttacttttgcaaagcagggaaatatatgaataagaggcatgaatccacaattgctgaagcaaatcaatacatgtgaaggaaaagcaaaaccctatgtaggcctatgtagaaaccttatgcacagaactaaatgcttgttaagtaaaaattcctaatccttatcctcttatgccattttaaattaactctaaaattagtattggaaaaatctccctgatttgttcaaatggctgatgcttacatgtcattttggatccagagatgcaaaatataagagcttcatacataggttcaatacttttctaaactgaattgggtttttgaataaaataccagggtattccaaatgaatgatttttatctgactcattaagaagtgaaaataaatattttattatacatgtaatatgatttagttttacaaactgttaatatcataataatctcaagaagttctaaaaatggagataattatgacagccataaaatataaagtatatggaattatatatttggctatatattagtcatatatttttagggcctactttatatttttttccctggcagtgttttagttacatttttccacagtgtttttctaaaaagaaattgtatcattttgtaattcttagtttgtcagagaaaccaactttatctcaacttcattaaagagtaataataaatttgaatttagttgatgtaagagttgccagtaccaaaatggagtggtttatgccaagcagtaataaaatggagccaggaggccatgaagtaagggagcacacacatgtatgcctatgatggaacttttcccaagaaattcctcagaaccatagtattccagataagctgcttgcacaaggaagtttgcctaacaagagctgccttcatcaatgagctaatgtggattcctgtaacaagctcctggaaccagtggtctttgtttcaaaacagttcatgtggactttttttctttcaaaagcttccccttgcttcagcctctttgcatgcacctgtggtgggccatagcaagcataacccgaattgcaatttcttgctattctcaataaactctttgttgtggagagttggtccctctattgtttattttaggttgagattagcatagaattttgtaaagtcctggaggtatatccatgccagggattaaattggattctattcccaagtaatttttgttcttaaggacactctaaggaattatttgtgtctgctttaattattaaaaataattttgtttattcagttcaatagaattgtatcttttaaaatacttatagtccttagatactgttttgttataaagtattttgttttgaagatgtctttaaattcactggcttcaaagataacttctgcattattccttgggctttcctcttagttcaatttagaaggaacagagaaaacacaaacatttaggtaaataatggaaataggattcacgtcataaaacgatactttgcaaaattgacaaggtggcaaacatacaggtgatgttagttttttgattaataacaagagacagaatctgaagggttagaggaaatgcataagaatctgaaaaaataaaaggatctggagaagacacccttaaaggtgatgatcaagaagtctgtgttgtataacggggctgttggggctcaaggagaacaaattttaaaagtggcaggaggtatggagaaagctgtgttggtgatgtgagtattatgggcttctcaaagcatggttctgactctggcaaaaagtgggaggtcagagcagagttggctgcttgtaatgggagtgggggagaaagcaactctttaaaaaaatttatgtcaaaatggtattcagtggtccatcacattgaatcaacacacctttattgaaaacatattatttagcacacactctaggggttcatttctcttattctctgaacttgaaatccttttcttgttgatctttcatatgggtcactaaacagattctattttacctgattaaataaatggtaacaaggcctaggtctactccttcgattttactgtatacttacttaacagttcactttgtcagacttctaccccctctacaagattaagaaaattagtggttacagtgtcatgcaattctattcggcttgaaaagttattgaggcatgtttttccacctttttaaccttcatttatttagtagaagcattcccttaagtgtatgatgagtcaacactggttttgcctgactccagtaaagtcaaagcattatttaatttaaaatgtgtgcatgttaagttcctttctttgcatttaattggagacttttttccacagttagctcaccaaaatgttactaggttcctctgtggctgtctactatttgaacagacaagcaactaattagaataacagaacaacatgactgtcattcctccattcttacaggttatttttaaaaagagattttgtttaaaaagagaaaatatgtattatattaaggaaatataagatccatactctccttgaggcattttttcacttcaccatgccaacattcctttattccctatcataataccgatcaagaaatgggaggttttcctaagtcaagaaaacctctcacacataaaaattcaaactgggaaagcaaatgtatcagggggcggcttttaatttgacaaaagatctgctacattacaaaagaatttttctaaagattactttatgtagacaactccctcagtgtaccgaaaatcaaagaatgttctacattttaaacacattttaaaatgggcacacctgttcctaatattcttatgtaaatggacctatttacatgtgagacccaatgtggtgggtaaatgaaaaccagtgtgtgagttactcaagtttgttaatgatgttagaaatatagtcaaaatagctcagtctgctcttgctatgctattttgtccagccaatctctcatcctcccttcatcctaattccagaagagaggataggagtaaaagcaaaatcttattacaaaaaacacactctggaaagaaagaaaactgtattggataatactcagtttggtatttgttttctcctgtctagttcttagtacccttagaattgagataattcattatttgtcactcaggtaggtttcgagtgaactgatatatttaattagatccttaaagcccataggatttatactggtcatttctgtcaattgtgaatctgctcatacttgttcttcatgaaactatggaataatttttcatgtattttcatgtgtcaatctgaaaagaaacttaggttctccagaacagaggagtttatttgaaaatagcagaggattataacccagaaaatgtgtgctgagccagatcacaggcgcatcaaggagactgggaccaaagggagacttttaaagacaaagagaagtcttcataaactgtttgttaaaccagaaagatcattggttacaagagcttgctgtaagagttggcgacaaatcattgttaaagacgtcattactagacagatgtccttgtgcaagctgcttatctggagctttgcggtctaggggaatttccttgctaaaagtcctgttacaggcaaatgtgcagtaaatgcgggaatgtctcctataaggcctttacaggcatttgtgagtgagggctcccccttcgtggccttccaactccatttgctagggtttgacataattgattccattttggtatcaacaactttcacacatggatagttcaaaatggaagctcctgtaaaataatactttcatatgtattttttcatggtgtctagtacctgtgccacatagtgaatgcctgaataaaggaccacatgtattacagttgttagattttcttagggaccctattgtttaaatgacttataataagcacttactgtgtgatggtaaacactatgctatttatgtcacctatacttcttacttaacattaacacaactctacacagtttggaatattgttgaaataatcactttatagctgagagtagagcatgtatgggttaaactcttgcccaaggtcagacagtgagttgacttgtgtcttcccatgttgtcactgatgcgtcttctcctttgctggctcttgttccctttattccttcagtaatatagagaaactacagcctttcattcccaatagagtgaaaatacaccactcattcattatttttcaattatagtgcaaggacgagcagtttaccctaatatccatttcttgtttggttgggaaattcaccaacagagcagaaaagcacagtggggagagacctcaggggaaacacatacaactttgagataaaccctgtttttgttttaatgttaaaatttaacttttaatccctttgtagtatttacacaactgtcagtgaaatgataaatcttctagctcatttcacaagagggcagcactttcttttaaaatttaaagtatgactaaaaaaatacaatcaaattaacgttttctatcatgaagttaagcttgaatgatttacaggaagatgggagcctctctgtcctgggggcaatttatgagttaagatgagtgcagatctgcagggtaacttgggatccttagaaaatggaacgatggattaaaatcaagccctagaatttttgacttgcagtttgaatttggagactattttggtaactttgtaaatgtgtaaaagtctgtcaagatcatgtctttcttttctattatggcaaaacatgaagagtgaatcattttaatatattcaaattgttttgctcatatcaaataaaaagtatttattgagcaatggttttatgtttaggattctataggtcatttgaggaacaaataaatttaacttttttcttcattatttaaagagcttaactcccttggggtgacaaggaagggaaagcacattggcaaaacaacctgtaaacaagccaaggcaacatgtaaataaggtacagggtaacagtacagcataatggagatggccgatttggatagggaattgttgaattagggttttaatgcagggctttgagtagaaggtggaaattgaattggtcctcagtgggtggataaaatttgaatagatttaaaaaaaacaaaacacgaggaggctattatttaagaaaatagaatcctgtcaacagagaaaaagtacaaagtgcatcagggcatgctaggaaagcctgttgtttagaacattgtaggaatgatgcctggtaggtaggataaggctgtattgtggcaccttgaaagttaggagtcagggctgcactctccaataccattgccgctggttgtatgtgactatttaaatttaaatgaattaaaatcaaaatcaaaatgtatttccccagtcacatcattagccacatttcagatgtttaatagccatcctattattgaacaacacaaagatggaatattttcattatcacagaaagttctattggacagcactgcatcacagtttagttatttgggggttggaatatggagaatcattaaagaaacagggaatgatacgacagtataaagaatgtttgaattttaaatctgtaagccgggaacttaaagggaacttctttttttttaatgttaagtgttttcgatggagcataaacagaacttgcaaggtataagcattttgtataagtgttctaaaaactgtcatatttattttttattttaaattagctactagtatactagctttaatgaggaaatagaaggtgagctaaaggaagtaactttttcattagttttcaaattcagttaggtttgtcatgcagcatacagaactggagaatacagagagactggattcaggaatgatgacgtgaagaaatcctgtgaggagatgtattagctcattctcatgctgctaataaagacagacatacctaagactgggtaatttatttaaaaaaaagaggtttaatggacttacagttccacatggctgtggaggcctcacaatcatggcagaaggcaaaggagaaacaaaggcacatcttacatggtggcaggcaagagagcttgtgcagaagaactcccctttataaaaccatcagatctcatcagacttattcactatcaggagaacagcatgggaaagacccaccttcatgatttaattacctcccaccaagtccctcccacaacacgtgggaattatgggagctacagttcaagttgacatttgggtgggacacagccaaaccatatcaggaggtggaagagaaaagaagcaagaaatatcaaaaaatattaagatattttgatatttaagtagtgtgtatatgtgggtgtattaattggtgattccaacttgttttaaagtttcaaagttgtttgagatgatatgtatgagataatttagtaattcaataacgacttttggttgtctactatatggtagagactgttgtaatttctggggatacgtcaatgaatacaatagagcattgctattttaggaatggcttcactgatgtgatgaatattttattattcaatctggcttttaataattactggtcataggccgggcgccgtggctcacgcctgtaaccctagcactttaggaggccaaggcgggcagatcacaaggtcaggagtttgagaccagcctgaccaacatggtgaaactctgtctctactaaaaatacgaaaattagccaggtgtggtggcacgagcctgtaatcccagctactcaggaggctgagacaggagaatcgcttgaacccaggagacggaggttgcagtgggcccagactgcgctactgcactccagcctgagcgacagagcaagactctgtctcaaataataataataataataataattactggtcattgataaatctttatgtaacctatttatattttattttaaaattttattgttaataataaccagtgttaactcataacaagttttctttgtggtaaaaaatgaagaaatattttaaaatatcatacacttagcttctctcaaaatattaggtttgtgcaaaagtaatcacggtttttgctgttaaaccaaccgaaataataatactataataatatatttttagagtttttatcaatttttttgatatatatgaaaactagtggaaccctcacctctgaaaaagtcaatgcaggcatttctggtatacatataataataagaaagtcttaattgtcctgtaactaaaactatctaaatctcaataaatttgtgttgaaacaaatgcgcaattatatagtactagtgaatgtctttcttgataagagtgtttgctcaagtgttagaggaatattctacacagaaaaatcaaggttcagacaagagttccagggtcaagcagctagataagtgtcataaaggaaatcatgacacaggtcgtttgatttcgagagtgttattctttcttttttatcccatgaaatatatactatagggccaggatgaaataatacagataagtaatctagtttacatgtaacatcaatgaatattttctcatacaattaaaacattttctgtattgcttttcagactatcatagtagtagaatgatctgactcaatttttagtgaggaagttatgttctgatgacttaagttcttatcatcctgaactacatatagtcttttctataccaatgtgtagtgttgtcagtttgcgtgttgtaaatatcttcttccagtttgtgtcttgcctttttattttctttacagtatttttttttatttcaataggtttttggggggcaagtggtgtttggttacatgaataagttctttagtggggatttctgaaattttggtgcacccatcacctgagcagtgtacactgtatccaatgtgtagtcttttatccctcacccccctcccacactttcccctgagtccccattgtgttgtacttttaaaggctcttttacttcctaattattccatattctgattttaaagttaaaacactctccagattaaattctagatggaaattgtactttaaattcctttgtttagcaatttcaaatgcagagcttgagatgacaagacattgcaaagtcccttctactgtggcttaacttatccctaaacaagaatgtggctgatgtcagtgtcagatggtgcttcacctgtggacgttcatttcctttaatattttgttacagtaaccttcatggcacataaagcctcctgtctctgaacctgacaaacagggtccagggaataagacttaatcactatcacaagaaaatcacgggaaagacctgccctcacgattaaactataattttctttttcacttctgcaacttagatccatgtacgaaggtgctattcacattgcagcatctctttagacactagtagactctggcgctttcactctgccacagtctaggtgggatcacttaaacctacttgaaagataaagcgatgcttcaattgcctggacaaatcaggccagacattcattttcaagcgttatcaatggatttttataaacattccaaaaaactttagaccgtagtatcacagtattagatgacaatagggatactcgtttccttgggaagagaatagctcgagttatataatgcctgtttagacacaaagttgtcctttaagtaagcaggagttactagttataaagtaacttatgacaacaaaaaggctttgttctgtctgtcccttagaaaagcttaccattgaccagcccactgctgcagaaagcttgtttctattgagggctggtttggtagtgttagaccatctggcacctcaaaacttctgaaacttttaaaggcaaaaataattgtctccagtagcattagctttcaaatataatgatgccaccctttttggaataggtatctactcaggaaggtaaatgtgttttacttgggtattttctatctaatgatttaattttgtatgaaaatagaaacacaggctgtggtgaaattttcacacagtataaaagattgaacattgaaatgtttcattctagacactcagctctccagtccctcccttccaggtcgccattattgctgtattatagatctttacagaaatattatctgtatctcatagattgtacctgtacataactacatatcactccccccctttttggcgtatacataggatatgtacgtgcatacatattagaggttaattatttgctcttagaaattatctccctcttggccaggcacggtggctcacgcctgtaatcctagcactttgggaggctgaggcaagtggatcacgaggtcaggagattgagaccatcctgtcaaatatggtgaaatcccatctctactaaaaaatacaaaaaattagccagatgtggtggcaggcgcctgtagtcccagctacttgggaggctgaggcaggagaatggtgtgaacccgggaggcagagcttgcagtgagcggagatcacgccactgcactccagcctgggcgacagagcgagactccatcttaaaaaaaaaaaaaaaagaaattatctctcttttccatagttgtacagcatttcattatgtgagtctgccataacttgtttacccagttaccttttcatggacatatagattgttttcagctcaataagtcaagtaggacttattgagcatccttgtacatatgtctgtacacatgtttgcaaattcctagtgatagaatttctgagtcaaaagttatatgcattttaacatttgatgggcattgttaaattatcccttaccctcaaatttggcagattctaataatctctaggaaatgtaatgacttaaagtaaaggaattcttcattttgtaatcagcctactgatttccatgaaaggtgcataatacattgtctgtgttcaccgtctatgtagaactcattgctcagagcaaacatctgaaggaagagagataacggtacagaaagtaaatatgactggaggggagaaaatgtgtgattgtggtgtgtgactttttgtgggaaaccatagttgtaagtgtgagtggttcatgtggttaagtattaactggttattggtgatattagtgaagatggatcatgattagggagttgaagtaggtttagagtgtgattttgcagagaatgcagaatgggttcctaagtaagaagatgacagggacatggttcagagttgaagcagtagctccacaatgaatggattagcctccaagcatgagagaaatcccactgcttagtattatacacaaaagtatagctgatcgcgtggggttagtttgaacttcctctgtgtttacccaatgttcagttccttaaatatgtattcagattatagtaacaatgccctcctggggaaagtaccagctttttacttgtgactgaaaacggcgctttcaattttgatttgttttgacattttagttgctgttattaaaatttgtattttaattttggcttcaatttactaaatctacatagctgaagaaaactggagaaacctttataaaaccttttgaaaacctttaagagcctttttcccagagccctgtggatttagttgcatatgctacaggcttgtgctgtcagtagacatctggaatttgaggcttggcctcctgagattgtttccctcttgtctgatgctgcatattttttaggaagaatatggtttggaagcattaacttgtcttggcattatttttagtcacctaataaagtgccgtctgaattgttaaatatttagaaggttgctgaaggctgactcctgcacctggttggctaattcagaagcaaatcagctggtatttctcttcctgaacccctaccccacccacccattttcctgaagaagaaaaagctctttgagcctctttgaatgtctattggaatcttttggttatgtgttatagaaaatatattaagtattgaatctttttcttatgaatcctaatttttatttctccatgaccacctgtaaaattatcaaagtagatggcattatactgaagagacaaacattaaaaataattctttgcgtacaaagcatagtgcctgaacttcctgggataaaaggagagttttccctttcatcaggggactcaggcctccatccttagattgaactttttgccctttagggctgtatattaccttaaatagctaccagctgacacactttgctgcaggctgatgttaacttgaaagtcgaaatgtatggactggtctctccctaatggaacttcagtggtagaagacaatgaattgaaaactcagatcacgattagggtcttgaagctattttatttttgaattctaaatcccaagttagaagggttatgaaaaggagaattgtgtatatttctttcacaagaaataagttggatctttctttgagtcagaatgggcttacaacaaataaacttttctccccatgccagaaactcctcattttagtaatgaataagccatgatgtagcgatttatgtgtaatcacctattgaccttccatatgcttcactttagaggctcctaagaagcttttcttcttttcttttctttttgttctttgtgttggccaatataaagagaaacctgttagaatttacatagaaaacatacttgatctttacagttttaaaaattgtctttagtgggaagggtgccttaagatccactataggagtaagatgtaaagttcttatttgagctgtaaagaatcttttattgccttaataaaattactaaataggtcatcttttaacaaattatatgaaatatagtttttaagtacaaaacatttgtaaattgtcctaccctttgaaagttgttggcaaagccatacctatagctctcttcattttggcattggaatgtggtttttattaagcagtttagatttagattttcttgagtccattgctgagttttcctgtgcttctctgtggttctggaactttttgctttctcatgaaactctatgtctatgtttgaaacatggtttatttagctagagattcctgggttattcagtgttgatctgatacagggattggtagtgtcaagcatattccacctactgaggattagtgaacaatttatttgcacattggcttaaattgggaaaatgtcaactacttcaaatgtcatcatctaatttattaagtctctctggtgatgtattgcttacactggaggcatctattttttgttttaataattacaggattacaggtgataatgtatcaaagaggtggttgataaaaaaggactgtagaaatgtaggtatattaccaagatgatattttgtgtactgactttaaactaagaaagtactctttgttttgagacaaagtctcactctggttgccccagctggagcgcagtggcacgatctcggctcactgcagcttcgaccttctgggctcaggtgattctcccacctcagcctcccaagtagctgggattatcgtcatgggccactacatctgggtaatggaaagtacactttatcttatagatatcaaacacaaattcatgatgaaatgtgctcacttttataaaagcaactcacatttacaagtcttttaatgtatcagttatcaaagagtgcaatacttttgagtaatatattagatatttagctatttgaatttcacagaatgactttggatatttacatgaataatctatttgactttaacacttaaaaaacaacatttttagttgctttcttgtgttttagtgagagtatagttaccctgtgattaaaattagttaagaatttaaaaaaaatctttcaaatgatcccatattcttttgatgatctgtttttgaatatggatccactgagttttgtactctttcttcgaaagaagctgccatcagctgggtgtagtggcttacgcctgtaatcccagcactttggaaggccgaggcaggtggatcacctgaggtcaggagttcgagaccagcctgacgaacatggagaaatcccgtctctactaaaaatacaaaattagccaggcgtggtggcgcatgcctctaatcccagctactcgggaggctgaggcaggagaatcgcttgaacttgggaggtggaggttgcgctgagctgagatcgcgccattgcactccagcctgggcaacaagagcgaaactccatctcaaaaaaaaaaaaaaaaaaaaaaagaggctgacatcatagctagatttgtcaatatcttagtttttgttgctgcataactgtatataagggagttttcggtaagtgtcatcgtttctaccttagcagaggatgtcagttctgagaaggtagctgatacaaaggcaacagtttctggatattctactctcgaattccacaggagaacatactcttgttcctttctcctgtccaggactcaggtacttatcaggctgataaaagttcccatgctcttatcttttgggaagaaggcctaatacaaaggataccctttcttttccctcatctttatgccttgtgtttaaccttgggtgtggatacaagatatgtgggactctaacaataacatatcattcttgtcttgttataagagccctttaaacagaaagggtctactttagagaaagactatggtattccctgttgttccacggagtttttgtttaattcacccttctgatctgtgcatgggggaatggaatggcgtgtttgcacatgtccctgatcccagccatccagcaccctgggtggtagctggaagtttgcccagctgagaaagattgttctttttctctcccttttttatttatttatttttttgtgtgtgtggtggtggtgatggtgctggtgctggtggtttcttttgtcttgtatttatgtaaaaagtttatttgctgctcttgaaagatctcagcatgtggccccagagtctttacagaccaggttccctgtggccactttctctgtaagtttcttcaccacagttctgatggttggtcttcatgctgatgtcagtgctgttttgatccaaactgtagattatttttacctgtgaatttctgaataagcattagattaacacatttgtttttgaaatcaaatgtgcgttgaggtgaaacacgttctgctagaaagctcataaagccattttgcccctggggacatacaggtttttatgaaaaaataatgaaaatattttaaaagcttgttaaaatttgtatagatgggcatatgtaaaacacatgctatttaaatactgatatgaaaataagttaggaatgaaatagaaagaaaaatgatttgcaaatccaaaaaataataccaacattgtatactgttccctgatagatttttagtttttctggttttaaatggaatctcttacgacccatgattaaataagtgctaacggtattgatatttaagcaactcattagccctttaggagatgcatattctgattttaggggttcccccccccactttggtctatgccctgatgcaaaaaaagtaaacttacttatattaaaatttacattattctacttgtggtagtgtcaccattataagcactgcatctttatgatgaaactctgcctacaactagagaaacatgtttcaaatggacatttctgttatactttattggtatactgtatagctatgtaatgcaaaagcaaaatcacatttgccttggaatgatatccataatatcactacaaagaatttataatttggattggagtttttttctttaaagcgatgacacttaaaacttcctggaagatggtgtttctctgagtgccagtagtaatttaacatcaaaatggaagacacattcaatgtagttattactcacattttgagtacagtagtttctctcattaagttttatgtcagaaacaagtaaattccctataagaaaacagtctgaatgactttcagcggcatcaaagagatcgaaacactttaaaactattttcttcatcagttgcctgctaacacctttttgaaaaataaaattaatcaacgcgtatttccttttgtgatttgtattgttttgtacattcactcccttttcttttcatgggttggctcccaactggaacatggaacctgtgatccattcaagattgagacaatgtaaaagatagagaactgacttttggggcaggcaggcctccaggaagtgggagtgagctttcacttcaaactgggtgaggggtggtggaaagggaggatgctgattaaaataataaacaactgctggaaagagaagttgattaccacactgctgtcagatcagccaggggagctgccagagcccactgaggctgctctcccctgccacaaagccggcagaagggactagatttgctgcgagagcttttctctggacagacagaacaccttttaaaacaagtttagttctgttgcattgacagcatcccttaggccaggctgacctagggaaatggactgaaactagcttggtggttaccatagcaacccaggctgctggtgtctgggagagtgagaaccggtggcctcttgtcctgtgttttggtgtttcttcagctaagagtacactcctccttcgaactctacataagtcatgctctttgaaaactggctctttacccaggattttttttttttcgttctgaaatcggtctgaatggaggaagttggtaatacttggctttttttttttcttctctcatgcaagtttccaggatatagcttctttttttgctgtatgtaattgagaccaaactctaagcttggggccctggagagaacagttgtggcctgcaggtcattagtgaggtgagcagaagggaatcctggacttcccagagaaagaggagaccatgccagcctcgtggaacacagctaccaggaaatacagaagcaggtctattccttgcgaactccgaagtccatgaaaaaacggacccacagtggggtggctaaaatgtcccagcgcaagctgccgctgctgctgatggaccatagctcaagggcaaggcttgtaaaggattttacaaaggattttaaagtatagccagaaaagatacggtgtttagaagttaaacgctgttgtctgaaggaagtttgccggaaagatgtaggcttcaagggctactggacaatgattggtctgaacttcaacttacgggaactgctgacaaaatttgaaaaggtatgcagaaagcaaacttcatgaatgtacttttttcctttctttcttgccttttttttcactatacatttagatagatgctctattgactctttggtggtttagtataatttataaggaatattcaattttgctgtctcctttaaagatgtttttcaagtaaagggctaattagcaattacttcctttggtcaggagggcttctcatgatgcctgtcacttttagaattccacatcagaagaaactctttgtactcaagtcagctggtaatttaactgaaacttctttggagaaaaaaaaaagaaaatgaaaataaaataaaaatccagcaaaaaacactgggtattggtgccaaagtctgacttcgtaggcatgggttctgttctccatacccctcaggtttatctgtccagccactgcctgccgtgcactgccctgtacagccctctgcctggggactcagctgtgggtggcagaagtcgcttcacagtgacagtggcacatctgacctcaggctttttatctgagcgtgtctgttttaaacatggagtgcttgcatgcactgtgaagctttaatgcttggattattaaatgtgcgtgtagctcttttttccataggaaggctcctggcacaatctagatggagtctagcctgccaaatactaccttacatttatagttaaaacagaaaacctccacatgcgtgtatgcgctcctgccctctttagcctttggatgccaaacaccaatcttcttccaatttccagtctttaaagaaaaagaaaggcagaaaggggtgaagtcctccctcacttggtatgtaagtcaattattaatatttaaaaagctgtgctcagtggctttcaccgtgaatgccccatggatcattgcaagtacaaatactgtagaagcgggactggattgagtcattaaaagaataatgggctttttcttacaaaccacaattgccagagggaaaagatgcaacatcatgccatctgaaaagtttggaagcttttccaaaacaattgcagtcactgcttgccttttgatgataggaacgttatggtgggatgaatgtggagagagaagaatttagctctttgctccctcctggctgcagttgcttctcccaatctctctctgcacctctactgtaatgtaaggattaggcttgtaacacagggcggacttcgacctctcgctttaatatgtggttaagcatctaaattcctgagagtaaaagacggttctccctcagcttgctctccacttagaaggggcggggaaggcaaggaatatcttccttatggcagctggtaacagcaggtgacaaactttatgaccataaagaggtctgttagcttgttttgtatagatttgtctgtttcttcctttaaaggtatagagcatatgttacatgaataattcattacttagaccccctgagaggcagtaattgtgggcaatagctggacttttgtattgtaattgctgctattagtcttaaaagtctaggtcagataccaggggttcctaacctgcctcagcttcaagccattttattggcagagttagaagttctggttatattagcatgtttccccttttaactcccatgtcttagtatttgtcttattcctattttagtagttgaattgacagtagaagatatctactggctttttcctgtcaaaggcttgatttgggatttttattattattattatctatttatttatttatttatttttgagacaaaaggcgaactcaaagaaacagtcctgatgtaattctcagtctgaagttctccatatatgtgtatttttgtgttaggcagttttataaaaacctatgtgaaagttgatctctttggccgtattttacttctaggaagttgtcgtacatgaatgtattctttccaaagtgttaataaaatcctttgcgtattcttacaaaatctgtctcatatattgagatgttgcttcattggtttattggcaggaaaactggaattacggaaaagtatcagtacctcacacgtctcaaatacaactaaccaccttcccccaacaaagcaataatgccatttctagggaaagaccaaggcctactgctataatgcagaagccacaggatcccttcagaagctgagtaacagccattctacacgcagaggtagagtccctttaccctcaattctcagtcctgtctcttcctcagtattagtaacctgtttctagagagaatactagccttaacgatttaccacttttcatatcagcagttgtcattgttcagtctgaagtttaggtgaccacagtagaaaggggattttgctgtattcctgaaggaatttcaggctttaagaaaacgagggtccactgttggactagtagactcaaatcctgatacgcttagtagttgaggccaacagctgagcagcaggccttccaatggtggctaatctggaaagttatagactggtcagatcattaaaattcccaggtgaaagcagaccttcagcataactttaagacagcagtttttttgtgaaggtaaattgaaagggatattttagttgatatttttgaattttggagacatccagtggttttgtgatttttactggatataagaatgtttggcatgttatactcatataagaatgtttggcatgtggttgagcaccttgtctcagcatgtgtgatgctgggattgtagtttcccagcacaggcaggatgggcaatttcttacattgggtactgatttctagtcttctagaaccagaaagggcaaggctaggagtctcttgcaggcaggaagtattatgttcctacaagatgacagctcattacagattaggaaggcccaattggagggaaccatgccaactcgagtggtacctaaagaggaagaacttcttaccaggggaggatgaccccataccaagatgtgcctgccagcaagcaggtcctaatcatctaacaaagtgataagggatgagaagttgtggccatgggctcaagggtgactatgggaagagttcacattcaaagttgactagtccaccaacacacctctctgagatccagccaataggtagttttatttgccacgctgattttaattaatttttttccctgaaagtacttcctaaaggaagtatctcatgactttagggactattaacatactgtcatacttaagccatttgcattgtgtactgtatttcttttgtttaatagtcacagaggatagtgtaatggccaattttagctcagtgacattttgagtgactgctgccttttattaatttattcagacctgctactgaatggttaatgataatcgtagttctctaagggattttttgatgtatgtgtctgctgtgtgtgtgagtgccgttctcttagtaccattctcttggtgactccttgggcaaagatgcttcctatcataacaacacagagagaaaccactcaatgctgaattactttatggcatttacctcctttcacatgactctatcttttataattacaatttgaagctatattgtattgctcagtttgccatatctcattttaaaacaaatgtgtcctcaataagatatagtaaacacatttcaaagtctcctcatttattccctacttagcaaatatttgtgaagtatgtaccaggtgctagtctaagtgtatagatggagaagacattgatcttatggccgaatgggaggatacagacaaggacattttcaatgacaactgcataattaagcaaaagtagatgaaattataagagtaatgatagccctaatctcagtacttgtgaagtctctcctggagaaattacatttaaactgagacttaacagatgagtttaagttgaaagaaggaaatgagattatataccaatgtgtgtgcatgtgtgtggcccatgggtggacttgtgtcaggggaagaaattgggagctttcagggtaacagggactgctttgacatgggtcagaagttgagaagctgtgtgccccaggcttgtagttttaaacatttgaaatgcgataatttttctctgggttttctgacctgttcagttttgattacacgatctgatttgtttgttcagttttcatcacactatctgagtttgttccacttagtaatttgactgttttctactctgttgtcttactttttttttttttttggagacatggacttgctgtgttgctcaggctgaccttgaactcctgggctcaagctatccacccacctcgagtcttacctatatttatcatcacagataataggaaaagaacattattagcatcgatttcttaattcagaaatgctgctgtagacctgatgataccacctctattgtcagtcaaaaatgtgattcaatagagtgattaaaatctgtgagattagctgttggaagaaaatttatagaataataattaaaatcaataaattaattgaataattaatgacaattactatcccagaaacctcacaaactgtttcaaaacatatttacatatgacataacctttgaagatgatgttatttgcctattctattattatttaagtaatatatatatatatttttaaaatcatgattcctcattttcaaaacctaaagctctggcagtaatcctgctgagctcctgataataattctgaaatctagtctgacttttgaaaggaatggtggatttattttcctctaatgattaactttgtttagttaggctgagctttgggacatgatagcgaaattgttctaacctcatttcttcttcaccttcaggaaaggggtcagaactccttcagaaaaaaacatcactgttgccacataaggttaagtaaatagttggtgcaaaaataaaccaaaattattttaacaagaccaaagaggatgaatctagtctagcacccatttagttgttgaagacttcctggtggtactgttctaaatctctgtttcctgtcagagatttcagacagttctgtttattataatgtgaggaaatatttttgcttacatatttaagcaaaatatgttttattttcatgatgttttattgatttgttttataatgtatatcacataatttgtttataatgttttataatcaagctactacttgtagctttataatcaagtagtagcttgactgtgaaacattataaacaagttatttgatatacattataaagtgtttacagttatatctctatgggttatatcattagagaaatgcccagttaagggcaaaacttgtagtcaaatactaattattaaataagtaaaaagtaaataaataaatgttttcccgtatttgtgaagtttatcttgatctgaatagtgggtgttgtttacagaaagactaaccacttatcagtgaacctcagtgagcttttgtagccatcttctggagggctgttctgagggtttgcatcttatgcttttgatggtgttttatttagagaaaagtgtgtagtcctatttttctaactcctggcttttcttaaccttctacattatacttacattgttttaaaatacttttcaagtgaatccttaggacattgcttctgccctgttttcaaatgttagttcaactgcttgaatatcttgccatggcccctctgtgcacatgactggcttatgttaaatgcttggaagagcattgctttgtgcttcaagatggattacattcccataactaattatcagtaaccattttgtgctgtttaaagttcagaagggcttgcaggtgacagaggtaagcatcagtagggccaagtctcccagctgtgcagtgagagccagccctctttcatggaactttaatttattgtagcatttgacgccacatcagggtcatgatctgacagcctcccatgctgacatcctgagtttcaaatcagtgcatcattgcatagtgatctacgaagaaacatgattcattaactgcatttatttctaaattttcagtgcaagcttagccaggactttgcagtgcaggcttctaaattattttaagttcccccattaaacttttcaagtgaagaaattgcacaaaatgattactacatttccttccaatttttcaattgtttggttttctcctagcactatagtggccaatttgccagtcaatcaaaataaacctattaatccactcatacattgatatgtgtatctatgtgtcatctatctactctgtttacattaggatccttctatgtaacagagactgtgaggatacagaagaaatattaagatgattttctgttttgaggcactctgggtatatttggcaaagttaatatgccaccaaatgtcaaataaaacaaaataatgtctgtggatttccttttctttgatcacttgtggtttgattttcttcccaacttttgatgatgatcatgtgtggaagggttttccacatactgaaaattatattccaacatgaacatatgatcactggtagcacagttaaagaaaggtttgtggaactgcttatcatccttggttgggccagctatgcagtcctgtttcattcccattcgtcgtggtagctgggttggaaaacacatcgcctgatctgatgtgagaaggcgaattttctttatgttcttggaacccaaatgtcctgatgttgcgtatgctcttgtgaaacttagaaaactatgcatcttaatgcaccactactacttcttcttcctcttcttcctcctcctcctcctcctcctccttctacttcttcttcttcttcttttagaagaaatccccctctgtcatccaggctggagtgcagtggcaccatctcagctcactgcagcctttgcctccagggctcaagtgattctcctgcctcagcctcccgagtagctgggattacagacatgcaccaccacacccagctaatttttttctatttttatgagagatgggattttcatcctgttggctaggctgatctggaactcctgacctcaggtgaccaacctgcctcagcctcccaaagttctgggattccaggcttgagccactgtgcccggccttttactttttgcttctcttcaatgtgaaaggaatcaaataggtcaaaccacatcaggatgttgtagtttgaagttgtcttgtgattttaggtgtggttcatcgataatgatgtataggaacttaaacaggaaatttgaagccaggttctccttggcaatagagagcaaagaggtgccttgcttgtcgtgtcattgagcttcctgagaaagatggctaccttacagatatatagcgtaagcataaaatcattgcaaaacactatctgcacacctttaaatatgtctctttagaggtcttaaaatgcacttcaggacacaaaaatagaacagttgtatcaggagatgacaccaaagaacttttcagcggaacttccctttttctttttttcactgagaatttctatttggcacatctcaaactatgattataatgagactgcaattttctacacataatgttgcacagcctgagaaccttgaatcattatctggctctgtttcccagctgccctattcacttctcttctgcactgctctgggatagaactgccagtgaaatgcaaaagattcaacaatctcagagtttttattcagcggttaggcctaattctgcaaactgcaaaccacactttgcattggaccagatttggttttgtcatttgggtcagataacctcagagatcaatgggtttgcaaatttggaccataaatcttgcaggagctgtctattaaactttgtgttcatctcacccagtctctaaatctgaccctattagtgtcatgttagacatctcaaatcccatcagaaataatactaggtcagtgctgccaattcacctcatgtaactgacatcttcctaacatgctgattggagtagtgaggtgcaaaaggcccttccttgggtgtttctggttagtggaggtctatgggtgattgaaaaacaagcacttagatgctggtccctaagcctggattcttggtagaatgcatgggtgtgcttactaggagtgaattttaaataaagaaaagcattctgagtatttaaagtattcctatgtaaattttcaccctgcttatttatttataacaagagaaacttacaatgagtgaggctgtcttagtcagtttgggctgttataacaaaatgccatagactgagtagcttataaaccacagaaatgtatttctctcagatctggggactgggaagtccaagatcatggcactggcagattcgatattctagtgagggcctactttctggttcataggtgttaccttctaggtgggtcttcacctgatggcaagggcagggcagctctctggggcttcctttataggggtagtaatctcgttcatgagagctccacccatgaccttatcacctcccaaaggccccacctcctaataccattattgtcagggttaggggttcaaaaaaaagaattttgggaggacacaaatattcagactatagcagagtcttataaagaaaagcttcagagtagaaggacaatagaactatggtgtttaggagtttgctctcctttactaattcagattcattgcctgaaatgcaagttttttatttctgcagtgagctgttttactgttcattaccaatgatagccatggagactcacaccacatcttcatacccagctctggtccctgcttttctgtttgtaattcacacttacttatgatacattactggctgtcatgccagagttagctacaattaggttgcttccattaaattcaggaggaaaagataattgccaaactaatatggatagttatgctgacaattttataagggaaaagtaggaaaaaaattggatagacactctatatcttaaatttgttagatttatctaataaaaagaaactttgagtttaactttttgaaaactcagagaagtatagagatgaaaactaaacttatctgtaatcctcttctatagaggttacactatttttgtttatttttgtagtcctattgtgtatgtgtcaaattatacacaaatgcatatgccaattaaagtatgtacttttaaaaatgaaattatcataatatatagttttatatcctgttgttaaaaatattatatcaccactaatatattatgatagcttccactcttttactctaaaaacaatcagtgtgttaaaacatttttatacataagtcttcttaagttagataattttaacatttttatggctttttaaaattgcagtagttttggggggaacaggtgatgtttggttacatccataaattctttagtgatgatttctgagattttggtgcacccatcacccaagcagtgtacactgaacctaatgtgtagtcttttatccctcaccccacctcccacccttcccctggagctcccagagtccattataccattcttatgaccttctgtcatcatagctcagctcccacttataagtgagaacatacgatgtttgattttccattcctgacttacttcacttagaataatggtctccaactctatccaggtttctgtgaacgccattatttcattcctttttatgcctgagtagtattgtagtattccatggtgtgtgtgtgtgtgtgtgtgtgtgtgtgtgtgtatacatatatgtttacattttctttatccacttgttgactgattggtatttgtactggttccatatttttgcaattgcaaatggtgctgctataaacattcctgtgtacatgtctttttcatataatgacttcttttcttctgggaagatacccaagtatggaattgatggatcaaatggtagttctatttttagttctttaaggactctccatactgtttttcatagtggttgtactagtttatgctcccatgagcagcgtaaaacttccctttttaccacatccacaccaacatctatttttttttattttttaattatggccattcttgcaggagtaagggggtatcacattgtggttttgatttgcatttccctgataattagtgatgttgagcattttttcatgtgtttgttggccatttgtgtatcttcttttgggaattgtctattcatgtccttaatcaagtttttgatgggattatttgtttttattcttgctgatttgtttgagttccttgtggattctggatgttagtcctttgctggatgcatagtttgtgaatatttttcccactctgtgactctatgggctgtccatttcctcttctgattgtttcttttgctgtgtagaagctttttcatttaattaagtcccgtctatttataattgtttttgttgcatttgcttttgggttcttggtcatgaagtctttgcctaagccaatatctagaagagtttttctgatgttatcttctagaatttttatggtttcagatcttagatttaagtctttgatccatcttgaattgatttttgtataaggtgagagatgaggatccaatttcattcttctacatgtggcttaccaattatcccagcaccatttgttgaatagagtaactttccccactttatgcttgtgtttgctttgtcgaaaatcagttgtctgtatgtatttggctttatttctgggctctctagtctgatccattagtctgtgtgcctgtttttataccagtaccatgctcttttggtaactatagccttgtagtatagtttgaagtcagctaatgggatgcctccagatttctcccttttgtttagtcttgctttggctatgtggggtcctttttgcttccatatgaattttagagttttttttttttctagttctatgaagaatgatgatagtattttgatgggaatcatgtagaatttatagattgtttttgacagtatagtcattttcacaatatttattctactcatacatgagcatgggatgtgcttccatttgtttgtgttgtctgtgatttctttcagcagcattttatagttttgcttgtagggatcttttacctccttggttaggtataatcctaagtattttattttttttacagctattttaaaaggggttgaattcttgatttgttctcggcttggtcactgttggtgtatagctgtgctactgatttgtgtacattcattttgtattctgaaactttactgaatttatttatcagatctgggagctttttggttgagtctttagggttttttaggtatacaatcatgtcatcagctaacagtttgacttcctttttacagctaacagtttgacttcctttttacagatttggatgtcctttatttctttctcttgtctgattgcactgtctaggacttccagtgctatgttgaatagaagtgatgaaagtggacatccttgtcttgttccatttctcagggggaatgcttttaacttttccccattaagtataatgttggctgtgaattcatcataggtggcttttattaccttaaggaatgtctcgtctatgccaattttgctgagggttttaatcataaagggatgctggattttgttaattgctttttctgtggctattgagatgaccatgtgattttttgtttttaattctattatgtgttgtatcacatttattgacttgcagatgttaaaccatccctgcatccctggtatgaaacccgtttgatcatgatggataatcttttttatacgctgtttgattcagttagctagtatgtttttgaggatttttgcatctgtgtttatcagtgatattggtctgtagttttcttttttgttatgtccttttctggttttggtatcagggtgatactggcttcgtagaatgatttagggaggatttcctctttctctgtcttgtggaatagtgtcaataggattggtaccagttcttctttgaatgtctgatagaattcggctgtgaatccatctggtgtggactttttttttttggtagctttttaattaccatttcaatcttgctgcttgttactagtctattccgagtttctctttcttcctggtttaatttagaagggttgtatatttccaggaatttatccatctcctctgtgttttctagcttatgtgtgtaaaggtgttcacattgttcatggtagccttgaatcatcttttgtatttctgtagtatcagttgtagtatcacccatttcatttctaattgagctcatttatatcctctctcttcttttcttggttaatcatgttaatggtctatcagttttatttatcttttcaaagaaccagctctttgtttcacttactttttgtgttttttgtttgtttgtttcactttcatttagtcctgctctgatctttgttatttcttttcttctgctggatttgggtttggcttgttcttgtttctctagttccttgaggtgtgacctttccttgtctgtttgtgctctttcagactttttggtgtagacatttaatgctgtatactttcctcttagcactgcttttgctatatcccagaggttttgataggttgtgtcactattattgttcagttcaaataattttttaatttccatcttgatatctttgttaactgaaagatcattcaggagcagattatttaatttccatgtatttgtttacttttgaaggttccttttggaattaattcacaattttattccattgtggtcttctgagagagcacttgatataattttgattttcttaaatttattgaggattgttttatggcctatcatatggtctatcttgaagaatgttccatgtgctgatgaaaagaatgtatattctgcagttgttgggtagactgttctgcaaatatctgttaagcccatttgttctagggtatagtttaagttcattgtttctttgttgactttctgtcttgatgacccctctagtgctgtcagtggaatattgaagtcccctacaattattgtgttgccatctgtcccatttcttaggtctagtagtaattattttataaatttgggagctcctatgttaggtgtatggactaatccttttatcattatataatatcctttcttgtctctttagtttttgctttaaagtctgttttgtctgatataagaatagctactcctgcttgcttttggtttccatttgcatgtaatatctttttgtaatcctttactttgaatttttatgagtccttatgtgttaggtgagtctcttgaagacagcagatacttggttgttggatttttattcattctgccattctgtatcttttaagtggagcatttaggctatttacattcaatgttagtattgagatgtgaggtactattctattccttatgctggttgctgcctgaatacccttttttaaaaaattgtgttgttgttttataggttctgtgagatttatgatttaaggagattatattttggtgtatttcaagtcgtttttcaagatttggagcaccttttatgatttctcgtagtgctgatttggtagtggtgaattctctcagcatttattcatctgaaaaagactttatctcggcttaatttatgaagcttagtttcactggatgcaaaattcttggctgatagttattttgtttagggaggctaacaataagaccccaatcccttctggcttgcagagtttctgctgataaatctgctgttaatcttataggatttcccttgtaggttacctgatgcttttgcctcacagctcttaagattcttttcttcattttggttttagataacctgatgactgtatgcctaggtgatgatctttttgtgacgaatttccaaggtgttctttcagcttcttgtatttggatgtctagatttttagcaaaaccatggaagttttcattgatttttttttttcaaataaattttccaaacttttagatttctcttcttcctcaggaacatgaattattcttagatttggttgtttaacataatcctaaatttcttggaggctgttttttttttaattattttttatttgtctttgtcagattgggttagttggaaagccttgtctttgagctctaaagttttttttttctacttgctcaattctcttgaaactttccagtgtattttgcatttctctgagtgtgtctttcatttccagaagttgtgattgtcttttatttatgatatctatttctctaaagactttttcatccgtaacctgtgttgtttttttaatttctttttttgagatgaggtctccctctgtcacccaggctggtgtgtagtggtgtgaccttggcccactgcaacctctgcctcccaggctcaagcagtcttcccacttcagtctcccaagtagctgggaccacaggtgtattccaccatttccagctaatttttttgtattttgggtagagatggggtttcaccatgttgcccaggcaggtctcaaactcctgagttcaagtgaccctcctgccttggcctcccaaagtactgggattactggcatgagccaccacacctggccatgtttaaaatttctttaaggtagtttttacctttctctggtgcctccttgagtagcttaataatcagccttctgaattatttatctggcaattcagatatttcttgttggtttggattggatccattgctggaaaggtaatgtgatcttttgagtgtgttatagaacattattttttcatattaccagaactgcttttttagttccccttctcatttgaataaactgtttcattggaaagatctggaactcacgggctactgttcagattcttttgccccataagatgatcacttgatgtagtggtctcccccttcccctagggatggggcttcctgagaaccagactgcagtgatggttgtgctcttctgcgtctagccacccagcagggctaccgggctccaatctgatcctagggaatgtctgcaaagagtcctgtaatgtgatctgtcctcaggtctcccagccatggatagtagcacctgctccagtggaggctgcaggggagtgaagtggactctgtgggaatccttggttgtagtttggtttagtgctctggttttctcgaatgccagttatgctagcagtgaagttgtcatgtgaacagactcaggacttgtggttaagctgatgtgtggtaagcagtggaattagctgttgttttctccttctttggagcagggttgttctgttatgagttgctgtcataacttgagttggttggcctctagccaggaggtggtgctttcaagagagcaccagctgcagtagtagaaggatggtataatgttgccctatgttggccaggatgagtactcaggtcatctcaggtgatgggtaaggctgtaaaactcccaagagcttatgctgtcttgtggcatttgcagtggcaagttgcttccttgaaagggtctgtgaattcttttggttttcctggtatgttcctgcagtggttcttggagcgaaagttcacggtgtgagtctccagacgctgttctgtctgcctaagcaggagctgtgcattagacctgtctcctatctgccattttcctcaaaagaattttaagtctatggcttttgatatagattgccaaatgtttccccaaaatctgaaccaattttaaaaaaatttataataattctaattttacttaaactgcccccaaatgtattttataaagataaactatttttctttttttttggctttttcatttaatactagatataaataaattattgaaatttcccagataatgcatgcaattgttttggataaatcagtgggataatattttcttttatatttagttatcaaaatagattaagggcaagtaaagttagggagactgactttctttgtactttctttatacttagccagaaatttttctgttacagaagaattagattgttatttacatgccaaatatatgtttttcgtgcttattcccaagaatgatctttcacatcaataataaaataattaggttgataaatttaagaaccattttaaatcagataacttcacttaaatatgtgcataaaggctagatcttgtcaaaatttccctctcccctctttctctgtttttgtgtgtgcataagcctgaatatatcagttattctatgcttttggaagtatttttgctgacacgttaaaagtttgttttttttttaattatactttaagttctgggatacatatgcaaaatgtgcaggtttgttacataggtatacatgtgccatgttggtttgttgcacccattaacccgtcatctacattaggtatttctcctaatgctatcccttccctagcccctcaccccacaacaggccccggtgtgtgatgaaaccgttgttactagtttttatttcttaaagatgatgaacttgtatataaaaatattcttttaacattttagaaataaattttataagactgaaaggacaaactattagtaaatgtttcaaaatgtgaaaaacactttagttatagttatgtaatatcttagtgacctctgtaagatgtaatattttaagggaagttttacctatgtgaaaacgggagagtaagagtctgttggatattaggcaaagttcagtgatttggcaacaacagttgtataagatttcaaaaattgctaattgaatctgatataccaacatctaactagctggtacatgaactatagattacaatacattttttaaaaaaattgaggagtcagtgtattgaacaccttttaaaaaatttcaatttaagttctgggatacatgtgctgaacgtgcaggtttgttccataggtgtacatgtgacatggtggtttgctgcacctatcaacccatcatctaggttttaatccctgcatacattaggtatttgtcctaatgctctccctttcctttcgccctaccccccgacatcccccggtgtgtgatgtccccttccctgtgtccatgtgttctcatttttcagctcccacttatgagtgagaacatgcggtgtttggttttctgttcctgtgttagttgctgaggatgatggtttccagcttcatccatgtccctgcaaaggacatgaactcattcttttttatggctgtatagtattccatggtgtatatgtgccacatttgctttatccagtctatcattgatgggcatttgggttggtttcaagtctttgttactgtaaatagtgctgcagtaaacatacatgtgcatttgtctgtatggtagaatgatttataatcctttgggtatatacccagtaatgggattctgggtcaaatggtatttttggttctatatccttgaggaatcgccacactgtcttccacaatggttgtactaatttacactcctaccaacagtgtaaaagcattccaatttcaccacatcctcgccagcacctgttgtgtacttgccattctaactggcaggagatggtatctcattgtggttttgatttgcatttctctaatgaccagtgctgatgagctttttttcatatgtttgttggccacataaatgtcttcttttgagaagtgactctttgaatcctttgcccactttttgatggggttgtttgctttttttcttgtaaatataagttcctcgtagattctggatattagctctttgtcagatggatagattgcagaaattttctcccattctgtaggttgcctgttcactctgatggtagtttcttttgctgcccagagtaattgatagattcagtgctattcccatcaagctaccattgactttcttcacagacctagagaaaatgactttaaatttcatatggaaccaaaaaagagcctgtatagccaagacaatcctaagcaaaaagaacaaagctggaggtactgaagatttaaagactataattttcagaataataagaattttggaagcacttgaatttcttataatttaaggtgaaatgaactattttgcttgagagcaactcatctgtgaatataaagatatactgattcctaacacttgcattatctatttgcttttttctgtttaggacatccaggcagaaattgatgcccacaatgacatatttaaaagcattgacggaaacaggcagaagatggtaaaagctttgggaaattctgaagaggctactatgcttcaacatcgactggatgatatgaaccaaagatggaatgacttaaaagcaaaatctgctagcatcaggtcagaatagtcaatatcaaaataaaaataatggggtggaaggggtagatacttgtgatttttgtatatcagaaagagaaagcgcagccttaccaccacttctatttcatcagaaatagtttaagattttaatgcaaagcctgtttccttgagttatatagttcaagctctatttgtgtccaatactttctgccacctgttctagactattcataaatgttcatatattttaaatctaacaatactagtaacaatactgttagcaacatctgctaattactgagtgtttaccttgactaagtacttgttaggatctttacaaatgttactttatttcgtaatcaaaaaatcctagtaaggtgggtggtaacattatttcttctatgaggaaacagaggtttaatgaatataaggaacttgccaagttttggggctaagaagtgccaagtcagagtttgaatctagatcttttttactcttggcagtgaacatgttttgcttaatcatgttgttttttatgcctcattcaagatgtatttatagaaattaaatatctcttatggacactaaaatggaaaattgatgattcatgtctgcatttggagagagtaaaattaaataaggatgaaccttaggaccagaattctgactaggaaaagaccttgaaaattacccagagagacagtatgattagtgttattgggatcaagaatattttaagatcatatttaatagagagtggacagctcctaattatatataaatttagtgaatactggctgaaaaatatgttattgagcaaaaatctaaaagcagaacattggcaggaagtcctggatcagcttttgttttgttttgttttttgccttgtaccaagtgtacatcctttaaaccaaatggtcttgaatttgactctgacttcactatttactctctgatcttgaacaaactactcagcctctttgagccttggattattttatttacaaaatcagaatagaaatatttaacactcatgattgctatgaagatttaatggaatggtttgatagttccctaatctatgtaaatcctgcctaagaaagcatctagttaagtatttttatacataaaggggctcactggatctgcctcagctggtttcaagatttaatggagaacagaattttcaatgattacttatcataaatgaattaaaatttttttttctaagatgtattgaaaggtttttattcttctggagctcagagagtggaatttgcagttcctcttacatgtgaggaagggagcaatgcagcatggacatggatgctctgtgtaaagttcccattgggaaatacaataggtcagcattggccaactactttttcttagtaagagaagaaaattagggagttctatgtagtgagggattatacttttttaagatttgaattttcaactgcctagatcccatcaggttgcaactttccattcctcataaatatgaacaaaaatatttaaaatattaatagtgaaaagcattcactgagcatccagcaagtcatctatgccagcaacctaagaattccagagctggccctagtgaagatggtatacatggtgctgggattttcagaggttagagaatgacttatttaggaagaataatttaatgaagacctatatcataaacagatcattctaagtaaaaagttacagacaagaaatttttggtctttcttgggagttattgcctaagcctatcatgacacatttttttttaacctggaaagaaagaacttataaactacagttggaatattatgtaataagtaagttaacattatttttagaagatgggagaatatgcttgtggcagtggacttttgcattaaggtagatcagacattccagtaaaatgtaataataaattaatgtgataatgaattaaaataacttttactttgattagtcacctcaagagattcaagcacttattcaagcatgtaataaaaacttatttctgtgcttaaggcattgctattaataagatgtagtccctacccctagaggttcacaaatctgtttagattaaggtagggcccaaagcagagagtggttactctcacttcagatgatcaaagaaggcttcataaaagaggtcattccttagctgagccttgaaacatatatagttattccccagatagtctaggtgatgactggggaagggtaactaagttaggggcttgaaataacactgtgttgatatgaaaatcaatacattaagtctggctgagaatacagtttgctgctggtgtcatggggaaaagactatggctaacaaaaagacagaggtgtaagagacaagtcatgcacacctatgtgtaaccaagctcccttccattgtggatggaattgggagccttttgagtaacatgattagatttgggctttggaagaatccctcacacagctacggaggatgcctcggatgagcctgttctgaagaggggagacctggtaggagacactttcggcatctaggaaagggaagagagattgagcagataattagttcacgttgttaagacactggtgagacatccaggagaagacagccaaagccattagatggagatctgctcttcaaaagagagcagtaggtgaaatagacagacgggaggcggtgtccagagacaggtggcaggtaaccattgtgagttagttattagagaggttgaaacattagaagagggcaaagaagtccaagaaactctaatacataaggaatggtgaaggagagggaagcagcaaggaaactgagaagtccctatcctgaagagggatgagatccaggaatgctgtcgagagccaaggaaagagggatttctaaaagaagtgcataagtaatggtgcaagctgcttgaggaagtggagtaagatcaggcctgcagagtccaggagcaattagaagggctttggtggccttttgccagggccttttttttttctggttgagggagaaatctgattgcagaggactaaagagacagaaggggaggtgagtacgtggaaaaagaactgagtctactcagtctcgttatctcaaggaactcatctgtgaagggaagaggagggaagaatgcatttgctctattattatagttgatagtattgcaagtttataacagcttgaagctgtatctgtatctatattaacctgtccgtgcttttacagagattagatatggcttttaaaaatttttttaattttatttttaatgtttgtgggcatatagtaggtgtatatatttatggagtacacgagatattttggtacaggcatgcatgcaatgcataataatcacatcgtggaaaatgtggtatctatcccctcaagcatttatcttttgtgttacaaacaatccaattatacttttttagttattttaaaatgtacaactaagttattattgactataatcacccttgttttgctatcaaatactggatcttattcattctttctaactgttttatacctattaatcatcaccacttcctccccatcacccccctgccccaccaactacccttcccagcctctggtaaccatccttctactctatctccatgagttcaattgttttgatttttagatccccaaaataactgagaatagtcaatgtttgtctttctgcacctggtttatttcacttaacataatgatctccccttccatccacattgttgcaaatgacagaatggtggaatagtactccattttgtataaatacattttctttatccatttatctgttgatgaacacttaggttgcttccaaatcttggctattgtgaacagtactgccacaaacatgggagtgcagatatttctgcgatatactgatttcctttcttttgggtatatagccagcagtgggattgctggatcatatggtagccctatttttagttttttgtggaacctccaaactgttctccatagtgtttatattaacttacattcccaccaacagttcacaagggttcctttttctccacatgctagacagcatttgttattgcctgacttttggataaaagccatttttaactagattaggtaagtttagctaaaggcgtaaatgatctcttctttatttttatatttaaaaaatgaataagataaaattaaaatagcatgtttgttattacttggatatttataaaagataaaatagtttgttatttaatttagcctctgcatttgccaaaaatggtggcacgtggtatgtgttcagtaattgttagctattattattctcattgattacctctttgtttggcactaatttaaaatacacaggaattctctctaccctatgtttttctctcggtcggtaatgttggggatttctgagaaggtctcccaaaacagcttccccctttgctggctggattctgaacaagtatgaaacaaagtgtgctcaaggggcattcatcatgtggccaatagagaactcaaatgccatgttaattactgatagaggccaggttggaggtggtaacttagagtgaaggtgagtggagctgtcaaccaaaccccagaatgaggcagaatcaccagcagtcactgggcaaggtggcttcccaagtgagaaaccatacatggaagagtagaaaagaactcagtatcttcatggcctgtcgtcaagtggaccgtatgggctgagctaagcatgcccaattattctccctgaatttacagatcagattcgtcactctacctttgcagggactgtttcaggggtggagaagagaccagagtgtgcttagtgagaaaatccctccccaaggagtgggaggagtgttctcataacaaatctgtagaggcaatccacctcccaggctcctggctccttcattgcctactgaaagtgatcactgtggagcacactgttcagccctacttctctgttctttcctctcattcctttcatgcacaatctgctccttatactgccttctattgtgaacacattctcctatgtctcaaatatttctcgaaacttttccatcacttttctctctaaatgttgggtttccccttaattgcctacttcgcttgaaactcttttcaatagaggttaatttcctcattttcctcacctagcagccaatgagaatattctgaatctctaccaactgctatggacaccaaacggcctgaataccagccataaacatcaaatgtggtgccagaaaacactggctgaaaagggagccctgtcacacagggataagagggacaattgccagcctcattgtgactcattaagcattgcttctccatctttcaacaacatctccttagaagtgaatgcatccattatcctaatctttcatcatcttatttctgcttcttcctgatctatatataggacatgcttctacattcctcattaattcaagtgtccctttacttttttttttttttttttgagacagagtcttgctctgtcgcccaggctggagtgcagtggcacgatcttggctcactgcaacctccacctcctgggtttaagtgattctcctgcctcagcctcccaagtagctgggattacaggtggctgccaccacacccaacttatttttgtatttttagtagagacgaggtttcatcatgttggccaggctggtctcaaattcctgacctcaggtgacccactcgccttggcctcccaaactgctgggattacagacgtgagccaccacgcccagccccatttaccttttattctccatccttttctccactattattgttggtgccaatatccatattcacaactttttatattttgatttccaagtttctttttactttatctgtaaatgcctttatccctgttctaagtcccgtagaccttgtcacactgggagtcagttaacatttcctgtcatcttggcatccctgagataatcaatttccaggagatcaagggcagactgttttccagagtacacattttattttattacattcgacctggccatgtgcatctgaatgcaattggttttcccctattagttagtgaagagccctctgttgtatcaaatcaaataagaattgttttcaacctcatcagtaagatggctctccttcacattaaggttatgagtcctatccaggggggtgccttccttcattagcttattatatactggacctgtctatctactgttatttaactttacagttttatccagttcatttttattttttacttatttattttttaaaagttttacaatttcagtagctttaagggtacaggtgattttagttacaaggatgaattgtatagcggtgaagtctgagattttagtgcacccatcacttgagtactgtacattgtacccattttgtagttttattttttttatccctcactgccttggtaacctccccgacctctgagtctcatatgtccattatatcactgtgtatgcctttgcatacccatagcttatctcccacttgtaagtgagatcatgtagtgtttggttttccattcctgagttactttatttagaataatggcctccagctccattcaagttgctgaaaaagacattattgtattcttttctatggctgagtggtatttcatggtatacacataccacatgttccttatccactcatggattgatggacacttaagttggttccaaatctttgcaattgtggattgtgctgtgataaacatacgagtgccagtgtctttttgacataatgacttcttttccttttggtagatacctagcagtggtattgctagatcacatagtggatgtacttttagttctttgaggaatctgcttagagattgtactaatttgcattctcaccagtgtttaagcatccccatttcaccacatcctcattgacatctattgttttttgactttttaataatggccgttctggtcagggtaaggtggtatctcattgtggttttaccagcatttccctgaggattagtgatattgagtgtttcttcatatgtttgttgcccagttgtatatcttcttttgagaaatgtctaatcatgtcatttgcccactttttagtaggattatttgtttttgttcttgctaatttgagttccttgtagattctggatatcaattctttgttgggagattctggatatcaattctttgttgggtgcattgtttacaaatattttctctcattctgtgggttgtttttttgctctgttgattatttcttttgctgtgcagaagcattttagtttaagtaggtgccatttatttatttttgttcttgctacatttgcatttgcttttggggtcttagtcataaattctttgcctaggccaattttcagaagagtttttcctagaatttcttctaaaattgttaatggtttcaggtcttagatttaagtctttaatccatgttgagttgatttttgtatatagtgagaaataggaattcagtttcattcttccacatgtgactttccagtgttcccagcatcatttattgaatagcatgtcctttttccaatttatgtttttgtgtgctttgtcaaaatcagttggttgtaagtatttggctgtatttctaggttctctattctgcttcattggtctatgaagatgcttgatataattttgatttttaaaaattaattgagacttgttttgtggccttatgtattttggagaatgttccatatgctgatgagaggattgtatattcttcagttcttgagtagaatgttctgtaaaaagcagttcagtgcgcttgttctagagtgtagtttaagtccagtgtttcttggttaactttctgcctcagtgatgtgtctagtgctgtcagtatagtgttgaagtcccctaatgttaatgtgctgcagtctatctcttttcttaggcctagtagtaattgctttctgaatttggtagctccagagctagacacatacatgtttaggattgtagtatcttcttgttggattgatccttttgtcattatataatgaccttctttgtctttttttttaactgttgttgcttttaaagtctgttttatctgatataagaatagctactactgttcacttttggttgccattcgcatgtcatattttcttccactttaccttgaatctataagaatccttatgtgttaggtgagtgtcttgaagagacactttgggtgtttttatccattctgccactatgtcttttaggtgggaaatttagaccatttatgttcaatgttattattaagatgtgaggcactgtttcagttatcatgttgattgtcacctagacactttgttttctttattgtgttattgttttatagacccagtgagttttatgctttcagaaggttctgttctggggcataatgacctttcatttcaagattgagaactccttttagcatttcttgtgtggctggtcttgtattgacttgcatatgttgaaacattcctgcgtccctgggatgaaacctacttggttttggtgagttatcttattgatgtgctgttggatttggtttactagtattttgttgaggatttttgcatctatgttcatcagggatattggtctgtacttttgtttgttaggttgtttcctggtgttggtatcagagtgataatggcttcatagaatgagttagggaagactttctctttctcacctaacgcataaggattcttatagactcaaggtaaagagggtgaaaatatattatttgcaattgaaaaccaaaagtgaggagtagctattcttacattagataaaacagactttaaagtaaaaacaatcaaaaaaagacaaagaaggttattatataataatgaaataatcaaacaagaagatattataatcctaaatatatatgcatatgacaaattcctttggcatttggctgtgtgaaaaatactttatttctccatcatttatgaaacttagttttgctgaatacaaaattcttggctgacggttttttctgtttaaagaggctacaggtaggatccaaattcctgttagcttgtaaggtttctactgagtctgacttagcagtctgctaagtctgctgttcattcgataagtttttctttataggttacttgatgcttttgtctcagtgctcctagaactgtttcctgcatgttgacattagatagcctgatgactatatgctttgctgatgtcctttttgtagtgagtctcctaggactgctttgtgcttcttgtatttagatgtctaatccctagcaaggctagagaagttttcctcagttatttcctcaaataagttttcaaaactatttggtttttcttctccctcaggaacaccagtgattcttagatttggcccttttacataatcccatatttcttgaaaactttgttcatttcttttcattcttttttctttaattttgtttgattgggttaatttgaaagccttgtcttttgacaggcttttgacagaattttgacaaggctctgaaattctttcttatacttagtctaatctattaaaactttccactgcgttttgtaattccttaaatatgtattccatttccagaagttctgtttttttaaatctatctcattagaaaatttttcattcatatcttgaattgtttttataacttctttatgttgtttttcacttttctcttgtatctggttgagtaacttaatagtcatccttttgtattctttatctggtatttccaaagatttcatattgatttggatttattgctggagagctagtgtgatcatttggtggtgttaaagaaccctgtttggtcatattgccagaattatttttctggctccttctcattgcagaaaactatttattctaattattttttaatttattttttgttcgactatgtgttcttttaaatttctttttctctccttgaggatgtgattttaatgactctagtttattgtaacccaattcagctctgcatggtttcaggggtgaagactctgtatgagttccttggttatagagtctgtatgatggctttctcagatactcattgtagtagtaatgtgcttggtgtgtgagtgggttcactgtctcctgtggcattggaatggcagtggtctcttgaaggttatctcattccccagtggtgtgcacttatttattttatccagtatttcatttactaggttgaacagttcaggtttcaggccagtagtggaggtgtccatgagtaaaaaccaaacaggtgggtaatgtaatacccagtgatgcacagaggtcccagccttgacagaggcagctaggggatctctcagggaaatgcactgaggtcttttcagggaaaagggaggaagctacctcagccctcctgtcaggccagcaggaaagccccactacccagtcactctcctgacccagtttcctggctattcagatgacacagatacctctttccatctgtaggaatgctgatgttacatatagagagggactgtgactctacccctcatgtaagcctgaacctggaaggtacttctcttgtggggatgcagtcaccccactgttctagaatggctgtctacaggtgcacccacgccaagctcctgtgggagcagccccaggtgtgtctgcaatggtgggtgaaggagagaagtcccctcctccaagacccttcaggagcaccagggctgcctgactcttggggcagagctgcagactttctccactgagcccagcattacacccatgcctctgctgaaagaaacttcccacaggtggaaatgtctgggagtcaaggcctgctgtcttcattcttttgtcattcttttgtcccacgggttgctcccttgatgtggagcactccctctttcccctaggaggaggaatccctgagggccagactattgtgaatgctgctgctccactcagtctagcaacccatttggactgccacagtccaggctggtgcagggggaatgtctgcaagggatccagtgatgtgacctgtcctgaagtctcacagcagtgggtgccagcaccagctctgaggggggttgcagaggagtgatgtagactctgtgatattccttggttataaatagccttagtgtgttggctttctcacatgccatgtgtaatagtaacgaacaggtcacgtgggcagactcagggcctcctggttagccagggtgatgcaggtaatggtgacggccaaggtcacacaagttttccccttcctggtgtggtgttattctccttgcagatgctatcatggagtgagtcagttggcctccagctagaaggtggcacttggaaaagggcactggctgtggtggtactggtgggatttatgctttgccttatgttacccaggggaggtactctggtgtcccaagcaatgggaggggccatagagctcccaaaagtttctgttttttttttttttttttttttgtgtgtgtgtgtgtgtgtgtgtgtgtgtgtgtgttaagctaccaggaggagtgaaggggcaaaaccaggagggaggtgggtcaggcaagtccatgctctggctctccacaggcagacgcaagcagcagccctagtgggattggaggacagtttgctggctgctggggtagtgttccaaggaggagcacagctgcctctgctgcacagaagagtgcaaatgaggggggtgtagccagcagcagtaagacccacctagcttccctgcacttggcaaggcaggtctcacatctgcagcattccactaacagcaacagctagcaaagttccagccagtctgcactgaaactcaaaactgccccagatcataagccttcccagtggagatggaaactgcagggctttcaggccatgcccatcctcatctgcccatgaagcaggggcacccagctcctatgcccactcaagtttatatcatgaatttcagttgggagcatctcttaacctgcgacccgtgcctgagttaattggctgacctccacaaggtctcctgtgagacaggatcaggaatgacttcccttcatccctctggagactgggagtgcacacacagcacatcccgatgtggttccttctcatctactccccattgctcactacaccagctccggagctgggtagggttaaggccttttccctgacctggattgccaggttccccggtgggtgtgtatgtgctgtaggcagtttctccctttttcacactctggggacttacaatttttggcctggctcatgatatacactgcagcctgctgcttctttcaaagggtctgtggtgtctgtcagttttcttgttaagttcctgtgttgcttcttggaaataagttcacagtatgaatctttacacactatttcgtctttccaagtggaagaagcatgctaacaatgcttccaattcaacatctagggaaaaaaaaagttttattcagtttatatgctagatctacaatatttcaacttgattatttatttatttatggaacagagtcttgctctgctgcccaggctggagtgcgatggtgcaatcttggctcactacaacctccatctcccaggttcaagtgatgctcatgcctcagcctcccatgtagctggaaatacaggcacgtgccaccatgcccagctaatttttgtatttttagtagagacaaggtttcgccatattggctgggctgctctcgaactcctggcctcaagtgatccaccctcctcggccttccaaagtgctagggttacaggcgtgagccactgcacctggccccaacttgattatatttaaatgcacatcctaaagtattttcaactgtcaaattctccagcttttaaacatttattccttttttttcctgaattttcacatctttcttctaatcttcagttacttaaacccttcctcttttcagactccattaatcccttctacctagtttggagcccatcataagatacttcagcagtgtcaagagcttgaatttcctttccccttttaacttcttctatttcccagtctctgacattccaatgtccatactctctctatcccttgtctttaatcttggattctgcctagtgttgcactagaaagtgaaaaatggtaacattgatcctgctataatttgatactttctacttaaaattggcattgtgatttgcaatgattttctattatattcaccaccttgtctattttattttattttttaattatttattatttagatttcatgtttattttatttaacttttactttcagttcagggtacatgtacaggtttgttatataggtaaactagtgtcatgggggtttgttgcacagattatttcatcactcaggcattcagcctagtaccctatagttatttttcctgatcctctccctcctcccatcttccatcctctgataggccccagtgtttgttggtctcctctatgtatccaagtgttctcatcatttagctcccacttataagtgaagacatgtggtatttggttttctgttcctgcattagttttctcaggataatggcctccagcttcatccctgttcctgcaaagaacatggtctcgttctttttcatggctgcatagtattccatggtgtatatgtaccacagtttttcaatccagtcttatcattgatgggcatttaagttgattccatgttgttgctattgtgcatagtactacaatgaacatacatatgcatgtgtctttataatagaatgatttatattcctttgggtatatacccagtaatgggattgctgggtcaaatggtatttatgtttttaggtctttgaggagtcgccacactgtcttctcaatagatgaactaatttacactccaaccaacagtgtaaaagtgttcctttttctcctcaaccttgtcagcatctgttatattttgactttttactaatagccattctgactggtgtgagatggtatctcattgtggttttgatttgcatttctctaatgatcagtgatgttgaaggtttttttttaatatgcttgtcagctgcatatatgtcttcttttgaaaagtgtctgttcatgtcctttgcccactttttatggtgtttgttttttccttataaatttgtttacattccttatagatgctcaatattagacctttgtcagatgcatagtttgcaacaattttttcccattctgtatgtttactctgttgatagtttcttttgctgtgcagaagctctttagcttaattagatcccatttatcaaatttttgcctttgttgcagttgcttttggtgtcttcatcatgaaatttttgcccattcctatgtgtagaatggtattgcctcagttgtctttcagggtttttttttttatagttttgggttttacatttaagtatttaatccattttgagtttatttttctatatgatataaggaagaggtccagtttcaatgttttgcatatggctagccagttacccagcaacgtttattgaatagggaatcatttccccattgcttatttttgtcagctttgtcaaagatcatatagttgtagccatacagccttatttctgagttctctgttctgttccattggtctatgtgtctatttttataccagtaccgtgctgttttggttactatagacctgtagtatagtctgaagtcaggtatcatgatgcctccagctttattctttttgcttaggattgccttggctattgtgctcttttttggtttcatatgaattttaaaatagttttctctagttctgtgaagaacattattggtagtttaataggaatagcattgaatttataagttactttgggcagtatggtcattttaatgatattgatccctcctatccacgagcatggaatgtttttctattggtttgtgttgtctctgatttttttgggcagtgttttatagttctccttgtagagatctttcccttccctgattagctatactcgtaagtaatttatttttttgtggcagttgtgaatgggattgtgttcctgctttggctcttggcttgactgttgttgatgtgtaggaatgctagtgatttttgcacattgattttttttatcctgagacgctgctgaagttgtttattagcttaaggagcttttgggctgagactataaagttttctggatatagaatcttgtcacctgcaaacagatatagtttgacttctcctctttctatttggtagccctttatttctttctctttcctgattgccctgggcaggacttccaatattgtgttgaaggagtggtgagagagggcatccttgtcttgtgccagttttcaaggggaatgcttccagcttttgcccattcagtatgttgttggctgtggggtgttgtagatggttcttagtatttagaggtatgttccttcagtatctagttcgttgagaatttttaacctaaggggtgttgaattttgttgaaagccttttctgcatgtattgagataatcatgtggtttttgtcttgttctgtttatgtgaagaatcacatttattgatttgtatatgttgaaccaaccttgcatcctagggataaagcctacttgattgtggtggattagctttttcatgtgctgctggattcggtttgccagtgttttgttgaggatttttgaattgatgttcatcaaggatattagcctgaagtttttttggtggtggttgtgtttctggcaggttttggtatcaggatgatgctggcctcaaataatgagttagggaggagttcttcctcctcaattttgtggaacagtttcattaggaatggtatcaactcttctttgtacatctggtagaattcagctatgaatccatctggtcctgggcttttttttgggtggtaagctatttattactgactcaatttcagagctcattattgggctgttcagggattcaatcttttcttggttcagtcctgggagaatgtatgtgtccaggaatttatccatttcttctagattttctagtttatgtgcatagaggtgttcataatattctctgatggttgtatttttgtggggtcagtggtgatatccctcttgtcatttctgattgcatttatttgagtcttctctcttttcttctttattagtcttgctagcagtctatctattttatttcattttttttcaaaaacccagctcctggataagttgatcttttgaatggtttttttgtgtctcagtctcctacagttctgctctgatatcaccatgcctattttaaaagattttgatcctttttagtccccaaattctctctctgcaggtggccttttttttttttttgagagtgaggctatctgattgatactctttatgctacttggagtatttaatatgcattggttctgtatttcacattatgcttttattgcgctaaagttgatattaaagttttatagcataaaatgtcatggcagggaacatttgctctaatttatcataattttttaaaaagaaaatgtctgctaagatcataataacagctaatatttatatgctagatctaccctaagtgttttacaggtattaacttctttgaccatggtgtggccattggaacaatgtaataatatgtggctcaataccataggttaatatcttaaacgttatttttcattctctttggatagccatgattaaactttttttttttttttgagacagagtctcactgtgttgccagggctggagtgcagtggcatgatctcagctcattgcaacctccgcctcctgggttcaagcgattctcctgcctcagcctcccaagtagctgggattacaggcacccgccattacgcccagctaattttttgtatttttagtagagacggggtttcaccgtgttggccaggctgctcttgaactcctgaccttgtgattcacccgcctcagcctcccaaagtgctgggattacaggcgtgagccactgcgctcagcctaaactttttatatgctaaaatccaacatgctacatctcctttagcatctaaaacaatacatacaatgataaatttcacttcaatctgtacaagagaagaatgctaatgatttgaaacgtcagctagaagacaggctgtcaggaacttttattatattttttactcactggaaaaatatgaattggaaatacactaataagttctctgctgtggataacatgggtttaaattttcatgttaaacttatttaatttgagattgtcttaattaaatatccatttatcagcataatgatgtttaatatagatctttattaacatggtttcaaaggccagtaaaattgtcaaatctaatgaaaacagagttcaaagataaaattctatcttccctttcttttatgagtctattaaaaattcagggcacctttttaaaagcccgtagagaagattaacctttaacatcatcatttaaatctaatgttaccacattttacagtgtcattgacactatgtttagccttagatagttgcttttcctaaccatattgtgaaactactaaattttttttttttccaaatctaatagaggaactgctctcttttttttctggtttctctagtgtagcacattctaatagaactttctccaatgatagaaattatctatatctacactggttaatacaattgctgctagccatatgtggcctaatgagcacttgaaatgtgaccagtgcaactgataatctgaatttcaaaatttactcattttatttatcctaaattaaaatttaaatagccacatgctgctgatgtctactgtattggaatcacggctttggtgttcttttcagcaccgtcagactgaattctgaagacttgactcttttctcctaatatgtcttaattcctttcctgggagtaggaacaatcttttaaagttacttgttgttcttggactaataaaggtattttctttcattataacccaatttatagtttggagattttaccataaaccaaaatatatatatatacttttgtagtaagaataccaaattggacatttgattctgggtagtcattacacaacagaggatgggatatctgccagagtgggtgctccgtaaatgtttacttgtgctgagtaaatgaaaaactgtattttattttaaccaatgctccttctcacacttactcacactatttccttttatatctgtacactgggagaaggaataataacttgcttgaagatacagtttgtttgaaagttggaggcttttgctgatttaaaacagatactggtttgtagttacttccataattcctttctactgtgcttaaatgatgaagtaccatttttatgggtctttaccttctaacatgtttttgcattacattttttaagaataactggtcacttaaaaatacttatagagttgtaaaaaatgattcaattttaaaaggagtaacttgcgtaaaagatattctgtagtagacatcatcctaggttgataatacagtcaataaaagtgtttattgctttgtacatatcaaagtactaaaggagtgaactgaagcagctgagatgttagaataagtcaattgtctaaaaatatgaatgcccacagatatgtttgataaagaaatgttttatgtgaagattttgaaaatctggttgatcactagttatcaatagtcttagagaaatttaagttttaaaatgcttataggataattgagaaagtaccactaagctgaacgcaaatttaaagtttcttcttacaaagcattcgacctgttgcccaagaaaaggctttcatctttcaagatgaaagaattaaaatgaaactagaacactgaaggctgctacagaagcatgcatttatttgagcatatggtagtaatccactaaacacatagttataatctatttgagaataaccagaacagatttgccagacaaagattctggcagatcaacttgctttttactatgaaaaatcaaagatgcagagaagcacacatataccaatgttttctttttgatttcaaagccacttcagcatttcttttaaaaagtattgtcttcatcctcataattaatagatagtttttcagattctaaatactgtaagtttcagtaatcagtttcattatttctgtgcagtcaaagaagactgcattggaaaatatgtttgtgtgcatttcaatacaataagtgtttgcaactcaatttcaaaggaatataatgtgtgatttagttattgattattgagttaaactacagacgttgaagatgcaggatcaaatcatctgaaataaaagggcagggaacacgtataaatgttttgcacacggagacactcaagtgcttcttgattgaggacatctgatttctagctggttttgcaattaaaaatattggaaagaaattgcagtagctcagtcaaatttatttgctgcaaaatggcttagaactacagagaattttcagttaatataattgaaattatttagttctgctctgtgacaagtgaaattattagttatcagggaaaggtaattacatatttggcctaaagttaatcaatatgaacacagaaaagctggagctcaagcagaatcaggaccttgttaaccacagttttgtaaaatgagttcaattgtagcacctgtggaataaatagaactgatcataaatacaagaaaataaattttctaatcatactgttctcagagatttacaaaatgctttgaacttcgttctgtatttaaactttttttattatttcacacagcgttttttaatcagcatatgctgatgaaaggcagacgtgtgccttgttacacctctaaacctcaaagatcatgggcagtcacagtaattccatttccccaagttaaggcataagcccgcattcacagtctgccctctgggatgatgcaggattgagtcaagcccagttcgattccttgagtcgctggagttgtttctgactgatccatattttcaaatccagcccaccagtgggcctgaggctggataagtgggctttcaccagggccctaacaagagcaaaaaaggaacatgtgcatagatttatactcctattctcaagggcctttgctcttattggaaccttaaccatatcaaaatgtatttcctaaacatatctgtgattatggagttcataatctaagaatctgaaggtgcatttctgtgttaaatgcagaaattattattgaaacaaagacctcacctttaaatgagagtataaagtactgcagtgactttcgcccaactgttctctattcacactggtcatttgtcactagacattggtcaaccttaagccaaatagtatcctgtcgaagcaatgcctgattattttccaactttttgaagtaaacattgctattgttctgctttttggttacaacagaaggagtttttggttacaagagaaagtaacacatcagtaatttccattcctaaaaaagttaatcaagaccaggcgcggtggctcacacctgtaatcccagcactttgggagtccctggccggtggatcatgaggtcaggagtttcagaccaggctgaacaacatggtgaaatcccgtctctactaaaaatacgaaaattaaccgggcatggtggcacatgcctgtaattccagctgtattcaggaggctgaggcagcagaatagtttgaacccaggaggcagaggtcgcagtgagccgagattgcgccactgcactccagcctgggtgacagagcaatactctgtctcaaaaaaaaaaataataataataattagtcagtggtttttttttttttttttttttttttttggaaagaaaaatactatgagtctgttgtaaatccttaaatggcgtaaaaatagctaaaattaggtatttactgtgctcttagtggttattttcctctctctctctccatgtatagagataaaatgagaaaaaaatatatttggatgtgcgtatatactatacataaactatcaaaacttggtttataattgtacattctatcacggacatccttcttgaaagccttcgttttgtataggtctgtgttttaaattttgatagttattaccaataaatcctctgaatattatagcctattcaaaatagctgtttcttacaggaaatggatatatgtgtgtatacatatgtataaatatatatacttatgtaatatatgtattgtatatatgtatatcatacatatatatgtatatatagtatattataaatacatatatatatgtatttacaaggagtcagtctcttttgtggaagtaaacattacttggtcagataagattattatgctaaaggaaggtagataattttgtgaatgtaatttgcatttctaaatgtggttattattattattattatctctcaacagggcccatttggaggccagcgctgagaagtggaacaggttgctgatgtccttagaagaactgatcaaatggctgaatatgaaagatgaagagcttaagaaacaaatgcctattggaggagatgttccagccttacagctccagtatgaccattgtaaggtaagtggataacctatagtgagtcgcttaattcaaattctagtgaggtagatatttgaaatacaattatagataagtatcagagttgaaccaattatcacaggattcccccccccaccaccgtctgcttttagttgccagtagacatttaaagtgcatacattgtttccatttgtattatcttcacatttaactaaatttttttcaaacactaccagtatctgaagtataatattgcttttagcttattatgaagtttatctaaatttctaataggttttagaatcataatatattgaggttttgggttttttttgttttttgtttgtttgtttgtttgttttaccaagtttcactcttgttgcccaggctggagtacaatggcatgatctcggctcactgcagcctctgcttcctgggttcaagcgattctcctgcctcagtctcccaagtagctgggactacaggtgcctgccatcacacccaactaactttgttttttttttttaagatggagtcttgctctgtcacccaggttggagtgcagtggcatgatcacagctcactgcaacctctgcctcccaggttcaagtgattctcctgcctcagcctcccaagtagctgggactacaggcacctgcaaccacccccagctaattttgtattttgtatttttttttttagatggagtctcgctctgttgcccaggctggagtgcagtggcatgatctcagctcactgcaaccttcacctcctgggtccaagagattctcctgcctcagcctcccaagtagctgggactacaggcgcatgccaccatgcccggctaatttttgtatttttactagagacgggatttcaccatgttggtcaggctggtctcgaactcctgacctcaggtgatctgtcttcctcggcctcccaaagtgctgggattacaggcatgagccaccttacccgacctgagaaaatttttaaactacaaattaatcttaaattcaaaaggcatcgagtcataaggaattacaaactatcttgtttgtgtttaataaaagtgaaaaataaggacttgtagtaaaaaaaaaaaaaagtaatgcagatgaagaccatactatttaaaatcattttatgtgttttacttttctgagccaagccttttctttgattacatttttatactgctcaaatttctgttcctatgcaaatgtatacttttactctgatcagccaaaagatatgctgaaatgttatcaactgacacattaatccttagatccttgtgtgattaaatttgtgccttgttcactttccattgatttctttaatatctctttatgcccattttcttgtatatacatatcatcttattttattgtatttttcactcctcccatgtaatgaaagttctcattctaaatctggtcattttaaggtgacactatgattctatttccattttaaaaatgacaaacacgaatgcacacatctcctaaaggaaaatgtcatttatgtaataagttgctttaatacaaaatgataagaccctgaaatttatttatttgctttttgaacccttgtgactagattatcaaaattaccatttgggtgtattttttttctttctactcgaagcaggaatatgatagagaaatagctccaagataagaaaaaggaaaacactgttgatgtatgatatgcaagataataataataatagaagatttaaaatgaccgatttaagaaaatcctattctctcctaactttttctaacttttacttctattaattattcatacagtagtccctttttgtgggttacagtattagggatgaaacagaataacacaaagctcttctaatagatgtgctctgtaaggaatacaagctgcttatggccatatgctaatagtgtttaccgaaatccacatcttgaggtatgaaatgattttcctcttctggccttagcacataaagtatgtatcagcctctcagtctgtcctggctgtattttggcctccctcccagcaaggtaacctggatttaggttgtgttttgctctatcttagagcactgcaggcagttgctctgcttcagtccttgagacctaagcctttaggtaatgaagataatactgataatgatggtaatacaattggttcatttattcagcaagtatttattgagtgcctaatatgaaccagcatattctggtcactggtgactcaataatgaacaaaaccaggttcttacctgattgtgagagatggacactagacaaataggcaataaatatatatgtcctacggtaataacaaaaataaagcaaggtcaagaagatacaggaggatgtgggattataggccaaggtgctattttatatggagaaggtcaggaaagtatcacaaattgggtgatttttgaacagagacctggagtgatgtagtaagcacttagcaacccctcttgaaagtagaacatttagggaaaggaggcagagagcacaaaggccacagagcctgcaatgtttggggcatatttgaggaatagctgggagaccaatatgtttgaaaaaatttagccaaatatggtagataggagatgaagctggggtggcgggtgggagaaagggattcagatcatttaggtccttgaatattctttcttaaggactttggattttactcaatgagagaggaagccatggaagatgtaggtatctatagtgctgtgatctaatattatgtaataatataggtaaattatgaagagtagaatatagaggagttcagcactatttcagtaacccaagtggtggtgaattggaaaagggtatagcaggagagatgatgaagagtaactgctttctgaagacatttggaaagaatcaacaaaatttgctgatggattagatgtgtggaatgagagaagaagagccaaagatgtcagaagtcaaagatttttggacaaagcaaatagaaaatggaagtaccttttagagagataagaaaactgctggaggagcagtctgggaaggaaatgtaagagctcgatgtttgacatgttaagcttatagatgtttaagctgttggatatataaatctgaagttagaagaaagatcaggattagagatgagttagaagaaagatcaggattagagatcaaaattgtcagcctgtatatcagccctgggattggatgagatcacctatagggagagattgtatgtgattgtaccaagggaaaaaaaatattctaagaaatgagccctgaggagccacaacttcagaggttgggaaaatgaggaaactgagaaggaagagccagaaggctagaagaaccaagagagaacagagtccaggatgccaaaggaggaaagtgtgttatgaaggagggcgtgatcacaaggatcaaatattgctgagaggttaaataagatgaggacagaaaattaatcatctcgagaccatcttgttgaccttggacaagaggtgttacagtggcatgatggagttggaagcatgattggagtagattcaagagagaatatgaacaaaagtacagaaaaccattttaaggacttttacaacaaaggtaacagaaaaatcagatagtagctgaagaaagaatgtagggtcaagtagtggttttataactcattgctgagtagtgaattatgaaataatatattaatattattttattattcagcatgttctatgctggtaagaatgattctgtgaagtgggaagaatcagtgatgcaggagagaggataccagctcaaacagtggcaggatgcaatccattgcacaagtggagcagtgggtcttaggtctgtctgactccaaatatattcatcatccatttaaaacctacttaccgaataacttttatgtcctagcaccattctaagcactggagatatatcctcacatttttgtttttgtttttacttgagtctgttccctcttttttgctctattatgtcagtttcctagcttagtttatgaaagaatatgaagccacctttttcaccctatctttttctttagctgccttccaaaaatggacaataaagaaatgaatattaacatattattctcaagaactaatattttagtgtataatgctagctttctgctaaattagtactcggtatagattagctgaataagttgattcacagaatttatacaaaaaaccctccagttatctgcttcctctagaacatgacacagtacagaaaggtgtgctgggtttggggtaagcattctttgtaggtcattgctgaagtcacagggctggaggattccttgattccttccagggtagccatcatgtattaataagtaagttagttgccatcatgtttgacattacccttacagaaaagaaaaactcgagggaagaaataaaagcttaaaagatgaattttctggctgggcgtggtggctcacacctgtaatcctagcactttgggaggctaaggcaggcggatcatgaggtcaagagatcaagaccttcctggccaacatggtgaaaccccgcccctactaaaaatacaaaaattagctgggtgtggtgacgtgcgcctgtagtcccagctatttgggaggctgaagcaggagaattgctggaacccaggaggcagaggttgcagtgagccaagatcacgccactgcactccagcctggcgacacagtgagactccatctcaaaaacaaacaaaaaaacccaaaaacatgaattcttcatattttctttataggttgtgacatttgctgttgctttgtgagtaaaggtttgaaagtccagtgtcacattttttaatgtgagacacaagatctgtaatgtagataatctactgtgaattgtgtgtggccatgggttttagggtgcactggaggcaggtaaggagggttgttggctcctcataggtgtgataatttgggttagaggtgtgagtgaggtactggtagtagaaaaggcactgagctagaatgagaatacttttatttaaaggctggctctgtcactgatgacctgggtgaccctgaaaaagtcatttgacttacccaagcttcagtgtatggaaataagtagtatcttagttcctttgggctgcagtaacaaaatactataaactgggtggcttataaacaatagaaatttatttcttacagttctgaaggcggagaagttcaagatcagtgcactagtagatttggtgtctgccaagggcccactgtctggttcatggatgatgtcatctcactgtgtcctcccatagtggaaggtagtcttttatatgatactgatcccattgatgacagctcctcactcatgccctaatcaccttccaaagacccacctcccaataccatcactatgggagttaggatttcaacctgtaaattttggtgacacatagacattcaaactgtagcaagtagttccatttctacacagaattgttctgacaatcaaatgaaatagtggaaatgaaagtaatttaggaaaagtaaagtgctgaagggcagtatataattttatttaattatgtatattctgtcaaaagcaaccttctttaccaattgccaagagtaatgttttaaaattacgttactataaatattatataaaatatatataattaacattaattcatactaatataaatctacattattacagttagggctaatgattatgcatttgtagatttagagcaatatttaaagaagtgtggtacctacccgtaattatttatcttactgaacatcatcagtcataattatcgaatagtctaagcatagtttaaccttagccttgcatccaagaattcccttcctaagagtttatttaatagtttttggccagtgttcgaacataaacctaagtctctaacttatcctgagtcttttcttgaaatcaaaatctcttatgggtgtgtaagagattgctctatatttcagggcagctttttttttttttaagtccttgaaaatgtccttttcctctgctgtcatattccattgatcaggaaaagtctttatttagtgtatattcatgtataatttagaattgtcaattactggactgaaagaaccctaagaaataagagtccagtcctcttatttacggtagaggaacatgagaggcacagtgtagtttaagcaaacctgagttttcatccctccttccctctcttactttcatttacttactatatgcctggcagtttattttattttttaaggaaaaataactttattttgaaaaaaaatcaattctctatttaaagcatacatgagacagcatctttcatttagtcctaaacttgattacgtattctcattataatattccaatgacattctgcaaatacatttcaagtatgtcatcatatacttattggtaaatatcaaacaaagctactgactgtgagggaaaattttccgtaattttttttacctacccagagatactcatcccactgtatatctgggatttttatgaacatttacaaattttaacaaaattcttttttttcccattgcatgcatcaatatgctaaattctccactacaatccaggtaaaatactgatagtgtgtgaaaacccagtgtattttctaatactgcccatgatagacagagtgaaattacagcataaagagtagccaggaacctatactgtaaacattatttggctccaagtatcttgcaacaaatagctactaataggactatacatagcacatagagcacagcaatcctggattgtagtatgcctgtaaaaccctttaaagcattttttctcaacctttttatcattaccctccttttcaattacaaaaattaaattcaaattaaattaaatagctttaactataaatttcttcctaatgagagaaattaatacaaaagattttgttgggtaggctgattttggaaggtcacaatccatatctaagatttttttcaccccaagaaccaatttttgttcccagttgagaatgtaagggttaaagttgatgaaataaattaaatagcctttaacattattagagagaaaaaaacctaatgggtaacaatggagattgagatagttgacttctagaccatctctgttccatacttgctgtatgatcagggaagaaatcatgtctctttattttgttgtttgggagaacacaggaatagcataaaacctaatagcttggaaaaatcacttaatctcactggactcagtgaggctattaattgaaagaattggtatagatcagttgttttcaattctggctgcactttcctaggacatataaaagatatcaatgctcagttatatttacccaggccaattaagccagtctctggaggatatgggctcaacctatagtgtaaatcagaatcacctgatgggcttgttaagccacagattggtaggccccactttcagagcttctgattcagcaggttttgggtggggcctgcaaatgtgcattatcaagttctcaggtaatgttatgctattagtctattgaccacactttgagaactgctggactaggcatttgtgtaagagtgaatgtgtgtgtgtggtgtgtgtccccaggtgacttctaatctcaaaactattcgtatagaaaatttcaataaggttcttttaagttctaggatactcagattttaatataataagagttgttaaacatcaagatggcttataaaaggagacctatggacaaatatcaacttcttggtcaattttcattaaaaactcgtttcttaaagctttttacagtatttttttgaaaattaactttttttttttttagctgcatatatgggtcttcacttcacttttcagtaaagataacttatttggttatcagtgtctgatcatttgataagaccaatggaaggtttggatagtagccagttatttttgaattgcttgaagagaatcttgtaaatttgtagtccagaggtaattctgcgattgcttcaatacttggaattgcaatagagttgtaagtactgattcttttacaagaccatgtataaaccaagaagtcttctgtattttccagtcccaaaactgaatcgataaaaaagagtgccattttttagataaagtgtttagaggctttgcctttggcctctcatattttcctttcttctctagaggctctgactcctcgggcctctgactcctcacgccttcatcccctctgagttcttctaggatctaagacaccagagaggtcctggtatagaaaaaaacacagtccctgtttacatgaaatttacattcaagggagatcctctgcttatccttaaacttagagttcctgttctctgtgttttgagaaatcatttcccaaaaggttatggctgagctgtgaactgcgcattgttatcccaaatctcaggttgtctttgcccagtcatccacttctgtaaccccaacttttctcccttggtgttttagtctgtcttttgctgctgtaacagaatgtcagggactgagtcatttataaggaagagagatttatttggctcacacttttggaggctgggctcacagttccagaggcggggaagttcaaatcaagggcctgtatctgatgagggtcttcctgctgtgtcatccaatggtggaaagcacaaaggcaagagagcgttcatgacagagaggagatggaagctgaacttatcctttgagcccactcctgctataactaacccactcccactgtgataatgacattagtccattcatgaaggtcaaaccctcatgacctaatcaccgcttaaaggctgctcctcttaatatcagcacagtgtcacttaaatttcatcttgagttttggaggggacattcaaaccatagtacttcgttgcaattcgggcaagcttttagttcatgtacccatttatttccaatctcttctttaagggaatacagaactcttttcaattataacattatgatgtagctttaaacagaacataaaataacttttaaaaccaattttttcagatatgttttagcttactgaaataaagttgcttctcttttcatttagtcttgtctattattataaattctgttagtattttttctgatctcctactttttaggtcttttcctttttgtaataaagtttaaaaatctttttagctacaaagaactcttgtcttacagctcaaaagtacataattagaatcaatcaagatcaaccctcagatggcttgatactaatattagccaaggttttttattccctaaaagttcccatagaaagaaagggaccttgtacttgatttctaattcattctctaatcttaaggtaatagtttgaattactttatttcaagcaacacaatactgattaatttgacgtaaactctcactgctaatttaagatgtctaaagaatatcagatggaattttgtgaagagacaaagaacttaacactaatttaattattccaaaaggtatgatctcataaatgcaagttttgaataccactatatacaacctttatttaggggttgatttatagaaactcatatattctgagtcttctgattccgaactatctttatatattctagtcctttatatgtacataaatgatttaatgactccttttcaaagttactctttgataatagtggtgccaatcatttcattccccatccatccacccacctatccacactattcaccaaatgtcttaatgttaaagttgatgcttctgtacgaagagcaataaggtatagcctctgcacctcagtgatatattttaataattcctattactaaaagccctgtgcttgtggtttgttggctgtatccagagggaatactttacatttaaatgtttaggtgatggctctgagatttcgccttagaatagggatataaagcaatgctttaaagcatctcctatgttcaaacacctagcggttatagatcaaatataaaaaacagaaaaccaaacatggcattgtgggctccaaaacatgacaatcattctacaggccagaaacaaagcagaaaagcaaactagctagtgatgttgatgctgctggaaaaatgtagcagaccctagtgatgagcaggcaggaagccccatagcaaagactcagctcaaaacccttctcttacacacagaaatgagtgattcacagattggcatcctttccttccgtagtgtaaatgccccaggcactgctattatgaaacttcagtgtattgttgatccttaattaaatgtgcgtactttcttgggtgttttaatcagtgtctcagaacattgatatattttcagcaacatcaataataaatactttgttcagtgcttcaacaatacataaacatttgagacctggggcctagcacatagtaaacactcagtaaaaggtggctgatatcttttcccataattgttgggagtcttttctgatagttttgatcatttttattttgtttaaaactatataggctacatgagcagttttaactaaataaaactgtattaatacctgttatttaccacctagtataacccaacagaactagctttcaattactatctagattaacccgtcaaattagacaagggtcaccttatagtctttgcaagtatcagtttggtaaacagcacactcattatttttttcgtgtaagtacatgtttaattccctcaaatgttaacataaattgctacttaaaaaatatgtagtgttttaaggactgttttaaaataaatggataggctaggcactgtggctcatacctgtaatcccagcactttgggaagccgaggcgggtggatcacttgaggccaggagttctagattaggctggccaacatggtgaaacctcatctctgctaaaaatataaaaattaggtgtggtggcgggtgcctatcatctcagctacttgttggagactgaggcagtagaatcgcttgaacccagggggcggaggttgcagtgaaccaagatcacacctctgcactccagcctggcaacagattgagactcccgtctcaaaacaaacaaacaaacaaaaaaaaaaaagcagcttactaataaataataaaataaatgggtaaagttgaatcttcccatctaatgacttcaatcgaatttttagaatcatttttgaagttttgaagaagctgaggtcacttatatgcaacttccctttcaagaatgtgagcttatcattcagtcaacaattacctataatgcacctacaatgtatatagtgtttgtaatgttatggatttactctaaccaaatgctcttgagtggataaaattgcagatgcagattttactgtacaatttgcacttcattttcataacaatgtaaatattaagttatgtaggagcaattatcagagctctaataccctttctccaatagaatgcatatttgatgttagaaaagcaaatctagaataattgaaagtgcatgattcaggtataatttcttgtttgtgtgttctttccctcagggctactctggcctttgcttaacccagtttatttcctatattcaagctttattatataagactcagaacatatctggccttaagctgaattgccaagaaacattagcaaacttgctcattaaaataacaaattctaacattgtctttaaaacaacaacaccctactgttaaatttaggctgtgtgtgtgtgtgtgtctgtgcacacgtaggtgtggtagaattttttttccctactaaagtaatcggagactctgcctgaaattctgtaattttgaggtcttgttgtgttagaaggttgcctacagtgggaaacttgtctttttctgaaattaaaaaaaattattttccaagttcctctccaacctttgccagtctgtgttgacttactccttattaaacgctcagctctttaaggcccattagtcaagctgttacttgtgtgcaggcctgaagcagcagttctgtcagtgagcctgcacctacctgcaacaccccatttggttgtctgcacctggacttgtctcctaatcataatatgtaatattgcaactttaccccaaagggccatagaatgtccatgtttagagggagaggtgagacagcctaataggtgtcactctctggtggtaaaattaagagtggatcacaaatgtaggcaagaaacagaggcctgtaaaaccaatgaacccttttgcaaaacaatcattttactgcctctgcacatatttagcccagagataatttattttatctagcagttcatatattcactcaggttgaaacttctatattgtacctgatgtttgctgcatactttgctaggtgccaagcatgcatgagtttgtaagactatttttgcaatcatggagctcacttcactctctagcagtgatgcaggcttgaaaacaagtactacagtagatattaaaagtgctgtaatacaggcatggacacacagccaaggagacatgaatcacgattatttgtgcttgggaagattgggaaaggctccacagagcaagatgcttttgagctgaaagatgccttggaataagtaagaaatcactaaaggtgttaccaaaatgctttagggagaaaatcctccaaattagccatggcatgttttggagtatgcagtagagtaaggggtgctgcttacctccttttgtgatgatacttagaataagactgaaagaagaaaatacaagttcagcacctaatccagtgccacattagaataggtactaattgaggatcccttagtgaaatatttgggaccaaaagtatttagatttcagattttttcatattttcgaatatttgcattacacttaccaggtgaccatccctaatcagaaaatctgaaattcaaaatgctcctaagagcatttcctttgagtaacaatattgacactcagaaatgtttggattttggtgtattttagattttggattagagatactcaacctgtattgcatatattagctggatgaaggaatacatttatgtgtgcatgtattttaaagagtacagggggccgggtgcagtggctcatgcctgtaatcttagcactttgggaggctgatgtgagtggatcacctgaggtcaggagttcaagaccagcctgaccaacatggtgaaaccccatctctactaaaaaaaaaaaatcaaaaaaatcagctgggtgtggtggtgtatacctgtaatcccagctacttgggaggctgaggcaggagaatcgcttgaacctgggaggtggaggttgcagtgagccaagatcacagcattgtactccagcctgggcaacaagagcgaaactctgtctcaaaaaaaaaaataaataaataaaaagcagggtgcagtggctcatgcctgtaatcccagcactttgggaggctgaggtgggtggatcacctgaggtcaggaattctagaccagcctgaccaacatggagaaaccccgtctctactaaaaatacaaaatttgtcaggcatagcggcacatgcctgtaatcccagctactcgggaggctgaggcaggagaatcgcttgaacccgggaggaggaggttgcggtgagccgagatcgcgccattgcactccagcctgggaaacaagagtgaaactctgtctcaaaaaaaaaaaaaaaaaagtacagggaaggatactattttattactatgaaaagcaaaagaatttctgtctcatttttaacattgatatttggtattctgattcaggcattattttttatgtcactggggtggaaccaaaatgaattttgtatattaactgctcattgagggatgttaaccaaaactttcaaggcactatgtaggagatttttttttaaattttgtctgcataccaacggaaagtaagcctgttttctgtctcctttttcatgtagttttattagtgctatcaaatttaatgagtgctctgcccttttttgctgtcattctgtaatgacttcagatccatatatgctgatttagctttgaaagcaagttgggaaaagagtaaattacattctagcagatttgtctcatgtttgcatcatttatttttttctgcttatattctccagtaagcagttaactgcttttttgaaaccaaaagctaaagaagcctgctgtaccagcaatacctctatttgttataattcagctaccctgcatttagggccagcttctcaggtgtcccatgcagtcacacagggctctgctcttacaaggtttctgcacttggcttaatgttcttctgctgccatcttgagattcttagtaatatttggacaaggggccctgttacactgaggtctgcaatcacatagccagacctgcttgcattgcgaagaacattaacatatatattctgacacatgtaacacaatattgaatgcctcttaaaacttgcttcaagcatctttccatctccttaggtaaggaagccatcctgagccccactctgagttacatgccccttgttgtaatttgtgatgtctctgtttgttagtgttggctgagctttgactaggggttcattccaagacctcacctttcctgctgacttattaactgttcctcggactctacttgacttctagaacaccgcactctcctgatgtttttcttacgtcactggtagctctttctcagtttcccttcctggttcttccttctctcccctgtcttctaaaattgggatgtgtcacttgtcaggccatgtcaccttctctgtattcactccttcttgggtttaaaaatgccatctatatgccaagcactcccaaagatatatccgtttacatgtcatctctacttgagtgtgtaataaacacctcacagttaatatgaccaaactggcttcctgaattggcccctataacatgttctacccagcgttctgcatttcagttggtaggaatattatttcagttgcttaggtaacaaataataatcacctttagtcctgcctttctctcattttcagtctgttaggaaatcctgttggttctctgttcaaaatatagaatctgaatctaccacctgtgacactcctctgtctctggaagtatcagtccagcaaccagagtgttcctattaaaataaatcaaactctgtaggggcttcctaacttattcagaggaaaagccacagctctcggaatggtctgcaaggccctgcctgatctgacctaccccctactcacaccttgctcatttcctctcttgctgttttttctctgacacactggtttcggccacactggtcccttgctgagctttcagtcacagtgccagcctgtctgctctgcccaaaatgccccttctttactcaacttctctacttgaactgcagctccctctgagcactccttctctctctctcattctctctctcttccccccccacccttttctacttctttctttttctatagcatttatcagaatctaacacaatgacttattttctatgtcttttttttttttttgcttggtactctggatgctcgataaaagttgaatgttgactgaaagagctatacccaagggaacatgtcctttggtgtgaatgttccttttgtctctttatttctcagtaattcttttttattcatttgcgttctaaagaatattacattttgaaaatattcctactttaaatagccaaatgtttaataaaggtaataactgaaatagaagtgtaagcaataatcttgtctcgagagctagaaatcatttcagttacatgacatatttgaaatgtaagcaaattaaataacacaatggcactttatgccttgatattgtagtcagttcagaggttatcttttctctatcttaatactgcctaaattttcaactcaagaatgggaaagatttttatttaagggaaaatgaattggcatacctttaattgttgagatagcttttaaaatatagcttttttttttttttagctgtatgtgctggatattgctagattcttccagtgtttgtgcttctctctgttgtaggaatttgatacctttgaatgctagttgagttgagattcttaacaaatgcagggagaagcttaaacatgtggagtctctcattcagtgactatgttgtcatgcattatattttataaataaatatagccccaagtcattgaagcaaaatataaagggaaagttttataattgttacaaatacaaaaaatgggcttctaaacacatttgtaattcttcataatgctgttctttgaaagcagtaatttattcaatgctaaatgagctcaattctagtgggcattcctttcttaaaagtataatttttaattatgaaaataataacatattacagagtttatgaaataaagaataaaaacatggccataattttatcaccataacaacccttttcattttgcattatttcctttttgcatatttaccttttgcatagttttacttgggtgcagagtttttatgtcatctttttcacttagatacatgtcatgcctatttcttcacattgctatgtggtcattatcacaataacttttcaaggttgcataatggcctctattgtggccatatcatagaacctaaatatattccaggtgttggagatttaagtttctttcaattttttaaaaatcataaataatgttataatgaacacttttgtgttcgtagcttttctggatcattttcttaggatatattcccaaaagtgaaattcctgtttcacacaatatgaccatagtaatgacttttgatatattgccagcctactttcccaaatgatcaaaccaattttttgcctccagcaatgtgtgaaagtgaagctttaccataccctggcctgtgatttctcatttttgttctattattagtgatccttgtattgttagcagtaaaatactagtacttcatagatgtatagaaatttagaaaacagttttggaatatcagacacctgagtcaaggttctctccacaaagaggaagaggagaactggtttgatgtttgggttagtcatgcctagaaggataggagaaaagctctccatggcttgttaaacacattagttgaagaaatttatatttgtctgaaattagtgtgtgtgatgtcatctagctgaccatttatacctccttagagaattgttttgcccttttattctggaagaaaccggttcacaaaaaaaccgctgcatttatttctttgctttctaagaatctaaactgatatgagtcttgcaacacagttttctgcttatgaaatattttggctttatcttggagaatcacataattccatttttttctttttctttttcttttcttttttctttttttttttttttttttgagacagagtctcgcccagttgcccaggctggactgcaatggctcgatctcggctcactgcaacctccgcctcccgggtccaaatgactctcctgcctcagcctcccaagtagctgggattacaggtgcctgccaccacacccagctaatttttgtatttttagtagagacggggatttcaccatgttgatcaggctggtctcgaactcctgacctcatgatccacccgcctcagcctcccaaagtgctggtactacaggcatgagccactgtgcccagcctgagccactgcacctggcccatttttttcataattaaataatttatcccttagaagagttaagtcatctactttcagatgttcctgcaaacggagggctttgttctggcattggtcaaccaaagctctaggtaaaatggctagaaccttcctctacaagtaagagtgaatagaggctttggaaagaaattcagtctgagacaagagctgagaaacatggtagaattttagattagcatgattttaatagtaatgggctgggagtggtgctcacacctgtaatcccagtactttgggaggaaaagtcaggaggatcacttgaggccaggagttcaagactggcctggtcaacatagcaagactctgtccctatttaaaaaaaaattaattagcctggtatggtggcatgcaactgtagtttagctacttaagaggctgaggcagaaagatcacttgagcccggaagttcaaggctgcagtgagctttgatggtgtaccagcttgggcaacagagtgagaccctgtctcttaaaaaaagtaattttttattctacagcactgaatagtttcaaaatatcttttcattcactgtctcaccagtgaagttagtaaaatgagagagatgattaacacgcagagaatttaagggacaaacccaagtaagggcccatgagcacaggatgagtaagggtgtgcctgtgtggtatggactggactgtacctaaggctttggctgcaaatctttgtctggttttactttaccacagaacagtatttttaacatctcctccttcattcatacaaaaatttattggctttccgctatacctgctctggcacaaatttcagccttccatgagggctcagtctggcaccagagtcaggtttgcaaagaggccatggtgagggagtgtggtgaatgctggatccccgtgagggaaggctgcagctcatgctggtggtgcaggtggcactggagccggatccctgaagggtcaaaaggggtgagccctgtggatttctttgactttcaccagtgagggtcaatgagattgttaagaaagcaaaacaacacagatgttgtcttgagataataatgtcttctatgggggctggaaggggaagactacttccttctactgcagagttgctccatgctgctttcttccacagacctactttgtatgaaatgctcccatttctcaggtgttttccttccttgatccccttctaacaatggcctcctgaggttccacattttcttttatgccagtttattcattttctcattcattaatccaaaagatatactgagtgctagaatctaatgagaaagagcagagctattgaaaatttgaagcaaggccaggctcagtggctcatgcctgtgatcatagcactttgggaggccgaggaaggcggatcacctgaggtcaggaattcgagaccagcctgaccatggagaaaccccatctctactaaaaatataaaaaattatctgggcgtggtgacacctgcctgtaatcccagctactcaggaggctaaggcaggagaatcgcttgaacccaggaggcggaggttgtggtgagccgaaatggcgccattgcactcaacgctgggcaacaagaacgaaactccatctcaaaaacagaaagaaagaaagaaaatttgaagcaaaagccttctgaattgcaaagaccatgaggaggaaatagcttggcatgttctcggaacagaaataaggactttgaagctagaaatgagggtgtattaggagatgacatcagacagcagggagggtccagaccttggtaggaagtttagaatttattctaagtgcaacaggaagccatgggaggagggttttaaacagaagacaggatctgatttatctatcattttaattttgtaatttagaaaattttaagaaaagtgcatgttagcaaagtttggtgcttgatacacggacaatttggataatggctttagattgaagaaaggttaggaaagagttgctatttaaagaaggggggtgaccccaggatttatttcacacccacatgtttgcttttctctgttcttagctcagtccatatgaccaactgctagtttaggagagaagggtttagcagggattcccctcttccctccaattctcttagaccctgttttcttattaaaagatttgcaggatcccatctcggtcagtgatgtcagcaacccagccattatggtgagctgatgccatgctcatgaagaaaatgaagatcagctgattgacttccaagtatttctgccctaagccacgccaatcacttctttataccgtcttatcttttaatctcttgtctttctcactaagttgtagcaggtgggagaaatgttccaagaccattaaaggaggataattgggaatctctgtatagacatttaaagttgaataagcagcagtttattcggctgcctggtgctcagaggcacaccagtagcatccaaagagcaccctgagttcgaaggagtcggagaggtgggacaggaggaagggtgtcttcaataaagtgaattcaggctcttagacattctgttgagaatggaaactgtgatttttagtagctacattctgatatttacaatcaggtcttcattaatctgccatttcacggcttcatttagtttaagtaagtatgtggaaggtacacaatcggacaagccatgagagactacattaccttcaatgtgtttattctatctgttttcttgagttgctttccaccttattacctctaagctagttacaattttttttcaacacacagctcatgtgtgtttgagaaggttgacctccctccctcctctgtgtatttattcataatgaggctccttggtaccccgtgtgtacctctttcagagatttgtggcacttaaccacgttctgggctagtattgttctctcttcccctttatactataagtttctcaaagattgagtttatagctgatttttgccttctcttatgcctaacgtatttttatatattgtatatatttgtactttaaaatttttattttggtggaaatctttgttgaaaaatctattatatactttaatgccacctaaggatgggagaaaatttgaatgttttcttttggacacaagataatcattgtgctctccagttgttatttttgactcttgaggtatttgggattatatctccttctactaaacacctcagagcatgcgacttctaaaacatgatttcagtattccctttgttgctgttgttgttgttttgagacagtgtcttgctccgtcgcctaggctggaatgcagtggcaccatcatagctcactgtagcctcaaactcctggagccaagcagtcctgcctcagcctcctgagcagctgagactataggtgcatgccacaatgcctggctaatttttgttgttgttattgagacggggtctagctatgttgcccaggctggtgtcaaatttctggcctcaagcaatcctcctgccttggcctcccaaagtgctgggattacagttatgagccaccacagccagcctcagttttcctttttgaaattattttgtatcttcctacttattctaactgatgctggtctattgcttggaggccaaaacttcactttatacaatttgtctgggaggggaattgaaggtcttttcacatatctactacaggctgagcatcctttgtgtaaaattcttgggatcagaagtgtttcaaaattcagtttttgggattttggaatatttgtgtatccataatgagatatcttgtgaatgagaaccaagtgtaaacatgaaattcatttgtttcagatataccttagacacatagcctgaaggtaattttatacaatacttaaataatttcatgcactaaagtttgtatacatttgaaccatcagaaagcaagagtatcaggtgtggaatcatttcagcactcaagtttcagattttggagcatttcagatttgggattttcagattagggatgctcaacctgtagaatgcaaaatacataagctttgtgacaggttgtcatgtaagagcacttttagctcaatggccaagccttgagccagcaagtagccagatatctgctgcatagagaagtatgtggttgctaggtgtctctcccatcaaccacaaggactctttccctaacttccttgatagaaaacattttaacagaagcaatcaccctcattcttcactcactcagctctgagagcaccaatctctaagctaggcatgcacttgcctcagagcctttgcactttccattttctctgcctagattgctcttttgccagatattctcatgccttgctccctcacttccctccggtttttttttttaaatatcgctgtctttcagatgccttccctgaccacttacacaaaatattaccaaccctcatcttcaacccaccatcctctcccactcatcctgtgtggtagatttttatagtaatgaatcatgcctccctgtgtccacactcctatgcagagggaaatttttgctcttttcatcaaaagataaagtacatttttccattctcttgaatctgttctggcttcatgacatgcttcaaacaatagactgtgacaccgtgatgtgcaaactctagagctttgctgtgtaacataggaacccttagacatatgtaaccatttgtatttaaatcacaattagataaaatttaaaatttagttcctcagctgtactagtcatatttcagatactaaataaacatatgtgactagcaggtaccatattggagagcaattagagacgacatagggagaaactgaggtaccccagacaataggcagtgatgatttccagacatgtgagtgaggctgttttgtcccgccctccccatccaagctgcaggatgactataacctcactagtaatcccaggtggtaccagccaaagaacaggtcaaattgccaacccacacaatcatgaaaaataattgtcattgttttaagctataagttttatataggtttgatacacagtcatgataatggaaacacccttcaattctaatgactgacagtaatttggaaaccatgccctaaggggttacctcatgggtgagaatgtcacaaaatgaggaagacagagtgaatccataccatccatgacagtcagatcagttccttatttatctaaaaagagaaaaggatatttgctattactaaaataaaaaccaactgcagactgaaatacttattaatagcacagacttagttttacatcaaaaaattactaccagcaatttgcaaagtagataatttaaaaatacagaactaactgaaatccattatttcagtttaagatgaacagattgggtgactttgttatatcttgctctgacatgttttgtaacattaaatacatagtatttaattctgagagcatttctcccataatttattatgctcaagcatttattgagtgctttctatatatgtctaggcaggtacagtagaggatttcagatgattaagacctgaaccttaccatgcaagaactcacaatttaatggaggggacagatgcatggtcaaaatatatgcacattaacacagtacaagctctgttagaggaataggaagtgctctagaaacactgaggtgggagcagccatcttgttattgcacatactgaacacacagaatgagctcttactttgcatatgcattggggataaagactagaaaagaaacaaattaggctgggtgcagtggcttacatctgtaatcccagcactttgggaggccaaggtgggtggattgcccaagctcaggagttcaaaaccaccctgggcaacatggtgaaaccctgtttctacaaaaacgtatgtaaaaaaaaaattggccaggcatggtggtgcatgcctgtaatcccagctacttgggaggctaaggcggcagaattgcttgagcccgggaggcagaggttgcagtgagccaagatcatgccactgcactccagcttgggcgacagagtgagactccatctcaaaaaaaaaaaaaaaaaaaagaaagaaaaaaaagaaacaaattacctagagaattgttttgtgtaaaaaacagaattattgttttattttaataataaccttgttgagatagtattcctgtatcataatatttacccatttaaagtgtgcaattcaggggcttttagtattttcacagagttgtgcaccattattgctatctagattcataacttttttttttttttttttttttttgagatggagtctcgctctgtcacccagcctggagtgcagtggcgcaatctcagcccactgcaacctctgcctcccgagttcaagtgattctcctgcctcagcctcccaagtagctgggactacaggcacccgccaccacgcctggctaatttttatatttttagtagagatggggtttcaccatattggccaggctggtcttgaactcctgaccttgtgatcctcccgcctcagcctcccaaagtgctgggattacaggcatgagccactgcgcctggcccataacttttttatattccaaaaagaacatccatacccataagcagtcactcctatccctcccctccctccccagttccccagccttaagcaacgagtaatctactttctgcctctctagacttgcctgtttgggacattgcatggtaatggaatcttacactatgccctttcatgtctagcttctttcaatgagcatgattttaaaattcttccatgttatagcacatatcagtatttcattcatttttattactgaataagatgtcattgtattatggatatatcacattttgtttatccattcagcagttgatggatatttgggttgtgtccatcttttggctattatgaataaggctactataaacattcatgtatgagtgtttatgtggacatgtttttctttttcttcggtatatacctatgtgtagaattgctgggtcatgttgacaactctgtgtttagcattttgaggacatgccaaactgatttccagagtggctgtgatatggtttggctctgtgtccccacccaaatctcactgaattgtaataatccccgcatgtcatgggagggacccagtgggaggtaattaaatcatgggggcaggtttttcccatgctgtttttgtgatagggaataagtctcacaagatctgatggttttataaaggagagttccccagcacatgctgtcttgcctcccgccatgtaagacgtccctttgctcttccttcgtcttctgcaatgattgtgaggcctccccagccatggggaactatgagtccattgaatctctttcctttgtaaattacccagtctcaggtatgtttttactagcagcgtgagaatggactaatacaggttgcaattttaccattccaccaacaagcatcaaggttcctgtttcttcacatcctcaccaaaagttgttattatctggaacagaactgttttgaatgaaaatataaactcattaaaacagaaaaattccaattatattatgttatatgcatttaaggtggcccatatatcagtcacgtgatattagaacttaaagctgaatgccactttgtagctctgtgtacaaaacagctcattggagtctaatgatcttatcattaatgttcaccaggtggttgggaaatgcaggttttcttttatgtctaattgagagagttaaagtgtgaaatgattatatgtataaaactgttgaaagttaaatctatttctgacatacaattaaatataattgaaataggacaaattgaataacaaaattaaatttacaaaacaggatatgaatggaaattatcatatgtatgctgctttgtaggatatttgggtggtgcattggcatgagggccagagccctgtatttgtacttacttggcatggttcccacctgcccaggcttgcctcctgtacttccctacattggcatatcaaaggagttcgcgagacattctccagccagcaccctgcgcagagaggatttctttttcttttttttttgttttctgaagcacggagtttaatgtggttaggaagcaaaatacaatctaagactcagacttgcttttaatgaatccaggagacctgacaatgatacattataaaaaacaaaaataaaaatctgacaataccccccaacttgtcagtggcttcccatagcccatgattgggttgagtgagtctcagtgcataggaagcagtgcagtggtctttgtggcctgacctccgcccacaccttcagcttcagctgctaccgctctctgagtactgaagtttttatagttccctgagggcgcacactgtgacactcctgcattctctgctagtgtttagtttcctttgctgggagtacctttccctctctgcaagactcaatttacgcaccacctcccccaggaagcattacagatcccccaaggctctactaggtcccagacatggcattagtctgggtgctttgtttaccatgctgaacaaaaacagaaaaagtccctggtctagtggagcttatattttatctaagagagggactaaacaagaaatatagaaatgtcacctcttttgcatagtagaaggtgccaggtctaggaaatacaaagatagttaagcagaataatgagaatgggaaatgtaggggatgagaaaggtggaatgctacattcaataaggtaggtgggtgggcctcaccttctagacagccttaaaaaggatgagggaatctgtgatatggctaaatctagggaaagagctttccaggcagagcaaacagacagccaaagagattactctattgtgagagtctccatgttaaacaaataaaattccatccataaaggaagttgataggttggttttccaaagtatcctttctatagaccaatatgtacatatttccatttcaatttttgaaatctaaaaagaagttccaagacaaatctctcctttgccctcttccctccccacacccctgcacaatgcacattttgtggactattaatagtctagaattcctaatcagaaattactgtacacctaagttgcacagatcatattgtcttctttctccaacaaaagatctggatttgcctgtaaaatatatgccccgtaatagttttatatttccagagggccagttctgcctctgctcttccttctctgagtcatttgcctttatgtcccgtcttctctcagtttttaatctttccacattattgcctattggtgttttctggttgatcttttgtgctaaattctaaatgccattgtgtgaattcttcctcctatttgataaaccagagtgaagacctgttctaagatcttcatcttctcttcagtggcttgcattaaatctgtacattcctggaacttccccttccccaggaagaaatctagcacaggccttgcacagcattttaagaatctttaccactcctgagccaggcgtggtggcccatgcctataatcccagcactttgggaggccaaggcgggcggatcacaaggtcaggagatcgagaccatcctggctaacacagtgaaatgccatctctactaaaaatacaaaaaaattagccagacgtggtgatggggccctgtagtcccagctactcaggaggctgaggcgggagaatggcgtgaacccaggaggtagaggtgaaggttacggtgagctgagatcgcaccactgcactccagcctgggcaacacagcgagactctgtctcaaaaaacaaaacaaacaaacaaaaaaacccaacaaactactccttgctgggtgtggtggctcacagctgtaatcccagcacttgggaggccaaggcaggtggatcacctgaggtctggagtttgagaccagcctggccaaccatggccaacatggtaaaatcccatctctattaaaagtagaaaaattagctgggtgcagtggcaggcacctgtaatcccagctacttgggaggctgaggcaggagaatcacttgaacctgagaggcagaggttgcaagtgagccaagattatgccacttcactccagcctgggtgacagagtaagactccatctcaaaaaaaaaaaaaaaaaaggaatgtttactgctcccatatttactgatttgatttggattttggaaatatcttgaccactaaaattaaaaaaaataattttgctatattacctgctggttttcactattttttaagtaacatgatttttcatgtcgttattatatatttttaggtgattatggaagtaaatgctaggaatatttttattcctctagagcttcttgctctaacaacataataatctaagttaaagaactggctcaagacttgtaaatgtgtatttttttggattaaaaatctttttttttccatttttcttgtatctctttttatttccatatattaaaactttaagtgccagatgtatataatctttttttttttttaatttcctgaatgtcacacatcctgcgatttcttcacaagctgcgtttgttaaataggagatgatggaaggtttgttatccccgcccccacccaccaacatagtcatttaatgctcatcagtgataattgctgtgtgaatttagttgatttgtgcttgcttcgctgtcagtctttggttttatggatctaggaaggacatataaatgtacctttgcattttagagaaagttttattttatcctatatcctgtgttacatcactatatcttaattgtggattttttggttcactttgctcgttcatttaaattttttatcaaagtaataattgtatagtttaaaaatcaaaataatatttacaatgcttacacacaaaaaaatagcatttttgtcactccgtctctcactagttcttgtcagctcttctcatccctccccacctgtgagggttaagctacactttggttagtccaagcacactttccagtatgcttaccatgttatgacttatctcctctatacacgagtaggaaaattatcagtaatagtggtttctagagtagtacttgaggagggtaacgggtggcgtgtgcatgcttcatggccttattcaatcaagcactctactcttgatttactgctaaatcctccttgaatctttagatttcctaaaggctatcatgagattttctggatatagaaaatgtagcccattagtctctgtcagcttcattaccagggtttttttgtgtgtatgttgcttagatccatatttttatataagataattattctggtatttctagattttttcattcttaccttttattgactatggaagaaaaggatctagcctgcaaatactgtagcatctcaacatagtgatgtcaaatactactaaaaatttagttgtcttcaaaaggaaagattttattcattctaacatataatgaaagttcagtattttagaaaataaaagtctgacttttcataataggttgccagggaactacaccgaaggcaaaatactagagccagtaggtggttatgtgtttaattttaagaggataacaacattaacaaattccatttggcaacagcgttaaaattgcacctgggaaaatcttcattactcttatcttgcagcagtcactgaaggagtttggttgtttttataggtgcaggggtgaaagtttagctccacttcaaggaacaaaggtgctaaagagaaactattctgagaatcatagatttgcatgaaaaacctcacaaaagaaaaatagtaattgcctcagcatgagagatggaacatattttaagataattggagactgttttatatgtgccctcattggtttatttttgatttcatgtatgtactttgtttctatcgcttcatttttttttcttaatgtattctaaataatgtaaaacccttctgaggatcttattgctacttgtgaaattacctttctctgtatcattggatgtaatttttttgtcagtcagtcttacaagaaaaaagtatcttagcaaaggctattatattttatcaatctgacatcagtgaaaatcctaaaagtacattttgtgtaaattcaaatacactgtaacaatttcccttaagtgaatattttaaagctgtttctttttttgtatacttaacgtttacagaaattatcttttttcctttgtatttttcttcattcatatctataaaatttacattttggcttctaacttagctgaaatgcttgctattagtcattttcttgctaagtgtggtcagaagtggtatagttgaagatgtcccataatttggtgaacacgtgaggttacaaactcaacttttgcttctcttttgaaaggccctgagacgggagttaaaggagaaagaatattctgtcctgaatgctgtcgaccaggcccgagttttcttggctgatcagccaattgaggcccctgaagagccaagaagaaacctacaatcaaaaacaggtgagactggtttctccactacatcataaaaacacatgctaggagaacaaaaaacccaaaatcaagtaggaaatttccttacagcattttaggatctaatatttaaatcttttcttctaagtgttactttattcaaatatgtcattaattcacagatatctagattcttaaattaagaaaataaaatttttgtatacctcaatatcaattttaaaggaaattaactgcagaaaaaatagattgtctaaaaagtgtactgtaactataaaagtaatttctataagaaataaaaatttatattatatttaaacaagttacatgataaataattgcaagtagtagaaagttattaaaatataataaatatacaaaatatttcaaggtctataagtaagattacttttgataatgacacaccaaagtcctttcttttacaagcagacaacatttctttaatttaaaaataataccctgtgtgtttatttactttggcttaaaatttaaataataactaccttactagcaaatttactagcaaaaaatatatatttcttatatttaaacatgttatgtgataaataattgcaagtagaagacatttattaaaatataatagtaaatatataaaatatttaaatatctatatgtaaggttacttttaaaaatgagagaccaaatacttttcttttacaagcagacaacatttgtttaatttaaaaataacctgtaacatttatatactttagcttaaaattgaaatagtaactaccctactaacaaatagcaatatatcacatagtaaacttaagagaaaatgtgtaatgaattctgggtccaatatatatctgtattgtgatttttcactgctgacaataaaatcattctgatgcatttttaaaaataaacatgccattcaaaatcgtttttcatcattcacttcacatagtaacagcaaacctgaaagattgcctcatgctgtgtccagcagtgtaaatcatgaacatttattacttgtaagggaagcatagttagaaaatgctttctttgactataactggaactggatcagacatatggacaggtagccgttttcctactgaatcttactcaaggaaccttcttcagtccgaataaatttcccatcaagaccataatctttttgactctctgaaactagttgtatatatgtgtgtgtgtatatacacacatgtacacacacacacagcacacttaacttgtctagcatttctttttgttttctgctggtggtaacactgtctttccagttagcctcctacaaagctaagtcattgttgagtcttccacttttcaccaaatccagtggtctacaaatcactcataattattatttcttttctttttctttttttttgagacagagtctcactctaccacctaggctggagtgtagtggtgcgatctcggctcactgcaatctctgcctcccaggttcaagcaattctcatacctcagcttcccatatagctgggactacaggtgtccaccaccacgcccagctagttttcatatttttagtagagacgaggttttgccatgttggcaaggctggtcttgaactcttggcgtcaggtgatctgcctgcctcagcctcccaaagtgctgggattacagacgtaagccactacactcagccttatatttgttatttctatctttgaagaattattccttttgagtactctgttttatatatatatatatatatatatacatatatatatatatatatacacacatatatatatatatacacacatatatatatatacacatatatatatataaaaaatgtatacacacacacgtacatactcatgtgcacacacatactgccattaattccacattctcagccttttgtgtgtagacttagaatagttttaggcagaatctgttgctacttttggtagcattggtcccattgcattgttctgtcatctgtgtgcaacacgtagtatttgcccatatattctctctcttccactttagtctactactgataagtaaatcttatcatgtaatcatattcgtgtttctcccctgattatacatctttcttgactttccattgcatactgaaaaaaaatcttggcctccagcatgacatttattgtttcattttatgtcatgttatgttatgttatgttatgttatgttatgttatgttatgttatgttatgttatgttatgttatgttattttgagacagggttttgctctgttgtccaggctggagtgtagtggtgaaatcacggcccactgcacatcaacgtcccaggatcaagtgatcaatcctcccacctcagcctactgagtagctgagactaccacagactatcttttttaaaagtttttgtagagatggaatctcattgtgttgcctaggttggtcatgaactcctgggctcaagccatcttcccattttggtctccaaaagtgctgagaatacagccatgagccaccgtgcccagcctagcataatatttattttaaaaatctttggatcatcaccttgaatgcaaacatgcagcaattaggcatataattgagactactgattaaagcacacaaatgtgatttctgtgcacatatgttgcactctgaagatatcatttgctgagcttagggctattttgaatatagcacatttgatcaaatggaacacaatccttgtacattactgccatttggaaaacatactgcttttggccggacgcggtggcttacacttgtaatcccaggactttgggaggccgaggcaggcggatcatgaggtcaggagatggagaccatcctggctaacacggtgaaaccccgtctctactaaaatacaaaaaattagccaggtgtggtggtgcatgcctgcagtcccagctactcaggaggctgaggcaggggaatcgcttgaacccgggaggcagagattgcagttagctgagatagcaacccagcctggtgacagagtgaaactccatctcaaaaaaaaaaaaaaaaaaaactttgtaattgaagccctcctgatttttcaacaaattttttactaccatttttatagttccataaccaatctatactatctacttccttgaatgattttggaactgtcttgtcatggatgtgctaccttcccttcttccatcttttgaagttctttcaaaagaacattttaaggcttgcttatgtccttcatatacaatattagaatggttaagagccttagagatgaactagtccaaggctattcacttaacagatgagaaaactgaggtccatcgaggaaaaatgaactgctcaggtctcagcccagtcctgttggatatctaacatatgcagctattgtttgtattgattttcagatgttaaaattttcttacttgccctaagttgaggaatccagttttgagcattttataacctatgcaatgcctgtatatatcaggtactcaataaaagtttgatgaagagtacatgactacctgagtaaataagaggtataaagaaattcatttatttattattctgacttcatatacaacctattacaagaacatttttatgagctagatgcttaacaatgattcctctctcacccctcccctggccgccatcaccatatttaacaacaaggaaaatgagcccagatgtctcatgtaccccgtaaatatgtatacacttactgtgtacccacaaaaattttcaaaaaaggaaacaagccgaaactgtagagaattctttgaaagagttgaactcatcagtacttgcttttcctcacaatcttgagtctataaagaataactgtagatgggagaaactgatattatcagcagtagagtaattggattattgatttttaagatgaaatggaaataaaccccaacttttctagaatgagcactcaacatttacgaaattcctttcctatatctgtcaagaagcccctgccccctcccgtcaccctgagtccattcttccatcagtctttgcatcttacctcatgctcctccgtcttctgggttgctcgggctaaaatccactgggccgctcttggctcctttgtccttttgtcacccaaatccattctgtcagcaagtcctgtcatcactacattcaaaaggtacctagaatatgatcctttatcaccacgtctactatgctttcctggtctaagcccccactaccccttggatgattgcaggttccttcaactcatctgcctgctctgcctttgctcccttattagagatttccaacacaatagctgtaaggaccatttgaatatataagtcatgtcatgtgactcagagaagtcagattcttataatggctcacagactgtatgccagggggtgccatgttacatttctgacctggtctcttattattgtccctttcgttccactccctgtagatgtaagctccttgaagacagagggttatttttttttcactgctgtattttgtaatatttagaatactatctggcacatagtaagtgcttattacatagtgtttgaaagaatacgcatgagctgagcactgtccaagatggataaagaagtataacgcatgttcctgaggtttcaatttagtgggagatcaaaactagcacagagcgtgagaaagcaagcaatgtaaaagtgtccgtagtcatgcactcagttgtgtcctgaggattctaagtgatgcgggcattccaggagagaaggactctgagggtcagagtggagagaggttgattcctgagctagtcttaggggtatggacaggtaggaagtgattaagttcgggaaagaggaatggccatgctggggacagaatccttagcagaacagctcagccataaggaaagagcagctgtattttggggagtcagtagacagcctggcctggttgccagagtcttgtgcctggacggcagatggggatgagatggttgtatgtgctgaatggttcagaggacctggaaaggtcctacagaggacctggaaagtcaggcagaacattgtaacttcatacaacaagaaagaaggtgctagtacagttttgtttttttaagcttggggaaaaaaataagaagttcacttgtctcatcttatccaatttaaaatctaccttcagtcagcttttcttgtctcctttcttccctaggactttgcgaagtttataaaaagctactttaaagcagtacaaagtgttacatcactaaaacgccacattattctggactcttctcagtggtcagtcatttaagggttaaaacgatattgtataatttaaaaaaaagtttcatgaacattctagtcatgcgtcattcatagtgttggtgaggaagtcatttgggcacacatgtttcaaatccctaataaaatgtctagaaagatacacagaaaaaaaaaatactggtttttgagttcttattttactgtgacattcaggatgttttaagctccatgtttttaatactacatttggggggacaagaaaaaaagaagtcatgtcaatttaactttatggttttttttgttgttgtttgtttatgattagcaattttcatactgcctcctttcctgatactattttctataacaatggctggttttacttgttaaaaataaatcgaagaaaactatccataatagcttttatacttttgttgtttaccatgacttatgtacatctgctattagaagtagcaagcatttgaacattagttatcctgtttgatgccgaagtactcaatgttggagaggttagatcaggaagaaatcaagtgatttttttcggttctatttaataagcattttgtgagtatgtgatgtgtaccatgctataaggacataccaagatggagtcacctcttttcttttaggtaaccattctagaaaacactttcctccatgatttttatctccaatgcctttttttcttccagttcctttaaattttttccattactaattatcttatactgttgtatgtatttttaagtatttaaaaatcactattaattgaccattccacattagtttcctccataccaatcttatgctaggcctatttcaatatattcttaattggcatttctccattaacataaatcctaaaatgataaacctaaagcacaaacctggcatgaggtttcctggagataaaaactgcccgtagtgcatgccatgggatctgagctcctccacctggcacagaaggctgcacagcaatttgtcctcagcttttccatccggccccaccttgtgcctctcttcactccactcttgaggtttgctgggagccaggctcctcactacattctgcaggtagtggtcttccttgcctttgccccattgcccatcccagttttctgcctgtaggtcctctgacctgatttccaacgcttgcctcatttgcccacgcagctgctggtcatcctgccggctctgctggggctttgtgtcttcctggacgctttcccttcccgagctctctgccatgattccctggcaccctgtggtctctctcactgtgttttccaatgtctgtgtctgaagcttggcccttccctctttttttagtgattaccctcattgatggagagtctgaaagagtgtaaaaaaatgatctgagcagccaggatagagattgtatggaaaacatagtgcagatccttttcttagatcatgggaaagccactgaagtacttctcagaggtattaacttctgctgtagacactggtgcgactgtatgaacttgatgtccggtgagtgatgggtaagtagcaaaatgaagtgacaggacagggacaaagattaatggtaagaaatgactccagctgtctgacagcaatgaggagaaagaaatgataaaaagatatgcaagaatcctaaaataaaacaaaacgaggtagtctttgggactttcaacagtaaaagaaaactgaagctgtgaattatggtgtgtgtatttctgaagacagaatataaatcagttaagagaaggcataggaatttatattatattttagtaaattttcttccaaaatggtaaccataaaaaaatagggctaaatgggtaaaatgtagctctttggaaaactcaactactcagatttctgcttataaatggctattaagtaaatatgatttttagctgaactaaaattatctgaatccttgtagaaattttaccaagttcacaactttgtcagtagtccctgacttttgtttgagcaatatggaaatacttaatttcatttaatttgtatcatgtcaatgtatactttttccttttaatgcaattgaactgttttttttttttattttaatccctagtttgtatgtgttagaaagtatcacagtacaacaatctctcatcctttgcattgttctttgtactttccaagcaactttcatattcattctcctgtctatcccaatgagttgagccgatcatacagtatgattttttttaaaaataaaaacacaaaggccaagaagatattatggtgctgaccaaagtcatccagctaacgaaaggtagatgcaagaacagagccctatgcgtctatgacaatgacttccttaacctctggattttggctggcttttgactcatcccttcgattttatctcctctatctgtgttcactgacggccatctggcccctaacttcctagctcctccttgatctcaatgtctagagcctcttaaacttgcatccatgttttctggtctctcccttgtgctgccagcctcccctggctgttctcagtaccagatcagaattcctgtgtgaaccacactgctgcacagtgaagctgtgcaagacaacagccttcacccacccctacccccaaacctccagagggaattagggaatatttgtgccttctctcctgttcattaccttcagttcagtttaaaagtcagatctgcacaggggagttggagccttctgtcggtcttcctctctccataccacatacagatgcaggcaggcaggcacgcacatgcacaagcaccccccaccaaacatactttatgatttaaagctaaggtatcaatcactaaataaaactgctaacaattttataggctatctcacctctaaatgtgtttagaaaattacacaattcattgtatacatatgtatggagaaaacacctgtcctcttcttgtgatatttttagattaaaaaagagattgcattatttatccaccagtttcctcaggaatcatctttaaaaattattccagttaaagaattactgttactacaactactattttatttaagctgcctgaatatcatttctgtttcagcctggagcagtcaattttgcttaatttaaatattttattaataatcatagaaaaacccagctattacttaatttagtctatttgtgcatgtatagttgagtatagtgggtatagttgtgtatgtgtgtatgtgcatatacaactttatatagttgtgtatgaatgtatatgtgatgaatagttaataataatttttcagatgaaaaagtatgtatgggttaatgttttcctctttggtcctttgacagatggctatgtatatttagtacataatatggtatgtaatatttaactcagggtatactgtttaatttttaaatatttcctgatattttagaaagccaagtattaagactatttttcttccctgtaaaatctcatatattttgtgatacaacgaagaatttataagtgacatattcagtccactatgtcagtccactttatgccagtattagcaaacttatgcaaatacaatttcatagttattaaatgagtgaagatttgaaattattatatagtttagtagaagttacttttatattctccatataacttaaggttacaacattattttcttgtatgtaataaaatgaggacaaattacacattagttaatagaagtaactgggctagtaaaactaatgggtgttttctcccagggcttttgttttcctcactaacaactttattaattggagcctcattcattgtaaatgacaggcacacagcttccctaagtgtaggcatgaaggggaaggcattggcctccataaccgagccacggtagagacgtagctgaccacagggactggaataccacccagaaggcttttctccatgtcttcttctctgcttctctgtacaggttttcattttcttagctttcctatgactgtatagctcacaacctcataccaggaagggctcacccttctttagatccagaatattccaggagagggctctggttgacttggcccgagtaacatgggactcagggactgctaggattggcagaccttcttcataatatcatgctaaatggaggaagaatccaatcccataaaggaaggggaaagtgaaaaatggtagtaaatgcagacattcccaacaagccagaatttcacaggtgctgaccatgtgccacacactgtgccaagaaacttacctaccttgtttaattgcattctcataataattccttgaagggtgaatacttaccacccattctacagatgaggaaactgagagtctgagaggcttagaggcatactgtcttctatgtgacagagccaaaatacaaactaaggcttatgtcacaaaacttgatgctcttaactgccatagtgtactatcttaaactacttccgtaataattagtatttgtagctattcaatagaaacaacattttattttcattttcttcgattttaaaataattcacacagtaattgaatatgtttataactctttgcttttttctttattgttgctctttcttcactgaaataccacgctgcataatggaatcataaacagttcactgatttcctaacaccgagggagaaggtgtctaggcaatattagactttgtctttttaattttcatataaaaatttgaagtataagtaattgctttcaggcctatagaccacgacaataatttcattagcttctcaagtccaaattagattagtaaagttgtaatgcatgaaaaagcgcagaaaaatataatgttactttcttttccggtgttcttaactacagagcagtaatgtgatttttcacaaattaaagttctataatatctgtatgaatataatgcatctagtcttcaacttttctaaaatacaacgagccagctgagtaagcccatcgattgggtaaaaatttggaaaatgtttttcatgctaactcctactgtagtaataaaatctcatttaaataaacaatagtcttcatgaagaattatatgataaagatttgtttgatagacatagcattttcaattaattgtttaccatctgttatgttctctaatcagtgttacagccattcataaatcacatttgcctcataaaaagatggcaatcgtttacacgtgtgtattttattataatcagcatctgagacattactttctgatttaaacataaaggaccggaggatacaagactctttgagcgtggtataatgtacttatgttttgtgattgttgttgttcttagtagaaaactggaatcttccaagaattagaggttttgccattttttaagaagtataatcctagcaaaggcatgaattctcctcttcaattaaactcatcacttattttggcagtacataaacataagccatatttaacttataagaatggcagagcatgggtagaaagctccagacttctctgtagctcgatcaatcactaggggctgtgtttagctgggaagcagcctggggagagatgggcagtcatgtggcaagaaataaaagactttgaatctaaaactcctgtcctttgattcttgaaagagaaaggggagaattttcttctttattttctttttctagttaaagatattgtacagagattgatttatgcatttaacaagtacgttttgagtgcctaccatttacaaggggggtgttctagatactcgggatacagtagtaggcaaaacagatgtttttttcctcctgaaacattctcagcttttcctctttccttttattgccacctgcctgcccccagtgacccatctgttgatgtccagcccaaaggaattcacttgaataaatcgcaaaactgccactacttggaggaaattcagggattattcctgaatgaagaaaatggaaagatctcaggttgcttagcgaggccctggttgtctgttccagggtctctttgctcttcctgcttctttccttggagttgcgtctgtctagtggttggcccctgcttcttcctccactcaactctgggcttatttactttggccacttcacaagaagagtaaaccttgaatgtatttagactccagttctgcctctattgacttcaggtcagtggtgccatgtagctccctccaaagcgtgttttgtattctgagttccccttcatttgtgtcccctctcttaataacttgcatttactatttgtggaaggtagtccctaaatctgtttacttttgaggtcttgatgttccctaaatatatctaggttctcttttcttaaaaaaagaaaaaaaaagaatttgagaagtccactggcagcatggatgaatctatgccatctttatcatatctgtattgaaagatttaggctacatattaacaggtgaatctgctctgagtagcctcttgttattgtcatccttataatttattaaatggacataattagaagcactaatcagccgtggcacttgatgatgtacttgtaatctggctcataatgagtggttgtcatcagttattgtacagagtaggaaatggtcagggccctctcaaacactgattgaacatttcagagttattaaatggatcttaatcactttatcagaaaattaggaaataatgtatttcccaatattttaatcagaaacatcttttggtcatgaggaaagagagagagaaataggaggggggtaaagagagagagatattgagagagagcaagtcaagtcttttcctttgagttcttattggctaatcaacctggtttgcttatgtgaaaatctctacagatatctaagcctcccagagctagttataaaatagtaaaaaggaatgaaagagtaaccttcctcaagaacctactgtgtgccacacatgtgccagtagctttctatgtattaactgaggttgaaagagataaggaatatatctaggattatgtaactagttagtattggaactggcatgcaatctcctaatcttttcttctaccaaattgtccaacagtaaaaatgccagttgtgaatttttttctttacttgattgttttaatatttccttttcgtcttttggtagaataaaacaataagattatagatacatgcaaaaaagcaaatagtataaataaggtatttggaattaccatacctgaaatgactttgtaaggttgatccttctatttcacaatagtttttttgtaagtgctttacacagatgtgagaaggaggaagaaaaatgaagtgaaaatatgtccacttaaaagtgtaaagttgaatgttctcaataaagaggagcactaaaaattcaattccgtccaactcaattaagtaattatatactgaggacataccaatctctagactggctactataaaatcaatatggaaggaaagaaaacattcttgacattgggctttaaaacgtaagtgtagaaaagccacaatggagattacaaatgttgatatcataattgagaaaaaaacaccatacatatgggaaatgtttattaaacaataacactgggcgaattctaataaatatctatcattatttcatgggagaaacatagtttcatttttaaaatttaaaaaatagctttgcataagcactcaaaggaagagttttttttcctctactatcaagatttctttgagatatacagaggctcaaccttcttacataattgaattgaggtaaaatagactcttgaaataaaatatttttctagcatgagaaaatagggtttgcacttgataaaattgggctgggcaggtcaagtaactggcctaggggcaatgggcaaaatgggagcaggactgattccaaatcctagtctctgttcctggtccagctttggtttttcacctgcattctagggaagtgtattatagtcttcttcctcatggtataaaggagagcgtggcataaatgctgtgccactaatttgcatatttgaagaagtaaaggtaattggatgacagaaaacatcaggattgatctttcctttttcctctcttcctttgtcttcttcctgtttcttctttctaaaagatagttatctgtggtcccttaaatagctttgtaatgcaataaataaattggtgtttaaaaattatgaaatatgaatataaaataatattcataatacatgatacataaatatataatataaataaatataaaagtataagtaagaggctaggtgcggtggcttatgcctgtaatcttagccctttgggagactgaggtgggaggatcacatgaggccagaagtttgagaccagcctgggtaacatagtgagacctcatccctaaaaaaaaaaaaaaaaaattagctggccactgtggcacataactgtgatcccagctactcagaaagctgaggtgggaggatcacttgagcccaggagtttgatgctgtgagccaggcttatgctactgcacttcagctggggcaacagagcaagaccctgactaaaaaaaaaatggtgtatacatatatatatatatatgtgtgtgtgtgtgtgtgtgtgtgtgtgtgtgtataaaatttttaaatatatagatatataaaaattatgtataatatatacataattttacttatgtataatatatacataattttacttatgtataatatatacataattttacttatgtatattatacataaatatatatattttcttctgagtagttgagtgtatatgtacgtaatataattctaccctcaaattttggccagttcaatgggaagacccgaagggaggagaatggagagtgacagggcatacacacacacacacacacacacacatacacacacacacacacacacactttagagaataggaaagtgacataggaaaaaaaagtcttctgatctcagaattgctagcaaatttatttggttttctcctgctgtttcctctgtctctagcattagcctctattactgcctttcccaatgcaaattagattaccctcttatcactgagcttcatttgctctctggcctccagtatttagtgactgtgctctgtgttgacacaagaacccagtggagtggaaatgtcccgtaagcttcagctacatggtccagagaaatcaatttatatgccaataggctagccacattccatcctgacaacctgttagaaccacctggggagctttggcatctatctatccatgccagaccttacgctgaccagggaaatcactaccttttgggggagggttcctggattatcagccttaaaaactcactcagtccctcactgtgagggtcgtttctaacatgacaccggggttcttcactggtgaagcagattctctgcttctacttgtaggtggtccttagcatttaccacaaatacctattcagaaaatctcaagtaacatttgtcctttgattttcaaatgagagtacttttttttttaagaatgcaataatttccctttttttcatttttttctgccttttagatgtttgaatttatttattatttattttaccccaaatagtcataccttcatatttcacatgtcgcttcttcttatgtatttcacagacttctagaaagtttttgttttgttttttactttgctctgtgcttggcttaaagtatgcattcagctgagattgttgctgcactgggaaactcttattttgactcaaaagtgattcgttgatatgtttcctttctggcagacagatggtgaattgaacacagagcttttcttttcttctgagtagcttcttgagtggggattatgtaataaatactgcacaaggactgctcaatcaataaatttttacattaaggaaagataaaaacgtcagaggcagcagatgatgttttgtcacaagacaaagaacccatgggcctccctgtgccaagttatttaatgtctgacagaatgagtttttactttatctgaggaaaattaccataattaagttgtccgttctgaaatgagtagtgtatttctttttttacagtagtcaatgcttaagatatatttttgaaaaagcccaagtgacttattaacaaacacaggtgtttaatcataaaagttaccacctctcatgagactaagaatgatttttttatcttagacataacattttatatttatataaaatatatacaatataagtattatatattcatcattttttagatatcttttttttttcctgagatggaattttgctcttgttgcccagcctggagtacagtggcacattatcggctcactgcaacctctgcctcccggggtcaagcgattcttctgccttagcctgctgagcagctgggactacaggcatgcgctaccatacccagctaattttttcgtatttttaatagagacggggtttcatcatgttggccaggctggtctcaaactcctgacctcaggtaatccacctgccttggcctcccaaagtgcaggaattacaggcgtgagctaccgcacccagcctagatatcttaaaggtataaggatttaaataaagtttgtctttctaatgatacactggccttcagagagctgctttctcaagaagcctttgcaatcctgacatgttgcatgttttagggcttttctctgggctcctagacagttacttgaacctgtttctctaattcacttatttttttatttttatttttatttttttgagatggagtctcaactctggcacccaggcaatggcactgtgtcggctcactgcaacctccatctcctgggttcaagcaattctcctggcccagtctcctgagtagctgggattacaggcacccaccagcacacctggctagtttttatatttttagtagagatggggtttcgccatgttggccaggctggtctccaactcctgacctcaggtgatccacccacctcagcctcccaaagtgctgggattacaggcatgagctgccacacctggcctctaattcacttatgttctttatttatcttgtactggtatattcagcctatctaccagttgtgatgttttctcttcttccttcagttcagctgccaagagatttctgaagtttcctgtagacttccaccacttaagcagcacaacttgtagttctgcggttgctaaatatcaatgtctagaatttttttgaaatttagagagacaaacatatgtgttctgtcacctttgacttggcttttatataatatttaaataaagcaggcagaccaatttacactgaggatgaaagttacagtttaggagagcttgcttctgtgcattttatggtgaagttcatcttatgatgatcattttccaagtgatttggaacattttgaggtgaagtggaaattgctaatgtgatgtgtactgaaagatgagatgttatcacaaagaagaatgtgttttctgtctcaaattaatgtacagtttatgtcaattgcactgcctctttatttgcagtggacagttggataccaccatcaaaccagctagataggaaaggaggtattttaaggtgtagaagatagtgaggccccaggagtgtggagccatgctggagacctttctaagctgtcttgagaatttctcctcagtgttgactgcattcctctgcccttgctttaccagctccccatctcttatatttctgacccttggctttgaacttgactttgatttctgtctgtatcctttgcttctcctctggactgttccagcccacatcctgtggcctgtccatgtgttatgcttgctatttttatctgaaactctaagtttatttcaggcattgtggaagcccccttgctctattacaaacttaggatggtccttgaaatcttgctatcttcctgctaaaatgtctgtgggctgcagatgatgccctttattaaaactaaactgctaaacagccttagagagatgatcactatctaaggtatgttatttgtcttcagtatttatttttaggaacacaatacattaatcttattttctgagagtttttgcttataatttatagtcattcttcattaattatacttaccatttctcttgagaatactgaaatgaaaaagtgtctttggattttgtgtaactgaatttatgataaagaaaaattggtttatttcttgtgttatcttcttacatttcagtggctttagaaatatattaaagttcaaaaaccgggtcaatttattaatctcagtaactgttttattatccttttgagtgtgtgattaaatgtagcagagaattcatggatgaagtatggagaaattctttcttaccctggacaatttttaccctggagtaattttttcttactttttctccgtatttctcagtaacgatggtaacactcacacttggctattaagaatatataatcagacatccaaattattctttttcttttttttaatcacagaattaactcctgaggagagagcccaaaagattgccaaagccatgcgcaaacagtcttctgaagtcaaagaaaaatgggaaagtctaaatgctgtaactagcaattggcaaaagcaagtggacaaggcattggagaaactcagagacctgcagggagctatggatgacctggacgctgacatgaaggaggcagagtccgtgcggaatggctggaagcccgtgggagacttactcattgactcgctgcaggatcacattgaaaaaatcatggtcagcatcattgtctttgaaggatttttaagaaatgttttcttgttaaatataacacaaataaagagagccacgtatataaattgttataagggattgttacaaagccaacgccgctgcaaccccacccatcaggagtcaggacaggtgctttccatatgaccctcattggggttcattggaaccccctgcccccaaataacaactaatgcaacttttatgataatttacatttatttttattttttatccaactgtgcatctctagacaatgtagattaggtttacctatttttaaaaaatatttttaatccccagatttcccctctcttcctttttccttttcagtttatttgttaaagacactgaattgtttgttttgtattgattcccagagcctggattttgcagaattgtgtccatatggtatagtctccaggttcctctctactcggtatctcttgtaaattggtggatggagatagagatttaatcaaaagcacactcttttactgggaactctcatctataaattgtatcttattgtatattaatgaagaattagtttagctataaattctgtttgtagtaaggaattgcccaaagctatggatgttagacttatggttacctcccctttggttcccatattctagaacatctcctgaaaaaaaagttaataaaatttagacaataagagatataagagatggtttaaagtataccccaaatctcattgacagtgtagtcagataaaaataagtactgaattttgctaaatattattaaatatgtcaaaacaactggaaaacgaaatccttgggggtaatcaaataatgttaactgcctaaaattatcattaatcgttcttatttacagaatacacaccttctggcaggagaagggcttaggagtcacacctgccaacagacttccagttagcacctttgatactagcagatgttctgtttttatggcaaggaaggccacatagtcttttattctgttataggaaagtgcagtcataacatgataaataggttctttatgctagaacacacagcagttctgaaaccattttaaaacttgctttatctcgagccccttaatttggaagctcttcaaaaacaaaagataaactttcttgatagaaagactcctcattgccatataacacctgaccataaaaagaaaaacaaaaaccaaagaccttgtttgtcaaagctttttaaatgttttaacctgtggcttatatagggaaacattatttttggagaggaaaaatttgaatttcttttttgttccaaaagatttttaaagcctgtcttgaagttatattctatttgtttaaagtttactatcttttgaaataaaataggctattatttgaaattatatgcatctcaaaacattttctggcatttcatttttaatctttaatagataaaaataaaaagatgttgattttaaaagctaattacagttcttgagtcctccaaggtacctacccatggagagaatattaatgcatatagctaaaatcctgactaaagaaaccttgaaggatttgaattctgtaattgttctcaaactgaatctgagagacccagaccttttcaaagttcagactgaaaaatccctttgcccaccctaacccacccctcctccttccctgtgcttctatattaattgtgaattttttacacttataatgcctctattaccatacaactgctcttcttatttaattgtatttgtgtgtttttctgtgtgtgcacattctgtcatccattaaaatgccgaatctgcagcaatggaaaaaaaactatctcaactcttcttctccttccatactgaagcaattcccatgaatttgtatgcatcccttcctctaccctgtctttgaaatgttggtagctgcagggttcggtaatatttcttactttacacatgttgacttcaaacttccaacattcatagttctcaccctgactctagtctcttaaagagacttaaagagcctccccacttaaagagtggacaatgtagaaatgaggaaacctgagggcaaagctaatgggatgtttacaacacctactacttctaaatttagtttggtacattattaactataattttgtggccaatttaaatttaaactgttttcttttaatatcccagttccattatccattctgtgttagcttaatattgctcaaatatcatttttgtgggcctttgtcaatagaaattaattctgtctctcttggattgcaagttctgtgctgaatagtgagggtctattcccaagcagcttccattctttactgggaacgtcaagaatgtggatgctcataattacaatttctaagtgctcttagtaagttgttttaatgattctagaccttgctcagaggtggcatttgtcaattctaagactcatttaccttttttctgtagactccactcttcctgcccaagccctaaccacagacagtgattataaatgattttgacagggatagatcttacctcttgagtctgtaataggcattggtttcatggttaggaatgttgtttctactggccactttctaatttaattttaagtggaaacatgttaaaatcaagttgttgcatttggtgaaaaaatattaaggtagctatgttaaaacagaataaaaagaaaacacgaatacaaactaaagatagaatcaacattagatatcagtaaagtggaaaataatggcatacattttccagagtaaactgcatataatagaaagcatgaaaggaaatacataatcattttaaaagtttgaattataatttttctcttcacacatttatttatatttttgggtaataaacaatgactttttggttcttcatccaagttactgaagacctgaattaagtcagctgttgttgagtgggcaactgtagttgatttcctctgagctggccttgccatttatttggaagtacaattccaggaccccgcatgtaccaaaactcatgtatactcaagtcccacatttccccatggaacctgcatgtaggaaaagtcagctctccatatatatatgggtttcgcatcctgcaaatactgtattttccatatgtttggttgaaaaaaatctgtgcataaatggacccaggaagtttggttgagaaaaatctgtgcatatgtgaacccatgcagttcagacctaagttatttaaggatcaactgtattagcttttgttatattcgtttccaataatatattttttgttcttttcttctaggcatttagagaagaaattgcaccaatcaactttaaagttaaaacggtgaatgatttatccagtcagctgtctccacttgacctgcatccctctctaaagatgtctcgccagctagatgaccttaatatgcgatggaaacttttacaggtatcagcttattccccttcataatgcaggcttacaccttgggtggtctttaaaccctacctcactatattaccactcaccgttttctctttctttgctgatggtatttgataatgaatttagcatgtgatgacatcaggtatttgtctttcagtatcttgaacctaaaggcctcatttatttatagagtttaatttaattttttgatgtactattcatatgatatttgtagaaaattgcaaaaggttaaataaatcacagtaattgaaacctgtggtaggtcacagaaacatttttcacataatggctaataaaggagtcatttttcttactttcatcatgtattttttttttcattttgaaaaatcaggaaagtctctattgtttttcttctaactggttgctatttaaatatcttccttattttttccagatagcacatttataccagtggtgtttacctttagttcttagattttagctaatgcagttggtttaatgactctagaccttatttaaatatgcaattttgatgtagcacataaaaacatttgagagatatattttatctataataggtttgctgaattaattcaaatatcaaagcactcaatggttcatattttcttaatgaaattgaagaagtaagaaattagtgtacaatattttacaatcttagtctttgcaaagagtgttaataacctaggattagtaaagcaaaatctgttaaatttatgtgtttttctagtggatggaacatagaaatatttgttctttattctttttttttcttctgctctgtttctctaattcattatcttcatgtgatgattcttatggtccatcttgatttacttcccattctatttctgttatcaccatttccgaagattagaagtcggggaatatgttatacttgaaagaagatatgtattctgtcatccttatctatgatcctggtaacctctagagctcagatgttagttgctggttggaaaagaagagaaaaatctatgctggtgggcaacactgttgaattgcaggagtaatattttctttactcataaagtgtggcatttgaaggcttttaggccttaatgaacaaagtgcatactaatgcaatttaaatagctagccaggaggaactagtgctgtccagggaatcagacatacacagtttcatttaaggacagctgcaaatgagattgtccctctaagtggaacagtaactagcattacatgaccaaggctagaaaaaggaaatggaaatgtcagtaggctgtgtgcagttgttattgatttgcatttagtttctcagtttagtaaccctttacattttcataatgcagagaactaactatagaatgtgtatttttaaaaggctaggcatgggggctcttgcctgtaatcccaacattttgtgaggctgaggtgagagggttgcttgaggtcagaagtttgagaccagcctgggcaacataggaagagcctgtctctacaaaataaaaattaaaaaattacatatgtggtgtggtgtgcgtctgtagtcttagctacttgagagactgaggtgggaggatcacttgaggctaggagttcaaggttacagtgagctatgtttgtgccaccgcactccagcctgggcaacagagtgagaccctgtctttaaaaataaaacaaaaacaaagatgtggataaaagatgtagagtgtccaacctgggcagcatagtgagaccttgtctctaccaaaaaaaaaaaaaaaaattaacccggcatgattgcacatgcgtgtagtcccagctacctgggaggctaaggtgggaggattgcatgagcccaggaggtcgaggctgcagtaagccataatcgtgccactgaactccagcctgggcaacagagtgagactctgtctttacaaacaaaacaaaaccaaaaccaaaaatgtatattaaaaaaaatacgaagagtacattaatatgcctgtacaaactgaaatatatatctcaacccgaagtagagatgatcagatacaaatttggaggaaaataagatgttgcatactcacatgtcttttcattctctgtttatcttctaccacctcactcactctatccttctaactatccactatctatgtactgtctatttctctctctcactccccatatatatatataatctattatctatctaactatctagtttcctaggcttctttttcatttgctccccataacactttttaccatcttccttacaaaagagagatgagtggtcactgatcccatgaccacattttgactttagaggctttacaaacaatgtactgccttagaggcaatgcagagtaacagttagggcacagattctggcactgtatgaccagaatacgaacaggagtgttgccactcactagctttatatccttgggtacctctttgtgttttagtttcttaatctgtaagatgatgataaaaataacctttacagttattgtgaagactaaagcgttaatttctataaattgcttagaagagtacctggcactgtttactattatttgaggtcagaaggagtctttttttttttttttttttttaccattactctgataccagagacagagaaggggtccaaggggtctatataaacaatcatatcctgggcaatagcatcatttattatagtctttaaagcaaaaatattattaaagttattgtttcggaatcaaattatttcctctgacttgcatgtgtatgtgtgcaggtttctgtggatgatcgccttaaacagcttcaggaagcccacagagattttggaccatcctctcagcattttctctctagtaagtactaataaactggactgatcgcattaattgaatgaattagcattttctttcactttaattgaagaagccgtattccttgctataaatatgtttatttagatagatccttgtaaggaggtactaacatcaaagaaaatattgcttaatggttattatttgtaataacgtaatgacaactgagaagtcttcaaggtggaacagaaatgaactcatctttagctatggtttctcattggaatgtctgataactaacatagtatcatatcatcattgctttgtcataggcaaagattatgaactttttcataataaagaaatcagttttatcttttaaggttttaaattaatttttctgcttaaaatgtgcttatttaaaacacaccttcaactttcaaagtaaaaaaaatcactccccataaatctttaagtgggaagattttgatttattaggctcgctgcgattatatttagtttttctgctattcgagtattgcgtatgtagccaaaccacctatgcagaattttatgtaatatttttcaactggaattgataaatttatggactattcttgagatcttcaataaacaatttgagcttctactttatcattcactagtgaagatactaaagaatgtcggatttatagtcaaccagattgagtttaaacattcattctgtcgcttaccagacctgtgaatttctgaaggttgatttctttgtcttaaaataccgtattacctatttcctctgattgttttgagaactcaatgacaaggcatatcgaattacacaaagcacctagcacagttcttgacacaaatgctttcaataaatattaattcctttcctttcatttcctttagcaaatatatgtaagaaagcaatttgtttcatttaattcaatttaagtaaactttaaaacttagggcaaagcttatttctcaattatgacagtttttttgcaactataaccatagaaacagctaaaaagtactatatcttctaactaaattgattacatttatatttcctcttaatgtttttgtcactcttgataaactgccttacctcagttaaaggttgggcttttcttttacaatttcaagaatcttaatcagtcattttctgccccttcctgccctacacctctctacctctcaccctcctcactgcccccacccctacctcaactccatacagtttttctgtttcacaaaccttagaccttaggtagttaatctttggtatacgccttcctggaatatactgtgtacctagatgccaggacacatttttaaagtccagataccatcaatgttgatgaagtaaataggtttgctgtatacttattagattattaagtattccagatttctaaagctcagtttttcaaaatgtaaagctatgtaccaagaccaaatgaaagaggaatttacaaaataattgagactgtctttacagttctaactatcagttatctttaatattgatgaaatgctatactttcacctagcaatcactctcatagtggaaatcaagcacatattcttttggaagtgaaatattgtgaaatttatacacatttttgtaaaagtcaaatacatggccttgtattatctaacactgagaatccaaggaggtagaagttattcaaatcaaaacaattattaaaatgagtggggaagtgtaaacaaagtcccaattaatacatttaataattgttatcctttgctgcttggaatctttggctttattatatttcttggacttcagccatggttataaaagaagcctgtttagttaggcacaaaataaaaactgacctattagcctggtgccaacactgaaatgaggttggctctaatgagaaatgtaacatacctacttcctcattttcatccctgtttatactttggtgggcatagattgagaacagagtgcttgccttttataaagagaggaggaattgttgagtagaagaattgctcagctagtgttcagaaattgagatcacatctgagctcgaccgtttatttactggctgtcactctttgggcaagttattttatctctacacatttagttcctcatctatcaaatggaactttaacgtgtatcttgctggcttccttaccgaaaacatatatttgaaaatgcttggcaaagtttagaatgctgaatagttgtaagatattaatgtgacatgaaattgagaaaaaaagtattggtgacaactggctacgtgaggatctgatgatatttgcaaagtatgaaaattccaagtattatttgaatttttatatttgttcatttagcaaaattcttttatggcactaaattcacatgtactattcttcttaaataagtcttaaaataattggttaatgtaggaataatatattttttataagtaagaagtaactagaattgtaaaaaaaaaaaaaaaaaaagtacctcaatttaaaaaccccataaaatctcagtcatagtaaggtctagtgcaaaagtaggagactgggctctctgtatgtttcagatgaaagtaagaaattgggatttttctgcctagacgattgccttggttcttcacaactttttgcctatttttaaattccttctttttaaatgttatagaattgaatttacttaaatgccatctgtactcaatagctactcctgtgactacgatgcaaagtaaacaatgttattagtcatctggaaaattcggtcttgaaaaatctaatttttaatctggatataccaggtaaaattaattttggttttagctttatcaaaaatatatatggagtacagtttccagatggcactaaggtttaaactgtagtatttataagcaacaccatttgaaagtttaaaagtatttttatcaacaggttagattagttggcattagaccttgaacctgtattgtttcttgttttacttcaaatgaatccttaaagccattttttgtttggcccagtggatctcataattataggaatccagctcagaaaccagagcagttcattgaatttgctataaaatgttcagttgttttgcattaaggtgtaaggctttttggtttccaacgtttccaataatctccctttgtttcctcagcgtcagtccagctgccgtggcaaagatccatttcacataataaagtgccctattacatcaagtaagttgattttaattctcctttatgataccaagaaaatcatgttttattgataacttaagaggcttctctccccataacttttaaaaatagaattcagtcctattatctgaaagaaactgtgatatagttaatattaaaaagaaactacttttaacatgagaattatatttttcatgtatcagattagggatataggtgtgtttagctgatatattttaaagtagagatttaaatatttggagacagacaataagctatgatggccatactgtattccagcctggacaacaaagcaagatccagtctctaaaaagtaaaaaaaaaaaaaattggagaaaaatgacagaatttcaaaatactcttgacataatgatatttgtcaaattgtacaaattctaaaccatttttcttcctctaagaaaatccatataaaaatgtcttatactcttgtcattttattccaccaataagaaataatgatttatcatgaaaaagtgaaatattgtcaagtttttctttgtcttatagaagttatctgcattattagcataggctcatcattctttgattctgttgtccagttagtttctccttcttgcatactgtttcttcttcttatatgacattttataagttttgtataatttacacaggctcttagtaggcgttgatccttggcttagggctatatattgtcatggaacagaatgataaaattctacttctatagtcccttggagtgtaacttagtaaagatattaatttacaacgtgctctagtgatgagtcatagttgaccctattttatgtgtcagacgaacagcatcataatcatgacaacacttacttattgtcaggagacagctctgtctcaggttagctgtgtgacctcaggtaagtcagatgaagatctctgggccaagtttcctttttatcatttctaacatggggtgtggtatctccaaaatctatacaaatgctaataatctgctcttccagtatacttcctgaaaacgttgtgtgaagtccatgttggtgaaatagtcttttcttataattttttattacagtctgagatgtaagctcagggtaaaaaacaggtttgcataatatataataaatataataagcaatatacgttacattagcttatgggagtttaatatttttatcagtgtataacctacaatgcactgagttgtgaactgagttgagaacaaggtattaaagcaattgattggtgtcaaatttgcccaagtaagaatggaaagaggtcagacgctggttaagttggcatgtctctagtgaaagaagatgtgattatctaactgaaaatgtttaaaactgtttacatttttattgtacactataacaataataatagtaatagtattagagaactttaatttgcttggttgaatattgacttgaatttaatcttacaaatttagatataaatctgatgtactgtggtaggcaaaataataactgctcccaacccctgaaagatgctcacatcataatccctggaacctgtgaaaatgttaggttacaaagcaagggagaattaaggtcgtaaatggaattaaggttgcaaatcaactgacctttaattagggagattattctggattatcctgatgggcttaatgtaatcccaggggcctttaaaagtggcaggggaggcagagatttgagaatgctagctactagcttggaaggtaaaggaagcagacatgatccttaaatgcaggcagcttctagaagctggaaaaggcaaagaaatgggattctctcttagaacctccagagaaggaattcagccctgccaactttgattttatcccagggagacatttttgtaacagcaatagaaaattaatgcatgtactataaaaaaatcaagaagttcacgcaaattaattgaaattaattaatttattgaattgacttagagtcttttatcatctgatttttttaaaaatgcaaactggatctagtttttgggttttactaaataaaaaaaattaaatatcttgctttatgtttatatcatgattatctgtgtggtttgggacttttaaagtccatccttaattttagctcttttttaaaaatgaatttctatatgtttaggttaattatatatgactgagaattgtctaaatcagaatttctctaattcaaaatgtttataattttggaaggatctggtaggattgtattcttgttcttgtggggcagagttcttatggggcagattggtagaataaaagttagttttacctggcttcccattggctagagcactattaccagcactggaaaatagatataatataatgatggccactattttaaataataacgtttaggactgtagcatttaaaaaaatcttctccatcaccagtaaaagatcagattgtttaaaatatatgtagttttagtgttaaatgtcttttaagtcttccaaatttttagaaatgtgctcatttgtatatagcaaattcccattttcacaaaacttgtttaaccaggatctttcattgtgtaatttaacagtttatttcctcatgaagaaggaacatcaaattctgaaggtagagttataaaagccagtatttatgtgtgaagaattgttatgaaaacaaaatttaattcccaaattaataaccaagcaaatggagaatgaaaaagcttttaatatacacttccctttgcgtggcttcaaaagtagaagaaaaatgtttaaaacaaattttgcatgattgccatgcaatgagaatttcctggagcaaattagaatgtatatggctaacaaaaaataatattcaggtagaaatattcaacgtttttggtgtttaagtatatcatctttgtattcactgttagaatatggccagaaagttgaaaggagactaggaagggcaaattatttttatgtcatattttaattttatagatcacttaaagcccactttgatggcttcccactgcatttctgtctctctaggtaattccttattaatattttgaagtgcactgcggtggctccatggctcatgtgtttgtagaaaatgaaagaatataaatctgaactgaaagagtctatatagtataaacccctctatttgttgatatcttaagttaaaactagtctatatagtataaatccctctatttgttaatatcttaagttaaaactagtctatatagcataaacctctctatttgttaatatcttaagttaaaattaacatttgaaaattttatttgcttcctctaaggtagactttctgaaactgatctagttatttcttttttcctagtatagtgcaatgagagctcattgtattcagggtttaagaacatttaaaatggggccgggtgcagtggctcatgcttataatcctaatgcttgggaggctgaggcgggtggattgcttgcccccaggagttcaagaccagcctgagcaacatgacaaaaccccatctctacaaaaaattagctgggcatggtaacatgcgcctatagtcccagcagtcaggaggctgaggtgggaggatcacttgagcccgggaggtcaagactgcagtgagccatgatcacaccactgcactacagtctgggcaacagagtgaaactctgtctccttaaaaaataataataataataataaataaagagagagagaaaaagaaaatttaaaatggttcttgctgccttcacaatatacaaaaatctgccataaaagccagatatctctcattgtaaatttttggttatgtattttgcacaagttgttcatttcctcagataaaagtcaacttccagggaatatgaggaataagaggaatgaaagctttgggttcggttgaactttcttaatgcatcacattaaccatgtaaaattcaccatttctcagtttgccacagaaataataataacatataataatgataaatagttgctgtgggaagtaataatgatcattgtaataaattacatttttgaacagtcatttatttgccaggtgttgtgctgaatcttgtgcatagatgatctcttttaattctctcattagccaagtgaagtataggtactataattacccccatttacacataagtcttaatgaattatcaataactgcattaaaagtaattaataagcacgcttacagcttgcttgagattacacagctggtaaatagaagagctagtgttcaaacccagggattgtctacagctcctgaactcctgatcactatgcggtgctgtgtcctggccccaatattagttgagtcagaggacggaagtttttagtcccatggaaactttgaataggatgaaggattatatttaggaaggaggatagtagtggagaaagtatgagcaaacatcctttctttcataccatagacggttaccatttactatgcacctcctgtgtgccagcaactgagtccagctgtccaaggacaaagcccatgctttttccagtactccacactgccgttgtataggcttttccataggctaatttctacaggaggatctattttctagatgtttaaagcagtttcacactgtggtctggtaatggacaaaggtgctttttcatagataggaagatgtcattcccacagtgcttgccagttggaccttgagaggaactctgaggtggggaaacacactctttggccttcctctatctttccccattcacatgatctgaagatttctgtcaactggtagatttaagtatctgcgagtaagatggccaacaaagctggcttataagtcctaagggacttgaaacacagatggttctctatacatccggcctgttggtaagtcacagtatttaatagaatttaataagatgtagttaggaaataagattttcctttttccttataacaccttctctaaagcctgagttgttgacttttcagtaagcctttagtcttgctacagatgactattctgttcttgtgacaaggtgtcaccatcacaatttaacaattctatagctcagtttttcccactggagtctgcagtgcagatgttaattcttcatagaaccctaaatacaatgtacaatatcacacaacacacagctttcattatgtacatattagtaatctctggttatatataccatgcatgtcacattttctaaaactgacattcctcaatattgcaagaaattaaccagcataaacttgtctatatctataaaatttgctgtcttacatttctttcccttgttctaactccccctctgagtggatccaaatgaagattatcctcaatttgttacatctctctttatacttttattttccattcttgtgcccattattgataatcctgcaaagctcttttagacctactctcatttcccaaggccaccctctacctgccctaatccttcagtaactgaaaggaattgaaatttgtaatagttgtaaaatcttggggagcgagtagttgatctttatcgcagtcatacagttcatttgcatagattgtatatacttgtcttggcagaactacatataccgtctagaggagagaattcatgcatacttctttagaagaattgtgcgccagcttaggcaatacagaagaaatagtccttccctaaatatggtcagagaggagtatcagcaaggcaatctccaaatactcagcctaacaggaaaatgaaagctaacaaagtgtgtgtaacagcaacaacgaagaattaacataaagcattttatcattaacggttatagaaaacttatcccagaacagaataaacccgtaacaaaggtataattaacaatgaaaaataaacatagctctctccaaaagggtccctacagcagtctttatttctcccttccctctttcgtgaagatgagggatggtatctttttggttccagttttttaagtaaagaactcttgggccgcactttgaatctctttcaagaactggagcttgtggttttggttttaatgataaagaagtaaatgaaatagaagcataagcaaaatgtactggagagtctgtctttctagtagtctgtgactctgtttttactgaaaataaatatttaaaactcactgggccaagtctgctgatggggaggtaagaacaaaattgctttatgaaagaatgtaagtaccttaggatcactaaacccctgggcttggaggggcttcagataaatgagcataagcataccttggctaactaaaaatctaaacagtagaaagcctgccctgcagcagccagcaaaccgtcactgggaagaaatcttatgtattactggtgtcctagttaattgaggtaatttaggtggaattgatattgtctttgagagacattaggtagttaaggacttaaaatatcaccttcactgccattagtctacatattgttgggccatgaagtagtattttggcttggaatcttctagattacccaactctattgcattatagtgacaccatcagccttactgggcaatttgatttttagggtaagggatgcagttagtaaagttctaccatacaatgtaggaaggatcactgtggggccatttagagaggaaaaaagatatctatactttataaagattaaatttttaaaactgccattgcaattagcaaaagtacagaagtaataatgtttaaaattgtaaaataaatagaaatatgctgattataaagtaaaataatacagtaaaagatttcatataaccatatagaaaaaaatagaagtaattaatcccttcttttaaaaatacataaaagaaagagataaagtagtaattttttttaataaaaagctaaaagctacaaatccagcttttaaaagcaaacttaaaggatacaatgatcccctcaactgttgtgggaacatagtcctggtgttaacaccttcagatgggggcatacaaggctccccagggccaatgcaacaacaaatgacctacaggaatttggctgatggtctgaatctccccagtttgagagtcacggagatgagggtagggttgggtgggaggtggggttccctatgaattctgggctcatgtagaaatattatcaagctagcagatcccctgggtttactgagtatttgcatgtttatatttccaagcaatttagtaccctcaagacaattatcacctgtccctcccctcgcacgtagacacatcagttttgatcattaattctactactttatttaaaaacaaacacaaataaactttgtcttattgttttgtaacaaatgttctagtagtcatacatgcaatattgacatcttatattttggggtgtatggtatggtagcctatttctatatagtcctttccatgtttgtatctttaaatctactcttgagtgtgaaattactttaagtgtattttgtttcagagacagggtctcactctgttgcccaggccagagtgcagtggtgcaaccatggctcattgcagtcttatactcctggcctcaagtgaacctcctgcctcagcctcctgagtagctgggactacaggtacatgccaccatgcccagctaattggactttttttagagatggagtcttgctatgttgcccaggctggtctcaaactcctgacctgaagcagtcctcctgctttggcctccccaaatgctgggattacagacatgagccactgtgcccagcttaaatgcattttatagtcaaatcctacggaattattcattatttacaatgttgtcttcctgcctcctgtcttcattatcatgagatactaatggcattttttaaggaagactctaaacttttgcagtacctattatcaaataggatcatatatcttatttgaattttggacagaattttttttttcttgaaattctgacctccacgcttcttttctcttaagttaatttttgtttctaaaagtatatctttggatttcctgcctttaaaagcttagaggacagtagacagtgtttgcgagtggatgaggaagttgaatataacctgaggaatatataagttattcctgcagctttctcacccactacctccatcctctccccaggggcttttccacacagacacacacacacccacacccacacccacacacacacaagcacgtgcacagagtgagaatcaatgttactgatgggggtactccacattcttcctatattctagtcttgggtgaaacaaggactgaaaagattataaattccaaagtaagtacaccacctctcagatctttaagaaggtgttactcaaataaatgttgtcatatcagattgccaacatttgttttcactcttcatactttaggcagttgaatgcaaaatcgattagttgggagctcgtgcttgattgctatatatatgtaacttctataagtgtacataaagtaaatgttaacagaacctgtattttgcctgtgtcaacttccttttctggagacttctggttttctcatagtacctcccaccttctaatacactgtataacttacttacagtgtttgtcgtctcttatttttccccatcctgaggcatggccactccacttggcaccatggagttcattgctaataattataggaccagtttgagtgcaggagaaaagttggaagccaaacagaagtggctggagtggtgaatgggacacgaggaagtagatatggtacagtactcattggtgaattttgcctgtgaaggagagaaaaaaggtgataactagcagaaaatgtagatttgaggtaggggtgtgtgtgtgtgtgtgtttaaggatggcacgtctgtaaacatttatattctacaaaggatagtcttcttgagagaggggttgacagtgcagcacaggaaatttttaagaaatcattgggaagaattggcctttaataagaagggggacaatttctcagttaaaggggagataggataacagactggcagttggagggaagtttcctgagttggtggtggagagagaaaggagtcctcatctagtagtatttaggttttcaatgaagcgtgagataaagtaaaatgatattaaggcagagaaataaaccagtttggggagagagatagcagtagtgaatttctgttttggagtttgggaaagcaagtttattagggaatatagtgcagttgccaggagttggacatttgaggtttgaaatcacatattttaaagtaaattgagtctgtctgttgagtgattttctccagttgtttttatccacagctgctcaggtccagagtaggcaagtaattgagctgatccaggcctgggatttgcaaggggtgagagagaagcaagggagatgaggttatttgtaatgattctaatgatagaccatggactcaaatttggacagattcatcaagaaatattttaaaaccttaattatgcaaatatacttccatatcaagagcttagcttaaaatgagactatctctgtttaaatcccatttctattacttactataggacctcagacaagctatctaagcactctctgccctagttttttccatctgtaagatggagacaatattgtcacccaagtcatagaattgtaatccaaatagaatttacacatagaaaaagtttatccaaaaaagtttacttggtacaaatcgagcactcaaatagcatgttattactgtgattaatatacatcctgacctagtatattttactttgcacagcaaagaagaaatatttttttctttgattgtcttatctcagagcaatatacatagttcttgtccccacatttgtatttttacttatctttagttttgttctgttatatgcctttataattataattggaatggaatgatatataacaaacctcacaaaatccagttataagcataaaattggatagctagtaacaaataagtatatttgggtaagtgttagtttttggagaaacaagttgccttctgatcatcctttaaggtttcatggaaaaatatgagaccactctaatgaggacaaatgggtttaagaagtatcttccacagagcagtcatttgcccagaaatcaagattttaccagcctatcaaaagtgcatgtcctttgctgttggttcattgtgttacatgttaggcagtattgcagcacaactttttttgttttatttgttggtgctacagtcttatattatttgtgttttactttctgtggcttatcagtgttatattgttatgaataataatagataggtggaaggatatactacttcttaaccttattggcttaatattttaataatgtccataaaatgcagagattatatgttatcccagctggggctcttcagagtaagggggcacttttaataattataccaggatgctgatatgtaattcctgtatacagtctagtataaagcaggatttatactgcttgaaggatagttttcaaaataggcaaaaatcttaactcttatacaaatacaaaaagagcatgtttcatttaactcatagtaagggaaccagtaagaagttataataggttccaaagagaatacaaaatgtcacatatttatagtgagattagggatgctaaaatgaatttacctctggatgcaaagctgacaaactggtcaatatccacaggacaataatcaattgcattccactgggcacaatttgcatttatatggacagaaatcatttgcattactatctgttttcttcagtttgcagagtttaaaatagctcagagataatttaagctttgcaggatacccactcattttttgcccacaacaaagaccttcacaatttttccctgcacaggcaaaactggatggctggccagcctagttacatgtcacatgttctcactattgtttgcttcatatgattttgtacttaactgttaattgctactttgttttttgttttgttttgtttttttttttttaattttattcttggatagattcccatggctgttgccttttaaagagaggatttttagtaataaaatcataattttattttagagcttatcaagctgcacaatatgaagtcccactccctgttcatatttgagattaattagaacccaagctgttgttattttgggggaaaatgctacttttattctgttttggttgcctactctgggagaacttcaggcattttggcaagaggagctgagctatctgcagctgttcaaatactttaagcctttgggttcattgtggattttgctttaaccctctcccccgacttaaaaaaaaaacagcagccaactgcattgcctgttttttttatttctgttgtttggtaagcagcagttatacttttgtaaccagaggctgtatttattttctgtgttggcagttctgcctaatgaatcaactggtattgaattcacaaagggagatgcccgttccctccctccatctgtttgccaaatgtgtgtgttccgtcagctctcagtagtggtttcactaaaaagagccattagcaagaggtgttcaccttgaattcttagtcctccgcctgactgagaaatagtggtattttcctcttgtgattccgtaggggttgtgtgaggtgaagacccacacctgtaattccagagaaagcatatttgttgtttaagtataacgtctggctctacattaccgatggctttagtttggttcttgagccttggtttgctccatcatgatgggatgtctgtctctggacagtactgttgtcgtggggattgaaattccctgaaagagaagacaagagatcaatgaaccctagtaggttctctcagactgggagcccatgatgccttactggaattgcattacctcctcagcaaatccttccatatttgttggtaatagggaggaaattctttttgagactctgcatttctgtaaagctctgagcctaatgatgaatagtaagaatttaggtcaaacaacttcagtacccggctccatggtcttttgagcaatttgtagtatcactaccatcaaaccgaaagggtggaatggttttgttggtgttcagtagtggaccatgaagtagaagtatttgtctctgcattggagtcaagaatctgggtagaggagcccgacaactttccatctctttccaagacagatcttcacattgtagttacattattttgtttgagatcttggaatttccaggatacatacccaattgctaatatttccgggatacgtacccaactgcaaatacacactttaaatatttttcaaaggtaagtatgagttatttggggtttttgttacctgtgtatatataacagtgatgatattcttttcccagtgacatgccccagtttttgatatattacataggcttgaaaaataatttctcttgaatttgattttatgaatgttgtaatatcactctcttaggtactatgctggttcatttagtttactaaatagttttataagaactaggtgtcatttaagaagtctttggagcactattaaatgttatgaatctaccctgacctagataaggggcagttaactctttttaaatgtaaggccactgacccaccaaagtcatgaactgtttacctaagaaacttaattgaagcattccatttatgttttaacctcaatttattaccccaaaacttccatctaacatatgaattagttttgaaatttacagaaaaagagaaagtataaaacttgcttttaaagtgaagaacatgaggaaaacaatttaatacatatagaaaataataatactggttaatgagaggaagctgagaagaggaacacagagtctaagtggcaagagacacttgcctgaggggagtggggaatccagatacacatgaagagaagaaagggtagatttgcactgaggaaagttcgactcaaggtagaagaggagggaggctctgtagattgtgggatgatgttattcagagttaaacttgtttctgcaatctttggaaatatgacgagacttttaaggtgtagtgactcccacagcactacttctgctgttggaggattcgttctgaatgataatctacatctgtttaacagatatgggtttattctggagcctgcattgatctggccacatcaagccaggaccgaagggttcatgacagtcacattttatatctaggttttaatttgtagtttcagttctgtttgaaataggcaaagcaaagatttcatttgtgtttttacaatgtagttgctcaaatgaaatttattattaaaaaatttttataaaaaacttttgtatagagatgaggtctcgctatgttgccaagctggtctcaaactcctgggctcccacctcaggctcccaaagtgttgggattatagatgtgaggcaccacacctggctaaaatttattattaatattttttatttttttgagacagtgtctcactctgtcacccaggctacagtgcagtgaaacgatctcggctcactgcaacctccacctcccagcttcaagcaattctcatgcctcaccctcctgagtagctaggactacaggcacccaccaccatacctggctaatttttgtatttttagtagcgatgggatttcatcatattggccaggcttgtctcaatctcctgacctcaagtgatccacctgcctcggcctcccaaagtgctgggattacaggaagagccactgcccctggccaatgtttcaaatgttaagtaacaattgggcattgggtttctgaatggttgataatgaggataattttgcatgtatttttaaaaatttgaaaaaaatcatttctacttgggtatttcgtttttggcctatatgaagttttttgattttttgtttatttttaaaattttaccttttttttccagccatcaaacacagaccacctgttgggaccatcctaaaatgaccgaactctttcaatcccttggtaagtgttattaatagtaataaattaacctaaacaactgagaaccggtttttttttttttttttttttttttttttttttttttaaggtggattctcgctgttgcccaggctggagtgcagtggcatgatctcggctcactgcaacctctgcctcccggattcaagcaattctcctgccttaggctcctgagtagctgggactacaggcgcccgccgccactcccagctaatttttcgtattttaatagagacagggttttactgtgttgcccaggctggtctcgaactcctgagctcaggcaatccacccgcctcggcctcccaaagtgctcccgtgagccactgtgcccggccgagaactgtatattgttaaataggagctaatcaccagcctttcttacatggcatattaatgttaaaagaatcatgtcattgacatttaaaagtagttaaatttctaagggcaatgcagtaaacaggtattgcctttcttaggagaattgtgtggtttgaaatcatgtgagccaaaaagagttgatttacagggaggaatgtaattgtagtttttacctccttcgtattgagtcatcttaaccttcagctttgcacgcaaaaaatatatatagatatacaattacaatatagccaactttaatccactgccttaaatttgcttttggctcactttttatttagtacgtgccatcaaattagctcacctagtttaaatttgtctaaattgttaaaagctaaattcatttttatataaaaatgcaagaaaacacagacgagaattccggttttgttttaatttctagtgcaatgtggctttcaacttattgtttaacctacttcctctggttggtccagcggtttttttaagttttctctttgggtagctaaggagatgctggagggaaaaacagcacccgaagcctccctctcccatttcaataaaaaggatgcccccttttttaatctctttaaatgttgggcttctgtgtgagtgtttttttttttggtgggtgaaggggcctgcaaaagttggacaaacaaaagacatagaactggtttgcttagtttgtaaaatgagggggcaaattttgatgatatctgagttttcttttaactctactaatctctgatactctgtctttaggggacaaagaaagaaattacaatatctattgtttccaaagagttgagtattggttgtaggatcatttgaaccagatctgcaaaagggcaggaaaaccaaatcaatcaggatgggaggagcatagaaataagatgagctccatgaatagtgaactggacagtgtggttggaagaaaatgaagtgtccttggggaagatgcccctggaggaaaatctcctttattgggaaaaaaaggaagggccctctgcctactgtgcagtgcatttaataagccatgtgacagctgtgctttctcttcatcaccttcctctttttcctaccaaagggctgaaaggggtggtaccttttctcacccatcataagggtcatggtgaccctcctataacaaaagacaggtcaaccagaaaagcacaagaaatttacttaatcaaagttttacctgacatgagaaccttcagaagactcaaagaaaacagggaaaagtgtctgtttttacacttagattgagtgaggaatggatgactgcattgaattgtgattggatgaaagggtataatttaatgataatagactgagaagggaattccagcaaggcctatctattcagattcttcttggcttctccctgcagcatattcctttcctctagggacaggatacctgtcacaggagaatcttcaggagagaagggagaaggtgacagtgaacttgctagattttatggcttgctttggggaagagaagttctagttttcatgacccaccttggggaaggggaattctggtttctatttatcactttggaaggagaaagagggtcaggagacaagagacccagaggtcagagagaccttactactgaggccttccagtctccttcatttcaaagtactcaacccaccatgttctgagccctgacacctgttgaaaatactttcttagaattttctctgtagcactgctttgagatgtatctcaacatggtgctaatgatcatttaacttttttcttaaatacgtgttggggaatttgggagaagactttttatttcaggcaaacataatattttttcatcatccaaagtaaccaaatacattctgggcattcaatatatattcaataataagcctatcttcaaattgtttctttttctatttcagctgacctgaataatgtacgtttttctgcctaccgtacagcaatcaaaatccgaagactacaaaaagcactatgttgtgagttattctaccaaagttaatcaatctgttacttgaattgcgttttttttttttccaagaggaagataaatgaagaggatggagtgtttgccaagttaatctggtcttcagtgtacctcactcaaggagttggttttgtttctataaatgttttattacttgccccatcagtgtgcagtactgaacacatgccattcttacttggagaacaaaattaaccaaaacacaggagtaatgtaaaaagctttttcaaaaattgtgctgccacccaatttaaaaggattaaatcaaagaaagtattaagtcatgtgttttcagtaccttttgcccatttggcaatgtagagttccagtttgtctcaataccactatatataaagaaacactaaaaaatcacattcctgatctaaatttgaactggcaccttaacaagtgagataaaaggctctattttcttttaaatatatcttgagacatttagtattatcaatgcatttttcctgtggaggatgtgttcagagtggaattctgtggcagtcctttcatcaaaaggatatttcctcccgcaaaataacctaaaattaagtagcagtgtgaatacttagcatatagatttatgctatctggattctatttgtggttgtagttctaatgattgagtctaccctaggccttgtcagatagttgatgtggaaagtgatatttacctgttcttttaagatagggtaaattgaaaagtttcaagtattcttctttgctaccttttgttaactgttaatatacgtctaggcagttcagtgatgctttgaaaattatgctttgaaaaatgatatgttaaggttgaaaaatctgctccttgaaagtcaatagaagttagcaataaattttaagctggctgcacgaagaattgaggaaagagaggtataatgtcattgagaaaaaatagcaatgcaaagcttgaaaataggaaaagcttaagctatgtatggaagagaagtctacagggctgaaagacacctccagatgaggcaatgcaaggaagaatgagatgaccttgacttttgcataatccacagagcctcaaagataattagcaggtggtagtagttgcagcaagtgttgcagaattacccggacaaagaaaagaaagccaccacgctctggctactgatcagtatgttgagcgaaaagagaataggaagtaaattacgaacacacaaaagggatgtttggtctgcgcaggagtccatggtgacagcagttttgaaagaggctcagctgcacatccaggatccagttgatgggtctggaagttcttctcaggcctgatgagctataaaatgaggacaaatgactcagccacaaaatttccattgacagaagactgctttttgtcattatgaacatggtcccagttttcgacaacacttatgggtggataagcatattaacacatttggtgttttcttctcttggttctttggattcctgaagaaaaaaaccccctcctcagctcttcccctcaaacctgagaggaacagaagggacgcttctccaacttctaaactaaacgagattggtaatgacaattaaacaactaaatgacagttagaaaagggctagattgtattggatttcaagtatatgaggtgcttttttcagagccaactgaccttcacttttcctacagccttctcccactgccctccagccaaggcctctgggccactcctggagctcatcagtttattattaatctgcttcttcctctcccttcctttcagtttactagaaataccctgaccctttctctgcactggcttgtaacccttttttcctcccaaatactgttaaagatttacctcttttggaaacatttacaagctaatcctacccgtctccacattttttcccagtagtttatgattgcctgtaatagcaggttctctcaccttagtgacaagtgcttgcctttgtgtgctcgaataatgtttggtggattgccccatctccactgtgaactactttaggtcatggctgtctctcattatgtgcaaatctccacccagcataaggcagagggcagtgtcattgttcattcatttgttgggctccaagattgtgcaggagataaaacactataaagagacttgattctcacactgaaggaactcatatttcgagaacgttgcacatggacccaatgccctgcttacaaaagattcctgctgccctcagaatggaatggtctttgcctggctcacctctctgtccacctccttccctctgctccaccggggcatcaccatttcatcatccacttagtgatagaaatggcaaactctgtattccattcctcctgcctaaaaagcacttgtcttagctctttgtataggttgatgcaaaaataattgcagtttttgccgttaaaagtaagttagggtatttcattaaaagtaatggcaaaaacctcaattacttttgcaccaacttaatccttctgttcttcccttggctgggacactcattcctgtaggtctcaatgttgtcgatcacctctcttttaatgaggttttctatggctcctcatagaactgttcttttccttacatgacacttctggtgcttggtttaggcactaaggcagagtgtcaatggtaatttttaatattctgtttattagttattgtttgcttctccatcatgggatggatgagtctgtgttcgtctctacttaggacctcatacaatttctggcacagagcaggggttgcttaggacacactgagtgaatgatttgagtttgaaggttatatagcagtactccagaagatgtgtccaaggagatttatagcagtacttttcatagtaaaactcattcagttttggcatatttataaatataatacagcaacaaaaatcaatgagctagtaatcagcatcaacatgatttaatcttagaactataaaattaaatgaaaaaattaaatggcagaaaaaaaatgtgtaccactctgttccatttatatgtagttcaaacccatgcaaaactaatgctatatacacttttaaaaactgaaagtgaaatacaaaggttaatggttaccccataattgtaagaggatgtaattaggcaggattcaaggagcttccaagatagtggtaacattctgtttttttcagctgtgtgatggactaatgggtatttgttctattattttcttttagaccacacatatgtattttctgttttcctttgtattttgattttgaaactttatgtgataggtaatagcagaaaagcaaaagggaagtatgttccgaggagggggagagtcctctcattatgaagaagaaggcaggcttccttgattagtgggcatatgagccaggctataaaaggcacctgggatttaggcatggggcagttaattggggataagaagggaaggagttatctgtgtgagaattaaggtgtagatggtgttcaaggaacattaagttatagagtctgaatggaatagcttagctattttgtccaatatccagaaatttccttaaagttaatttaggtcaatttgaacgtcatatttttcctgaaattcctttcggtttttttcctcaagttcttattgtgttgtatttcatgtttggatatttttcgttatagaatggggagccatgaggcattttctgtattgtgggagtttagagatagggccagaagtggaagtatgctttagggaatatctaagaaagaccaaagggcagagaacagagaatgggtaaatagttcaggtgaaggatgatcaaagctgagctggctgggagttgtaggaggggagatcagggtctggatttttaaggctgcctgaggaagaactgatgactcggggtattgggtagttggtaaattgtggcaggtagaagaaggaaggatgttaggatatttcacggtttgcagactggatttcatcatgacaagaaggccaggcctttatggggagaggttcctgaaagagaattatatagctcttgtagggatcagagcaatgggacatgggtcaagtgttgaggcaggagatcagcaggagaaaagagaatctggagccatccaaagagaagcaataatagaagtaagaggagtgagtgagggcctcaggctcacagaatgaaatgccagatgtgaaaccttgagctctgcctatatttctggggaagagaagataggggaaatgctaataataataataataataataataaaataaaaaaataaagaatggccacatagcttgacacctggagaagtgtcactgaagcccaagattggatgcttaacagtgttcattgttttgcagaacaggagaatgatgatgcatttctattccatcccctgtgccttgtatgtgggattaaagaaaaagtcagaaagttggatagaaaatgattatgctgtttgtttcatttaccacatgactgagctgtcatttgtctccctttgaaatgagaaaatcttaatcataattttctgtgatttaaatgtagtcagttctttaaaggtacctaaatgtgacacacttcaggaagatttacgcttgacttaggcactaagacaaagtgtcagagtaaatcactaaaaattgaagacatgatagtctgtgggatgtggcaaattagtgtcacagctacagagtgtataaccagggagacttcagaaagaaatgcaaggacagcctgatgcaggaaatgggctttttggaatttggtctgttgtcacctgatgccatgtggggatccaatagcagtgctgtgttactggcataattaatgttggaattcagaaaacttacagccttttggccatatttgaatatgttccttggtgtctgtggggagctgtagttccctagctactgccctttattaaacactttcctttgtcaggcactttgcttctgccctctagaggtttacaattgaaaactgtgtacagttgacccttgacacccaaaacttaacatgttaacagtcaattaacacatatttgatatgctatgtaatatatactcttattctacaacaaagtaagctagagaaaagaaaattttaagaaaatagtaaaagacaaaatatatttaatattcactaattggaagtgatcatcataaagggtcttcatccttgttgacttcatgttgattaatctgagggggaggaagaagaggagcagttggtgttgctgtctcaggggtaacagaggcagaaagggtagaggagaaaagagaggcaggcacgttcagtgcttaactttaattgaaaaaactccacgtgtaggtggaccctcacagttcaaactggcgctgttcaagcgtcaactgtacagggcaaagaaatgaggtaagaattacagtgaaaattccagatggttcttagtttttttctgacaccttctctaactcatatgaagcttatttgacttatttttgttattagcttaagtttaccaatgatacatttggcatctgaaggaaatggattggttcgttatccagacttgtatgttttatgtttatctctttaaaaaaaaaaaaagtcttccctgttgagttgtttttgaaatcattttactctgtatgggtttaaagcagttcttttaatttgtagataacttaaaaaataaataattctgtgttactcagacagctagcatggacacatttcatacatgtctttaaaaattcaaaattattagttattcagtggttacaaatggataaatacaaaggaagctatttgttcattttagttaactgtcaaaatatgtcatattttttgagagaacagtttttgcatcaggcgaagagaaagaagttggttttatatgtatataaccttattttttctctttgcctcttatttttcatgctaaaagttaaatatataacatatgtgtatatataaccaactattttctctttgcctcttatttttttaatgccaaaaagttaaaaaataagaaaaaataagattagagttcttctagtctaatttttttatgctaaaaggttaaatacagagacagagaaagaattttataaaaactgatgtctatgagcagaccttaaattaatgtggactctaattttccttactcagatgtttagatttagaagagtcatctccacactcaataaatgtatagatagatacatggtagtttgataatctgctttgtctctttgttttcagttagtgaatgaaagacttaaaattgattaaattaaaaaaaaatttgtcgttttcatctaaactcctccttcgggcctttgcgggcctccccttgggcagtgtgtgcctggaccatgcatttctcctgtctgtttcactgccggcaaacaccactcgtgtgtaagtcacgcatcacccacactgcagtccaccattccttagagcctctgggcttgagtgaattcttgccttttctcaagtacttctctaaacctggaattctttcctcacttcatgtggatctcttgtattttatccatttttcaaagcccatttcaaatcgcacctctccagggagccttttccagttgtctttcctctcctagaagtagtagctctagcagaaatttgcgtattcctctcatagggcatgtttactcctccttttagtaaagccatcagtatgtctttgagagcaggggctctgccttcacctcctgtgcacaccctcctggctctagccccagccatgcctaccatagatgttgtacacatgaagagtaaggatgggaacaaatttgtgaagaccaatggatgtgggggctgtctagtacttcttcttagctacaggtcacctctgtgtctagagtactgactgctctagtacttcttcttagctacaggtcacctctgtgtcagagcatcatcggaagtaaaccaggttagggccagtttgtgacaatcttatagatcgggcttgattcagcaggcagtggagagctgttatttttctataaaacctgttttttaatatggagcatcttcagtaaattttgtatgtaatgatgtacatgataaaagactgtttaagaacaattagtttggctgtgatacaaagaatgaagagagcagtgcacaggctgcttgcaggagttaagatgaggagagcagtgtaatatttgagatgcgctgccatttggagtagattgagagatttatgccttgctacatttaaaagcaaaaagagcctggcaaagggaaagccagaaaaagaaagtaggaataattaatattccaaagagcaaaaaatgagataagattgggaagcaacagagttcagattcaaaagtatgaaagtgtggtaaaatgtaagaatagaaatgtgtttgtttctttaaaagctgaaatttagctaaaaaggatagattcttaaattgaagaatcaagctaaatacttgagactagaaatgcctttgttgtgatgttgttatgtaatgtaatgtaatgtaatgactgtaaacattccttcttctctcctggttagtggatctcttagagttgagtacaacaaatgaaattttcaaacagcacaagttgaaccaaaatgaccagctcctcagtgttccagatgtcatcaactgtctgacaacaacttatgatggacttgagcaaatgcataaggacctggtcaacgttccactctgtgttgatatgtgtctcaattggttgctcaatgtctatgacacgtaagtttatattttttctcattaaaatacgatcactgaatgaaatatgttaatagaaaatgtctgatttttaagtgaattttttaataagtgctttcaaattactttcccagtggaaatatttatgtttgttgttgaaactgaatgattttacaaatcattgagcttcttaacaaacaatagaacagaaaagaatgtacatctttcattttaaaatgttgcttcaatttacaaagactgtcaaatttatagtattctttgccaaaatgctaggggaaacaatatagctaagtcctactttcttcttgtttcataatgtctcacagtatttcttttttcaaaataaaaaatcttctgtttattgttatgaattacagtaatttattagctcataataatctgctctacaatctttgtaatccaactgaagagtgatttgaatggccatgaacgaggtagtcttttaatatttgctttatttgcatagtggttatgtgtgtgtgtatatatatataatatatatatatatggtgttttaaataatttatgctacaggacactttaatatctgtcatttaattaggtactcactgttcataaagcacactctcaactcccagcataactcatttgccattaatttggcccttttgaatacgacagtacatttgtgaaatagtcagttctagaaagacctgctgtgggctgacatttctgaaacattaggaattactcattgttctggtgggaggttaaagtatgcaaagatgaaataagaaaactagaactgggctgggcacggtggctcccgcctgtaatcccagcactttgggtggccgaggtgggtggatcacctgaggttaggagttcgagaccagcctgaccaacgtggtgaaaccctgtctctactaaaaatacaaaaattagccaggcatcgtggcaggtgcctgtaatctcagctacttgggaggctgaggcaggagaatctcttgaactcaggaggcaaaggttgcagtgagctgagatcgtgccactccactccagtctgggtgacagtgcaagactctgtctcaaaaaaaaaaaaagaaaagaaaactagaactgttgttttgcctctcatgcccaaaaagttattatctattaattagctacatgaaaacttctatttaccaacctttgatttagagataaataagatagatgatcattcataaatgcacacattcaggagctgattggttctgtataggaagtaaataatgatgacagtagctttagcaatgagctgactaaaaatctggattttttttctattccttttagtttacatgtaataactgtacatatttatgaggtacacagtgatatttcaatacatgtatacagtttgtaaagatcaaatcagggaagttaaaatatccatcacctgaaatatttattacttctttatgttggaaacattcagaatcctctgttctatcttttgaacctgtgaaataaattattgtttactatattcaccctacagtgctatagaacactagaacttattccccctacctatatgtacttttgtaccaattaatgaaactttccctgtcctcctctctcgattttttttaattagagaagtattttatcttttagtgttcataaatatcataacaaagtctttctaaataatcagccactgtgtgcttgagggctcttaagaaacctgctgaagcatgagtctcagttaccataatgaatacgggatttgcgatatctctgtctgatattttttaatacatttcattttaatgcacattttaagttctcctagggtaaaatattaccattagccttaatccaccattaagttgctcttcaataatttgaatcctcagaagatgctttttcatagtaaattcaccaaaatagttggtcaaaggtgttttaactacaaaacctgtaacttaacttttacatcccaggaaaattgctaaattcatagaatacttaggaactccattcagtcctatagaatatggtagaggtatacatcttgaactacattttaaggaagaactggagaagaggttcagttgccttatattgtccatggctctgacacactgttttggttttctggggctgccataacaaagaatgatagactgaatggcttcaacaagagaaatttatttcctaacagttctagacactgagagtgtgagatgaaggtgtcggctgggttgagtctttatggaagccactctttctggtctgcagatgatcgtcttctccctgtgtcttcacatggtttttccttgtctgatgtgtgctcatctcctcttcctctaaggacaccagtcatatcagattatgacccactctaatgacctcattttaacttaattacatctttaaagaccctatctccaaatacagtcccattctgaggtactaggagttaggaccttaacctgtaaattttaggggacacagttcagtgcataatgcacacatatgctcttttcactggacagcccaaagggaatagtgccacttggttgggaggaagcagtgtgtgaaatgccgtgattcatattctagggagttaaatgttggcacagttccacttgcctccatcaaatgggaatatgtgggaaatgctacaatttgccactgtttctcatttagaaagacagtatcttgaaatttctcatttttcattttaaaggaaaaaaatctttcaggactaacctcccttctatgaaaaagaaagatggcaaagaccatgctggatcagaatggtgcccatgcagtgtagctttctatcttggagagagtattggggattaatctatggaaaaaacagttattcttatgacagtaatgtcagacggccagagctggttgcccaggtttctctaacaaccatgatttatttattaatctaaataatagttattaactcttttcaaccaataattttctttgagaatcagatagaaattactatctaccctccaattaggacattacagactcatacatctgtgaatctgaggaatggtaccttgttctaacacttctattcattcagccgtcctgacattcactcactaatcatatacccgtgactgccttctttcctggcatgtgatacagccagaactggtgttttcagcttcagccagctcttgataatgagtgatgcacacacagatcacagaattctcaaagtagaaggatttggggatctttaattctgcccttttctctttactaattgaaaaccttgcccgttgagacaggagaatttatctacctattgcatattagtcataattaaagaactagtgttcagtcttttgataatcatttgattattcttactatatttctatatctaggaaacatagtactttattttaagtgaacagtttttttccaattttaacatgtacccacctcctgatattctgaactttgtaaaaaaaatttattttcatctgtcatggatgacaagaattcaaatttttggttctggttgctgtgtgagttggcagctacttaacattggcatcttaatttttcatctgaaaaattgaaataaaaatatccactctgcttaccacacaaaaggtgattatgaagggcaaatgaactaatatatgtaaaaagtactttataaagataaaattgatttcatttatgaatttgcagcctcagtcatcttaccagattaaaaggtcttaatttcacaatcttccttctggatttaatggaaatcaaaagtgtttaaatcatgatataaagcaatagtctgtagtacttggtttaaatgtgtttttttctaccaaaaatattaacctcatttgcagtagtgtcatttgttccactattccaaagatggtataattttataaagtaaatgtctttatagttaaaccagtttaaagagttgcctatgaaaactatcaggagactaaatatgtcaacactgggctatgtcactcactaatatattttactgtctccctcttgtctctcacatccatgtagcttatttacatcagtgtcctttattgtctggtcccacgtaacctgtacagttcagtcaaccagttaaccttgatgcaagtctctgacccacctgaatgcatcttatttgtttgtttttgtttttgtttgagacagagtctcactctgtcgccaggctggagtgcagtggcatgatgtcagctcactgcaacctctgactccctggttcaagcgattttcctgcctcagtctcccgagtagctgggattacaggcacgcgccaccacgcccagctaatttttgtatgtttagtagagacagggtttcaccatgttggccaggatggtctcaatttcctgacctcgtgatccacctgcctcagcctcccaaagtgctgagattacaggcgtgagccaccgcgccgggcctgaatgtgtcttatctccgatgctcacacccctgcctctgtgcctttgctcaggctttctctgtgatactctatgttctcctacttgggactgtcatggcatgacataccttctatgtctgattttgggtttatcttctctgtcacatgttgtgaaactaatgactacctagactaaatcactaatgataggcagccacaatgatcttgtacttgatgtttgatttccatacataaaggattgtctcatatgttttctagttgtattcctatcttaccttcctcagctagtgtgtgagttcatcggggtaggaatcatgtcttctgcttttctcttggtcccaacagtacacagagcaatgtcaggatcacagtaagcctttgtaactggtgatggtgtgatgaatgggtgattgacagcatcagttgtcttcctgatgatattcctttcttgtgttgtgacagtaaagtgggagtcatgctttaatgcatattattttgaccatttttccctgtagggatcactttatccttagccacattcatgtacttgtctcagcccgttcacaaagccttctgttatcctctgcaagtctattgtctgactgggtccagagagtaaaaatttcctgcttttgaaaggaagcaaacattgtctgtttcatgtgataattaggaaacttctaaaaaatataaagtagaaacacagtttgtagcatggctgtctgtagggttaatgtgaaactggtgtttctgtaattgtgagaaatgattatattaatttagaaattctgcttagaagggctatgtttattttaatattaagtattagtcacttcataggttaattctgaatgtcatatacctacatactaagggttcagtaagtttattagatatgatttaatataaattataaactctatcctattgagggagtactttgaaaatacattgcaccaatccctaagcacgatttcctttcttatttattgcatactttatatgtcataatatgcgtacagaaacttccttcagtacatatagttgagaatggaagaatatcaattagtgtaagtagtaaaaatatcaataaaatcaatgattaaatatagtttggcaagaagactgcttaaaattaaagttacgtgatacaaatatttatgtttttaaaatagcacaaattgttaacttttatacattcatatatttatgtaaacttttagttataggttttaagtgtgctgtacttgtgtattaaaaacatataagaaaatggacaataaaaacctaaaatgaaaatggatcctaaatgtgtaataataaagatagcaataaaggctttttttctgggctatgtgttattccatagcaaggataatatcttattaatttttgtaattatcttccaatccctaggactgggactactgtgactaacatttggtagattactcagtaattctttgataagcaatgaaattaagaaaactctttggttttaaagataaaaaaacatgtttcatctggtcgacttataagtgaaatagaaatgatctatccttagcattgtgtaaaactatgttctaatgttgattaattaatacattctggttttaattataatttgatatttccccaaatagggatttcacatctgtctaagatcactgactattaaaattgcaatagtaatttataaaaactgcattgacagaaaattaactatatactgagggcttataatttgctgaatacttaaataccaatatttatacttaattaatacttaattaccaattagtattcagcaagttgtaagctcttagtatatagttaattttctagtctgtgttcttgtttttagatatatcactagacttttcttcctgtatgaagtcatatatatatatagtgtgcgtagctctagctgttttgaatcttgcatctacaattattaacgtataggtttaattcatagtatttttttttttttttttgagatggagtctcgctctgtcacccaggctggagtgcaatggcacgatctcggctcactgcaatctccgcctcgcaagttcaagtgattctcctgcctcagcctcccgagtagctaggattataggcatgcgccacccgcctggctaattttgtatttttagtagagatgtggtttctccatgttcgtcaggctggtctcgaactcctgacctcaggtgatccgcctgccttggcctcccaaagtgctgggattacaggcatgagccactgtgcccagccaattcataatatttttaaaggtgaaatcttttcagctttataatcatcattttcattttgctttagttcgttcttcttagtttatgtgttgtgtgcaaagtggcttcaagctgtgtgttcttctagccttggccaaacaccctgttaatatatgtcatgaaattacagtattggtttaatattaattgttaaaagttaatagaaaagttgcatctttaagatacaattatttttgatggtttacccccaagaaaatagatattcagaaacaatgaacatgctgtatatggttttaaatgcatctaacacattaacattcttataattttaggggtcgaactggaaaaattagagtgcagagtctgaagattggattaatgtctctctccaaaggtctcttggaagaaaaatacagatgtatgtaagacctttcttataccaacagtgtttttagtaataataatgattataacaatttattggaaacttaaattatataatttgttagtagtaatagttctctctctttttttaacccttactgtgcctataccaagttagacagagggtggcagtgcaaagacttggggctttgtgtgaaatggaaagctgattataactaagaggtgaggtgccaggatggagtgagacccaactacaaattatacttcatttaattcttagaataatccctccataatgtaggcatttgagattttcattttctagctgagaaaattaatgctgagataggttaagaatctagtctaagactgcagagctgataagggatggggctagaattagatactaggtttttctgactccaaagcctaaacttttttttatttctttatacttccaatgcttaaaagaaaaagatgaactagaacctttacagtcatagacgataatcctaaataaatatattttacagctgtgacaaaataaaacatgatttttaaatttttattatatttggatttatcaaataaatcaacagtgttcctttacctgtcagttaatgaaaggtatattggctttggaaaagacttgtgttcaggagccaaggagacctgtcttcaaatctctaccacttagtagctgagtgtctttgggcaggttatgtgatttcattgaatattgccaactaagaggtaatagtattccaattttacagttcaagaagctgaaatttagcaaattttcttcaactgaaaaaatgaagctaataattcctgcttggagaataattaggagtaatgtttaaggtacctagaaatagcagttgttgaataaatggtagcagttgctgctgagtccccaaacccttaactactatcacatatcttttgatttatttttgtccataaaatgtgaatttgatcccaccatgcatattcccagatgattctttacagataaatccatacatttgtgggagaggtttagggatattccatgaatggagagatactaaaaaacaataggatgtttgattataggccctgtaaactgagttaagttttgtgtcttatgtcaacatgcatacattttaaaagcttttattttctgggatttctgtgaggttattggattttgaatttcaggtctagaccatgatggcttgttttttctacatagtttgacaagaatgtcagtgaaaagaaatgtggatttatataaaatgaaaagctgattgtaggattaggagataaggtgctatgacggagtgagagcctagttagccatgcagaagaaagctttgcccaagacttttgctttgtggcactttatccagaattgaagtagtttttggaatcataatcatgaaaagatataatttcaacagctgaaaacgttatctttttataatgatcaggaaaggaaaatgttaatgaaaacaccaatgttacaaaattagaaatggattttttatcatctctgatttggggtttcttgtgcttctgaaacaattagggttctctgaaagtaacagttatagtgtggagcttactctgaaatatttgcaaattcaacctcaaagcttacattgtggataattcaacattaactttcagattttggcaggggaagcagaaggctctgccgtgaaatttctgatatttaattgaatccaggaagtatgccattttagaactaattaaatatgaaatctcttgggttttaatctttaatctaaatctttactgggatatctagactttggaatgtcctggggttttattttgctttttactttgaggaccttcaccactctgattccagtttctgtgatatcattattgtttcctttattagaattaatattcaagacagtttgctcttcaaatgcaatggcagggccgccattcaagatcattggtatctgtctgaacattgattttattaatacaatgcccaatgtcagtgtcttcaccccataacaccttcttctcttggtcctttcctaagaatattccttgtttagtttctaacagtgccctggcctttatgcttatagctggctagcttccttgcctcatcaaaaacacatttacagaccaggcacagtggttcatgcctgtagtcctagctacttgggagactaaggtgggaggatcacttgagccccaggaatcggaggctgcaatgagccatggtcggaccaccacacttccagcctggatgacaaagcgagaccttaaaaaaaaaaaaaaagtacacattttcaaaccatccttttaaattatcattagtatctcttctgtgcttatttattagaatttgagtttttagattatgactttcttattacctgcccctttaccctgacactgctttttgtatcttactataatgttgagaatgtgaacttttgtaggaacttttataaggatttatagaaatatgtcaaaatgtctaaggacacttttgtccttatgttttgtgagtagttttactttaatagtggcatagtggtatagccatatgcctcaaaagaggaaagttgggcatagttgatcttgctgaaaatgtgcacttttctgcaaagattattatacatatgcatcaacttttatttacttaacagacctcttcccagggactggtttaaaataaacatcatgctaagactactggataaatatttttgtctatgatagtcttattgtttttaatggaaagaaataagtagagctctaaccaaatctaagtgaaaaaattataataaaaatcaaatttatcttcattgaatttgctttccctatgtatgcttataattaaagccatacttcattataattactgtgtcaatatcactgagcttggttcagtttgaaatttcaccactgacagtgttagatctagcattatattccttataaaaagagagaatggaccaggcacggtggctcacacctgtaatccccagcactttgggaggccgatgtagggcagatcaactgtgatcgggagttcgagactagcctgaccaacatggagaaaccctgtctctactaaaaatacaaaattagctgggtgtggtggtgcatgcctgtaatcccagctactcaggaggctgaggcaggagaattgcttgaacccggtaggtggaggttgcagcgagccaagatcgtgccattgcactccagcctgggcaacaagagcaacactccatctcaaaaaaaaaaagagagagagaaaatgatgcattttgatctgatatcaggtactgtttgaaaatagttttagaatccaataaatatttactccactttcttctattcttggaaaatgtcacatgaagagcatttagattttaagtacttttgaatttttagaacttgaaaatttatttccaaaaagtattaatttctataatgaagtagattgtttgtatttgaaatttcttcctcttccaaaagtaacttatcttaggatattagctttattgttgaaaataatatataattttgatcttcaaagtattgtatatggtgaataaaaggtaaaccaagagtggacaaaatagaagagttttaattttactgaattaagaaaattataaaacaaatcagttttttaatgaatggaaaaacctaaaaactgtatgaaaatatgcacaaatttttaaatttgattaaatgtatttcattacatgaagtaaaacaaaaatagtggttatagctaataaggaatgggagactggcccaaaggagaaaaaacacaccttcttgtactttttagtgtttcttatataaaatagatgtgagtataaaagtctttaaaataagttataatatatatacatttagtagaatattgaatttaggagtgaacacacaaagtttgtaaacaaatctgttaaaatttaaaggtttgttatttaaggtacgtttattcctttgtgtttttttatttttttttgagttggggtcttgctatgttgcccaaactggtctcaaactcctggctcaagtgatcctcctgccttagtctctccagtagatgagattacaggcatgcaccacagcacccaactacatctattcctttgacaagtcatgaaggaagctttgttttggctcattctttctcaataagaaggggagttcttatgaagatcataaaattaattcatatgcatttattgtatcattttaaaaaggaaatttgcatttattgatttatattatatatgcatgatttatgtttatatgtatacataacccattcttgcaggaacgggttaactacatgcttcttaaaataatctaatatcatatgtaatgcagaatattaagatcagaatattaaggtcattggaattcaggagacaacgaatcagattcatgtccttctgaaatttttttaatctgcatggttcagtccacattaccaaagatatattttaagtaaaagaacatggtagacagatgaaagttaacctcttgcctctctttgcagatctctttaaggaagttgcagggccaacagaaatgtgtgaccagaggcagctgggcctgttacttcatgatgccatccagatcccccggcagctaggtgaagtagcagcttttggaggcagtaatattgagcctagtgttcgcagctgcttccaacaggtaagcatgaaggatcactggtgtgtaggatgtgttggcgaagggttttgaggatgttctgagacatggaatagggaactcgggctggagccaaatactggaagactttgggtaccatccaacaagtggtgtattttatttcctaaggctcatttgcttcaaaaaatagcaacccttgcaaagagacttgctgtttttctttgataaaatctacaatctttaacctgtgccattagattgctgtttgtcctgcccttttcctggcctcatctcctaccattcctctccttgctctccgctttccagctgcactgttttatttccttgattcctgcctcagcagtgcctttggacctgtgtctgctgtttagacgttcttccttccccattgcccactacctcccttctcatacctaatctttatttgatctttagattttagctttagctattacatcctctgaaaatctttctctgacctcttcagataatgctgtattttcctattatattcacctaatatcgtccacctcttccttctcatactcagtgcaattataattacacactgaattatataattcatggcttagtgtttgtttcttctctaggaacctaagctccatgaagacaaggactacggctatcattttactgttgtatcctgtcttagttcattcaggctgctgtaacaaaataccataaactggatggcttttaaacaacagaaatttattttctacagttctggaggctgtccatgatcaaggtgctagcagattcagtatctgctgagggcccaccttctggttcattgcaacctttcttgctgtttcctcatatgacagaagaagtgaatgatctctcttgggcctctttttttgtttgtttgttttgtactttaagttctggggtacatgtgcagaacgtgcaggtttgttacataggtatacatgtgccatggtggtttgctgcacccatcaacccatcatctacattaggtgtttcccctaatgctatccctcccctagtcccccacccactgacaggccccagtgtgtgatgttcccctccctgtgtccatgtgttctcattgttcaactctcacttatgagtgagaacatgtggtgtttggttttctattcttgtgttagtttgctgagaatgatggtttccagcttcatccatttccctgcaagggacatggactcatccttttttatggctacatagtattccatggtgtatttgtgccacattttgtttatccagtgtatcattgatgggcatttgggttggttccaactctttgctattgtgaatagtgcctcagtaaacatacgtgcgcatgtgtctttatagtagaatgatttataatcctttgggtatatacctagtaatgggatttctgggtcaaatggtatttctggttctatatccttgaggaattgccacgctgtcttccacaatggctgaactaatttacactcccaccaacagtgtaaaagcattcctatttctccacatcctctccagcatctggtgtttcctgactttttaatgatcaccattctaactggtgtgagatggtatctcattgtggttttgatttgcatttctctaatgaccagtgatgatgagctttttttctatgtttgttggctgcataaatgtcttcttttgtgaagtgtctgttcatatcctttgcccactttttgatggggttgtttatttttttcttgtaaatttgtttaagttctctgtagattctggatattagccctttgtcagatggatagattgcaaaaattttctcccattttgtaggttgcctgttcactctgatgataggtgttttttgttgttgttttgtttttgtttgttttttgtttgtttgtttgctgtgcagaagctctttagtttaattagatcccatttgtcaattttgccttttgttgccattgcttttggtgttttagtcatgaagtctttgcccatgactatgtcctgaatggtattgcctaggttttcatctaggatttttatggttttaggtcttacatttaagtctttaatccatcttgagttaatttttgtgtgaggtgtaaggaaggggttaagtttcagttttctgcatatggctagccagttttcccaacaccatttattaaatagggaattctttacccattgcgtgtttttgtcaggtttgtcaaagatcagatggttgtagatgtgtggcattatttctgagatcttgggcctcttttataagggcactaacctcattcaagagggctccaccctcatgacctaatcatttcctaaaggctctacctcctcgtaccatctcctaagtggttaggtttttaacatatgagttttgggggacaaaaatattcagattattacatttcctgtgccttgaacatcataactactttaataaatatctgctaaagaactgaattaaaatgtcctgagttctttttaagacaagatttttaaaatatatatacattaaagatgttattaaagtatcagttttttttctttgagactatgcatacaaaagaaagatgtacgaagttttatactgatctaagttactaatttgaaactgagaaagcactttcatttctttttaatgtttactgcatataaagacattttagaaatgttactactgatgttatacatatgcataaagtacaagtctacagatattttggcaaagcatatccagtgatttatcattgctagggaaaaaaaaggctcacaccgtgtctttgaggagaattgatgtcatgggttattacattttataatggccctttttcttattttagaaatacaaaaaatatcaaatgcaaattctaaatatgatttatagtcatacatgtaggttcacagaatgacctcaacagcaacaggaggataaaattggtagatatttagctttgcacataggaaaattacttagtattgggaattgaagagggattggggagttttatgtaatttatcctgataaattctgcaaagtacatccatagcaatatgctttctgtgtgatgatataatgggactagagcaggacacacaaaaatgacagcttttatttagcatttataatggccttcaagtttgtaaaattatcggtgagtctttcacaagtttttactgtcttagatgaaatttttttttttttttttgagatatattcttgctctgttgcccaggctggagtgcagtggcgtgatctcggctcactgcaacctccgcctcccaggttcaagcgattctcctgcctcagcctcccgagtagctgggactacaggtgcacgccacaaggcccagctaattttgtgtgtgtgtgttttagtagagacggggtttcaccgtgttgcctaggctggtctcaaactcctgagctcaggcaatccgcttgcctcggcctcccaaagtgctaggattacaggcttgagccaccacacccggccaaatgagttttacagaattatttatgtaaaaagatgactttaaattgagtggtttgggtttttgcttttgtttctttcaaaatctgagtatattgaagtcttggtatttttttgcttcttcctatgtgacaatttctgctttttctactcataagttctagaattttcttgacttgaagaaccttaaagcattgtgacttaactgacatggaaagagttatatagtttcctcttctgcacaaattttcagaagattatgaagcaacaacactagctacagtttaaatgaaggcatttcttcacttttaatatatttcttttttcaccagaataacaataaaccagaaataagtgtgaaagagtttatagattggatgcatttggaaccacagtccatggtttggctcccagttttacatcgagtggcagcagcggagactgcaaaacatcaggccaaatgcaacatctgtaaagaatgtccaattgtcgggttcaggtaaggcgtgccagtgctggaggaggctattttctgtttcctttgtgtaatctcagtggtacgtccatcctccattcccattcattcccatttggaggtttgctttctaaataaatggtatgttcagtatgtctcatctatctaaaagtagcatttctttttataactactacatgaagcatattttattattgttgctattattattgtcatttacactacttggatcagaaccagagatttttatgaatgtctgtttacttaggtcacagaaatgattcatccatgaaaactgtatggctgattataaatatataaccctgatggaatttggtaaatattctgaggtcttggggtcaaacttagtaagcaggaagcaatgtttaattaccagctgagaagtaatcaaattactttgtgttatttctgccaagtttgatgtgaagtacattaacccgacttcttcccatgaggagcactgctaaatgccatactttaatgtaatcagtgtgtcagactcttcagtttgtgaccccaaagccgacagtgcagagtctgtggtttgtcctaaggtggacatttttggacatcctgatccactcctcttaacataggtatgcatttgacctcttgaatatattatatttctctactggggggaatctggaaaatagccccagtttaatttggaaatctattatgaaacaacataagcctactcagtagggaaattcaagattttgtgtgtgtctttttttatttattttttgagaccaagtcccactctgtcacccaagctggtgtgcagtggcacgatcttggttcacttcaacctctgcctcccaagttcacgcgattcccctgcctcggcctcccgagtagctgggactacaggtgcatgccaccacacccagctaatttttgtatttttagtagagactgggttccactatgttggccaggctggtctcaaactcccgaccatgtgatctgtcctccttggcctcccaaagtgctgggattacaggcgtgagccgccatacctggccctatgtgtatcttttattcgtaccagaagatcaagtaccaatacggtgattctctgagggagagtcaaatcaggagggctgggattggttgttgttgtatattgtatcagtattagtatcttgaattaaacagaattgttttcatttgactgactttatcagcataatagtttgtacgaagcatatcattgcattctctgtggatggctaacataagaaatgaaaattcaaaagttctcttctctcatgcattatggtgtagttgggaagactaaagtattgtgaggtcagagggccttgctgctatgcattctaagaggaggaaaagacaggtaggtagtgtgaagtagagtgagcattagcctggcagacagctagggtaatagatgacttccagtggaagtcaaagcacaaatgttggaagaagaagaatggtaaagtcacagtttaaatgcagcagggttcttggaatggctacatttggagtatctggtagacatagatgtatgggagagggaatagctggaatgtggcaaggtcagtctactactgggaagataattcaaatgagagatgtagtcatcaaagctaataatcactgctatttattgtttactttatgccagacaatgtgctaagaggtgttatatttgttattttagtcacttttcttaataactctgtaagattgggagtattacctctactttacacataaaggaactaagactccaagattagtcaacttgcccaaggccaggcagccgattgtgcagagacaaagttaggattcaaatccagaaccctttggttttccagtttgtgttcttaatcaagatggttttaaaaagcagattagatttttaggagagagagatttaatattaagaagtaattaaatggtattgaaaagagcaattgatttaaagcactaattattagaccaaaaatattactctggatataaacggtaatgtgaagccatgggaaagatccagattaattgacttgggaagagactgccatatatagatatatataaaatctgccatatatggccattggtataacctagagatgccatgagggaccatgtttctcagcatctgatggatgtagagagtgaaggagaggataaaatactctaaaaacattaaatatttgaatgacctttaaagtttcatttcttaaattaaaaatgacctgaagcaactatgtagaatattaagatttaactgagttgtgggacatggatgtttattatattctccctacttttgaattaacttgaaatatttaataagaaaaatatgaaagagcaattataaagggtgaacaacctgaagtgttaaatttcaagggtttaagtttctgctagtactatcaaattgacctgtaaatgtctctatgatagagatgtgaagttgaccagcaggtcagagattaaggttatgggaggatattcaggagatagtgtattgagaagtagctctggagtcaggctacttggatttcaatcctggatctattgtttggtgctgagactttgaataagatacttggcctgcttgaacctgagtttcttcaacttcaaattctatgagtgtttcctcataggaatagttaatacatgaaagtatctagggcagttcctatcacagagtaggcattcagtaaatgttggctctttttgttactaccaataacatcattagtgtgatagtagctaaacctatgagtgtgttgttgaacatttccattaagtggaaatgccagaaaaacctggacaatgatgttgctcagtaaaaggcaagattagagagaggtataataagggacagaacaggattcttcagagaaataaagacgcatagtgtgctttagcaagatggtagaggtgttaagtgcatcagaaagattctttgaatcagaagtcattgggaatcttagagaggattctatccgtgtcgttataaagatggctcaggaaaatacataggcgaatatgtgcaaacaacttgtttaagaaatctagctataacttaaaatatgtcaggatattgaaaattggaagatggtaagtgatatattgtcttacttttacttgcatttatatttttcctgttttctacattgagaatatagtacatctaaaatttgtatttcgaatgagagagaaatatgtccagacttgatacctggtttaggcacaagagtgagcaagcaaaggtttcttcaagctaatggtgacttaattattgcacaaagattacacatgaagggaatgaatataagaacaattccaatagtaaaatggggtccagttggaataggtctgattagtttagttgtaaagagatgcatctttctctgtggcttcagagaatgaatggaaagacaagtacagaaataaagatagaggaatatgtctattatagaataatcttaacttcattcagactgtctttctatcaagcttctacccaagatatatatatatatatttcattttccccgaacttttataaatactgctagagtttttcactaattacttccaaataaaatgttaatgaaatcttagatttacataatgttttgtaagctgggaattgtttcagttagaatcatacacaattccttaatagtagttgcataaataaattagaactttagttttctttcttgtaaacagagtgaaggtaggtaatccaagactgttctctgtgaccacctgggcccttagctctgttttcatgcactgtcatccctaacatgtggcttccatcttcaaagtcacttcatgctaacaaagtgactcttctggatgtcagatccattttccagtggggaggaagaggcagcatgcctcttcccagctaactcagtcccttgaaattccaattagaacccccacccaataactttggtttttattgcactggtcaccaacatcagcaagagaggctaagaaacagtaattttctcaaggctcattgctaaaatgtgctaacagtacaagggtatgttaccaatgaaaaagagagaatggctatctgccaagggagtattcagcagaaaacaaaatttcatttagaaagaagatgtcagtcatacctgtcaagccatgctgataagccaagagatgtcgttagtgtatgtgattgtttcaaaccaatagcctccttggcaaaagtaagctggctgtagtatatgcagaatgatttccttaagattgatttgcaagtgatttttcaggtcattttagaagctactcagtacttagtagtttacagccacacaacttttaaattttgcttccattttcattctgttggttctatcatttaattttttttctgtagatgtgggtataatttatgttcttagttctaccagcaattctgacagaacagatttcggagaagatgttttccactcagacccatagaaacttatcgtctaaggttttgcttttgtaaataagattctgcaagtacaagtcaatgtgcagtgtcattcttacgccagagattttaaaacaccatttccattcaaggatgcattgtgatcaaggctttatttagtttttcctttgttacacagtatttcttgatttcttttttttctagtgactaatttaaaccaaatataaaagtgctcattgttgaaaactgtatctttgtgagggaattttaaaattcatttcttattggtggtataattgatattttaaaatttgatgtttcaacttaatagatataattcttttcttgcctatcattttccattcgtattcaaacattaaaagaaatcttctgacatgcatatttgtctccctctcatgtataaacagatagaagcatgtttcagagacttgaactccaaaattttatattttattttttggtaattcggatgaatgaaatttcttaccacaaatttagactaaatgatagtaatgcaagccaataaattttcttttgttttctctaggtatagaagccttaagcattttaactatgatgtctgccagagttgtttcttttcgggtcgaacagcaaaaggtcacaaattacattacccaatggtggaatattgtatacctgtgagtactaacccactgttttgtttttaatacattgccattgaattaactagtatctaaaattttattatttatttagacttaatcttttttgaaaaaatatcactttgaagattttttttttcttttaagtaaactcatttatgttgaattaattagtgcagaaaaaaatattaacttttttaaatatctgtgttttgattttaaacttttttggtagcaaattcttttaagagctgatactgacctacactgaaaatgatactatgtaacgaaaaatcatgtttcttttagacatatttatgctttcatagttaaataccatattcatattagcaaaatacagaaaatggagatattaaaaatatagttcctaactctagctcctgaataaactaccttctaatttttccatatctctggttttaagattctatttatatttatatttatgtatctttttccctgatatttttcactcgacattccatttcgtcacacagtgtaattttttttagtcacaaaatttttaattgagtgaattactacagtttacctaaccattccctgaaatttggacatatagtttattttcaattttctgatgttataaataacactcttacaagtatctttgtgagggtagctcattccagatattatgtaaactacattgcaatagaataaagcactataagtaggttatttcagtcaatgaatatgggtattttttatggtcaaaatacttgatgtcaacgtttttttcaaaataggtttatcccaatttacattattatcacactttgttaaagtttcaattttactaagccccaccagtattggacataagttcttgtttttcctttgatttacagctattttttcctgaagttatcctcatgttctattaatagctattcttttacttccttccaaataatgcccaaatgtattcatcaagctgtctattttctttggtttagggaattgagttacttttttggatcataaattgacagaaaggctgtaatacttataaaatatacacatataaatctcacactcataggtatcttatctcaaataaataagtgccctgtgtatggagaggaaatctgtagaaaatattgctgaattataatggaggaagtgcccacatcacattatagctttaaccaggaaaaagaaatctccccaagaaaatttgtgagacatcatttattactattatcaacttattcactcaacaaattaatattgaacattttgcaggtgtcaggccctcttgtcaaagataagcaaaaccagacactagttaaagtggtaaggacagattttaatcaataatatactgattatgcacatgtatttctgtttgtacagaggtgactgggtgttttcagaagggaatagactggggaaacaaaagagggacttgagcagaggcaaggaagtgaaaaatgacaaagcattggtcagcatcagttccatcagaccagctgtgtctgtgagctggcaattgtcagagttaggattctaccattccagagagagactgggagacaggggtcctatccttcctgatgattacatttcaaagaaatggttttcagatccttgagaaagacactcctgagttgttggagatacatccacatctcaaagggacagaggaaggattccccattgtaaaccctttccagtaaatgccctaagaaagagtgagcagggacctgtcttcaggtgttggctagagtgaacagtaaattcttttggcagtctggagtttgtttttcaggcagacgctttaaggggtcagacgccttaataatcccttttttaagggtcatcctagggatgtggtcttgaactgttataaattatgttcatgtttgtttaagtcttttaatggagaagtgggtggacagggatggacaaaatgatttgtgctgaaaatttgcagcttttataggccaaggcttcagtagacaacagagcttacaggaggccaactcaaatttggtcaaggagagaatccttgtcagtaatttcagctctgatagtgtatcagagtatacccagaaagataagattgtggacttcctgctactctccctttaggaggaagaatgtgtgagaatgaacaaggaaacgaataaatggggttgttatacattgcagtaagtgcctttaaggaaatgaatggataatgagatagaatgattagaagagacattttagataaagaaatcagtaaggtttgtctgagttgacatttgagttgagaccaaagtttgagaaagattcagccctgtaaagaactagtagaagcatgtttcagaaagaagaaacagaacatatagtggtctgagttgggaaaaaggttagcgtgattgggctgcagaaagtgaagcctgttccccaaggggcgcatggaaaggagcactggttacacaactggaagtgcccagtgcaaaatgaaactggggggccccttgtttaacaattattaagacttccgagttggcaacatcagaggagtaaatgaagttcaaagcccttctgattgtagggccctgtacaactgcataagtgcaatagttcaaagcccttctgattgtagggccctgtacaactgcataagtgcaatatctttgaagctcaccctgaggctgggaaagaggtgggtgtaaccagggaacagaaagaaaccaggacaaatttgacaaaagagagacaatagtaggagatggaattaaaaagaaaggcaactatcagattgtatagaaccctggggatcattgtaaggaatttggattgggggaaaatatcatagtaatatttacatgaatagctattatagaagtttagaaaactgattataaaatgctagtatcaaaatatcataaagtaaatatatgttgttatagtaaagatatataaaattactatttttcttggtcttgaacatataataattcttaatggctttacaaaatacctaaacaatttgaaacccacatatcttcaacagttgtcatgcagtaggtgcatacttaagaatcactgatacacatatgaattccactctccaactaccaattttaaatgaaatctgtaagttacccaaaactgttcttgttgcatagtctttcaaaagtcactgtttatcatttccaagattgcagcttatcctgcattatacaaggatagcttcatttttcaagacatcctttgcccatttctgaggctttgtagtgatcttatcaacagcctacttataaatcatctgtatgacaggtcactttctgcatttgaccctacaactttttgtaaaataactagaaatatatgtaaattgaatctttaaaaagatacttgcatttaatagcaatgaatgatctgattgctattattgtagcattaatgtctttccattcattctctgaagccacagagaaagatgcatctctttacaactaaactaatcagacctattccaactggaccccattttactattggaattgttcttatattcattcccttcatgtgtaatctttgtgcaataattaagtcaccattagcttgaagaaacctttgcttgctcactcttgtgcctaaaccaggtatcaagtctggacatatttctctctcattcgaaatacaaattttagatgtactatattctcaatgtagaaaacaggaaaaatataaatgcaagtattcagaaatcattgctttctgaaatttctttctgttcacccacattctttacatttgctctactcttttaagttttatttatggttcatccatcttttactcaacatttcctaaagtcgtttcatgtctgccttagaaaatgaactcaagtgtgaatttgtttggtacagtgataataagcaacacttgagtgttaaatggatcagaccttcccatatggaccttgatgtttgcattcctcagactgcatctccctttttagttaagaagatgctccagtcaccttactgacttcatctctttccttttcaaagtcctttacagctgactctgaatgtttctatttttaagagctttctgcaatttagaaaccttattttaaatccacaaagcaccctaaatattttgccaatatatctgcttatgatttatggtaatgttttcctttagctgtaagaagactaatggtatatgaatgaactatcatgactcatgaaagtattttatgatattgataatttatatatgtatatataaattatctgaagaaatgtagcagaatttttatttctctaggaaatgattttttgtcttatttccccctactattctataatccaaatttgtacatttaagaattctttcattaggcttaataagagttgatcttcaagagacagcatgacacagatgatatttaatgcctgtcatcattctgtctccatatgtccaaatcccaccttctcacaaaaacagctcaactcccactttgtgtgtgaaatctctcccagctcctccagttttaccctcatcaaagcacttagttcaggggcctctgccaatagcctctactttaccaattaggatttgattctatgttcccttgtatcattttctaactgtggtgtttttgtcttctcaattatctttttacctccttgaggactgggatgacttttatacttttctccctgtgttagttaaatttgcctcataaaagccagatgagctcgtatctgactttataaatactagttatagaatattaaagctggaattaaagctctaagagatcatctaacttatctttattttgaagaaaaaactaagtcttagagaaggtaagtgatttgtgcaaagttaatggtatggatttagtgacttaactccattagggaaatacacacacacacacgcagttagcacattggaaaataggggtttgtgtatatccttgctggaatattatgtttgttgaatacccttttacataccaggcattttgctaggagttggaaatagagagaaaatttcatgaaggagaaaaaatacctctatgtggagaaattcaacaagactgtaatattttttagaatgattaagcttatgaatcaagagagtagtcaatttttttttgtattatccatgcattaaacctttgaattcagggattatcattttttaaataaatagttatatcttatattaaagatgttcagatttaaatttcttttttatttatgatgatttaatttcatcgtgaaaattaccctactcagatcttctttaaaatcatctttgttgtaagtaaccaaaatttaattcaaattagaaacattttcatatgttgttagagcatataaaagatagtgtgtggttttgttttttgagatgagatctagtctgttagtgaatttcaagtgtattatctgtagccacaagctgtacattaggtctccagaatttattcatcatataactgaaagtttataccctttgaccagtctcttctcttttcctccaccccccagcccctggtaactaccattctactctgtgctactatgagcttgacttttttttttaaaggtcccacatataagtgagatcatgcagtatttgtctttctgtatctgggttatttcacttagtataatgtcctccaggctcatctaagttattgcaaatgacagaattcccttctttttttatgactggatatatttcactgtgttttctttatccatttttctgttgtaggatacttagtttgattccatatcttggctattgtgaataatgctacagtgcacataggagtataaataccttttggagataatgattttattttctttggatatgtacccagaagtgggattactggatgatatgatagttctatttttaattttttaaagaacctttagattgtttttcataatgactgaaccaaagatagttctttaagttggagagttcttctttaaatttcacatgatttataaaagttcatacaattgctgacagtgagagagaagtggatagggttaaatactaaggataatggaaaatgtttagaatagctactagggtcaatcttgagtcacacagagatgagtaaactgattgctaccttgccactagagtgcagctgaggttaattgacaaggatttgtagtttgtgactccatcattgctcagcagctttggaattaaaagatgaaaagtatatttgaaggccaagggagtgaaaaattccaaggtgttaatgatactgtggttgatttgaggtatcctcatgctgaagaaatcccaaggtgggataaagggctagacgtcaagatgatggggaaagaagaggtttatttataatataagaagtgagaagaagagtcagaagattccagtcagtgaaagattttttcaagttagagattttggactaaaagtggttttaagttatgatgaggcctggggtatggccataccccaatgtgtgactgaagtgggacatagaaggttctagaaatgagatggcttttagaaggtcatcactgcatttctagaagtgaagtgacagatgatagccctgtctggcgttgtgccatcaaaggagaggggaagggcacattggctttagtagatgaagctaaggggaaaagggtgtgtaggagaggaaaaaaatatcttcttcccatcttagtttcatagttgaggctcctgtaacaaaagacagattaacaagagaaaagcatacgaattgatttaatataaattttacattatatggaagccttcatcaggaagagaagacccaaagaaacggaagcctgtgtatttttatgcttaggtttgatgaagagtggacagttgcgtagaagtatgattgaataagaagatacgacctaatgctaatgaactaggcgaacttagcaaggcctgtttgttcagattcttttctgtgtccttctgttttcagtgataaggatgtttcttccctccaggaataaggagggcacctctcaaataagggtcttatgaccctttagggaagaaggatgggagaaggtcagagagatcttgctacgtctgctgttttctcaactgccaatgtgccatatttggaggtagtgtgtcctgaacccttgccaagtgtaaacatccttttctcttggttgttatgaaaaagagattatacagccacaaatgaaaaagatgttataggaaatggcattatcatgggagcttcgggattgattcaaggagataggttgaaatactaattatgaacaaaatgtaaggtaatgtgtaaaagaacacagaatccactgtaatggagaaagaaaggtagatagataggctgtatgcatatagtgaggtacagtaaccccatccatggagagaaaatgtgaaatagagcaaggtaatggaggaaatagtaaaaggaaagaaggaggaaataagcaaggaaaggttagccaggatagaaaggtagtttgagagacatgttagctgagggagaagagacaggatatttgcaaaattttgtagcttgaaaggtcaacagcatcagctacttccagcatttcaattgcaagggtagattcattgtcaatgtcatagtttagttgctgagctttacataggactagtttgtactggtaactttgatgagtttagtgagaagaggcaacaacaggaaaaaaatacctcaatgagaaacagcttattaaattaataccactcaaaacagatttatattgcaggttttaagcaaatacagttgttttaaaagcaagaggttcaactgtattcttgttgatattgattaatatgtagggaaataaaccaaaattacatgttttccatgagaagaatcatattttcagtgagaagaattacaattttctagtaaaaaatatcgaatttctgttttaaaagataaattgtgccttttttttatgaactatatgccattggcaaaaataaaacacacacacacacaaaacacccgaaaagaacaaagaaaaaaatctagaagcagttgttttgatcaatcctttccacccctgccagcatcaatgtacttcgtaagactataaaaatcaaatattttaaaaatgctgattcattctttggaaagctctaccttgagttagggtagtttgttttttggcagtcttgtctcttcagatgtgatgtggggtgtttgccaatatactgaaaacgcagcatcacggctgtttctctgacctcagcatcctgaagtggtgtttcagctcctgctctccttacatcgttttaccagtaggtccagtgcatttagatttgtcattagcttttaaggtgaggtttgggcaaaatccattttattttggatgacttatcatcccactgattcttgactccttggtaattctgctaatgctaatttttttagcttcatatattttcattagggcttgaaagtctctgagcttttcttactgattgcatcctatccatggcattcaaatgtgtctgaatttcaacttgttgaaatcattgaaacttaaataaaaactgagaggttgttttatagttaaaaaaaaaaaacctgttaagaatatctttaaaataagtcttgtgataatgaaatgtaccgcttagcagtatgcatgtaccagttgggactactggtttctatatttaagaagtaactcttgctaatgagggtgctgttcaacaatgattttagcacttgtgcatgatccaaatgataatgtttaattattctgtttgcgtgccaagtgactttttttatataaccttgatttgcctctttgtaagcctttgttttcctctgtatgtaacttattcatatttgtaattaacaatttaaatccactgtttggagcattaaggaattagttaatactgatatctcaagttaagaagtgactccccaaaaaaaagttgtggggagaattaaaacaaatattttctgttttgttttgtttctttatttgtggttctttatcttgttttgtttaaattgtttggtaattagaagttatttacgggatttaggttatttggtagcattgtaaatagcttcctttcatgtgttgctttgccggtctttggggataataataagagtcctttgagctgacctagtaaagccgtttattcaaggatcacttgattatgaatactgggggaagggggttagcttttctacattctagattcttctataccttatccttgctgcttcttgtgatacatattagtgaaaagggaactttcagccatgtattaatgcttttgaagttcagtagtgcatagatttcagcataaagtaagattatacagtttgcaatatgaacagggacatatagaaggatacacatgcattcatatagagatatacaaactcaagcaaaagatagagtaactctaaattatgttccatgtgatgtatctatatttgttctctgtcaaggataaaatggaagaaaattgaaaatttcctaactgtattttggttggtaaaatacaatctcaaaagtaaaaaattatttgatttcgccttaaaagtgattttgtttagggtttttctttagggttttgctacagatagatgtatcacagggtacattttataattcagtgatactttccatattttatttattcatttatattagttggtggggaacaagtaaaaaattgattaattcttattatacaggtaagttttcattgttttacggctacttaatagcagtacagtggagtaaagcacattttcagaattcacatgcccacttatctgtgtaggttcagttctaaaatgtttttcacagtgagtcactgtcattagctttccaaaaatgacaatttcaaggacagccctaatttgtacatgtgaatttttatgtgcttgttgaaaatcagtccagaggcatctggggaagatggtggtagcatggcatcagagtttttttgttgttgttgttttatttttttatttttatttttatttatttatttatttatttttttgaaatggagtttcgctcttgttgtccaagctggaagcaatggcgcaatcttggctcactgcaacctctgcctcccgggttcaagtgattctcctgccttagcctcctgagtagctgggattccaggcatgtgccaccacgcccagctaatttttgcatttttagtagagacggggtttcaccttgttagccaggatgatctcgatctcctgacctcgtgatccgcccgcctcggcctccccaaagtgctgggattacaggcatgggccaccacacctggcccagagtttttccatgtcttttgcctttgccattttccttccattggtaaagcagttacatttataaagagacatttgtaaagagaataactagacagcaaaactaaaacgtacaatgtttgcaaccaaactagatgacaagagagatccaaaataaatccaggtggcgataagccaccaccagccacaaaacgtacaagacatcactgcctgtatgagaggaaagacaaggaagtgagggtgcctaagaaccagatagcccccaaaataggcaacagatatttaatggaaagctggcttgagagcagagctaaacctggaagggttttgccatgcgcagaggctagggtaaaaaaggtgtgacatttctagaatgctcttgcctgctgtgagctctcagactggacccatcagggcttccttctagaaagaaggtctcatgctgagcaaaacttctgggaatagaatcaatatggagcatctcaaggcaacagaaatgaaaggagaaggcctagtccaaactgttcctacgtgctggtagagggtatgggggaacaggaccaggaagtctcaaactcaagtactgctatgaatggaatgtttatgtcccccaaaaattcatgggttgaaatctaatccctagtgtgatagtgttaggagatggggccttggaagtgattaggtcatgaggatggagctgtcataaatgaaattagtacattcataaaagtgaccccagagagctctctcttcccttccaccatgggaggacgcagtgagaagacggctgtgtatgacccaggaagcagactcactggaccacagatctaccaatcctttgatcttggacttgccagtctccagaactgtgagagataaatctctgctgttttatttaagccactcagtctatagtattctgttatagcagactgaatagattgagacacatgctgtaattgtaaataccacacaaaagcaaaagaagaggaatctctgtgaagttagaaaagctctcctcaacctcattttgttataaaagtttaggaaaattaattatacaaccaaaaaaatgagcaacaaaagtatcaagaccaaatctcatataaaggaattttaagaaaaagagataaggaacaaaattatatcactacaaataaagcatgccagtgtaactactttatgaatgggaggaaaatggaaaagtaaatctatattttaatgttttcactaatcatgtgggtggtagtattggtattagtgttctaagactattgtgtacgtaatatgataaaaagcaaatgaataattatgggattgtctaggtctatcatctcttgtgtccttgagaaccagatttttggttttgaaaaaaggagatagaggtgtattagaaaacaagttaagttaaatcagaaatttgaattggaatcatcaatgtaacttcaagagaaattttaccttcaaatgcatatttcccagctctgtgcaaagaaaaagcctgttaacactgaaaaggcctaaaaggtgtgcttggaacatcttgtaatagtagctaataaggaagctgttgaagactgttagagtcacattaaaagttgccaactgaacttgaccttcaataatgagaattgcaatagattgaaacccatcaaatacattaaaatctcatgatatttaaaatgaacaaaagcattgatcatctttggaaaataataggaaaccatttcatgatactgaaaattagtcaacacagtaaaatatttatcctgacttttctaaatgaactgtaccacagagtacctaaatgttagacatggtgatgtttctttataaaagtatgtattaggcagggctgtctagagggtcagaactaataggatagatgtatatatgaatgggagtttattaaggagtattgactcacatgatcacaaggtgaagtcccacagtaggctgtctgcaagctgaagagcaaggaagccagtttgagtacccaaacctcaaaagtagagaagccgacagtgcagccttcagtctgtggccgaaggcccaagagcccctggcaaaccactggtctaacagtccaaaagttgaagaacttggagtttatgttcgagggcaggaagcttccagcacggaaaaagatgaaggccagaagactcagcaagtctgctcttccatcttctcctgcctgctttgttctagccatactggcaagtgattagatggtgcccactgattagatggtacccaccgggtttgagggtgtatctgcctctcctagtccactgactaaaatattaatctcctttggcaacaccctcacagacacacccaggaacagtactttgcatccttcaatccaatcaagttgacagtattaaccatcacaaagtattccaagtaataaatgaaaaatgaatgatagaatgacaccattttgcaattcccaatgaatggatacggacacttagcatgaacagctgctaagatcacctaagagaggtgacagctattatgtgcctcctataacactgccaaataccactaattgtcttgacaaaagtctgctgcattatctggatcaagttgcagatttgtaggaggttatcaagaggacagacgaaagtactgagctgtaccaaaaatagacattctgtaaaatccagactctggaaaactctgcaggtcaaattgcctgagttttccaacagacaaactgtagggaaatggcaggtgtggaggagggacctgtaaattaaaagtgatttaaaatatgtcagatttttttttaataagcaaaacaaattaaggatagacattggagtgataaaactatttttgaaacataattcaagttatgtactacttcaaaaaatgaagttgatggtaataatggagaggggaagaaagttttgcctggaagcggcttctcgaatgtgcagcagtgttccattttctgactgataatatttcattaagccatacttttttgtgtatatattttgttttactttaaaataaaaagaattctaaaaataaatcagtctagtcaccaaaattttacaaatggctgtctctggatggtcaaatagctggcaatttttattttatttttattccttcatgtatattttatttttctttctagttgtacttataccaaacgtgttatatacaccatttaaatcttttttaagtagctgggactgcaggcacgtgctgtcatgcctagcttttttcctttttttttttttttaaatttttttttatagagatggggttttgccgtgttgcccaggctggtctcgaactcctgagttgaagcaatctgccctccttggcctcccaaagtgctggcattacaggtgtgagccactgcatccagcctatttataaaatgacattttaatataattttttagaaaaccaaccacatggcatctaatcagtacattatttaaaatgaaggacaaatttaggatgcaatattagatattttagtcaatggctatggattctttccctttcaaaacttaaaacagttccatttttctagaagcagtgacatagtcttgtaaaaaggctcaagttttcaagaacatttttttccttactgaacttggttggagtccatcaaaggcttagtgtgagtttacttaggcttcaaaaacctgatgataatctcctcagaggccatgatggttaaatgagattgaaggaaaacaatttataaggtacaaggtcctatgctaacctgttacccttgtgtttgatctaatgggatctgcaaaatctgttctccttttcttacagaaataaacagaaaccgaatcttccaagaaatgcatttaaaatgttgggtaatttgtgtagtaatgattgttcctttcaattttatctttctatcataatatcaaaagttatttccttaaaaaaaagaaaaatgtattatacctagtgtaaaggcagagttgagtttgattatatttattatggtaagtgggtggttctcttttttctttctttctttttctttttttccaaaccaaaccattactttagcattttaaaatagagaaatattaggtactactattatataataaaaatcaaattggaccaagtatatataaatgttttaacatttcggtgcaaaaatgggttaaattcactttattggctctatcccagctgaagaattacattctgataacctgaatataatccctaattccttgggatgaattacttttcactttttcttttaatattgcataaagtttatggcaataatgagttaatgctcttagattacaactctttgtgctagcttttccccaaggaaataaaaataagctatttctgtgtgtgtactaacttttaaaaacatgtaaatatgagtattattagaaactctaatttcaataactactataacttttggggacagcaagtagttgtttgttattttgtgcatgggatagaaaggggttgtttttgttattggtggttttgctttggtctttcatgtcttgaaaatatttagctaaagaatgtatgctgtggaattgaactggcacttttgaataatttgtcatttttttcacaagcaagagttcatgttggaactcaaatatagataaactagaagaactgatgctaagtaaaagaagcaagtcataaaagaccatatattatattaatttgtttatatgaaatgtccagaataagcagattcatagagaaaatagattaatgcttgccatgggttgtgggaggcgaagggtcatgggtacagagtttctctttggggtgatgaaaatgacctgtaattagatagtggtgattttttttaactttatgaattcactgaaaaccactgaagtgtaaactgtaccttaccctttctgaggcacactgggtaaggggcctgatgccttgcccacctggcctttcctctcacccactcactccactcagggctgtgaattgaagacctggatatggcttgaaaaccactggcctaagagatcaaaacttttacattgctaggtatggagtttactcccaagtaaaagctggagtccattgcttattaagtatttctctatattaacagtgtactaagaacagacaaagaaataaattgggtcataaatgcttattcttatacacgggtcctctttatgcatttctattatggaaacttctttttttccttccttaccaagacatttagggtaagcatatctctacactaaattatctgcagttgtgataaccattgcaaaagatgtgaaaatcgtttatagtagatgatatatccttttggctttattctgagacccagatattgcttctctaaaagtttccttatttgctcccaactacaatctgttgtttttttttttttccttttctgcctggtaagagctgaatactctcaaaccgtcagatcttataacaacccttttttctccacagggtttccttgaattctttttcttttcatgaatacctttttcttctgcacttttgctttgcatttgggaagccctatatccatataactgcagatcattatgtagttaatattcagttattcaggaaaagatgggtcattgtgaatctgatggcaaagcctggtgatagcatggggctggcaccttgttgcaggttgtttgttttgtcagtgtaaaaactgatgaattttaaatgataagtagctgcggcttaatcatgtctcatctctgctttgcaagccaagagaatcaaaagttcccttaattattgactagaagcagacatgttttgatagaaggggaatggatagaaagtggcaaaactatataagggttaactcagaacttagttgttttcaaaaatagtttggtttttgtttttgtttttttcaatttttggttgggtgcagtggctcacacctgtaatcccagcactttgggaatctgaggcaggtgaatcacttgaggtcaggagtttgagaccagcctggccaacatggtgaaaccccgtctactaaaaatacaaaaattagctgggtgtggtggtgcgcacctgtagtcccagctactcaggaggctgaggcacgagaatcggctgaacttgggaggcagaggttgcagtgagctgagatcgtgccattgcatgccagcttgggcaacagagcgagactctgtctcaaaaaaataaaaaaagtttctgtctgcaaaacaagtttctgtgagtcctgggcatgcatgttgtgaaggaaaagctgaagggcagggacagggagcaggcagcaggtaagcaaatatacttatcattcagtgtctgtgattacaagaaagtttctctctccttctccccttctcctcctccgccgcctcctcctcctcctcctcctcctcctcctcctcctctctctctctctctctctctttctgtctctaagaggagggagtgaggtataatgagtggtaggttgagcagccaagttggagccagaggatcatgggcttcattaagttctgtgcaggtaatgtaaatattttaaatgcatcttcggaaggatcacagttgatatctgtattgtaaatagaaactagaattgtgatatacagtagaaaactggggcttggagaacaatagttcatgggataggatgatggggtgggtggggttgggatagtgttagtccatatcaccctaaatgattatcaaactaatcatttagaaatacctaagggaacagtgacattttataccactattaaaaatgtagttcaggtaaaataattatatgtctgcatagttgggaaaggacaaagaaattgacagtattccttcccaaacagagcaccaatgtggccctgctctttctctcttatttattgtcttacctttttccccactagaatatatgctggcttgtgtgtagccagcatcggctctatgactaatttccattaacacagcttggttaaaaccattgtggttaaaaccacaatactctgtcatcactatattaatagcaaattgaaaatttttttagtgataagaaccagccaatagtttggaaaaattagtttggaaaaatttcaaaactaattatactttttggcccaagttttaaaatattggggaaatgaactaggtatggtttattttcaacagagaatgaaaaagtataaacatatcactggatatatttagtgatgagttcttattgccaagtgttttcatgagactgctttatttcaaaaatgcataaaactaccaaaactgttgacatttaattgcatcaatttacatcggctctgattttgttatagatagttattgccttccattttactgagagaagtgtaattgttttcaaccttatagacaacatctggggaagatgtacgagacttcacaaaggtacttaagaacaagttcaggtcgaagaagtactttgccaaacaccctcgacttggttacctgcctgtccagacagttcttgaaggtgacaacttagagacgtaagtttgattttaatattaaatctagtgtgaacatttatatctgatgttgtcttttttatgttagtaacacaagagaaattgtttaataccaactgcattttagaggaggtaaattaaacttggaatcagtcttcacaacatgaatttttacaattcacttttgacaatgtcacagccaaaatttcaattttaaccttgcacatgtccttaaattttaaaaatatgtattaatatgtcaaccttaatacacactggtcatctcttttgttggtcatctcttttctttttaaaaacacttaaagtgtggcattatatagtctttcattatttattttcctttttttccccttatggggggtgttttactatttctcagagtatgttttatactctttttgcatctctttaatataaatttattaataatacttaatctgttgattcagatatttatgctaaaattctaaagtatcacattatgattctaatctattttttattgaaaatgaagacagcaaactgagatagctttatatattacataaaatagaaaaaatttattcaaagtgtataatttgagttggttagcatacatgaaagtttcaagatggtgaaattaccatgtgattataaagcaaagggaataagaatttatggcctgaagtgaaaagaaaaaaaatgtttttcaatgacccagaaaaaatgcaaagaagtaattttaagatactaaacaattatgtgttaagatccaaatagatagattttaaatctttgaattgctttttcatatgtcaggataaatattcctgctaaggccattttcttgtggttgaatcttggggaaaatgaacttttattactaatcatcaacagagtgcccagttgtatagcataatgaagttctagtcagagaaagacaccgtctcagatgactagagaagagaaactcaaaagtgtgaagttttctactttataaaaaatagagaaaattgtagtaagaagtataaaaaatgtcaagtgcaatttttgtgaaatgaaactttagccttcagattcatagttcattttattttgtacatgatagaaaatcaggaagtagtaatattttagtgctttgtgatagtcaatgtctcaaacatgtcaaaatagaagaatacagtatttggtctgcagaccaaaatagatttttttaaatccctgtagacctcaaactttgctaaatttatgtaccagtttatctcttttatttgtggaatggctaagaaatagaagaaagaacacagccaaagcataggagatacctttttccctctataggtaatgtcgtgtgtgtgtaaacagaaagaaatacaatgcaaatgcatatttagataggtccatgtataacacatacacatacaaaaggtaagaaaaaatttcaactgtgtgattactgtgcttgatatcaaactgtgtacacttaagatatattctttccacttgatatcaaactgtgtacaattaagatctgtgtctttctaaacattcttttgcatagtacaatttagaaaaagttttaataaagcaatttcaattgaaagagagctgttcgaatacattcaggaacagtagacttttggtcctctttttgatttgtgggtatgcttttgtcctttccttcaaaaggttgtgtgataatagattcttatttgtcttagtatctaatatatgtttaactgtgctgatgccttaggataaagacaaaattgtactttttttgtatcccatccagttaacctttggaatggataattctgaggcacagaattattacttggtgctttaatttacgggataatttgataggtttgaactaagcgatgtgccttttaatcttttgctaaaccattggcattttgcatcacaaatatctacacgctttacaggaatcatgcagatagatgcatattttatactcctttaaaacatttttaatttgcctttcaatgtcaaaataatcattggtgtcagtcatcctattctgagtgactctattaggtaaaaattaacagaaaagcatgccaaataattttgtgctgtgattttggggtgtaattctgaaaatgcctcgcctcaattcattcaattgaaaatgaatttatgagcattttttgtgagaggaaaacaagagaaaaaaaggaagaagtgtaagcttgcatcagatgcaccaagatcctttttggacagatttatgaactactagatatagtgggcaggttttctttttttaatcctagaccaagctctcgggatttgatatagttcacttttcggctgagccctttctagtacagggccgcttaatcttctggtgtaacaatttatgtgagtgggtaataaaaaagtttgattttgtttattctcctatttgtgggaggagaacattggagaaaaaccagcgaagtggcaaatgtgttgaagttatttatgaagctaattagaattttcttttgcttctttctttttcatccttgcaaaatgtagcattttgtcctctgcccagtagttacacatgcatgcatggaggaggggatttatggggaaaatgagttattactaaaagggagtaaacaaatccatgctaaggtttattcgattaattttataactatgcaaaattttccagaaaataaatcaataaatgagtagagtttgattaaagaatactccattgaaaataaatctgaggaacaagctaaaatagtagcaaaagtaattcaagggttgtgagaattattattggctaaagagataggttggtttccctaaagattaaaaaaagtaaaatagacacctctccctggtattggttaaaggggagtaaatgagtttaaagatttttttaagagcctttgctatagcaagaaacaaatacactataagtttaactacagttgcagttaacatccgactagaaggaagtatgacagccaagttgagacctgaaagattaatagggctaagtatgatgtgtttgatgtgggaggttgagagggagagtttctggtccaaggaagcattttcaaaagcttggaggcaagatagtttcagaaactggggtggaaaactatcaacaatggcaagaaatggcagtggagagagaagatggaaccatataatgaagggccttctaagccatgccaaagtgtttggagtttattctgagagcagtggggagcctttgggggtctttgagtaaaagcagcagggatcccacttaccctgctctggagcaaatggattgaagaaggcagaagacaaagaacaaggaagagtctaatgacaatttaaggcactaaaagggtcattaagttcttcaaaatctgggttttatatataaaaccattatatatatatatacacacacacacattgtatatatatacacatatacaataaatatgtatatatagtatatatacacatatacaataaatatgtatatattgtatatatatgtatatatacacaaatataatacatatgtatatatattaatatagcattttatttatatatatatatatatatatatatatatatatatatatatctttttttttttttttttttttttgagacggggtccagttctgtttcccaggctggagtgcagtggcacaatcacagctcactgtctcattgcagcctcgacctcccaggctcaagtgttcctctttggaaattcctaggcagtatgtgaagttggtggtgggggggggtgtccccccagcgttaagaatgacgctgaatgatctggctccagacataagcctgtgagtcaagcagaacaagttttcttgtatcagtttgtaaattaacttctgggtgaaattttcagcctcccaagaagctgggactataggcatcatgacaccacgcacagctaatgtgtttattttttgtggagatggggtctcattatgttaccaaggctggcctcagacacctgggctcaagtgatcctcccgcctcagcctcccaaagtgctgagattataggtataagccaccgagcctggcctgtgttacattttacatgatactaagtgatcctcttgcctcagcttcccaaactgctaggattacaggcacaagctaccgaggctggcctgggttacatttcatataatatctaagtatttgtagcagagtctgctttctggaatattagtgtgtgattgacaaaatcacctgttcagcccccatgctggagagcagggataggctgcgttctgaagcctgggctaacacacacattgttcttatttccaaggctttgtaatgataggttgtaactatgcagtttcttattttctcctttcagaattaaatgaaaaagcttatcatttaatctttttttctacaaatcaaaattttctgaagtcaatgaagcccaaggtttgacttttttatctctatttctttttttagaaatttttcaaatatataacaaaacttgagaaacccttcagttcagttctctacccttgccattctcattttttaggtcatggatcacttttgtgctaactggattaagttagcaagaaccagtcaagcaatttgacagagctttcccaaggttgattaagacaaaaaaaatacacacttttcttctatttgaagttcgtggcatatgttttgctacacttgaattttggaaataatctcttaagcagttactgtttttagaaagtatatagcatatcattcacctgacatttaacatattcagggttaatgaagaacagtgacgtggaaatagtattgactaatactatgttgttttattgttattgtatctattttacacatatgtaaattaagtttactgacagtatagatattctgacaaacagtctggataaatgcctggttctgcagtgagaacacatggacacaggaaggggaacatcacacaccggagactgttgtggggtggggggaggggagagggatagcattaggagatatacctaatgctaaatgatgagttaatgggtgcagcacaccaacatggcacatgtatacatatgtaacaaacctgcatgttgtgcacatgtaccctaaaacttaaagtataataataataaaagaaaaaataaataaataaataaataaataaatgcctggttctgaaaatagatctgaagagtcttagtttttcatcccaataagataatgttcaaaagtctttgctgtgcaggcatcaacctgcacttcactataggagatgaagagaaaagtaggcattatagatacctactttctttgtctaagtaggtatgtataatagaaataggagaatcaaggagttttggaataattttgtttcaaacactgttagcttttgcagacttttatttaattaaatagctaattttctttgtactgtaaatgttctacattcatttactctccttcctcctcaaaaagctagggttggaactagcttttaattaggatcagttgttttcaaaagtatttcatggagacttgggaattcttcctaggcagtatatgacatccccagcattaagagtgacactgaatgatctggctccagacacaagcccctgagtcaagcagaacaagtttttttgcatcgattcatagtttaaacttctaaaaaacttttttttgaagaaaatgtatcatgatctcaggaagttgccttcagtgttatttatgatgtgacatttttggtgggatctaggggtggtatctaggttgcatgtttgttcaatgtgtgtgtgaggttgaggtattttgggtacatctgggtttggatgtttacatttaaaattacatgaagaacagaaaagtctaattttattgcacctctgccatcaacatataatgtagtgtttcatttttaacttcatctttctaaccaagtttcttctctaggaaaaacaaaaatatgattgcatcccccttggtatattatagaatggtatctttacattattctataattttgagttatttttgagcattctggttttttccccagtatgactgtttaaagatgtgtttgctatccttgaacaaatatcctgtaatatctgtgaaaaggcccctgcagactcttgaatacacggcgacttctctagaatacactgtgacttctgttacttttgatttccccatggtggctctcagggcaaccacatatatgagcggaagataattgagaatctccccacacccccactgcttttgtcttaaattgctctaaagtgtttgttctgtgacttttgtctccctctcccctctttgcagtcctatcacactcatcagtatgtggccagagcactatgagtgagtattcatagcccacgtgcaggagaggtgttctgatcagtggtactagcatgggggtcttactaaactcttggtctaaaataatacttctgtgttccgggtaacaatcctagtggtctgtttgcatggcagattcattacttaagtaacctaacatttctaatagtaacacctatcaatatttgggcataaaattattgctttgtttttttcttttaaagcccctcacaatctcctcaactgtttcatgatgacacccattcaagaatagaacaatatgccacacggtaagaaactttgatcagagccctccactgcactgccacccagaatgtatctatgtctaattaatctaatatcattaatataccttgatttaagaaatgcagttttgcaggagttatgattccattatatttggaatttgggctctcatattttcatgacacagtttgcactttaccaaacacctgctatatattctatgaaaagtaaacctaaccaggatgtgattctccagctaatgagaatccaaacactgtacaagcaggatttagatggtgtaaccaagtttcagtaaatgaaagtgggattgcaggtattctcaggagatggtgcacatgtgaattacaatatgtaattaaatttatgctaatgctttaggataggggtttattttagagtctctaaataatatataggctggtcttgatggtgtgcacagactttcagaaaagtggtatatactaggtgtctgtgattctagtaagtagctttgcctagaaaggttaattcaagcatcataaaaatggtaacatttgaactgggtctaggccaactagaatttctaggggaaagtcttggactaatggaataatatactcaaaagcattgagctgggaaagggcatggtttgtttactgaactgcaggtaggggaaagagaaatagatgagaaagtgaaggacacagaagttgaggtctgataatgaaaaacccagccactgaagagttggatcatgtccttagttgaagggaagtcatggagagtttttgttatgagaggaacatcattttatttgtttgagaatgtcacgctcacttagatgtagaccaactagagggttaaggaaagcctaggtctgggagctcaattagaagattaggtcagttaggagactttacaacatggcgtaagataaaggcctacaggcattaaggcagtggtgatagaaaggtagctcaacatgaaacgttttagttttacagtcgtgttaggagatttggatctttctatgttttgtcagaattttgacaatttaaaaatgattaaggatgtacgtccaattgaccatgtcctatatggccatgttgtctaacctccttatttttattttgcagactggcccagatggaaaggactaatgggtcttttctcactgatagcagctccaccacaggaagtgtgtaagtaaatcatgaaattagtgctgcctgggaaggctagttcttgtattatggctgtcagaaacaatcttcactgatgtggctctgaatcttgatcccaatcaaaattattaagtgtggttccaaaaatttctacgtagattttatgctttcaaaccatgatagtataaactcaatatgtttatttactttgtttcatataagttaatgaaaaaaatcttacatttgtcaacttatataccccacgaaaatcagattgttttatttaggataacaggtgtatatattcattccatttgtcttatatttcttattaatttaacaaaggtaatttgacagaatatgtgccctttctgtgaaatcctctttcttccactagctaacattttttccataatatctgcatttagcacctctgacccacacatacttagatatatactcctacccttcattgaaaactgttaactcctctgccaatattttattttattagcaactaagaaaagcctcattgactttagaatactaaaaagatattatatactaaaaagctttctagccaattagtttatttctgatttccccatatgtgtatattccacttggttgtggaactttctcagcaaatattttatcactgattatcccactattgtgtgtactcttacttttggaactttttattcttttttttgtgccctggaattcacatttttaatcctgaataatatctaaaagactaatactgtcaagcttatgtgactaacaaagctctattgtggtttggatctgatgggaatctgtaaagtagacagaaaagttgtcaaacatagtagttgggtgttttcactaaaaaaaaaaaaaaactatggagagtgctaggttaaaatacttaaagtgctcaaatatagaatattctctttccatattttctaaaacttgttttatttattatggttataaataaaagttatcaggaggtttttcaatttcaaatttcaaagattgcatcttaatacttgacagtaatgtagtagagatttatacattatcattcatgtactatgagtgtgaaacaattcccaaatcaaaataaaggtgtattcataatgtttgtttcatatttaacctactggtgtgcatttcatgtaaagtagttaagtatcttgaatctttcctaaatcaacaaatttcctcaaggctgaccatagccaaagcgttaaaggaaataaaagataataattcagaacaaaatcttacttctttaaaatgttttgtcatgccctgtgaacacagtaaaggtaatgctcaaatttagtatattgtatcttaaaataggaataaatactattttcagatttagcactgtttcagaaaagattaacattttttaaaaagaaaagaaaaaagtcagaagattaacagtcagatacattttaatatactgtcattatatatattaactcattcacccatccaacagacagttgttattaatatatacctaccatgtaatggtatgctggagccaattgtgagagctgattgttacattttcaggatgtttgtaagctgttaaacagagcctttttaaaaataatttatatacatgtatatacagttacaattaaataaattagattaaaacaaaaacaaaagtaattctcaaaactcatcacaccctaatgattttacttcatttcactaatatctatgcccttgggattatttattataaacttgtccatcctgcaacccacaggccacatgtggcccaggacagctttgaatgcagcccaacacaaattcataaactttctgaaaacattataagatttgtctgtgatttgttttttgttttttgttttttgttttttttttgcttttttagctcatcagctatcattagtgttagtgtatttaatgtgtggcccaagaaaattcttattctttcaatgtggttcctggaagccaaaagattgaatactcctgattcattatctctgtcaggtggtgtacaaatgtgtatcttttcccagttccacattcagtgaagtcatgaacttgaaattggccatgatcaaaaagtatttaaatcacagaagttgcaaatgccacaaatcaaggtctttttctcttggagaacctgttaaacatttaccaactcacgaccgccatgcacccaatactgcaataggtctatagatgcagatactgtctccatgaatcttataggctagaaaggaaatagataagtagtcctaccagaagaacatgatgaaggcatttgtggtaaacagaatgatggccccccaaagatgtccacatcctaatccctgaagcctatgaatatactactttacttggcaaaagggactttgccacaggtttttaattaaggaccttgaaatagagagattatcctggataatccagatggccccagtgtaatcccaagggtcctcataaagggtaggaaggagagccagagtcagagaaggagacgtagcaatggaggcagaggtcagagagagatctgcagatgctgctgtgttggctttgaaaatgaggaatgcaggtgacctcaaggtgctagatgatgcaaggaaacaaataatctcctatgaaccctaggatgggcattattatgagtcctattttataaacaaggaagctgacatccagaaagataaatgacatgtccctgatcacccatatatctattacaattagatacatgagtacgttcgattgactctggacaatttaaaaggaaattgatgttacgaatactacatatctttgaaggaaaaattgagcagtgacatctcaggacaggataggactcatgacggttctggggaatctcagaagtgggaacgcaaggacaattccttgggccatggctatcaggacgtctcactccatctgccatctgcccttgggtgacactggaaagaaagaatggggaggctgactgtggtttacacaggcattgcagtttgcaaatctgaaacctagaacagaacaatccttaaaagaaagaaaatcattatttttatttatgtcttgtctactttcaaaagttcattgaatgaatcacagtttttttgtcatctgatatgtactaattttgtaatctagatagtgtttactatgtgtgacttaactgtagtataattatattccatctaatgatatttccttggtgcaaacctattatttttgcaacattttctattttagcccaagacatacgattgatgtttaatgtccctgatctggtacctcatgttctatctgcatttaaagagtttgttattggtttttactatatgtaattaagaactagaatgtatctatttttatattcaacatttagacctaataatctgtgaaaaacacttaagactaaaattgtatgttttatataaatgattgttaaattcttatttttgtgaaaactgccttaactctcttccagataccataatgaaagaatgcaatgatagtggggatgataattataataatgtgttaaactctatcagcttccccagagaagtgaatctatatgtatgttgacaacaaaaatacatctcaaatctaattttggctggtttcactatggatagtcagtctccaaatctttaaaacaaaaatttacttggtattaatattaagcactgaagttaatccatgaggtcaggtgctgtagtaaatgttctgagggcataatggtggcttgtgatcttggaggaactctacgccaggatctgtggtcaaatcatggccacaagatcagccacatagcttaaagggatccaagttttcttttaattcttgttgtccttatattagttcttattttaagtcttttctttccatatttattattttcttttaggtatgttattgataggtatcatagaactaattttttgtttgtttgttttgtttgttgttttgttttgtttttgagacagagtctcactctgtcgcccaggctggagtgcagtggcacaatctcagctcactgcaaccttggcttcccgggttcaagtgattctcctgcctcagcctcccgagtagctgggattataggtgcccaccaccaagcccaactaatttttgtatttttagtagagatggggtttcaccatgttggtcaggctggtctcaagctcctgacctcaagtgatctgcccatctcgacctcccaaagtgctgggattacaggcgtgagccaccgtgcccagccaactaattgtttttttaactaatattagaataagtttacctctatttttatcgtaacacctgagattaccatctactttagttccattttgcattatccttgctcattctttctttcatatgctatgtggacaaagtgctttgcctgtacacttgaatgacctgcctggtcatatggatggataggttaggactgtagatattgctccattgtctttggacatttaatattatggaaaataggaagctaaacctttttccaccgctgaacatgatttactgttttattttgatttctggcagattgcttgtgatactttatctttaaaatacagacattttccagggatacatatgaatgtgcttcttttgttattattatttttgggtactctgtctttatagtttctatactcagatctttttcatcctgagaaatgagaaatatttacaggatgttctactgaactcttattttgctgttttattttatatctatctactatatctttacgctttgtccatttgtcctatccatatgttagagctgctcttttgtcatgttttatcacctctctcttcacatgaacttggtgaggtgcctccaggcatcgctgactttgcattgtgtaattcactgcagctcattggtgtcctggtggtgttgagacattagtcttacagcttgcttctgccccggataacacagctaggtttagggtgttggccatttacttcctatgaggaaaatatacacatacacagacccatatctccctgccagtctgtttgatttagctacatgggaaactgaggagcttttggattgctttcaaatgctgctctctgcagtggtgcagtacccatactctcttcttctcgtccttctaaacccaggaacaagcatggggttcttgcagaggttccttcattcatttcccagtgatgctgcgttttctcaggaaagggaatcaaaggataatgccgcagcttacttcaatccttaacccactggtgttccttatttccagttgctaactgtgttgtaagggtcccaccccatcctcttttaaaatttatttgataaaagcaagaaggtcaggttaggtacttattattatattgtggccttaaccaaagtatatgacctttatttaaatatatatatactcacatacacacatgttcatatctatatctatatatttctagagggagagaaaaagagagggggtttattgatgaagaaagcaaaataaatcaacaagtggcacatctgaacttttgctttggctgtttgacaagcataataccagaacgttcagttttctcaattgcttcatctagctctctgatctcaatgcttaggataaaccttttctaggaattcaccaactgtctgatacaatttcaagtcccttccttgttagagtaaactgcagtaacaccaagatgaattttcaaaccagaattacaagtaccagaggtcttccccagcatcaagtgttactcatcagctcaagggcacaggtaatctcaaggctctggtgaagctgagagaggcccaggactgccagcaccacacaccaggttctttctggctgcaacaggatgctgtctgactccagagtaacagaagaagtctctaagggatgttcgcagcccccatcgcttacacaggaaggagctgcttcagtcatgagatagccccatttgacactctgatagctacataactgacatgaggttttcctgctgccctatcctgtaaagccatcgatttccaggacttgtttaccaaaagccatcaaaacggaccacgtgccatctgctaatggactgccctgctagtattagccaggagattggtatttgcacatttataagatctcactggatctctcttgttgaaagaagataagaaattccgagtctgctagaaagcattttcttgccataaatatatcaactttgttagacattcacttatgtcagttactaattcaaccacgttactgctatgtctagttcattagacaggtagttagataagtgggagaacccacatgcattaaatgtagtttcttgttctaatgcagagtgatcaaccctaaaaatgacctgctaataatataaagtaaaatatctgtagagacattataaatatctacaattataatttgtgctgagctatttaaataaaagaacataaggattataaaccttgtcatatgggttacaaagcatttcaaagttactttcaacgaaattctaaagacagtgaagtcagatgattcttaattcagtagtcttttaatcaactctttaggcatggagtaattgattttgtctacagtagcttttatactaaatgctgttccttatttttgttttttctgctgagtaagatatcccttctgaagtttatgagatagagctgttagatgaaagagaagcctgaaatgttgactcatgtaatatccatgctctgctagatgaacttcttcctagagttttaaaagggaggtcatggagacactgagctctaagacaaacttggcccagccactatcctgtccatcattatttctacttcctttatgtccaaaaacatcaccatccagatgtgagcctctgggtctgtttcctttgtcttgctagggaagacgagcacgccctcatccagcagtattgccaaacactcggaggagagtccccagtgagccagccgcagagcccagctcagatcctgaagtcagtagagagggaagaacgtggagaactggagaggatcattgctgacctggaggaagaacaaaggtgtgctaggcctgggagaaggaaatatgtcatcctttcttttgtatgaatttcactgtagcccccatttattctctttttcaagactattgtctaagaaatctcagtggagtgaaaattttagaggctattaacaaactgggatgctggctgcaatacagcagcatttgggggttcattgatgatgtctactgggacacttgcttaaaactacaattttattcctgcatgctcatcctgctattaatacacatttttatataagaggaactagcatgagctaaatttgaacctcacagacgattttggagagacgataatgcacgtggtagtcattctgtttctccctctttctgtattagaaatctacaggtggagtatgagcagctgaaggaccagcacctccgaagggggctccctgtcggttcaccgccagagtcgattatatctccccatcacacgtctgaggattcagaacttatagcagaagcaaaactcctcaggcagcacaaaggtcggctggaggctaggatgcagattttagaagatcacaataaacagctggagtctcagctccaccgcctccgacagctgctggagcaggtagggtgtgtagaattcagcgtcacacctccccaggccatctgtccactgccctgggagatgatggtccaggtgtcaggagaggcagagaagtccactttcaatttcttacctccgtagttaattcagactggcttagaaatttccttttacatgtaagcatataaatcctcattggcacacaaaaatgtgtttgcccagcttacaatggaatttcccagtcttctttaacaatgaagtccgcctcagctctgaactgtttgagagaaaatatcctatgacatatatcttcctaaattatacatgggaagcatctgtattaaggaacagcaagagacctgaaatcggcattctaaagctttcttccagtgagacaagaatgctgactccaagaatcattattttctattctcaagaaattgagttaaagatggttattaatttgctactattatttcctaacactggaccatgttttatgggagttgcttgcaagctttctggatgataagaaatacaatttacattaagatgaatacatgcatgtatggagaatacaaaataatacttgcctttatagagaaatgccagctcttattttctattttccctttcttcctccctccctttcttccttctgtttttctttcttaatgctggtcaggacctactaaattgattctataactcatcggtgggttattgcattcagttttgaaaaacactgttctttgagatataaaagaagcatcaatacagtttctgcctttctggtgcctgccatcttgttagagatcacagcaagatactttcatatgtgaagacacagcacactgtagggaattaagtgcttgatggcacatagtagttaggaataggagtgatgtctcagaagtagtgatggagagacctttgcagcaggtgcagagagcgtagagtcccagcacaggggccaagagctcctctctcttgaagaatccctgacatcaacatgcatgtcatctttagtctttttctctagcctgtgctgtgtggagctcctatgtgatataataggagtgcctttctccagaaatgatttattgactcaaagcaggaacaactttctctccagtgattctctcaaattttagaaaactgccttttcacagttgctctcagtctttttaacttaccagaataattcaaaacagtgtcatttctgccttacctacacagaaatttgtgtaggcaattcataatttgaccatacacttttctctatgtctctcagtgtttcagaatttgggtgaggctgttcaatggaaggcttacttcagggcctctcaatcccacaatttggaaagtaagagtttcccaagagtgacccaagacgtgggtttcttgaagcccttcggaatgtttgagtcttacttagtgccagccacatacattgaaaacgttacatttttcattccgcgaacttgaagtttccaaatggtgctgtgtaagggatggattttctcttgcaatctcttgtttagaatatgaagtgttagtgttaacaacttagtgcataggtggaattgctacagaaggaagctgtgctcaaaacctttatttgccatggctggttgatgcccacaggagagcaaaaggcttttctgttcacccttgccttcccctactccctccatcccattagacagtgctgcctgatggctcatgtgccttgagaatcacatagcaatgcttttagagatagctaatatccaaatggcttctatatccaagactgcagagctcttatctcttctaaacaatttaggatgatgaatgctagaagtagatggaaaattcaactctaatagtaaaaactagcagaactaccaggcttcaactaatatagatttaatggaaaaatctgcatgaaaaacttgtaacatctgcattccctatatgatggctcacactttctaatttgaccatatatttgtcagcgtatccatattgaagatttgcgtgagtgcctttacgaagtatttactaagtgtcaggctgttctaaccattttagaaatagtcattcttcactcccctcacaaaactctataacacagcactattattaccctccccattttacaaataaagaactgaaagcatggaaggttctacagttttcccagaattacacagcttatgagtggcagagtgggaattagaatccaggcaatctgaatccataatcatgcttctaatcactctctcaatattgccttggagtatgagctgattttgaaattggataaatttactgtattagaaacccagtgctgatgtttaaaatatgagtgaactatgcttatgaattcacttaacattaaaacaacagaaaaattgagggataaaaatggtgttgataaatgagtctggcagcataaccaagtggattcttcaaggtgtccaagcggaaagagaaggaccaaagcccccaccaagctgatgctaaaatgtatggaaaacatctgaaggcaaagacttctatatgatttaattatccatggtgagggcggggaagttaaaaaggaaatgtttttccttatgattatttgaatcctttctctgctttaacctctgaatgtggttccagcctgaatctgattcccgaatcaatggtgtttccccatgggcttctcctcagcattctgcactgagctactcgcttgatccagatgcctccggcccacagttccaccaggcaggtcggtgtccccagcacacagctcctctgctgagtctgctttgtgctttgccattagtttgtgtttcctgttaagtaacattcctacacactggtgccttaggaagtaaaagagttttttgtatttggtcttaaataggtgcaaatccatttcaacaatatcaaaaagcaaacattttcaaataagctataatacacttgtttatataatctgtagaagtggattgaagtttggatgaaaaagcctcctctgccctttagaatgagcaagaaattaaattatttgcttatgaatgatttttttagtacactttctgtctctaaaatgttacattggtgcatattcaggactaataatattacaccaaacattatggttgtatctgccaaggtgtggaaactcatttattcacttttcttcgtcctagtccacttagacattgtcttgcctgtcccatcagaggcagcggtcccacgcagcctgtccttggtcacaatggggacctgtcactgatgctaggaaggactcagtaaactaggtgttaaccaatgacattttgttatcaattaaattaaaattctagaattttactgagaacgatatattgtaaccaaattaatttcttggtgggatatcttttggtacattaaccagaaaaaaattaaaatattagctggatgcagtggctcccgcctgtaatcccagctctttgggaggccatggtgaaaccccatctctactaaaaatacaaaaattagccaggcgtggtggagcactcctgtagtcccagctactcgggaggctgaggcaggagaattgctggaacctgggaggcggaggttgcagtgagccgagatcgcaccaatgcactccagcctggtgacggaggctccatctcaaaaaatatatatattaaaatattaagattattttcatattttttaaataagagaactatcttgactatggattataggataaaaaacacatcctagtgaaaagtatcttaaataagatgcctttacttttgtggcaggataagctggcctaagctgaagtctccaaaaagaaaggaggacagaaaaagaaattggtgaaattttttttgtatgaaaacatacctgtggtgcaaaaataatagatttctcattcaaacactgaaataataagaccatattacttgtttttcagtctcatatttttcagtcccctggtgtgtggattctttctacacaaacaaacagctagtacgtgtcaattatgtaaaattatattaccaacactcaagcaaaaatgttttgggtatattcccctaaaattgtcctttgcaatgggaaatcttttcacattgatatttagaggctggttggagtatttcctcctgaatttgggttttagtggaaggctagacattaatttgagaagctttgttgttctctttatttgctgtcacagcgggagaggacctgctggccccaccgcacgacaccagcacggatctcacggaggtcatggagcagattcacagcacgtttccatcttgctgccgtgagtatgaaagattgcagcaccacagctgcacgtgttccttccctttctctttttctgcatgcggcccttcgccttcttccttaagataacaaaaaccttattacaaacaggactgaatattatttgaaaataaggcaaacattatataagaaaatgaagctcaacctagatactatcaagtaacgggggtacagtcgcaacgcaattctgctctttgagatttttcaatatgcctgatgggtgataaaatgaaagcaaataaaataataagtctggttttaagaagaaattatcctcttcgatgcaagctatcataaggaacacatcttagttcaaagaagagctttcagtggcatgccaaacaaggcatggaaacagcctttctagtgtaattccctctcttttcttcaaacattgttctccaatgtcatcagactccagtgcagaaagggattgttttcagattttccctttttattcccgctggtttcttttctcatggaataaaatagtcattgtataaaggccaaacaatttaagtcatcatagattaggatcctgtgaagtttccatctgaacaaccaagagccagaaaataaccaaattcctggggaaattatataataattcttacttattcattttttccaagtgttttgtcttcagcaccttgccaccttgcaattttggctgagctctcacctaaaacacttctggtgtttctagcagaatatatacatacaagtaaactgtatatatgtatacatatatatacacacacacatacaaatatataaatgcatataaattacttagtactataattatattttaaataatctttgacaggatttgaagacattatttgtaattttagagagatttactctcaaactgattttaaatccagggcagtcactaaaataagaattcatgtaaagcatagcctcttattttacccttgtctgtcatctccttagaaaatgccatcccaggctgggcacggtggctcacacctataatcccagcactttgggagggcgaggcaggtggatcatgagatcaggagttcgagaccagtctgaccaacatggtgaaaccctgtcgctactaaaaatacaaaaagtagccgggcatggtggcatgcacttgtaatcccagcaactcaggaggttgaggcaggagaatcgcttgaacctgggaggtagaggttgcaatgagccgagatcgtgccaccgcactccagcctgggagacagcgtgagacttcctctccaaaaaaaaaaaaaaaaaaaaaaaagccatccgaaatgatgaaaaagagattatcaattatcaggagtgtaggtaaataagatatattgacttcatttaaagattattatttactgtatagaactttgtaatttttaaaataccatcattagcagaatgtgaaaacagctatttaaaatatatttctggcccaggtgcggtggctcatgcctgtaattccagcattttggcaggctgaggcaggtggatcacttgaggtcaggagtttgagaccagcctgattaacatggcaaaaccctatctctactaaaaataccaaaaaaattttccaggtatggtggcacaagcctgtagttgtagtcctacctacttgggaggctgaggcatgagaatcgcttgaacctgggaggctgaagttgcagtgagttgagatcatgccactgcacttcagcctgggcaacagagactctatctcaaaacaacaacaacaacaaaataaatgaataaataaaacatatatttctttgtgaattttcaggaatatttgcctgaagattatattatggtttccaccagcacatgaatatatctatttgtgttttgccagtgtttcccaggttttcatttgtagatctactataatgcttctcaaagtttgcagaatcacatttacactacatcagtctccacacccacctccccacctccccaccccccaaagcacatgcatgcatgtgcacacccatatagacacacttttggcttttagagtctcacaaaagcttaagaggatcactgaatgctcacatgctaccagattgttgcttattttctaggctctgtaaccacagtaatagataaactgattaaaactagtttattaattataattcaaggtcaaatttatttagaggttttgattttcaattgttatgttacttagtgagtagataaaatctcatcatagtctttatgagccagaattaaattcttaaaggaaattactttttagttcagcttatacctaaataaccttaataattagttaaaaacaaattctgtacatcaaagctgtttagaagtttttatttaaatatcatggacattttcaattgtaaaagtcagttggcagtgacagccaggatgggaaatgtgtttcaatatacaccttgtaatatatataaaatatataatttccatattaaaaattttattctaaaaatgtgggattttttccaagttccatttcctaaagaatttactcttaaatttttctcaaagtatactctgacatccagattttacaaaagctggacccatgtcattttaaaacagaacattattaaaaataaataatcataatttagagcaaaaatgaattgtaacaggtaaatgtatgtatctctttttatggcctcactttaaaggcaagtataaaattcctattggttggggatcttgttagctgttcattgatattggtttctgagaggagtatacacagtaccttcaatgggacccacatcacagagattcatcctctcccctgcattggtcccctcttcaccaatgtcattctcagtgttcagagagtggtttatggagccctgagattccttaatgtttattaagcttgagtcacattcgtcaaaaactcaaaacctactgaaatgcaatgatttccttttaaatatgtttgtatgtaaaatacccttagccttctatctgataaaaagctgttggtttaaaagtattggtttggagcagctggcttcatgttttcatagtgttaactatgcacattcacaaatatttataatagtcatagttttctgaatgagcattactagtcatgtcttcttttcaagaattcaagcacatccatgtatgaaatgatgaaaagtgtattttagaatcctttgaaatctccatgttttaatttttggcttctgaaagttctgctattcatattttttctctggtattatatacaagacagggacagctttccataaaaataaaagctgtattgacttatttataaaattgatacatattttcatattctgcctgtaattattaaaccttttaaaaattgatgcaaaatagaaatcagcgtgggaggtagactcagtgcccagtgcatgtgtctttctctctcttttttttttttttctgagacagagactcactctgttgcccaggctggagttcaatggcacgatctcaggtctgtataacctccacctcccaggctcaagcaattctcatgcctcagcctcccaagtagctgggactacaggcacatgccaccacgcccaactaatttttgtatttttagtagagatcgggtttcaccatgttggccaggctggtctcaaactcctggcctcaagtgacccacccaccctggcctcccaaaccgctgggattacacgcgtgagccaccacacccggccccaatacatgtttctgacttgagtgaatgattacattttctagctgggaaggtttccttgtagcattcctagatagtactcagaacgttttgtaggattcatttgttcttttgtccctttaaagttgctcagccagcaaatattttaataagcctttgtgattcccaaagcttaccaaccacctttggagaatttatctaaacaaatcggattggcaccctcccaatgccaagccaatcccttgagcccctgtaactaatgagaactttaaaaatgcttgtcgccagcatacaatgaattgatcttcatgttaatcttgacttttgatcctttgtggattaaaaattagcatggccccaaatgaatttccactcttggcaatcttggaattaaaatgaaactctgtattcataaatcctaattgtgtgaattgcctattttaacatgaccgttttttaactgtgtctacacattgttgcacataacactttagaactcctttgtctgaattaatatcccagttggtcctgatagcatccttgaattatggccttttaaagtctttttaaaattatttatgttgagtcttagagcagagaagcagacatttccttcacttcctggcaaggagttaaggaaaggggtttaaatgtactgccaattaacaagtgtacttactaaaattcccactgactgcagtaactatttttattttttggtataaattttttttgtccattttttacttatgtccttcaaatgtatgaaatactggcagtaagccaactaatttttgctgatagaccaagaaatgctttcaaaattatttttgacccacaggcatatttttactatgaattgcctatgtttattaagcttgaatggcattcatcaaaaacccaaaacccactgcaatgcagtgatttcctttttaaaatatttttgtgtgatttgttcaggcaaatacccatagccttttatttgataaaaggctgtaaggttaaaagtattggtttagagcaaaatggattagacttctgtctagggtttggctatttgttatatttgttacttgcaagagaagcataactctgtctgttttaaaaagagtgtgtaaacctatggtgtacttaataataattcaactcagctatcccttggacactgtggaggtccactcttttctcctggatgtaacttacagatctgttagaactaggcttcttttagcctgatttctcccccaaataccgggcctcacactttccctccagacgttataggaagggtactcttcatgcctgctctttttttctcacatagctcccagcacacagcacatggtcactgatgtcctttctcccactcagcatagaacagtgagagatggaaggagtgcagcatgctagatgactagggacaacttttatttgaccaagaacagattgttgccattactgggggacagatctcctcttttccccccagcattgagaacgagatgatcatgtagcaaaagaggggacgaaaagcagatgccttagagaagagatggcagtggctgcccttgcaaagcccgccagatcgtcttcactgttatgggctctggaaccaaaaaggaattgagctatctgtgtggaaaggagaattagatgccatattctaacttctccgttgttcctaactgggcccatccaagggactattattatcccaagtgtccagaaggacactgaggattaggccagcactttccttgatgcaagtacttggccaccattttcctgggcgttagggtccagggtgtgtcaagggtgggtcaagagaggcagaaaccaaagacttatgccttcagtggtcccttggtcagaattagtactcagcaaagtaagtagaacatgctctgttctgatacataaaccaaatacacagtatgatttaaataggaaatgagattttttgcaagactaagtgctcagtgaatgctttagtgtatgcactaaatcttaaatcacatgggatatgagaaactaaccaggaaaactagccctcattgaagcattaagccaggaaaaaaaaaatgtgtttcttgtttttcctattagcatccatttaacaactgggctattattaccctatgtagagtgatactttccacgcatttgcatgcctgagagttggaaccaacaaagtaacaggactgccattaagtgatttcttttgttttctctttcagcaaatgttcccagcaggccacaggtaagagttaatggcttggttggctctatgttactgatcccaacctagagtaagcagattatccacgactgattttattcctactttattctccatgtaaataagtaaacttacttgacatttaaatgttagttgattctgtacaacagtttgtcagtctgggagtggggggtggctcccaagccacagataccaaaaataccatgtgtttgatcctttgtgttctaacagctttttaatggcatcttatgtgctacataaagtcactctagatagatttgaccaccactgctctctcaaatgtctacttaaggtggctatcacagaacattgacctaaaaaaaaaatgactggtaccacagaggtggttttgttactttgcaggggaaaatatttcaattttttacttaaaaattttgctgagaactgttggcagctgtacccttatgccttttagtattttctataaaccaaaaagtgtatgagacaggtttactttgccaaggttgaggacacacctgggaaaaagagagataaatttcattaggatttgtagcctgttttgttttgtttttttgttttgttttgttttttgtttttgttttttcccaaaaaggattttgagggcttcacagaaacgaaagagcaggcaggagggggtggaggaacagtcaattatgcatttgtcttatgctcagtaaatctgcgttttatataattaagataaggtatgcctagagtagaagaagcagtcaagtacacatttttctcagggtgggaggagagatgacttctagtcctgcctttgtcctgtaaagataagctgttaattcacattgtcagggtgaaattcaacaaaactctgttttagggtaaagatttggggacccttagaaatttccttgtgagcaatttgtgagggaggtcactggccttctatctttgcaagtagctgcttaggaaggtagtttttgtgtgactcagttcccacttttaatttttccctttagcatagtgagttagggatcctgagattttgttttccattcacattttcttatcacatacttttagtaataatgtgccacaaagccacagcagctttggagaacattttctttcatgaacttgtttactaatctttttgaaacaatgagccttctgaatgattgtcttattggcaagagaggctgggatcttaactaaaagacaagggtatgtgaagtaggctaggggtgtggtgagctgtgggtgttctctcctgcttgcttctgttgtctaagtgaattggaagccgggactttagcagggagtgaggttggggaggaggtgtcagaagtgcgaggagagactggaggatgtgtgatagcttcttggagaatagaagagcagatggcctgggaaatagagtgtgactataagcagcattaaaggtgccactcatgaatttaacatgaggccattctgcagggttgtaagttgccctctaggcatattcacgttcatgagcacaggcaccagaatgggctgagtattggcatttaaaaagttgaagttggggtttgacaaagtgagtacagtgattcaagggaagaggcaaagaagtgattataatgattgaaccagatgcttaagctcagtagtgaaaggaatgaggaaatgtccagtgtgggagacagaaataaagatgggaggatcaatggatcctattgtcaaaggatggataaatttgcagttgtaggggaagtaagctgtggaggtagaggtggttgtcagaagctaggttgaatgatactgaaattagaggggttgcaagtattggtaatggtccatatttggacctttgtgtgaatggctaagaaggttggaggacaggaccattggaggaaaagagcctaaagaaccaagaagccagagtgctggaagaatcatctccatgggtgttgaaatcactaacatttaaaaatggctttagagtaggggactttgagccattttttacttcaagaagtgaaggaacatgacctacggagtcagtagatgactgcataatggagtcatatagtctgatgatatgagattcaaagctgggtgtttttagggagaggagaaagaagataccccagaggccccaatgaggaccaaggaagactcatgcagtgtatgaggaatgggggagaatggggaggggaagtgctgtgtgagagggttatgagggaagctgtgtcttcaggtagatgcagatattgattagagcaagtagatgcaggcagcattcagagaagggtttgggaacatgggttttgcggatcacaggccacatgacctataggacaggtttcaagagctaggaagagtgaggcatagggtcacaaaaaggggtatgcagatctctatatgactagaatacaggtgatggaagggcaaccaggagtctagagctttttagggtggcccattaaaattagggataaagggtacaaagaggttagtcctgatggtccccaggtggaatgaggctgtgagtgacaaaggcaaggagggaagagagaatcttttaaaatcctcagatataatacaagtgctcagaatttaaagcagaaaattatctgaggaggccttctcctcctactctgtttctagattttagaaattgagtttacaaagagctaaatggttcccagttgtacagcaacttagtggatggagcaaacatgtaactcaatacaagaggcccctttcccattttcttccttccctttccatgtgttttttcctgctcttctcttttcttcattttttcatgtcttgggtcgaatggaaattcatgaaaagtatatattttcacctggagggttgggctaatatttacatagcatgatcttaaatttttagaattctgacacctaaaatgagcagtattgtgtgtccaattaatagacacatctcattctcaaggataatggagtatataggcacaattcaaaaatcctcttggctttatatttaacatgaatcagcgccagagtttcagttatcaatattaatatgtaacaaaatgttcctttctcatatggggttaatctctccccttctctgtcctcaaaccacttctttgaatttactgtggccggcacttacctcatattacaattgaatgaggctgcctggctgagatatcttccacacctgcttcacaggagggcctcccctcagtacaatgcctggaacccatcagtgtttgctgaatttttgctccctctaacatggcaatcaaatgttcaaaatggagaagcaagtgtctgaagaatccaaatttgaatagtcatggagaatgggctctaggccagagtcaaatgagtttgctgctttcagcatacctgggaaaaggaggggctccgtgggcagtttttccagtggcttcattaggaacatgcttccagggagcaggataaagtcccccataaaataaggtgtaaagacagatggaatatctttcctgagggtccagaaaggccttttatgatttatgaggcatggaccagtttggatgatttcattttagcactttttttttatttttttctaatttcaaaatccttttagaagaccaaatgtttgaccttcccttcaaaaggttgataccacttccatgagtgtggcctggatttatattgtctctgacctgggacatttaactttaactggcaccactaaacacccttgggttatgattcctgccttgccttcctcttctctggactccagcttgggatcaagatggttggcattgttagggtaccccctctacagatgacctcccacagtcccccaggaagacatgggatattttcaccagcctcattcgctcaccattggtaccttcagcagaaagaaatgaagtcctctccattttaactttgcttccagcctggccaagagaaaagactttcagacttccctctaaatcagctgcagtgatagaaagcagactaggtaacttcagcatgagagggagggacctcattgcaggaagcaaaagtcacagtagagttaagactcttgaaagaagcacttttattttcttgaagaattgacagatctctgcttcctgtaatgttttgtgcaaatttctgacagtgctattttcccttcccataggcaatgtgaagtattcatccggccaaccaatgtttcctgacgtacagtgttgcccttttcagcaaatgccaattccaagttccattaaatcagaagctccatggctccttggcccacgatgttgagtgctgactgtgtgttctactgaaagagtaaaacactgactatccaaagagaaatggatattttgtttttataataaccatatattattgttttcttcttccctttctatgcaagtgtaaattaatgaacagagaggtatttggaaatggtaatacatttgtcacggatttgtataatgtatacagcattgggaaagtgggtgggggctttctaatatgataccgtctttttaataactatgacaaagcttacataagaattagaagaccactttacatttttacattccttctgctgttcatattaaccttgcacaattacttcattttttctttgactcttttaccacaatgttttggttatttataatttatcagccatatgtttatcagccatataaccaactagatcccaaatagatccatgtatttgtttccgtgatttggccacattaataaattcataaatttcaatcaaatatcttatatatacacacatatggtttaagctacagccctgtgtatgccgtttaactttatttgacgttgcccacttacttctttgctgaccacttggataaccgtaataaaaatcctataagcctaaatggcatttcttttgggatatttttcctgcattttattccctttttatataagtaggaattaattatttattttatgtcttaatctatttgataaagaagactacattataataatctcaaagatcatattaccaaaggttgcccacttgagcatattttcattttgacacagaaacaaaatttagtacaacctttcctagttcccatgtcttgattttcatcattacatgcacagcagacctttacctattgtgataccagaacacatcattgtctttggttcccttcaaagagaattttattgttgttttgtattttcaagtccttaatagttcttgaaactcctagttgttttcttgttgaaagcagacacacatttagtgcacggcttattttacctttcgggtgaaagatcagatgtttttatacccttcacttgatcaatatatttggaaagaatgtttatcaaaagtctatgtcactgcttctacagaagaatgaaattaatgcttaggtgatggtacctccacctacatctttttgagtgcattcaattatgtattttggtttagcttctgatttaacatttaattgattcagtttaaacatgttacttaattagcaaatgtagaggaaccaaaaaaaggtgaaaataatatgttttgattcaaacctaaagacataaaaacataaagacattttaactttgggttctctttagctgggatctggccagaaggaggcttaaagttagaaattgctattattttagaataggttgggtgggttggggggcaagggtgtctatttgcagcagagatattttgaaaagaagaaaattgttttatataaaaaggaaagccatgaccacctttctacctcagatccatcttcatccattgcattggaaactgctttatgctgctgcagtctgcaaagtctagagcttttatcaggccatgtcatacccaagaaagcacctatttaaagaaaaaacaattccctgagctctcaactccaagttgtagatttggtgtcttccttgttcttactttaaaaagtcatgtgttaattttttttctgcctgtatttgtatgcaaaatgtcctctatctgctattaaagaaaagctacgtaaaacactacattgtaaccttctaagtaataataaataaaaagaaatatattgcagtaacaatgggaagtaagtatgtagttcttttgaaatatgtggtaaagaactaatcacagactatcatctaatctggttacatattgtatttttcatcctgaataaaagtaattttaacacaagatgactttgatattcttcagctggattcactgatagaatgtgagttttgaatgcacatttatgaaaacaagatatagagatagcctgtgtcctgatacatctacattttttcctgcagtttctctcatacacactaatacagtctcctgttgctctcattctctctctctccccatctcttacacatacatataattatatgattctcaatttattttccagatagaaggtttattgatagagaaaagtaatattggatgtaaaaatgtgtacataaaacctgttgagtgttttaataactagatgctgttgacattaagttcctttcaaatgtacttttagtttcatgctctcaaatactgtatgctttttatccgtacactggattttaaccactctagtaggtttaatcaatttctgaagccattcagtgggaaacaatgttgagaatcatgttgctttattctaaaattaaaagctgtctatgaactagaaaaatcatctaaaatataatttgttaaaataaagaaaactgatacattctgatgaacaaacattttaaacatcctgtgtaccactaagtaatgctgacattaagcattcctgaaaaaacacttgatttccagcaacttgttgactaggtagctgaaaatagaagtgcgaacaaatgaacaagttttgctttcatactgctgtggtttgaatgtgtcacccacagttcatgtgttgaaaatttaatccccgattccatagtgttgaggggttggacctttaagaagtgattggatcatgaggtcagaggtcatgaatggattaatgtcatcacagaagtgtgtttgctatctcaagtgggtttattaccaaagcacgttgggttctctcactttctcttgcatgttctctgccctgtcaccttccaccataggatgacgcagcaagacaggccttaccagatgctggcaccttgatattggacttcccaacctccagaacgctgagaaataaatttcttttctttgtaaattacccaatctgtggtattctgttatagcaacacaaaatagaataaagatgtatactgtgccttcaagttgttatatatcacatatatatataatatatatgttacaatcaaggcacagtatactatatatactgtgaaggcatagagatagatgatagatgatagatatagatagatagatagatagatagatagatagatagatagatgatagatagatgatagatagatatagatagatgatagatagatagatagatagagatagacagacagataatctttgtagtttgctcctgtgtatcttttctcccacccacattcactgtttcagtatgccagctttttcaaaggcctttctaaattcattagtggagaatttaatgataatacagtaaaccaccactaacgctactacttaaacctatgagtaggatccaaaagcttcactgacatacaatgtcagcttgtgtttttgtgaggttaattaagtaaccagaatgaggctgctacagacagcaggagataatcacaattacatcgcatccactgcctatggtatcagttatctattgccacagtcatgctgcatgggagccataaaatcttaataataagaatttatttagctcatggtatatggggttcagctactctgggcagactcttctgatctcagttagacttgctcacacatttgtggccagctttggatcacttgagggctctgctgatcctggctgggttgcacccaggtctgggagctgattggctgttgaccaatgtggcatggttaacctaggatgactggggacacttggatgagttccttgattcactagcaggctaacctagggatgttctcatgcaatgacagaagtgtgggcatgcagaaggaggcctttgctgaaacgtggcacatctttacttcagccaaattctgttggtcaaagcaaattacacatcttggtatggggaatacatttcatgtctgtactgagagaaactgcaaaagtcaaggataaaggataggtatagctatagaaagcataatgaactggtggccattaggtttcattatgtaaaccttgagataggcaaagcggagaacttggagccagaatataaagtatccatttccttaggcttcatgtccactgctccagtggaaggaaaaggcagtagcctctttacaggggcttcttttaaaacaaaggtcgaaaagatcagccctttcactccaaactaacaaagcaatttcaaaagaaaaaacaagtaggaaaatctatcatgcctgtgcctaaagtcccaagagaagaagacctcagaactgatactaaaattaggaaaaataaaaacaggaaaggaaaaaaactgtgagaaatggaataaagatgctacaataaactgctcagatgaacctttgttcaggtttagcattaaaaaattttagctggaagaacacacaacatgtaggaggctcctcactttgaccaaatcagtagggcacatgtgctacagtgcccctcccaaggggcatgcttaaaagcatgcaatttatttgcactttgcataaacttacaaacttagctctaatctctcattttagaggccttcaaattgtggcatattttagagtatttgcagttgacacatatgcttaaattcagatattcttttagagacagcttcttttttggtagttttgaattttgtgggtaattaggagaaatgaactgacaatttgccttcagcttagctctgtcctcagaccagaaatcacaaattttgaatttgtaatggtattagagttctccagagaaacagaaccaataggatagatatagatatgtagaaagagattgactatgaaatattggctgacatgaatgtggaggctgaggtgtcccaccatctgtcgtctgcaagctggaagcccaggaaagctggtggtgaagttcagtccaaaacccaaaaacctgagaactaggggaaccagtggtgtaagtcccaatctcagcccaaaggcctgagaacccagagtgctgatgtctgaaggcagaagatgggcttccaggcttgcacaggaagaccaaatctgcccttccccccacctttttgttctattccagccttcagtggactggatgatgctttcacattggttagggcaatcttctttactcagtgtaccaattcaaatgctaatctcttacacaaacagcctcacagacatacccagaaataacattttaccagctatctgggcatcccttaccccagtcaagatgacacataaagtcaacatcatcataattaaatgagaagagtttccaggttgccatgggatgtaattacgcttagtccttgatattattttttctagggccatttttcaaaaatattaaaatattgatttttaaatgttttgtttgtttctttgcctaattaagaataggaatttcctggcttctcctataactgactaaaacatccaaggccaagcatggtggctcgtgcctgtaatctcagcactttgagaggctgaggcaggaggaccacttgaggctgggagttccagaccaaacctgtgcaacatagtgaagcccctgtcgctacaaaaaaaaaacgatttgttttaattaggcaggtatagtgatacgtgcctatagtcctagctactcaggaggctgaggtgggaggattacttgagcccagtagtttgaggttacagtgaactgtgatcacaccactgcactctagcctgggtgacacagcaagatcctatctctaaaaaaaaaaaatatattatccagttggaatgtgactgccatgtaataaatacaactgtaaggaccatttagtttctctcttccaacctctcctttattttgaaggtctggctcttttgcatacaggtaaaagcttactcatatttctcttcagatctttttttctttttttaagaagaacaatgctgtagatcgtcacagcctatttgaaatattttataactctattcctttagtgttttgagaaagcatgtactaattcttaaatttatttctcataatattgataacaaaaggaattctatatagcaattactggaaatgtgccctgtgaatataaactaattctcttgagattaatcatcaagtatcagttctctttagttttatcaccacccgtagataaattaagtggagttcctgaatcagaacagcttaggaccaaacccatacatataaggacaccagagtatatgtcactgtatttgtcctagcctcagagacgaattgtttagtcattttaactttaactggttttgcaagtttaaacacaactttatattagagcagtaaattgtggtcctcatagcaccctcctcagaatcatctggagtctcggtagactctccccaaaaatactgaatatgaagctccacagaccatgctcaggaatctgtgttatatatgtctgccggtttcagacaaatgccaccaaaataagctattgatggtacaaagctgtgctatttttaaaagccataagagaacagtccttgacagtttttgtggcatctcagaggggaaacatcttgaatgggattgcataaggagaatgctgtaatagttgaagattgggagacgtagcaaggcaaaggttttgaggcaaagattttgaagaatcttggggaaaacagctgtttgatgctattaaataatttaacagtttgatgttcatacaagtgaagttttagaaaatttttggaacagataagttacaatatagtcatgatcttgaagacagaggaatatcaaagctatgttagtgaagataatgaacgcataaagtcatgtcaatgtagagaaagctgcatgggtgtaagatgcttttggttctcagcttcttcagccagagttaaaggataaatcattaatatctggaggcaggatcaagccacaccttcaccgcaatttggagtgtcatgattatgtattatattcccaggatggtcttttcaaccactgtaagtgtcaggttttcctgttccttttgttggatgatcatttgttggaccgttacatgggacaatggctgcacagagtatgcaaaatgctggagatcacaaattcaagttctgcaacctagaagaagagctgctgtaaaaatgagctgctgattaaagcagctctattctcaaccaccacttgctcaatttcatgaacgtcgcaggccaggacttctatagtcttggtgatattgtctaactcccctgctagtatatgaaatgtagtatgtatgattcttttaattttttggacttctctcttgaaaagagaagaaagtaacccagaatgctccttgaatagttatggctccaaatcaagtcaaaatttttatccttcttgaaatgttatcaaacaatctctttgtctaagaaaaaaactgattggccaaaatatattctgattgatgtcagagattatccagaaagtgggcatcagtttaacaacacaaggagcccctaatccaggcagtagccaaaaatccaatacttgtcactggggaaccatccaataatctttctttctttcttttttagccaaaatatccctatgaaacaatggtgaacccttgccaagaaattttgaacaattttcatacaattcatcaaaagtggcatgacaccagacaatgaaatttgtagtattgatatcattagatggagataaagaaaagggaaagtgtgccttttaagagctgcaaaagtttaagacagccgtcaaatatataccctctgtttccaagttctatttctgtgaaagttcagtgccaaagactagctttcatgaaagttccccgaatatagtcttggcaggggtaggaaccaacctttctaggtaagatgttgatatgttttggctctatgtccccacccaaatctcactttgaattgtaataatccccacatgtcaagggcagggccaggtggagataattgactcatgaagatggtttcccccacactgttctcattatagtgaataagtctcatgagatctaatggtttttacaaatagaagttcccctgcacaagctctcttgcctacgaccatgtttcttgtgactttgcctctcctttaccttcttccatgattgtgagacctcgcccagccaatgtggaactgtgagtccattaaacctctttcctttataaattactcagtttcgggtatgtctttatcagcagaatgagaacaggctaatacagtgaattggtaccaggagtagttgtagaggaacagaattctaaggatgaatttatttagttggttttggggtttctggaggtggatgcttaatattattagaccccaaaatgctaaggactcgacttctaatagtatggagaacactcatacttcttggcaagaactgtttcaagggttatgcaaaataaatgcattcaatactcctaattcactgcttgtgagaggcaaggagtttagtgactctatacataacacttttgactatatgtggagaaccaaggaatataatgaagttggttggttgctcctaagttcgctaggcaaaatgatgaaggaaaacaatgaactcagggattctaactccctgttccagaagcacatactgaacctcaaatctgctaagattgccctgagttagagtcttatctcctgtagagaaagagctgaaattgtggaaaatcagacacaagctcttatcatgtgagtggctgacctgcaaagaaagggccacacgcagcctcgccagatgtctactgttaaagtgtcaacttgattggattgaattatgcaaagtatttttcctggatgtgtctgtgagggtgtggccaaagaagattaacatttgagtcagtggactgggagaggcagacccaccctcatcctaggtgggcaccatttaatcagctgccagcataaaagcaggaatggaaagagtagactggctaagtcttctggcctccatctttctcctgtgctggatgctttctgcccttgaaccacagactccaagttcttcaccttttggattcttggacttacaccagtgatttgccaggggctcttgggcccttgaccacagaccgaaggctgcattatcgaattccctacctttgaggttttgggacttggactggctccccggctccccagcttgcagatggcctaatgtgggacttcactttgtgatcatgtgagtcaattctcctaacaaactccctttcatatatacatctatcctattagttctgtcactctagagaaccctgactaatacaaatgtgataagggttttagatttccagtgatcagtccttttgtgatatttgcatttaaaaagttatctcattgttgaatccaagtacctaagaagtcaactaactcattacaaagaaatgataggaagagaagcagaatatttctcaaagggatggtgcacaaacgaaaccgtacatttggttgtatgccagttctcaaggaaattctagatagacattgaatttagacgtaggagtgactaagaatgcaaaaaaaatatattagaaagaggtgccttatagataacatagttaaaggcaaactgaaacaagcaaaagaggaaacaagatagctaggaaaataacaaaataattcattttaaagcatgatagtctgtggctttgtttcataaatccaaggtgaattcagaagtcttggtggaagctatttcctcccaaagtctgtttatagaggttaacttgaggtcttcacagaggacttcatcttccatttctaggatggtttatgcttgactgaaagacatagctccaagaataaaccccttggatttttactgtcctgctaattgttaacagtacctcaaggggtactgtgcatcagggtttcagggctgtctttctctgatataatttctagaagacccattctctaggtttcagttcatgtaaagataacttaagaggcagaaagacagctcccacctgttcacggtaggactaagtgtattgcctgaatccccagcattctttggccatggctgcttgcaatcgtgtggacatattcctaagtccagatggacacatacactcctgaataagtggcagagcttttcaaagctcttgctaagccccagtaaaatgggttttccatcactaaagtgatagataaataattcccaggtttgggaacacaaaataaaaaaatatatatttttggctactgttagagctgtaaatgtctgatgaaaggcttcaatccaactacaaattaacagatattgatcaggacatattcaaaagtcatcacagaatgcatatatatgaaatcaatttggaagggttctgaggcttggctcttgtccacgtcccatctttatagcttttattagaattgtgctgttgacatatgattcatgtatcagaggacccttgaccattttggtaaagttttgctgctgatgttgactgagtgtagaggcaaatatgtccttgctagggtggatagttccatgtaaaattttgcaaactttctttgctactgagggccatccttaaagtgcctgaaatcacccctgggaagtttgcaactacatatttcccagtatcctttctttatgctggagtcaaatcctagccttctgaaatagcttctttgaacatacccaaagatttggcttcttagggtaggatccttgtgaaggctgcctgaactccttttgtacaagttcctaccttattatagctactgccttaagaagcattagcacactgaaaattcctttaatttgctaaacatttttatttgagatttctacaaaagtcaagaacccctgttggtttgcaaagccttccaaaattgtgaactactcctaaagcttgtccactctcagtgtgtattttagctcatttatctttagctaactgacaagctctgatgagagcattaagttttagcacctggtagattttgcttctataaggagtcatattttaggaacaatatgagacctgatacagtaggttttacctaaaattatatttttctgtttagtcttaagatatggtccatcaacaaacaaaactaaatcttgatttcctagtgtagtttctcgcatatctattcagggaatagatagtttgaaaagagaggttagagagtcataggtgtccctgttttaaagaaaatgaaagaagagttgcaaaattcagtaattaatagagatatgcaaataaagagagagaaatagaacttctaggaggtaagcttacttactgatagttatcgtttattttcagtgagagacaaagaccagatattgggagggaccatcaagtttaaagaactttctaaaaatcaagtgaacagagtctccctagtttagctgctgtggctatcacccttaggcaaggtgagtagacttttgccactgagataagagagaaactgtagtgagcttttggtctctgattattcacaagaagttgaattagaacacacagggcttattcaaatctctcacattatatatgaatagacaagtttatgataattaggttggcatagaatgagatgttattgaagagttaattttaacttttgaaaggagtgtttgtgttggggttctcagagaagagctttggttaccaagggatatagtttggctctgtgtccccacccaaatctcgtcttgaattgtaatccccatatgtggagggagggacctggttggaggtgatggatcatggagaagatttcccccatgctgttctcattatagtgagtaagttctcatgagatctgatggcttaaaagtgtttggcacttcctccctgtctctcctgctgccctgtaagacgtgccttgcttccccttcatcttcagccatgattgtaagttttctgaagcctccccagccatgcagacctgtgagtccattaaacctctttcctttataaattacacagtcttagatagctttttatagcagtatgaaaataaactaatacagaaaatgtttaccagcagagtgggtcactgttataaagatacctgaaaatgtggaagtgactttggaactgggtaacaggcagaggctgaaacagtttggaaggcttaggaagatgaggaaagtttgaaacttcctagagacttgttgaatggttgtgaccaaaatgctgatagtgatacatacaatgaagtccaggccgaggcagtcttatatggagatgaggaacttattaggaactggagtaaacctcactcttgctatgctttaggaaacagactgacggcattttgcccctgccctagagatctgtggaatttgaattgaaaaaaaatgatttagggtatctggcagaataaatttctaagcagcaaagcattcaagaaatgatttggctttttctgaagcgtacaatcatatgtgttcacaaagagatgatctgaaattggaacttgtatttaaaagggaagcagaacatagacgtttggaaaatttgcagcctgaccatgtggtagaaaagaaaaatccattttccagggaaaaattctagccactgcaaaaatttgcataagtaacaaggagctgaatgttaattgccaaaataatggggaaaatgtctccagggcatgttagagatcttctcagcagctcctcccatcacaggtccagaggcataggaaggaaaaatggtttcatgggctgggctcagggccccactgctctgtgcagcctcaggacatggtgccctgtgtcccaggtgctctagctcagccatgacctaaaggggccaaggtacacctcagaccattgcttcagaggattcaagcccaaagtcttggtggcttccatgtagtcttgggcctgtgggtgtgcagaagctaagagttgaggtttgggaaccttcacctagatttcagaggatgtacagaaatgcctggatgtccagacagaagtctgtgcagggatggagcccttatggagaacctctcctagggcagtgtggaggaaaaatatggagttggagcccccatgcagagtccccactgaggcactgcatagtggagctgtgagaagagggccaccattctccagaccccagaatggtagatcaactgacagcttgcactgtgtgcttggacaagctgcaggcactcaatagcagcccatgaaggcagctgtaggggctgtaccctgcagagctgcagagcagagctgtccaaggccttgggagcccaccccttgcatcagtgtgccctggatgtgagacataaagtcaaaggagatcattttggagctttaagatctaatgactaccctgctggatttcagacttgcatgggcctgtagcccctttgttttggccaagttttcttaattggaatagaaacatttacccaatgcctatacccccattgtatcttgaaagtaactaacttgctttggatcttacaggcacataggtggaaggaacttgccttgtctcagagaagactttggacttggacattggtgttaattctggaatgagtttagactttgggggactgctgaggaggcatgatttcctcttgaaatgtgaggatatgagatttgggaggggcccagggtggaatgttactgtttgactctgtgttcccacccaaatgtcatttcaaattttaatcttcatgtgttgagggaggaatctggtgggaggtgattggatcatggggatggtctcccccatgctgtcctcatgatagtaagtgagttcttatgagatccgatggtttaaaggtatttggcagttcacctctctctttctctcttctctgctgccatgtaagacatgcctcacttctccttcaccttccaccataattgtaagtttcctgaagtctccgcagccatgtgtaactgtgagtcaattaaacct

SEQ ID NO: 44 - DNA, 585298 bp, Homo sapiens
aggtttaattgactcacagttacacatggctgcggagacttcaggaaacttacaattatggtggaaggtgaaggagaagtgaggcatgtcttacatggcagcagagaagagagaaagagagaggtgaactgccaaatacctttaaaccatcggatctcataagaactcacttactatcatgaggacagcatgggggagaccatccccatgatccaatcacctcccaccagattcctccctcaacacatgaagattaaaatttgaaatgacatttgggtgggaacacagagtcaaacagtaacattccaccctgggcccctcccaaatctcatatcctcacatttcaagaggaaatcatgcctcctcagcagtcccccaaagtctaaactcattccagaattaacaccaatgtccaagtccaaagtcttctctgagacaaggcaagttccttccacctatgtgcctgtaagatccaaagcaagttagttactttcaagatacaatgggggtataggcattgggtaaatgtttctattccaattaagaaaacttggccaaaacaaaggggctacaggcccatgcaagtctgaaatccagcagggtagtcattagatcttaaagctccaaaatgatctcctttgactttatgtctcacatccagggcacactgatgcaaggggtgggctcccaaggccttggacagctctgctctgcagctctgcagggtacagcccctacagctgccttcatgggctgctattgagtgcctgcagcttgtccaagcacacagtgcaagctgtcagttgatctaccattctggggtctggagaatggtggccctcttctcacagctccactatgcagtgcctcagtggggactctgcatgggggctccaactccatatttttcctccacactgccctaggagaggttctccataagggctccatccctgcacagacttctgtctggacatccaggcatttctgtacatcctctgaaatctaggtgaaggttcccaaacctcaactcttagcttctgcacacccacaggcccaagactacatggaagccaccaagactttgggcttgaatcctctgaagcaatggtctgaggtgtaccttggcccctttaggtcatggctgagctagagcacctgggacacagggcaccatgtcctgaggctgcacagagcagtggggccctgagcccagcccatgaaaccatttttccttcctatgcctctggacctgtgatgggaggagctgctgagaagatctctaacatgccctggagacattttccccattattttggcaattaacattcagctccttgttacttatgcaaatttttgcagtggctagaatttttccctggaaaatggatttttcttttctaccacatggtcaggctgcaaattttccaaacgtctatgttctgcttcccttttaaatacaagttccaatttcagatcatctctttgtgaacacatatgattgtacgcttcagaaaaagccaaatcatttcttgaatgctttgctgcttagaaatttattctgccagataccctaaatcattttttttcaattcaaattccacagatctctagggcaggggcaaaatgccgtcagtctgtttcctaaagcatagcaagagtgaggtttactccagttcctaataagttcctcatctccatataagactgcctcggcctggacttcattgtatgtatcactatcagcattttggtcacaaccattcaacaagtctctaggaagtttcaaactttcctcatcttcctaagccttccaaactgtttcagcctctgcctgttacccagttccaaagtcacttccacattttcaggtatctttataacagtgacccactctgctggtaaacattttctgtattagtttattttcatactgctataaaaagctatctaagactgtgtaatttataaaggaaagaggtttaatggactcacaggtctgcatggctggggaggcttcagaaaacttacaatcatggctgaagatgaaggggaagcaaggcacgtcttacagggcagcaggagagacagggaggaagtgccaaacacttttaagccatcagatctcatgagaacttactcactataatgagaacagcatgggggaaatcttctccatgatccatcacctccaaccaggtccctccctccacatatggggattacaattcaagacgagatttgggtggggacacagagccaaactatatcccttggtaaccaaagctcttctctgagaaccccaacacaaacactcctttcaaaagttaaaattaactcttcaataacatctcattctatgccaacctaattatcataaacttgtctattcatatataatgtgagagatttgaataagccctgtgtgttctaattcaacttcttgtgaataatcagagaccaaaagctcactacagtttctctcttatctcagtggcaaaagtctactcaccttgcctaagggtgatagccacagcagctaaactagggagactctgttcacttgatttttagaaagttctttaaacttgatggtccctcccaatatctggtctttgtctctcactgaaaataaacgataactatcagtaagtaagcttacctcctagaagttctatttctctctctttatttgcatatctctattaattactgaattttgcaactcttctttcattttctttaaaacagggacacctatgactctctaacctctcttttcaaactatctattccctgaatagatatgcgagaaactacactaggaaatcaagatttagttttgtttgttgatggaccatatcttaagactaaacagaaaaatataattttaggtaaaacctactgtatcaggtctcatattgttcctaaaatatgactccttatagaagcaaaatctaccaggtgctaaaacttaatgctctcatcagagcttgtcagttagctaaagataaatgagctaaaatacacactgagagtggacaagctttaggagtagttcacaattttggaaggctttgcaaaccaacaggggttcttgacttttgtagaaatctcaaataaaaatgtttagcaaattaaaggaattttcagtgtgctaatgcttcttaaggcagtagctataataaggtaggaacttgtacaaaaggagttcaggcagccttcacaaggatcctaccctaagaagccaaatctttgggtatgttcaaagaagctatttcagaaggctaggatttgactccagcataaagaaaggatactgggaaatatgtagttgcaaacttcccaggggtgatttcaggcactttaaggatggccctcagtagcaaagaaagtttgcaaaattttacatggaactatccaccctagcaaggacatatttgcctctacactcagtcaacatcagcagcaaaactttaccaaaatggtcaagggtcctctgatacatgaatcatatgtcaacagcacaattctaataaaagctataaagatgggacgtggacaagagccaagcctcagaacccttccaaattgatttcatatatatgcattctgtgatgacttttgaatatgtcctgatcaatatctgttaatttgtagttggattgaagcctttcatcagacatttacagctctaacagtagccaaaaatatatatttttttattttgtgttcccaaacctgggaattatttatctatcactttagtgatggaaaacccattttactggggcttagcaagagctttgaaaagctctgccacttattcaggagtgtatgtgtccatctggacttaggaatatgtccacacgattgcaagcagccatggccaaagaatgctggggattcaggcaatacacttagtcctaccgtgaacaggtgggagctgtctttctgcctcttaagttatctttacatgaactgaaacctagagaatgggtcttctagaaattatatcagagaaagacagccctgaaaccctgatgcacagtaccccttgaggtactgttaacaattagcaggacagtaaaaatccaaggggtttattcttggagctatgtctttcagtcaagcataaaccatcctagaaatggaagatgaagtcctctgtgaagacctcaagttaacctctataaacagactttgggaggaaatagcttccaccaagacttctgaattcaccttggatttatgaaacaaagccacagactatcatgctttaaaatgaattattttgttattttcctagctatcttgtttcctcttttgcttgtttcagtttgcctttaactatgttatctataaggcacctctttctaatatattttttttgcattcttagtcactcctacgtctaaattcaatgtctatctagaatttccttgagaactggcatacaaccaaatgtacggtttcgtttgtgcaccatccctttgagaaatattctgcttctcttcctatcatttctttgtaatgagttagttgacttcttaggtacttggattcaacaatgagataactttttaaatgcaaatatcacaaaaggactgatcactggaaatctaaaacccttatcacatttgtattagtcagggttctctagagtgacagaactaataggatagatgtatatatgaaagggagtttgttaggagaattgactcacatgatcacaaagtgaagtcccacattaggccatctgcaagctggggagccggggagccagtccaagtcccaaaacctcaaaggtagggaattcgataatgcagccttcggtctgtggtcaagggcccaagagcccctggcaaatcactggtgtaagtccaagaatccaaaaggtgaagaacttggagtctgtggttcaagggcagaaagcatccagcacaggagaaagatggaggccagaagacttagccagtctactctttccattcctgcttttatgctggcagctgattaaatggtgcccacctaggatgagggtgggtctgcctctcccagtccactgactcaaatgttaatcttctttggccacaccctcacagacacatccaggaaaaatactttgcataattcaatccaatcaagttgacactttaacagtagacatctggcgaggctgcgtgtggccctttctttgcaggtcagccactcacatgataagagcttgtgtctgattttccacaatttcagctctttctctacaggagataagactctaactcagggcaatcttagcagatttgaggttcagtatgtgcttctggaacagggagttagaatccctgagttcattgttttccttcatcattttgcctagcgaacttaggagcaaccaaccaacttcattatattccttggttctccacatatagtcaaaagtgttatgtatagagtcactaaactccttgcctctcacaagcagtgaattaggagtattgaatgcatttattttgcataacccttgaaacagttcttgccaagaagtatgagtgttctccatactattagaagtcgagtccttagcattttggggtctaataatattaagcatccacctccagaaaccccaaaaccaactaaataaattcatccttagaattctgttcctctacaactactcctggtaccaattcactgtattagcctgttctcattctgctgataaagacatacccgaaactgagtaatttataaaggaaagaggtttaatggactcacagttccacattggctgggcgaggtctcacaatcatggaagaaggtaaaggagaggcaaagtcacaagaaacatggtcgtaggcaagagagcttgtgcaggggaacttctatttgtaaaaaccattagatctcatgagacttattcactataatgagaacagtgtgggggaaaccatcttcatgagtcaattatctccacctggccctgcccttgacatgtggggattattacaattcaaagtgagatttgggtggggacatagagccaaaacatatcaacatcttacctagaaaggttggttcctacccctgccaagactatattcggggaactttcatgaaagctagtctttggcactgaactttcacagaaatagaacttggaaacagagggtatatatttgacggctgtcttaaacttttgcagctcttaaaaggcacactttcccttttctttatctccatctaatgatatcaatactacaaatttcattgtctggtgtcatgccacttttgatgaattgtatgaaaattgttcaaaatttcttggcaagggttcaccattgtttcatagggatattttggctaaaaaagaaagaaagaaagattattggatggttccccagtgacaagtattggatttttggctactgcctggattaggggctccttgtgttgttaaactgatgcccactttctggataatctctgacatcaatcagaatatattttggccaatcagtttttttcttagacaaagagattgtttgataacatttcaagaaggataaaaattttgacttgatttggagccataactattcaaggagcattctgggttactttcttctcttttcaagagagaagtccaaaaaattaaaagaatcatacatactacatttcatatactagcaggggagttagacaatatcaccaagactatagaagtcctggcctgcgacgttcatgaaattgagcaagtggtggttgagaatagagctgctttaatcagcagctcatttttacagcagctcttcttctaggttgcagaacttgaatttgtgatctccagcattttgcatactctgtgcagccattgtcccatgtaacggtccaacaaatgatcatccaacaaaaggaacaggaaaacctgacacttacagtggttgaaaagaccatcctgggaatataatacataatcatgacactccaaattgcggtgaaggtgtggcttgatcctgcctccagatattaatgatttatcctttaactctggctgaagaagctgagaaccaaaagcatcttacacccatgcagctttctctacattgacatgactttatgcgttcattatcttcactaacatagctttgatattcctctgtcttcaagatcatgactatattgtaacttatctgttccaaaaattttctaaaacttcacttgtatgaacatcaaactgttaaattatttaatagcatcaaacagctgttttccccaagattcttcaaaatctttgcctcaaaacctttgccttgctacgtctcccaatcttcaactattacagcattctccttatgcaatcccattcaagatgtttcccctctgagatgccacaaaaactgtcaaggactgttctcttatggcttttaaaaatagcacagctttgtaccatcaatagcttattttggtggcatttgtctgaaaccggcagacatatataacacagattcctgagcatggtctgtggagcttcatattcagtatttttggggagagtctaccgagactccagatgattctgaggagggtgctatgaggaccacaatttactgctctaatataaagttgtgtttaaacttgcaaaaccagttaaagttaaaatgactaaacaattcgtctctgaggctaggacaaatacagtgacatatactctggtgtccttatatgtatgggtttggtcctaagctgttctgattcaggaactccacttaatttatctacgggtggtgataaaactaaagagaactgatacttgatgattaatctcaagagaattagtttatattcacagggcacatttccagtaattgctatatagaattccttttgttatcaatattatgagaaataaatttaagaattagtacatgctttctcaaaacactaaaggaatagagttataaaatatttcaaataggctgtgacgatctacagcattgttcttcttaaaaaaagaaaaaaagatctgaagagaaatatgagtaagcttttacctgtatgcaaaagagccagaccttcaaaataaaggagaggttggaagagagaaactaaatggtccttacagttgtatttattacatggcagtcacattccaactggataatatattttttttttttagagataggatcttgctgtgtcacccaggctagagtgcagtggtgtgatcacagttcactgtaacctcaaactactgggctcaagtaatcctcccacctcagcctcctgagtagctaggactataggcacgtatcactatacctgcctaattaaaacaaatcgttttttttttgtagcgacaggggcttcactatgttgcacaggtttggtctggaactcccagcctcaagtggtcctcctgcctcagcctctcaaagtgctgagattacaggcacgagccaccatgcttggccttggatgttttagtcagttataggagaagccaggaaattcctattcttaattaggcaaagaaacaaacaaaacatttaaaaatcaatattttaatatttttgaaaaatggccctagaaaaaataatatcaaggactaagcgtaattacatcccatggcaacctggaaactcttctcatttaattatgatgatgttgactttatgtgtcatcttgactggggtaagggatgcccagatagctggtaaaatgttatttctgggtatgtctgtgaggctgtttgtgtaagagattagcatttgaattggtacactgagtaaagaagattgccctaaccaatgtgaaagcatcatccagtccactgaaggctggaatagaacaaaaaggtggggggaagggcagatttggtcttcctgtgcaagcctggaagcccatcttctgccttcagacatcagcactctgggttctcaggcctttgggctgagattgggacttacaccactggttcccctagttctcaggtttttgggttttggactgaacttcaccaccagctttcctgggcttccagcttgcagacgacagatggtgggacacctcagcctccacattcatgtcagccaatatttcatagtcaatctctttctacatatctatatctatcctattggttctgtttctctggagaactctaataccattacaaattcaaaatttgtgatttctggtctgaggacagagctaagctgaaggcaaattgtcagttcatttctcctaattacccacaaaattcaaaactaccaaaaaagaagctgtctctaaaagaatatctgaatttaagcatatgtgtcaactgcaaatactctaaaatatgccacaatttgaaggcctctaaaatgagagattagagctaagtttgtaagtttatgcaaagtgcaaataaattgcatgcttttaagcatgccccttgggaggggcactgtagcacatgtgccctactgatttggtcaaagtgaggagcctcctacatgttgtgtgttcttccagctaaaattttttaatgctaaacctgaacaaaggttcatctgagcagtttattgtagcatctttattccatttctcacagtttttttcctttcctgtttttatttttcctaattttagtatcagttctgaggtcttcttctcttgggactttaggcacaggcatgatagattttcctacttgttttttcttttgaaattgctttgttagtttggagtgaaagggctgatcttttcgacctttgttttaaaagaagcccctgtaaagaggctactgccttttccttccactggagcagtggacatgaagcctaaggaaatggatactttatattctggctccaagttctccgctttgcctatctcaaggtttacataatgaaacctaatggccaccagttcattatgctttctatagctatacctatcctttatccttgacttttgcagtttctctcagtacagacatgaaatgtattccccataccaagatgtgtaatttgctttgaccaacagaatttggctgaagtaaagatgtgccacgtttcagcaaaggcctccttctgcatgcccacacttctgtcattgcatgagaacatccctaggttagcctgctagtgaatcaaggaactcatccaagtgtccccagtcatcctaggttaaccatgccacattggtcaacagccaatcagctcccagacctgggtgcaacccagccaggatcagcagagccctcaagtgatccaaagctggccacaaatgtgtgagcaagtctaactgagatcagaagagtctgcccagagtagctgaaccccatataccatgagctaaataaattcttattattaagattttatggctcccatgcagcatgactgtggcaatagataactgataccataggcagtggatgcgatgtaattgtgattatctcctgctgtctgtagcagcctcattctggttacttaattaacctcacaaaaacacaagctgacattgtatgtcagtgaagcttttggatcctactcataggtttaagtagtagcgttagtggtggtttactgtattatcattaaattctccactaatgaatttagaaaggcctttgaaaaagctggcatactgaaacagtgaatgtgggtgggagaaaagatacacaggagcaaactacaaagattatctgtctgtctatctctatctatctatctatctatcatctatctatatctatctatcatctatctatcatctatctatctatctatctatctatctatctatctatctatatctatcatctatcatctatctctatgccttcacagtatatatagtatactgtgccttgattgtaacatatatattatatatatatgtgatatataacaacttgaaggcacagtatacatctttattctattttgtgttgctataacagaataccacagattgggtaatttacaaagaaaagaaatttatttctcagcgttctggaggttgggaagtccaatatcaaggtgccagcatctggtaaggcctgtcttgctgcgtcatcctatggtggaaggtgacagggcagagaacatgcaagagaaagtgagagaacccaacgtgctttggtaataaacccacttgagatagcaaacacacttctgtgatgacattaatccattcatgacctctgacctcatgatccaatcacttcttaaaggtccaacccctcaacactatggaatcggggattaaattttcaacacatgaactgtgggtgacacattcaaaccacagcagtatgaaagcaaaacttgttcatttgttcgcacttctattttcagctacctagtcaacaagttgctggaaatcaagtgttttttcaggaatgcttaatgtcagcattacttagtggtacacaggatgtttaaaatgtttgttcatcagaatgtatcagttttctttattttaacaaattatattttagatgatttttctagttcatagacagcttttaattttagaataaagcaacatgattctcaacattgtttcccactgaatggcttcagaaattgattaaacctactagagtggttaaaatccagtgtacggataaaaagcatacagtatttgagagcatgaaactaaaagtacatttgaaaggaacttaatgtcaacagcatctagttattaaaacactcaacaggttttatgtacacatttttacatccaatattacttttctctatcaataaaccttctatctggaaaataaattgagaatcatataattatatgtatgtgtaagagatggggagagagagagaatgagagcaacaggagactgtattagtgtgtatgagagaaactgcaggaaaaaatgtagatgtatcaggacacaggctatctctatatcttgttttcataaatgtgcattcaaaactcacattctatcagtgaatccagctgaagaatatcaaagtcatcttgtgttaaaattacttttattcaggatgaaaaatacaatatgtaaccagattagatgatagtctgtgattagttctttaccacatatttcaaaagaactacatacttacttcccattgttactgcaatatatttctttttatttattattacttagaaggttacaatgtagtgttttacgtagcttttctttaatagcagatagaggacattttgcatacaaatacaggcagaaaaaaaattaacacatgactttttaaagtaagaacaaggaagacaccaaatctacaacttggagttgagagctcagggaattgttttttctttaaataggtgctttcttgggtatgacatggcctgataaaagctctagactttgcagactgcagcagcataaagcagtttccaatgcaatggatgaagatggatctgaggtagaaaggtggtcatggctttcctttttatataaaacaattttcttcttttcaaaatatctctgctgcaaatagacacccttgccccccaacccacccaacctattctaaaataatagcaatttctaactttaagcctccttctggccagatcccagctaaagagaacccaaagttaaaatgtctttatgtttttatgtctttaggtttgaatcaaaacatattattttcacctttttttggttcctctacatttgctaattaagtaacatgtttaaactgaatcaattaaatgttaaatcagaagctaaaccaaaatacataattgaatgcactcaaaaagatgtaggtggaggtaccatcacctaagcattaatttcattcttctgtagaagcagtgacatagacttttgataaacattctttccaaatatattgatcaagtgaagggtataaaaacatctgatctttcacccgaaaggtaaaataagccgtgcactaaatgtgtgtctgctttcaacaagaaaacaactaggagtttcaagaactattaaggacttgaaaatacaaaacaacaataaaattctctttgaagggaaccaaagacaatgatgtgttctggtatcacaataggtaaaggtctgctgtgcatgtaatgatgaaaatcaagacatgggaactaggaaaggttgtactaaattttgtttctgtgtcaaaatgaaaatatgctcaagtgggcaacctttggtaatatgatctttgagattattataatgtagtcttctttatcaaatagattaagacataaaataaataattaattcctacttatataaaaagggaataaaatgcaggaaaaatatcccaaaagaaatgccatttaggcttataggatttttattacggttatccaagtggtcagcaaagaagtaagtgggcaacgtcaaataaagttaaacggcatacacagggctgtagcttaaaccatatgtgtgtatatataagatatttgattgaaatttatgaatttattaatgtggccaaatcacggaaacaaatacatggatctatttgggatctagttggttatatggctgataaacatatggctgataaattataaataaccaaaacattgtggtaaaagagtcaaagaaaaaatgaagtaattgtgcaaggttaatatgaacagcagaaggaatgtaaaaatgtaaagtggtcttctaattcttatgtaagctttgtcatagttattaaaaagacggtatcatattagaaagcccccacccactttcccaatgctgtatacattatacaaatccgtgacaaatgtattaccatttccaaatacctctctgttcattaatttacacttgcatagaaagggaagaagaaaacaataatatatggttattataaaaacaaaatatccatttctctttggatagtcagtgttttactctttcagtagaacacacagtcagcactcaacatcgtgggccaaggagccatggagcttctgatttaatggaacttggaattggcatttgctgaaaagggcaacactgtacgtcaggaaacattggttggccggatgaatacttcacattgcctatgggaagggaaaatagcactgtcagaaatttgcacaaaacattacaggaagcagagatctgtcaattcttcaagaaaataaaagtgcttctttcaagagtcttaactctactgtgacttttgcttcctgcaatgaggtccctccctctcatgctgaagttacctagtctgctttctatcactgcagctgatttagagggaagtctgaaagtcttttctcttggccaggctggaagcaaagttaaaatggagaggacttcatttctttctgctgaaggtaccaatggtgagcgaatgaggctggtgaaaatatcccatgtcttcctgggggactgtgggaggtcatctgtagagggggtaccctaacaatgccaaccatcttgatcccaagctggagtccagagaagaggaaggcaaggcaggaatcataacccaagggtgtttagtggtgccagttaaagttaaatgtcccaggtcagagacaatataaatccaggccacactcatggaagtggtatcaaccttttgaagggaaggtcaaacatttggtcttctaaaaggattttgaaattagaaaaaaataaaaaaaaagtgctaaaatgaaatcatccaaactggtccatgcctcataaatcataaaaggcctttctggaccctcaggaaagatattccatctgtctttacaccttattttatgggggactttatcctgctccctggaagcatgttcctaatgaagccactggaaaaactgcccacggagcccctccttttcccaggtatgctgaaagcagcaaactcatttgactctggcctagagcccattctccatgactattcaaatttggattcttcagacacttgcttctccattttgaacatttgattgccatgttagagggagcaaaaattcagcaaacactgatgggttccaggcattgtactgaggggaggccctcctgtgaagcaggtgtggaagatatctcagccaggcagcctcattcaattgtaatatgaggtaagtgccggccacagtaaattcaaagaagtggtttgaggacagagaaggggagagattaaccccatatgagaaaggaacattttgttacatattaatattgataactgaaactctggcgctgattcatgttaaatataaagccaagaggatttttgaattgtgcctatatactccattatccttgagaatgagatgtgtctattaattggacacacaatactgctcattttaggtgtcagaattctaaaaatttaagatcatgctatgtaaatattagcccaaccctccaggtgaaaatatatacttttcatgaatttccattcgacccaagacatgaaaaaatgaagaaaagagaagagcaggaaaaaacacatggaaagggaaggaagaaaatgggaaaggggcctcttgtattgagttacatgtttgctccatccactaagttgctgtacaactgggaaccatttagctctttgtaaactcaatttctaaaatctagaaacagagtaggaggagaaggcctcctcagataattttctgctttaaattctgagcacttgtattatatctgaggattttaaaagattctctcttccctccttgcctttgtcactcacagcctcattccacctggggaccatcaggactaacctctttgtaccctttatccctaattttaatgggccaccctaaaaagctctagactcctggttgcccttccatcacctgtattctagtcatatagagatctgcatacccctttttgtgaccctatgcctcactcttcctagctcttgaaacctgtcctataggtcatgtggcctgtgatccgcaaaacccatgttcccaaacccttctctgaatgctgcctgcatctacttgctctaatcaatatctgcatctacctgaagacacagcttccctcataaccctctcacacagcacttcccctccccattctcccccattcctcatacactgcatgagtcttccttggtcctcattggggcctctggggtatcttctttctcctctccctaaaaacacccagctttgaatctcatatcatcagactatatgactccattatgcagtcatctactgactccgtaggtcatgttccttcacttcttgaagtaaaaaatggctcaaagtcccctactctaaagccatttttaaatgttagtgatttcaacacccatggagatgattcttccagcactctggcttcttggttctttaggctcttttcctccaatggtcctgtcctccaaccttcttagccattcacacaaaggtccaaatatggaccattaccaatacttgcaacccctctaatttcagtatcattcaacctagcttctgacaaccacctctacctccacagcttacttcccctacaactgcaaatttatccatcctttgacaataggatccattgatcctcccatctttatttctgtctcccacactggacatttcctcattcctttcactactgagcttaagcatctggttcaatcattataatcacttctttgcctcttcccttgaatcactgtactcactttgtcaaaccccaacttcaactttttaaatgccaatactcagcccattctggtgcctgtgctcatgaacgtgaatatgcctagagggcaacttacaaccctgcagaatggcctcatgttaaattcatgagtggcacctttaatgctgcttatagtcacactctatttcccaggccatctgctcttctattctccaagaagctatcacacatcctccagtctctcctcgcacttctgacacctcctccccaacctcactccctgctaaagtcccggcttccaattcacttagacaacagaagcaagcaggagagaacacccacagctcaccacacccctagcctacttcacatacccttgtcttttagttaagatcccagcctctcttgccaataagacaatcattcagaaggctcattgtttcaaaaagattagtaaacaagttcatgaaagaaaatgttctccaaagctgctgtggctttgtggcacattattactaaaagtatgtgataagaaaatgtgaatggaaaacaaaatctcaggatccctaactcactatgctaaagggaaaaattaaaagtgggaactgagtcacacaaaaactaccttcctaagcagctacttgcaaagatagaaggccagtgacctccctcacaaattgctcacaaggaaatttctaagggtccccaaatctttaccctaaaacagagttttgttgaatttcaccctgacaatgtgaattaacagcttatctttacaggacaaaggcaggactagaagtcatctctcctcccaccctgagaaaaatgtgtacttgactgcttcttctactctaggcataccttatcttaattatataaaacgcagatttactgagcataagacaaatgcataattgactgttcctccaccccctcctgcctgctctttcgtttctgtgaagccctcaaaatcctttttgggaaaaaacaaaaacaaaaaacaaaacaaaacaaaaaaacaaaacaaaacaggctacaaatcctaatgaaatttatctctctttttcccaggtgtgtcctcaaccttggcaaagtaaacctgtctcatacactttttggtttatagaaaatactaaaaggcataagggtacagctgccaacagttctcagcaaaatttttaagtaaaaaattgaaatattttcccctgcaaagtaacaaaaccacctctgtggtaccagtcattttttttttaggtcaatgttctgtgatagccaccttaagtagacatttgagagagcagtggtggtcaaatctatctagagtgactttatgtagcacataagatgccattaaaaagctgttagaacacaaaggatcaaacacatggtatttttggtatctgtggcttgggagccaccccccactcccagactgacaaactgttgtacagaatcaactaacatttaaatgtcaagtaagtttacttatttacatggagaataaagtaggaataaaatcagtcgtggataatctgcttactctaggttgggatcagtaacatagagccaaccaagccattaactcttacctgtggcctgctgggaacatttgctgaaagagaaaacaaaagaaatcacttaatggcagtcctgttactttgttggttccaactctcaggcatgcaaatgcgtggaaagtatcactctacatagggtaataatagcccagttgttaaatggatgctaataggaaaaacaagaaacacattttttttttcctggcttaatgcttcaatgagggctagttttcctggttagtttctcatatcccatgtgatttaagatttagtgcatacactaaagcattcactgagcacttagtcttgcaaaaaatctcatttcctatttaaatcatactgtgtatttggtttatgtatcagaacagagcatgttctacttactttgctgagtactaattctgaccaagggaccactgaaggcataagtctttggtttctgcctctcttgacccacccttgacacaccctggaccctaacgcccaggaaaatggtggccaagtacttgcatcaaggaaagtgctggcctaatcctcagtgtccttctggacacttgggataataatagtcccttggatgggcccagttaggaacaacggagaagttagaatatggcatctaattctcctttccacacagatagctcaattcctttttggttccagagcccataacagtgaagacgatctggcgggctttgcaagggcagccactgccatctcttctctaaggcatctgcttttcgtcccctcttttgctacatgatcatctcgttctcaatgctggggggaaaagaggagatctgtcccccagtaatggcaacaatctgttcttggtcaaataaaagttgtccctagtcatctagcatgctgcactccttccatctctcactgttctatgctgagtgggagaaaggacatcagtgaccatgtgctgtgtgctgggagctatgtgagaaaaaaagagcaggcatgaagagtacccttcctataacgtctggagggaaagtgtgaggcccggtatttgggggagaaatcaggctaaaagaagcctagttctaacagatctgtaagttacatccaggagaaaagagtggacctccacagtgtccaagggatagctgagttgaattattattaagtacaccataggtttacacactctttttaaaacagacagagttatgcttctcttgcaagtaacaaatataacaaatagccaaaccctagacagaagtctaatccattttgctctaaaccaatacttttaaccttacagccttttatcaaataaaaggctatgggtatttgcctgaacaaatcacacaaaaatattttaaaaaggaaatcactgcattgcagtgggttttgggtttttgatgaatgccattcaagcttaataaacataggcaattcatagtaaaaatatgcctgtgggtcaaaaataattttgaaagcatttcttggtctatcagcaaaaattagttggcttactgccagtatttcatacatttgaaggacataagtaaaaaatggacaaaaaaaatttataccaaaaaataaaaatagttactgcagtcagtgggaattttagtaagtacacttgttaattggcagtacatttaaacccctttccttaactccttgccaggaagtgaaggaaatgtctgcttctctgctctaagactcaacataaataattttaaaaagactttaaaaggccataattcaaggatgctatcaggaccaactgggatattaattcagacaaaggagttctaaagtgttatgtgcaacaatgtgtagacacagttaaaaaacggtcatgttaaaataggcaattcacacaattaggatttatgaatacagagtttcattttaattccaagattgccaagagtggaaattcatttggggccatgctaatttttaatccacaaaggatcaaaagtcaagattaacatgaagatcaattcattgtatgctggcgacaagcatttttaaagttctcattagttacaggggctcaagggattggcttggcattgggagggtgccaatccgatttgtttagataaattctccaaaggtggttggtaagctttgggaatcacaaaggcttattaaaatatttgctggctgagcaactttaaagggacaaaagaacaaatgaatcctacaaaacgttctgagtactatctaggaatgctacaaggaaaccttcccagctagaaaatgtaatcattcactcaagtcagaaacatgtattggggccgggtgtggtggctcacgcgtgtaatcccagcggtttgggaggccagggtgggtgggtcacttgaggccaggagtttgagaccagcctggccaacatggtgaaacccgatctctactaaaaatacaaaaattagttgggcgtggtggcatgtgcctgtagtcccagctacttgggaggctgaggcatgagaattgcttgagcctgggaggtggaggttatacagacctgagatcgtgccattgaactccagcctgggcaacagagtgagtctctgtctcagaaaaaaaaaaaaaagagagagaaagacacatgcactgggcactgagtctacctcccacgctgatttctattttgcatcaatttttaaaaggtttaataattacaggcagaatatgaaaatatgtatcaattttataaataagtcaatacagcttttatttttatggaaagctgtccctgtcttgtatataataccagagaaaaaatatgaatagcagaactttcagaagccaaaaattaaaacatggagatttcaaaggattctaaaatacacttttcatcatttcatacatggatgtgcttgaattcttgaaaagaagacatgactagtaatgctcattcagaaaactatgactattataaatatttgtgaatgtgcatagttaacactatgaaaacatgaagccagctgctccaaaccaatacttttaaaccaacagctttttatcagatagaaggctaagggtattttacatacaaacatatttaaaaggaaatcattgcatttcagtaggttttgagtttttgacgaatgtgactcaagcttaataaacattaaggaatctcagggctccataaaccactctctgaacactgagaatgacattggtgaagaggggaccaatgcaggggagaggatgaatctctgtgatgtgggtcccattgaaggtactgtgtatactcctctcagaaaccaatatcaatgaacagctaacaagatccccaaccaataggaattttatacttgcctttaaagtgaggccataaaaagagatacatacatttacctgttacaattcatttttgctctaaattatgattatttatttttaataatgttctgttttaaaatgacatgggtccagcttttgtaaaatctggatgtcagagtatactttgagaaaaatttaagagtaaattctttaggaaatggaacttggaaaaaatcccacatttttagaataaaatttttaatatggaaattatatattttatatatattacaaggtgtatattgaaacacatttcccatcctggctgtcactgccaactgacttttacaattgaaaatgtccatgatatttaaataaaaacttctaaacagctttgatgtacagaatttgtttttaactaattattaaggttatttaggtataagctgaactaaaaagtaatttcctttaagaatttaattctggctcataaagactatgatgagattttatctactcactaagtaacataacaattgaaaatcaaaacctctaaataaatttgaccttgaattataattaataaactagttttaatcagtttatctattactgtggttacagagcctagaaaataagcaacaatctggtagcatgtgagcattcagtgatcctcttaagcttttgtgagactctaaaagccaaaagtgtgtctatatgggtgtgcacatgcatgcatgtgctttggggggtggggaggtggggaggtgggtgtggagactgatgtagtgtaaatgtgattctgcaaactttgagaagcattatagtagatctacaaatgaaaacctgggaaacactggcaaaacacaaatagatatattcatgtgctggtggaaaccataatataatcttcaggcaaatattcctgaaaattcacaaagaaatatatgttttatttattcatttattttgttgttgttgttgttttgagatagagtctctgttgcccaggctgaagtgcagtggcatgatctcaactcactgcaacttcagcctcccaggttcaagcgattctcatgcctcagcctcccaagtaggtaggactacaactacaggcttgtgccaccatacctggaaaatttttttggtatttttagtagagatagggttttgccatgttaatcaggctggtctcaaactcctgacctcaagtgatccacctgcctcagcctgccaaaatgctggaattacaggcatgagccaccgcacctgggccagaaatatattttaaatagctgttttcacattctgctaatgatggtattttaaaaattacaaagttctatacagtaaataataatctttaaatgaagtcaatatatcttatttacctacactcctgataattgataatctctttttcatcatttcggatggcttttttttttttttttttttttttggagaggaagtctcacgctgtctcccaggctggagtgcggtggcacgatctcggctcattgcaacctctacctcccaggttcaagcgattctcctgcctcaacctcctgagttgctgggattacaagtgcatgccaccatgcccggctactttttgtatttttagtagcgacagggtttcaccatgttggtcagactggtctcgaactcctgatctcatgatccacctgcctcgccctcccaaagtgctgggattataggtgtgagccaccgtgcccagcctgggatggcattttctaaggagatgacagacaagggtaaaataagaggctatgctttacatgaattcttattttagtgactgccctggatttaaaatcagtttgagagtaaatctctctaaaattacaaataatgtcttcaaatcctgtcaaagattatttaaaatataattatagtactaagtaatttatatgcatttatatatttgtatgtgtgtgtgtatatatatgtatacatatatacagtttacttgtatgtatatattctgctagaaacaccagaagtgttttaggtgagagctcagccaaaattgcaaggtggcaaggtgctgaagacaaaacacttggaaaaaatgaataagtaagaattattatataatttccccaggaatttggttattttctggctcttggttgttcagatggaaacttcacaggatcctaatctatgatgacttaaattgtttggcctttatacaatgactattttattccatgagaaaagaaaccagcgggaataaaaagggaaaatctgaaaacaatccctttctgcactggagtctgatgacattggagaacaatgtttgaagaaaagagagggaattacactagaaaggctgtttccatgccttgtttggcatgccactgaaagctcttctttgaactaagatgtgttccttatgatagcttgcatcgaagaggataatttcttcttaaaaccagacttattattttatttgctttcattttatcacccatcaggcatattgaaaaatctcaaagagcagaattgcgttgcgactgtacccccgttacttgatagtatctaggttgagcttcattttcttatataatgtttgccttattttcaaataatattcagtcctgtttgtaataaggtttttgttatcttaaggaagaaggcgaagggccgcatgcagaaaaagagaaagggaaggaacacgtgcagctgtggtgctgcaatctttcatactcacggcagcaagatggaaacgtgctgtgaatctgctccatgacctccgtgagatccgtgctggtgtcgtgcggtggggccagcaggtcctctcccgctgtgacagcaaataaagagaacaacaaagcttctcaaattaatgtctagccttccactaaaacccaaattcaggaggaaatactccaaccagcctctaaatatcaatgtgaaaagatttcccattgcaaaggacaattttaggggaatatacccaaaacatttttgcttgagtgttggtaatataattttacataattgacacgtactagctgtttgtttgtgtagaaagaatccacacaccaggggactgaaaaatatgagactgaaaaacaagtaatatggtcttattatttcagtgtttgaatgagaaatctattatttttgcaccacaggtatgttttcatacaaaaaaaatttcaccaatttctttttctgtcctcctttctttttggagacttcagcttaggccagcttatcctgccacaaaagtaaaggcatcttatttaagatacttttcactaggatgtgttttttatcctataatccatagtcaagatagttctcttatttaaaaaatatgaaaataatcttaatattttaatatatatattttttgagatggagcctccgtcaccaggctggagtgcattggtgcgatctcggctcactgcaacctccgcctcccaggttccagcaattctcctgcctcagcctcccgagtagctgggactacaggagtgctccaccacgcctggctaatttttgtatttttagtagagatggggtttcaccatggcctcccaaagagctgggattacaggcgggagccactgcatccagctaatattttaatttttttctggttaatgtaccaaaagatatcccaccaagaaattaatttggttacaatatatcgttctcagtaaaattctagaattttaatttaattgataacaaaatgtcattggttaacacctagtttactgagtccttcctagcatcagtgacaggtccccattgtgaccaaggacaggctgcgtgggaccgctgcctctgatgggacaggcaagacaatgtctaagtggactaggacgaagaaaagtgaataaatgagtttccacaccttggcagatacaaccataatgtttggtgtaatattattagtcctgaatatgcaccaatgtaacattttagagacagaaagtgtactaaaaaaatcattcataagcaaataatttaatttcttgctcattctaaagggcagaggaggctttttcatccaaacttcaatccacttctacagattatataaacaagtgtattatagcttatttgaaaatgtttgctttttgatattgttgaaatggatttgcacctatttaagaccaaatacaaaaaactcttttacttcctaaggcaccagtgtgtaggaatgttacttaacaggaaacacaaactaatggcaaagcacaaagcagactcagcagaggagctgtgtgctggggacaccgacctgcctggtggaactgtgggccggaggcatctggatcaagcgagtagctcagtgcagaatgctgaggagaagcccatggggaaacaccattgattcgggaatcagattcaggctggaaccacattcagaggttaaagcagagaaaggattcaaataatcataaggaaaaacatttcctttttaacttccccgccctcaccatggataattaaatcatatagaagtctttgccttcagatgttttccatacattttagcatcagcttggtgggggctttggtccttctctttccgcttggacaccttgaagaatccacttggttatgctgccagactcatttatcaacaccatttttatccctcaatttttctgttgttttaatgttaagtgaattcataagcatagttcactcatattttaaacatcagcactgggtttctaatacagtaaatttatccaatttcaaaatcagctcatactccaaggcaatattgagagagtgattagaagcatgattatggattcagattgcctggattctaattcccactctgccactcataagctgtgtaattctgggaaaactgtagaaccttccatgctttcagttctttatttgtaaaatggggagggtaataatagtgctgtgttatagagttttgtgaggggagtgaagaatgactatttctaaaatggttagaacagcctgacacttagtaaatacttcgtaaaggcactcacgcaaatcttcaatatggatacgctgacaaatatatggtcaaattagaaagtgtgagccatcatatagggaatgcagatgttacaagtttttcatgcagatttttccattaaatctatattagttgaagcctggtagttctgctagtttttactattagagttgaattttccatctacttctagcattcatcatcctaaattgtttagaagagataagagctctgcagtcttggatatagaagccatttggatattagctatctctaaaagcattgctatgtgattctcaaggcacatgagccatcaggcagcactgtctaatgggatggagggagtaggggaaggcaagggtgaacagaaaagccttttgctctcctgtgggcatcaaccagccatggcaaataaaggttttgagcacagcttccttctgtagcaattccacctatgcactaagttgttaacactaacacttcatattctaaacaagagattgcaagagaaaatccatcccttacacagcaccatttggaaacttcaagttcgcggaatgaaaaatgtaacgttttcaatgtatgtggctggcactaagtaagactcaaacattccgaagggcttcaagaaacccacgtcttgggtcactcttgggaaactcttactttccaaattgtgggattgagaggccctgaagtaagccttccattgaacagcctcacccaaattctgaaacactgagagacatagagaaaagtgtatggtcaaattatgaattgcctacacaaatttctgtgtaggtaaggcagaaatgacactgttttgaattattctggtaagttaaaaagactgagagcaactgtgaaaaggcagttttctaaaatttgagagaatcactggagagaaagttgttcctgctttgagtcaataaatcatttctggagaaaggcactcctattatatcacataggagctccacacagcacaggctagagaaaaagactaaagatgacatgcatgttgatgtcagggattcttcaagagagaggagctcttggcccctgtgctgggactctacgctctctgcacctgctgcaaaggtctctccatcactacttctgagacatcactcctattcctaactactatgtgccatcaagcacttaattccctacagtgtgctgtgtcttcacatatgaaagtatcttgctgtgatctctaacaagatggcaggcaccagaaaggcagaaactgtattgatgcttcttttatatctcaaagaacagtgtttttcaaaactgaatgcaataacccaccgatgagttatagaatcaatttagtaggtcctgaccagcattaagaaagaaaaacagaaggaagaaagggagggaggaagaaagggaaaatagaaaataagagctggcatttctctataaaggcaagtattattttgtattctccatacatgcatgtattcatcttaatgtaaattgtatttcttatcatccagaaagcttgcaagcaactcccataaaacatggtccagtgttaggaaataatagtagcaaattaataaccatctttaactcaatttcttgagaatagaaaataatgattcttggagtcagcattcttgtctcactggaagaaagctttagaatgccgatttcaggtctcttgctgttccttaatacagatgcttcccatgtataatttaggaagatatatgtcataggatattttctctcaaacagttcagagctgaggcggacttcattgttaaagaagactgggaaattccattgtaagctgggcaaacacatttttgtgtgccaatgaggatttatatgcttacatgtaaaaggaaatttctaagccagtctgaattaactacggaggtaagaaattgaaagtggacttctctgcctctcctgacacctggaccatcatctcccagggcagtggacagatggcctggggaggtgtgacgctgaattctacacaccctacctgctccagcagctgtcggaggcggtggagctgagactccagctgtttattgtgatcttctaaaatctgcatcctagcctccagccgacctttgtgctgcctgaggagttttgcttctgctataagttctgaatcctcagacgtgtgatggggagatataatcgactctggcggtgaaccgacagggagcccccttcggaggtgctggtccttcagctgctcatactccacctgtagatttctaatacagaaagagggagaaacagaatgactaccacgtgcattatcgtctctccaaaatcgtctgtgaggttcaaatttagctcatgctagttcctcttatataaaaatgtgtattaatagcaggatgagcatgcaggaataaaattgtagttttaagcaagtgtcccagtagacatcatcaatgaacccccaaatgctgctgtattgcagccagcatcccagtttgttaatagcctctaaaattttcactccactgagatttcttagacaatagtcttgaaaaagagaataaatgggggctacagtgaaattcatacaaaagaaaggatgacatatttccttctcccaggcctagcacacctttgttcttcctccaggtcagcaatgatcctctccagttctccacgttcttccctctctactgacttcaggatctgagctgggctctgcggctggctcactggggactctcctccgagtgtttggcaatactgctggatgagggcgtgctcgtcttccctagcaagacaaaggaaacagacccagaggctcacatctggatggtgatgtttttggacataaaggaagtagaaataatgatggacaggatagtggctgggccaagtttgtcttagagctcagtgtctccatgacctcccttttaaaactctaggaagaagttcatctagcagagcatggatattacatgagtcaacatttcaggcttctctttcatctaacagctctatctcataaacttcagaagggatatcttactcagcagaaaaaacaaaaataaggaacagcatttagtataaaagctactgtagacaaaatcaattactccatgcctaaagagttgattaaaagactactgaattaagaatcatctgacttcactgtctttagaatttcgttgaaagtaactttgaaatgctttgtaacccatatgacaaggtttataatccttatgttcttttatttaaatagctcagcacaaattataattgtagatatttataatgtctctacagatattttactttatattattagcaggtcatttttagggttgatcactctgcattagaacaagaaactacatttaatgcatgtgggttctcccacttatctaactacctgtctaatgaactagacatagcagtaacgtggttgaattagtaactgacataagtgaatgtctaacaaagttgatatatttatggcaagaaaatgctttctagcagactcggaatttcttatcttctttcaacaagagagatccagtgagatcttataaatgtgcaaataccaatctcctggctaatactagcagggcagtccattagcagatggcacgtggtccgttttgatggcttttggtaaacaagtcctggaaatcgatggctttacaggatagggcagcaggaaaacctcatgtcagttatgtagctatcagagtgtcaaatggggctatctcatgactgaagcagctccttcctgtgtaagcgatgggggctgcgaacatcccttagagacttcttctgttactctggagtcagacagcatcctgttgcagccagaaagaacctggtgtgtggtgctggcagtcctgggcctctctcagcttcaccagagccttgagattacctgtgcccttgagctgatgagtaacacttgatgctggggaagacctctggtacttgtaattctggtttgaaaattcatcttggtgttactgcagtttactctaacaaggaagggacttgaaattgtatcagacagttggtgaattcctagaaaaggtttatcctaagcattgagatcagagagctagatgaagcaattgagaaaactgaacgttctggtattatgcttgtcaaacagccaaagcaaaagttcagatgtgccacttgttgatttattttgctttcttcatcaataaaccccctctctttttctctccctctagaaatatatagatatagatatgaacatgtgtgtatgtgagtatatatatatttaaataaaggtcatatactttggttaaggccacaatataataataagtacctaacctgaccttcttgcttttatcaaataaattttaaaagaggatggggtgggacccttacaacacagttagcaactggaaataaggaacaccagtgggttaaggattgaagtaagctgcggcattatcctttgattccctttcctgagaaaacgcagcatcactgggaaatgaatgaaggaacctctgcaagaaccccatgcttgttcctgggtttagaaggacgagaagaagagagtatgggtactgcaccactgcagagagcagcatttgaaagcaatccaaaagctcctcagtttcccatgtagctaaatcaaacagactggcagggagatatgggtctgtgtatgtgtatattttcctcataggaagtaaatggccaacaccctaaacctagctgtgttatccggggcagaagcaagctgtaagactaatgtctcaacaccaccaggacaccaatgagctgcagtgaattacacaatgcaaagtcagcgatgcctggaggcacctcaccaagttcatgtgaagagagaggtgataaaacatgacaaaagagcagctctaacatatggataggacaaatggacaaagcgtaaagatatagtagatagatataaaataaaacagcaaaataagagttcagtagaacatcctgtaaatatttctcatttctcaggatgaaaaagatctgagtatagaaactataaagacagagtacccaaaaataataataacaaaagaagcacattcatatgtatccctggaaaatgtctgtattttaaagataaagtatcacaagcaatctgccagaaatcaaaataaaacagtaaatcatgttcagcggtggaaaaaggtttagcttcctattttccataatattaaatgtccaaagacaatggagcaatatctacagtcctaacctatccatccatatgaccaggcaggtcattcaagtgtacaggcaaagcactttgtccacatagcatatgaaagaaagaatgagcaaggataatgcaaaatggaactaaagtagatggtaatctcaggtgttacgataaaaatagaggtaaacttattctaatattagttaaaaaaacaattagttggctgggcacggtggctcacgcctgtaatcccagcactttgggaggtcgagatgggcagatcacttgaggtcaggagcttgagaccagcctgaccaacatggtgaaaccccatctctactaaaaatacaaaaattagttgggcttggtggtgggcacctataatcccagctactcgggaggctgaggcaggagaatcacttgaacccgggaagccaaggttgcagtgagctgagattgtgccactgcactccagcctgggcgacagagtgagactctgtctcaaaaacaaaacaaaacaacaaacaaaacaaacaaacaaaaaattagttctatgatacctatcaataacatacctaaaagaaaataataaatatggaaagaaaagacttaaaataagaactaatataaggacaacaagaattaaaagaaaacttggatccctttaagctatgtggctgatcttgtggccatgatttgaccacagatcctggcgtagagttcctccaagatcacaagccaccattatgccctcagaacatttactacagcacctgacctcatggattaacttcagtgcttaatattaataccaagtaaatttttgttttaaagatttggagactgactatccatagtgaaaccagccaaaattagatttgagatgtatttttgttgtcaacatacatatagattcacttctctggggaagctgatagagtttaacacattattataattatcatccccactatcattgcattctttcattatggtatctggaagagagttaaggcagttttcacaaaaataagaatttaacaatcatttatataaaacatacaattttagtcttaagtgtttttcacagattattaggtctaaatgttgaatataaaaatagatacattctagttcttaattacatatagtaaaaaccaataacaaactctttaaatgcagatagaacatgaggtaccagatcagggacattaaacatcaatcgtatgtcttgggctaaaatagaaaatgttgcaaaaataataggtttgcaccaaggaaatatcattagatggaatataattatactacagttaagtcacacatagtaaacactatctagattacaaaattagtacatatcagatgacaaaaaaactgtgattcattcaatgaacttttgaaagtagacaagacataaataaaaataatgattttctttcttttaaggattgttctgttctaggtttcagatttgcaaactgcaatgcctgtgtaaaccacagtcagcctccccattctttctttccagtgtcacccaagggcagatggcagatggagtgagacgtcctgatagccatggcccaaggaattgtccttgcgttcccacttctgagattccccagaaccgtcatgagtcctatcctgtcctgagatgtcactgctcaatttttccttcaaagatatgtagtattcgtaacatcaatttccttttaaattgtccagagtcaatcgaacgtactcatgtatctaattgtaatagatatatgggtgatcagggacatgtcatttatctttctggatgtcagcttccttgtttataaaataggactcataataatgcccatcctagggttcataggagattatttgtttccttgcatcatctagcaccttgaggtcacctgcattcctcattttcaaagccaacacagcagcatctgcagatctctctctgacctctgcctccattgctacgtctccttctctgactctggctctccttcctaccctttatgaggacccttgggattacactggggccatctggattatccaggataatctctctatttcaaggtccttaattaaaaacctgtggcaaagtcccttttgccaagtaaagtagtatattcataggcttcagggattaggatgtggacatctttggggggccatcattctgtttaccacaaatgccttcatcatgttcttctggtaggactacttatctatttcctttctagcctataagattcatggagacagtatctgcatctatagacctattgcagtattgggtgcatggcggtcgtgagttggtaaatgtttaacaggttctccaagagaaaaagaccttgatttgtggcatttgcaacttctgtgatttaaatactttttgatcatggccaatttcaagttcatgacttcactgaatgtggaactgggaaaagatacacatttgtacaccacctgacagagataatgaatcaggagtattcaatcttttggcttccaggaaccacattgaaagaataagaattttcttgggccacacattaaatacactaacactaatgatagctgatgagctaaaaaagcaaaaaaaaaacaaaaaacaaaaaacaaaaaacaaatcacagacaaatcttataatgttttcagaaagtttatgaatttgtgttgggctgcattcaaagctgtcctgggccacatgtggcctgtgggttgcaggatggacaagtttataataaataatcccaagggcatagatattagtgaaatgaagtaaaatcattagggtgtgatgagttttgagaattacttttgtttttgttttaatctaatttatttaattgtaactgtatatacatgtatataaattatttttaaaaaggctctgtttaacagcttacaaacatcctgaaaatgtaacaatcagctctcacaattggctccagcataccattacatggtaggtatatattaataacaactgtctgttggatgggtgaatgagttaatatatataatgacagtatattaaaatgtatctgactgttaatcttctgacttttttcttttctttttaaaaaatgttaatcttttctgaaacagtgctaaatctgaaaatagtatttattcctattttaagatacaatatactaaatttgagcattacctttactgtgttcacagggcatgacaaaacattttaaagaagtaagattttgttctgaattattatcttttatttcctttaacgctttggctatggtcagccttgaggaaatttgttgatttaggaaagattcaagatacttaactactttacatgaaatgcacaccagtaggttaaatatgaaacaaacattatgaatacacctttattttgatttgggaattgtttcacactcatagtacatgaatgataatgtataaatctctactacattactgtcaagtattaagatgcaatctttgaaatttgaaattgaaaaacctcctgataacttttatttataaccataataaataaaacaagttttagaaaatatggaaagagaatattctatatttgagcactttaagtattttaacctagcactctccatagtttttttttttttttagtgaaaacacccaactactatgtttgacaacttttctgtctactttacagattcccatcagatccaaaccacaatagagctttgttagtcacataagcttgacagtattagtcttttagatattattcaggattaaaaatgtgaattccagggcacaaaaaaaagaataaaaagttccaaaagtaagagtacacacaatagtgggataatcagtgataaaatatttgctgagaaagttccacaaccaagtggaatatacacatatggggaaatcagaaataaactaattggctagaaagctttttagtatataatatctttttagtattctaaagtcaatgaggcttttcttagttgctaataaaataaaatattggcagaggagttaacagttttcaatgaagggtaggagtatatatctaagtatgtgtgggtcagaggtgctaaatgcagatattatggaaaaaatgttagctagtggaagaaagaggatttcacagaaagggcacatattctgtcaaattacctttgttaaattaataagaaatataagacaaatggaatgaatatatacacctgttatcctaaataaaacaatctgattttcgtggggtatataagttgacaaatgtaagatttttttcattaacttatatgaaacaaagtaaataaacatattgagtttatactatcatggtttgaaagcataaaatctacgtagaaatttttggaaccacacttaataattttgattgggatcaagattcagagccacatcagtgaagattgtttctgacagccataatacaagaactagccttcccaggcagcactaatttcatgatttacttacacacttcctgtggtggagctgctatcagtgagaaaagacccattagtcctttccatctgggccagtctgcaaaataaaaataaggaggttagacaacatggccatataggacatggtcaattggacgtacatccttaatcatttttaaattgtcaaaattctgacaaaacatagaaagatccaaatctcctaacacgactgtaaaactaaaacgtttcatgttgagctacctttctatcaccactgccttaatgcctgtaggcctttatcttacgccatgttgtaaagtctcctaactgacctaatcttctaattgagctcccagacctaggctttccttaaccctctagttggtctacatctaagtgagcgtgacattctcaaacaaataaaatgatgttcctctcataacaaaaactctccatgacttcccttcaactaaggacatgatccaactcttcagtggctgggtttttcattatcagacctcaacttctgtgtccttcactttctcatctatttctctttcccctacctgcagttcagtaaacaaaccatgccctttcccagctcaatgcttttgagtatattattccattagtccaagactttcccctagaaattctagttggcctagacccagttcaaatgttaccatttttatgatgcttgaattaacctttctaggcaaagctacttactagaatcacagacacctagtatataccacttttctgaaagtctgtgcacaccatcaagaccagcctatatattatttagagactctaaaataaacccctatcctaaagcattagcataaatttaattacatattgtaattcacatgtgcaccatctcctgagaatacctgcaatcccactttcatttactgaaacttggttacaccatctaaatcctgcttgtacagtgtttggattctcattagctggagaatcacatcctggttaggtttacttttcatagaatatatagcaggtgtttggtaaagtgcaaactgtgtcatgaaaatatgagagcccaaattccaaatataatggaatcataactcctgcaaaactgcatttcttaaatcaaggtatattaatgatattagattaattagacatagatacattctgggtggcagtgcagtggagggctctgatcaaagtttcttaccgtgtggcatattgttctattcttgaatgggtgtcatcatgaaacagttgaggagattgtgaggggctttaaaagaaaaaaacaaagcaataattttatgcccaaatattgataggtgttactattagaaatgttaggttacttaagtaatgaatctgccatgcaaacagaccactaggattgttacccggaacacagaagtattattttagaccaagagtttagtaagacccccatgctagtaccactgatcagaacacctctcctgcacgtgggctatgaatactcactcatagtgctctggccacatactgatgagtgtgataggactgcaaagaggggagagggagacaaaagtcacagaacaaacactttagagcaatttaagacaaaagcagtgggggtgtggggagattctcaattatcttccgctcatatatgtggttgccctgagagccaccatggggaaatcaaaagtaacagaagtcacagtgtattctagagaagtcgccgtgtattcaagagtctgcaggggccttttcacagatattacaggatatttgttcaaggatagcaaacacatctttaaacagtcatactggggaaaaaaccagaatgctcaaaaataactcaaaattatagaataatgtaaagataccattctataatataccaagggggatgcaatcatatttttgtttttcctagagaagaaacttggttagaaagatgaagttaaaaatgaaacactacattatatgttgatggcagaggtgcaataaaattagacttttctgttcttcatgtaattttaaatgtaaacatccaaacccagatgtacccaaaatacctcaacctcacacacacattgaacaaacatgcaacctagataccacccctagatcccaccaaaaatgtcacatcataaataacactgaaggcaacttcctgagatcatgatacattttcttcaaaaaaaagttttttagaagtttaaactatgaatcgatgcaaaaaaacttgttctgcttgactcaggggcttgtgtctggagccagatcattcagtgtcactcttaatgctggggatgtcatatactgcctaggaagaattcccaagtctccatgaaatacttttgaaaacaactgatcctaattaaaagctagttccaaccctagctttttgaggaggaaggagagtaaatgaatgtagaacatttacagtacaaagaaaattagctatttaattaaataaaagtctgcaaaagctaacagtgtttgaaacaaaattattccaaaactccttgattctcctatttctattatacatacctacttagacaaagaaagtaggtatctataatgcctacttttctcttcatctcctatagtgaagtgcaggttgatgcctgcacagcaaagacttttgaacattatcttattgggatgaaaaactaagactcttcagatctattttcagaaccaggcatttatttatttatttatttatttattttttcttttattattattatactttaagttttagggtacatgtgcacaacatgcaggtttgttacatatgtatacatgtgccatgttggtgtgctgcacccattaactcatcatttagcattaggtatatctcctaatgctatccctctcccctccccccaccccacaacagtctccggtgtgtgatgttccccttcctgtgtccatgtgttctcactgcagaaccaggcatttatccagactgtttgtcagaatatctatactgtcagtaaacttaatttacatatgtgtaaaatagatacaataacaataaaacaacatagtattagtcaatactatttccacgtcactgttcttcattaaccctgaatatgttaaatgtcaggtgaatgatatgctatatactttctaaaaacagtaactgcttaagagattatttccaaaattcaagtgtagcaaaacatatgccacgaacttcaaatagaagaaaagtgtgtattttttttgtcttaatcaaccttgggaaagctctgtcaaattgcttgactggttcttgctaacttaatccagttagcacaaaagtgatccatgacctaaaaaatgagaatggcaagggtagagaactgaactgaagggtttctcaagttttgttatatatttgaaaaatttctaaaaaaagaaatagagataaaaaagtcaaaccttgggcttcattgacttcagaaaattttgatttgtagaaaaaaagattaaatgataagctttttcatttaattctgaaaggagaaaataagaaactgcatagttacaacctatcattacaaagccttggaaataagaacaatgtgtgtgttagcccaggcttcagaacgcagcctatccctgctctccagcatgggggctgaacaggtgattttgtcaatcacacactaatattccagaaagcagactctgctacaaatacttagatattatatgaaatgtaacccaggccagcctcggtagcttgtgcctgtaatcctagcagtttgggaagctgaggcaagaggatcacttagtatcatgtaaaatgtaacacaggccaggctcggtggcttatacctataatctcagcactttgggaggctgaggcgggaggatcacttgagcccaggtgtctgaggccagccttggtaacataatgagaccccatctccacaaaaaataaacacattagctgtgcgtggtgtcatgatgcctatagtcccagcttcttgggaggctgaaaatttcacccagaagttaatttacaaactgatacaagaaaacttgttctgcttgactcacaggcttatgtctggagccagatcattcagcgtcattcttaacgctggggggacacccccccccaccaccaacttcacatactgcctaggaatttccaaagaggaacacttgagcctgggaggtcgaggctgcaatgagacagtgagctgtgattgtgccactgcactccagcctgggaaacagaactggaccccgtctcaaaaaaaaaaaaaaaaaaaaaaagatatatatatatatatatatatatatatatatatatatataaataaaatgctatattaatatatatacatatgtattatatttgtgtatatatacatatatatacaatatatacatatttattgtatatgtgtatatatactatatatacatatttattgtatatgtgtatatatatacaatgtgtgtgtgtgtatatatatatataatggttttatatataaaacccagattttgaagaacttaatgacccttttagtgccttaaattgtcattagactcttccttgttctttgtcttctgccttcttcaatccatttgctccagagcagggtaagtgggatccctgctgcttttactcaaagacccccaaaggctccccactgctctcagaataaactccaaacactttggcatggcttagaaggcccttcattatatggttccatcttctctctccactgccatttcttgccattgttgatagttttccaccccagtttctgaaactatcttgcctccaagcttttgaaaatgcttccttggaccagaaactctccctctcaacctcccacatcaaacacatcatacttagccctattaatctttcaggtctcaacttggctgtcatacttccttctagtcggatgttaactgcaactgtagttaaacttatagtgtatttgtttcttgctatagcaaaggctcttaaaaaaatctttaaactcatttactcccctttaaccaataccagggagaggtgtctattttactttttttaatctttagggaaaccaacctatctctttagccaataataattctcacaacccttgaattacttttgctactattttagcttgttcctcagatttattttcaatggagtattctttaatcaaactctactcatttattgatttattttctggaaaattttgcatagttataaaattaatcgaataaaccttagcatggatttgtttactcccttttagtaataactcattttccccataaatcccctcctccatgcatgcatgtgtaactactgggcagaggacaaaatgctacattttgcaaggatgaaaaagaaagaagcaaaagaaaattctaattagcttcataaataacttcaacacatttgccacttcgctggtttttctccaatgttctcctcccacaaataggagaataaacaaaatcaaacttttttattacccactcacataaattgttacaccagaagattaagcggccctgtactagaaagggctcagccgaaaagtgaactatatcaaatcccgagagcttggtctaggattaaaaaaagaaaacctgcccactatatctagtagttcataaatctgtccaaaaaggatcttggtgcatctgatgcaagcttacacttcttcctttttttctcttgttttcctctcacaaaaaatgctcataaattcattttcaattgaatgaattgaggcgaggcattttcagaattacaccccaaaatcacagcacaaaattatttggcatgcttttctgttaatttttacctaatagagtcactcagaataggatgactgacaccaatgattattttgacattgaaaggcaaattaaaaatgttttaaaggagtataaaatatgcatctatctgcatgattcctgtaaagcgtgtagatatttgtgatgcaaaatgccaatggtttagcaaaagattaaaaggcacatcgcttagttcaaacctatcaaattatcccgtaaattaaagcaccaagtaataattctgtgcctcagaattatccattccaaaggttaactggatgggatacaaaaaaagtacaattttgtctttatcctaaggcatcagcacagttaaacatatattagatactaagacaaataagaatctattatcacacaaccttttgaaggaaaggacaaaagcatacccacaaatcaaaaagaggaccaaaagtctactgttcctgaatgtattcgaacagctctctttcaattgaaattgctttattaaaactttttctaaattgtactatgcaaaagaatgtttagaaagacacagatcttaattgtacacagtttgatatcaagtggaaagaatatatcttaagtgtacacagtttgatatcaagcacagtaatcacacagttgaaattttttcttaccttttgtatgtgtatgtgttatacatggacctatctaaatatgcatttgcattgtatttctttctgtttacacacacacgacattacctatagagggaaaaaggtatctcctatgctttggctgtgttctttcttctatttcttagccattccacaaataaaagagataaactggtacataaatttagcaaagtttgaggtctacagggatttaaaaaaatctattttggtctgcagaccaaatactgtattcttctattttgacatgtttgagacattgactatcacaaagcactaaaatattactacttcctgattttctatcatgtacaaaataaaatgaactatgaatctgaaggctaaagtttcatttcacaaaaattgcacttgacattttttatacttcttactacaattttctctattttttataaagtagaaaacttcacacttttgagtttctcttctctagtcatctgagacggtgtctttctctgactagaacttcattatgctatacaactgggcactctgttgatgattagtaataaaagttcattttccccaagattcaaccacaagaaaatggccttagcaggaatatttatcctgacatatgaaaaagcaattcaaagatttaaaatctatctatttggatcttaacacataattgtttagtatcttaaaattacttctttgcattttttctgggtcattgaaaaacattttttttcttttcacttcaggccataaattcttattccctttgctttataatcacatggtaatttcaccatcttgaaactttcatgtatgctaaccaactcaaattatacactttgaataaattttttctattttatgtaatatataaagctatctcagtttgctgtcttcattttcaataaaaaatagattagaatcataatgtgatactttagaattttagcataaatatctgaatcaacagattaagtattattaataaatttatattaaagagatgcaaaaagagtataaaacatactctgagaaatagtaaaacaccccccataaggggaaaaaaaggaaaataaataatgaaagactatataatgccacactttaagtgtttttaaaaagaaaagagatgaccaacaaaagagatgaccagtgtgtattaaggttgacatattaatacatatttttaaaatttaaggacatgtgcaaggttaaaattgaaattttggctgtgacattgtcaaaagtgaattgtaaaaattcatgttgtgaagactgattccaagtttaatttacctcctctaaaatgcagttggtattaaacaatttctcttgtgttactaacataaaaaagacaacatcagatataaatgttcacactagatttaatattaaaatcaaacttacgtctctaagttgtcaccttcaagaactgtctggacaggcaggtaaccaagtcgagggtgtttggcaaagtacttcttcgacctgaacttgttcttaagtacctttgtgaagtctcgtacatcttccccagatgttgtctataaggttgaaaacaattacacttctctcagtaaaatggaaggcaataactatctataacaaaatcagagccgatgtaaattgatgcaattaaatgtcaacagttttggtagttttatgcatttttgaaataaagcagtctcatgaaaacacttggcaataagaactcatcactaaatatatccagtgatatgtttatactttttcattctctgttgaaaataaaccatacctagttcatttccccaatattttaaaacttgggccaaaaagtataattagttttgaaatttttccaaactaatttttccaaactattggctggttcttatcactaaaaaaattttcaatttgctattaatatagtgatgacagagtattgtggttttaaccacaatggttttaaccaagctgtgttaatggaaattagtcatagagccgatgctggctacacacaagccagcatatattctagtggggaaaaaggtaagacaataaataagagagaaagagcagggccacattggtgctctgtttgggaaggaatactgtcaatttctttgtcctttcccaactatgcagacatataattattttacctgaactacatttttaatagtggtataaaatgtcactgttcccttaggtatttctaaatgattagtttgataatcatttagggtgatatggactaacactatcccaaccccacccaccccatcatcctatcccatgaactattgttctccaagccccagttttctactgtatatcacaattctagtttctatttacaatacagatatcaactgtgatccttccgaagatgcatttaaaatatttacattacctgcacagaacttaatgaagcccatgatcctctggctccaacttggctgctcaacctaccactcattatacctcactccctcctcttagagacagaaagagagagagagagagagagaggaggaggaggaggaggaggaggaggaggaggaggcggcggaggaggagaaggggagaaggagagagaaactttcttgtaatcacagacactgaatgataagtatatttgcttacctgctgcctgctccctgtccctgcccttcagcttttccttcacaacatgcatgcccaggactcacagaaacttgttttgcagacagaaactttttttatttttttgagacagagtctcgctctgttgcccaagctggcatgcaatggcacgatctcagctcactgcaacctctgcctcccaagttcagccgattctcgtgcctcagcctcctgagtagctgggactacaggtgcgcaccaccacacccagctaatttttgtatttttagtagacggggtttcaccatgttggccaggctggtctcaaactcctgacctcaagtgattcacctgcctcagattcccaaagtgctgggattacaggtgtgagccactgcacccaaccaaaaattgaaaaaaacaaaaacaaaaaccaaactatttttgaaaacaactaagttctgagttaacccttatatagttttgccactttctatccattccccttctatcaaaacatgtctgcttctagtcaataattaagggaacttttgattctcttggcttgcaaagcagagatgagacatgattaagccgcagctacttatcatttaaaattcatcagtttttacactgacaaaacaaacaacctgcaacaaggtgccagccccatgctatcaccaggctttgccatcagattcacaatgacccatcttttcctgaataactgaatattaactacataatgatctgcagttatatggatatagggcttcccaaatgcaaagcaaaagtgcagaagaaaaaggtattcatgaaaagaaaaagaattcaaggaaaccctgtggagaaaaaagggttgttataagatctgacggtttgagagtattcagctcttaccaggcagaaaaggaaaaaaaaaaaaacaacagattgtagttgggagcaaataaggaaacttttagagaagcaatatctgggtctcagaataaagccaaaaggatatatcatctactataaacgattttcacatcttttgcaatggttatcacaactgcagataatttagtgtagagatatgcttaccctaaatgtcttggtaaggaaggaaaaaaagaagtttccataatagaaatgcataaagaggacccgtgtataagaataagcatttatgacccaatttatttctttgtctgttcttagtacactgttaatatagagaaatacttaataagcaatggactccagcttttacttgggagtaaactccatacctagcaatgtaaaagttttgatctcttaggccagtggttttcaagccatatccaggtcttcaattcacagccctgagtggagtgagtgggtgagaggaaaggccaggtgggcaaggcatcaggccccttacccagtgtgcctcagaaagggtaaggtacagtttacacttcagtggttttcagtgaattcataaagttaaaaaaaatcaccactatctaattacaggtcattttcatcaccccaaagagaaactctgtacccatgacccttcgcctcccacaacccatggcaagcattaatctattttctctatgaatctgcttattctggacatttcatataaacaaattaatataatatatggtcttttatgacttgcttcttttacttagcatcagttcttctagtttatctatatttgagttccaacatgaactcttgcttgtgaaaaaaatgacaaattattcaaaagtgccagttcaattccacagcatacattctttagctaaatattttcaagacatgaaagaccaaagcaaaaccaccaataacaaaaacaacccctttctatcccatgcacaaaataacaaacaactacttgctgtccccaaaagttatagtagttattgaaattagagtttctaataatactcatatttacatgtttttaaaagttagtacacacacagaaatagcttatttttatttccttggggaaaagctagcacaaagagttgtaatctaagagcattaactcattattgccataaactttatgcaatattaaaagaaaaagtgaaaagtaattcatcccaaggaattagggattatattcaggttatcagaatgtaattcttcagctgggatagagccaataaagtgaatttaacccatttttgcaccgaaatgttaaaacatttatatatacttggtccaatttgatttttattatataatagtagtacctaatatttctctattttaaaatgctaaagtaatggtttggtttggaaaaaaagaaaaagaaagaaagaaaaaagagaaccacccacttaccataataaatataatcaaactcaactctgcctttacactaggtataatacatttttcttttttttaaggaaataacttttgatattatgatagaaagataaaattgaaaggaacaatcattactacacaaattacccaacattttaaatgcatttcttggaagattcggtttctgtttatttctgtaagaaaaggagaacagattttgcagatcccattagatcaaacacaagggtaacaggttagcataggaccttgtaccttataaattgttttccttcaatctcatttaaccatcatggcctctgaggagattatcatcaggtttttgaagcctaagtaaactcacactaagcctttgatggactccaaccaagttcagtaaggaaaaaaatgttcttgaaaacttgagcctttttacaagactatgtcactgcttctagaaaaatggaactgttttaagttttgaaagggaaagaatccatagccattgactaaaatatctaatattgcatcctaaatttgtccttcattttaaataatgtactgattagatgccatgtggttggttttctaaaaaattatattaaaatgtcattttataaataggctggatgcagtggctcacacctgtaatgccagcactttgggaggccaaggagggcagattgcttcaactcaggagttcgagaccagcctgggcaacacggcaaaaccccatctctataaaaaaaaatttaaaaaaaaaaaaaaaggaaaaaagctaggcatgacagcacgtgcctgcagtcccagctacttaaaaaagatttaaatggtgtatataacacgtttggtataagtacaactagaaagaaaaataaaatatacatgaaggaataaaaataaaataaaaattgccagctatttgaccatccagagacagccatttgtaaaattttggtgactagactgatttatttttagaattctttttattttaaagtaaaacaaaatatatacacaaaaaagtatggcttaatgaaatattatcagtcagaaaatggaacactgctgcacattcgagaagccgcttccaggcaaaactttcttcccctctccattattaccatcaacttcattttttgaagtagtacataacttgaattatgtttcaaaaatagttttatcactccaatgtctatccttaatttgttttgcttattaaaaaaaaatctgacatattttaaatcacttttaatttacaggtccctcctccacacctgccatttccctacagtttgtctgttggaaaactcaggcaatttgacctgcagagttttccagagtctggattttacagaatgtctatttttggtacagctcagtactttcgtctgtcctcttgataacctcctacaaatctgcaacttgatccagataatgcagcagacttttgtcaagacaattagtggtatttggcagtgttataggaggcacataatagctgtcacctctcttaggtgatcttagcagctgttcatgctaagtgtccgtatccattcattgggaattgcaaaatggtgtcattctatcattcatttttcatttattacttggaatactttgtgatggttaatactgtcaacttgattggattgaaggatgcaaagtactgttcctgggtgtgtctgtgagggtgttgccaaaggagattaatattttagtcagtggactaggagaggcagatacaccctcaaacccggtgggtaccatctaatcagtgggcaccatctaatcacttgccagtatggctagaacaaagcaggcaggagaagatggaagagcagacttgctgagtcttctggccttcatctttttccgtgctggaagcttcctgccctcgaacataaactccaagttcttcaacttttggactgttagaccagtggtttgccaggggctcttgggccttcggccacagactgaaggctgcactgtcggcttctctacttttgaggtttgggtactcaaactggcttccttgctcttcagcttgcagacagcctactgtgggacttcaccttgtgatcatgtgagtcaatactccttaataaactcccattcatatatacatctatcctattagttctgaccctctagacagccctgcctaatacatacttttataaagaaacatcaccatgtctaacatttaggtactctgtggtacagttcatttagaaaagtcaggataaatattttactgtgttgactaattttcagtatcatgaaatggtttcctattattttccaaagatgatcaatgcttttgttcattttaaatatcatgagattttaatgtatttgatgggtttcaatctattgcaattctcattattgaaggtcaagttcagttggcaacttttaatgtgactctaacagtcttcaacagcttccttattagctactattacaagatgttccaagcacaccttttaggccttttcagtgttaacaggctttttctttgcacagagctgggaaatatgcatttgaaggtaaaatttctcttgaagttacattgatgattccaattcaaatttctgatttaacttaacttgttttctaatacacctctatctccttttttcaaaaccaaaaatctggttctcaaggacacaagagatgatagacctagacaatcccataattattcatttgctttttatcatattacgtacacaatagtcttagaacactaataccaatactaccacccacatgattagtgaaaacattaaaatatagatttacttttccattttcctcccattcataaagtagttacactggcatgctttatttgtagtgatataattttgttccttatctctttttcttaaaattcctttatatgagatttggtcttgatacttttgttgctcatttttttggttgtataattaattttcctaaacttttataacaaaatgaggttgaggagagcttttctaacttcacagagattcctcttcttttgcttttgtgtggtatttacaattacagcatgtgtctcaatctattcagtctgctataacagaatactatagactgagtggcttaaataaaacagcagagatttatctctcacagttctggagactggcaagtccaagatcaaaggattggtagatctgtggtccagtgagtctgcttcctgggtcatacacagccgtcttctcactgcgtcctcccatggtggaagggaagagagagctctctggggtcacttttatgaatgtactaatttcatttatgacagctccatcctcatgacctaatcacttccaaggccccatctcctaacactatcacactagggattagatttcaacccatgaatttttgggggacataaacattccattcatagcagtacttgagtttgagacttcctggtcctgttcccccataccctctaccagcacgtaggaacagtttggactaggccttctcctttcatttctgttgccttgagatgctccatattgattctattcccagaagttttgctcagcatgagaccttctttctagaaggaagccctgatgggtccagtctgagagctcacagcaggcaagagcattctagaaatgtcacaccttttttaccctagcctctgcgcatggcaaaacccttccaggtttagctctgctctcaagccagctttccattaaatatctgttgcctattttgggggctatctggttcttaggcaccctcacttccttgtctttcctctcatacaggcagtgatgtcttgtacgttttgtggctggtggtggcttatcgccacctggatttattttggatctctcttgtcatctagtttggttgcaaacattgtacgttttagttttgctgtctagttattctctttacaaatgtctctttataaatgtaactgctttaccaatggaaggaaaatggcaaaggcaaaagacatggaaaaactctgggccaggtgtggtggcccatgcctgtaatcccagcactttggggaggccgaggcgggcggatcacgaggtcaggagatcgagatcatcctggctaacaaggtgaaaccccgtctctactaaaaatgcaaaaattagctgggcgtggtggcacatgcctggaatcccagctactcaggaggctaaggcaggagaatcacttgaacccgggaggcagaggttgcagtgagccaagattgcgccattgcttccagcttggacaacaagagcgaaactccatttcaaaaaaataaataaataaataaataaaaataaaaataaaaaaataaaacaacaacaacaaaaaaactctgatgccatgctaccaccatcttccccagatgcctctggactgattttcaacaagcacataaaaattcacatgtacaaattagggctgtccttgaaattgtcatttttggaaagctaatgacagtgactcactgtgaaaaacattttagaactgaacctacacagataagtgggcatgtgaattctgaaaatgtgctttactccactgtactgctattaagtagccgtaaaacaatgaaaacttacctgtataataagaattaatcaattttttacttgttccccaccaactaatataaatgaataaataaaatatggaaagtatcactgaattataaaatgtaccctgtgatacatctatctgtagcaaaaccctaaagaaaaaccctaaacaaaatcacttttaaggcgaaatcaaataattttttacttttgagattgtattttaccaaccaaaatacagttaggaaattttcaattttcttccattttatccttgacagagaacaaatatagatacatcacatggaacataatttagagttactctatcttttgcttgagtttgtatatctctatatgaatgcatgtgtatccttctatatgtccctgttcatattgcaaactgtataatcttactttatgctgaaatctatgcactactgaacttcaaaagcattaatacatggctgaaagttcccttttcactaatatgtatcacaagaagcagcaaggataaggtatagaagaatctagaatgtagaaaagctaacccccttcccccagtattcataatcaagtgatccttgaataaacggctttactaggtcagctcaaaggactcttattattatccccaaagaccggcaaagcaacacatgaaaggaagctatttacaatgctaccaaataacctaaatcccgtaaataacttctaattaccaaacaatttaaacaaaacaagataaagaaccacaaataaagaaacaaaacaaaacagaaaatatttgttttaattctccccacaacttttttttggggagtcacttcttaacttgagatatcagtattaactaattccttaatgctccaaacagtggatttaaattgttaattacaaatatgaataagttacatacagaggaaaacaaaggcttacaaagaggcaaatcaaggttatataaaaaaagtcacttggcacgcaaacagaataattaaacattatcatttggatcatgcacaagtgctaaaatcattgttgaacagcaccctcattagcaagagttacttcttaaatatagaaaccagtagtcccaactggtacatgcatactgctaagcggtacatttcattatcacaagacttattttaaagatattcttaacaggttttttttttttaactataaaacaacctctcagtttttatttaagtttcaatgatttcaacaagttgaaattcagacacatttgaatgccatggataggatgcaatcagtaagaaaagctcagagactttcaagccctaatgaaaatatatgaagctaaaaaaattagcattagcagaattaccaaggagtcaagaatcagtgggatgataagtcatccaaaataaaatggattttgcccaaacctcaccttaaaagctaatgacaaatctaaatgcactggacctactggtaaaacgatgtaaggagagcaggagctgaaacaccacttcaggatgctgaggtcagagaaacagccgtgatgctgcgttttcagtatattggcaaacaccccacatcacatctgaagagacaagactgccaaaaaacaaactaccctaactcaaggtagagctttccaaagaatgaatcagcatttttaaaatatttgatttttatagtcttacgaagtacattgatgctggcaggggtggaaaggattgatcaaaacaactgcttctagatttttttctttgttcttttcgggtgttttgtgtgtgtgtgtgttttatttttgccaatggcatatagttcataaaaaaaaggcacaatttatcttttaaaacagaaattcgatattttttactagaaaattgtaattcttctcactgaaaatatgattcttctcatggaaaacatgtaattttggtttatttccctacatattaatcaatatcaacaagaatacagttgaacctcttgcttttaaaacaactgtatttgcttaaaacctgcaatataaatctgttttgagtggtattaatttaataagctgtttctcattgaggtatttttttcctgttgttgcctcttctcactaaactcatcaaagttaccagtacaaactagtcctatgtaaagctcagcaactaaactatgacattgacaatgaatctacccttgcaattgaaatgctggaagtagctgatgctgttgacctttcaagctacaaaattttgcaaatatcctgtctcttctccctcagctaacatgtctctcaaactacctttctatcctggctaacctttccttgcttatttcctccttctttccttttactatttcctccattaccttgctctatttcacattttctctccatggatggggttactgtacctcactatatgcatacagcctatctatctacctttctttctccattacagtggattctgtgttcttttacacattaccttacattttgttcataattagtatttcaacctatctccttgaatcaatcccgaagctcccatgataatgccatttcctataacatctttttcatttgtggctgtataatctctttttcataacaaccaagagaaaaggatgtttacacttggcaagggttcaggacacactacctccaaatatggcacattggcagttgagaaaacagcagacgtagcaagatctctctgaccttctcccatccttcttccctaaagggtcataagacccttatttgagaggtgccctccttattcctggagggaagaaacatccttatcactgaaaacagaaggacacagaaaagaatctgaacaaacaggccttgctaagttcgcctagttcattagcattaggtcgtatcttcttattcaatcatacttctacgcaactgtccactcttcatcaaacctaagcataaaaatacacaggcttccgtttctttgggtcttctcttcctgatgaaggcttccatataatgtaaaatttatattaaatcaattcgtatgcttttctcttgttaatctgtcttttgttacaggagcctcaactatgaaactaagatgggaagaagatatttttttcctctcctacacacccttttccccttagcttcatctactaaagccaatgtgcccttcccctctcctttgatggcacaacgccagacagggctatcatctgtcacttcacttctagaaatgcagtgatgaccttctaaaagccatctcatttctagaaccttctatgtcccacttcagtcacacattggggtatggccataccccaggcctcatcataacttaaaaccacttttagtccaaaatctctaacttgaaaaaatctttcactgactggaatcttctgactcttcttctcacttcttatattataaataaacctcttctttccccatcatcttgacgtctagccctttatcccaccttgggatttcttcagcatgaggatacctcaaatcaaccacagtatcattaacaccttggaatttttcactcccttggccttcaaatatacttttcatcttttaattccaaagctgctgagcaatgatggagtcacaaactacaaatccttgtcaattaacctcagctgcactctagtggcaaggtagcaatcagtttactcatctctgtgtgactcaagattgaccctagtagctattctaaacattttccattatccttagtatttaaccctatccacttctctctcactgtcagcaattgtatgaacttttataaatcatgtgaaatttaaagaagaactctccaacttaaagaactatctttggttcagtcattatgaaaaacaatctaaaggttctttaaaaaattaaaaatagaactatcatatcatccagtaatcccacttctgggtacatatccaaagaaaataaaatcattatctccaaaaggtatttatactcctatgtgcactgtagcattattcacaatagccaagatatggaatcaaactaagtatcctacaacagaaaaatggataaagaaaacacagtgaaatatatccagtcataaaaaaagaagggaattctgtcatttgcaataacttagatgagcctggaggacattatactaagtgaaataacccagatacagaaagacaaatactgcatgatctcacttatatgtgggacctttaaaaaaaaaagtcaagctcatagtagcacagagtagaatggtagttaccaggggctggggggtggaggaaaagagaagagactggtcaaagggtataaactttcagttatatgatgaataaattctggagacctaatgtacagcttgtggctacagataatacacttgaaattcactaacagactagatctcatctcaaaaaacaaaaccacacactatcttttatatgctctaacaacatatgaaaatgtttctaatttgaattaaattttggttacttacaacaaagatgattttaaagaagatctgagtagggtaattttcacgatgaaattaaatcatcataaataaaaaagaaatttaaatctgaacatctttaatataagatataactatttatttaaaaaatgataatccctgaattcaaaggtttaatgcatggataatacaaaaaaaaattgactactctcttgattcataagcttaatcattctaaaaaatattacagtcttgttgaatttctccacatagaggtattttttctccttcatgaaattttctctctatttccaactcctagcaaaatgcctggtatgtaaaagggtattcaacaaacataatattccagcaaggatatacacaaacccctattttccaatgtgctaactgcgtgtgtgtgtgtgtatttccctaatggagttaagtcactaaatccataccattaactttgcacaaatcacttaccttctctaagacttagttttttcttcaaaataaagataagttagatgatctcttagagctttaattccagctttaatattctataactagtatttataaagtcagatacgagctcatctggcttttatgaggcaaatttaactaacacagggagaaaagtataaaagtcatcccagtcctcaaggaggtaaaaagataattgagaagacaaaaacaccacagttagaaaatgatacaagggaacatagaatcaaatcctaattggtaaagtagaggctattggcagaggcccctgaactaagtgctttgatgagggtaaaactggaggagctgggagagatttcacacacaaagtgggagttgagctgtttttgtgagaaggtgggatttggacatatggagacagaatgatgacaggcattaaatatcatctgtgtcatgctgtctcttgaagatcaactcttattaagcctaatgaaagaattcttaaatgtacaaatttggattatagaatagtagggggaaataagacaaaaaatcatttcctagagaaataaaaattctgctacatttcttcagataatttatatatacatatataaattatcaatatcataaaatactttcatgagtcatgatagttcattcatataccattagtcttcttacagctaaaggaaaacattaccataaatcataagcagatatattggcaaaatatttagggtgctttgtggatttaaaataaggtttctaaattgcagaaagctcttaaaaatagaaacattcagagtcagctgtaaaggactttgaaaaggaaagagatgaagtcagtaaggtgactggagcatcttcttaactaaaaagggagatgcagtctgaggaatgcaaacatcaaggtccatatgggaaggtctgatccatttaacactcaagtgttgcttattatcactgtaccaaacaaattcacacttgagttcattttctaaggcagacatgaaacgactttaggaaatgttgagtaaaagatggatgaaccataaataaaacttaaaagagtagagcaaatgtaaagaatgtgggtgaacagaaagaaatttcagaaagcaatgatttctgaatacttgcatttatatttttcctgttttctacattgagaatatagtacatctaaaatttgtatttcgaatgagagagaaatatgtccagacttgatacctggtttaggcacaagagtgagcaagcaaaggtttcttcaagctaatggtgacttaattattgcacaaagattacacatgaagggaatgaatataagaacaattccaatagtaaaatggggtccagttggaataggtctgattagtttagttgtaaagagatgcatctttctctgtggcttcagagaatgaatggaaagacattaatgctacaataatagcaatcagatcattcattgctattaaatgcaagtatctttttaaagattcaatttacatatatttctagttattttacaaaaagttgtagggtcaaatgcagaaagtgacctgtcatacagatgatttataagtaggctgttgataagatcactacaaagcctcagaaatgggcaaaggatgtcttgaaaaatgaagctatccttgtataatgcaggataagctgcaatcttggaaatgataaacagtgacttttgaaagactatgcaacaagaacagttttgggtaacttacagatttcatttaaaattggtagttggagagtggaattcatatgtgtatcagtgattcttaagtatgcacctactgcatgacaactgttgaagatatgtgggtttcaaattgtttaggtattttgtaaagccattaagaattattatatgttcaagaccaagaaaaatagtaattttatatatctttactataacaacatatatttactttatgatattttgatactagcattttataatcagttttctaaacttctataatagctattcatgtaaatattactatgatattttcccccaatccaaattccttacaatgatccccagggttctatacaatctgatagttgcctttctttttaattccatctcctactattgtctctcttttgtcaaatttgtcctggtttctttctgttccctggttacacccacctctttcccagcctcagggtgagcttcaaagatattgcacttatgcagttgtacagggccctacaatcagaagggctttgaactattgcacttatgcagttgtacagggccctacaatcagaagggctttgaacttcatttactcctctgatgttgccaactcggaagtcttaataattgttaaacaaggggccccccagtttcattttgcactgggcacttccagttgtgtaaccagtgctcctttccatgcgccccttggggaacaggcttcactttctgcagcccaatcacgctaacctttttcccaactcagaccactatatgttctgtttcttctttctgaaacatgcttctactagttctttacagggctgaatctttctcaaactttggtctcaactcaaatgtcaactcagacaaaccttactgatttctttatctaaaatgtctcttctaatcattctatctcattatccattcatttccttaaaggcacttactgcaatgtataacaaccccatttattcgtttccttgttcattctcacacattcttcctcctaaagggagagtagcaggaagtccacaatcttatctttctgggtatactctgatacactatcagagctgaaattactgacaaggattctctccttgaccaaatttgagttggcctcctgtaagctctgttgtctactgaagccttggcctataaaagctgcaaattttcagcacaaatcattttgtccatccctgtccacccacttctccattaaaagacttaaacaaacatgaacataatttataacagttcaagaccacatccctaggatgacccttaaaaaagggattattaaggcgtctgaccccttaaagcgtctgcctgaaaaacaaactccagactgccaaaagaatttactgttcactctagccaacacctgaagacaggtccctgctcactctttcttagggcatttactggaaagggtttacaatggggaatccttcctctgtccctttgagatgtggatgtatctccaacaactcaggagtgtctttctcaaggatctgaaaaccatttctttgaaatgtaatcatcaggaaggataggacccctgtctcccagtctctctctggaatggtagaatcctaactctgacaattgccagctcacagacacagctggtctgatggaactgatgctgaccaatgctttgtcatttttcacttccttgcctctgctcaagtccctcttttgtttccccagtctattcccttctgaaaacacccagtcacctctgtacaaacagaaatacatgtgcataatcagtatattattgattaaaatctgtccttaccactttaactagtgtctggttttgcttatctttgacaagagggcctgacacctgcaaaatgttcaatattaatttgttgagtgaataagttgataatagtaataaatgatgtctcacaaattttcttggggagatttctttttcctggttaaagctataatgtgatgtgggcacttcctccattataattcagcaatattttctacagatttcctctccatacacagggcacttatttatttgagataagatacctatgagtgtgagatttatatgtgtatattttataagtattacagcctttctgtcaatttatgatccaaaaaagtaactcaattccctaaaccaaagaaaatagacagcttgatgaatacatttgggcattatttggaaggaagtaaaagaatagctattaatagaacatgaggataacttcaggaaaaaatagctgtaaatcaaaggaaaaacaagaacttatgtccaatactggtggggcttagtaaaattgaaactttaacaaagtgtgataataatgtaaattgggataaacctattttgaaaaaaacgttgacatcaagtattttgaccataaaaaatacccatattcattgactgaaataacctacttatagtgctttattctattgcaatgtagtttacataatatctggaatgagctaccctcacaaagatacttgtaagagtgttatttataacatcagaaaattgaaaataaactatatgtccaaatttcagggaatggttaggtaaactgtagtaattcactcaattaaaaattttgtgactaaaaaaaattacactgtgtgacgaaatggaatgtcgagtgaaaaatatcagggaaaaagatacataaatataaatataaatagaatcttaaaaccagagatatggaaaaattagaaggtagtttattcaggagctagagttaggaactatatttttaatatctccattttctgtattttgctaatatgaatatggtatttaactatgaaagcataaatatgtctaaaagaaacatgatttttcgttacatagtatcattttcagtgtaggtcagtatcagctcttaaaagaatttgctaccaaaaaagtttaaaatcaaaacacagatatttaaaaaagttaatatttttttctgcactaattaattcaacataaatgagtttacttaaaagaaaaaaaaaatcttcaaagtgatattttttcaaaaaagattaagtctaaataaataataaaattttagatactagttaattcaatggcaatgtattaaaaacaaaacagtgggttagtactcacaggtatacaatattccaccattgggtaatgtaatttgtgaccttttgctgttcgacccgaaaagaaacaactctggcagacatcatagttaaaatgcttaaggcttctatacctagagaaaacaaaagaaaatttattggcttgcattactatcatttagtctaaatttgtggtaagaaatttcattcatccgaattaccaaaaaataaaatataaaattttggagttcaagtctctgaaacatgcttctatctgtttatacatgagagggagacaaatatgcatgtcagaagatttcttttaatgtttgaatacgaatggaaaatgataggcaagaaaagaattatatctattaagttgaaacatcaaattttaaaatatcaattataccaccaataagaaatgaattttaaaattccctcacaaagatacagttttcaacaatgagcacttttatatttggtttaaattagtcactagaaaaaaaagaaatcaagaaatactgtgtaacaaaggaaaaactaaataaagccttgatcacaatgcatccttgaatggaaatggtgttttaaaatctctggcgtaagaatgacactgcacattgacttgtacttgcagaatcttatttacaaaagcaaaaccttagacgataagtttctatgggtctgagtggaaaacatcttctccgaaatctgttctgtcagaattgctggtagaactaagaacataaattatacccacatctacagaaaaaaaattaaatgatagaaccaacagaatgaaaatggaagcaaaatttaaaagttgtgtggctgtaaactactaagtactgagtagcttctaaaatgacctgaaaaatcacttgcaaatcaatcttaaggaaatcattctgcatatactacagccagcttacttttgccaaggaggctattggtttgaaacaatcacatacactaacgacatctcttggcttatcagcatggcttgacaggtatgactgacatcttctttctaaatgaaattttgttttctgctgaatactcccttggcagatagccattctctctttttcattggtaacatacccttgtactgttagcacattttagcaatgagccttgagaaaattactgtttcttagcctctcttgctgatgttggtgaccagtgcaataaaaaccaaagttattgggtgggggttctaattggaatttcaagggactgagttagctgggaagaggcatgctgcctcttcctccccactggaaaatggatctgacatccagaagagtcactttgttagcatgaagtgactttgaagatggaagccacatgttagggatgacagtgcatgaaaacagagctaagggcccaggtggtcacagagaacagtcttggattacctaccttcactctgtttacaagaaagaaaactaaagttctaatttatttatgcaactactattaaggaattgtgtatgattctaactgaaacaattcccagcttacaaaacattatgtaaatctaagatttcattaacattttatttggaagtaattagtgaaaaactctagcagtatttataaaagttcggggaaaatgaaatatatatatatatatcttgggtagaagcttgatagaaagacagtctgaatgaagttaagattattctataatagacatattcctctatctttatttctgtacttgtctttccattcattctctgaagccacagagaaagatgcatctctttacaactaaactaatcagacctattccaactggaccccattttactattggaattgttcttatattcattcccttcatgtgtaatctttgtgcaataattaagtcaccattagcttgaagaaacctttgcttgctcactcttgtgcctaaaccaggtatcaagtctggacatatttctctctcattcgaaatacaaattttagatgtactatattctcaatgtagaaaacaggaaaaatataaatgcaagtaaaagtaagacaatatatcacttaccatcttccaattttcaatatcctgacatattttaagttatagctagatttcttaaacaagttgtttgcacatattcgcctatgtattttcctgagccatctttataacgacacggatagaatcctctctaagattcccaatgacttctgattcaaagaatctttctgatgcacttaacacctctaccatcttgctaaagcacactatgcgtctttatttctctgaagaatcctgttctgtcccttattatacctctctctaatcttgccttttactgagcaacatcattgtccaggtttttctggcatttccacttaatggaaatgttcaacaacacactcataggtttagctactatcacactaatgatgttattggtagtaacaaaaagagccaacatttactgaatgcctactctgtgataggaactgccctagatactttcatgtattaactattcctatgaggaaacactcatagaatttgaagttgaagaaactcaggttcaagcaggccaagtatcttattcaaagtctcagcaccaaacaatagatccaggattgaaatccaagtagcctgactccagagctacttctcaatacactatctcctgaatatcctcccataaccttaatctctgacctgctggtcaacttcacatctctatcatagagacatttacaggtcaatttgatagtactagcagaaacttaaacccttgaaatttaacacttcaggttgttcaccctttataattgctctttcatatttttcttattaaatatttcaagttaattcaaaagtagggagaatataataaacatccatgtcccacaactcagttaaatcttaatattctacatagttgcttcaggtcatttttaatttaagaaatgaaactttaaaggtcattcaaatatttaatgtttttagagtattttatcctctccttcactctctacatccatcagatgctgagaaacatggtccctcatggcatctctaggttataccaatggccatatatggcagattttatatatatctatatatggcagtctcttcccaagtcaattaatctggatctttcccatggcttcacattaccgtttatatccagagtaatatttttggtctaataattagtgctttaaatcaattgctcttttcaataccatttaattacttcttaatattaaatctctctctcctaaaaatctaatctgctttttaaaaccatcttgattaagaacacaaactggaaaaccaaagggttctggatttgaatcctaactttgtctctgcacaatcggctgcctggccttgggcaagttgactaatcttggagtcttagttcctttatgtgtaaagtagaggtaatactcccaatcttacagagttattaagaaaagtgactaaaataacaaatataacacctcttagcacattgtctggcataaagtaaacaataaatagcagtgattattagctttgatgactacatctctcatttgaattatcttcccagtagtagactgaccttgccacattccagctattccctctcccatacatctatgtctaccagatactccaaatgtagccattccaagaaccctgctgcatttaaactgtgactttaccattcttcttcttccaacatttgtgctttgacttccactggaagtcatctattaccctagctgtctgccaggctaatgctcactctacttcacactacctacctgtcttttcctcctcttagaatgcatagcagcaaggccctctgacctcacaatactttagtcttcccaactacaccataatgcatgagagaagagaacttttgaattttcatttcttatgttagccatccacagagaatgcaatgatatgcttcgtacaaactattatgctgataaagtcagtcaaatgaaaacaattctgtttaattcaagatactaatactgatacaatatacaacaacaaccaatcccagccctcctgatttgactctccctcagagaatcaccgtattggtacttgatcttctggtacgaataaaagatacacatagggccaggtatggcggctcacgcctgtaatcccagcactttgggaggccaaggaggacagatcacatggtcgggagtttgagaccagcctggccaacatagtggaacccagtctctactaaaaatacaaaaattagctgggtgtggtggcatgcacctgtagtcccagctactcgggaggccgaggcaggggaatcgcgtgaacttgggaggcagaggttgaagtgaaccaagatcgtgccactgcacaccagcttgggtgacagagtgggacttggtctcaaaaaataaataaaaaaagacacacacaaaatcttgaatttccctactgagtaggcttatgttgtttcataatagatttccaaattaaactggggctattttccagattccccccagtagagaaatataatatattcaagaggtcaaatgcatacctatgttaagaggagtggatcaggatgtccaaaaatgtccaccttaggacaaaccacagactctgcactgtcggctttggggtcacaaactgaagagtctgacacactgattacattaaagtatggcatttagcagtgctcctcatgggaagaagtcgggttaatgtacttcacatcaaacttggcagaaataacacaaagtaatttgattacttctcagctggtaattaaacattgcttcctgcttactaagtttgaccccaagacctcagaatatttaccaaattccatcagggttatatatttataatcagccatacagttttcatggatgaatcatttctgtgacctaagtaaacagacattcataaaaatctctggttctgatccaagtagtgtaaatgacaataataatagcaacaataataaaatatgcttcatgtagtagttataaaaagaaatgctacttttagatagatgagacatactgaacataccatttatttagaaagcaaacctccaaatgggaatgaatgggaatggaggatggacgtaccactgagattacacaaaggaaacagaaaatagcctcctccagcactggcacgccttacctgaacccgacaattggacattctttacagatgttgcatttggcctgatgttttgcagtctccgctgctgccactcgatgtaaaactgggagccaaaccatggactgtggttccaaatgcatccaatctataaactctttcacacttatttctggtttattgttattctggtgaaaaaagaaatatattaaaagtgaagaaatgccttcatttaaactgtagctagtgttgttgcttcataatcttctgaaaatttgtgcagaagaggaaactatataactctttccatgtcagttaagtcacaatgctttaaggttcttcaagtcaagaaaattctagaacttatgagtagaaaaagcagaaattgtcacataggaagaagcaaaaaaataccaagacttcaatatactcagattttgaaagaaacaaaagcaaaaacccaaaccactcaatttaaagtcatctttttacataaataattctgtaaaactcatttggccgggtgtggtggctcaagcctgtaatcctagcactttgggaggccgaggcaagcggattgcctgagctcaggagtttgagaccagcctaggcaacacggtgaaaccccgtctctactaaaacacacacacacaaaattagctgggccttgtggcgtgcacctgtagtcccagctactcgggaggctgaggcaggagaatcgcttgaacctgggaggcggaggttgcagtgagccgagatcacgccactgcactccagcctgggcaacagagcaagaatatatctcaaaaaaaaaaaaaaaaatttcatctaagacagtaaaaacttgtgaaagactcaccgataattttacaaacttgaaggccattataaatgctaaataaaagctgtcatttttgtgtgtcctgctctagtcccattatatcatcacacagaaagcatattgctatggatgtactttgcagaatttatcaggataaattacataaaactccccaatccctcttcaattcccaatactaagtaattttcctatgtgcaaagctaaatatctaccaattttatcctcctgttgctgttgaggtcattctgtgaacctacatgtatgactataaatcatatttagaatttgcatttgatattttttgtatttctaaaataagaaaaagggccattataaaatgtaataacccatgacatcaattctcctcaaagacacggtgtgagccttttttttccctagcaatgataaatcactggatatgctttgccaaaatatctgtagacttgtactttatgcatatgtataacatcagtagtaacatttctaaaatgtctttatatgcagtaaacattaaaaagaaatgaaagtgctttctcagtttcaaattagtaacttagatcagtataaaacttcgtacatctttcttttgtatgcatagtctcaaagaaaaaaaactgatactttaataacatctttaatgtatatatattttaaaaatcttgtcttaaaaagaactcaggacattttaattcagttctttagcagatatttattaaagtagttatgatgttcaaggcacaggaaatgtaataatctgaatatttttgtcccccaaaactcatatgttaaaaacctaaccacttaggagatggtacgaggaggtagagcctttaggaaatgattaggtcatgagggtggagccctcttgaatgaggttagtgcccttataaaagaggcccaagatctcagaaataatgccacacatctacaaccatctgatctttgacaaacctgacaaaaacacgcaatgggtaaagaattccctatttaataaatggtgttgggaaaactggctagccatatgcagaaaactgaaacttaaccccttccttacacctcacacaaaaattaactcaagatggattaaagacttaaatgtaagacctaaaaccataaaaatcctagatgaaaacctaggcaataccattcaggacatagtcatgggcaaagacttcatgactaaaacaccaaaagcaatggcaacaaaaggcaaaattgacaaatgggatctaattaaactaaagagcttctgcacagcaaacaaacaaacaaaaaacaaacaaaaacaaaacaacaacaaaaaacacctatcatcagagtgaacaggcaacctacaaaatgggagaaaatttttgcaatctatccatctgacaaagggctaatatccagaatctacagagaacttaaacaaatttacaagaaaaaaataaacaaccccatcaaaaagtgggcaaaggatatgaacagacacttcacaaaagaagacatttatgcagccaacaaacatagaaaaaaagctcatcatcactggtcattagagaaatgcaaatcaaaaccacaatgagataccatctcacaccagttagaatggtgatcattaaaaagtcaggaaacaccagatgctggagaggatgtggagaaataggaatgcttttacactgttggtgggagtgtaaattagttcagccattgtggaagacagcgtggcaattcctcaaggatatagaaccagaaataccatttgacccagaaatcccattactaggtatatacccaaaggattataaatcattctactataaagacacatgcgcacgtatgtttactgaggcactattcacaatagcaaagagttggaaccaacccaaatgcccatcaatgatacactggataaacaaaatgtggcacaaatacaccatggaatactatgtagccataaaaaaggatgagtccatgtcccttgcagggaaatggatgaagctggaaaccatcattctcagcaaactaacacaagaatagaaaaccaaacaccacatgttctcactcataagtgagagttgaacaatgagaacacatggacacagggaggggaacatcacacactggggcctgtcagtgggtgggggactaggggagggatagcattaggggaaacacctaatgtagatgatgggttgatgggtgcagcaaaccaccatggcacatgtatacctatgtaacaaacctgcacgttctgcacatgtaccccagaacttaaagtacaaaacaaacaaacaaaaaaagaggcccaagagagatcattcacttcttctgtcatatgaggaaacagcaagaaaggttgcaatgaaccagaaggtgggccctcagcagatactgaatctgctagcaccttgatcatggacagcctccagaactgtagaaaataaatttctgttgtttaaaagccatccagtttatggtattttgttacagcagcctgaatgaactaagacaggatacaacagtaaaatgatagccgtagtccttgtcttcatggagcttaggttcctagagaagaaacaaacactaagccatgaattatataattcagtgtgtaattataattgcactgagtatgagaaggaagaggtggacgatattaggtgaatataataggaaaatacagcattatctgaagaggtcagagaaagattttcagaggatgtaatagctaaagctaaaatctaaagatcaaataaagattaggtatgagaagggaggtagtgggcaatggggaaggaagaacgtctaaacagcagacacaggtccaaaggcactgctgaggcaggaatcaaggaaataaaacagtgcagctggaaagcggagagcaaggagaggaatggtaggagatgaggccaggaaaagggcaggacaaacagcaatctaatggcacaggttaaagattgtagattttatcaaagaaaaacagcaagtctctttgcaagggttgctattttttgaagcaaatgagccttaggaaataaaatacaccacttgttggatggtacccaaagtcttccagtatttggctccagcccgagttccctattccatgtctcagaacatcctcaaaacccttcgccaacacatcctacacaccagtgatccttcatgcttacctgttggaagcagctgcgaacactaggctcaatattactgcctccaaaagctgctacttcacctagctgccgggggatctggatggcatcatgaagtaacaggcccagctgcctctggtcacacatttctgttggccctgcaacttccttaaagagatctgcaaagagaggcaagaggttaactttcatctgtctaccatgttcttttacttaaaatatatctttggtaatgtggactgaaccatgcagattaaaaaaatttcagaaggacatgaatctgattcgttgtctcctgaattccaatgaccttaatattctgatcttaatattctgcattacatatgatattagattattttaagaagcatgtagttaacccgttcctgcaagaatgggttatgtatacatataaacataaatcatgcatatataatataaatcaataaatgcaaatttcctttttaaaatgatacaataaatgcatatgaattaattttatgatcttcataagaactccccttcttattgagaaagaatgagccaaaacaaagcttccttcatgacttgtcaaaggaatagatgtagttgggtgctgtggtgcatgcctgtaatctcatctactggagagactaaggcaggaggatcacttgagccaggagtttgagaccagtttgggcaacatagcaagaccccaactcaaaaaaaaataaaaaaacacaaaggaataaacgtaccttaaataacaaacctttaaattttaacagatttgtttacaaactttgtgtgttcactcctaaattcaatattctactaaatgtatatatattataacttattttaaagacttttatactcacatctattttatataagaaacactaaaaagtacaagaaggtgtgttttttctcctttgggccagtctcccattccttattagctataaccactatttttgttttacttcatgtaatgaaatacatttaatcaaatttaaaaatttgtgcatattttcatacagtttttaggtttttccattcattaaaaaactgatttgttttataattttcttaattcagtaaaattaaaactcttctattttgtccactcttggtttaccttttattcaccatatacaatactttgaagatcaaaattatatattattttcaacaataaagctaatatcctaagataagttacttttggaagaggaagaaatttcaaatacaaacaatctacttcattatagaaattaatactttttggaaataaattttcaagttctaaaaattcaaaagtacttaaaatctaaatgctcttcatgtgacattttccaagaatagaagaaagtggagtaaatatttattggattctaaaactattttcaaacagtacctgatatcagatcaaaatgcatcattttctctctctctttttttttttgagatggagtgttgctcttgttgcccaggctggagtgcaatggcacgatcttggctcgctgcaacctccacctaccgggttcaagcaattctcctgcctcagcctcctgagtagctgggattacaggcatgcaccaccacacccagctaattttgtatttttagtagagacagggtttctccatgttggtcaggctagtctcgaactcccgatcacagttgatctgccctacatcggcctcccaaagtgctggggattacaggtgtgagccaccgtgcctggtccattctctctttttataaggaatataatgctagatctaacactgtcagtggtgaaatttcaaactgaaccaagctcagtgatattgacacagtaattataatgaagtatggctttaattataagcatacatagggaaagcaaattcaatgaagataaatttgatttttattataattttttcacttagatttggttagagctctacttatttctttccattaaaaacaataagactatcatagacaaaaatatttatccagtagtcttagcatgatgtttattttaaaccagtccctgggaagaggtctgttaagtaaataaaagttgatgcatatgtataataatctttgcagaaaagtgcacattttcagcaagatcaactatgcccaactttcctcttttgaggcatatggctataccactatgccactattaaagtaaaactactcacaaaacataaggacaaaagtgtccttagacattttgacatatttctataaatccttataaaagttcctacaaaagttcacattctcaacattatagtaagatacaaaaagcagtgtcagggtaaaggggcaggtaataagaaagtcataatctaaaaactcaaattctaataaataagcacagaagagatactaatgataatttaaaaggatggtttgaaaatgtgtactttttttttttttttaaggtctcgctttgtcatccaggctggaagtgtggtggtccgaccatggctcattgcagcctccgattcctggggctcaagtgatcctcccaccttagtctcccaagtagctaggactacaggcatgaaccactgtgcctggtctgtaaatgtgtttttgatgaggcaaggaagctagccagctataagcataaaggccagggcactgttagaaactaaacaaggaatattcttaggaaaggaccaagagaagaaggtgttatggggtgaagacactgacattgggcattgtattaataaaatcaatgttcagacagataccaatgatcttgaatggcggccctgccattgcatttgaagagcaaactgtcttgaatattaattctaataaaggaaacaataatgatatcacagaaactggaatcagagtggtgaaggtcctcaaagtaaaaagcaaaataaaaccccaggacattccaaagtctagatatcccagtaaagatttagattaaagattaaaacccaagagatttcatatttaattagttctaaaatggcatacttcctggattcaattaaatatcagaaatttcacggcagagccttctgcttcccctgccaaaatctgaaagttaatgttgaattatccacaatgtaagctttgaggttgaatttgcaaatatttcagagtaagctccacactataactgttactttcagagaaccctaattgtttcagaagcacaagaaaccccaaatcagagatgataaaaaatccatttctaattttgtaacattggtgttttcattaacattttcctttcctgatcattataaaaagataacgttttcagctgttgaaattatatcttttcatgattatgattccaaaaactacttcaattctggataaagtgccacaaagcaaaagtcttgggcaaagctttcttctgcatggctaactaggctctcactccgtcatagcaccttatctcctaatcctacaatcagcttttcattttatataaatccacatttcttttcactgacattcttgtcaaactatgtagaaaaaacaagccatcatggtctagacctgaaattcaaaatccaataacctcacagaaatcccagaaaataaaagcttttaaaatgtatgcatgttgacataagacacaaaacttaactcagtttacagggcctataatcaaacatcctattgttttttagtatctctccattcatggaatatccctaaacctctcccacaaatgtatggatttatctgtaaagaatcatctgggaatatgcatggtgggatcaaattcacattttatggacaaaaataaatcaaaagatatgtgatagtagttaagggtttggggactcagcagcaactgctaccatttattcaacaactgctatttctaggtaccttaaacattactcctaattattctccaagcaggaattattagcttcattttttcagttgaagaaaatttgctaaatttcagcttcttgaactgtaaaattggaatactattacctcttagttggcaatattcaatgaaatcacataacctgcccaaagacactcagctactaagtggtagagatttgaagacaggtctccttggctcctgaacacaagtcttttccaaagccaatatacctttcattaactgacaggtaaaggaacactgttgatttatttgataaatccaaatataataaaaatttaaaaatcatgttttattttgtcacagctgtaaaatatatttatttaggattatcgtctatgactgtaaaggttctagttcatctttttcttttaagcattggaagtataaagaaataaaaaaaagtttaggctttggagtcagaaaaacctagtatctaattctagccccatcccttatcagctctgcagtcttagactagattcttaacctatctcagcattaattttctcagctagaaaatgaaaatctcaaatgcctacattatggagggattattctaagaattaaatgaagtataatttgtagttgggtctcactccatcctggcacctcacctcttagttataatcagctttccatttcacacaaagccccaagtctttgcactgccaccctctgtctaacttggtataggcacagtaagggttaaaaaaagagagagaactattactactaacaaattatataatttaagtttccaataaattgttataatcattattattactaaaaacactgttggtataagaaaggtcttacatacatctgtatttttcttccaagagacctttggagagagacattaatccaatcttcagactctgcactctaatttttccagttcgacccctaaaattataagaatgttaatgtgttagatgcatttaaaaccatatacagcatgttcattgtttctgaatatctattttcttgggggtaaaccatcaaaaataattgtatcttaaagatgcaacttttctattaacttttaacaattaatattaaaccaatactgtaatttcatgacatatattaacagggtgtttggccaaggctagaagaacacacagcttgaagccactttgcacacaacacataaactaagaagaacgaactaaagcaaaatgaaaatgatgattataaagctgaaaagatttcacctttaaaaatattatgaattggctgggcacagtggctcatgcctgtaatcccagcactttgggaggccaaggcaggcggatcacctgaggtcaggagttcgagaccagcctgacgaacatggagaaaccacatctctactaaaaatacaaaattagccaggcgggtggcgcatgcctataatcctagctactcgggaggctgaggcaggagaatcacttgaacttgcgaggcggagattgcagtgagccgagatcgtgccattgcactccagcctgggtgacagagcgagactccatctcaaaaaaaaaaaaaaaaatactatgaattaaacctatacgttaataattgtagatgcaagattcaaaacagctagagctacgcacactatatatatatatgacttcatacaggaagaaaagtctagtgatatatctaaaaacaagaacacagactagaaaattaactatatactaagagcttacaacttgctgaatactaattggtaattaagtattaattaagtataaatattggtatttaagtattcagcaaattataagccctcagtatatagttaattttctgtcaatgcagtttttataaattactattgcaattttaatagtcagtgatcttagacagatgtgaaatccctatttggggaaatatcaaattataattaaaaccagaatgtattaattaatcaacattagaacatagttttacacaatgctaaggatagatcatttctatttcacttataagtcgaccagatgaaacatgtttttttatctttaaaaccaaagagttttcttaatttcattgcttatcaaagaattactgagtaatctaccaaatgttagtcacagtagtcccagtcctagggattggaagataattacaaaaattaataagatattatccttgctatggaataacacatagcccagaaaaaaagcctttattgctatctttattattacacatttaggatccattttcattttaggtttttattgtccattttcttatatgtttttaatacacaagtacagcacacttaaaacctataactaaaagtttacataaatatatgaatgtataaaagttaacaatttgtgctattttaaaaacataaatatttgtatcacgtaactttaattttaagcagtcttcttgccaaactatatttaatcattgattttattgatatttttactacttacactaattgatattcttccattctcaactatatgtactgaaggaagtttctgtacgcatattatgacatataaagtatgcaataaataagaaaggaaatcgtgcttagggattggtgcaatgtattttcaaagtactccctcaataggatagagtttataatttatattaaatcatatctaataaacttactgaacccttagtatgtaggtatatgacattcagaattaacctatgaagtgactaatacttaatattaaaataaacatagcccttctaagcagaatttctaaattaatataatcatttctcacaattacagaaacaccagtttcacattaaccctacagacagccatgctacaaactgtgtttctactttatattttttagaagtttcctaattatcacatgaaacagacaatgtttgcttcctttcaaaagcaggaaatttttactctctggacccagtcagacaatagacttgcagaggataacagaaggctttgtgaacgggctgagacaagtacatgaatgtggctaaggataaagtgatccctacagggaaaaatggtcaaaataatatgcattaaagcatgactcccactttactgtcacaacacaagaaaggaatatcatcaggaagacaactgatgctgtcaatcacccattcatcacaccatcaccagttacaaaggcttactgtgatcctgacattgctctgtgtactgttgggaccaagagaaaagcagaagacatgattcctaccccgatgaactcacacactagctgaggaaggtaagataggaatacaactagaaaacatatgagacaatcctttatgtatggaaatcaaacatcaagtacaagatcattgtggctgcctatcattagtgatttagtctaggtagtcattagtttcacaacatgtgacagagaagataaacccaaaatcagacatagaaggtatgtcatgccatgacagtcccaagtaggagaacatagagtatcacagagaaagcctgagcaaaggcacagaggcaggggtgtgagcatcggagataagacacattcaggcccggcgcggtggctcacgcctgtaatctcagcactttgggaggctgaggcaggtggatcacgaggtcaggaaattgagaccatcctggccaacatggtgaaaccctgtctctactaaacatacaaaaattagctgggcgtggtggcgcgtgcctgtaatcccagctactcgggagactgaggcaggaaaatcgcttgaaccagggagtcagaggttgcagtgagctgacatcatgccactgcactccagcctggcgacagagtgagactctgtctcaaacaaaaacaaaaacaaacaaataagatgcattcaggtgggtcagagacttgcatcaaggttaactggttgactgaactgtacaggttacgtgggaccagacaataaaggacactgatgtaaataagctacatggatgtgagagacaagagggagacagtaaaatatattagtgagtgacatagcccagtgttgacatatttagtctcctgatagttttcataggcaactctttaaactggtttaactataaagacatttactttataaaattataccatctttggaatagtggaacaaatgacactactgcaaatgaggttaatatttttggtagaaaaaaacacatttaaaccaagtactacagactattgctttatatcatgatttaaacacttttgatttccattaaatccagaaggaagattgtgaaattaagaccttttaatctggtaagatgactgaggctgcaaattcataaatgaaatcaattttatctttataaagtactttttacatatattagttcatttgcccttcataatcaccttttgtgtggtaagcagagtggatatttttatttcaatttttcagatgaaaaattaagatgccaatgttaagtagctgccaactcacacagcaaccagaaccaaaaatttgaattcttgtcatccatgacagatgaaaataaattttttttacaaagttcagaatatcaggaggtgggtacatgttaaaattggaaaaaaactgttcacttaaaataaagtactatgtttcctagatatagaaatatagtaagaataatcaaatgattatcaaaagactgaacactagttctttaattatgactaatatgcaataggtagataaattctcctgtctcaacgggcaaggttttcaattagtaaagagaaaagggcagaattaaagatccccaaatccttctactttgagaattctgtgatctgtgtgtgcatcactcattatcaagagctggctgaagctgaaaacaccagttctggctgtatcacatgccaggaaagaaggcagtcacgggtatatgattagtgagtgaatgtcaggacggctgaatgaatagaagtgttagaacaaggtaccattcctcagattcacagatgtatgagtctgtaatgtcctaattggagggtagatagtaatttctatctgattctcaaagaaaattattggttgaaaagagttaataactattatttagattaataaataaatcatggttgttagagaaacctgggcaaccagctctggccgtctgacattactgtcataagaataactgttttttccatagattaatccccaatactctctccaagatagaaagctacactgcatgggcaccattctgatccagcatggtctttgccatctttctttttcatagaagggaggttagtcctgaaagatttttttcctttaaaatgaaaaatgagaaatttcaagatactgtctttctaaatgagaaacagtggcaaattgtagcatttcccacatattcccatttgatggaggcaagtggaactgtgccaacatttaactccctagaatatgaatcacggcatttcacacactgcttcctcccaaccaagtggcactattccctttgggctgtccagtgaaaagagcatatgtgtgcattatgcactgaactgtgtcccctaaaatttacaggttaaggtcctaactcctagtacctcagaatgggactgtatttggagatagggtctttaaagatgtaattaagttaaaatgaggtcattagagtgggtcataatctgatatgactggtgtccttagaggaagaggagatgagcacacatcagacaaggaaaaaccatgtgaagacacagggagaagacgatcatctgcagaccagaaagagtggcttccataaagactcaacccagccgacaccttcatctcacactctcagtgtctagaactgttaggaaataaatttctcttgttgaagccattcagtctatcattctttgttatggcagccccagaaaaccaaaacagtgtgtcagagccatggacaatataaggcaactgaacctcttctccagttcttccttaaaatgtagttcaagatgtatacctctaccatattctataggactgaatggagttcctaagtattctatgaatttagcaattttcctgggatgtaaaagttaagttacaggttttgtagttaaaacacctttgaccaactattttggtgaatttactatgaaaaagcatcttctgaggattcaaattattgaagagcaacttaatggtggattaaggctaatggtaatattttaccctaggagaacttaaaatgtgcattaaaatgaaatgtattaaaaaatatcagacagagatatcgcaaatcccgtattcattatggtaactgagactcatgcttcagcaggtttcttaagagccctcaagcacacagtggctgattatttagaaagactttgttatgatatttatgaacactaaaagataaaatacttctctaattaaaaaaaatcgagagaggaggacagggaaagtttcattaattggtacaaaagtacatataggtagggggaataagttctagtgttctatagcactgtagggtgaatatagtaaacaataatttatttcacaggttcaaaagatagaacagaggattctgaatgtttccaacataaagaagtaataaatatttcaggtgatggatattttaacttccctgatttgatctttacaaactgtatacatgtattgaaatatcactgtgtacctcataaatatgtacagttattacatgtaaactaaaaggaatagaaaaaaaatccagatttttagtcagctcattgctaaagctactgtcatcattatttacttcctatacagaaccaatcagctcctgaatgtgtgcatttatgaatgatcatctatcttatttatctctaaatcaaaggttggtaaatagaagttttcatgtagctaattaatagataataactttttgggcatgagaggcaaaacaacagttctagttttcttttctttttttttttttgagacagagtcttgcactgtcacccagactggagtggagtggcacgatctcagctcactgcaacctttgcctcctgagttcaagagattctcctgcctcagcctcccaagtagctgagattacaggcacctgccacgatgcctggctaatttttgtatttttagtagagacagggtttcaccacgttggtcaggctggtctcgaactcctaacctcaggtgatccacccacctcggccacccaaagtgctgggattacaggcgggagccaccgtgcccagcccagttctagttttcttatttcatctttgcatactttaacctcccaccagaacaatgagtaattcctaatgtttcagaaatgtcagcccacagcaggtctttctagaactgactatttcacaaatgtactgtcgtattcaaaagggccaaattaatggcaaatgagttatgctgggagttgagagtgtgctttatgaacagtgagtacctaattaaatgacagatattaaagtgtcctgtagcataaattatttaaaacaccatatatatatatattatatatatatacacacacacataaccactatgcaaataaagcaaatattaaaagactacctcgttcatggccattcaaatcactcttcagttggattacaaagattgtagagcagattattatgagctaataaattactgtaattcataacaataaacagaagattttttattttgaaaaaagaaatactgtgagacattatgaaacaagaagaaagtaggacttagctatattgtttcccctagcattttggcaaagaatactataaatttgacagtctttgtaaattgaagcaacattttaaaatgaaagatgtacattcttttctgttctattgtttgttaagaagctcaatgatttgtaaaatcattcagtttcaacaacaaacataaatatttccactgggaaagtaatttgaaagcacttattaaaaaattcacttaaaaatcagacattttctattaacatatttcattcagtgatcgtattttaatgagaaaaaatataaacttacgtgtcatagacattgagcaaccaattgagacacatatcaacacagagtggaacgttgaccaggtccttatgcatttgctcaagtccatcataagttgttgtcagacagttgatgacatctggaacactgaggagctggtcattttggttcaacttgtgctgtttgaaaatttcatttgttgtactcaactctaagagatccactaaccaggagagaagaaggaatgtttacagtcattacattacattacattacataacaacatcacaacaaaggcatttctagtctcaagtatttagcttgattcttcaatttaagaatctatcctttttagctaaatttcagcttttaaagaaacaaacacatttctattcttacattttaccacactttcatacttttgaatctgaactctgttgcttcccaatcttatctcattttttgctctttggaatattaattattcctactttctttttctggctttccctttgccaggctctttttgcttttaaatgtagcaaggcataaatctctcaatctactccaaatggcagcgcatctcaaatattacactgctctcctcatcttaactcctgcaagcagcctgtgcactgctctcttcattctttgtatcacagccaaactaattgttcttaaacagtcttttatcatgtacatcattacatacaaaatttactgaagatgctccatattaaaaaacaggttttatagaaaaataacagctctccactgcctgctgaatcaagcccgatctataagattgtcacaaactggccctaacctggtttacttccgatgatgctctgacacagaggtgacctgtagctaagaagaagtactagagcagtcagtactctagacacagaggtgacctgtagctaagaagaagtactagacagcccccacatccattggtcttcacaaatttgttcccatccttactcttcatgtgtacaacatctatggtaggcatggctggggctagagccaggagggtgtgcacaggaggtgaaggcagagcccctgctctcaaagacatactgatggctttactaaaaggaggagtaaacatgccctatgagaggaatacgcaaatttctgctagagctactacttctaggagaggaaagacaactggaaaaggctccctggagaggtgcgatttgaaatgggctttgaaaaatggataaaatacaagagatccacatgaagtgaggaaagaattccaggtttagagaagtacttgagaaaaggcaagaattcactcaagcccagaggctctaaggaatggtggactgcagtgtgggtgatgcgtgacttacacacgagtggtgtttgccggcagtgaaacagacaggagaaatgcatggtccaggcacacactgcccaaggggaggcccgcaaaggcccgaaggaggagtttagatgaaaacgacaaatttttttttaatttaatcaattttaagtctttcattcactaactgaaaacaaagagacaaagcagattatcaaactaccatgtatctatctatacatttattgagtgtggagatgactcttctaaatctaaacatctgagtaaggaaaattagagtccacattaatttaaggtctgctcatagacatcagtttttataaaattctttctctgtctctgtatttaaccttttagcataaaaaaattagactagaagaactctaatcttattttttcttattttttaactttttggcattaaaaaaataagaggcaaagagaaaatagttggttatatatacacatatgttatatatttaacttttagcatgaaaaataagaggcaaagagaaaaaataaggttatatacatataaaaccaacttctttctcttcgcctgatgcaaaaactgttctctcaaaaaatatgacatattttgacagttaactaaaatgaacaaatagcttcctttgtatttatccatttgtaaccactgaataactaataattttgaatttttaaagacatgtatgaaatgtgtccatgctagctgtctgagtaacacagaattatttattttttaagttatctacaaattaaaagaactgctttaaacccatacagagtaaaatgatttcaaaaacaactcaacagggaagactttttttttttttaaagagataaacataaaacatacaagtctggataacgaaccaatccatttccttcagatgccaaatgtatcattggtaaacttaagctaataacaaaaataagtcaaataagcttcatatgagttagagaaggtgtcagaaaaaaactaagaaccatctggaattttcactgtaattcttacctcatttctttgccctgtacagttgacgcttgaacagcgccagtttgaactgtgagggtccacctacacgtggagttttttcaattaaagttaagcactgaacgtgcctgcctctcttttctcctctaccctttctgcctctgttacccctgagacagcaacaccaactgctcctcttcttcctccccctcagattaatcaacatgaagtcaacaaggatgaagaccctttatgatgatcacttccaattagtgaatattaaatatattttgtcttttactattttcttaaaattttcttttctctagcttactttgttgtagaataagagtatatattacatagcatatcaaatatgtgttaattgactgttaacatgttaagttttgggtgtcaagggtcaactgtacacagttttcaattgtaaacctctagagggcagaagcaaagtgcctgacaaaggaaagtgtttaataaagggcagtagctagggaactacagctccccacagacaccaaggaacatattcaaatatggccaaaaggctgtaagttttctgaattccaacattaattatgccagtaacacagcactgctattggatccccacatggcatcaggtgacaacagaccaaattccaaaaagcccatttcctgcatcaggctgtccttgcatttctttctgaagtctccctggttatacactctgtagctgtgacactaatttgccacatcccacagactatcatgtcttcaatttttagtgatttactctgacactttgtcttagtgcctaagtcaagcgtaaatcttcctgaagtgtgtcacatttaggtacctttaaagaactgactacatttaaatcacagaaaattatgattaagattttctcatttcaaagggagacaaatgacagctcagtcatgtggtaaatgaaacaaacagcataatcattttctatccaactttctgactttttctttaatcccacatacaaggcacaggggatggaatagaaatgcatcatcattctcctgttctgcaaaacaatgaacactgttaagcatccaatcttgggcttcagtgacacttctccaggtgtcaagctatgtggccattctttatttttttattttattattattattattattattattagcatttcccctatcttctcttccccagaaatataggcagagctcaaggtttcacatctggcatttcattctgtgagcctgaggccctcactcactcctcttacttctattattgcttctctttggatggctccagattctcttttctcctgctgatctcctgcctcaacacttgacccatgtcccattgctctgatccctacaagagctatataattctctttcaggaacctctccccataaaggcctggccttcttgtcatgatgaaatccagtctgcaaaccgtgaaatatcctaacatccttccttcttctacctgccacaatttaccaactacccaataccccgagtcatcagttcttcctcaggcagccttaaaaatccagaccctgatctcccctcctacaactcccagccagctcagctttgatcatccttcacctgaactatttacccattctctgttctctgccctttggtctttcttagatattccctaaagcatacttccacttctggccctatctctaaactcccacaatacagaaaatgcctcatggctccccattctataacgaaaaatatccaaacatgaaatacaacacaataagaacttgaggaaaaaaaccgaaaggaatttcaggaaaaatatgacgttcaaattgacctaaattaactttaaggaaatttctggatattggacaaaatagctaagctattccattcagactctataacttaatgttccttgaacaccatctacaccttaattctcacacagataactccttcccttcttatccccaattaactgccccatgcctaaatcccaggtgccttttatagcctggctcatatgcccactaatcaaggaagcctgccttcttcttcataatgagaggactctccccctcctcggaacatacttcccttttgcttttctgctattacctatcacataaagtttcaaaatcaaaatacaaaggaaaacagaaaatacatatgtgtggtctaaaagaaaataatagaacaaatacccattagtccatcacacagctgaaaaaaacagaatgttaccactatcttggaagctccttgaatcctgcctaattacatcctcttacaattatggggtaaccattaacctttgtatttcactttcagtttttaaaagtgtatatagcattagttttgcatgggtttgaactacatataaatggaacagagtggtacacattttttttctgccatttaattttttcatttaattttatagttctaagattaaatcatgttgatgctgattactagctcattgatttttgttgctgtattatatttataaatatgccaaaactgaatgagttttactatgaaaagtactgctataaatctccttggacacatcttctggagtactgctatataaccttcaaactcaaatcattcactcagtgtgtcctaagcaacccctgctctgtgccagaaattgtatgaggtcctaagtagagacgaacacagactcatccatcccatgatggagaagcaaacaataactaataaacagaatattaaaaattaccattgacactctgccttagtgcctaaaccaagcaccagaagtgtcatgtaaggaaaagaacagttctatgaggagccatagaaaacctcattaaaagagaggtgatcgacaacattgagacctacaggaatgagtgtcccagccaagggaagaacagaaggattaagttggtgcaaaagtaattgaggtttttgccattacttttaatgaaataccctaacttacttttaacggcaaaaactgcaattatttttgcatcaacctatacaaagagctaagacaagtgctttttaggcaggaggaatggaatacagagtttgccatttctatcactaagtggatgatgaaatggtgatgccccggtggagcagagggaaggaggtggacagagaggtgagccaggcaaagaccattccattctgagggcagcaggaatcttttgtaagcagggcattgggtccatgtgcaacgttctcgaaatatgagttccttcagtgtgagaatcaagtctctttatagtgttttatctcctgcacaatcttggagcccaacaaatgaatgaacaatgacactgccctctgccttatgctgggtggagatttgcacataatgagagacagccatgacctaaagtagttcacagtggagatggggcaatccaccaaacattattcgagcacacaaaggcaagcacttgtcactaaggtgagagaacctgctattacaggcaatcataaactactgggaaaaaatgtggagacgggtaggattagcttgtaaatgtttccaaaagaggtaaatctttaacagtatttgggaggaaaaaagggttacaagccagtgcagagaaagggtcagggtatttctagtaaactgaaaggaagggagaggaagaagcagattaataataaactgatgagctccaggagtggcccagaggccttggctggagggcagtgggagaaggctgtaggaaaagtgaaggtcagttggctctgaaaaaagcacctcatatacttgaaatccaatacaatctagcccttttctaactgtcatttagttgtttaattgtcattaccaatctcgtttagtttagaagttggagaagcgtcccttctgttcctctcaggtttgaggggaagagctgaggagggggtttttttcttcaggaatccaaagaaccaagagaagaaaacaccaaatgtgttaatatgcttatccacccataagtgttgtcgaaaactgggaccatgttcataatgacaaaaagcagtcttctgtcaatggaaattttgtggctgagtcatttgtcctcattttatagctcatcaggcctgagaagaacttccagacccatcaactggatcctggatgtgcagctgagcctctttcaaaactgctgtcaccatggactcctgcgcagaccaaacatcccttttgtgtgttcgtaatttacttcctattctcttttcgctcaacatactgatcagtagccagagcgtggtggctttcttttctttgtccgggtaattctgcaacacttgctgcaactactaccacctgctaattatctttgaggctctgtggattatgcaaaagtcaaggtcatctcattcttccttgcattgcctcatctggaggtgtctttcagccctgtagacttctcttccatacatagcttaagcttttcctattttcaagctttgcattgctattttttctcaatgacattatacctctctttcctcaattcttcgtgcagccagcttaaaatttattgctaacttctattgactttcaaggagcagatttttcaaccttaacatatcatttttcaaagcataattttcaaagcatcactgaactgcctagacgtatattaacagttaacaaaaggtagcaaagaagaatacttgaaacttttcaatttaccctatcttaaaagaacaggtaaatatcactttccacatcaactatctgacaaggcctagggtagactcaatcattagaactacaaccacaaatagaatccagatagcataaatctatatgctaagtattcacactgctacttaattttaggttattttgcgggaggaaatatccttttgatgaaaggactgccacagaattccactctgaacacatcctccacaggaaaaatgcattgataatactaaatgtctcaagatatatttaaaagaaaatagagccttttatctcacttgttaaggtgccagttcaaatttagatcaggaatgtgattttttagtgtttctttatatatagtggtattgagacaaactggaactctacattgccaaatgggcaaaaggtactgaaaacacatgacttaatactttctttgatttaatccttttaaattgggtggcagcacaatttttgaaaaagctttttacattactcctgtgttttggttaattttgttctccaagtaagaatggcatgtgttcagtactgcacactgatggggcaagtaataaaacatttatagaaacaaaaccaactccttgagtgaggtacactgaagaccagattaacttggcaaacactccatcctcttcatttatcttcctcttggaaaaaaaaaaaacgcaattcaagtaacagattgattaactttggtagaataactcacaacatagtgctttttgtagtcttcggattttgattgctgtacggtaggcagaaaaacgtacattattcaggtcagctgaaatagaaaaagaaacaatttgaagataggcttattattgaatatatattgaatgcccagaatgtatttggttactttggatgatgaaaaaatattatgtttgcctgaaataaaaagtcttctcccaaattccccaacacgtatttaagaaaaaagttaaatgatcattagcaccatgttgagatacatctcaaagcagtgctacagagaaaattctaagaaagtattttcaacaggtgtcagggctcagaacatggtgggttgagtactttgaaatgaaggagactggaaggcctcagtagtaaggtctctctgacctctgggtctcttgtctcctgaccctctttctccttccaaagtgataaatagaaaccagaattccccttccccaaggtgggtcatgaaaactagaacttctcttccccaaagcaagccataaaatctagcaagttcactgtcaccttctcccttctctcctgaagattctcctgtgacaggtatcctgtccctagaggaaaggaatatgctgcagggagaagccaagaagaatctgaatagataggccttgctggaattcccttctcagtctattatcattaaattataccctttcatccaatcacaattcaatgcagtcatccattcctcactcaatctaagtgtaaaaacagacacttttccctgttttctttgagtcttctgaaggttctcatgtcaggtaaaactttgattaagtaaatttcttgtgcttttctggttgacctgtcttttgttataggagggtcaccatgacccttatgatgggtgagaaaaggtaccacccctttcagccctttggtaggaaaaagaggaaggtgatgaagagaaagcacagctgtcacatggcttattaaatgcactgcacagtaggcagagggcccttcctttttttcccaataaaggagattttcctccaggggcatcttccccaaggacacttcattttcttccaaccacactgtccagttcactattcatggagctcatcttatttctatgctcctcccatcctgattgatttggttttcctgcccttttgcagatctggttcaaatgatcctacaaccaatactcaactctttggaaacaatagatattgtaatttctttctttgtcccctaaagacagagtatcagagattagtagagttaaaagaaaactcagatatcatcaaaatttgccccctcattttacaaactaagcaaaccagttctatgtcttttgtttgtccaacttttgcaggccccttcacccaccaaaaaaaaaaacactcacacagaagcccaacatttaaagagattaaaaaagggggcatcctttttattgaaatgggagagggaggcttcgggtgctgtttttccctccagcatctccttagctacccaaagagaaaacttaaaaaaaccgctggaccaaccagaggaagtaggttaaacaataagttgaaagccacattgcactagaaattaaaacaaaaccggaattctcgtctgtgttttcttgcatttttatataaaaatgaatttagcttttaacaatttagacaaatttaaactaggtgagctaatttgatggcacgtactaaataaaaagtgagccaaaagcaaatttaaggcagtggattaaagttggctatattgtaattgtatatctatatatattttttgcgtgcaaagctgaaggttaagatgactcaatacgaaggaggtaaaaactacaattacattcctccctgtaaatcaactctttttggctcacatgatttcaaaccacacaattctcctaagaaaggcaatacctgtttactgcattgcccttagaaatttaactacttttaaatgtcaatgacatgattcttttaacattaatatgccatgtaagaaaggctggtgattagctcctatttaacaatatacagttctcggccgggcacagtggctcacgggagcactttgggaggccgaggcgggtggattgcctgagctcaggagttcgagaccagcctgggcaacacagtaaaaccctgtctctattaaaatacgaaaaattagctgggagtggcggcgggcgcctgtagtcccagctactcaggagcctaaggcaggagaattgcttgaatccgggaggcagaggttgcagtgagccgagatcatgccactgcactccagcctgggcaacagcgagaatccaccttaaaaaaaaaaaaaaaaaaaaaaaaaaaaaaaaaaaaaccggttctcagttgtttaggttaatttattactattaataacacttaccaagggattgaaagagttcggtcattttaggatggtcccaacaggtggtctgtgtttgatggctggaaaaaaaaggtaaaattttaaaaataaacaaaaaatcaaaaaacttcatataggccaaaaacgaaatacccaagtagaaatgatttttttcaaatttttaaaaatacatgcaaaattatcctcattatcaaccattcagaaacccaatgcccaattgttacttaacatttgaaacattggccaggggcagtggctcttcctgtaatcccagcactttgggaggccgaggcaggtggatcacttgaggtcaggagattgagacaagcctggccaatatgatgaaatcccatcgctactaaaaatacaaaaattagccaggtatggtggtgggtgcctgtagtcctagctactcaggagggtgaggcatgagaattgcttgaagctgggaggtggaggttgcagtgagccgagatcgtttcactgcactgtagcctgggtgacagagtgagacactgtctcaaaaaaataaaaaatattaataataaattttagccaggtgtggtgcctcacatctataatcccaacactttgggagcctgaggtgggagcccaggagtttgagaccagcttggcaacatagcgagacctcatctctatacaaaagttttttataaaaattttttaataataaatttcatttgagcaactacattgtaaaaacacaaatgaaatctttgctttgcctatttcaaacagaactgaaactacaaattaaaacctagatataaaatgtgactgtcatgaacccttcggtcctggcttgatgtggccagatcaatgcaggctccagaataaacccatatctgttaaacagatgtagattatcattcagaacgaatcctccaacagcagaagtagtgctgtgggagtcactacaccttaaaagtctcgtcatatttccaaagattgcagaaacaagtttaactctgaataacatcatcccacaatctacagagcctccctcctcttctaccttgagtcgaactttcctcagtgcaaatctaccctttcttctcttcatgtgtatctggattccccactcccctcaggcaagtgtctcttgccacttagactctgtgttcctcttctcagcttcctctcattaaccagtattattattttctatatgtattaaattgttttcctcatgttcttcactttaaaagcaagttttatactttctctttttctgtaaatttcaaaactaattcatatgttagatggaagttttggggtaataaattgaggttaaaacataaatggaatgcttcaattaagtttcttaggtaaacagttcatgactttggtgggtcagtggccttacatttaaaaagagttaactgccccttatctaggtcagggtagattcataacatttaatagtgctccaaagacttcttaaatgacacctagttcttataaaactatttagtaaactaaatgaaccagcatagtacctaagagagtgatattacaacattcataaaatcaaattcaagagaaattatttttcaagcctatgtaatatatcaaaaactggggcatgtcactgggaaaagaatatcatcactgttatatatacacaggtaacaaaaaccccaaataactcatacttacctttgaaaaatatttaaagtgtgtatttgcagttgggtacgtatcccggaaatattagcaattgggtatgtatcctggaaattccaagatctcaaacaaaataatgtaactacaatgtgaagatctgtcttggaaagagatggaaagttgtcgggctcctctacccagattcttgactccaatgcagagacaaatacttctacttcatggtccactactgaacaccaacaaaaccattccaccctttcggtttgatggtagtgatactacaaattgctcaaaagaccatggagccgggtactgaagttgtttgacctaaattcttactattcatcattaggctcagagctttacagaaatgcagagtctcaaaaagaatttcctccctattaccaacaaatatggaaggatttgctgaggaggtaatgcaattccagtaaggcatcatgggctcccagtctgagagaacctactagggttcattgatctcttgtcttctctttcagggaatttcaatccccacgacaacagtactgtccagagacagacatcccatcatgatggagcaaaccaaggctcaagaaccaaactaaagccatcggtaatgtagagccagacgttatacttaaacaacaaatatgctttctctggaattacaggtgtgggtcttcacctcacacaacccctacggaatcacaagaggaaaataccactatttctcagtcaggcggaggactaagaattcaaggtgaacacctcttgctaatggctctttttagtgaaaccactactgagagctgacggaacacacacatttggcaaacagatggagggagggaacgggcatctccctttgtgaattcaataccagttgattcattaggcagaactgccaacacagaaaataaatacagcctctggttacaaaagtataactgctgcttaccaaacaacagaaataaaaaaaacaggcaatgcagttggctgctgttttttttttaagtcgggggagagggttaaagcaaaatccacaatgaacccaaaggcttaaagtatttgaacagctgcagatagctcagctcctcttgccaaaatgcctgaagttctcccagagtaggcaaccaaaacagaataaaagtagcattttcccccaaaataacaacagcttgggttctaattaatctcaaatatgaacagggagtgggacttcatattgtgcagcttgataagctctaaaataaaattatgattttattactaaaaatcctctctttaaaaggcaacagccatgggaatctatccaagaataaaattaaaaaaaaaaaaacaaaacaaaacaaaaaacaaagtagcaattaacagttaagtacaaaatcatatgaagcaaacaatagtgagaacatgtgacatgtaactaggctggccagccatccagttttgcctgtgcagggaaaaattgtgaaggtctttgttgtgggcaaaaaatgagtgggtatcctgcaaagcttaaattatctctgagctattttaaactctgcaaactgaagaaaacagatagtaatgcaaatgatttctgtccatataaatgcaaattgtgcccagtggaatgcaattgattattgtcctgtggatattgaccagtttgtcagctttgcatccagaggtaaattcattttagcatccctaatctcactataaatatgtgacattttgtattctctttggaacctattataacttcttactggttcccttactatgagttaaatgaaacatgctctttttgtatttgtataagagttaagatttttgcctattttgaaaactatccttcaagcagtataaatcctgctttatactagactgtatacaggaattacatatcagcatcctggtataattattaaaagtgcccccttactctgaagagccccagctgggataacatataatctctgcattttatggacattattaaaatattaagccaataaggttaagaagtagtatatccttccacctatctattattattcataacaatataacactgataagccacagaaagtaaaacacaaataatataagactgtagcaccaacaaataaaacaaaaaaagttgtgctgcaatactgcctaacatgtaacacaatgaaccaacagcaaaggacatgcacttttgataggctggtaaaatcttgatttctgggcaaatgactgctctgtggaagatacttcttaaacccatttgtcctcattagagtggtctcatatttttccatgaaaccttaaaggatgatcagaaggcaacttgtttctccaaaaactaacacttacccaaatatacttatttgttactagctatccaattttatgcttataactggattttgtgaggtttgttatatatcattccattccaattataattataaaggcatataacagaacaaaactaaagataagtaaaaatacaaatgtggggacaagaactatgtatattgctctgagataagacaatcaaagaaaaaaatatttcttctttgctgtgcaaagtaaaatatactaggtcaggatgtatattaatcacagtaataacatgctatttgagtgctcgatttgtaccaagtaaacttttttggataaactttttctatgtgtaaattctatttggattacaattctatgacttgggtgacaatattgtctccatcttacagatggaaaaaactagggcagagagtgcttagatagcttgtctgaggtcctatagtaagtaatagaaatgggatttaaacagagatagtctcattttaagctaagctcttgatatggaagtatatttgcataattaaggttttaaaatatttcttgatgaatctgtccaaatttgagtccatggtctatcattagaatcattacaaataacctcatctcccttgcttctctctcaccccttgcaaatcccaggcctggatcagctcaattacttgcctactctggacctgagcagctgtggataaaaacaactggagaaaatcactcaacagacagactcaatttactttaaaatatgtgatttcaaacctcaaatgtccaactcctggcaactgcactatattccctaataaacttgctttcccaaactccaaaacagaaattcactactgctatctctctccccaaactggtttatttctctgccttaatatcattttactttatctcacgcttcattgaaaacctaaatactactagatgaggactcctttctctctccaccaccaactcaggaaacttccctccaactgccagtctgttatcctatctcccctttaactgagaaattgtcccccttcttattaaaggccaattcttcccaatgatttcttaaaaatttcctgtgctgcactgtcaacccctctctcaagaagactatcctttgtagaatataaatgtttacagacgtgccatccttaaacacacacacacacacacccctacctcaaatctacattttctgctagttatcaccttttttctctccttcacaggcaaaattcaccaatgagtactgtaccatatctacttcctcgtgtcccattcaccactccagccacttctgtttggcttccaacttttctcctgcactcaaactggtcctataattattagcaatgaactccatggtgccaagtggagtggccatgcctcaggatggggaaaaataagagacgacaaacactgtaagtaagttatacagtgtattagaaggtgggaggtactatgagaaaaccagaagtctccagaaaaggaagttgacacaggcaaaatacaggttctgttaacatttactttatgtacacttatagaagttacatatatatagcaatcaagcacgagctcccaactaatcgattttgcattcaactgcctaaagtatgaagagtgaaaacaaatgttggcaatctgatatgacaacatttatttgagtaacaccttcttaaagatctgagaggtggtgtacttactttggaatttataatcttttcagtccttgtttcacccaagactagaatataggaagaatgtggagtacccccatcagtaacattgattctcactctgtgcacgtgcttgtgtgtgtgtgggtgtgggtgtgggtgtgtgtgtgtctgtgtggaaaagcccctggggagaggatggaggtagtgggtgagaaagctgcaggaataacttatatattcctcaggttatattcaacttcctcatccactcgcaaacactgtctactgtcctctaagcttttaaaggcaggaaatccaaagatatacttttagaaacaaaaattaacttaagagaaaagaagcgtggaggtcagaatttcaagaaaaaaaaaattctgtccaaaattcaaataagatatatgatcctatttgataataggtactgcaaaagtttagagtcttccttaaaaaatgccattagtatctcatgataatgaagacaggaggcaggaagacaacattgtaaataatgaataattccgtaggatttgactataaaatgcatttaagctgggcacagtggctcatgtctgtaatcccagcatttggggaggccaaagcaggaggactgcttcaggtcaggagtttgagaccagcctgggcaacatagcaagactccatctctaaaaaaagtccaattagctgggcatggtggcatgtacctgtagtcccagctactcaggaggctgaggcaggaggttcacttgaggccaggagtataagactgcaatgagccatggttgcaccactgcactctggcctgggcaacagagtgagaccctgtctctgaaacaaaatacacttaaagtaatttcacactcaagagtagatttaaagatacaaacatggaaaggactatatagaaataggctaccataccatacaccccaaaatataagatgtcaatattgcatgtatgactactagaacatttgttacaaaacaataagacaaagtttatttgtgtttgtttttaaataaagtagtagaattaatgatcaaaactgatgtgtctacgtgcgaggggagggacaggtgataattgtcttgagggtactaaattgcttggaaatataaacatgcaaatactcagtaaacccaggggatctgctagcttgataatatttctacatgagcccagaattcatagggaaccccacctcccacccaaccctaccctcatctccgtgactctcaaactggggagattcagaccatcagccaaattcctgtaggtcatttgttgttgcattggccctggggagccttgtatgcccccatctgaaggtgttaacaccaggactatgttcccacaacagttgaggggatcattgtatcctttaagtttgcttttaaaagctggatttgtagcttttagctttttattaaaaaaaattactactttatctctttcttttatgtatttttaaaagaagggattaattacttctatttttttctatatggttatatgaaatcttttactgtattattttactttataatcagcatatttctatttattttacaattttaaacattattacttctgtacttttgctaattgcaatggcagttttaaaaatttaatctttataaagtatagatatcttttttcctctctaaatggccccacagtgatccttcctacattgtatggtagaactttactaactgcatcccttaccctaaaaatcaaattgcccagtaaggctgatggtgtcactataatgcaatagagttgggtaatctagaagattccaagccaaaatactacttcatggcccaacaatatgtagactaatggcagtgaaggtgatattttaagtccttaactacctaatgtctctcaaagacaatatcaattccacctaaattacctcaattaactaggacaccagtaatacataagatttcttcccagtgacggtttgctggctgctgcagggcaggctttctactgtttagatttttagttagccaaggtatgcttatgctcatttatctgaagcccctccaagcccaggggtttagtgatcctaaggtacttacattctttcataaagcaattttgttcttacctccccatcagcagacttggcccagtgagttttaaatatttattttcagtaaaaacagagtcacagactactagaaagacagactctccagtacattttgcttatgcttctatttcatttacttctttatcattaaaaccaaaaccacaagctccagttcttgaaagagattcaaagtgcggcccaagagttctttacttaaaaaactggaaccaaaaagataccatccctcatcttcacgaaagagggaagggagaaataaagactgctgtagggacccttttggagagagctatgtttatttttcattgttaattatacctttgttacgggtttattctgttctgggataagttttctataaccgttaatgataaaatgctttatgttaattcttcgttgttgctgttacacacactttgttagctttcattttcctgttaggctgagtatttggagattgccttgctgatactcctctctgaccatatttagggaaggactatttcttctgtattgcctaagctggcgcacaattcttctaaagaagtatgcatgaattctctcctctagacggtatatgtagttctgccaagacaagtatatacaatctatgcaaatgaactgtatgactgcgataaagatcaactactcgctccccaagattttacaactattacaaatttcaattcctttcagttactgaaggattagggcaggtagagggtggccttgggaaatgagagtaggtctaaaagagctttgcaggattatcaataatgggcacaagaatggaaaataaaagtataaagagagatgtaacaaattgaggataatcttcatttggatccactcagagggggagttagaacaagggaaagaaatgtaagacagcaaattttatagatatagacaagtttatgctggttaatttcttgcaatattgaggaatgtcagttttagaaaatgtgacatgcatggtatatataaccagagattactaatatgtacataatgaaagctgtgtgttgtgtgatattgtacattgtatttagggttctatgaagaattaacatctgcactgcagactccagtgggaaaaactgagctatagaattgttaaattgtgatggtgacaccttgtcacaagaacagaatagtcatctgtagcaagactaaaggcttactgaaaagtcaacaactcaggctttagagaaggtgttataaggaaaaaggaaaatcttatttcctaactacatcttattaaattctattaaatactgtgacttaccaacaggccggatgtatagagaaccatctgtgtttcaagtcccttaggacttataagccagctttgttggccatcttactcgcagatacttaaatctaccagttgacagaaatcttcagatcatgtgaatggggaaagatagaggaaggccaaagagtgtgtttccccacctcagagttcctctcaaggtccaactggcaagcactgtgggaatgacatcttcctatctatgaaaaagcacctttgtccattaccagaccacagtgtgaaactgctttaaacatctagaaaatagatcctcctgtagaaattagcctatggaaaagcctatacaacggcagtgtggagtactggaaaaagcatgggctttgtccttggacagctggactcagttgctggcacacaggaggtgcatagtaaatggtaaccgtctatggtatgaaagaaaggatgtttgctcatactttctccactactatcctccttcctaaatataatccttcatcctattcaaagtttccatgggactaaaaacttccgtcctctgactcaactaatattggggccaggacacagcaccgcatagtgatcaggagttcaggagctgtagacaatccctgggtttgaacactagctcttctatttaccagctgtgtaatctcaagcaagctgtaagcgtgcttattaattacttttaatgcagttattgataattcattaagacttatgtgtaaatgggggtaattatagtacctatacttcacttggctaatgagagaattaaaagagatcatctatgcacaagattcagcacaacacctggcaaataaatgactgttcaaaaatgtaatttattacaatgatcattattacttcccacagcaactatttatcattattatatgttattattatttctgtggcaaactgagaaatggtgaattttacatggttaatgtgatgcattaagaaagttcaaccgaacccaaagctttcattcctcttattcctcatattccctggaagttgacttttatctgaggaaatgaacaacttgtgcaaaatacataaccaaaaatttacaatgagagatatctggcttttatggcagatttttgtatattgtgaaggcagcaagaaccattttaaattttctttttctctctctctttatttattattattattattattttttaaggagacagagtttcactctgttgcccagactgtagtgcagtggtgtgatcatggctcactgcagtcttgacctcccgggctcaagtgatcctcccacctcagcctcctgactgctgggactataggcgcatgttaccatgcccagctaattttttgtagagatggggttttgtcatgttgctcaggctggtcttgaactcctgggggcaagcaatccacccgcctcagcctcccaagcattaggattataagcatgagccactgcacccggccccattttaaatgttcttaaaccctgaatacaatgagctctcattgcactatactaggaaaaaagaaataactagatcagtttcagaaagtctaccttagaggaagcaaataaaattttcaaatgttaattttaacttaagatattaacaaatagagaggtttatgctatatagactagttttaacttaagatattaacaaatagagggatttatactatatagactagttttaacttaagatatcaacaaatagaggggtttatactatatagactctttcagttcagatttatattctttcattttctacaaacacatgagccatggagccaccgcagtgcacttcaaaatattaataaggaattacctagagagacagaaatgcagtgggaagccatcaaagtgggctttaagtgatctataaaattaaaatatgacataaaaataatttgcccttcctagtctcctttcaactttctggccatattctaacagtgaatacaaagatgatatacttaaacaccaaaaacgttgaatatttctacctgaatattattttttgttagccatatacattctaatttgctccaggaaattctcattgcatggcaatcatgcaaaatttgttttaaacatttttcttctacttttgaagccacgcaaagggaagtgtatattaaaagctttttcattctccatttgcttggttattaatttgggaattaaattttgttttcataacaattcttcacacataaatactggcttttataactctaccttcagaatttgatgttccttcttcatgaggaaataaactgttaaattacacaatgaaagatcctggttaaacaagttttgtgaaaatgggaatttgctatatacaaatgagcacatttctaaaaatttggaagacttaaaagacatttaacactaaaactacatatattttaaacaatctgatcttttactggtgatggagaagatttttttaaatgctacagtcctaaacgttattatttaaaatagtggccatcattatattatatctattttccagtgctggtaatagtgctctagccaatgggaagccaggtaaaactaacttttattctaccaatctgccccataagaactctgccccacaagaacaagaatacaatcctaccagatccttccaaaattataaacattttgaattagagaaattctgatttagacaattctcagtcatatataattaacctaaacatatagaaattcatttttaaaaaagagctaaaattaaggatggactttaaaagtcccaaaccacacagataatcatgatataaacataaagcaagatatttaattttttttatttagtaaaacccaaaaactagatccagtttgcatttttaaaaaaatcagatgataaaagactctaagtcaattcaataaattaattaatttcaattaatttgcgtgaacttcttgatttttttatagtacatgcattaattttctattgctgttacaaaaatgtctccctgggataaaatcaaagttggcagggctgaattccttctctggaggttctaagagagaatcccatttctttgccttttccagcttctagaagctgcctgcatttaaggatcatgtctgcttcctttaccttccaagctagtagctagcattctcaaatctctgcctcccctgccacttttaaaggcccctgggattacattaagcccatcaggataatccagaataatctccctaattaaaggtcagttgatttgcaaccttaattccatttacgaccttaattctcccttgctttgtaacctaacattttcacaggttccagggattatgatgtgagcatctttcaggggttgggagcagttattattttgcctaccacagtacatcagatttatatctaaatttgtaagattaaattcaagtcaatattcaaccaagcaaattaaagttctctaatactattactattattattgttatagtgtacaataaaaatgtaaacagttttaaacattttcagttagataatcacatcttctttcactagagacatgccaacttaaccagcgtctgacctctttccattcttacttgggcaaatttgacaccaatcaattgctttaataccttgttctcaactcagttcacaactcagtgcattgtaggttatacactgataaaaatattaaactcccataagctaatgtaacgtatattgcttattatatttattatatattatgcaaacctgttttttaccctgagcttacatctcagactgtaataaaaaattataagaaaagactatttcaccaacatggacttcacacaacgttttcaggaagtatactggaagagcagattattagcatttgtatagattttggagataccacaccccatgttagaaatgataaaaaggaaacttggcccagagatcttcatctgacttacctgaggtcacacagctaacctgagacagagctgtctcctgacaataagtaagtgttgtcatgattatgatgctgttcgtctgacacataaaatagggtcaactatgactcatcactagagcacgttgtaaattaatatctttactaagttacactccaagggactatagaagtagaattttatcattctgttccatgacaatatatagccctaagccaaggatcaacgcctactaagagcctgtgtaaattatacaaaacttataaaatgtcatataagaagaagaaacagtatgcaagaaggagaaactaactggacaacagaatcaaagaatgatgagcctatgctaataatgcagataacttctataagacaaagaaaaacttgacaatatttcactttttcatgataaatcattatttcttattggtggaataaaatgacaagagtataagacatttttatatggattttcttagaggaagaaaaatggtttagaatttgtacaatttgacaaatatcattatgtcaagagtattttgaaattctgtcatttttctccaattttttttttttttactttttagagactggatcttgctttgttgtccaggctggaatacagtatggccatcatagcttattgtctgtctccaaatatttaaatctctactttaaaatatatcagctaaacacacctatatccctaatctgatacatgaaaaatataattctcatgttaaaagtagtttctttttaatattaactatatcacagtttctttcagataataggactgaattctatttttaaaagttatggggagagaagcctcttaagttatcaataaaacatgattttcttggtatcataaaggagaattaaaatcaacttacttgatgtaatagggcactttattatgtgaaatggatctttgccacggcagctggactgacgctgaggaaacaaagggagattattggaaacgttggaaaccaaaaagccttacaccttaatgcaaaacaactgaacattttatagcaaattcaatgaactgctctggtttctgagctggattcctataattatgagatccactgggccaaacaaaaaatggctttaaggattcatttgaagtaaaacaagaaacaatacaggttcaaggtctaatgccaactaatctaacctgttgataaaaatacttttaaactttcaaatggtgttgcttataaatactacagtttaaaccttagtgccatctggaaactgtactccatatatatttttgataaagctaaaaccaaaattaattttacctggtatatccagattaaaaattagatttttcaagaccgaattttccagatgactaataacattgtttactttgcatcgtagtcacaggagtagctattgagtacagatggcatttaagtaaattcaattctataacatttaaaaagaaggaatttaaaaataggcaaaaagttgtgaagaaccaaggcaatcgtctaggcagaaaaatcccaatttcttactttcatctgaaacatacagagagcccagtctcctacttttgcactagaccttactatgactgagattttatggggtttttaaattgaggtactttttttttttttttttttacaattctagttacttcttacttataaaaaatatattattcctacattaaccaattattttaagacttatttaagaagaatagtacatgtgaatttagtgccataaaagaattttgctaaatgaacaaatataaaaattcaaataatacttggaattttcatactttgcaaatatcatcagatcctcacgtagccagttgtcaccaatactttttttctcaatttcatgtcacattaatatcttacaactattcagcattctaaactttgccaagcattttcaaatatatgttttcggtaaggaagccagcaagatacacgttaaagttccatttgatagatgaggaactaaatgtgtagagataaaataacttgcccaaagagtgacagccagtaaataaacggtcgagctcagatgtgatctcaatttctgaacactagctgagcaattcttctactcaacaattcctcctctctttataaaaggcaagcactctgttctcaatctatgcccaccaaagtataaacagggatgaaaatgaggaagtaggtatgttacatttctcattagagccaacctcatttcagtgttggcaccaggctaataggtcagtttttattttgtgcctaactaaacaggcttcttttataaccatggctgaagtccaagaaatataataaagccaaagattccaagcagcaaaggataacaattattaaatgtattaattgggactttgtttacacttccccactcattttaataattgttttgatttgaataacttctacctccttggattctcagtgttagataatacaaggccatgtatttgacttttacaaaaatgtgtataaatttcacaatatttcacttccaaaagaatatgtgcttgatttccactatgagagtgattgctaggtgaaagtatagcatttcatcaatattaaagataactgatagttagaactgtaaagacagtctcaattattttgtaaattcctctttcatttggtcttggtacatagctttacattttgaaaaactgagctttagaaatctggaatacttaataatctaataagtatacagcaaacctatttacttcatcaacattgatggtatctggactttaaaaatgtgtcctggcatctaggtacacagtatattccaggaaggcgtataccaaagattaactacctaaggtctaaggtttgtgaaacagaaaaactgtatggagttgaggtaggggtgggggcagtgaggagggtgagaggtagagaggtgtagggcaggaaggggcagaaaatgactgattaagattcttgaaattgtaaaagaaaagcccaacctttaactgaggtaaggcagtttatcaagagtgacaaaaacattaagaggaaatataaatgtaatcaatttagttagaagatatagtactttttagctgtttctatggttatagttgcaaaaaaactgtcataattgagaaataagctttgccctaagttttaaagtttacttaaattgaattaaatgaaacaaattgctttcttacatatatttgctaaaggaaatgaaaggaaaggaattaatatttattgaaagcatttgtgtcaagaactgtgctaggtgctttgtgtaattcgatatgccttgtcattgagttctcaaaacaatcagaggaaataggtaatacggtattttaagacaaagaaatcaaccttcagaaattcacaggtctggtaagcgacagaatgaatgtttaaactcaatctggttgactataaatccgacattctttagtatcttcactagtgaatgataaagtagaagctcaaattgtttattgaagatctcaagaatagtccataaatttatcaattccagttgaaaaatattacataaaattctgcataggtggtttggctacatacgcaatactcgaatagcagaaaaactaaatataatcgcagcgagcctaataaatcaaaatcttcccacttaaagatttatggggagtgattttttttactttgaaagttgaaggtgtgttttaaataagcacattttaagcagaaaaattaatttaaaaccttaaaagataaaactgatttctttattatgaaaaagttcataatctttgcctatgacaaagcaatgatgatatgatactatgttagttatcagacattccaatgagaaaccatagctaaagatgagttcatttctgttccaccttgaagacttctcagttgtcattacgttattacaaataataaccattaagcaatattttctttgatgttagtacctccttacaaggatctatctaaataaacatatttatagcaaggaatacggcttcttcaattaaagtgaaagaaaatgctaattcattcaattaatgcgatcagtccagtttattagtacttactagagagaaaatgctgagaggatggtccaaaatctctgtgggcttcctgaagctgtttaaggcgatcatccacagaaacctgcacacatacacatgcaagtcagaggaaataatttgattccgaaacaataactttaataatatttttgctttaaagactataataaatgatgctattgcccaggatatgattgtttatatagaccccttggaccccttctctgtctctggtatcagagtaatggtaaaaaaaaaaaaaaaaaaaaagactccttctgacctcaaataatagtaaacagtgccaggtactcttctaagcaatttatagaaattaacgctttagtcttcacaataactgtaaaggttatttttatcatcatcttacagattaagaaactaaaacacaaagaggtacccaaggatataaagctagtgagtggcaacactcctgttcgtattctggtcatacagtgccagaatctgtgccctaactgttactctgcattgcctctaaggcagtacattgtttgtaaagcctctaaagtcaaaatgtggtcatgggatcagtgaccactcatctctcttttgtaaggaagatggtaaaaagtgttatggggagcaaatgaaaaagaagcctaggaaactagatagttagatagataatagattatatatatatatggggagtgagagagagaaatagacagtacatagatagtggatagttagaaggatagagtgagtgaggtggtagaagataaacagagaatgaaaagacatgtgagtatgcaacatcttattttcctccaaatttgtatctgatcatctctacttcgggttgagatatatatttcagtttgtacaggcatattaatgtactcttcgtattttttttaatatacatttttggttttggttttgttttgtttgtaaagacagagtctcactctgttgcccaggctggagttcagtggcacgattatggcttactgcagcctcgacctcctgggctcatgcaatcctcccaccttagcctcccaggtagctgggactacacgcatgtgcaatcatgccgggttaatttttttttttttttttggtagagacaaggtctcactatgctgcccaggttggacactctacatcttttatccacatctttgtttttgttttatttttaaagacagggtctcactctgttgcccaggctggagtgcggtggcacaaacatagctcactgtaaccttgaactcctagcctcaagtgatcctcccacctcagtctctcaagtagctaagactacagacgcacaccacaccacatatgtaattttttaatttttattttgtagagacaggctcttcctatgttgcccaggctggtctcaaacttctgacctcaagcaaccctctcacctcagcctcacaaaatgttgggattacaggcaagagcccccatgcctagccttttaaaaatacacattctatagttagttctctgcattatgaaaatgtaaagggttactaaactgagaaactaaatgcaaatcaataacaactgcacacagcctactgacatttccatttcctttttctagccttggtcatgtaatgctagttactgttccacttagagggacaatctcatttgcagctgtccttaaatgaaactgtgtatgtctgattccctggacagcactagttcctcctggctagctatttaaattgcattagtatgcactttgttcattaaggcctaaaagccttcaaatgccacactttatgagtaaagaaaatattactcctgcaattcaacagtgttgcccaccagcatagatttttctcttcttttccaaccagcaactaacatctgagctctagaggttaccaggatcatagataaggatgacagaatacatatcttctttcaagtataacatattccccgacttctaatcttcggaaatggtgataacagaaatagaatgggaagtaaatcaagatggaccataagaatcatcacatgaagataatgaattagagaaacagagcagaagaaaaaaaaagaataaagaacaaatatttctatgttccatccactagaaaaacacataaatttaacagattttgctttactaatcctaggttattaacactctttgcaaagactaagattgtaaaatattgtacactaatttcttacttcttcaatttcattaagaaaatatgaaccattgagtgctttgatatttgaattaattcagcaaacctattatagataaaatatatctctcaaatgtttttatgtgctacatcaaaattgcatatttaaataaggtctagagtcattaaaccaactgcattagctaaaatctaagaactaaaggtaaacaccactggtataaatgtgctatctggaaaaaataaggaagatatttaaatagcaaccagttagaagaaaaacaatagagactttcctgatttttcaaaatgaaaaaaaaaatacatgatgaaagtaagaaaaatgactcctttattagccattatgtgaaaaatgtttctgtgacctaccacaggtttcaattactgtgatttatttaaccttttgcaattttctacaaatatcatatgaatagtacatcaaaaaattaaattaaactctataaataaatgaggcctttaggttcaagatactgaaagacaaatacctgatgtcatcacatgctaaattcattatcaaataccatcagcaaagaaagagaaaacggtgagtggtaatatagtgaggtagggtttaaagaccacccaaggtgtaagcctgcattatgaaggggaataagctgatacctgtaaaagtttccatcgcatattaaggtcatctagctggcgagacatctttagagagggatgcaggtcaagtggagacagctgactggataaatcattcaccgttttaactttaaagttgattggtgcaatttcttctctaaatgcctagaagaaaagaacaaaaaatatattattggaaacgaatataacaaaagctaatacagttgatccttaaataacttaggtctgaactgcatgggttcacatatgcacagatttttctcaaccaaacttcctgggtccatttatgcacagatttttttcaaccaaacatatggaaaatacagtatttgcaggatgcgaaacccatatatatatggagagctgacttttcctacatgcaggttccatggggaaatgtgggacttgagtatacatgagttttggtacatgcggggtcctggaattgtacttccaaataaatggcaaggccagctcagaggaaatcaactacagttgcccactcaacaacagctgacttaattcaggtcttcagtaacttggatgaagaaccaaaaagtcattgtttattacccaaaaatataaataaatgtgtgaagagaaaaattataattcaaacttttaaaatgattatgtatttcctttcatgctttctattatatgcagtttactctggaaaatgtatgccattattttccactttactgatatctaatgttgattctatctttagtttgtattcgtgttttctttttattctgttttaacatagctaccttaatattttttcaccaaatgcaacaacttgattttaacatgtttccacttaaaattaaattagaaagtggccagtagaaacaacattcctaaccatgaaaccaatgcctattacagactcaagaggtaagatctatccctgtcaaaatcatttataatcactgtctgtggttagggcttgggcaggaagagtggagtctacagaaaaaaggtaaatgagtcttagaattgacaaatgccacctctgagcaaggtctagaatcattaaaacaacttactaagagcacttagaaattgtaattatgagcatccacattcttgacgttcccagtaaagaatggaagctgcttgggaatagaccctcactattcagcacagaacttgcaatccaagagagacagaattaatttctattgacaaaggcccacaaaaatgatatttgagcaatattaagctaacacagaatggataatggaactgggatattaaaagaaaacagtttaaatttaaattggccacaaaattatagttaataatgtaccaaactaaatttagaagtagtaggtgttgtaaacatcccattagctttgccctcaggtttcctcatttctacattgtccactctttaagtggggaggctctttaagtctctttaagagactagagtcagggtgagaactatgaatgttggaagtttgaagtcaacatgtgtaaagtaagaaatattaccgaaccctgcagctaccaacatttcaaagacagggtagaggaagggatgcatacaaattcatgggaattgcttcagtatggaaggagaagaagagttgagatagttttttttccattgctgcagattcggcattttaatggatgacagaatgtgcacacacagaaaaacacacaaatacaattaaataagaagagcagttgtatggtaatagaggcattataagtgtaaaaaattcacaattaatatagaagcacagggaaggaggaggggtgggttagggtgggcaaagggatttttcagtctgaactttgaaaaggtctgggtctctcagattcagtttgagaacaattacagaattcaaatccttcaaggtttctttagtcaggattttagctatatgcattaatattctctccatgggtaggtaccttggaggactcaagaactgtaattagcttttaaaatcaacatctttttatttttatctattaaagattaaaaatgaaatgccagaaaatgttttgagatgcatataatttcaaataatagcctattttatttcaaaagatagtaaactttaaacaaatagaatataacttcaagacaggctttaaaaatcttttggaacaaaaaagaaattcaaatttttcctctccaaaaataatgtttccctatataagccacaggttaaaacatttaaaaagctttgacaaacaaggtctttggtttttgtttttctttttatggtcaggtgttatatggcaatgaggagtctttctatcaagaaagtttatcttttgtttttgaagagcttccaaattaaggggctcgagataaagcaagttttaaaatggtttcagaactgctgtgtgttctagcataaagaacctatttatcatgttatgactgcactttcctataacagaataaaagactatgtggccttccttgccataaaaacagaacatctgctagtatcaaaggtgctaactggaagtctgttggcaggtgtgactcctaagcccttctcctgccagaaggtgtgtattctgtaaataagaacgattaatgataattttaggcagttaacattatttgattacccccaaggatttcgttttccagttgttttgacatatttaataatatttagcaaaattcagtacttatttttatctgactacactgtcaatgagatttggggtatactttaaaccatctcttatatctcttattgtctaaattttattaacttttttttcaggagatgttctagaatatgggaaccaaaggggaggtaaccataagtctaacatccatagctttgggcaattccttactacaaacagaatttatagctaaactaattcttcattaatatacaataagatacaatttatagatgagagttcccagtaaaagagtgtgcttttgattaaatctctatctccatccaccaatttacaagagataccgagtagagaggaacctggagactataccatatggacacaattctgcaaaatccaggctctgggaatcaatacaaaacaaacaattcagtgtctttaacaaataaactgaaaaggaaaaaggaagagaggggaaatctggggattaaaaatattttttaaaaataggtaaacctaatctacattgtctagagatgcacagttggataaaaaataaaaataaatgtaaattatcataaaagttgcattagttgttatttgggggcagggggttccaatgaaccccaatgagggtcatatggaaagcacctgtcctgactcctgatgggtggggttgcagcggcgttggctttgtaacaatcccttataacaatttatatacgtggctctctttatttgtgttatatttaacaagaaaacatttcttaaaaatccttcaaagacaatgatgctgaccatgattttttcaatgtgatcctgcagcgagtcaatgagtaagtctcccacgggcttccagccattccgcacggactctgcctccttcatgtcagcgtccaggtcatccatagctccctgcaggtctctgagtttctccaatgccttgtccacttgcttttgccaattgctagttacagcatttagactttcccatttttctttgacttcagaagactgtttgcgcatggctttggcaatcttttgggctctctcctcaggagttaattctgtgattaaaaaaaagaaaaagaataatttggatgtctgattatatattcttaatagccaagtgtgagtgttaccatcgttactgagaaatacggagaaaaagtaagaaaaaattactccagggtaaaaattgtccagggtaagaaagaatttctccatacttcatccatgaattctctgctacatttaatcacacactcaaaaggataataaaacagttactgagattaataaattgacccggtttttgaactttaatatatttctaaagccactgaaatgtaagaagataacacaagaaataaaccaatttttctttatcataaattcagttacacaaaatccaaagacactttttcatttcagtattctcaagagaaatggtaagtataattaatgaagaatgactataaattataagcaaaaactctcagaaaataagattaatgtattgtgttcctaaaaataaatactgaagacaaataacataccttagatagtgatcatctctctaaggctgtttagcagtttagttttaataaagggcatcatctgcagcccacagacattttagcaggaagatagcaagatttcaaggaccatcctaagtttgtaatagagcaagggggcttccacaatgcctgaaataaacttagagtttcagataaaaatagcaagcataacacatggacaggccacaggatgtgggctggaacagtccagaggagaagcaaaggatacagacagaaatcaaagtcaagttcaaagccaagggtcagaaatataagagatggggagctggtaaagcaagggcagaggaatgcagtcaacactgaggagaaattctcaagacagcttagaaaggtctccagcatggctccacactcctggggcctcactatcttctacaccttaaaatacctcctttcctatctagctggtttgatggtggtatccaactgtccactgcaaataaagaggcagtgcaattgacataaactgtacattaatttgagacagaaaacacattcttctttgtgataacatctcatctttcagtacacatcacattagcaatttccacttcacctcaaaatgttccaaatcacttggaaaatgatcatcataagatgaacttcaccataaaatgcacagaagcaagctctcctaaactgtaactttcatcctcagtgtaaattggtctgcctgctttatttaaatattatataaaagccaagtcaaaggtgacagaacacatatgtttgtctctctaaatttcaaaaaaattctagacattgatatttagcaaccgcagaactacaagttgtgctgcttaagtggtggaagtctacaggaaacttcagaaatctcttggcagctgaactgaaggaagaagagaaaacatcacaactggtagataggctgaatataccagtacaagataaataaagaacataagtgaattagaggccaggtgtggcagctcatgcctgtaatcccagcactttgggaggctgaggtgggtggatcacctgaggtcaggagttggagaccagcctggccaacatggcgaaaccccatctctactaaaaatataaaaactagccaggtgtgctggtgggtgcctgtaatcccagctactcaggagactgggccaggagaattgcttgaacccaggagatggaggttgcagtgagccgacacagtgccattgcctgggtgccagagttgagactccatctcaaaaaaataaaaataaaaataaaaaaataagtgaattagagaaacaggttcaagtaactgtctaggagcccagagaaaagccctaaaacatgcaacatgtcaggattgcaaaggcttcttgagaaagcagctctctgaaggccagtgtatcattagaaagacaaactttatttaaatccttatacctttaagatatctaggctgggtgcggtagctcacgcctgtaattcctgcactttgggaggccaaggcaggtggattacctgaggtcaggagtttgagaccagcctggccaacatgatgaaaccccgtctctattaaaaatacgaaaaaattagctgggtatggtagcgcatgcctgtagtcccagctgctcagcaggctaaggcagaagaatcgcttgaccccgggaggcagaggttgcagtgagccgataatgtgccactgtactccaggctgggcaacaagagcaaaattccatctcaggaaaaaaaaaagatatctaaaaaatgatgaatatataatacttatattgtatatattttatataaatataaaatgttatgtctaagataaaaaaatcattcttagtctcatgagaggtggtaacttttatgattaaacacctgtgtttgttaataagtcacttgggctttttcaaaaatatatcttaagcattgactactgtaaaaaaagaaatacactactcatttcagaacggacaacttaattatggtaattttcctcagataaagtaaaaactcattctgtcagacattaaataacttggcacagggaggcccatgggttctttgtcttgtgacaaaacatcatctgctgcctctgacgtttttatctttccttaatgtaaaaatttattgattgagcagtccttgtgcagtatttattacataatccccactcaagaagctactcagaagaaaagaaaagctctgtgttcaattcaccatctgtctgccagaaaggaaacatatcaacgaatcacttttgagtcaaaataagagtttcccagtgcagcaacaatctcagctgaatgcatactttaagccaagcacagagcaaagtaaaaaacaaaacaaaaactttctagaagtctgtgaaatacataagaagaagcgacatgtgaaatatgaaggtatgactatttggggtaaaataaataataaataaattcaaacatctaaaaggcagaaaaaaatgaaaaaaagggaaattattgcattcttaaaaaaaaaagtactctcatttgaaaatcaaaggacaaatgttacttgagattttctgaataggtatttgtggtaaatgctaaggaccacctacaagtagaagcagagaatctgcttcaccagtgaagaaccccggtgtcatgttagaaacgaccctcacagtgagggactgagtgagtttttaaggctgataatccaggaaccctcccccaaaaggtagtgatttccctggtcagcgtaaggtctggcatggatagatagatgccaaagctccccaggtggttctaacaggttgtcaggatggaatgtggctagcctattggcatataaattgatttctctggaccatgtagctgaagcttacgggacatttccactccactgggttcttgtgtcaacacagagcacagtcactaaatactggaggccagagagcaaatgaagctcagtgataagagggtaatctaatttgcattgggaaaggcagtaatagaggctaatgctagagacagaggaaacagcaggagaaaaccaaataaatttgctagcaattctgagatcagaagacttttttttcctatgtcactttcctattctctaaagtgtgtgtgtgtgtgtgtgtgtatgtgtgtgtgtgtgtgtgtgtgtgtatgccctgtcactctccattctcctcccttcgggtcttcccattgaactggccaaaatttgagggtagaattatattacgtacatatacactcaactactcagaagaaaatatatatatttatgtataatatacataagtaaaattatgtatatattatacataagtaaaattatgtatatattatacataagtaaaattatgtatatattatacataatttttatatatctatatatttaaaaattttatacacacacacacacacacacacacacacacacatatatatatatatatgtatacaccattttttttttagtcagggtcttgctctgttgccccagctgaagtgcagtagcataagcctggctcacagcatcaaactcctgggctcaagtgatcctcccacctcagctttctgagtagctgggatcacagttatgtgccacagtggccagctaattttttttttttttttttagggatgaggtctcactatgttacccaggctggtctcaaacttctggcctcatgtgatcctcccacctcagtctcccaaagggctaagattacaggcataagccaccgcacctagcctcttacttatacttttatatttatttatattatatatttatgtatcatgtattatgaatattattttatattcatatttcataatttttaaacaccaatttatttattgcattacaaagctatttaagggaccacagataactatcttttagaaagaagaaacaggaagaagacaaaggaagagaggaaaaaggaaagatcaatcctgatgttttctgtcatccaattacctttacttcttcaaatatgcaaattagtggcacagcatttatgccacgctctcctttataccatgaggaagaagactataatacacttccctagaatgcaggtgaaaaaccaaagctggaccaggaacagagactaggatttggaatcagtcctgctcccattttgcccattgcccctaggccagttacttgacctgcccagcccaattttatcaagtgcaaaccctattttctcatgctagaaaaatattttatttcaagagtctattttacctcaattcaattatgtaagaaggttgagcctctgtatatctcaaagaaatcttgatagtagaggaaaaaaaactcttcctttgagtgcttatgcaaagctattttttaaattttaaaaatgaaactatgtttctcccatgaaataatgatagatatttattagaattcgcccagtgttattgtttaataaacatttcccatatgtatggtgtttttttctcaattatgatatcaacatttgtaatctccattgtggcttttctacacttacgttttaaagcccaatgtcaagaatgttttctttccttccatattgattttatagtagccagtctagagattggtatgtcctcagtatataattacttaattgagttggacggaattgaatttttagtgctcctctttattgagaacattcaactttacacttttaagtggacatattttcacttcatttttcttcctccttctcacatctgtgtaaagcacttacaaaaaaactattgtgaaatagaaggatcaaccttacaaagtcatttcaggtatggtaattccaaataccttatttatactatttgcttttttgcatgtatctataatcttattgttttattctaccaaaagacgaaaaggaaatattaaaacaatcaagtaaagaaaaaaattcacaactggcatttttactgttggacaatttggtagaagaaaagattaggagattgcatgccagttccaatactaactagttacataatcctagatatattccttatctctttcaacctcagttaatacatagaaagctactggcacatgtgtggcacacagtaggttcttgaggaaggttactctttcattcctttttactattttataactagctctgggaggcttagatatctgtagagattttcacataagcaaaccaggttgattagccaataagaactcaaaggaaaagacttgacttgctctctctcaatatctctctctctttacccccctcctatttctctctctctttcctcatgaccaaaagatgtttctgattaaaatattgggaaatacattatttcctaattttctgataaagtgattaagatccatttaataactctgaaatgttcaatcagtgtttgagagggccctgaccatttcctactctgtacaataactgatgacaaccactcattatgagccagattacaagtacatcatcaagtgccacggctgattagtgcttctaattatgtccatttaataaattataaggatgacaataacaagaggctactcagagcagattcacctgttaatatgtagcctaaatctttcaatacagatatgataaagatggcatagattcatccatgctgccagtggacttctcaaattctttttttttctttttttaagaaaagagaacctagatatatttagggaacatcaagacctcaaaagtaaacagatttagggactaccttccacaaatagtaaatgcaagttattaagagaggggacacaaatgaaggggaactcagaatacaaaacacgctttggagggagctacatggcaccactgacctgaagtcaatagaggcagaactggagtctaaatacattcaaggtttactcttcttgtgaagtggccaaagtaaataagcccagagttgagtggaggaagaagcaggggccaaccactagacagacgcaactccaaggaaagaagcaggaagagcaaagagaccctggaacagacaaccagggcctcgctaagcaacctgagatctttccattttcttcattcaggaataatccctgaatttcctccaagtagtggcagttttgcgatttattcaagtgaattcctttgggctggacatcaacagatgggtcactgggggcaggcaggtggcaataaaaggaaagaggaaaagctgagaatgtttcaggaggaaaaaaacatctgttttgcctactactgtatcccgagtatctagaacaccccccttgtaaatggtaggcactcaaaacgtacttgttaaatgcataaatcaatctctgtacaatatctttaactagaaaaagaaaataaagaagaaaattctcccctttctctttcaagaatcaaaggacaggagttttagattcaaagtcttttatttcttgccacatgactgcccatctctccccaggctgcttcccagctaaacacagcccctagtgattgatcgagctacagagaagtctggagctttctacccatgctctgccattcttataagttaaatatggcttatgtttatgtactgccaaaataagtgatgagtttaattgaagaggagaattcatgcctttgctaggattatacttcttaaaaaatggcaaaacctctaattcttggaagattccagttttctactaagaacaacaacaatcacaaaacataagtacattataccacgctcaaagagtcttgtatcctccggtcctttatgtttaaatcagaaagtaatgtctcagatgctgattataataaaatacacacgtgtaaacgattgccatctttttatgaggcaaatgtgatttatgaatggctgtaacactgattagagaacataacagatggtaaacaattaattgaaaatgctatgtctatcaaacaaatctttatcatataattcttcatgaagactattgtttatttaaatgagattttattactacagtaggagttagcatgaaaaacattttccaaatttttacccaatcgatgggcttactcagctggctcgttgtattttagaaaagttgaagactagatgcattatattcatacagatattatagaactttaatttgtgaaaaatcacattactgctctgtagttaagaacaccggaaaagaaagtaacattatatttttctgcgctttttcatgcattacaactttactaatctaatttggacttgagaagctaatgaaattattgtcgtggtctataggcctgaaagcaattacttatacttcaaatttttatatgaaaattaaaaagacaaagtctaatattgcctagacaccttctccctcggtgttaggaaatcagtgaactgtttatgattccattatgcagcgtggtatttcagtgaagaaagagcaacaataaagaaaaaagcaaagagttataaacatattcaattactgtgtgaattattttaaaatcgaagaaaatgaaaataaaatgttgtttctattgaatagctacaaatactaattattacggaagtagtttaagatagtacactatggcagttaagagcatcaagttttgtgacataagccttagtttgtattttggctctgtcacatagaagacagtatgcctctaagcctctcagactctcagtttcctcatctgtagaatgggtggtaagtattcacccttcaaggaattattatgagaatgcaattaaacaaggtaggtaagtttcttggcacagtgtgtggcacatggtcagcacctgtgaaattctggcttgttgggaatgtctgcatttactaccatttttcactttccccttcctttatgggattggattcttcctccatttagcatgatattatgaagaaggtctgccaatcctagcagtccctgagtcccatgttactcgggccaagtcaaccagagccctctcctggaatattctggatctaaagaagggtgagcccttcctggtatgaggttgtgagctatacagtcataggaaagctaagaaaatgaaaacctgtacagagaagcagagaagaagacatggagaaaagccttctgggtggtattccagtccctgtggtcagctacgtctctaccgtggctcggttatggaggccaatgccttccccttcatgcctacacttagggaagctgtgtgcctgtcatttacaatgaatgaggctccaattaataaagttgttagtgaggaaaacaaaagccctgggagaaaacacccattagttttactagcccagttacttctattaactaatgtgtaatttgtcctcattttattacatacaagaaaataatgttgtaaccttaagttatatggagaatataaaagtaacttctactaaactatataataatttcaaatcttcactcatttaataactatgaaattgtatttgcataagtttgctaatactggcataaagtggactgacatagtggactgaatatgtcacttataaattcttcgttgtatcacaaaatatatgagattttacagggaagaaaaatagtcttaatacttggctttctaaaatatcaggaaatatttaaaaattaaacagtataccctgagttaaatattacataccatattatgtactaaatatacatagccatctgtcaaaggaccaaagaggaaaacattaacccatacatactttttcatctgaaaaattattattaactattcatcacatatacattcatacacaactatataaagttgtatatgcacatacacacatacacaactatacccactatactcaactatacatgcacaaatagactaaattaagtaatagctgggtttttctatgattattaataaaatatttaaattaagcaaaattgactgctccaggctgaaacagaaatgatattcaggcagcttaaataaaatagtagttgtagtaacagtaattctttaactggaataatttttaaagatgattcctgaggaaactggtggataaataatgcaatctcttttttaatctaaaaatatcacaagaagaggacaggtgttttctccatacatatgtatacaatgaattgtgtaattttctaaacacatttagaggtgagatagcctataaaattgttagcagttttatttagtgattgataccttagctttaaatcataaagtatgtttggtggggggtgcttgtgcatgtgcgtgcctgcctgcctgcatctgtatgtggtatggagagaggaagaccgacagaaggctccaactcccctgtgcagatctgacttttaaactgaactgaaggtaatgaacaggagagaaggcacaaatattccctaattccctctggaggtttgggggtaggggtgggtgaaggctgttgtcttgcacagcttcactgtgcagcagtgtggttcacacaggaattctgatctggtactgagaacagccaggggaggctggcagcacaagggagagaccagaaaacatggatgcaagtttaagaggctctagacattgagatcaaggaggagctaggaagttaggggccagatggccgtcagtgaacacagatagaggagataaaatcgaagggatgagtcaaaagccagccaaaatccagaggttaaggaagtcattgtcatagacgcatagggctctgttcttgcatctacctttcgttagctggatgactttggtcagcaccataatatcttcttggcctttgtgtttttatttttaaaaaaaatcatactgtatgatcggctcaactcattgggatagacaggagaatgaatatgaaagttgcttggaaagtacaaagaacaatgcaaaggatgagagattgttgtactgtgatactttctaacacatacaaactagggattaaaataaaaaaaaaaaacagttcaattgcattaaaaggaaaaagtatacattgacatgatacaaattaaatgaaattaagtatttccatattgctcaaacaaaagtcagggactactgacaaagttgtgaacttggtaaaatttctacaaggattcagataattttagttcagctaaaaatcatatttacttaatagccatttataagcagaaatctgagtagttgagttttccaaagagctacattttacccatttagccctatttttttatggttaccattttggaagaaaatttactaaaatataatataaattcctatgccttctcttaactgatttatattctgtcttcagaaatacacacaccataattcacagcttcagttttcttttactgttgaaagtcccaaagactacctcgttttgttttattttaggattcttgcatatctttttatcatttctttctcctcattgctgtcagacagctggagtcatttcttaccattaatctttgtccctgtcctgtcacttcattttgctacttacccatcactcaccggacatcaagttcatacagtcgcaccagtgtctacagcagaagttaatacctctgagaagtacttcagtggctttcccatgatctaagaaaaggatctgcactatgttttccatacaatctctatcctggctgctcagatcatttttttacactctttcagactctccatcaatgagggtaatcactaaaaaaagagggaagggccaagcttcagacacagacattggaaaacacagtgagagagaccacagggtgccagggaatcatggcagagagctcgggaagggaaagcgtccaggaagacacaaagccccagcagagccggcaggatgaccagcagctgcgtgggcaaatgaggcaagcgttggaaatcaggtcagaggacctacaggcagaaaactgggatgggcaatggggcaaaggcaaggaagaccactacctgcagaatgtagtgaggagcctggctcccagcaaacctcaagagtggagtgaagagaggcacaaggtggggccggatggaaaagctgaggacaaattgctgtgcagccttctgtgccaggtggaggagctcagatcccatggcatgcactacgggcagtttttatctccaggaaacctcatgccaggtttgtgctttaggtttatcattttaggatttatgttaatggagaaatgccaattaagaatatattgaaataggcctagcataagattggtatggaggaaactaatgtggaatggtcaattaatagtgatttttaaatacttaaaaatacatacaacagtataagataattagtaatggaaaaaatttaaaggaactggaagaaaaaaaggcattggagataaaaatcatggaggaaagtgttttctagaatggttacctaaaagaaaagaggtgactccatcttggtatgtccttatagcatggtacacatcacatactcacaaaatgcttattaaatagaaccgaaaaaaatcacttgatttcttcctgatctaacctctccaacattgagtacttcggcatcaaacaggataactaatgttcaaatgcttgctacttctaatagcagatgtacataagtcatggtaaacaacaaaagtataaaagctattatggatagttttcttcgatttatttttaacaagtaaaaccagccattgttatagaaaatagtatcaggaaaggaggcagtatgaaaattgctaatcataaacaaacaacaacaaaaaaaaccataaagttaaattgacatgacttctttttttcttgtccccccaaatgtagtattaaaaacatggagcttaaaacatcctgaatgtcacagtaaaataagaactcaaaaaccagtattttttttttctgtgtatctttctagacattttattagggatttgaaacatgtgtgcccaaatgacttcctcaccaacactatgaatgacgcatgactagaatgttcatgaaacttttttttaaattatacaatatcgttttaacccttaaatgactgaccactgagaagagtccagaataatgtggcgttttagtgatgtaacactttgtactgctttaaagtagctttttataaacttcgcaaagtcctagggaagaaaggagacaagaaaagctgactgaaggtagattttaaattggataagatgagacaagtgaacttcttatttttttccccaagcttaaaaaaacaaaactgtactagcaccttctttcttgttgtatgaagttacaatgttctgcctgactttccaggtcctctgtaggacctttccaggtcctctgaaccattcagcacatacaaccatctcatccccatctgccgtccaggcacaagactctggcaaccaggccaggctgtctactgactccccaaaatacagctgctctttccttatggctgagctgttctgctaaggattctgtccccagcatggccattcctctttcccgaacttaatcacttcctacctgtccatacccctaagactagctcaggaatcaacctctctccactctgaccctcagagtccttctctcctggaatgcccgcatcacttagaatcctcaggacacaactgagtgcatgactacggacacttttacattgcttgctttctcacgctctgtgctagttttgatctcccactaaattgaaacctcaggaacatgcgttatacttctttatccatcttggacagtgctcagctcatgcgtattctttcaaacactatgtaataagcacttactatgtgccagatagtattctaaatattacaaaatacagcagtgaaaaaaaaataaccctctgtcttcaaggagcttacatctacagggagtggaacgaaagggacaataataagagaccaggtcagaaatgtaacatggcaccccctggcatacagtctgtgagccattataagaatctgacttctctgagtcacatgacatgacttatatattcaaatggtccttacagctattgtgttggaaatctctaataagggagcaaaggcagagcaggcagatgagttgaaggaacctgcaatcatccaaggggtagtgggggcttagaccaggaaagcatagtagacgtggtgataaaggatcatattctaggtaccttttgaatgtagtgatgacaggacttgctgacagaatggatttgggtgacaaaaggacaaaggagccaagagcggcccagtggattttagcccgagcaacccagaagacggaggagcatgaggtaagatgcaaagactgatggaagaatggactcagggtgacgggagggggcaggggcttcttgacagatataggaaaggaatttcgtaaatgttgagtgctcattctagaaaagttggggtttatttccatttcatcttaaaaatcaataatccaattactctactgctgataatatcagtttctcccatctacagttattctttatagactcaagattgtgaggaaaagcaagtactgatgagttcaactctttcaaagaattctctacagtttcggcttgtttccttttttgaaaatttttgtgggtacacagtaagtgtatacatatttacggggtacatgagacatctgggctcattttccttgttgttaaatatggtgatggcggccaggggaggggtgagagaggaatcattgttaagcatctagctcataaaaatgttcttgtaataggttgtatatgaagtcagaataataaataaatgaatttctttatacctcttatttactcaggtagtcatgtactcttcatcaaacttttattgagtacctgatatatacaggcattgcataggttataaaatgctcaaaactggattcctcaacttagggcaagtaagaaaattttaacatctgaaaatcaatacaaacaatagctgcatatgttagatatccaacaggactgggctgagacctgagcagttcatttttcctcgatggacctcagttttctcatctgttaagtgaatagccttggactagttcatctctaaggctcttaaccattctaatattgtatatgaaggacataagcaagccttaaaatgttcttttgaaagaacttcaaaagatggaagaagggaaggtagcacatccatgacaagacagttccaaaatcattcaaggaagtagatagtatagattggttatggaactataaaaatggtagtaaaaaatttgttgaaaaatcaggagggcttcaattacaaagttttttttttttttttttttgagatggagtttcactctgtcaccaggctgggttgctatctcagctaactgcaatctctgcctcccgggttcaagcgattcccctgcctcagcctcctgagtagctgggactgcaggcatgcaccaccacacctggctaattttttgtattttagtagagacggggtttcaccgtgttagccaggatggtctccatctcctgacctcatgatccgcctgcctcggcctcccaaagtcctgggattacaagtgtaagccaccgcgtccggccaaaagcagtatgttttccaaatggcagtaatgtacaaggattgtgttccatttgatcaaatgtgctatattcaaaatagccctaagctcagcaaatgatatcttcagagtgcaacatatgtgcacagaaatcacatttgtgtgctttaatcagtagtctcaattatatgcctaattgctgcatgtttgcattcaaggtgatgatccaaagatttttaaaataaatattatgctaggctgggcacggtggctcatggctgtattctcagcacttttggagaccaaaatgggaagatggcttgagcccaggagttcatgaccaacctaggcaacacaatgagattccatctctacaaaaacttttaaaaaagatagtctgtggtagtctcagctactcagtaggctgaggtgggaggattgatcacttgatcctgggacgttgatgtgcagtgggccgtgatttcaccactacactccagcctggacaacagagcaaaaccctgtctcaaaataacataacataacataacataacataacataacataacataacataacataacataacataacataacatgacataaaatgaaacaataaatgtcatgctggaggccaagattttttttcagtatgcaatggaaagtcaagaaagatgtataatcaggggagaaacacgaatatgattacatgataagatttacttatcagtagtagactaaagtggaagagagagaatatatgggcaaatactacgtgttgcacacagatgacagaacaatgcaatgggaccaatgctaccaaaagtagcaacagattctgcctaaaactattctaagtctacacacaaaaggctgagaatgtggaattaatggcagtatgtgtgtgcacatgagtatgtacgtgtgtgtgtatacattttttatatatatatatgtgtatatatatatatgtgtgtatatatatatatatgtgtgtatatatatatatatatatgtatatatatatatatatatatataaaacagagtactcaaaaggaataattcttcaaagatagaaataacaaatataaggctgagtgtagtggcttacgtctgtaatcccagcactttgggaggctgaggcaggcagatcacctgacgccaagagttcaagaccagccttgccaacatggcaaaacctcgtctctactaaaaatatgaaaactagctgggcgtggtggtggacacctgtagtcccagctatatgggaagctgaggtatgagaattgcttgaacctgggaggcagagattgcagtgagccgagatcgcaccactacactccagcctaggtggtagagtgagactctgtctcaaaaaaaaagaaaaagaaaagaaataataattatgagtgatttgtagaccactggatttggtgaaaagtggaagactcaacaatgacttagctttgtaggaggctaactggaaagacagtgttaccaccagcagaaaacaaaaagaaatgctagacaagttaagtgtgctgtgtgtgtgtgtacatgtgtgtatatacacacacacatatatacaactagtttcagagagtcaaaaagattatggtcttgatgggaaatttattcggactgaagaaggttccttgagtaagattcagtaggaaaacggctacctgtccatatgtctgatccagttccagttatagtcaaagaaagcattttctaactatgcttcccttacaagtaataaatgttcatgatttacactgctggacacagcatgaggcaatctttcaggtttgctgttactatgtgaagtgaatgatgaaaaacgattttgaatggcatgtttatttttaaaaatgcatcagaatgattttattgtcagcagtgaaaaatcacaatacagatatatattggacccagaattcattacacattttctcttaagtttactatgtgatatattgctatttgttagtagggtagttactatttcaattttaagctaaagtatataaatgttacaggttatttttaaattaaacaaatgttgtctgcttgtaaaagaaaagtatttggtctctcatttttaaaagtaaccttacatatagatatttaaatattttatatatttactattatattttaataaatgtcttctacttgcaattatttatcacataacatgtttaaatataagaaatatatattttttgctagtaaatttgctagtaaggtagttattatttaaattttaagccaaagtaaataaacacacagggtattatttttaaattaaagaaatgttgtctgcttgtaaaagaaaggactttggtgtgtcattatcaaaagtaatcttacttatagaccttgaaatattttgtatatttattatattttaataactttctactacttgcaattatttatcatgtaacttgtttaaatataatataaatttttatttcttatagaaattacttttatagttacagtacactttttagacaatctattttttctgcagttaatttcctttaaaattgatattgaggtatacaaaaattttattttcttaatttaagaatctagatatctgtgaattaatgacatatttgaataaagtaacacttagaagaaaagatttaaatattagatcctaaaatgctgtaaggaaatttcctacttgattttgggttttttgttctcctagcatgtgtttttatgatgtagtggagaaaccagtctcacctgtttttgattgtaggtttcttcttggctcttcaggggcctcaattggctgatcagccaagaaaactcgggcctggtcgacagcattcaggacagaatattctttctcctttaactcccgtctcagggcctttcaaaagagaagcaaaagttgagtttgtaacctcacgtgttcaccaaattatgggacatcttcaactataccacttctgaccacacttagcaagaaaatgactaatagcaagcatttcagctaagttagaagccaaaatgtaaattttatagatatgaatgaagaaaaatacaaaggaaaaaagataatttctgtaaacgttaagtatacaaaaaaagaaacagctttaaaatattcacttaagggaaattgttacagtgtatttgaatttacacaaaatgtacttttaggattttcactgatgtcagattgataaaatataatagcctttgctaagatacttttttcttgtaagactgactgacaaaaaaattacatccaatgatacagagaaaggtaatttcacaagtagcaataagatcctcagaagggttttacattatttagaatacattaagaaaaaaaaatgaagcgatagaaacaaagtacatacatgaaatcaaaaataaaccaatgagggcacatataaaacagtctccaattatcttaaaatatgttccatctctcatgctgaggcaattactatttttcttttgtgaggtttttcatgcaaatctatgattctcagaatagtttctctttagcacctttgttccttgaagtggagctaaactttcacccctgcacctataaaaacaaccaaactccttcagtgactgctgcaagataagagtaatgaagattttcccaggtgcaattttaacgctgttgccaaatggaatttgttaatgttgttatcctcttaaaattaaacacataaccacctactggctctagtattttgccttcggtgtagttccctggcaacctattatgaaaagtcagacttttattttctaaaatactgaactttcattatatgttagaatgaataaaatctttccttttgaagacaactaaatttttagtagtatttgacatcactatgttgagatgctacagtatttgcaggctagatccttttcttccatagtcaataaaaggtaagaatgaaaaaatctagaaataccagaataattatcttatataaaaatatggatctaagcaacatacacacaaaaaaaccctggtaatgaagctgacagagactaatgggctacattttctatatccagaaaatctcatgatagcctttaggaaatctaaagattcaaggaggatttagcagtaaatcaagagtagagtgcttgattgaataaggccatgaagcatgcacacgccacccgttaccctcctcaagtactactctagaaaccactattactgataattttcctactcgtgtatagaggagataagtcataacatggtaagcatactggaaagtgtgcttggactaaccaaagtgtagcttaaccctcacaggtggggagggatgagaagagctgacaagaactagtgagagacggagtgacaaaaatgctatttttttgtgtgtaagcattgtaaatattattttgatttttaaactatacaattattactttgataaaaaatttaaatgaacgagcaaagtgaaccaaaaaatccacaattaagatatagtgatgtaacacaggatataggataaaataaaactttctctaaaatgcaaaggtacatttatatgtccttcctagatccataaaaccaaagactgacagcgaagcaagcacaaatcaactaaattcacacagcaattatcactgatgagcattaaatgactatgttggtgggtgggggcggggataacaaaccttccatcatctcctatttaacaaacgcagcttgtgaagaaatcgcaggatgtgtgacattcaggaaattaaaaaaaaaaaaagattatatacatctggcacttaaagttttaatatatggaaataaaaagagatacaagaaaaatggaaaaaaaaagatttttaatccaaaaaaatacacatttacaagtcttgagccagttctttaacttagattattatgttgttagagcaagaagctctagaggaataaaaatattcctagcatttacttccataatcacctaaaaatatataataacgacatgaaaaatcatgttacttaaaaaatagtgaaaaccagcaggtaatatagcaaaattattttttttaattttagtggtcaagatatttccaaaatccaaatcaaatcagtaaatatgggagcagtaaacattccttttttttttttttttttgagatggagtcttactctgtcacccaggctggagtgaagtggcataatcttggctcacttgcaacctctgcctctcaggttcaagtgattctcctgcctcagcctcccaagtagctgggattacaggtgcctgccactgcacccagctaatttttctacttttaatagagatgggattttaccatgttggccatggttggccaggctggtctcaaactccagacctcaggtgatccacctgccttggcctcccaagtgctgggattacagctgtgagccaccacacccagcaaggagtagtttgttgggtttttttgtttgtttgttttgttttttgagacagagtctcgctgtgttgcccaggctggagtgcagtggtgcgatctcagctcaccgtaaccttcacctctacctcctgggttcacgccattctcccgcctcagcctcctgagtagctgggactacagggccccatcaccacgtctggctaatttttttgtatttttagtagagatggcatttcactgtgttagccaggatggtctcgatctcctgaccttgtgatccgcccgccttggcctcccaaagtgctgggattataggcatgggccaccacgcctggctcaggagtggtaaagattcttaaaatgctgtgcaaggcctgtgctagatttcttcctggggaaggggaagttccaggaatgtacagatttaatgcaagccactgaagagaagatgaagatcttagaacaggtcttcactctggtttatcaaataggaggaagaattcacacaatggcatttagaatttagcacaaaagatcaaccagaaaacaccaataggcaataatgtggaaagattaaaaactgagagaagacgggacataaaggcaaatgactcagagaaggaagagcagaggcagaactggccctctggaaatataaaactattacggggcatatattttacaggcaaatccagatcttttgttggagaaagaagacaatatgatctgtgcaacttaggtgtacagtaatttctgattaggaattctagactattaatagtccacaaaatgtgcattgtgcaggggtgtggggagggaagagggcaaaggagagatttgtcttggaacttctttttagatttcaaaaattgaaatggaaatatgtacatattggtctatagaaaggatactttggaaaaccaacctatcaacttcctttatggatggaattttatttgtttaacatggagactctcacaatagagtaatctctttggctgtctgtttgctctgcctggaaagctctttccctagatttagccatatcacagattccctcatcctttttaaggctgtctagaaggtgaggcccacccacctaccttattgaatgtagcattccacctttctcatcccctacatttcccattctcattattctgcttaactatctttgtatttcctagacctggcaccttctactatgcaaaagaggtgacatttctatatttcttgtttagtccctctcttagataaaatataagctccactagaccagggactttttctgtttttgttcagcatggtaaacaaagcacccagactaatgccatgtctgggacctagtagagccttgggggatctgtaatgcttcctgggggaggtggtgcgtaaattgagtcttgcagagagggaaaggtactcccagcaaaggaaactaaacactagcagagaatgcaggagtgtcacagtgtgcgccctcagggaactataaaaacttcagtactcagagagcggtagcagctgaagctgaaggtgtgggcggaggtcaggccacaaagaccactgcactgcttcctatgcactgagactcactcaacccaatcatgggctatgggaagccactgacaagttggggggtattgtcagatttttatttttgttttttataatgtatcattgtcaggtctcctggattcattaaaagcaagtctgagtcttagattgtattttgcttcctaaccacattaaactccgtgcttcagaaaacaaaaaaaaaagaaaaagaaatcctctctgcgcagggtgctggctggagaatgtctcgcgaactcctttgatatgccaatgtagggaagtacaggaggcaagcctgggcaggtgggaaccatgccaagtaagtacaaatacagggctctggccctcatgccaatgcaccacccaaatatcctacaaagcagcatacatatgataatttccattcatatcctgttttgtaaatttaattttgttattcaatttgtcctatttcaattatatttaattgtatgtcagaaatagatttaactttcaacagttttatacatataatcatttcacactttaactctctcaattagacataaaagaaaacctgcatttcccaaccacctggtgaacattaatgataagatcattagactccaatgagctgttttgtacacagagctacaaagtggcattcagctttaagttctaatatcacgtgactgatatatgggccaccttaaatgcatataacataatataattggaatttttctgttttaatgagtttatattttcattcaaaacagttctgttccagataataacaacttttggtgaggatgtgaagaaacaggaaccttgatgcttgttggtggaatggtaaaattgcaacctgtattagtccattctcacgctgctagtaaaaacatacctgagactgggtaatttacaaaggaaagagattcaatggactcatagttccccatggctggggaggcctcacaatcattgcagaagacgaaggaagagcaaagggacgtcttacatggcgggaggcaagacagcatgtgctggggaactctcctttataaaaccatcagatcttgtgagacttattccctatcacaaaaacagcatgggaaaaacctgcccccatgatttaattacctcccactgggtccctcccatgacatgcggggattattacaattcagtgagatttgggtggggacacagagccaaaccatatcacagccactctggaaatcagtttggcatgtcctcaaaatgctaaacacagagttgtcaacatgacccagcaattctacacataggtatataccgaagaaaaagaaaaacatgtccacataaacactcatacatgaatgtttatagtagccttattcataatagccaaaagatggacacaacccaaatatccatcaactgctgaatggataaacaaaatgtgatatatccataatacaatgacatcttattcagtaataaaaatgaatgaaatactgatatgtgctataacatggaagaattttaaaatcatgctcattgaaagaagctagacatgaaagggcatagtgtaagattccattaccatgcaatgtcccaaacaggcaagtctagagaggcagaaagtagattactcgttgcttaaggctggggaactggggagggaggggagggataggagtgactgcttatgggtatggatgttctttttggaatataaaaaagttatgggccaggcgcagtggctcatgcctgtaatcccagcactttgggaggctgaggcgggaggatcacaaggtcaggagttcaagaccagcctggccaatatggtgaaaccccatctctactaaaaatataaaaattagccaggcgtggtggcgggtgcctgtagtcccagctacttgggaggctgaggcaggagaatcacttgaactcgggaggcagaggttgcagtgggctgagattgcgccactgcactccaggctgggtgacagagcgagactccatctcaaaaaaaaaaaaaaaaaaaaaaaagttatgaatctagatagcaataatggtgcacaactctgtgaaaatactaaaagcccctgaattgcacactttaaatgggtaaatattatgatacaggaatactatctcaacaaggttattattaaaataaaacaataattctgttttttacacaaaacaattctctaggtaatttgtttcttttttttctttcttttttttttttttttttttgagatggagtctcactctgtcgcccaagctggagtgcagtggcatgatcttggctcactgcaacctctgcctcccgggctcaagcaattctgccgccttagcctcccaagtagctgggattacaggcatgcaccaccatgcctggccaattttttttttacatacgtttttgtagaaacagggtttcaccatgttgcccagggtggttttgaactcctgagcttgggcaatccacccaccttggcctcccaaagtgctgggattacagatgtaagccactgcacccagcctaatttgtttcttttctagtctttatccccaatgcatatgcaaagtaagagctcattctgtgtgttcagtatgtgcaataacaagatggctgctcccacctcagtgtttctagagcacttcctattcctctaacagagcttgtactgtgttaatgtgcatatattttgaccatgcatctgtcccctccattaaattgtgagttcttgcatggtaaggttcaggtcttaatcatctgaaatcctctactgtacctgcctagacatatatagaaagcactcaataaatgcttgagcataataaattatgggagaaatgctctcagaattaaatactatgtatttaatgttacaaaacatgtcagagcaagatataacaaagtcacccaatctgttcatcttaaactgaaataatggatttcagttagttctgtatttttaaattatctactttgcaaattgctggtagtaattttttgatgtaaaactaagtctgtgctattaataagtatttcagtctgcagttggtttttattttagtaatagcaaatatccttttctctttttagataaataaggaactgatctgactgtcatggatggtatggattcactctgtcttcctcattttgtgacattctcacccatgaggtaaccccttagggcatggtttccaaattactgtcagtcattagaattgaagggtgtttccattatcatgactgtgtatcaaacctatataaaacttatagcttaaaacaatgacaattatttttcatgattgtgtgggttggcaatttgacctgttctttggctggtaccacctgggattactagtgaggttatagtcatcctgcagcttggatggggagggcgggacaaaacagcctcactcacatgtctggaaatcatcactgcctattgtctggggtacctcagtttctccctatgtcgtctctaattgctctccaatatggtacctgctagtcacatatgtttatttagtatctgaaatatgactagtacagctgaggaactaaattttaaattttatctaattgtgatttaaatacaaatggttacatatgtctaagggttcctatgttacacagcaaagctctagagtttgcacatcacggtgtcacagtctattgtttgaagcatgtcatgaagccagaacagattcaagagaatggaaaaatgtactttatcttttgatgaaaagagcaaaaatttccctctgcataggagtgtggacacagggaggcatgattcattactataaaaatctaccacacaggatgagtgggagaggatggtgggttgaagatgagggttggtaatattttgtgtaagtggtcagggaaggcatctgaaagacagcgatatttaaaaaaaaaaaccggagggaagtgagggagcaaggcatgagaatatctggcaaaagagcaatctaggcagagaaaatggaaagtgcaaaggctctgaggcaagtgcatgcctagcttagagattggtgctctcagagctgagtgagtgaagaatgagggtgattgcttctgttaaaatgttttctatcaaggaagttagggaaagagtccttgtggttgatgggagagacacctagcaaccacatacttctctatgcagcagatatctggctacttgctggctcaaggcttggccattgagctaaaagtgctcttacatgacaacctgtcacaaagcttatgtattttgcattctacaggttgagcatccctaatctgaaaatcccaaatctgaaatgctccaaaatctgaaacttgagtgctgaaatgattccacacctgatactcttgctttctgatggttcaaatgtatacaaactttagtgcatgaaattatttaagtattgtataaaattaccttcaggctatgtgtctaaggtatatctgaaacaaatgaatttcatgtttacacttggttctcattcacaagatatctcattatggatacacaaatattccaaaatcccaaaaactgaattttgaaacacttctgatcccaagaattttacacaaaggatgctcagcctgtagtagatatgtgaaaagaccttcaattcccctcccagacaaattgtataaagtgaagttttggcctccaagcaatagaccagcatcagttagaataagtaggaagatacaaaataatttcaaaaaggaaaactgaggctggctgtggtggctcataactgtaatcccagcactttgggaggccaaggcaggaggattgcttgaggccagaaatttgacaccagcctgggcaacatagctagaccccgtctcaataacaacaacaaaaattagccaggcattgtggcatgcacctatagtctcagctgctcaggaggctgaggcaggactgcttggctccaggagtttgaggctacagtgagctatgatggtgccactgcattccagcctaggcgacggagcaagacactgtctcaaaacaacaacaacagcaacaaagggaatactgaaatcatgttttagaagtcgcatgctctgaggtgtttagtagaaggagatataatcccaaatacctcaagagtcaaaaataacaactggagagcacaatgattatcttgtgtccaaaagaaaacattcaaattttctcccatccttaggtggcattaaagtatataatagatttttcaacaaagatttccaccaaaataaaaattttaaagtacaaatatatacaatatataaaaatacgttaggcataagagaaggcaaaaatcagctataaactcaatctttgagaaacttatagtataaaggggaagagagaacaatactagcccagaacgtggttaagtgccacaaatctctgaaagaggtacacacggggtaccaaggagcctcattatgaataaatacacagaggagggagggaggtcaaccttctcaaacacacatgagctgtgtgttgaaaaaaaattgtaactagcttagaggtaataaggtggaaagcaactcaagaaaacagatagaataaacacattgaaggtaatgtagtctctcatggcttgtccgattgtgtaccttccacatacttacttaaactaaatgaagccgtgaaatggcagattaatgaagacctgattgtaaatatcagaatgtagctactaaaaatcacagtttccattctcaacagaatgtctaagagcctgaattcactttattgaagacacccttcctcctgtcccacctctccgactccttcgaactcagggtgctctttggatgctactggtgtgcctctgagcaccaggcagccgaataaactgctgcttattcaactttaaatgtctatacagagattcccaattatcctcctttaatggtcttggaacatttctcccacctgctacaacttagtgagaaagacaagagattaaaagataagacggtataaagaagtgattggcgtggcttagggcagaaatacttggaagtcaatcagctgatcttcattttcttcatgagcatggcatcagctcaccataatggctgggttgctgacatcactgaccgagatgggatcctgcaaatcttttaataagaaaacagggtctaagagaattggagggaagaggggaatccctgctaaacccttctctcctaaactagcagttggtcatatggactgagctaagaacagagaaaagcaaacatgtgggtgtgaaataaatcctggggtcaccccccttctttaaatagcaactctttcctaacctttcttcaatctaaagccattatccaaattgtccgtgtatcaagcaccaaactttgctaacatgcacttttcttaaaattttctaaattacaaaattaaaatgatagataaatcagatcctgtcttctgtttaaaaccctcctcccatggcttcctgttgcacttagaataaattctaaacttcctaccaaggtctggaccctccctgctgtctgatgtcatctcctaatacaccctcatttctagcttcaaagtccttatttctgttccgagaacatgccaagctatttcctcctcatggtctttgcaattcagaaggcttttgcttcaaattttctttctttctttctgtttttgagatggagtttcgttcttgttgcccagcgttgagtgcaatggcgccatttcggctcaccacaacctccgcctcctgggttcaagcgattctcctgccttagcctcctgagtagctgggattacaggcaggtgtcaccacgcccagataattttttatatttttagtagagatggggtttctccatggtcaggctggtctcgaattcctgacctcaggtgatccgccttcctcggcctcccaaagtgctatgatcacaggcatgagccactgagcctggccttgcttcaaattttcaatagctctgctctttctcattagattctagcactcagtatatcttttggattaatgaatgagaaaatgaataaactggcataaaagaaaatgtggaacctcaggaggccattgttagaaggggatcaaggaaggaaaacacctgagaaatgggagcatttcatacaaagtaggtctgtggaagaaagcagcatggagcaactctgcagtagaaggaagtagtcttccccttccagcccccatagaagacattattatctcaagacaacatctgtgttgttttgctttcttaacaatctcattgaccctcactggtgaaagtcaaagaaatccacagggctcaccccttttgacccttcagggatccggctccagtgccacctgcaccaccagcatgagctgcagccttccctcacggggatccagcattcaccacactccctcaccatggcctctttgcaaacctgactctggtgccagactgagccctcatggaaggctgaaatttgtgccagagcaggtatagcggaaagccaataaatttttgtatgaatgaaggaggagatgttaaaaatactgttctgtggtaaagtaaaaccagacaaagatttgcagccaaagccttaggtacagtccagtccataccacacaggcacacccttactcatcctgtgctcatgggcccttacttgggtttgtcccttaaattctctgcgtgttaatcatctctctcattttactaacttcactggtgagacagtgaatgaaaagatattttgaaactattcagtgctgtagaataaaaaattactttttttaagagacagggtctcactctgttgcccaagctggtacaccatcaaagctcactgcagccttgaacttccgggctcaagtgatctttctgcctcagcctcttaagtagctaaactacagttgcatgccaccataccaggctaattaatttttttttaaatagggacagagtcttgctatgttgaccaggccagtcttgaactcctggcctcaagtgatcctcctgacttttcctcccaaagtactgggattacaggtgtgagcaccactcccagcccattactattaaaatcatgctaatctaaaattctaccatgtttctcagctcttgtctcagactgaatttctttccaaagcctctattcactcttacttgtagaggaaggttctagccattttacctagagctttggttgaccaatgccagaacaaagccctccgtttgcaggaacatctgaaagtagatgacttaactcttctaagggataaattatttaattatgaaaaaaatgggccaggtgcagtggctcaggctgggcacagtggctcatgcctgtagtaccagcactttgggaggctgaggcgggtggatcatgaggtcaggagttcgagaccagcctgatcaacatggtgaaatccccgtctctactaaaaatacaaaaattagctgggtgtggtggcaggcacctgtaatcccagctacttgggaggctgaggcaggagagtcatttggacccgggaggcggaggttgcagtgagccgagatcgagccattgcagtccagcctgggcaactgggcgagactctgtctcaaaaaaaaaaaaaaaaaaagaaaaaagaaaagaaaaagaaaaagaaaaaaatggaattatgtgattctccaagataaagccaaaatatttcataagcagaaaactgtgttgcaagactcatatcagtttagattcttagaaagcaaagaaataaatgcagcggtttttttgtgaaccggtttcttccagaataaaagggcaaaacaattctctaaggaggtataaatggtcagctagatgacatcacacacactaatttcagacaaatataaatttcttcaactaatgtgtttaacaagccatggagagcttttctcctatccttctaggcatgactaacccaaacatcaaaccagttctcctcttcctctttgtggagagaaccttgactcaggtgtctgatattccaaaactgttttctaaatttctatacatctatgaagtactagtattttactgctaacaatacaaggatcactaataatagaacaaaaatgagaaatcacaggccagggtatggtaaagcttcactttcacacattgctggaggcaaaaaattggtttgatcatttgggaaagtaggctggcaatatatcaaaagtcattactatggtcatattgtgtgaaacaggaatttcacttttgggaatatatcctaagaaaatgatccagaaaagctacgaacacaaaagtgttcattataacattatttatgatttttaaaaaattgaaagaaacttaaatctccaacacctggaatatatttaggttctatgatatggccacaatagaggccattatgcaaccttgaaaagttattgtgataatgaccacatagcaatgtgaagaaataggcatgacatgtatctaagtgaaaaagatgacataaaaactctgcacccaagtaaaactatgcaaaaggtaaatatgcaaaaaggaaataatgcaaaatgaaaagggttgttatggtgataaaattatggccatgtttttattctttatttcataaactctgtaatatgttattattttcataattaaaaattatacttttaagaaaggaatgcccactagaattgagctcatttagcattgaataaattactgctttcaaagaacagcattatgaagaattacaaatgtgtttagaagcccattttttgtatttgtaacaattataaaactttccctttatattttgcttcaatgacttggggctatatttatttataaaatataatgcatgacaacatagtcactgaatgagagactccacatgtttaagcttctccctgcatttgttaagaatctcaactcaactagcattcaaaggtatcaaattcctacaacagagagaagcacaaacactggaagaatctagcaatatccagcacatacagctaaaaaaaaaaaaaagctatattttaaaagctatctcaacaattaaaggtatgccaattcattttcccttaaataaaaatctttcccattcttgagttgaaaatttaggcagtattaagatagagaaaagataacctctgaactgactacaatatcaaggcataaagtgccattgtgttatttaatttgcttacatttcaaatatgtcatgtaactgaaatgatttctagctctcgagacaagattattgcttacacttctatttcagttattacctttattaaacatttggctatttaaagtaggaatattttcaaaatgtaatattctttagaacgcaaatgaataaaaaagaattactgagaaataaagagacaaaaggaacattcacaccaaaggacatgttcccttgggtatagctctttcagtcaacattcaacttttatcgagcatccagagtaccaagcaaaaaaaaaaaaaagacatagaaaataagtcattgtgttagattctgataaatgctatagaaaaagaaagaagtagaaaagggtggggggggaagagagagagaatgagagagagagaaggagtgctcagagggagctgcagttcaagtagagaagttgagtaaagaaggggcattttgggcagagcagacaggctggcactgtgactgaaagctcagcaagggaccagtgtggccgaaaccagtgtgtcagagaaaaaacagcaagagaggaaatgagcaaggtgtgagtagggggtaggtcagatcaggcagggccttgcagaccattccgagagctgtggcttttcctctgaataagttaggaagcccctacagagtttgatttattttaataggaacactctggttgctggactgatacttccagagacagaggagtgtcacaggtggtagattcagattctatattttgaacagagaaccaacaggatttcctaacagactgaaaatgagagaaaggcaggactaaaggtgattattatttgttacctaagcaactgaaataatattcctaccaactgaaatgcagaacgctgggtagaacatgttataggggccaattcaggaagccagtttggtcatattaactgtgaggtgtttattacacactcaagtagagatgacatgtaaacggatatatctttgggagtgcttggcatatagatggcatttttaaacccaagaaggagtgaatacagagaaggtgacatggcctgacaagtgacacatcccaattttagaagacaggggagagaaggaagaaccaggaagggaaactgagaaagagctaccagtgacgtaagaaaaacatcaggagagtgcggtgttctagaagtcaagtagagtccgaggaacagttaataagtcagcaggaaaggtgaggtcttggaatgaacccctagtcaaagctcagccaacactaacaaacagagacatcacaaattacaacaaggggcatgtaactcagagtggggctcaggatggcttccttacctaaggagatggaaagatgcttgaagcaagttttaagaggcattcaatattgtgttacatgtgtcagaatatatatgttaatgttcttcgcaatgcaagcaggtctggctatgtgattgcagacctcagtgtaacagggccccttgtccaaatattactaagaatctcaagatggcagcagaagaacattaagccaagtgcagaaaccttgtaagagcagagccctgtgtgactgcatgggacacctgagaagctggccctaaatgcagggtagctgaattataacaaatagaggtattgctggtacagcaggcttctttagcttttggtttcaaaaaagcagttaactgcttactggagaatataagcagaaaaaaataaatgatgcaaacatgagacaaatctgctagaatgtaatttactcttttcccaacttgctttcaaagctaaatcagcatatatggatctgaagtcattacagaatgacagcaaaaaagggcagagcactcattaaatttgatagcactaataaaactacatgaaaaaggagacagaaaacaggcttactttccgttggtatgcagacaaaatttaaaaaaaaatctcctacatagtgccttgaaagttttggttaacatccctcaatgagcagttaatatacaaaattcattttggttccaccccagtgacataaaaaataatgcctgaatcagaataccaaatatcaatgttaaaaatgagacagaaattcttttgcttttcatagtaataaaatagtatccttccctgtacttttttttttttttttttgagacagagtttcactcttgtttcccaggctggagtgcaatggcgcgatctcggctcaccgcaacctcctcctcccgggttcaagcgattctcctgcctcagcctcccgagtagctgggattacaggcatgtgccgctatgcctgacaaattttgtatttttagtagagacggggtttctccatgttggtcaggctggtctagaattcctgacctcaggtgatccacccacctcagcctcccaaagtgctgggattacaggcatgagccactgcaccctgctttttatttatttatttttttttttgagacagagtttcgctcttgttgcccaggctggagtacaatgctgtgatcttggctcactgcaacctccacctcccaggttcaagcgattctcctgcctcagcctcccaagtagctgggattacaggtatacaccaccacacccagctgatttttttgattttttttttttagtagagatggggtttcaccatgttggtcaggctggtcttgaactcctgacctcaggtgatccactcacatcagcctcccaaagtgctaagattacaggcatgagccactgcacccggccccctgtactctttaaaatacatgcacacataaatgtattccttcatccagctaatatatgcaatacaggttgagtatctctaatccaaaatctaaaatacaccaaaatccaaacatttctgagtgtcaatattgttactcaaaggaaatgctcttaggagcattttgaatttcagattttctgattagggatggtcacctggtaagtgtaatgcaaatattcgaaaatatgaaaaaatctgaaatctaaatacttttggtcccaaatatttcactaagggatcctcaattagtacctattctaatgtggcactggattaggtgctgaacttgtattttcttctttcagtcttattctaagtatcatcacaaaaggaggtaagcagcaccccttactctactgcatactccaaaacatgccatggctaatttggaggattttctccctaaagcattttggtaacacctttagtgatttcttacttattccaaggcatctttcagctcaaaagcatcttgctctgtggagcctttcccaatcttcccaagcacaaataatcgtgattcatgtctccttggctgtgtgtccatgcctgtattacagcacttttaatatctactgtagtacttgttttcaagcctgcatcactgctagagagtgaagtgagctccatgattgcaaaaatagtcttacaaactcatgcatgcttggcacctagcaaagtatgcagcaaacatcaggtacaatatagaagtttcaacctgagtgaatatatgaactgctagataaaataaattatctctgggctaaatatgtgcagaggcagtaaaatgattgttttgcaaaagggttcattggttttacaggcctctgtttcttgcctacatttgtgatccactcttaattttaccaccagagagtgacacctattaggctgtctcacctctccctctaaacatggacattctatggccctttggggtaaagttgcaatattacatattatgattaggagacaagtccaggtgcagacaaccaaatggggtgttgcaggtaggtgcaggctcactgacagaactgctgcttcaggcctgcacacaagtaacagcttgactaatgggccttaaagagctgagcgtttaataaggagtaagtcaacacagactggcaaaggttggagaggaacttggaaaataattttttttaatttcagaaaaagacaagtttcccactgtaggcaaccttctaacacaacaagacctcaaaattacagaatttcaggcagagtctccgattactttagtagggaaaaaaaattctaccacacctacgtgtgcacagacacacacacacacacagcctaaatttaacagtagggtgttgttgttttaaagacaatgttagaatttgttattttaatgagcaagtttgctaatgtttcttggcaattcagcttaaggccagatatgttctgagtcttatataataaagcttgaatataggaaataaactgggttaagcaaaggccagagtagccctgagggaaagaacacacaaacaagaaattatacctgaatcatgcactttcaattattctagatttgcttttctaacatcaaatatgcattctattggagaaagggtattagagctctgataattgctcctacataacttaatatttacattgttatgaaaatgaagtgcaaattgtacagtaaaatctgcatctgcaattttatccactcaagagcatttggttagagtaaatccataacattacaaacactatatacattgtaggtgcattataggtaattgttgactgaatgataagctcacattcttgaaagggaagttgcatataagtgacctcagcttcttcaaaacttcaaaaatgattctaaaaattcgattgaagtcattagatgggaagattcaactttacccatttattttattatttattagtaagctgcttttttttttttgtttgtttgtttgttttgagacgggagtctcaatctgttgccaggctggagtgcagaggtgtgatcttggttcactgcaacctccgccccctgggttcaagcgattctactgcctcagtctccaacaagtagctgagatgataggcacccgccaccacacctaatttttatatttttagcagagatgaggtttcaccatgttggccagcctaatctagaactcctggcctcaagtgatccacccgcctcggcttcccaaagtgctgggattacaggtatgagccacagtgcctagcctatccatttattttaaaacagtccttaaaacactacatattttttaagtagcaatttatgttaacatttgagggaattaaacatgtacttacacgaaaaaaataatgagtgtgctgtttaccaaactgatacttgcaaagactataaggtgacccttgtctaatttgacgggttaatctagatagtaattgaaagctagttctgttgggttatactaggtggtaaataacaggtattaatacagttttatttagttaaaactgctcatgtagcctatatagttttaaacaaaataaaaatgatcaaaactatcagaaaagactcccaacaattatgggaaaagatatcagccaccttttactgagtgtttactatgtgctaggccccaggtctcaaatgtttatgtattgttgaagcactgaacaaagtatttattattgatgttgctgaaaatatatcaatgttctgagacactgattaaaacacccaagaaagtacgcacatttaattaaggatcaacaatacactgaagtttcataatagcagtgcctggggcatttacactacggaaggaaaggatgccaatctgtgaatcactcatttctgtgtgtaagagaagggttttgagctgagtctttgctatggggcttcctgcctgctcatcactagggtctgctacatttttccagcagcatcaacatcactagctagtttgcttttctgctttgtttctggcctgtagaatgattgtcatgttttggagcccacaatgccatgtttggttttctgttttttatatttgatctataaccgctaggtgtttgaacataggagatgctttaaagcattgctttatatccctattctaaggcgaaatctcagagccatcacctaaacatttaaatgtaaagtattccctctggatacagccaacaaaccacaagcacagggcttttagtaataggaattattaaaatatatcactgaggtgcagaggctataccttattgctcttcgtacagaagcatcaactttaacattaagacatttggtgaatagtgtggataggtgggtggatggatggggaatgaaatgattggcaccactattatcaaagagtaactttgaaaaggagtcattaaatcatttatgtacatataaaggactagaatatataaagatagttcggaatcagaagactcagaatatatgagtttctataaatcaacccctaaataaaggttgtatatagtggtattcaaaacttgcatttatgagatcataccttttggaataattaaattagtgttaagttctttgtctcttcacaaaattccatctgatattctttagacatcttaaattagcagtgagagtttacgtcaaattaatcagtattgtgttgcttgaaataaagtaattcaaactattaccttaagattagagaatgaattagaaatcaagtacaaggtccctttctttctatgggaacttttagggaataaaaaaccttggctaatattagtatcaagccatctgagggttgatcttgattgattctaattatgtacttttgagctgtaagacaagagttctttgtagctaaaaagatttttaaactttattacaaaaaggaaaagacctaaaaagtaggagatcagaaaaaatactaacagaatttataataatagacaagactaaatgaaaagagaagcaactttatttcagtaagctaaaacatatctgaaaaaattggttttaaaagttattttatgttctgtttaaagctacatcataatgttataattgaaaagagttctgtattcccttaaagaagagattggaaataaatgggtacatgaactaaaagcttgcccgaattgcaacgaagtactatggtttgaatgtcccctccaaaactcaagatgaaatttaagtgacactgtgctgatattaagaggagcagcctttaagcggtgattaggtcatgagggtttgaccttcatgaatggactaatgtcattatcacagtgggagtgggttagttatagcaggagtgggctcaaaggataagttcagcttccatctcctctctgtcatgaacgctctcttgcctttgtgctttccaccattggatgacacagcaggaagaccctcatcagatacaggcccttgatttgaacttccccgcctctggaactgtgagcccagcctccaaaagtgtgagccaaataaatctctcttccttataaatgactcagtccctgacattctgttacagcagcaaaagacagactaaaacaccaagggagaaaagttggggttacagaagtggatgactgggcaaagacaacctgagatttgggataacaatgcgcagttcacagctcagccataaccttttgggaaatgatttctcaaaacacagagaacaggaactctaagtttaaggataagcagaggatctcccttgaatgtaaatttcatgtaaacagggactgtgtttttttctataccaggacctctctggtgtcttagatcctagaagaactcagaggggatgaaggcgtgaggagtcagaggcccgaggagtcagagcctctagagaagaaaggaaaatatgagaggccaaaggcaaagcctctaaacactttatctaaaaaatggcactcttttttatcgattcagttttgggactggaaaatacagaagacttcttggtttatacatggtcttgtaaaagaatcagtacttacaactctattgcaattccaagtattgaagcaatcgcagaattacctctggactacaaatttacaagattctcttcaagcaattcaaaaataactggctactatccaaaccttccattggtcttatcaaatgatcagacactgataaccaaataagttatctttactgaaaagtgaagtgaagacccatatatgcagctaaaaaaaaaaaaagttaattttcaaaaaaatactgtaaaaagctttaagaaacgagtttttaatgaaaattgaccaagaagttgatatttgtccataggtctccttttataagccatcttgatgtttaacaactcttattatattaaaatctgagtatcctagaacttaaaagaaccttattgaaattttctatacgaatagttttgagattagaagtcacctggggacacacaccacacacacacattcactcttacacaaatgcctagtccagcagttctcaaagtgtggtcaatagactaatagcataacattacctgagaacttgataatgcacatttgcaggccccacccaaaacctgctgaatcagaagctctgaaagtggggcctaccaatctgtggcttaacaagcccatcaggtgattctgatttacactataggttgagcccatatcctccagagactggcttaattggcctgggtaaatataactgagcattgatatcttttatatgtcctaggaaagtgcagccagaattgaaaacaactgatctataccaattctttcaattaatagcctcactgagtccagtgagattaagtgatttttccaagctattaggttttatgctattcctgtgttctcccaaacaacaaaataaagagacatgatttcttccctgatcatacagcaagtatggaacagagatggtctagaagtcaactatctcaatctccattgttacccattaggtttttttctctctaataatgttaaaggctatttaatttatttcatcaactttaacccttacattctcaactgggaacaaaaattggttcttggggtgaaaaaaatcttagatatggattgtgaccttccaaaatcagcctacccaacaaaatcttttgtattaatttctctcattaggaagaaatttatagttaaagctatttaatttaatttgaatttaatttttgtaattgaaaaggagggtaatgataaaaaggttgagaaaaaatgctttaaagggttttacaggcatactacaatccaggattgctgtgctctatgtgctatgtatagtcctattagtagctatttgttgcaagatacttggagccaaataatgtttacagtataggttcctggctactctttatgctgtaatttcactctgtctatcatgggcagtattagaaaatacactgggttttcacacactatcagtattttacctggattgtagtggagaatttagcatattgatgcatgcaatgggaaaaaaaagaattttgttaaaatttgtaaatgttcataaaaatcccagatatacagtgggatgagtatctctgggtaggtaaaaaaaattacggaaaattttccctcacagtcagtagctttgtttgatatttaccaataagtatatgatgacatacttgaaatgtatttgcagaatgtcattggaatattataatgagaatacgtaatcaagtttaggactaaatgaaagatgctgtctcatgtatgctttaaatagagaattgattttttttcaaaataaagttatttttccttaaaaaataaaataaactgccaggcatatagtaagtaaatgaaagtaagagagggaaggagggatgaaaactcaggtttgcttaaactacactgtgcctctcatgttcctctaccgtaaataagaggactggactcttatttcttagggttctttcagtccagtaattgacaattctaaattatacatgaatatacactaaataaagacttttcctgatcaatggaatatgacagcagaggaaaaggacattttcaaggacttaaaaaaaaaaaaagctgccctgaaatatagagcaatctcttacacacccataagagattttgatttcaagaaaagactcaggataagttagagacttaggtttatgttcgaacactggccaaaaactattaaataaactcttaggaagggaattcttggatgcaaggctaaggttaaactatgcttagactattcgataattatgactgatgatgttcagtaagataaataattacgggtaggtaccacacttctttaaatattgctctaaatctacaaatgcataatcattagccctaactgtaataatgtagatttatattagtatgaattaatgttaattatatatattttatataatatttatagtaacgtaattttaaaacattactcttggcaattggtaaagaaggttgcttttgacagaatatacataattaaataaaattatatactgcccttcagcactttacttttcctaaattactttcatttccactatttcatttgattgtcagaacaattctgtgtagaaatggaactacttgctacagtttgaatgtctatgtgtcaccaaaatttacaggttgaaatcctaactcccatagtgatggtattgggaggtgggtctttggaaggtgattagggcatgagtgaggagctgtcatcaatgggatcagtatcatataaaagactaccttccactatgggaggacacagtgagatgacatcatccatgaaccagacagtgggcccttggcagacaccaaatctactagtgcactgatcttgaacttctccgccttcagaactgtaagaaataaatttctattgtttataagccacccagtttatagtattttgttactgcagcccaaaggaactaagatactacttatttccatacactgaagcttgggtaagtcaaatgactttttcagggtcacccaggtcatcagtgacagagccagcctttaaataaaagtattctcattctagctcagtgccttttctactaccagtacctcactcacacctctaacccaaattatcacacctatgaggagccaacaaccctccttacctgcctccagtgcaccctaaaacccatggccacacacaattcacagtagattatctacattacagatcttgtgtctcacattaaaaaatgtgacactggactttcaaacctttactcacaaagcaacagcaaatgtcacaacctataaagaaaatatgaagaattcatgtttttgggtttttttgtttgtttttgagatggagtctcactgtgtcgccaggctggagtgcagtggcgtgatcttggctcactgcaacctctgcctcctgggttccagcaattctcctgcttcagcctcccaaatagctgggactacaggcgcacgtcaccacacccagctaatttttgtatttttagtaggggcggggtttcaccatgttggccaggaaggtcttgatctcttgacctcatgatccgcctgccttagcctcccaaagtgctaggattacaggtgtgagccaccacgcccagccagaaaattcatcttttaagcttttatttcttccctcgagtttttcttttctgtaagggtaatgtcaaacatgatggcaactaacttacttattaatacatgatggctaccctggaaggaatcaaggaatcctccagccctgtgacttcagcaatgacctacaaagaatgcttaccccaaacccagcacacctttctgtactgtgtcatgttctagaggaagcagataactggagggttttttgtataaattctgtgaatcaacttattcagctaatctataccgagtactaatttagcagaaagctagcattatacactaaaatattagttcttgagaataatatgttaatattcatttctttattgtccatttttggaaggcagctaaagaaaaagatagggtgaaaaaggtggcttcatattctttcataaactaagctaggaaactgacataatagagcaaaaaagagggaacagactcaagtaaaaacaaaaacaaaaatgtgaggatatatctccagtgcttagaatggtgctaggacataaaagttattcggtaagtaggttttaaatggatgatgaatatatttggagtcagacagacctaagacccactgctccacttgtgcaatggattgcatcctgccactgtttgagctggtatcctctctcctgcatcactgattcttcccacttcacagaatcattcttaccagcatagaacatgctgaataataaaataatattaatatattatttcataattcactactcagcaatgagttataaaaccactacttgaccctacattctttcttcagctactatctgatttttctgttacctttgttgtaaaagtccttaaaatggttttctgtacttttgttcatattctctcttgaatctactccaatcatgcttccaactccatcatgccactgtaacacctcttgtccaaggtcaacaagatggtctcgagatgattaattttctgtcctcatcttatttaacctctcagcaatatttgatccttgtgatcacgccctccttcataacacactttcctcctttggcatcctggactctgttctctcttggttcttctagccttctggctcttccttctcagtttcctcattttcccaacctctgaagttgtggctcctcagggctcatttcttagaatattttttttcccttggtacaatcacatacaatctctccctataggtgatctcatccaatcccagggctgatatacaggctgacaattttgatctctaatcctgatctttcttctaactcatctctaatcctgatctttcttctaacttcagatttatatatccaacagcttaaacatctataagcttaacatgtcaaacatcgagctcttacatttccttcccagactgctcctccagcagttttcttatctctctaaaaggtacttccattttctatttgctttgtccaaaaatctttgacttctgacatctttggctcttcttctctcattccacacatctaatccatcagcaaattttgttgattctttccaaatgtcttcagaaagcagttactcttcatcatctctcctgctatacccttttccaattcaccaccacttgggttactgaaatagtgctgaactcctctatattctactcttcataatttacctatattattacataatattagatcacagcactatagatacctacatcttccatggcttcctctctcattgagtaaaatccaaagtccttaagaaagaatattcaaggacctaaatgatctgaatccctttctcccacccgccaccccagcttcatctcctatctaccatatttggctaaattttttcaaacatattggtctcccagctattcctcaaatatgccccaaacattgcaggctctgtggcctttgtgctctctgcctcctttccctaaatgttctactttcaagaggggttgctaagtgcttactacatcactccaggtctctgttcaaaaatcacccaatttgtgatactttcctgaccttctccatataaaatagcaccttggcctataatcccacatcctcctgtatcttcttgaccttgctttatttttgttattaccgtaggacatatatatttattgcctatttgtctagtgtccatctctcacaatcaggtaagaacctggttttgttcattattgagtcaccagtgaccagaatatgctggttcatattaggcactcaataaatacttgctgaataaatgaaccaattgtattaccatcattatcagtattatcttcattacctaaaggcttaggtctcaaggactgaagcagagcaactgcctgcagtgctctaagatagagcaaaacacaacctaaatccaggttaccttgctgggagggaggccaaaatacagccaggacagactgagaggctgatacatactttatgtgctaaggccagaagaggaaaatcatttcatacctcaagatgtggatttcggtaaacactattagcatatggccataagcagcttgtattccttacagagcacatctattagaagagctttgtgttattctgtttcatccctaatactgtaacccacaaaaagggactactgtatgaataattaatagaagtaaaagttagaaaaagttaggagagaataggattttcttaaatcggtcattttaaatcttctattattattattatcttgcatatcatacatcaacagtgttttcctttttcttatcttggagctatttctctatcatattcctgcttcgagtagaaagaaaaaaaatacacccaaatggtaattttgataatctagtcacaagggttcaaaaagcaaataaataaatttcagggtcttatcattttgtattaaagcaacttattacataaatgacattttcctttaggagatgtgtgcattcgtgtttgtcatttttaaaatggaaatagaatcatagtgtcaccttaaaatgaccagatttagaatgagaactttcattacatgggaggagtgaaaaatacaataaaataagatgatatgtatatacaagaaaatgggcataaagagatattaaagaaatcaatggaaagtgaacaaggcacaaatttaatcacacaaggatctaaggattaatgtgtcagttgataacatttcagcatatcttttggctgatcagagtaaaagtatacatttgcataggaacagaaatttgagcagtataaaaatgtaatcaaagaaaaggcttggctcagaaaagtaaaacacataaaatgattttaaatagtatggtcttcatctgcattacttttttttttttttactacaagtccttatttttcacttttattaaacacaaacaagatagtttgtaattccttatgactcgatgccttttgaatttaagattaatttgtagtttaaaaattttctcaggtcgggtaaggtggctcatgcctgtaatcccagcactttgggaggccgaggaagacagatcacctgaggtcaggagttcgagaccagcctgaccaacatggtgaaatcccgtctctagtaaaaatacaaaaattagccgggcatggtggcatgcgcctgtagtcccagctacttgggaggctgaggcaggagaatctcttggacccaggaggtgaaggttgcagtgagctgagatcatgccactgcactccagcctgggcaacagagcgagactccatctaaaaaaaaaaatacaaaatacaaaattagctgggggtggttgcaggtgcctgtagtcccagctacttgggaggctgaggcaggagaatcacttgaacctgggaggcagaggttgcagtgagctgtgatcatgccactgcactccaacctgggtgacagagcaagactccatcttaaaaaaaaaaaacaaagttagttgggtgtgatggcaggcacctgtagtcccagctacttgggagactgaggcaggagaatcgcttgaacccaggaagcagaggctgcagtgagccgagatcatgccattgtactccagcctgggcaacaagagtgaaacttggtaaaacaaacaaacaaacaaacaaaaaacaaaaaaaacccaaaacctcaatatattatgattctaaaacctattagaaatttagataaacttcataataagctaaaagcaatattatacttcagatactggtagtgtttgaaaaaaatttagttaaatgtgaagataatacaaatggaaacaatgtatgcactttaaatgtctactggcaactaaaagcagacggtggtgggggggggaatcctgtgataattggttcaactctgatacttatctataattgtatttcaaatatctacctcactagaatttgaattaagcgactcactataggttatccacttaccttacaatggtcatactggagctgtaaggctggaacatctcctccaataggcatttgtttcttaagctcttcatctttcatattcagccatttgatcagttcttctaaggacatcagcaacctgttccacttctcagcgctggcctccaaatgggccctgttgagagataataataataataataaccacatttagaaatgcaaattacattcacaaaattatctaccttcctttagcataataatcttatctgaccaagtaatgtttacttccacaaaagagactgactccttgtaaatacatatatatatgtatttataatatactatatatacatatatatgtatgatatacatatatacaatacatatattacataagtatatatatttatacatatgtatacacacatatatccatttcctgtaagaaacagctattttgaataggctataatattcagaggatttattggtaataactatcaaaatttaaaacacagacctatacaaaacgaaggctttcaagaaggatgtccgtgatagaatgtacaattataaaccaagttttgatagtttatgtatagtatatacgcacatccaaatatatttttttctcattttatctctatacatggagagagagagaggaaaataaccactaagagcacagtaaatacctaattttagctatttttacgccatttaaggatttacaacagactcatagtatttttctttccaaaaaaaaaaaaaaaaaaaaaaaaaaaccactgactaattattattattatttttttttttgagacagagtattgctctgtcacccaggctggagtgcagtggcgcaatctcggctcactgcgacctctgcctcctgggttcaaactattctgctgcctcagcctcctgaatacagctggaattacaggcatgtgccaccatgcccggttaattttcgtatttttagtagagacgggatttcaccatgttgttcagcctggtctgaaactcctgacctcatgatccaccggccagggactcccaaagtgctgggattacaggtgtgagccaccgcgcctggtcttgattaacttttttaggaatggaaattactgatgtgttactttctcttgtaaccaaaaactccttctgttgtaaccaaaaagcagaacaatagcaatgtttacttcaaaaagttggaaaataatcaggcattgcttcgacaggatactatttggcttaaggttgaccaatgtctagtgacaaatgaccagtgtgaatagagaacagttgggcgaaagtcactgcagtactttatactctcatttaaaggtgaggtctttgtttcaataataatttctgcatttaacacagaaatgcaccttcagattcttagattatgaactccataatcacagatatgtttaggaaatacattttgatatggttaaggttccaataagagcaaaggcccttgagaataggagtataaatctatgcacatgttccttttttgctcttgttagggccctggtgaaagcccacttatccagcctcaggcccactggtgggctggatttgaaaatatggatcagtcagaaacaactccagcgactcaaggaatcgaactgggcttgactcaatcctgcatcatcccagagggcagactgtgaatgcgggcttatgccttaacttggggaaatggaattactgtgactgcccatgatctttgaggtttagaggtgtaacaaggcacacgtctgcctttcatcagcatatgctgattaaaaaacgctgtgtgaaataataaaaaaagtttaaatacagaacgaagttcaaagcattttgtaaatctctgagaacagtatgattagaaaatttattttcttgtatttatgatcagttctatttattccacaggtgctacaattgaactcattttacaaaactgtggttaacaaggtcctgattctgcttgagctccagcttttctgtgttcatattgattaactttaggccaaatatgtaattacctttccctgataactaataatttcacttgtcacagagcagaactaaataatttcaattatattaactgaaaattctctgtagttctaagccattttgcagcaaataaatttgactgagctactgcaatttctttccaatatttttaattgcaaaaccagctagaaatcagatgtcctcaatcaagaagcacttgagtgtctccgtgtgcaaaacatttatacgtgttccctgcccttttatttcagatgatttgatcctgcatcttcaacgtctgtagtttaactcaataatcaataactaaatcacacattatattcctttgaaattgagttgcaaacacttattgtattgaaatgcacacaaacatattttccaatgcagtcttctttgactgcacagaaataatgaaactgattactgaaacttacagtatttagaatctgaaaaactatctattaattatgaggatgaagacaatactttttaaaagaaatgctgaagtggctttgaaatcaaaaagaaaacattggtatatgtgtgcttctctgcatctttgatttttcatagtaaaaagcaagttgatctgccagaatctttgtctggcaaatctgttctggttattctcaaatagattataactatgtgtttagtggattactaccatatgctcaaataaatgcatgcttctgtagcagccttcagtgttctagtttcattttaattctttcatcttgaaagatgaaagccttttcttgggcaacaggtcgaatgctttgtaagaagaaactttaaatttgcgttcagcttagtggtactttctcaattatcctataagcattttaaaacttaaatttctctaagactattgataactagtgatcaaccagattttcaaaatcttcacataaaacatttctttatcaaacatatctgtgggcattcatatttttagacaattgacttattctaacatctcagctgcttcagttcactcctttagtactttgatatgtacaaagcaataaacacttttattgactgtattatcaacctaggatgatgtctactacagaatatcttttacgcaagttactccttttaaaattgaatcattttttacaactctataagtatttttaagtgaccagttattcttaaaaaatgtaatgcaaaaacatgttagaaggtaaagacccataaaaatggtacttcatcatttaagcacagtagaaaggaattatggaagtaactacaaaccagtatctgttttaaatcagcaaaagcctccaactttcaaacaaactgtatcttcaagcaagttattattccttctcccagtgtacagatataaaaggaaatagtgtgagtaagtgtgagaaggagcattggttaaaataaaatacagtttttcatttactcagcacaagtaaacatttacggagcacccactctggcagatatcccatcctctgttgtgtaatgactacccagaatcaaatgtccaatttggtattcttactacaaaagtatatatatatattttggtttatggtaaaatctccaaactataaattgggttataatgaaagaaaatacctttattagtccaagaacaacaagtaactttaaaagattgttcctactcccaggaaaggaattaagacatattaggagaaaagagtcaagtcttcagaattcagtctgacggtgctgaaaagaacaccaaagccgtgattccaatacagtagacatcagcagcatgtggctatttaaattttaatttaggataaataaaatgagtaaattttgaaattcagattatcagttgcactggtcacatttcaagtgctcattaggccacatatggctagcagcaattgtattaaccagtgtagatatagataatttctatcattggagaaagttctattagaatgtgctacactagagaaaccagaaaaaaaagagagcagttcctctattagatttggaaaaaaaaaaaatttagtagtttcacaatatggttaggaaaagcaactatctaaggctaaacatagtgtcaatgacactgtaaaatgtggtaacattagatttaaatgatgatgttaaaggttaatcttctctacgggcttttaaaaaggtgccctgaatttttaatagactcataaaagaaagggaagatagaattttatctttgaactctgttttcattagatttgacaattttactggcctttgaaaccatgttaataaagatctatattaaacatcattatgctgataaatggatatttaattaagacaatctcaaattaaataagtttaacatgaaaatttaaacccatgttatccacagcagagaacttattagtgtatttccaattcatatttttccagtgagtaaaaaatataataaaagttcctgacagcctgtcttctagctgacgtttcaaatcattagcattcttctcttgtacagattgaagtgaaatttatcattgtatgtattgttttagatgctaaaggagatgtagcatgttggattttagcatataaaaagtttaggctgagcgcagtggctcacgcctgtaatcccagcactttgggaggctgaggcgggtgaatcacaaggtcaggagttcaagagcagcctggccaacacggtgaaaccccgtctctactaaaaatacaaaaaattagctgggcgtaatggcgggtgcctgtaatcccagctacttgggaggctgaggcaggagaatcgcttgaacccaggaggcggaggttgcaatgagctgagatcatgccactgcactccagccctggcaacacagtgagactctgtctcaaaaaaaaaaaaaaagtttaatcatggctatccaaagagaatgaaaaataacgtttaagatattaacctatggtattgagccacatattattacattgttccaatggccacaccatggtcaaagaagttaatacctgtaaaacacttagggtagatctagcatataaatattagctgttattatgatcttagcagacattttctttttaaaaaattatgataaattagagcaaatgttccctgccatgacattttatgctataaaactttaatatcaactttagcgcaataaaagcataatgtgaaatacagaaccaatgcatattaaatactccaagtagcataaagagtatcaatcagatagcctcactctcaaaaaaaaaaaaaaggccacctgcagagagagaatttggggactaaaaaggatcaaaatcttttaaaataggcatggtgatatcagagcagaactgtaggagactgagacacaaaaaaaccattcaaaagatcaacttatccaggagctgggtttttgaaaaaaaatgaaataaaatagatagactgctagcaagactaataaagaagaaaagagagaagactcaaataaatgcaatcagaaatgacaagagggatatcaccactgaccccacaaaaatacaaccatcagagaatattatgaacacctctatgcacataaactagaaaatctagaagaaatggataaattcctggacacatacattctcccaggactgaaccaagaaaagattgaatccctgaacagcccaataatgagctctgaaattgagtcagtaataaatagcttaccacccaaaaaaaagcccaggaccagatggattcatagctgaattctaccagatgtacaaagaagagttgataccattcctaatgaaactgttccacaaaattgaggaggaagaactcctccctaactcattatttgaggccagcatcatcctgataccaaaacctgccagaaacacaaccaccaccaaaaaaacttcaggctaatatccttgatgaacatcaattcaaaaatcctcaacaaaacactggcaaaccgaatccagcagcacatgaaaaagctaatccaccacaatcaagtaggctttatccctaggatgcaaggttggttcaacatatacaaatcaataaatgtgattcttcacataaacagaacaagacaaaaaccacatgattatctcaatacatgcagaaaaggctttcaacaaaattcaacaccccttaggttaaaaattctcaacgaactagatactgaaggaacatacctctaaatactaagaaccatctacaacaccccacagccaacaacatactgaatgggcaaaagctggaagcattccccttgaaaactggcacaagacaaggatgccctctctcaccactccttcaacacaatattggaagtcctgcccagggcaatcaggaaagagaaagaaataaagggctaccaaatagaaagaggagaagtcaaactatatctgtttgcaggtgacaagattctatatccagaaaactttatagtctcagcccaaaagctccttaagctaataaacaacttcagcagcgtctcaggataaaaaaaatcaatgtgcaaaaatcactagcattcctacacatcaacaacagtcaagccaagagccaaagcaggaacacaatcccattcacaactgccacaaaaaaataaattacttacgagtatagctaatcagggaagggaaagatctctacaaggagaactataaaacactgcccaaaaaaatcagagacaacacaaaccaatagaaaaacattccatgctcgtggataggagggatcaatatcattaaaatgaccatactgcccaaagtaacttataaattcaatgctattcctattaaactaccaataatgttcttcacagaactagagaaaactattttaaaattcatatgaaaccaaaaaagagcacaatagccaaggcaatcctaagcaaaaagaataaagctggaggcatcatgatacctgacttcagactatactacaggtctatagtaaccaaaacagcacggtactggtataaaaatagacacatagaccaatggaacagaacagagaactcagaaataaggctgtatggctacaactatatgatctttgacaaagctgacaaaaataagcaatggggaaatgattccctattcaataaacgttgctgggtaactggctagccatatgcaaaacattgaaactggacctcttccttatatcatatagaaaaataaactcaaaatggattaaatacttaaatgtaaaacccaaaactataaaaaaaaaaaccctgaaagacaactgaggcaataccattctacacataggaatgggcaaaaatttcatgatgaagacaccaaaagcaactgcaacaaaggcaaaaatttgataaatgggatctaattaagctaaagagcttctgcacagcaaaagaaactatcaacagagtaaacatacagaatgggaaaaaattgttgcaaactatgcatctgacaaaggtctaatattgagcatctataaggaatgtaaacaaatttataaggaaaaaacaaacaccataaaaagtgggcaaaggacatgaacagacacttttcaaaagaagacatatatgcagctgacaagcatattaaaaaaaaaccttcaacatcactgatcattagagaaatgcaaatcaaaaccacaatgagataccatctcacaccagtcagaatggctattagtaaaaagtcaaaatataacagatgctgacaaggttgaggagaaaaaggaacacttttacactgttggttggagtgtaaattagttcatctattgagaagacagtgtggcgactcctcaaagacctaaaaacataaataccatttgacccagcaatcccattactgggtatatacccaaaggaatataaatcattctattataaagacacatgcatatgtatgttcattgtagtactatgcacaatagcaacaacatggaatcaacttaaatgcccatcaatgataagactggattgaaaaactgtggtacatatacaccatggaatactatgcagccatgaaaaagaacgagaccatgttctttgcaggaacagggatgaagctggaggccattatcctgagaaaactaatgcaggaacagaaaaccaaataccacatgtcttcacttataagtgggagctaaatgatgagaacacttggatacatagaggagaccaacaaacactggggcctatcagaggatggaagatgggaggagggagaggatcaggaaaaataactatagggtactaggctgaatgcctgagtgatgaaataatctgtgcaacaaacccccatgacactagtttacctatataacaaacctgtacatgtaccctgaactgaaagtaaaagttaaataaaataaacatgaaatctaaataataaataattaaaaaataaaataaaatagacaaggtggtgaatataatagaaaatcattgcaaatcacaatgccaattttaagtagaaagtatcaaattatagcaggatcaatgttaccatttttcactttctagtgcaacactaggcagaatccaagattaaagacaagggatagagagagtatggacattggaatgtcagagactgggaaatagaagaagttaaaaggggaaaggaaattcaagctcttgacactgctgaagtatcttatgatgggctccaaactaggtagaagggattaatggagtctgaaaagaggaagggtttaagtaactgaagattagaagaaagatgtgaaaattcaggaaaaaaaaggaataaatgtttaaaagctggagaatttgacagttgaaaatactttaggatgtgcatttaaatataatcaagttggggccaggtgcagtggctcacgcctgtaaccctagcactttggaaggccgaggagggtggatcacttgaggccaggagttcgagagcagcccagccaatatggcgaaaccttgtctctactaaaaatacaaaaattagctgggcatggtggcacgtgcctgtatttccagctacatgggaggctgaggcatgagcatcacttgaacctgggagatggaggttgtagtgagccaagattgcaccatcgcactccagcctgggcagcagagcaagactctgttccataaataaataaataatcaagttgaaatattgtagatctagcatataaactgaataaaactttttttttccctagatgttgaattggaagcattgttagcatgcttcttccacttggaaagacgaaatagtgtgtaaagattcatactgtgaacttatttccaagaagcaacacaggaacttaacaagaaaactgacagacaccacagaccctttgaaagaagcagcaggctgcagtgtatatcatgagccaggccaaaaattgtaagtccccagagtgtgaaaaagggagaaactgcctacagcacatacacacccaccggggaacctggcaatccaggtcagggaaaaggccttaaccctacccagctccggagctggtgtagtgagcaatggggagtagatgagaaggaaccacatcgggatgtgctgtgtgtgcactcccagtctccagagggatgaagggaagtcattcctgatcctgtctcacaggagaccttgtggaggtcagccaattaactcaggcacgggtcgcaggttaagagatgctcccaactgaaattcatgatataaacttgagtgggcataggagctgggtgcccctgcttcatgggcagatgaggatgggcatggcctgaaagccctgcagtttccatctccactgggaaggcttatgatctggggcagttttgagtttcagtgcagactggctggaactttgctagctgttgctgttagtggaatgctgcagatgtgagacctgccttgccaagtgcagggaagctaggtgggtcttactgctgctggctacacccccctcatttgcactcttctgtgcagcagaggcagctgtgctcctccttggaacactaccccagcagccagcaaactgtcctccaatcccactagggctgctgcttgcgtctgcctgtggagagccagagcatggacttgcctgacccacctccctcctggttttgccccttcactcctcctggtagcttaacacacacacacacacacacacacacacacacacaaaaaaaaaaaaaaaaaaaaaacagaaacttttgggagctctatggcccctcccattgcttgggacaccagagtacctcccctgggtaacataaggcaaagcataaatcccaccagtaccaccacagccagtgcccttttccaagtgccaccttctagctggaggccaactgactcactccatgatagcatctgcaaggagaataacaccacaccaggaaggggaaaacttgtgtgaccttggccgtcaccattacctgcatcaccctggctaaccaggaggccctgagtctgcccacgtgacctgttcgttactattacacatggcatgtgagaaagccaacacactaaggctatttataaccaaggaatatcacagagtctacatcactcctctgcaacccccctcagagctggtgctggcacccactgctgtgagacttcaggacaggtcacatcactggatcccttgcagacattccccctgcaccagcctggactgtggcagtccaaatgggttgctagactgagtggagcagcagcattcacaatagtctggccctcagggattcctcctcctaggggaaagagggagtgctccacatcaagggagcaacccgtgggacaaaagaatgacaaaagaatgaagacagcaggccttgactcccagacatttccacctgtgggaagtttctttcagcagaggcatgggtgtaatgctgggctcagtggagaaagtctgcagctctgccccaagagtcaggcagccctggtgctcctgaagggtcttggaggaggggacttctctccttcacccaccattgcagacacacctggggctgctcccacaggagcttggcgtgggtgcacctgtagacagccattctagaacagtggggtgactgcatccccacaagagaagtaccttccaggttcaggcttacatgaggggtagagtcacagtccctctctatatgtaacatcagcattcctacagatggaaagaggtatctgtgtcatctgaatagccaggaaactgggtcaggagagtgactgggtagtggggctttcctgctggcctgacaggagggctgaggtagcttcctcccttttccctgaaaagacctcagtgcatttccctgagagatcccctagctgcctctgtcaaggctgggacctctgtgcatcactgggtattacattacccacctgtttggtttttactcatggacacctccactactggcctgaaacctgaactgttcaacctagtaaatgaaatactggataaaataaataagtgcacaccactggggaatgagataaccttcaagagaccactgccattccaatgccacaggagacagtgaacccactcacacaccaagcacattactactacaatgagtatctgagaaagccatcatacagactctataaccaaggaactcatacagagtcttcacccctgaaaccatgcagagctgaattgggttacaataaactagagtcattaaaatcacatcctcaaggagagaaaaagaaatttaaaagaacacatagtcgaacaaaaaataaattaaaaaataattagaataaatagttttctgcaatgagaaggagccagaaaaataattctggcaatatgaccaaacagggttctttaacaccaccaaatgatcacactagctctccagcaataaatccaaatcaatatgaaatctttggaaataccagataaagaatacaaaaggatgactattaagttactcaaccagatacaagagaaaagtgaaaaacaacataaagaagttataaaaacaattcaagatatgaatgaaaaattttctaatgagatagatttaaaaaaacagaacttctggaaatggaatacatatttaaggaattacaaaacgcagtggaaagttttaatagattagactaagtataagaaagaatttcagagccttgtcaaaattctgtcaaaagcctgtcaaaagacaaggctttcaaattaacccaatcaaacaaaattaaagaaaaaagaatgaaaagaaatgaacaaagttttcaagaaatatgggattatgtaaaagggccaaatctaagaatcactggtgttcctgagggagaagaaaaaccaaatagttttgaaaacttatttgaggaaataactgaggaaaacttctctagccttgctagggattagacatctaaatacaagaagcacaaagcagtcctaggagactcactacaaaaaggacatcagcaaagcatatagtcatcaggctatctaatgtcaacatgcaggaaacagttctaggagcactgagacaaaagcatcaagtaacctataaagaaaaacttatcgaatgaacagcagacttagcagactgctaagtcagactcagtagaaaccttacaagctaacaggaatttggatcctacctgtagcctctttaaacagaaaaaaccgtcagccaagaattttgtattcagcaaaactaagtttcataaatgatggagaaataaagtatttttcacacagccaaatgccaaaggaatttgtcatatgcatatatatttaggattataatatcttcttgtttgattatttcattattatataataaccttctttgtctttttttgattgtttttactttaaagtctgttttatctaatgtaagaatagctactcctcacttttggttttcaattgcaaataatatattttcaccctctttaccttgagtctataagaatccttatgcgttaggtgagaaagagaaagtcttccctaactcattctatgaagccattatcactctgataccaacaccaggaaacaacctaacaaacaaaagtacagaccaatatccctgatgaacatagatgcaaaaatcctcaacaaaatactagtaaaccaaatccaacagcacatcaataagataactcaccaaaaccaagtaggtttcatcccagggacgcaggaatgtttcaacatatgcaagtcaatacaagaccagccacacaagaaatgctaaaaggagttctcaatcttgaaatgaaaggtcattatgccccagaacagaaccttctgaaagcataaaactcactgggtctataaaacaataacacaataaagaaaacaaagtgtctaggtgacaatcaacatgataactgaaacagtgcctcacatcttaataataacattgaacataaatggtctaaatttcccacctaaaagacatagtggcagaatggataaaaacacccaaagtgtctcttcaagacactcacctaacacataaggattcttatagattcaaggtaaagtggaagaaaatatgacatgcgaatggcaaccaaaagtgaacagtagtagctattcttatatcagataaaacagactttaaaagcaacaacagttaaaaaaaaagacaaagaaggtcattatataatgacaaaaggatcaatccaacaagaagatactacaatcctaaacatgtatgtgtctagctctggagctaccaaattcagaaagcaattactactaggcctaagaaaagagatagactgcagcacattaacattaggggacttcaacactatactgacagcactagacacatcactgaggcagaaagttaaccaagaaacactggacttaaactacactctagaacaagcgcactgaactgctttttacagaacattctactcaagaactgaagaatatacaatcctctcatcagcatatggaacattctccaaaatacataaggccacaaaacaagtctcaattaatttttaaaaatcaaaattatatcaagcatcttcatagaccaatgaagcagaatagagaacctagaaatacagccaaatacttacaaccaactgattttgacaaagcacacaaaaacataaattggaaaaaggacatgctattcaataaatgatgctgggaacactggaaagtcacatgtggaagaatgaaactgaattcctatttctcactatatacaaaaatcaactcaacatggattaaagacttaaatctaagacctgaaaccattaacaattttagaagaaattctaggaaaaactcttctgaaaattggcctaggcaaagaatttatgactaagaccccaaaagcaaatgcaaatgtagcaagaacaaaaataaataaatggcacctacttaaactaaaatgcttctgcacagcaaaagaaataatcaacagagcaaaaaaacaacccacagaatgagagaaaatatttgtaaacaatgcacccaacaaagaattgatatccagaatctcccaacaaagaattgatatccagaatctacaaggaactcaaattagcaagaacaaaaacaaataatcctactaaaaagtgggcaaatgacatgattagacatttctcaaaagaagatatacaactgggcaacaaacatatgaagaaacactcaatatcactaatcctcagggaaatgctggtaaaaccacaatgagataccaccttaccctgaccagaacggccattattaaaaagtcaaaaaacaatagatgtcaatgaggatgtggtgaaatggggatgcttaaacactggtgagaatgcaaattagtacaatctctaagcagattcctcaaagaactaaaagtacatccactatgtgatctagcaataccactgctaggtatctaccaaaaggaaaagaagtcattatgtcaaaaagacactggcactcgtatgtttatcacagcacaatccacaattgcaaagatttggaaccaacttaagtgtccatcaatccatgagtggataaggaacatgtggtatgtgtataccatgaaataccactcagccatagaaaagaatacaataatgtctttttcagcaacttgaatggagctggaggccattattctaaataaagtaactcaggaatggaaaaccaaacactacatgatctcacttacaagtgggagataagctatgggtatgcaaaggcatacacagtgatataatggacatatgagactcagaggtcggggaggttaccaaggcagtgagggataaaaaaaataaaactacaaaatgggtacaatgtacagtactcaagtgatgggtgcactaaaatctcagacttcaccgctatacaattcatccttgtaactaaaatcacctgtacccttaaagctactgaaattgtaaaacttttaaaaaataaataagtaaaaaataaaaatgaactggataaaactgtaaagttaaataacagtagatagacaggtccagtatataataagctaatgaaggaaggcacccccctggataggactcataaccttaatgtgaaggagagccatcttactgatgaggttgaaaacaattcttatttgatttgatacaacagagggctcttcactaactaataggggaaaaccaattgcattcagatgcacatggccaggtcgaatgtaataaaataaaatgtgtactctggaaaacagtctgcccttgatctcctggaaattgattatctcagggatgccaagatgacaggaaatgttaactgactcccagtgtgacaaggtctacgggacttagaacagggataaaggcatttacagataaagtaaaaagaaacttggaaatcaaaatataaaaagttgtgaatatggatattggcaccaacaataatagtggagaaaaggatggagaataaaaggtaaatggggctgggcgtggtggctcacgtctgtaatcccagcagtttgggaggccaaggcgagtgggtcacctgaggtcaggaatttgagaccagcctggccaacatgatgaaacctcgtctctactaaaaatacaaaaataagttgggtgtggtggcagccacctgtaatcccagctacttgggaggctgaggcaggagaatcacttaaacccaggaggtggaggttgcagtgagccaagatcgtgccactgcactccagcctgggcgacagagcaagactctgtctcaaaaaaaaaaaaaaaaaagtaaagggacacttgaattaatgaggaatgtagaagcatgtcctatatatagatcaggaagaagcagaaataagatgatgaaagattaggataatggatgcattcacttctaaggagatgttgttgaaagatggagaagcaatgcttaatgagtcacaatgaggctggcaattgtccctcttatccctgtgtgacagggctcccttttcagccagtgttttctggcaccacatttgatgtttatggctggtattcaggccgtttggtgtccatagcagttggtagagattcagaatattctcattggctgctaggtgaggaaaatgaggaaattaacctctattgaaaagagtttcaagcgaagtaggcaattaaggggaaacccaacatttagagagaaaagtgatggaaaagtttcgagaaatatttgagacataggagaatgtgttcacaatagaaggcagtataaggagcagattgtgcatgaaaggaatgagaggaaagaacagagaagtagggctgaacagtgtgctccacagtgatcactttcagtaggcaatgaaggagccaggagcctgggaggtggattgcctctacagatttgttatgagaacactcctcccactccttggggagggattttctcactaagcacactctggtctcttctccacccctgaaacagtccctgcaaaggtagagtgacgaatctgatctgtaaattcagggagaataattgggcatgcttagctcagcccatacggtccacttgacgacaggccatgaagatactgagttcttttctactcttccatgtatggtttctcacttgggaagccaccttgcccagtgactgctggtgattctgcctcattctggggtttggttgacagctccactcaccttcactctaagttaccacctccaacctggcctctatcagtaattaacatggcatttgagttctctattggccacatgatgaatgccccttgagcacactttgtttcatacttgttcagaatccagccagcaaagggggaagctgttttgggagaccttctcagaaatccccaacattaccgaccgagagaaaaacatagggtagagagaattcctgtgtattttaaattagtgccaaacaaagaggtaatcaatgagaataataatagctaacaattactgaacacataccacgtgccaccatttttggcaaatgcagaggctaaattaaataacaaactattttatcttttataaatatccaagtaataacaaacatgctattttaattttatcttattcattttttaaatataaaaataaagaagagatcatttacgcctttagctaaacttacctaatctagttaaaaatggcttttatccaaaagtcaggcaataacaaatgctgtctagcatgtggagaaaaaggaacccttgtgaactgttggtgggaatgtaagttaatataaacactatggagaacagtttggaggttccacaaaaaactaaaaatagggctaccatatgatccagcaatcccactgctggctatatacccaaaagaaaggaaatcagtatatcgcagaaatatctgcactcccatgtttgtggcagtactgttcacaatagccaagatttggaagcaacctaagtgttcatcaacagataaatggataaagaaaatgtatttatacaaaatggagtactattccaccattctgtcatttgcaacaatgtggatggaaggggagatcattatgttaagtgaaataaaccaggtgcagaaagacaaacattgactattctcagttattttggggatctaaaaatcaaaacaattgaactcatggagatagagtagaaggatggttaccagaggctgggaagggtagttggtggggcaggggggtgatggggaggaagtggtgatgattaataggtataaaacagttagaaagaatgaataagatccagtatttgatagcaaaacaagggtgattatagtcaataataacttagttgtacattttaaaataactaaaaaagtataattggattgtttgtaacacaaaagataaatgcttgaggggatagataccacattttccacgatgtgattattatgcattgcatgcatgcctgtaccaaaatatctcgtgtactccataaatatatacacctactatatgcccacaaacattaaaaataaaattaaaaaaatttttaaaagccatatctaatctctgtaaaagcacggacaggttaatatagatacagatacagcttcaagctgttataaacttgcaatactatcaactataataatagagcaaatgcattcttccctcctcttcccttcacagatgagttccttgagataacgagactgagtagactcagttctttttccacgtactcacctccccttctgtctctttagtcctctgcaatcagatttctccctcaaccagaaaaaaaaaaggccctggcaaaaggccaccaaagcccttctaattgctcctggactctgcaggcctgatcttactccacttcctcaagcagcttgcaccattacttatgcacttcttttagaaatccctctttccttggctctcgacagcattcctggatctcatccctcttcaggatagggacttctcagtttccttgctgcttccctctccttcaccattccttatgtattagagtttcttggacttctttgccctcttctaatgtttcaacctctctaataactaactcacaatggttacctgccacctgtctctggacaccgcctcccgtctgtctatttcacctactgctctcttttgaagagcagatctccatctaatggctttggctgtcttctcctggatgtctcaccagtgtcttaacaacgtgaactaattatctgctcaatctctcttccctttcctagatgccgaaagtgtctcctaccaggtctcccctcttcagaacaggctcatccgaggcatcctccgtagctgtgtgagggattcttccaaagcccaaatctaatcatgttactcaaaaggctcccaattccatccacaatggaagggagcttggttacacataggtgtgcatgacttgtctcttacacctctgtctttttgttagccatagtcttttccccatgacaccagcagcaaactgtattctcagccagacttaatgtattgattttcatatcaacacagtgttatttcaagcccctaacttagttacccttccccagtcatcacctagactatctggggaataactatatatgtttcaaggctcagctaaggaatgacctcttttatgaagccttctttgatcatctgaagtgagagtaaccactctctgctttgggccctaccttaatctaaacagatttgtgaacctctaggggtagggactacatcttattaatagcaatgccttaagcacagaaataagtttttattacatgcttgaataagtgcttgaatctcttgaggtgactaatcaaagtaaaagttattttaattcattatcacattaatttattattacattttactggaatgtctgatctaccttaatgcaaaagtccactgccacaagcatattctcccatcttctaaaaataatgttaacttacttattacataatattccaactgtagtttataagttctttctttccaggttaaaaaaaaatgtgtcatgataggcttaggcaataactcccaagaaagaccaaaaatttcttgtctgtaactttttacttagaatgatctgtttatgatataggtcttcattaaattattcttcctaaataagtcattctctaacctctgaaaatcccagcaccatgtataccatcttcactagggccagctctggaattcttaggttgctggcatagatgacttgctggatgctcagtgaatgcttttcactattaatattttaaatatttttgttcatatttatgaggaatggaaagttgcaacctgatgggatctaggcagttgaaaattcaaatcttaaaaaagtataatccctcactacatagaactccctaattttcttctcttactaagaaaaagtagttggccaatgctgacctattgtatttcccaatgggaactttacacagagcatccatgtccatgctgcattgctcccttcctcacatgtaagaggaactgcaaattccactctctgagctccagaagaataaaaacctttcaatacatcttagaaaaaaaaattttaattcatttatgataagtaatcattgaaaattctgttctccattaaatcttgaaaccagctgaggcagatccagtgagcccctttatgtataaaaatacttaactagatgctttcttaggcaggatttacatagattagggaactatcaaaccattccattaaatcttcatagcaatcatgagtgttaaatatttctattctgattttgtaaataaaataatccaaggctcaaagaggctgagtagtttgttcaagatcagagagtaaatagtgaagtcagagtcaaattcaagaccatttggtttaaaggatgtacacttggtacaaggcaaaaaacaaaacaaaacaaaagctgatccaggacttcctgccaatgttctgcttttagatttttgctcaataacatatttttcagccagtattcactaaatttatatataattaggagctgtccactctctattaaatatgatcttaaaatattcttgatcccaataacactaatcatactgtctctctgggtaattttcaaggtcttttcctagtcagaattctggtcctaaggttcatccttatttaattttactctctccaaatgcagacatgaatcatcaattttccattttagtgtccataagagatatttaatttctataaatacatcttgaatgaggcataaaaaacaacatgattaagcaaaacatgttcactgccaagagtaaaaaagatctagattcaaactctgacttggcacttcttagccccaaaacttggcaagttccttatattcattaaacctctgtttcctcatagaagaaataatgttaccacccaccttactaggattttttgattacgaaataaagtaacatttgtaaagatcctaacaagtacttagtcaaggtaaacactcagtaattagcagatgttgctaacagtattgttactagtattgttagatttaaaatatatgaacatttatgaatagtctagaacaggtggcagaaagtattggacacaaatagagcttgaactatataactcaaggaaacaggctttgcattaaaatcttaaactatttctgatgaaatagaagtggtggtaaggctgcgctttctctttctgatatacaaaaatcacaagtatctaccccttccaccccattatttttattttgatattgactattctgacctgatgctagcagattttgcttttaagtcattccatctttggttcatatcatccagtcgatgttgaagcatagtagcctcttcagaatttcccaaagcttttaccatcttctgcctgtttccgtcaatgcttttaaatatgtcattgtgggcatcaatttctgcctggatgtcctaaacagaaaaaagcaaatagataatgcaagtgttaggaatcagtatatctttatattcacagatgagttgctctcaagcaaaatagttcatttcaccttaaattataagaaattcaagtgcttccaaaattcttattattctgaaaattatagtctttaaatcttcagtacctccagctttgttctttttgcttaggattgtcttggctatacaggctcttttttggttccatatgaaatttaaagtcattttctctaggtctgtgaagaaagtcaatggtagcttgatgggaatagcactgaatctatcaattactctgggcagcaaaagaaactaccatcagagtgaacaggcaacctacagaatgggagaaaatttctgcaatctatccatctgacaaagagctaatatccagaatctacgaggaacttatatttacaagaaaaaaagcaaacaaccccatcaaaaagtgggcaaaggattcaaagagtcacttctcaaaagaagacatttatgtggccaacaaacatatgaaaaaaagctcatcagcactggtcattagagaaatgcaaatcaaaaccacaatgagataccatctcctgccagttagaatggcaagtacacaacaggtgctggcgaggatgtggtgaaattggaatgcttttacactgttggtaggagtgtaaattagtacaaccattgtggaagacagtgtggcgattcctcaaggatatagaaccaaaaataccatttgacccagaatcccattactgggtatatacccaaaggattataaatcattctaccatacagacaaatgcacatgtatgtttactgcagcactatttacagtaacaaagacttgaaaccaacccaaatgcccatcaatgatagactggataaagcaaatgtggcacatatacaccatggaatactatacagccataaaaaagaatgagttcatgtcctttgcagggacatggatgaagctggaaaccatcatcctcagcaactaacacaggaacagaaaaccaaacaccgcatgttctcactcataagtgggagctgaaaaatgagaacacatggacacagggaaggggacatcacacaccgggggatgtcggggggtagggcgaaaggaaagggagagcattaggacaaatacctaatgtatgcagggattaaaacctagatgatgggttgataggtgcagcaaaccaccatgtcacatgtacacctatggaacaaacctgcacgttcagcacatgtatcccagaacttaaattgaaattttttaaaaggtgttcaatacactgactcctcaatttttttaaaaaatgtattgtaatctatagttcatgtaccagctagttagatgttggtatatcagattcaattagcaatttttgaaatcttatacaactgttgttgccaaatcactgaactttgcctaatatccaacagactcttactctcccgttttcacataggtaaaacttcccttaaaatattacatcttacagaggtcactaagatattacataactataactaaagtgtttttcacattttgaaacatttactaatagtttgtcctttcagtcttataaaatttatttctaaaatgttaaaagaatatttttatatacaagttcatcatctttaagaaataaaaactagtaacaacggtttcatcacacaccggggcctgttgtggggtgaggggctagggaagggatagcattaggagaaatacctaatgtagatgacgggttaatgggtgcaacaaaccaacatggcacatgtatacctatgtaacaaacctgcacattttgcatatgtatcccagaacttaaagtataattaaaaaaaaaacaaacttttaacgtgtcagcaaaaatacttccaaaagcatagaataactgatatattcaggcttatgcacacacaaaaacagagaaagaggggagagggaaattttgacaagatctagcctttatgcacatatttaagtgaagttatctgatttaaaatggttcttaaatttatcaacctaattattttattattgatgtgaaagatcattcttgggaataagcacgaaaaacatatatttggcatgtaaataacaatctaattcttctgtaacagaaaaatttctggctaagtataaagaaagtacaaagaaagtcagtctccctaactttacttgcccttaatctattttgataactaaatataaaagaaaatattatcccactgatttatccaaaacaattgcatgcattatctgggaaatttcaataatttatttatatctagtattaaatgaaaaagccaaaaaaaaagaaaaatagtttatctttataaaatacatttgggggcagtttaagtaaaattagaattattataaatttttttaaaattggttcagattttggggaaacatttggcaatctatatcaaaagccatagacttaaaattcttttgaggaaaatggcagataggagacaggtctaatgcacagctcctgcttaggcagacagaacagcgtctggagactcacaccgtgaactttcgctccaagaaccactgcaggaacataccaggaaaaccaaaagaattcacagaccctttcaaggaagcaacttgccactgcaaatgccacaagacagcataagctcttgggagttttacagccttacccatcacctgagatgacctgagtactcatcctggccaacatagggcaacattataccatccttctactactgcagctggtgctctcttgaaagcaccacctcctggctagaggccaaccaactcaagttatgacagcaactcataacagaacaaccctgctccaaagaaggagaaaacaacagctaattccactgcttaccacacatcagcttaaccacaagtcctgagtctgttcacatgacaacttcactgctagcataactggcattcgagaaaaccagagcactaaaccaaactacaaccaaggattcccacagagtccacttcactcccctgcagcctccactggagcaggtgctactatccatggctgggagacctgaggacagatcacattacaggactctttgcagacattccctaggatcagattggagcccggtagccctgctgggtggctagacgcagaagagcacaaccatcactgcagtctggttctcaggaagccccatccctaggggaagggggagaccactacatcaagtgatcatcttatggggcaaaagaatctgaacagtagcccgtgagttccagatctttccaatgaaacagtttattcaaatgagaaggggaactaaaaaagcagttctggtaatatgaaaaaataatgttctataacacactcaaaagatcacattacctttccagcaatggatccaatccaaaccaacaagaaatatctgaattgccagataaataattcagaaggctgattattaagctactcaaggaggcaccagagaaaggtaaaaactaccttaaagaaattttaaacatggccaggtgtggtggctcatgccagtaatcccagtactttgggaggccaaggcaggagggtcacttgaactcaggagtttgagacctgcctgggcaacatggtgaaaccccatctctacccaaaatacaaaaaaattagctggaaatggtggaatacacctgtggtcccagctacttgggagactgaagtgggaagactgcttgagcctgggaggcagaggttgcagtgggccaaggtcacaccactacacaccagcctgggtgacagagggagacctcatctcaaaaaaagaaattaaaaaaacaacacaggttacggatgaaaaagtctttagagaaatagatatcataaataaaagacaatcacaacttctggaaatgaaagacacactcagagaaatgcaaaatacactggaaagtttcaagagaattgagcaagtagaaaaaaaaaactttagagctcaaagacaaggctttccaactaacccaatctgacaaagacaaataaaaaataattaaaaaaaaaacagcctccaagaaatttaggattatgttaaacaaccaaatctaagaataattcatgttcctgaggaagaagagaaatctaaaagtttggaaaatttatttgaaaaaaaaaaatcaatgaaaacttccatggttttgctaaaaatctagacatccaaatacaagaagctgaaagaacaccttggaaattcgtcacaaaaagatcatcacctaggcatacagtcatcaggttatctaaaaccaaaatgaagaaaagaatcttaagagctgtgaggcaaaagcatcaggtaacctacaagggaaatcctataagattaacagcagatttatcagcagaaactctgcaagccagaagggattggggtcttattgttagcctccctaaacaaaataactatcagccaagaattttgcatccagtgaaactaagcttcataaattaagccgagataaagtctttttcagatgaataaatgctgagagaattcaccactaccaaatcagcactacgagaaatcataaaaggtgctccaaatcttgaaaaacgacttgaaatacaccaaaatataatctccttaaatcataaatctcacagaacctataaaacaacaacacaattttttaaaaaagggtattcaggcagcaaccagcataaggaatagaatagtacctcacatctcaatactaacattgaatgtaaatagcctaaatgctccacttaaaagatacagaatggcagaatgaataaaaatccaacaaccaagtatctgctgtcttcaagagactcacctaacacataaggactcataaaaattcaaagtaaaggattacaaaaagatattacatgcaaatggaaaccaaaagcaagcaggagtagctattcttatatcagacaaaacagactttaaagcaaaaactaaagagacaagaaaggatattatataatgataaaaggattagtccatacacctaacataggagctcccaaatttataaaataattactactagacctaagaaatgggacagatggcaacacaataattgtaggggacttcaatattccactgacagcactagaggggtcatcaagacagaaagtcaacaaagaaacaatgaacttaaactataccctagaacaaatgggcttaacagatatttgcagaacagtctacccaacaactgcagaatatacattcttttcatcagcacatggaacattcttcaagatagaccatatgataggccataaaacaatcctcaataaatttaagaaaatcaaaattatatcaagtgctctctcagaagaccacaatggaataaaattgtgaattaattccaaaaggaaccttcaaaagtaaacaaatacatggaaattaaataatctgctcctgaatgatctttcagttaacaaagatatcaagatggaaattaaaaaattatttgaactgaacaataatagtgacacaacctatcaaaacctctgggatatagcaaaagcagtgctaagaggaaagtatacagcattaaatgtctacaccaaaaagtctgaaagagcacaaacagacaaggaaaggtcacacctcaaggaactagagaaacaagaacaagccaaacccaaatccagcagaagaaaagaaataacaaagatcagagcaggactaaatgaaagtgaaacaaacaaacaaaaaacacaaaaagtaagtgaaacaaagagctggttctttgaaaagataaataaaactgatagaccattaacatgattaaccaagaaaagaagagagaggatataaatgagctcaattagaaatgaaatgggtgatactacaactgatactacagaaatacaaaagatgattcaaggctaccatgaacaatgtgaacacctttacacacataagctagaaaacacagaggagatggataaattcctggaaatatacaacccttctaaattaaaccaggaagaaagagaaactcggaatagactagtaacaagcagcaagattgaaatggtaattaaaaagctaccaaaaaaaaaaagtccacaccagatggattcacagccgaattctatcagacattcaaagaagaactggtaccaatcctattgacactattccacaagacagagaaagaggaaatcctccctaaatcattctacgaagccagtatcaccctgataccaaaaccagaaaaggacataacaaaaaagaaaactacagaccaatatcactgataaacacagatgcaaaaatcctcaaaaacatactagctaactgaatcaaacagcgtataaaaaagattatccatcatgatcaaacgggtttcataccagggatgcagggatggtttaacatctgcaagtcaataaatgtgatacaacacataatagaattaaaaacaaaaaatcacatggtcatctcaatagccacagaaaaagcaattaacaaaatccagcatccctttatgattaaaaccctcagcaaaattggcatagacgagacattccttaaggtaataaaagccacctatgatgaattcacagccaacattatacttaatggggaaaagttaaaagcattccccctgagaaatggaacaagacaaggatgtccactttcatcacttctattcaacatagcactggaagtcctagacagtgcaatcagacaagagaaagaaataaaggacatccaaatctgtaaaaaggaagtcaaactgttagctgtaaaaaggaagtcaaactgttagctgatgacatgattgtatacctaaaaaaccctaaagactcaaccaaaaagctcccagatctgataaataaattcagtaaagtttcagaatacaaaatgaatgtacacaaatcagtagcacagctatacaccaacagtgaccaagccgagaacaaatcaagaattcaaccccttttaaaatagctgtaaaaaaaataaaatacttaggattatacctaaccaaggaggtaaaagatccctacaagcaaaactataaaatgctgctgaaagaaatcacagacaacacaaacaaatggaagcacatcccatgctcatgtatgagtagaataaatattgtgaaaatgactatactgtcaaaaacaatctataaattctacatgattcccatcaaaatactatcatcattcttcatagaactagaaaaaaaaaaaactctaaaattcatatggaagcaaaaaggaccccacatagccaaagcaagactaaacaaaagggagaaatctggaggcatcccattagctgacttcaaactatactacaaggctatagttaccaaaagagcatggtactggtataaaaacaggcacacagactaatggatcagactagagagcccagaaataaagccaaatacatacagacaactgattttcgacaaagcaaacacaagcataaagtggggaaagttactctattcaacaaatggtgctgggataattggtaagccacatgtagaagaatgaaattggatcctcatctctcaccttatacaaaaatcaattcaagatggatcaaagacttaaatctaagatctgaaaccataaaaattctagaagataacatcagaaaaactcttctagatattggcttaggcaaagacttcatgaccaagaacccaaaagcaaatgcaacaaaaacaattataaatagacgggacttaattaaatgaaaaagcttctacacagcaaaagaaacaatcagaagaggaaatggacagcccatagagtcacagagtgggaaaaatattcacaaactatgcatccagcaaaggactaacatccagaatccacaaggaactcaaacaaatcagcaagaataaaaacaaataatcccatcaaaaacttgattaaggacatgaatagacaattcccaaaagaagatacacaaatggccaacaaacacatgaaaaaatgctcaacatcactaattatcagggaaatgcaaatcaaaaccacaatgtgatacccccttactcctgcaagaatggccataattaaaaaataaaaaaaaatagatgttggtgtggatgtggtaaaaagggaagttttacgctgctcatgggagcataaactagtacaaccactatgaaaaacagtatggagagtccttaaagaactaaaaatagaactaccatttgatccatcaattccatacttgggtatcttcccagaagaaaagaagtcattatatgaaaaagacatgtacacaggaatgtttatagcagcaccatttgcaattgcaaaaatatggaaccagtacaaataccaatcagtcaacaagtggataaagaaaatgtaaacatatatgtatacacacacacacacacacacacacacacacacaccatggaatactacaatactactcaggcataaaaaggaatgaaataatggcgttcacagaaacctggatagagttggagaccattattctaagtgaagtaagtcaggaatggaaaatcaaacatcgtatgttctcacttataagtgggagctgagctatgatgacagaaggtcataagaatggtataatggactctgggagctccaggggaagggtgggaggtggggtgagggataaaagactacacattaggttcagtgtacactgcttgggtgatgggtgcaccaaaatctcagaaatcatcactaaagaatttatggatgtaaccaaacatcacctgttccccccaaaactactgcaattttaaaaagccataaaaatgttaaaattatctaacttaagaagacttatgtataaaaatgttttaacacactgattgtttttagagtaaaagagtggaagctatcataatatattagtggtgatataatatttttaacaacaggatataaaactatatattatgataatttcatttttaaaagtacatactttaattggcatatgcatttgtgtataatttgacacatacacaataggactacaaaaataaacaaaaatagtgtaacctctatagaagaggattacagataagtttagttttcatctctatacttctctgagttttcaaaaagttaaactcaaagtttctttttattagataaatctaacaaatttaagatatagagtgtctatccaatttttttcctacttttcccttataaaattgtcagcataactatccatattagtttggcaattatcttttcctcctgaatttaatggaagcaacctaattgtagctaactctggcatgacagccagtaatgtatcataagtaagtgtgaattacaaacagaaaagcagggaccagagctgggtatgaagatgtggtgtgagtctccatggctatcattggtaatgaacagtaaaacagctcactgcagaaataaaaaacttgcatttcaggcaatgaatctgaattagtaaaggagagcaaactcctaaacaccatagttctattgtccttctactctgaagcttttctttataagactctgctatagtctgaatatttgtgtcctcccaaaattcttttttttgaacccctaaccctgacaataatggtattaggaggtggggcctttgggaggtgataaggtcatgggtggagctctcatgaacgagattactacccctataaaggaagccccagagagctgccctgcccttgccatcaggtgaagacccacctagaaggtaacacctatgaaccagaaagtaggccctcactagaatatcgaatctgccagtgccatgatcttggacttcccagtccccagatctgagagaaatacatttctgtggtttataagctactcagtctatggcattttgttataacagcccaaactgactaagacagcctcactcattgtaagtttctcttgttataaataaataagcagggtgaaaatttacataggaatactttaaatactcagaatgcttttctttatttaaaattcactcctagtaagcacacccatgcattctaccaagaatccaggcttagggaccagcatctaagtgcttgtttttcaatcacccatagacctccactaaccagaaacacccaaggaagggccttttgcacctcactactccaatcagcatgttaggaagatgtcagttacatgaggtgaattggcagcactgacctagtattatttctgatgggatttgagatgtctaacatgacactaatagggtcagatttagagactgggtgagatgaacacaaagtttaatagacagctcctgcaagatttatggtccaaatttgcaaacccattgatctctgaggttatctgacccaaatgacaaaaccaaatctggtccaatgcaaagtgtggtttgcagtttgcagaattaggcctaaccgctgaataaaaactctgagattgttgaatcttttgcatttcactggcagttctatcccagagcagtgcagaagagaagtgaatagggcagctgggaaacagagccagataatgattcaaggttctcaggctgtgcaacattatgtgtagaaaattgcagtctcattataatcatagtttgagatgtgccaaatagaaattctcagtgaaaaaaagaaaaagggaagttccgctgaaaagttctttggtgtcatctcctgatacaactgttctatttttgtgtcctgaagtgcattttaagacctctaaagagacatatttaaaggtgtgcagatagtgttttgcaatgattttatgcttacgctatatatctgtaaggtagccatctttctcaggaagctcaatgacacgacaagcaaggcacctctttgctctctattgccaaggagaacctggcttcaaatttcctgtttaagttcctatacatcattatcgatgaaccacacctaaaatcacaagacaacttcaaactacaacatcctgatgtggtttgacctatttgattcctttcacattgaagagaagcaaaaagtaaaaggccgggcacagtggctcaagcctggaatcccagaactttgggaggctgaggcaggttggtcacctgaggtcaggagttccagatcagcctagccaacaggatgaaaatcccatctctcataaaaatagaaaaaaattagctgggtgtggtggtgcatgtctgtaatcccagctactcgggaggctgaggcaggagaatcacttgagccctggaggcaaaggctgcagtgagctgagatggtgccactgcactccagcctggatgacagagggggatttcttctaaaagaagaagaagaagaagtagaaggaggaggaggaggaggaggaggaagaagaggaagaagaagtagtagtggtgcattaagatgcatagttttctaagtttcacaagagcatacgcaacatcaggacatttgggttccaagaacataaagaaaattcgccttctcacatcagatcaggcgatgtgttttccaacccagctaccacgacgaatgggaatgaaacaggactgcatagctggcccaaccaaggatgataagcagttccacaaacctttctttaactgtgctaccagtgatcatatgttcatgttggaatataattttcagtatgtggaaaacccttccacacatgatcatcatcaaaagttgggaagaaaatcaaaccacaagtgatcaaagaaaaggaaatccacagacattattttgttttatttgacatttggtggcatattaactttgccaaatatacccagagtgcctcaaaacagaaaatcatcttaatatttcttctgtatcctcacagtctctgttacatagaaggatcctaatgtaaacagagtagatagatgacacatagatacacatatcaatgtatgagtggattaataggtttattttgattgactggcaaattggccactatagtgctaggagaaaaccaaacaattgaaaaattggaaggaaatgtagtaatcattttgtgcaatttcttcacttgaaaagtttaatgggggaacttaaaataatttagaagcctgcactgcaaagtcctggctaagcttgcactgaaaatttagaaataaatgcagttaatgaatcatgtttcttcgtagatcactatgcaatgatgcactgatttgaaactcaggatgtcagcatgggaggctgtcagatcatgaccctgatgtggcgtcaaatgctacaataaattaaagttccatgaaagagggctggctctcactgcacagctgggagacttggccctactgatgcttacctctgtcacctgcaagcccttctgaactttaaacagcacaaaatggttactgataattagttatgggaatgtaatccatcttgaagcacaaagcaatgctcttccaagcatttaacataagccagtcatgtgcacagaggggccatggcaagatattcaagcagttgaactaacatttgaaaacagggcagaagcaatgtcctaaggattcacttgaaaagtattttaaaacaatgtaagtataatgtagaaggttaagaaaagccaggagttagaaaaataggactacacacttttctctaaataaaacaccatcaaaagcataagatgcaaaccctcagaacagccctccagaagatggctacaaaagctcactgaggttcactgataagtggttagtctttctgtaaacaacacccactattcagatcaagataaacttcacaaatacgggaaaacatttatttatttactttttacttatttaataattagtatttgactacaagttttgcccttaactgggcatttctctaatgatataacccatagagatataactgtaaacactttataatgtatatcaaataacttgtttataatgtttcacagtcaagctactacttgattataaagctacaagtagtagcttgattataaaacattataaacaaattatgtgatatacattataaaacaaatcaataaaacatcatgaaaataaaacatattttgcttaaatatgtaagcaaaaatatttcctcacattataataaacagaactgtctgaaatctctgacaggaaacagagatttagaacagtaccaccaggaagtcttcaacaactaaatgggtgctagactagattcatcctctttggtcttgttaaaataattttggtttatttttgcaccaactatttacttaaccttatgtggcaacagtgatgtttttttctgaaggagttctgacccctttcctgaaggtgaagaagaaatgaggttagaacaatttcgctatcatgtcccaaagctcagcctaactaaacaaagttaatcattagaggaaaataaatccaccattcctttcaaaagtcagactagatttcagaattattatcaggagctcagcaggattactgccagagctttaggttttgaaaatgaggaatcatgattttaaaaatatatatatatattacttaaataataatagaataggcaaataacatcatcttcaaaggttatgtcatatgtaaatatgttttgaaacagtttgtgaggtttctgggatagtaattgtcattaattattcaattaatttattgattttaattattattctataaattttcttccaacagctaatctcacagattttaatcactctattgaatcacatttttgactgacaatagaggtggtatcatcaggtctacagcagcatttctgaattaagaaatcgatgctaataatgttcttttcctattatctgtgatgataaatataggtaagactcgaggtgggtggatagcttgagcccaggagttcaaggtcagcctgagcaacacagcaagtccatgtctccaaaaaaaaaaaaaaagtaagacaacagagtagaaaacagtcaaattactaagtggaacaaactcagatagtgtgatgaaaactgaacaaacaaatcagatcgtgtaatcaaaactgaacaggtcagaaaacccagagaaaaattatcgcatttcaaatgtttaaaactacaagcctggggcacacagcttctcaacttctgacccatgtcaaagcagtccctgttaccctgaaagctcccaatttcttcccctgacacaagtccacccatgggccacacacatgcacacacattggtatataatctcatttccttctttcaacttaaactcatctgttaagtctcagtttaaatgtaatttctccaggagagacttcacaagtactgagattagggctatcattactcttataatttcatctacttttgcttaattatgcagttgtcattgaaaatgtccttgtctgtatcctcccattcggccataagatcaatgtcttctccatctatacacttagactagcacctggtacatacttcacaaatatttgctaagtagggaataaatgaggagactttgaaatgtgtttactatatcttattgaggacacatttgttttaaaatgagatatggcaaactgagcaatacaatatagcttcaaattgtaattataaaagatagagtcatgtgaaaggaggtaaatgccataaagtaattcagcattgagtggtttctctctgtgttgttatgataggaagcatctttgcccaaggagtcaccaagagaatggtactaagagaacggcactcacacacacagcagacacatacatcaaaaaatcccttagagaactacgattatcattaaccattcagtagcaggtctgaataaattaataaaaggcagcagtcactcaaaatgtcactgagctaaaattggccattacactatcctctgtgactattaaacaaaagaaatacagtacacaatgcaaatggcttaagtatgacagtatgttaatagtccctaaagtcatgagatacttcctttaggaagtactttcagggaaaaaaattaattaaaatcagcgtggcaaataaaactacctattggctggatctcagagaggtgtgttggtggactagtcaactttgaatgtgaactcttcccatagtcacccttgagcccatggccacaacttctcatcccttatcactttgttagatgattaggacctgcttgctggcaggcacatcttggtatggggtcatcctcccctggtaagaagttcttcctctttaggtaccactcgagttggcatggttccctccaattgggccttcctaatctgtaatgagctgtcatcttgtaggaacataatacttcctgcctgcaagagactcctagccttgccctttctggttctagaagactagaaatcagtacccaatgtaagaaattgcccatcctgcctgtgctgggaaactacaatcccagcatcacacatgctgagacaaggtgctcaaccacatgccaaacattcttatatgagtataacatgccaaacattcttatatccagtaaaaatcacaaaaccactggatgtctccaaaattcaaaaatatcaactaaaatatccctttcaatttaccttcacaaaaaaactgctgtcttaaagttatgctgaaggtctgctttcacctgggaattttaatgatctgaccagtctataactttccagattagccaccattggaaggcctgctgctcagctgttggcctcaactactaagcgtatcaggatttgagtctactagtccaacagtggaccctcgttttcttaaagcctgaaattccttcaggaatacagcaaaatcccctttctactgtggtcacctaaacttcagactgaacaatgacaactgctgatatgaaaagtggtaaatcgttaaggctagtattctctctagaaacaggttactaatactgaggaagagacaggactgagaattgagggtaaagggactctacctctgcgtgtagaatggctgttactcagcttctgaagggatcctgtggcttctgcattatagcagtaggccttggtctttccctagaaatggcattattgctttgttgggggaaggtggttagttgtatttgagacgtgtgaggtactgatacttttccgtaattccagttttcctgccaataaaccaatgaagcaacatctcaatatatgagacagattttgtaagaatacgcaaaggattttattaacactttggaaagaatacattcatgtacgacaacttcctagaagtaaaatacggccaaagagatcaactttcacataggtttttataaaactgcctaacacaaaaatacacatatatggagaacttcagactgagaattacatcaggactgtttctttgagttcgccttttgtctcaaaaataaataaataaataaatagataataataataataaaaatcccaaatcaagcctttgacaggaaaaagccagtagatatcttctactgtcaattcaactactaaaataggaataagacaaatactaagacatgggagttaaaaggggaaacatgctaatataaccagaacttctaactctgccaataaaatggcttgaagctgaggcaggttaggaacccctggtatctgacctagacttttaagactaatagcagcaattacaatacaaaagtccagctattgcccacaattactgcctctcagggggtctaagtaatgaattattcatgtaacatatgctctatacctttaaaggaagaaacagacaaatctatacaaaacaagctaacagacctctttatggtcataaagtttgtcacctgctgttaccagctgccataaggaagatattccttgccttccccgccccttctaagtggagagcaagctgagggagaaccgtcttttactctcaggaatttagatgcttaaccacatattaaagcgagaggtcgaagtccgccctgtgttacaagcctaatccttacattacagtagaggtgcagagagagattgggagaagcaactgcagccaggagggagcaaagagctaaattcttctctctccacattcatcccaccataacgttcctatcatcaaaaggcaagcagtgactgcaattgttttggaaaagcttccaaacttttcagatggcatgatgttgcatcttttccctctggcaattgtggtttgtaagaaaaagcccattattcttttaatgactcaatccagtcccgcttctacagtatttgtacttgcaatgatccatggggcattcacggtgaaagccactgagcacagctttttaaatattaataattgacttacataccaagtgagggaggacttcacccctttctgcctttctttttctttaaagactggaaattggaagaagattggtgtttggcatccaaaggctaaagagggcaggagcgcatacacgcatgtggaggttttctgttttaactataaatgtaaggtagtatttggcaggctagactccatctagattgtgccaggagccttcctatggaaaaaagagctacacgcacatttaataatccaagcattaaagcttcacagtgcatgcaagcactccatgtttaaaacagacacgctcagataaaaagcctgaggtcagatgtgccactgtcactgtgaagcgacttctgccacccacagctgagtccccaggcagagggctgtacagggcagtgcacggcaggcagtggctggacagataaacctgaggggtatggagaacagaacccatgcctacgaagtcagactttggcaccaatacccagtgttttttgctggatttttattttattttcattttcttttttttttctccaaagaagtttcagttaaattaccagctgacttgagtacaaagagtttcttctgatgtggaattctaaaagtgacaggcatcatgagaagccctcctgaccaaaggaagtaattgctaattagccctttacttgaaaaacatctttaaaggagacagcaaaattgaatattccttataaattatactaaaccaccaaagagtcaatagagcatctatctaaatgtatagtgaaaaaaaaggcaagaaagaaaggaaaaaagtacattcatgaagtttgctttctgcataccttttcaaattttgtcagcagttcccgtaagttgaagttcagaccaatcattgtccagtagcccttgaagcctacatctttccggcaaacttccttcagacaacagcgtttaacttctaaacaccgtatcttttctggctatactttaaaatcctttgtaaaatcctttacaagccttgcccttgagctatggtccatcagcagcagcggcagcttgcgctgggacattttagccaccccactgtgggtccgttttttcatggacttcggagttcgcaaggaatagacctgcttctgtatttcctggtagctgtgttccacgaggctggcatggtctcctctttctctgggaagtccaggattcccttctgctcacctcactaatgacctgcaggccacaactgttctctccagggccccaagcttagagtttggtctcaattacatacagcaaaaaaagaagctatatcctggaaacttgcatgagagaagaaaaaaaaaaagccaagtattaccaacttcctccattcagaccgatttcagaacgaaaaaaaaaaaatcctgggtaaagagccagttttcaaagagcatgacttatgtagagttcgaaggaggagtgtactcttagctgaagaaacaccaaaacacaggacaagaggccaccggttctcactctcccagacaccagcagcctgggttgctatggtaaccaccaagctagtttcagtccatttccctaggtcagcctggcctaagggatgctgtcaatgcaacagaactaaacttgttttaaaaggtgttctgtctgtccagagaaaagctctcgcagcaaatctagtcccttctgccggctttgtggcaggggagagcagcctcagtgggctctggcagctcccctggctgatctgacagcagtgtggtaatcaacttctctttccagcagttgtttattattttaatcagcatcctccctttccaccacccctcacccagtttgaagtgaaagctcactcccacttcctggaggcctgcctgccccaaaagtcagttctctatcttttacattgtctcaatcttgaatggatcacaggttccatgttccagttgggagccaacccatgaaaagaaaagggagtgaatgtacaaaacaatacaaatcacaaaaggaaatacgcgttgattaattttatttttcaaaaaggtgttagcaggcaactgatgaagaaaatagttttaaagtgtttcgatctctttgatgccgctgaaagtcattcagactgttttcttatagggaatttacttgtttctgacataaaacttaatgagagaaactactgtactcaaaatgtgagtaataactacattgaatgtgtcttccattttgatgttaaattactactggcactcagagaaacaccatcttccaggaagttttaagtgtcatcgctttaaagaaaaaaactccaatccaaattataaattctttgtagtgatattatggatatcattccaaggcaaatgtgattttgcttttgcattacatagctatacagtataccaataaagtataacagaaatgtccatttgaaacatgtttctctagttgtaggcagagtttcatcataaagatgcagtgcttataatggtgacactaccacaagtagaataatgtaaattttaatataagtaagtttactttttttgcatcagggcatagaccaaagtgggggggggaacccctaaaatcagaatatgcatctcctaaagggctaatgagttgcttaaatatcaataccgttagcacttatttaatcatgggtcgtaagagattccatttaaaaccagaaaaactaaaaatctatcagggaacagtatacaatgttggtattattttttggatttgcaaatcatttttctttctatttcattcctaacttattttcatatcagtatttaaatagcatgtgttttacatatgcccatctatacaaattttaacaagcttttaaaatattttcattattttttcataaaaacctgtatgtccccaggggcaaaatggctttatgagctttctagcagaacgtgtttcacctcaacgcacatttgatttcaaaaacaaatgtgttaatctaatgcttattcagaaattcacaggtaaaaataatctacagtttggatcaaaacagcactgacatcagcatgaagaccaaccatcagaactgtggtgaagaaacttacagagaaagtggccacagggaacctggtctgtaaagactctggggccacatgctgagatctttcaagagcagcaaataaactttttacataaatacaagacaaaagaaaccaccagcaccagcaccatcaccaccaccacacacacaaaaaaataaataaataaaaaagggagagaaaaagaacaatctttctcagctgggcaaacttccagctaccacccagggtgctggatggctgggatcagggacatgtgcaaacacgccattccattcccccatgcacagatcagaagggtgaattaaacaaaaactccgtggaacaacagggaataccatagtctttctctaaagtagaccctttctgtttaaagggctcttataacaagacaagaatgatatgttattgttagagtcccacatatcttgtatccacacccaaggttaaacacaaggcataaagatgagggaaaagaaagggtatcctttgtattaggccttcttcccaaaagataagagcatgggaacttttatcagcctgataagtacctgagtcctggacaggagaaaggaacaagagtatgttctcctgtggaattcgagagtagaatatccagaaactgttgcctttgtatcagctaccttctcagaactgacatcctctgctaaggtagaaacgatgacacttaccgaaaactcccttatatacagttatgcagcaacaaaaactaagatattgacaaatctagctatgatgtcagcctctttttttttttttttttttttttgagatggagtttcgctcttgttgcccaggctggagtgcaatggcgcgatctcagctcagcgcaacctccacctcccaagttcaagcgattctcctgcctcagcctcccgagtagctgggattagaggcatgcgccaccacgcctggctaattttgtatttttagtagagacgggatttctccatgttcgtcaggctggtctcgaactcctgacctcaggtgatccacctgcctcggccttccaaagtgctgggattacaggcgtaagccactacacccagctgatggcagcttctttcgaagaaagagtacaaaactcagtggatccatattcaaaaacagatcatcaaaagaatatgggatcatttgaaagattttttttaaattcttaactaattttaatcacagggtaactatactctcactaaaacacaagaaagcaactaaaaatgttgttttttaagtgttaaagtcaaatagattattcatgtaaatatccaaagtcattctgtgaaattcaaatagctaaatatctaatatattactcaaaagtattgcactctttgataactgatacattaaaagacttgtaaatgtgagttgcttttataaaagtgagcacatttcatcatgaatttgtgtttgatatctataagataaagtgtactttccattacccagatgtagtggcccatgacgataatcccagctacttgggaggctgaggtgggagaatcacctgagcccagaaggtcgaagctgcagtgagccgagatcgtgccactgcgctccagctggggcaaccagagtgagactttgtctcaaaacaaagagtactttcttagtttaaagtcagtacacaaaatatcatcttggtaatatacctacatttctacagtccttttttatcaaccacctctttgatacattatcacctgtaatcctgtaattattaaaacaaaaaatagatgcctccagtgtaagcaatacatcaccagagagacttaataaattagatgatgacatttgaagtagttgacattttcccaatttaagccaatgtgcaaataaattgttcactaatcctcagtaggtggaatatgcttgacactaccaatccctgtatcagatcaacactgaataacccaggaatctctagctaaataaaccatgtttcaaacatagacatagagtttcatgagaaagcaaaaagttccagaaccacagagaagcacaggaaaactcagcaatggactcaagaaaatctaaatctaaactgcttaataaaaaccacattccaatgccaaaatgaagagagctataggtatggctttgccaacaactttcaaagggtaggacaatttacaaatgttttgtacttaaaaactatatttcatataatttgttaaaagatgacctatttagtaattttattaaggcaataaaagattctttacagctcaaataagaactttacatcttactcctatagtggatcttaaggcacccttcccactaaagacaatttttaaaactgtaaagatcaagtatgttttctatgtaaattctaacaggtttctctttatattggccaacacaaagaacaaaaagaaaagaaaagaagaaaagcttcttaggagcctctaaagtgaagcatatggaaggtcaataggtgattacacataaatcgctacatcatggcttattcattactaaaatgaggagtttctggcatggggagaaaagtttatttgttgtaagcccattctgactcaaagaaagatccaacttatttcttgtgaaagaaatatacacaattctccttttcataacccttctaacttgggatttagaattcaaaaataaaatagcttcaagaccctaatcgtgatctgagttttcaattcattgtcttctaccactgaagttccattagggagagaccagtccatacatttcgactttcaagttaacatcagcctgcagcaaagtgtgtcagctggtagctatttaaggtaatatacagccctaaagggcaaaaagttcaatctaaggatggaggcctgagtcccctgatgaaagggaaaactctccttttatcccaggaagttcaggcactatgctttgtacgcaaagaattatttttaatgtttgtctcttcagtataatgccatctactttgataattttacaggtggtcatggagaaataaaaattaggattcataagaaaaagattcaatacttaatatattttctataacacataaccaaaagattccaatagacattcaaagaggctcaaagagctttttcttcttcaggaaaatgggtgggtggggtaggggttcaggaagagaaataccagctgatttgcttctgaattagccaaccaggtgcaggagtcagccttcagcaaccttctaaatatttaacaattcagacggcactttattaggtgactaaaaataatgccaagacaagttaatgcttccaaaccatattcttcctaaaaaatatgcagcatcagacaagagggaaacaatctcaggaggccaagcctcaaattccagatgtctactgacagcacaagcctgtagcatatgcaactaaatccacagggctctgggaaaaaggctcttaaaggttttcaaaaggttttataaaggtttctccagttttcttcagctatgtagatttagtaaattgaagccaaaattaaaatacaaattttaataacagcaactaaaatgtcaaaacaaatcaaaattgaaagcgccgttttcagtcacaagtaaaaagctggtactttccccaggagggcattgttactataatctgaatacatatttaaggaactgaacattgggtaaacacagaggaagttcaaactaaccccacgcgatcagctatacttttgtgtataatactaagcagtgggatttctctcatgcttggaggctaatccattcattgtggagctactgcttcaactctgaaccatgtccctgtcatcttcttacttaggaacccattctgcattctctgcaaaatcacactctaaacctacttcaactccctaatcatgatccatcttcactaatatcaccaataaccagttaatacttaaccacatgaaccactcacacttacaactatggtttcccacaaaaagtcacacaccacaatcacacattttctcccctccagtcatatttactttctgtaccgttatctctcttccttcagatgtttgctctgagcaatgagttctacatagacggtgaacacagacaatgtattatgcacctttcatggaaatcagtaggctgattacaaaatgaagaattcctttactttaagtcattacatttcctagagattattagaatctgccaaatttgagggtaagggataatttaacaatgcccatcaaatgttaaaatgcatataacttttgactcagaaattctatcactaggaatttgcaaacatgtgtacagacatatgtacaaggatgctcaataagtcctacttgacttattgagctgaaaacaatctatatgtccatgaaaaggtaactgggtaaacaagttatggcagactcacataatgaaatgctgtacaactatggaaaagagagataatttcttttttttttttttttaagatggagtctcgctctgtcgcccaggctggagtgcagtggcgtgatctccgctcactgcaagctctgcctcccgggttcacaccattctcctgcctcagcctcccaagtagctgggactacaggcgcctgccaccacatctggctaattttttgtattttttagtagagatgggatttcaccatatttgacaggatggtctcaatctcctgacctcgtgatccacttgcctcagcctcccaaagtgctaggattacaggcgtgagccaccgtgcctggccaagagggagataatttctaagagcaaataattaacctctaatatgtatgcacgtacatatcctatgtatacgccaaaaagggggggagtgatatgtagttatgtacaggtacaatctatgagatacagataatatttctgtaaagatctataatacagcaataatggcgacctggaagggagggactggagagctgagtgtctagaatgaaacatttcaatgttcaatcttttatactgtgtgaaaatttcaccacagcctgtgtttctattttcatacaaaattaaatcattagatagaaaatacccaagtaaaacacatttaccttcctgagtagatacctattccaaaaagggtggcatcattatatttgaaagctaatgctactggagacaattatttttgcctttaaaagtttcagaagttttgaggtgccagatggtctaacactaccaaaccagccctcaatagaaacaagctttctgcagcagtgggctggtcaatggtaagcttttctaagggacagacagaacaaagcctttttgttgtcataagttactttataactagtaactcctgcttacttaaaggacaactttgtgtctaaacaggcattatataactcgagctattctcttcccaaggaaacgagtatccctattgtcatctaatactgtgatactacggtctaaagttttttggaatgtttataaaaatccattgataacgcttgaaaatgaatgtctggcctgatttgtccaggcaattgaagcatcgctttatctttcaagtaggtttaagtgatcccacctagactgtggcagagtgaaagcgccagagtctactagtgtctaaagagatgctgcaatgtgaatagcaccttcgtacatggatctaagttgcagaagtgaaaaagaaaattatagtttaatcgtgagggcaggtctttcccgtgattttcttgtgatagtgattaagtcttattccctggaccctgtttgtcaggttcagagacaggaggctttatgtgccatgaaggttactgtaacaaaatattaaaggaaatgaacgtccacaggtgaagcaccatctgacactgacatcagccacattcttgtttagggataagttaagccacagtagaagggactttgcaatgtcttgtcatctcaagctctgcatttgaaattgctaaacaaaggaatttaaagtacaatttccatctagaatttaatctggagagtgttttaactttaaaatcagaatatggaataattaggaagtaaaagagcctttaaaagtacaacacaatggggactcaggggaaagtgtgggaggggggtgagggataaaagactacacattggatacagtgtacactgctcaggtgatgggtgcaccaaaatttcagaaatccccactaaagaacttattcatgtaaccaaacaccacttgccccccaaaaacctattgaaataaaaaaaaatactgtaaagaaaataaaaaggcaagacacaaactggaagaagatatttacaacacgcaaactgacaacactacacattggtatagaaaagactatatgtagttcaggatgataagaacttaagtcatcagaacataacttcctcactaaaaattgagtcagatcattctactactatgatagtctgaaaagcaatacagaaaatgttttaattgtatgagaaaatattcattgatgttacatgtaaactagattacttatctgtattatttcatcctggccctatagtatatatttcatgggataaaaaagaaagaataacactctcgaaatcaaacgacctgtgtcatgatttcctttatgacacttatctagctgcttgaccctggaactcttgtctgaaccttgatttttctgtgtagaatattcctctaacacttgagcaaacactcttatcaagaaagacattcactagtactatataattgcgcatttgtttcaacacaaatttattgagatttagatagttttagttacaggacaattaagactttcttattattatatgtataccagaaatgcctgcattgactttttcagaggtgagggttccactagttttcatatatatcaaaaaaattgataaaaactctaaaaatatattattatagtattattatttcggttggtttaacagcaaaaaccgtgattacttttgcacaaacctaatattttgagagaagctaagtgtatgatattttaaaatatttcttcattttttaccacaaagaaaacttgttatgagttaacactggttattattaacaataaaattttaaaataaaatataaataggttacataaagatttatcaatgaccagtaattattattattattattattatttgagacagagtcttgctctgtcgctcaggctggagtgcagtagcgcagtctgggcccactgcaacctccgtctcctgggttcaagcgattctcctgtctcagcctcctgagtagctgggattacaggctcgtgccaccacacctggctaattttcgtatttttagtagagacagagtttcaccatgttggtcaggctggtctcaaactcctgaccttgtgatctgcccgccttggcctcctaaagtgctagggttacaggcgtgagccacggcgcccggcctatgaccagtaattattaaaagccagattgaataataaaatattcatcacatcagtgaagccattcctaaaatagcaatgctctattgtattcattgacgtatccccagaaattacaacagtctctaccatatagtagacaaccaaaagtcgttattgaattactaaattatctcatacatatcatctcaaacaactttgaaactttaaaacaagttggaatcaccaattaatacacccacatatacacactacttaaatatcaaaatatcttaatattttttgatatttcttgcttcttttctcttccacctcctgatatggtttggctgtgtcccacccaaatgtcaacttgaactgtagctcccataattcccacgtgttgtgggagggacttggtgggaggtaattaaatcatgaaggtgggtctttcccatgctgttctcctgatagtgaataagtctgatgagatctgatggttttataaaggggagttcttctgcacaagctctcttgcctgccaccatgtaagatgtgcctttgtttctcctttgccttctgccatgattgtgaggcctccacagccatgtggaactgtaagtccattaaacctcttttttttaaataaattacccagtcttaggtatgtctgtctttattagcagcatgagaatgagctaatacatctcctcacaggatttcttcacgtcatcattcctgaatccagtctctctgtattctccagttctgtatgctgcatgacaaacctaactgaatttgaaaactaatgaaaaagttacttcctttagctcaccttctatttcctcattaaagctagtatactagtagctaatttaaaataaaaaataaatatgacagtttttagaacacttatacaaaatgcttataccttgcaagttctgtttatgctccatcgaaaacacttaacattaaaaaaaaagaagttccctttaagttcccggcttacagatttaaaattcaaacattctttatactgtcgtatcattccctgtttctttaatgattctccatattccaacccccaaataactaaactgtgatgcagtgctgtccaatagaactttctgtgataatgaaaatattccatctttgtgttgttcaataataggatggctattaaacatctgaaatgtggctaatgatgtgactggggaaatacattttgattttgattttaattcatttaaatttaaatagtcacatacaaccagcggcaatggtattggagagtgcagccctgactcctaactttcaaggtgccacaatacagccttatcctacctaccaggcatcattcctacaatgttctaaacaacaggctttcctagcatgccctgatgcactttgtactttttctctgttgacaggattctattttcttaaataatagcctcctcgtgttttgttttttttaaatctattcaaattttatccacccactgaggaccaattcaatttccaccttctactcaaagccctgcattaaaaccctaattcaacaattccctatccaaatcggccatctccattatgctgtactgttaccctgtaccttatttacatgttgccttggcttgtttacaggttgttttgccaatgtgctttcccttccttgtcaccccaagggagttaagctctttaaataatgaagaaaaaagttaaatttatttgttcctcaaatgacctatagaatcctaaacataaaaccattgctcaataaatactttttatttgatatgagcaaaacaatttgaatatattaaaatgattcactcttcatgttttgccataatagaaaagaaagacatgatcttgacagacttttacacatttacaaagttaccaaaatagtctccaaattcaaactgcaagtcaaaaattctagggcttgattttaatccatcgttccattttctaaggatcccaagttaccctgcagatctgcactcatcttaactcataaattgcccccaggacagagaggctcccatcttcctgtaaatcattcaagcttaacttcatgatagaaaacgttaatttgattgtatttttttagtcatactttaaattttaaaagaaagtgctgccctcttgtgaaatgagctagaagatttatcatttcactgacagttgtgtaaatactacaaagggattaaaagttaaattttaacattaaaacaaaaacagggtttatctcaaagttgtatgtgtttcccctgaggtctctccccactgtgcttttctgctctgttggtgaatttcccaaccaaacaagaaatggatattagggtaaactgctcgtccttgcactataattgaaaaataatgaatgagtggtgtattttcactctattgggaatgaaaggctgtagtttctctatattactgaaggaataaagggaacaagagccagcaaaggagaagacgcatcagtgacaacatgggaagacacaagtcaactcactgtctgaccttgggcaagagtttaacccatacatgctctactctcagctataaagtgattatttcaacaatattccaaactgtgtagagttgtgttaatgttaagtaagaagtataggtgacataaatagcatagtgtttaccatcacacagtaagtgcttattataagtcatttaaacaatagggtccctaagaaaatctaacaactgtaatacatgtggtcctttattcaggcattcactatgtggcacaggtactagacaccatgaaaaaatacatatgaaagtattattttacaggagcttccattttgaactatccatgtgtgaaagttgttgataccaaaatggaatcaattatgtcaaaccctagcaaatggagttggaaggccacgaagggggagccctcactcacaaatgcctgtaaaggccttataggagacattcccgcatttactgcacatttgcctgtaacaggacttttagcaaggaaattcccctagaccgcaaagctccagataagcagcttgcacaaggacatctgtctagtaatgacgtctttaacaatgatttgtcgccaactcttacagcaagctcttgtaaccaatgatctttctggtttaacaaacagtttatgaagacttctctttgtctttaaaagtctccctttggtcccagtctccttgatgcgcctgtgatctggctcagcacacattttctgggttataatcctctgctattttcaaataaactcctctgttctggagaacctaagtttcttttcagattgacacatgaaaatacatgaaaaattattccatagtttcatgaagaacaagtatgagcagattcacaattgacagaaatgaccagtataaatcctatgggctttaaggatctaattaaatatatcagttcactcgaaacctacctgagtgacaaataatgaattatctcaattctaagggtactaagaactagacaggagaaaacaaataccaaactgagtattatccaatacagttttctttctttccagagtgtgttttttgtaataagattttgcttttactcctatcctctcttctggaattaggatgaagggaggatgagagattggctggacaaaatagcatagcaagagcagactgagctattttgactatatttctaacatcattaacaaacttgagtaactcacacactggttttcatttacccaccacattgggtctcacatgtaaataggtccatttacataagaatattaggaacaggtgtgcccattttaaaatgtgtttaaaatgtagaacattctttgattttcggtacactgagggagttgtctacataaagtaatctttagaaaaattcttttgtaatgtagcagatcttttgtcaaattaaaagccgccccctgatacatttgctttcccagtttgaatttttatgtgtgagaggttttcttgacttaggaaaacctcccatttcttgatcggtattatgatagggaataaaggaatgttggcatggtgaagtgaaaaaatgcctcaaggagagtatggatcttatatttccttaatataatacatattttctctttttaaacaaaatctctttttaaaaataacctgtaagaatggaggaatgacagtcatgttgttctgttattctaattagttgcttgtctgttcaaatagtagacagccacagaggaacctagtaacattttggtgagctaactgtggaaaaaagtctccaattaaatgcaaagaaaggaacttaacatgcacacattttaaattaaataatgctttgactttactggagtcaggcaaaaccagtgttgactcatcatacacttaagggaatgcttctactaaataaatgaaggttaaaaaggtggaaaaacatgcctcaataacttttcaagccgaatagaattgcatgacactgtaaccactaattttcttaatcttgtagagggggtagaagtctgacaaagtgaactgttaagtaagtatacagtaaaatcgaaggagtagacctaggccttgttaccatttatttaatcaggtaaaatagaatctgtttagtgacccatatgaaagatcaacaagaaaaggatttcaagttcagagaataagagaaatgaacccctagagtgtgtgctaaataatatgttttcaataaaggtgtgttgattcaatgtgatggaccactgaataccattttgacataaatttttttaaagagttgctttctcccccactcccattacaagcagccaactctgctctgacctcccactttttgccagagtcagaaccatgctttgagaagcccataatactcacatcaccaacacagctttctccatacctcctgccacttttaaaatttgttctccttgagccccaacagccccgttatacaacacagacttcttgatcatcacctttaagggtgtcttctccagatccttttattttttcagattcttatgcatttcctctaacccttcagattctgtctcttgttattaatcaaaaaactaacatcacctgtatgtttgccaccttgtcaattttgcaaagtatcgttttatgacgtgaatcctatttccattatttacctaaatgtttgtgttttctctgttccttctaaattgaactaagaggaaagcccaaggaataatgcagaagttatctttgaagccagtgaatttaaagacatcttcaaaacaaaatactttataacaaaacagtatctaaggactataagtattttaaaagatacaattctattgaactgaataaacaaaattatttttaataattaaagcagacacaaataattccttagagtgtccttaagaacaaaaattacttgggaatagaatccaatttaatccctggcatggatatacctccaggactttacaaaattctatgctaatctcaacctaaaataaacaatagagggaccaactctccacaacaaagagtttattgagaatagcaagaaattgcaattcgggttatgcttgctatggcccaccacaggtgcatgcaaagaggctgaagcaaggggaagcttttgaaagaaaaaaagtccacatgaactgttttgaaacaaagaccactggttccaggagcttgttacaggaatccacattagctcattgatgaaggcagctcttgttaggcaaacttccttgtgcaagcagcttatctggaatactatggttctgaggaatttcttgggaaaagttccatcataggcatacatgtgtgtgctcccttacttcatggcctcctggctccattttattactgcttggcataaaccactccattttggtactggcaactcttacatcaactaaattcaaatttattattactctttaatgaagttgagataaagttggtttctctgacaaactaagaattacaaaatgatacaatttctttttagaaaaacactgtggaaaaatgtaactaaaacactgccagggaaaaaaatataaagtaggccctaaaaatatatgactaatatatagccaaatatataattccatatactttatattttatggctgtcataattatctccatttttagaacttcttgagattattatgatattaacagtttgtaaaactaaatcatattacatgtataataaaatatttattttcacttcttaatgagtcagataaaaatcattcatttggaataccctggtattttattcaaaaacccaattcagtttagaaaagtattgaacctatgtatgaagctcttatattttgcatctctggatccaaaatgacatgtaagcatcagccatttgaacaaatcagggagatttttccaatactaattttagagttaatttaaaatggcataagaggataaggattaggaatttttacttaacaagcatttagttctgtgcataaggtttctacataggcctacatagggttttgcttttccttcacatgtattgatttgcttcagcaattgtggattcatgcctcttattcatatatttccctgctttgcaaaagtaaatataaattagtcatacgtgattcaatattaagaagaaaaatttcccatcgattttgcctttttcaggaagatgatgaaaataattaactacattacaaatgcgacacgacagaaatatcatgaactcaattgtgcaggtaaagcaattttaaaaaacgtgtgcatgtttctagaagaatatagtgctgcaatttttgatccagtctcaggaccacctcagcaaaattaacaaatttttttttttttttgagatggtgtttcactcttgtccaggctggagtgcaatggcatggtctgggctcattgtaacctccaccgcccgggttcaagcgattctcctgcctcagcctctcaagtagctgggattacaggtgcctgcccccatgcctggctaatttttgtatttttagtagagatggggtttcaccatgttggccgggctggtcttgaactcctgacctcaggtgatctgcccgcctcagcctcccaaagtgctgggattacaggcatgaaccaccgtgcccggcccaattaacacaaatttttaacaaaacaaaactatttacaaaataaataaaaatctgaacaacatgactatccaatacaacctactctcttacaggaaaacgttaaactcttttcttcttgttttactcaaatgtaatattttaaaccttaacttatactttggatacttacagtctccttaaaatacattattttccattcctctctgatagaccataatctaaactttcacctttaaagtcccccctaccaacttccatgactctttctctagttttaaaatgataaccactcatgtatgttactttctagtctccatcattttctgatagagacatgagctgttgactacccagtacctttaagtttagccttgaacttttctctcatgcaccggtaggttttccaggacaatctattataaaatagtagatactactataaaatagtagctatatagatactataaaataacaataataactccaggaaaaatatcctgaagatcaggatgaaaggaagactgaagcagaggatttgggattctgataaactccatggaaaaataaaaagtttatgtaaactcagaaggagcaaaaaagtattaaattaggctcatggtcaaaatttctctgattatgtaaaatctatttgagaagcacatccaataatatattttacagtcagaaatataatctacccagggaaatcaatattaaaaaaccataccaatatttattcccccaattctagggaagactatatagtcaaaataaaacaaccgccctactggggaaaaaaaatctcctccttcttgggctggggagactgtgtcactattttgtaatttccccaaaataaagaaggcattacaaattaaatagttaagaaaacgtgacgttgtagagtcccctgagagagtagaggaggtggacagatttgtgacattttatctctagacgaactttcctgtcactagtacaaaacaggaggaatggagccatttgcagcacaacttatctgaacaaggggaaggcaagcacaaaacttctcaaaaatccctcaaaatgtattacttttgcctcttgggattagagttagaaaaacaaaagattgcaaacacaaaaaaagaagatattaaggtgacaatgaaatcagattatcagaaaatgaaaaagaaatggcttgaaataagatctaaacatgacaaggacaactaagacaaaaaattaggctttatacaacgaatataatctctgtggacccacactacatattaaatccacacctgttaattttgctggctcataatactgggtatttgtataagtagtctaaattaaaggaaaattagccataataaaaagagaagttcagaccacgcttttgcagctttttaactgggtcaaaattggccagcccaaacacagacagtaattaagaaaatatcatcatcttttcaaaaagggacatacactctatgccttgtttgagatctcattaacttggaataagttctagtcaaagacaaacaggttttacataccttactagattttaattatagctaaatatagttgctaatttcatattcatgtaaacacttgcattgcctgtgtcaagattcctcagcaatatttctgtgaactgaaaagcataaagtcaaccaatcactaatcaaccgctttattcatggcaatattattcgggtcttgagtattttttccttaataacgagttctactcaattgaatttctaaaaacgtaagagaaactcaaactctaaaagtagcattttggtatctacttaatataagcatggcatccagaatctataattaccttagggccaaggaatcatttccataatgggttatgtaaacccaaaataaaactctacatgcccccctaaccatctgaatggaccaatcctcttggccaagggcgttccagagttaacctgaaaaactagttcaggccaagatggaagagggggtcaacatgcctcattacacccctccagcattaacatcaacacagactttaagtctgatatgaaacatctgtaatctgttctctctgaagcctgctacttggaggcttccccagcaggataaaactttagtcttcacaaccccttattgtaacccagacattcttttctacattgaataattctttcaaccaataggcaatcagaaaattttcaaatctacctatgacctggaagcacccgtccctccattttgagttgtcccacccttccagatcgaaccaatgtaaatcttaaatgtattgattgatgtattatgtctccctaaaatgtataaaagcaggctgtaccccaactaccttgggtacatgtcctcaggacctcctgaggctgtgtcataggtgcatccttaaccctggcaaaataaactttttaaattaattgagaactgtctcagatattcttgggttcagagttattatcattggtaagaatgagttaggaaccctaagatacaatctagtgcacagtttgtactactaataactgatcttcctcaatttcaaaggaaaaaaatcttttatttcactttatttacttattaatctgaaataaatattctttgttcaggaacttctggtcttcaaatgaaactgataaccaaaagactgctggcattaaaaactatttcaactacaaaaattaaaaattagtatattttaggtttcaaaaacaatgaggatcacagttgagaagcagttcttttcaaaacattttaatttataatataaatattgggaccaagttggcagactttcatacaaacccctaataataacagttgttaaaacaagcatttatatagcaattttcatgagatcagagctttgaataaacaaacataaactgtactcctgattatatacctccctgctcaaatctgtaagttatgagatactctttaagggataaaaacttaacacatttttttctggcaatttctcaataaactctaaattcatgatcttagtacagaaatatataaattgaatgtacgatatcagtttaggaagacgtaaaatagagtttagacactgtaaagcttttggggttccttggtattatactaagggatacacttaatgtatcatgtttgggactggactttggcggtcctctctaatctactctttacaataattcaattccatctataatatacttgataagtatattccaatttctctttgcgcatctgacacagtggggaactacttctcattaacattagattccacaatttgttcttgatattaaggtggaggggggagatgtttccacgatatgtcttagcttcctcttgtatcacagaaccaacacattttcaaaagataatccttcctctatttgactataactatcatgatcccttggtttctctctctctctctgtctctcaatctctctctctctcaaaaccaaaaacactttgttcactgggccattttttcaaatcttaatgttgtctgcatcatctctggcacatgctggagcctttcctgggaatagcctccctctctcctgcccctgataatgcctcatggccctgtggccaagatactatcaacacattcttcagaattatctgcagacgctcttccctggaaagtctgctttggcatttcaaagctttgttaatgcccctcttccatatagaaactcccacagcaacatggcacagacagccctaacacaacacagatcaccttgtctgtttatacagcttcatgattcaaaaaaatactgaaaataaaagcaataagataagaaaaaaaaaaagtaagaagcaataagactgtgtatttgattgatcgggtgtggaaaggaagagaaacaatgtattcaagaatgatacctaaatttctggcttgggtaactgagcaagattaacaaacaagggaatatactaagggaaacagatttgagttttaaagggtctgttgaatcacgaacttgtatgtccagtgagcagttgcatataataatttagagctcagggagagttatgggatggagacaaagcaaatagattgttacagaagcctgggaagcctgggaagagtatatccagtgaaaatgaaagagatttaaggacagaaatctggaaaattagttaagtatggagcaaaggaaagtgaacaaagaaaaaaagtgaaaaaaatggccaaatgtagcaataaaattaagagtatatgacaaatcaagaggtgaggacacttgaaggagagtattgtcagtgtacaatgggacaggaagataaaattatgtaaaatctggggagaggtaagcagtaaggtcatcaaagatcttggcaatgcccatgctgttgtcactgatgcagaacatcattgccttccttttcttttatttttattattttattttattttttagaaacaaagtctcattctgtcccttaggctggagtgcagtggcaagatcatagttcactgcagccttgaagtcctgggcaatcctcccacctcagccacccaggtagctaggactacaggcatgagccattcctgactaactttttttaaaaaatttcttagagatcggggtctcgttatgttgctcatgctggtcttgaattcctggcctcaagcgatcctcccacctcagcctccttgagtagccccattgccttctaaaaggattataagcaataactacaatttaatatatatcattctctcatacaagaaaaagaaaatacacataaagtatgtgtgcaacttccaaaattaattttaaataccactggtaactcagagcactatttagtaactttgattaattgaaaatcaattctgatgtaattttccaaacagatataccctagacctaactttttgctaagaaaatggatgttgtatcactatgaaattctacatacagtgacaaagacagaactatgacagacctatgttaagtgacttctttcactgttaaacaaaaattctaatgatttactacctgtgaatccctatttaaaggaagcatccaggccctagagataagcagtcccaagaggaataaaaccaatttcaccacattcaaaacaaaacactgcagtctgaaagaatgacaaaaaacatgaactattttttctatttaaatacatttcaaagaataaaaacagtatgaatacatcaacaaggatgacagatgctcaagagcttatcttccgagtataatgagcactgttttaaagaaaagtcccctgtacttcaaaattgtttcaaatgtttcaactagaaaatcattagtggtttttttaaaacagtgctctcattagataaaaagcttttcggagtttataaactacattaaccatttggggtatttcagaactaactaacatgttggaaaagaaaatttcctaaatactatcttgatatctagagctaccaaacactgaagctatacaaatacagcgtagtgtctaacaatgtctgatgcataaggttaaatatgtctcttctatgagccataattcctgaatcctcctattcactcaagttgtttaaaaggctcacgtaaagaagccataataaaactttttaaaaagatttttttaaaaattcagaaaaagaagaacattaaatcagaaagtggaggctatcgtaggcaattataattgagcacagggctcccagcaagtgtaaatgagcctggagctccctggctgccaaagctaacagaaaagcagaaattagttacatcattacccaatgtccattagggtggaggggaaaaggcaagatgttgaaacatatgccacgtacagaaaaacaccatttctttttttttttttaaacaacgtgtatgtgaatacaagtgcttgtataaaaatacataaaattttctggaaagctgtataagaaacagtggttattctgggtgtggtacttaggaagaatcccagggcaggagacgttgcacgttataacatgtatctactactatagttgctctttcaagaaacgtgcattatttcatagtgtaaaaatctatattagatttatatatagtttatattaaactataattttattttataatttagaagtataatataaatgaatgtaaaataataaagaagatagtacagggcagagtaacgtaagggccacataactacattagattctgaacatcacaatatgatagaaatcaagaagcacttggctgggcgcagtggctcacgcctgtaatcccagcactttggagggacgaggcagttagattgcttgagctcaggagtttgggagcagcctgggccacatggcaagaccctgtctctaccaaaaatacaaaaaactagccgggtgtggtggcatgcacctgtggtcccagctacttgggagaatgaggcaggaggatttcctgagcccaggcagcagaggttgcagtgagccaagatcacatcactgcacttcaggctgggtgtcaatgaagactccgtctcaaaaaacaaacaaacaaacaaacaaaaatcaagaaagaagcacgatttcaaccacctcatcacaaaatagttaccaataaaaaaaacctcaaggctactctgttacagtttgtaatcaaacttaaagatagctcaaagcagaaatccaatcatgttctttcacaagaccagtgagagagagaatgagagttcaagaaagagagaatgaacgaagaaaaaagaataaggaagatgtaaatgctatactgcaagcaactataatcccaatgtatagcactggagtgagctataaagatgactattacaatgtctgcaaatatgtattaaaatgtctggaaatatgaggaaaagaatacttctgctgctaaaatctatcttctttgttatcttcattatcaaaggaaaactttcttagagaaaccagcttaaaactattttttttttattatactttaagtcctgggatacatgtgcagaacgtgcaggattgttacataggtatacacatgtcatggcggtttgctgcgcctatcaacccatcatctacattagtaggtatttctcctaatgctctccctcccctagccccccaccccctgacaggccccagtgtgtgatgttcctctccctgtgtccatgtgttctcattgttcaactcccacttatgagtgagaacatgcagggtttggttttctgttcctgtgtgagtttgctgagaatgatggtttccagcttcatctatgtccttgcaagggacgtgaactcattttttatggctgcatagtactccatggtgtatatgtgccacattttctctaattacaagcataagaaagtatgaaacaaatcatgacggcttacacttcgatggaatagaaacttttattaaaaatttgcaacatactataccttaaaaatttccacttttaaaaatactatcactattacactcaattctagggtacttaaaattcatacatataaattataaataaacacccaaatacagtgtcaaaagtcaccacattcatatatttaaaaaaaataataattttctaagaagtcacagccaaaggaaagaatgactaggtttaaatatttcaataatgtgaattattaaattttttttaaaggcagcaggggggcctaggctgggcacgatggctcacacctgtactcccagaactttgggaggccaaggcaggcagatcacttgaagtcaggaattcaagaccagcctggccaaatggcataacgtcatctctactaaaaatacagaaattagccaggcgtggtggcatgcacctatagtcccagctactcaggaggctgaggtgggaggatctcatgaacccgagaggcagaagttgcagtgagctgatatcgtgtcactgcactccagcctgggtaacaaagtaagactccctctcaaaaaaaaaaaaaaaaaaaaaagaaaagaaaaaaaaaaaaaaagaaaaaaaaaggctagctgctaagtaatactgagaagtctatgaattcagaaaaggacattgcaggctgggcatggtggctcacgcccttaattctagcactttgggaggccaaggtgggcaaatcactgaagcctcagagttggagagcagccttggtaatgtggcgaaaccctgtatctacaaataataggaaaattagccagaggtggtggtgtgtgcctgtggtcccagctacttagtaggcagaggtgggaggatcgcttgagcccaggaggtcaaggctgtagtgagcccagatcatactacttggactctagcctgggtgacacagtaaaaccctgtctcatgtctccaaaaaaaaaaaaaaaaaaaaacacacaaataactggaggttttagattgttgattgcctttaaaaaccatttcatactaggtgacaatattcccatatatacacaaaagactaaaaacatattaacaggcctagcagttctactcaagaggaataaaaccacacaaaaacttgcacataaatgttcatagcagcattattcggaatagccaaaatatggaaacaacccaaatgcccatcgactgatgagtggacaaacaaaatgtagcctatccacacagtggaatattatttatcaatgaagagaaaggaaagtaccacaaaagctacaacatgaacaaaccttaaacacatgatcctaagtgaaaaaagacagtcattaaagcactataaactgtaggattctatttatatgaaatactcagaatggcaaacagaaagtagacccaaggtttccagcagctagggagaagtagggatgcggagataatagctacagggtggtgatggttgtacagctctataaatacactaaataccactgaaatgcacaatttcaatgggtacattacttggaatatgaattatattgcaacaaagcttttacaaaataaaaaacatattatcaagtcaagattctcttctattgtctccgttaatcttaacctcataaaccctaatcctgagccattgctgccagaaacagaaaagaacttacgccatcccagccatgcatctgtgggaacattcaagtaaagtctcctagttgtcacccacatggcaacgctaaccagggatggccaaaagatgaccctgacggacagtcacaaggtggcagctcatctgaagggcccccaactgataccaggacttcttcacccaagctcctcaattcaagatacttcagggtggcccagcagttcagattttctaaacccaagttctcatgagctatttactgggctctaaaatcctgaattcttgatcactgcgaaggcagcatatccacacatcccatgcctggactgtccatgttctcactaggcaccagcaccggctcggacactatgcgtgatcttatagtttgcctgaatggggctgaacaataggagttcccctgggcagcctgttctgactgccaggttgggcttttttgctcagctgtgcagctagacatttaaaagcaggcagaatgcctattcctgcacatctaatccaaaaaccttctagctcataggaaacactatactaatcatgcttgagattaccagtcaagtagtgaggaaatattttctgacaaattgcaaaatattattttttcaagtattttcagtttcctgggattgaataaaaccattttaaaagaatttatcataccgaagggaaggaaaagaatgaaaactagtctaacagataactaaaaacatgcagttaattcatcaaatagaatattagtgtagtgcagcccattaaatggtacttagattgcttttccttttgatgactactctggtgactatctgaaagaaattgtgtgttcactgagataatgtactcactacaaaacaatacatcattcaatgccacacttctgaggaaaaaatattttgtgaacaaaatggagaagcaggccgggcgcggtggctcacgcctgtaatcccagcactttgggaggccaaggcgggcggatcacgacgtcaggagatcgagatcattctggctaaaacggtgaaacgccgtctttactaaaaaaaatacaaaatattagccgggcgtggttgcaggtgcctgtagtcccagctactcaggaggctgaggcaggagaatggcgtgaacccgggaggcggagcttgcagtgcgccgagatcgcgccattgcacttcagcctgggtgacagagcaagactccgtctcaggaaaaaaaaaaaaaaaaaggagaagtagtgagttatatttcaagtttccttactccttaagaaatgtactatctgacggaataggtaaaataattataaatatatatgtccaatttattttgttaaatgcctcattgcacataagcaatgaagcactggcaaaatactaaattatgccaaatattattggttgtttaaaaacatactttaaaaaggtaaaagttgggccaggcatggtggctcatgcctgtaatcccagcactttgggaggccaaagcgggcagatcacctgaggttgagagttcaagaccagcctgaccaacatggagaaaccctgtctctactaaaaatacaaaattagccaggcatggtggtgcatgcctataatcccagctacttgagagaatgaggcaggagaatcgcttgaacccgggaggcggaggttgcagtgagccaagatcttgccattgcactccagcctaggcaacaagagcaaaactcagtctcaaaaaaaaaaaaaaagtaaaagtttacaatataaaaataagtctattcttacacagtatttctaacatttgtgaaaacaaatcacgggtatgctcttgctgttaagatgtaaaaattaaataagaccgcaggtatcagagaaaggagtttctgcagttcaagactgaggacaatattttacaaaattgtacatctctgctgtcaagaaagacaatttataaaggtctgagtcatgtttgctattatttcacttctcatatttctgaaattttcaggaaaaaaaagtagaaaaaaaactgcacctcaatctgtctgtaagtttctattacttacttcccagatcttcaatttgaggagatgtcccccatcttactgagactctccagccatattcacaaacgtttctcagcttttgatttctttttcagtgtcagtatatttataaaatatattttaacacttggatacaattatagaacagaatatagacaatatgaataaccaaaaaccaaatgttaaaaaaagaggatccattttcataacttagtgcagttgagacttaagttgttttcacataggatggaattaagaggaaactgggttttctcagtacaactttggttccctcaagatcatgtaaaagctagatggtccccacagaattcagaaagctttcggatatgcatgttctaataaatgtctttacatttttgatggaccctggcgcttcccaggtcccttacaagccaaggtatctgaaagactttttcttaacatccaaagggtagcaatgtcagtcttttacgataactcagaaaaggtcagaatttcttcaccatggaaaatttagcctccattccctctaaattaattttccttctttttctttctttccagagcattagtatgcctcagtgaagtatgacattattgtgttccgaatgccaagtggaataacttataaaactttttttaatagaaggaaatagaagatagagcccaaagccctcccaaatatgaaatgtgaaaagaagtaaatgagaggagaaccgatccacagtagacaaaatgaaataaaatattctacgctcttttgaaatgatgacaagcacctctctcaacatccttgattacctgttaagttaccacaattttccaatacatacgccaagctctcagcactccctgctactcctttccctcacaaaaccttttcttccttaattatgtatccccacaaattagtcatttttggaatttaaagaatgatgagccaagagtactttaagagctctctaaactaaaacttctttccaaactccctctctttcctccaatatttggaatataagctatacaataagatatcctaagatcagcattgctggagttggccaggtgaaattagtgaatgccagacaggaggttacttaggaatagttccaagtcatcttcaaaagaatagttacacacacacacacacacacacacacacacacacctctctctctcacacacacacactcactctctctttctctctctctctcttttggttttaccttcagcaatgcaacctcaaaaacttgtactccatcctcatactagaagggaatatcacttagcaggttcagctacagacaaggacagagaaggatctttccactgcaactgatatgacaccctctgctttgcctcaaccaaggtcaggggacatgaccgctaataccactgcatgtatgaagggaaggcaaagcagggaagagagaagaaccaaaaccaaaataataaaagtatcttctttcttcttcttttttttacatgcagatgaaaaaaaaatctgaaaagtcttcttggggtggttattgtgaaagagcagggctgaatgagggacaaggagggtgacagttgcagcacaggacacataagcagataaatactgaactcaagcctaatcttcaggactacaaaccgaggaaacatattaatggtatgcagagtaacttaaatatgcatataacaaactctccagctcaattctattcaataaatatttattaatgacctgttttgtatcaggatgatatggtttggctctgtgtccccatccaaatctcaccttgaattgtaataatccccacgtattgtgggaggtaactgaatcagggggaaaggtttttcccatgctgctctcataatagtgaataagtctcacgagatctgatggttttatgaaggggagttcccctcacacactctctggcccaccgccatgcaagacgtgactttgctcctcctttgccttccaccacgattgtgaggcctccccagccatgtggaactgtgagttaattaaacctctttcctttataaatcacccagtgtcaggtatgtctttattagcagggtgagaacaggctaatacacaggccctcagcaaagcatgaaaattaacaagactaagctctccttttgagtgttaatccttcctataatatatatgcttagtaactcccaatcagaatgccacttcattttttatttattttttgagatggagtctcgctctgtcacccaggctggagtgcagtggcgagatctcggctcactgcaagctccgcctcctgggttcatgccattctcctgcctcagcctcccgagtagctgggactacaggcacccaccaccacgcctggctaatttttttttgtatttttagtagagatggggtttcaccatgttagccaggatggtctcaatctcctgacctcatgatccgcctgcttcagcctcccaaagtgctgggattacaggcgtgagccactacgcccggccagaatgccacatttgaatgctttaaaatgttttaaactgtcttccatattctagatctccattctacattagcaggtatgcaatatgcctaaaatgacacaaataaattaaattacaaaggagatggaattatctttcacatatctaaatcatgccatggctaaagcagaagcaaagtttcagctcagatgaggagcacagtgattacatgacaacatctacattggagttcaaaagcaccaggaacaatccaacaatgcttaaaggaattagtctctagacttaaacacttaggcatttaggatgcaacatccctgcttccttgctggacatggaatcacaagactcagaatagaggttactttttgagagaagaagggggatctgatcaaggaggcacagacagcttctaaggatcagcaataacttggaatagtgattgttttaattatgattcttcatgctgtccatgtatgttttacatactttcctgtatgtatgccacactttaaaataaaagacaatacagcaagtatctctggaagagcacacaagaaactggcatcggtggctgcctcttgcaagggcggtgacagtctatggtcatgatgcgtcatttaggacgcagtacactagattttttactacacatcctttttgctttttttttttaaactatgtagcaccttctgaaaaataagtaagagcaaataagcaaatatgctaacactttgctcacgcatgatattaagattcaaggtaagcaatgaagatttgtatgtcacagtcaaagggaaagattttcaagaatgtggataagtactgctattggccatgctcagaataaaagaaaatttcataaagagagctaccaatgtaataatcaattttccatacacagggtaatcattaatcaaatttaacagttgcagaaccttattcctccagcccaaagatttgtcatattttacaggtccaatgccacacaggttaaatgccctgatcagttaaaccagccctcaactccagaacctcctatctgcccgggcagtttaactctgtaacaatgaccaatgtatcccaaagagatgagagttgtgaatcgtcagatctatcatcctcagcctcagggagccccctgaggaatctgagattcaccatactgtaagaacccttaatagtcacataccaaccaaaatggaatcaacagaatgtttctatgcgttcttttggatgattctatttaggatatgagttagtaaaccatgaaatctagttcacagaacaactcagaatgaaggagctttaactaaagcatgtctattagagaaaaagtcaaggaaaagctgaaaatgttggaagttctaaagaaacacagtttaaacagctcagtagggcttccaaagagaagcatttcagtggaattcttgtgggatagaaaccaatggtttctggtggaagttttaagcactggagttctgcacacatttcaaaaaaaaggggctaacaccctcctctcaggagtacaataataaaagaatactatattcatacagatttttcaaaggaagtgaacactggaacaagagctttgagaggtgaataaaatatctgattaaaacgtcatgtttatatagaccccaaagaaatgaaagcagagactaaaacggatacttgtacaccaatgttcatagcagcattattcacaatagccaagaagtcaaaacccaagtacccatagatgataaagagataagcaaaatgtgatatatgcataataattagccttaaaaaagaagaaaattggccaggcaaggtgactcacgcctgtaatcccagcactttgggaggccgaggcgggtggatcacgaggtcaggagttcgagaccagcctgaccgacatggtgaaaccccgtctctactaaaactacaaaaaattagccgggagtggtgttgtacacccataatcccagctactcaggaggctgaggcaggagaatcgcttgaacccgggagacggacgttgcagtaagctgagatcatgccactgcactctagcctgggtgacagagcgagactccacctcaaaaaaaaaaaaaaaaaaaaacacagaaggaaatgcagaaatgtgctacaacctggatgaaccttcaggacattatgctaatgaaataagccagtcacaaaaagacaaatattgtataattccacttgtataaggtaagagtagtcaaattctcaggtacagaaagtagagtggccattaccagggattggagggaaggaggaagtggggaattactgtttaatgggaacagagtttccgtttgagataataaaaaaattccagagatggctaatggtgatagttgcaccactgtaaatgtttctaatgccactgatttgtacacttaaaatggttaaaatgccatattttgtatatttcaccatagtttttaaaaagatcatattaacagagttacaaaatagagcaatgaattcaaagacagaaagataagggttatcaatattattaaaaacgcctcttatctgaatcacatgaagaaacagaaagtaaaccgataaatgaatgtaacagctattactccctttgacaatgctttggcctttacaatgggaatgacaccatttagatgtaatgcccttgtgcaaagcacaactgtacccaacatcttcctcttggagacaactctacccccaaccctaccccaccccaccctcctatcccattcatcctcccactgtgccatgctcctccccagccccctaaccccccatctgccgcgtagtgcacacacacacacaggtagggcaaaaggttactgaatggggcctaaaactaggtcagtgttttgtttgtatatatcaaatcttatttctcaatgatctacaaagacataagatataaaccagaggctgcaaactgaaatgcctaaaagagacatgcaggtaacacaaacgcagactgtgatttgtgtataagaaaagccacaacaccaggtggatcacaaggtcaagagatcgagaccattctggccaacacggtgaaacgccatctctactaaaagtacaaaaattaggtgggcgtggtggcgcttgcctgtagtcccagctactcgggaggctgagacaggagaattgcttgaacctgggaggcagaggttgcagcgagccgaaattgtgccactgcatctctagcctgggcgacagagcgagactccgtctcaaaagaaaaaagaaaagccacaacacaaacttgctacagaggcagcaatctcagtgttgggggaaactgagtggcctgtaggcagctgtggacatgtgcaaacccactgtaaccaaatctaccgatttttctgccttaaaagaggaattatttctaactcatgaaggtggagtagaattggagaaatgcagaaaggcggggaggaaagcggattcacgtttgaggtcggaatgtcatttgggttcttctctagtctggcccttgaccagttgcgagagggaaactgatttaaaggagattggagtgatactttgtgcccagaaaacctgcagacgtctctgaaagccatgcttgggataacaaactatttattactgaccctgtgataaggagagtttttcagatgtttgttgaaataatttttgcagtaccatggtaaacaaactgaaaaggtgagagataatagactagtttaaaaatgtaaatcaagatttgcatgaattctttaaataaacacccatcactgcttaacatatttttaattaataactatacaagtccatatttgctttctttgaaagtatgaggcaatgaaaataaactactggtcactgtcagcccctaatttctgtgatacagctatagaaatattgtctgaaagaaaactgtttgatcggtccagtgtcaacagaaacttttcagccagaaactgattttttttccttcttttcaagcttagaacaaggctttataaaatctccagttttgtttatgttttcaaaacaattaaacatcatttgatgtttctcaattatttttgtcacataaaaggaagatgaaatatattcaactggccccatgaaagcaaaaacaatcttagtaaggctgtgctttaggtttacttctgtggtacagaaggtaaagattctaataagtaatagaggactaaggggccctagggaaaatatgtagagcaaatcaattcataagtatttgcattagcacattccttcataaatttgccagcttctcactgaacatggcaccaatttatctcagtcctccggcttttcaaccacttcctttgaaaaatctaaatgaattctaatggttgtgattttagaccagtattctttacatgccaaaataaacaaaattctttcaagtttttaattctgaaaaccaacaaagtcaagaagtcgcaggtaagttaaggaatcaaatatgcagataaatacctcacaaacagattatcccatcaaatttccatggaaagcataaaccataaaaatccaactcaaaatagtataattacatagctttccataagacaggtagccagtaagggtatctaaaatattgatgaaggcaaaagacagttattttaacaagaaactgattctattaattcattgttgacctagaattacagaagtctgctgtggctgctccatatttgaaacgttacattcactggtttctttacagggggcatcacactatttcttccagacgtgtggatattttcttcctaatgaaagtacttcattagggcctttattgccaatccaataattcaatgttagtagccattagagtgccttaatttcaattttagccactgctgtggaaagtgaaatggaatttcagaagcactattttcctctgttataatggtcatcttgtcctctcttctgactctgccctcagagaaaacacattccgctctcttttctaaaaagaaatctctgtctcattactccctcaacgtattcatggtatttgatttcactgtcaaaaacgatctagactcactgcctcatcaagcattgatttttaatctaagttcctaaggctatttactgaaatgctctcgtaaagacctgacttcctatcctatcttagtactgtatcaccactgcctgctgcacatttctagctggagagctgacttagctgccaggatgtcaatgaagccgaaaactcctcatctccttcccattgccccttctgcccagccccagtcaaccttaccctcacttcactcttcctggtaatggcccccggccacccttctgatcttctgaactgaaattttggaagtatctccaaatgttccctcccctctcgcacacccatgataaccaggtatcagtggctattttctaccaattcaaactgcccacatctacttctgcttttccattttcagtgacatttccattcttcggttgttggctgactcttgtctaagctcttactgtcgtcgtgcctggtctccctcttctttccacctattacttttctgtattacattataaattgtggccagattaatctttctaaagcacagtaatgccctcccttgctcaaaaaccttcagtaatatactcaaatctagactcaagttcatattctttgacaagaactcaaaatcctgtattatctgacctaattttacctttctgtcctcattttcccaatatgctccttttaacagacactacttggcaacactggcttcatcccattcccaagccactaatcaagctgtcccctctgccctcaatgtcattttctttctttcccaccatttctacctttaggaacccagcataaaacatctacctggtggccaattttcccaaatagaaataatctcccaaatctgaattactgtaagactttgttcctctctctcaatgattactttcttctacttgtcttcttttattgccccagagatatagttttatctgccctctaaaattccaaaattcaaaattcaaaaattattaaaggtatcatgtatttttcatcttcctgtctttcagtcccctaccaatgcaggataattttcccaagatgtgctatagaacctgttgttgaatgaagggaaaaaatcccgtgaataattttttaagcactgaaatctaaatactaacaaagcaaatagtgaattagaaatattaaaattaaatacattttctatctctgtaacttgcaaagctctaagacatttttacaccaagacttccaaacagctgacttagtaatctatctgaaagaggactaccatttttcttcactaaattctgtgtgccataatgaaattaaaagcaatcttcaatcttccccagtgttccaaaggggatctatttcaatgtatgaatgaaacagcgtagttaagagtaacaagtacttagaatcatttaaagtcatttacaaaatagccttaaacattaactcttactatcactgtcatttgcaaataaaacactttgtaaaaaatttccaaaggtgaattaaaggtgtattttatatctaagttccttaaatgattgaaaaaatgaatttatatacacaagcttcactgacatcactaatatttctgattgataaaatatattgctaaatcaattatttcgacctttctcatattacagatgaagaaattgaggcccagagaatctaaacgacttgatccaattcacacagctaattacaaaatcaggacccaaactcaagtgttcagtcctctatttacagagctactacttaggctgataaagtaacaccagtgggaaaataagtttatctaggagattcctttataattttctggaagaaatctggctgattgggagaactgccactgtaattctttaaaatgccatgttgctagcactgtctctatactaatattaatggagttgccaataatcttgctcttctgttaattagttatgtctcattttaaaaacaaaggtgatccagaatgaaacaggtatcatctgcaacaatcattgtccaatacgagagtgacagtcactttccaatgcagatgggagttcctacaatcctttcctgttttctagagctaaatttcctctttgtgagaaaacatattttaaaagtccatttataaataaaagcctataaatgttcatgctttatttccccttggataaggtaaaacaacattacaatacagatgatttctaacattcttgtaaagatatcagaaaagacacattattattccatctaaaatagtaaaccaatatatttttcttatcacatgatcccacaaatatataactggctattattcttaaatttgatgtcataaaaatacttatatcttttcttgattagaagataccatccagcctggcacagtggctcacacctgtaatcccagcacttcaggaggccaaggcaggcagatcacttgcggtcaggagttagataccagcctggccaacatggtaaaaccccatctctaataaaaatacaaaaattagccaggtatggtggcatatgcctgtaatcccagctacttgggtggctgaggcaggagaattaattgcatgaacctgggaggcggaggtggcagtgagccaagatcgtgtactccagcctggacgacacagcaagactccgtctccaaaaaaaaaaaaaaaaaaaaacaacaaaaaaaaatggataccatctattgtaagataaaacactcattcaatggtatatttgagaagagtaatattacacatatgtataaataatagaaaatattcaactgtttattaaaatttcatgaagaatgtgataaaacatgtcacgaatacaatgaagatctatttatattaaggatgagcaaaaataagcaagagctttaaataaactaattataaccaaaaaaaggagaagagggagagagaaggaagaaaaaggaggacaaggaggaagaggaggtggaaaaggacaaaaggaggaggcaaaggagaaaaaagagaaggcgtaggaagaataaacatcttttccataaaccaaacagatcagcttaacaattcccttcagcattactagcaaatgaatcagatagttattacactcttatactgggggtctcatatgcaaggtaaaagatacggcagtgattgaggtataaggagagtctgacttgtgaacacgatgagaatcactatacctttcctaattaagtatcagcaacatccacctgtttcacatacacaggctacatatgttattattaacactatgagaagactctgcattgccatcaaggagagaatatacaaatctgagaagagaattgcatcatagcgagataagtgctatgggagcccaagatagggcgtaaactcattctgtctgaaagggatgagagacaattcactgataagatacatttgatatgggccctgaaggatcagtaaaactttctagaagaaaggcatccaagcaaaaggataggtacaaagtcagaaaaaaatacatggtttctctggagaaccataaaaagtttcatatacagtatggtttgttcacattagcaataaaacaactatcgttctctaaaatggttcataatcaatgttttataactcactgaaattgctattcccactcctaataacagttattagtaaaaatgaatattacaaataggcgtttttctaagcactttacctgtaatagctcatttaatcttgacaacaaccctaagaggtaataccaccattaattactctcattttgtagatggagagactggggcccaaagaggttaactagtttgtccaaggttacagtctgacttcatgatacccttagatccaatactgtaaatcacacactcaatcattaaccctactaataccacactggagctgctcttactatgcaagctctcctcacttacacctgaccaacctaagtatgctgtggacaaaaagaatgggaatcccagatatcttcaggcctccttagaatccttaccatgtctcttcttttccttcttctccctcagtgtttcagacctcaaagctgctatttcactttacaataatccttaattccctcctcattctcatagtaatatcaccaagaaggcagccagatcaaaaagaaaaaaagtaaagagtttgtctataacaggtaaatccccagagttgtcttgtccccagctcaccacacctttattagagaaggtaggttttcatgaaatacagacatagagatgtacaagagatggaaaaaaagtagtaagaaaaccagtattatcttggatgctgtttctcattgactacatacatctcagcacagtgatggcagaaatttaacatctcccaaataatacatttttcaagagttctggttcttctttcccttgagaagctatgctttttttcaaagtgattttttgaaataagaaaggcctgtaagtctaccaattaagcagatggagcctttattagaacaggagcagaagctaaaagggcaatggcatgcacaccccgattaatttacccaggcatcagagttaaaggaacccgctctggagcaaaaacatagtagccaataaaatgcaaatggagagtttagcagcacaggtgggtacttaaaaatgatttaagcaaactggcacatagtagtgacattttccattctgcaatcatggccatcacaatgatctcattaaatttacaagctaactccaaataagccaggctcaatataaacagaaggcatctaaagtgatgcaagaggaatccaatatataactctccatttgcatccttaacaaaaaagataaagagagacacattcatgcagacacactggatatctgggagagctccagaaatatccacacttacacattacatgtgatgtggtactccaggtttaaagacctttcctattacagaaggaatgcccttcctgggtggtctagtgttgaatcatccacctggttttaaaatgcttccttatttctaactcaactgcaatagaaacattatccgcaaaatttcactttcaaaatgggggcagatattaaggcatcatttttaagtcctcttctctcctatggagtccatctaactttgtcttcttctttgtcatctaactttgtccatctaactttgtgttagaaaattagtagaactgggatatttcacatttttgacacattttgacaaacccaaccaaattccacagcaacttcacaaagattaatgtacatctccagaaataaatcacatagaataaaaaatgtattcaccattgagaaatttcacaaggcacattaacacctttttctgtgtagacacccaaaagttttaaaggtaaattgggcttctcccatattctggtttaagaggttgtaaagttgtattctgcttcagtaactattcagcttcattctataatgagttgcatttctagactgaccaaattgataggcagagtcctcaaaggataatggcatcatttaaagtagaaggcactgcttaaatgccaaataatcctgatggcataaaaaacagctgtactttactaatgaatatgacattgtggtcatactactacatattgatttaaaaattaataatgatagtctggcacaatattaaaaatgtgtttatcgaccaatttgatatgaattttgttgtgcttatttaatcacatagataccaaattcataatatgctactaagacctcgagggagtcatctatgactctaaacttactatgatcacaaagaaattatatctaaaataatgggctattgctaagtgtcagcaaaatcgaatgattctatttaaaagatcaaatagcttaatcacatcaaagttatgcatggtcaatttaatccttatctttaaaaaggctcttgttgaaagaatataaattctgatgtgaggaacataaaagttgttaaatactatacctaaatatatcattttaaatatttgcatgtaaataaaacatatttggtgtgttctaactttatttggctgttattgttgtgtttaatgatacagcaccatgcttagctttaactaatatagcatataatatagagtattttaatttccaaactttaaacaataataacagagtaaaagaactgggaaaaggttatcattgtgccaagtacatagtaggcacaaaaataaatatctgtcaaataaatgaatagctagatgggtaaataaaattaaaatggggctcatttttttaaagtttcttggttaactactgactactaagattctttgaagcaaatagattttgaaaaccaactctaaagtcttttagcctgtaaccaaagtacagttagtgcatgcctaataaataagcatgtgttttgtacatgcctagttaatacatggaagattaaattcaaatgtcaagctaaagactggtttgtggcaaaatattcaaacaaattgaagaaatatttattaaggaatacactcaaggaagcactgtacttagtagtatcatcaataaaaagtaaatataatatttaaacttgaaaaaatttcagctgaataaatttccaaatttagtgtggcattgtagaggagaggtaaaacctccagtggatatcccaaagcttccattttccaatgtatgacaatgacattaaaaattatgaccctaattataactttcaaatagtgacagatggcttctctgaatggtctctgtaccttttaatttagtttgcaaaaaagatccatctgaattacaatgtaagtgcattaacactcacatgtattctctttttaaacacccaggtgcaatttaatcaaagcaagcttttagagaaacaatacaatacagtcaaaggaaaggatttctcaatgttctgctaaatcgagggatggcttttttgattatctggaagaatagttgaactgcccatttcaaacaatcctccctgaactcccaagcaagctctgcatggtaccgagtgggtagcagtaaatttgagattatgctcccctgcaagcatactccccggtagaacagtagctctgtgcagcttattcaatgcaaggtgatcatgcttcaacagcttggctatgcagagcaagactgatggacatttacgaagagctgaaaaaaaagaacaccttcctaaagagaagtccacctcaactctcctgaaatgatctgaagaagtacaggggccaagttcactcaatgcaatcccaagggcaatctcctgcagttcatcaacaaagcatagccacaatgactttagactggaagatgttcaaagcaaacataaatcaatactcatagttctggtctccataaacataacctcagcagatccagtattaagaaatataacttgctgaagctgccaagaggaatttattgccaaacgcaaacctggataccaaattgaggtgacttacagttacactactttaaatagaggaaatatcatgtgaaatcatgatgatggtttcagaatagttaattgatagcagggattggatgggtaggccagtgggtgattaaaaacattcttagttatgtttctaaacatatcatttgtataatacagaatgcttctctttttgctcaccagagtgatggtatggtggatataattcagccaaaagaggcatcaaatcattaagaactcacaatgtgcagacagatggaagacagaacacattcctgactaatcccaatgaaaattatccactgatatctcaagaaatcatttctattgaccctgaatgtaaccaactacagtataacagtattatggcacaagttctgcttgaaaatcaataatgcagggtttgaattgaattcatgggactttattcaataatagatttctgctcacggattcaaaggcaaaggatagtcaataaaggccacaaatagtcttcccgtattcctaacagatttctacaccaggtggtagaacgctatggcgggctggctgcactgatgcccacctgcgcctggaatagaacctggcacaagaaacacaggctcacaatttataagagcggaactggcatagaattcagagagactgtacaatgagccagtgggcataagatttggggagactaaagaattcttttcttgaaaaggaagtggtaagccattctgggtatttttagaggctattaaataactataataatatacataaaaatcaaagtaaaaggctaccaaagatgttcactttggttaattttagattgtgtgaaattcacctttatttttaaaatcttttttaaaaaagggcttttcaaaaaaaaaaaaaactatcagacaaaacacaaatttccgaagtaaccactgatccatgagtgcataggaaacaaactgacttatatttgtcattagcattacaaggcttgctactgcaaattataatggcttgtagcttaatccaaaggattcgctaacagttatttctctcatctttattatacatttctatagattaaaggtatccaacaaattgtctttaaattctagccacaaaccctgctttattaagtagttcttaagcaataatggtaattataattaactgtgtgaattatttaacaatagttcagaatcaatacttgttaaattattcaagatttcacctgtatgctgttaaggcccactgcttatctaattcagagtaactgaattaaacacagtataaaacattgtacatccttagggtccaatgctactgccgagaaggagttacaacatggagatcagtgaaaactgtttcaagataatgagacactagtgcaaaggtcctgtggtaggaaggcttggtatgtacaaggaagagaaaagagccaaatacagtgggccaggggacaggagtgatggttaaaaatttttaaaatgtcagagagacaaatggccctgcctgatcatgtaggacctggtagggcagcgtaaggggtttagattttattataagtgtaatgggagcctttgggttgtttcaagcagagaactgacatgacttggtttatgtcatgttatgtatttgcttccataacttatgttatgtatttgcttcaaatactagaagcaaaaacaacacttagatggctactccatttgtctggataaaatggcatggctttgatggattaaccatgaaaatgaagagagacagatgattaagaatatactttggaggcagagaccaatgtgctagctgaggtacaacaaataggaatacatagggtaggtgaaaaaatgagcaatcaagcgtgacttagagtgttctggtttgagctaaaggattcagaaactaactgaatgaaaaagtcctaaagggtatcatatgagcacagagaaactcctagtccaggtgtctaaagggaaaggcagtgagataggcttcccaggagaagtaatgcctgagatggcaactgaagttagacaagtggactcctaaagaaaacagtctaaacagacagaggaaatcatatttatgaaggctcagaattaaaagatcatgtccaatcatttatgaaactgaattaatagtgattatggccaagtaatataggaaatgacttctaggaagctgcgccattgagaagtgtgtcattttataatattataatatataatactgactctccactgaaactacagatctagtgctttgtggacattctttcaatgtaagtatttctgaacagttacaaacaaactgttttaaataaactaaaatgtctgtaattgattcataacaatgtttcatgaaatttagcatcttttctgtatctcaacttttctgtcaagtattttataccctataaatgaatatcgggaaagaggggggtttgttatttagactaatgctctaatttgtgcctttgaaatgttgagggtttcttaaaggttcatatattgaaagctacacgttatctttgtttaaggtcaggaattgcttctaaacttctttaattatcatgtaaataactttcctaagaggagaacaacttagaaaaagcctatatttctaaccctacatagactccatagcccaaagtacaagaaagaatttattcatccacatatttaacaccactgtgcaaaagcacatttgacctcctcatttacaagttaattcatagggatcattctaactgaagtgctgctggtaatggaagcaccacaggccaaaggaagcttgcaatgttcagggaatatctagctccttttgtttattcattcccttgttcattcattcatttactttgcttgaagaatgtgatgcaactgacatgtaatccatcacatatctgagaaaaccttacaattattttcgaatttgtacttaattaggaagatgagctgagactaaagggatgtatttaacctagcggttaggttcaaaaactcactggaaaccttcccaggaatctgtccttgggggaaggtcctgggactcctgtattttttcctatgatttggtagccactcttttcactcttgtttcttcttcatttgctctttctagaatcagctggatcttttctccatgctttactgtttctgttttaagataatatttgaatttatattcttgtttaccaccatgaatctcattcaacacctccccacagcaccttttagaagcaggagaaagcattacataccagcattatacctattctttcaggctacacctgcaaccattggtaaaattaatgacaggcaaaccaagctgctgagacttctagtgttgagtcgttactataaattcagaaaaggaaaaaaaaggctctgactcataatgagagaatcattctttcccacagtcacaggtgagaggaggaaagaagaaatcaatgacaatctgatgagtacttttagtatgggaaaagataaaataaaatagtgttttgaaaatatatatgtttgcatacatgcattagaacacattttaatgcgtgtatatatatttaattttacaaaatacaagagaatcatatcactattttttataagttccttcctcagttttctttggggaggggtttcttgtcagctttattgaagtataattaatttaaaataaaattttaagtacacaatctgatgagtcgtggcaaatgtatacagtagcgggaccaccaccacaatcagcatataggtcatttttaacactctagaaagtcctttcatgtccctttgtagtcaattctcaagcccctgtcaacaattgaactgctttccataaccataattttgcctttctaaaatgtgatatgaatgaaatcatacaacatgcatttagtgtttttgtttttgttttgtaattgaaaaaccatagtggtacacatttatgggatacaatgtgatacatggatacaacacggcatgatcaatcaaactaattaaccgattcatctccttgcttacctgtcatttcttgataagacatctcaaatttattctcttagaaattttgaaatacataacacattattgttgatttggttggtagccactcttttcattcatgtctctccttggtttgccataaatcctcttatctatctgaaactttgtagcctttgatcaacaatttccccttccttctctccctccctcacccaccaagcttctgataaccatagttctactgtctacttctattaattcaaatgtattagattccatagataagtgatatcaggcagtatttatcattctttacaaaggactttaatctctttacataatgacttccaggctcatttatgctatcacaaatgacaggatttacaccatttgtaaaggatgaatagtataccattatggagatataccacattttctttatccattcatctgttaatggatgttttgttgttgtttccatatcttggctattgtgaataatgctacaatgaacgtgagagtgcaaatatccctttaacactgattgcagtttctttggatataaagacccagaagtgggattacttggttgtatgtatttctatttttacctttttaagaaccttcataccattttacataatggctatactaatttacattcccactcacaatatatgagttcttttccttttctctgtatcttctccaacaccagttatctttcatgtttttgacaacagccattctaactggggtgaggtaatatctcattgtggttttgctttgcatttcccaagtaattagtgatgctaagcattttttcctgtacctgatgatcatttctgtatctacttttgggaaatgtctgttcaggtactttgtcaatttttaaatcagtttatttgttttcttgctgagttgagtgcttatatatattggctgttaaccccttatcagatgtacggtttgcaaatattctctccccttctgtaggttatctctccactttgattgctgcctttgctgtgcagaagctttttagtttgattcaatcccatttgcctatttttgctggtgaacggccatattaaaaaaatcattgccttaaccaatgtcaggaaactttttccccatgttttcttctaggaattttacagtttcaggtcttatatttaagtctttaatccatttgaagttgatttttgcctatggtgtaagataggggtctactttcattcttttacatgtggatatccagtttttccaacataatgcattgaagaaactgtcctttacccattgtgtgttcctggcacctttgtcaaaaatcagttgactataaatgtgtgggtttatttgtgggttttctatcttgttccatggatcaacgtggaattgcatgccgattttatgacagtactatgctgttctgattacagtctctttataacatgttttataaccaaggaatgttaggcttccagctttgttttttgtttgtttgcttgctccagatttgttttagctatttagaatcatttgtggattcatacaaatttgaggattattttctatttctgtaaaaaatgacactggaattttaacaaagattgtgttaaatatgtaaattacattgggtagtatggaaattttcacaatatgaagtcttctaatccattaacacagaatatctttccatttatttgtgttttctttaatttttcttcaccagcgttttatagttgtcagtacacagtcatttacctctttatttaaatttatacctaagtattttgttgttgttgctactgtaaatgggattgtttacttaattttctatttggataatttgtcataggtatatgaaaacactgctgatttttatatgttgatgttgtatcctgcaactttattaatcagtcctagaagttttttagtggaatcattagggttttctatacagaagatcatgacatctgcaaatggagacaatttcatttcttccattcctgtaagaatgcctttaatttctttcccttccctaatcgctctggctaggacttccagtactatgctgaacagaagttgtgatagtgggcatccctgccttgcccctgatcttagaggaaaagctttcaactttttaccactgggaatgatgttagctaaatgtttgtctatacatcctttactgtgttgaggtacattccctctacagctaatatgttgagagtttttattatgaaagggtgttgaatttggtcaaatgcttctaatgctttttctgcatttatcgcgatgaacatatggtttttgtaattcattttgttactgtgatgtatcacatttattgatttgcatatgttgggccatccttccatcctggggataaatcccaatgatcatggtaaatgactctttttatgtgctcctgaatttggtttgctaatagtttgttgagggttttttcacctgtattcattatggagattgccctattgttttcttgtttgttttggtttggtttggtttggtttttttgaaacaaagtcttgctcttgtccccgaggctggagtgcaatggtgcaatctcggctcactgcaacctatgcctccaaggttcaagagattctcctgcttcagcctctcaagtagctaggattacaggcaagtgccaccacgcccggctaatttttgtatttttagtagagacggggtttcaccatgttggccaggctggtctcaaactcctgaccttaggtgattctcccaccttggcctcccaaagtgctgggattacaggcgtaagccaccatgcctgggcttgtctagcttttgtattgctagctttgtaaaattagtttggaagtattctgtctactttgattttctagaaaagcttagaattggtattagttcttcattaatatttggtagatttcagtagaggagtcatccaattctgggcttttctttggtgggagaatttttattactgattcaatcttcttacttattattggtctgttcaggttttctccttcttcatgattaatcttgataggttgtgtgtgtctagaaatttattcatttcttctatgttattcaattagttgctgtataattgttcagttcttatgatcctttgtattttgggagtatcaattgtaatatctcctttttcatttctgatatttacttctttgggtctttttttttttcttggttagtctagctaatggtctgttgattttttttttttcaaaaaagaatctcttagttttgttgaaatttttcttttatttttctagtctgtattccatttattttggctctgatctttgttctttccttccttctggtcactttcagattagcttgttcttctttttattgttccttgaggtgtaacattagattgtttattcatgatatttcttctttcttgatataggcatttattgctataaatttccccctttctgctaattttgctgcatcccataagttttggtatgctgtgtttccatttttctttgtctgaaggcattttaaaatttcattctaattttttctgtgacccagtggctgtttaggagcatattgtttaatttccacatatttgtttattttccaagatttctcctgttattgatttctggttttatcccactgtgatctgaaagaacacttgatatgatttcaatactcttacatttgctaaggtttgttttgtggcctaacatctgatctattctggagattattttatgttcacttaagaagaacgtgtattctgttgctgtggaatggaatgtgctgttaggtctatttggtctatactgcaattcaagtccaaagtttctatactgattttctgtatggataatctgtccactgttcaaagtgggatgctgtggtcccttgctatcttagcactgcagtctacgtatcccttcaggtcattttataattgctttatatatttaggtgctctctaatgttgcattcatatgcgtttacaattatgtctgtgaattaatacctttttatcattatgtgatagcctcctttgtatcttttatggtttttgactttaaatctattttgtctgatataagtatagctcccctggctctccttgggtttccatgtgtgtgaaatatcttttttcaccccttcactttctatgtacatgcttattaggaaagcaagtctctactaggcaacatgtgattagaccttactttttctttaatccatttggctactctgtatctttttataatagagagtttaatctattctttatttccccatccattgagccagtcttggttattttattgaagaatttaatccatttacattcaaggcagttactgataggtaagaattgctactgccgttttggaatttgatttctaatttagatcctttgtttccttcttcctctgtactgtcttcctttgtggtttttctggttttctgtggttgtatgttttgaatcctttctttttatactttgtgcaactactataggtttttactttgtagtataaaagttgcagataccaagatgaaattactcttctcaaacccaaacaaattgcagccagcaaagcacatagagaggtcgtgtgtggatgtctgagataaaacctatctcaagtactttctaaaatagccacacaagaactttttcatgtccttcacatatctccctcccacaaagggacccaaaatggcgaggaaatggaatatcctcctccaattcacttttccccctgtagaaaccatgggtctagggaaattctctgtgtgtgccactgtcccagcttgggggaggggtggtacagtcaaagaaaactgttccgcttattgttcagccacagcttttctcagttctgtggtcaagtggatgtctcaagttctgggttattcacaatggtattcttgcctgatgatagttgttagttgaatttctgggagagaggggaacagagaatgaggcccgataacttctattctaccaccttgctgatgagatttattttaggaaattggctcacatgattgcaaaggcttgacaaatccaaaatctgcagaataagtcagcagactggagacccagggaagagctgctcttcaagtccaaaggccatctgctagtaggattcccttttcttctgaggaggtcagtctttttctattaaggccttcaactgattggatgagacccacccacattatggaggataatccgctttactagaagttgactgatttaaatgttaatctcatctctaaaaaataactgcataaaacatctagtttgaacaaaaatccggataccatggcctaaccaagttaacacacaaaattaacaatcacattagtgtggagagatgaaaatgaaatctggggaacacaagatttgtgttagaaggcagtagagtgattgaccagcctgctttatctgggactgaggggtttctcagagcaagaggatttcaatgctaatgctgagacagtcccaaataaaacaaaacaaggtcactctaaagcaaggttatttcatcagtccttgttcttgtttcaatctcttccagtttatctctgaccttctaagttatacagattcatgggcacaacagtctttggacaagaaactaccaaaataatgaaaaaatgtactgtagtttatacagaagtttttggtgaattttgatcatgatgatgagtgtccatctctaagtgtactgatgaagtctagtgtacaagcccaccaggataatgtcatcaaagtttcaaagtgcccaaaaaatcagacaaatagcctttacccagtgaaacctatggtcctttttgcaaattttctcaaacaagattatcagtgaaatgttggtatagcagaaagagcatttcctaaacttatttccatggtaaaagttggttcagaagaaaagaagatgtttagaaaatattgacatgagaagatgtttagagaatattgagatgaacaaagttaaatagcagaacttcccatagccttaaaaatataatgtgcatcgtgcagctccaaaggaaagcataatttgcagaattttccaaactgggccacagaaatcactttcacagtacacactatctcccagaatagggttcaacagagatccagtttgttaaagacaggattaacaagacatacatagaaaatatttcagctcatcaaaatatttgcagaaacataatttctggctcaacattgattctcataagcaattttgcagactccatatttgtttatgtatcttagtaaatgattcaaatgttgattcactagtgagttttacctttaaagagaaaattacttttcttctttcactttaacatatttacaaaccagcaaataaatgggtaaaggatgtacaatgaggccaaggacatcatgtggtggagccacagcccctcacttctctcctccttacaggcgttcacctgaagcatcctgggtaacagatctctctctgagcgaggaattgcaggtcacctgtaaaattattctaattgacttacacttcactaaatttttaaagttaatattggcacttacacctcaaacagaaattccaggataaaaactcaagaaagctaagacaatgagattttaggaaaatgtgtgttgcaggttatggagaatttctaattcagtatctaaattatgtaagatcaaatttatagaatccaattcgagagtgttggatactatatttctaagagtttgcatcagtgctactttgacccactggaaatactgctttaagacccagatcaatttgagagaaggtctgagaaacatttttaatataatacaaggcattcatgcaaacttgaaaacagatacttactggaatgagaaaatgcaaaactaatgaaaatattgaaaatgtcagtacattgtgtagcacttaaactgagcattagctaattttaatgattgctttttcctgtgctactgccaatattgtcagcaacagatgttgttactgaaaatgctaattattataggtcatagacaccctctagctcgctctctttcttgctctctcttttggtttgtattggtaattacatctgtgcatggataagctgcatatgatttgaagttgtgttttgtgtaggatgatgtcatcacatcaaaataacaaagagatcagttgtttaacttcccaatgtcaaacattgttttacaaatagtactgaataaaactaagttcatttatgatcaccaatcactgcattgtcacatttcaggtcgacaaggtacaattagaatatatttccatttggttataacaagcaaataacctcaaattaaaatgttaagacatgaaaaaaatcacaaaacatatactatattaaatttccaagaaagagtttttgcagtatggacataaatgccactaagacaggtacaaaacttgaaaattatttttagtaactcaaaaatgcaaacatttacaaagaaagataaggagaatttaaaataagagtaaaaagctgtcataaaatcctcaaaataatttcttctgcttaatttctaaatatcccagatatcaggaaacttagcctgcatttatactatgaaaatctgaaatgaagatttcttactttatacttaagtattaagttcagttgttagatacaaaacatgaaataccaaaaaaaaaaaaaaatggcacccacactgaagttaacagattctgagattagctgcaagaaataggactgtagcgttttaaagtagaggtgacacaataaacagaatattgattcacttctaagtaattttatacaaataattgacaggttatctcttgtcaaaactgaatggtaatggaaaagttattcggtcacaatgaaataagagtgggaacagacctggaattggagtttcataatgaaacagcaaaggaagttctattatcaatgccctgcctagcaaactggtagttctattctatcctaattcatctcatcaagtactcttgcatacctattatatgccaatgctggatatcagggctgtgattctgtgtatagcaaacctttggcagatgtgctataaaattttgatgcatgaaaaatttaattttgttaaaaattttgtaccgtgctgttttggatatataactgtcatggaaaataggattaactgagaaggtcctatgacctggtacaaaggtgataccattagcctaagatccaaggggtaatgaccaagacattccaaagagagatctgtgttcattagtaattagaataactttttcaaggcaatagagttttactcaatagcaacagagagctgcagggaagccaacgatatatcgtgagaagtggattcttccataaatatgagactaggctcagataaaatatttgcaaactttagtgatttttttttgtcgtttatttttcatttatttatttattttgagaccgagtttcgctcttgtcacccaggctggagtgcaacggtgcaatctcggctcactgcaacctctgcctcccgcgttcaagtgattctcctgcctcagcctccccagtagctgggattacagatgcctgccaccatgcccggctaatttttgtattttttagtagagatcgggtttcaccatgttggccaggctggtctcgaactcctgacctcaggtgatccaccttcctcagcctcccaaagtgctgggattacaagcatgagtcaccacgcctggcctttttatgctatcaaactttaatattcaaagttgaaaaaaaattacaaagtattccacatattgtactggggagacacatgacagaaaaagacaacttcttcatgatagaaagaacacaccattagctgaataataataattcatttatacaaagctcctgagtttaaacaaattatattagtctaaagtcagtttcataatcttgcagatcggcctagaattttatgaagtatagtaacaacatgcaatttttaattctttaaagccttaaaatcagctaattgatttcttcaggcaacatcattcataattgagtggaagttgccccacttcacactcttctttttctctcataatcctatatggcttttcagaaggccacacggagtataactacagcatatatggcataccttatacatgtgtaggcaatgtgctgggtaagacatggccatgcatggtttaccttacgagctcagagatatgacttactgtttctactgcctagatgtgaaaagggctcatagacctcgaaagtaacataatcaaatgtaaaacagtatctaattttaaagcccagtggatctggaattacaaggaagcagaaaaatggagacaggatgcagaggtagaattcatattctggaaagcatcatatttcaaacacacccctataattcaaacattttatttgatggaaatcatatgaggctctgagtattgatataccactgctgtgtcaagagttgactagaccatttctgaattaattaaaatataaaagtaaattcccttaaaaatactagttattttaataatgctgggcccattcttgtaacttctgctttctttttaggaactaatggatatatcaatgactaggtatttttaataaatcattggaatgtctacttttttcatgaaatatcgaaagtttttacgataaagactgaaattttgttctcaaatacttagggaaaaatatacctcattacttcgatgacagaactgcttcctagtaattggcatttcttaacatcaaagagatgttaaccacgtgttgaaacatcaaacacacgtataccacctcaaaggaaataaacaatttgtcatggacaaagggtcaataaatataacaaaaaattcttacaagtaatcactgatgcataaaatgctcaaattaacaaagatataaaaattataaaattcaaggctaatcagagtatggcgagatgagtgttctcatatgctataggagtagacattgggacagcctttctggaaagccacctcgcaatgtataacctttgatccagcacatacacagagaaacctatcctaacaaaacacaatcatttgttacagtaaaagatatgcataaaaaattcattgcaaccttataagatcaaaatcagaaagctatttgtccagaacacaaaatgcaacagaatgtttaccactgccctaaaaatatgacataaaatagttaaagaaatacaaatatgcttataaagtactattagggagaatcaaacaaaaaaaattcataaaaacaaaaggaattctataaaagacaattctaaatttgtgcaaagatgctttacatgcatacaggcgtatctcagagacattgcaggtttcgttccacatcaccacaacaaagcaaatgagtcacacaatttttttggtttcccagtgcataaaaaagctattttacactaaactactctattaagtgtgcaatagcattatgtctaagaaaaataatacacagcaggtcctagaataatgttgtttcattcaatgtcatttaattcaacattctttcattataatattgatgagaaaaaacaatgcttccagtcagggcccctgtctgtatggagtctgcactgaaagtgttcagtgttcagtgagtagtgcttgtttgtgattgttttggaattgcatggtgggaggaggcgatactgagaattttcactttgcaaacatttgttcctttattaatctactcccaccactatgacagacatcactcattgattcacctaaaactgggtaaataagtatctcacttgtatttactagtctttcttaaatgtatgcatagcttacaattcaatgttttagaagtattttggtctttatttagaagtttggtgatcttttgtgatgagaaatatgctgtaggaggccgggcacagtggctcacgcctgtaattccagcactttaggaggccaaggcgggtggatcacatgatgtcaggagtttaagaccagcctggccaacatggtgaaaccccatctctactaaaaatacaaaaaaaaaaaatcagccgggactggtggtgcgtgcctgaagtcccagttagtcagcaggctgaggcaggagaattgcttgaacctgggaggcggaggttgcagtgagccaagatcgtacccctgcactccagcctcgttgacaacagagtgaaactcagtctcaaaagaaaaataaaaaaaaaatgctgtaggaatttaactcttctttatatcaattgactcatgataaaactggttttgttatatgacattttgcttaaagtcgtagtttccaagaacctatcaacaatgttaaggaaggacttactgtacataccttaattttaaaatattttattgcaaaaaaaaatgctaacgattgtctatctgggccttcagcaagtcataacctttttgttggtagagggtcttgccctgatttgatggttgctcagttaagggttgactgacattttcttaaaataagacagcaatgatgtctgctccattcactgattcttcctgtctgccccatttattgaatcttcctttcatgaaagatgtctcggtagcattttgtccacattagaacttgtttcacaactggatttgttcttctcaagcctctcaaagccactactttactaagtttgtgtagtattctaaatctgtcattgtcatttccataatgttcatagcatcttcaccaggagtagattccatctcaagaaaccactttttttgctcatccattagaggcaactttccaacaattcaagttttaccacgagattgcagcaattcattcccatcctcaggctccacttctaattctacttctcttgccatttccaccacagctgtagttatttccttcactgaactcttgaaccccgcaaaatgatccatgagggtaggaatcaacttcttccaaactcctgtaaatgtcactattttgacctcctgccattaatcaagaatgctcttaatagcatctagagcagtgaatcatttccagaagcttttcaacttactttgcccaaatccatcaaaggaattactatctttagcagctatagctttatgaaacatttcttaaataataagacttgaaaatcaaaatatcatctcgatccatgggctgaagaatggatactgagttagtaggcatgaaaatagcattactctccatcagagctcttggttgaccagtacattgtcaatagcagtaatattttgaaaagaatctttttttctgagcagtaggtctcaacattgagcttaaaatattcattaaatcatgctgcaaacaggtgtgctgtcatccaggctttgttgttccatttattgagcacagatagaatagatttcacataattcttaagggccctaggattttcggaatggtaggtgagcaatggtttcaaattaaagtcaccagctgcattaaccactaacaagacagtcttgtcatttgaagcttcgaagttaagcactgacttctcctctctagctatgaaagtgccagatgacatctaattgaaagctgctgtttcatctacattgaaaatttgttgtttagtgtagccaccttcatctattatcttagctccatcttctggataacttgctgcagcttcaacatcagcatttgctgcttattatttgtacttttgtgttatgaagatggtttctgttcttaaacttcatgaaccaacctcttctagattcaaacttttcttctgtagcttccttaactctctcagccttcatagaattgaagagagttagggcattgctctggattaggctttggcttaaggaaatgttgtgactggtttgatcttctatccagaccactaaaatgttctcactatcaacagtaaggctattttgctttcttattatttgtgttttcactggagtagcactttaaatgtctttcaagaacttttcctttgcattcacaacttggccaactgttggatgcaagaggcctgcctggcttttgacctatcctgactttggacagtccttccttgctaagcttaatcatttctagctttttatttaaagtgagcattgtgcaattcttcttttcacttaaacacttggaggccaatgtaaggatattaactggtctaatttcaatattgttatgtctcagggaatagggaggcccaaggaaagtgtgagatgggaatggtgtgttgatggaacagtcagaccacacacaacatttatcgattaagttcagcatcttatatgggtgtggcttgaggtgcccaaaacaattacaatagtaacatcaaagatcactgatcactgggtaaaataatatataataataatgaaaaagttcgaaatattgcaagagttaccaaactgtgacacagagacacaaagtacatgctgttggaaaaacaacactgatagacttgtttcacagagggttgccacaaactttcaatttgtaaaaatgctacagctggaaagcacagtaaagctatgtgtgataagatgggggtatgcctgtgtacacacagaaaagaagagtgaaatgaaagtaagacattaataatattcccttctgaatagtatggttaactggtaagttttattttcttcttccttcctttctactacattttacaaaatgtgcactttctttttaatatatccaagagtaaaagtgtaaatgctattttaaagctaatgaaatctattttcatttgccaaacaaaattataagtgatttgctgtatatgcatattcaagctgtcattatacttctttgacattcagaggtttttctaaaaaacattttttataccttacaaaatcaacttagagatttaaaaaaaacaagtttcagcatagttgacatatccatttcactcctcacagttaaaggtatgtccagaataataacctcccgcctccaacccagtgtgtccctcactgcttcgttaattaccttaattatttgtttaacctcttaaagattttttcaatataaaataatatcaagagaactacttaattgagtactcttcctcactttcttccagccctaaccaaccaccccatttccccaaatacacctgtactaaatcaggtatatatcaggaaatacatgggctggttaattcctggtcttcaatttctgtcctttattagtaaagaaaacattctactgctttacacagtgctttgtgccttaaatgagatttctcctagaccgcaataaatatttgctaattttgatttaatttaaagacgagggaggttaatcaagagcaattaatcaagagcacaaactagatgtcataaataaataaatacattttaaaattctccaacaacctttgagttatttctagtctagcaatattcattctgatttggaaaccaaaagtaaaattctatggcccccaaccaactgaatggatccctcctctgggccaagggcattctaaagtaaacctgaaacactagttcaggccgtgatgggaatgggtggttggacatgcctcattataacttcctctctttggaattcaggcacagctgactagcattaacattaatacagcgaccttatgattgacaaaacagactctctctagtaacaagatatcaacatgacagatagcaggccctgaaagaaatgtaagtattttaccccaaaatatatttctttgacatattttgaaatacccctgcaaagctgtctcttctggggaaaatctacattccatagagaatccccttccctttccaggtctttttccctatccaggagagaattaattaagagtctggtacgtttttatgtctgataagaaacatttacaatctattctctctgaagcctgctaactagaggcttcatctgcaataataagaaccttggtctctgcaaccccttatcttaacccagacactcccttcgattgattccaggtctttagatgaactctttcaaccaactgccaatcagaaaatctttgaatcctcctacgacatggaagccacttcaagttgtcccgcctttttggaccaaaccaatgtacatcttacacgtattgatggacgtctattttctccctaaaatgtataaaaccatgctacaccctgatcaccctgggcacatgttatcaggatctcctggggctgtgtcatgggccatggtcactcatatttggcttggaataaatctcttcaaatattacagagtttgactcttttcgttcacagattcatccttggaagccagaatgatatatgttgttccatataattttcagtaaataaggaacaaccctatgtttcaaacattgtaattcctatcattctttcaccagataagcaggggaaaattcaggttatctggcagtgtaaaaattctagatataaagaagtttaaaatgtaatgatttaaaaacaacagtatgtgtgctaaaagaatcacaccatatgtgattaagtcaaattataaagcaccagctttaagtaatgactcagagaaatgagaaaagcaaaacaaaaaggtatagttatgaatgggcttcacattgacttattatgagtaaatcattcctttgacaaagtttatgcttctttcatagataaagaccaggatagttctagagcttaagaatagaaacttgacaactttctactaaccttgatgaataagaaagacaaaaagatattatgtcaacaccaaaagaagggcccccatgcctgtctcaacaaaagttatcagttgcaagccttgttaaataaggttacacaccaactttcctactatatcgaattttagagaatgacagctttcataaaggacaattttgttgctcatctctacaggaattagtaaaatataataaatgagggtatcaactctacatatttcatgctttgaaaagttgcaaacttttatagtaggcatgcctagcttttgcaaaaggaaaaaatgaatttttaaatgtgtttcagttaaatgtaaatgagctaaatgaatgaaagctgcagactcaataaatgtttattgccaggtaagttaaggcactttttttttttttttttgagacagtctcactctgttgcccaggctggagtgcagtggtacaatctcggttcactgcaaccttcgcctcccaggttcaagcaattctcctgcctcagcctccccagtagctgggactacaggcatgtgccaccacatccggctaattttttgcactttcagtagagacaaggtttcaccatgttagccaggatagtctcaatctcctgacctcatgatctgtccaccttggcctcccaaagtgctgggattacaggtgtgagccactgtgcctagccaaggcacttttaagccattttgcacttgtcaccatctgaagttgaaacatgaagaatccaaaaacaaaagcatttcaagttcttttatgatgctcaacagtaaagtatgcaagggctcaagtaatctgacaagcttttattagaatagggttgttgttacctataagacattttatcataaaaatattcaagcatacagaataattgaaaaaagagtaaaataaatacccatatactgacaaccagactcaacagctgttaagatgttaccatatgtgttttatctaaagagatacatttcattaattaatttttggaaccaccttcaagtaaatcatttactccaactatttgattcatttgatgtcaatagtccaaattagaaacatataaaatacactttggtagtacagtcccatgaaacccaaaaatggaatatatccatatcatcgcagtttggtcattgccactactaattaatcctataggattaactcttttaagcttctgtctcctgatcttgaaaaaatcaggaagctaaacttgagaatatccaaagtcaccataggttattaaatgttaccatttcaatacccacaggaaaactctactctcactgccctgtttgatctgcatatgaaactcggaaaaaccataagacacctggacgacagctggccagaagctgccccgtaccctaacccgcaaggatgtggacacatttctagaaatcactccagcttttaaagtaaggatgacatttggcataagtaaactattgaattattaagttgtctaatgaggtactgattctcaaccacatgcaacttcctgaaattttggtttatatgacataatttctccaatctttctctagcttcctatcaagcttactgctcagcttttagaaataagcataataggtcattaggcttccattagaagcaattacttcaaaatagagcaaatgttcccctttctttaccaccacaccgtataaggatcttccacaaagacaggccatgtaatgaagcaatctaggttttgtttcaagaattaatgcaaaacagcactcagtcattatggtcattaattcaggttattcactacctatcaaaatcacactctcaaaaaacatattatgcaaagccacttgagatttaccagaatgtttaattattattgaaattcaagaaagatcttccttcttcaagccttcccagcatctaagattactaatgtatagatttttaaaattatggctgccctaattctggattgaataaagacttcaaaatacttcatttgactagatgctgcagactcaggggctattagtcctgctctgaagacatggacccttttatgtagccccagtttgaatctaagttgtttggaaatagtatgattttactggcagagaatgtacctcaatatggaagctggctgtgtgccccaggaaagaagaaaaatgaactgaccctgcattgcagaaagacctaaggtggttagtattcaacattcttccgcctcagttgagacacacagaagtttgagttagtcactgttttcaaaacgcatttcagcagtgcatggtgagaaactcaaatgtaggtaaatattgtcattgattgttatttgttgtttttattcataggaaatttaatatttcgatttccataatactccagctctgcatagcaaattcataaacattaatacactggtcctataacagctttctaaaatatgtggaatgtaaattattcccactgtctagaagacaaaactgaggactgatatgtcacttgggtattacataagatcaaacaagtaaggaatcaaatctagatcttgtgattccaaattcagcatttttcccattatactttacttgtactgtattctaaataatttctattaaaagtacattactgtgcatattttatagatatgatttacatagcatttaacataagctgccctagatagtactaagaaaactcaaaactatcaaattctctaagataaagtagtaaatttatcacaatgaattagaattatatttccatgacttttacctaatcccatggtttcaaaatcttactgtcaatctaatattaaaaagagaaagtgttcagggttgcctagggctggggcagtgcggtgggaagaaataggaaatgactgctcatgagtgtgagggatttctttttaagaagagacaaaagtgctctaaaattagattatagtgatggctgcacaaccctgtgaacatgccaaaagcactgaattgtacattttaaaagtgacttttacatgaattatatatcaataagactattttgaaaagaaaaaaactaaagtcaaagtatatagaacttctgctttactgtactaatttttaaatctaaggaaaaattgaaatttggtttatttattcaatatttacaaatactgttttgtccacagaactagaaaacaaggtatagtcccaaattcaagagtttacaattcagaaggtcaaaaagaaataaatagctaattatagtaccaggcaaagttaaatacaagttccacaaaaataaatgcacataagatgtagtgaaagatactacagtaatctcctgggagcttaaatatggagtaccagtgggttgtgtgaccttgggcagcacaaaaaaaatatattaaagcactttaagagcaaagctctacatagatgttaaggcactgcttccctatttataaaataaggaaattggtcatttctacaatttccataaactctaatgttctacaaatctataatttaattctagacagactgacttctactgtgaattatttttcatttttgcttgaaatattgtgtaattccctcatcaactaagtcataacataaaagtataacatttttgtcactcccataccaaactgacttacatccaaaagaaggctgtttcctttaaaagaggcattctgaagaattatgtccttattttaaagatacaaatattatgcaatttcttttttagaattcctttttggaaatgctgtctgtgtttgagtatctccaatattcacaaatatttttcctttgaaaatgaactaaattttggaaacagtcaaaaagatctggcatacatagctggcaatcaaaagggcaacttttttattaatataaaaatgtaaatgaatgaactttgtagacatttatgatggacaagtacccaatgttctctgaatacaatcagcatacttttgtgctccatgtctgaggcagaagaatagggtctggagacaggcagcctaaggccaagtcatggctgagttcttggaattgggccaaaaggaaaaccccatctctccatgcccaagtgagaagaggccagagactcccctctttacaaaatccctctaccctagcctacaaatgggaaatgcctctgattggttgcaggccaaagcttaccttcagcctctgattggtcgcaagccaaggcttcacttcagcctatgattggtcacaggccaatccttctttcatatagggtgttgtaaccaattggaggcctctaagggtacctaggggtgtcaccaaatttttttagtttaataaaatccctaaagcaaattgcaatcagggcttttgggccacctgctcaagcccattcccactctgtggagtgtacttttctttcaaaaaatctgtgctttcattgcttcattcttttgttgctttgtttgtgcattttgttcaattctttgttcattgcgccaagaacgtggacagctcccagtcaagactttgcattctggtaacaagtttactcattcagtctattcgcagagttttctgctctactaaaattctatctactcctcaagatccatattagtactaacacttctctgacattttaaattcagattttactgccccttcttctgtgttcaaacaacttctagttttattatactgtatttgttgcatcccattttagaaactacagtgactgggttctcagtatctgaaattcagacagttctgggatagaatatttgatcccacacaggtaaatcattcaacttgactaggtttccgtttatattctataacagggttatgattttcatctaacaacttcataaaatatttttaattggtattgcctattgtctgtgaggatacaagaaatcaggcattcaagctggtagtggttatgtaaacaggtgctaccttgcaagatggaaatccggcaataaatatcaaaagcttttcattggctgggcacggtggctcacacctgtaatcccagcactttaggaggctgaggcagggggatcacgaggtcaagagatcgagactatcatggccaacatggtgaaactccgtctctactaaaaatacaaaaattagctggaagtggtggtgcacgcctgtagtcccagctacttgggagactgaggcaggagaatcacttgaacctgggaggtggaagtagcagtgagctgagattactccactgcactccagcctggtgacagcaagactcttgtctaaaaaataaaaaaaaaaatttaaaaatttaaaaagcttttcattgttctggtccttttggtccagttatgctattctaataacgtaccctggacataatcaggatgcacttaatgatgtataaggatcatagaattatttatcatgagaacattggtaacaacctagttacctaaccatagtgggttccctgaataaattatggtgcagccactcaatagaattttatttacattgttttaaaaaagtcacaatataagacataaaaaaagcattcatgacctacaaagcattcacgatgtgtaaagtgtaaaaggaaggctataaaatcctagaataaagctacagagcaaattgcatttcccgtacttctatattacaaccaccctagcctgcaggatgccagggtaggtgcagctacactctagacttttaaaattctgaacccagagtaaatacacaatcagataatgttttcaactaaaaaagttcccccttttctctacctctttaactcttgcaacatttaccctgaagaaaaaggaaaattcttcattttataaaatttttgagccaagaatcaagaactttttttttccggctataattaatactagatttataccaagaatactaaattcggattttggggggtgagtttagactcaaaactgatggcaccaaaaagcataattcttaaaatgtatactttccagaagtacatttaaaattctcagtatttctttccatcctctactaagcaaccatgtttgtttttcctcctgtatcactcacagtaaagacgacttctttcctttgctttgtttagtttctggcaatggaataggattctttttaatatgaggttttatgtcaatcagcattatatcagtttctttgtgggttaactagatttttaggggccatctcagagcctaatctataatccagaaaaggcttcataaattgaggagcatcctacaggatcttctatcacaagccccactggtcaagggaagttttttcttgcatttcctcaagctgagactcagagaaaataacaaccccagggaaaatttcaaagatttattttctccttcactgttgaaagcaggagtttatggcatcttcgcagtggggtgaccagggtgcatctgaaccccagtgagtcaaagtctgcaggggcatgaatcctttggaaaaattctctgggcgactgtaatgtgaacatccttgttaagatgtaagggttacttcagagataaagataatgaagattatgatgccatcaccacaaccaagagacatgagactgtgctaggcatgtcaggtggatcatctcatttgatccacactcaatcaaggtgggagaataatcctaccaatagtggtaacggtaacaacagtagccaacccacatagcagatatgtgccaggctttgtttttaccattttatcaatattaacttatttaactcctacaacaaccttatgtgtgtgtgtgtgtgtgcatgtgcgtgtgtgtgtgtgtgtgtgtgtgtgtgtgtgtagattgagagagagagagagactaattccaaccctatcttctgaaaagggaactgaaacacagagatgtggaaggatttgccaaggttacataactggtaagtggcaaagccagaactgtttgaatttagtctcacgctagactcgtgtgaacgactaaaattcctcagaacaacatatttgtacttccttgtttcccatggaaaatgcaacactgcattttacatttatgctgcttagcacatatctctgatgcatgacagccattcaatacatgttctttgaattaaattttttaaaaatatatacatatttcttattttaaacaactcagtctgttaagttagttgactcctttcagtttctttcttagggagctattatgtccttttaaatataatgataaaaaactacatgtgggtatggagaactgggttcaatgaacacataatttaacgtttgtactgttaagaatcaaaccaaattaagttataaatcaaaaaccagaaccaactattttaatatggatggaaatgacccaatccatctttcttatcaaagtgcaaaatgaactcatttttaaaaatctttatttccttaacattatatagccaatacttgaacatcgaacatcgaaatagttttgaaaagaatatatttccttacttttaaacttctaggaaaacaagtacatagccacctgctcaaaactgtcaggaactttggaaggccgaggcaggcagattgcttgagctcaggagtttgagaccagccggcgcaacatagtgaggccctgtctccacaaaaaaaatacaaaaaaattagcccggtgtggtggcatgcacagtagctgtgatcccagctactcgagaggctgaggcgggaggatagcttgagcccaggaggtcaaggctgcagtgagccatgatagcaccactgtactccagcctgtgtgacagagaccctgtctcaaaaaaagaaaaaaaaaaagctgtcagcaataaaacatccattatagactatctctgtttccttatgtccaaaatgaaatggttgaatcagatgatttccaacatctcctcattctccagaattccatgttttaaaggaacatggaatgttctcatgctccagctcatgttttaaaggagactgcaggtgaaatttctttagacaaggaaatgcatatggaaataattcagaacaaaacaatatctattacttagttaatgtaatctctctttctatatcttctatactgagtgacccattttatcccaatataattccaaaaattctctatctaaaattacaggtagagagacactggctattgaagcagaaaatctatgttgaacacaagctgcaccgcatactagctgagcaactaactactggcatgttccttcacttgctgacttgcaaaacaaatttctttcctatctatctcttaaggacacaagataatataatattgttaatattacatttattaatgatgtaatatatgagaaaacacattgtaaactctaaaatactaaaaatgtaaggaaactgtactagcagtatcaagatattttcccatcataacagctaacagttattctattgttgtagtcagccatttttctctcaattctgttaaaataaaaacaaaatagttgtctattgtgcaaacagttcaacatcttcttccatttgatgtttttccaaaattcttgcttaactttatgaagccatactttcacataagcctattatttattaagcactaaaaggcactgtctgcttttataagtgagctttgttataaattaatctttttagagttccacagaactgaacaaactagaagatgaaaaatgaaaagcaaccctctgatgcacttcacatcctttccaatttcaattatttggactcatttacctcgcccagaaatgaataagctttgtgaaactgagaaagctaccaaggcataacattttctacattcttttatctctatggtaggaactctactaattacttattttagagaactaaaaataaactaccaaatatactaagagaagttggtagtgatcacagttaagagtaagaggaaggagctatgtctgcacatttaaaatctagcagtacctacagctaggaaatttccacttgaaatttaataaactttgcctctaggaaaacacaaatcatcaaccctttaagttacaattatcaaataatactctacaaataaaagagaccttttatccgtatccttaatactacttcaactccatctcagaaggaccttctatttgttccggatttgtactagtattacacttctagacatacaccaatgataatgatatcttggctataaaagaattttaaaatgctaccttatagaatgtattagttattctttaagtgagtgacaaagcattgcatcagatctaattatactgtttttagctaattatattgactttatccaagtcattgatagcatgagttttctgattaagaaaatgttagttaattggataactttttaaaaacataattttgacaacacatatcaacttggggaactacagcaaaacagaggtccaagagctttctaaaatggcacttgtgctcttggaagccacaggaatcatgtctgatagtggcaggcaggggtgcaggtgttttctccttgatcccgtctcacttttgtctgtaatcttgacctgactaggaagtgcagaaacaaacgcagagtagagaaagtagtctgtgtgggtatccatacagctcccaggaaacacacctacagcatccatagagagggttagatggaggcaaacccatctacatacgccatttttctccattaaacctcaaccttcacacagtttctgtactaatctaaccaagactttctcatgaagccaagaagagacaactcatatgatcaagtgggaattctaacttgcagactagagggtcatgactctgagctccatggttcaaacaatctatgtatgagttggttattgagagaaactgagggaatccaagagttgaccttaaaatacacacatctcaacaatcagatcatgttaaagtaaatctccattgccctggatcacttcaggatttaattgtccaaggagagcagggttctcctgtgaaaaaaaggtggggaaatgtttgagagtaaaaaatacaaaattcaaccggtcgaaaatacaccactccattcagtgtcttctaaaaaaccacatactcaaccttaactacctctaaatacagggagctgtacatgtagatgaaaaataatatgtgaccttacttcatcagtgaacataaaaacctgctgagagattaatgtgccttcatgttcattatctatttactcattagcactacaagcaactacatagttctgtgttgtccacgtccacacatgaaaacacacacacacagccacaaagcaagccttttgtagacatcactggtcaatcgtgacttcccaggtggaatcttctggtctcttctatttttcacagaatattcagaagtagttgctttaataccacagaagacacagtattccggggaagactttgagatcagcaccacactgaaagctcaagccccctagaaggccaggctaagaatagccatagtttcactctgtatgtaaatgactagtcaccaaaatcgtgttgtgtataccacatagagaaaaagaatcaactgtggtacaaaaaggcaacagtagaaagtaagaacaaaattatacactactaatatttaatacatgatttcaccatggcatatatgtataatttttaaatgaatacacatctatatacagctagatgtttaaaagatttttgctgaagaaatatgatcagaatagtttggggggtgactaaaaccacttaaactaaaatgatttacatatacattcaagcaaatagaagttatatcacttaaatcaacattttctaaaatgcttgagtcacgaaggagtcaatttacagcactaaatatttttaaatttttctcatttttctataatgttcatatcccaatctactttacaggaaactgctttttaccatgccctcaattgctaaatattttacagaaattggcactaagaaaaaaataaggaggacttacaaaaatctcttctgatttaacattaacacaaataacccagttctaatctaaagacttcatgatataaaacaccccaaagtaatcacgtaacaataaaaacaaattaaattcaatattatttttcaaatcatttacatcagctttttttctactgtgctctactaaaagaaaaattattttataggcatgaaaattttaaagaaactaagcaaacaaaaccatatctgagaaaattagcatccagtgtagggtgattttaggtcatcagggcaatttcaatgctgctaattatatctccaagtaagcagcacttacgtttttgcttcctgctcaaattttattggatgtataaccgagaagaaatatttttaaaggcaaaaaatacacgtgaatgtgtaaatagattgtgggaggggagtatattttaactctgagagctgtgacatgccttttttcattcctcccttctctttgaaacatacaagaaaacccacaaaatgagaatattctacacaagtatctactcgtgtaacacacacactatcttctgacaaacaagagaagtatgaaaataagcagaaaagacgagctgccacagagggaaaagtctaacaaaagactaaacaaataatacataaaaagaatgatcctcaagaggaatttaaaagaagataaaaatattcagacactgaatttcaaaatgccaatatgaattttaaatagtcaaatttccctcagattatgccacattttattctcattcattttggtctctacatgtatttacaatagactgtttctgtatttttatggagatacacaaacttaaagcatttttttctaagaaactaaatttagagaatgtgggaggaataaggagaaagtcaagacagcatttacaatttaatgggaagggaatttacagtgtcttaaagcaaataaatgtcaaacccatttaaacttttaggtatgacacatggactattgataattaaaatacaattaagtatttttggttggtatagctacctctatcaatatttgagatggcaactgttaatatttaagtctacaactaaattttcatttcattacattaatatagctcaataacttagatcagttttcaaaatataaccacacaaataaaatttatctgttactagtttatttatttcatagtaattgtgccgcttcctaatctggatttccagttctttaggcaaaatctcctatgtcactgccttatactgacacctgctgcaatgtactggaattgtacatttctcattgcgttaatcaggcagttgttaattttgcatatgggaaagaatacgtggaagatagtatttcaacagcaaataatgtaaattttaattctctaaatgaaataagtaacatttattctaaacatttaaattttcatggtatctttaggaaattataaatcaagaagtcttcccaaaaagcacttctgatggtaatttatccaatgacttcagtgacttaacttgtgcctatttgcggtagaattagcaaactaattagcaactttctccaatacttgacttctgctgtttcatcttttgcactaacttaataccttcgactttagaaaaatatttggttttgtgaaagtacacacacaaacggatcaggaaaatgaccctgctcttaaaaaaaagaaagctttatacattcatactggtagttaaaaaaattaaatagcatgaattagtgaatgagcttttcttatctattatcaaaattgccttttcatgaaaaacataaatgttttaccagaataaacttatccactgaagtagagcaaaacacaacacattgaaataactaggtttacaaatctttgtaactgaattaattaagctccattaagttttaattaacttcttatgcaaataaaactcttgtaagtatttctgaaaagaataccccactacctgaatctgtctcccaaaacttccggaaaaaaaaaaagtttccagacagcaatatatctaattggccaaattgtaagaaattacagtgtgatataataaagttaatggaatactgcttcccacctcaatctgctgccatataagcatcatctagatgcctggacatgccatactgtatatcatcagaaaaataatattttcttagaggcagttgttttgatcacaaatgagtttgggcagctaacagagcaacaagatacattcttgagaacggtactaaaaatatgataggaaggaggaatatagtactgcggtagtgtaaaaattgctattataactctctccttttatatcaaaacactctaattttgacaaaagtaatgacatagtatcaacatagtttgaataaaacaaaactatgatcaaacatataacagctgacttaaaaaaatacagcagctgattgaatggtttatgttcgggatgacgtagtattagaaatttgcaactgtcaaacaagttgtctccagtaagtctacttaattcatccatccaagtgaaattaaattcttcaagtgtaactataatatatggagatttaagaatataggggatgttttatgatgaaattcagtctgatcatttttttaaaatgtcttttaattgttttaattgaaaaagcaattagctataaaacaatggaacattttttaaaaatctactgaaagattatttggcactcttcttttaattttactaaaatttacataagattaatgtgccattcactattaagatactgcaaagtaccagagaggtaacaggtcttaatgaatgtagtagttttgcatcatattttctccaaacatttcactagcccatctcagaagacaagattgtgtcaattgcaaaagaaactatgtactaaaactaaaacctgttttagatttttaaacaaaatgtaattatgcaattcactttaacagctttcacaatcagttactaagaaagggaatctttccttgataagaacctgaaagattagtttttagagcctgagaaacagtagaactgtcagacacccgagatccttattttcaatcactcagttaccttacagagcttctgataccgaggagaagaaactgccatcctttgtaagcgatgcaacaaaaccacaactttctgcagagacgttctcaccacagccatcattttaagtttaccacacttctggagacacctcagaatttgcattataaatgaagagcaacgatcatttcctcccggtcactggacaatgatttgtcagttctctgagcatgctcgtttccaggaaagcatttgaaagatacagggggttaggttctaggaaaaaggaggctggtattccttcaacttctcaatttaaaaaacacagacaaacgccacagagaaagccccccagcagatgctcacaggcagcacttgctcagcccggcatggccagaaatgaaggaagttgtcgagcagccaagcgctgccggctgcgggagaggagtgcgctcagtagccaaagaggatattaagtgaaacattaaagctgcagatagaaagcggacatcccctgggaacagggattcaacatatcactgccaccaccacggtgcatgccctgtagctggtttctattaagagagaacagagcattcaccgtctctaaagagggatatgttcactacccaataaatgcagctctagctgtgctctgtgaattagtgaacaggagaccctgttataaatcttgagaagagcagaagggtacacctgactctgatgacaacagcccatacattaagtgctaaaaaatcacccccagacagatctcagcccaaaatcacctaaaacaaaacaaaacaacaaaaataaagcaaaacaaaaaatacttgcaggggttatatgactaagacaccctaaaagcagagcgatccagtggattctcatctgcctgcctagaaggaaagccattagaaatggaataggttaggatttgtctaattaaacagctaagtgaataaaaaattaaaagtctgtaattgactactgaacattccaaattgccacatttccccttagacagcatcttcatgatctcattgtatttgccataaagctgttttaattttatgaataggaaatatgaggccataattatatcatataaaaatccagtacataattttggggttctatgtgtatatatatacacacacttgagacatattctctactgcagcctgaacatcattgcaaatatcaactggggtaaagtactatcaggagatgtgcaaaataaccctggatgattaaatgactgggtcaaagagcacagccagaaatagaacccagatgttgctcattatcagtgtcctgctcaaactggtaaccgggctaatgctgcaatttcacctctgtctaatgttgtcatgattctttaaaagaaatgcagtattttcaagtatttgtttttcctcctttacttcatttgcctttcttagtccttcatgttacaacgatttaaagtcctatattgtgtcttacagaacggtgtttatcaagcagtgctttgccgactttattgggtcttatagaactgtgttcatcaggcagtgttctgtggacttctgcctgtatcttttttccctgcaggtccatactgagaatctacactgcctccctctggtgaggctaacaatgtcaccatatctgtgtaaagccaaaagtggagaacatattcaaaggatagagtataaaatgttaaggtatttggcaaatagatagaaatagattagtgattgttcagaggggagggaattggcggggaggaatgggaaattgctagtaaagggaaggggtttctttctgaggtaatgaaaatgttctaacttgattgtggtgatggtcgtacaatcgtgaatagactagaaacaaatgaattgtaaaatttaaatgaatgaactgtacagtatgtgaattatatgccaagaaagttgttattaaataagtatgaagctataattcctgtcctagaaccagcagatgaagtccccatgagataggcattcacccctcaaacacagtgctaagcatgcagctgggcacaggagaaaatctaaaacaatctataatcaaagtctgcatctatggaacaagacgatgaaaatgaggctaaaagcaaacataggagataaaagtgtaataatcctaaaacgtaaattattagagagcaaaaccagccacccatgacaacaccactccagaaaggcagcagaactcaggattttacccagcaaagaatcagagcatttcaattaattggtaatgccaaatgtaaagctgaaatttttaaatataattaaaagaataacaatcttttagaatatgaacatgcacattaagaataaatgcacttgaactaataaactagttggaagtcaataatgggctttcatacaaaagcaaaaaataaagtttctgcatctttggccaaatactcttatctgaatatagattcacagtgacaactgcataccaggcaattcctcctggatgttactccaatgcttcatttcaacaaagtcaaaacagatgaaatttgccatccccacacatttcccgctaacttgcaaccctgctctgacattttcttctatgttcccagtcttaggctctaacaccacttggcaatctgcctttccccttcctcagtctatgtatactattgagtcattagatctactacccctgccattgtctcctttctggtaattattacctgtagcctggatggctacatgagtatcctaacaggcctctcttctgtcactcttgtctagttcaagtccattcctcataccatcagctaaattcctataaagcaaaaatcccattgcatcactcttgttactatcctttatgacttctcttcattgccactggattaaaatataaatacttgcatggcatttaagaccctctatgagctggactgctcagttctcaaggagcttgtctctcctgcagggctccaaagaatcggcttttctcttgccaaaaggcttctgctggggaataaatcctaacagccttgcagcagggcaatgaaacatagatacataaatccaaatcatcatccatccttaaaagaatggcatgtatcatagcatactcccaaaagttaatcatcttccatgtgctttagacctatccttatcaaaattcacccaagattcaccttaaactgagcatagaataaactgctttatcttcctgaaatactcccatggccttggatctggttgtcataagacatgaagcaagtataaacagcgaatgtgtcagctaagtagttctacatacacatcctgtgcatgcagcaaagatacacggagctccttattccatcttccttagtgcacaaagactgtgcaccaccagcaccaccaccaccactgccaccaccatgccaccagaacttttctgttatgatttgccatgcttctgtacagtcattttctccaacaaacgtctctccatttccaaacaagtttctattttaaatgtctgtttactcatacaaaaggagaatcattaatatacaacaccataaaaaaattaaaattctcttgcctcagaaaaactcagtaaaaggtactaaatctctaacaatcttctatctataaggtgctgaaaataaaaccatggaacttttttaaaaatagaatggagagaacactttaaaattaagagcatttaataacaaagcaagggagtgaaaaatcatgcgaattaccgtaatgtgaaacattctaaacataaatgtacatatttatctttaaacaaaggaattttagtggactcttagtaaatgtcctctttattactttctaccagccaaaagagactatttttagcaacactaaagtaataatgtattatattttataaagcattataatgtattttaatatttttatcagcaccctttcttgatgctgtttgccataagtaatcctgtgcttagatatttttattttgaaagattttaaacatttctatttacatttgtcttccactgtttgaatattcattaaatattgagaagagtcttagctatggtaagaatatatcctaagataaaatatgtcagaagacatcattaaactctagaataggcctgtgttttgctggtgctcattaccagggttcatttaaagcctcctttattcattgtgtataaactgttacctactcaagtgcacagcctagatagctactgaaattaaaccattgcataagttaactaactgtgagcatttataggtcaggctttttcttgtttaaatcataaaaaaataaataatctagcatctatccacacttagagtcctctatgacctcctaaaatacagatgatggctaaatattttatcaattaacatttatagtgacctcatgaggctcaaaagagtgagtcaaaggaacagatttaattttgatacttgcctggtcacactcattaccaagtcacaaaatgtattgcgcaatgaataagatagaagcagcaatgtatttaaacagaaattttcaacaaatgaatcttaagaactcaacagtaaaacaccatgagttttcatgcacagggacaatttataaataagctcattccaaaaagatctgtttttcaaattgtgtaacttttcagtgaaaataatttcaaacttaaagaacaattgtaagaatcagagtagttcaaagaaagactctgtatccttcatccagatccacacatttgttgacattttacaaaatggtctttttcatgttttcagagaaaagagttcctaagaacggatttaaaaaaggtttcaatgctgagtttcataacggtgagtcaaggtccaaggacagcagtcagtattcacttaggatttgcacacagggcactgcgtaggcaacaatacagataatataatctctgcccttgaagaaccatgtgaccaactgggacaagcagagacatgtatcaaaagacaatggaggccaggcacggtggctcaggcctgtaatcccagcacttcgggagaccgaggcaggtggatcacttaaagtcaagagtttgagaccagcctggccaacatggtgaaaccccatctctactaaaaatacaaaaactagccaggcatggtggagcacacctgtaatcccagctactcaggtggctgagggatgagaatcacttgaacccaggaggcagaggttgtagcaagctgagattgcaccactacactccagcctgggcaacaaaacaacaacaacaaaagacaatggaacacgtgttcacaggtacatcagaaataatagttgtcaaactgatgtgagcatggcatggtataaagtaatcagatgtaatactatggttgacaaggagacttccccattgaaataggtttttgttttgtttctttgggagtggacagagtctcgttctgccacctagaatgaagtgtagtagtgcgatcttggctgactgcaacctccacctcctgggttcaagtaattctcatgcttcagcctcccaagtagctgggactacaggtgcgcaccaccacgcccgactaatttttgtatttttagtagagatggggtttcaccatgttggccaggctggtctcaaactcctgacctcaggtgacctacgcaccttggcctcccaaagtgctgggattacaggcgtgaggcaccacactccgcatgaatcagattttgaactggaaggttcaagagtactgaagcagaactacttgagggcaaaaaaagattcagacgtatttcataagattccttataatgtttataaatgaaaagttttatattagcacattttgtgtagaagaaatatttgaacctcagactacatatacaatcacagttatcaagctaatgacataaaagtaatatcatcaagcctaatattcttagttataaactaagccatagagcttttgcagcttttatattaagtatgtataataaatggagaaagaaacaacttcacattaagggaaaatgcccttataatttaggattcaataaagctaaccataatagggcttaaaatgacaaaaagcagaatagctgtgagcctctaactctaaataaacaattattacttccataaaacaaggtgggttttttcccctctaacattaagtaaaaatatctaatagagcttatttcaagaaacctattattcacaggagagcacggatttcataagagaataaagtgacaacttcaccttttaagggtaacacatttgcatgcagagggatcaaaagcacacagggcaaacacaggtactggtgtggtttcccatgcacttacctgcatctgctgtttgagttccctggccaagatactatcctgaagagcattctcccgatgagaggcatccacaagcacattcactgtggtctctgcttcttggatccacttcaggaagttttccagatctctgcgagaggcctgcaccgtcctccactcagcctccaaggcgttctgtctgtcagcaatactgaaagtaacaatatgacagcacggctccattacttacagtgttgtgacattccacatcacgcatcccctaaataaaaaactaacaggcagcccccaaaggaccttttattcaagtcaccataggtaactgggagatttatctgtatgtgtgtcttgaataatccttagtggagggatcatgtgaattctgagaagagtgaaagggggagagccataaaaatattaaaatcacatccatatcataaaataattataactacattttacagctcataattgtaagttaaattattcccccatatgttgtaggtcaatacaaaaggcaattctattcattcagtcactgaatcctaccactcctttaaggattaaatattcatacagtcagcgactatacgaatatttgttgatactgcctttatgtaagtcaatacaattaccttttgtgttgacttacataaagacagtatcaacaaatactcctacagtcagtggctaaatgaattctaggaagaaataatatctgaagaaatatttaagacaaaataaaaataattgaagcagctgattttatatattttaaacaattcatatatatacaagttggtttcttatttagtaatatttagaatgcattggacaaatgagcttctataaacccttcattaaatctacatcaaaattagaacacagagctatcttggagttatatgagttaagagatacacacacctgtaaattcaacatttaaaactttatattcttcagagctctataataagaaaacaactcaattttaaaaattagtatcgataatttcactcctaggtatttaaatccaagagaactggaaatatttccacagaaaaacttgtacacaaatgtttgtagcagcattatctataatggccaactagtagaatcaacctaaattgagacagaaattaataaacaaaatacactatatttatacatagactattattcacccataaaaaggaatgaagtactgacacgtgttacaatatggatgaactttgaaaacactatgttaagtgaaagaagttaaacacaaagggccagatatggtgaaattccatttatacaaaatttccaaaataggtaaattcatatatatagagaaagtagattaggtgttgcctaggattgcatggtggaggacaatggaggctgactactaatggtatggggtttctttggaggatgataaattttctgaaattaagagtagtgatggttgcccaacatggtgaatatactaaaaatcctgatgaattttgtgatacagcagtccctcctgatctgtaggggatacatttcaacatccccagtgaatgtctgaaaccccagatagtgccaaaccttatatataccatgttttttcccatgcatcatacctatttttacaatataaattaggcacagtaagacattgatgataataactaataataaaatagaacaatcataacaatatactgtgtaaaacttccgtcaatgtgatctctctctttctcaagatttctttttgtatataccacaggtaactgaaaccacagcaagcaaaaccacagataaggggggactactgtatacaaattgtatcacagtaaaaatcagcatatctaatagactttatttacacgtattttttctctctgtccatccattcatccatccatccgtccttctatctgtatatatacatagagggagaaatgtctggaatattaacttaatattcaaacagttatttttgggtgctgggatttaagttggtttactttcctatttgtactttttggcattttttttattttataatgatgcagtatctttttttaacatatcattttaaaaaatgggcaaaagatttaaacctatacgttaccatagaagatgtttagatgacaaataaacaaatgaaaatatgctcagcacattaatcattagagaaatgtaaattcaaaccacaatgagacattacttcatgttaaaacggctttaagaaaatgactataccaagggttggcaggaatgtggagtaactgcaactctcatacattgcaggtaaaagtacagccattttgaaaaacagctggcagttttttgtaaagttaaccatgcattagtgatacaactcagcaatcttacccctagatatttatccaagagaaacaaaaacatatgtctaggtggggcacagtggctcatgcctgtagtctcagcactttgggaggccaaggcaggcagattacttgaggtcaggagttcaggaccagcctggacaacatagtgaaattccttctccactaaaaatacaaaaattagctgggcatggtggggcatgcctgtaatcccagctactcaggaggctgaggcagtaagaattgcttgaattcaggaggcagaggttgcagtgagccaagattgtgccactgcaccccagtctgggtgacagagtgaaactgtctcaaaaacaaacaaacaacaacaaaaaaaaccaccatatgtctacataaaatctgtatgccagtgtatatagcagccttattggtaatggccaaaaactgaatacaacccaaataccaactggtattacatacggataaagaaagtttggtacagggatacaatggaatactattccacaataaatataagcaaactactgatacatgcaacaacatgcatggaatctcacatgcattctgctaagtcaaagaaaccagacactaaagactacatactaacattctgtttatatgacattcttgaatgtcatcaacctcatcctagcacttacttcttaacctgcagaatcagttcaaatttcctcgcctggaatttaatttcctccataattgatcccagtttacttctcaaactttatcccctagttttcttcaatactctgtttaggtaatagtggtgtgctcctttttctctagaatattcttaatattgtgtccacacgaaaatgttatatccacataaaaatgtcttgctgaccctctccatttatcacaatcctaccacaatcctacgactcctttaagggttaaggactacctcttccagaatattccatcccagttcagtatccttgttatgagttcgtaaaaggtcaataatcctcttcaaacaatgattaatcacatgaatcctggaaaaaggccttgaatgatgatcttgtttcattcttaaattgtattttaactacattatatagttttcgtatctttccacccattctataaactgcatttcagcagaactttttataccttcatattcctgagtcctatttatacaagtatttaccaaatgacaatctttccataatattcctttattttattttattttattttattctagagatggagtcttgctctgtcaccaaggctggagtgcagtggtgtgatctcagctcactgtaacctctacctcccaagttcaagtaattctcctgcctcagcctcccaagtagttgggattattggcgcctgccactacacctggctaatttttgtatttttttaatagagacaggatttcaccatgttgactaggctggtctcaaactcttgacctcaggtgatcggcccgcctcggcctcccaaagtgctggaactacagggatgtgccaccacacccagcaaatttttgtattttttttttttagtagagatagggtttcaccatgttggccaggctggtcttgaactcccaacttcaagtgatctgcctgcctcagcctccaaaagtactggcattacaggctgagccactgtgcccggccatgctatgtctttaaaattagctcctacggttaaacaatttacaagaaaaaatcaaactaccaaatcaaaaagtaggcgaaggatatcaacagacatttctcaaaggaagacatttatgcggccaacaaacagatgaaaaaaagctcaaaaccacaatgagataccatctcacaccagttagaatggcaattactaaaaagtcgggataaaacagatgctggagaggatgtggagaaataggaatgcttttacactgttggtgggagtgtaaattagttcaactattgtgaagacagtgtggtgattcctcaaggatctagaaccagaaataccatttgacccagcaatcccattactgggtatatatgcaaaagattataaatcattctactataaagacacatgcacatgtatgtttactgtagcactatttacaatagcaaagactgggaaccaacccaaatgcccatcaatgatagactggataaagaaaatgtggcacatatacaacatggaatactatgcagccataaaaaagaatgagttcatgtcctttgcagggacatggatgaagctggaaaccatcattctcagcaaactaacacaggaacataaaaccaaacactgcatgttctcacttataagtgggagttgaacaatgagaacacatggacacagggagggaaacatcacacaccggggcctgtcagggggtggggggcaagggaagggagagcattaggacaaatgcctaatgcatgcggggcttaaaacctagatgacaggttgataggtgcagcaaaccaccacgcacatgtatacctatgtaacaaacctgcacattctgcacatgtatcccagaacttaaagtaaaaatttttttaaaaaaactaaaaataataattgagctaattataaaaaataactcctacataccatttttcaagaagctcctagatatcccccacagaactcagtttgcaaatcaagaaggaggaagatatgagaagcataaaaaagagatccagcccaggaagaagcaaaggggctctcctgttaatggtgagaggagatcacagaaaagagggtctgaatccaaactggagcaggtatgggctgtcttcagcgttgccaccactctgtattcctgttttaacgtgacaaaacttacaaaggatacactcagacaaaatgaggaaatcgccccaagaagaaaacaaataaaccaaaccaaaacaaacaaacaaaaaaggcaaaaacaaacgaataacacaaaacttccatgagatccaagcaacagggattctaaactaggagcaaagcaaatacccagcatgatggctgtgcagcaggcctagaaagcatgtctccagaagagaggtcaccaaggaccaaggaacaatattagaagtgatagcctgctgaatgtgactggctttgtggaaaattgtactgtcaggtcactggaaaatgtgggagggattagcaataggtgcaaagaaaactaggcatataaaaataaggcaattattaatttcaggtaaaacaaacacataggaaacaaaattacagtaaacctcagtttttagctggtaataatgtttggacaagcaaaataatgtcaacactgtatatgtatttacctaaaattcaatggcgaagcagggaaaagaacagtagcatccctaagcaacttcctatgtatttaccaaaataggatatcagcagacaatttctaatactaaagaattgaaagatgatggcatacccattttatttagaatatggaaatgtaaaaatgatagaagaaggtaaggagaatagttgcctctaggaaggggactgcagtgagtcgagggaaaagaactatattctgttataaacctttcagtgcttagtggttgttggtttttttgtaatcataggtgaattttaatttttaaaatttagaagttacccactagaatttgagtagttgttgttggtggtgttttatccttccccaaaccctgcccatattttccatttttaaaacatcaacagaaaaaacattaagaatagccaaatgaaggctgtgctaaaaaggcactagaaaacaaagattaaaggagtgcacatatgcaatcaatccactacacacaggtgattctcctttaagaacattcaatatataaaatttagtcattaaaaaatttagtaaggtcaaacaccttcatttcccataatcagaattcttttttattatttaagaatattcatatgcacataataggttatatggcaacagctaatgtaaaaagagatcattacagattaattctattaaaccctgagaatgtccaaactagggaaaaggatgcaaatgtccaagaaacctaagtgtaaaggcagatgattcttcttatatgacagatatttaaatacctagcaagtataaaggacaaggctacgaggggaggtagacaacctacggtcatacttcaaaggaaaagtgagctaagggaccatgagcacttggcctcagacagtattccactgggtaaagtaacttcagcagcacactttggtgaccagtggaacattctcaatccagaagctagaccacccattgacaaattatctactgatcatcagtgagaaaagagatactactttaaaaaatattcactttgtatgaaactttcagaaaaacaaattttagttgttttgtaagagatgtctactttgttggttatataagtaaaaaaatatggattttggattaaggtagacaaagctccattgctcactagccatgagcgcttgggcaaggattgtcttcatcatccctaaactttgcctgatacacaggttttccatcatctgactctggctcacctccccaggaggcatctccccacttcacacttcatatgttatttatctataaaaatgaaccaattattaatcctctgagtggtcactgcctctgtcgcatccagacctctacattttacttttttttaccttaaatatcctcctgctcctttcctccagcctccactaattttctccatcccacctagttaacttctactgaccatccagacctgggtgcaaacactttccaaaaccatggtaccttccccaaggcatcccatagtttcccctaccatggctattggtgtttcattgctgctatcataaataaccacaaactttgtggtaaaaaacaacacaagtttattatcttacagttttgtcagtgatcaacacgggtctccactagactaaaatcaagttatcagcagggctgcatttatttctggagggtctaggggtgaatctggttcctcttcttttccaacttctagaggttgccacattgcttgactcatagccacttcttccaccttcaaatccagcaacagcaggtaaagtcgtcaaatcacatctctctgaaccactcttctgccacctcctccacctttaaggactcctgggatgaaatggggctcacccagaaaatccagaataatcactttgggggacacttttctgccttcctcattgtatctctgatcatgacagtaagcaattgttttcttgcctgtttaaagctgttgctcatcagtgcacccaataggaccaggacctacatacagtagaaactcaacaagtatttattgaataaacttatacagcaataggaataacatctccatattgcagcaatatttgaaggaggaaatgagatatacacatataaatgtatcaagatatagtgaatactcagtaaatattttccctaacctcatgtatgaatttggtgaaatactaggcaattaattttgcttattgcatgcaaatgtgaaatttaatgataagtgtcctggaatttttttttaatgcatatatagctggtatcaaatttttatcataaacttaactactaaacataatgactatactaaaagtcaaaccctacttatagcagtgcaaattgtcttcatattattataatgaatgtatgtgtttaagtttaaaatcatagcttatacatgttattttatattctgatttttgaaattaatataatttatataaaatttctaatagactatagcttagttgtttcctccacctccagtttattttttcttacttttaaaaattagaccctaggctagagtatggtatactcaatattacaagattttttatccattctcaaggaactccacatgatttatcataatatcataagtcaataaaatcactgaaattagagtctcaggaacacgtattcatactttattacacaggtgaatataccacctttaatgccatttgtgtacactgctctcaaaagacaatgacctaattctatcacctccaccatttactagctgtatggcttggggtaaatcatttcaaatctccaatttatttttttcatccttaaaataaggggcttgtactggatcagtaaattacccatttcaaaatctccagagatccttttaaaactacataatccatcacaggaatcacaaaacctactagaagtgttcctccactctcacctccatccctagtttcaaattcagcttcattaagaattgctgcatgtaaacgaaagatgactggcgggaatagatgagtagtgtgccgatcgcaaaaaaggttgggaagcattaatgtggaagagttctaagatcgcatccagcactgaacttgcattcgtctatgattctcaatgtagatttcatatttggcagttctgactgctacgtctcaagaaagatcagaacacagctagaggacgtattgagaaaaataacgagataatacaagggaaggaatgctgttacaggaaaagaaatgattttaagcttaggaatttgtggctagaagacaaaggcaaagaaatttttttctaaatcttttgttaaatctacaaatcacaaagaacacagactaaaaacctaaagatacaacattttaagtttagaagggtaacattagcagaaataatttttttttttacttcaaacagaagaagcaacagactataaaagtctttactgcaagaaatgacaccaagtaaaaatataaatagcttcccaaaaaagatttaaggacatccacgggtgacagatttataacactttacagtaaagggaagtaggattttttttaaatgtaaacgcttagcttttaaaagatatttttgtaataaaagcagctatgacaccctatagcctataatcattttgtaacacaataaaacatgacatacttgcctttttaaaatgttattttaaagatgttaaataatacttgatattttaagctacaagatatattatttaatcaattgtgcatttacttataattggtcaaaagagtatttgaacatgaatagatatgtctctctttttaaagagtttaatgaaaagagcatctcaggaaacccatcaatgtgtgttgccaaattttggtgtgctcaaaaggtgacctttacattaatataatatttaaatacatttatctcttttagaatgaaaaacagcagcatcagtagtttgagtggcaggtagaaaacttacaatgaaacaataccttaaacttttcagtgagcaccttcacaaggtaattttgttcttttaaataatattcacctgggaaatacattaaagcatgctgtggggaaaaatgcagttgaaagaagagtcagtcttcatttcacaatcccctgctgctaccccatgatccctgcccacagccttgtgaacccaaaggagcatctctcttggggctgtgattgtcaggaaataaatagtcaagaccacagagccatttctttgagaggatttccctcaccacatcctatttcccctttagctaagtcactaccagatatttggtcttcattagtcaaccaatattgaatcataactccaataccttccccagtctgctccaacacactccccaacccttcttccaccatgctctagagctcctcttctaggatcagcagactctgctgtaccttccatctccccaggccaatccctttttgtcttcactgaaaccagtttccatagggccattatttctcctgcaaactttttgttttttccagagtctggttctgtcgccaaggctggagtgcagtggtgtgatcacagctcactgcaatctccacctcctaggctcaatcgaacctaccacctcagcctccctagtagctgggaccacaggcatgtgtcaccacacccagctgatttttgtattttttgtagagatgaggttttgccatatttcccaggctagtctggaactcctggactcaagcgattcacctgcctcagcctcccaaagtgctggattacagacatgagctactgcatggggttccctgcaaacttttcatgaagtcttttcctttttctctcagatcctttatgcctcagtttgagaagctggaataagggtcctccctgctccccactgctacctccaggttattgttcacccatcttccaggcaaaatcccactgtagaaagcacaacacatgtatccactctgttcctatactgagcttcaggttcaggggcactgtatatagaggttgaccactgcctcaatgaggaagtgaagtttgaaatccaacttaaggtctgtttgccaagccatagctctagtgaggaatgacaccacccagagaaagggacacattagacactattatggaccacaggcaatcctgttctcctctcatttccaaagatcttactcttccctgctccatctttctcccacttccatctgcattcttcttcattgcctcattgagtagatgaatgctattaaagagtagttcaacagggctacctttccttacatttaataatataaaccacaaataggcactcattactgcccagcaataccatatatttaccctaggaaactctccatcccactcacaaagatctgaacttacacccaatcctctctcttccaacttctcttagtcctacctccaacttcactgacaatgtgctcgatagatcataaagctcagttcttgcatggagaacctttcatcttccaccactaatggtctagttcacgtacatctaaactcaccttctcgttgacttttctggtcataatgaaaaatgcattccagttcttaccaaacccaattctctaaatctcactttcttatcttctcaaagccttcctgtcctccttcctttgtcccctctgcatttaatcatcagtctctcatctagtgggtcattctcataggcacacaaacatgctttactataatccattttaacagaaaagtcaatcgactctcttaaccttacagcccccacactaagcactacctaaaatctctgtccctcttcacacaaacttctctaaagttgtttccacaaactgtttctacttcttcaccttcatctcactctctagcttccagccacattacttcctccaaattgctctttccaaaatcaccaggaatgtccaagctgtggaattaccaaaatagtgtgctgtgtcatcctatttggttattcagcccaattcaatccagtagatcattctttcttagaaacattctcctctctccatttcctctaagagatattctcctccctctatttctgaacatgacaaatctgcgttttttcacttcattggaaattttttctgagtcccttttgctccttcctccttttttgttcaatcaccaaaccctaggccttatggactcagttaagcatacccctctcttcttcatcttcactccttccctggtgatctcatccagtcccacatgttcaacctccaatgtgaatgctgagaactctcaattcatatctgaggtccagaacatctgagttccagattaacatacataattgcctatttaacctatatacttagatatctaacaggcatctcaaacttaacaaaatccaacttgcaatttttgttcttccaaaactcccacatcctttcccaattcggtgaatggtaccaccactcatccttttacaaaataccatcttggattgtttccaagcccttaaggcatatatctaatccaccaaaatgtcttttctacttccaaggcatatcgcaaatctaacatcttatttccatcattgctggcatacagtagccacggggaccaccatgtcccagttggaccacaaccatcacttcctttctgatcttcgcaattattctactatacccactagcaacctattatccacataagatccagagagattaaattttaatatatatacacattagacagtgtcactcccttccttaacaattccaatagctttctattgtacttttaatatccaaactccttcccatgtgatatgattaggttttgtatccacacccaaatctcaccttgaattataacccctatatccccatgtgtcaagggagagaccaggtggacataattggataatggggatggtttcccccatgttgttctcgtgataatgagtgagttttcacaagatctgatagttttataaggagctcttcccccttcactcagcaattctcttcctgccaccttgtgaagaaggtgccttgcttccccttcaccttccgccatgattgtaagtttcctgaggtctcccctgccatgctgaactataagtcagttaaaactctttcctttataaattacccagtctcaggcagttctttatggcagtatgaaaacggactaataccccatgtcttacaaagctcagcatgatctggcctctgccttcctctcctaccgcatctcaagctcttaccatcatattcattatattgcaaccacatgctgtgctctttcctgcctcatgacttttatatttgctgttcactctgtaattttcttcagatggttccttcttaaccttcagaaccagctcaaatgccaccaagttatgctttctaaatttgcctcagttaagtccctctcttacatagcacctctttaatttctcttacctccaaaacaacctcctataattatgtattattttcctatttaccacttacgtacattgcaggctccccctatgcaatgtcagcttcctgggagcaggaatgaggtgtatttatggttgaatctttagggctggtcacagagcttggcaaataggaagctaaataaatacttgtttaactggttgattaatcaattaatggaaaaagaaacaaatgaaaacaaaaacaaagactgtgggcattgtttctgtgggcattggctctttagtttgtttgatatggagctaaatgtgctgagaaaatatccgcatgcttgagtttgatatttacaaaatgaaaacattaacattcataggcatttatcacaaagacattgttggcaattgttttttaaaaaaagtaataaaatgatacttgaaatattaaaacaacgtaacagaagaggaaaatatagaagactataatttttacccttctctttttggccagctttattcccagcttggaagggaaaactaaaaatcaaatcctagcaaagaaaataaacaaaacaagttgaaaaataaaggtgattttcagggaaagaagtaagcttccgagaggataaatcaagttgactgacccaaatctctgaacctcatattggtgggcatgctaggaggataaggctacctgtacttttcacctaagcccattcattcgggaatgacagctgctacagcattcatttttaagagcttgaaggttgagcctggctgatatcaggccttatgaaacaatcccaatataagtatcttctactgatcactgttaaaaggaattgaccaaattggacaaagaataaatgctgaaaaaagcttcatttttattaatctatagggacaataaacatcattactgaaaaagtaataacagatataatagaagcttccaaatatacaacaaaattacttggaaagtcaatcaaaattaaatttttgaaacttaacctgttttcagaatagttacaaaatcagtctttactatacacaatatttaaataaccttttgaaaactatatacattccacatgtctagctggccattattaattaataaatattaatgagaaagataatagcatttcaaaagaagaaaataaagttatcttactgaataaatctgtatttgtgctcccacattaaataattgtgtcttatgaacagacacttctcaaaagaggacatttatgtgaccaaacatatgaaaaaaagctcaacactactgagcattagagaaatgcagatcaaaaccgcaatgggataccatctcatgctagtcagaatggcaattattaaacagtcaagaaacaacagatgctggtgaggctgtggagaaataggaaggctttaatgctgttggtgagaatgtaaattaattcaaccattgtggaagacagtgtggcattcctcaaagacctaacaacagaactaccattctacccaccaatcccatttctgggtatatacccacaggaatataaatcattctattataaagatacatgtatgtgtatgttcattgcagcactgttcacaatagctaagacatggaatcaacccaaatacctatcaatgatggactggataaagaaaatgtggtacctatataccgaggaatattatgcagccataaaaaggaatgagatcatgtcctttgctgggacatggatggaactggaagccattatccaccgcaaactaatgcaggaacagaaaaccaaacaccgcatgttctcacttataaatgtgagctcaacaatgagaacacatggacccagggaggggaacaacacactggggcctgtaggaagggggcaggagaagggagagcatcaggatatatagctaatgaatgctggacttactacctaggtaatgggttgatagatgcagcaaaccaccacatttacctatgtcataaacctgcatgtcctgcacatgtatcctggaacataaaataaaataaaataaaatatttttttaaataaataattgtgtctttttaaattccgtatcttttcttcccaggatggttggacttttgctttggcagaaaatgcttaattgcaaggtaaattcagcaactgtgataattctgcaaaccaaggaaactgcattttttaagaaatttcatctgttaataaaattttagaatatctatactgcactcagaaaagcagacaaagaagtattttatcattaattaaagtagaaagagttagaaatgactatggacaaacaactgataatgactcaaccttctgctaatttaaccccagaaagtactgtgcatttgactaaaggaagtggacttatcagaaagacattatatgaaagagcatatgatgacactttgggcatctttttcttaagcatatactacctaccaagaacttttacacataacttttgatatcacaataaccccacatattagacatgttctccactttagaatcaaggaaatggtgactcggtgagttgaaataacttcctataggttagcacagaaggcaagtgcctaagatgggcttttaaccaaggattgccccatataccttacactcagtgctttctgttctgcctgtacaaacctagaaataccttaacataggcaaggtaaaatgcgataaggacaaggagaaaaacacagagtaattagtgatttctaagaaactatttatagcacacagttatactgtctcatttcctttacaatacttcagtgtagataactatgtgtgtatatacatgagtgtgcatatatatacatacctgtatatacatgcatgtgcaaacacgtctatacacacagttatatgtgtgtgtatatgtgtgtgtataaacacacacatatatgtgtatgtatatatacatgtgtgttacacaggtgtgtatacgtgtgtgtgtgtatgtatatatatatatatatatatatatatatatatatatatatatatatatatatataatgttatttttgccctggagtgccaaaatatatacagctaaaatagcattttagacccaaatcaggcatccacactgactgtgctataaacacatttcaacaatcactatctcaactggcactagaaaatttgttaattagcattaagagatggaaggaaaaaaagtgataagtaaaaaaagtagtggtcaggatatatagattagttagaaacattagagacaggcctacttttcaaagaatccaaaaaatcaggattcagttgcgtttcagaagtaatattatttttgaacattagaaaactaatattatgaaagtaactatattaattactacccctgaacagggtctggggaagcaatcaaacacattaatatttctgcagcaaggaaaaaggctattcatactaaccagaataaataaagactttaataaagagctgcatggtaattcaaagatttctgttatcaaagctgtttttagattttggcattgtagataagggattgtggacttataattgtgaatagctaaattatttaggctaactgcaattcatacaaaacatttcctttgaaagctgatattgaacttcacacattatgctgcacagtattccatgtgcaaatataacaacccttcacccctccagaatttggctgacaatgatgtatataaagaacaggctggaagataagagggcagccatggtaaaaaggcctctcagcagccattagacggggtgtgatggccacgtactggagtgcattacattatgcataaaaaaggccccgtatctttcatctgatatggcttctaaactcaacacagataagaatcagtaagcggaattacagacagaactgagaggcgggtacacaaagcagtcaccaagaatgtcagcaacggctgacagtctgattcaaagaacaaaaatgaaactgtttttagagacaataagagcctggcttgccagtcaagcttgaattccaatcccaactctgccattataagctgtgtagtcttgagtaattccttaacttctctgtacttcagtttattcattaacataggactgatgaaaatgctacctctctcctgcagttgttgtgaagattaaatgaaatgatgtgtgtgaagaggtcagtacagtgcctgacaatgagacgacactcaaaatttatacgcacaaaacaaagccccaaatctcacaaagtatagcagcctgaataaatttactgccaattcttcagaactcacagcatgaagagcattaccatttagtatagaaaaatatcatcctgactgtgttgcatgactttgaacatgtcacttaacttctctgagcctgagaatattagattagaccatgtattctcaacacaggtaataaatggttatttcttttcagggggagggtgaaaaaatgtattctttttatgtataaagcacaaccatacagtacacagtatatcatggtattaaaatttcatgggaagatgagtctacacaggctccttagggaagcgataatgtaaagaaaggttgagaaacactggttcagaagaactctaaggtcactcgtatccattaaagttccttaattctatctttgcaacaatactaccaagaattcagaaaaaagttaaatatacattcacaagctttaagaaggcaaagaaagatttatatattctacaaagatgtccatttaaaatagttaaaaattgtaaagttcactgggtttaaaagagaaaactctctttacatatagaagccctagttatcattcacgaagggatcctatgagccagttttgctctgttttccctgttttatagataacaatatatctaaatcatgtctaaatattaatataattacttatttccaccccccggaaaatgcagagagaaaacacaataaggacaaccacttgtaactacaaagaaactggaacattgtaattgtcttagctatgataaacgaaaaatcaccttgcaatataattcatttttaattgcctcttccatctaatccaactactgctgtaggctgtcttaaaatatttacaaagtaaaagcaaaaaaaaaaaataagaagaagaattggaggtgctaaataaagcaggccacacattcctaacggataaattttttgttaagtttacaaggaaaacaaagtcctaactcttatacatggaatttttggaaacacaaagacagagcatatttaaggactatatctcttttttttatgttagctatattatgcaaataatttttattcatcgtacttactgtaatacgtatatgttttcatccacagttcctgcaacataactcccataacacttgttatagccttttgttctaatattggggtgcctcagggctcagaagcaggcctcagaaaacaatctctctctgtgaccttctcctgccctttcacctccttctttctctcctgaaggcaggagtcttcccctacctttctgtcttggagatggccataaagaaattctctaacctgctttgtctgattgtaggtcttttcttttttttaattattattattatactttaagttttagggtacatgtgcacaacgtgcaggtttgttacatatgtatacatgtgccatgtcggtgtgctgcacccattgactcacatttaacattaggtatatctcctaatgctatctcttaaggttaaagctgtttttaattcaccttcttccctgcctgagttatgatatccttactaaatccaaataacctattataataaaagagaaaagttgtagtaaaatgttagaaagaccaatattatagccactctgctttaaccacttgtgaagttttgtctttgctaacccagtcttattttctccagtatccaaggtatatctaacaacacattcaacctcacattgtgccatcataaccctcttctttgagttttcagagcttcagagattgtaactaaaaataacactctggaagtgtataaaacgtatccatgtcaaaatgttattaaatgcttagccatactttattagcaggaatatatcaggaatataaagtgctctaatacccattttattcacgtcaaaatagatgtgttttgataccaaattggttttaagacagttgcattttaataaagatgtgcgtaatttcacctagacacaggcattcccagtactatatgcatgatgtaaacatctttttttactaatgatgaatataaatatgcagtcttaaagagatgctaatcactgtttatagtttctcaaattctaggtgttcaagtgattcaagtgacagaaaattctcttgtaaacacatattctattttgggctgttccaaatactctgactagacaaagtaatgggaaaaaagatagtaaattaactaaaatcctaaatgcacatagattatttcagggatctagtgttggatccatgtgtgtctggtcctcaacttaggatgccccacccaaatagcacgctattccaattacctttagggataccattaccctgatgcatctgtaaacacctgcactccttaccatcagaagactacaaagtgtattctagataatactgagagcgtaagacaatcagaacacataatcattggcaaggtttaggctgatttaaaaaaataaaataaaaaactccattgtaaaaattcaaaaacatattgtataagcatacattctgtactaagtatgataatactaactcagaacatcacagtataaaaatacataataataaaatgtacttgtagtagccacatgtttggcaggtttccacgagaaagccaaagccatcaaattctcaacttgacaatatacatttacctgccagggccttagacttacctttgtttgagattgatccatgatgtttttaagtactctgtggtttctttcacattccttgtgtcatcactcccatattcctccaggagtttctgcaggacgttatcgaacgccatgacgataccatctccaggacccagttcttgaagcagtatctgaggtgcaagtgcaggtctgtttgttagacttggtcactcagtaattagtataatcaaaacaatggtactcccagcagattttgacatgctttagatacagatatcacaggatgaaaacagactgggggcaaacccttttgttatatgtaagcttaaaccaaaattagtagaagtgaaaagaaacatgtccaagaaagtgatcgagtacatagatgacaatattacaagattattatcattttctttttgagatattttccttcctcaaaccatttgtctttttcattccttctgctgtacctctctgatccttacacggacatgcgtcataaaggactgaatacagagacagttcctgcatacatgcctggagaaacgtgaagaatcaacaacatggacgtcttccatctcttgcccctggatcacaaggtgtgtttacaaagataaccacttgaatggatcaagctgccaagcaaggtttactgagagtttgcttgaatagccaaactgatgctgaatttgtccactggcattggttctttgacatagtttttcagcctctgagagtctctggatcaaggtactcaccatgaaatctaaatgacaactgaaacctttaatataatgctttttgtagcaattgggaagattttaaatcagcctaaggtttcagaagaaaagaatcacactgctgattaaaaaataatgttctaatatgataactgaaacactgacatcacttttaattgtattcctctagttaaggggccaggggcttcactattacttgggagtcatttggtggaaacagtcagcagtatcacaaacacacagaatgatccagaaatgcatataactggccacttgcttttaaaactgtaaccaagtaaagtctgcatttgtggagaataaaaacatacttccacattttcgattgttttctacatatactttcttaaattcttcacaaatatacacttccatcttaggctagctgaagggcaaataaatgttataccaaactataacctcacaactaaaacctccaattcaagaatattttataattttatacagagaatcttaaaagcacttttaaaaataccatagttgttcaatattatcaactctataactgaactgatgacaaaaaagatgtctgctattacgaaattgataaaacagtttggttaaaaagtcattaaaggaaactaaacttacttatctgatttgttcactatagtagtcctcaaatgaaagtcttggaaaaacttattaataaaaataaccttcagggtaagtaagtaatatggtttggatttgtgtccccacccaaatctcatgtccaatcgaaggaggagcctggtgggaggtgactggatcatggggatgaatttcccctgtgctgttcttgtgatagtgagttctcacaagatcagatggtttaacagtgtgtgacacttgggaggccaaagtgagcagattacttgagctcaggaattgcagacaagcctgggcaacatggcggaaccccgtctctacagaaaatacaaaaattagctgggcatggtggtgcacgcctgtcatcccagctacttggaaggctgaggcaagaatcgctggaacccaagaggtggctgttgcaatgagctgagatagtgccactgcattccagcctgggcggcagagtgagacaatgtctccaataaataaataaaatgtgtggcacttctcccttctatctctctctgtcttgctgccttgtaaagaaggtgcctgcttcccctttgccttccaccatgattttaagtttcctggtacctcccagtcatgcttcactacagtagccctcaaatgaactgtgagtcaattaaatctcctttcttcataaattactcagtctcaggtagttatttatagcaatgtgagaacagactaatacagtacagaagggagcaaaagagggttcctggaatcttgaaagtgttctctttctagatgctgatttgagggtgtgtttcacttgcaaaaagtcagtgagctataaatctcggagacatgcatattcttacttgttatgcctccagaaatttttcgaaaaaaatcttccagatcaaattcttcatataaatttcattagacactctaagaacttaggaaaaaacatggcagggtcctattgttaagaattacagtgaacaatagaaaaaaagtatatccaacaaaacaatactgccaaaaaatatctgatgagtcttacttggttatcagaaatttgtttggtgagtggatcccgtcgggcttgctgaagaatatagagtcgagcctcatattttctcatcagttcttcagtctcctccctatggtcatcccactgaagactgtcaataatcatgtcctcaagctgctgctgtcttagctcaacgccatgctgggtgccatcccactggttcttgaccctttccactgagggtagcattataaaagaaaaaaaaatcccaacatgtaaccctcaggagaaagaaaaaatatcatatatcaaatgtatcacaaataagtctataaacagaagaaggcaagctgataaacacattttgaaggaattttaatatacatctgccatcctatacaattgatatatttctgaaacggtgtttgagaaaaaaaaatcttgaactcttattttcagtgctctaaaacaactcccaaaaaaatatctactattataaactgatactgccaaacaattataaagaaaatactgttctatttaattttgtatttacagttgtatttatagacctggtttgatgaaggtagggtttaacagtacttcatgacagaactttaagacagagagatagtcacctgttaccctcaaaggagaattttctaaggcagtcttgattttagaagaaactgaactgtgtaagaatttttttttgcatttgttttactgtagcaggaaaactctctaaaaggaattttatatattcaagttcaagagaaatgctaaaagtaaaagagactcatgaactgtgcacccagcagctcttcatcataaaaattccatactggctcttgtccttcctcttttattattgttcattcctttcactcattatcaccttctctctctttctatttctcctcaagctttctctcttctcctttctctatttttaacaaggttttaaggacagacagatctaaggaaactttttttttttttttttttgagagagagtcttgctctgtcgcccaggctggagtgcagtggcacgatcctggctttcagctcgctgcaacctccgcccccaggtacaagtgattctcctgcctcagcctcccatgtagctgggactataggtgtgtgccaccacacccggctacttttgtatttttagtagagagagggtttccccatgttggccaggtctcgaactcctgacctcgtgatctgtctgcctcggcctcccaaagtgttgggattacaggcatgagccaacgcacccggctggaaacttaaattttttattaatcacttcagagttagttcataatcttgaactgaggtactaataaacaataacttagaatatccgcaagaacctgctgataataagtaggtagaatgttaaaaccacgctgctgaaagatgctttggatatcagacaaaaagaaaggctatagttaagtaccaggcccaagaggaacgtaactacaagataacattccagctgagttatcatggaacactttggcaaagttcttgggataatatatggttatagtgaaacataaaagctatcaactggctgggtgcagtggctgacacctgtaatcccagcactttgggaggccgaggcaggtggatcacctgaagccagaagttcaagaccagcctggccaacatggtgaaaccctgtctctactaaaaatataaaaattagctgggcatggtggcaggtgcctgtaatcccagctacttgggaggctgaggcaggagaatcgctggatcccaggaggcagaggttgcagtgagtcaagattgcaccattgcatccagcctgggcaacaagagtgaaactccatctcaaaaaacaaaaaagctatcaacaaggctgttcaggccttaagttatacttacatgtcatcattctttaaaacttgctcaatgagacaatctgtttcattctgtcttagctgtttaaataaattgcttaagttttaaacttaaggaagagaggccaaatctatcataatgttctcttgtcagttaaaaagttacataaagtacttatgaccaattctattactaatagaatcctttaacagtaaacaaatgaaaccaaagacatcaagcgagagtaaatatcacaggtttatcataagaaataggcaaattatcccattcattgtgagttaagccctaaaacgaggttactattggtagcaatacattccccctgggaagggtttttcatataatgaggagtgatgaaggttatagaacctctacacacacagaaatatttatatatagagagaaaatagagtgtgtacattcaatgggaaagggaagatatttaggagaagtcttgtaaaacaaaaaaacaaacacctgaaagaagttttggacaaaaagagaggtgatggaaaaaataataattaaaagaaaacatcaagatgatagaaaaagcaaactggaaatggcttgtcaatagtttggtatcactagagcagaggagctcccctgtgatgtgagggaaaccagctcactccaaagttccataataggcacaatccatccattcataaaaagagaaaagaaggaaaatgatgtatttagtaaaaataagccaacactgttagacattaaaagttcttttctaatgtatctcctataataaccctgttgctaccatgactattttgaaatcaaaacatactttttacagggagagtagctgactttcttcccttgacaaatattaggatttatccttccagtttatattttgtcacaaatatttattaggtagttaatttgtattggcactgttaaaggcccaagggcagaaagacggatattcacaatctatggaagagagagacaattaaagtagttgtaagatctataataaagcaatggggggaaaggccatagaaggaactaaaaatagaaattaacattcaccagggaccagaagaggagggaaagatgtcacaaaggggatgacattttagctgctgcgtagaattgcacctgggaagaaaaggccaagagaaataaaataatgcaaataaaggtaagaagactaggaaatgtcaggatattttaaggaataacagcataattacaggccgggctgagggctgaagtgagaaaaggggtagtggcagcagattgtgacaatccctaggtgtcactcttgagaatttagacttcgtttgctattggtagtacattcccactaagaagggtttgtagaacctagatgcttctgagctagaatgcaaaccccaagcaaggatctttgtttgctattgttttgtatgtttattttttgttgttgttttctctcatttataactaaagtatccccaaattaatgccagtcacataagcacatagtagttgctcaataaatatttgtggactgaattttgggttgagttaaaagacacagtaagacctgattttagagaataaagtataatgagagaaaggatttgcattcttgtgagttcctttaacctttttttattcctctaaaagaaagcctaagttaagagaagaaaacccaatgtgtaagtaattacttaagagtcgtgatgttaataattaaggacttcataaggttattgtaacaatgttcacaaaacataaaaacaagggaaagctacatttctgtataaataaagagtaacaaatattaaacactattactttctagttgaataatctttgaaaatgtgtttgtgtgtgtgtgtgtgtgtgtgtgtgtgtgtgtcaccatttgcagggaaagtggatgataatacataactttttttaaaaaacttacatttttctgtaattgctgttctcatatctgaactggaagctttatttttcaaattctgtgccaatgtaaaaacataatccagctgaggatggcgctgttctaagtcagcctttgtaatctgttaagtagaaatgattattcggataggttaataagccatatgagaagaataataagcaaaacagttgtgctgacatcaaagttgtcgttgttttcctcctctatggcatagtgaagcatcagcaacgtggcagaaaatgagtgcatgatttaaagtcaaggatcctgcattcaaatctcagttcttccatttagcacctgagtcaccaggcaaggagctttacctctctgtgtttttgttttcacaaaaaagaaataataaaatactgacagctcaattacatccagtctgaggacattaaacaaagaaaatcccttcaaaagctgaaaaatgccctgaaaacattagcagttattgctgctgatgatgacttgcatatctgttctgtgtcaggtacgaacacaaactaatgtcatagggttgggggtgacacagaaaagtgctaagaggaataactataaattaaatcctcttagacacgaaaaactgctgctgtagatggtttgtctctcagtgctaataaatatgggagaaatggtaacaacatcaggaaaatcatgtgttttcagtacagaactaatgacagtcatagagactagaaagcaatttacaaaaaatacaaatagtggcaaatgactttttcccagtccttcctctttacaaattcacccgttttgtagattccagctactcctttggtgtcaaatattacttctaaatggattgctcacaactttcaatcctaaatcccagggcacatggtaatgaatactgatcacttccttctaaatggcataaggactccccaccacaacacgtctgaaactaaatcactcaaaccctcattcacactcaatttcttctattccttatttctgctaattgcaacagcatcatcttagtcatttcagaaagggctctttgccttgatttatgcatttcttgcctccaatccatcctagtcttctactaaagcagagcacggttatcatgagttcataaacacaattttaaaaagaaaaagaaatgggaaggaagatgtttaccaattgcttacagactaaaaatccaaagggctttgcacagcctgcaggctccttcacaaagggaatttgagctgcttttcctgccttgtttcacactgtatttcttaattgcacaaatgttggccctactgtcctttgtgcctcctgtaccacatgactttattcactctgttccctataccaggaatgtcaccactttgtcccagatgccaaaatcccacacagtttgctttccatcactggagaagtgatccccttcctcatcctggctcccccaacaggttgcctgtacttctcctgaggcttttattagactcttgccttgctacagtaatttgtcaactcatatgcactcagtgcctctgcctcggtgtggacttatttgtaatgtggggataaaaacagtacctatctcacaagactattaaagaattgaatgagataacgtgtacaatacttagaaaaatgaccagcacacatgaagcacttaataaaatttagcaagagctgttattattatttcattgtagtttcccaatttctacctagaatattcttgtcagtatccttgtaccactcacagcccagaacttagcacacactaaatagggaaaaagaatttttacaaatgaatattagatggtacatgtatagtagtaaagttataggagatattcacttttaaaatcagaaattaatctcattatgaaatataagttgcaaaggcactttaggagattatcctacatcacacaacaggcatgaaatgctaacgccagcttatatttatactaatgtgcctagctttacggtatcagttttagattttaaaaatgcactgggtctttagtttaagtcagtaaacctgatcatatcacaacagtataaatgcaagaaaagctctatgctttgtagttagccctgaatggttgtttgacagatacagaattttttaaacctcattctctcatagtttaggataaacaaaagggattcaaacagatctggtctacctctgggttgtggcgtttccatgacaagcttttacactatgcacctactttcattcgggaaacggtcttattgatctcttctacatccccaacagtgacaatgttggacttcagcatctggtcgattaataccagccagtcggctagttctgttatagttttatcaagatcagcaggaattgaaatttccgaagtacgatgagactgaacaggaatatctgacgcagatgatactagcaccaccttttggacattaggatgagctgaaatgaaaaatgtagcaaaagagaaattaatcaacaggatgttttaattatggtggtgtcatggtgacacgtgtatgtgtatttaaataaaatttagtttaagtaaaaaaaattctaagaggttattttttcatactgaaatggctatggtattacctgtaatatccatatgtctttggtagctatcaagccaacaaaacagttttgcaacattctataacataatcagcactgacactgagaaaaattaaaagtacaaatgtgggagaactggaagtattattttattttggcaagatgattttaattataaagccaacttattcataattttttatttttttcatttaactttataatgtgagcatattttattcttagtaaacacaattatgaatacctatgtaataacctatacccatattcacttttatttaacccttggatatttagattgctcctgaaattttattttaattttttaaaaaacttgcaaagaatatcttttcatgtagagtattttgcacatttctgatctctatcttagcatagatttcccaagtagaattactgagtcagaaaatacaaaaaaaagtatgtatttaatattcattgccaaattgattggttttgatacaataagtagttgaattagtaattaaaactatctgtaacctacttcaggtatgatatattagatgaggcttaaataattttctaaaatgtatagccaatctgtaaattcagcacaatcctaataaaaatcccaacaggcttgaatgtaacaaaatcattaattcaaatttctggttataaaattaatattgaagagaaaaggacaaaaaacagtcaaattattttttgatagaggaatatgccctcccagatattaagttatattatttagctaataattattaactcagtatattatagactgagacatttaaagagaccaacagaagagaagagtcacaatgtgtaggtggcagagaaatctgaccttggcagagactgaattacagatcaatgaagaagaatttactgttcaattaagtgagtcaccacggctgcagcagggaaatgatgggactgattttaacctcacatacaccatagaaaaattaattcttagtggattaaggacctaaatatgaaaaacaaaattgttagttaaaaataaggaatacttttattacttcagaggactgaagtagctctcaaacaaaacacaaaaaagggaagctattaataaaccattaatggttaagaattccaaagagcaccataagtaaagattttaaaagcctttgaaagatgaaaggagatggtatttgcaatgcccattgcagacaaagaactgatagccaaaatactttttctaaaacttaaaaaatcatctaaagacaatccacaaaagaggaaataaaaaaggcaataaacataaaaatgtgaaataaatgtctgacctcttctataactgagatagtacaaattaaaatgaaataccctacatccacaggaccaccatcagaaaagtgacatctgagaagctctaggttaagatgcctacactattatcatcagcacattatttgcctttttaggctcagtctctcccacgtgtacagtgtgttttatctaagtctacataacgtgacatcacaagagaccaaatgcagaagcagaaataagaatacagctgtgttctattaaactagacatttaagagatttcaaaaaatataaaactgcagcttttccaggattttgtttgttttagaaaacagagttgtttgtttgtttgtttgtttgtttgttttttctttgagataggggctcactctgtcacccaggctgggaagcagaggcacgaacacagctcattgcagcctcaacctcctgagttcaagtgatcctcccaccactgcctcctgattagttggaactacaggcctgcatcaccaagcctggctaattttttttatttttaattttttgtagagacagggtctccctatgttacccaggctggtctcaaactcctgggctcaagtgatcctcctgcctcagcctcccaaactgctgggattatagacatgattcactgtgcccagcatcttatgctaatgttacaaaaacatgctatttttgttaacatataatggctttattattatttttaaacaacttaataaatgaattaatggaaaatttttctagttaggtaaatacggataactatcactcacaaaagcaaaagctatttgagggtcctcaataatttttacaagtgtaaaggggtcctgagagcaaagtgttgaggtgctggtaatgctgtagaacaataagaacccattacacacagccagtgtcagtgtaaactgggccaagtaatccagacagcaccctaatggcagctagtgaagtagaaggcacccatatgctaaacccagtgattccatcactagatatacaccctacagaatatctcacacatccttctgccccatcttcactttaactttttttgtagataaaaaaaattcattgttttaattcatcaaatacctattaagaacctattatgtgtaaggggctattctagacgctgcaggcatgagagtgtgcaagacaaagtttgggctggagtgcaatggtacggtcttgggtcactgcaacctccacctcctgggttcaggcgattctcctgcctcagcttcccaagtagctgggattacaggcgcccgccaccacgcccagctaatttttgtatttttagtagaaacagagtttcaccatgttggccaggctggtctcgaactcctgacctcaggtgatccacccgccttggcctcccaaagcactgggattacaggcatgagccaccgtgccctgccagagcttgcattctatcaggaaaatggatgtgtgttatgaagtaaaatcaatacaagaagacagagacagggtgtatctgagatattgtgggcaagaaagggctattctagaaagggatatctgaaggagaactaaaggaagtgagtatgtgaaacatgaaaatatctaagagaagaacatttggggaagacaagaagaaggaacaccaagcacaaagaccagaaatgattacgttcttggcatgtttgaaacagcaagaagaccagtgtatttgaaacagaatgaacaaagggaaaagtagtaagaaatgtgattaaagagacaggcagatatgcatggtgttctggactaaggccagactttggaactcatttatgtggatggaagtgattaaaagactgtgaacaaagaaacgacacaatcaaactcgtttaaaagaatcactctatctgctatcagaggaataggtcatggagaagtactgaggcaagaataaaatcaggattatgagttaggagcatattccaataatctagatagaaagataagggtgttcaagaccacggaagtaggtggaatggaacatggaaatgatgctacttgctgatggattgaatattaattccagagaagagttgaggttgactacaagtttattggcctaaggactgggtgaatcatctaaaaaaaaatgtctacagttctgggactggtaagcataggtagaaaagagaatttagaggattgtagtatatccaatgttatgtaatactgtacatcagtttaaatgagtagactagagctacatgcttcaaaaggtatggcaataaggatgatctagtagctatcagagaaagaggatacgtaagcagcccagagaatatgggatcctatgcataagtggaggagctggtcttaggaaaagagataataaccctttcactgaataggaaggaagtgtgtaaagtatatgggtacagccgcaggtagcttgatggattctctggtgggaaaacgaaaaaggttttttttttcttttgaaaatgagatgaggtcactagttgagaaatgagtaccaaggagtactcagaagaaagtacggtaggactgtctcttagcgctgagtgcttatttgaaatgaatagtcatagctctgaaatgagtacagtcggcaaggtgttggcaaggatgaacctcaaaaacattatgctaagtaaaagaagcatcgtatgactccatttatatgaaatatccagaatagagaaatccatggaaacagaatgcagatcggtggttgccaggggctgggagtaggagggaatgggaagaaactgcttaatgagtaagaggttttagtttggagtgatagaaatattttggaactagatagaaatagtggttgtacaacattgtgaatgcattaaatgtcaccaaattgttcactttaaaatggttaattttattttctaaataaaatgttaaaaagaaggaactgaattaaaacactgcgtaggaggagagagacatactaagattagcttcaggtctcaggcctatcccaaggacgaatatcctgttaaaaatgagccatccacctaatggaagttgtagctttgctgttagctttttatacttctaaatatgtattcaaattttccctgctcctttaccatatagaggttttaaaaagtaagataacccatgacgattttataaaatgcatcaaattctttccctatgattatggagttgagcctgtatttgcaaagcagcagtacccaaatgtcaactcaagtgttctgaatattaatcaagaaacttgatcaggccccaggtactttttgtgcaaatttccagaaatacaagtaataaaaaacacaaacttggtcctcaattagcttgcaatctcgaaaaatgaaaaaaaatatattgtctgtcatcacttttttcaaaacttgaggggaggaggaggaagagaaggaaaagaaaagaaaaataagaggaataagagaaataaaaagaaccctcccaaaaaaaagaggtagaagaggtagaggtggaggacgagagaagaggtagaaagtagaaggtggacatggaagtcaaggaggaggagaaggacaagggagaagaaaaaagcggggaggagcaataaaaagaatcagcagaagcagctgtcagggagtgagtggacagttagagttggtcacatttgcggttttgccaggtgactcaacagaggaagagcagggcatgatggttcagaaaacttgcaaggcagtggcaacagtggctatggggcaggagcctgcgatctaatctggataaagagagaaggaaatagtgagaaaacattcttctttctccacatccaagtgagaagtatttgtctcctaggttggagaatgcttctaaatatccatcccccacctgcttcccaggatatctaagccttttgttctcagtcatgatcagggtctaattacatatgttaaccaagctcatgttaacacaacaagttatagctgatttcctgaaaagctgcctggacccagaaaactagtccccagtttttgcacctagcctctcatcttcccttcggcaggacctgtggatgcccaggtagcactggagtccagagaaaggccagccttatctgccgcgagaacaaatgccttacccacactgggcagccaaatgtgtcttgggtttaaagaagatgttctttccaaatcattgaaagtagattaaataaagaaaatggcacgacgtttctaagtctttctaattcatgtatgaggctcatatcacaaaattttacatactgattttttaaaaaactttgttaaagataaacatatcttaccagcaatccttgtctgtgaaacagaactgggctcctggatgcattccttcagggtggtaggcacctctctgcaaatctaccgcatcaggacaaacagaaagagaagaatactacgtaaataaagatgactgtagttcaaaagaagaggtgttattctgaatggcagctctgctacttttcttcccctaacgacctaaacttctggctctaccttcactctccattgcaatcttgtttgagcccctaactccactgacattgctatcaaaaacaccaaccagtccttagctgtcctgacccctgtgcaccagttaatgccgtccactccccctcccttgaattctgttattactctgcaattctggctttcctcctacctctctggctggctctcctgaatttccttcaccaactccttttcctctgcccatccatcaaataccaatatccttcagggcagctgtgttgctcttcttgcccttcaccctgggctctccctgagtcctggtttccaaagatttcaggaatcaaatggagttttgagaggctaaagactgcccaaaacatatcttcagtccagccctctctgtgaactagatattcagatatgtccacatctgaattccttatccctatcttccctgacacccgtttcataaactcttctgaagattctaactcatctttctatatcaattcttaggatcacttcatctatctccgtagtgaagctatagcaatatttcaaaaacatgactttcctctgcttaaaacccatcaatagctgcccactaccctcaaagtggtagattgtttgcaacatggagctcaaattccttgtgatgcacagtgagtcctccaggatctcatctctgagaacatccctcagccttccattctacagtgggctacttcctggacctatatacactgtgctcattctctgtctcttctagacactttcatttgccacttctctctacactgcactttccctcattcttcacccgaccaatacttattcatccttcgtaaattaaccagaatgtgatcttttcaacaaaaccttccacagctacccctcaaagccaagcaggtgctccacctttatgtacccatcactacctggatgttataattggttgtctgctggtctcatccatgataagctctttgagttagaaggaatgccacactctttaatgcattcctatctcttaaaatgatacctggcagaaagtgagactccaataaaaacctattgagtgaatgaatgactgtatgaatgaatgaaataaaccatgttagaatttcccaaattatgtttgttgagattttctgcacaatgagcattgttggtcttagacattcataattcaccaaagtgaattatattaaaatttacatgaaattctgcaataaccaaagctctagctttgtctgacatagtgcacccaaattaacaactgtgcccttttctgcagaatacccactgataccctttgtgttaaataaatatgtgtgctccgactgaatatggacaacctttctggcaagtgacacaggacctaacatgtctggaaaggagtgtaggggagagagagcagtggatattgtaggagagatcacaggacgccaggccatgagaagcctcataagccaaaaaagcattttggctttcaccctgagcaagatagaaaaccattggtggactttgctcagataagtcacttgatctgaattatgttttaaccaatcatattggctgctttgtctagaacagaataacaaagggcaaaggaagaagcaggggagatgagtggggcagcctttgtagtcatcaagacaagagatgatggcaggcttgaaacaagttagtggcaatgggggttgtaagaagcagtcaaatgtatgatattttttgacctaagaaaagtcgaaagaattgtagaggaaatatctatgtgccctctgacatctacaactgtcaaacttctgctacatttgccttatcacacatagccatctggctatccaataaaccatccatccagtagatacgtattttgaaggaaaagctgctaatggtgactgaggtatagtttttggtttgggggttttctttgtttctttttgtgatagaattcatataccataggattgactccaatatttctgacttaagtaataataagatgaaacttccattgactaaggtgggagatgtatattaaggcacagaagggagagggatatcaaaagctcgattgtgtatgttagtttgaggtgcctattagacatttaaggagagatgttgagcaggtagttgcatacacaagtttagagtatggagaaaggtccagaccagagatacacatgtgtgaatcacagtgactcaacaggcagtgattcccaatcagagagaccagatcaataaagcacctgcatcattagctataggataatggctaccatttaaagaggatgagagagaaaatgactgatatggagtccatccaaaccaaggacagagacatatccattcaatgtcctatacagacgtcatactctgaaatggtgtgtaccaggtcaaacaaaaaagatatctatgactttatctacttttaaccgtttcaatggcaaaaaaaaaataatggtaggagggaaagatattagttgtatttgtagtcacatgccattacatttcactggaacctagtaaatatatatttaatgaaaaaaatcattgaaaataaacatacatgtgtgaaaagtcatgtgcaaaatcaggatgctattttctttatttatttcttttttttttttttgagacagggtctccctgtctcacccaggctggggtccagtggtgtgactgcagctcactgcaacctccacctcccaggtataggcaattctcgtgcctcggcctcccaagtagctgcgattacaggcgtgtgccactacgcctggcaaatttttctatctttagtagagatggggtttcactgtgttggccaggctggtctcaaactcctggactcatgtgattccccccatctcggcctctcaaagtgttgggattacaggtatgagccaacacacccggctcagaatgctattttaaggtcttcattttcagaatatcatcactggaattttcttactaattccaacatatattcattatttaatgtagtatataatgtataaatcccctaggccaaagagttctgtataaaataaaaagtattcttctagaatatatgcctctgtctatgacagataaaaaatataaacattagtaagctttagtaaaatttgccccatttggacatacttgaaagtaaagcagttacatgatcccacatctctgacaacaaaatcaataaatatgagaaatgtgtgatagtaactttacacacaccttattccatgtcatatttacagtccttaagctttctgaaattttatccctttcaggtaaactcagacttttatctgaaagcatctccaattcagttctattcagccatttgagtttttcagcatgtacttccatttcttgagttaagtcctggagaagttaaaagataggtgtggttagaaggtagtcagataagggaaaattcaagaactgtattagaaacctttttggtattattacaaatgtaactttctaatttgttaagtgaaaaaataaacttataagaagcttaagctcatgctaacaaatgataactaggaagggagtgagcacatgccttctgtgtgtatttttgcactcctgtgcacaaacgggctctctggtactcactgtctcttaaccgggtcatatattatttttacactgctaatttaacattctgttcttatctcctccttgctactccatcctaatatactgttccaccttttctaactctcctcaaattgtttacaaaagagacattcccaaaaaaaccactgaaatttttaggtaaaaaaggaagcttgttagatattgtcacattttaaaaagaaaacttaatatatgttccacaaaatatttttcatcattattcaatgtttctttctcaaaatgcttcaatcatactcctttatagacaaaatctctgaattagtaagtaacctttcacacacacttatgcttgtacatgtatgaatacacactcataatttcttttttttttttttttttgagacggagtctcgctctgtcagccaggctggagtgcagtggcacgatctcggctcactgcaacctctgcctcctgggttcatgccattctcctgcttcagcctcccgagtagctgagactacatgcgcctgccaccacggccagctaatttttttttgtatttttatagagatggggtttcaccatgttagccagatggtctcgatctcatgaccttgtgatccacccgcctcggcctcccaaagtgctgggattacaggcgtgagccaccacacccagcccacaatttctttttttaaaaaaaaatgtgagcacattatgctgagtgttctgcaacaagtattttaattcttaacacaaaaaataaatatttatgaatacaaaatttatggatatttggatatatttatacatctatatatgtatgaatttttatagattatatacatatacaactataaacaatacttgttagttgcaaaccaacaaagaaaatctgattaatacaaccatgacactaaacctattgcaagctgcattttgttcctcagcaagtcactctgataattactgattatctataaagttgagttttgcagctttatagacaataatcagtaattttcttccaaatctaaaaacaaaaaacgatatttcatagccctattgtattttaaaatgataaggtcagtttacaatatcctaaaaacctttggtctaatactgacaccataatagtttgttctttttacataagtgaagtttaagctctgcaagaccaaaattataactgctctttaaaaaataaaagatattcctctttcaggttcaccacatttaccaaaaagtacaaagtttcttttcccttttcttcttgagacacgcagtatgtgactctgaagtataatgttcgggcaccaaaaggcatatagacagaaataaacaacttactcttaattcttgcaggttttctcccaattcggtggttgatctcttttgcatagcatgctcagcctttgttaaccaacagataatctcatctagctgatgcctgtacttcatcacctgcttactttctccttttagcctaaaagaatatattatttaaaaatattgaggaaaaactgtccaattaagcagaaccttacatatttgctttgaatatcctgactaaatatttcccaaaataaataatttctaataattattttaatatatattttaagtgaaacaatgtatatattctacaatataaagattgcttaataatagaccaagaagcttttttccttagttaaattcaaaaacattgaaactaaagaatattatcttccctcatcataaaaagttatgtagaaattgaatacaaaagccttttttacagttagataccactccgcaacataatggaaattttttaaaacatgaaaaatgtctttatctaaaataatagggaaaaagcataattctctttgagtgtttcacgaatattgaaaggaatcattatatgacatgttatcacattaggtggtaactattactctgctttattcatagaacagaaagaataagaacaaagcaaggtatcaagaatgggagaatcttacaagtattagggaagacaagaaacatgtgaatttggcttgtttattaaaataactattatatttgaatagagcactgttacaaaaagagatatagaaaaaaacaaagcaaaaattttaaatgatgcaaggaaaacagtcaaatgaatataaaaaaggaactgcctcaattagatctttatagtgttataagaataacatttataagaatataaaccatctgtcagaagagaggaatatgattagaactcatatgacaaataagattatgtgttttttaaaaggatttgaaagctattaaaagcctggtggtatctttatttttatagctgctataattaactgctggtttaaaaactgaatgcaatttttaaataaattgtattgtatcattcctaataagaatttatgtttttgcagctaggagttttcatttttaatcacaaaagttctcacataatcgtgcaatacatgtaataaaatattagataatacttctatatttaataaacagtcaatatttgatgtataatgtttaaaaaaatgaaaatcactacaaaatcataatttttaagtatccatcaagaaagaatgctcctttaagattaaaaataaataaatacagcaacagcactaattactaagactaaaacaagtaatctaccctccatagtgaaaagtatttaacttaaatgacaactttggaaacacccaaaatactattataggcctttgtttctaaaaaagagttgaaatttcacgtccaatgtttcaagatcatgactaatttagtactttcaaaacagaactatgaagaaaactagcattataaagtgatttcaataagatatatttgagtcacccaatattttcatctgcaaattagctaaatataatctacattttaaatattatccccaagagtaaaaacaaattataaattcatgttctaacagaagaaacaattgctcactaaggaataacccactgggcatggtggctcacggctgtaatcccagcactttgagagactgaggcaggaggatcacttgagcctaggagttcgagaccagcctggacaacatggcaagaccttatttttacaaacaatttaaaaatcagctgggtgtggtagcacacacttgcagccccaactactcagaagactagggtgagaggattgcttgagcccaggggctcaaggatgcagtgagctacgattgcaccattgcactccagcctgggtatcagaacaagaccttgtctccaaaaaagggaagaaataactctgcaggttgctgaactatgcaaatacttaactacaggcactcaatacaaaaacaaattgaactgtgtgataattctcaattactttgttaacaacatatatacaatctacccaaaatggtcccaatttaatatagactaccaacctaaggtgaagtttagcgttaatttacaaagacaaatattgttttagtcaaaatataagctgttggggaagagattcattattcttttcacttccaaaaaatgagtaaaaacacgtattagcttcaccttattagttttaggagctgtaattaccacactccacagatatctacctttagaagaatttctgcatttattgttaaaaccctcccagcaggtacatgtttttccttaaaaaggtataagagaggataggctcagtggctcatgcctgtaattccagaactttgagaggccaaggccagcagatcaacttgaggccaggaattccagaccagcctggccaacatggtgaaatgccatctctactaaaaatatgaaaattagccaggcatggtgacaggcacctgtcatctcagctactgaggaggctgaggcacgagaattgcttgagccggggaggcagaggttgcagtgagctgagatcacgccactgcactctagcctgggtgacagagcgagactctgtctcaaaaaaccaataaaggtctaggagataaatcatttcaagctaagaccctccatgcaaactgaatagcatgacatataagatcttatgggacctcattttccaatccttcccctggtcattgaaccctcctctcctttcaatcctttgcagatctctcacacgacgatgctatttatgcctcccacctctgctgttttacttcttctgcctagaaggccctccctagaagaaatttatagaaaattgctataaatgctttaaaactcagcttcggcatgcttcctctgtgacacttaaattccacagcgcatcatatctgcctctgtgacactttatctttttaatgatgttttctttcatcattttcttcttcttagtctttgagttcctaatcatacttgtatcttcagtgctaaacatagagctcaataaatatcgatcaagtcattaatcaatcattggcaaaattcagcaatatgcttagagaataagttctaagataacttgctttcataagaaatagatactttaagtgtttactatgaatagtcaaggcatgcacattttccaaacactattgcatttaatcctcatgacagtcctctgtggtgatatcatagttctcatttccagaggaagacactttggccagagagttctgtgctctttccaagttcgtacagcataatattgagagcataagacagtatgatcacttactttctatgagatcttggacaagttacttaacctcgcctctcttagcctcagtttctaaagctgtacaaggcttaacagtcccctaagaggtgagtcatgactcctaaacaaggcaatgtgtgcaaggtgccagatactctctctgccatgtggtaatctctcaaccaaaacgtactaattattatttgtctcttaccaaaacacacaaaataatagattttttaaatgaaaagcaactgtaggtcacatgatacttgaatattttaggttgcataataatactggacctgataaagtattagattggcctttcacaaaatgatagcttatcactaaaataatacttcatcaacagagttaaaattaacagaaaaaaaaatcgtggagtttttaaccctaaactaccaacaagaaacaaacaaacaaaaaagatcattaatgacggaatatatgaaacaaagtagaaatcattcataaatcttgactgtctcagaaaataatgtcaaataattttaaatatggaaagtgtctatagtgttgggcattatattccaattgcaaaacaaatttgcaactggaagatgcccaaataaaatctgagtcactgtaacataatctgacataaaaattaataatactatattatattatattatattacatagatgaagaactttattattggcaaagcatgaatagaacacaacatttgacaccaaaataacttagtgagacgtattactaaggtaggctcaatcaggaaataagcaaagggaaggtctgatcttgaacccagaccttcaaacctgaaacctggagtttcagttatttcaactactttaaattcccatcataatcaccatatcataataagcagttgtaaataaaaggaataaaggtgtttggtttttacatatgtagcatttgagtagaaaagtgagactttatggacagcctaaaaatacaggaagggagaacgtgggcagtggaggtcttaaatgtcagtaaaattcctattataatgtcaaacaataaaagaactcattagattgcatcttaaaagattctatccaaaatatgttcactcctgtgcctgcaaacaatcatagctaaatcaccttggctgcctatccttcacttctgcaacaattgcatcccagcgttggtttaaacctgccagtttttctttcaagaagcttccatctgcctgggagagtttctgcacaatcccatccccagttcggtttagtgctgcaaaactgggctggtggctgctgatgcccacctcaagttcctgtaacagagcacaactcaagattagtttcactaataagtaaatgattctgatgcaatgaatccacccaagtattgtggtatcaatttaagtgtgaaagaaacaaactcctggaaagatattttatgttagaaaaaaaaggcattttaaaacaatttaattacatttcaatgaacatgctaaatgaaatttattttgaaatctaacccaccttcatgaatgtcatcaggcaaaatacaaggaaatagggcagcttaataactaaaatgaataacagctgtttacattaaagcataagcatcaatcatgtttgatgaaaatgaattgctcatcttctttcaagcaagtgcttgaaggcattgctttaaaaaattatataccccaataaatccttatatccttgtgtcctaccacatacaagtaaacctaaatgcacattttactaagatattgcttcactggttgatatggtttggttgtgtccccacccaaatctcatcttgaattgtacctcccataatccccacatgccaagggagggacccagtgggaggtaactgaatcacaggggtggttaccctcgtgttgttctagtgagagtgatctgatggttttataagggacttttcccccactttgctcagcacttctctctcctgccgccatatgaagaaggacatgtttctttccccttccaccatgactggacgtttcctgtggcctcctcagccatgctgaactatgagtcaattaaacctctttcctttataaattacccagtctcaggtatgtctttattagcagcatgagaacagactaatacactggtctacaaatgtttaagtaacagattgaatgaatattttcaagtcaaatttaaacacttatctgtaactccaaaaataagaaaaatgcattaacacatttatttatttatttatttatttattgacacagtattgctctgtcacccaggctggagtgcagtggcacgatcttggctcactgcaacctctgcctcccaggttcaagcaattctcctgcctcagcctcctgagtagctgggactgcaggtgcgttccaccatgcccggctaattttttgtatttttagtagagatgggttttcaccatgttagccaggatggtctcgatctcctgacctcataatccgcccacctcagcctcccaaaatgctgggattacaagtgtgaggcaccgcgcccggccacattaacacatttataagaaaaacaaatgaattatctttaaattgtcatgtccttctaaataaaatacatttaaaaaacttaataaaagagaaaatatttttatcaatggtagaattgaaattgcgtgtgctttctaccattatttttaaagacctattgttatcagaactaactttgtgttatattttcccaagactgaattagacttacatgagcagctgccctgctgtcgctccagaataatttactttatgataattatcaatgatacaaagaaaaatgagatgcctaagtgtttaagtacaaaaaacagaggtgaggcatgcaaatattttttctgttcttggtatagtcttaggcataacagtttacaaattttattctaaatataaaattgtttaaataaaattgtttttcacattagccaccaaggagtatttttatttaaatttctttgaaatcctgattgaaaattgtgattgaccaatttcttaaacttttataactggtaacaagaattggaacaaaaattacaaattgtccattgacttctgaaaaattaatatattttgtccctacttctgaaatctgtcttaacaggcatacactaaccatatgtgcagtccccctcctctaacagaaagcactcacctgctgatgtatcctggctttctctaagtccaggctgccacctggagcacaggtatcaaccagtaattcttcagcctctgttatccactgtgtgaggtcattaaggtcacaatggaactgtctccattcttccattgccctgtcaaaacaactagaggacaatacacaaaataaaataggtttccaaattttccaggactgcctaaagccatttttctaaaaaagaaaatcaaatttcatttaaacagaaagacctcaaacaactgaattcacagcctattgctccacaaaaccaattttcgtagtgggatacaggtaataattcctcctagagatatatgcatcataacaagggcaaagcaatctgctcacaccaccagctaccaaatcctctctctcatacacacacacatgcacactcacgtatacacacatgcacactcacatacacactcacaaacacactcacacacacactcgagcagctttttaactaaaaagatgcagccttttctggcttgaaaaatcaggatcgattagttgtaggcatgttaacgcatccaactttatacatttaacatttaaatactgtgaaatataaaatatgattcattattttcttggggaaaaatatgttgttttactaccagaacacttagttcccggcaagaataaagcacaaaaggccaaaacacttcaaaatgcccgtatacccctctatctatatgttatatactgaattatgtccaatcaaaattcttatgttgaagccctaaccccacagtgtgactgtacttagagatagagctttccaggacacaaataaggttaaatgaggtcataagtgtggggctctagtctgaaaggactggtgtccttataataggtggaagagtcaccacagagctctctcatgtgaggacacagcaagaaggtggccatctgcaagccagtaagagagacctcactagacaccaaatctactggcaccttgatcttgaacttccagcctccagaactgtgggaaagtaaatgtctgttgtttaagctacccagtctatgttatcttataacggctgcctgagcagattaatgtacttcgggtaatgactggtcctgagggtcccatttacctaaatacagcaaagtatgaaattgcatgcagagcccgttatgcaataagacagagggctattgagatttctgtttaaaccaaactcttttaaagatggcaaagtaaaacccagtgcttgttatattcaggatacatgaaataagcataaaaaggaaaagctttattggaccaggatcctaaataattttttctcctatctttttgtttaagagtaatggagctgagttttagaagtgatctctgagatcttaacaatattaataaaatatatattttttaaataaaatggctcctaatatcaataacccctaaataatgtgtatatcgtctttctccatgaaaattacttttaacattttgctaatactgcccacagtaaagcaattttctattgagcatggaaaaagaaaagcacttaaaaaaaaggcactatgaggtgatattgacactcattatcatttgcaaaaattcacaataactacacaacaatcacaatttccaaattcgagatgctataagactgttccaaagatctaaagactttgaaaatacaaacattaaacttagaatgtatcatcagtgacagagagaaaaaaaaatggtggataggaggaaggtctaacttgcagctcccactcagacaaacagcagcatgtgcagacacatagtggacttttgttccaagaactaccgcaggaacataccaggaaaactgagagaatctacagaccctttgaaggaggtggaatgctgctgcatgctgcatgggagagccgaggaactggagatcagcttgcgttctcagctgggagacttgtcacctggggcaagttctcaaccctgctcaccagctgcctggaaataaacccaatgctgttgggccagtgggggtgtgggggtggcggaaggggttcctgataggactaagactggccttttgggccgtgggctgcatggaaactgagtgaggcctgcaactgcacgctttccctcacttccctggcaacctgtgtgatgcagcagaggcagccataatccccctgggaacataactccactggcctgggaaccacacccccatcccccatagcagccacaacaagccatgcacaaggagagtctgactcagcacctaaccctgcccaacctgatggtctttctctactcgccccagtagccaaagacaaagaagataatttcttaggagctctatggccctgcctgccgcctaatcctctctatgctactgcagctgatgctctcttgtaagcaccatctcctggctgggggccaaccaacagaaaaccagcgaacttaaccaaaatacaaccaaggactctcacagaggccgcttcactcccctgttacttccaccagagcaggtgctggtatccacagctgagagacctgaagacagatcacatcacatcacaggactctttgcagacacttcccagtacccgctcagcacccagtagctgtgctggatggctagcttcagaagataaataataatcactgcagttcagctctcaggaagccccatccctaggggaaggaggagagcactacatcaaggaagcatttcatgggacaaaagaatcaggacagcagccactgattcccagatcttccctctgacatgctctacccaaatgagaagaaaccagaaaaacaattatggtaatatgacaaaacaaggttctttaaaatacccaaaaagatcacactaggctgggggcagtggctcatgcctgtaatcccagcaacttgggaggccaaggcaggcagataacctgaggtcagcagttcaagaccagcctggccaacatggggaaaccctgtctccactaaaaatacaaaaataagctggtgtggtgatgcgtgtctggaatcccagctactcaggaggctgaggcaggagaatcactcaaacctgggaggcggaggttgcagtgggctgagattgtgccattgcaactccagcctgggcaacagagtaagactccatctcaaaaaaaaaaaaaaaaaaaaatcacactagcttaccagcaatggatccaaaccaggacaaaatctctgaattgccagaaaaagaattcagaaggtcgattattaaaccaatcaaggacacaccagtgaaaggtgaagtccaacttaaagaaatcaaaacaatgacacagcatatgaaggaaaaaatctcgagtgaaataaacagcataaataaaacaacttttggaaatcaaggacacactcagagagatgcaaaatgcactggaaagtctcagcaataaattcgaacaagtagaagaaacctcagagctcaaagacaaggcttttgaattaacccaatctgacaaagaaaaagaaaaaagaattttaaaaaatgaacaaagcctccatgaagtttgggaatatgttaaaagaccaaagaataatttgtgttcccaagtaaaagagaaatccaaaagtatctaaaacatatttgcaggaataattgaggaaaacctcccggctttgctagagatctagatatccaaatacaaaaatctcaaagaacacctggaaaactcatcgcaaaaagatcattgcctaggcacatggtcatcaggttacgtaaagtcaataagaaggaaagaatattgacagttgtgaggcaaaagcatcaggtaacctataaagaagaatctatcacattaacagaagatttctcagcagaaaccttataagctagaagagattggggtcctatcttcagcctccttaaacaaaacaattacaagccaggaattttgtatccagtgaaactaagcttcataaatgaaggaaagatagtctttttcaaacaaatactgagagaatttgctgctattaagccagcactacaagaattgctaaaaggagctctaagtcttgaaacaaatcctagaaatacaacaaaatagaatcttcttgaagcataaatcttggccaggtgtggtggctcacgtctgtaatcccagcactttcggaggctgaggcaggtggatcacctgaggtcaggagtttgaggtcagcctggctaacacagtgaaaccccacctgtactaaaaaatacaaaaaaaattagccaggcatggtggtgggcacctgtagccccagctacatgggaggctgaggcagagaactgcttgaacctgagaggcagaggttgcagtaagccgagatcatgccactgcactccagcctgggtgacagaagaagacctgtcaacaacaacaacaataaagcatagatctcaaagaacctattaacaataacaaaatgaaaaaaaaaaaaaaaccaaggtattgaggcaacaaatatcatgataaatagaatagtacctcatatctcaataataacattcaatgtaaatggcctaaatgcttcatttaaaagatacggaatagaagaatggataaaaattcaccaaccaagtaactgctgtcttcaagagactcacccgacacataaaaactcacataaacttaaggcaaaggggtgcaaaataacagtccatccaaatggacaccaaaagcaagcaggagtagctattcttatatcagacaaaataaattttaaagcaacagcagttaaaaaagacaaagaaggacattatataatgataaaaagactagtccaacaggaaattatatcctaaatatatatgcacctaacattggagctcccaagtttgtaaaacaattactactagacctaagaaatgaaataaacagcaacacattaacagtggtggacttcaatactccactgatagcactagacaagtcacccagacagaaagtcgacaaagaaacaatggaattaaactataccctagaacaaatggacttaacagatacttacggaacattctatgcaacaactgcagaatatatattctattcatgaacacatggaatattctccaagatagaccatgtgataagccacaaaacaagtctcaacaaatttaagaaaactaaaattacatcaagtactctctcagaccacagtggaatgaaattggaaatcaagtctgaagggaaccctcaaaaccatgcaaatatatggaaacgaaataacctgctcctgaatgatcattgggtcatcaatgaaatcaagatggaaatttaaaaattctttgaactgaacgataatagtgacgcaacctatcaaaacttttgggatatggcaaaagcggtactaagaggaatgtgcatagcattaaatgcctacatcaaagagtctaaaagagcacaaatagacaatctaaagtcacacctcaaggaactagataaacaagaacaaaccaaacccaagcccagcagaagaaaaaaaaataaccaagatcagagcagagctaaatgaaaatgaaacaaataaacaaaaatacaaaaaaaaatgaaacaaaaagctggttctctaaaaaaataaataaaatttacagactattggtgagattaaccaagaaaagagagaggatccaaatcagttcaatcagaaacaaaatgggtgatattacaactgatgccatagaaatacaaaagatcaaggctattatgaacatttttacatgcataaactagaaaacctagaggatatggataaattcctggaaatatacaaccctcctaaattaaaccaggaagaaatagaaactctaaacagaccaataacaagcagcaagattaaaatcatgattaaaaaattaccagcaaaaaaaagcccaggacccgatgggttcagagctgaattctatcagacattcaaagaagaattggtaccaatcctactgacactatccaaaagatagagaaagagggaatcctccctaaatcattccatgaagccagtattaccctaataccaaaaccaggaaaggacataacaaaaaagaaaactacagaccaaatccctgatatagatgcaaaaatcctcaacaaaatactagctaactgaatccaatagtatatcaaaaagacaataaaccatgatcaagtgggtttcatactagggatgcagggatggtttaacatacacaagtcaataaatgtgatacaccacataaacagaattaaaacaaaaatcacatgatcacctcaacagactcagaaaaagcctctgacaaaatctagcatccctttatgattaaaattctcagcaaaattggcatagaaggaacataccttcaggtaataaaagccatctatgacttttagcccatagccaacattatactgaatgaggaaaaattgaaagcattccccctgagaactggaacaagaaaaggatgcccactttcaccacttgcattcaacatagtaccggaagtcctagacagagcaatcagacaagagaaagaaataaagggcatccgaattggttaaaaggaactcaaactgttactgtttgctggtaacatgatcatatacctagaaaaccctaaagactcatccaaaaagctcctagaactggtaaataaattcagcaaagtttcaggatacaaaattgacgtacaaaaattagtagcactaaaaatttaaaaatgaaaataaaattgagatgtaatctatcactattaaactggcaaagtttttttaaataataaaaaaaaaacctgtcaatgttagtaagggctcaaaaagaaggatatttttacaaatactgttggcaggggtatagtaaccaatttcatgatataatacaggggtttaaaatgtcattatttttaaagaaatttgtcttcatctaatgatcaagcctaatgaaatataagtatggataaagatgtatgtaaaagaatgttctccaaaggtacaaagagaaaatttgtaaaatccaaacaaaggaatataccaaaggccactaaaagctatcttttcaaggattagtcacattgaaatatgtaggctaaaatagaaaaaaagagaaggaacatgatgcctagtttttgtgcgtatgtctctcaagttacccaatgtattattctgtgctccctttcctcttatacagcgctttccactgggttatttcataacttatttgcctttccatcacatccacagctactggcaaaaatcttgcctgttttcatttctacctattaatagtcctggtcaaaatctagtaagaaggctcaaaagcattcatttaaacagaaggctataaaaaagagtttggtactatatatggattctaattatctgtagctgcctctgttcttcactcacattaatcatcaagtgtgctgagaaagtgaacattaatgaaaaatttctttagtttttttaaagagaatggacactatttagacactaaaaattagaagtgcttccatatcattaagatattatgttataaatggtcatctatacatgatcacattcctcctttaaggaactatactcatcacaatttattaaacagggcataaggccgggtgcagtggctcacacctgtaatcccagcattttgggaggccaaggcaaggcggactgcctgaggtccggagttcaataccagcctggccaacatggtgaaaccccatctctactaaaaatacaaaaattagccaggcgtggtggtgtgcgcctgtaatcccagctacttgggaagctgaggcaggagaattgcttgaacctgggaggcaaatgttgcagtgagctgagatcatgccactgcaccccagcctgggtgacagagcaagactccttcttaaaagaaaaaaaaataatagggcatcctacaaggatatgaaacatgttctcattaatctcagtgtccacatgatcttcttcacgcccatgaacttgcaggcatttttttaaattaaatattaatttcatttacacataccctttccgatcactgtacattctattaattctgtcccattttgcattcagctgagtaagtgtatctctgatctgaatggcttcaggtccagaggcttcaaggatgacatctggctgtttttcatgaatgactgcaatctgctctccaagtttgtccagttggtctttgatattctaaaaatatattgtcatagattaacaaaatccagcaaagtaacaaaaaaaggaatcacagatgaccagatatttatattgtagaacactcatttgaaataataatgagacataatcattgttaatcatgaaaactgaaaactttttttttttaaatgatactctgttttaaccaaagtgtgtggaatatgctacataatatactcaaggcaggaaaaaaagtcctcacaatagtagcatttgtacagaacacatgaaaggcttcagtaacattctctataggtaatgaggcatttgaagctggaaatagtgatattttcaaatatctaataatgttagtttaaatgagaggaatgcactatcaaatccatattatcagtgaatttattgtgattttacatataaatgcaatcaagttacatgaaaatgccttgctagaatttaagtttaattaacttacaatcaagatgccattccatacctcaactggccaattttaaaccattatagattgcctgataaatgctgacaattaacatcaactgacaatctagtttataagacaggaaggtggtctatgtctctgtttaattttaaacaaggctctgatgttgcaaataatttataactgtgcacatttaacaatccatacccactttttaaaaattcaaaatttaatatattttctttgacaatataggaaagctttactagtcatacatattattaatcccctggcacaaattgtaaaagatatagaccatctaagtaggcacaagaacaaatttcttcctctacttctacattaactgtggccattcaaacacagtgcccagaggtctaccttcagagagtcttcctgaaaagagaagtcttcgtaaatagcagtgttgagctctggaacattaagcgataattcaacatcatccatgcaaagtaaaattttgttaatttcaaccagataatctgtaggaagaagtgatgatctaattccagaagcaagttgacccattttcctctgttgaatagggattgcctacaaaaacagcaaaaaaaaaaatatatatatatatatatatctcttaaaatacccccacaatgaataataacaagactattgtgtgaaggaatgcaatatcatgaaccaaatttttaaaacttagttttaatattttatattataaacctaccttgcaacagaaaaccttaacaatctgtatcctaattttcatctgcagcatgatattaaacagtataagtatgttattaatttgacaggctttaagatctatgccatctaaactcagttagcaaacaaaaaacaacaattcctttcttgagttgttgaaagaatgagaatatcctgccaatcacaaagttttgtatgaaataaaacattttgatacattatttcactcttttaaaaatatcacaattttaaaattggacctcattgctaaaaatataagcaagttaaacatgtttccataacacaacatgaaatgcacaaagggttttgattaaagtaatatccaggtaattcagtatgtaatcttaatctctgagaataatattatagagcaggaatatcctacattagaaaatagatcatgaagtgtcatatttagacagacttgaggctctatggactactcatctgccctaatatagattttctggatcctcttctcagagctttctttttcatttttatttttttgggggggtgcaggacagagtgttgctctgcctcccaggctggagtgcagtgctgtgatctcggctcactgcaccgtctgcctcccaggttcaagcgattcttctgcctcagcctcctgagtagctgggattacaagcatgcaccatcatgcccagctaacttttatatatttagtagagatggggtttcaccatgttggccaggctggcctcgaactcttaacctcaagtgatcagctgacctcagcctcccaaagtgctgggattacaggcatgagccaccatgcccggccctcttctcagagctttctaaacaataaagtgctctctgggatggaccgccagtccttcaggagttcaaaccctttactcctagatggccacaatttaataagtgctacgtattaccacttgcaaagggccaaactgcagctgctcatgaattaaggtaccttccttgacactttcacttctcctatgttgaacttctaaaaaatgataatcatctgtaaattcaagatgataggtaaaacgatcacaaatgcatgttaattcagttagtgatcttgaaaatggttacaatccaatctctaaaggaatccaagactcatgactaaaatcattgagtggataacatggtgttgaacctagaggactgcattattgcctcctagaatttgttaaactactgcgtccatcatttgagggtagttctggatagccaggttagaagcaggtctatacatttcttgactttaacaacagaactaattacacttgtctccaagattaattttattatcctaatgccgcaagtttaaattttagtcagaaagcatttctagatatttacccatatgtctaaggaaacaaattctgtgttttaagcaaatataaaagaatgctgaaataaataacatatctacccagaaaccagttatgaataaaaagatgctaagtattttttaagaaaagaaaaaatcaaaaataattcttttggattttcatttcaaataagccagtgtttttattttggaagatcagaaaactaggctcaattgttctccctcttaactttaaggaaaagaaaatagcccaatgaaagtatttctaggttgagtaatcatgtcgaaaaagtaaaagaggaaagtgggacccgttttccttcttggcttcccatccattaaccaagattttgctgaaaggtcatctgttttccaaaagaccaaaaaactccagacatccaactactttattatgcttgtagggacatttacctttgtagtactttcctcatttagcaccactagataatacatgccacatttgttttttaatctgctccattaggtaaatgttgggagccacttttatacctcagctactactgcaagactggaattcctgtgctgcttcttcagttacataacggattgtcattctgcaagaccacgtgtacctgaagctttagaataaactagggaggttagtaggtatcataaagatccaagtttaaaaaattcccattcattaagactgcctctttttcttttcagactataggacaatccaggatttttctgagccttcccactcttgcagaagcagcaaggccgttcaagacttaaacatgtgctttctgtattcccaaaatagatttttttcccccaagagagtgatcaatcaaaatgccctaggactaaaaaaatgtcctcgagatctgaccgagactttacttctggacaattttatttttaaagaattctccaaggacacagaaacacaaatatactagaggtcagtacttaaatgagacagtgttacatgacgtagctcacatcatatagcaaagattaaagagatttttaagtgagtgttttattaaatttctaagttttgtttttaccaaaccataggaaaaacctggaactaaacagaattgaatattcatcaactttctggaggatgaaaactttttagatcccaaaacagaaacccctgaaaaatcactaagggaaaacatagtcacctgtggctaaacaaaaattttaaatggttatatcttaaagataaaataattagaagataaatatcaataagataatattttatagcaattatggcaagtggttaatatctttataaagtgctcatacataatttaaaaacagtaatactctagtaaacaaattggaaaaggtcacttaacatatatttcaggtaagacaatgagtcctgtaaactagtgcttctcaatcctaattgtacattaaaatcatctacaaatgttttgtgttttgtttttgtaaatgcccacacctaggtcctgagagattctgatttacctgtttcaggaattagatttgggcactgtagtttttttaaagctcccccacagtaattctcatgttcacacttaagaatcatataagtttgaaaactatagatttgaagtttgtaacatagttcgcctaccaatgttagtaaagccagaatgaaattagcttgtatagtatatattagtacttttaacaaacaaatttatttatgtattaaaagcttaaaacttatttctattttgtgccagtaataatttctgatttcggacccaaagatgaaaaagatattgcctgaacttggagaagcattagggaagaaagatactttaaaaagtcacaataaagcagagaactataatataatctgacagaagttagaaataaaaatggagctgagttttaaaagataacgcatttttcagctaacctaaaaagacaaaactcactctagggaatcggaataaaattaataagttcccagatgtgctaaggcacatgatgtgtttaggaaaatgtaaagaaaaaccagcatagctgtactacatgggaagtgacagcacatcaaagacataaggagccaggggtcagactgaagactttgtatgtcgttatattgacagaccttgcatttaaagctttttctgtattttgcaatattttcctaaacagtttcttcgatgaaggaatgacatgatcagccatgactttggggagaataactgtgaggaagagacaaaggacatgctagagtgagaaaaaacagacataagaatatgtccatgggatataatatcatgggagaaaatcattagtctaaattatggaaaggatagtgaagtaaaataagctaaggcactttctgatggtcataaaacaagcagctggtagagcaatatctaacttcacgttcaaacctgtatgttgcttcaagcagtctcaacagttttaatgcctactcagtgtgatgtgagaagatatgtgaggaacaagaaatagttaagaaggatgttgaggcttcagccttgagagaatggctagtttttaaagtatagtcatgcattgcttaataacagggacatgttctgagaaatgtgtctctaggttatttcattgtcatacaaacatcatagagtgcccttacacaaacctagatggtacagcctcctgcacacttaggctgtgtggtatagtcaattgctcctaggctaaaactttacagcacgttattgtactgaatactataggcaattctgaaacacagttggaagtatttatgtatctaaacatatctaaacatagaaaaggtacagtaaaaatacagtaccataatcgatctacttaatttccaaagtcatcaaataaaaatcgttctagaaggaactaccaaagaacggaccccagggaacaacagcacacttaaaatgcagctagaaagattgccgtttaaaaaagagctggagctggatatggtggcccacacacctgtagtcctagcaacttgggagactgacataggaggatcacttgagcctaggagttcaagatcagcctgggcaacatagagataccccatctttaaaaaaaaaaaagaaaaatataaagaaataaaaagggagctggtagtgaatctttactagaatataaatcatattacatcactttcacaaactgagttatttttaaactagaaattttttttgacatagacaagaccttcacaaataaaatatggaattggaggaagccacttctgaaatagatagatctcttttaggtttgataacataatcagaaatccaaaagagatggccaataataaggttttacatttccattttgagttctgcaccatccaaaaatatgaacacatctagtaacacacactagaaaggaggagatgatattccaactggtgtgttttaaagcatctgtgatgcagcatcacacatctgaatggcaagagttaagtaaggtatttaaatgcaacagagactctccaatcataataccttaattttgttgtatctagtatgcaaaagtaataattgcaaacggatcttttcttttttattatcttccataggttgatgtaacatttcttctcctctttgtagaacttcctcaatctgggcactctcctcatccatctaaatttttaaaaggaaaaaaaaaatgactcaaaagaaaaatgcataaggtcacttcctatcaactcctaaggaggaaaactaacctacttagtatagtatacgtcaagatatgttaacctgaacgatcaaaaaatttatgttttttttaaatatattttatatttgaagataaaatgtctcaaagagagtttagcaaacattagataatactaaggattatgtctagttcagaaactgagtctattttctttttaagcacatgaatcatgtgactcttacattgacacacatcaaaaaatcacatttgaatctgtttcatcatgtttgacagattatatgggcaaacatcttgatgtaaaaatgaaattaatagagaagaaaaatgagaccaccatggttttgaaatctccttgaaccaaccttttcatcttcatcactggattccaagtgtttttccacaaattttaacatattttctatgtcattttctaatttttccaagtcagagaaaggcacaccagtttcaaatgtttcagtggtgaccaaacattggtataatggttcctgagcaattagcaactgtagaaggaaaagaattctctgaaaatagatttttaatttgactttccatcattaatcagagagatggggtgtcaagagagaaactaacacttttttaactgacttttctattcagctcagctaacttttgtttcattcatttatatggcaatgattttaccaattcagacttctctgaatgacccgttttctccaaactctagccagggatgtgacgtagtattgcaattcattgtggctgcccagagtgttgtggcgtggatttggagaccacatgcgagcatagcaggaaactatggccatgatccagaaactatccttaccatggccacagaaaggaagaacagccacccagcccccagggcagggacacctcacagaatgtctcccagttaagtttcctcagtagaattccccttggattttcatacacaaacgtcaaagaagtgcatatttctcaatgtcatcttttcagataacatctacgtagaaaaattttatatttgtttaaataaaactcaataaaacaattttaataaaactaaatgcagataaataccatctggggttggctaagtgtgggaaaactagcactctcataaaggtcctatttattaccctgttaattaaatgtctaaagctctttattaaatttataaaatcaggtagtactttcctacattaggattaaactgtgaaattatctgtaacttttagatttgtcgtcatataaaacaaaaaaaaaaacaagttctgtggtgtgtgcaatgtgaagacatatatagagtgtgaccataaaataaagggtttaatattcatccctagcttgggaattagtttcatcatttcataaccaattctaacctttgactgagtctttgaaaccttttctcaaataggttattttcttcaatactaattgcttgttttctctccttcatatgcacaatcacaaataaatacggacaaatgctccattcaaagaaaaagtgattaaaaacattttaatttaaaaattgttggccgggtgcagcagctcacacctgtaattccagcactttgggaggccaaggcgggcagatcacttgaggtcagcagctcaagaccagcctggccaagatggtgaaaccctatctctcctaaaaaaaacacaaaaattagctgggtgtggtggcagttgccggaaatcccagctacttgggtggctgaggcaggagaatagcttgcacccagaaggcggaggttgcagtgagctcatgccactgcactccagcctcggtgacagagagagaaaacaataaaattaaaataataaaacaaaattgttgatgtatgtactgtatgactatcatttagatacatacccataggaaaaatggtttactctaaaagcataattactcactttggcacttttgatatgttgagacaccttttcaaagttcctattcagctcagctaactttggttctacaagctccctgcttgagcttccacgggcattcatcaaaataagggcttgatcgcggacattttcaacctggaggttggcatcatccagctcagatactaaacgctaattataagaaaacacaaaattatctcatgggaaaaatcaaacccaaacatgagtgtgatgcttatacagaaggaaaggtagtttaaataaatatctgggatccccagtaagagatttcagcataatcaaccaggtgagagctgttcacataggactcattggagaacacagaggtaagtaattctcattggaaaatacagaagtaagactcgctggagaatacaaaagtatgtaagactcattggagagtacagaagtaagacagactcattggagaatacaaaagtaagtaagactcactggagaatacagaagtaagcagcactcaatggagaatacaaaagtcagcaatcagcaagactcattggcatcttatgtgaataggtcttactccggttgattgtgctgaaatctcttacaagtctttcaatttcaagttcgtctcttattttgtctcttattgtctcagtttctcccatcaaaataaatgttaatgaatctaatgcttgggaggaatgagagctaagtaacttagagcattccagaagagaaaacatgacaacaaaacatgccactcccaaaagcgttactgatgtctgtgtttgctaccttcacaatttcttcctgtttacttgttggtttcttttcaatttcatccaatagagcttcagcttgataaagccaggtacttatgtgagccacgttcccatcaaatatttctagctggttctgatggttctacaaaggaattaataaaatgcttacataaccatatgaaatatttaagatgataatcttaaaagagatttaaaagaccttcaaagagcaaactgtaccatgaatttaaaggagagctttcaccttcctgcagagctcttcttcagtgaataactcatcttattcctaaaaatgcacatctatggtgcttaacactttttaaatttatttgatttagacctcagcacaataaaaagttgaagtagaataaaaggtgaaagtttctttttcaatttcaatgcaagttcatctcttattccttattcttatattacaactgatctgatttgccctcttcaatctttttttcttttttcttttgagatggagtcttgctctgtcaccagcctggagtagagtggcacaatctcagctcactgcaacctccacctcccaggttcaagtgattctcctgcctcagtctcccgagtagctgggactgcaggcttgcaccaccatacccagctaatttttgtatttttagtagagacggggtttcaccatgttggccaggaagtcttgatctcttgaccttgtgatccaccttcctcagcctcccaaagtgctgggattacaggtgtgcgccaccacacctggcccatatttttaaaaaactcatttaaggaataattttttaaaatgatgaaaatatgaattgaaaaagattctgtatgctctgctcaaaggacagtgcctttgtatccttacctcagtatcaccagcccttaatattacatctggcacagaccacagcaagatgtactgaagcaggacatgaaatgtgcttgacagaacagatttgaaaacagaagcaagagttaagcagattatgactgggaaaaacagttaatctaaggcaagaagttagagtgtgaccaaaaagggtaacgagacttatgatgaaattaacctttagcaattatattttgtgggataaaagaaactggaaaatgcttagacagtaaaagtttttacaaagaaagaaatcattaatctataatatgaaacatagttgaaaaaagaaaatgtaggctgggtgtggtggctcacgcctgtaatccagtactttgggaggccctgatgggaggatcacttgacctcaggaattcaagaccagcctggacaacatggtgaaaccccctctctacaaaaaataaaaaaattagccgggtgtggtggcgcatgcctgtagtcccagctactctcaaggctgaggtggaaggatcacctgagcctggggaggtcgaggttgcataccactgcactccagcatgggtgacagactgacacccagcctcagaaaaaaaaaaaaagtgaacaaataaacaatataaaaataaaacaaacttgcccttgtacccctgaacttaaaataaacatttttaaaaaaagaaaatgtgaactaataaatgatatgagaaaatatcaacagtgatctggattctaagtaggaagaactgatgagtgccagacttgtttacccctattaagcaggtaaatcaaatgttctaacagcactagaaagatactgcttgaatggagagtttgaaaggtgtagactgaagaatacagaaataagggccataagaatgtgaaataaagctagtaattaaaaattaatatataaaatatttaatgagcatattctatgtgccaagaatctcatattcactattatattcaatatttaacaactctgttaggtatatacttttgttctcattctgtatatatggaaatttaagcttagtaacattaagtaacttagctaaagttaaacagataataagtcatggactgtggatataaatctgttagagatcaagagcaaagcccatgctcttcactgccctacacatcctgaggaatttaaataaatattcaaacacatgataatgtattttttatgtctctatccattacctagtaattctataaatttgataaaagtcctatctcaggtatttcagaattaaaaaaaattataaatgacaatgccttcctcagcaggggagggtggggtggccatatattcacaattagtatcataggaacataaaaccatataaaaattaaatggtaactatttccatgagatgcaaatttacagagcagtggcataaccaaagactaacacatatacaatatttaataattataatcatagcaaaatctaaaattggttgttttgcatatagttatttaagagcactacatgtttaaggctcataatcaatcattgcaaaactgtatgagatagatataataatgtccattttacaaattaaacaactgaggtttagagaatgtttaagtaactttaccagtgttaccaagctagtaatgaaaatttttacataggccgtcagatgctagagcctgtgctcttaaccagtatgccattattcaaacactatgaagattttatataaaaatagcttctgatagtacgaaaatcaaatacaatatgaaatcattaaaatgaaacaaataaggtgcatttactaaaatatgaaagtacctcattccatgcagatcatgaatatttagaaacactgtaaattctttctagttattacctttccaaagaaaaaataaaacctagtctaatgaaattaattcacaagcaaaacatcactgtgacacacagtaaacaggatttgaaatttaatcaaagttgtattcatttaaaaaataactagaagagaggagaagatttcatcatttactttttcctgagacataccatcaaggtattgcaccaatcttcagtccaggtacgaactcggctccacccagcgttaaggacgcagagcctctcttctaaaataggctcactgccctcaatcaagttttgcagggcagcactactctctgtgatggtatttaaatcagcttttctcttttccagatccttcagaacattctagaaaataaaaacaccaagacctacttgatgcttcagaatattataaaagtatatacaaccttaaattattaaaaacttttctgccacatatacaaagtagtccatgactccctatataatttacaatgtcaaagtttacaaaattcccaaacttattaacatagtgagaattcttaagttccaaatggaaaacaaaatgtgtaattcaacaaataccagtgagtgtaacacactcagctgtgggaaagcaattatttcatttatttaaatataaatccatttattacatatgaatgccaattaccttcatcatcactctaaatgtaaaggctcaatttcattttcagtaactacaagctggcaaagcagaaggatcctagaactcacaacttaaaaaaattcacaatgaatttatctcctagattaccagaggaaactatcgatgtgtactataggtacttgcaaggataacatcttacagctgggtgatttcacatataatatactgaataaacattacaaaaaaacatttcatgtaagtaactcacaagagagcagcaagtctaagctttggtcttacaactgtcataagtgcaaagataatactctggatggtatgatgataaagtgatcggcacattcgtaagtttcaccaggcaaagtatatagtcacagaattatagagagagcatgagttccacaattaaaactacaaagctctttcaatcaaaaagcaatatgcatgtatctaccctactgctactattattgaccattttttaaatcaacatttaaaccaatcattttaaggagctcaagtttatatttctacattaaatcacaccttggaaagcataccaattacaaattcacaaatgagtccaggtttaaacactcacttggccatgtcaattactggcatatttatgacagaactgaaatactactttccaatattattctctagcaaggggggagaaaataaaggatacccaatagctatgctctcagcaattattaataagaatctttcatttcttcagtgggcatgtactgattgactagaatagcatttaagaactataaaaaataatgaactacaagtaattacatctaaatagtacacatacttttttacagtaaaaaagattacattgaaaatagttatatttaagttatggaataaaaacagtattcagaaatgaaaatattatttatttaagctttgcattgaaaataattttacataatctttaagtgcaaatacattaaaatgtggtgaaatctgcatgttccttaaatctgaaaagacagtgataaaaagatggtggttattaatatatactgatgtttcatttgatttactctaatgaagagaatgtgctgtgaatttgtgacttgtatatatcatctttatcatttcaattctgaaataagattaaatggaaacttaagagcatattgttccaaaagaaacaaatttttcattgctttgagtctttacctaaaaaagctatgagaatcagctgaaaaacaaattgaatttatgagtatatgaacatggatgtttaaaaattgaatatataaaatcaatatcacctatgtaccaacaataagcactctgtaaaaaaaccgaaaagtatatttttacatagcaataaaaatagatatgtaggaataaactcctgtgcatatatgaataatgtttataaagaaaaaaatcaaaacattatgtaggaatgtgaaagaatttaggacaaaaatgagacatatatgttaccgaatagaattaatataacaaagatatcaattctgcactacacaaatgtatgaattcaaggcaattcaaatcaaaatttccaatagaatttaagaatttaacaataaaaattctaaagttcatataagatatataccaaaaatgaagcataaagagagggaacccattaactgcagttaaaatatactataaaacatggctaaacattctaaaaactggtacatttcatggggccagatcagtggagcagaaaacaacgaaaggcaacaggaaaataagaatatatgaacttagcatgtcaaatccatggggacaaggttaattactcaaccaatagcactaagataattggttatccttttggaaagaaggttagagccttacctcacgaaatacaccaaaataaatactggaaagattaatgcattaaaggtaaaaagatgaaactataaaagagctagcagaggaggtggctggcaagatggccaaacaggaacagctccagtctgcagctcccagcaagaccaaaacagaatgcaggtgatttctgcatttccaacagaggtacttggttcatctcactggaactggttagacagtgggtgcagcccacggagggtgtcgcttcaccagggaagcgcaagaggttggggaactccctcccctagccaagggaagccatgagggactgtgccgtgaggtacggtgctatccagccaagatactacacttttctcaaggccttcacaacctacagacccggagattccctcaggtgcctacatcaccagggccctgggtttcaagcactaaactgggcagccgattggggagacaccaagctagctgcaggagttgtttgtttgttttttttcacaccccagtggtgcctggaacaccagcaagacagaaccattcactcccctggaaaggggactgaagccagggagccaagtggtctagctcagcagatcccatccccatggagcccggcaagctaagatccaacggctggaaattctcgctgccaggacagcagtctgaagtcgacctggaatgctggagcttggtggtgagaggggcatccaccattactgaggcttgagtaggcagttttcccctcacagtgtaaacaaagcctccaggaagttcaaactgggcagaacccaccacagctcagaaaagcaactgtagccagactgtctgatctctgaaagaagggtggcagccccagcaaggggcttatagagaaaactcccatctgcctgggacagagcacctgggggaaagggcagctgtgagcaaagcttcagcagacttaaatgttcctgcctgctggctctgaagagagcagcggatctcccagcacagagctcgaactctgctaagggacagattgcctcctcaagtgggtccctgacccctgtgcctcctgactgggagacacctcccagcaggggtcaacagacacctaatataggagagctccagctggtatcttgtgagtgcccctctgaaacgaagcttccagaggaaggagcagggagcaatctttgctattctgcagcttcccctgatgatacccaggcaaacaggtctggggtggacctccagcaaactccagcagacctgcagcagaggggcctgttagaaggaaaactaacaaacaaaaagcaacaacattaacatcaacaaaaagaaggaccatgcaaaaaccccattcgaaggtcaccaacatcaaagatcaaaggtagataaatccacgaagatgaggaaaaaccagcgcaaaaatgctgtaaattccaaaaaccaggatgtctcttctcctccaaagaatcagaactccttgctagcaagggaacaaaaccggatggagaatgagtttgatgaattgacagaagtaggcttcagaaagtgggtaataacaaactcctccaagctaaaggagcaagttctaacccaatgcaaggaagctaagaaccttgaaaaaaaggttacagaaactgctaactagactaaccaatttagagaagaacataaatgacctgatgaagctgaaaacacagcacgaaaacttcatgaggcatacacatgtatcaatagctgaatcgatcaagcggaagaaagcatatcagagattgaagatcaacttaataaaataaagtgtgaagataagattagagaaaaaataatgaaaatgaacaaacaaagcctccaagaaataagagactatgtgaaaagaccaaacctacatttgattggtgtacccaaaagtgacaagaagaatggaacaaagttggaaaacacacttcaagatattatgcaagagaactccccgaacctagcaagacaggccaacattcaacttcaggaaatacagagaatgccacaaagatactcctcctcaagaagagcaaccccaagacacataatcgtcagattcaccaaggttgaaatgaaggaaaaaatgttaagggcagccagagagaaaggtcaggttacccacaaagagaagcccatcagactaatgcagatctctttgcagaaaacctacaagccagaagagaatgggggctaatattcaacattcttaaagaaaagaattttcaacccagaatttcatatccagctgaactaagcttcataagcgaaggagaaataaaatcctttacagacaagcaaatgctgagatattctgtcaccatgaggcctgccttacaagaactcccaaaggaagcactaaatacggaaatgaaaaaccagttccagccactgcaaaaacataccaaaatataaagaccatggacactatgaagaaactgcatcaactaatgggcaaaataaccagataacatcataatgacaggatcaaattcatacataacaatattaaccttaaatgtaaatgggctaaatgctccaattaaaagacacagactggcaaactggataaacagccaagacccatccgtgtgctgtattcaggggacccatctcttgtgcaaagacacacatagactcaaaataaagggatagaggaatatttaccaaacaaatggaaagcaaaaaaaaaaaaaatgcgggggttgcaatcctagtctctgataaaacagactttaaactaacaaagatcaaaaaagacaaagaagggcataacagaatggtaaagggatcaatgcaacaagaagagctaactatcctaaatatatatgcacccaatacaggaggacccagattcataaagcaagttcttagagacctacaaagagacttagacttccacacaataatagggggatactttaacgcccaactggcaatattagacagatcagtgaggcagaaaattaacaaggatattcaggacttgaactcagctctggaccaagtggacctagtagacatatacagaactctccaccccaaatcaacagaatatacattcttctcagcaccacatagcacttattctaaaattgaccacataattggaagtaaaacactcctcagcaaatgcaaaagaacagaaatcgtaacaaacagtctctcagaccacagtgcaatcaaattagaactcaggattaagaaacgcactcaaaaccgcacaactacaaggaagctgcacaacctgctcctgaatgacttctgggtaaataacgaaattaaggcagaagtaaagaagttctttgaaaccaatgggaacaaagacaaaacataacagaatccctgggacacagctaaagcagtgtttagagggaaattcatagcactaactgcccacatgagaaagcaggaaagatctaaaatcaacaccctaattaaaagaactagagaagcaagagcaaacaaattcaaaagctagcagaagacagaaataaccaagagcagagcagaactaaaggagatagagacacgaaaacccttcaaaaaattcaatgaatccaggagctggttttttgaaaagattaataaaatagataagccactagccagactaataaagaagaaaagagagaagaatcaaatagtcacacacaagaaaaagataaagggggtatcaccaatgatcccacagaaatacaaactaccatcagaagatactataagcacctccacaaaaatgaactagaaaatgtagaagaaatgggtaaattccaggacacatacaccctcataagactaaaccaggaagaagttgaatccctgaatagaccaacaacaagttctgaaattgaggcaataattaatagcctaccaaccaacaaaagcccaggaccagatggattcacagctgaattctaccagagatactaagaggagctggtaccattccttctgaaactattccaaacaatagaaagagagggactcctccctaactcattttatgaggccagcatcatcctgataacaaaacctggcagagacaaaacaaaaaaaagaaaatttcaggccaatatccctgatgaacatcaatgtgataatcctcaataaaatgctggcaaactgaatccagcagcatatcaaaaagtgtatccaccatgatcaagtcggcttcatctctgggatgcaaggctagttcaatgcaaatcaataaatgtaatccatacacaaatcaataaacgtaatccatcacataagcagaaccaatgacacaaaccacgattatctcaatagatgcagaaaaggcctttgataaaattcaataccccttcatgctaaaaacacttaataaactaggtattaactgaacatatctcaaaataataaaagctatttatgacaaacccacagccaatatcatattgaatgggcaaaagctgaaagcattccttttgaaaactggcacaagacaaggatgccctctctcaccactcctattcaatatagtattggaagttctggccagggcaatcaggaaagagaaagaaataaagcgtattcaaataggaagagaagaagtcaaattgtctctgtttgcagatgacataattgtatatttagaaaaccccacagtctcagcccaaaaactccttaaactgataagcaatttcagcaaagtctcaggatacaaaatcaatgtgcaaaaaatcacaagcattcctatacaccaataatagagagccaaatcatgagtgaactcccattcacaattgctgcaaagagaattaaatagctaggaatacaacttacaagggatgtgaaggagctcttcaaggagaactacaaaccactgctcaatgaaataagagaggatacaaacaaatggaaaaacattccatgctcgtggataggaagaatcaatactgtgaaaatggccatactgctcaaagtaatttttagattcaatgctattcccatcaagctaccattgactttcttcacagaattagaaaaaaacactgtaaatttcatatggaaacaaaaagagcccatatagccaagaaaatcctaagcaaaaagaacaaagctggaggcatccagctgacttcaaactacactatcaggctacagtaaccaaaacagcatggtactggtaccaaaacagatatatagaccaatggaacagaacagaggcctcagaaataacaccacacatctataactaactgatctttgacaaacctgacaaaaacaagcaatagggaaaggattccctatttaataaatggtgttgggaaaacaggctagccatatgcagaaaactgaaagtggaccccttccttacaccttatacaaaaattaactcaagatggattaaagacttaaacgtaagacctaaaaccataaaaaccctagaagaaaacctaggcaataccattcaggacactggcatgggcaaagacttcatgattaaaacaccaaaagcaacggcaacaaaagccaaaattgacaaataagatctataaactaaagagcttctgcagagcaaaagaaagtaccagcatagtgaacaggcaacctagagactgggagaaagtttttgcaatctatccatctgacaaagggctaatatcctgaatctacaaggaaattcaacaaatttacaagaaaaaaacaaacaactccatcaaaaagtaggtgaaggatatgaacaggcacttctcaaaagaagacatttatgtggccaaaaaacatatgaaaaaaagctcatcatcactggtcattacagaaatgcaaatcaaaactacaatgagataccatctcacaccaggtagaatagcgattattaaaaagtcaggaaacaacagatgctggagtggatgtggagaaataggaatgcttttacactgttggtgggagtgtaaattatttcaaccattatggaagaggtgattcctcaaggatctagaaccagaaatatcatttgacccagaaatcccattaccgggtatatactcaaaggattataaatcattctactctaaagacatgcccacgtatatttattgcagcactattcacaatagcaaagacttggaatcaacccaaatgcccatcaatgttagactggataaagaaaatgtggcacatatataccatggaatactatgtagctattaaaaatgtgagttcatgtcctttgcagggacccggatgaagttggaaaccatcattctcagtaaactaacacaggaacagaaaaccaaacaccacatattctcactcataagtgggaattgaacaatgagaacacatggacacagggagggtaacatcacacactgggtcctgttgggggctggggggctaggggaggggtagcattaggagaaatacctaatgtagatgacgggttgatgagtgagacaaatgaccatggcacgtgtatacctatgtaacaaacctgcacgttccgcacatgtatcccataacttaaagtataacaattaaaaaaaaggaaaaaagctagtagaaaaaaaaagtgaataattaaatgaacctggagttgaggtggtctttctaagcactaaaggcagaaataatgaagaaaaagatggattttgttcattaaaaaatattcagaaggatttactttttttcaaaaaaaaaataaaacttaaaaaaacaaaaaaggaagctacagtaataaaaaaatttgtttgcaatcaaacacaactcactaagcattgataatcagaacagataaaaagctccaaattaaaagaccaatttggtgataaaaaatggtcagaattagagtaaaaagcggtatttttaacagcgctatagaagacctataaacttgtcaaaaatgttctaattaaataaccaaaacatgatgtcaagtagaaattctcattcgcatgtggtaggtgcactatttctgaagaacaattgcataatatgtataagacttaaaaatggatatattcctgtcccttgatcaatacttttagggttaagaatttatcctcaggaaataattatgaatgtatgatatggtttaatatattcaccatagcgttatctataataatgaaaatggtaataatttaaatggacatgaatagagaaatgagaaaataaaaaaattaagaatgaaatactatgcatatctctaatatgctatataaaaacaagtataggtaaagaaaaatgccaaagatgtaagtttttaaaagaaggtcaataaatactagttacaacaaaatttatttttaaatatatgcttttgcatgtgcacatcgaaatgtgctcaaaaaaatgaaaaaaaatagcattgtttgattataggtgatttttgctcctgtttttttgtattacactaggcaaatttcattcaaatagcttctattacttatgttactaatttaaaaagtaatgattttcaaagtatactgcacgaggatgataatatgtccttgaaaaacttaaatttaacaacaataaagtttggtgcctttgttttgcattcaaccacaacacaccgatgacttgcaatgctcatttccctcatacattcctttcttcacttcctttacactcacactgctcatggcatgatcacgcttttcatgagcttttttctaaactgagaatagtctttccagtgtctactatcttaactttctcccagctgtcatctccacagagcattcaaagtaagcaggagttgtgtcaccccacaacctctcagcaccttctcctcaaggcccacagcaaacgtgtagagctgtagagggtgtcaaactgatacttgtggctttatataaacatcagtcacagtattgatcatttatattcagcacttcccactagtatactcgcttctttctcaggaaagagatttaggaaaacagaatgccttgttaaaagaaccactcatgttccattcaattctttctctactgcagaagccagaaccagcaaatcaactttctaatctctgtgatttcaaagtacagggttaaagaaaactcttgtattgattttttaaaattctattcctaagttctttacatctgaaagtttgcaatagaaagattacttattggttttaaaatgttattaaagaagaattaaactcagcacaattctttgtaaacactctgtaaatatgtgtcattgattttaaaggtggtgaattaggcttttaagtactatataaaaataatacctataaaggccttgatgatccatgaatgtaatgcttttggaatcaggataaaaatatcttattaaaagagctgttttacaaataaccccattaaaaagtgggcaaataaaatgaacagacacttcaaaaaggacatactagcagccaacaacacacgaaaaaatgctcaacatcactaacattagagaaatgcaaattgaaaccacaatgagataccatctcacaccatttagaatagctattattaaaaagtcaaaaaataacagatgttgacaaggttgcagagaaaaaggaacacttttatactgttggtgggaatgtaaattagttcagcctctgtggaaagcagtttagaaatttctcaaagaacttcaaacagaattctgattactgacccagaaatctgattactgggtatataggcaaaggaaaataaactgttctaccaaaaagacacatgcactcatatgttcatcagcactattcacaagagcaaggacatgtcatcaacctaggtgcccatcaatggtggattggataaagaaaatgtgatacatatacaccatggagtaccatacaaccataaaaaagaatgaaatcatgtcctttgcagcaacatggttgcagctggaggccattatcctaagtgaattaatgcaggaatgggaaaccaattaccacgttctcgcttacaagtgggggctaaacattgggtacgcaaggccataaagaagggaacgataaacactggggactagtagaggggcgagaaacagagggaggcatgagctgaaaaactacctagtgggtactatgctcactacctgggtgatgggatcattcataccccaaacctcagcattacacaatatatccatgtaacaaacctatatgtgtaccccttaatctaaaagtagaaattataaagaaaataaaatataatcattatttttaaaatattttttcttaggacagagaagtggaaaaacaatgcaaaaaagaaaaggctagatttaatataaaatggagggacatggtatccaaccaggtcgcccgaacaaatgccatgttacgctggcatcatgctggtgtttcatctgaactgcaacttactttagcccaggaaatttctgtatccaagtcaccaagcagaccttctgaagtggacttctgtaccaattcagtttcagtagcagaaagccattcagagagagaagcagcctctttcttcattttccgggccaactgtgatgctctttccagatcctgttttccttctgtcacctgagacggagagaggcagggagagactgagactgagatgggaatgaacataaatgagaatgaatcagaatgttaactaaagatccaaactgattcatatataacccccaagacatacataacctttgtcttagcaccttagaatcctctaagcttgcatttctgcaaggaggcaatatgctgtagtggttaagtgccaggcaatcctgggttttcatcttagctctatcattaatttcctaagtgatactggcagaggtatagccctcaaaagattggtatgaggctgggcacagtggctcatgtctataatcccagcactttgggaggccgaggcaggcaaatcttttgagtccaagagtttaagaccagcctgggaaacatgacctcattttctacaaaatgaaagacctcattttgtaaaaaatacaaaaaattagccagtatggtggtgcgtgctcgtagttccagctggtcagtaggctgaggtgggagaatcgcttgagccctggaggctggggctgcagtgagccgtgatcctgccactgcactccagcctgggcaacagagcaagaccccgtctcaaaaaaaaaaaagattgttatgtgtattaagcgagaaaaacacacataaaagggcagaaataaagttgaaaaatcactagtatctattataattttgaacataagatatcttagaatcctctccatgaaggaaaaatacggtattatagtaacttgaggggaaaatagcaccattttcacaattatatgttttataattaaccactttaacttaaaatgcagtacacgactatacaaaccaaaccttattattattttgctctcattgttgttgacagaaaacaaatgaacttaactaacatttaccaagctcttaatacagcttccgtgttgtgctaaggaatcttacacacgtatgcaataaaattcacaaagcctctttctactttatggataatgaaaatgaaacttaaagaggttaaggccaaggccagggtggtacaatctttggattgagccatgccattctggcttctaccaccatcactcccagacattgcccttgctaagttcaataatgaccccaatggcaactgatctaattaatatgtttatgtggacatcatatttaactttcaaaatatccaaaacaggtaactgcactctgtcaaaataccatcttcccctagctttccagacctagtactcaactgtgtccctaccacttcttgctacttacattagtttcttttgcaagctcatcttcctgagatttcttactaaatgatgtaattcttaagacttggttgagggccctcttctttcactatatcctgttcctagacaatctatcatccctgattactttaattatgacctctatgcagatgactcataaaatccacctcttcagtccagatatattctccagacctgaataatcatgtgagtacccgacatttccaattaacattctcaaaggtacttaaaatgtcaacatgtccaatacatacctgtgatttctgcatgcttctacctttttttttttttgagacagagttttcactcttgttgcccaggctggagtgcagtggcacaatcttgactcactgcaacctcagcctcccaggttcaagtgattctcctgcctcagcctcccgagtagctgggattacaggcacatactaccacactcagctaattttttttttttttttttgagtagagacgggtttttgccatgttgaccaggctggtctcaaactcctgacctcaggtgatccaccaccttggcctcccaacgtgcaaagattacaggcataagcgaccgcacccggtcctctatcttttcttacagcacccatctcaatggccacaccatccacatcatcaagccagaaacccaggggtcatccttcatctctcctcctggaccaagtcctgttgatttcacttcctacatatgtctgaaatcaattcactcactccatctccactctccatcctagttcaaggtacgaccatctctcaccaagtgtacaatgacttcgaaaccagtctcctcacatccactccagcctccctccaattcctcttccaaaatgcagtgagtaatcctttaaaagacatatctgagtatgtaatttgcctactaaaacctgtgcagtaactgcttaagacacagattttaatctgtaacacaaactctatgacattggcaggattttgtctaatcctatctccctagcaccatgttcctcacactggctctctctgctctagccacataaatgtaccacactgcctcctgccttagagcttttatatatactgttttatcagtctagaaatctcctcgtttcacccaggttactcctacccagacttcagatctcggcttatgcatcacctcctcagggaagccttcctaacacaagactgggtgaaacccccctttacctatactcttaaagaaccatgtacattcttcataactcttcagactgataatgtgacatcatctcatgtaactactcaatgtttttctctttcactaccctaagttccattagacaacgagataatttatatctttcctcatcactgtctccttgtataattcctgacacagagtaaaatctcgattgagtgaaactttaaatgataaaattaattaatactaaaattatagtcacaattggagaattagtgcaaaaaccagcaataccattccattcataaaatgcccagtcagtgaataaatataataatatttaacgaataaccagctgtataattccaaaaagaagctctaaggtgtgtgttccagacatgtaatacatcaaaatgtatcacatcaacaatctaagcttgcagaagtgagatcaaaatcacccagaaaaagtataaactggtcgttctgatttcaactgaaaacaaaatttcagctatttttctctgggcttatatagaaacttcaatattacctcaactggaagtagttaatatttcctaactgaaggaggatccaaaatactatcaaacatgggttttcaatattacctattaaggtttcacacttccacacattctttgctctcctggtttcagggcaaaaattcattcactcacagtaaatgctcaacaactcctgcatggattcactaaaatgcccaaattagagatatttcttgccaggatttcaaatcctggtagattaatgtgaacttcttgccactggttatttactagagccctgatgttttaacatttctcggtagactgttcaatttagaaatctaaggaccaacaacttgagtttttacagggattattatttcccatttttcctacatgaaatgggaaaacattaggactaaaaacagaatgtttctcacaattaaaattacacttagaaaaatcttacatgttgcgactagaaaaaagccaacaccggctactgctatccattgaaatttggaattattaacatttattttttcccttgtatttctttgaagtactaatgagaggtgacagcatgctggcagtcctcacagccctcgctcgctctcggcgcctcctctgcctgggctcccactttggcagcacttgaggagctcttcagcccaccgctgcactgtgggaacccctttctgggctggccaaggccagagcccactccctcagcttgcagggaggtgtggagggagaggcgcgagcgggaaccggggctgcgcgccacgcttgtgggccagctggagttccgggtgggcttggcgggccccgcactcggagcagcaggctggccctgccggccccaggcaatgagggacttagcaccgggccagcggctgtggagggtgtactgggtcccccagcagtgccagcccaccggcgctgcgctcaatttctcaccgggccttagctgccttcctgcggggcagggctcgggacctgcagcccgccattcctgagcctcccaccccctccatgggctcctgtgcggccggagcctccctgatgagtgccaccccctgctccacggcgcccactcccattgaccacccaagggctgaggagtgcaagcccacggtgcgggactggaaggcagctccacctgcagcccgggtgcgggatccactgggtgaagccagctggactcctgggtctggtggggacgtggagagtctttatgtctagctcagggattgtaaatacaccaatcggcactctgtatctagctcaaggtttgtaaacacaccaatcagcaccctgtgtctagctcagggtttgtgagtgcaccaatccacactctgtatctagctactctggtggggccttagagaacctttatgtctagctaagggattgtaaatacaccaattggcactctgtatctagctcaaggtttgtaaacacaccaatcagcaccctgtgtctagctcagggtttgtgaatgcaccaatcaacactctgtatctagctactctggtggggccttggagaacctttgtgtccacactctgtatctagctaatctggtggggacatggagaacctttgtgtctagctcagggattgtaaacgcaccaatcagcgccctgtcaaaacagaccactcgtctctaccaatcagcaggatgtgggtagggccagataagagaataaaagcaggctgcgcgagccagcagtggcaacccgctcgggtccccttccacactgtggaagctttgttcttttgctctttgcaataaatcttgctactgctcactctttgggtccacactgcttttatgagctgtaacactcactgcaaaggtctgcagcttcactcctgaagccagcgagaccacaagcccactgggaggaacgaacaactccagatgcgctgccttaagagctgtaacactcactgcaaaggtctgcagcgtcactcctgagccaggaagaccatgaacccaccagaaggaagaaactccaagcacatccgaacatcagaaggaacaaactccagatgcgccaccttaagagctgtaacactcaccacgagggtccacagcttcattcttgaagtcagtgagaccaagaacccaccaattccagacacactaagtctaccacaatgaacatatattacttgtagtatccttagaataatttatggaatatcagtagccattgaaagtataaatattagcctgaattaaatattaaaaataaattttttttaaaaacagtgtctcactctgttcctaggctggagtgtagtggtgtgatctcagctcactgcaacctctgcctctcaggttcaagcagctctcccacctcagcctcccaggtagctaggactacagatactcaccaccatggctaatttttttttggaaatttgttttgtttttggaggttttcatttgtatttttttgtagagacaaggtttcatcatgttgcccaggctggtctcaaacccctgggctcaagccattacctgactcagcctcccaaagacctgggattacaggcgtgagccactgtgcctagccaaaaataaatttctatgtaactatgaatcactgtaatattaccacatacatttaaagaaatataacaattattacaataaattgaaaacacgtatgaatctcataattttcaaacatgcattttccaaaaaatgaaatttaaaaatacatgagagagaacgagagagagagagagattgagagagagagagagagagacagagagatgagctgtggggctgctctcctcacctgtgcgcccaggtcattgtaaagaaccttcagggaagtcagctgctcatccatcccttttgggttgtccgtttgctgtttctggacaatatgtcttcctgttttaatcacagtttccacttcaagtttgacttcactcaaagttttatacagtttctttaaaacaaacaaagaaaaagacaaattacacactgtggtgacaacttgccaactggcatcatgtcagaccacagcttacacagattgacagccaagacctaactatggtgatcaaaggccatcatctttctcagatttggtctgaaggtcgagtcaaatgaaatcaagcttgtaataacttcttcaaatctgacaagaaaataaactaatagagtttatgctcattctttcaaaatctcagacaaatgcttatgaaagtacttgataatataaatatttttcctacataaaatgggaaaacattaggactaaaaacagaatgtttatcacaattaaaattacatttttaaaaaatcttgcatgttatgactaaaacaagccaacactggctactgctgtctgttggatttggaattattaacatttatttctatttctcagaagtactaagtctaccacaatgaacatatataatttgtatgataaaaaatacaaaactcgatatatcaagatgtatataactataagtaaacagatttctgatgcaaatcaaaaccacaataagatactatctcacaccagtctgaatgaccattattaaaaagtcaaaaaacaacagatgctggcaaggctgcagagaaaagggaacaccatacactgttggtaggattgtaaatcagttcagcccctagggaaagcagtttggaaatatctcaaagaactaaacatagaattattattcaacccagaaatcctattactgggtatataagtaaaggaggataatcgttctaccaaaaggacacatgcactcccgtgtttatcacaccactacacacaatagcaaagacatgtcatcaatctaggtgcccatcaatgggggaatggataaagaaaacgtggtacaaatacaccacggaacactacacagccataaaaaatgaaatcatgtcctttgcagcagcatgaatgcagctcaaggccattatcctaagtaaattaattcaggaacagaaaaccaaatactaaatgttctcacttataagtgggagttaaacaatgggcacacatgcacataaagatggaaagcaaagacaatgggactccaaaaggagggaaggaggaaaggggcaagagctgaaaaactaccaattgggtactacatttattatttgggtgatgggttcagtcgaagcccaaacctcagcatcatacaatatatccatgtatcaaacgtgcacatgtacttcctgaacctaaaagtcttcaaaaattaaaaataaaaataaatttaaatataaaaaaagaaatcgtagttctgtaggtcaaattcagagctgtcttcttcctagttacctgaaaccaaaaagctttattctaaacagcttctcttgacacctatacatcatcatctcaacatctcataggacgctgtcatgtaacagacccctgaactatgtatgttccatgaagtcaaggacagcactttctctgattaccattatgtcacaataatcaaataaatacttacatacatgcacatatatattaaaatttatcctttgttttgaaaagcacaaagaactgtccctatacctctcctgtcctaaagagtctcatcttaagttctgtgattctcaagcagaacactaattctaagattgtgtccccttagccacattatttttaaatttctattcaattgaattataaagttcaagactaaaaaagtaataaggccttatatatcatttcttctttcctatcttaaggtttaaatttctattgaaatttttattttcctagaaaatggaatttttacgatatccattctaagtatggttcttctagctaattcaaatttatccttgaaaactttgcttattagtcacactctgctgaagccctcctaacttcacatggtgattaagctgtatttcttttgttttggtttttgtcatcatgttatatacatgtctattctagtttccttagctatctctcttatctcttctaatttctttggagggaaagaccacacttcttattttttaacacgttttccatcatcaatccttatgtttagcacactgtagactagtgatcactggacacactaggcatgtacttgctagaccaagccataacagctgctgaaaaagccactggatgtgccaatcacccaaaagcctcaccatacacttgtccaggtgcgtctgtatgacgtcagggtctacgtccttcacatccagaacgtgaagttctgctttcacgccatccagcacacgcttgcagtccagcatgcgctgctcgaagttagctggcttctggaaaagctggaactttgtggacacctctcggagtttcctctgtttgcagaaatgaaaatatgcaattcccatcaggatgattatctctctcatcatgagcataacagatactactaaaaatttgtaccataaagtaccaaaagaaaaaaattcagaaatatgacccaaaataaaaaactcctaatgaatctcagtgagggtacccgatcacctaagtgaactgcatagcccagtgtcaaaaattacaacactcagtgtctcaatctcagaagtaatagatttggataagaaatttagataaagctgacctcactggaattaaaacttcatgttcaaaaagatagttcaggaacctagaactcaaaatgcccttcatcacaagttcagagtgaaagtcaatgtcatatcaaccatgaaagaactaaatgatgctgcatccaattcatgctcggcctgcccacagcatcagccacacgatactgacagaggctctgcattaaagaaaaagtgtatataaagctaacttctaaatctggctcactctcttgtttctcatctcagctatcaaaatcagatttcatatttttccacacatgcaacaatttgtttctgctgccctaggatgcaaccttcaacacatcatcactcccatcccatggtttacatcacaaagaatacaaacggtgcccaagtaatcaattctttctcttttttgaagaaaattcccaacaagttgaaaagtaaaaggaagctcctggccttctttacctgtagcacatccatctgacttcctcctctggcagtcctactctctggggaggtcaggggctgagaacgcatatttcttctcaactcctctagggttagctcatgggctgagatctctgcttggattttctaaaaagagattggaaaggggagaggatgtccttttttttttacttaagtataaaaagagacaatacaaaagttctatatcgttgtgtaatacatgatatcgtattttacataatgttgacctccacagaagctttaataagtttttgtaggccaggtgcggtggcttatgcctgtaatcccaacactttgggaggccgaggcgggtggatcacgacatcaggagttcaagaccagcctggccaagatggtgaaaccccatctctactaaaaatacaaaaattagctgggcacggtggcgggcgcctataatcccagctactcgggaggctgaggcaggagaattgcttgaacctgtggggcagagtttgcagtgagccgagatcgcgccactgcactctagcctgggcaacagagtgagaatccgtctaaaaaataataataatacgtttttgtataataataataatatggcccactgcatggtatgactattgtacatgacgcacctgctaagggctttgcatttgtcgtttctaatgttcacaacttatttataaggaaggaattgtcccaacttcacagctaagaaaactacaatttaaaatatacaggacttttcagccaggcacagtggctcacgcctgtaatcccagcattttgggaggccgaggaaggtggatcacctgaagtcaggagtttgagactagcctggacaatatggcaaaaccccgtctctactaaaaatacaaaaattattgggaggccgaggcaggcagatcacttgaagtcaggagttcaagaccagcctggccaacatggcgaaaccccgtctctactaaaactacaaaaaattagccgggcgtggtggcgcgtgcttgtagtcccagttattcgggaggctgaggcaggagagtcacttgaacccaggaggcggaggttgcagtgagccaagatcgtgccactgcactccagcctgggtgacatagtgggattctgtctcaaataaataaataaaataaaataaaataaaataaaataaactatataagacttttgccagagtctcacatagaaagcaagagaactccaaaacccaaatgctgccctgtaagtaaggtcaatctttcccattgactctcggttttggagagcaggaggggttctcttatagttgaggaggcaattacaaaagctctctttacagctcaaaagccctcaaatgcacggcaatacctgagcttcctgtggaacttggaaagcatctatcctgtcagtcaggtatgtggtgagctgtttgtccagctcccccaagctctcttgcaagacttgaagcatctggtcagtttcccgcagcacctggagttgcttttccaaagaaatctgcttgctctctgcctgcacaaaggagaaattgaatcattagttgcccaacacaaatataaatagcagaatatatatattctggccactaagaaaagaccataaaagctttcatccaagactttagctttctttataaataaataataattactaatgataacagtgaaaatgtcccactaggatcttatgtaccatgcagctgaattactaattattacttctttctatatataatgttgaaatacaaaaatgtaaaggtttcccataagatgcattaaacagaagataaaaatgtgttatttattataattttaaagcatttttaggaatcagcaatgtctgccaattaagaatataaaacataagaaaaatgtctatcaatacacaaacatcagagtctctttttttccaaagcctaaaacaaattctataggtgtacatacatatcaaactactatttacagcacttttgggttaagcttgatgttattcatgggctgaacatcaacagttattatttaatatgtgtttggaagcacctaatattcatacccaaccttcctataaaagaaatgttctttctctaatttgtgatacgaatatgtatgttacaacctggatatgaactaagagactatggctttcacagcagcttatgtgaaatatcatggccctaatatttactaggatagtatgagttgttgttcttatatacagctatcatatgatccttaatgaaaattaaatgtttgtaagtagaagtaatctcaaaaataatttttttaatcatccagttctgtcttagagtgttagatctattcttcctttctgaatatttcaataccctcaatgcccctgttagcattggttaccaactttaaccaacattaaagatttttccaacattaaagctctatgatatggagcttagggccagctccacttcatcaatacctaatcaacacccatgtatgtcccaactcttaccaggtgacttagatcttcatatcggctgttgaaagcctccagtttctcactgattatatcatccaggatccccccatcaatcagagtctggccaagctctcgaatctgggtgcgattatctgccgggtggcgcagaacagattccagagactggaatggagatgggaaaaaaaaataataatgcatttactaaggcaaaaggtatcaaggatccccaaaatgtctatttgttaaacaagtaattatattttctaaaaatctacctaagtaacaggaccaaaagttaagtaaattactaattcacaaaaatatccatcatgggattaaaaaatgcataaaattgagaaattagcacaagtgatatatgatataatttcacaaaaataatttcaactattattaattatgggagggtgaggcaggaggatcacttgagcccaagagttcaaggctgcagtgagctgtcataccactggactccagcctgggcaacagagcgagactatgtctctaaacaataaataaatgaataataaaaagttaaaaataattattaattatatggggaaatgctcatgacacaaagttcaaaggcagagaacagtactatacaagcaaaatgatctcaacttttattaattatattactaaaaataagtagtcattttcctacaatatatgcagaataagaggcattgttttatatacacactttttatatacataaatctaattaaccatatgggctaaatagcattcccagtttacagattggaaaattgaagctcagaaaggttaaattacttgcctacatacacacagtcaaaagaagagctaagattccaacatggctctaaagctttaagactccaaagcctggccaagtgcgatggctcacacctctaatcctagcacattgggaggccgaagcgggtggatcacctgatgtcaggagttcgagcccagcctggccgacatggtaaaaccccatctctactaaaaatacaaaattagctggggtagtggcacacgcctgtgatcccagctactcaggaggctgaggcatgagaattgcttgaactcaggaggtggaggttgcagtgagccaaaatcatgcaattgcactccagcctgggcaacatagcaagattccatctcaaataaaaagataaataagtaaataaaagactccaaagcctttgatccaatatactaccttctagtatgcatacataaaagataataattaggaagaaatctacaaactgttttaaaatgtttatcttagagtttgctttatacttttctttattttccatatttcaagaatatatacgtattcactcttacattaggaaaaaaattaagcttttcatatttttcattcactctgtctctcactctgctatatttgagaagtgacatcttttctctagcagagcatccgtctcctggaatgtaagtgccacattttactcatttctgacctttaatccagttgtccactcagttcccacatggtaccatgacatttttaaaagcctatctacccccttcccttttcttttttgttaagcaaacctaccctctttgcactgtatttcatttaagaaacggttattaagttaacatgtgctacacactgtgctgggaactgaggaataacaaagcatcgggtacatttcttggcctcaaggagttcaaatccaggcttgaagacaagctcctacgacaagatcccatggctcaaccactgtcttaacttctagcatctgaaggtaagagacaggaatcccctataaactgtcagtgctgtgtttagtgagtaaaaataacttgttgatgaaacaagagagcagttgtcctaataacatatggcagagctttgtccagggcctactaaaataaactggaaaaccactagagtgcttcaacatgtctaaaatgtaagatgtcaaacagctaaccacgtcttgaggctgatataatgggtcaccaataatctaaatacacatgattgtataaacacttcaggctatggaagaaaatgcaagtgacattgaaaaccactgaggaagcaaatgcatttgcctgcgtaaagcattacattcctcattgtaatacacgtgtggcctcatcacagcaaagagaaatgccgtggagatcacgggttccaacctccagggcttcgttgacagcatccgtcttctcaggcaggacctctgtgctcttcatccgctcttccaaagtgtttaaccaggtagtttcaagatccaaatagtgaagcagttcaatccaacaagaccagacctcctaaagcatgaaaaattttaaattagacaaaaagccatttcacacatcgtatctctagtactacacattctctttaatcgctaataatttcatttggatgtgagtatacctaggaattcagaactgatggagttgaaacttcaaaaaaataaaataaaatcggccaggcgtggtggctcacgcctgtaatcccagcactttgggaggctgaagcaggcagatcatgaggtcaggagattaagaccatcctggctaacacggtgaaaccctgtctctactaaaaatatatatatatatataaaaatattagccgggtgtggtggcggatgcctgtagtcccagctactctggaggaggcaggagaatggcgtgaacccgggaggcggaggttgcggtgagctgagattgcaccactgcattccagcctgggcaacagagcaagactccatctcaaataaaataaaataaaataatcaacaaaatcatatgagaccagttggtgaagggtggggagcaaagagtgggcaagaggctgcctcactctttaaaataaattccatgatctgatttaaatgtcaaaaatagaactatataattagtaagaaaaacaggagagaaacattatttagtttgttttttaaagaccaagtgcggtggttcacacctgtaatctcagcattttgggaggccaaggcaggtggatcacatgaggtcaggagttcaagaccagcctggccaacatggtgaaaccccatctctactaaaaatacaaaaactagctgggcatggtggcaggcacctgtaatcccagctactcgggaggctgaggcaggagaatcacttgaacctgggaggcagaggttacagtaagcccaggccacgccactgccctccagcctgggtaacaagagtgaaactccatctcaaaaaaaaaaaaaaaaaaaaaaaaaaagtttggtttttgaacaaaatgaaaaaattgctcccaattgtaaatttttaaaaaataatttcatagaaaattgaaatctcctgggccccacccaattccaacttggagctaactgatgtaaaagtttgcaatgtagccttcccaacttttttctaaattcatgaggacatgtcaatataagagagccacattttaccaaaactggagttatactgttcttactgtgttggttttgatcactcattcccctctgaggtttccagagcagggacccaggggttgtgtagtgggtggaaacatttataaatttataatcccttattataagaggaacttatttgagtggtaagtttaggagaaagaactcagctggatgcctcctgggcttgtcgtcttgaatgtactgaatgagtggaggcatcttctggtttacataaatgagtgaaggcacctgccggtccactctccatatgaagtatgcttaccagatcaaggagcagtacatttttctacaaagggccagccagtaaatattttaggttttgggaggacacatttgcttcctatcacagattcttcttggaggggggtatgtgttgtacaacccttgagaaatgtataaactattctcagttaaccaggtatccaaaaccaaactacaagttagatttaaaccctcagccagtccgggtgcagtggctaatgcctttaatcccaggactttggtaggccaaggcaggaggatggcttgagcccaagagttccagaccaacttgggcaacatagcaagacccccatctctacaaaaaaaatttaaaaataattagccaggtgtggcattgcaaggctggagtcatagctactcaggaagcgggggcaggaaggtcacttgagcccaggagtttgaggttacagtgagctgtgatcataccactgcactccagcataggtgacagagcaagaccctgtctcaaacaaaacaaaacaaaatcctcagccataattttccagccactgaattagaataaaagaaaagaggttctagtcccccaatttccacaagcaaaaagcagaccaaaaatctgctcagatgcaagcacaacctcttttcttatgggaaagaaaaaatgactcaaagaagaccacttccaagaagcagacagatcccaaatcaagtagctttcttactaacttgcctcaatgatatatatttatcttagcacaaaattggtttagaacaagaaacgaatgaatttacaaatgaatgaatgatcaaagtaatgaatgaatttaggttaaatattgcagttgccattttttaccatttcaagatttgccacaatacaaatatttgttttacgtcaaattgaatgtaaattaaattgttgtaaattgaaagccttcttaaatcttccaacaagcaataacaaaagtcatactactataaaaacaaacaagcaaaacctcactcttagtttaaaaaaatttcatagactcatctacattttacgtgtaatggccagggagaaaaaaaaaaggtattttatctaagacccagtaaaactgtcacatatttaagttctatttttccttcaggtgactcttgaactttagacaccactcaaaagaaaataattcctctctatgtactcaaccaggcaaaacaaaacaaaagagaggcttgaaatgtgctctgcaatttttggactggaataggccctacagatcatctgttacatgaaaacctggattgcacctataaaaaaagtaaagtttgaatatacaaaatgacttgcccaagaaccttctgataattagggacagattttggtctcctgtttttaacccctctttcatttttatcaaactatttcccaagaactattttttctttataatccagaatttgaaagaaaagagaagttttctccaagatttgaaaatggccaaaacattacagagtttggatctcagaaatacatcactgaaaataataataataataataataataataataacaacaataataataatagcatacctctagcgtgtggcactttcctcgaattctattacaaagaagttggtaattctccagcacaacattcagctcagacgtcaactcctggccaccagagggcaccttggcagctaataacttgatgttgtccttgagaatcttcactctcacctccttctgcaacacatcctcttttgccctctgttccaagaaaggatggatgaacttgaaaaacgtctccctttctcagtaaccaatttcttttctttctttttttttcaagaattaaaccaaagttaaaacatctggatgattctaactgccaaaatagaacattatttaggtaacagtgaatggttctttgtggggttttgtttttgtttttgtttttgagatagagtcttgttcactacaacctctgcctcccagttcaagaaattctcctgcctcagcctcccgagaagctgtgattacaggcacccaccactatgcctacctaattttcatattttttagtcgagatgaggcttcgccatgttggcggggctggtctcaaactcctgacctgaggtgatccacccaccttggcctcccaaagtgctgggattagaggcgtgagccactgcacccagcccagttgagcgtttttgaaataagaatgctaactctgaaatttcactcatgcatccaatgtactcagctcccacaaatgttttcatttcataacagcagtgttaacgtaagttatccaaagtatgtttactgacatgaagtattttcaaagtctgggtccaagatcagaatttaagtgagtgaattttcattatcactggagggctgagcagattacactgtgataaatatattttcacaaaaattgaggtacactatggtagaagtatctttaaaagttctctaaataatttaagctttttaaaaaattatagaacataggcacatgtatccttctgctaattaatagcatttcaatgataaagttagactgagatgatctgatccagaaatagctgtttctcagtgctaagataaacaatctgacattcaggaaaatcaacctatcaggttggtgcaaaagtaattgcagtttatgccattacttttaatggcaataaatacaaataaaacagtctttcactttcccctttacttttctctactacttaatggttttgaacttccttagattgggggaaagtaattaagtgtagtggttttgtaagtcctaatggctgtttgaaagaataaaaataaataaaatgttgcccaatcaaatatttaaatatcatttttctcaaatctcatctatagcaacttttaaaatccacagaactacaatgccaatagtgtaaagaaagacaataaatgagacaattcttaacatggtagcctattttaaaataccttatgtactgagtatttttaaatctttcaaaaagagctacactaaaaaagatgttttagtgaaaaaacaacttccaacaagtctcctgtcatatttactttgattcatgtataataatgtatgaatgtcatataatcccttttttgaaaaaaatcacagatttttgctttagttacacttctaggtaagttaactttgaggtaaaacattagtcactgtgttgcttaagcttacaggaaaaaaaagctttgaaaacaccatctcctttggcttgaacattcaaggacagttgaagctgtgttagaaatttgggaatgatgcccagttcttttattatatataaaaagagagtgttcaagactatcgacagaggagtacaagtttacaggaaatgtatccagtggatccaactaatatgaactccccgatgcattcctaccgctattcctacctgctctaatgaaacgtcagtgttcatatgtgccgtatgtattaactggaagattagtaacaggaaaataagaataaacctcagacaacttgggaggtctcttttgttccccttacaaaaaataactctttgtgaaaatgtttggaaatagtgatgaatgcaattaatgccactggattgtgcacttaaaaattaagctgaccaatgttatatgtatttaccccaattaaaaaaaaatgatcattcttcctcatgcccactaccagaggtttttaagtcattctctgtagcctcccaaaggtctaacttaagagcttgtctcatgggccctcatggactcaactcatgggccaagccaaatatgtggactcctggctttcttcccctgctaaaattagagcagctaccctgttatgtttttttaattcaaaaacctactgtgaaagatgctacatgcacatagtgtttgacagatagacagatgattgatgtgctggttttaaagggaggagggaggcatgaagcctgttggcactggtcgtccccgcctcaccttcatctcttccacagcactctcaagctcttctggtgacttgtactcaaaatcccgctccaaatattcttcctcggcctgggtcatccattcctgcatctctgccaagtctttcttcaggttcgcagctttttcttgactttcagacaacctacttttttgagtagcgatctacaaaggaaaagccattcccccaaataaacaaatgttaatgtgttcaatgtcaagttttagctcttaatatttaaaggcacagtaataactttccacaacgaattgcatgctttaaaattcagataaaatctcatacatctcatgctaacgctgtggaatataagcagtaatgaaaataatcttaagactgggattccacaccacatttggataatactcttatctcgaaatagctattataattttgacaatgcataactgttgactgtaatcccagatgtaggaatctaatctataacagtaaaagcacatatatgaagtaaatttaatgtagcactacttataatggaaaaaagaaaaaagaaagcaaaaacaaaaaatctagaagccagtcagtcttggtggctcacacctgtaatcccagcactttgggaggccacggcagggggatcacctgaggtcaggagtttgagatcagcatggccaacatggcaaaaccccatctctactaaaaatacaaaaactaaccaggcatggtggtgcatgcctgtagtcccagctacttgggaggtagaggcgggagaattgcctgaacctgggtggcagaggttgcagtgagccgagatcgcaccactgcactctaacccagggaacagagcgagactctgtctcaaaaaaaaaaaaaaaaaaaaaacccctagaagcaatcaaaatgtccattttcttctttttaactgcacttcccattaagatttcacttttaaaaagcagggagggagaggctgctattaaagatgtcataagacaccgctctataaaattttggttttgatgtctactatgtttgtatatgccacacagacacaaaaaagttacagtaaaaaatagatagttgtctgattctgattcagtaacttagttaaaaattttggagaagtctagaaatattttcagagcactcctccccataacgacaaactgacttctactgtgagagaaggcgccgttctgcagtcacagtccaacctctacttggcaggttcagcctcatgctcaaattaaacgccacagtagtggccaccctgccagggcctgcttggctgctaggtggatagtaaccaaaggccagcacaggagctggatggttctcacagaagttagagttaagcaagagacagaggctttcccagtccctccctccaaacaggatctccggcataaaaatagacaggaccaaacaagagcttttcttccactgtccccacagggtaaccaaggagctgatgccagcaacactcacaatcccattcccaagcctggctgatcatcaggttaacctggtcagcttttcataaaaatacatgcacacacacagaaagagaaagagagagacagagattcttgggccccatttccagaaaattctctgtatgtgtacttcttgaacactagtcagcaatataattttcacagatccaaaaagaaatgaagaaaataaagacactaccataagcttaacaacaacaaaacaccctcaaaattatctttaattatcctgagaatatatactttctattttttggcattaaaatgttcctttttttcaggatatcatgaatataatagatgaaatagactatctttgtttgttgatttgttttatatgcctgttctttttagcaaaatgaaaatttggcaaaattatgtttgtccaaaactacttcaacatttgtactagtcaatgcaatgcaatagtctggaaatgctctagataattattcacacatgtggttacctccttcctgaggacactttaaatttcccatatatttattcctgtattttgaatcagtaattcacaatgaattatttgtcaccatatgtatgtggatggatggatagatagatagatagatagatagatagatagatagatagagatacaaacttctaattatcaccttccttgatcctcattgccacttccaaaccattttctatttcctcaaaaaccccagttccttaaggcacatgccatcagattatagcacattgagaaaaatttgaatttagctaggataagagatgagagtataacattattagtttcttaagtgtgatcatagtattgtggttttgcagaagaatgccttcatgcttggaaaatcatgctagagtatttaggggtgaagtgtcatgatgttttcaacttactgttcaaaagtaccaaaaaaaaagggtgtgtgcgtgtgtgtgtgtgtgtgtgtgtgtgtgtataaagagaaaggcagagagagagaaagcaaatgtggtaaaacattagcaagtctctgaatggatggatatacagctgttcctttttatcattctttaacttttctttacatttgaacatgttcaaaataagttgggtaaaacaataaacacaaagcaaaatattcagttatgcaaatataaatttttctgatacaaacattagccaaaagcattttattaagaaatacgtactatttacgtgactgtggggtaagcctatatttcatattgacttctatttttcactgctttgtcactcacttcagctatatatagcctcactattattccactaataaaaatcaaagcaattgggaaagaatacctcccagttctactgttcccatatcatttcctcccttccattaccacggagaaaccatatctctagcaacatcttcacttagacggtggatctcatcctcgcataatcacagacttcacttgataaattctcctatctcaatctctttctgcaccatcattttttttctaaagtgaggtcctcttattaatatctctcatttaatatctctcattattaaaaataacaaaaccacctctttggattcccatcaccagcacccacccatttctctgctcccctgaagacagaaatttctcaaagttggttatgcttggtgtcccagctcctcagttcccataccctcctcgaactatccactatgacttttttcccaccagttcattgaccctgctttctcaaggttattaaatgcctccttcttatcaaatttaaagctcgattttctgttttgattggcccctgcaatcctcagcattaggccctgtgaaaagttttctccacctagcatttgggaccccacattccccgttactgatttttcctccttagcttctagcatcaaatttaacccttccagaatggtagtcatcatttcacctacacccacagaagcttctccttcgttattgcagtaaatgacaccacaattcacacaaagtggaagctttgtaaaaatcctgagtcatccttgaccattcactttttcttctatcacacatccaattctttccttaggtctcttctttattttcaaacctaatatttctcatgccctccatcactacttcgttaagcctccctagtgtatgggtccatcctctctctccaagcctgcagtaaccttataagaattctttctgttttcattcctgccttcccagagcaaactattcacatgaaaaccagagagaggccgagtgcaatggcccatgcctgtgatctccacgctttgggaggctgaggcaggaggattgcttgaggtcagcagcatctgaccagactggcatctggtctcaaactgctgacctcaagccatccttttgcctcagcctctaagaaccccatctctacaatttttgttttttttttaagacaggatctggctctttcgcccaggctggagtgcagtggtgcagtctcagctcactgcaacctccatcccctgggctcaagccatcctcccacctcagcctcctaagtagctgggactataggcgcacaccaccatgcccggctaatttttgtattttttatagagataaggttttgccatgttgcccaggctggtctcaaactcctgagctcaggcaatccacccacctcagcctcccaaagtactgggattacaagcatgcaccactgcatctggctcaaaaatatttctaaaattatctaggcatagtggtgaacatctatagttccagctacccaggaggcaggaggactgcttgagcccaggagttcaaggctgcagtaagctaggattgtgccactgcactccagcctgggtgatacaacaagatactgttgctaaaaaaaaggaaacaaaacaaaaagccagagtgaccttaaaagatctatatcacatgtcacttccctgttcaaaaccttccaattgctttctgtgtaatatcatacttgaaataaatcccaagtcctttcctccaaggccatagctaatccatcctctgcctacctctaacctcaaatattcccattctccaactcactaactcctctctgttttattccagctacactgccttcattctttattaaacagaccaagttcattcccaccacagagttttaaagcctgctattctccacgcctgaatgttcttatctgaaccttacaaggctcatctcttactttactcagttctttattcaaacatccccatctcagaaagtccttccctgaccatcctatttgaaataacccacctagccctaactccttgctactcctccatgatattattcattatccatctgcctcactagaatgtaagctccttaagaggagtttcttcttccttgttcaatgctgtacctgcagtgcctagaatgatgcttgacaggtggcaactgattaagaaatatttgctaagtaaataaatggtcccactcaaatgtcttaggggtaaagcaagtgtcataaatgtgtttcaagccagatttaagacaagaatggataagccctgagccaaactggacaatcagcaccctctcttaatttaaaaaatgatgcctttttttttggccccagctcactacccatgctggagttattctagaccatcgtttttcaaactggatgggtcataatacatttagtcagctgagagaagctacagtctacatctcctgaaaaccgtaggtagtaaagttgaaaaactcacctccttgctaagtttctccagttgagtttggtagtcacctagtcttgtctgcacccaagtttttattccagcaactggaccacttcgaagattagtctctatttccttcatgtttttcagagatgattcaattgtttctatttcattaacaaatgcctaaacacataaaagatgcatgttgagttcattactatataagtggatgccataattatagtttgtctgcttatctccctgcaaatattacacaagcagactgcttaagagtcagtacttctaactacttaagaaatattgtgccttaagaaactcatttcacctgggtgcttgatatagccatctgccaaattagactggaaatacttgactctcagaagggaatagccttttaattaatgtagagaagcctgatgatttcaccaaatataaactgcatgcactattactagcaaattcatttcttgttttttgtttttttaacactttaagttctagggtacacgtgcacaacatggagtcattgtatattgcttttcttgtgccacatggtgaggatttaagaaaaacatacttaaatgaatttgatgaacagacacttctcaaattcatttgttaaatatgtttttcttaaatcctcaccatgtggcacaagaaatgcaatatacaatgactcctaatgaaccaaaattgttcttgttctctattctataacctctcaaaattctataaccacgtccagaaataaaaacttgaagaatctgtcattcttttattagctataaagtcataaaagctttatgatgaaagatattttatctagatgtaatgctatgctatattctcacaattttaataatagcagcaaataacatagaaaaagaacaaaatgttatttatgacaagttccccagatcagcagaactcacagagcactggtctaactgcctctgtagacctgcgtcgtctccttgggcagcctgctgtttcattaagaagtctttcacgccatccatccacttctcaatgactgttgaatcggcctaatcgaacatgataacagagggggatattacttcgtgacgttcagcctactacatctcaagatctaccgccactggaacaaaggaactttttaaagctccgatagcatcgctttcatttatgttatttctttttctaaaccttccaaatttgaaaatgattattttcttcattcttgactaaaatcctcaagagatgacaggttagtaaccactctaaaaatttccaaacgctagctctttttgcttaaatgcaagcaatagttatgatttaaaatgcaaattacagggaaaaaatgcatttctaggttttatcagctataaaatattttgctctgatataatttagaacaatttttctctaaagttagtaactcagagcaggaataaacaaatagcacggtagagggaatacaatagatggttctcatttctgcttttggatgcctttttatctgagaactcaagacagtccccgttcagctccaatatttcatccaacatttattaagcacctactatatatataaaatccagctactgtgtatggcgataggggttcaaagacaaatgtgaaagcaaacattttgcaaagagaaagagactttagagagaaggtaacattggaaccaggccttaaagaatgcaaataagggccaggtacggtggctcacgcttgtaatcccagcactttaggaggcccaggctacggatcacgaggtcaagagatcaagaccatcctggccaacaaggtgaaaccccgtctctattaaaaatacaaaaattagctgggggcgtggtggggcacctgtagtcccagctactcggggtggcttaggcaggagaatagcttgaaactgggaagcagaggttgcagtgagccaagatggcaccactacactccagcctggcgacagagcaagactctgtctcaaaaaaaaaaaaaaaatgcaagtaagtagatgcaattttagcttttgagctccaataccaaaatcattgtcatttctttccataggtgggcaactgccatgtttttctctggtcttctactgattacatgttcccaattccttccatgatgtctgtaggacatgatatttaggtattgctcactactctgatcaacacgctctggaaactacatcaatttttaatgtccttaaaatatgccacccagaaccaactattctgatccttataatgtttgaattgatcacaaagatctaactagtttatataaggttatcagagattatctcaaatactttggtgaaatcaagacttgccaagaatgttcatttgtgagcattatttgaactaaatgagagagcatcttcaaatgtgagatgttatcactctgtgtatctaataatctaggcttcctcctccaaaaaaaaaaaaaaagaaaagaaagtagtacttaaaggaaatgagtctgggcaaggcctattattggtatccatgttgattcctggtgaccacgacattctttcctaagcacatataagatctctagtcggttatttatcttacagtttggctaggaactgacatcaaacttactttatatcttctgcttctaaaaactaatgtttcctcttaattaggacattcctccatctccatttttctggtaatttctcacaagattatgacgtaaatgaccctgagatcaagggtaaaaatcccacttgggatgtagatttatgcatctggaggagctctgagtggttttgcttgtggtcctaagttcaggctctaaagcactctcagtaatgactattctatactttgtagttttgaaggccattctctgatgaagatggcaagtaaaaagtgcttatctagctaggtttctctgtgtcttccattaatattataccatcctgtctaagcacttctgcatctcgtttattcttggcacagctttgaaagcctttcagttccattgcacactttccccaagctgcttcctcctctcttctccagcctgtctgacactattcccacaggtccatgctacccttatatattttcagttggttacaggtcacttctgtgtttgctccagcatttcaaggtcttagcatagaaggcttcttgggaagacatgctcaggacgggtagagtggggcatccaaaaaagacagaagtgcaaaaagagagaaagtgtgaatacattcacagagttcataaaatgactttaaaaattctccgtttaacttgtcaccacagattcttgcactgctaatctccattctgcacttttaaagaatgcattactgctgtataactgggaaattcattaactctagtttgaataaggaaaactgatagtctcctcagccaaaattttcaaaatttatatggaagcattatatttcaaggaagttttaaccacaattggctttgacttgagtaagtggccttaactactccagtcactggcatatgaggaagttttatggcctcaacagccttccctcctccctccttcccaccctctctctaatacacgcagacccatcagggcacatgcaattcacatgtatctgttccttctctccctctgacatgagaaaaaaagaaagagaaaagaaacagatccctctccctctccctctccccctccccctccctcgccccctccccctccctctccccctccctctccccctccctcgtctccctctcccctttgcacggtctccctctgatgccgagccaaggctggactgtcctgccgccatctcggctcaatgcaacctccctgcctgattctcctgcctcagcctgccgagtgcctgggatcgcaggtgcgcgccgccacgcctgactggtttttgtattttttggtggagacggggtttcgccgtgttggccgggctggtctccagttcctgaccgagagtgatctgccagcctcggcctcccgaggtaccgggattgcagacggagtctcactcactcagtgctcaatgttgcccaggctggagtgcagtggcgtgatctcggctcgctacaacctccacctcccagccgcctgctttggcctcccaaagtgccgagattgcagcctctgcccggccgccaccccgtctaagaagtgaggagcgtctctgcccggccgcccagtctgggaagtgaggagcgcctcttcccggccgtcatcctgtctaggaagtgaggagcatctctgcctggccgcccatcatctgggatgtggggagcgtctctgccccgccgccctatctgggatgtgaggagcgcctctgcccggccgcgaccccgtctgggaactgaggagcccctccgcccagcagccaccccatctggtaagtgaggagcccctccgcccggcagccaccccatctgggaagtgaggagcgtctccgcccggcagccgccccgtctgggaggtggggggcgcctctgcccggccaccccatctgggaagtggggaacccctctgcccggccgccaccccgtctgggaggtgtacccaacagctcattgagaacgggccatgatgacgatggcagttttgtggaatagaagggggggaagtgtggggaaaagaaggagagatcggattgttgctgtgtttgtgtggaaggaagtggacataggagactccattttgttctgtactaagaaaaattattctgccttgggatgctgttggtctataaccttgcccccaaccccgtgctctctggaacatgtgctgtgtccactaagggttaaatggattaagggcggtgcaagatgtgctttgttaaacagatgcttgaaggcagcatgctcgttaagagtcatcaccactccctaatctcaagtacccagggacacaaacactgcggaaggcggcagggccctctgcctaggaaaaccagagacctttgttcacatgtttatctgctgaccttccctccactattgtcctatgaccctgccaaatccccctctccgagaaacacccaaaaatgatcaataaatactaaaaaaaaaaaggaaagaaacagacagagaagccatgtaggccaatggatcatcccaaaagtgacaaagggaatagaagggaacctgtaaagccacactataatattttcactactaaaaatcctgcatgtaattctaaccacactgtgctctaaaagagacagtgtgcccatataaagaaatgctgaggtctgactaccaagctcagcacctgcctagccatggggccttgagaaactaatttttctttgagccttaataactcattgtgaaactggaatcataacaactatcttgtctggttgttctgaaaaacagagactcccacatagaagaatgcactaaatggtagcgattattatactaagatctacaaaaccaactgctttattatgaccaagattgagaccataaaagagttaccacatccaagttttggtgtttatgtcccatcagaggcaccacaggaatgaacagccaggatgagcatgtgtttgcataagcatgggtttcacttttttaattgctgccaacattaatgcttgttctatcctgtaactgtttcaaagtaactgtttcaaatggctactgcttatatatctggctagacctggccaaatacagctcatgggaaggaattggtacagaaggaaaggcccatcctttagaagtgcctggcagcagcagattcactcggcgtttccacctcgtggcacaccgcgcgggaagggttatcaagtcccaaagatcaatgctacctaccacctgtacctgtatgggtgaaggcagaagacagggagctctactctgccttccactctccctatcttatctcccctttccctgagcaaaatattgtcacaatcaacctgtagcagatgtttcctgtgcttttcaaacataccaaaagtctgctcatctttaagtcaattccaccacaacaaagaggttgattacaaagatcgtcaaagagctcacatgaaaatagtgtttctctgtccatttaaaaattactcagctgatgcacttacaagcttctaatctacaataatgacgatttttttcttcacctccatctgcttacagaacacacgcatgcacacacacacacacacacacacatttctttaagggacttcagttcttacaaaccaaaacgaaatataaaaactgttagtaaatttctaaagcaaatgtcattatttcacatgcaaaaaaaaataaactaagtactaatctggggcagccatttctcatacctatttttactcacaaatattcaaatgaatataaaattacgaatacagtattttttgaaaatcaaaatatcaaatattctagtatggaagggtcaaagtctacatggaccatcactgctcaaaagcaatgatttctaagcatttcagatgggcaacaacctgctatgggatcacggacaaggaacagcaaggtcattaaaacaattcctctgaccctatctcacctcatttcccatcccccatcctgtgacctaaggatggaggtaatttaaagcttggtaaatctggatttaagacagtaagattgcaaggtacacaactacctctggagacttgattacagctaaattcttggcattttcttttgctcctcccccatctgtcggaatgtccacagctttttaagacatagaccagaaaaaaaaaaaaatagtgtgaagccagaattaaaacagtaatttaaggcagccaggttcctattttgtttcactttataatactcaataacctcaaaaacacaaccttgaaaatgtgctctctcacttagtagggaagacaaacaatgacactgctactacacttattaaaaactaataaggttcttaaatctaaggaagggaatatatgaatattcccttcagtaaagtaaaatgtgttcacaaatgagaaaaaaaactcaaacccttatgagataattatatcaattatatgttacctaagaagggttaaatcatccgtactaatattactcttagaaagtattgcatttttaccctaaaatgctttccaaagtactctcaaaacctggttctgcctgttggagctccagcacgcccccctccagattccgggtcagagcaagtccattcatgtgtgcctttgactgttcaacagttgaaggaagaggcatgactacacaggtgtcctgccacttaggataaccaggctttagactgtataaatccactctcactagagaggccggacacatcaattacattcacatctgctaacttgctctatgcctgacagggatccaaccctcaaagagctcatgcctcgtgggaagagagacacacatttctcaccataataaaagacggcctgagatgggtcattgtgaaggtgtaaatgacacacagtcgaatcacagaggagggaacgattatctagctatgggtgtagtgatgagctgggctgaagacagatgagcagacaggaggaggagggatgtgaattcctagcaagtacatgacattttcagagaaaggcaatagtctaggatggtctttggtgacccaccgtattctccccacctgactcagctcacagtggagatgcagggagggcttcagggcaagaaagggacattttgtattaatggcacttggtattaatttgtattaatggtgaagacaaccagatcctttcagaagtacaactctggtattggtgtgaaagatgaattccagagagaagagacaggaagtgggaatcagatttaaagggtaatgaaattttcagggaaagagattgcatgagagcctgaacccagaaggaagggcctggaggaggagcctgaaaaggcaggagcgctggaaaatagaagacagttttgtgtgtgccttggggacatctttcatttcccagttatacatagggcaggagctcttgaataaggaaaaggaagtacgtaatatgaaatactttgcagcccctaaatccaaagatattactactggtgaggagagatatataagcagcctcttaggattttataatatgttatccccatgattcacatgaaaatccagtcagtaaaatcaataatggaaaaaagaaatacccatttcatgtattttcaaatgttttgtcacctggaaggggtatagtagtttgtaaaaagtaacaatgaatattttacctcgtaagtacaggaatggaggttattgctttggcatggcacaaataaaaagaacttaagaatgtatttgggcataacacaatgaataaaaatatgtaggtccaatctcaacatgcacaaaaggaaccagctatggagacaaaggaaatgcaggcaaatgaggaaaaacactgcaatgccaacaaataacagaaaactgaaattcgcacacaactaacagcctcttacaaatattgaaggatagcagaaaaaagcaagcacatggccatgaaaacactttcaaagtttaaatgtgctgtatcaatgaaagatgttattaagtagtgggattcacttccaaactctatctggactatggatttaaatgtccttcacagagttccaatatcatttctttccacagtgtgggggaaaatgattggaattagcaatatttgtcaattgttcttgtctaacttgtatgtacaaggatccactgttaatattagctgcccccaggaaagaaaatggtattggggaagaaaaggaactctaaatgttcactgtaagtatttctgtggtattcaatttcttcacaatgtgtaggcttcaagtactactcatgtaatgaaaaatgcattttaaaaataaacgagttaactattttgttcctacaaaacattattatgaattggcattgaatctaaaacctactgtgcttcatgccttaaagacaaaaataattaaatgcctaaaaaatcatatatcaggtcattgaaaaagggaaaacaatgataatctgcaaataaatatttattataattatctaataatttgagggtgtggaatttaaagttttcccaagtaaatcatgagtagttaagtaaccagcaattcctacaaagcaaaaaaaaggagttttcttttgaatttaagataaaacatgtatttcaatgaagaagttatacaattaagaaatatagacactgtattccttaaccacaatcttgcagttagtacacaagaagcaaataaaaaaagtactggacattacaaatctgctactgtaacaacaaacacttacatatccagacacacacccttgatgttggatatttttaatggaaataaatatttccaagtgaccacttttagtgcctggatttgctacattaatagcaacaacccaccaaagcttaaagctggattactataaccacaggactcttttgtattttgggagaatatttattctctttaagctccatattgaaatagtagcatacatttagctaaccctaagatatacttttaagagtcaaaagaagactaactctgaggttaatctccatttatactttggacttaaatctgaaaacaaagggatgatcttttgaaaagatggggaatgtttcatctggcattgctaaactttggcactagtgacatttggagccagatgattattttgttgtgaggctgtcctgtacatggtgggatgtttagctgcatccctggcctctacccactggaagtcttctcccacagttctgacaacagaaatgtttccagaaattaacaagtatcctctggagggtaaaatcaccccggttgagaatcactgataatacaatgctgggaccataaccaaaaactttagaattatagaaaaggccaatgctcattttgaaagccgggaacaattgcaactcataatacacaacgagaagtgggaccatcgcaaagtaaaatgggccaggcatggtggctcatgtctgtaatcctagcattttgggaggccgaggagggtggatcacctgaggtcaggagtttgagaccagcctggccaacatggtaaaacctcatctctactaaaaataaaaccttagccgggcatagtggcatgtgcctgtagtcccagttaatcaggaggctgaggcaggagaactgcttgaacccgggaggctgaagttgcagtaagccaagattgcaccatggcactccagcctggggcaacagagcaagactccatctcaaaaaaaaaaaagtaaatgagtcaaaaacactaagccacacaaaacacatttctctccataattactggtttatttgaatgagatctccatctagaactgcacttacacctagagaaaaactacctcctgtcactaccatcacacacagctacccacacacacacacaacccctccatctgtatcttctgctgatcattcattggaactacccattagttcctgagtcaaagaacgcccctccaaattcagtggtccactcagagaatctggctggatcccttccacactaatctgtgaggtcttccagctcctcttctaccacgtgttctctgactttgattttcaaaacatacattttcattaatttttgtcttcgctttcaatcttttcactttttgggggcaatattccttatgcaaatttgcttagcatctaaatccaaatctatatatatttagatctagatccaaatatatgtagatataatatttagatgtagatccaaatatatgtagatatatatattgtatctacatatatttggatctacatctaaatatatatagattcggatttagattctctctatataaataaagatgtatatgcatatatacagagacatctccctatatatatagatatatatctacacatatttggatttagcttccaagagaatctatctatctatatatatagatagatagatatacagagatatatccaaatctaaatctcctattgctaatttcatttcattcgttgaaaaatattgattggatgccttctctgtgccaggcattgctctagttatgagtacatcttggcatacatcggtgaataagaaatttaaaaaagacaaagatccctgactgatggggaaaaaaaaaaaaaaagaccaaggtaaggagtcactggaggataggaagccttgcagggagagagtgtgattggttcattctccacccagaactttcctattaaaataccaggtgacctggaaactctgcttctccatctttctcacaggcagaatgttaaaatctgacactgacttctattgacattgactctctccttatacatcctcacatttatcctttcctcttaaactttatcactgctgcatctgtcaacattttcaggtgtagtgaaggatcctgtttctgaattttcatgtccctggaacgatttgccttcccactctgacactgtcaatggcctatctctgacttttgacttcaaatgtcaaaaacctgcaaaaagtagtttcatgtattcagcaatttactactacctgggctatttctaccaccccaaccaagttactactataatctaatcaacagtctgtatttcacacaggccctccatgcctgaaacattattttgaccatttttaagcaattttctcttatcttcaaggtccagtttactctacttttgactttgcttccaggcaaaaggaaataaatgtgctctctagcacattaaaagtacatctttgataagtcccaacttaaatacataataaatggggatctagaaagaatgtaaaatatttaaataataaatacgtgaatcttataagataattactatttaccccgtaataaacttaaactcccagtggcctctggatttacctcaaaagctctgagtgtgagagcaatttcctcaagcaaatgtagatctttggaaaccaagacctttagcttgttccactttccttgcacatcatcaaattcttgcttatataatttttctacatcaggatgaacatttttctccagagcctttgtttcttctgcaagtttatgtaatgcaggtttctgattctcaaggatttcatcaagggtctggaaaaagttttaaaagattaaaaatatgcacaaaaatgtgtctgcacagatatagtaaaatgggctatataaagtcaaaagtcactttaaaatgcattagaaagcatttttatctaaaaagaacagtgggtgggagtgtgaattagttcaaccactgtggaagacagtgtggtgattcctcaaagacctaaaaccagaaatgccatttgacccagcaatctcactgggtatatacccaaaggaatacaaatcattctgttataaagatatatgcacactatgttcattgcagcacaattcacaatagcaaggacaaggaatcaacccaaatgcccatcaatgatagactacttaaagaaaatgtggtacatatcaaccatggaatactatgcagccataaaaaggaacaagatcatgtcctttgcaggtatatggatggagctggaagccattatcctcggcaaactaattcagaaacaacaaaaaaaaataccgcatattctcacttataagtgggagctgaataatgagaacatacggacacatggtggggaaaaacacacactggggtctgttggagggtggggcatggtgggagggaaagcatcaggaagaagagctaatggatgctgggcttaatacgtagtgcagcaaactaccatgacacacgtttacccatttaacaaacctgcacatcctgcacaagtacccctgaacttaaaataaaagttggaaatcaaaaaacaaaacaaaacaaaacatgaaaaactcatgaaaaaaataggcataatcataaaaattaaagctttttcttcatgagttgtgtgtgggcaatacagtgtattctcaaccctaaaaaccaagggaacagcaaacccagtgtgggccaagtgtgcagtgctcaatggctgctctccttttcatctaatagcacagagccataaggctactcaactaaatgacctcggaaacattcctattcgatgcagaaaaaagtatacatcaacacgtcaactgatagtcctcatttcataaagatattttagcagattttatgaacaggttgagaattttaagctaatcacagcagaaggagaaaatatgcttttcttctatgaaaaaatttttaataactgtactttcttttatgtgaggtcaaactaaccctcaaatcataaacacatttttgcaccaatgatgaacaaaactgaccaactttttttttaatctctgaaaaaacatttcaaaatatgtaagaggagatattagaagaagcgctagagttctaacatggaagatatatgttacctttttttcttgcagggccttctccaccttggcaagatcattaaggacattcagagacacctgggccttattttctgaatcatttagcacatctttcagtgttttcaatgtttccagatatgcatgtccaggttggcccttcagttctgtttatttaaaaatatttagtttgaaaaaatcatattaggaaccaatattattacatagaccattatcctaaatgaattccaatacatggcaaaggagaccccatgattaaaatgtaaaagggtctctgttaattaacaacatagatcattccattggcatttctgagagtcagacagtgacttcattcctgcggatgttgacgtttgaaatattaactaacccactataatttttcttcatttcttcatgatgaaatgtctctctgaagatggaacaacaatgtcccttttgttccatataatctcctcttccttaacagctacacaaagaataaaagaaaacaaagatcccttcaaccagtcttgctgtaagctccaccgtgtagacaaacccaggtccagagtggaggagattatatggaaatactgccaccatgctgcccaggtaccctgagaaataatgactgaacagccagctggaacagtgtctacctcagtcactaatgtaaaaatatcacagaagtaacacttgcgtggaaaggaagtgagttctcttgaagcacaaagaggtgaaaccaactagcagcaaaagttaaactgcctactgatccttgtcaaaagtgaaagcacagcttgtaccaataagtggagaaagaggtaccctcaaagacatatttcacataactgaattcaaggaacaaagacatgctgtccagatgcactttcagaagaaaggcaatacgacacatttgcctagcatgcacacatacagacacttccagtcatcacacaatctacaattgctgaagttaggctgggttacatgtggagcatttcacacaatgctcaatgcatttcacaaaataatgcacaatgcaacacagttcctaactcaaatggcagctaggaagtaaatagtgtaacgtaggagggatgagctttcaaaatctttaacagtgaaccttccaaaaccaagtgtattccaaaagtaagaactctaaaatttttctgaatctgacagtggaatatgatttcttttaaaagacagtatgagactgccaaaactttaactattttgaggaaacagaagtaagggatcattcattttgatcctcctagcaatgatattaagtggcctcctcaaccaaaggaagaaattgcacctgtttctcaaaaaaaaaaaaaaaaaaaatctttaaaaatcattatatccaggtcaggtacaatggctgacacctgttatccctggtattttgggaggctaacatctgttattttgcctaacacctgttattttgggaggctgttatatcacctgttataatggcttacacctgttattttgggaggctgaggtgggaagatcacttgagcccaggagttctagaccagcgtgggcaacatagctagaccctggctctactaaaaataaaaaaccagccaggcatggtggtgcatgcctgtagtcccagctactcagtaggctgaggcagaaggaccactgaaacccaggaggtcaagactgcagctatgattgcaccactgctctccagcctgggtgacagagtgagatcctgtagctacaaaaaaaaaaattattattatatcctactgacacaattttagagaatgtgaaacttgcttgtatgtttacaaaaaggtgtgaatctggaaaagaatctgaatacagaagactttaagactttgaacaatacaggcacaaaggaaaatggagaaggttggtgcaaagcaagcaagtgtactcaagttctaaatgttgggagtcatgtttacattaaggcaaactgagacaggagattttaaaattgttgggtttaccattctctagatgttgttgacgatcctctacagcctcttgtacagcttggtagcggcccagaaagctatcgaagccccgctggacaaaatctggggcagaaggctgagacatcagggccgagcagcttgcacgagccatttcaattttggggtgaaggccaagaagatttgtcaattcccgctaaggaagagaaaatacggtcacacaactcactgaagatgaacatcctcacaggaagttaatcagggcagcattaacttaaagttcatgatacgagaagccctccttaactctggaactgcacatagaattcctccactttccagaccgttggctccttacctgacaggaatccttcaagcttggcaaggactgccgggaagattcagaaatggaagtgtgttttacccactcctcctttgtcttgatgaccttttcaagctcatcaagctgcttgaaataagcatttatatcttcctgtagctgaatctttctttctagatcttccaaatgttgagatacattcttccattctgatgaaaccttctccagaacattttttatttcttcagtaggaaggccttctatgcagacatgaaaaacaagcaaacagtctatatattacaaaatgtgtcttgaatttattctgaacattctaacactcagaatagtgaggcaatgtcacacataatgatcactttcttaagtcccttttaatacaacaacaaaaatttataatgatgcacttaaaaataatgatgtttatttcaattccttgaacaaagaagaaagacattttaaaataacgattcaggcacatcagtagaacttcagccactgccttttctagataatatatgtttccatccatgccatgcttctactctgctagtttatcacctgaaccagtgaaataagatcaactaccttgatctgtctaggcccgacttcagaaagaagaccctttgtcctaagaaaaaaagaaagctggctagaaaaactaggaggcagctcaggtcttggtgaccaaagcacagtgtcatataaattaaaaaatgaatggcgaggatgccttatgctgggaagcaacctggtgagtgcaggaatattaagccagcagccaggctctagaagcatcagcaagcccactggagaccttgcacataaataagcaaataccaaaagactgaggcagcaataagatgatctactttagaaacacatcagggaaaacaatgccaccatttttattactgaaatcttatcattttatttgtccgatatttttgaaaagtagagaatgttcctaaaaataataaagtcatatataataataggttttatcatagtccttcccttaatctaaaataccttcaaatcctctaaaatgactatgaaaaagtatgggaaatcttcaaaggaatctttctattcggaggaaaacatgcataccaaaaggatggcttcacatttttattgagtaggaaagcaataaaacaatcctgctttataaacatatatgatcaaaatccaggataatgagagcttgaactaaaaaacaaaggcataaaaacaaaaagtcatgtatgatccacagacaatgcaactttgaaaatttttataatacactgtgtctactgaaaatcataaatgagggcatatcatgctgtcatttgaatgtgtcacctatgtcaattgcagaagttcactgttcaccaccatctctcaggtaagagaatatgagacataagcaaagcattcacaccacaagccatgctgcattacccctgttaatggggagagtatacaaaacaaatcaccattttcctaacaatatgaacaatggagatatgggtcatgcccctgccccatcatttctattctaggcaggcaaaggaatagtaacaccagccacatcatctttatgttggacaattcatactaatcaaggaagaaaattaagtaggtaaataaaatttctgagatggaaaattaccactactcatctagaaaactggaaagaggtgctcacttcaagaacaagggcggttaaaacaacttcagttattttttcactgacaatgtcttacaagccattcattttgcctctttaaaccaattttaaacatctgaatctccctttctctaatcctgagatattgctggttacagtgatgcccggtaatgattcaaacacaatttacatcttataaaaggaaaactgcacattgtctttaaaaatagttgttttactcccagagatccagagtttaaaattttctatttctataaaacacagagttcttagaaggtgactagtcaaaaggcaaaatcaacagaagatcactttattaattgtctaaaagggagaacatagaacacattcctgccactcagtctcacttgactttacacttctcagtctatcactattggaatcaagggaaacgtttacaaaacataggaccttcaccaaacttcctgggcttatatgcttaggcaaccacaatgggcattgattcataaagccacattatccagatgcccaactactctactgtattttactagatgaagagctctaggaacaagataagctaaacgaagaaaaccaagtatatcagctatgaaagtcaaatgaaacacactattttatttattattattattattattattattattattattattattattttgagacagagtcttgctctgtcaccaggctggagtgtagtggtgcaatctcagctcactgcaacctccgactccctggttcaagcgattctcctgcctcagcctcctgagtaactgagattacaggcatgtgccaccatgcccagctaatttttgtatttttagtagagacgaggtttcaccatgttgcccaggatggtgttgatctcctgacctcgtgacccacccacctcggcctcccaaagttctgggattacaggtgtgagccactgcgcccagcctcacgctattttattttctaaaattgtttctatgctctatgagatacctcaaaacttatgtaaaatgcattaggcaggaaagacctatcagaattggctatggtgggctttttgatggaactggtttcagaaaaacagtgacgtgattattcaaatatgggttttactgaagaatttgacatgcctccctaactgaactggaacacacagactttatccagttcagctcccccatttctcagcttcccactgttgtcctaaaaaaaattttttaatagatgcatctttaaaacaaaaaagaattagggtcctctaatgaatgcatttctaattccaccaatgcttgaaaaaacatgataatacaaactataaaaggtttcctatgaaattgggcaagtatacattaggtgacaaaagccccatgtcaactattctccagtgttgcctttggccttttgcaagtagcactttcatgtgaactcaatgtccagaatgtgtctatttaggacccatttatggtagaattttatggaccaaagcctatagtcagctaataaactaatagtcacctgataaactaacagctaagagtcagctaataaactccctcattttccagacaccaaggcaaagaaacaagggttccaagactttcccaaggataagaaactagaaaaggacaggagaatccaagtttgcccattcccccaatcactgttattctcactataacatcacctcgcaccaacttctcatctacatcaagtctcccccatcttcataattctgccacactgctgaaaacctgacagaaatgggagtaaattcagtacacagattcaagaaattatcccatattcacatcagataaagtcagagtcaccaggtacaatgctgaggtagaagtaaaaaatctatgcttgtaaaggaaataaattcaacatccaatgcattataattattgaatgaatctcaagggaagttatcatctgtttgtgtctctggatctcttcaagtaaatactggaaagagtaacctccaagtgggatgcccacaggaaggacaactaagacaatctgctagaatggattttgaaagaaaatattaaatactattctatttaatttatttaaagaaagaaattaacatttattaataataaatggattgataatacatttgcataatttcaaaataaatggacatacactgtccacatggtatacattccatattttgtgtgtatgtgtatatatctatatatgtttgtgtgtgtatatatgtttctgtgtgtttgtgtgtgtgtgtgtatacacatatccagtatacatactaaataaataaacatatttgttaaaggctggaggcaaaataatctaaggtcaaaacaacatgaacagttgttttctggagggaggaaggtgactaacccaaaagagaaatttctggaaagatggaaattttctacagtgatgtgtgtgtgtaggttacacaggtatatctatttgtcaaaacagcacagctaagtcatgtatttcaatgtaagtaaattttacttccaagaaaactgtaaaaatagtaataattgagaggctgaggaacgagtaaaggtatagataattcaagaatggcagaatattgtcaattactaaactaggtaactgatacaaggaagttcattatagtattctatttgcttttatacagttatattttccataacaaaaagtcaaacaataaaaaattaaatgctactgcttttaagattcttgtcaaactaatattcctaattctgtataggtatctgtacaggtgtcaaggagagctacagcagccttccaaagtgcttaccattattagaccaacgtacatggagtgcaagaaatgtctttcaacatttctctagaacaaagagagattcatatgcaaaactgcacatcaagaatattaatctttagcttattctgagtcactgggagctacagcaaaaaaaaaagtcttgggagcatttaaaaatttcatatataagtaacaccttatcaaacttaactataaaaatactgtagtaaataaatataatgcattaaaagttatcaaaaatcaaatacccttaatgaatttaacgtaacttcgtttcccaaatgttgccaagtaaagttttcttttgctaccaccctgcaaacaaattcccaatatataaacccaaaggatacagttttaaaatatactatgctagtgggttttaactgttctgctaatcagggtatccagccccgaccccatataaaatcagaacaactttgcttttatctgcttttttacaatcagcttcagaataaaatttcatttttaaagattctgctgcctaaaaacatttttgaaaaccatttatctagccaaaagaggattcgagtattaaagcaaaatatttaatagggcaaactgtaatattattcgatgccaccatctgaaaaatataggggaaaaaaatcaaggatcttaccttttcccatttgctccacaaggatttgtccagtttggtttaattcatctgctctggggattctttctctctgttctttttctaatgcctgcaaatgaagtcccaacataagaatattgcaaactttcttctcaatataatgttgctgttttaaatgtttaagttgaatggccctcctacattctttttaaatctgaaaaggtaaattcaaacgtaatcatagcaactaaaaagcattggtttcttttgtaagaaaaaaaatgtacctcataattataagctcctattagaaggaaataattaaaattatgttttagatccaggatatctattcacatacataccctgagtacgccatgccataaaaataatggtttgagtcaaaagaattgaatgtgttatgacagaagttgttgaacaaaaattaactaacaagaaaaaaggataggctgggcatggtggctcacacctgtaatcccaacactttggaaggctgaggggggtggatcactagaggtcaggagtttgagaccagtctggccaacatggtgaaaccccaactctactaaaaatacaaaaattagccaagcgtggtggcgtgtgcctataatcccagctgctcaggaggcttaggcatgagaattgcttgaacccgggaggcagaggttgcagggagccgagattgcaccactgcactccagcctgggcaacagagcaaaactcccatctcaaaagaaagaaaacagaaaaaatggatagaaatattttgaggctcagtattatttgtttgggttatattaagtctagggttcaatgcaaacttcaagcacaatcatatttcatacataatttttaaataatgaaaatagtaaatatgctttagaacccaaaccaaagcattttgttccttttttttttttttttctttgaggcaggttgtcactctgtcacccaggctggggtgcagtggcacaatcatggctcactgcagcctcaacctcctgggctcaaaggatcctcctatctcagcctcccgagtagttggagttacaagtgcaagctcacgccccacaaatttttttttttttttactttttgtagagacgggggtctccctatggtgcccaggctggtctcaaactcctgggctcaagcaatcctcctgccttgtgctggaattataagcgtgagccatggcaagcccaacccacattttgttctttatgttgaggaatggctcctaatttcattattttttttatctctatagtttgatactcccaagacaaaattctttccagaactagtaagaatgaagcaagtaaaatcatgtatacacacaaaaacacaactatatgtgcacacaactcggtatttgaattttctctcattcctccatccccaactgatatttatatattattcatatttatatactattcaaatagtatccatcataacacaatcacaacttctgagcaacccatattacttcaaccagacaatccagagaagaatcccaattctaaattgtttacatgtaagtgctatcaaataaattcagctatcctactttgattttcacaaagtttactgtgactaggtagaacaaccttcttatagtcaaagatcaaggaatattagtaagagactctaagaaacaccgtttattttgtctaactaaagatcaatgtaaaagtcaccatcgaactggagaaaaaggcaattatctactttttacaagttgattttttgctacctcttaagatggcaggagactagactatagattctctacccaggtgcccaaatagttaatgcagtaatgtgtaggagacgtatgagcacccaggacaaaaaagctctgcaagttcccatcacactcttcagaaacacacataagcatggaaagcggcagggctaagatcccacaccttttaattgtatttattttttacaactctaaagaaaatatattgaatacactttttgatttaaaatagtttgttgtattccgaaggcaaaacatcttcagcataatgttaatatagagtcataaattattagataccagattaagggtgatctaaactaactaaaaagtagtaccactaactggatcaccataagaagtattcctcactgtacatctcagtgactgacaaagatgaaaaaaaaaaaacgtcctccaaatagggatctgatgacagctagcatgaatggattcaaaattcactacaatgtactaaaagctaccttctgcctacatttattttacaggaggcttttgaattccataatgtctttatgccagcagaaaatccagcatgatgaactattttatgcactaggatatatgtggtttatgttttttaccttcaacttctttttcatttcggaagtgtcttgcatcttcatatactcttttatctctgtggtctgaatggcagttttccatttcaaaatccagttcaacagctctgcacttatagcatcaaacctgtttgaagattcagaggtgaccatttgtcatgtttccttctactgttttacttgactccagaaagagcaactcaaatgctcatcaggaatatgtctttttatcactcccccaaaaacagcaacccagaaatagggtaaccatgcaaaatgagatcatatatttacaactaaaagtatgaaaagagtaataatattatagggttaataaacaattgaagaaaataattaaataatttgttgttgttgttgttgtttcgagatggagtctcgccctgtcacccaggcttgagtgcaatggcacgatctcggctcactgcaacctccgcctccagattcaaaggattctcctgcctcagcctcccgagtagctaggattataggtgcccaccaccacacccagctaatttttgtatttttagtagagacagagtttcaccatgttggccaggctgacctcatgatcggcccgccttggcctcccaaagtgctgtgattacagtcatgacccaccatgcctggccttaaataaaaatttttaaaactttacatattaaaacaattttcacctttataaggaatcacttgtatttttataaatgcttatagataataaaaaccagagttggttagataatcagcaaagaacaagtacagacattactaaagttaacatcttcttttgttcaatatgtaatgattgagccttactaaatgtcaggcactgggctgggctcttgatatgaaagtgaaccagatacaaatctcagctcccaaggagcttctagtctagtaagcaatggaaagtaacaggcaataacaaaagaatttgctaggtgctaattccaggaattcacaggagtggcttctaatccaattggggcatggatggcttcctaaaggagaacaacagcattacactgaggagtttcccttgccaagggaaagcagagaaagggaagatcacattttgcaaactgcaagtattagttaggcgtgtctggaataatgagtactgaactcacaagggagggacaattgacgatgtggccaagaatcacatggaccagctacaagaaggccctgcaggacatattaaggagtttggacttaacccaaaggcagttgagagccaagggagagttctatgcatggaactgacatgattctatttatcctttagtgttcactgaggagaaggcattaaagagagacgagtcgagaacaggctgtgaaagcaacgggagtcacaactaagatagtaacagtgggaaggaagacgaaaggacaggtttgagaggtgttgagaaggttggtcaaaaccacagcaaggaggaacaagaggagtcacgatcactgattgctggccttctacccggcccctttctaagtgttttatgtctattattaactcaaggaatcctcaccagcaccctaaaaagtatacactattattatcccctttagagatgaaggtactgagctcacagaggttttcagtaactgtcccatgtcacaaagctaacaaagggtgaggctgggattcaaaccaagactgtcttcttaactagtaccctccccacagagcttctcgatacattaagcagtggcacaagtcgttattgctgattcttgtgagaaactttgcttaaagtgtttctggtgaactatgaatattttatcttttcatcaaggtagattttccctgtaaaatgtgagggattttgtgatgctctagataaatatctggggtcaaggtattgctcaaacagggatatgttcctcctgtcatcttaacagcagctttctatttaatatttcagagaagagacggccatctaaaaatcgcacgtttccaatgaccttggagactcagtcagcatctgctctcaatatgggcaagagtgatgcaatgatcgcaggtcacaggaacaggtgtctacattctaggaaatgactgtccactgtaccgcgagctggtaaaaaccaccaccacagcagcaccaggggaagagaagtggaaatgagctgccattttttaagcatatattttaaactaggcactgcattaagcagtcatttaaggccctcgattattggggtagtccattttaaggcaaaccaatagtggtttctagagcagacagaagatataaaagggtctggaaaccatgttaataggaatggttaaggatcccctgcactttctgacaataaaaactggggaagctatattcaaagactgaggaggtcactgtcgagttgtgacagtgaaagaaagaataaaaagacagtcatggacaatcatatccttccaaggagaataatgggaaaggaagaaagaaagcttcgatcacaaagttctcccaattgaacacaggataaataaaatcatccaagaaaatttggatgcttagctagtgccaagtagaatattcagaagacaggggcagtgagtggttcagtagttgacttttcataataataatacttattatgtctagatttgcctatgattaatgattagtacaaaataggcaccaagtagaaaatatagtatgtgcaatattggatttgaacaatttctctatctcttctcactttttcttagcttcaatatccacatggatctgtctcttctttgggggaggaggaggaggcagttcctgcttagatttttttgtaattgcttgttctcttacacgaacagtctccaaaaggtccttctgaggaatctgagacatccccagctttgctacagcctgagtcacctgaaataaaagccatccaaaatttcaatgtttataacagcttcattgagatgtaattcacatgctataaaattctttctttgaaatacacaatttaatggttattagcacatttatacagttgtataatcatcctcacagtctgtctccagaacattttatcaccccaaaaagaaatcccatagccataaaccaacactccccattccccactcccaccagtggcaaccatgcatttactttctatctctgtggattttccccttgtggacatttcctatgaatggaatcatagcgtatataatcttgcgattggcttcttatacttagcatagtgttttcaaggttcatctatgttgtagcatgtgtcaatacttcgttcttttgtattatcagataatattgtatgcatacaccacattttgtttatccattcatctgtgtatggatatttgagttgttccactttttggctattataaataatgctgctaagaatatctgtctacaaaccaatgttttatgtttgactaattcattaaaatatttttaagattaataagattacttaagatttaagatgttaagattatttattggctaagtataatcagttactataaattaaattataggatattaagataatctattaaaacttactttagaaaactgaaggtgattttcacatgtcaatttttcatcaggtgtaaggaaacaactttttagtttatttcatacaaattaaaactaacctgaacatttaaattttaaatgtttacttcatggcacaacatatgatccaaatcaaaaagtacctggttggaggaatcttctagtctctgaaccaaagaatcccatctttgagtcagttcctctgagtcactgttgatcttcttagatgccttggaattatcaagtaattgtcccacatcctggccaatctcactcagctgatccaatgtttgacgcttcatttccatgtcttccttcaaaatctagtatttcagatatttattagatgactctttttaacaggactttgtctttctgttccccagccaaaaattttaaacatgtatcttttatagtaaaatgtacatgctttgcagttcactatgctaaaaggtaagactcgtggttccagattgttacagggcagcagtctaatgctaggtaatgagctgtaatctgcattcactaaattctactaaccattagctataaaacattaagatatcataggcttacaacacagatgctgacaaccccatcacttacagccagacgtcgaacactgacacttagttccttttggtctttgaagttgcttgtctggactttatttaaagcctcttctttttcggttaaccaagctttcaacaagcactacaagtaataacaaaagttgaactttatctgcaaaatcatttggtaattcaattaaatcatgcatccaaatttctaacttttattttattagaggcttcacccttacatggggataagaaggccttcaaacacctaagtctgaggcacaaatgacccagaaagatacctttctttaaaatattatccttctcagatttgtaacagaacaatcagacattagcctcatacctagggaactaaacctaattctcaaggagataggtggagggaaaagggaaaatccaactatgcaagtctccaaaggaattacattacaacttcctagaggcagaagtaagctcggagattgtcttgtcccagcccctcattttagaaaggaaggaaagagaagtcaagttacatgtcccagatcacttggatagttaatggcagagctgggtccagggtccacaccccaaaaccagtgttttccatggcatcatgtaggaaatccacactagcattcaaggttcaacagcaattatgattaaaggagggagtctgaagagcacccaaagcccatataaagatttttcaacttcattggacaacaatgtgtgttttctaagcagaggatattcagtcatgtagagagataatcctgaagaagggatggaaaacaaccgtagctacattgtgataatttctcccaaaatgtagcatttagggtggaaacccttttctatttagtagggaggaaaacaacttggttctgtatttgcaacggaatcaattctttctcagcaattttatttatgaattaaatatttaacaactattccttgcctctatatttcaccccccaatggatactgtcctcagtctagtgaggctggtaagatatgcacataaataatgatgccatcagacagaacatgtagacagtacacacacacacacaaaaggtatagttaaaatgtcagatcattatagaacacgatgaaaggtcagtttaaaacctaaagtggtacaagtgactgaaatactagcactctatttttaaactgttttttatcatcaaattaaaattatttccaaatttgcaattactttactggatagaagagtaacacaatggttttctctagcaatcgatgtcttctactgcaattattactattactattatttttattttttgagacagagtctcactctgtcacccagactggagtgcagtggtgccatctcggatcactgcaacctctgcttcctgggttcaagcaattctcctgcctccatagcctcctgagtggctgggattacaggtgcccactgcaggcctggctaattttttgcatttttagtagagacaggtttcaacatgttggtctgacctcaagtgatctgcccgcctcggcctcccaaagtgctgggattacaagcgtgatccaccgcgcccagcctttctactgtcattattgaagtaaaattttaactattctgagactttttggcctaaatacaaggttcacaataaacataaatatttataaagtgaaatgtaaatatttgtaacatgaaatgtaaacatttcataaatcagaatcaggtcccttttgtgattcctaataagaaaaatctgaccacagattgagggcggggggggaagtagtcattaacaatttatatttggacaaattctgcaactatctgccaccatatttagtaagccacaaaacatcacacacttgagttttttcccctgaagagaatatagttgcttcttatagatggaaatgaaatgcatttaaaagaatcaaaatggacactgagagatgtgggaatagagtatttgcttttttttttttttttttgagagggagtctcgctcttgtctcccaggctggagtgcagtggcacagtctcggctcactgcaacctctgcctcctgggttccagcaattctcctgcctcagcctcctgagtagctgggattacaggcacccaccgccacacctggcttatttttatatttttagtggagacggggtttcactatgttggccgggctagtcttgaactcctgacttcaagtgatccacctgcctcagcctcccaaagtgctgggattacaggcgtgagccaccctgcccggccagtatctacttattttttaaaccacaactgtttggcatttggggagaaaagttttgtttatttgtattttgtttcaatggttgcttttctggaaagacagagaacaggcaaagagccaccagtcctattgaaaaattaaggtggcagctttgtacaacagattcatttgctgtgataacacttagtggaaaaaatatgcaattaatccagtgttaaatcaaaggtgtgactaaataatattttctcattaatttcaatacttgttaaaaatcaagaaaaaatctagggaattaaagttcacagtgtgttgagtggattcattactcattatttactgagcacaaattatatgctaggcattgtgttgatacaaattcaaatacatcacccaacacaaatccactaataactatgatgtcaaacaaatcatgaaaatagcatatcttctaagtactaacattccaagtaatgaaaacaggtcaaattaatggagccaaatgacacaatctctgtgaataagcttcatgatcagttataaactggatagaaatttgatctttaaaataattatttatatattttcctttcaaagaaaagtaaacaaggcaactttattctaaagtcacaataaaagatgggttacttttcaccatttattttgccccttatggaaaacagtttcatacctgttcttccaataattcctgccacaatatattgatttcttgtaacctattccagcgttcttcagtccaacggcatactgctgtccagcgctcaccaagtttctagaaaaaggagaaaccatcctttgtcaacacagccttaagagagagttatcacaatccttgaagaaattcatgatttccattgttctttattatagaataacaacttataaaaagtatttttataaaaattgctttaaaataacagactaggcctagaaatgtatgaatcagaaaaactaatttccatagaattgaacaaatgatttcacatagctagaaactaacataatagaactgtatcctctgaatctttgactccaaacctgctctttctatttcattgtggtttttatgagaatatgacatttttacatattattaaaaaataaaacaaacatatctactttttgtgcttcaaatttttcaaatttttagctaaaaaaaccagcatgtctgttatattccttaactctcttttacatgccaagaaaattttcatctgtggtaccaaaattatgaaaaatgtttaacttataaaacctgttttgaataagagaatttttatgagacaataaaaaaatcaaatgatttgttctgtttacattatgtgatccataaaaaaattccccataagttacataaattagcaatagaatcttactagtatcagcaatactaaataaattttattaattataaaaaatcactcttcatgattattttctcccaaaatcattttattacaattttacaaataatgattaacaaatgttaaaatttatttttgtactatatacatgtgaacaagaattatttaattcatattatactattttgatacttaatatgagaataagcttttcatagtacaaagggggagaaaacttaagagccagaagatagatttccagtctcagcatgataactcattgtctatttaaatctcaggaggactacttaacctctctgaatctcagattccttactgctaaatagtcaaggcatgaatacttagctctcaggttataataactaactactgcatacaagtcttagaacctctggctgactttaaatatcacaaaagcaaaaggacctcacgtgatgaaattacagtttggattgcctcacttaatgaggcatcatatttaaataaattggcaacgtcttaccagaaaatccaagtattgttcaaatgaaataccaataaatttatctgttaaagacttgtaaagatacactattgcctttgtgcaaaaagaagcaattttgggaggtttccaaaactgttgttgaaattcacatattaatctaccgaaaacactgagatattgaatcctactaggtgaaattctcaaactttactatgcacatgatttttcttacattgcaaattcactgcatccctccctcacctagatttaggtagtgggtagagcctaggaatctacattttaacaagctcctcaagtgcttctgagaagaagtcagtggatcacttaataagatcagctcctgtgtgatatggtttgcctgtgtctccatccaaatctcatcttgcattataactaccacagttctcacattttttgagaggaacttggtgggaggtaattgaagcatgggggcagatctttcccatgctgttctcattatagtgaataagtctcacgagatctgatggttttacaaaagggagtttccctgcacaagctctctctctttgcctgccaccatgcatgtaaatcgtgacttgctcctccttcccttctgccatgattgtgaggcctccccaacgatgtggaactgtaagtccattaaacctctttttcttcccagtctcaggtatgtttttatcagcagcatgaaaatggactaatatagtaaatcggtaccagtagagtggggtgctgttgaaaagataccctaaaatgtagaagtgactttggaactcggtaacaggcagaggttggaaacatttggagagctcagaagaagacagaaaaatgtgggaaaatttagggtacctgtggaagaaatttctaagcagcaaagcattcaggagatgacttgggtgctgttaaaggcattcagttttataaaggaaacagatcataaaagtttgagaaatttgcagcctgacaatgcaatagaaaagaaaatctcattttctgaggagaaattcaagctggctgcagaaatttgcataagtaacaaagaggcaaaagttaatcaccaagacaatgcggaaaacatctccaggcatgtcagaggtcttcacatcagcccctcccatcacaagcccagaggcctaggaggaaaaaatggttttgtgggctgggctcagggtccccgtgccttgtggctaggtacttggtgccctgcatcccagctgctccagccatgactaaaaggggcaaaggtacagctcaggccatggcaaaggtgcaagccacaagccttggcagcttccatgtggtgttgagcctgcgggtacacagaagtcaagaattgaggtttgggaacatccacctagatttcagaggatgtatggaaacacgtggatgtccaggcagaagtttgctgcagaggtggggctctcatggagaacctctgctagggcagtgcagaagggaaatgtggcccaaacagagtccctactgtggcaccacctagtggagctgtgagaagacggccactgtcctccagaccccagggtggtagatccactgacagcttgcactatgcacctggaaaagccgcagacactcaacactgacccatgaaagcagccaggagggggctatttcccgcaaagccacagaggcagcactgcccaagaccatgggaacctacctcttgcataggcgtgacctggatgtgaaacatgaagtcaaaggagatcattttgaagctttaagatttgactaccccaccgtattccatacttgaatggggactgtagcccttttgttttggccagtttctcccatttggaacagatgtatttactctttgcctgtgcccccattgtagctaggaagtaactaacttgcttttgactttgcaggctcataggcggaagggacttgccttgtctcagatgagactttggactgtggacttttgagttaatgctgaaatgagttaagactttgggggtactgttgggaaagcatgattggttgtgaaatgtgaggacataagatttgggagaggccaggggtggaatgatatggtttgcttgtgtccccatccaagtctcatcttgaattgtaactcccacaattcccacattttaagtgaggaacccagtgggaggtaattgattcatgggcgcaggtctctctcttgctgttcttgtgatagtgagtaagtctcacgaggtctgatggttttaaaaaaaggagtttccctgcacaagctccctctctttgcctgccaccatccatataaaatgtggcttgctcctccttcccttccaccatgattgtgaggtctccccagccacatggaactgtaagtcccttaaacctctttttcttcccagtctcaggtatgtctttatcagcagtgtgaaaacggactaatacactgtgcttccaaatcttgtcattatgcacaaggaagctggggactgcaaccagccccatccattcaccccaagagctgaagtaaaggaatcaatacctgggtactcctgtagcccacacactgtagaaccccaactgagaagtacaatcaaaggtaggtttttctacccttctggataaagaatgagaaaggacatgaagaacaagggcaatatgtaattgggtctcagaccacaggtccctcaggattatccaactttacagcactcttacctgtaactggtcttctaggatagctgtagcactctcaccactgttttcatcaacaatgaccaccatgtgagttagtgaatttactttcacctgttcagcctcaagatcactttgcaaactctagagaaaaaaattaagataaaccattatttctactttcacatttacctatttaaaacgcactcagttgtcaatagtaattaaggacagttaatgaggcatcatatttaaatttccaatcattaccctaactgttctactaatgaaactaatcctattatacatctttacattccattatcaacaaaggcagtttgaggatgcagtgttataacagactgcaaatggagatatcaccacttttattcaagttctggccctccctcagaatttatagcataaaggagttgagtgtccatactaggaattaatacaaaaatgtagaagtggtaaagcaaaaaagtccagagcttaaataaaccaagtcagagatcattttatctagtgtaggacagtataaagagataagtagaatgctacacgatagtcaaaagttactctgattagctacccaataaagcagttaaagaagtatggacaccttagattctctcgccttttccatgggaagagcatagtcattggatacatgtgtatagaaaatttataggctgggcatggtggctcacacctgtaatcccagcactttgggaacccaaggcaggcggatcacttgaggtcaggagttcaagaccagcctggccaacatggtgaaaccctgactttactaaaaatacaaaaaatacaaaaaattagctgggtgtggtggcacacgcctgtagtcccagctacttgggagactgaggtgggagaatcacttgaacccaggaggcagagggtgcagtgagctgagattttgccattgccctccagcctgggtgacagagcaagactccatctcaaaaaaaagaaagaaagaaagaaaatttatttaaatactatcaatagtgttctcaaatgcttctcagagttgtgtttaatgtattcctaaagttttacatattagttacctcaatgtttcactgatcaataaaagtcttcaatttacagagagcatattttattctatctttccttatcttgactatgaaaagtttatctcctagacttgtgaccaaattaaattgcccacccaattttggttcctaacttaatgcctgacgctttcctgaatcatagacgaagaatttgctcttcacccacacaccatgtgaacgccaacatgcttgggttcttagccacttagagggccaaaagaacccttctccagttgtatgaaagctatgtactttcaaaagaaaactgcacatcacatataaaattttaccgtgcccttttatccctggctcagaaaagtctcatctctatcaattccaccctgtgagctgctaaatgaagacaaccctgaagaagtgtcccaacttcatgttaacgatagatgtcatcagcctctgagatgctaagtgctgctctttcatatttgataaggtatcgaagaaatatgagacagatttactttatgttcttctagcagcttttgtagagattttacatcatcatccagggggcaagtttccatcttctgaatgcgctcctctgtgagtgttaaccaggcggagagctgctgcagttgcttcttctgcagttccatcagcacatcgtgcagcctgtccgtggggaacacagcattattcctacaagccttttccctttgcaaagtcaaatatacattctgggcaccggagatacagggcaagggaagacacccttgtctaaacattcaaggtagcatttagtctttaaatatagaagccaggaaagtaaacttttattttgtcctaaatggagttcattaaatgcagacaaagaatgcaaaaagcagcaccctgtattcatatcagaatcattgtttcttcaatcaggaattcctgcttattaaataggtggaagtggcaatgaatgcagtttgctccttaagacacaatacatgaaataaaataaaccatgagaaagctttaaaataaaagtcacaaaatggaaaagtagatcaatactccatagtcctgtcttcacaccaagttaatgtttagctaatcttaacattgcaaataagtaactgcccctatgaaatgtcttttcctttttttggagacagtctcactttgttacccaggctggagtgcagtggctgaatctcagctcactgcaatctctgtctcctgagttcaagcgatcctcatacctcaacctcccaagtagctaggattacaggcatggcccaccatgcccagctaatttttgtatttttagtagagacggagtttcgccatgtcgcccaggctggtctcaaactcctggcctcaagtgatccatccgcgttggcctcccaagtgctgggattacaggcatgagccaccatgcctatcctctttttcctttttgttaaattctgtattccaacttttatcttttggtgtggctaacacatcaaaggggaaacaaagatcatgcagaattccagcaatattacccgtagaaaagagtcttacttttccaaggcaagttctgtaatcatctcgctttcacagacatgcagacatctactagagctcaactgtgcaaagcagcctgtggaattaagtgcatttcttggctttccactcaccgggactgtctgtccatactctccaccctaagagcctcccatctagcattcagcagggtcatctgttcctgaatctcaaattcttcttcgtctgacagagttccttgtgttatcagttggttgcctgcctgcaggacgctgcccacactgctctggtgtgcagtcagttccatcataaaagcctagaaagggacattgttataatttgtgagctactcagtgcaaaaaaaaaaaaggaagactgaacaaattgctaatgcctaacctaaatgtcagtgatgcagaaaaaggtagcctagtagagcgcaaataaaatagacattgaccacattttttaatctctgaaaataggaataaacacctgccataagttaaaagagaaatagctcaaagcaagcaatgatgcatctgataataccagctattttaaagtaaatgctgactatgctactcatagatcatgaacatggaattctaaataaataaaataaaaggctgggtgtggtggctcacacctataatcccagcattttgggaggctgaggcaggtggatcacctaggccaggagttcaagaccagcctggacaacaaggtgaaaccccgtctctaactaaaaacacaaaaaattagccgggcgtggtggcacatgtttgcagtcccagctacttgggaggctgatgcaggagaatcacttgaagccaggaggtagaagttgcagtgagccaagattgtgccactgcactccagcctgggtgacagagtaagactctgttaaaaaaaaaaaaattataaatatatatatatacacacacatatacatatacatatataatatataaatagattatatataaaaatatttatatattttatttatatatatttatttatatattttatttatatataaaataaaatatatatttatttttatttatatatatttatatataaatatatatttatttattatatatataaatatatatataaaataaaataccatactcacccaagaggaactgtttaagagatattaccacttatattattttctatccaaaacaacaaataagatctgtcaattcacataactatacaaaagaaaaatttaaccaaaagaaatctccatatagtgaaattcactatgctgcaatatagtatgtcctcaaaggagcaggaaacttttatgatatgaaaaaatacaggaaccctgggtatgacatttgcttaatcatgcaattaaaaagaataatcatttcctagggaacactcaaatcttaaagatttggtgtattggttcactcgtttgcttttgaaatataacaatgcacttcagaactgagcagtactatgcaatgattttcatcagtggctctccaaaacacacaaggagactaaaatctaaaatctaattctgaggcacagtttaatcacccataccaattttgtgacaaagcactatttaaatatcacagttcctgaaataaaccattgacctttccaaagaacagaattcagtagataacaaataggagagtagagtccctgattaaggctcaggtcccgtgggggacacaccctgctaagaaactacagatatttacttcatgggttgcaaactggtctttgacttcttcaacatcatcagaaatatcatcctgctcctggaaagtgtcctcagcagaaagcaaccaggtcagcacttcctccaacgcaatctgatagctgtccagatccatgtcaacctcagtgacagtgctgggagtttcagctcggggactctcatgctcctcctcaggcgctgtactctgtaaaaacaaagccaagaaaaacccacactaatcatcaaagcaagaggtgttcagcaaactcacactgtatggcgaacccaaagtacccaccactctgtcttaggcactaatccaattctcaggagccaaatgggcactgccatgaatgagttagaagcattgagtaagtgcactagggtagcaaagagtataaaagcagcatgcactcatgaattctgtactcaaggagattctaatatagttagggacagagaacccacatgaatcacttctgaacagaaattgaagaacagctattagaaaagtaaatgccatggtcccaacaaggcatgatatttgagttcaacaaaggctaaaacaggaaagtttcgtagaggagctggaacgtgttaggccttttctgtaatttaaagaaaaagaaaggtgagaattctgccttgacccttaggtaaattgcttttgctgaactgcattttagcattgcattttagacactaaaagacagccacacaggctgctgtactgattgtatttttcttaggcagttgccctctggtttatctgatggccttttagggctcatggaataaatttctatcaacctctttctaaataactgagtatttccatatatactttaagagcttataaccaaattgactctccctagttcttttgttccctttcagagcaagatttcttgaagacttgcctacattctgtctctactttatcaactctcatgcatgatttttaagtacaatatttcaaatgtacagaaacgtatagagaacaatacaaaaaatgctcaagtatttaacagctatggtttgttaacattccctttaacttcaacttgctatttgccccatgactcaactgaaaaggcttttaccaatgtcatcaataaccttcccattgccaaacggacctttctagcatcatcttcagggtgaccatataattaaccaacaaactagagtatttttgatgataactgtgctcaaacaacaaatccaaaccagaactgtcccaagtaagcccggagagctggccacccacgttccttgcttcagaccttggtagcactcctcaaggctgagcaacttgagctttcagaagcttgtttccctgcttctgtgacactgccctggtttcctgctggttcaacagcagctgctgactcataagtaatgaatctcctcaaaattaagttctaggctcttttttctccccactgtatactgtgtctgagtaatctcatctactcctattggatttaaagaacatctagaaccacctaggagtctggattccaaactctcatatcccactattttcacatctctacttcagcgcctcctaggcatattaaaccatgtccatattcaaaacctttactttcttccaaagcttgttcctcctcagacttctccaactcagtagatggctcctccctgcaactaggtactccagctacaaacctgggagccagccccagcttctctctccttcatcttccacatttaatacataagtaattctgaccttccttcaaaacttcgctccctctccctccccctccccctcccctctttccacggtctccctctgatgccgagccgaagctggactgtactgctgccatctcggctcactgcaacctccctgcctgattctcctgcctcagcctgccgagtgcctgcaattgcaggtgcgcgccaccacgcctgactggttttcgtatttttttggtggagacggggtttcgctgtgttggccgggctggtctccagctcctgaccgcgagtgatccgccagcctcggcctcccgaggtgccgggattgcagacggagtctagttcactcagcgctcaatggtgcccaggctggagtgcagtggcgtgatctcggctcgctacaacctccacatcccagccgcctgccttggcctcccaaagtgccgagactgcagcctctgcccggctgccaccccgtctgggaagtgaggagcgtctctgcctggccgcccatcgtctgggatgtgaggagcccctctgcctggctgcccagtctggaaagtgaggagcgtctctgcccggccgccatcccatctaggaagtgaggagcacctcttcccggccgccatcccatctaggaagtgaggagcatctctgcccgactgcccatcttctgagatgtggggagcgcctctgccccgccaccccatctgggatgtgaggagtgcctctgcccggccgcgaccccgtctgggaggtgaggagcgtctctgcccggccgccccgtctgagaagtgaggagaccctctgcctggcaaccgccccatctgagaagggaggagcccctccgcccggcagccgccccatctgagaagtgaggagcccctctgcccggcagccaccccgtctgggaagtgaggagaccctctgcctggcaaccgccccgtctgagaagtgaggagcccctccgcccggcagccaccccgtctgggaagtgaggagcgtctccgcccggcagccaccccgtccgggagggaggtgggggtcagcccccgccaggccagccgccccgtccgggagggaggtggggggttcagccccccacccggccagccgccccgtccgggaggtgaggggcgcctctgcctggccgcccctactgggaagtgaggagcccctctgcccggccaccaccccgtctgggaggtgtacccaacagctcattgagaacgggccatgatgacaatggcggttttgtggaatagaaaggggggaaaggtggggaaaagattgagaaatcggatggttgccgtgtctgtgtagaaagaaggagacatgggagacttttcattttgttctgtactaagaaaaattcttctgccttgggatcctgttgatctgtgaccttgcccccaaccctgtgctctctgaaacatgtgctgtgtccactcagggttaaatggattaagggcggtgcaagatgtgctttgttaaacagatgctagaaggcagcatgctcgttaagagtcatcaccactccctaatctcaaggacccagggacacaaacactgcggaaggccgcagggtcctctgcctaggaaaaccagagacctttgttcacttgtttatctgctgaccttccctccactattgtcctgtgaccctgccaaatccccctctgcgagaaacacccaagaatgatcaataaaaaatatatattaaaaaaaaaaaagacttatctcaaatccatccagacctttccatttccacaaccacacacatccatcttctgaactggaatacctgctaacaagtgtctttactttcctgttttcccccacccaacactctcaccttcacaatccacagtccatttctcacacagcagccagaatgatctttcaaaaatgtaatgccatcataagacgtacctgctgaaaacctttcactggctttcccaatgctcttaagatacaatttaaaattcttaacacagtttacaaaaatactgtgatagtaagaaaccaagatagagtgacagaaagagagagagagacagagagttgtattttgatagattaatcagaaaagacttctctgaaaaggctccatttaaactgaggaaaaatgtgcaggctgccatataatggtgggtgcagaagcatttaacagaggggaacctgcatgaacaagagtcttgggggaaaagtccactctaactgcagggcagagtagcagaggtaggccacagcttgtaaactataggagaaaatgaagtctttaaatagcattaggagatatacctaatgctaaaggacgagttaatgggtgcagcacaccacccgtggcacatgtatacatatgtaacaaaccttcatgttgtgcacatgtaccctaaaacttaaagtataatactaaaaaaataaaataaaaatgagtatgaaggctgcaataaaatgaaaacacacacaaaagacattttggaggaaggcttgaagaatccaggaaactgaatatatgagttaagaaatgaaccaatcagcacagagtcgaaacagtggataattaaaagacagatggtgccaaagacagagaaagaaaaatgagttaagttatggacaaaaaatcctaaaactgtagagctaaaataacccctggagatcatttagctccaaacctctatactataatgagaatttctaagaaccaggaaagttagtgaccagccaaaggtcactgagataggcaccagcatccatgaggtcgagaaggaaggcactatctaaacacaaatgttcagacggtattaattcgaacacatgaggaaactttcaactgacggatatttaaagagaaatgcaggaattattcattgaccaccagcgtatgtttgtagaaagaacagggcagaagaagtctgactattaggagagtagcagatggcaagctatgtcagagagatgattaaaacttgatcacattttagttttcaattaacgtaattcagcctctaagacactaatgaaagcttgcaaatgaagaggtgttaatacacttgcacttaatcaaatagcaaatgttttctgaagttcttatcatgccacgctgagccctaaacagaagtgattattttatctacacatcatgaaaagtaaatgaagtctccttcctttttaagagagaaggcccttaactataagaactaaataaaatatctcctccttctaacaaaatgcaataaggaaatgaatctaaaaccctgtaacaaactcagaagatcatctgagccaactaaaaaggtgcatcattaatgtagaataataactatacttttagaggcaaatacttcctagcatttttttcaattatagtaagttaggaattttcctcagcatcatttgatattcactacaaaagagagccctgggttcacaatcaggcctcatttctcaatcctttcttttcagtaaatttttttctttttctataaatcacactatttttgaaacgggggaaataaaaggatgggtacatattacccaaagaaaatttaaaagaataagtaaattctctgaatctcagaggatggaaaaaaaagatgctatgtcaattcaagactagtatcataatatgggaattaaataatattttttaaagaaatctgttaaatgagaatgccaaaacaaatcaagaagaaaaatgataataatgatagctgttgcttgttgagtgtttattaatgtcattttagatactttgaattcattatctttatgaagttggtggttttaaccacattttgcagacaaaactgtgattgagagtttaagtaacaacccaaaacaagtagcaacaggatgaatttaaggtccatccagagaagctttctttctctctgaaatgtagttcttataattttgaaatctacatgtatgtcttggttgcttggtcactagaatgttgaaccaagtgacttctaaggtccaattcttaagattctctcatcttatgaattacaaggactggctagactaaaacagaatgagattaaatatggattgattcaaacagtagaactaaggaagaaaataaattatgattttatttctctctttaaaaattcatttatatcctgatgaatgaaatcatcgtaatcccttcatgaaaagctcaccaagtagtttaccatacattactcctcctaaaggaaagggaaaataaggcttacattttgatagcccttgtgagatatataatggaaaaaaaatcttttctcaatggcaaaaaaagaaagacaattagtacttagaaaaaaaactaggctgatatgagaaaaaccatctttagcacatgacagaaataaaagctggcaaccagatgatgtgaaaacatagattcccagcatgtcatgcagcagcatgagcaacagcccagttttgctgggtgaaataaagtattttccttcttaataaagtccattgagttatggtgttctattacacacatgtgacagaatgctaactgctaagctgaacttcttatgcaaatgtaagctgagaaaccaagatgttctcagtcaagaaaaaaaccctctaaaagtgtttttatctagtacctaggagaaaacaaatacggcaagccaaacatcttaataaaatgttacctgtacctgtatattaattgcctcttcttcacattcttttttatatttccttgggagtgtctctacctcacggatggcgtctatggtgacttgctgaggtagcacctcaaacaaagatgttaaatacataattatggatttcttgtcaggaagctgaacggcaacatctaaaagtggaagaatataagaaccagcttaaattaggtgtccaaaatatgtgaattgctcaatattagatataaaataactctccttagtacccataaacaatacctaatatataatctttgcaataccagtaaattgccacttcataatatatgagacaaaggcaaaagggattacttatttttgttcagtatctcattttttaaagtcttccctaaaagcctccccaaaatggtcaaagataagctaccatatgttaccatttaagataaagatacagactttattcatactatgaaaataagtctagaattcaatcctgcaacatttataactaaagtctttacatcacatgcaagatgctcacataaaaatgcattttattggactaaccagatactgaatttatctaataattacattttcttaaaactttaactcttacttaatttagattaactattgtccagtgctgtagttaaatttctacctaaaagatcccacaaactgctaagtacaaaagtattaataagtgtcagtaataaaatgactcgcacctatactccaaaaaggaaaaggttcttcaagtctcataattcatttttaaaaggacaaagaaacactgcttttcaagaatgcaaaactgtaaagcaaaatcaaggtggaaattaaatactggacaataccttcaggatctaacagcttttcaattcccaaataagtttgagccttgctgaaggcatgttcaagtctctcaattggtgacattttgacaactttatcccagctgaagagatcaggtctgaaaaccatgcaaataaaatgcaatgaagatgaaatatgtggaaacaaagtaggcattgttataatctaatacattttagttttagattatttttatttgtgaggtttttttgagtttatttttatatcccaaaggcttgtcaaatacatacttgaaattaattcacaaatatgaaaataacagataatactttccaagggtcttgtattagctaaataggactgctattttctgtggtaaccattaagactagaagtagtatataatgtttcccaaagagtagaagaagaaaagggggtaaagggaaacctaccgatacaaaaagagataagaaagtaaaaaaaaaaaaaaccacagaaaaaataagaaaaatgagcagctcacactatgcggtaaaaatgaacctaaatatataaataatcataatcaatgttaatggactaaattcttcaattaaaagatcaagattagcagaacacaaaatctagctctaatctgttctcaggatattcctaaaacaaaagccttggaagagtttccctccaatcccctgcttccatgctactactatattgtctaggactgtatttcatttctatcttgattttcttttaatctcacaaattggacattattgttgctttgacttatccaaaagttaatcattttctttattctgtgtctgttcttgcatgttagacccacccaccttctgggatgcacttcccccacttccctccctgaattcatctcccattactccccccactcaggtcactgcagccactgccctctccgatgccaagtgcctcctctgctcttgtctgatgtattttccttcagtgtgtgtacatttctatatactacacaactttattattgtcttgtctccctctgttggaacataagctccacgagaactaagatttttgcctgttttgttctctgctgtataccctgtgtctagcacataaaaggcaccccacacgtatttgttgaatcaattaattaataaatggaatggtatattggctaaaattctacagtttcttgataaaatcccttaaccaactaaaaacctagggcaacctcctttaacctcataaaaagtgtaccaaaaaagctacaaaaactatcattcttatggtaaaacactaaaagcactccttttattatcaacaacaaaaattctgcccactatcaccaattcaaatcaacattgcattgaaggacaaggcacaatagagaacaaaaaagaaaacagaagaaataaaaggatcataattctaggacattctaatccctcctcctccaagaaacctacaatctagagacaaacttactaaaatttgtaagaactgattaagtttccagatataagacgtagaaaagtctattgcacttttatataccagcaaaaaaacatagaggaagtgaaatttgagaaaagtaatcatttacaacaataaaatataacaaattttgcctttggcatttaaatccctgatccatgtagaaattattattttttttttagtgtggtgaagtaaagatccaatacatttatttatatatgggtaatcaattgtccaaatcatctattaatctgcaatgtcagctcaagcgtatatcagattttcctgtgtaatggagcaatttctgagttcttaattttattaggttgaaccatatgaaaacaccattcttatatagcaaaaacactcacatgtcggcaatttcatatggttcagcttatattggtgtgtatattgatagtactgcatagtcttaattaatatagcttcatagttttggtttctttttggaaagtatttcagcctgattcttcctcagaagtctactggctattcttgggcctcgtcttttatataattagaatctgttcacaagtttcattaaagacaatttggctatttttaattgggaatgcattgaatttacagagttttactttcagtttgagaagaaaagctaacacaattttttgtatacattatcagttagtgctgaatgagtggggttgaactttgtgaattatttcatattttttaaattcataaatatgcaggagaaactatggaccttgtattgcagcatttaagtcctaaggaaataaaaacctgatgggtagttttcttccatgatatttcttttcttaaggttttggtagaacatgtgcagaaaggagagcagtggcactggagaaggggcttcagggagtagtggtggcagcaaagggacagagaggagacatgaatttgtaaagcccacttctagatagagtaatgtctcacttatgtcggtggaggacagcattaaaggcgagtccatctgtccagctggtggtgaagttgaggacgttgacttggctgtagggcctggtggtctgacgcacccagctgagcaggatcttctcactgttcgtctgctgcaggtccgacatgacatccttcatgacatctttcacctatgtaagagaaaccaggcctgtccataactaatacttcagtaatttacttcaacttacttcaatgaagtccttgaaaaagcaatattgcactaattaaccattatggatcaggtaactggcattcattttacttcagatttttctgtagacactagagcaatacattttaacagtgattattttgggggactagaatttgaggtgatttttacctcacttttatacattactgtgttttctatatcttaagcaatacttgtactatgtttggttacaatgaacataactttcacagtcatagaaagtcatatttaactctatgtgtttacaaagaccttttcaattaaattttattttctacaaaaatgagaaaggaaaaacttttgagtgactacaaaataaagtatctttcctgactgcaatcacgattatactctagaactaacattttatagtattattctaaattagtaaatatgttttaagaaagtgctcaaagaatgacatagatctatctaagggacacaggagccaatttaaggggctcacactggccaaatctaggatgacttgaacactgaaatgagtactagtaaaagatcataaacctatgcaaatgtccatgaatctatactgatacataaatgaataaatgaatggagagagagataagatagagaaacaagaaacaaggggaagctcttctttacaagtagaacaccaactaatgtagaaggattaatgaaattagaaaatcattatctatcaagcatcataataatagctggtccaggcaaaaattatgaacgggtgctaaaagtttgataaaaactaaatatttatacagtctcaaagtatatccccacccgatacttttaataacaaagggtagtcaatttacagggaagaaacttggtaaataccaccttagccaaacaatcaaagttaacactgccagaaaaagaacagatatcacctatccccgatatgatgcactaagaagaactcacgtcacttttgtgacgtccctgccaaaagtgaacaacctgaacttaatcataaggaaagctcagccaagcccaagcccactgagagagacattctacaaaataactagccagcactcttcaaaaatatcaatatcatgaaatacaaagactcaaaaacttccagattaaagaggactaaagagacatgaaaaataaatgtaatgcatgatctcagattttcttttgctactaaggatattattgggacaactgacaaaatcttaagatctgtagattacataattgtattatttcaatgttattttcttgattttaataattatatactaagttttcatatttaataatcaataattggcattttaaatatcaatattttacatctcatattattataccaatatgctattgtgtttacataagagagttcttgtttttaggagaatgccatggcgttagaaaatacacactaaatattttaggcagactgagagagagtacaaatgaaatatagacaactggtaacatttaggaaatgtgagtgaaaggtacttgggaattctttgaactattcctgcaacttttctagatgtgaaattatgtccctttttaaaatttaacataagaaaggtaggtacttttttccctatgccaggaaaatagggcattttgtcagcctcttccattgaaaattgttatgagttgaattatgttctctaaaattaatatgttgaagtcctaaccctcagtacttcagagaggggctctatttggaaataaggtcattgcagatgtcactagttagaatgaggtcatacaggagtaatgtgggccctaaatccaatatgactgatgtccttacaaaaagaggaaatttgacagatatgcacacagggagaacaccacgtcaacactggagctatgttatcacaggccaaggaactgcaaaaattgcagacaaaccaccagaatttgggggcaaggcctggatcagagtctccctcagagccctcaggaaaaaccaaccctgctgatgccttgatcttggacttctggcctccagaactgggagacaacaaatttctgttgttcaagccaagcagcttgtggtacttggttacggcagccttaagaaactaaaagacaaacaacacattttccatctctattaaaaagtgattggaaatttccccacctgccagtgcaaaatgatgctccaaagtaaccccaaagtcagtttgtgatttccatccacaatgtcagttccccctatattcactaattccacctattaagacaaaacaaaaaacaaaaacaaaaacgcttttaagacaatttcttcacagaactccaggtttttattttagcacatttggacagcagtataagtgagagataagagaaatttcattttagagaatcaggtaagcttaaatctcaaaaatgtattatttatactacagatcaatacagccatcagaaaaagcacatgactgtttcttcactcacagaaaaagttcagtatttctcataagaaaaaatgtttgcaagaatcagtggatgccaatgcatcaagcagttggtgagtttcacaataaataatgctgatggcagcacagacccccagaactcacattacacacttacattgttctgatgtaaaacctgcagcactctgttgacgttatttaaggcatgtacccttgtggaaccacgttcctttggctggaaaataaaacaaaaaagcaagtaaaactgattgtccctccatatgcctgactaacactagcactgagatacacacagaagtgaagctcagcgtacagggcccctcagaggcaggagatctggctgaggtctcaggttaccaccctggaagctggtgttcacagtatgaaaatccctcaactaacaacatcttaagataccagttccctaacttgcatgcacgttgaaatctcctaggcagcttcataaaaacaccaatacctctgtccaaccccacccccaaagagtgtggcttaatgggtctagggtgtggtctggacttgggatttttaaaagattgcctgtagttctaatgtgcagacaagtttggaaaccagtgctctatgaacaaagcttcctttctcttaattggtctggctgcagaaggattttagagaaattgtgtcctctttattctgcacagatgtgaacagagcaaggaggattcagaggcaccatcccaggctccaggtagcattgcaagagccctcggaaggcagggaattcccatctggggaaagataacctatgcagcttctttctacttcactggccagaaccttatctgagagaggaatcagcctgtctaacagttgtctacccactacctggagggcaaagagagagaatgacatcccacacttctgcaagaaagaaattcatcttcaggagtgcatctctctgtactgtgatagtaattctacctctagagttaacatttgtacccatacatgcatcctctttattggcagttttatctgcatgagtttggagtaccccacacataaaataatagagttgtatttaaaaaataaatcaacaaaatataatcctgaaaatctgaataaaaaatagatgtcatagtttttaacaacttttttttttttttgagacggagtctcactctgttgcccaggctggagtgcagtggcgcaatctcggctcactgcaacctccacctcctgtgttcaagcaattctcctggcctcagcctcctgagtacctgggattacaggcacatgccgccacacccagctaattttttgtattttagtagagatggggtttcaccatgttgctcaggctggtctcgaactgctgagctcaggcaatccgcccaccttggcttcccaaagtgctaggattacaggcgtgagctaccgcgcccagccttaacaactgttttaaaaaatatttaactcttaaatgtgtttgtctccagactctactgttcaaaacattgtgtcctctctataaatccattcttttttgtaattctctcatcctgggctgtctcagagcaataaacatttaaggtaattttatcttcaataaaaacagagccctcagaagagccaaaatgttgttgtatcaaagcactcattaaaatgctttgttaaaaatgttccgaatttcagcctttacatttgaacgtaaagtaaaatggatactttcactttaatgggtacccacactgggtcatcaagtatcagcaatgaccggagactccgttgtttacaaagatgacttgctcaccagtgatgttcctgtgaggccttctagaagatccaatagcttccttccatctttgaggtctgtgaacatatcattgatgggtggtttcccactctgtaaaagaaaaacacaaataaaatatggggtatgccaacagcagaaactccatatatacctgggcaaataaatgagtggcttcattttttgctcaattaaaatgttgtggatgatctgcagactatccaaatttgtcttttgggggtttttatttatttatttattttaattaattaattttttttttagacagagtctcactctgtcgcccaggctggagtgcagtggagtgatctcagctcactgcaacctccgcctccagggttcacgccattctcctgcctcagcctcccgagtagctgggactacaggcgcccgccaccacgcccagctaattttttatatttttagtagagatggggtttcaccatgttagccaggatggtctcgatctcctgacctcatgatccgcccacctcggcctcccaaagtgctgggattacaggcgtgagccactgcacccggcccaaatttgtcttttatagaaagaacaagtacaaatacagaaatttttaaatcccataaagaatattttaagctgaaataaattgcatttttccttacaaagaaagcaaatcaagctgttgggcatcgtggttcatgcctgtaattccagcacttgggaggccgaggcaagctcagaagtttgagaccagcctggccaatatggtgaaacctcatctctagtaaaaatacaaaaattagccgggcatggcggtaggcacctgcaatcccaactactcgggaggctgaggcaggagagttgcttgaacccaggaggtgaaggttgcagtgagccaagatcgtgccactgcactccagcctgggcaacatggcaagactccatctcaaaaaacaaaaacactacaaagtctggacataatttcacacaaatatacagtaaagtggaagaaagaacaataaacgacaaaataataggccttgagtatggcatatgttcctgagaaagcaatgataacgagacgcattaaaaatgtaaatgagcctacaacatccgggtgcagaggccaactaaaagtataaggactgtcacttcatcactgcgtctcacatcacagtgtgacaatgtcttccagcctttccattatgggagtacgtgatttggtcatcaatttcagggctgaggtgttcagtctgtatttctggttattaatttcttaacacttaaggcactttgggcttaacaattaaatactttttgtgcttaaaactagtaccagtccaagattttaactgacaaagcttatagaatttctaaactctttttcctgataaatagcatcaactcccacagataatcctgctctagtgtctgatgccagaaaatcccactccattcactgtaagtttggtagatccttgcctgtctgtgatacaatgaattattatgcaatggggtgatcaccgcatagaaaatcaggaagcctcggctttaagtccagtttgacctttaactacctggtgaacctggctcagctacctaaccttttaaatcaaaagtcactgtaaagatcaaataatagaatattataagaaaatgccctgagaactacagaatacaatgtaatatttaataaatgttgtattatcttgtatcgaattactgccttatataataaaatctccacagagatgaacagtcccacttcctgtcaataatagatattttttaaccaatacttcttttatcttcttcatttctcactttaaaaaatatatacatatcattcatatgaagcaaaactttactctgagtttgaaatggaggagggggaagaaggagccattctgaagtttcctaaaatttggcattattccttccttccttccctcgtgattccttatctgtttttattgtgtgtgtgtgtgtgtgtgtgtgtctgtgtctgtgtgcgcacaagtgtgtgtacctgaagagacctgaattacaaagatgaataaagattccatatttctgcacactcaacagcttaccattcagtggaagtgatactcttttttagaaaataacaattacagtgcgatgtgtaaggtctggaatagaaaagtgtgccagtgctatagaagcacagaggagagagagaccccaagaccactgcaagccagggagtgggcaaaggcttcagacaggagctgacccttgaactagactttatttagttttttacaaggcataatttaattatcttttaaaacattcagattcagggagttcatatgcaggtttgttacatgggtatgttgtgtgacactgaggtttgggtctcgaatgaccccattgcccaagtagtgaacacagtacccagtaggtagtttttcaacccttgttcccctccctctatctgtttttaaacaggtattaggtatagccaactcataatttttagcatgtgcctttttcatcattcatatacttcagatgagggaaagtgcagtaaattttcaccacagaatcagtaaagaatacactgttacttattcatatctgaaacaaagctgcttttctgttcccagctgcctttttcacaggcagcgatagattcagggacaaagagattttctccatcaatcaaaataacacagagatgtgcaagatgcaggggccactttccagaggcagaacttcaggaagccgggtaaggggtaatttccccttgaggggaaagtcccctgaggacttgctacccactgtcagtaaaagcaatgggcagaagtggccttcgtcacctgcctacgtctaatccccctcccccacccaaccagaagtacaattctgcaaaatagccaacaaataaccgaattcactttcaggtcttaggcatagcaaaaatatattatataggtaaagcgcatgggagaaacaaatggggttatataggcatagaaaggatcttagaaaatactgatgatggcaagggcagctaatataacacctgggcagcctgaaacccttctcaaatccactctccactttccaaaaaatagtataatataaaacaactggctgggcacggtggctcatgtctgtaatctcagcactttgggaggccgaggcgagaggatcacttgagcaggaattcgagaccagcctggccaatgtggcaaaaccccatctctactaaaaatacaaaaattggctgggtgtggtggtgcacacctgtaatcccagctacttgggagactgaggcaggaaaattgcttgaacccagaggagatggagactgcatgccactgcactacaacctaggcaacacagcaagactctgtctcaaaaaaacaaacaaacaaacaaacaacaacaacaaaaacagcattatataaaagaaatacaggcctggcacgatggctcacgcctgtaatcccagcactttaggaggccgaggcgggcggaccacgaggtcaggagatcgagaccatcctggctaacacagtgaaatcccgtctctactaaaaatacaaaaaaaaaaaaaaaattagccgggcgtggtggcgggcgcctgtagtcccagctactcgggaggctgaggcaggagaatggcatgaacctgggaggcagagcttgcagtgagccaagatcacgccactgcactccagcctgggtgacagagcgagactccatctcaaaaaaaaaaaaagaaatataaatatttattcatattataaataattatggatgtccattaatgacctcatctgtaaacaagaagcctcttattggccatagaattttgggcaagttacttggcctttctgcatctatttgtttacctgttaaactaagatgacagatgttcattaaatggttgatgtgactatatcacaagcataactttagtgttttctattggcagaaaagtgtaataaaatatcaacaatatctgaaaggactgagacaacaactaagcacttcttcatctcaagcaggaaggcaaaagcaggccctgaacatgagaacatggtagtgtcaattcacagagaaagatctcacaagtctcaggtttcattaatatgtcatatgatgacctgcaggaacatatctcattcaaaaacaattaactaccttttgttgtaaagtgaaagcagccatagagaatacataaacaaataaaccaattggaatgactatcttccaatgaaactttatttatagacactaaaatttgaatttcacataattcccacatgtcacaaaatattactcttcttttgatttttttgcaaccacctaaagctgtaaaaaccattctcagctcataggccatacggaaacaggcagtagaaatatgaaatgttcttagacataatgatagcaagcatttactatgtatcatatgttctaagagacttataaagatttagttgtattatttagatgtattatttatttccttataatagtatttcgagaaaaacagcatcatcttcttcattctacaggcgaagaaactgatgtggaggtgacttaacaaatgagaggcagaaccaggatctgataccacaaaatctggctctaaatctatgttttcaacatctgtgctatactgctactaaaattatgaagacacaggactaggacagatagggaagaaaatatttcatcactggactgggatatgtagggaaaaaaatatttaatcactggagtgggtgggatatatttagtggccccccaaagagagcaacaagatatatactacattttgatgaattcaaaatgcagactatttttttttctagtacaccactttaaagcgtgtctggtgctttggtatcacaagctgtaaacttgggatccactctgtgaaacagcttggaaatgtcagaagtcatctatgaataaaaataaaaactgattcatcctgacagttaacctcttatttcaattttgaaatctttgcaaagactcatttgcagagacttctctgacaaagagaatacagttgaataatgcatttggacaaatatttagtgaatacctcctttgtgcttggccctgcagaaatgccaagttcaggtcattctccttattctcaagagagtttccatagttttccaataaatacaaaatggtataaatgaacagtcttgaacttgaagggtatataagccttgggtcacatttaactttaaaaaaagtaaacaaccacatgacacaactctagatgacagatactacagccctggcgtggccagctttggctgtccccaagtctcatctccctctaccatcaccattttgacaagtgagaccagcactcatgcttgcggctgggacactactgctgctggattttaaaatgttagagcacaaaggcgaacggtcagcacaatgcaaggggagaagccaggggggtctagcggggagcaagggctgcaaacaactgcagtgatgacacatgtgagggaagcaaacctgatgagccccaggcacatctggagaatcagctggctctgcaggctcaagtggcagctcctgctcagttctagctaagggtggccatatgggaattcaggttcactgtgggcagaacttctcatttttaaaaagaaggtggaaatctgaatttatatgtataacctcctggtaactgtaatttcctaaaacactgtgctaaacaaatagatcttgtctacaggcacaccaggtcatagggtgaccgatgagcaatttctgcatagagcatgaccacatataggtgaaatataggattaatcaaagaggaatgccttaaggaactggtcaactctggagaaaggccacacacaaatatgcacacacccacacacacacacacacacatacacacacacacatccacggactacagaatatgattaattgcaaatacatcacatatcaagaaataatgactcttgctcaggccaaaaacaaaggagtcattcctgattcatttcctttcacttcttctccacctctaacctacccaccagccctgtccttccacttccaaaaacacatcccaaacatgaccacttcttaccatggtcattgtgtcaactctagcccaaaccgccattatctattgcctgaactccagctccagccaactgatctctttgcttctacgtaagagccagaataattccaattttaatgtgcagaccacattgtgtcaatttccctgatttaccctaatgggcatccattacaggcaaatccaatccaaactccaaataaaaatcttgtgagatctggtcccaccctctctctgatctgatactgtattattcttaccctacttcaatactctcaaagcacaattattaatatttctaccacagatcatgtttttcagcaatagtagtagtaatagaaaaaaatctacaaaaaattgaataagaaagtaagatttagaaagtgcagtttggatttcttaaaagagtgaaattctaattctttgtatcaataacaaatcagatgcagaattgggccttggattttccagtagagagatagatcagtgcctactttctgtcatacagtatgcgaaaatcaaggctggtgaaagcagctcttgacttcacggcactcagattccaaatacagtcatgagtcacttaaggacagggatacattcagagaaatgcatccttaggtgatttcatcattgtgcaaacatcatagagtatatttacacaaaccgagatggaatagcctacaatatacctaggctagatggtatagcatatcactcctaggctacaaacctatagagcatgctactgtactgaataatgcaggcaactgtaacacatggtaagtatttatgtatctaaacacagaaaaggtacagtcaaaatatgatataaaagattttaggctggatacagtggctcatgcctgtaatcccagcactttgggaggccaaggcgggtggatcacctgaggttgggagttggagaccatcctggctaacgtggtgaaacccatctctcctaaaacataaaaattagctggttgtggtggtgcacacttgtaatcccagctacgcaggaggctgaggcaggagaatcgcttgaacctgggaggcggaggttgcagtgaaccaagactgcgccactgcactccagcctgggcaacagagagatacgctgtctcaaacgaaaaaaaaaaaaaagatatagtacacctgtataggacacttaacatgaatggtgcgtacaggactagaaattgctctgggtgagtggtaaatgaatgtgaaggcctaggacattactgtatactactgttgaccttataaacactgtacacttaggctacactaaatttatttttaaaatatttttctttcttcaataataaaccttagattactttataaatttttcaatttctttaattttttgacttttataataacagcttaaaacacaaacacatcacacatctgtgcaagaatattctgtttcattttgtccttattctacaaggctttttcaatttttaaaactgtatttttttagttttcaaacttttttgtcaaaaactaagacacaaacatacacattagcctaggcctacacagggtgaggatcaataatatcactgtcttccacctccagatcttgtcccactggaaggtcttcaggggcaataacatacatggagctgtcatctcctatgataccgatgccttcttctgggacacctcctgaaggaactgcctgaggctgttttgtagttaactttttttttttttaatgagtaggagtaccctctaaaataatggaccagacacagtggctcacacctgcaatcccagcactttgggaggccaaggcgggcagatcatgagatcaggagttcgagaccagcctgccaatatggtgaaatcccgtctctactaaaaatacaaaaattagccagtcgtggtggcacatgcctgtaatcccagctactcaggaagctgaggcagaagaatcgcttgaacaggggaggtagaggttgcagtgagccataattgtatctctgcacttcagcctgggcaacagagcaagactccatatcaaaataaataaattaattaaataatgataaatttataataaatacataagccagtaacacagttgttggttatcactaccaagtattatgtactgtacataagtgtatgtgctagacatttctacaactgaaagcacagtaggtttgtttacaacagcatcaccacaaatacctgatgacacagtttggctgtgtccccacccaactctcgaattgtagctcctataattcccacgtgtcatgggaggtgcccagtgggagataagtgaatcatgggggtgggtctttcctgtgctgttctcatgatagtgaacaagtctcatgagatcttatggttagttccctgcacatgctctctctcttgcctgacgccatgcaagacgtgactttgctcctcctttgcttctcaccatggcctcccagccatgtggaactgtgggtcaattaaacctctttcctttataaattacccagtctggagtatgtctttagtagcagcataagaacagactaatacactcgagtaaatggcattgtgctatgcccttataacagttacagcatcactaagctatgggaatttttcagcttcattatcatcttctgggaccacgatcatatatgtggtccatcaatgagtaaaacatccttatgtgacacatgactgtagatttaaacaaaaaacagtactaacataatatggcaaacacgttaaggtgaatttgcaaatctagcttggtgctgccaaaattgtacaaagaaacagatacagcagggagacagaatctgtcctatgacttacctaaacccattatcagcaatcaagttataactgcatataataaaaacagttggaagataacagattttaaatgctttcaaaagtaacatgtctgatgagtgtcatcttacaaacgaataacaaatttgagcccttcgacactgattattctattatttatttacaccctattttcaaaacaggatttgagacactctagttaattcaattaccagtcccattgtttactgtgtgtgtgtgtgtgtgtgtgtgtgtgtatggtgtgtgtatatatatatatatacacacacacacacacaaacatatatagtgtatataccataatatattcacactctcctcagattaatttgagattaatctgatgcccctgatagttcaaaatgatgcccaagcatctgataacattgtaaattttatggtctctctctctccctcctcatctgttttttgcaagaagttggttaatttaaaaattcaaaaagaaataatttaatgcaacatttctaaaccttttcaaattagaatctttaactcatgaaccccaatttcaacactgacacaaatgtagcatcttttacattcttgtaatttttcaatttcttaataatcaataatgcatcagtaagcactatgtacatcatcttagttaatgataatatatttatatgataatacatttttaaaccattatacaacaaaatgctacactttttctcttggtagtggaattaaaagtagtttgaacaattttctttggatttattgatttatctaatttttacaaagtttatgtattactgcataaaacaaataatagatgttttaaaaagaatgctgtctctagtcaagattaagcaaaatgataaaattaggttcatctcaattataaaatgtgtagttgaatcaacgaaatgaagactgtatgatatgtagtatttacttttatgattcaactctgtggtaaaagaacaaacacagcattgctttccacagagaagactgaaagtaaaatgagggcactgcaataatgcctaatgagttccttccacacctcgacaacagaaaaccagcaaaatgtgctccagtcacttaaacaattagtgactgcagatctctcagccgtcctctttaagaattctgggtggtcagcataagttgctaagaattgaaaaagattccatttagaagcttgcttggaaggagggagggagagaagaagaggaagagagaaagacaagagaaacagatggtgctggtcatcacagagtatgcctcattaactacagagcaatgatttacagtgtttactgtaaatgtgcagagaacactccgaatcagtaaatgtgcacctaccttcagaactataaaatactgtaaaacacatgccaaaccaagtaatatctttcagggaatcacaagtcatacagacatgtaacagaatgtttacctcgattttggtaagttaccggtatagtgatgataaaatctgggatgataagaaaccactgtggggctcagatacctggcggccagaggcaggggccactagcatactccacggacaatcaggtgagggctggaggctgaataagctctgactccaaattagcaagtaaaaaagaaaatgggctaaggacatgaatggacaattctcaaaagcagatatacaaatgggcaacaagaatatgaaaaaatgctcaacataactaatgatcagggaaatgcaaatcaaaaccacaatgccataccacttcactcctgcatgaatggctgtaatcaaaaaatcaaaaaccaatagatgttggcgaggatgcagtgaaaagggaacgctgctggaaatgtaaactagtacaaccactatggaatacagtgtggagattccttaaagaactaaaagtagaactaccatttgatccagcaatcccattactgggtatcaacccagaggaaaagaagtcattatacaaaaaagatgcttgcacactcatgtttatagcagcacaattcacaattgcaaaaacatggaaccagcccaaatgcccatcagaggtaggcatttggaaaaggagccattataccaaaaagatgcttgcacatgcatgtttatagcagcacaatttgcaattacaaaaatatggaaccagcccaaatgcccatcgatcaatgagtgaataaagaaattgtggtgtgtatatacacacacacacacacacacacacatatacacaccatggaatactattcagccatcaaaaaggaatgaaataatggtatctgcagcaacctggatgaaactggagaccattattctaagtgaagtaactcaggaatgggcaaccaaacatcatatgttctgactcataagtgggagctaagctgtgaggatccaaaggtataagaatgatacaatggactttggggacctgggcggggggtgcaggtgggagtgggggtgagggataaaattttacaaatcgggtacagtgtatactgctcgggtgatgggtgcatcaaaacctcaccaaatcaccgttaaagaacttactcatgtaaccaaacaccacctgttccccccaaaacctatggaaataaaacaacataaataaataaataaaaagctctgactctttatgcataccaggcaaggtctgtaggcaaactcaggaaacaatatagcttattccatgtatacacaactggcaatacagtagaaatgtttgaagaaggcagtccttcaaaagataggcttccatgagactagggtgaggcactggtaatagcactgattatgatagtgtaaaggtaaataaaatcaaagttcctttgttcaatatatataaaggagaggcaggtacactgctccttcccttcccttagggtgtctccttaaaacaaaatagacccaatttttttggtcaggaaatagataaatccagtctccagtttttcaagctaagttaaacacaggagttgttgagaaggtggacaagagactatcacaacaaggcacatctagttgtctctcacagagacaagtgttcattgttctttctcccactttactgaatatttgtgtgaaattctgtccagactttgacgtctttagccaactgcctgcatgcacttaaccatacatgcacacttaattgtaaattgtgttttctctgtattctatgttggtaaccagaggtaccagtgttggcagggttttttatttctccaacaaataataacaaaaataaatgtcagcttccccctaagtgtgactcccctcatggctggtggatggttacctgtggcaattgcagctaaaagcttcccaggccagatacagctggaaatgggtccagtgtctccttgctctgtgtaataggtagagattctctcccctcaaccactacctctcagcaatcccctcttgataccttacttcccaccctggcataagcccacccttccctgcaccaccagagcccatctctgaagctagagatggtggggccacaagaggctgaatgggaaagcacaaggaaggtggtcctgctcactccttcctaagtgaagggtgaaaagtcatttcctcccagttgatcaatttctaaactgatcgtcaattacaaagactaccaaatttgcttcacaattatgaataccaataggctgaatcaaaaccctgtattaagtactcatcaaagcatagcatattaaataatacttgacagttttaattttaatcatttgtttttagttttaaccaaggtgaagttcattttacaaacaattttgagacaaaaatcaaattttaaaaattcaaattgaatgaaaacaaaacaaacagcaacaacaacaaagcttgcataagtatagccaaagtatctggaagctggtgtttaagaatatggagtacattttattgttttctttttagaggtattagtgaatagacacaaattcacatttctttttaaggaaccacttgaatgtgtatggctcctaaaacaatcagttgagttgccatatgcatactcatgaaataaaccaatggcagacccaatgtgtaactcttcaagctcaagcctctactatagatgggatttatcttcacacaggaagcctgtcagcctctttacagtactaaagagaagactgaatatctagaggtggaaaagggtttgggctccttttattgcacctcctgtacaaatctccctccacatcttttcccacccttattttagtgattattaacttccaacatgaaaaaagtaggaaaacaatctaaaagcaatgtctcactgtctcctaaaggaaaacatcttaatagctctccatattggaatccataaaaaatgcttcatggctttcctctcttacgttctgtcaatttgaatttcaaggttggaattgtaacttacatgaaaacttggctcatctgtgtcttagaaaagagaaaagcagggatttgcacaaactcaagttcagcatttttaattttgcatattttctacctaacctttatttgtgaagcctctttagagaaccatctcaccaaatggataaaagaacttctgcaatttgtatgttttcagctctgccagatgagcagctctgaaagtcagccaaagaaaatgcaggctcaaagtcagagcaaatttcccaaagcaaagcaatgaggcctttgctgcctcccttgggagaccggccggctaacaagccagaggctctgaaatttagaaggggcaaaacactcaagtcatacacaccatacaatggaagaacgcgggcttaatgagccagtgctttttcccttttctgtttacgtgtggcacggatccacagatcaggactatcacagattcgaggtatatgatagggtttttattttgcattcctaagtaattatcatctcctatacacttctcagcaatgcctcaatatttcttcacgatataaggaaggtaataatgatcgattgcgtcttatggctatggaaatgtagaccaggtgatctgaaaaaattgactaataatttgcctgaggtcataaataaatgagcaggatatccagaaataagtgtttaatttcctaatttttagctttttttagataatcactttttctgagctcttcataacttttaaaaatccaagagccataatttactctacactatgacttctcaggatcctgaattccaaagcactgtatactccatgatatgttcacaaggatttgcagcaaaaagaatacatattttgagtgagcactgtcttggttactgtatattcatttacagttacaaattaaaagatggttttagactgatattattctcaagttctttaccaaatcccttatcaagaaaagaattgttctggctttaagttttaagtcttatttttcttcacagtgaatttaatagttagaccctatgtgaagaattgtattgggtaaataaaacaataatatgcattaagtccaagtggttatttaacaatcactgcagcacaactccaagaaatcaggtaaatagggaaagtttggatagctggatttgtttatttttgtcaataatgcagcaaaagtcctgatgcattgtattcatatccaggacttagcacaattcatgccatgttgcactcagtcctaaactctactcctgtctctccaatgcaaccatccccaagtggcttatgaacatatagaattaggcatattcaatgtatgtctatgtcattgtcattcatttatttattaagcctacaaatagtttactggatacctactaaatgccaaaagatatgccaataagcaaatagaaagtccctgcacccacagagtttatgtctaacctaggaaaaaaggctggcaactatttaaattacagtatggtaagtgcttcaaatcataacactttgagagtatacagcttatctaccctagtctgggagctcagaaaagagatccttcaggaagcaacatttaagctcagacaagcaggaaggggtaggagctggccaggaagagatagagaaaggactgtgtgcaaaggccagggagggcccaccgggatggtaagcaaaggccgtgtggctggagcaaaatgagggagcgagaggaaagtaaaataaaattaggagtaaattgggaggcagctatttagagctttaagaaccaagtaagaccaaaacatcacactatataccaaaaattatacaatttcaatttttaattgtgttttttaaaaaaaggaaaatgggcacccaacgaaagagcttacagaagagaaaaaggtattcaggtttaccctttagaagcaccgtagatactctcttgaaaatggaaggggaggccgggcgtggtggctcacgcctgtaatcccagcactttgggaggtcgaggcaggcggatcacttgaggtcaggagtttgaaaccagcctagccaacatggtgaaaccccatctctactaaaaatacaaaaattagctgggcatggtgacatgcgcccataatcccagctactagggaggctgaggcaggagaatcgctgcaacctgggaggcagaggctgcaggctgcaatgagccaagattgcaccactgcactccagactgggcaacagagctagactgtgtctcaaaaaaaaaaaaaaaaaaaaagaaaagaaaaaaaaaggaaagggagatggagaaggtggagcatggaatggaagaaccaattagcagattatcacagtggtccatgtattcaaggataattttccaacaaggtaaagtcataactctcaaaccaatgtgataataatgtctgtcaaagatttatttaactcattaattaatgagggacccagtaagctgttacaaccagttcaggggaaaatttttaaaaacacatgttttacacaagaaaaatgaaaactgaaatagatttgcaatagatgcaaaaactggtctatccaaggagtaataattaactgctttacaaataattttcatttttatggataagaatcatttgcatacctattttccacaacttacctagtcgtaaagtagctcaaaagtaattaaaggcagagataattcagatgcctgagctaacaggacacccactagttttttgcccattgtaaagtctctcaccattttttctaatacaaataacaatgccttggaaaagagacgtgtcactctacatagagtaagtggacaattttgaatatatgtaggtattggaattaacaaggctcgatgtttgattgacttttgatggggaggaggccacaaaggaaatatctagacaaatgtctgttttaaaacaaattcctaaatggcagaaggtgccatcagtgtctgtttggatttctcagcacagaggtcctgttgctctgtttaggaacccacactgtagggaagtagtggacccactgaaaaattatattgtaaaacccaccacaatgtaccaaaggacatggatttttaaaaatgaaaaaaaaaattcgttcccttcaacgggatttatttttttttcttgttctatcctcgcattacctagtaataccaggcatgaatacggtctttccccagctcagcaagagttaagccacatgggagtctatggaaatctcccagtctagaaatgtgttactccctctttcactatccccaattggaagcaatccaacttatggtcttaagacagccagaagaaagaaaaaataatgtggatgtttagtgtcactgccatgagcttcccatctccaaatattcataatttctcagataaattccttctaggttttgatttcttgctagatgaaaataaaagttttcagagtcatcccacgtttggtagtttttctccaaacaccatctccaaacactaacacagaagctgagcttagaaactaccatctccaaacactaatagagaagcttttagctaaaactaactataacttttactaaaaatgataaaaattaccaagtcttttccagtatcttggtaagaaatacaaatattccagggcaaacaatttacatgggacttaaagccccatttaattgcaaaataatagacattataaatgcacaaatttaaatatcaagttcatttaataaactagtctggtactaccagattttgttttctttgaggtctttttaaaggtgtcaatgacccaccataaatattgagaaatttcttttcaattattctgtctcagttgtcatctctcttcctctacaaaccctttccatgtcctattttactacctatttctctccattttcataaataggtaaaaagtaatttacccagtttcaaatgctctctaaacttaggtctaccaagtttaatgctttcaaaacaatcttcaaaattagttctaaggcaattcttccccaaagactaaattaagctgctaaaaactgcttcacttgttctatctaaacaattactgtgttatcctcgtgaataaccaggaaaaataatcttacttttatgagcaatcataagaccactggaataaaacacctcatatccagactcccagttgctaaaactacattctctggaaaatggtcacatgcagatgaatagttcaaaagtttttattcatgtcaagcccgagatgcacatatgttacctgtgtctctggaataaaacaaactaaaatttaccaaaacacacctgcatgtgatttggaataatcctacacatataactgccaattatgcaagcacctttatgttctaattctctgtatttttaaccctctgtcaaagttggttttcatgttccttacatactcacaggcaagataaaatacccctcaagataaactcgcaaagcccaaaaagcagtgaaatcaaataaccaactataaatattgggacgtggagcattttttaaactatgctgctactcaaagtaaccttaagatatcctcatttttcctcaagaaataccaatgtttgtctctctgacctttacaacttttgaaaagcaaccaaaaattttgaaaagcaactcttcattaaaatagcttttatactatttaaaagaccacaacagtgtttctctgagaaacttctatttttcatcttgttgtagaagagtcctaaacaatctgttatcctgaaaactctcctcctacctcaggcttagtgcacaaaattccaacaccaataactaatagataatcatattagaacagatttgaaaatagcactgacaattcctctcttcagcatgctctgcccctatgaaaaaatattgctcaaagcattgattatgttctaaatggttagaaatgctaagagtagatctttggggtgggggaggaattaaggaagtacacaagaaaaaacaacccacaaggcagataaatattattagccacatccacaagaataaaaatccataaatatttctgacagggtagaaagactgcctgaattataacatttggttttaaccaggcaaaatgaaatcatcatcctcttaaccaagagaactcaaaaattttcccaatgatatattcttttccaagatgtacccaggattcacagaatcgaaagcagctaactgctgccttagatatctggagaaggccaggtaaaagtcaatagcgtcccataaactatgtgcatgagaatttccgtttaaacatattttaggacagaataaaggaacaacaaatgtatctgcatactcagaagacttcggctaggtgacatttcctggggaaaattcactgcacttccaaccaaactccttcaatcagaatgcggcatctgaaccatcgaagtttttgaaagtctcagttacctttgaaaatcgagcatttatccatttggtaaaggttttcttctgtacgtcattgtgttcatctgtggaatggaaaaagaaagagaaggaaaaagtatgagagtctgtacctttagtaaagcaccaaataaggttatctctatcctggagagtttaaaatagtcctattagtcgagctccttgagcacaatgaggcggagctaatgcagaatgtgatgactgcccggtacacttatggagcccaacactgcctacaacagagggaggctcgggcacctttcccaagggaccaggttgtctcaccctaaaccccggagtcctgccatcagtgaccaaatccaggtttatcggatcaaatcagagccctactttccagctagtacccgtagcactttctgctacattttgtgcaagtaaaatttcagcataatcaaaatgtcagcatgctaaaaacaaaaattaaagttatccaataaaaactcaggaattcgtgacttcctccctcttcatactggtcctacaccctctagaatgacagtataaggtttatggtcaatcttgtaacccattttcctgtagtaagattggcatgaggttttaatgatcttgatctatacgaacttttacaggtagaaaaatcagaagaatttaaaaccattatccgttttggttttgattacaaattcattttctgagccataaaaaaaagaaaagttactttaaaagactgaccaccctgaacttttgaaatatgggtagaaggatttggttacatacaaggagtccatgtggctaacaaaaagagaaaaggactttctctttagaaccaaatagacggtgtcccaatccatttattgtgtgaccttgggtcattataacatcgcttttcctcacagttctcatctgtaaaatggggataaataatacctagcttgcaagagtattgtaaaggttagtgaatataaatgaaaagcacttgacgaagagctggtgttcagctcgttgttataatgattacagtaaaagtgtaagcaaggtagataaataaatattcattggacctcttcaaatcatactcttccatcactccacgattttctattaaagccagtaaaagagtcattgttggcttaaatcctacaaaacagcattttcacaatctctatcagttgttcagaaagctgtccaaggcgtatctgcgacagtgcagaaaggtgtggctccatccatatgtgtgtcctgcctcctttgccaccttttatactgctgggctgcctcccacatcagagcagcaaaataataatggaggaagcccaggtgtgcttggccctccagtgtcagttccacattaaatacagacctgctcacgaacctctgctaggatcattagaggttcgcctaccacttcacccagtttgtggtcttcggtccttacccccttgtggaaggagagtttgtaattaaaaggtcattcccagaataaatatagcagcagcttcagaaaaaaaaaaatgcacttttacaaatccataaaggtaattggagaccaactccaagacactaagggagcaagtggtatagaaaacaaaactgctgtttaagaaactccttgatattaatggtgctcagaggtgaccttccttcaagaaaggacagcaaagacagcaacgatccctatttcaagctttatattatctgatcaaggccacataagccatttattaaccaagagaacttgcttacacagtgaatgaccctttaccatcttcatatcaaagagggacacagtagagattatactcagaatataaggctaccaccacacatcaacctgaaggggggatataccagcctcaccaaaatgaatttaatattaaaaatcagtgtttagggcatttggaaaatccaattatttgtcccactaccttaaaaaggatttattttcataaatcttgttatatgcagtttcatttaatcccatgaataaaaaaatatagaaaggtcataaataagtattaaattatcttaatttgataacattcacacaacttaagaatttggggccataaaaatggaaaaaattctaagagagaaatcttactacattttacattttcttaacctgtttccggagcatttaactttcttatttcaaaaacatattaaaatatctaatactatgtaggtttctccccagatataaagtgggcaaagaaatgagcactattaccctatcaatgataataatctttccattttatcacatatgaaatgaaataaaatttatggattcccattcttatgtttgtaaaaatgagtaagataatatttcaacaatagtctttattttatgggtcaagtcaatgtcagaatataagtctaagtaacagacaaattatttgcctgtaaacgatacattttctaacatccaaatgtttcaaaaatacttcaaagtttataaacacacttccgcattcattctcttgatacagttaaaaatggggaaaagggagtacatatttcaaagactagtttgcattttccttttttcagacacacacacacatacaaacacacatacttcttattttctactagacaggaattcagtaaaagaacaagaatttgcctgtggcttttcaattatgagattgaaatgtaacaaatttcacacacttactaacctccacatcacaacaattaaggtaaacaatcttggcccagatctcgggcacgtaaaaatagcagacgagtaacaggacaactaaaactccgtcatgctattctgatcagccattttgtctgcctagaaatttatacagaacttccacagtctgaaattatttcaatcttcattatcaagccaattcgttattttaacttctccaaaacaaaaatgtgtaagaatgcaacaaacatactataacttgattataaatatatatgtataatattaagtgaatgaatataatttacactgcatatacaccttctctaaatgtattctttcaagctcccaaattcaaaccctgttttccttaggcttggatttttgaaaaccattttgtttctaaaagcctttgctggcttagcaaatcttatccattaatgacctttctccattagagggatgaacacgagactgaattagaagaagaaaaatgtgttaaatcccttaaggctgctttcccaaattcttcctctaaatattttgctcttcttaaaatgcttttgacatgctcacacagatccaaaggccttcactgctgcctagcctgggattttatttctgtgataggtaaaagaagtatagcaagacacatcaacaaaactgcttgataaatcttcaaggaaactggtttcaaaatgttttcacttcaccagctcaaatgggtatggaaaattgttttagcagaacgtagcaacatatatcaatttaaatcctaaactggaaatgtggcagagaaattaggagttgtttcccctatgaaagcacacaaatcacctctaaaactctactgttattagagagaaagcattatcctctagtacaccatttgaagcaatttaagagtgtccagttggctgacactaacataacatgagttccctaaagtgcagcttattattcaggaaagtagcacctagacctttagccaagaaagaaatctcttattggatgattttaaacttggattgattttattaaggcctctttcacaaatgcaaaacttaacacaccctagaaagccaatctctcgttagcaaagattattattttggaagtaacaaaagcatttcagatcatattctcatttcttctttttgtgggccctacatgtgaatcactcccaatataattctgccactcacacttagttatgccattatgctctcttgtttcatcacacccaatcacacccaaacactaattcatttattcaaacaatatttattaaaatgtcaaatgggaataataaatattatataataatctgtaaaatattataaatatgtatgtagacaaagaaacaaagccaacaggatacagactgctctcaaacagaaatgtttaacctccctgagtttctttcaaaatccgacatcctcagaggaccttaaaaaagccaaaattaaaaatgtagttttcagaattgtcaaaactacctaagtgtacaagaagtttagataattaacatttcaaatgatatttttgtgagtttgccacatttaaaccttgacgttattaaagctaaaaaccgcatttaaaacagagtttcacttcactctgtaaaaagctaaatacaagttgattttttttttttaacgatatgttttgctttagtttacaatgaactagttgcttggggaatgaatccgatgggcaataataacacaagtggaccatgtcttcccaagatgctgtgtcacctcactggctatcaaacctgtgaagccattatagtctcatttcttctgagagaagaagcccgcagggcagtgagctattcctggtattttcttgatcccaggggctggctcttcatgctctcacaagctgttctttttctctccgtactgctgtgtatgtatcatagctcctgggtgcttcttcataataacctggcctgccataaagataatgatcctgatatccagactagcctgaacaattgaagtaatatcactgtcctggataaccaataattggagggaaaaaaatgccagcacatgcttccatgatgttcttcagaggcccttgagtgtgcattaatgcaagaagaatcccagccagatgcccagtgaaggaagtccctggtgagaataagtgaaaaggcacaagtgtggcccaacaagcaaatctattgaggacaaggaagcccaaaatgttgacaaagcctccaaggcaatgatggttgttaagaaactccaaagcaaacaaaactcctggaaaaacctacagcacagtaccttccaaagccaggttcatccagaaattagagaatattgcaagagcaggtacaccaccccagggaacagggaaaacgtggtgatgacacaggcaaaccatctacttcccagtcatctttccagattattcctttccagagcacggacgccatattgaaatacaaatgccaatcatcagcaatggtgagcaggagacagcaggcaatgctgccagtctttctgctggtaactcctctctgccctaaggcaaggagaggtggaaatggtggaagtgagaagggaaaggaaaacaactccacttgtcaaaggagaaggctgaggcagaagttaaatgaattgtccagcatcacccacccagcaaatgctgggccacagagagaaccaggtctaactgactgtggagcctgtgttcaatgcacttccatgtaggaggaggttaaagataatttaatggaaagaaggctttaaaatatatcttgaaaaatagatgaagtatggttcatgcaaagatgggaaggacattctagatagaataagcctagtcaatacctcttcatttcagcctcagactcaatacctcacaaaaaagaacatgtttaatataattttggtatctacaagaaaacacagagggctataacatctaatgatgtcaaaataaggctaagacaatccaaatttcagaagttttcaatcctgaaaactgtatatgcccataaaagagaagaagggtatggagttaaaatatatgctttaaaaatgttcttgtaataaaatcgagattatctgaaaaaaatcaacctccttaagcaagcacatgctctgctagcatgacccaatgacccatccactctgcccaaaactgaaggcaattatggagccttgggatcctagaatgtctacagccacatctggactgcatttagaatttatatcatgttcagcatcagaggaacattttttttttttaagaccgagtttcgctcttattgcccaggctggagtgcaatggtgtgatcttggctcactgcaacctctgcctcccaggttgaagcggttctcctccctcagcctcccaagtagctaggattataggcgtgtgccaccaagcctggctaatttttgtatttttagtagagacggggtttcaccatcttggccaggcttgtctcgaactcctgacctcgtgatccacccaccttggcctctcaaagtgctgggattacaggcatgagccactgtgcctggccagaggaacatatttgttccagctgagaaccaacctaacccaccaaaactatccaccttactatcacggagccacagaggacaggagtaggaagtatataagagggtgcctgatgggattccatcctgtgaccagagaggtcaaggacttacccctcatgacatgcagttggatggtgccataaatcaaatcaagattcatgtctccttacctagctctcctcctactcacaagactgcctctttttaaaaacctgttttatggaggtataaaattcacctaccatacaattcatccacacacctaccatagaactcacctaccatacaatttacccatttaaattcacctactatataattcacccaattaaagtttacaattcaatcgtttttggcatattaatagattttttttaattgtggtaaaatacataacaatatttgtgatttcagtcatttttaatcatacaattcagtggcattagttacacctacagtgttatacaaccataaccactatctagtcccaaaactttttcatcacactgaacataaactctgctgtcattaagcaataagtccccatacccaccagcccctggtaatagctaatctactgtccgtttctatgcatttgcctatttaagatatgtcatgtaagtggaatcatacaatatttgtccttttgggtctggcttatttcatttagcataatgttttcaaggtttcatccatgttgtagcttgtatcagaacttcattcttttataagggtaaaaaatattccattgtgtgtataaactacagtttctttatccatttgtctaaagatgagcactagttgaccactttttggctattatgaacaatgtcacaatgaacactggtgtacaagtatctgagttcccgatttcagttcctttgggtgtagatgcaggagtgaaattgctaggttaatatacagtaattctatgtttagatttttgaggaaccagcaaactatttcccatagtggctgcatcattttacattttcaccataatgcatgagagttccaatttctccatatcctcactaatatttgttattttcctttaaaaaaaaatgtatagccatcctagtgtaagactgactttgaaaacacagaaactacctaacaaaacccccaaacttagacacctcctgaagactttctgaatgagttcaagtttaacagcatgctaacctgaagtagctgggattcagaaattgctttttcacatttaatccacaccatattgccaaatgattgatttactctcaaaatagttattttcagaattaaatgtaaccattaattccatcttctaattttagtttatttacttcttaacctgttttcttttcaacaaactcaagtttttttaaacaatgcataggaatataggagataatgtttttctacttgcactttctagagcgcctaaacttaaactgaaagaatgtttctaagatttacaggcatccgacactgtttgaaacttttcctctagaaatatattttgcaaaaaaaaaaaaaaaaactcaacatcttttctatcaaccatattatatgtgttgcaaatgcagaaaaacagactccatttatggtggtagagattgtaaaccttacatacaaacacttcactttgaatttttgtcctggagtgaagattttcattaaaattgctagaaatgtcatagaacaaggagggattatttaggacacagtgaattagtcataatgatatgagtcactgtcatgaaaagccaacagaaaacatttttttattgattgacaaaaggctaaacttatgaaagaaaatttctatgaaattaaattcctcactttattattatcaaataaacatctattatgttctacaaactgtctgcagaaatctcaagaaaaagcaactatctcattaacatataattctagatgtataagcctggaaaaaaaatggggaaaacattttgaatgtaaaaaccattccagtgatttgaccttcagactttctcatgacaagttctacttgtcaaaatagcagcaaaaatatgtccttgtaagactgctaattattcaaataatatttttctcattttaattactttatttatttcattattttcctcatgttatgagggatcttcctcataaattcacagaataaaacaatataatatccaagaaacagcaattttcaaacaaaaaaatgtataaaatatccaaagaaaaagagaacaatactttacccaaatatctctccagatgcatatataggaatgctatgttttctatagagctaatgtaggaaacctttcactgtatgccatgtgtcttctaagatcatgacaccgggtcatcatagtcaaataaaaaatatattgtgagagaatacatattgatatggtttgtctgtgtcctcacacaaatctcattttgaattatagctcccataattcccatgggttatgggaggaacctggtagaagataaatcatggaggtggtttaccccatactgttcttgtggtaatgaataagtctcatgagagctgatggttttataaggggtttcccctttcctttggctctcattctctcttgcctgctgccatgagagacgtccctttgccacgtggaactatgagtccgttatacctctttttctttataaattacctagtctccagcatatctttattagcagcataagaagagactaatacacatatatatgataattcaataataaattgaaaagcatcaagcagtgaatgagcattgtaaaagccaatgatgacattctgaagccaacaactccaatggataaaatggaccagcaataatacagtttggcttgcttccttacttcaatttagtcctctgtgtgtcagagcccatacaacaccttgagatagacaagacccagacaacagcaatccacatacattaaagcactgatctttccattcttccagacaggagagtctccaggtagcatcaaagaacaatgcaacctcaaaaaactcatgggtcaaagagaaagtgtctccagctcgtcaggattagacatctacaaaagtttacataaccttaagggccacaatgaacatcccctcaaacaaatctgccaagccttctttactacaccccatcatttggagaatcattggagcaaagactctccccctctttctctcctcttcattttcagaacccacctccttctgcctgttctacttttttgaacattcaaacctccctccatcctgcgtcactgaatattctttttcaacacccttctctgacgtgtcatgacacaggccgccatcttggaattctcagccacagagccatcctgctgtaccagtctgggctccctgcaccatgtgggtcagtctctttctaccatttctcttctggattgcctttttccatcgtttctttttcttcttaaaacttcctatataatgtctataatatactttagaagatttcaacatacaaagtgtaatatgcttgtgttaaactagtttaagtcagaagcttcaaacactcttgttcgtgaacttccaaaagaatttccatgcacattttaaagttgagaactgatatttatcataaatttaaatcgtgaaaaagatgtaatttctagcatgttgttaaggagttgcaaatttagctcattcaattaatagaaaatgcctcctctggtacctaattggcaaaactagtcctcactgtcaaactaatcagccaaagcagatttattttctgacaagaggagtctgacttggttttggatttaaaaaccatgttataggtgtttccaaataacatctcacttcagaattctctttctaagataaagggatggatggatggatgaatggatggatggatggatggatggatggatggatggatggatggatggatggcagctggacacaaagccttgccctggatgcaacaagcaccagccatttaaaaaatttgtaaaggattgctctttgttttgcattcttaaattgtcctcttgtttgatgcctcacagcaatgcagcacagtaaaatttgaggagagtgagaggtatgactttcttttataaagtcaaaaagaagaattatgaaaggaacgctaagaaaagagacaggtaggatgctatcttgggtgccttaaccactacaaaagcttgccaagatcacagtaagacacacatattccagtgtgcaaaccacactagaggctcacatttgtgccaagccagtataacattccagagaagttcagctataatttaattagaaaggctaaactccagagtggaccactacaaaggcatcagttatctttattttcatcaacaccagagactttgttaattaatgaatatgagaaatgtgcttttactgtggcttaataattggcataattagaatgttagaaatattctcccactgttgattttagtgttattcaatgaacaaggattggtcaaaatattttctagacatgccccaccactgattaaacagaatataaaaatctagtgagtctgggaggctagatccctaaaggtcctatgttcagccattggctggaggattttagttatctgctgctgattataagactaaatcctctccctaagacaacattgtctaataaaaagataatgaaagtcacatacataattttaaaagccgcattaaaaaacaggtaaaatgaatttttagtaatatgtactatttaacccaatatctccaaaacattatcatttcaacatatactcaatattttaaaacatcttgaaaatatattttatagtctttttttcttactaagcctttgaaatcctgtgtgtatattacatttacagcattatttcaattcagactagctacagttcaggaactcagcacccaatgcaccaaattatacagctctagaatattgctgcatttactttaactatgaccttcaaaaggacacagagctgtcgggcacagtggctcacgcctgtaatcccagcactttgggaggccaaggagggcagatcacgaggtcaggagatcgagaccatcatggctaacaggtgaaaccctgtatttttgtaaaaatacaaaaattagatgggtgtggtggtgcatgcctatagtcccagctactggggaggctgaggcagaagaatggtgtgaaccccggaggcggagcttgcagtgagccgagattgcaccactgcactctagcctgggcggcagagagagactctgtctcaaaaaaaacaaaaatgacacagagctgcagcttaccaactttacatgcaagctgtatgaactgtttttcgagcctacttgcgaataatgattgcttaatgaatgccaatgttaatggcaggatttggtctgaaacttgcctttattatgacccttataggaagacagtggcattgggagccaacattaccaatcaaaaaaaagccataatttataattacgcataatcaaattggcttaggtcattttgtaagacttctagtcaaataaactgacataataagaactggggaccaggcaagtggctcacatctgtaatctcagccctttgggtggcctccaggaaggatctcttgagctcaggagttcaagatcagcctgggtaacacagggagactctgtccctacaaaaaatcaaaaaagtgtctgggtatggtggtacatgcctgtagtaccacttattcaagaggctgaggtggaaggattgcttgagcccaggagtttgaggctgcagggaattgtgaatgcaccactgcattccagcctaggtgactgagcaagaccttgtgtcaaaaaaaaaaaagaactgggaatatttccaactctttgttatgtttgttgtcttaagttttatattttctagtctaaatgactaattgttattaaatataacaattagttgtacaactattttgtgaaaaacactgtacaaagaaatagtaacatttacagagcatctactatgtgtcagtcccaaaagagatccagatgttgctttcaaggaagctgtggtccagtggcctgggatgagtggggaagggactaagacaacagaaaattataactaatatatcaggtacagatacattcataaattcatagacaaatatgtcttgatggggatgaaaaggggatcacggaaagatttgaggaacaggttgcatttgagctagatcttgaattactatgtttggggcacgtaaaaatggttagaaaggcatttgtagaagagagaacagctgcagcaaagtcctaaaaacatgatgcagacacaactgtgaagaggttcctttggctgggtggttttttatcagagctgtgatgccactgaattttggaacaggctgcagttaaattgcagaggactttgaaggccacagcaaggggttaaatgagcaggtaatgtgggccattggcttttcctgagcaagagcgtgacatgatcagaagggtgctttagtgagattaacatgaaaaatggactcatggggagggaggccggaagaaagtaagccagtttgaggcttattagaattgcccgtgctagacatcagcgagcctgaaagagtagagaagtaatgagacaagaaagggggaggtggatgcaataggtattgaattgaagagagaaggttgctgctgggacgtggtgaggtggatgggcatgatcattattatacagcgtgtctcccgttctattctcaattagactctatggctcttaagagacaaaattttatttattagtgcttttgcctcacatatttaccatttatttgtgatgagaagacttaaaatctgctctctatgctattttcaagtatacaccaaattgttattaactataatcatcaccttgtacaatagatctcttgaagttattcctcctgtcaaactatattctttgaccaatattactccaagtcccccacccccatgctgggactggactactgaattattataagagtaatgaaggaaaggctgggcacagtggctcacacctgtaatcccagcactttgggaggccaggatgggcggatcatctgaggtcaggagttcaagaccagcctggccaacatggtaaaaccctgtctctagcaaaaatacaaaaattagctgtgcgtggtggcagacgcctgcaatcccagctactcaggaggctgaggcgggagaatcgcttgaacctgggagacagaggttgcagtgagccgagatcatgccactgcactccagcctgggcaacacagccagaccccgtctcagggggggaaaaaaaaaagagtaatgaaggagaaagggatgtgcaaaaacttctcagactttggtaacttaaagaatggtgtctctccattaaaaaataaaaagtgcaaaaaaaatttttttaagcacagaaagaaattgattaaggaaagaaattcctctttgcaccaaaaaatgtgagagattagcagcatactcaggtaaacttatcaagcaagcccagtgtgaaaggaaaataaacggtggggccccaaaaatcactaagctaaagggaaaagtcaagctgggaactgcttagggcaaacccgcctcccgttttattcagtcacccctctgctcgctgagataaatgcatatctgattgcctccttcggagaggctaatcagatattcaaaagaatgcaaccatttgtctcttattaacctatgacctggaagccccgtccccacttcgagttgtcctgcctttccagaccaagccaatgttcatcttacatatgttgattgatgtctcatgtctccctaaaatgtataaaaccaaactgtgctctgaccaccttgggaacatatcatcaggacctcctgaggctgtgtcacaggcacacactctcaatcttagcaaaataaactttctaaattaactgagacctctgtcagatattcagggttcataccaggaaaatgcaacattagagcagacaggagagggtcttcacactgaggagctcaaactctcacaggcatctagctttcccagtgtccatccatgagaactgtttaaaagtatattttcatgcattaaaaaggatactagcgggtagggcaaggtggctcatgcatgtaatcccagcactttgggaggcccaagtgggtggactgcttgagccaccagcctgggcaacatggcaaaacctcatctctacaaaatgatacaaaacttagccaggtgtggtagcacatggcatggtagcacacgccatggtcccagctactcaggtggctgaggtgggaagatcacctgaatctggggaggtggaggctgcagtgagccgtgatcacaccactgcactccagtttgggtgagtgagatcctgtctcaaataaataaataaataaataaataaataaataaataatattagccaggcagaatggtccacacctgtagtcccagctactctggaggctagggtgggacaatcgcttgaacccaggagtttgaggctggagtaagctatggttgtgccactgtactccagtgggacaacaaagtaagaccctgtctctaaaaaaaaacacaaaaggttaaaaaaatgatattcagatacatataatgaatatggaaagacatggaaggattttcacaatgtattaaggggtaataaagcaggtcattaaagaatatacacagtgcttcacttatacgtaagtgtacgtatgacagaaagccaagagccaaaatgttagcactgtatctgtacgttagaagattctgagtgactcttatattctattatttgttagccatattttctaagtttgtaataaatacgtaataccttctgtaacattttttctttaatgcacccatcttgtaaaaggtgtatttttctccactttaatgaggacaagtaggaaaggaagagaatttgtcagctaaaaaataaactgggctgacacaaggtctgtctgtctgcgggtctgtctgctttggtggaggatggtaagaataagggagacttctgcatatctgtatttacatgcagacaggaaggatctaggaggaagggagatactgtagatgccaacactcaaccaaaaacaaaaaaagctcccaaatcccaaaggatgggagacagaaatgtatcgggagctaagctcctaaactggataaagcccacatatttctaaaaatgaaacttgccggtttacattgctttatttgcacctgcctgtccagtgggttttccacttggaagtgaaaaagagtgctaattctctcttcagagagagaaataatgtaaaataactgtgtttatggaggtcactttcttcccagcttccagtctattcactacagaaacaccgtggaagagggagctgaatcatttaaaatacaccttttgcaataaattcaagtattttaaggcaaaatcattagttattaaaatgggaagaaggccgggcatggtggctcatgcctgtaatctcagcactttgggaggccaaggcaggaggatcacttaaggtcaggagttcaagaagtggacaatatggtgaaacaccatctctactaaaaatacaaaaattagccaggcatggtggcacgtacctgtaatttccactactcaggaggctgagacatgagaatctcttgaacccaggaggcggaggttgcagtgagccaagatcgcgccgctgcactccagcctgggcgacaaagtgaatgagcctccatctcaaaaaaataaataaataaaatgggaagaaaaaaatagaagattaaggcaaaacaaaatgctaccaacagatcacaccaaactacctagactttctccaaagcctaatattttactcactttcagaaaaagaatagaaacctgggaaaaaatgaggagtatctgtcctttgcttatgtactttgatgaaatgccaactactactataaatagcatttttttaaataagaaaaaatggagtatttcggaagtggtttttggtttttttttatattgagtttttttgtctttatttggagtgttttaatatccgccatgacaagttaaaaacaaaatgtaagatcataaaaaaaggaagaagagtcattttaataattaaatttgtaaaattgcacatccgctaaaatgcaatcctttgtccaagataaatatttataataagcaggaaaaacaagtcagaaaggaacactgcattccccttcaaaactcagggctaaaaatttcttcccatggacatcacagtttaaaaattggcccataaatcacagaactctttgcctaaaagggtataaattggaagttaataaataaaataattgaaaggtttagtctcatattgaaaaatacatattcttatttttaattttcataactatgaaaaggttcacataaactactaatactttttgtttgtttgtttgagacagagtctcactctgtcacctaggcttgagtgcagtagtatgatcacggctcactgcagccttcaacttccgaggctcaagcgattctcccacctctgcctcccaggtacctggagggcatgtgccaacatgcctggctaatttttgtatttttctgtagacacgaggtttcgccatgttgccctggctggtctcgaactccggggctcaagcagtccgcccgcctacaccacacaaagtgctgggataacaagcatgaaccactgctcccagccttactaatgaattttttaattaaaaagctcattcaggtagggttggatgagggggacagataaaatccattgcctgagcaaaagcgcaagaaacttcatttacaggccactcactttcctaatgacttccttcatgttaacttcttgtcactgttaaaaattagggttctgggccggggacagtggctcatgcctataatcccagcactttgggaggctgaggcaggtggatcatctgaagtcaaaagttcaagaccagcctggtcaacatgatgaaaccttgtctctactaaaaatacaaaaattagccaggtgtggtggtgtgcgcttgtaatcccagctactcaggaggttgaggcaggagaatcacttgaacttaagaggcggaggttgcactgagccgagatcgcacctctgcactcaagcctgagcgaaagagcaagactccgtctcaaaagaaaaaaaaaaaaaaatagagttctggcagcactgtctttatttaatagtctactgtgagtctgacatttattgcctttaaaagaaaaaatttgtaaattcagtctatactatcactgggtactgcaaacttgctaattatatcttcagtgtaaaatagctcttcctctcatttgtcttgaacatttgctggtcttttaagcatcaaaaagtccagataactgttgaaggttagaagaataagtttatgtttgcttttctgaaataagcttatagctggtaagtatgtcttctttccactttcatatttttagactgaagagtactgatcaccttagtcagttttacaaaagtaacaaatgcattcgctccgggacttgggtttccttcactagaataccttccactgttaaatcatttaagtaggagaccagaatctcagatcgtaatccatgtgcacagtcaacatggctttgcaaaggaaggataacgttctctgttttctttcttgtctccttcctaaggacaccccaaaacctagcgtttttctgcattacagcactgcaatggcatcttttaggaacactagaattactcccttccctgaacctatggactgtataaaatataactcgtgatcacaaatttttcttggaggttagcaagagtcaatcaaacaaaaagatttggatgaatgatctttcctcaaaactttagcatttccctcaagataagagtaagctaactaccattacctagggttatgtcaaggagaaacgggatctgagtaaaaagcatatgcaatgatataaccagaagaactgaaagcagaatctcagagatatttgtacatccatgttaataggaacgctattcacaaaagctaaaagatggaagcaacccaagtgtccacaaacagatcaattaattagcaaaatgtgatatttacataaaatggaataataaccagccttgaagagaaaggaaattcagacacatgctacaacatggatgaacatggaggacagtgtgctaagtgacacagccagtcacataaagaaaactatggtatgattccacttacatgaggtacctagaatagtgaaagtaaaatggtggttgccaagggctaggaggagagaggagtgaggagttgttgtttaatgtggcggtccctaacctttttggcaccaaaaaggaaccggttttgtgaaagacaatttttccatgggcggggcagtgggggaggcagtgggggagtggtttcgggatgaaactgtttcaccacagatcatcaggcattagttagattctaataaggagtgtacgacctacatccctcacatgcacagtccacaatagggttcgtgctcctatgagaatcgaatgccgctgctgatctgacaggaggcagagctcaggaggtaatgctcgattacccaccgctcaccccctgctgtgtgactcgcctcctaacaggcaacagactagtagcgacctgtggcccagggcttggggacccctggtttaatgggtatatattttcagtttttcaacaagaaaagaattcaggagaacgatggtagtgatggttatataacaagatgtatgtacatttcaaatggctaaaataataaattttatgttatctgtattttactgaaataaaacatagaggaaaaaaaccagatgcaataaacatttttcatgttcatttcacagtgttatttttttgaagaaaagagattaatttatctcaacttttcatatattcccctataagacaaatggagaaattgtacttggttccaattttgtcttttaatactcatattttcaacctatcattctttcagaatataattacaggtaacctgaattctagaatcagaattgttttcactctgatcatgcctctagacatggtatttaagatagaactatttgctggaactcactatggtacacactgctagttgcctactcaagcatcctttctctccttctcacttacaagattaatcccattttttttccctgtagcaaggtggccagttaaaatattcaccttgccttgcaactagagataaccatttggctcaattccgcccagaggaggggagaagtatattgggtggaagacccaggagaactattatttccctgataaaaattaacagacttggctggcatgaacatcttgccctgggcctttctgcttcctccaggaagacagaagctgccagtttccctgagcaggtaaccagccctgggttgcctacctacagactgaagcttacttgagaaaaatgagttctttcttagttaatctatcgtaaaagggtttctcttacttgcagctaaactcaatcctaactcaatctggtgccactgagataagtctgaggaaagaaattcaggagtatttctggtctacaagttggagttggatgttccagctctgcaaaaggaatgttaaacaggctgaaatggcctgggcgcaatgactcatgtctgtaatcccaacactttgggaggctaaggcgagtggatcacttgagcccaggagttcgagaccagcctgggcaaaatggtaaaaccctgtctctacaaaaagtacaaaaattagctgggtgtggtggcatatgcctgtggtcccagctacttgggagggtggggtgggaggatcacttgaacccaagagttcgaggctgcagtgagccatgatcacaccactgcactttagcctgggagacagagtgagaacctgtctcataaaagaaaataagataaaataagcctgacatgtcctataactctgatctaaaacgtaacactgaaggacagatgactggaatagggagatgcatgcactaaggatgctatcagagtctccatccatgaatcatgttttctcataataaaactgacatttattaaacactttctatgtgccagacacagggctaaccactttgtacacattatctcatttgatcccaacagccttataaggtaaaactcagctcccaactactttatggaactgctttttgactgctttatgtcttgaacaatttatttttctcctatatacaaagagggtaaaaatgcaacccttaaacaattgttatgagaattaaagataataatcagcatgcggcaagagccacatggttaattctcaataaaacccaactgtcatcatggtcaaaaagaatagtacactgcacaaattcccagatgtagcaaaacatcagaatcccctggagaattgtcttagaatacagactccttgactccagccaggcttaaggaatcaggtgcagcccagtcatccagagatgtgaaggaatctggtctaagggaataccaactgctgtattctcaagataataaaaactttaccactttgttataccaaatcatcacaaagcttacctaagccacatataggaatctaccctgtgcctgcacaactgccttcacagaacctacattttaaagtatgccctctgttttcccaagacttaagaacatcgctgtagcttatgtgaaattgctttaaataaaagaagacatacatgtggccaagcatattaaaaaaagctcaacatcactatcattagagaaatgccaaccaaaaacacaatgatataaatttcacaccagtcagaatggctattattaaaaaggcaaaaaataaaagatgctagcgaggttgaagaaaaaaaggaacacttacacactgttggtgggagtgtaaattagttcaaacactgtggaagacaacatagcaattcctcaaagacctaaagacagaaatactatttgacccagcaatcccattactgagtatgtattagtctgctttcacactgctgataaacatatacccaagactgggcaatttaccaaagaaagagatttaatggacttacagttccatgtggctggggaagcctcacaatcatggtggaaggcaaggaggagcaagtcacatcttacatggatggcagcaggcaaagagagagcttgtgcagggaaacgcctctttataaaaccatcagttctcgtgagacttattcactatcacaagaacagcatgggaaagacttgcctccatgattcaattactcccactgggtccctcccataatacctgggaattcaagatgagatttgggtggagacacagacaagccatatcagggtatacacccaaaggaatataaattgctctgttacaaagacattgcagcacagtaacaaagactttgaatcaacctaaatgcccattagtggtggattggataaagaaaatgtggcatatacacactatggaatactatgcagccataaaatggaatgagatcatgttgtttgcagggacatggatggagctggaggccattatccttagcaaattaacatatgaacagaaagccaaataccacatttctcacttttaagtgggagctaaatgatgacaacacatggatatatagcagggaacaatatacactggggtctattggagggtggaggttggggggagggaaacgatcacgaaaaataactaatggatactaggcttaatacctggatgatgaaataatccgtaaacaaacccccatcctgtgacacacatttacccatgaaacaaacctacacatgtaccccttaacttaaaataaaagtttaaaaaagaaatccttcaaatgaaaaaaaaaaagaaagaaaaaaagaaaggaattgctttagagggcaaggtgcctcacttctgctcactttggggaccaggcataaagcagggtgtcttgacaaagatcagagatcttctttgtatcattttgtcttggctgccaggaagttcagagccaaatgttgtactttaatttttctcaatcaagtttttttttcttttttgaggcttcaggctggagtgcaatggcacaatcatagctcactgtagctttgacttgtgctcaagtaatcctcccacctcagcctcctgagtggttcagactacaggcatgagccaccaagcccagctaatattttaaaaaaattattttagagatggagtcttgctgtgttgcccaggctgatctcaaactcctgacctcaagcaatcctcccacctcagcctctcaaggtgctgggattgcaggcatgagccaatatgccgggcccctcaattgagtttcaactatcattattttcattatttttctttattttgggaggggatattttcaaacattttattacaaaagcaatttccatttattaaggaagatttagacaaaccaaaggaaggaaacttaaaccacccattttccctctgcccagagataaccagtattaacaggtttatatacatcctcctagacatttttgtctgcttcttccttacatagtattttatatttatttaaaatactttataaatctgtttttattacagtgcacattctttaataatgtcattttaaagcttcataggtattttattgtctggacattaaataattttttaccaatatctcccactctgttattatgcattcctaatgctgatttccattcttaattttataagcatttcaataacaatcatacttagaattaaaattttgaacatatacatgacatttatttattcattcttcattcattcagagaataaattcttaaaaatgaaagtcaaatacacattccagtaggcttccacagaatagaacactccctgcctgaaaaattcttctcatcttcccagattccatttcttccttctcctccactcctccacagcagatcctctacaagttagatttcctaaaggatcagtcttggacctcttcacacttttactaagtggtcacgcatctactcactccacagcatctatgtgcaaaactcctaatgtcttatttccagcccaaacctttcttctcaattacaaaatcatgtgtggtggttttaaaatacattcagaaattatttggtggctgtctattcaagcggggggcttaattccccacccactgagtatgggctgaaattggtgactcacttctactgaatagaatatggcagaagtgatgagtcggacttttgagactaaaagtattacagcttcccctttgcattctttcatatctctctcactctaagagaagctcacagccatgtcatgaagacactcaagcaccctagagagaggcccacgtggcgagaaactgtggccttcgaccgagaaccagcagggaactgagaccttctgccaaaagccatgtacataagccatcttggaatcagatcctctagcctcggtcaagcttcagatgatggcaaccctggccagcatcttgagtgcaatctcatgacagaccctggactggaatcacctagctaaaccacttcaaaattcctggccaaggaaactgcatgagataataaatatttgctgttttaaagcaccaatgttggggtgacttgttacagagcaatagataactaatatagatttgctgctaagtttcataataatttattatgcagcaagagataaacacatactatgtaactaaccacctacttgacatctccactgagatagctcacagactcatttcaaccttaacccatcaaaaaactgaactgttgcttctctctcaaatctattctgcctctagtctttcccaactacggaaaagcactttcatccattcactggttcatgccaggatgctgaaatgaatcctttcttctaataccacaatctaacccttctatcaacttttgttggttctaattcctaaatacagcttgagtccatccacatctcttcagttccactgtcaacccccagtccaagctactgtcatctcttgcctccagcctaaagccaataaccttctgacactgtctcctaaattctcttcttattccttctaatcaactctctgaactttggaacaactaaattaacatggttcatatggccctgaatcatctgaccactcctatgccaagccttgtcttgaaacactcaccctcctcagtttgctccagcacactgaccttcatgttactctgacaaacccagccctttcctgcctcgggatattggttcatgctgctatgcctgcctccttcaccctgttctcaacctgcttaattcagacgaacattgcaggtttaattttaaacatcttctcttcagagcggacttctggacgactcctccagtctctaaaggcaacctgttttccttccttgtgcacccagtacttatcttaatttgattacatattgttttgggtaagcccaagagggcaagaaatgtcaactttgatctctatagtatatgcagttcccaatacaggttgtcaatttaaaaaatattgaataagcttattgaaagtgtttattaagtctaaacacagagtgtattcaatctagacctctaacttgtccatttcaatagaaagaacatgaatctgttatatgtattgccttttcaaccttctgcaaaattgcaagaccatcatcatcaagatgatccactgactgtttttctcatcttttccacatgtttaaggatcctttaattcttggcaaagatgaaaattgacttctagaaacattaaaaagaagaaaagctggtataataatagtccctaaaggcagaccacaaaagcaattctaaagttcattagaaaattaaattggcccctgattgatctaaatgggaacattttatcctagtgtttagagttgtgatgagtaatcatttccctttccaaagctcagtgttttataaaaacagggttgatcatgactctctgcaagattattttttggtgaagaaatcagagactcactgatggaagaaccaagaaatactaataagggcatgctgaagcacagtgtaaatcaacagtgccctgtcttttaacttccagtaaataagacactgacttgtaaccagagacagagtaggtctgggagccagccgactctgtgggttctgaggcagagccacacacagggagcagccccacaacagtgttcacagtgactatacagaaaagaaactgttaataatggcactccggtagaaaaaatagcaacaatccatgcctcactcttgccacctgcattcatacacacagactctcaggctagcatcaaggctctgaattcaaagatcatatagggttatgtatatatatgtaatcactccaaactttgataagtggcacagattttaacttaatagatttatgggaaatacatggtgatagaatatgataaactcaactctgtaacaagcacatgtatattcctgcacacagaaagaaatgttacttggtacaggccgggcaccgtggctcacacctgtaatcccagcactttgggaggctgaggcaggtagatcacttgaggccaggaggtcaagaccagcctggccaacatgatgaaaccctttctctattgaaatacaaaaattagccaggtgtggtggtgcacgcttgtaatctcagctactggggaggctgaggcacgagaatcacttgaacccagaaggtagaggttgcagtgagctgagatcacaccattgcactccagcctgggtgacagagcaagactctgtcccaaaaacaaacaaacaaaaaaagaagtgacttggtatagaaaaatatataatagtcacagatttgaaatactatagctttggtcactccatttattgtgacaaacagggtgcatatttttctaatctgtagcttagagcacagtattattaatatactgtactattaactatgatttattcatttctataaaccaagtaataaagttagaccatttttactttggtaaattcttcagttctctagaagtgaaatcttggtaaaagaatttaaccacaggcacctatagcaattttatacataattctttaatttgcaaattaccagtagtaactaaactatttttttctaagcaataaaaagtaaagaacataatgctataaatgtttaggatacaataatcattctagaaaaattctagaaatctttctagaaaaattcaaatcagaatgacactgggaagcctgggcatggtagctcacacctataatcccagcactttgggaggccgaggagggcggattgcttgagtccaggagttcaagatcagcctgggcaacatagtgaggcctctgtctctacaaaaaactttttttttttttttgagacagagtgtcgctctgtcaccaggctggagtgcagtggcatgatctcagttcactgcaactcacgcctcccgagttcaagcgattctcctgcctcagcctcctgagtagctgggattacaggcacacgccaccacacccagctaattgttatatttttagtagacaccaggtttcaccatgttggccaggctggtatcgaactcctgacctcgtgatctacccacctcggcctcccaaagtgctgggattacaggcgtgagccacccggcccgacccaaaaaacttttttaaaaaaagcaactgggaatagtggtgcacacctgtagtcccagctacttgggaggatgaggtgggaggactgcctgagtcccagagttcaagactgcaggaagctgtgatcgtgccactgcattcagcctgggtgacagagtgaaaccctgtctcaaaaaaaagaaaagaaaaatgacagtgggtatcaaaaacccattacaacttataaaaaggctgctaccctatgtgggggggaagaaaacatgccataaaacgccaggcagaacgtgctgattgacagagaccaggctgtgcactagaccagaagagtggtgccctgaaacaaagaggtggagctaggaagcaaggactccaacatctaaggccttcaatggatacattccaaccagcaagcaacacccaggcagccgcctggcagggcaaggctagattccaccaacgaggtgaatcccccctaaaaatgaatcagagtcacagctttatcaaaggtcaaagtgaaacactgagaatcagtagccaggcaaaagcaaacaagggtacagatatatagcaatcaaagacaactcaaacaaggccacatatccaaacaaagagcctggaaaacaaaaagtcaccatgacacccaaccaccaggaaactgtgaaatgatcttgagattgataataatgaaattagaacaccctttaagcttaaggaaagaaatccagaaatgaaaggtatagcccagatcacttttagatctgtgctagatagctaatatgcatttccctagccataatcaaatattctaacatgcttataaacgctgagttattaatgtttacacacttgcataaatatcatttagctcttataaccataaaatgccccccagtctcatctgttaatagttctaaaaggatcacagcgcttaggatatggctgacgcatttagcaaacataatccaaatgttaattctagataaccaactaaagaatagagtccatctgggacatgtattttacgtaaaatattttcaaaaaacattcaagtgtgatgatgttagcatagtgcactactagaagtctcatactatgtagctactgcccaaaagaagtaaaaactccttgtttaactatgggagaaaacatggaaaggatagttcatcaagattgaggaattccagtattttttaagtatttccttttagttactttttttttttttttttttgagatggagtctcactctgtcacccaggctggagtgcagaggcacaatctcagctcactgcaacctccgcctcccaggttcaagtgattctcctgcctcagtcacccaagtacctgggattacaggcgcaggccaccacacccagttaatttttgtatttttaaggctgggcgcggtagctcacaactgtaatcccagcactttgggaggcaggggcgggcggatcccgaggtcaggagattaagaccagcctgaccaacatggtgaaacctcatctctactaaaaatacaaaaattagctgggtgtggtggcacgtgcctgcagtcccagctactctgggagctgaggcaagagaatcacttgagcccgggaggcggaggttgcaatgagccgagatcacgccactgcactccagcctggtgacagagtgagactccacctaaaaaaaaaaaaaattgtgtttttagtagagatggggtttcaccatattggccaggctggtctcaaactcctgacctcaagttatccgcccgccttggcctcccaaagtgctgggattacaggagtgagccaccgtgcagggcatcttttagttacattttaacatccatgctctttttgtctctactgattcattttttaattttgttttgttatacatatttttgtaagccactgaacctagaacaaagtatggagttattaacaaatgtaaaatatttaccttattccatgaactaaactaaaattattcaaccaaaaataaaaaactaaaagaagattgaggcattccatagcgttatcctattcttggtttctttgctttctctccatcacgggagttgagagtacccaattatataaatcaaataaaagaaagtaagaagaaaaatctataaatgccatatgatctgccaagaagtactttattttatagtaagaagatgcagtgtaagcaaatggataacacatacacccacggtaattcaaaggctctccatcccaggacctgttcacaaatgcagacctttgaaaatattctgcaagcactgagtggctaatatttgtgtaatttgaagaaaagaactagaaataatataaccataagaaattgatatttttaggaataatgaatggaattgattttgtagtaacaatgaaaatgatgacagcagcagcagaaataactaacacatagagtgcttaccatgttaggggcatggtaccacctcccagctattatcctattttttgtcattgggatgtaattcacacgccataaaatccatccggatttaacggatgtacgattctgtggttttttactgtatgcacaaagttgtgcgacaatcatccaatcttaattccagacactttcatcaccccagaaagaaacccattagcagttactcccccattccctgccagcctctgagccctaataaaccactagcctactttctctctttatggattttccagtggcagacatttcatataaatggaatcataggatatgtcaccttttgtgccagacgtctttcacttagcattatgttttcaaggcccatgcatgttgcagcttgtatcagtcctgtatttcctgtatggctgaataatactccattatatgaaatgaccatattttgttgatccattcgtcggctgatgggcattttggttgtttccactttttgcctattatgaataatgctgttatgaatatccatgtacaagtttttgtgtgaacatatgttttcagttttcttgggcagaaaacttagagagaaattactgagttatatgataactcaaagcttaactttttgtagaactgccaaaatattttccaaaactgctacactattttacattttcacaagcaatataaggttctaattttcccacatccttgccaacacgtatttctttccatttttattacagccataccagtgggcacaaagtagaaaaatttcgctatggttttgatttgcatttccctaagtgactaatgatgttgaccatcttttcatgggcaataattattagccaattgtttatcttttctggagaaatatctattcctttgctcatttttcaattgggttgtctttagattgttgagttataagaattcttggctggacatgatgactcacgcctataatctcagcactttaagaggctaaggtgagcatatcacctgaggtccagagttcaagaccagccgggccaacatgctgaaacacgtctctacaaaaatagaaaaattagccaaaattagccaggcatggtggtgcatgcctgtaataccagctacttgggaggttgagggaggagaatcgcttgaacctgggaggcagaggttgcagtgagccgagatcacaccactgcactccagtctgggtgacaaagcaagactccatctcaaaaaaaaataaaataaaaaataaaaagacttctttatctattgcggatactagacctttagcagatacctaatttgcaaatattttctcccatcctctggactgtctttcacttgcattttcttattttaatcctcacaacagccatgaggtattattgtggctattactatcccatttaacagatgggaaaacagagctgacatacacaactaataagaactggagcagagtccaacccaggcaatctgcccccaggcatccataggacatactgtcagaagcgctgagctcattagatgctatagcaataggcactaaataaaataagcaggattaaaaatgattaacttaaaaagaaacagtattactggtgctttgcacagaaataccagaaggcccttcttaacttgaggaggaagagtggcttaaaataaagcacattcagccttaaaaggaaggcaaaacttggcctttaaacactgtctattcttttcaattgtaggaaactttctttcttattgagttatgtagttgaaacaaaggaattcagaatacaaatggtatttttgctgagatgcaaacattgtaaatagtcacagtgggtgttttgttaggtggaggcctatttcttagtcaacaaccccctcttttcagaatgtatgcctccccagccctacgcacccactctctgagatgatgaacaaagcagagttttagcaactaagatatcactccaatctgtcactccttcttctacccttatttctgccaccagctatgtgaaatataaaagttaatctgcggccaggcgcagtggctcatgcctgtaatcccagcgctttgggaggccgaggacggcagatcacctgaggtcaggagttcaagaccagcctcaacatggagaaaccccatctctactaaaaatacaaaattagccaggtgtggtggtgcgtgcctgtaatcccagctactcgggaggctgaggcaggagaattgcttgaacctgggaggcggaggttgcggtgagccgagattgcgccattgcactccagcctgggcaacaaaagtgaaactccgtctcaaaaacataagcacataaataaaataaataaaagttaatctgcaaagaactttagtatgtctgtagaattaggttcatggtaaataatgggtaatagggggatttaaaaaagcatgctagatctactaatactggcatggaaaggaattcagtatatttagctaaggaaaaacaaaacctgtaaacaatataaataatatcatcttgtatttattaaaaataggcaatataaattcatattttaatactcacgttagtaaatgcacataaacaaaaaaagtcagtggggagagaagaccctgttgaacttgactctattctggcacagtgaagagacatgagaggtgtagaataagtgggaggcccccttgcagggatgagtcaggggactggggacagtgctaggtggggagtttgactggggcagtacacctgtcaaacagtaatgcaggtgtcttaaggtgagctcagggaggacagaaacatcccatggagcaaaagggcaaaagctcacttgatcttgattttcagtacgaatacaggccccatgtaagtctgaaatccaggaggacagtcaaatcataaagctccaaaatgatctcctttgactccatgtctcaaatccaggtaatgctgatgcaagaggtgggttcccatggtcttgggcagctccgaccctgtggttttgcagggtacagaccctcctggctgctttcacgggctggcattgtctgtggcttttccaggtgcacgatgttagctgtcagtggatctaccattctggggtctgaaggatgatggccctcttctcacagctccattaggcagttccccagtgggaattctgtgcgggggctcccacctcacgtgtcccttccacgctgccctagcagaggttctccattagggctctgcccctgcaacacacctctgcctggacatccaggcatttccatacatcctctgaaatctaagtggaggttcccaaacctcaattcttgacttctgtgcacctacaggtccaacaccatgcataagcctcccagggttggggcttgcaccctttgaatcaacggcctgagctatacgttggccccttgtagccatggctgggacacagggcaccaagtcccaggactgcacaaagcagcagggccctgggcctggcccactaaaccatttttccctcctagacctcctggcttgggatgggaggggctgccgtgaagacctctgacatgccctggagccattttccccactgtcttggggattaacatcttcctgggaagccctccaagttcttcaaagctctgcctgttacccagttccaaagtcacttccacattgtcaggtatcttaattagcagtacccaactctaccagtacaaatttcttgcattagtccattttcatactgctgtgaagaaatacccaagactgggtaatttataaagaaaaagaggtttaatggactcacagttccacatggctggggaggccttgcaatcatggcagaaggtgaaggaggagcaaaggcatgtcttacatggtggcaggcaagagaccatgtgcaggggaactgccctttataaaaccattagatctcatgagacttcaatatcacaagaatagcacgggaaaaacctgccctcataattcaattacctcccaccagtttcctcccacaacatgtgggaattatgggagatacaattcaagatgagatttgtgtggggacacaaccaaaccatatcagagggttccccactaggagtagggtgtaatttgttttctgttttgttttcttttttgagacagagtctcgctctgttgccaggctggagtgcagtggcacgatctcagctcactgcaacctcaacctcctaggttcaagcgattctcctgcctcaacctcccagtagctgggactagaggcacgcgccaccacaatcagctaatttttgtatttttagtaaagacggggttttaccatgttggccaggatggtctcgatctcttgacctcgtgatctgcccacttcagcctcccaaagtgctgggattacaggcgtgagccaccatgcccagcccaggttataatttttatgtgatgaaatgtttgacttttaaaatacaactacacaatattgtatttaaaaagaaagaaaacaactaagggtagcactctgtcagatggtcctacaaaccttataagccatagaaatgaataaacaaatatgaatcaaatgaacgaatgaacagatctgggtaagttttagtgacttcccaaacttcttaaagttatgagaaaaataatgcatgtcctcacatatgtgaatttgagcacaggcagaaattctataacctccacatcaatttttttaaagacctctcaatccaaaaaaagtttatgaacactatcttaagagaattctataaggtctcattttatgaaaggtcaaaacagaaattaaaagataaaccaaacaaaacaaaatcccttaagtcaaacacagtaaaaagacaccttgtaagtcacaaaagaactgtcattagagctctcttagatcctgatctgtaatttccaaactgccactaaacggaccctaactttaaaaaaccttatcatttattcatttataatcctttttttttctttttttgcgacggagttgcccaggctggagtgcaagggcatgatttgggctcactgcaacctcctcctcccaggttcaagcgactctcctgcctcagcctcctgagtagctgggactacaggcgtgcaccaccacacccagctaatttttgcatttttaaagtagagatggggtttcatcatgttggtcaggctgatctaaaactcctgatctcaggcaatccgcctacctcggcctcccaaagcgctgggattacaggcctgagccacccagccatgcttatcatgtatattccttaatggtaaagatatgtttctctttcctaaggccaaaaaacaaggaatctagcatataaaaattaacaaattaacatataccaacaaattatttggtccattgctttaaaaaatatttattgagcatctactctgtgccaggcttgttattcctttaatgtcatatgtctttctggtttgatatatgtcacagttttctttcttctacacactgcaggataaagaaactgaagaaatcaatggccagaattaggttatcttcaatgtccacgtgataattcccaacagcctgtaccatggctttttatgagacatgaaaagggaaagtagcaacaagcttataggatctcagtctttagatcactaaggattatcagtaataaaggaaacagaaggcggggtgcagtggctcacggctgtaatcccagcacttcagaaggccaaggcaggcagatcatgaggtcaggagtttgataccggcctggccaacatggtgaaaccccatctatactaaaaatacaaaaatcagccaggcgtggtggcgggtgcctgtaatcccagctactcggaaggctgaggcatgagaatcacttgaaaccagaaggcagaggttggagtgagccgagatcgcactactgcactccagcctgggcaaaagagtgaaactccatctcaaaaaaagagaaagaaacagaaacttctccttatataggggttttcacattcttaggatttttctcctggtcgccccccgccaacaaattactgtcttcttgaagataagtttctccttgaaaaataaaagctcgtagaatttatccatataagaacaaaagattcaggcagtatctaacctagtaggttactatgctatcgctacatctgtttgtctacgacaaaatccttacttaattctaacagtaacttgagtttttcagaaatgcataatagaaaatattctattattctaaataatttagatattattcaacaactgcattgtctatataataattgaggaaagtcataaaaagaacatatctataaaataaaattcacatctgtaaaattaaccaaaaaaagtgacagttctgagtaatgtatgtataattatcttggaaggatttttttttttttttaacaaatccttgactcatgtataatcctttattaaaaacgcaggtagaggggccgggcacagtggctcacacctgtaatcccagcactttgggaggcagaggcaggcagatcacttgaggtcaggagttcaagaccatcctggccaacatggtgaaaccccatctctactaaaaatacaaaaaattagccgggtgtgatggcacgcgcctgtagtcccagctactctggacactgaggcaggagaatcacttgaacccgggagatggaggttgcagtgagccaagattgcgctactgcactccagtctggatgacagagcgagagtccatctaaacaaaaaacaaagagacaaaaaaaaaatgcaagtagagataccatctcacatcactcagaatggctattatcaaaaagtcaaaaaataataggcactggcgaagtggcagagaaaaagcaacacatacacactgttggtaggagtgtaaattagtccaaccattgtgaaaagcagtgtggcaattcctcaaagacctaacaacagaaagaccattcaacccagaaatgccattactgggtataaacccaaaggaatataaatcattccatcatgatgacacatgcatgtgtatgttcactacagcactattcacaacagtaaagacatggagtcaacctaaatgcccatcaatggtagactggataaagaaaatgtgttacatatacaccacagaatatgtgcagccataaaatagaatgagatcatgttatttgcagaaacatggatgaaactgaaggccatcatccttagcaagctaacacaggaacgaaaaatcaaataccgcatgttctcacatttaagtggcagctaaatgatgaaaacacatggacacatagaggggaacaacagacatgggacctaccagaggctggaagatgggaggaaggagacaatcaggaaaaataaccaatggctattaggcctagtacctgggtgatgaaataatcagtacaacaaacccctattacacaagtttacctctataacaaacctgcacacgtaccccagaacttaaaatcaaagttaaaatatatataggtaaaaatttattgatagcaacatctcccacgggtatactctcctggctttcaagtgaataaacatgagctgtactgctttaacacatcaacttttatattcatgtgacgattacgctgtttattgtgtcagaaatagaatgcgatgcacatacatctctatcagctgccataatattttaagttaatgaaaataaattcccaggccaggtgcggtggctcacgcctgtaatcccagcactttgggaggccgagacgggtggaacacctgaggtcaggagttcaagactagcctggccaacatggcgaaacccagtctctactaaaaatacaaaaattagccaggcgtgatgacacatgcctgcagtcccagctatgcaggaggccgaagcaggagaatcacttgaacccaggaggcggaggttgcagtgagccgagatcacgccactgcactccagcctgggtgacagagcaagactcagtctcagaaaaaaataaaaataaaacttccttccatgaacgaaatgatcattgaatccacagatcaccaaaaaaataccttaagtaatctctgaacttcttcacttttcataaaattggagttatttaaatcccacttttagtttggctactcattttcttcccaagtacatttgaacactgtggtgaatgtttgtcgcttagtaacaatcctgccaatgacactgagagaaaaccattaaatcacattaactgaagcatgcaatttcagaataaaatgtgaaaagtggagaatcctaagtggtttatgtacatgcttttgtcacaagaaagttgaccatctcctcctcatgatctactccagaattccaatcctaggctggccctaaagttgaaagtacttgagtcattccttccctttttccccttcatcagacaaacatatgcatcataacacacacatgaacaggaaaagcttcttctaacattatttttaaaattaattattaaatcaactgctaaaagaaaggcatgaaatttatttcaggagaaagcaggaatgattggagaattatccaccactctcaattctttctgcagatgttcttttttaaaagaagtgaaaatcaagagctacgcaatgtggcaagcagaataatacatcttcttcctctccacttgcaaaagaggcccatgtcctgtgagtaccttaggttacacagcaaggggtaaattgaggttgcagatgaaagtattgtttgctaatcaactgactttaggatagaaggttatcttgggttagcctggtgtgcccagtgaaatcacaaggggccttctaagtggaaaaggaagagagttgaatagcagagcgagcaacgagccacatgagaaggactcagcccaccactgttggttttgaagactaaagagagccatgagccaagaaacatgggcagcctgtggaggctggaaaagaccagggaaaggagtctcctctggagcttccagaaggaacatggccctgtcaacaccttcattttagctcagtaagacccgtgtcagacttctaaccttcagaaatgtaagatagtaaagttgtgttgttttaagccatcaaatttgtgctaatttgaaacaatcacaaaatgaaacaaatacacggactcatctgcaacgcttctcagtcagtcatccctgcctgtgaatcacaaattgggaaacagaaaatcagaagtaaaaacgcgaagtggggagagcaaagctgtgggtgcctgagcttctagccccagctggctataagtacattagcacccacacacaaaatctacaccaggagtcatcccacacaaaccaacccaaaacaaaggacatttgacccaaatcactccttttacctctcagggggaaacataagggagacagtggggagaagcaggtcccaatcagaggcaatttctgcaggtaccaattgagttcctaatcaacaaaccaatagcacagacccaacaagagggagactctcacacgcaagttccttccatcacagttacaccgaaaagaagagtgagctcagctttaagcagtggaatcgcaaatattgaaatccacgaagagagctttgccataactcaatttaattcatcaacagagcccagatattcccaggctaccaacctcaacatccaggtcctcaatagcattctctcaaggtactacaataacctcccatactatctacccttgtatttgcttcctaaacacctctgacagattcaccttcttctgatcacaaaatatcttatgctccaaacctccgaacatcacccactgcctttaaattcagatacatctatatgctacagggctaaatgcctacctagcatggtattcagcatgctttttatagctaccccctattaattctgtgccctctacctggaacattttcctccagccccaacattgccatcagtatccacagcaaatggtaccccctttcatgaaggctttagatggtttctctcccagctctaaacccatcccaccctcaccttttgaattcatatggtactttgttccttatctataacaaaatattgtatatatacacgcctatatgatctctcccttttttgttttgttttcttgtttgttttagacagggaaagactgtaatgtgagttgagtgagtttgtatctctgcccatctgcaggtttgctactgcacaaattcctaccaactgagttgggacctagacgctgtcttgagagggaagatgtaaggcccaggtggaaaataaacaaatagtaataatgctacaaagaaacaggtccgaccaggccaagtcagtcctcaaccatcttacacctcaccagttctggaaaaccaagctctctgtgcgtcaatttcaaaatgattttaaagttgtgttaggtcgctataccaatggacatatgtatagaaatatttcagtgcttctcgaagtgagaaaattaaagatggacagactctttcctaacatctgactcaaaagcctagaaaacacatagaaaagaagcaaataatacagttctgtaagatactgtgttttgtgtgccatggtttctctatttttagatttaaatactattgtgtgtccatcaattattatgtataaccattaaaaaatcttttaaaaacataaaattaaaagtgctatgtactgagaaacttattcaaaatcatatttcaaatagcaaaccatacccaaaaaattaaaaatatttttttaaaaaatagcaaacccacataatacaaaacctaagagaaactgagcacttaacaaaataagcataaatataacacattacttagcataaaaactcattctaaatgacctggcacacagtaggtcctcaatacacctttgttttaaagtcctgactcagtgcaaactcatcagcctcataggtcagatgttgtaaggacccaagatattgcatcgcgtggaaatcaactttcacatcacataacaagtggcatgtcatttttttccttctctaccgtatttctaaaactattcaggtgttgatgcagacctttttccatgtcttggcaaagtgtaatttgaacaggcagtttctcatgaccttcaagtctgtgttcaacaatgaaatcatttggctttatatcccatccagttattaatcacaaacaacaaaagaagaactttcacacagaaaatgtgaaacctatgctggccagcactcactctgggtcactccaggtcacattcacttgtagctaagttcactgaagaccatgcaatgacctcagctatttagaaaatacattcaaaatttttctggagaggaaaaatacagctatgtgactttaagacaagtgctcctggaggtcagcagtctgaaaagggtacaatgaacaacatggctgggtcctgggcagatggggggtggtgtgcacaggtcactgggtgccaccggatgggcgggcacatcacctatcctccctcagttggctccttcactaagtgcctgagcaggaaatttctaccctggcatggaatgcccacaccaggatctcagcattcccaccccacccatgtaggaaggaatccagctattctagcaggatttaactttatataaatcagctccaatgagttgatatgtttaataacaaagcaaacattcacaactctattttactcctttttttgttgttgttgccattattatgattactatgatgaatttggctttgatttttattcttttaagtaagaaagtggcagcaaaaaggaaaaaaaaattccaggaattgacttgtgtctctctaatgaaacaggcagttctggctgggtgaggtgtctcacatctgtaatctcagcacttttaggagaccaaagtaggaggatcacttaagcccaggagttcaagaccagcctgggcaacatagcgagaccccatctctacaaaaaaaaaaaaaagaaagaaagaaagaaaattagccaggtgtggtttcagacacctgtggtcccagctacttgggaaactgaggagggaggatcacttgaacccagaaggttgaggctgcatgagccatggtcatgccattgcactccagcctgggtaacagagtgagacactgtctctaaaaaagataaataaataaataatttttttttaaagaacaagggacttatttccttatcagccccgcaatgccccttttagcatccagaaatagatccacctggtcttccctggaagattctggacttccctggaagactcctggatggttttaactcaaacatagccctctggattaagctcacaattgaaactaatatttccctgcctgccaagctaaaatttttccctggagcattaataattagctcaaaatcaaggacaaaattagtagagcaacacataaggtgtttctcccccttcctaacatcagccagtctttttagccacaaactacaagctagtctttctgaaatccagcaagcccctgagtcaaactatggtgtaaagaaagtgggtggaaagtcacattagtcagggacattaagtgccatctgccatggctttaatcccatagtacaatctgaagactctttcttaggacaccctgggaagcagcataacaagaatatttactgtcctgtctcttgaatcggtgaagttaaattcattactttttatacagaaaggtcttcaaaatatttctgttctcctggtctgatctttcctcttctttcatcaatcaaagtcaaaagaaaagttggctaataatatcttagtttggtccttcccccaagaagcagaccctgagacaaggattcaaatataagtagtttatttcagaagtgatcccaggaaacactgctagggagtagagaaaggagacaaagaaggaaaggtggccaataataaaaaggtcattatcaagcaagttaccattcgatcacaacccaactgggaacttggagatgcagtgtaaaatgttcatctcaaaagtaggcgacctgagatgcaagagagctggagaatttatactacagcagcagtcactggctatgggttgctgggcgctgacacttcctgccagccctgagtgtgaactttccagccagagaatgccctcaggcaaaggcatgccggtgtgggcagctggaagtcccagtgcaccagaagtactgacagcagggagtggggtcaatagcagcctctgctacagctaggattggggttatctccaaaagggtacttaaaccaggtctggtgcagtggctcaagcctgtaatcccagcaccttgagaggctaaggtggatggatcacttgaggtcaggagtttgagaccagcctggccaacatggtgaaaccccgtttctactaaaaatataaaaattcgccaggcatggtggcaggcacctgtaatcccagctactcgggaggctgaggcaggagaatcccttgaacccgtgaggtgaaggttgcattgagccaagatcatgccactgcactccagcctgggtgaccaagtgagacacaaagaaaggaagaaaggaagaaggaaagaaaagaaaggaaagagagaaaagagaggaaaggaaaaaagaaggaaggaaggaaggggggaggggaggggaggggagggaagggaagggaagggaagggaagggaagggaagggaagggaagggaagggaagggaaaaaagaaaagaaaagagaaataaaagggtactgaaaccagaggcaatcatttctgttacaggacatatatcactgaatacaaagttgaattcttttccacaaaattatccttatattcaaattttggaaggtttcatattatgcagcaacactgggaaaaacacaataatccaaaaggatctcaatcaatgttctactcagaggctgttaaacatcaagcgatgaaatgtaatacaggcttagctactgagggatgaatttcaactttaactgttgaatggcagagtaactaaaaaagaaaaaaaaaaaaaacgatgcgtagacaaaggtttttaccagaatcttcaaatgtggcaatgcaaataaaaaaaatataatagatgctcatcatggctagtaattacagaaattgaagacaaaacagtattttgggtactcacaattcaatactggctgggcctcagagatactggcatatttgtataaactgatgacgttaaacgtgttacagtcctctgaagggcgtatcagaaaccctaaaactaacctctcatcccataaattctatttctgggaatttatcagaaatgaatacctgaaatgaaggatggtgccaacaacaataataatagtagcaagtatttacactgcactcatcagatcagtgccaggctgttctactgacttatatcaggggttctcagctgggagtggttttgcccctgcaagacacctggcaatgtctggagacatttttgtttgtcaccactggggaaaagcggccaggtatgctgtccagcatccccaaagcacaggacagcttccacagcaaaatggaactgtctcacggtggacaaacctgccttatatctatcccctcatataatccttacaacagccctggagtacttgtattatctccattttacagatcaataaagataattttcgctgtactattatccataatgttgaaactagaagtaaactaaaaacaaaaacaggaaaaccattaaataaatgatggtataactacctaacagaaaaaaatggaaaatgcttatgaagtaatgtcaaacgaaaacaccagaactaaaattagaaatattacataattccaattatttttaagtatgagtataaagactagatgggaaaataacaaatgaaagttactgttgtattaatatggtagaaatagaaatggatgcttctttcttttctaatttttaaaatgttattgcaatttttaaaagaaaaagcactcaacaatgaagataagaatactggaatcttcttctgaggagactgaagtgggaggatcacttgagcccaggagttcaaggccttcctgggtaacatagtgagacccccatctcaaaaaactaaagaaagaaagaatactggaatgttttttaaacaacacaagagttaatagaatatgaagaagatggttaatattaagaaattaggaataaaaatttccatgggaccccaccaaatgttggtgctttaaattctgaagccataactgtttcacgtaaggctaaaaaatctaaatgttgtatctacctccttctgtattttacttatttcatggctcactatcacctatagcaaataggcaaaaagaatcaaatttcaattcagctaaacctgattcattttagcagctccattatacaaagtgtgtgtgtatgtatgtgtgtgtgtatacacactgttatggtatttcaactgttaagataatttagactgtcacatagttttaatatatatggtaatttaaactgttattctaaatttatcaaaagtagcagtcatattaggagtagtaacattattgctgttactatgagcaacatttactgaacgtttcttaaatggactaccatatagtctaatacccacaatatccatataagatagatgcttctattgtccacatttttcagcaaagagcacagacatttaaagttaagcagtttgcccaggtaaaagtagctgaatccaaattcaggcagtctggctccaaagctcaagtgcttgaatcaaactagtgtataagaatggttggggacaagatggcggggagggagccacaggctcctacccttcctctccctacagcaaggaattgactatctctgttctaccagatgtaaaacctggcttttgatataagtttactaagttgagtagacttcacaataattttaccagcagcatcttatttgaaataaaaataacaattattattaccaaccaatatcagcaaataaatgtttcccaaaaacacctacgtggattcaaaggaggaaaaaaaataaggctgtcagagtttctgcaggaagtactaagatcagtgattctaaagtggggggatttttatctgatcctcatatcccactgactattccgttcttgtagacttgaggatgaaaaaacaaaatcttcatcctgttaataggaaaatggataccatagaatcagtaacagaaggagtgtttacacaatgtaagcatctgtttctagaacaccgaagaggaaaggataggaagactacaaataaaacactatttgtggatattaaattgttgggcttcaatgtctctaagtctagtctcacctgcccagagcatatattatgaaatgaagtcactgaaaacaaaatgctgtgatcttctgagattcctgaagcacagcttaacttaacaaataacagggatcagaatactaataacatatcatcgtgcggaaatgaggggaatttggtatgagccaaagtacaggctcctacccttgctgagccactatcaactaaaagcaggctatgggtgggtgtgaggaagtctggaagaacaagtggtctacaaattccacacccatgtgctccaacagtctcaaacctttctcgaggctgcagtgtcaggaacatggcaggtgagggcaagtaaaaaaggctgaaaatctccctcaaaaatagaacttacatttcttcctacaacaggctatgggtctccaacaaattctgagtaaatcttacaaaaaaatgtaactttattttttatgcatgtggtgatttaactataaagaaatcctaatatgtcttgataaacagtatgtgtgtgtgtatatatacacacacatatgtatatatacacacacatacacacacacacatatatttatttatttattcatattttagacggagtcttgctctgtcgcccaagacagaatgcagtggtgcaatctcagctcactgcagcctccgcctctgcctccacctcccagattcaagtgattctcctgcctcagcctcccaagtagctgggattacaggcattcgccaccacacccaactaatttttgtaattttagtacaaatggggtttcaccatgttagccaggctagtctcgaactcctgacctcaagtgatccacccacctaaacgtcccaaagtgctggggctaagcagtgtatgtttaaaagttatcagaaataacaaatgaaagataccaacaacaataataatagtgaatatttagaaagcagttactagagcagtgccagcctgttctaactgctttatatcaggagttctcaaccagaagtgattttgccacctacgagacatctggcaatatctggagacatttttaggacattttagacattaatagaaatgtgtcagttaataggactgacacattcaccagccagcatcccttctgattacttgaacagcagtctgggtggttgaggcctatgccaacctgttaaatattttgaatagcacctctgcctgaatataccataaataattaaaacaaatatcatatctaacaaaacctgagatgtcgataagtaatgattgtcattcatatggagtactacagatagattaaatgaatgttagcctttgaaagtaaccttcccccttttgaggttccagaaggctaatgacaactgaaaaacctgtttcagaatcattctcacaagaattggtctacttgctttgtggatatattcccaactatgactacatataagaattcaaaagttttaattcttaaaatcaaagaattcaaattttaaaatatttctaattcaaaatttggtatgttctaaatattatttcatctataaatttataaatcttcaacaataactcttaaagcctttaataataacaatcctgatatcagttcactaagtgtgatcaacgtaacatagtaatgtaagatgttaacagtggggaaaactgggtaacaagatgttaacagtggggaaaactgggtaacagtggcaaaaagtggtaactggggaactttacataccatctttgcaacttttctataaatgtaaaattattctaaaataaaaggcttatttcaaaacggcaaaaatataaataataaagatacagtttattttcttgggcaagaaaataaaaaagctatttttgtatatccatattaaattttaggtttcacataatgttgatttacaaaacaataagaaaaaatgggccaggcatggtggctaacgcctatagtcccagcactttgggaagcagaggcaggtatatcacttgagcccaggagttcaagaccaacctgagaagcatagggagtccccatctctaccaaaaatacaaaaactagtgggacatggtggtgcatgcctttagtccctgctactctggaggctgaggtaggaggatcccttgagcccaggttgcagtgagccgagattggaccactacactccagccaaggtgacagagactctgtctcaaaaaaaagaaagaaatgaaaaatgttcgaaaatccttcaagcggcttttgatcacattgctggatttggattccataggcatacctgctttccacacattttttaacaggaattatatctcattcaccgaacaacaacaaaaaaattaccagaattctacctcattcactgaactacaacaaaaaatctgagcaactaaaaaacgtgccaggagctagggaaggtttaaagattcaaagacaagaacaggactttcttcaggctcatggtctaaaggagaggttctcaaacatacacaatgaccacctgaagagattattaaaagataagttccacctatctttcaacaccgtgcagagatagacctcgttttcaaaaacactgatgggtaacatccatcatgaatgttgtgacagatgaagacatcttagaatctctgaatttaatccaagcagggaaggagaaagcagagaagaggggcacccaacccacacttggaagtcagcagagaattcctagagaaggtgtccttgaccgaccataggagtgaatggctgatgatctaagggcagcatgaaccatgaggacaggcccggcatccagcagagaactgctcaataccaagaacatttaccctgcttctgaaagtcactggacactggctccaaagtaccaattagagcactggaaactgcctaactcgggccactacccagccagagaaaggggctttgttttaatccagttgggtccaacaaaatatgaaaacaggattctagaacgtggttggatgctgcagcacagaaaaccagactacctgccttaacttgcattgtcctttcggtggaagaactttttcacttgctaattatttctccaatgttagtctacttgagtagcaaaatacagcttcctactgacgcagggggcagagctttgagacttttttgttctgccctttattttttcatctcctctgcaatcagcctgtcaacaagcatatcgttattgtcagggtgtcagtttatagcagcattcacacccactgcctttctcatttactgctttagatctagaaaccgatacccaagtgtgaaaacagttgcaaaatgagaatctaaggctcttcactgatgtgcctgcactgcacaggtgaggacacaagtgtccatcatcatctctgcaaggcatatgcagtggttctaggctgccagtaagtagaatccttaagtttaaaaccaactttaaaacatcccagcaccttcacaacaacgaccgcagcacccagcaaaccacagttgctcaataaatgttcactgagtcatttatttttggctccttggtttttttgtttttgtttttgtgtgtgtttgtttgtttgttttagacagtctcgctctgttgcccaggctggagtttaatggcagtatctcagctcattgcaacctccgactcccaggttcaagcgattctcgtccctcagcctcccaagtagttgagattacaggcactcaccaccacacccagctaatttttgtatttttagtagagacagggttttgccatgttggccaggctggttactgttttcttatttctaattcctagtcatgtgtggcatagttgaagctgacagaaacatgagcactgcagtaattaggaaacataaatagccaggcacagtggctcacgcctgttatcccagcactttgggaggccaaggcagaaggattacttgggcccagaagttcaagaccctaacctgggaatagtgagaccttgtttctatttaaaaaaaaaaaaaaaaatcagaagggccgggcacgttggttcacgcctaaaatcccagcactttgggaggcagaggcaggtggaccacaaggtcaggagatcaagacgttcctggctaacacggtgaaaccccatctctactaaaaatacaaaaaattagccaggcatggtagcatgcgcctgtagtcccagctactcgggaggctgaggtaagggaatcgcttgaacctgggaaggggaggttgcagtgagctgagatcgcaccactgcactccagcctgggcaacagagcgagactcttacccaaataaaaaaaaaatccgaaaaatgagctgagcgtggtggcacatgcctgtaatcccagctactcaggaggctgaggtgggaggactgcttgacccccggagatcgaggctacagtgaacctagctcatgccattacactctagcttggttgacagagcaagaccctgtctcaaagaaaaaaagaaaaagaagaagaagaaacataaatagatgagaaaatttagaaaactactggaaaatcaatgctgacagtcttcctaacacaaacccaatatgataaaaatgattcattataaaacaccaggcaaatattatttactgaataacttcccaaattatgggaaataaatgtcaatactttatttcagtaatcaagacatagatttaccttgaacgaccttttatttttatttagatttgattactcagaaatgttgcagcgtaaggcctagtaacaaattcagcaaatatacagaatgcaatctcaaggactttttaaaagaatagtgcacacttcacttagtcaccaaataaattttcatcataaaacataagattctccttgcaacagcaggagaaatgcataggagggaggcagacagatatgacatgtcccgtgggacatgaaaagggaaatgagaactattgcctcaaccaacttgcaaaatgtccataacctccctctttaaataccatcactatgaaatttttaatgcatataagcaaagtgagaatttaataattattttaaagaattcacatgggcaaaggtaaaatataataattcatttcaaggtgtttatttctcctctatccccaaaagtcccttaaaccacattcgtacacacacaaaaaagattctacttttcctgctataacactcgttactcagagttagataataaatactgattaacaatcagtgggtctcagagtattggcagatgctagattgcatgggtgggttagagttacctcagtagaaagtgaatttgctaggggaataaatttcttctgtcaaacacagtctaggagctactaacaccagaaagagagtaatggccaatgagtccaaggagaagctaaaggcacagaatccagaagtcaacaagaaaataggccagggcagaagccaagtgactaactctggcagcaggttcccagcaagagactggctgagccaggagaaaagtagcagtgtcggtgtgataggagttgcttctcagagtgccaagtggatcgctatctgatgaggtatttctactggcgatatgtgcaagtgacctggaagaatctgtgcaaggtgcctatcttacaagtgccacacagcccagcctttcagagtatttggatcagcggcattcaactgaaatctatcacgtttccagactactatgacagttcacctctatttggagaaataacctctctgcagactaaataaagctttttatataaggcatcaaaggcaaagagcacagaatcataggggaggcggctgcgtgcccttttcctttgcttgcctgcttgcttgcaagcaatgaaaacctttctgaacaaatgatagcaaactttgaaaacagcaaaacatctggggcatcttgccacaaagatatcctccacacaactgcaggccatttgctgtcctgtatagctctctatttcctgccatttactggatctgtggttaaatgaacccaacatagaattacagcttcaatgctttgatgtgaaaaatcactaacgaatctaaattgaaggacgaggacacactggtaaattttcaatatgatggtgcatacggggcctcatttaaactaatgtcttatcttcacttagcatctaaatgtattttttcctgtactgacttgaaatactctaacacaaacagacaccatttattataatccttcttgcaatctgtcaagttatgttcaaaaaattttacaaagatgtacctttaaagactgacaacagccccaaaacaggaggcagaatagttagggcttaattttaagcctaactccacagcatctttctgctaactccatgttccataaaatatataaaaaatggtttttttcataaataaatctgggacttaccatccatatggaaataatttatcagtatacgaaaatgtaataaaatagtgtatctaaataactactagtctcagcacagtttgggatgatgacgtcttccatatcagccaaaaaaagaaagaaaatactatagaatctaagtccaaagactcaaacctctgtcctagatatctgaaaataatatctatcttttaaggtagcagttaaccattttagaactcaaaagaaattcaaataagtcctcccaaatctgccattttgtaggaatttcccttggaatcattaagagtataaaagtcagggatccaagcaacaaaagaaaatgagcaatgcatgaaaagccaaatcactgacgaatttgtccaaagagccaataaacatatgcagagaagttcagttccacaaaaaaagaaatgcaagttcaaacaactatagactacatttcatctctctacatgtcatctgttgtagatgacgatttaacagtaaaagcatatttgccccagcaattgcccaagtaagcgaagatacatgtacacaggtagtttttaataatgttttaagtgggatgccactaaatcaggatggtttcaattttggttcaaaaaagaaaagccatgctcacccatagaggcatacatttttacattcatagaaaacaagggtagcagaagaaacgaaactattaacaatggttttggagagaggaaggaaatgacagttttctactttgtagaattttcattttgcattacattttttttttttttagaaaacagtctgattacttaagatattttaaaggacatttgaactatattactaaaaattaaatttggagtcaaaaacgtatttaaatgctccttttccttgagagcaactccacacagagggccacaggaattcctgcccagctcacaatctaagtttcaatactctgcagctcagacagaaagtttggcctgtgttcctttagtcctagactaaaatttcactttagcacaatggtagaacctggctatgagtcatcttcctctgcaaaacaatgaaaggtctagttcagtgggaaaaaacgacttcagttgccagttcattgaactgttcaaattaaggtcaaaatactggagcaggagcgagggagtcgctgtgtccagatcctatctaaccccacaccagtcccctgaatggccctccaaccaagtcttgaatttgcaaacggttagaataggaagcacctggtgccctctaagtaggggtcagagaacgcaagtgaaaacatgaaacagatccaaatccagtttcatgagcatgcctttcaagtaatgccaaggaaaaatatatcaaaaacatgatggagtgcacagcttcagcttaaatatatttcaagtaccatgatgaatataatgtttgatttcctaccctagactctacctaaaagagcccattatcaacagactaggtttttataatttttacagaatttattattccatttatttacctggaactattactatagcttgcaaagaactttaaaatgtgtaacatcatgaatcctgaccacactctcccggggcatcctccctggttgggagatcctgtgatcctcctggttgggagtccccttctcagaggttcagtgacttaccctgacgatggcaggggtaatggaaacccagatcttgagggccaagtctcatcccttaaagaactgctcagggccaggcgccgtggctcatgcctgtaatcccagcactttgggaggctgaggcgggcggatcacgaggtcaggagatccagaccatcctggctaacacggggaaaccccgtctctactaaaaatacaaaaaattagccgggcgtgatggcgggcgcctgtagtcccagctactcggaaggctgaggcaggagaatggcgtgaacccgggaggaggagcttgcagtgagccgagatcccatcacgcgctccagcctgggcgacagagcgagactccgtctcaaaacaaaaaaaaaagaactgctcagtaccatgttaatcccatttctcattttctccacccaagattcttttcttttgtttttgtttttttttgagatggagtttcgctcttgttgcccaggctagagtgcaatggcgcaacctctgctcaccacaacctctgcctcctaggttcaagcaattctcctgcctcagcctccctagtagctgggtttacaggcatgcgccactaggcccggctcattttgtatttttaatagagacagggtttctccatgttggtcaggctggtcttgaactcccgacttcaggtgatctgcccgcctcggcctcccaaagtgctgggattacaggcatgagccaccgcaccggccgattcttttctttcacatgtcgctctttctactctttttctcccaacttaacaattctcattctctcacctctgtaagttatagttacctggtcttcctaaccacctactcattttctctataattattaagatctgcaaaaaattcacgagtcctaagatatcttcccagacaaatctcactgccctgtgatcactccaaattctgtgttcctttatttggatatagtcaactggtgggtctggcaatccctaacatatgacaaagatgacaacgttccttcctttcagccaccagcaaacctagcattcacttcacacaccatcctttccaggtcctaacctccacgggggaagaatcaaatcaccttcatttttatatccccatacctccccagagctgggcgtgtgctaggtacctagcaaatgctgactgaatagatgagtgtggtcgtcaacctcctggagttccaacacaaaagacttgagctcctttaagagtgagtcacggctgggcatggtggctcaggcctgtaatcccagcattttgggaggccaagagggaggatcactcgagctcaggagttcaagaccagcctgggcaacatagtgagatcccatctctacagaaaaactattaaaaattagccaggtatgggagcacatacctatagtcccagctactcaggagactgaggtgggaggatcacttgagcctgggaggtcaaggctacagtgagctaagactgtgtcactgcactccaggctgggcaacacagcgagacttagtctcaaaaaaaaaaacaaaaaaaaaaaacaaagaataagccacagttcaggagattctcccaggagtgtccccatctggcctcacatccacattcacacacacacactcagcccctgatgaaattctctttcccaaagttctcaacctgccttgcctcataaggacaccactgccctggagccttgtctcttctgagaggtctgttcagcattcccccagatcagccacctgttcccctgtgaccttttcctggagtgtcttccaagatgacagccactgttcagcctaacatagcacactctcctacatcagcaaagaccataactaagcctctgtccaatcttcttccaacttcctgttactcaaaggaactaattcattcattcattccacaagcagctactgagcctcttctgcacatcaggcacacattcaggtgctaggaggcagcagtaacaaagctgcctctactccctcccatggagctttcagtctagtgggggacgaatacattcccctgtaccctccacattggacacccttggctggcttttgacaagctacagagcagggcctcagtccaatcaagtcacgatctctgactgtggggcacaagcatgttggtgattctaatgggggacccaagtagtgaatcttttaacccttccatctaaaaaggaaacagctgacatagagtcctgtcagcaggcaagaaagcaggaaggatggcaaaacgagcagggctcccaggagtggtttcctgagcagtggcaatttccagacatgagtcatctgggccttcatagatgcctaaatggccagtcccgcctccaaattattcatttcacattttcaagcttgttttgaaactttggtttatctcagttatattattgttagcatctagtgaaaatgatgatacagctggataaagatagagatcgatagatagatagatgatagatagatagatagatagatagatagatgatacatagatagacagagagatagtgatagagatagagatctattttttttttaaacagagtctcgccctgatgcccgggctgaagtgcagtggcgcaatctcagctcactgcaacccccgcctcccgggttcaagcgattctcttgcctcagcctcccaagtagctgggatttcaggcacccaccaccacacccagctaatttttgtatttttagtagagacgatgtttcaccacattggccaggctcctggcctgaactcctgacctcaggtgatctgcccgcctcgggctcccaaagtgctgggattacaagcatgagccattgtgcctggctgaaaatattatttttaacattaaatttaatgtccttatttctaacaagatgactaaagagcctacactatggacacacacaaaaaaatcagttcaatagcaactgatgagaggagaatctaggcccttgtgaaattggaaatcatgtacacattggttttctatttttattaaaataacatgcactgaaatacattttaattttaaaaatgctattttcctaaagccttttgattggtcatagggcaggaaagaatgttatctaaatgaaccagaactcaaccagcacagcatttaaatatatttaacactgtagctactcatttaaaagcctgcttttttattttattttttttttttttgagacagagttttgctctttcacccaggctggagtgcaatggtgtgatcttggctcactgcaacctccacctcccaggttcaagtgattctcctgcctcagcctcccaagtagctgggattacaggcacgtgccaccacgcccgactaatttttgtatttttagtagagacaaggttttaccatgttggccaggctggtctagaactcctgacctcaggtgatccgcctgccttggcctcctaaagtgctgggattacaggcgtgagccaccgcccccggccaaagcctgcttattatttaaaggtttgtttgtacttttcttctagctgtcttctgatttcaatcattaaggttaccctagaccctttgtagcaagaccctttgatgaagactagctgaccacagagactcttaatggtggggaaagagagaggatttagtgacaatcaaaggaaatcttcgaaaggccacaagcctgcaattgctgcccctatgcaggtttttgagacaaggtatccctctgttgtccaaactggaatgcagcggcatgatcgtggctcactagtctcaaactcctaggttcaagctatcctcccacctcagtctcctaagtagctgggaccacaggcacatgccaccatgcctggctgatttttaaattttttgtagagatggaatctccctgtgttgcccagagtggtctcgaactccaggcctcaagtgatcctcatgccgcagcctcccaaagtgcttggattacaggtatgagccattgtgcctggcccgcgtggagttttaattcaggtccctgagaggtattttgatgttgtgttgggatcacatggttatttaagaaagaagtaacagttaatgatgagaattgtagcacaccagtctcctatgccacttgttcaagaaacccaattcactaagaaaatatgggctgctccaatcattttggtttgaatttgctctgcagagacaacgctacaaccccttaccacctcattcactgaagctaagaaggaaaacattaagagggaaagagtaattccacaagaaaggaaaacattgaaaaagaaaaccaaccagtctcaaagttttttcatagtgacaacattcatgcatgatatgtatgatcgaataaaacacatcacttggggtttttcccctccaaaagctcatacaaccagtacacacatgtatacattaaacaagatatgaacatctaaactgatcagaaaaactaagtcaccccggaagtaaacttcagcgagagaaaagtgcacgacactttccctgcatgaagttatgcatatgcatgtctcatagacaagcctgcactgaaacagaaaccccagcactcatactgtcccccaaagtacaaacgttttattctcccctttctcaggtcaaaactaaatatttcaagaagtaaaatgcctttttagccaacagagtaaatcaaatacaatatgggatgaggtctaccaatactcaacaccacaaaggaggcttcttctctagatggcagtaaacagcacagagtaagctattttgaaaatacagggaggtaaagtgaagcatatttgctaccacaaatatagggatcctggaaggcttcttccaaagaaactaataactctggtgaattatcacttcctgaagagaagtgtgaagcagacagcgttggtctctactcttgagggtccacaacagacgtggcagcaggaaagacaggctgtctgttcccgtcaccagcctggtcctaagctttgttacttaacaaaactgaatgaaagaaccctgtcttcatagacgtttcttaagaaaacctcactggctgggagtcgtgcaagttgacaaacttacctggtaatcgcttgcaagcctggagagctacatgccctggcaaatccaatctgcactttttccaatgaaacgtggtggctgccaggccgctcatcacctacatctgcttagatgatgaggaaaaagatgtggaggaagtggacaacaaaagcagccttcgaactgcacactgggatgtcctgtgttattttgggttttttttttttttttttttggtggcttttatttttcccatgagaggatctgactaaacctaaccccacctcctctaaacaccagagaggaagttacactttgtagtcagtgaaaactccttaggcaggttttttgtttttttaatagtcacaactaagggcctctattcatgttcctatgacagagattataactttgcttcctgttttgacagtatcagctgggaaggggcactccacccacctccctacccactgcgtagataaataaagatgttagaaggcgtttgccctgggtatacaactggccttaggagtttcgttacatattaactatacttcaaagaataaattggacttattatttcactatagtagttatacacaccttggggaagtaaaactgaaaaggatttcttcttcatcccttagaattcgctactagggaaaaaataaacttaaccatatgcagctataagagaagaggccaccatttagacaaatttttccagcctattctcttttgtggtcaccttgctctctttattatcattatttttttttcactcgtcacccaggctggagtgcaatggcatgatctcagctcactgcaacctccgcctcctgggttcaagtcattcttgtgcctcagcctcccaagtagctgggattacaggtgcccaccaccatgcccggctattgtgtgtgtgtgtgtgtgtgtgtgtgtgtgtgtgtgtgtgtgtgtgtttagtagagacgggatttcaccatgttggtcaggctggtctcgaactcctgctgtcacttctgcatgtgtccaccacatacatgcaaaaagcaaggaaaatcattattcatatgatcacatctactttctagtccttctctcattctttttcttgcttgttgtgaaatagaaatcttctacttattagcaaagacttttcatagaatatgtatctttgtcaggatacacacaggtttgaattcaaaggtgtctctcatcctgctactgtactatgatacagaaaagagaaactaacagtacctcccctatgctcctcctcctcatctctgcattttccttagactagtagctgtatgactctggcaaaatactctctctctctctctaagcctcagtctccaaatctgtaaaatggacgggctgacttcacctgtcttctaggactgtcacagggagggagaccgggaaaagcacagtgatacagatgatgtcccatagtcaatacccattgatctttttttgcatcaaactttattgatatataattcatatattatacaattagctcatttacactgtataatttaatgatttttagtattgtcaaagaattctacaaccatcaccacaatcgacccccatcccttagcccaaggcaaccactaaaatctacttccagtctctatagagttacctattctgtacatttcatataaaagaaatcatacagtatatggttttttgtgactagcttatttcacttagcataatgcttttgaagtccatgcatgttgtattatgtatgggtatttcatttatttttaaaatattccattgtattgatagaccatattttattatgtatttatcagttcatgaacatttgggttgtttttatctttcagctaatatcaataattctgctatgagcatttgtgtacacgtttttgatgtgggcatacattttcatgtctcttgggtgtggcgggtgtgtgtgtgtgtgtgtgtgtgtgtgtgtgtatgtgtgtacccagaagtagaattgctgagtcatatggcaaccctatgcttaacctttggaagaactgccagacagctttccaaagttgcatccttttacattcccactagcagtgtatgtggatacccatttctccacatcctcaccaatatttgttattatttgtcttttttattattgccatcctgctgggtatgaagtgacatttcactgtggtttgatttgcatttccttaatggctatcgaaacccatcttttatccatagcccaaaaatgtcatttctagaatcaggactaaatattcaaaatacagaacagccagtgaggcgtgggcaccacctagtcagaacggatactggctacaatgctgaagtgaggtcctgaaggtgtccatctttaacagtggctattttccaataggaatcaaagactttcaacattgttcctggtacagctgtatgggttcataccagctaaatattgctggccttcatacttctatctatagtaagaggctgtgaaagaagttggccctgcttcctctaccaaagggttcttctgaaaactggtaaggaaatgaaattctgaatgtaaatatgacatttcaatctttacaaatcagttctttccacctgtctttatgtgtcttcctctgaaatagaaacaggcacaataaaagcagccttttgtcagtaaatagtcataactgtttataggaagaattgttagaccagatgtgatttaagattaaggatctcaaattttgaaggtagccaaggaagacaagttaaaatttagacactagcaacaatttctccttccctctcaaaagtgcagtactgggagaatagtaattattcaaacaaatcaacatcaaagagatctttttttttcagaccttactgtgtttgagcaaattcatgtacaatgatgttaattacctttttcctaaaacattctatcttaggatttattttttgatccccccaaaactaaacagaacaaaaactatacaaagtacaacaaagaaaatatcagaaggctattaactttaaaaaataaaaacttttttccttattttttgatgtaaggccttgggccttgcaacatgtattaataatatgactcatccatcttctaaaaaatttcccatgtcccaaggctatactctgtaatccattgtcttatttatttcttgccgtggagctgactatgaaattgaccgttgaactttcatatgtcaaatagaactttccatagtgggaaacttctaaaacattcatattaagctaagtggaaatatcatgatagctcaggagcaaacaaggtctgtaacagccaatataacttccaaactagattctatgtaggaaaagcaaaccattgaacacacacaagtgcaaaggcttcattgaagtttctgtaaacacttgatggtgaggaaaatcagaagctaaaatcagtttatctgaagattcttctaaaaagatcaataggggggcgcttttgaaaactgttgtgcaatgtcaggacccactctattcacagatccattcttctgctagattacacggtggcctcattttctagttcttgtgaaatcaatagaccatttatgttgcaagtatctgtctagggtatgcgctttcttattcaatctagtgttgacagcagtaatcaaattttgttcataccactagctctattatagctcaatagcaactggctgccagcctaggtctactctcatcaaaaaaggaaagaaagaattggagtggagagagaattacagaacaaattagctgaaactacaggaggtaatgttgaagttagagagggaagcaaaggaattcagaaactaatcctctctccacggaggaaatatacacccagcagcatcagccccacaaaatccaggcaagctgaccttggccatgaagggtacacatcttcttcattcttccctgttatctgtaaaccttcttggctttgaacatcatattataactgtcagtcctaactaatacaactatacctcgccctgcagagctaccaacaagaactagagccaaaccacaccctccaacaccagggagactaaatgcaaaggacaagttatggcacttcccatgagctctccattttataactcttctttttttttctcttgagacgcagtcgcagtcttgttatgtcgcccaggctggagtgcagtggtgtgatctcagctcactgcaacctccgcctcccagattccagcaattcacctgccacagcctcccgagtagctgggattatgggtgggcaccaccatgcccggctaatttttatatttctagtagagacggctttcaccttgttggtcaggctggtctcaaactcctgacctcaagcgatctgtccaccttggcctcccaaagtcctgggattataggcgtgagccaccacgcctggcctagaactcttctttatatgattacgctacagtcaagcatttttctcagatcagaatataaaaagataatcttacaatagaaaccaggtcagcttttttaaaaagaaaaaattgggagggggtgaaggcctgactgaaattctactcgatttgcacttctagactttgaattctcctagaaaactagacttctgctcatagatactctctacctaaaagcatcatgaatgatactgttccctgatatgacaaacacctctttttcttatttttcaaagttttatcttgaaataattttagacttataaaagaagtggttaaaaaaaaaagaaaagagtacacagagttctcatgttcccttcatccaacttcctcaaatattaccatcttacataaccagagtacaatgatgaaaaccagacaattcacatagatgcaaatctatgaactaatctataggtctttttcaaatttctgcaattgccccctttttctggtctacaattcaatccaagatcacatacaagcaatacttcaaaaattcaagatgcatccttttcaatgaatcatgcctatctaatgaatatttctgacccctcctaaagttctacttcccttcagtgttaatgaggcagtgtcatcattaacttttgagtctttccagaaatgttcttttcttccatagatcttgcctccatttcttatcagtcagtttcatcaaccttatcctgtaaacacatgtcaaagagtttcacaacctcttttccaaaaccctagggccagaggtgctgctgaaccagaactcttcccatttgagaaaagttatatagcacaagtcatatattacagtgaaaacaaaaaacagcaagatccagggcaatttcccctaatcaaacacattaatagccctgcagtaaatacatatgtttatgaaggatgcctgacatacataaggactttaaaagagtcccagctgttcaagtcaggcttcaacaccaaatgagttcaggtcaaactcaagttttcttgccaaatgaactacaaataaaacaccttctggttttcggaggtcttcttcaatagtgtagctacagatgaaggatgatgaatctgtacctacgaaatccacagtttcatccatctcccgcccaccctcaccacatcttctacctggtctcctggcagagccacctgcaatgttccctgggcctctaggggctcttctctccaaatcactctcctacagagcccagagtgatctttctattaacctgcacctgcccagcttcaaaatccttaaaggtttcccatgcgaggatggagtctcgtctgcttcatgcagttcacacagctccctacaatcagaactaagtcccatgactatactgatcaactacacggcacccaagaagaatgcaaaaatgaaaaaggcatcaactgtcctcaagagtctcacaatctaattaactccccttaatatcttcatcagagtaatattgtttagaatacaacttatccaataatcaaagagcatgtcgggttttttttttaacccatttgtgtccagctaggaaattctacctcagttcttgatcacagcaatgattataaacaaaactcttcatgttgacattaaaagaattttcacatgattttaaaagcacatgtctaaaaatactcattatgcgactgttggtatggttcaaaaaattataaaaagcaaaagccaataaaaactgttttaaaaacaagcaaacccaaaaaagtaatgtcaaggatggtacttcatgggctgagtgatttctcatgaaattgtttttccaaagcatgaagatataaataaaatctgaaatcatgcctttgtttccatatgagtatactaatgggattgaatgacattataatcaacagaattaagtcagagagagttaaatcgaagccgccatcatcaaagagcttagaaaatattccaggctgggcgcaatggctcatgcctataatcccagcactttaggaagctgaggcgggtggatcacctgaggtcaggagttcgagaccagcctggccaacatggtaagactccatctctactaaaactacaaaaattagccaggcgtggtggcgtgtgcctgtaatcccagctattcaggagggtgaggcatgggaatcacttgaaccagggaggcagaggttgcagtgggctgagatcacaccactgcactctagcctgggagacagagcaagactccatctcaaaataataataataataacaataaagtattccaaaccacacggagccagacctcagacatagatcttaaatagctgccaataaaagcagggaaatcatatttaagtattggtttcattttctaatgtggaaacagacaaagacacctacttggaatgatgaattaaaaagaaaactcctagaagttgtatttcaggattaaattataacctttctcaagaaagctgcatgcaagtagtgagattaaaagggagacaataatcgcaccaaagcccttaatgaggaggtaaagagaggtagtaataggggcacacagcttctccctctaccaggagatagaaggagtagatagaaggagtgtgctaagaggggagaattcagggtttcctcccagggtggccctcctctcacatgtgtgtgtgtgtgtgtgtgtgtgtggtgtgtgtgtgtgtgtctgtgtgtgtgtgtctgtgtgtgtgtgtctctgtgtgtgagtctgtgtgtgtgtgtctgtgtgtgttgtgtgtggcagggtttctcactggcagtgttgcttctaaacagaagtggcagctgtctggaacccagtgggtgaggcctccagtggctgacagcgatctgcaggagaacagaaaaacactacatggaagccaagtgatgccaccacttggtagaaacagggtccaatctgccagggccacaggcgcaaccctacatgactggctgcttaaagcagtcatccctgggatggcccttccagcttagaacttctcactgtagtggcaggaatgaaggccaagagttcttcagggaggcaagaattgtcatttaaggcaacagtgaacgaaattgataaaaacaacccaaatacttcaaaaagaaaggaattttaaaatattactttaaaaaaaaaagaaagagggagtaatttttctggactgtctccataatctgtttttataaatcaggtggcaacctgctgggctgtggaacaaaggtcagcaagtgagttttctcgaagcacacttgctgtcatagtaaggaaaatttttctagtttctagtgagctctagaactttcaagcttcatgggaaggtgtgaagaagagacacctagaaattattctttggtgttggcaggaaaaaaaatgtgtccaagtgtcctacagggccaccagcctatgaaccccaatgtggtcttcataatattttgttccttggtcacctacagtcacaatctctacctcagaaaacttgtgccactgcctgtcttctggctggctctccacaggtgagtgtgctgacgtccccaagccctgaaggttgtttactgtcattcagcttgcccgtggcgatgtcggagtctggattgaagttcccaccatatcaggatcaccctccatgaggcaacactttccctacctacaacctgtcttccactggccaccacctgccgcagcccagcagacacacctgtaggcatctcagccctgatcacagcatctgtgtgcttcctcttgcaaatgcccacatgcaaatctgaggatgttggccactcagaagatgtgggtattaacatgtgtgagtcatctgtagatcctgccgcagctggtaccacacaaagatagtcctgtctaaactatgggcacacccacccactctcatgtgtcctatctctacttgggaatgagacataatcatctacttgtgacaacttagagccaagagtgaggagacaatgaagaatataggtgttcattagacagaactgatgctgaggaactgaccagaggtatttcaaatcagctccagggtttccaagatgatataaagacagttccaggatgatattaagaggtggtcaggtaagaactagagaattcaagtcacaattatcacttgagagtttatttatgagccacgagattcagcagtgggttcacagtgccagagttcctggaaagagcatttgagagagccaggcagctgataggtttaagcagtgcctactctgttccatgcagtacagcagtgaaagagccggttcccaggccaggcaaggcaagtgctatagatggagagttgagggacctgccatatcattgcctcaggaatcgggttcaactacggaggcaggtcagagcatgccaaaaaggggaaaggagaagtcagaggctgaggaaacaggtgggagtgagtgctgcagaggcaagacaggcacaaacaacctgttattaaaatgctctacagagttgcaaaggagcgggtggcagatgggaggagggaactcagaaacaatgtcagaaggtacaaaggagaaagggcgatccagaaataagacaagaacaaagctgggctctcttattccaggacagtggtcaacaagccattcctgagtttgcaagtcaggaccacttatgtgccatttcacattaaacttcactttccatgaaatttttctctgccagagaatgtccagtagtaaatctgtctatctataaaagtataaataaattaaacatggcaaagttggttttaaataaggaatgttagactaccgtaactttctggaggttgtcaatgaactatagtactggaactacggatgttcctacttgatcatcaggatataatttggtctgtattcacttttagagatctctgaacttcaaagttcgttcaatttattttcactgatgccttcaaaattcttaaaagttaagttgtgtcaatatttcaactctcacttgaaaaatgaggttattgaggtttcaggacacaaagtaaaacaccaaattcgtgctgtgagtggatttaaacctcagggccagctcccagctattgagccgttccttcagccatagcatgcatcttgcaaagcagctccctggctttcgagagcattgcctgaaccaacatgaagcctagagatgtcaaagttatgtttatgaaagtaaatgatactatgcaatacctcctgtcttcctcagtcatagccaaacagcaaatgaagccaagaggaaatacatgttcctcaatagcagtaaggttccaggtatcaggtggcggcagcagctgctgaaagcctgttccacttcacccctcccctagaaccccaaactcgggcacaaacccacgcctcaaactcttgaggctgcccggattatgagtctttcggcgacagatgacagagtgacgcaacactaccactcccgggggcgctaaaatcatagccttgacggaacaggaaggtggttactcttcacagaagctactaatctgctgcccccaccctgcctcaccacccccaccccccccaaacacacaccggaaagagggaggaggaaaaggaaatgaaagcaagtgactctagggtctggatttcatatgcaagaatagccagcaacaggtgcagcattccggtgaaattaagacactcaaagcaccatttgcctccacagcataaagagcccaggcacagaaacccaacattaggcaatgatgtcagaagtgcaaatcatcatcattctctagccagcagcaattttgtagggaaaaaaataaaagggcatttgtctgttgatacataatttcttttaatttaggagtcctctcttaaaatagtttgaaaataatcttagcatcgatcatcaatgtacttttttaatacctagtgactatcacagtgcctagcacatagtaggtgggtggataaatatttactgaacgaatgaataaaatgagatatttactgaacgaatgaataaaatgagaggtaaacaaaaaattttcttcacaaataaagataaccaaaatctacactagtatataagtgtatctttttccccatttctccaagaacagaacaaaaggttggaatcagtagccaaggacactggcttcatcatgttgttgatgaacacatcaggagatgcaaaccgtccacccctggctgaaactgagaagcccgatctgccaccccttgggtgatctatgcagggaattctcatctgcagaagatccaatgggaaaaacaatcacaatcatttaagcaatccacctttagattttcctttctttcaatgtgccatttcacataacattttttttacctggcattataagagaatttacaagataagtgttgctgtatgatcttcttcaacatgacagaaatcatcaactcataatatgttatggaaaatgtcttatactgtgtgtgacatgctatatgaaaaatctgaatgtgaataagacggtatagaaatgaagctattttatgggctctaaaaactgacagaatcagtagagaacaaagagcaataaaaatgagcccatcaatgggagaaggtctgttatgggaagactgtattgaattaaaaggttaatatcaggctgagctcagtggctcatacctgtaatcccagcactttgggaggccgaggtgggtggatcacctgaggtcaggagttcgagacaggcctggccaacatgacaaaaccccatctctactaaaaatacaaatacgaaaattagccacgtgtggtggtgggagcctgtaatcccagctacttgggagactaaggcaggagaattggctggaatccgggaagtggaggttgcagtgagccaagatcgcaccactgcactccagcctgagtgacagaatgagactccatctcaaataaataaataaataaataaataaataaataaataaataaataaaaggttaatatcagcatgagaacattactgattacgtaagttgaaaggtttcagtaagttaaaaataatgatattaattataagaataaagtgttcaaagcacagataagagtaaatcaccaaaattatcaggttttagagaactgagaatatacataaaaaatagtgtcataaataactttacaaaattactattaaaaacggtttgacttaatgatactctttgttcaatttttttaatctatgaatttttcttgtgtttgtaacttaagtattctgagtaggagttctctcttccctatatattcaatttaaagaatccttagattttttcaagttaacttccaaagatccaaaatactcccactttgttttactttgaggtaatacccaaaggtcttgactagggttcttaatggagatcctaagtggctagttaagaattacctcaaatttcaaagaataaacaggaatagcaagtctattacaaatgcttttgttcttttaagtgactccgccttttcattcattcattcactcattcattcattcacaaggatctatcatccctacagaacaggcaccgtacaaggcactatggacacaatcgtgaacaagacaaccttggtccctgcccatatggagagcacagtcttggggacctatcaacactaaagtaaacaaacaagtgaacaaaagcaatgagcaatggtgacaagtgtggatggtggagacaacagcacaaaatctacttcaggtgggtgtcaggacaggcttctctaagcaggtgcaatttcatccaatgcccaatcccagaaggaggagaaggagatagccaagagctgggggccggtattccaggtggaggaaagaccctgtaaacagaggttgttcccagagctgaaagctgaccagtgtggctggatggggcaatgatggacagtgagcaaggaggtgcattatacatttgaaaatggcatctcaccatatgattcactgaatatttgcctttccaaacactttctcctcagcctggaattcttcccttccacattcctctctaccactttgcaagtcacttctctgggaaacattccttgaccctctgaggaagagcaaaactccgggagtttatccttcctgacctgtggtcccacagcacatagtatgtatcatgagcacacgtcttaccacgctgctgaatcgctgcgtttgaaagcctgcaagcagagatcttgcttgtctgcctcccagcagcctatcacgtaacttggcaccagcagagagaaataaatgacagtgaacgaaccaagagataaatggacaaattaaatggatgcaggggcactaattaactactcaattgttggagatttggaatagcgccaaggttacagctccttaactcatttacagtttaatttctaccccatatgactttcatacaacagacacttttcggtaaatctttttccatcacggagaagtgatggaataactttcatagcgtatcattagacactggacccaatccattcatattcaacaaacacgcattaagtgccaagttctgtgccaggctctgaggctgacagtggtcctatcctagatgatttacaaggttagtaagcaaaataaatcatatttagaaaatgtttttaatgactgaccttgttagattctttacatgtaactatcttatttcatgacattatttagaaaaaacgtcttttaaaaacttcctaggtcacccagaggacaaaataatttagaatctgttaactcagtaattttcacactaattattggcggagagtcatgcctcggcttcctttcaatgaacaggtggacaaaatttaagtagccacattctcaatgagtctttacctgcctgtgactgtctgccgtctccgtttgtggattcagatctcacttccatttctcgtcggctcagcgtgtcctccaaatgtagttaagactcccaaaccaacagtgcatgatttctgaagtcacaaagggatgtgtacccctcggctggagaatgtgctttgatggagtcaaattgaaaaacagggccaaacagtatgggaaccgtggatagatgagttcctccccaactgcccggaccagaatggtcacattcctgcctctgtgaatagcccaatcctggtctgctctgtctgagcctctgccaggtgtggagcctgtcgccttaaaatctgaagacgtgtgacaacacttatctgcctaggaacagcaaggtatgcatttctacaaacaccactgttgaaactgcttggtatacagagaagccaagcacttcctctcttctcaggttttccttagattcaagccaaatagaaatctgagtgaggaaaaatgttaaggaatttagctttagaaaaatttgtttttatgtttctaactcttgcaagagagcttgttctcatcaattttataacctatttttcaacctacatactccagactaattcctaatgcttttagggatccatccattaatgcactaaataatacatgccctcaaactaagaggtaaaccatgccccttcaatcaggataagaaatactactgagtgaaatgcagactgcatctttctgccaattttaatccacagccctctgctcacttcactcccaatcaccggcctcaatcaggctttctgtgggccaagttctgccagcttagagcctgcacacagctctgccttcagccagtgccctccaccaccttgaactatggacttgaatagattcctcaagaaggccttccctgaccactcaaactatcactcattccaggtccctatgaagtccccgagtgatttgccatgacagcactgcagaatgtctaccctctaagcagttaaacaactatttgtatgctctgcaatttgatgtctggttctcgtactagtctacacactcaagaggccagatgccatcatagagctcatcagttttgtcaactacacccagtgcagtgcctgccatatggggcattcacccaagactactttccatttaaaattgttgtctcttttgaaacactctgtggcacactgctgccactgctgaggtttaaggaaacaaatactcattttaagccatcatctttatcaggggttattaccaggcagggggtccatgaacttggacaggaaaagcaattagatcttttcactgacctctaacagaaatttgcatttccttccattgtgatggcagatcacaaaacacattattagtggtagctttgactgtgtcaccagcaaaaatcataaccattttcacatcaccttacaactctagcaggtatcttgaaaataccatttggctcgttgttatttcagaagagtagagaggttagagatgctagaagttcttactgaacacactaatgaaacagcaaatactactctctcacagactttttcagtattttggtaactgtatgcatggaataccatgtactctattttatgcatttaaaaatatttgtcaggctgggtgcggtgcctcatatctgtaatcccagcactttgggaggccgaggcaggcggatcacaaggtcaagagatcgagaccatcctggccaacatggtgaaatcttgtctttactaaaaatacaaaaattagctgggcatgatggcgtgcgcctgtagtcccagctactcgggagtctgaggcaggagaatcgcttgaacccgagaggtagaagttgcagtgagccgagatcgcccccctacactccagcctgggtgacagagtgagactccatctcaaaaaaaaaaaaaaaaggccaggtgcggtggctcacacctgtaatcctagcacttttgcaggccgaggcagggggattacctgaggtcaggacttcaagatcaggctggccaacatggtgtaactccgtctctaccaaaaatacaaaaaattagctgggtacagtggcttgcaactgtaatcccagctacttgggagactgaggcaggaaaatcgcttgaacctgggaggcagaggttgcagggagccaagatcgcaccactgcactccaggctgggcaacagagtgagactttgtctcaaaaaaaaatttgtctggcttcactaaactgccaaaggagtctatgggggcaatgaaggggggatgaagataaagaataaaaaccctgatctattaacagatcactatcatgagatataaacatctgatgcaccaagaaacaattatattttgttctgaatgaatgtatttttactcattgtaaaaggaaataatatttccttaaaaagactttgcaaaataaacaaaattaataaattaagatactatttttaaaacaaataaagatatttatttccttggttttaatacaaaacaactctaaaagaagaaattcccaagagacattaacaagtttaagagttacttaacagctcaactattagacacccctgacactcctaagaatattcttgatttgatgaaacttctggtaacacctggaagcttaaagtcattttcctttgtttcatcacctctctaaaaagttatcgttcctttgttaagatgctagataagcccagttctaaccaaccctttgaattactcatgtctgggtactcccatgtgtatgcactacgcatatcttaataaacatgtttgtttttcttttgtttaaaaaaaaaaaaggaaagaaacttctctcccttttttctagaaagactcatccttgaaccatcaaggccctgggcttgcaaagggaggatagcagacaggtggggttgcgatagtagacaggtggggttgcggaatgtattacactccgatttccctcacagtgttgtcctagttctagcctagcagttggaaattcagccccatctaacttccgttgttttttgtttcgttttgctttgttttgttttgttttgtgttttgagacggagtttcgcccttgttgcccaggctggagtgcaatggtgtgatctcggctcactgcaacctccacctcccgggttcaagtgattctcccgcctcagcctcacgagttgctaggattccaggtacccgccaccatgcccagctaatttttgttatttttagtagagacggggttttgccatgttggccaggctggtctcgaactcctgacctcaggagatccacccactcggcctcccaaagcgctgggattacaggcatgagccaccatgagcagcccagtccccttacttctgtaacaactctgtgaatatatgcacataaccaccggaaagagttataattaacaccttactatgaactactttaatcagccaaccattaaaatccagggaaaaaagagctttgatgagaggcgaaaggccgagcctggagggagttaggccagtgggcaacacccaggggctgcctcagcagaaaacaggctcagagaagacaccaaaaccaagctctgcagaacctcaagggcagccagcaggccctggttgcgttatgtgggcttctctggaagaataaataccacagcatttcttttacacaaattaggacaggttctgaccagttcagttcagcagctccagttacattcaggagctttctcactctctcccgccaaaaggaaaatgcgtaacaggaaaagaaatgatcctggcacccctcctccttctcctcctcccatttcccctctccttcaccccctccctgttttctgtctctaaaacttagactccaagccaaggtcggcctgatctgtctgctttcatccacaggcgtcacatctcttacagaatattcacaaaaccccctcggcttcacacagcagacagaagcctaaaatccctcccgaaacatcccttctcaggtacaaatccaccagacgagcatcaacaacggcatgagatttgaaggaaagtcagaactgtccttcaggtccaggtggcctagagacgcagaaagaatgccaagtttggacccctagtcatctcataggaacaggtgcatcttgagaaaatcattttctccctccttgagtgggattcctcagggataggggaaaataactggactggttggccccttaaagcatctaccagatctaagattctgtgagggtccgtgttaccacaacagccatccatggttgcaagtgatggagaagagcagaaggaagccacttactattaaaagtggtgtatcagccagaaaatgttggaaagagaccatttcagcttgaaagtcggctcgctcctagtattcattcaggattccaagttccttgcatttgtaattcattactagtgagctaaatataccacaagtgtaaaatgtctcagagaaaacactcccatcatcatcagcaatatggaaaatacatggccgtcacatcagaggagaaacttgcctcaaaataatttggatatttacagccacacacacaatgtgatgatttagatgatttctaaagccatgaagcttctcaggcctggcagaaagtataaaaaatattaggatgactatgcctaacaacagcaagaatttggtgctgagaaaagagggctactaaaaaaaaaaaactaagggaccatgttattcacagagctttatgaaattgccaaaaaaagtaacagtacagcattttctgtactatcaataaaatgttttaataaaatgatttctacagtctatctcattatatatttctcaatttttatccaagtaataaatgcacttaagtttgttttcaataaaataagatgataacacaatgcagcaggcttgggcatcccctttcctctgttatctgtttcttctgacaatagattatgcatttctaaatactatgcttataaactccttcctgattgcaagtcagacattatctataagactttttttacttatcacttttatatccactcttccaatctctacttgagatcttatttctgatatcacacttttaatttccaagatctctttcttattctctgattttttttttatcacattctgttcttgtttcaaagacacaattattttcctacttctctgaggatacaggccacattcctatttcccctaagtggctccttccttttgtttgtgttaatataaggtctactggtggaggctttcaaacatctgctgactcctagcagcccctcccatttcaaaatgaggctcaacaatgcataggcttgggtgtcacctaccaactggtgggctcaaagtaaggtaatcaatttacgtgctgtaactatactgtactcccagtaaaagcactctttaattggtggctgatcagcgatgggaggctgtcttagtccattctatgctactgcaacagaatgccacagactgggtaatttataatgaacagaaatttatttggctcaaggatctggaggatgggaagtccaaaagcatggcactggcatctactgagggctttcttgctacatcatcccatggaaaaaggtgaaagggcaggatacactgacagcaagtaagcaagagagagtcaaactcacttttataacaaggccattctcaagataactaacccacttctgcaataatgacattaatccattcaagaaagagagcagagctctcatgacctaatcacctatttttaggccccacctccaaacactgttgcactggggattaaatttccaaaacatgaaattcgggggacacttcaagctatagcagacaggtatagcttcaggaactggggcacctcctggtgtcagttaatcttcctgatgtctattcagagccttgccatgctctctgggctaaggatcccaagttggaattcagtttttccagaaaaaatatataaatctctgttctcctgtgcaggtgaggaagaaggggaaagctctgagagtcaaagtgtgctgtttaaagattctcaaccaaactctcagttttcagcttcaaacttctcccactttcccctgaaccaacctcaaacaatcctggcaactttcaatcagagggcttgcaaaatctgtgagatgcataagaaagccactccaccatcgtctttcttccccatcaatggttatttcatttccacttccatttgaccacaggagtttattcctttttgttctcttattgtaattatagtagcaacatgacagcaagcaatgataaacacaaattgctctaccacttttaactgtaagttctgctctctttaatttatacacaggaagactcctaaaatggtcccatttccatgagcctggcactgagtttcacatggagcagtgtgcaagcaagacgtggttctcatagtcttgaattccaaaaggtagtcttgctaaatactttatggccaaacccagactttttacagtaatattaataacatcagctgtaactgtcagttaattattctctttatgattaagtccaatttgaaatatgcagtgatttcctatagagagaaattttatagtcatagcataaaattacatttcctttcctttattttcaaatgtgaaattttactttagacttggtaaatcaatacagccaaattacagttgctttttggggacctcgatgcagacttacttttacttcatgtactaaaaatcctaaattgcattaatgttttattaaaaatttaaataaatttaatctctaaaaatgtatgccaaaataaatacagaagctcaaagttcacctatatgtattaaagcaaatctatatcgagatattaacaatgaaataaaaatacacccagtgtaaaggtttctagaacccaaatgctcagctttctctgacccctaaaggtctgcctccaagttctgaaaacagatagcaattctcatcctggctgaaaggaaaacaaatgttgttgatagtaatatggtgaaatacagaaataatttcaaggccaccttgcagatcagaaagaacttcacctctgataccaatgttccccacaaaaccgagtaaaattgtctttggctacctaaggatggagaaaacttctcaagctaataaaggtaagattttccagcatattcataaaattgcaagctttcgcccaaattacttggtttaaaaggacacatacagccagtttgattaatcccctggcagtcaagaagcttgtaaaaaatattttgcccatatcgtgatatatgtttaatatatgaccaaaaaaacaagcaagagaaagagagaacaaggaagagaaagagagaaattttaataaagtgttcttttattttctttaaaccttaatgtttttgagaaagcttaaggaaaagataaaagtaattgctactaaatgactgcaaacttttaagcaaaataaatattaatgttgtgcttcatggattctgatgtaagaatgtttaaaatcccctaacatttaaaacagattatcacaaaaagtgatctccttgctcttttccagcccatcattaattggagggagggagggctcttctggctctcattcaaatgataataatttgtctattaatcttgataaggggatggagatgaatgatgttggaatactcataaataatctttatagtagttaatccaccatttacctagtggtcatgatgatttaatagcttactgaagggcatatatatagtcaatccaatccccaaatttaagaattgccaaggttatgcttcatcaatgcaaacatctttgttacttaaatgtaagcattagacctggaattgctaggaagccaaaatagtgccactctccacatttaaactggatttgcctctaaaaagatcagaatcacacactccctacacatttccctatgtgtatcctgctcactaatcctttacacatggatggagtccccaggtacaaagcactgcttaagacagtgacttccaatggcccatgaaatccatttttttttttttttttgagacggagtctcactctgtcacccaggctgtaatgcagtggcgcaatctcggctcactgcaagctccgcctcccaggttcacgccattctcctgcctcagcctcccgagtagctgggactacaggagcccgccaccacgcctggctaattttttatatttttagtagagacggggtttcaccaggatgtgttagccaggatggtctcgatctcctgacctcgtgatccgcccacctcggcctcccaaagtgctgggattataggcgtgagccaccgcgcccggccgaaatccacttttactatttctcctacactttgcccaccaggatgttagtttcatttaatgagtccctgtgtggaagatatttctgagtcaaagtgtctttaatttccaaatcctgctagagaatgatagaagctcttggtgatgagtcacaagggtagtttgctggtcaaaataaattcctgctccacaaagtcccctgcagggcagctgagaagggccactcacagatttagggggattagctgagctacaggttcacagatgagtgtggtaaatccatcagacacattcagtgaatgctcaccaggtgctcaccagtgcaggacacactgcagggagccaccaagatcacttgctacacaaacacccaactaaaatatttatttaacaaatgaaaacagccaactcccaaacaaacatccatccaaggtaaacaaaagaaaccagtttccatgtgaaaaaaaactgcatcatttcataaatttgcttgtaataaaataactttgggcatattgtggtaattatttaattatcatttgcttggagttagaggctcagcactgagaactactccagggtagtgattaagagtatgggcagccgggtgctcacgcccgtaatcccaggactgtgggaggccgaggcgggtggatcgcttgaagtcagaagttcaagaccagcctggccaacatggtaaaaccccatctctactaaaaatgcaaaaatcagccaggcgtgaatgtaggcacctgtaatcccagctactcgggaggccgaggcaggagactcgcttgaacccgaggcggaggttgcaatgagtggagatcacgccactatacttcagcctgggaaatagagcaaaactccatctcaaaaaaaaaaaaaaggccaggcacagtggctcaggcctgtaatcctagcactttgggaggccgaggtgggcagatcacgaagccaggagttcgaaaccagcctgaccaacatggtgaaaccccctgtctctactaaaaatacaaaaattagccgggcatggtggtacacacctgtaatctcagctactcaggaggctgaggcaggagaatcgcttgaacccgggagggagaggctgcagtgagccgagatcacgccactgcactccagcctggatgacagagcgagactctgtctcaaaaaaaaaaaaaaaaaaaaaaaaaagatatggcacagctacttgggtttaaactccacctctgtccctcattacccgtgttgggcaagctacttacccactctctgccttggcttcctgactgtaaaaaggcgaaaatagaagtgcctcttttatagggttattgtgaggatcaaatgaatttatatatgtgtgtacatgcacatatatgtatgtatatagacaaacacatatacccagatatgggtgtatatggttgtgtgtgtgtgtgtgtgtttgtaaatagtaaaacggttaaatagtggctggcatagaaaacatgaaaaaccattaagctactcttcttatcactacaatacttcttatacatcaaattatttcatacagtgtttcaggttaaaattaagcaaccactaaacgtgtgcaactgtgtttaatatgatgagctagagatgcttgaaaatgatcagctgattccaaacagctgtgccctcagagccactgctgcacagcgagcttgtctgagtgcctgccacgagcacctccccccactccatccccattagcagggaaagacaataagtaaatctggtgaataaggtgcaaatagaaactcaacacttaacagatttcaaaaagcagactcaggtaaataaaagttcccagtattaaatgaggcacatgctagttcatcttcaacctgaatgcgaaagctcagaccacgactgaaaggaaggggtggaaaaatcgagtgagtggtgcactagttttttttgattaatggttttacctctgtaattctacctatggaaactgtcctttgccccagaatacccttctctcctttgatttctcactgctctgttgttcccttgcttcctgcacagagaaatctaaccagaatgtcaaattgtgtgtgtatgtctgagcatcagacacattccaaccaatttataattgattatttcataatcattctttgtatacatattactatttataatattcacaaaggcaaaattccagtggccagaaaagtgggtcagagtccattcatccagacctggtaacctggattgggagacggcccctctcactatcagcagcctggagatagtcagaggcaatgatgcaaagagggaaagagagagcaggaatgaagccaggacgtaatagtaatagtaataataataacaaaagcaacagcccctaacaatattagccaaatactttgaactcatttaatcttcacaattataacgatctgttaagacacaatagaataattatttttatccgagtctgcagaatttacacctttaaaaatttacttaaagaccaggcacagtggctcacgcctgtaatcccagcactttgggaggcggaggcgggcggatcacgaggtcaggagttcaaggcaagcctggccaacacggtgaaagcccgtctctaccaaaaatacaaaaactagccgggcgtggtggcacgtgcctgtaatcccaactattcaggagactgagacaggagaattgcttgaacctaggaggcggacattgcggtgagccaagatcacaccattacactccagcttgggtgacagaacaagactccgtctcaaaaaaaaaaaaaaatgtacttaagtctgggcatggtgacccatgcctataatcccagcactttgggagggtgaggcaggtggatcactggagctcaggagtttgagaccagcctgtcgctacaaaaagtataaaaattaactgggcatggtggcatgtgcctgtggtcccagctactctgaaggttgagatgggaggatcatttgagcccaggagatcaaggtagcagtgagccgagatggcgccactgcactccagcctgggcaacagaaaaagaaaaaattacttaaaataacttgggaccaaaaactgaagatagaaacatacaatgtttcaactaaatcttatggtatataagattctaccagaaaatgtactaggcttcgtcctttgcagaagtgatcatgacgacaggaagcagaaagatgttagtcaaccaagttattccgagaaacaatcatctaaatgtctagtaccaagtaaatgcctcatgaaacaatttgtcattttatcaacaaatccttaagtgtcgaagtctctgccaaaaggcaacacacaagtacagaaagtctaacatgcccagaaacagcatttccaaggaaaatgtcagacccacaacttaacagcctgattggcagacagactaccctgggccacaacattaaaagagtaaaattcatgtaccttaacctggaaaaatgtgaaagaataatgaggaaaaaaaaaaacctaactaaatattataaaaattaactttaattcaaaaaaattttaagcaaatttatttttgtttgttttattttgagacagggtctcattctgtcaaccaggctggagtgcagtggtaccaccatagttcactgcagcctcgacctccaaggctcaagtgatccctccacctcagcctcccaagtagctgggaccacaggtgctggcatcacacccagctaatttttgtattttttgtagagaggagtttcaccatgttgctaaggctggtcttgaactcctgagctccaacaatctgcctgcctacgccggccaaagtgctgggattacaggtatgagccaacatgcccagctagatttattttcagtagacattataggccaggtgcagtggctcacgcctgtaatcccagcactttgggagcccgagacaggcagatcacttgaggtcagcagttcaagaccagcctggccaacatgatgaaaccccatctctactaaaaatacaaaaattagccaggcgtggtggcaagtgcctataatcccagctactcgggaggctgaggcatgaggatcacctgaacccgggaggcagaggttccagtaagccaagatcacgccactgcactccagcctgggcgatagagcgaaactcggtctcaaaaataaaataaaataaaattagccaggcgtagtggtaggcacctgtaatcccagctactcaggaggctgaggcacaagaatcacttcagcccaggaggtagaggttgcagtgagttgagatcccaccactgcattccagcctgggcaagagaatgagactccatctcagaaaataaataaataaataaaaataaagacattataaaggaattaaactaagcaacactttatttcttggtattccctaaataaacttgaagaagtaagaaagatggaatacactgaaggaaaattttcctttgaagaattgggagttacagagaagtccacagcacttcatcgttaacagtattattgtacaggctcttaacagtgcaaagtattttcagtatatatcacagggtgttaaaaaaaaaatcctacaagcagagtacctaagccgaaaatgaaactcaaaaagagataataggtcaaaaaatggtgaaacatacagtcgtgaggtttgtcaaaagaaaacaatcccatctggaagctatttccaggaaaggaaaggacagaacaaagcccagaaagaaatgcttatgttcagatttactgactgtgagagcagaaatttacataaagcaatggaaaaagtaccatgcaatatgatcaactatcaaagggttccttgacaggaaagtctgaggactattttaaaaaattaatttataaaaagaaaggtaagagaaggtactaatctctattacaacaatttggtaatttatcaagataccagattggggctgggcgcggtggctcatgcctgtaatcccagcactttgggaggccgaggtgggtggatcacttgaggtcaggagttcgagaccaacctggccaacatggtgaaaccccatctctattaaaaatacagaaattagctaggcatggtggtgggtgcctgtaatcccagctatttaggaggtagaggcaggagaattgcttgaacccgagaggcagaggttgcagtgagccgagatggccccactgcactccgaaaagagcaagactccatctcaaaaaaaataaactaaaataaatatatatatcagattggaatgtttaaattggcttcaggattaaggcaaatcgttggcgaacttcctgcaatctctctttttttaaaatgattttctgtactgtaactggtttacaatatgggatgccacaaatgagagttctattcatctagattatcacatgtagctgaagaaatagcttcctccatatcattcgctgtcctatttatgaggttctgagttttgggggtcctcaggaccaggagaaacacaaactgccttatttcatcaaatgtatttgtgagaatttatgaattatgtcaatcttaaaactaaccattttcttattgctttgtctaatatgacactttgagacaaatatgcatccaaagtttaccaaagggagcaagcatgttagagaaagcaagcagtttctgtgaactacccatggccttatcttaccaatccactcatttcttcctctctgcattgttgttgatttttgctttttcaaaatcctacttcctatgtggctctctgtaagaattcagaattagatggggcattttttaaatatgataaaaaacttactctaagtcctaactaataacaagcatatcctcatctatgaaacactgacaattatatcttccccataaaattatggtagggagtaaatgaaataatatatttgaaaggcccaacacatacacctagctctctgcctccctctgttattttaggaaatattttctccatctaaaattaatttcccttgtgtgctccagattagcaagcgatcaattcattcacactttgctaacttttatagtgaaactaactggttacaattttaaaagttaatgtatatccagatacttcctgtgaaaaacattgactttggctaagactcctgaacccatacattattggaagtaaaagtttaacagattatggttaattttaaatgaaagtaatgtaagtgaagagactgcaaacaaagcaacagctatactactaatatatttacccagaccctctcatttccgatgttttctttcaacatgacagcattttcaactcaattggcaacaacattgtgcccactatcacacaaaccacctgaatgagagctatggggtcagtaagagccaccaattgccacacatatccaaataggaaccaacatcagtctatccgttgttttgttttttagagactttttttgttttcttgcagagacagggtctcactgtgtttcccagcctagtctcgaactcctggcctcaagtaatcctcctgcctcggcctcccagagtgtggggttacagacgtgagccactgtgccaggccccacttttaatacaaccatgaaagatgagaaggtagtgcagaaggaaacaactgagggaaatgtatcctgaaatcctctagctgcctcttccattttgaaagagggagtgtacagggaacagtcctgtccagatagcaatggagccgaggcgaccttcagcagttcacagcgccatgacgttctcatctggcaaatcatggtaatacctattctgccagatcatcaccagatcatgccaaggattcaaacacatataaagtgcttttcaggtagattcctactaatgccaagctgcctgaaatctgtccactgcataaaggcacgaggccaaggtgaaaaacgacgctgaaatccagccagcacagcggcacggaggaaagaacaccttttgctttgcacaaaggcacagcccacgaagtagtgtgtccatcagactgtgtctctccagagtgggcgccgttatctaattgcccacgcaaaagggctgccttggtctaagttaaaataatgcccagcagcagcactaactaatggcaatttctaggtgagaacaagaacaagagtttggcatcgggccctgtccaactagtgtcagaacctcagccagtagccaattcccccttccctgaccccttcaatgcacatcaagcacccgaaccttccttcctctcttcccatctcaccacagtgctgcccacactgccactgggtcctggaacagtgccctgactgacctactgcccctgccagccatccaggaaggaagataagccactgttcaggccagggaccccacttcctgaccccgctggttgaacttaagatgtcttttcttaagaaacaatgttaggataattacatcctatggcacttttactgcagtattgtctttcagctaccattaaatgtgaaacaggattctgcaggctggcttatgttccaatgcttcaaacaagcaaattagaaactcttatagcccactaagtgcccaggccctgggtcctggcctctgtttgcaaaggagatcatctcctcttgatcttgtgtaagccattcgagctcatgaaacctgtttccttagctgttaaataaataaataaataaataaggaaaaaaatatatagagagaggtatatatatacataggtatttttgttgtgagtacttcaaatgcaatacatgtaaaatggcaccaaatggacactgagaaagcagtcaccataccaggtgcacaatcccttatccacaatgccaggatctgaaaagctctggaaaccaaaggctttttccataacccatttggcagcaaaacgtgacctgaactgacctgaggctatttataaccctgtttgtgttccacttagtgtaaatattcatacattttctgcagaatgatgaagatattggatgatagggtactgtcccaaactcctctggaggctttatgtaacatagggcatatgggccatagcctttctgaaatgggaaaaagaaaaatcataaattctgaagcatatctggtcccaaggatttggataagggatggggagttttaccatgaaggaggttcgctggccaacccaagagcagctttttgtgctagactttcagctacatttcccatcaacaagttgtcacgatgtctgagcacagcaacagctccgccctgaagaggtcagcatccaggtcctgggtctgggctggccagctctagggagtggatggggttaggagctaaaaggctgagcagacagggaatgcggaaaccaggcctgcgccctacttcacttgcactcagacaacccaagccatcaagcacattcttatgacttgtgtagtcattttttttttctagattttcaaagtgaatcttagtttttattcccaacgctggctccctctagtctgggcaaactgccatttaatcacaagggccactcaaaggttgttttttctctttttttaagctgttgaaaacattaagctaaataagtgaatattctccagcctccctctctgagcccctccctacctttctcatccattaaaacagcactccatttcattacaaatattctactcctagtgtattaaagacataacatgtatattataaaaagtaaatatgaatattaatgaaacagaagcatgaggaaaagggaaaattttaagaactgaatcaatgtaacattctctttgtagcatcacctgtagacctagacaagcaaggaccttgccttaaatcctgacttttagagggcctcactctaccctcttccatccccatctctcccccagaaatagagaaatcagaggaccaaggggatatgcaagtcctaaagcacggtctagaggcacagggtcctagtactcactgctcaaatgagcactgggctctttcccaagcaagggtggaccacactactgtttgcaagtggggaagagtgggagaccatgggtgcttggccaactgaccacaaacttgggtgcaaagcccttcccagtgccaaatggagccagcatgggcagacaaaggggaaagtctgcaaactggagccagggggcagctctctccaccaccatgttctgtcatagaatctgaggacttggaaaattccaaactcaaacttggcccatgaaattgtgatcaaagcatatgtatatttattattatccattctcctttctattttcttttctttttttttttttcagtatcagaaacctgctcttctcctccatccccacagttctagctcagcacaagccatatttctcaacctcccttgcagcaagatgagtccacgtggctaagcagcagccagtgggatgtgaaaagaaatcaggaatgcaacctgagggccatgcacgttttaaaaaattgcttattttttacttctcttttctctttccttggactagaacttgacatagtgttgaggggcaagcctcatcaagaaaatggaacaacactttggaaaggcagaacaagagagaaggaaccaggatccctgagagaccatatgaagcggagccaccttcccaccctccatcacccaccaactctgaactgtaaggagagaaagaaataaactctgattttatttgagccactgtattttgaggtttctttggtacacccctggagcctctctgtaactaatacatttgcaaatgatctacataaactggctggaaattagttgtatgaatccactatggtgacttcagccaaaagaatataatatccagcctcagcaagtaaaataaaataaaatgggagaggagagctactgtgtgatgcagttattttttcaagaattctaccagaaaatcatatcaaatatataaacatggaagagaaaaactaaaagaattccacaggacaattagccatgaaaaggcttagtctatcctagaatgtcttgttattaaatataaagaagcagaaaaagggaaattctgtatatatttaagaaacaaaaacaaatcttcctagtgcaatatgattaaaactatttttacatgcttattttaaaagactggaaagaaataaacccacattataataattatttgtatggaggtaacggcttacatttcttgagtgcttctatgttccaaattgctttttttttttttttgagatggagtcttgctctgtcacccaggctggagtgcagtggcgcaatctcggctcactgcaagctccgcctcctgggttcacaccattctcctgcctcagccttccgagtagctgggactacaggcgcctgccatcaggccggctaattttttgtatttttagtagagacggggtttcaccgtgttagccaggatggtctcgatctcctgacctcgtgatccacccgtctcggcctcccaaagtgctgggattacaggcatgagccaccgcgcctggccccaaattgctttatatatgttaattcacttactttttacaacacgaggaggttgatgctattactatctctactttactcaggcacagagcagctaagccatttgtccaggttcacagagctagcaggtggccatgcttacacccacagcacctgatactgtctgaaccattccctaaagtatttctacagaagagtactaataagatttttaaatcctgcaggatttttcttattattcttttcaaatattgtgtaatctaataccatgccatccttgatatctaactcattttagagataaaaatgcttaccctaaataccatcatataatctatatttctataaccccaacagcaatattgcaggttagaatccaagtgtgcagaatatttgtgaagatcagtgtagataatactgaaatgacagtgatgaggaagaaggtactagaacacagcccttcccgagcacagctcgcacaattaagcattaacaattaggttttctggagcttagaaagtgatcagtgtgaggtcatctagtccatactccttaccttacaaacaaatcaattaattgtgcagacagcttgagtgacatattcaaggtcacacagctggtgatctgcagagctaaaactggaacctagttcctctttgacactaagctaagctctttttttaaatagggcatccaggttttctagaatttagcaattaaagcagtgattttcaaattgtgttccaaaagacatgaaggaccctcagaagcctgggttgagctactcacctgccagtcccaccccccaaactctgctgtatagaaagccacatcctacctatcagcaatgcatcgtcacattcctaaaatgagcctccactggaagacttgtttgcagaaagacttccaaggcaaaaataaaaatcacataaccaagtgaagtattcgcatcgttactttccagagccccataacctgggaccttttagagtgcttagtaatctgaagaaagcttcttacgccagaattcttcccccaggaagatcctcatcatttcactaaatgggcattttcatgccaactaaaaatgtaatataatcacacaataaagggcaatcttagaagaggaaaggcagttggcaaccacgctgacaaatatctatactacactgacctcagtctgctcatttcatgactgcctgttgaaaacaacatcaagtgatcgatctgtcgtgagcatctgggaaacacagtcaaaggctgacatgcagctaatcaatcgggacaataaagatcaacaaagattgaactgatatttttctcagggattgcacacttgtttgttttttgtttgtttgtttgtgtttgagacagcatcttgctctgttatccaggctggcgtgcagtagcacgatctcagctcaatgcaacctctgcctcctgggttcaagcgattcttgtgcctcagcctccccagtagttgggattacaggcacgccccccaccccccgccacgcccagtgatccctgtctccccacctcggcctcccaggtagctgggaccacaggcatgcactaccatgcccagccattttttttttttttttttgagacggagtttcactcttgttacccaggctggagtgcaatggctcatctcagctcactgcaacctccgcctcccaggttcaagcgattctcctgcctcagcctactgagtagctgggattacaggcatgagccaccatgcctggttaattttgtatgttaagtagagacagggttgctccatgttggccaggctggtctccaactcccaacctcaggtgatccgcctgcctcagcctcccaaagtgctgggattacaggcatgagccactgcacccagaccaatttttatatcttttgtagagatggggtttcactatgtagcccaggctcacacttgtggaaagcaatgaaaaatgtgatttgcttctgcacacgtgtatttattgagcacatactatgtgtcaggcactgttctagatactagtgattcaacctagacaaaatacctgcattctagtggaaaaagacaatcagcataatccagtaagtgctatgggaaaaaatgaaacaggataaagtgggtggagagggctaatgagggaaggatttgctattttaattgactggcacagtagctctctgagaggagggagttagccacaaggttatctgctagaagagggctcaggccctgacctgggaggtgcctgcctcatataatgagcacaaactagtaaggggagatgaagccaggcaggataaacagggtcctgtagatcactgtaaggtctttcgcgtttattacaactggaatggggagtcactgcagacttggaaacctgaagcaacatatccacttctgatttgaaaaggatccctctactgtggggttcagaccagcctccatgggccaagggaggaagcagagagacaagtaaggaggcaattccagaaaaagcaatggtcccctagaccaggacagtagcagtggagatcgtaaaatatgaccggattctgtataaattcagtattaggaaaatagaaccagcaggatctgctgcattggatgtgggtatacgagaaagaaaggactacaaagatgactccaaaactggggcaattggaagaatcacattgcctttatctgagacaagcaagactgtgggatcagctttggggtttacgggagatcaggagttcagattttcagatctgaacatagaagatgtgaagtaaacaactggaaatgcaagtatgcagttcagaggaagaggtctgggctagagatagaaatttgagccagcattcagatagtatttaaaccaggatactggtgagatgacaaacggcaacagtggggacagagaggaggtccaaggactgggtcctgggccctccaacgttaagaggaagaatcagcaaaagataatgggtgggaaaccaggagcgtgtggggtgtcctagaagccaaatgaagaaagagtcatggaggagggagtgatcagcagtgttgatgctattgagaggtggaataaggtaaggactgagaacaggctactggatttagcaacaaggaggtccctaataactttgacaagagcagttttactggactggtagggggtctgcctgatttgagtggtcttaagagggaatgaaaggagacgaactgcaaatgttggtacatacaatctttgaggagctctttcataaaggggaccagaggaatggcgtggtagctacagagacaggtgggatcaaagtaaagttttgctagaagaaaaacaatagcatgtttgtaagcggatccactaaaggggaaatcatagggatgcagaagagagaagggaggtgactttgagtaagtaaaggaggatgggtacaatgtacacggttagggtggccttgggtgggttctggttgaggatagatgtggtattgaagtttctggattcctctttggtttgcttcaattttcttagggcaagagtaggcaaagtcagccgggcatggtggctcacacctgtaatcccaacacttcgggaggctgaggtggatggattgcttgagcccaggagtttgagaccagcctgggcaacatggtgaaacctcttatctacaaaaaaaaatacaaaaattagccaggcgtggtggcacatgcctatagccccagctacccgagggtgggaggattgctggagcccaggaggcggaggttgcagtgagccatgctagtaccgaaaaaatgggacgcttaaattcagatgacagaggggctgccaccataaacaatgacctggtctagccagaatatacccaccacactgggagacaagatcactagaaagagaacttagagaaattaagaggacagagtattagaaggatcatcaatgtttacacccaaatcactaaaacaagagtaacttttagagagagtgacagagctaaactcactgagaaatgagagtgagcggtggagggagggagtgacatctcaccaattaggttgagttggtgatgcaatccgatggcaggagattgcagctggggaatctggtctgaatgcggaatgaggagcaaagggccattatctctctctcctgtagtaggagagggctgggagaaaagaacccacacaaaaggcagtcacaacaaacatgtctacactttgacaaagaaatttcttttgatgtcagaaaaaataaagcactgtgatatccattccacctgagcttgatgaagcccaagtttcattaattaaaaaaaaaaaaaactgaggcagactgttaattagtaatctatgtctgattatttgccacttttagcaacaaaagggaaatattcatcaacaaataaaaatacattatatgcaaaactgggtcaaacattatcagaaattttgcccttcaaactttgtgtcttctcaacctaattctagcaatcaggtcttttgtttgagtggctttaaggcagtagaagtaaagtaaggaccagaatttgagttacagcaaaagtgtgagaccctcagttcgtgccagcgtattggactgccaatctaatttcagaaaaaaagaaacattatgaagacataaccctataatatgtcactcttcctctaacaagacttaacttttcattaagtcataggtctcctttgagaatataatgaaaactgtggaccctttttctaagaaaatatgcagaaacacaagtgtaaaaacttctgcacatattgcaggatttattgttaacctcttctctccctccccaaacacccagtcaggctaggtagagtaatatctgcaagggggcttcctatgcccttgggagataaatacagtcaacaactgcggcatcaactaataatatctactaaaaaatattacaaatcaaaaaccacttcttaattcttcatcttccgctgccgtcatctaccatccagatgctcattttagggtcagtcaaaaatatctcagaaaatacaaagataaataaaatatgcaacagttcttgatttttttttttttcaacagagtcacactctgccacccaggctggagtgcagtgatgtgatattgactcaccgcagcctccacctcccaggttcaaattattcccatgccttagcctcctgagtagctgggactacaggtgcgcgaccccatgcccaggtaattttttttttttttgtatttttagtagaggtagggtttcactatgttggccaggctggtcttgaactcctgacctcaggtgatccgcccgcctcggcctttcaaagtgctgggattccaggcatgatccaccacacccggcctcttgaatttttaacattatcttgcaaagagctcaaaaaatgactcaggaaagtactcaagactccagctgccagttttcaagggcagaccccagcccaagccagtctcatacatgtaagagaaatatatatattacatatttttcccagatatctccaggcacctcaaaactcaatctagaacttcacttactatccccttatgcactgccctctccacaaaacctagaaagaaaggcttcatttgcgagtgttaaagtcaaaaaccaggcttctctctccatcccatccaccacccatcatctgaagaccaccaccatgtcctatcaggtctgcctcctacctaaagcttctaaactctcccctctcctccttcccagctacctcaatctcagttttggcttcaatacctcttatcctctaactgtgacagccacccaaaggtcctccagaaccccaggcttgcctcatccagcacacaccccacaccatccatgctccacgtggcttctagagcaccactcagaagagcaaatctgatcagatcagccctctgctcacaagctttcagaggaagcaaggccttcccaaaccaggagtgagagagaggaggccatctcaagtaaccaaaaacacagagaaaagggaaaataaaacagaaagtatgtaacctgatattacagctacggtttgtggtgtgtggtgtgtgcagggtgtgaggtatgtatgtgtcagggaagtagttcggtgaatactgctcctagaaattggaagctttttttatttaatatgtcatatctttcagacatagaaatagacaataataggcaaaagaaaatggtacaaggtccatgactgcagtgaatctcctatccagatctgcctttcaggcaaggcaatgcacaaattcattcccccagcagctgagggctcatagctgagcatccgtccaggaactgcccttggccaagttaccttgcccagattttcacctcacctccttcccagggtcagccaaaagcctactggtcaaggcaaaggtccccaggctcaacacattgcctcaagttgggaaatctctgaagggccatcccagcaccagcattccctatggatccaatggtggccctgctgtaactcaactacacttcagcttttccctggcccagtccttcttccctcatttctttcattaacaggaattgttctcaagtgcacacaaatctctgtctcaaatcctacttccaaggaactgggcttaagacagtcatcactcagttcacaaatcagcattatttcatattaatttaagattctatttctattttcattgaggaattaaatattatagataaaactgaagaacctcctctctcactatctctaaagaaatctagtgtttataatttccataaaaatttttgtattttgctatatatttataatatgaatacataaacactgcagggcaatttctgcaggtatatgagctttatatacagtaccattcaatacattgtgcaacctgatttttgtttgtagtcaaattgtttttaagatttatctatgctgacataattagctctttaaaatacaacctaaatcaaatacgtcaaaacattaccagcctggccaacatggtgaaaccatgtctctacaaaacatacaaaaaaaattagctgggcatgatggtatatgcctgtaatctcagctattcgggtggctgaggcacaagaattgtttgaacccaggaaggggagattgtagtgagccgagatcgcgccattgcactccagcctgggcaacaagagtgaaactccatttcaaaaaaaaaaaaaagtcaaaacattaacagctgataaatttcaaatgagggcacgagcatatctgatatatcatttcctgtacatttttttagattgaatacttcagaattttaaaaatgataaatatataaatataaatttttttaattttaaagccctttcaaagattcaccattatgcttaggatacaactcaaactcctaaagatggcttataacactcttctcagcttcattctccagcatcctgctttagccatattgaaaacctcacaattctcacctccaaacctcttgtcatcaactccctctgtcttaacagcctccccacatccccactcattctttcagatctcagcttagatatccactcttccaagatgccttccttgaagccctgggatgtcaggtaccactcccgtgagctcacacagcaatctgtgctgtttttacttttacaactgtgtaactgcctgtttaatctgttttcttaaattcctgtgtacctgccctctctaggtgacagacagtcgacaactggaactgtgtcttattcaccatgcgccaatccacaagcctaacatgttgtagaggcaaggcaacaaagtactatgcaaaagtctcttaccggccaaagcaaaaacttgggtaccaccaagagacaacccaagaatgcttgcaagtgtttacaaatgagagcttttgttttttcttgaaggttaagggaaccaccatttctgaaatatcagcatatatagtagattttagttatccactgaatgtaaagaaagatgaacttacaaacagtatgacaataacagcctcttctttcttctattcccaaaacctccacagcagagcatcacattaaggaaagcatttgttacctgaattattataatttctgagcatcccagctttattaactgaactccagggcccttctaccacttaagaattccctaaatgtaagatatttctcaacatctgctcctaatttatttttaatttgcatttattctatcctatttgttgaagctgaaattactaatagaggatggcattatcttcacagcatcacattagactactctttaattaaagttcctctgaagtagttttccaaactcttttagtatatagattttctcttagctgtgcaagagttttaccttcatttaagatgagattaacattacctttctttgctactttttcaaagaactgttaatagtatactgcatagacatgaataaaccatctcttttctcattttcatcaactttttcctaaagcatgacccttctctcagaatatatatagaaaaaaatacagatcctattgcagctgaactgaatttgaagttccccatataaactgaccaagaggtactgtgagaaaaacagcagtagtcaacttcagtaagaagtagaagtaactgtaaacggttaagaaattgatcaagaaaattctagagaaaaagctaataaccgaaagtgttgaaaatctgaattacagtacgatttgaaaaactacatacctcattgaaaacataaagcaaatcccaccaaggtgaagtttacattgcggctttatagatactgttactaaaaagtcccacaaaggtgaaatttacctagaggctttaaacatactgttactaactaacaaatcccacaaaggcgaagtttacattgaggctttgcacaccctgttactaactgctaaccacttttcacatcctttcccctgctcagtctcctcttgtaccactctggtccaagtccttatactccttaacctcaattttttcacaactcttacctgttccctgcctccccctaactctgctaccttccaaatctatctttcctgctgccagccaagttatctttctgaaaaacagttctgagctagtcattaactcacctaaaatcctgtagtggcttcttacagggaaagatcaaataaaccctgcttcaaaagggctttcgaaatctgaccccagcttctcccatcatccccattaccccagccacactcagttaccagggacagacttcaaatgccttgctcttttctcatcatctgcaatgttcttcccacactgtccacagcgttgcctcttacacatccttcaaggcacacctcaaattccttgcctctttcacgctctcttactcaaacctaccctcattccaaccaaagcaagacatccttcctccctccatgtgtccctggtttgtgtggggatgtttattgatgtctttctttccaactagcctgagagcatcttaagaacagaggtgggtcttgcttatctctgagcccagcatctaacaatgaatgaacaataaccatttgctgaatgaatgaggtatgtatgtaagcaagtgtaatttttaaaaccattaaaaggcatagcaagtctttttttttgagacagagtctcactctgttgcccaggctggagtgcattggcacaatctcgtctcactacaacctctgcctcccagttcaagcgattctcctgcctcagcctcccaagtagctgggattacaggtgagtgccaccacgcctggctgatttttgtatttttagtagagacgaggtttcagcatgttggccaggctggtctcgaactcctgacctcagatgatccacccaccttagcctcccaaagtgctgggattacaggcatgagccactgcacacggccacaagtctttgttaagcacttactgtgtgtgtggagactaagctaaaggctagcatcagaaagtcagatgaaaaaaggcatatagacatacacaagccagaagggccacaaacagaaatgaagagtgaacacgtgggaaagattgattctggcatgcagatagcacagagagcagaacacctggtggcactgatgctgatgttttaaagatggaggttgcaaaactggggacgcagggagaaggagaacaatcaagcccagaacacaaaacaagcgaagtcacagaggtaagaaaaggaccatgggcagtcttcacctggtgccctctgcctccttcatggtggtttttggggcgagggggagggtggggcagtgctgttagaaagtaggatggtggccatgagcagtgtctcacgcctgtaatccagtattttgggaggccaaggcaggcggttcacttgaggttaggagctcaggaccagcctcggcaacgtggtgaaactccacttctactaaaaatacaaaaagtagccaagcatggtggcaggcacctgtaatcccagctacttgggaggctgaggcagaagaatcacttgaacctgggaggcggagggctgaaattgagtcactgcactccagcctgggcaatggagcaagaccctgtctcaaaaaaaaaaaaaaaaaaaaaaaaagaaagaaagaaagataggatggcatgagacttccctaaatgtctcccttagacatatatgcagagagaccccctctctgagcaatctgccttgatgccaaggccctcagaataaggtatgtctgacaccaaatgcccaacaaggctgccctgagacagcaagcatatgcatgtgttccgaaaacaccaacactcttctaatttacaacacgttacgtatcttgaaaaagcgtatgcaagttcaaataattcaagtcaactctgatttttctatacaaactatcaaaatgggagttaatatataattaagggtctgatatgttaacattatagaactggccattgatttcacatgtaaaaacacaaaagtaaacctttttatatttgctaatacggcattttctaatcacctaaaggaactagatgaggtaacagagtaaactagaacacacacagttttatttatgagccccccaccgaaaaagctgggctttagggtaagtccaggagcctttaacactaaataagatggagattcatcctcccacccctgagacaatatttacattttaaattttaaaagataatataatttcaaaactggcaatataacaatcactttaagaaattggtcatatacaacttaggaccaaatgttgttttaaagtctatttgcttcggggtattttattacttttattttgcagtttcttagtttcaaataagaaaaggcttcctcctgtttcatgaaaacttactccacatatgaacatggccaacctctgcaccaaagtctctgttctaacatagattaccagccactcacacctttccagtggctccctttttgatccttaatcttaaaactgcctgaggagcaggtctcattaaattttgagatgtgatctcaaataccacacaatgatatacaaagaagcaattccgtatctcaagtcactctgaaggttattttatcaaagaagaaataaagatcccttcctgtatcttcaaagaggtaaaagattaaagctcaaaagacaggtaaataaccccaaagatctgcaaataactcaaggtctataaaaggtttggggtttgttatttgacttgatttggtttggttaactgaatataaggatatcacaagaggccgggaaccatggctcatgcctgtatttccagcactttgagaggctgaggtgggtagatcacttgaggtcagaagttcgagaccagcctggctgacatggtgaaaccccatctctaccaaaaatacaaaaattagccaggcatggtggcacacacctgtagtcccagctactcatgaagctgaggtgggagaatcacttgatcctaggaggcagaggttgcagtgagctgagatggcaccactgcactccagcctgggcaacagagcaagaggaagactacggctcaaaaaaaaaaaaaaatcacaagacttttgggctgtttttacagatccatagggaaaatgctacggtggtctatgtcacttaactctttaattcatcttcacataaaaatcactatacatcttttaaaattcactcattttaaagaatggtaggcaaattatttcaaaagcaagcatagttatattaaatatgtcacctatttagaattaaaaaacagggaggcaaatattaatacatatataatacatttctctaaccacccccccttaagataagaaaactagcatagaggttgaatgtgaggagtttttttcccaccatgattcaaaaacacgtctgtctttgaaataatgtaatagaaaatatacacaatacatttttataatgaatgcatcagcggactctaagctgatgcattccctagaaaaagagttcaagatgtgatgttacactcacagcaagaagaccttgaacacactgcagcaataactaaggagcgcagtggagaaatatgtcggcactagatatattggtatcatcttctggttcaatgggccaaaataagaaatgcaccaggtttcatcactctcctgacccactttcctcacttttaacttcacccaacacaacccaaactcttcaaaatacagtgtaaaagaaaaaatgcccaacatcatgaaatctattatcttttcaaattatttaaagggaagtgtttataagtagaaataataaacgttgtagctttccttgctcctctaaaatgcagatcattttcactttggttctatgacttttaaacctgccttccttgtctataaattaagagcactaaagagaatagcccacagaacttgttaaaactccagatgctgggaccccaccccacatatctgagtctggacccagaagggtggttctgacataaagcttgaattaggaactccatatgtgagaagctcaaaacctagttttcaaaataaaagcatgtgcataaatctacatattgactggatcaatgttaaataacatgactcacacgtagcctttgaggggcaagtgaacaaatcaattagtatcaacctcaaaatgttatttcctgcaccaaaaatcttttgcatataaatattgtataccaaaatcttaattagagaatggagttgaagaaatttgcaaaaattaagactatgaaattaaagaaaaagatctaaagagatcatacttttgaaattatacagatgtgttaatttcaaagctgtaccactttagagacacaaagtcatattttttattggattcctctgctacatcagaaatgcccttatatgcttttctctacactttgaaaaaagattttgttccataattaaatgttaaaaggattgaactgaatgtaactagccacccgtccacataccaaaaaaggctcattcgaaaatattcacacaaaaaatgtgactctcatgctctatgtgttgttgagctccactgctatgaaagacagatctgcattttttttaaacttaatttcttaaaagtgaaggtgaggttataccactgtaaaccttaatcttagctgccagatgcgcatacacagacatttcccttatgaaccgggccaagagaatgtgcttctgatagaagagccccacaggatattaataaacgtcaggtatttggttgtttaaaggcacaaatgcaaagattggaaaaccacatggatgctggaaactacctgcttcctggaattgacatgtgcaaatccagtgtcacaggaagtaaaagcgaaaggactgggacctggtttcaatttctcagtccaagagccatcatctcgagagtaagtatacattaagaactcatactgcctcacatttcaaatattgaaataagtctatttattattaaacagttaaggcatataaaaagataaaaatataacatagtaaatgtctatgcctccacacaatttaaggggagaaaaaaaaatccagccaatgcatctgaaaccacttcagcagagtaccctttctccattgctttagattaaattttaactaatatttacagctgctcaaatagtcttgcatgttgacttgttcccagaaaaatcatcatatcagcatctagttcaaacttctgggtacaaataaggttcaataaaattgagttctctgttctgtctatataattaacgtacttcctttgcttagaatcatcctcagcaattcacgttttccagtcgggaatggatctcctctaaaagtttcacaaccatagtaacaggtcatgagaatcacattaatacaaaaaaactttctcatgattgcactacttcagcataatgaggtaacaacatggagaatatctttacaagcaggacaagaatagctgcccttctctgccagagttgaatttccatcagggttactgtctatcactacaaatccccagggctcatggaaaaaaacaaacctgctcaaagacctcccttcaaagcacaggtattccagccaaggaaagcttcaggagaaacaaaaaatgaactattttttcacagtcccttgagctgtttagaaaaatcccctcacagatactgctttaaacataaaagaaagaaatagaccgatgactgcctaaatacaacttaaccactgtctttcctcaagaaaggcctcagaaagataaacaaataaggtaatcctcctcagaattttcataaaattgaatcttgttaagcaagtttactttccaaacatagcagattttcaggaggcttgctataaatgtaacctggtataatatttcatatttaataatttgttttatttttatttcactggtctctctttgcttccttcccctacactcctcaaccaaccctttgcttccttcccctacactcctcaaccaactctttcagtaccacagatacctatctgggcatcggaccaggacctacactgtgccaaatgtcagtccttatgaaatccactaccttttttttttttaacttcagctcgttaaaagccttgagcagtagtcagaagaaaagagaaaaaggaattcatgtcagaaacacattatccatttctctatcttccacccaaaggactgtttgtcctctggtattttcccctttgctaactcaacagagaatgacagagactagagccaaaaatcaagaaaggatgcaactggcccagaagcagtaggctgtgtctcttacaattggccttcccttgtcagggctctgagatactaacctggggtccagaggagctctacctcacagtccagggtcccacccctgaaaactacaaaaaaagagatagaagagctgtataaatacaattaatacagtgcaaaatgtgtaagggacagaattaggcacaaaatgaagaagagtcaccgagcagcaatggaataaaatgtcttgtgagttaggagactgggcactccatagaggtcaaatgcagggtttctagagtcagatcatctgagttcaaatgccagctctggcacttccagactctgtagcctttatcattgaataaacatttattgctcacctattatgagccaggcattgggctcagtaccagggatgtattggtccctgctcttggggagttaattaaagtgcagcagtccccagcctttttggcaccagggaccagtttcatggcagacaatttttccaagggatgagggggatggttttgggatgaaactgttctacctcagatcatcaggcattagattctcataaggagcaggcaacctagatccctcgcatgtgcggttcaccatagagtctcactcctatgagaatctaatgctgccgctgatctgacaggaggcagagctcaggcggtagtgcttgctcagccaccactcacctcctgctgtgccacctggtccctaacaggcaacggactggtaccagtccaggccctgggagttggggagccctgttctagtgggaaggctattaatgaacacacagtaccagaaaaggtaccagagagtgctaagaacaacacagggaacgtaaatacagagatgcagtcaagagtgactgggagagctactttctaaagtcagcaaggaagatctctgaagaggtgacattaggcctacatctaaatgacaagaaggaaccagccaggcaaagatggaagaagagagatgtgcaaaggccctgaggaagacacactgggcctttggagaaatagaaagaagtccagtgccacaaatcacttcagtatggctcacatttatcatctgcaaaatggcggttgtgaggattaaactgttagcaccacatctgcacacagaatgtgttcaattagtgtaagttgctagaatcgtcatcatcagcagcagcagtgagatgccatcattggaggtgtgcaaacagagactgggtgagcacatcacaggaatggctgggttatagggcgtttaaggttccctcaacaattagatcctaagattagacaagaagagaaaatgcaaaggaagaaatgataaaattgttacacacaggcttccagcccaaggtcgcttgaagaacacattgaattatccaaaaatgtgaagcttgcccaactatttcattcatcaaacagttctttcccagctgagagtctataatcccaaactgtcaagaactccacatggagccagctgacacactgtccttagccctgaggtctactctttctacagggctctgggataaaaccacaacaacactgacagcaacagaaaaggatgacttattctgtgttactagctttaatgtatgttaattattgaatgaaatagcagtgaggatattcttcgattgtatatgcatcccaaaccattttattatttcatgtttaaaatgttccaagcagtactttctgcatcacacactctactggcaataaatttcactttttaaaaattcttagtcttggcctattgtttcaaaatatttactaacttgttgaactttctaaagcctactaattaaggctgttaataatacagtacttgatgatgaacttggcatatgtgcttttaagttagagaaagacaggtctacttttacccaacaccaaatccttggtcattatagatcaaattctttccagttcctttctaacactcacccaaacccaaggcaagtatactacaaccataaataaatacatggctttgtatttatgaaactacttcattacgtacccttgacaacttcctatttctgtttagatggtagaaatggctttaaaattataaaatttaaaaaattataatattcaaaatggcatgaaacaaagtaatactaagtgaggacaataaaaataatcacaataacttaacataaaatgcatagacatttttattatgccaatttaattatgccagccttttggattgtccaaactcgaggatttggagagcagaaaccacactctccgtccccccactttcatccaatttccccccaaaaaagaaacctggaagagcagatgaggatcaaaattttcctaaaggaaagtattcccttttaaaaaatggaaaagcaaccaatttggcatacagcatgtagacagaggatctttaaaatacatatatgatatgtagacaattcctatgacttaatctaaactaaaaatctcttaaaatatgtaagttttagagtaccatgaaatattacctctgtatagtaagcatttgccttaaaagaatcaaaaaaagtcccttagaggaagccagattgggactaatgggtccattcaaatccaaatttatctactggcttttgcaacataattcagccaaaagaatgtgattcatatctgagctatgtaacaactaaattttcagtgtgttttgaagtagatgccaccacaaaaaaagtaatagtcataaccttggcatctaaacactctaagcaatttgataatctttaaaaatataagaactcagtaatgtgggttcattgaagaactttagaaaatataaatcagcaaaaaaaaaagtaataatctcaaatgccaagatgaccactattaacatttattgtatacttcactaaatttttaaaaaacatttttcatataaatgacttcatataatacatacttgtttacttactatatcaagaacacatttctatattcatacacacacacacacacacacacatcacacacatctgtatcactttttatgaatgcttaatcttctactttatggatataccctaatttagttacctctactgagatcatgtatgatctgttcagatgtgctagagtaaagaaacagaataataggtttaaacaactatttcctaaagctatttgaccataacatccttttgtgaattacacattaacaatcctagaacttttgatcttttcgaaatactttgggaaataatgatctaaccaattcctaatattagattttcatggtgtttacaatgttttctattataaatgatactgtgatcaatttcttgagtgtacctttttatgtattgcctagggaaaaactctagaaacagaattactcagttaattgatatgcatgtgttaaaaacatgttatcatttttgccaaattgttctccagcaatattttaggttcatcagcctttttaaaagataattttaaattaaaatagtttgggagtttatatgttcattatatatacacggtatttctgaaattagataattactcttttatggacacggctaaagtacaagttataaatatcaaaggtcttactagaatgaaggctgactcagaaaactatttaggaatatacctcctcacaatttatagaaaatgactagtatggagacattaaatcgtctctcttccattttcctctgttatatttacatatgtctgaatatgtattccgtactcctaagatgatattaataatcccttacatttttgtagtaccttataccactaaaacatttaaaacaaaaagaattttacaggaagagaacatcctcaaagcatattttaaaacaagatattaagctataccttcaaaagacccgtcaagctacacaatagttgctacatatttacagccaaatctgtaataactaaaatctttatcaatcaaccaacaccggtatcatggaggaaaatgtgtattttaagacagttaatttagatcttattttcactgtgtatttctacagtttcacataataagaaacaagctcctaacagaacataaagatggttcacacagcaaaaacaggctttgggttccttttttgtctttaaagtgacactggatgtaattttatacctcaaagtaacttttcaaagttacttaagtatagtgttcacactcagggtggagttctgtgtaattttcaaggctgagaagtgttctgcctgttcaaaaatatctcccctttgagtttgtctcagaatcatatttgaagctttttaaaaatacagaaatttttattcaatgggtctggaatggagccaatgcatctgcgttttttaaaactccccagttgattcatctgtacagccagagtcaaaaagcactcggttatataaaaagattggaggagggggtggtatcctgaggaccccaatttaactgttcgtgtgaaaaccatgaatctgtctgagtctggtttattagattacctaggtgaaaattttaccttgagaaggctcataagatatttcaaggtaggacacctgttggcctatcaatggctatgaacagggatgggggtgaggatatatggtaatgaaatcaaactgtgaaagatctttcctgccagaaactgtggcacttcctacattaagcatataatcccttcaatttccagaaaatagaaagagaaatgttcggtcgtattttattttaatggagtagtcttccaaatgaacaacctttagctacaagcagcagtttcactaagcacaaaattgggttgagaaaggataggacactcagagatattataccttttacatataccttttacaaaattatagtcatttgtcagaattcagtttcttaaaagaacttcacctccaagaagttcttgcaagaacaatgcaaatcaatccaagaaacataggttttctaaatacataaaaatccatagctttcttgagcttcctttacctaccagatctggacttaatgatatcactgaattcgttctgcccattgtcaggactggcttcatgttctccatacttggccatcttgccagagtttcaagataatccaaaaactttaccaagtcctctttctaaggctttcaacttcctacgatggttcagcttgacatcaatacctaaaaggaaaagggaaagtactgacttgaaaaaatgtatttatatattttatatagttattcgtagtaactattcattcaccaaatatttattgagtgcctaccacgtgtaaagcaccaagccaggcaatggtgttatgactatgaacaagagacatagcctctgccattacggcgcttatgcacactaagcaattaattacataatgaattatttcattacaatactgacagactacaaatcatacaaaggagaagcacagagtattaagagcacacagcagaggagtctgacctgccctgggcaattagagaaggctttcttgaagagacatttgagccaagcctttaaagatgacaagaatttaattagccaaaaagggaaacagaaagagaaaaggtaagagcttcctatgtgaagtggcagaaagaatcatggagcagtcaaagaatggagcacaagccagtgtttctggaaagaagacagccaagagacaagtgtacctgttgaaccaggtgaagaagctgggcaggaccagggataggaccatggagaacaggtcaagggtttgtgtctttatctgaagagcaatggggagccagtagatggttcgaaggagggaaccaacatggtcaaattggcctttttaaaagatcgtcaagggacgggcacggtggctcatgcctgtaatcccagcactttgggaggccgaggcaggtggatcacgaggtcaggagttcgagaccagcctggccagcacagtgaaaccctgtctctactaaaaatacaaaaaaaaaaaaaaaattagccaggcatggtggtgtgcacctgtaatcccagctactcaggaggctaatgcaggagaattgcttgaacctgggaggtggaagttgcagtgagctgagatcacgccactgcactccaccctgggcaacgagagtgagactccatctcaaaaaaaaaaaaaaaaaaaaaaaaaaaaagacgattgtggcttgtaggtagaccacagtaatatgtggggaaccagtgaagactatggcagaatatagcaaaatgcaaattaaggaacctagctcatgggtatatgaatgctgaatgaaaatttcttgcaactcttctgtatgtctgagaattttttcatagtaatatgttggggaaaaattcctaatcttaaccaagtgatcaaaattcacataaccaatcatggggcatcatgcaattgaatggaaaatcaccacatcatctacacaatatccttgccaagatgttgaacgtgaatcttctcatgagcagacaaatctagactgtggctagttttcaaaagaaatggcctggtttcttcaaaactgtcagcgtcttgaaaaccaaaattacctgggagagggggagctttgtgaattaaaggagactaaatagacatgacaatgaaatgtaatctttgattgaattcagaattttaaaataaaacatttgaggatcatttgaaaaatctgaatttggactatgtattagacaatattattgtatcaatgttaaatttctttaacattaattatggtattgttgcaggagaatgtctttgattgtaagagacatgtggtgaaatatttagcaatgaagtgtgatggtatcttcaacttaagttcaaacagaatagcatatatctgtctatactgatataggtatatttaggttgatatatgtatgtagatgtatatatgcatacacacagacagacagaaaaatgcagtaagtattgtaaaataagtgggaaaactaggccgggcaaggtggctcacgcctgtaatcccagcactttgggaagccaaggcaggtgcatcacctgagttcaggagttcgagaccagcctggccaacatggtgaaaccccatctctacttaaaaaaaaatacaaaaattagctgggtgtggtggcaggtgcctgtaatcccagctacttgggaggctgaggcaggagaatcacttgaatccaggaggcggtggttacagtgagccgaaattgtgctattactctccagcctgggtgacaagggcaaaattccatctcaaaaaaaataaagtaagtgggaaaacttgttaaagggcatctgggtctaggcgaggtggctcacacctgtaatcccagtactttgggaagcttaagcgagaggattacttgagcccagaagtttgagatcagcctaggcaacatggtgagaccttgtctctactccatgtaaataaaaattttaaataataaaataaaataaaataaaaaggacatctgggtgtttattgtgctattctttctattgtaatattatatgcaggaaacaagtgtggtctaaacaagagtagatagaaagaaatgggtgaatatgtgggatatttagatatcaaagaaagtcaataggatttgggaattgattggatatgagagattcatatccaatgtgcaaaatgtgcaaaatgactccccaattttggcttaggcaattaggtgaagtgtgagtcattgagctgggcaacactgaggatagcaggctgggagaaaggaatcatcaatgtgatttggatttgcagagcttgaaatgcctctgagttatataagcggagatgacaaaaagagagttgggcccagcatggtggctcatgcctgtaatcccagctctttgggaggctgaggcaggcagatcacttgaggtccagagttcaagaccaacctggctaacacttgaggtcaagagtttgagaccagcctggccaacatggcgaaaccctgtctctactaaaaatataaaaattagccaggcatggtggcaaacacctgtaatcccagctactcaggaggctgaggcaggggaattgattgaactcaggaggtaaaggttgcagtgggccaagatcgctgccactgcactccagccttgacgaccgagtgggtgagactccatctcaaaaaaaaaaaaaaaaaaaagagagagagagagagttggatataaaggattggatcatcaatctgacagattttatgagagtctaaaaaacttttttcattttttataggctctactactgctaaaaatttatggattattatatgattacattctttcattcaagtacataactataaaggatttgctaaattcttaagtgtattttattatattcaagaatcaaaaactttgttcagaagaatgtctataaaagtttatcatggaaaattaagtttgcccagggaaaaattctctttcctggaaagaactacagtgtatcactttggagcagtaagtctaatgcttttcttcactattggtcttagccaagatctccacttctatgctacccaaagcctttattcacccataaaagagaaaagtcaactgtttacacactactttattccatttgcccattatcagtaacacttcttcactataatgtttcacttgccactctcctcaaggtgatttttcaaatttttctcttcttgataatgaaaatcccttacaggttgcaaagatacagcagaaaaggtgatcagagtacagaggaaaatggggagaaagaagaataacagaaggctatttaaatagtgatagccactgaggttacttgccattaatggccagaggaatttgagtacacttaaggcaaaggatgactccttctaattgccaaatgcagaatctttggttctcaggagacagaatcaaagtttcaccacgaacaatgcatcccagtgtgaccctccgtcttccacacctataaaatggagggaacaccatcttcacagaaggctaggtgagaaactgagaatcaatgaatgagatgttgctttagaagcttcaagccctatacaaatgcaatttattgttacctctgccctagatttcccttccctcaaatgatattctgtaaaagccagatgttcttactgaaaccaatccagtcaagtcgatattcactaactctcccttcagaacgcttccggctgtcatatggaccaccaagcaagagtgtatgaaataaacataaggtgtttaaaaaataaacataaggtgacagccttaaagacaaaactaatgtttcaattttttaagattttaggaattatacaatgaatatatgtatataatttttattttgtactatattttatgtatatagcacatatatatccaacagtgtgcattatgatggaaatgctgtgtaatgcaaacactattcattaatttactataggaaccaaaacctaggaacgattgagatagtagaaaaggaagccaagcggacaagagtttgctgctctgcttgaaacacagtaaaagaaaacggtgagtgccaagaactgccatttacactcggaagcgctccagggaaggttaatactactgtgattaatactgtttacagagccaataaattttaggtaaacacccaaaggagagttaaagagttgtctcatcggtcccataaaggctggtaaaaggggcggggaatggttccacgccaaccctgtccgtcaccgcagaactacccacaagcttcgcattcctccacctctcccctgaccctgagctatccgcaggctgcgtctcccacgcccaccgccaacgaaccgggagggcccagatcgacttcctgaggccggtgcaacttacaaaggaatggatgcggtcgctgccgcccggccgggcggccgggagggtcggctcagacctagggaatccggcctcccccgagctccgcgcgctctggccgcggcgaccgctgcactgaccctcccaaccgcggcagggggaactggcccgcaaggccctggtgatccggctgacctgaaggctgggaaagaggaggccctgtcctgaacacctcagagagcggggccgtggagttagaacccgagctctgcagttccttgtaaaataaagtgctggtcccacagctctctcggaggtcgggcaacgttttctccctcctcctcgaaaaacgcactggaatgagtccctttcataatctgaggcttggaggaaaaaatcctttgaacaacctgccatctgaaagttgcacagccttcaattggtgctttgttggtttttaagtggccttgagcaaccacagcctcggaccccgggccaaagcggggcatgaattaccttgtcagttgcagcaagagatccccagagtccggaaaaggagagccggcgactgcgcgggactacacaccaatggggcgcccccctcctcctgtcccctcagtctctccagggccgctgccagggagcttggcgatcgcgccacactctccggagccccacccttgggagcagcaaccacccagaggtcaagcacgttccccgccgggcggctggctgggaagcgctccgctggccgccgaccacacagccaccctctgcccaccctctcctgtggacaccgccggagccccgccttccccgggcccgggtgtctgtgacagactctcctaagaggccacgtcccctcttgcaaatcactggcccagcgccctgcaccgcgcgatgcacggagggcgactctgtcaccccggcggggaggaagattaggggagcagggaggcagcacagagctggtcagataagtttggatcgttcacaactagtacggatcccaaggacctccacgcccgagctctccacgcctccggcattctctctcgcaccgcggggagctaaactgaggccccgaggaaagggcacgcaaaagttactcccatcttcgactctgggacttgggaagcagctcgggacgccgatcccaggcggaagaaccacagaaagagccatcctcctcccggcccccgccccattccctcgggggctgtagtcacattaccagcccgaggcttcaataatgcatgggcttacctgctgcccgcgggcctcctcgcctgccggtcgccaccgccgcaccccgagctggccaagggctcctctaggagtttgacacggagtaaccgcgggggtgtgtgcgagtgttagtttggtggtgcgatgtatttaaaaaaaaaaataaagcttggagaagcagacacgaaccgaaattttaaaaaaagaaagaaagaaagagaaattgacacccgactgaaaacgccccttacttgtgcaatcttcctgcctggtagttccgccaaaaacaaaacagtcaaagcgcaaacctggaaggggcgcgcaggcaccaactttgccaaacgctacagagttttccgtttgcagaaatgacccaaaagaaggggggcgccgctccccgtgattccccaatcggcttctggagccagaggctcctcctcgcccctcggcgggagaaagcccgcggccggctgctgctgcccgcttccctgctccgaggaaaaacgactccacaactttgtgcgcgagagaggctcgctccttcggcggctcctcctcctcctccccgctgcgggcctgcccctttgttggagccgagcgctggaggcggaggagggagggtggggcgcaggaccgctgggtcgcgcgttgccgcccccaccccccgggaaggggctcgcctccgggcagccaggggtccgctctccagatgagaagggtgcagatcagcgccagccctccggcccgcgcctctgcagcgctccggctccccctcggcgctctcgccccgccgccgccggcccagcaactttgttccggaagatcagccccactacgttcccgggtcagcgtctgccgggcctcggcggtcaccgcggccaccgcgtcgggaacttggcgccccaagtcacctgactgcgcgccccgtcaatcagcgccggccctgcgcgccctcccagcccgcagcagcccggctcggcgcttggctggcctggggcgcgcgctccagagtgaaccgtgcgtgccgggagccgggagtccggagaccgaaccagaatggatgcctcgagcagacacaattccccttattcagattatccgaaaatgtgagtcacgtccccttaggcaaaacaggtctctagttagggtgatatttttttaagagataaattccaatctgccttccaactcaccccatctcagtttgctgacgttgctgattttttttttacccctagttccaaccgtatatttattttacattatttctctagtgtcgttgttaatattgaaaaagaagttttctcttacattagtttgtattacaagtagtgtttgcgctgaccttatttttctgttttccaatatgcacacacaaacgcacatctgttatagagcctgttccaagcttgagaggttgaccaaaaaatatctgggaagaaatgagctcgtgatgtgtgtgcatttttcttatttacacatttcattgctcgtgtgttcctgtgattcttttacacgatcagcacacgtgggaggggaaagaaaacagcaacctgagttcctagttcgtattaacagagaaaaggatggttgatactggagcgccggtttattgctggcttaatatttgagttaatttacgcggcagtaaagattaaaccactaggggccttaaactaattttcagaaagagtttactcgccttttgttatagtgaaagtttcccccatccatccctaagtgctccagggagggggcaggtaggagattcccaaaagagactcttccttgtaaggtttctaggacagtttccttccttttgatgattttctacgtataagccaaataaaatccaaaggattaacttgaaatgggtatgattttattcattcacttcattcattcatttaacaagcatcagtttagggctgtcaggtttgctggttctgtgggtaaagcaaagataaatctgatagtgatcttacccttaaagaacttggaatgtagtaggtgagataagacatgtaaacaagtaagtatatacaagatccgggagataaatgccataagaaaagaacagatcaagtgctagctgagtatggtcacatagagggactccaggattttttctttctttctttctttcttttttttttttttttgacagtgtctctctcagttgcccaggctgcagtgcagtggcgcgatctcgctcactgcaagctccgcctcctgggttcacgccattctcctgcctcagcctccctagtagctgggactacaggcgcccaccaccacgccctgctaattttttgtatttttagtagagacggggcctcccaaagtgctgggattacaggcatgagccaccgtgcccagcccccaggttttttttaactgatcattttgcagacaccaaaagttgcttatcactcactgtatcctggttgagttgatgaaactcagattttctccttcaaaatagataataaggccacattggagtgtttgatgatgttgtcacttaaattaatatttgtgacacttttcacaatttacaaagtaatacatcattttagctcaaaaattttgaaaaacgcacgtttagggtcctatgatttctgggattgtaagctgtgaggagatgtttagtcgagcttcctcaacgcctgtaagagatggaacaggaggccaacaagccaccttctgtgcaggagtgacctgccccgcatatcagccatagtggcttacagccagttacctggggacctgtgccctatctgtttctagcccttctctccaggcagagactgatgctctttgtaggtaatgagcaaaagaggctaaagaaattcttgttgactgggtgcagtggctcacacctgtgatcccagcactttgggaggtcgagacaggtggatcatctgaggtcaggagttcgagatcagcctggccaacatggagaaactctgtctctactaaaaatacaaaaattagctgggcgtggtggcacatgcctataatcccagctactcaggaggctgaggcatgagaatcgcttaaaccccggggcagacgttgcagtgagccaagatggcgctactacactccagcctgggtgacagagcaagactgtcagaaagaaagaaagagagaaagagagaaataaaggagggagggagggaaggaagaggaagggagggagggagggcggaattcttgttgatggaacgatcaagagatctcaagctggtcctgtgctggtcctgtcccccaacactttctttatttggtagggaaaccacatttggtgggcgatcttgaccacagagggctatatttccataaagcacagtgtgatcttcctttatatccagagaatctaggtgaggcacggtggagacaggcctctaaggtaatgggcctgcaacaaggatgctcagtggggttttgtctgctcatcccaaagatcagatcgctgtagaacatctggagagaataataggaatgtggccctgggtctactggtaacccaaagtcagaattgccctgctgtcaccacagaactgtgaaaattaaggaaaatggagttagtgtcactgcaggatagaaagcctttgacaaaggagaaaattatgatatgagtagtgtatatatagattcatatataaagatatatgtatatgtgtgtatagtgtatatagacatgattcacataaatattattcccatacagggaactgcatcctaatataagaaccaaaaggaaaacatttgctactaaactttgtgcaagactatataaatgcagtttttctttaaacagtagaaacaggggaaaatacacaatgtataaaaaaacaagacactcctttagctttacctttggtattgactataattaaagccccacatacaagcatttaagagaggaggaaagtttagggaatttagcctttcttatatttttcaggtaaaaaaagtataaatctggagcttgtgtgtaatagatactggatttttgctgagtattgttggtaaattcttcagtcaaacgtctagtatgtgtgcgagttgataaaattttatcatataaatttttgtaatagaattgaagaaacaaaaaataatagcacatgaaacttttagaaaataaatagtacaaaggctgagttccttacaacttaatgcactcaagaattacccagagaatatattttaaattcagattgattgccattccccagaaattctgattgactaggcctggtggggcccaggaagctgcaggtttaacatgccttagctttagatcagaatagctgaggagccacactttgagcccctgtgccctggggtgctggccttaaataggccactttggatgattggaggggtcaagaaattgccctaccaaaaaaaaatccatactgaatcaatcataattatgaaatacccgtgattagctttatctctttgaattcaagtgtttcattcgattcggaccaccctggaggttacctacaattggtaaaaccctaggactattcctggcaatttaacctgcacaggtggtaggaagcatggcccagttctgaggaaatgaggctctgaagagaaagtttaatgatgagaggacaaggaggacaggaatattgagaatacaggagctgaaatgtggaatccaaagaagctaagggcaaaataaaagcactaagttgttgggcagagaagagcaactgattgatcaaaatgggagaataaaggaagcgccaaaaagagaaggaagagacgcagagagggtggaggatgggaaacccagagcaccaccttcggggaaaactgaacaaaacacagtctacgctgagtttatcctacttataaatttttcttggcttaatttaatttgtataattttataatgttgttgctgaaaaagattttacagagtctttccatcaaccctctgaatttttttttttttttttttttttttttttttttgaggcagagtctcgctctgtctcccaggctggagtgcagtggcgtggtctcggctcacttcaagctctgcctcccgggttcacaccattctcctgcctcagcctcccgagtagctgggactacaggcgcccaccaccatgcccggctaattttttgtatttttaatagagatggggtttcaccttgttagccaggatggtctcgatctcctgacctcgtgatccgcccgcctcagcctcccaaagtgctggtattacaggcgtgagccactgcccccggccaaccctctgattttacaaagaagcaaatgaaagatacaaagctgatcagggaatacctttaggtaaaataaaacaatctattgggggaaagtgtccaaattactgagaagtgaaaagagaagatccctatgttacatgagttcattgttaaccagaagaagaggggagaaggtgggggaagaaagcgagcgtagccgaaagagaactggtctagattttagttacctaagtactcattatgatattgaaggctattagccatgtaagcttgtggaacttaacctttagcttcctacctgtaaagtagaaagagtaataccttctgcaagtgttgtgagaatcaaatgagttagttaacataaagcatttaccaccaaatctggtactttttacttttattatgttcctttcccctttctcttaactcaagaggattggctgccattttgtgattgtcttcattcattctttattgaaaacattcctggaacttccattatctgctgcaaagcaggatatgcaaatgggataggccacagtggttaccttcaaagagctcactgtctcgtgagaaagaccaacacatagatagacaattataaattaatagggtacaccagtacagccaaaatgtaacatgagccaggagagggacacataacccaatagaaaggacaggaatgggcagtaccaagaagtgacacctgagttgagccttagtggttgagtaggaatcctaaaaggcacctgttgtcttgctgtgcccaacatctttccactcttattgaaggaatattactccttcctttggagatttc

SEQ ID NO: 45 - DNA, 503548 bp, Mus musculus
ggtttgggggtagctgtttgaagttgaaggtgtctgtggcctagcagaccctactctgaatttctgggggacaaagggaggactattctgaatttagaatagtctccctgggggatgatggttagctccttggattgtgtttgtgttatttattgtcaaaacatttcatgtgttatcttgtttccttaacttgattacaaagaattttatttgtagctatcctcaacctcaaatttcaactcaccagtattatgtgctcgcctgaggaattcttaaacgagtgaatattctaacacctcttacatatgcagttttattagatattttaatcggaaaaagagaaggaaagcctttcccctctcttccgtgtgggtttattcatattcaacactaatggaaaacacgaagtgatatcttgattttaatatatatatatatatatatatatatatatatatatatatatatatatatatatatatatatatatccaggcatggtggtgcaagctttaatcccagaacttggagggcagaagcaagtggatctctgtgagttcaaggccagcttggtcttcatagtgagacactgttaaacaataacaacaactaccaaacaaaaactctgtcaaatcatcacacacacacacacacacacacacacacacacacacacacacacacatacacacatcccaaccaaacagaaacacaaaaacacacattgtatagggggctggtgacatacctcacttgataaagcaatttgccttacaacttaagcttgatccctagacccaagattgcttgtttgtttgttttctttctttttaaagctgggggagatagctagcacttgaaacccagtgctgggagggagagtattagatagatctctcgggtttactggtcagctacctagtctactcagtgagttctaggctagtgagggacccttaaaaaaaagtgcctggagaataatccttaaggccgtaagggtcctctggcctccatgccctcacatagggacatacacatagacacacacagaaagatagcacatgttttctcatgtttctattctaaaagaaactgcatctatacttcatctctgtctctctgtctctctgtctctctgtctgtctctctctcttgttgatactgtgatactgatgattcaacctagagccttgcacatgctaggcaaacatttcgccactgaacaacgtccctgatcctcttactaaggtgctcaagctgtcctcaaacatgcagtcctcatgtctcagtttcccaggtagttgggattacaggcgtagcccaccatgtccggttgtatttacatgtcatgtccggttgtatttacatgttattgcacaggttcagtagataatgttttcttctggactgctatattatatacagtcccctgtatttatgtggatcatgcccatagagtaaacatatgatatatacatgtacatatattttatgtattactctctctatatattactcatataataattttcccttctataaaagacttcccttacaatagtaacatcagtataaacatcttcagtcttcattattcagtggccacttagtgtaattactacttcaggttaatcatgggcccagggtcatgttcctatcactccctccacatgcttcatagtgatcattccagcagcctcagtgggcagaaggttctgttgtcacaggccactgactacccagggtgcattaaaaggtggacggctggttgcagtgcatcaatagtcacccatgcctcctggagacgtgttcacagtccttcaaaatgaagctgggctgaaaaggtctcatagtgactgctcttatggaaatagagccctttgtagtcttagtctcctgccagatgtggtttcttctcctaactcagggtcagggtgggaattcttgatcacagccaaactttgatctttttttcctcctctgtgactcacccacacatatgcttgctcaggttgccaggtaccaaagggcctctcttcccagtgatggccgactagtccatcttctgatacatatgcagctagagacacgagctctgggggtactggttagttcatattgttgttccaactatagggttgcagaccccttcagctccttgggtgctttctctagcttctccattgggggccctgtgttccatcttatagatgactgtgaacatccacttctgtatttgccaggcactggcatagcctcatatgagacagatataccagggtcccttcatcaaaattttgctggcatatgcaatagtgtctgggtttggtggctgattatgggatggatccccgggtggggtagtatctgaaaagtggatattagcccagaaacatagaacacccaagatacaatttgcaaaacacaagaaaatcaagaagtaagaccaatgggtggatactttgttcctccttagaatagggaacaaaatacccataaaaggagttacagagaccaagtttggaactaagactatcatggactatccatgaagacttcttatgttggagactcagtcagttgctgaaaggtaattgttttatgaagtttttgacttaataaatgggttaagtcacttggtgaatgcataattcaatggaggcggacctacttggagacagtaagttagtggactcatctctttggagggcaggtctttttctggacctccttctggatggctttctgcttcctgacagccatgaggtgtgcacactccaccacagcttctgctactcctcaggcccaaaagcaaaggccagcctcagcctgaatcggatgaaaccgagagctaacagaagtcttacctgtcagtcacagagatggtaatctatacaacatgtttgatctgatagcaggaatctccaatgtttttgcttacatgtcttatctcacctgaatgaattctacgttcttcaagggcaagatctatgttggatttctatgtatcatctgcctcagtaggccttatatagatgcttgttaatggaaggaatgaaagtgaatgagatcaagtcatatcagttcccagttggtgtttaggttctatttggcttgtatgaagaatgccctccaaggtgaagttgttaagtcagagactttataaaaaagtcttttccaagacttccttcagtcccagcccacagtacttagagactccagaggttttcaactggtaattaacacaaggctagtgaattatttttactggctcataaattaacccttgagtactaaggaagcaataagccgtaatcaatctgcttcgactttggttgctatttttatttccttctccaagttttatcaggaaaacagtaatgggaacacgttagaatgaaatgtataataaaaatgcatacataacacaaacttcattacgtccgtgataggtctcggctaagcccgtaaactcccaacaagttctgcaaacagatgtaagtttgcttggaaaaatagaaaataaataaataaataactagataaataaaggtttggcagatggtgccactggtaagacccctactgaatactaaagtctgaagacctgagtctgattcctgggtcccacagaaaggtgtaaggtgaaagctggctctacaaagttgagacagagagaatttagataggtatgatatttgtgtctactgtcaccagcaccccaaatacacacaacacacacacacacacacacacacacacacacacacacacacacacacggtaaaaattttaaaggtcagcaccaacactatttgtgtatatgaacatataaggacacttgggattgtttagacagcatttaaaatgatgcaaaagaaatttccataaaataaatatacccctggatttagaaccccaaactcaacaacctcagtaaactgaaatggggcgaattggccagaaggttgagatttatgtaagataataataaaaaaaattaaaagtactgttgataagagacctagtgtgcctagaggggtgtgacacacattttcggacaatttgaataaagggcacggtgcgtgcgcgcggtgactattccagcttctggcttccagcacgcacgactggttccgggattctcgcaccgcgcaccgcacggagccggctgctgcgggctgggagggcgcctagggctagcgctgattgaccgggcgcgcggtcaggtgacccgaagcgccacgttctgggagcccggcccgcggtggcttcccaggccggggcaggaccgaacccggagccgagggggactggtctccccgggagaacaaagttgcccggcctggggccccggggcgcgcgagcggcgagacggcgggtccgacctgcgggatccacggctccgaggctgggcgattcgtgctgggagacgcgagcccctacccggggtggcgggcggacccagcagcgccccaccctcgctctccaacaaaggggccggcggcagccggaggaggacctggaggaggagccggagcggcgagcagctctcgcgcacaaagttgtggagtcgcccttcccccgaggaggggagcgggcagcgccgggcgcgggatttctcccgcccagggccgaggaggagccctgggctcctcagccgatcgggccacctcggggagcggcgccccttttctttcgggtcattcctgcagagggaaaactcctgcgtgcgcctgcccccaggctagcgtttggactgttttgtttttggcggaactaccgggcaggaagattgcacaagtcagggggcgtttccaatcgggtgtcaattttggatctcccccccccccacccccctttggatcttgtcgggctttccacgtttcacttaaaaaaaattcttgtaacgtccaaggcaagctccccaccacccgaacacgcccagaggaaccttggggcctctgggacttggctagcaggtaagcccatgcattattgaagcttcggtctgggtaatgtgaccgcagtcccctagggaatggggcgggggttgaaaggaggtgggacctttctgcagttccaccgcccgggtcccgaagtagctgtagccaacttctgcactttccctggaagctcagcgtcccctgcctgggcgggagagagctgggttgagaaggtgggaatctgtactggtcgccaaggtctcagattcctaggtctagtttagtactgttgttttgtctctccctgagaggagaggctgtctgtcgcctgtccgtttaccgccccgagccgggcagcaggactagcgatctccaagaggggacgtggcctcttctgagagcttgtcacacacctccggtcccgggaaggcggggcccgggcggtgtccgggaggagagggtggggagggcggttgtgcggtgggagggttggggagagcttcctagccggcctccaggctgggggcgtgctcgacctctctgtggttgccgttcctgagggtggggccccagtgtggcgaggtggcaagcctgcagctgtggagagacagaggggataggggtacctcattggtgcgcagtcccgcccggccgcctgcttttccggactcttggcatccctcactgcaactgacaaggtaattcatgcccctctttggcctgggtctgaggctctgcttgcccaaggccacttacaaaaccaacaaagggctaattgtaggctgtgcaacttttagaaggcacattgttcaaagagacttttcaagtccctggattccgaccgtgtggcgttccagggttatttcaaggggaggagaaaacgtgtgtgactcttcagagtcagggacccgccttttttaaacccccaaattggagatcctgggtgtaattccgggccccactctctggagtcactgaggtatcatcctttattcttctagccttcagatcacctgggtcaccaggatctggagaggtggcctctccatgcgtttaagtgggagggtctgccgcggccagagcgcacgaattccaagagagatgggatctccagggtggcatggcagcagtctcatcgtcccgttggaacttgccctgggcctgtgaagtcaggctggaccctcgggggctggctgctggtggcgctggagaagcagcctgctgataacgctagtgcctgccagagctggaggaattcgaagctcttgtgggtcgttcagtcccgaggacaaggcagtgaggggcatgggccattcctgctgaagtccccccaccccctcaccagcgtttatgaggctttcgagatagctttaactctcctttgggtgtttactcaaaatttattgcgcctgtaaacagcattaatcacagtggcattaaccttccctggagcgcttcttagtgtgaatggcagttcttggcactcagcggtttcctttacaagcagaagggcaaacttgttcttcggcatccctcttcactatcgccagcattcctagcttttggttacttgtgagtgactaggtttcctccacagccgtctggatgaatattcccttaggatgacaccgtttgaatgttgtgtattcttgaacttttgcctataaagccatcacccctggcgttctgttctggtataactaagaagcgtccaccctgaagggggaactggcgcctgtgctgtggtgcgtgtaggtttcagtaggggaaacactcggtcaacgtcaccagctgtcattttgagggaagagaacggaggacagcaattgcataggagccctatacaacctccgggtcattcacctctagtttctcccttatccgggtgtagagtgtggctacttccattccaccagtgtggatggcggcagaatgtctttgggacacattgttactaagaaagccttggttctagcccaatgtaacttgaacagcctgatagagttgcagtagcattttatttatgttattttgagaaagggtctcactgtgtggcctaggctggccttgaactggcactcctcttgcttcagcctctgaagtagctggggttataggtgtgcaccactacacctggttggcatctgggagtttggaaggaggtatccttaaactctccaactcacatggagctcctgggacattcgtggcaacaagagttggtggctcttaaatgttgttgtttttcttttttctttttattggatattttctctttctttctttctcccttttcttttcttttcttttcttttcttttcttttcttttcttttcttttcttttcttttcctttcctttcctttcctttcctttcctttcctttcctttcctttcttttcttagacagggtttctctgtgtggccctggctgtcctgaactcactcggatattttctttatttacatttcaaatgatttcccctttcacgctgttcaatgttttagtgtgtccctcttcattcttttctagctcattgattttttttttctgatgtttttgcagtgtagtagggatttgtattaggaagaagacacgactggaaaaattatcccaatgtgaaaggcagaatcaaacatcacgatgaaatggcattattggatctatgcaaatgaaacgcaaccctgtgcacaagttaactttacctcaaaatcaaatcggtgacagtgtttgtgtgtgagtgcgtgtgtgtgtgtgtgtgtgtgtgtgtgtgagagagagagagagagagagagagagagagagcatgtgtgcatttttaaaagatggctcagtggttaagagagagtccacgttcactatcttatgtccatttttggcctccttgggcactagacagtcaaggcagacattcacacaaaaatttaaaaaattcatttttcgacatttatttatcgaatgtgtggtgatcaggtttaggggcaggtctctttctaacagagtggaaacatttttggaagcctaactggaggtccctgcataaagccccttgggaagtggcactggacttgtctttcaaaggaacttcattccaggaaagagactttttcttagacagccgggatttcctgtaattaaatgtttacatattctgtggacaagattttggttctctaatatattaaggatacacataaaagtttagaaaatctttcacactctgtacctcaagataggaatatatttgcttttgattatattctttgtagggagctgttccgtgaccccctagtctcatgtagctcaggccgccctcaaactctctgtgtagcagaaggtggcgttaaactctgtcttctccaactggggttacttgttcactcctggcgaaagctgcttggcaaatggccaggctgccagtcctcttcgctggttacttttgactttcattttgtttttgtagttctggggatcgaactcaggaccatgcatgcacaccctgcaggctaccattaaggctcatcctcagcccttttagtttatttttaatttttagacaggtagcctagactagtttgggatttactctgtagctcaggctagcctaggatattgaggaccctttttcctctgtctcttaaatgctggggttacagctgtgagtcactatacccaggtctgtaaatccttaataaccataaagtcagaataaacatttaagaatttttttaatgtcctttaaagtctgggagactgatgaagcaatccatatatggagaggaaatggttcttaaagctttaacagtttcccagtgttccttcgcttctactgcattcactctcattttgctcttattaatggactctactcatttcctgacttgcagaaagaaaagttattatgttgcataatgttaatatttatataataaagtactgtttgctacggtgaatgactattgaataatggaacacacaactattacacaaataagaaatttaaaataacaatatagtacaattcattcttcgaagtaaggattcatgctggagagatggctccttggctcagagcacttcttactttcccagaggctccaggttcagttcctagcacccactgtgggcgactcaagactactggtaactccacttttagggaatggaacactcttttctggctttcgaaggtatcaggaattaacagagacaaaaatgcaggcactcacatgtacacataaaaatattttaaaatcgtaaagaagaaccactaaagaattggtggtccattactacctagaaagaaaccctagttctgacatttgcttctctctctctctcttttttttttgaggtggtgggggtctgacttggcagctcaagccgacctagaactcagtgatctgtcatctcagggatgacagacacaaaccaccttgcctggctctgacgcgtgttttaatgtgtgaattagtgtactttctctgcagattactgttgggatgtcttgactctgatattcctaagtagtgattaagttcattgacattggggcgctcttaaagggggccgtggtctggaagagacagagagactgagctgagagactgagcttggctcctctctgggcagtgtaatccaggaagctcgggagcagagaggagcagtgtttgctggcgttcttaatgaacgggtgctcctgcagggcagatcttcagatctttaggccctggagatatttctcacagttactgaagattggattgttttatctgagtggtacctacccatgtacagcagaattggtgtcatgacccttccagaatgaagtttttatcagtgggcaacatggctatctacatttctacatacatctacaagccgtaccacccctgaggtccagatccgtatttcccgaatgctccctttctctttctgtgtctcagaagcaccttacactgagaaaatccaaaccgcatccattcttctctgtaatgtcctcagcggttcccaaccgagtagtagttcgtctacttctgagctgccctgtgccagctgagtcactcagcatgctagtatcctgcgtctctaatgccagggctgtccctgagtcttattgaccttttatttaatatcctgtgtatctatttattttttttccatctaatccattgaggccacaatcacatattgcttatattaacagcgttataacagagagattagcacaacagatacagagctgctcgtattttctttataacatttacttcctctgcctgtgtgtatctttgcatgtatgcttgtgcgtatcgatttgtatatatataaatgcatagacgtcgaagatcctgtcatacttctcactaatgacttcatagtgtctcctacaatggaagatatcctcctccctaacatcgctgctaactaatcctgcagtgtaacattggtataataatattgcctaaagtaaaccctaaaatgttttctttgaaaattcaacccaggatagtatttggtggtcaggtctcttttgttttgtttaatccatgaagaaactacctttctttgggtggtttttgtttgagtgacactgggcctgtgggatgtgtgtgttgtttgtgtgtattatagtttggaggccagagattggcatagtgccttatttttgagacaggatctctcattgaacctggggctcgctggttggctatgatcctttgtttccagaggaagtagttggaaacaggcattgctggcacatgcccatgcttgcttccctcttttatttttataaaattcgagggattgaagtcaggttcccatgattgtgcagtaggctctttacccacagacccatctcctaattccctaggccttttgttttgatagcctcttccaatttgtgtgcccatgataagcctcatgattgattctccgacagacagagatactcaacagagggtgcgctgtgattccatttatcacctgaggccccattgatgcttttgtaaagtctggtcaagcgtgggattatttttctctaacgcagtagcatgaaacaatttcagatgcagagaagagctgaaatgtttccattcgacatctcctttctcacggcctaagttctttaatgagagcactgctctaatgtactgtagtccttggtgcttcctgagttactctggtctactgacaagccatggtgtgaacgggcttatgtcacctctctgattgtccttctcctcagacaggtatccaagcctctctaggaatctctggccccagctttcttcctcggctgtgtgacgtgcttcccaaaagcaggacttagccccctgcctcccagttctcagcggcgctaatatttcacataccaagctcttctcttttctacttgccctgtagctagtgaacttcttcctctccttgaaggatagacccaaatgtcattgcttaggaaggccttctcagtggccctgggcaggtgtgactcgtccactttatgactttatgactttatctttctcttccggactgctgtcagtcatcagggttgtaatgaggtcattgattatagagtgaatttcattttatccgtgaagctcggtgtccataagcctcactcacgtggaagaggctgtgctaaataaagcctcatgtggatgtgctcaggaagccactccgtaactgtgtcttagactatatgtggctggagatggcttagcagttaagtacttgacaccccacctcagtatccgtgcagatgcccggcacatttggcagcctgtttgtaatcccagcacgtgggatgtgagttcaggggaaccctggggttcaaacagagaccctgctttaacataaaaggtagagagcagcagttgaggcagacacccaagtgtcagcctctgacctccacgtgcacatgcacacatgtacatgcacacccacccctttcacatgtgcacacacagacctgtgccagaagcaaaggaaaaaacaaataaggaatatgtttctgtatttctactcaatactttctcttttcctgttaggtattcatgctagcctggaccatttttcagatttagccttcagaagaggatctgggaaagcctttggattatactgaaactcattcaagatggccaagtatggggaccttgaagccaggcctgatgatgggcagaacgaattcagtgacatcattaagtccagatctggtgagtaatggatgcatcactgtggagccctctgtatagactgtgttgaagacagagatttcttagcttgttgtgcattgttcttgttaagtaaacttctgagaaactgaattctgagccgtgagtgactattgctctgtgaaaggcaatctccagtctctgtgtggcctatcttacactcccagcttgcctttgttacattgtgtgtgcagtagttttactgggagaaactcctgcctacagcataactgatgctgcgcagttatgatgtcaataagatagacaagcttagtctaacatttacccttattacctgaaaacggaaaggaatcacatgcttagagtagcgaataccatagtttctggtggaaagatcattttgtggtgggattccttaaccttttgcccacctgctaattgctgttggatgctaacactggcatgtgaccttctctttccttttagaaatgttagtttctaaagatacagtcttccccagtgtgatcaaatcagccagactaagaccgacgaatgactttcatgtgaacattcggattggaggtctttggatgccaccccacccccagcttattatataaccactgcttttcaattctggctctccaaatgaatcaactgggagtttttttacaaatgcagatgtgttggctctgctccaaacccactgaatgaaaatttctgtatttttaaaagagcttcaaacatggttccgagacaggctcaaaggggagatatttttgagcaagcatggcctttttaagctgggaaaattatatagagttctcacctgggtgtgagcattgtccttttgtaactccagcattataaacattccttcgtgtcactcttcaacaacaacaacaacaacaacaacattgaatagaactcaaaggtgatatttcctgttggaaatgtctgtgtgttatggtaagagttcatttcttagtcgaaactgctaaaatacgtgcaggaaatgagatctcagtaggatatgcattgcccttcgtgatgctggttgtgcttggtctgtgaaacgtctggatgttacagataaggctgtgactatgcagtggtttttgtagctttaaggactctttgggaagtgcgtcggcatgttgtgtggtgtattcactgtgatctcctaaatgtcattttaggggtacagaattcatatgtagagatgtggaaagtgacaggaaagtggaagagagacagctagatgtctctgtacgtctcagagtctataacttgtgaggccaggtgatccttcgcatcgtcccgaatcaacctttattacagaagaccttggattctggggtaggaaggtggctgcgtgggtaaatgctgtcgaagcctagtgatccgcgctcagctctcgggaccccagtaaagaaagggagaggagagaaccctttccacagaaactgtcctcttactccatacgtgcacattggcatgtgcgcagacacacatatacatcaatagtaaataaaatacactaaaaaaaagactttagatatttgtcactggttctctgtctttgtccactagaaaatagttttatggaaaaatttaacttttagagtatattctgagtatccacacttccaaactatttcttaaatttaaaatggctatttataaagttagtaaggtccatacatggctgggggtaatttgttacagtgtatactttttggtgttaagatagtttgtttataaaatattgtggtggtttgaatagctatggtccccatagactcaatgtttgagtgcgtgacccatagggagtagcactattagaaaatgtgtcactgttaggacgggctttgagctcttttgtgctcaagcgacacccagtgtggcacacggtcttcttctgctgcctgtgcatcaagatggctcctccagcaccatgttggtctgcctgcatgctgctgtgcttcctgccatgatgataatggactgagcctctgaacctgtaaggcagccccagttaaatgcttccctttatgagagttgccatggtcattgtatctctttacagcaatagaaccctaaggaagacaagtgttatttcatttactttctcattggtgtgtacatgggggtttggatgctcatgccacagcacgccagtgggggtcagaggacaaatgtcagctttctgtgatgtgccacgtgcatccaggagaccaaacttgggtttcttgctgagccattttgccaaccttccgtgctgctttttttaaatagggaacatcaactgttcgaatgactctgcttatagagtttcttcctaggcagaggatataaatgtacatttaagaagttgactgtagcactgtttacaatagaaaaaaagagagagagagaaagcaccataaaaatccaatttggacatgagttaggtcattgttgcctagagtgtttagaaatgaccgccagttcttaggttgttactattttatttaaagtctgtgttcttagtcaaataactctagaaatagctaggaacttactgtctccttactggggtcgcacagctgtgtggatgacgcagcatcccagtggaggtaattaagatagagcgcatgactgaagcagcgacgtgttcataagaagtgatgatattgaggtgtgtggatgtgagtgtatataaacattacaaacatggagggtgctatgaggtattgttaagtgattatgatacaggaggctgttgatgtgaaaagtaccctttaaaagcttgccggtgggagccggaagatgagtcagtggttaagagcacttgttgcttttctaggtgacctgggttcattcccacagcctatatggtggctcacaaccctctgtaactcctagggtagctaatgctctcttctgatctctgaggacagcaggcactcacacagtgtgcatgcatacacgcaggcaaaacactcgtacacataaaataacaacgtaaacacacacctgctctcctatcaggtgggaggctggaacagggagattttgagtttgatgccaacctgggctatgagatcctgcctccaaaaagatgtgagctatatcccagaatcttggcatttgggatcgttctttttcttactgtccggccacacgtgttttccaaagccgcttgatggacttgtattacttaacttcttacgttttaaaaaattctcaaattgcttttagcatttttactgtcagtgttataactgtgccctccctttgaatggcacctacttcaaaacacgacgaaaatttagctcctgcatagctgagctatgaatcacattcctctggctggattgtgttgcaaaagctggcagatcaatttggatttgaatgagtctgtgagtcatctctttgatttctggaagccatactcttgatttttgtttgtggcaaatgcttagtacacagggtaggatctcgggacactccaaagtttacacattattaagagacttttagaagtctagattaaatagttggaatgatccatatccaataaataaatttgaaagatttttactggttatgttattccatgctgcatattagttttccactttttaagaaggaatattcaccctgtacctgttgcttgtttataatcccagcatttgggaggtggagatagaatcgagagtaaaaggccaataaaaaaaaaaggtcataacatcataaacagagagtagagaactcaagtgtggtgctgcatgcctgcagccacactatttgggacccagcctgggcaatttagggagatcccatctcagcgaaacacccctacctcctataaaggaatatttttctttctattggagattaaaagactggaataaaattgagaatcttatacatgcatataatgtgttttgatcaagttgatctccaattacctccctttctattcttcacgtctctcttctagtcctgttcaatttcatatactctttaaaagttatctatctatttctatctatctatctatctatctatctatctatctatctatctacctatctatctatcatctatctatctattcatttttgaaacagagtgtggtggctacttttgagtcaatttgacagaggctggagtcatctgaaaggagggaacttcagttaagaaattggctccataagacaggtccagctagagggcgttttcttcatcaatgattgatgtgggagaggccagcccattgtggacggaccatcatttgtgggctggtggtcctggattcttataagaaagcagcctgtgctagccaattagcagcatccctccctggtctgagtcaccgcctcctgcctggttcttgtcctatttaggttatgaccttgacttcctttgatgatggactataatgtggaagtctaaaccaaataaactctttcctccccaacttgattttggtcacggggtttcatcgcagtaatagtaacccaaacaaagacataaggtctcattatgtaactgtggctcgtctggaattcactatgtagaccaagctagctttaaactcacagagatccacctgcctctgcctcctgagctctggtgttaaagacatgtgccaccatatctagactttacattttaaagtaggtctttggtaatttcatacaatatattatggtcatattctcccccttcttaaacatctctcagatctactcttccttccctactcacacaaatttgcttccttttttttttttccccctgaatccagtttgtatttccatatactcttgagtggctatccactgggtggcctggttgaccttccaggggttggtttgaaggacagcggctcccatgggctctgtgtttgaatacagggtccctcactgatggacctgcttgggaaaaaccaggaacttttgcccttgttggaggagttggaccactgtgggtgaactttagggttttgaaagtctcagcccaataccagtattcctctctctgtttcctgcttttggatcaagatatgagctcttagctcacaaaaccaaccaaccatccaactaaccaaccacttattgccctcgttccatcttaagttgtgcatcagattcgtaattcagtgtttaaaagccattttgccatctgaagagaaatacctagcaccagttacttgcatgtcgcccccaggattcggatgagggatgaaaacgacagaaaagcgggggtcttgtgggatgcgctgactgatgtagcttagcgtgcttattatatacagtttaacagggaggtgggcttattacatacacctggaaatagaggcctgtttccctaagcttgctaggagcagtctctataagagagcagcctctaagactgtaaacattggaggaataggggagttatggaagacattttctgcaaacactgtcaagatccacaatctaatttgaggaatgcctagccatccctttgagtctcacccagggagggcgtggccacttccaggaggctgaggcatggctgtgctcacatcaacaacacactcactctgggcttcactcctgccctacaactaagtgatcaaaggtaggcactgggatagtttaaagaacaaaagccacacactttgtgattgccttagatgtgaagcctgtgggtcactttgtagagttatggcctagcattcatgaggctctgggttcaatccccaccaatacataagcacgttgtggtggtccacaccagcaatcccagtgctcagaatgtggaggcaggaggaccagaagttcagggtatcctcagcttgtcatgacacactgacaccctgtcactctaagataccctgcctcaaaaaccggcaaaccaaccgggccaccccacccccacccaataaaaaacaaaatagaaaaaagaagagtctagaaagcatttgttgtctactgggctagggtttagggctgctgacagtgagccttcactgtctgctaaagcacttgagataaggttgtgagaagtggctagaatagtgacagctcttaatctgtgtcagtcggaaagcctaacaggtttataaagattttaaaatggtagtccaagaataatcttcagaagccgggtgtggtggcacacgcctttaatcccagcactcaggaggcagaggcaggcggatttctgagttcgaggccagcctggtctacagagtgagttccaggacagccaggactacacagagaaaccctgtgtcgaaaaaacaaaaacaaacaaacaaaaaaagagagtaatcttcagagaaaatgtgctactggtggagtgtgtggtttattaacttttctttgggacatgatgaaatgtcaaagaacaggctgggcatacacacacacacacacacacacacacacacacacacacccctttttgcctcccacgtgctgggactaaaggcttgcttcactgtggctggctacctccttggttttttatctaactctgcgttctaattgttgaggaaattagagcccatgcaaagctgagcctctaatgctagcatcttagcggtgatgctgatgctgattcctgcatcacagctgcacgttcacaggtggcaatcaaaagccatagaggagtcatttgttacactagccttttctctgtttccgtaggaccttcccaggtgcacctggttccctgccatttaggttaatatttaaatgcagccttcattgagtggccttctctgttgactttggaagtcatgttttttgtttgtttgtttgtttgtttttgacctacactttttctttattcttctcttttttttcttttctttctgtatttatttgagaaaagggcttgctttatatcctagtctggcctcaaactcatgatgctcctgcctcagcctcccaagtgccggagttacaggtgtacacaccacaccctgcttagtcaccctgtgccctatcactgcttgtgacttctctgtgttttctttctcgctatctggtactttgcttgcattttgtacttgctgatatcctttttcaatgcagctcgactccatgtgacttggggaaccagtacacctctggcatcaagcccagggcacagtggattgtagccaagtgataagtacttacccaatggaaaaggttccatggcttggagattcacgcgctgggatttgaattcaggatcaggttagacgggggaaacctggagtctgaactctgcacagtcttcatcctgtgcctgccaggagggtcattattttatgctcagatctgttccttgcgaatttgcccggtgttaactgtgcacaggtcctctcttgctccctccttgctacctactgagggtgaccctgggctgaagtctggggctgctttggttccctagtggtatcgtagcccacataagagacaggacctgctgctgcttggctgccttcttttctatctctgtcctgtcattctcttccgggagctgacaaaggggataacattggaggacagacagtccttggggcggaagatgagagactgacactgtctctgacgtggattctctttctctcttcctctgatggctgttcaaggcttttaactggatggcaaagaaggtaggatttcagatgcactgacatttggcacagggtaggccctgatctggtgcccagggaggtaactgtgctatcgagatgtgttgggggagggcagaggagcccatgaaactaaaggaaagcaaatttctttgctgatggtttacgctgtgttccattatagccagcttactgaaaacatgccctgtgatatctggtgtaaattagagctgcccaacaaggtctggagtgagagaaaggttgaggaggttggctttctctgttgacctttcagaaggtcctcttcagacaacacagtggctaagttgcgtttagggagtgagtggtctggtttttaaaaggtttacactgatcgtagtatccaagagagatttttctccacagtttaagggactatgaaaacagttccttgctccttctggagattcccttagctgaaatatctgtcctttgaagggaagcctttcagcgggcttggtttttttccacaagcccttgggacttgccttgagggacagacagggacccgggtggaaactcaagtctgttagagaacagcagtcttgggacgagcaaaagccttgcctgtgtcacaggtcctcacgaggctgaggaggagcgatctaagatcttgtctgtgccaatattctagcagaggcggtgtgttcattatatagacaggactgaaaactcaatttgattgaaccttatttgaacccagaagtttgcactggatgctgatatcatgattttccctgggaacaagggaacaagggagatcatgcaggcagttgtaaacactagttaaagtttaatctaaagcagtggagaataggatgcaggtagctagagtcccgccctctttcactgtgtggagaaacaagcatttactatggtgttgttttgatatgcacttttaaaaattaaaactgctgaatgagagctatgctcaactcaatatttggaatgcgagccagcgtgagattgtctgcacgtatgtgtatgtgtgcgtgggtgcatagagaccaagggatggcctcaggtgctgtttcttagcagctgcgaaccgtttttgtttaagcctctcgcactgagtggctcctggtagtctgcctgcacactgagccccagaggtcctcctttctccatctccctagttctggaattataagcataccaaatgctgccaccataccaagcgcttacaaggcaagcgccttacccagtgagctacaggatgatagagatttactctcgagatgatagcctggggaccagacccagccttggatcccaggcttccttcccatttgccattgcttcctcccctctcagggtgcaggtgacacttagggacttaggaagtcctcagacttctcagctaagctgtgtgtcccacgcacggggctgcttttgctgaggctggctttcatggcacgatgactcacaagtgacttgttggtctcttttgcatgtgtggcagctgagattccgacttggtgtggcacagccaccaactagttttgggaactcaatttttgttatattattgtttaaaaatgattttcttaacatttattttagtgtgtgtatatgtgcctatgtagaggtcagaggtcaggttatgggagttggttttctcctctcgatgtatgtgggttctacaaatagattttggtgactatatgtgtgtgtatgtgtgtgtttcagttctgtcaaagtggtggagctcagttacacagcaaacacacaaatagcgtgtgctatttcacacgctaggaatcttatgtgtccagtacaatccttgtggcccttacttctgtcacaaaactttttttctgtccaaacagtaagactctgggcggggtggtggtagtgaacccctttaatcccagcacttggggagcagaggcaggaggatttctgagttcgaggccagcctggtctacaaagtgagttccaggacagccaggactacacaaagaaaccctgtcttgaaaaaaaaaaaaaaaaaaaaagactccgggctgggtgtggcagtgcgtgcctttcattcaggaggctgaggctagtggagttcctctgtaagtttgagaccagcctagtctacacagtgagtttcaggtcagccaggagcacacagtaagactctaccttaaaaacaaaccaaaaccaaaaccaaaacaacaccccccccctcccccaaactaaaaaccaaaaaacccaaaccaaaccaaaacagcaacaaaatcacatcccctcccctccaccagccaaccaacccaaaccaaccaacccaaaccaagagaatgcaggaccttctcagcagagaaatctatttcagtataggacttggtacttggcatctgacgtgataaagcctgggacgttggccttgcttcccgccctttcagaaataccaatatgcctgcatattagaaaggtttggttgccttcctatgatttttggctctacagtatttatgtggaggagatatattttgagactgatataccccgtcaagggcacccgtgaattgcattatttaaagtaaattctgtaatcacatagatcgatgtgtgttctcttattgggaacactgggctttgagcttcaggctgtgtcagagtcgccctcctggattctgactcaggaatttccatgagccctgagagtttttccttcctagtgccttggcttagatagtgaaagtcaggcctgtgggtctcagccttagagagcagcctgagttcccccgaagggaggaaagggagagtcaagtgttgtttatttttactcagaaacatttcctggtaaatagatttaaaaggtaatggctttcatactattggcctttgatggtttggtgtctcatagtttggagcttgggtttggctgagaggaggtgaaactcaggaaagtgggtcaggggagggctgacagatgctgcttcagttctggggcatctgaactggaatgtccctcccaaatactgactagggctgtctctgtccgctctgtactatagtcacacctcagcgtggttagccctttcctgaggctaaccttggttaactttcctgcccacagctcctgagcaaggactgctctgattgcttctttgtgaaagctttcttcttttcttttcttttggtttgtctgtttgtttgttcttctgtttttagagagggtttcactgtttatttctgaccatcctggaatttgctctgtagactgggctggcctcagactcactgagatcatcctgtcttggccttccgagggctgggatttgtgttgtgtacttggatggctgcttggctggttctctccaccccgactccacctccatcgccctttttgagacagggtctcatgtagcctcagatgcccaaagttctgagacgacagatgtatgccaacatgcctggtttatggagaactggggatttctaccaactgaggcccctccccagccccttaatatgactatatagtttctaagacattacttcctaaaagggtgtatttgtcactggtaatgggaaaagaaaaaaaaaaaatctgtgctactttcctgattttctttatgctcacagaaaagttgtaagtatatttgcctctctgctttttaaagtctaagtacgtgatgtttggtgtttctgctccctttgagatgaagcagtctctctcttttctttctctctttctttcttttttaaaatttatttacttattatatacaagtacactgtagctgtcttcagacacaccagaagagggcatcagatctcattacagatggatgtgagccaccatgtggttgctgggatttgaactcaggacctctggaagagcagtcagtgcttttagccactgagccatctctccagccccctctcattctttcaaaaccagtgaattttaggaaagggtgatttgtgtgtcaaagggttaaaaagttataaagggactggagagacggcccagtggttaagagcattgcctgcccttctagaggacttgggtttgattcctagcaccatgtggtagctcacaatcacctgtaactctagacccaggggatgcgataccctctcttggcctttgtgggcatggcttgaacatggttcacagatattcacacaggcagaaggataaaaaaggatacagacaggataaaaaaggataaagggaaggagggggagttaagtgggtcgtgaccatggtagcatgttccttagggatctacaagaacatcctggagggcttgtaatatctttatgtttcaagaaccaaaactgaatgaaaccaaaccaaatcccaaatctttcatagacctctgcaggaataccactgagttaaacatctctgaaagtgtaggaagggatgtcggttcattcctagagaaggcaaccctcaaggttgaagatagtaatttttgtgtttgtttctgtgtatggaatttgagcaccccccccccaagtttagtgggagccatttcctgggcagtttcagatggatacgtggaagggcattgtgggttgggcctgagtagcttgctgtctatctgtgacggggacacagaattttgtgcagacattggctacaatgaagagtggggcaagtcttaacaacccatttaggaaaaaccatatttagattgacttaaaagaaagagaccacaaaatagaaccaataaaatctatcctaaacagactatcccaaacagcaaaaaaggtttccaagtgatacaggatccagttgtcagtgaattgttgtcgtgtcttgtgtgaaatgataatgctttttgaaatttacaatgtaaatattgactcagaaatgagaggatgttcctgaatttaattagtgtggaagattccaggccatttcccccaaagcctagcttgcagtgagctctgagttaagctctggatgtgttctggtctttgtatctccatgttgtctctgcaaagggttagaggatgccttactgtagagtgtagacatagaaaggcgtcatgcaacgcagaccaagcgttctttgtaaagacagcaaggaaagaacactaacctcactttgaagcggggataatcatctccgacaagtaaaatctgcaggcaagagagcccagaaaacggtttgagctcaactttaattgaagactgggggtgtttagcctgatgctgtgcagatgatgtcatcctgtgttaccgaattcagcttcagcagagacgatggagtaaatgcaaattaaaaataaatcgagagcagatgttgaagaatacctttcatttagggaataattaagcagtggaaaggtcattggagtttagtcaataaagctgagatgtgctgaagtcataattattcagctaacagatgcctgcttttggttgtgctctgctggggagcatttgggattggtgactggaggaagctgttcctatcttgttggatggaaagttccatcttccaaagttgcccatccagtggactaacttgaatgtacactgcatgagccaccaccacagtaactttgaagcagactggaggagcccctttcaaagctctcgtaatgattaggcctgtgtgctgctgatacctgtgtttttggtttggcaaaatacattgtgttttgtcattgcaatcttgctaggtttcagtccctgaaaagggtggcaacttagaagaaagccttagggctttagagggttatagtctgtgccggtcttgctggggagtgtggcagtgggcaggcacagtactgcagcaatagctgagagcttacttttttttgttgtttttgattttttttcctacaaataattgggaatgacttgggcttttgaaattttaaagccctcccccactgacatgtctccttcaacagggccacacctcctaatccttcccaaatagttccactaactggagactaagcatgcaattacatgagcctatgggagtcattcagaccaccacaggactcttgatggttttctctagtaaattatagagcatatagtgatagcattgagggagctagagagtggtagtttgccagttaagaacatagtactgcttttacagaggatccaagttcaattcccagcacacacaaggggtgcctcataactgtaactccaggtctatgtaggagatctgatgtccttctggcctctgagagcttgatgtgtacaaagtgaggctcacacgatatgggcactaattaaagggcactattaaaacttttatcgatgttttgaatattttattcctttcgtattttctgaggttttaggttggctgtggagtgagcattagagaggtaatatgaaagatggaagatgccaggcggtggtggtgcacgcctttaatcccagcacttgggaggcagaggcaggtggatttcagagttcgaggccagcctggactacaaagtgagttccaggacagccagggctacacagagaaaccctatctcgaaaaacaaaaaacaaacaacaacaacaacaacaacaagaaagatggaagacaccggaaggtgggacagtgagtggtttgggaggcttaatatttgggtaggtcattgatctaggtcataggacactgtttcacaggtaaaatgtagttactctcaggttaggaagtaactcacttagtgtgagggcttgagtttagctccctagtcggtccctgacactgtagggacagtaacacatgtatttgcgaccccagtgctgggggtgtggtggggcattctcaatggccagccagcagcctaccccaaatttgtgaactatgggaggaataaaagccatgtctagaactatttgtttgagaatgacagaggcagacacttgatattgaccacagctttctgtctctgtctcctcctgcctcccctaccccatacatagagggatagcctgtgacacccaagagcagatctgaggctgctagatgctccaggcagggtggtgcactgtctggttttctgtgtcaacttgagttagcacagagaaaggggcttcagttgggggaaatgtctccatgagatccagctgtaaggcattttctcaattagtgatcaaggtgggaggtccccttgtgagtggttgccatccctgggctggtagtcttgggttctataagagatcaagctgagcaagccaggggaagcaagccagtgagtaacatccctccatggcctctgcatcagcttctgcttcctgacctgctcgaattccagttcctgacatcctttggtgatgaacagcaatgtggaaagtgtaagctgaataaaccctttcctccccaacttgctttttgatcatgatgtttgtgcaggaatagaaactctgacgaagacacagggggctggaggtggctcacaaaggtttgtcttccagggaagtgatggctctgccacctagtttctctgccagggtgccgcggtctttgactgcctcctcgtagcagttagcttgtaattcatgcttgattcctgttaccttcttcttcttgatggcatccttggagctggcacagatcattttggtcttaatgggtgcactctcaggggcccagaagatgaccaccaggtctcataggttgcatcatagagcgcgtagcggcagcatctcgacaaaagtggtgtaggggtcgtccacagtctgccctgcatctcgtaccttgccctcccccgggatgatgttcttcttgtcctcactcaggaaaaagagcactgccttcctgtgtttcttcacttcttctggcttggaggacttgtgaactttcatgtcattgaacaccttgatcagagacagccacgccagaggccatgtttccagaaacgaagacagaaagggctactgaagaactgagccgccacagcagctgctgggatctgactgaaccaatatatagttttgttttgtttttttaaaaaatactttggcttatgcgcattttattggaaaaatttcccagttctgatacatgttctttttgtaaaatatagttttaccatatatatatgtgtatttatttattttctctgtctctgtctctctctgtgtacaaacacatgtgcctcattctcacatgtggaggtcagagggcaacttttgtgtattgattctctcctacttgtggatctggggatcacactcaggttgtcgcgcttgctgtcgtggacccgtagtcactgggcctcctctctgggctatgattatgttcttccaggagatctatgctctaagagttaagttttagagaggaaggcatgatgtgtaactagggttctgtgttcacggtactaatatcattcctgatggagattccgatggtagtacgcagctgggagttctgtggctcacatcgttgctgtcactccaagtcccccttactttggcccttgttttcctagaaccagtcagtcactagattgctcagatgacacaaggtgagaagacacaaagtgtgaaggacagaatttgtgatcttgtttgacccagttttgcatataatgaatttttatttgttgacaaatctttcccttttgctaaaagtggcaaataatcagacataaattactaattaacagcctggttgaggttttagttatttatgttttaattagtgaaacttgtgctgcatcaggctctggtagggttggtatcaaaatcttttttcttttttttttcctgatgtgaagaaaatgtcttcataaccctgttttcaatagccaggcatggaatgacgactgagtcagtgtattggaaggatattagtgggttgccaacattgccctttagccagtcatacttttttttttttttcaagagaaaggatctccctgtgtagccttggctgtcctggaactcgaaggttggctttgaacttatagatatctgctacctctgcctcccaagtactgggattaaaggcatgtgccaccctctaccttcatcccccacatgatgcgtgcttttaatatcagcacttgggaggtagtggcaggtggatctctgtgatttggaggccagcctgtccttatgtagtgagttctacaccagccagtgagacactgttttaaaaggacaaacatataaaggcctagttagtaaaatgatgccagtttttcttctagatgcatctttgaccattggttcagaatgataggggtttagtttcacgctcccacatgtagacttctagttctcccagagccaattcttaagatgctatcttttcaccaccacatgtttctgagagctttgtaaatcatgaggtgactatggctgttgggtttggttttgggccttctgttctgctctgatggtatatgtgtctgtctttatgactacatggcactgcagtgtaatctgagaccaagcattgtcatacagccagcacagtactttagcattactttggctatttggggtcttttgtgcatttatgcaagtttctgattgcttcttctggttatgtagagaatattactcaaactttgatagggattacattgtatctggagattggtttcactaatacagccatttttgcagcattaattctgctaattaattcatgagcatcttgccttatcttttggtgtgttcactttgttgcagccagaggacaacctctgttgttcttaaggtgctatttacctatgtttttggagagaaagcctctcggcggccaggatatcacctagtaggctacctggtcagtgtgccttggagatctctgccagtctgcctggtgttgttagtctcctggtatcatgagtatgtacctagtaatgcctggctttcctctcttccttctcctcttcttctctccttccttcctttctccctccctccctcccttgatctccatcttttggtgataaaactaagggtcttaagtgtataagcaaatattttattgacagagtcattaattttgcattcttagatagttttaaaaattgcttttcaaacactgctagccatttatgaatgtatgtatgtatgtatgtatgtatgtgtaagtttgttactgggatagccaaagctactgagtatgttggtatgctctgctactttactggctgtgtttattagttctaggagttctctggtggagtcttcaagtatcctaaatatgaagaacagtgggggacattatgatggaaaagagaaaggagcaagatatttgaaacaataactaaaagtaaaaaagaaggaagaaagtttcccagtaatgaaaaggttcaaatataaaattgtttgggtgtaagaataagaaataaaaaagcccaatatggtcaagttgcaatactgctgcaggtggggcacagaggaatataaaaaagggaagaaacgggacaaaacattggaaaaagaagagaggtaaatcatgtgtggggtggcgttgctgtggccagctgagcctgtgactgttgctcttggtttctgctgatgctgagtgtgtggtggccaagggtttgctggtggctggtgcttccttcagctccgtagctttcttttgtaggaacccatgcctttgtgctgagtgggtccttttactctcccccacgaccccagattgtactcactgggtggctggacttctagccaagagttgtctccagatttttgcaagtgtgcagagaagcaactgccatgggtctatgtctacatgtagaggacctaactttgtcttttttttttttttttctgtgcatttagatttttcaaggaatcatttattgtatattatcagtgattacatttcacagcaaaattaaattaaacacacactttggacaaacatgaaatggaagtcaaatctgtcatccaaatgccgagctgagtcttccttctgtttttttaggctgcagtagtggatcatgattccagattaatgcaacggattattccttacatgtgacagttgtttccacaacaggccctcgtgtgggctcctctcgttcctgttgagctctttccttttgctctgctctgtcgcccgatgtcatctattcccacgtaaaaggaaactctgagcccagtcctccagtatcaggcaccaattgtatataccacagacattcactggtatgaactgaggctcggtcatgacacagggtgaaagttcctgtcctcagacaccccatgacttcatactctgaagacttcctgtgagtaaaaatctccctgctgaagagatggctcctgttgctggagtgtagcagtcactgcagttttggggttcctgggctcttcagcagtgtgtggaagttagtaagctctagagactacccaccttgtgacctcaggctcagagctatcagacttcagagttagtctcagttgatgagatgtgctcctgtctatcaagggtgggagccctctcttcctagccacttccctacatgggccagccttctgccagccgcaccctacagcccagcagaattgggctctcctgttctctgccaccacatccccagaccattcctcactctgcagatatgggataccaacttgaaactccctcacctgaaattgctccgtgttctcaggtctccagggtagctcagctgttaataacaggttctctctggagatggtgccagctgtgacgcttcggggcagtcaaagtaacaaaatgggatttattaccattacttgtcctggaaggatcaccgtcaccaagacccacccccccccagcctcccacctcccccccccccgcccccagttggatttgagtcttgtgagggctgagggcttgcttgtcctaggggtgggacagcttgtccagccccccccccccatgtggtttctgctcccctttccactgctaggaagcagctttgctgagggcgtgttcagctctttctagtgtattctgctgtcctttcctttacttcctttgtgaatttctgcagcttcccttcctctgtttttggaatagtccctttagctctgcctttctcctttactcctagccatcgtgtgacctgctgtgacttccaggatctcttgaccctgtgaactctggagaatgtgacggtggcagccacacactcttcctttttgggcaggaagcagagtgaagtgcagctaaatgtgtgtcttttgtgtgtgcagtgcatgtatgcgagtgtgtgtgtgtgtgtgtgtgtgtgtgcgcattggtgcttgctgaggctggacgatgatgttgggatgtttctcactttctctcccatcctgttgccttgaaactgggtctcttcagtgaaccaaacacttcctgttttgctaggctctctgacccacctacctcttaggatctgcctgtctctgtcactcagcgttgaggttataggtacacataggcatgcctggattattaaataacttgaaatttttatttattactcatgtgtgtgcctctgtctgtgtgtgtgctcctgtgtgcgtgcgagtgcacccctgcttatgcatgcacatgtgttggtaggatgctgtgcacacgtgtgaggtcagagaacaacttcacggagtttgttctgtgggttctgagggtcaaccttgggttcccaggcacatcatcaggtgtccagtcccttattcccttaggcatcttgccagcctggcctctacgcctggctttcatgtgatttgaacttccgtcctcatgcttacaaagcaaagacatttagctgctttacctctaaacccgtgcttttatttcttaaatatgtccactctatctggatcggttgttgttgtttgctttgagccagggttttgccatgcagtttatgctgcttttagatgaagctcctccttctggtgctccctgaggactggggtgggagtactgagtactggggtgagagtactgaggactggggtgggagtactgaggactggggtgcaggcagaggctgtcattctgggcccctcctgtttgtttttgatgcctttaacttagaagaacatctgagaaagactaagcactttcagctcacttcatggattttggatgatctggctcatttgcatatgaaattcttttatctttatcttctgttatttactgacacagttttctggaaggatgtttgaaatcatgactgcttcttttttttttttttttttttaattaggtattttcctcatttatatttccaatgctatcccaaaagtcctccataccctcccccccactcccctacccacccactcccactttttggccctggcgttcccctgtactggggcatataaagtttgcaagtccaatgggcctctctttgcagtgatggccgactaggccatcttttgatacatatgcagctagagtcaagagctctgggggtactggttagttcataatgttgttccacctatagggttgcagatctctttagctccttggctactttctctagctcctccattgggagccctgtgatccatccaatagctgactgtgagcatccacttatgtgtttgctaggccccggtgtagtctcacaagagacagctatatcaggatcctttcagcaaaatcttgctagtgtatgcaatggtgttagcgattggaggctgattatgggatggatccctggataaggcagtctctagatggtccatcctcttgtctcagctccaaactttgtctctgtaactccttccatgggtgttttgttcccaattctaagaaggggcaaagtgtctacactttggtcttcattcttcttgagtttcacgtgttttgcaaattgtaacttatatcttgggtattctaagtttctgggctaatatccacttatcagtgagtatatatcatttgagttcttttgtgattgtgttacctcactcaggatgatgccctccaggtccaaccatttgcctaggaatttcataaattcatcctttttaatagctgagtagtactccattgtgtaaatgtaccacattttttgtatccattcctctgttgaatggcatctgggttctttccagcttctggctattataaataaggctgctatgaacatagtggagcatgtttctttcttactagttggaacatcttctggatatatgcccaggagagatattgcgggatccttcggtagtaccatgtccaattttctgaggaaccgccagactgatttccagagtggttgtacaagcttgcaatcccaccaacaatggaggagtgttcctctttctccacatcctcgccagcatctgctgtcacctgaatttttgatcttagccatcatgactgcttcttacagtacccctcctccatgatgtttttattttctctcccctccaccccttcctttccttcttactggaggaggcatgatgctttgttcttagctgtgatcctgagcgttgtctgacattgctgtgctgcctgctaagtctaacttgaaactggttgatttagaccatgtgcaaatgcactaggtggatagatttttaaactgtgtggcaaagaaacttcaaaatgcagtgactcagataaggttaacattaatttttctcatcttattggtcagctttcatgcactgctatgctcagcagggtctctcgggactcagggtcccctcttcctttttttaaaaaaaataactgacttatttgtttgtttgtttgtttatgtgtaagtatgtgtgcctatgtgagtttacgtgaaccacatttgtgcccagaagagggggttggatctgctgctcctggaattagtgttgattatgagcccaccaatatgggtgttgggaactgaactcctgtcctactgaagaaccaacagtatgtgctctaaccattgaactatctcttcagccccagggttctttcctgttttctagtccttctactcttgtctatgttgtatagtccatgaagagggaagaagggaaacttaaaaagaaagaaagaagtcatttccctttttaaaggctggcaggaataggtggctgccctggctgtagctaactcacgtagcttcatgtatctgcgagggtggttgaggaatctgctctgtggcatgcaagccaagtgttcagttataactgggggttgcaggaggcaggatttttgatggaaagaaaaaagagaatggaaaataacaaatatacttgcaagttagggagccagacgtgattgaactacagcccatctgagacctgtgcccaagcatagcacagggaagctggagtcagttcgtaggctttgccttctcttggtggcgcagccctgtcctaacccacctctgctcacctgcttcaacttccatctgtaaagctggggtggtgcgcacctttaatcgcagcctttgggaggcagatgcgggtagatctctgtgagttctagggcagccagggctacctagacctgtctaaaacagaacaaaacaaagcaaaacaaaaaccaagcaaaacaacaaatacacattggccctgacccatgtgtaagcattggtgtggtccagccctggctggtgagtacagggctcatttaagcagattgcggaacttgggtcggtactgcagaaggagatgcatgggtttctgtgcttgggcctgggtatgtgtgtctgctagattctgagatcgctatgggtcagaaaggggaagaaggggtcagagagaagggcctctcacatgtagggtttagggcaaggattctttcttgtcttacaaagaaaaattatccagtgagttctccaattgagccactttcctgatattctcatttcattaatattaatattcatagtcatttatagtatgcatattacttacttatccatccagagtagcataactgtgtagcataaatcgagtgtcattttaatagaggtacagggagggaagggacagggaaggaggctagtgaatagtcacttatttagcttagggttctcaacagcttaaggcaaaaaaaccaaaatcttttgagtggcccttgtgactcaatggcagcctgcccagaccagagggagccagtgctgggagtgaacactagattcactttgaaaagtctagaaatgaaaagctgctactcaaggcataagaatgtacctgatggctccagacctgggagccagtgaaatcctgcagcatgtctggctcccctccggctcccatggtctctctctgagcatcccagtggctcctcccattcactcactctggtcactgacttggaagagaccaggatacttcttctaagctgtctcagggttgagccactgctgtgctcagggaggccaggccttaatgtgcttgtgataagcctttgatgttgatgaaggggtggcgcacgcctttaatcccagaagagacaggagggatttctgagttcgaggccagcctggtctacagagtgagttcctggacagccagggctacatagagaaacccagtctagaaaaacaaaaacaaaaaacaaaacaaaccaaacaaacaaacaaacactgagagagagagagagagagagagagagagagagagagagagagagactctaacctatagaatgtacttggttgaccagggagcctctttcaacttgggaccatggcatggtatagactattaattgcttttcttctgtaagtgtacagatggttgtgagccatcaggtggttgctgggaattgaactcaggaccttcagaagagcagtcagtgctcttatctgatgaaccatctctccagcccttaattccttttcaaaattcttggaactgggactatgggtgatagtaagcttgtgttgtgattctatccttttcccttaaaacagaaccaaaccaaaccaaaccaaaccaaaccaaaccaaaccaaaccaaaccccaaaccagataaggggtctgagggttagtggcttacccagcctcccttggtaaaacagtatgcttgctttgtgaaatcaattatgtttaaatcaatattccttagtctttcagtggtgggacttaaacccagagtctcccacatactaggacagtccctaaacttcagccattctccctgcattttgctttgttatctaaagttgctaatctgcttgtcagaaactttagaaagtaagcctgctttgtagaaaggcagcttcgtactttgtagaagtatagcgggaaagggccttcgattgtcactatctgctgtgatcttgtttccggaggaaaaacaggacaagaaccaggtccttggcctgtctgtccgtcttcctctttttgccttgtggcttctccttgtgcctactccttgaggcctgacagggcaatcggtcagggcactgtggtggactccacagcagtgtgggcagctatggtgagaatgtggccaagtgggtgacttgtgttttggggctgggtgtgggtagaagagaaggcttggcttgattgagattgtgacaccctctggggctggcaaactctaacctcacatttctgttctcactaggcgatgggcgttaatctgctcacccgcttggcagtgctttgttttagagaatattaggtcaggccattgtctctcagtagacatttggacaaggtagccttgcaggagagacagtgccatgggcattctcatgtccttgtttatgccattgtgccagtgggaggtcagtcctacctgccaccggagaaagccatccagcaggggccagcctgccgtgcatgagttcagacagtgcggcaccagcaggaacctgcctggaaagaaaacacttgtggatggcacagccctggggatcgcccacggtcttaggcacagctgttgtattgccacttgacaggtgagaacacagccctgtgagctcatgatggtttgaaactggtcctattgctggcctaatcagatcttaatggaagaggcagctaaggtgattcaggatacgttttccccaggtagtcctttcttcagttttttttttttctcaagtctgtgcaggggtgagggaggggttggggggagaagggaagggcctggggagatggctcactgcgtaagtgcttcccataaaagctggagtacctgggtttggtacccacacccacgtcaatgctgagcaagatctctgtgatggctaatcgtggttgttaactgacatacctgggaagaaagaatattgattgaggatagcatccatcaaattggtctgtgtgcatgtctgtgtgggttggtatttatctatctatctatctatctatctatctatctatctatctatctatctctttctcttgaactttccccctttctttaaagattgatttatttttattttatgtgtatgagtgttttctctgcatgtatgtaaggactccacatgcatgcagtgtccagaagtggattactagtaactgaagttactgatggtcatgatctgccatgggaaccaaacttgagtcttctgtaggagcaacaagtgctcttaaccactgtaccatctttctagttcttgggatgcaggacatcttcttgattgttaattggtgtattggggcccagcccactgtgtacattgccatcccttggtaggtgggtttaggcagcacagtaaagccaattgatcaagccagagaaagcgagcctgtaagcagtattcctctatggtttctgctcaggctcctgcttagccttctctgggggatggactgtaaggtggagtaaaccctttcctctccaagtgacttctggacgtgatggttatcatagcatcagaaactaaagcaagataacttgtgtgcctgtaaccctagcattggagactggcaacaggtggacccaacaggtggagcgtgggagcaaaaatggcaagccttaaggttcagtgggacaccctccttcaaaagggaaagtagaaaggaataaagaagacttctgatgttcttctttgggctctgcatacgtatgacatgggcaagtgtaggcacatacatgtctgcaaattacacgcagacaacctgacacacacacagacatacatgcagtggaaagagcattccactgtgggactgtggttgtagctcagtgaaatacagctctgtccagcagagctttggattctatctcccagtattaattaaaagaaaaaagaatgaagcggaagaagagaaagaagaggagaaagaggaggaggaagaaaaaagaggggaaggaagagaaaggaggaagaagagaaagaggaggaggaagagaaagaagaggaagaggaaggagaagaaaagaaaagattattggttcctctttagatatacatggtacttggtggctcttactgacttcatgtagttgaatcacagtgaactctgagttgggctatgtacctgtgttgagagaaagcctaggcaattggaagggtaagcacattggtctgtggggttctttgttagtgctgttttcatttacattactttctttgaaaattaaacacaatctgttaatcttttactttatgtaatacatgagtctaggagtcttagccaatgtcctatgggaagtgtctggagacatattaacttttaaaacttcagtcagttatttacagcataagagctaggaacatgggaactgattgcttgcttgctaaatacctagactgtgaggaaaattcattttaaatggagaaaatatttcctaaaaaagtcgagggaggtagagagctaggtaggagatgaaccttcccagacttttgtctcatttatacttgtcattaattctgtggggaagatacagttgtttttctttctagaaattactcagattttgagtttatcgccactcacattctaaattcatccagagatgattttgaaaacgagagaaaacccaacaaaaatacagagaaaagaaataagtatcttgtcactaagttaaggtcaaaaggctatcaaaacacacccacacatatcacatataaaagttatgtatgcattttatacacacacacacactctctctctctctctctctctctctctcacacacacacacacacacacacacacacacacacacacacacacacgttgtttttgagagtgaatttcctgaggtagctgtgtcctaggactcacaatgtagaccagactggctctgcccttacttggctctccctcctctagaggactgggaataaaggtgtttgccgaccgtagctggctctactgaactcttgcctgctatatttagagatgatgttctatctgttgccttgttaaacttccgatgcaaatttgtctcaacttgtcctgctgggcagaaaaataaagaaaatgattagttacaagattgacactgcccatcaattttccaaactgtgtttgccaaagtggaccagttttgctttaagctcctgacacaaaagatctctttccccccagaacctcatagatggggcagagtagggcagggcagggagccacttcttcaactctagtcaaccgaagtaaatctttcttactactctctcttgtttttgcaacttaagtgaatttcactcttctcagggtatggcacaaggtgtctttctcccttacacatgctgttgttgaccttgctagggtttctgcatgtgcatattgcatttggtccaggtgactctgctttacggtcccatctcagttgttggagtgctgagatcacagatgtgtgccctgaatctggcttgttcacacacgatttggtgatcaggcttaggctgttaggcctgtgtggttagtgccttactacctgaaccgagcaccaccccttctgtctgttcttcacatcatttttgactttctctaggctgttgatgggcaacaatggggcatctttaggagttggacttaaatttcaggccagagtgttctaaagagacagcaactggctattaatgtcaattgtattattaattataataagttatttcgtatataagtcagaaggtgcctgagtttcagtcgtctacactgtagtgttcttatgaaatttcatgctctagcaggtgaggagacaagagggcgaggaagagagggcttactctgtggccaggacagttgctgctaagtaggattagggagggaaatactgaacaaggaaattagtgcctgccagtactctccagtcctgccagcttcaacgtggtgtaagcggcttgcaggtggttgctattgaattagcacatgcatcattgagtgctgggaccatttacctgacctggcattcttgagactatcaagtatttttccaacaccttctgtttcattggtgccttacttattggactttattgtgcctttgacacgaatggagatgggctggggaaggtgctgactgagtctagtaggctggctctggcaaaggctggagggcgcagctgcctggaagcagctgatcattttcattgcctttggctcatcatattaaacatgcttgtacacgcttcagtgtttgtttaatttttaccatagttatggttcagttccacaaggccctcgaagggctatatgccaaaaggcccatcgtcagcctgtggcactgttagataatggagatttgggggtgagccccagaggaaggaagctgttaggtcagggagatagaggaactgtctttgaaggtgatgctgggattccttcctctctgatttttgcttcctgggtaccgtgagcagcgttggtattccccgtgtgccctacctcaccatccataggccccaaaggatgcgaactagtaggctaagaacagaaacctaaaacaaggggcccagatagatcttccttcccttaaattattgttgcgattttgttacagccagagaaagcagcttgggaagtttccactctgtgatagcctcaggatcacagggtttgtggtggaatgctagtgtccagcttcaaagttctttctggcccaaaagttttccctttaaagtgtctaagaaaccattcatgtctaagacaggaaataaccactgcttgcaaaaatcataaacatgctgttctctgggctggggtgtcacagacagccaagcactggggttatagaactggctttggttgcttttctactactactactactattattattattattgttattattattattttcagaacagttacagattatttagtaagtatatagtaaggacatatttagtaagtatttgagtttcttggcttacatttccagggatcaattgtattaacattttgataaaactttaaagcaatttaggattttatgcacataaagtgactgtactgaggtactaaaataacagcagtaatttggccgtattgaagaataatggccaaagtcaagcctcacattcgaaaatggaggaaagaccatttcatattgtaactagaatttctctctctgtggagtcattttgtaaatattgcaatcaaatttcctattggctgtcaccatgtagaaaacaacagttaacagtgatgttattcatagtattgtctagtgtggtgtaatctcatctcttaggatgctgaggcaggaggattaccagtaagagtgaggccagtctggggtacagagtgaagccatgtgccaaacaaacaaataaataaaaacaaaacaactataaataaacaaaaaaaaccccaaacaaacagacaagaaagaaaaggcaaaaggtccatcctttgacctctggggtcacgggaaccattcctttcttggctactgtcatcaaatacaactcaagtccaggcgtgtggagatgagactattttaggttattccaaagtataaaccgaagaaagcaaaacttagagtcatttatttatcattcattttgtttttcttgtatacgcatgtgtgtgagtgagcgtgtgtgtacatgtgcacacatgcagtatgtactcttgcctgtgaagacctgagattgacattggatgttcttcctaaattgttttccaccttattttatgtgtgtgtgtgtgtgtgtgtgtgtgtgtgtgtatgtatgcatatacttgcctatatgtccaacacaccaatgcagtaccatagagtccagaagaggacttccatcctctagaaatggagttatgaaggctgtgactaggacagacttgctgctagcttgggttttagtcctatttggctaaaaccaaactatggtttggagagatggccccttgggtacaagtgcttgccttgcaaacatcagcatcggagttcaaatccccggttcaaaagctaggcatggatgctcttgtcctaccaatgagaaatggagatgggcagatcctgagagctcactggcacactagtttagccaaacatttagaaagtctatctcaagagaaaacggtgaagagagtaatagagagaaatactgatgtcctgctctggcctctgcatactgtatgtgggcacttgcacccataacacatttatgtgtgtgcattgtgcatatcacacacacacacacacacacacacacacaatttaaaaacacactttatgtgtttatgttagaattgagaaatgcaaaatgagaggtttactttagaaataatttattgcgaaactatattgggagtataggaaatacaacatgattccacttttttggcagtcacatacagctctgtgagcaatacagtcccctcaatgtttcccctatagtgtcttttactaatagcagtatatgactgcgattgccctaacatttttatattccttctatgaggcccgatagactccatggctttagaaatcatgctcctggtcacactatacatgtgggtttttttgaggcaagtttctcttctcatacggtccttactcattgctttttgcattgctagtgatagtagaatgttttcccattagatatttcacttgtggtattcagtttcctagtaatgctagggcctgagagttttgaaatagtctctttccagtatcttctgttgtacacaccatgttgacaattcctctcctaggtcagacacagctgtgggtgaatgtgttggctcagccccacacgacatgtagagattaagatgattgaagggaccactagtctctctcctctgctatgtcgtatcatcacagaacacggtgacattgtagagatataagatgctcagatagatgtaccagtctcttcactttgtcactgaggtatgtctgttcaggaggaaggtatgattttcctaagattaagttgttctatttagatagttaaaaccccagactctccattctttctgggtctctggtcacctggacctcaaaaactctcgctttatttcccccacatttcaccttctgtagacagtggtctggtggttttgtaccagaaaacgggagccttcatcagtttaatacatcctcagatgagcatactgggatgtttgcatttttcagaggactttgggttctgtctgtagtgtgcggcttgaggtggaattataaatattaggaaggagtgagacacctgtagcaagctgactgcactaccctaggagtttaagcatcagagatacaaggatactgggtgaggaaaggggggggggggcgggaggatgcaggggttgtttcccttttgttattttccctttagcctgagcgatggagagagttattgggcagaacgggaggtactgagtaaaactggctagaacctgtgttaactctgtgttacagaagtgttgcagtgagcattcatttagaacagcctagattatgcatccagggtttattggtcgccagcgagacatggcagaatttgattttggggtgttttgggaatctttcccgtgtgagtccacaagctggaaggtgtcccatggttctcaaactccacctaggactctgtattcacattgaaactctttcttgtccatcagctggctaaagcagcccctggtcaggtgctgctgacacacctctgctggtcctggtcgacgtgtacagatgcgcactgagtggctacagctaataaggaagggcagatctccattcgcattgctgaggcagagaatgcctgggggagcgaggggaacagatgatgtgtatgtgtgcctggtaacccactccaaacccatgggcttcaaggctcagtagtgaatcgttcttaggagaatctttttgcttttcagagtgagtgaaaatatgtcagcctactgggaacaaaatgcaaatgtttcttggtgcatccagtgtgttgttcttggtgctggttaggtttttctttgtctttcctcgaatccctttcttccccgttggaccattttagcagttgggtgaagccagatagatgagtttaaatgcacaaggtaaaattcatatgctgtaaaagaagctaattatattgccacatatttaccaaaataattaaaaaggcggagctaaatgatatttgtgcctggctagtgccttgaacagcacactctaatggctcttaccgtgatggtttcctaaaccaaatggtatttttcaaagtacttgatctagctgtaaggtaatgtgaaaatgtggagtggttttttaaacgtgtgtgtgtgtgtgtgtgtgtgtgtgtgtgtgtgtgtgtcagaggacgacttgcaggagttggttttctccttccatcatgtgggctctaggaatctaactgaggttttattagctgtgatggtaagcatcttacctactgaactacctactacctctcagctctgtgtgtggtttctgttggtgatccctgcaaagactgtagtgtgttttatgacctcacatcccagtggaaggggatacagattcctgttagaagttagcgggaataccactttcttcttcctgtctgaattcatgggcttcctgccaggtcataacccaggataaagatgataatatcaagtgcatgctggtttgctcagagcctggcaatagcggccgagtgtttcagaaaacctttatagcagaggtgactgtttgacatggagttgactgttctgtgactgtcccctactgcacaatctgtagcaggcagagcaacagacttccaccaccatggtgtctggactcttgaatgtgcccagtagtcggaaaaaaaaaacaaacaaaaaaaaaaacaaaaaaaaaaacccctaatatcataatatacagatagttgcttagctgcccagttgatacatattctgcagtgttctgaggggaatcacgaggcggctgagataggctgtggaagttaaggaagagctccttaaaagaatcatcagctccaggacttcatgcttgccaggtttgtgcagagccaggacaaagccagcaattgtgggcaaagtgtgctcaaggctgtgtgctgaggttggccaggctgcacttggcattttattcaagaatatttgtcatcctgatgggacaggagtcctttacctttcagtcagagagcaggtattatttagtactttcgcggatagatccctaaaagctttagggattcatatggattaccaggggctaaacatttaattgcaaaaccgagagagaccagattgcaaaatttgtaagaaactctcttgcaagagttagaaactgggagaaaagtatttgctggtctgaagttccttaatgtctttgctcagtcagttttgtctttggcttgaatgaacagggaagcctaaggtggcaggagaggcgaggtacgggtgtgtgtgtgtgtgtgtgtgtgtgtgtgtgtgtgtgtgtgtgtgcttgcctttctgtttgctgaaccattagccctgtggtgtttgtagaaatttgtgctttgctggcctaggcagataagggctgtcacaagtctgggtttttaaggcgacagactcaatgcctggcagaggctctgaggtacacaccaggattgggctctgctcagaggcaagaatgtaaccaatctggtctgggcagttggggagggactcatctctcctcactcccatatactttggccctgtttttcaatttgactgcatcaaagccaggtctcccttcagccgagggggacgtgcatcttcgtgactccacagagcatgtactgctggcttgggaactgaaaccacatttggagggcatgctgtgccagggagaaatggaagagacatctgtggccacagatggagccagcagagagtcacaggcaggtaaaggagactcgcccggaatggtgcggttgcttggatatttttgttcataggaagtaaacggaggcactgttcagtcagacaaaaattggtatgacagattctaaatgatttggtttttggatggccggttcctgtagttttattttgaaatgtgtcagttttaaaggaaggatttgacgtcacttattaaaagacatcttggaaccacgattcactcggttgaccagacttcttgtccttctggtctgccacttactgcctatctgttgaatgtgtggagggatttgcccagaagtgtctgttctatgagaatcctgtttgggtaagaacctcactagctcctcccaacccccaaatcttcagtgggtaaaggggattaacggtggcaccaagtctccaacaagggtgtcttgaataaacacccacccctgtatccacttagcttgtctatttcttcctggtttgttttcttagtgacttgccatttgtttaatctctgctggtgctaaattttgtgatgggcttcttgaaaacataaatactgagagatcccttctcacaagcttggaactgcagccctgtgtggctgtgtagtacggtaagagacaagttctgaggtttatactaggttgggcccagcagtcacatgggacacagattggaactctcctgcctcggggaagatcaggcaaagaatgtttcccaaacagtggatgtttgagatatcagaggaaagtctagaagaacactaggcctatgggaacatatgggtgaggacacatcttcagttaagtgtgtgtgcccatgaatcacgtggtgaggtgatggtttccagtctgcgatgtgcctgttctctctgcctactgctccatccagctacatgggtgggcttttggctccatggttagtgcgctctgtggtctgcctctcctgcctgttaagctggtccttagcccttagctcgctccctctccatctccgtcctgactccctccagggtggactgtgccctgtaatcctctgcctcatgcctgctggtttgcttcagggcacctgccaaagttgcttctcgtgttgtttaatgcaggcttcttggccttccaggtcttgttctctgcgctttggagagtgtctgtccttagggtgacagatcctggggatgaaggagtcaagagatgtcgttcaagaagcaaaagcactcttttttgtttgtttgtttgtcttcttgttgttgtttttttcgagacagggtttctctgggtagccttggctgtcctggaactcactttgtagaccatgctgccctcttacttagagatctgcctgcctctgcctcccaggtgctgggattaaaggtgtgcgccaccactgcccggccgggcaaaaagcactctttattcgttgaaatttggggctgttctgatgtaggcaccaaggactttcactacgatcttattcaggacctttgggtgtgacctcagtggggttattctggaactatttgaaaaagttaagtgttaaaaaaaaaaaatccaaaaatgcaaggaacagagaaacactctttggaataattgttataaacagaaggtaaattaacagtttcaaagaaaatgacatggtgagattctttagatacaatcatactttataatattttatagttgcttcccacattttatttagttttctgacatggcctggtggtgttgcttgctgacttattcttgtccgtgctccaacgacggtactgtattcctataattaatatcattataatttaacccaattaaaccctttacattgcataattagtagtgatgttctcacgctgatagcatttctttatcccagtaacagacatttgaggggtcaataccatcataacatttctccactccttctgtcggattttgttgttgttattttttctttgtatttgttttttgaaaacaggattttctgtatagcccagtcaatgttcactgagctcgtagggtggcctccttctgtgacctttctgccccctcacatcccaagtactgggactgcagacctgccctgccacaacagcttctctgacagcttttagatcttaccaaatagcttcgtttctgagaactagaagtagatggcttaatgaccgtgacttgtcacttggcttctaactgatgacggttgccctacactgttagctcaagggatggcaagctggctatctctggggaggctatgttcccaggcatgtctcttgccctctgtctctgcttcccaatttgtgttctctttttgggagaatggaaaaacaaacaaaaaacaaaccagaaacttaaaatgtttttattcattgtttgagaatttcattcaatctattttcatcttgttcctcatcctgacccctccaagattagcctcacgtcccaactccctcctgctcatgtcctttaaaaactgcatttatgtcctactttgggggtgagctttggctctctttattgtggagagcattttctgctcccctcttgcttcactcccgttcactctcactcactaggtagctatggattgcttacccagcatgcaccagtcgctaggccttaaagatggtgtacgacggatgactagtgtctcggctgttttacggtcaagtgtgtttcaggcggctacacgggagaacttaaattgtggtctgtttggtgtggctggaggacggtggcactttccacttctgacatcattgcctaatgtcaggcttctgggcttggctttctgccctgctgaggtgaaaggcgctcagagacttcatatttccccagaggcacacacctgttgctgactcttcttgaatatgaaacccacagcctagagtcactttctttggtttctctttcctctctgctctttcaggtgccattgtggggtggggtgggggtggggtgggggtgggagtgggggtggggttgtgggtttcagggagtgacttggagaagagctggccaacatcacgggtccctcaggtctgtgacttaaatgcattcaggggtagtaaggctgtccgtcattgtccttctgtcatgacagtccacagctagtgtttgtgctggaggtcaggggtggcactggctctggcagctgctgccacctgacacctggacttgtagtgctttgaggaacgtctatttcctcttggcatcaaatggtttttggccgtggccgtgagtgaggaaaggaagtattgtatagtatcatttactttcataaaaatagctttggactctctgggcttcctgtgagtccagtcagtgcctttggagccagggagctgccttcgagggcaaatgatccggcagaatggagcggtaccaggctgggccacaaaggaagaaaagaacacttaagttggctgttctccttgctgtcatgaaaccttacatacctcatctttcaagtgggagtcagagtcctgacacagcgtaacctgtaagagggccatgggcatcagtggcagtcagtgtcaatgaacagtgaaggccagccatccctcaatctgggcaccacctgacttatatgctaaggactgagccggagcattcgttgctgtagcttgccattggattggcatccagctggaagtgatctgagcccaatattcttaatttcagaatcaactttgttatacttactgtatttatactttgttggccagacagccttactcacagatattccccaggggagaagactttactggcgagggtacagactggcaagcttggggaatgtctcgcttgctggaggggctgccctgggcctgcaggcctgtctctcgtttcttctttgaatctctgtgttttctccttgctaaccctgccctctgatcttctttctctattctgcctttctcttcatgctgatgatcactctcatcacaggccagctctgtgcttctcctttagcagagctcgttacaacctctttttctcagccactgcctttccttgttccttttgcagcctctggctactcggtcccaggacttgagctgctccttgcagtagggacacagcaggtgccatgatacctgtggcctgcagactgagtcccttggctggcctgggaaccagctctttcagggctgtggtgcacagaagagagcaatcctctttcctctccaaacctattggtcgaatgagcagcccacatcacctggatactgggaacttgttgctgagtgtcctgatttggagatactgaatcgagaactaacacttgtcctttctgtccctcatttggacactttcttgtgactcttccacattgtgttagaaactgcaagggcatggtctgggacaatagtcagtcagtaaagtgcttgccagggtcaggtcttgaatttaattaccggaaattatttgaaaaagtctgagtgtgctaacacacatttgtaatctcagggcagaggaggcagagacgggagcatccctgggcttcctggccagctagcttagatgaattccagcaagggccctttctcacaaaaacaaagtggacagtgatctgggaagatacttgaggttaattaacctctgggctttatgcacctgcacccaggaaaacacacacacacacacacacacacacacacacacacacacacacacagatacacagatagacagacagacagacacatgagacacacagatgcacacacacatatataaacagacacacagacaacacacaagacacacatgcacacatatacaaagagacagacagagacacacacagagacagacacacacggacacacatacatagacatatataggcagacacatactctatcatgtatacagacagacatacacagagaaactgacagatagacacagatagacaaacacacacacacatacagagacataaatgcagacacaaattcacatacatagaagacagacacagagacgcaggcaggtgtacacacacacacacagacacacacacacagacacacacacacagacacacacacacacacacactaccagatggcaaatacctctggttcctttcccagggatgaccctgtctagttattacctgggtttttttcactttcccctcagttctggccctaactgtcataaatagatgcttatctcattctcagtggagagaaatgatgacacacaagagtccgagtgggtggagtgtccatgtttggacgagaccgtctctgtgttagcagctgcaggctggctcttcgatgactcacatgtgttaatccccgtatcttctgaagagagagcaccctcggatttgcatggggacatttgcacagggaaagaaacagtcctgtggccagggttgacgtgcagacaactgtgcctggtggactgtagtggatggtgcccatggaagccggtttgtaagcagggatagagttgccttttggacggggcagctgatagggctgggtctttgaggcagacttcagtatttgcacaggcaatgtgagcgggtgccagtagttaggaactggggaaattagtatgtttagctgcagagagtcagtggggagacaggcagtggcaggtgacagtggggtagtgttctgagcaaccctatttgaacccataggctggtgggcatcatttggtcaggtttcccgttgggttttgttatcgaggataataaaagaaaaactcttggatatcttcttcacgccttgccataaagcttgagcattctagaactctctagaaactggtcaggtttttctcacaatcccaacaaatgttcataagaaaagccacttactgcccctcgctctacaatatgcaggatgcttacagatttctaaaagacagaacatgtaacttcagatatgctggcacatgactgtaatctccgcacttcggaggtcaaggcaggaggattgctaaatttgactatagtgtagtcctcagggtctcaaaaatcccaagctagggttggaggtatgatggctcagcagcccagagcatgtatgtaagtgattttcagaggacttgggtttagttcccagcacccgtgttgaacagctcacaactgcctgtcactcagctccactgggatctgacagccctggtctctgtggagatcttactcacatacatataaccttccacccacatacccaattgaaaacaacaacagcaacaacaacaaatctttgaaaaaaaaaaaaaaccctctaaactaaaccaaacaaaaacaaagaacaaaacaaaacatgtagatgattcagaaaatcacatgtccttttattttttaaaaatagtatttctaaattgaggcggtggtggtgcaaagaggcaggtgggtctctgagttcgaggctaccctggtctacagagtgagttccaggtcagctaccactacacagagaaactcttgtcttgaaaaaccaaaccaaaccaaatagtgtttctactttcttctttgtctttcagtgttttgtgttttgtttatcatttgcggtcttggttaagtaactgtccttccttccaggaatcgcccaggcaatggccttctttcctgccatcagggtaggtgctggtagtgggagtggctatctgaaggactcctgctctaagcagttgactatgctggtttctcctaagtctctgacaggcccatcttgctgctgctaagaggttgcctcaccgggcatcctggagtgttgttctgttcttccgcagagccctgtgagctactacttgattcgtgaaagcactggccacttacaccagaaagcaactccggccttcagatttagctgcttcctactgtgatgtgtgcaccctgtcatgagagaagagagagcctcgttggcttacaaccccagcttcttcccagggttccaaagctatgattcctgctttcccctcctcctcaccaagagctgtgatgtgttgtgtttctcctctgtatacctccatgatgctttcctgattgtgaggaaaggagtcattttaacctcaagcttgactcttaggaattcccttcccttccttattccaagttaccgccctcgccgttgcaaaaacaggtgatccttcaagcacatggtgagtgtgtcgggggcacatttctcagcctctgtgcagttggggatcttacctttccacgtgtgctgtagacttgactctctgtaacttggttttgtgaatgataatgtccttcagttccattgtatactaatatggtagtgaagacatgactttagattttatttatatctttgttactttgggaaaatagtctgatgtgaaattactccacccatgaaataccatccttgcctttgctttttttggctttgcttatttttacaagagtttttcctggcgttgactttttgttgttgaatcatatcagcaataatatgaacattctcaacatatgttgtcagcatcgcgtgaagagttcttttcaccctaacgtaggatttttgctaatgatctttaatgtgattaaaagccaagatagaatttcatagtgagacatgaatgaattaaagaaatcctagaatgttttgtgaggaactattgtttcttagggtttctatataagtgaattcagctagttgtggatcaaaaattttggggaaaaattgcctttctactgtatatgtacagacttttttttcataatattattccttaaatgagacagactgcttatattatgatagttagtatgagtaatttacagataatgtaaagattgtcagcgggtgggattgttacagcatcttacataagggacctgaccctctgggttttgatatctgcaggcaggcttggaaccaacccctttcagatactcaggagaattgcatcccaagtaatgtcactctgatgagaacatgagagggaaggctgatcatgtggctcgtggataaagcacttgccccgcatgcccaaggccctagctttgtaggtagagtgctctgagccaccagatgaacaaagatgtgagaagggagtgtgggggcttggtgaggctgtggggttcacgagtacagacttgggatccgtcttctgcagctatgatatccaaaggaagctccggatataaggaaagggattttccttatcactcatttgaagtttaacctggacttgacctgggagggaaaccaaacctggtctgtgggcttctttcagtcttctctgattctgttcaccacccctaagcatgtctgctgcagaaggcattgggtttcgttccagggagatgccttgggtcttgcttctttttgatttttttttttttgatgtaacctgtgttttctgatatatgatttctcttctctcatggcaggggtttaattggcaacactttgtttcaggctgggtggggacaggggctatgaaactcagcacatgaagtgatagcagaaatgaggagggctgaatgtctagcctggcacactcagggttagtaacgaccagctcatcagcatgaagcgaagcagagcacagacatagatagagcactgtttatggattcttcttcattcatatgtgtgatctctgatggaagcatgggccagaaacaggacagaatgggaagtctgcaccagatctgtagacttgtttgcaccattgttatcaacgttaactccctgtcaggatcattattccgtggttatgtaaaaggctcacattatgggaggtgacatgaaaattttgtgtgccatttttacaacttattttaatgggtgtaaggtcatttcaagacagtttataaggacatgaaacaaaagtgctcatcactttctatttcgaggcaggctattataaagaggtgagaaggctatcagagaacagtcttatacccactgctgttaagtagagattgcccgttagcagggcagggcgttcgctggtcttagaaatccgcaggtgaagtcaggcgctatttcagagtcagaaggacacagcgtaccgtaccggacctctttcttttcttgacatgaatgaaaagcaaagctatggcttccgctgaagggcagtaaagaagagctggcagccaaggacagtgctgtgctgagtctgatggaggagcgccaaggccctcccacttggtcaccctggtgttggggtgtggcttggcactggcttttacctggtgcttggcactgttaagagtgtaggttcattagtttggactgacagtcataatatgatgttcaaagccaagagggtttccccatagcaggataaggagactgtgtaccttctgtggctcagtcagctgacctgggcttgaaagtttgtgtgcttttatatttgtgtatatgtttacatatgtgtatatatttgtgtgtgtgtttgcatataggtgtatgtacacatgcctgtgtttatatttatatatttatgcatgtgtgtgtgtgtgtgatatgctggctgtgtttcttccatagcggatgggtatctgaatgtctttccttctctcccctgctttgctgtgctgcgtgtgtttcagctgtttatttgttctttattctctttccacgccattcctttctttccctgctggtgagaagagacctagtctcacagccagttgcttcggggctataatagagttagtggtatgtaccaaatgtgattacagctgtctcaacaccagatgaatgagagtgtgcataccctggacagataattctgacagaaatggcctattggtttcacatgagctaggaccgaggccaccgtgtaacctatcagaagaacagatctgtgaggaacaggttcccacaggcccgaagagtttttgggaaagagcctgtcatgagaggtttttaggagttccttcagataaccctagagaactgatggtcacgtcattttttcccattctcaggggttaggggtagccccagcgctttgcccaaaggttgctccatctttcatcggtcctgcagagaagccagggtggtggctaaatgggccgatgtgtggcttctttgctttcgagctttgatgtcatttctatttagctcagtgagattgttttagaaaatttcccacagtggaaagttctcttggacatatgaaagttcaatggtcactttcaaaatcagccatgtgccaagaaataactaaaacaatggattgcgtagtgcagcagccttgggacatggaaaaatttaaaagatgtatgattcatattattaatacaggttgtaagacatgaggccttgcgttggaaaacagaaaagggcctttctgtttttgttgtttataatttctctttctgggtaaaataattattcttattttctatgatgattattttgcctgtatgcattcagtgtttgtgaaggccaggaaagggtgtttgctcccttggaagtagagttttcgtggttgtgagctgctatgtggttgccagtaactgcacttggttcctccccaagagcagttaggcctcctaaccactgagccacctctccagctccaagtgctattttcttttgaacttatgtcctatcttagggttttactgctgtgaagaaaaaccatgaccaaggacaacatttaattggggctggcttacagattcagaggtttagtccattaccatcaaggcgggaagcatggcagcatctaggcaggcatggtgcaggaggagctgagagttctacatcttcatctgaaggctgctaggagaagactggctcccatgtcgttaggaagagggtctcattacccacccctacagtgacacatttccttcaacaaggccacacctactccaacaaggctatacttcctaatagtggcactccctgggccaagcacagttcaaaacaccacatggtcttgcagtattttctttgctgtactttatatagattttgttctgtttggtttttatgagggaggattaaaaaagttaaattctacagtagaatgttacataaagaggtaattgatatcatcctacatgaatttgttcagacatgctaaggtttgaaagaactatcagacctttgatttggactcttttcctcgtttacattttcaatgctatcccaaaggtcccccatacccaccctggactctttttttgagtagtcattgtattctcccatatcaatacttttgatagggaaaggtaatttaaagttactgtctgcatatgaacttggttacctttaacctgtgtgtgacagctcagtgggtaagcatgctggcttccaggccaggcaaccagagttcaagccctaggaccaaccctgagtgtctccctgaccctcacagggggtgacttggcttatgcccttgccccataaatgtcacaaaggctcttttttggaggattttctcccgaagaatatttacaaataataacttaccaaagcctgcagtcatttggtctacttctggttaagaagacaaactgtagcaagtgcagacccacacaactatgccaggattccctggtccctttctgaagctggctcctgctgtagatgggtacctcttttctctgggattatgcggggtcaggcttccattcttgcttgttgctttggctacttagctctgcctatgggaacggagatgctttggtttacgatggacagtggatatggagtgtcgtcatggaactgctggggagaatgttaagtggtagagccagtttggaaaagtgcacagtggttcttcactacattcatagtgttatataattcctttgtggctctcctcctgggatttatgttatctccaggaggagtgaaaatgtgtccatcgacgtaatttacatgcggatatttagagctgaaaagttaataatagtccaaaggtgagcccaatgcagttgcctgtgaacggatgaaggctgcgacgtgccttatccacgcaggaaagcatcattctgccacacacgatgagatattgacgtccgcttcagtgcagaggcttgcaaacatgctaggtgaaagaagccagacccaacgcagcaaattctgctgatttcacttataggaagtatctagaaccagtgaatctctggagaccagagggagatgggagtagctgccttgggctgggcaaggaagcctgtgaatgactgctatctgcaggagtgaagggaggctatagcattgatggtggggtggctgcagagtctgcaaacacactgatatctgttgacttgggctctgcatgtgtacttacgatttcctactacgtgggttatagcagtaaactgggttttgactaagtgacatgactggagccattctgattctttactgtctcaccccatcttattccgttggaggatgaggatcagaggacagagtgcttagttgttttttccagagtctcaagtctatggtcttctgagctacatagataggttccttttacttggaactcctgtggaccctggtagggttacatattctgtgagaatctttgtgctaggtacggattctgtttcagaggaggaaagaaagctattagatccatactaaggatgcaggcatggcagtacaaacacctttccttctcttttgcacgtgtgtggagaacacatatgcaaatgatgtcaagagaacaaaacaaccatctaaaacagaagtctggaaaatatgagtctgtgtggttattgtttttttccaccgtagcagtttctttctcttttcctttgtggtttttggagacagggtttctctatgtagccctggctgtcttggagcttacactgtagaccaggctggccttgaactcacagagatccacctgcctctgcctcctgtgtgggagtaaaggcgtgtaccaccaccaaagtaaacactgttgtgagtatgcatagtggggtgtgtgtgtgtgtgtgtgctgtcagacaccatcaaacaagaaaagttagcatctctctagttgctttggaacattcaaaagctctaagctgtgactattaaaaaccaaaagtacctcaagagttcttaactgactgcggagtttaacttcctgtctgaggggaggtggagttagatttagtcagatcctctcgtgggaaaaaatcaaagggactttaaaaaagaaaaaaacaaaacccaacctaacaggacatcccagtgtgcagttcgcgggcggcttttgtgttgatttccttcacagtttccctcatctcagccactgtaggtgatgagcagcctggcagccaccacatttcgttggaaaaagtggaggttggatctgcctgggcaggtgcctctccaggcttgcaggagatcccccggtaagtttgtcagtggccagactgcagttgctaagggaggctttggacagagggtgttcgagttggcagagcctcactttctctcgataagtctgatgtgtaagtcaggaagcggctgaaagcagggcttatctgtgacaggcagaggtggcctgttcctccagagactaggtctctgtggagcggaagagcggccacacatcaggtgcttttcttctttggactgaagctgttgaacgcctttgtgtccaaggtttgccactttattcgaggcagctggttcagtattgagtgcttactcctgtttcatttttattaatcatgcattggtgttttgccagcatgtatgtatgcatgtatgtatgtatgtatgtatgtatgtatgtatgtatgtctgtgtgaggatgtccgagtccccggaattgaaccagtgctctcaaacacagcagccattctccagctccctgactgtttactcttaaagagaaacttttcctccgtggcaggctactgatgtagcccaggctggccttgacctctaggtcttccagctccacctctggtgagctggattttcggtgtgaggcaccaagtcagatgctgaggtgtggactgttgacagatctttctaggaaggcaacattctaggaagtacagatgtagttcagagctgagaaggagcacaaggaagcgttgcactgttggtggattgttggggtgtctgtttactacattggggtgagtgggggaaactgggggcttctgtttcttacaggtttgtccttggaaaggcagagcttccagggggttggtgtcctgacctttttcctaattaaagtccatttccagagtggcttagtttttctgatcgttgcagacatccatgtattcttagatggattcatggatatgctggctctgtggtctgtctgagggaaaaaaaaatcctaaagatgtgttttcatgtgctgtaagttctttgagttaatactttccctagaaaagaacagaaaccaaaccagataacaacaaaccataaaaaaaccaaacaaacaaaaaacaaaataaaattaagggtagtttttttttttttaaaacacttctcttcattgcaattcttccctcctttcaatattttggttcgtagtaacataggaacactgcactaggtgtatcctataagcatgctaccgaaataagagggccagcttgtgttttcttagagatgagctttcttggccaacagctctggggtgttcgtgtgctgcaattatctacattgcccctgtctttgttttcttactgaggagctctaaggtcccaacatataatcatgagacctttcagggctgtgacgaacgctccctgaacagaggtagtcacagtggcactgtgacctttctgaaatccctttaagtctggtggacttctcttttctcctgccccagatgtcagcctacaccttgtcttgctgcagagagtctggagcagctgctgtggttgcagtcagagaccaaccagaagaaaattatgggccggagtaaacaaagttactagatgacaaggtcagatagtttaaaaactgtcctggctgagttctgctctgtttaggtagtactccttcctttgctctggctgctatagagactttgtgaagataacatttaaaaaataaaaatatttcagggatgttattttcataaaaatagaaaaccagtgtttacctggtcccaaattctataggagttcagcatcttttcttttaaattaagctgggctcattctagttttgtaatgcgttatttcttcagtgatcttgatagaagtaaagataatagaatcagtggttaaagtggtattttgatggaacacacagtcaagtaccagatgatgcgcctgaggtttcccctgctcagggaacaactttgggagagcctgcttagcttgccacccttcccactctcttattggctgctgagactccatgcctagattggcatttcctttttagatggatggagcagacgatccaagactccagctgtctattgtagccacctgtatcctgaggctctttccagaggctctgatgtggctgaactgagacagtgactttgtagctttgccatagctctctggagtgtcctggatggagcagtgtggctgggcctgtggagacgatgacttttgtgccaactgaactggcagttagttccaccctagatggataagaaggcattatctcccccatacccaggtcaccacctgaggaagcagaagtctgaagtgctgtggggcgagcaagtggattccatgggtaggatcaggcaaagacttagcttccagtgtgtgctgatgttcagggcgtggtgtgtgatgctgagattgacagctgagagggagaagctcaagaaagtgatcttaaggaatgggtgactcactcactggaatgttctgatgaagcaaggaaaattgggagctttagaagttagatttacaccaggaagtgtgtgtgtgtgtgtgtgtgtgtgtgtgtgtgtgtgtgtgtgtgtgttacagagattaagagtgaatgagagaggggaggaagggggagagggagagggggagaagaaagggagagggagagaaggttggagggagatttggaaacattggcaggaagttcccctgtactctagtggcttcttctggtgcttgggttggcagcctgcaagtttgatttcccttgaatgttgaggtcttctttaattccttttagttaacatgtagctacctggtggtacaggctgtaccctgggaagcgctaagagtataaaattgcctctatggggcatgggctaaaatctggggctgggtaagaggcctgggccattgttgtctgacttgccagatgcttgaccccatgatggagctcaggcttgagagcatagtgcaggccctgaggtgcctctgtaaccctgctggctaaagggaactgagaagttggttctgaagaccaggtagcctatcaattacaaaggcacaagaatgccagtgatttggggagaagaaaggcagaaggtgaccagagaatcgtcatcaagaagaccctggagcaatggttctcaacctgtgggttgagacccctgggcatcataagaccctttcacaggggtcacctaagaccattggaaaacacagatatttacattatgattcataagttgtgtaaccggtaggacataaatggattgataatggacttggactgctgatcagtgtctaggaaaagcaaatcagacatatcaaataccaaaagtacccaaagacatgtaagctacaggctctcacctcctcatctcctgtgtatttttccttggtatcacttgaatggctgctcatggacatggtcctggatctgtttaatgttttcccatccgtttctctgacccgtgcttagagggcaccaggtgcttcctgtttcaatcattagcaggttcagcacttgttggaaatcgatgttaggtactgtgtggtaatttgataggatctgggtctagtgctcccccattcctgtctcagcactttgaccttcatctcaacagttcagtgacctggcaactctaagtagttttttcccactgcaccaggacttgcattgtttggtggaggaagatgagtcatagcctagttctgccattgtgtgaggtgaaatgctagtctagggctaaagaacacaggtcaggctttttgtgtaaatcagaataatcgaactggggggggggtaggtgggggtgacgggattatgggccagggtggccattttggtgaaattactctcatcttggaggaacattttattttaacggatgtttcacttcaaacctaattcttaataatgctttgaacaatcttaaggagtcagactccttcaaacaaaaatctatacagaatcaaaattatatgggacagaagaatgtcctcccctccccccctttcctcccatccccataaccagggttactgccttgggtgttctgtgtaacccttttgctatgagtataaaaatataaagtacaaaagttcctttttgtatcaaataaaaatcgttgtgtgttagtagcatgcaattaaatcaaagcaaagcaaaaacaagccacaaacaaataactgaaaattacaaatattaatatcagggcctacacatcttagcgtactgggctgctgtgagagcatgtgtgcttttattattacgctgccaccgtagagggtgggtgagaggatttgtgtgtgtgtgtgcctgtgtgtgtccctgtgtgtgccaatgtgtcttgagacaaaccttccaatcatcctttcctatgctggtgcccgttttcttctgttgtgtggatccctgattttgaaactcttagcgattccaaaaccaattcctacataaaacgggggagtttgaataacttgctttaattttgtttgacttttaaggtggttaacctctaacttaaaagattgacatccttttgctggtctgtgagatagaggtttacgtctttggactcagaccccacattttccctctctttttggtggctgtggacacagctgccatcctaaaccacacgagaccagtcattatttaggtaccctcaatattttattacatttttcatatactggtaattaatttcacatggatggtaagcccggaattctttaaggtccatacattgtggagcctgttacagtcagggccaggaggctgtggagtgaaacttgaaactaaatagcagttctcttggcactgaatgcagtgaagcctgtggctggagggcggcctcagtgctaaggctacttgatgctcttgcataggaccccacatggggtggctcttaaccatccataactttcttccctgagacccaacagcctcttctggctttaaaaggcacccacacaccgatgaacctacatatactcatacacacaaatacacttaaaattcaatgttagtggtgcctctacctcccacccccaccccccggcagggtttctctgtgtagccctggctgtcctggaactcactttgtagaccaggctggcctcaaactcagaaatccgcctgtctctgtctcccaagtgctgggattagtagtgtcttcaagatgaagttggtaaggctcattttgttttgtaaagacatgtgaaaatacaaatttcttatctaagcccagttgagggaaggattataacaaacgaggaccacttatgataatggagtctttcaagttgatatagaagaaagtacatgtggttattaaaggaagatgagacttttgtttcaatctggcaccgtgcttaccgccatttattatttgttgctacgtccctattcttcaatccagatagatcccttaggaattttccacgtccgagcactgagcctgtaattttaggctgggttcatttaactgtagatgctctgcatggcaggagctacacagccatacaggagacacgagctgtgtgggagatgtgatcgaggcgtggtgcccaacgtggtgttgctgtttttagagttcactttcatttgctcagaaaggatctccatctctgtttgctggcaagcagagagcctgggcacctagctgcccctctagttctctgcctcatgacctagttgctttctggtgtcttgtacaaaaagctttatttagtctgcagagaggtttatttctccaactaaaggagcgctgtcaccgtagtctaggagcatgatggatgcccagtgagtgctgttgctcagatactacaggaggctgaccctaaggtgctaggaagaaagacaccgagcacagattcctccagctagctttgcacatcatcatcatcagtgaaaatactgccagatagccatttgcctgaccctccacaaagcagctcctcttactgccccagctctgacccttttctctcggttggtacaacaagctccttgttgagaacttagtgccaaggttagtctcctggcttctgacctggcctgttttcttgctgccttctgatctgcatgctttcagcttctgcttggtccatggcatttaccccttttctgatgtttgtcgctgctgggtggttttgctgatccccttttgtgataactcaagagagagactcagccatgcctggtagtgtctgctagttgtctgaattagttaagatggctgtaaatatgcatcagctgggcatcatggtgggcgtgcacttgtgatgccagcacttggtagggggaggcattgtttcaggccagcctggtggacacagtgaggtctaggcaagtcaggattaaataatgggatcttgttgaaagcatgcaagtgagaatgaaaaaaaaaaacgtgtatttattatctaactctgagtcactagtgtataacaggaaaagtatagtcagggtgtttttgcatgccctgccagagagcagttctggtctggggtcctatgatgaaaaatccctagcctgttgctatgctctggggaaaaaaaaaaacaacaaaaaacaaagaaatgatctgctaagcacatattgagtgcctgctgttttcttggtcttaagaccaagtggaagtattatagtgttttttgtttgtttgtttgtttgtttttaaggctttaaaaatttatttatttatttagtgtaggtaagtacactgtagttgtcttcagatacccctgaagagggcatcagatctcattccggatggttgtgagccaccaggtggttgcagggatttgaacttaggacctttgaaagagcagtcagtgctcttaacagctgagccatctctccagaccacttgttacagtgttttaaatatatgtattttaaagataagatttattttatttatgtatatatgtctatgtttaaatgaatctttgccatatgtctctagaggccagaaaagggtgttggattccccccacagctgaagttacaggtagttataagaagcctgatttgggtgctgggaatggaactcaggtcttttggaagagcagcgggtgcttttgacctttgagatatctgtccagccctgggctagactgttttatcctcaagtctttgggatctcttttggtgggttcctgttctatggtcagttcccaggcaacagcttttaggatagcccatgctccagttgtttgagacccacatgaagaccaaactgcacttctgctgcctatgtgtggggagttttaaataggttttgttgtattgttttgctttgtagcccagggtcacagcatacactttgcagacagtgcacagagctagtgataagcgtttgtcctgagtaagaggagcaggctcatcagtgatggtaaggtagggcctcatctcatgcttgagtgttggctttgaggtctagatccgtcctgtgaaaaggtagtgagtgggtgtgagtgtcactgacatcaacatcctgatagtactgatgtgcccaccagcaggcagattgcagaggacaggaaaaaaaaaccctgcagtgctaagcaacctggtcaagagggcaccatgttgctgttcaagtaggctaaaagtggaaaaataattagcatgtgaaaaggcttgtttgtggaaatggctgtaagttaatggaagcaggttgatttttctgagttggaacacccattcaacctcaaaataatgttttcacattttgtcctaccaaaacaccaactccccccaccccccaccccagccctggttttccagcctgagtgtggctggagttgagctcatctgctctgtgggcttccagctgtttgactggcacttgaaagccactgagaggcattccaaagcttgagtttctttgtagcccaaaccaacctggaccttctgatccgaaggctgagatgacaggtgtttaccactggaaaagtaacttgtattaacctgatgcaattgttgactggtctccttggcttatcacctcagtctgctaacctaggcctagttctggaagcttctagtctccatacaatctaatctaggcctagagtgttttcagccactgagacttacggctgaataggctcaccctttttttttgtttgtttttgtttttgtttttgcgagacagggtttctctgtatagccctggctgtcctggaactcactttgtagaccagactggccttgaactcaaaaatccgcctgcctctgcctcccgaggcagaggctcaccctttcttattctttctgagctctggctggctgattcaactcagctgttctggctcaaaactcctcttcaactgactggtccaatctggcttctctctcagcctattctgaatggccctgcctggcctcatactatctttggcaatatgttctaatcttctggctccttctcattctctagctcattctgtcttcatcagtgtctagtttgttctctttctgcaacctgtctctgtacaactgtcctgataaaactgcctccttctttctccttttctgtgctgctgctccctcgggtcatttccctttcctcttgtgaaacttgagcatatcctactctgtcaaatctttctctgatttgacactttgtctgccactcaattagacaccacttacaagcatgggtgcttccttctaaaaactaacgttactttcattgtttgggattaaaggtgtgtgctaatggctgagccacaccattactagaaacaggatatatatgtatatatacatacatacagtaaataacaaaattttggggttcacagtgtgatcaaataacctgcaacatgccaccatgcctggtttctctgagcctgagggctgaatccaaggttgcttgtatgctagcaagtgctggacaactgaatcatactcccagctagctgcttggaaagccaggtgcttggaaagccaggtatgtcctcacagtttattctgcttttagaataattctctattcaggtgatcaagtacatcttgtccaagaattcttccctgacttctaaatatgagtttccttcctctctgatctacatctttcccaagggatcaagttcagatatccctggatatattccccaacactgcctttatgagatatgctgctgatctgtgctgttgaaagctagtctgtctctgccatgtagggcctgggaacatcttttttgcttctactgctatgtgtctgagaaccttcttttaggctctcagtttaagtcttgtctgttcttactaacttgattcctcagacccatcccagttcctgggttatttgttggcttagggattttttggccagtgaacaataattgactcagagttgtatggatgcaggcctacgtgctggtggaatccagacatctgaatgaagtcatatgaggaattccagcccactaatctttattgttttgttttatagatcagcaatatgtgagaatttaatacacattatggctagtttttgcttttgtttatgtttgagaaaacatattatttgtattttaactcttaaaatatttttcctcctctcatttatttgcttattgtacattatttttagtgtgatgtgtatgtgtgtttgtttgtgcatgtatatgactaggaatggatatggaggccagaggacaacttgtgggatcagttctctttttataacatatagactctggggattgcacccagagtgtcaggtttgatggcaaacaactttatgcacatcttgctagtctgcacttttacttttcttttagaaggttttacatttacaggaaaattgtaaagatggttctgagagtgtactcagtcccttctctacttagttaatatcttaccatcattgctacattttttaaaacaaatggaccattagtatattaatcatgaagtcattatcagaaatcccaagtttccttaagagttattattgatttaaaaaatatttatagctattatttataacatatcacattttgacttgaattgtttttgagtgtgctcaggctcagagcttttgaatccttacatgtcatactttgtaaacacattgacaaaacagatgaaaacttgtgacgtgggagtcagtctctgatgagccttctgggacctggtgaaggagaaggctattttaaaggctgacttatgtctaaaatctctgcattactttgcagtaatgaaaataattacttgctagtaccttaggttttattacacatgcgtttgagttacttataatctcctcaaacagaaaggatcattcgaaataataggtatggaatagcccttgaccaatcagatccaagagcaaatgaccagaaaagaggcccactcaaaaatgaataactgccctgctaacttttgagtgccctataaatgtctctagacattgtcgtatgattcagttggtagtcctaatgtaaggcagtcatagcagccaggctctctgacagtgagtactgtataaatgtttgccatggttgatgtcttttttcatttgttatttctgatcaattaaaaacatttagcttagtgggacatcagacggtaagtcactatgtgttaaaaatgaggttctaggccagtgaggtggctcaggaggtagaggcatttgctgtgtggcagccctctgacctgagtttaatctctggaactgatggtgggaagatgagagttaactactgcaagctgtcctctgacttctacttgtgtgctctggctggtacagccacatacacacaacacacacatgcagacaacacacacatgcacacacgtgcacatacagagacaaagagagaccgagagagagagagagagagagaggacaggcagagagggagaaacagagggagaccgagacagacagacagacagacagacagagaataacttaaagaaaacctgagaacttgtttaaaaagataaacataagtttttcattcttttatgatgcggttgcattttggtgtagggatatggctgagttggctgagcgttgtccagtatgtaatccatgagaccctgccttcaatcccgagtagcacacacatcaggagaggtagctcatgcctgcaccagaggatcagctactcagtgtcatccttggctacatagagaatttgaattggaggctagcctgtgtgctgcgagagcctatcttaaagaggtgggggggggggcaggggtgtattttgaattcaaattttcttagagactcccactgcagaagagggatatagatctctaggttgactgctgctctctgcactgtccctttggttcccgtgggaagaggagacccctgaaaggactaggaggtgtggaatttggaggccagtttctcccaaaccccattcagctacctgctgcctgctttgagtgatcgcagcagcatgcttggagcctgtactttggttcctgccaaatctccctcatttccccatgatgatatgttattagtctcctgatccctgttatttgttaagttaatctgcgctttgggaatctagtaagatcacagcattttgtttttgtgacttcattttgtagtatatgccctgggtgggtgcagctatgctggagttggtgaaacccaataacttactgtctacaaacatcattttatacttagccttcctgccctcttcagggttccagaaacagacacctccattgtttaagcagtccttctgctatgttttctaaggtagccattttcctattaacagaatgtgttttttttagtccttaatccactgaaacagaacagtgtgtgggagcagagggtgagatgaatgccccatgtagcatcttccatctcagcccttctgtggaaacgtgggcagccttactgtgctttgaatgactctgttgtgtttctcagtaaatacttacttgctaatattggttgattatgaagttcttcttgttattgttttttcttaaacccaggctgacctcaaacccattggtagttgaagatggcaggaacctcggatcctcccgcctctaactagtgttgggattacagacctgtgtcaccacacttagtttgatgtgacagtgtggactctgcccaaccataggcattgctgagagagaattagatacgtattttcttgtttggtttggattttcaagacagggtttctctttgtagccctggctgttctggaaccctctgtagatcaggctggcctcaaactcagacattcgcctgcctctgcctccccaagtttgcccagccttgttctggattttgttactttcattgtcattggttcctttctggattctagttacttatttccaataacttcctatgaacctacttttgggataagaagtttaattttaggttgtagggatggtgctgattggtcctatcccccaattggttcctgatctgtcagtaaagatgccatggaccagttactgggcataaggaataggcaggacttctgggcccccgcaggcaagcaggcagactcaaggagaagagagagggttttggtcatgctttggaaggacaaaaggtgacccgtctgtcatgtgagatattggacaggatggccacaggctggttctacaggcacaaggttgggattcttgagcttggactaacaactgagcagctaaaattgaaaacagatttagggttgtgagctaagagtattgggaagcgtacactagccacgggagtttaataatgcccagcaattgagccaatgaggaaagttgaacttgagcaacttttgtctgtggttttgtgtgtgtgtgtgtctgtgtgtgtgtgtctgtgtttttcatccatggatcaaatactctcgggggggtgggggtgctggtagtgcagtccatttctggagctgaggcagggtagcaaaagctacatgcaacactgaaactattaatatggattgttaagtgatcttcagtagactcagtcaagtttagtatgtttgatgatattgttttcatgcagtatcttgtttgtattatgtgttttttgttttttaaaaaagaatatttaccttttatgtgtgtagatgttgttatttccatgcacatctgtgtactacatacatgccatgtcacgagaggccaggatcccttggtattagagatatagatagttgtgagctgccatgtggttgctgggaattgaacccaggggccctcaattgagtaaatgcttctataagcttgggctgccggcaaacctatagggtactttcttaattggtgattgatgagggaggactgagcccattgttggtgatgccatctctgggctgggtcatgggttctataagaaatcagatggagaaagccatggagaacaaagcaggaagcagcactcctttatggcttctgtatcagctcctgcctccaggttcctgccctgtttgtttcctgcccttacacctttgataatggaccatgatgtggaagtgtaagcgaataaaccttttcttctcaccttgtttttggttatgatgttccattatagtaatagtaaccctgactaggacgattcctatcacatcttcatattttctgtgtttcctggtgctacttccaagagaaatgacaaagacttgattcttcaccttagtatctcctttgtaagataagccaaagtatcatgttagccagctcatctcatgaccgtggctgatgagagaagaaggaagaactttccccctagtctacaggaccggtctaatgcatggcagaatggaatttagtgtcctcaattgaagtgacactcaacccactgtctcacactgtcctggggaccttgcaggatttcagagtgactacagttttcccttgtggcctggctcacacagaacatgactaatattaggaagtggggagggacccctttatagagttttctaattttgtccttcattttcagctaattattcatgccttggggggtaaaatagcttagtaggcaggacaatattagttttaattgtgagcttagtccagagggctgtgcttgagtgaaaaccatccaggagttggggaaagagcagatggttctatttctggctgctgagaggggctttgcagggctgtaaggaaagatgggcgtgttgattgcaggcacagggcacttcctgggatcacatccattatgccactgcttcctcactgatattaaaagaaattaaaagcacaggccagattcttaaagctaccatcaccaccaatcattgtggaaacaatcctaaaacagttgtaaatatctacttcattaagctacaacaacaataagaaaacccaacccaactcatcattggtgatgatttctaaaaagtcatctttggaaagagtaaacaaattagctgtgtgctttggatctgtagggaaccctccccagcccctacctccatgttttgaccattgctgtccaggtggtgatgtggctttgtgaggccgaggaacacttgggaggccaagcatagctggtgcaggtaggtctctgggtctgggctttcagttctgtcgtgattgtctgaaaccatcagaaccatgaaccaaggtaaaatgttcttccttcaagttgtgtctgacaggtgtgctgatgaccacagttatgctaatgtagctaataaatggcttattattattattattattattattattatgtaggaatgctgaagaaggcctggtgtggtcattggatgctagaatccttctattcaaatgtagacagcaaaaggcctactaggaagggcaagtgctgggcctcctcagccttacaaccttcttttcctctcagcctctgctgctcttctttgcctgtaaatttccaagaacatttgtcatagatttaagtactttttctgtttcctctccaacaaaatatggaaggtgatttcagaagagtggaggccattgcatgggtctcggtgacctttacaacccagacaggatgtgggccagcagaggtacacagtttccaagggaaatttcgccctttgttttttgagattaataactgggtgggatagaaagccaaatgacttcattgttgagcatagacttccaggtcatgagatattgcccgtgtgaactaaactttggcaaggtgtggtagactgatgtgcgtgcacacctcaataatttcagaaatggagcagaagatacagggacatgccattctccatgtgatttgctttgccatttaattttatttaaatgctgaggcccaagcctagggcctgtgtattccagggaagcattcagccactgagccaatcccttgatattaatacatactttaaaaagcacatcaagggggctggtgagatggctcagtgggtaagaacacccgactgctcttccgaaggtccgaagttcaaatcccagcaatcacatggtggttcacaaccatccataatgagatctgactccctcttctggtgtgtctgaagacagctacagtgtacttataataaaaataaataaatctttaaaaaaaaaagcacgtcaaggaaagagctacttccgtcctttctctactaatagcactccgtggcagaatgggactgcctagatctttttgaagtccatctcttcatgtctgtttggatagagggtttcttatcacaagatctagctagcagttttaattataaatgacaagggcagatttagtttgaagttgatagagggagagtctattatctctgaacaagtacgaactaaggtggttgaaggttgacttggcaaggtgacttccctttctctgtcaagttactgtttgcttgcattaccacagggtctccagtctcttaccagacagcttccaaggccttcctaactcatcttgtgtgaacttaggtgtagggtagaggtgacttcaggcgggtagagatgcagtcttcgttggactctacccatcagcatcatttctctgtgtaaagaagtatggggaagagtgaagggataagactgtttcttcctctaaggattaaggtctcattaggagagctgatgacgcaggcatggacatgtaaagtgatttgtagtaagcaaggaattaagtcctgtctaaattccaaaggagtggacagagtgctacactgctaagggagaggctttctttaaagactccgtgaaagctaataccatttgggcacaagtggtacacacgtgtaatcctgtctcctcaggaggccgagtcagcctgattcttaattcaggctgtctgaggcttcagggacttcaaccccagcctgggaaaatttggccatgtctcaaactcgaattcaaacaaactcttccagagcctgtgtggcatataggaggcccagagttgaaccatcagtggcacctacatgttggcctcaaggaaagacgtgggggttgatgggaatccggatctgagggaaaatgctccaggtttgaggggctgacttgttagggccgacacagagaccacaggttttgagcatcgttcagaggtgcagaattaatttcaaggtcaggggcatgtgtgggtgtgggtgtgggtggatggcgtggtgctcatgagagagctggaaggggaagttggggaggacttccctcctgaggctggaagtctgggcatgattatcctggctccagtgagtgattaaaatgagtgatggcaaagctccctgcatggattttaatatttaagattctgctgccaaaggctgagctcactgctcttcagagtgtgactgtgaccaagggatgaagtgcccccctgttgggtcagcaccatctaggctgaatcccagctaacacctgctgaaggcacttcccatggacatctgcttctcccttctgtcctctagcaaaaggtaaaaggagccttggaggggtgcggctgtcacatttctgtcttccaggtctgcacctatggaatcatcctgtggattatgtgtggagacccagagcttgtaattaagccctgctgggctcgaagctctggctctctgaaggctcctgctgctttctgcttctgcttgagacctgctctctctctctctctctctctctctctctctctctctctccctcccccctctctgtgtgaatgtgtgtgtgtgtgtgtgtgtggtggcggcggctgtgtcagttcccatgtcagttccctcttgctgccagacgtgtcccattaatgctgattttccagcctagcagtcctttaatctttcagttgtggggttctgttgtggatctcattgggataaaatgaagatattggtgggctctgcccttcttgaaagtaccagggatgagtccgtttccttttcctgtccaacaggctgcttcattccttggctcatggtcaatggcactctcaaaagcagcagttataggtcaggttctaatacattgctgacgccaattctctcctgccttcctcttatgcatataaagagccgtgtggtgacgttgggcatactggaataagccaaaatgattgccctgttccaaaatcagctgattgtcccaaatgaacacatgctgctccatgtctcacactatgcttcaggtagtgaaatgctgtcaccatcaggatctcactatcagtacatgaaggtcttttgtggggagactggaccaggtagttatattgttttgtcttccatagtgggaacttctgatcatttctttgtcacaagaatgtaagcacaaagaatttaagatggacgctcattcctcattttgtcctgtatgtctgggtttagtgtcagcatgcctttttagcaatcaatttgttgttgttgctgctgctgctactattttaaaacaacagcacagagagttgttcttaaaagtttttgtgtatgctgggcgtggtggcacactcctttaatcccagcactcgggaggcagaggcaggcggatttctgagttcgaggccagcctggtctacaaagtgagttccagggcagccagggctatacagagaaaccctgtctcgaaaaacaaaaagcaaaaaagtttttgtgtgtatcaggatgtctgtttgtctggtgatgggggaagggaaggaccatctcaagttgttttaacattagggacagcaggatgctggcatctgcacacattatagatgtgggttattaactctactgtgacagaaaccagagaacgtccttgccatctacttagtctactatcttctgaagctacacgttacagtggctgtgactcagtagctttctctcagtgctgttggctctgagagcatccgacagtgttcaagagtgtttgggaagaaaacaagtgaacagctaagcaaacagtggaactcaagtgattccaaattcaggggaagtgcagaagttcagaggttagatagcaagcattaaaaaaatgaaccgtatgcttagtgggaatctcatctctggaatggattcacttaaaacacattttaaagattaatttatgtttattttatgtgtatgaatgttttcctgagtatatgtgtgcctgtgtaccatatatacacagtgcctgcagaggccaagacattggatttcctggaactggagttcatatggttgtgagctgtcatgtgggatgggatcagaacctgggtcctctgcatgagcagccactgctcttaaccatgagccatctctccattctcgcaaatgtattttcggtaaattgtctttcttgtggcagagggtacagattttatgtgtattacaatttccttctgacccaataactcagatggtattatcgccatatgaatataaaaaaagaaaatggtgtcttaaagtgatatgtggttcagccaggcatggtggtgtacacctgtaatttcagcacttggaaggctgaggcaggaagattgctacatttttgaggtcagctcaggctatatactgatttataggccagccagaaccacagagagagtctttctctttgaaaagtctaccctgtcaatcaaaaccttgataaaattaaaatagcagggcttgtggacaacattgaaaatatgaatatacctgttcatggcaccacaggaagtcaacatacatgtttaagatgagagcatctgtgaaccagagatttgttctgaaaatacctctcagacataataatcactttggtctgccacttttttgttagttgtttgttttttttttgtttttttggtttgtttgtttgttttttcaagacagggtttctgtatgttatagccctgcctgtcctgtgagtgtttgaagaccagctggcctcgaactcagagagatcagcttgcctctcctcccgtgtgctgggattaaaggtatgcaccaccatgtctgactttttgttagttttatagatatgaattaaattctgtggagaaaacaattttctttacccacccccccccgtcatcagagataacacattgttaaatagtttaattagtttagaatgtactatcctgtgctcgcttcggcagcacatatactaaaattggaacgatacagagaagattagaatgtactatcctaaaatttagaatcctgatattttgaatgctttttggaaaacacatatttctggaagactcgggtttctggaagtacagtatccggtagacagataggtatcctggcagtgtgataatgccctatttcaggtacctaaatcttttatgttcaaatggataaatcctcccagcttctgtttttcaaggaaaatatttccttcaagaaaataacttatttgttgggccaaagccaggaggagaggtaagaatgaaaaggcccccgtaatatgcttccttttcttgacataggaaaggctttgcatggtgttttatggaaaaagaagcatcaacattaattcctacaaatagtatatttaaccaacgataaaattatttctgtgtcaggcaaagaatcactgagcagggtcccaaagaagacccagggctgcttgcctgattttgaaggggtcgctctgggtttgccgtcttaggtatttgatttatttactttttttgtttttgtttgtttgtttgtttgtttcttttttctttctttcttttgttttttgtttttttttctgagacagggtttctctgtatagccctggctgtcctggaactcactctgtagaccaggctggcctcaaactcagaaatccgcctgcctctgcctcccaagtgctgggattaaaggcgggcaccaccacgcccggcttgatttattttttaatttctagtttggcctttcacaactgagaggttcgaggacccagtggtgacttagagcacggcttgtaatgtcccatgtagttggtgtctatgttgcctctccctctccctccaccttctttttagatttgatctctggaagctcaggcttgctcctgacttgggggaaggccttgaacttcttatcgtcttgtttcttcctggagagttttgggcttacaggcttgtaccacccgcacccgcgtccccaaacccatcctgtttggtgctggagatagaccccagagctttgtgtgtgctgggcaagtacatccactgccttcagaaatactacctataatactgtattacttctatggttttataagggtttttgttttcattttgtcttttttgttttatctttttgccttacctaaaaaaaattttttaacacagtaccagtagtttgaatatattctttttaaaacctttgaagattttttttgtttgtttgtttgtttgtttttttcttttttttttggtggtgggggttgacgcttcaagcagtctaggctggtcttgaactgtctgctgaggggaaaaccttgaattccagattctctcgactccgccttcacttattaggattataaaaaaacaggagctaccacatctagctcatgttataaaaatgatttcaatgattaaatctaattaattttattttttttctgctgagatacaccataattgaatatctgaaggggctacaagtgcatttcaagtctatccatccgtatccctagcacctttgtactttgctgatttgggcagagtgagcgtaatgttacagccagagtcaaagggcttacggatgagctctgctgtgcagtgtagctggaggctggactcagagggagctcctgtgacctctgagttgctgaggcctctttgttctctcgccccagtgagtgcctgggtgggactgggggaggcagacatttaaaagaaggggtgagtgttgactaagaaatcaggcttcgcctcccagaacacccactgtgactctgtgcaatgtttgactctcagcaaaaataccacttgtattctgaggccttttgtttcaacgacataactcaacaaccaaaacagcaagtttcctacaattgaaaagaacagaggccacgtagaggccaagttttgccttctaaggctaaatgcacttggttttaatctcttcttcctcaagagaagagccaggagactggccctctggtatttctaggcacggcttcagtaatatggtttctttctaagtaaggacttttgaatcctccttgttttattacttctattgctccactatggaagaagggcaggctgggacagtttactatccgtcagtgtcccgtatcccgcttccaggagccctctttctcttctgaggctgctcatgttgtctgtgggaagctggatcatatttgtcgataaaccctgcgcatatcacttgtatagcccactgcaatgtgaatgctatgcaaatatttgtttagggaggaaggacaagaaagagtgcttgtacatattcagtcagacacaagattttctgaccactttggacatgcagctggttgattctgaagatgtggaagtctcagattgggaggactgactgtgtcttccactcgtgatggaagctgaggacctggactgaggtgtatgctgcacctcttgtcagctgcacctcttgattgttgtaaggagtaaaagaagacaatctaaatgaaaagacattgtgtagaaaaacaaacacttgcacattacatctgattaaagtctagaatgcaatatataaagatttattggacagccacaggcacaacgcaagcaaacacaactgtggagtgggcaaaggaatagctgtctctctaaggaagatacacagatggccagttggcccaggaaaaggtgatcagtagcattatggacatcgaaattcaaaccacagggattccactttgtacatactagggtgggtgtgattgaaaaacaaacaaacaacccctaaacgtggcagagaacaggacttgaaaaggctgagaagtgttaggcttaccctgctggtggaaatgcactatgctcttggagttttctgtcagctcctaagagagttagttaggtgtcaagttaccacataacagcaatttctgtatgagttatgcatttaaaggagaagaaaccctaaggccacctcgaaaataatacacagatgcctgaaacagctacccatcataagtagtagtagtagtagtagtagtagtagtagtagtagtagtagtagtagtagaaactactaaaattggcctggcagctgatgaactgccaataaatcaatataatcaataaaagatggcacagagtttgctcacaaggagacatgaggtcctggcgagggccatgctatgcatggttgttgaaagaatactgctaggtggaagaagcctgcagaagcagccacacatcatcacactctatgggatgacgtctctctactgggcaagtgcacagggatagaaaggagattagtgttgatgttctcaggggacaggtagggcagggaatccagggatgacagctcatgagtatggaggcggggggtgggatgggtggggggaggttcttttaggaataatgaaataacatgtctgacacgagtggtaattatggcacaactttgttgaatgtacagaaacactagcacgttaacgcctctgtgtgtgtgtgtgtgtatgtttaaagaattatctacttaacgtatataaatatactgttgctgtcttcagacacaccagaagagggcattggatcgcattacagatggttgtgagccaccatgtggttgctgggaattgaactcaggacctcagaaagagcagtgagtgctcttaaccactgagccatctctccagctgcctgtgtgtgtgtttttaaaagtctgcatttatgagcgagtcctgagatgatgagatgagatgagatgagatgagatgagacgagatgagatgagatgagatgctgctgaattattgttggctaatgtgtttttcccatctgtacattctgcaacttcttactatttaagtaagataaaggacttctttgcaggtcatattccatgtagagatctttttcttttttgctctctttggtttgatttattagatggggcagttcaaaaagttgggatagtcccgtggaattcatctgacgtcatagaacttatgcatgcttccctttgggagaggggttgtggtgtgagacttgcgggagtgaggtacactgataaccacacctggggtctcttaccaggtacataacatgcatttcagacagacatcagttcttggtgatgtagatcagtggttgtaccctctgcaaaaagtgttgatgtatcttgaagccctgtgctcctgtctgaaccattcacagatgagacttgggggcatttcataattttcaggtttaagaagtgtttgtgctcatgtaaagtgtagtgttaataaatattgttggtaaataatattagactatttacttatggagtacgctatgaatctgaaattaatctggttcataacttccccctttgtaagttggctttgaaggatattctaacttcatcattagcagtaccaagattatgtcacagtctcctagtagctagacatcatggtgaccctctgagatctttgtttggctatgcaacctggttagatttgtctttgatttctgtgtgtctatacactctgtggtttttttgctggcctctgactcttcttatttccctttgaccttcagtagaactgtggctctgactctgtatgccccagtaggcgatcaacctggctggtgtgtgacttgctatggggggaggggtggcacacagtgtgtttcactcacatagagggaagcaaggtggcatgtttcctccactcttcctctgtgtctggtggctgcccgggacacctctcttctggtcagggcacagaataatttctgaaagtcaccacctttggcctgatagcttgaggtcatgctttctttctccaggtaaggtggccacgctttgagggatttactgtaggtttaatggggagattagtattcaaattgtgtttacttatacgagacttacaaatggttgttgctttgctctctggtctcattctgctttgaattttttgagacaggtgattgtgttcagaatatagcattttttttttttaaattgtagtgttcagaataagtcatttcagcaaacactgggaattcagctgttagagagctttgtatacaactgtagttgccttggttcaactctttgattaagattccactttaaaaaaaaaaaagatttccacttttagctgtgtctggtaccacagtggagtgataacaggactgaagtggtgaaggcaatggggtggatcaggagttcaaggtcaccctcagctgcatatgagccaccccgggctctgggataccctgtctccaaaccccaaataataaataaataaataaataaataaatttatttttctgaagaatttaccaaagtaaaagcagtcaaagcagtctagccttctaattttataacttggcttgtaaacataagttgttgttgttgttgttgttgttgttttttcccccttaaatatctttttaagctgaaagaggtttgtgcaacactcttggattttggtgtctgtagtgtgggaagttggaggtaagggtggtttctgtgtttttttcatcacaggaggtatggacggtttctgttctgggtggttgtattggtctggtaattgtggggcttctgcctgtgtgtggccccatagcccacagcatctactccctggagccacacatctctggttacagcaagcatagctgttcctggaagctggagaggcagggcaccaccatccagtgctgttttggcttgcccttattagtagtagttcttggttctcccactaactggcctctgatttcttcatcacagaatactcttcgcatgaatcaggatcctccctgcatttataaccactgggctttggaatgggagccgatgagtcatgcgatctctgagcaacggaatgagatgttcctacttagatcaatcagggtcgatgtcctcctctaatgggctttgagctgcttttctcgcttgccttcagggactatttttatacctgatttccttgcttggaatgttgctagaagtcagatttttatcttagtcaataatgagaaaggatcttcaaacacgtgaatggatgggatggcaaagagagtcagcaggtcatcttgatgtttgtgactcgaattatttgcacaagtatgaagacgtaatgtgtataactggttcatgctcttttttttttcctttgaagtgtacatattaacagttgatatgaaattttggtaaatgtagttcattgagacttacagaacacactaaataagcccattcagtaattttcgattggcaatctgtatcaggaactacaacttttatgttgaccagattacatatttcttgacctcctgaactcacctcaatgttatcaacataagtaagcattggtgtataagagggaagaaaacggggtgctttaagtgcttgggaggggggaggggggagtctagaatctgctttgaggaaaggtataaaatggcacctaaaaccttttttcgttcattcattaatttattttacatctccatcacagtccccctattctccaggtccccctctctcacagcccctccctccattccccctagagaagaaggggttccaacccaccctggcacatgcctgtggcatgtagaatgtccagagagggtgagaatggtgtgaagactcgagggaaggagaacagcacatgcgtagatatctggggcaggaagggctgggtctttacaggtggcacaaaggccggcgcttagagcaccctgagaagatggggcagggtggtcaattggtttgtagccttgtaaatgtgttaatttggtttttagaaattttactgttcagccagctgctctttagagagccagtctgagaggagaaagaatagaatttaggaaatagtgagagatggtgttggctataggttggaggaaagaaacgacaatatcttaggatgatggatgtataagttttatctcctgttgctgtgataaaatgtgcccccccaccgccaccccatgaaagccagaacagggaggatggaatttaagcatgcataattatgctcagttcattttgtgtgcttttacacagttcatggtcctagactagggaatagtaatgcccacattgggtgggtcttctgacatcaattaatataatcaagataattccttgattagtcctcaggccaacctaagctaggcaatctcgcattgacactgccttttcaggtgattatagattgtgtcaagttgacaattaaaactaatcatcccaggaggttacagtggaggtgtgcattgatagactgtgctgaggagaaggaagccactgttacagatactgacaggtccaggcaggaataattgaatgagtgaaggtggaccagtggatttgagagaacatcagtcttcattcaatgtgttaatgctgatacaagtctatgctgtatttctgtggcagtgtcaggaagatgcttggtccatatatgaacccttccatactctaaagactctatgagttgtacaaaatagagccatagcagacaggttaacaggagaacacatgcataaatgtattatgtacacatgcacatgacagcaacacaaactataagatgggaaaaatgcctgaggttttcacttgcacaggacctgtgtgtgaattcccagggctccgttgtctcctgcctgtaatttcagaactaagggatgaacgcccatgagactgaggccattctgaactacacagtgagttccaatctaaactgggctaaaaacaaaacatactctctctctttctctctctctctctacacacacacacacacacacacacacacacacacacacacatgtatgtgcacatacgagaaatagctaggtagggcaagtgataaatacattaatttccaggctacaaaatatgaatagtgcttaaaaatgctatcattaaagaatacatctaaaataataaatttattcataatatattttaaataaaggttatatttgctatctgtcttcattttttgtgaaaaacaaaacaaaacaaaacaaaacaaaacaaaacaaaaaccaagtgggcaagaatgtctagaaagctgtgtaaatatgtcaatatttcacttcctccttcaggggagagaaagtagtttacattttcattttgtttgggtaaatcttcataaatatggttagttgtacagtataggtaattttgcaaatcaaaaatgaaatgataatactaatctttaaaatttggtggaggaagttatacagtataagacttggctctcgactttggagccaccaagccagctgatacactagcaacattgtgccataggaaagctgctctctgatgcctctgaatagcttacttaactgcacccagtctgagaaggagtgacatccactgtcccccaagcagtttcagcagggagtggcttaggaagacaagtacgctaatcatttggggtaacagtgtggcagcttggtgcattcacaaagacctgatttgcacatgtctacttgactgggctccacctaactcaggcctgagggttaaggaatctgcattttaagaaaattcttcatgccgggtggtggtgcacacctttaattctagcacttgggcggcagaggcaggcggatttctgagttcgaggccagcctggactacagagtgtacagagtgagttccaggacagccagggctacacagagaaaccctgtctggaaactccgccccccccccccccaaagaagattcttcatctaatacaggtgttcaaagagcgtgggaatctgcagtacattgtcctttatcagatgatgacagattttatttataattaacccttgtgtgcatgtagatgcagattatagtagcatttactcttgtagccatttactggcctttttctttcccttctttacagcaggaatatcaaagcaggtagtttaaagcatgcaggtttgtccaccttttggtattgtgatacattgtagcctacaaagttcatgctggagaaatatacagtccttatcaaaaagaagaaggaggaggaggagagggaggaggaagaaaaaaggaagaaaggaaggaaggcaaaaggaaagaaagaaatagaagagcaaagagtctcgctatattttaagtgagtttaccattttgggtttggccccaattttacatgcatccaagactatcaaaacacagttcctggggctggagaaatggctcagctcttgcaggattcagttctcagcacccatgtggtagctgacaatcatctataactccagttccctgggatcggatgccctcttctgacctccttgggctccatgcatgcgcattgtgcacatacatacatacatacatacatacatacatacaggcaaaacattcatacacataaaataaacttaatctaaaataattaaacaaagaaataaatacacagtccctgaacctggcaggatggctcagtcattaagaacatttgctttgaagttatgagggatggaagttcagattataactccaaggtaactctcctggcttccatgcacacataagtgcatatactcacacagaaacaaacaagcacacaagcacacccacaaatatttagataaaaataagcccttaaaaacccaattcttaaagtaggaatatgggttctttgttaagggctattgaaggtaaggtggggatgggtttgaagtgaacacaccagaatctggcaagtaaactgttagtaaatgttagttttagtatgagaacacacgatttgtggctcgagcccatgacttcctaatcaattaattcatctcattatttcagtttccagtcttttcggtatttcttcaatcaatgtcacatggcctgttacatttcgttcttattaatgtcaattttagagagggagagtgttctcatttcatcttgtactccaggagtattcctgaaattcttcccttagattgacctcagtggcattataactgaatttaatggggagtaggaaagtttctctgggttttgtgaagaggaattttttttctcaagtcaactttatagatagaaaagtcagggctggtgacttgcttggggacctgactaagggggaagggcaaccaacagcaaggaggtcactgtcactctcggcaaggaaatagtagctttcatggattgtccactcagtgtgctcagtgcctggccagaaatgctgtgtagccatccctgtttgtaagagcaggtgggtgtcttagccattcaccttactggagggacaaaaccccagaattatcttgtaaataagaaggtggaaaggtgcctttaatcccagtacttgggaggcagaggcaggtggatttcagagtttgaggccagcctggtctacaaaagtgagttccaagacagccaggaacagagaaagcctgtctggaaaaaaaaaaaggtggaaaggttttgtgtgtgtgtatgttggtaaccagccccattcactacagtgaccttgaacagatatgttcctctttcacagtaaagccaattctgattctaaaatttaggttacccggtgctaatattcctaaggaacatattaaaccttggctgttgttgagcacaggttgaggaagaaggatcataagttcaaggatagcctgggctatagggtaagaccctgtctcaaagtgaaacaagagataggttgaaagtttggttggaaacaaaaagactctctttattgtttttttttttttttttttttaatttatttatttattatatgtaagtacactgtagctgtcttcagacactccagaagagggagtcagatcttgttacggatggttgttagccaccatgtggttgctgggatttgaactctggaccttcggaagagcagtcgggtgctctaacccactgagccatctcaccagcccatctctttactgttatgtggaggaatggttgcactagagcaccctgcagtctcctataaaattacacttcggtggccagagagatggcttcacagttaagagcatgtattgctcttgcacagggcctgagttcagttcttagtaccaacatctacttgcttgcaacttcctgtaactcccagttctgggggatctgacacctctggtcccctgcactcacgtacattacccctgccacaaatacctatattattcaatcaatgaacagagatcacactgagcggtgtctcacatctataatgcaattactcagggggctgtgctaggggcattatggggctacataatgggttctagattagcttgaactgctgagtaagattctgtctaaggaaccagaaacaaaaggcaaattaagactaatcacactgacatggcaatgaaaattgcttgtgcttttcaccattatataaaattttggtagcatgtatataatattcacagttttaactgtatattcatattgcaatgtgcaacaattacaatcatctttcccaaacttttttaatgttacaaagcttaaactctgtatcattgaacaattaatttctctctcacctctcccctcagcccctggaagctacagtatcgatttttatctctatgtgtgtgactgctttgatcgtggatttacagaacagctgtgctcatgtgacaggaacatgaaactcgttacaatgacccaagcgttcatccatgtgtaacatatctcataggatattgtttgtaaggactctgtaatagttcatgtcttgctaattaattctattgaagaacttttgtgttggtttgatccatttgctctcatgaatagtaagtaccttttgtgagcatgagggtataaagtccaagagtctgtttcagatcctgtgttttatttcttacactgttttgagtttgctggtgccgttgttgtttgagctttagcgactgggttgtattatgtaacccagtctgctgggcagccccttgtccaagccctagagtcatggtggttggttcactgtcatccagcagaaactgctaaatctcgattgaatgattaaacatccagatcttattgttaagggtcactcattcaaacaaggaaaaaatctttcattatgaattatagttgacacaatctgtgagatggaggaaggaaggaagagattatagtgttcccagaatgcactggctgttgcatagctttggagcagaaggacacacgtccttggcagctcatcaggaaggaagtgaagaaggaaactggacatttccactctttgaaaagccacattgctatgagcctggatgactgactgaggtcctgctctcgtgcctaaatgatttaacagtgagagtgttctgaaggaaaccccagccctagagagaatacatttgttgtctcctaagagcgatccaacgataaggcttctccagtctaagaaggtggaagtggaaatttgatagggttactggctataaggtcacatagttcagaaaggcaactgtactggctagttttctgtcaacttgacacagctggagttagcacagagaaaggagcttcagttgaggaaaggcctccatgagacccaactgtaaggcatttcctcaattagtgatcaagggggaaaggccccttgtgggtggtgccatctctggactggtagtcttgggttctataaaagagcaggctgagcaagccaggggaagcaagccagtaaagaacatccctccatggcctctgcatcagctcctgcttcctgacctgcttgagttccagtcctgacttccttggtgatgaacagcagtatggaagtgtaagctgaataaatcctttcctccccaacttgcttcttggtcatgatgtttgtgcaggaatagagaccctgactaagacagcaaccatgaaaagaaggtccttcttgtaggcttagatttttaaaaacctactttaataagggttcttaactggctcaacctcccttgtagcccaccactcactagagttggtggggaaagaaaggttaataggaaatggggtctgtggaccaatttagaaatagttctttggggctctttcagtcttggttgtcagctattagttgagcaccactctagggtcagcaacagcagttcaatcctgaagaaacctcagagctccaccaattggcaggagtccgaggaagctgcaagaagccactagagtatcttgaagttctttggagagttccttcgtatgaagccatgacaatcaaagattagcaactcaagaggctcctcccattgtctgcggtcatatttatatcctttgtaaacatcacaaatcctctcacatgtccgtttcaggaaaacatctctcacctgagtctgcttcagcaaaatatcccttcacctgtctgacccagcaaagcatcatatgacatagcggagtttcagaagcaaccagaaatttccaccttactttttaatcttcagctgtgaaacagagctgaactttttttttttttagatagggtttctctttatagccctggctgtcctggaactcacattgtagaccaggctggcctcgaactcagaaatctgcctgcctctgcctcccgagtgctggggttaaagttatgcggcaccaccgctggctacagctgaactttttgatgccttcaagaggcatgtgttgggaagaaaaagaaagagctagttcatgcagaagccagtaaataaaattgccattctctgtgatggtgtatacaattttcttccatgtgcaccagtgttgtgcctccttgtgtgtctgtgtaccatgtgaatgcctagtgcctttggagaccagaagagggcactggatccactagaggtggaattatagatagctgtgaactgccttgtgggtgctgggaataaaacccatgtcttctggaagagcagccactgctcttaacaactgagccacatctccagcctctataattttttttttaatttatttgtttagttttttgagacagggtcttataatgtagcacaggctagtctctttacttgcaacaatcctcctgtcttatcttctgtgtgctgggattagagacttaccacatttatggggtgttggggattgaacccagggcttcgtacatggtaggtaggcactatatcggctgaggtagatccctgagaactataatttttgatagtgatgtcaaggataatatattaatatcagcactctagcggaaagatttgagtttgaagtgggatcagagtttgcctgcactatgggtgtcatcttgtccttgccccgacctatcaggcatttccagaaataaaaaaaggttttattagctcatgggaatactttacatatcattttgtgccacctcaaagtgcagaggtctgtgctccctgggctaatttctcaagaaggttcattgaaagaaatcttttctcttgacttctggaagggcacacagcgtccttcctgacactttcccagcttcttagaaatatttatcttggacagaagattgcactttagtggacttgctgctttgaaattttaattattttaaattacttgaaaataatcatttttagtgattcttctcctcacgtggtgaacctgtggaggcctgaggagtctgtctttccacctctgtaaggttccagggatgaaactcaggtcatcagactggcaaacaaagtgactttaccctccaagccatcttaccaacccctcttcatttggttttaatttaaggctcaatataaaaaccttcacctagagaaaagaaaaaaaattctgaataccatttaaaaatttgaacgcatttgcagcaggtgacatgccattaaataaagcacaggaacaaatggcaaatgtgtcttgctttccctcaggtttgtcttgcttttctgaaagtgcttaaagtcttggtccatgacttgttcgtgatttctcttgtatattattattattattattattattattattatcattattatttatagtttctatctttataattgtcattttgtctgttggtacttgagggtttttttccccctgaaagttgtaagctgtgtagttttgtccccctcttgctcagtgtttctctactgagtcaacttggagatgtatggtttccatagctgcagttgttttatacctagttacatcaacagactggaaagtaatgcccactggaaaatcagatagaaatataagcagtttaatctggtgagtttctgtttaacaaatatatgagcttcactgtaaaacagagtcaggttcatttgcttctaactctccttttgacctctgcaggggacccttcttcttagctactgacacctaagcatctccctccagtcttgatcctgcctacctgtctgtaattacagatacagatggggcgccttattcttagaattcctatcagcatagacagtcagacctgccaggcaagttgtgtcttggtcaccaatctttctgcttccttacatgtcaaatgggaggtagaagaaaatgcacttttttataggacagacaacttgagatgctgtagtatgatttcttataacactgaaaaaatatagaaattaacacaaatgagtataagaatttcttagaatctctttagaaatacagtggtattttatttcttggttttgcagtcatgcatcgtatagtcatacgtacatataatgtttaagggaaaagctattcttcaagggtttggtctctattgcttccatatccccctttcttattccttttctcctcagccctgcagcctttcagaggtttatcatggatggctctgaatccatctatacctatacctatacctatacctatacctatacctatacctatacctatacctatacctatacctatacctatacctatacctatacctatacctatacctataccgcccccgcccccatttcactaaagtcaccttcaatcatgtcacatgcttgcacagtgaaagcacatgccttataccactctcatttcatctgtttgcattcattaggacttgcctgcggctcttcacctttttataaatgctctttctggccatttacatgcctcaaacaacaatgacgaaatatctttcctatataattctgaatatatatctacctaacatagtagttacaattgcctattgttttcaattcctgtcttatccttccttgtcaacaataatcatgctttctttttgtgcgtgtgtgtttgtgtgtgcacagtctaccaaagcacatgcatagagaagccataggatggcctgggtgccattacttaggagctgagaccttgagctttccagtcaatctggccaatcagccccaagttccaacctgcctctgtctctctcatgctgggatcccaagcctgtatcaccatgcttggattctttttaatgtgggttttgggagttgaactcagttcctcatcctttctgcacatgtacgttacttgagctatctgtcaagtccaaaaccactgccttcttgaaaatgctaatgatgcttgattttggaatcatgcatagtagacactcggtatagtggtttgaatggaaatactccccatagcctcaaatgcttgagtgattgattgccagttagtggaaccttttgggaaggatgagggggtgtggctttgttagagtaggttgagctttgaggtttctaaagcccaagtcaggcctagtgtctttctctctgcctgctgatcagtaaatgtcattatttggtcttttgtatagtgttttctataaattaggtatgaaactaactgccatttactgttactagccattgcaaagtttcttttgtttaatcatttactggggcagaagttctataaaaggacctaggctaaagtaatcatttacactgtaaaattttctgtttcttttggttgacaatattagctccaagtgcctgacaaggaggtgtatgagtatccatccatcttctagggattgaatggaggaaagttttagataaaatgttgccaccatcattggcattcacaagacagtcaatatccgcactgggctccttagctgtcaggccgccagttagcaggagcgataagccatttctctctgtccttctgaagggcaccaaggctttagttacagtgaatacaaagatattctagagctgagctgaccttcttcattgttgggtgcagggcacctgcagtgtggctgatccagattcagatggtgctggaaatgaaatacacattggatcacaaagtcttagtatgatgaatggtgttagatggcagtgcacagtaaagcattgagtatgtgctgaaatagcattttagatgtagtgggctaaataacaactgaacctggaaacagcacgtatactaaaatgagctttacttttttttttttttttctttttaagtgtggctagtagagattttaaaagtttatatgtcagggtaggtctaaggtgcagggttatcgttcctgctacttcttcagctgaggctggagaatcgtagcctatggtagactgtaaatccaagaccagtctgcacaactagtgagacactatctcaaaacaaaaaacaaaacaaaaacaaacaaacaaacaaacaaaaaacagtataaaaggggctggagagatgactcagcggttaagagcactgactgctcttctgaaggtcctgagttcaaatcccagcaaccacatggtggctcacaaccatccgaaatgagatctgatgcttcttttgtggtgtctgaagtcagctacagtgtatttacatatatataaaataaataaataaatctttttaaaaaaagtataaaaactgggctggtgtgggtggatggagagaaggctgagtggttgagaacactgaccacactggccacttttgcaaaggacccaggtacagttcctagcacccacatgtcagctcacagctggctataacttcaattctaggggtctgacaccctcacacagaaatacaagcattcataataccaatgcactaaaaaccaatttaataaacaaaaccaaacccaatcagggctggggattcagcttcttgatatgtgtcctggtcttgactatctgatgaggtttcatgttaaatctctaacatcttcaaaaaaaaaaaaaaaaagaaagaaaaccaaaacaaagccataaattctataatgttactaatatgacatttctctagacagcacaatttttgcaataggatttggggtcatgttgtaattggcatcagatggctagaacctatctagctaatggctgacaggaccctcatggatttagcatctagactgaaggaattgttttctgtttaactgataatatgggatgtctagggaatatattcatcattcatcagtttattctagatgggaacaacggagacaccctgaagtctttcaggcttctgtggccatgaaccctctcctggttaagcccaaggctgcatcttaggtgctttccttttgtttatccacctttcattgtcacctttcctgttgctgaaagaagagcgtaccttccagcattcctaactcatgtagtggttcacttctcccaggcacttagtataagcagaattcagttacaccctggataaggctttgtacccagtcaccattccatccacattttgatctgtccatccacctatctacccaaccatccacctactcatccatccgtccgtccgtccgtccgtccgtccatccatccatccatccacccacccacccattttcccacatgtccactcattcatgcactgagtcacccacccatccacctatccatccatccacctatccattcatccgtctatccttccatccacctacccacctatttatcccggatagaggattctgaagtgagatattcctctgaagatatatatcagtgtgattttttttttttaaagatttatttattgattatatgcaagtacactgtagctgtcctcagacactccagaagagagatcttgttacggatggttgtgagccaccatgtggttgctgggatttgaactcctgaccttcggaagagcagttgggtgctcttacccactgagccatctcaccagccctcagtgtgatttttaaatagaaaactcaagtctgccttctcttgccagagatttaaatgtgatgtgcctggttggtctgacagggaggagaagtctcagcagttagggaacagagaagtcatcctcttattatttaaggagaaaaaaccttgcagctagaaattacatatttttgcctatttaaattcatgataaatattagctgtcaacttaaacatttgagaattccttgggcttcttgaagatgaacctttgacttaaagtaatagacgtgatgttgtgagtttcgtggctgagatctcctaattatatggtaggcattatatagggatgttaagataaaagatgtgaaatgtacacatatacacacacactcacacacacacacacacacacacacacactagataaatgtaaaacaaagatgaaaaatgttttatatatcagctatatagaaaaataatattgctatttacaaatggaacaagatgtttgttactggcagtattgttccctattttattttatttatttatttctttttggtcgaacacacttttaatcccagcacttggaggtagaggcacgtggatctttgtgagttcaagaccagcctggtctacagagtgagttctagccagggtgttaccaagagaaaccctaactcaggcagaaaatattttattaagatttttcaagacagggaaaatatttgtatatttttagacagagcctctttaggtggtccagtctggccttaagcttaccctcatctgcatattccttcctagtgatggaattaccggcttggatggccaagacggagcctccaagcttttgtgagtattgcaaaattttcgaaaaaaaatgtattgtgatttttttaaatttatgagggatttaaagaatcccttacaatatggggaaactaatagaataaatgaattggaatgagactgatctatgatgactgagtcttgtaaggatatatttctgttgttgacaagcagaactcatgccaaggctgacagatcactgcagtgttgtccaggtttagttttttaaaacagtttccatacatctcaaattatttgtagatgaaaacagatactctgccttgagatttcctagttagtaagagcaacagtaacaggagggatccaattgtataggaatttttcttcatgagtcaatttaatctcttgatagtcattttaaaaagtcagtgaccccactgctctcttcctgagtaacctccttctattccgtgctatcacaattgattaaaacaaggctcataacaatctggagggaagcatttgtaagcgtggtggagctgcccctcccaccagagtctttgttctggtatgtttgcaacacgtgtactgtgcttgatatttcccacgtggcaaactttctccttcagcatcagaggctgttcctaggttcctggggccacgcgaattctaggtgagccctctacctgtgagtaagctgaatctccacccccaaggcttaaggctttaagaattgatttctttccaaaaacacacctctagagagagggtttaaggcagtgtcaggcccctctaaatctcacacagtctttcaagataagcttagggagttccaggaagtaaaacaggaaagggacagttttgtgtttctcattgccctgacacccaacaaactcagcatttcagcagtcagtttggatcattctcaaggctaccctttccatatcaaggtgttttcctttttttttttttcttctttttgttctttgaaagtatgctcagtattaaaggactctgcttgggggagttccttgtctaggaaaagattgcatgttacagattattagatgatacctactatttctgtatgatattttaaatgcatagtctgtgaatgaatgacttgatttcatttagacagcacagaagacatcagagtagaaggcgcgtccgtgtctcatcatggtgtgttaagggtcactcatgggaagagcccagagaatgagggaatgggctgtaggctgagcattcttgttgcttctgtaattactgtcatgttctaggatgtgttaaatctgtgaatgaggctttaatttataaagcagatccgaggtctaaagcctccagccacacattccttatagtccacatttcttttctgaattctcaaattttgtggagttcaggttagggtgagctggttgaccactattaaattgcttcaaaatatgttaggaggatgctgctttccttttaagcccttttatcagggcttgtctgtctgtaatagatacagaggtgtatgtatgttatatatttttgtgtgtgcacatatttgtgatgcagagttaatgttcagtgtcttcttcaaccactatctattttttcggagctggggtcttttactggatccagaatttacctaattcacctagatcagggttctcaacctcacgttgtggtgacccaccaaccataaaatcatttttattgctacttcatgtaattttgctactgttatgaatcataatgtaaatgtctgctatgcactatggtcttaggtcacctctgtgaaagtcgtttgacccacagagggatcacaacctgttgagaaccactaagttagactgtctggctgcaaggcgctgggacccatcccacctctgcttccccaggacagggattaccggcacgtactaccatgccttatttttcacacgtgttctgaggatctgaacttgggtctgtattcttttttggccagcactggacctactgaccatctccctttcccctcatggcaaaggtctattaaaagatatttatttcattatacattttagcgggcgaactgaagtcattttaaaccccatagtctcattggtgtttcctgttttacagattacagcaataaaattctaggccaggcagcatcgctggcccttggatttgtatgagcatgtcaggagtatttaagaagagcaaaatatttagaagaatttggaaaagcagccttaaggggtttaacacatttttcttctcctaattcaaccccgtgcttttttccctaatggagagaggtcattgatgatgagatttgctaagacagcaaaggctcttagaagggaattctaaaattcctgtctaatgaatacattgctttcagtttgggaccctgaaagaatacacattgaggaggtagatcagctgcatgcattgttcttactatttcagtctgtatgtgatcagcttaataagatgaggggttatattgtatgtttctaaattttttttgggggggggtcaggaattaaaccaatcaattggtctgtttgatgagaattgtaatagaaactgtttgaatctttttctaagcattgttttattttttttattttgtgtgtgtttatgtgtgtgtgtctgcatgtgtgtgtgtgtgtgtgtgtgtgtgtgtgtgtgtatgtgtgtgtgtatatgccatgtgaatgcaggtgcctatgaaggccagaagagggtgttggatgctttgaagctagagttacaggtggctttgagctgcccaatgtgggtgctgggaactgaacctaggtgttctagaagaacagaaagtactcttaattgctgagccatctctccagtcccctatttttcctaatatttgcatttctttattttgtgaatatgtgtgtgcgcacatgtgccatggtgtgtatacagggattttcagggctctgttttctcctttcaccatgtagtagttccaaggaatcagagcagacgaccatgctgggcagtgagcatcttcacctgttgaggcatcttcccagacttagcctgagactattgaagttctttgatctttttctgtggaactggagttgatcctggatcctgaggcacgctaggccatcactctactgtgggctacaaccccagtgaggctcttcaagctctgtgtcattttataggaagttgaagggtaaatgataacagcatggcagattttcagttgtttctgagttaccaatgaggacatggagagcagttactctactaacaatggcttctcattcttttttttttccttagaaagtattttatttttaattgtgtgtgtgtgcatgtgtgtgtacaggaataaaagtgttcaaggacccccaaagcccctggccccttgatttggaggcagttttgagctgtccagcccaggtgctaggagcacatcttgtgttccttgggagctcccttcctggctgttcacattttttatattttccatgactgaaaagcctttcctttactgaaaatttgtagatcatggggttagagaggagaggaggggagaatgggcaaaggagtgggcagtctatagatgtgttgaatacaaatctttcaagttgtttaggggaaataaatacaaaagagtatctgtacattttggaatatttttgaatgcctggatgttatctttgatggccaaacactccatttcatgttgggcaccgagatatagatatgtgttgatttgactaaaaagttctaggctatgttaggggaaacactgctttgttcttataaacatctctttatgtgggactttattttcaaattttatgttattctacagtagatggcatagaaaggtaaattggtagttactcctttctgtggtcaacctacagagaaaactctgtacatcattagatactttaattactccccagcacctcacccttctggggattggaggcagagctttgggtgtgtgcacattcactactgctgggctatatcatgagacttaatatgatcatgaaagttgaaacttttgaaatatgtttaaaaataaaatattgttatatttctgtgaatattttccatttttcttatctttattgtaaaggattttgttttgttttgttttgtttgttattgttttaatgagtcaggatttgtcttggctgtcctggaattctttctgtagaccaggggatatcattgactcagagattcacctgcctttgcttcctgagtgctaggattaaggctgcatgccaccactgcttagcgttaaagaactcttaaattgtctgaacattatgaaagtaagagaatatttatttgtgaactttctatttcttcttcataagattaaaggatggtgggtacaacacaatttacaaaagtaaacctcctttagagtcatggaacatattattatgttaagtgtttcaaacacagatgtttaaaattaaattcttttcagccaagctggtatagtgactgtttataggtagatgtacctagtatagccttgcacgctggctgtattgtcagctctgtccttctgaagtttgatggtaaaggctgggacattctgtgtatgtaagcaagtctccttgattaatgactttgtagcatcgatcagataatgtataaagctggaattggggctgatgactttcttccctgtcctttctgagatgcaggtcacctttcagcaccattaacatcaagaatcttcttagtgtccttctatactgtcccctttgagccttagggttgctctccaatttcctttatggatctgcaaactctctttctagaactgttatatttatcacagggatggcctttcagttacaaattttccttctgtcttagttacttttctattggctgtggcaaaacattgtgaccaaagcaacttataaaagaagacattaatttggaacttagttctagatggttagaatccatgaccatcatggctggtaccatggtggcaaataggcaggcatggtgctggaataccttacattcccatctactgactggaagcagagagagctacctgagtgttgcaggattttccctgtccaattacattagggtaacaggaggcctgtgattggacagagaaaagggaggcagagctaagagttgcagggacagagagtgtagagagtgagaaggagaaagaaaaatggaggcagacatgaaccagtgtacctttaaccaaccacaaatagttatgatatcagaaagttagaacaattggaataaagcttttatcattatcaattggttctgaaatgattgtattagcatcttgttaattgagaatttattgatgcataaatctgattggttatttataagctttaagagtttctattctaccaggtaaatgggttttgtattagctgactgtggggtgggtggttgttgcatgccaatgagaggaacttgggaactccagccccaccagaaaattggcaggtagagacagagccagcagggccaagagttaccagcacatgtgcgggaacgtgctggtacctttttaaaatatttcttgcaacacttgagaatggcatgagcttttgaaaccaaaagactgcccccccccctagtgacattcctccagcaaagctacccctctgagtccttctcaaacagttccactaactgtagaccaagtattcaaacatgtgaccctatggggaccattttcatccaaatctgcacactttccataagctattagaacacgaatttatcacaaacttgatgttttagccaatcatctatatgaacaatggagtaaccaagataaagttaaagaacaaaaccaacttgagaggaaagatttatttggcttacatattctgagtcatagtctagttaggaaagccaaggcaggaactcaaggtaggaacctatgctacttattggcttgttcagtttgctttcttatatattccataactacctccctggtgtggtactatctacaatgggccaggccttcccacgttgattattaagaaaatgtcctatagacttgcctataggttaatctggtggaggcattttctcaattgaggtttctcttcccagataactgtagcttgtgtccaattgacaaaaaagatcaaccaggacagatagttgacttatagaagaaaaagtttatgttggcttatagatctgaagatcagagttgatgactgaatagacctttagtttctgtaccatgtggcaatagccaggaatgggtggcagagaaaatgggtggagagccaagggaggacgaagagaaagtagggggacctcttatccccttcatagacattctgccagtgacttaagtacttcaacaaggttcccctattgaggtttccacctttcccagtgcatccaaaggggacgaaagccttttaatacatggtcctttgaaggggaccttctttttccaaactataatactagatgtagtcagtcttatttattagtgagatgttcctctttaccaaatacaggcagtccctttgtggtgtgtgcttggctggcagaacacacaggtctcttcctgtgatgatgttgcctagaagtgtgctgtagtaggtgaggcacttagatggacccatggctttatggactattctgaatatagactgctttcagaactactcacaggtagttaagatattactttgtaggtgttcaaccaacaatgacttctgttagttttaatagaaaagtggagagtgcttgaatcatataatgggaaatgataaaactggactgttgttttcctgtttgttcatagttatgccatcattttgacaaccaaaaactaaatgccaggtaccttatttacttttctactgctttgacaaagcactgtgacccaggcaacctataagaagaagcatttgatttgaggctcatagtattagagggttagagtccatggtcatcatgatagggaacatgggtcagacagcaggtatgattgctagaagagtagctgagagcttatatctgacccacaagctcaaggcagagagaacgctaactgggggtggtataggctttgaaaccttaaatcccacccccagttacacacctcttctaacaaggccacacctcctaatccttcccaaactgttccaccaattagagaccaagtgttcaaatatatgagcctgtgggagctattcttattcaaaccaccacatcaagtctttgcggaaaagtttcacttgtcagcataacaatatatcttacaatatagttaatatttatttccatcttgcagatgaggactttgggggtggatgactcttctggttcttaactcagaatcccatgagaagtggatcagaatgtgatctatttggccctaatacacattgcttttgctgttggtgctattgtaccatgtagtctccttacatacttcatttacttggctcattttcaagcaatttgaggttcttcagatgtttggtgctagttgtgccttgcccaatggatttgtaattgagccagagttgataatgtttttaaattcttctggtttatatgctcattaaaatgtttgtttaagagggctggagtggctaagaccacatactgttcttgaagaatggctggagttcagtttctagcacctgcatggtggctgtaacctcttgtaacttcagcttcagaggatccgatgccctcttctggactccgtgggtgtttgcactcgcatgcatatacccacacatagacacatatatacacatgattaaacatggtaaattaaatattaaactgtacttaaagtttaaagccactgtgactctgttgctccccccattttgtcaagaaaatgtgttggataactgactagaaatcttatattccccccctttttttttctagaaggggtaggacttgtgtgaagaaggagtagctatggagtcttaagtttctgttgagtaactttttggtgggatgtgttggtctagcttcattacctgaaaggatctttttgaccctgaaagggtccattgtcatggggattcaggcaggagccttaagcacttgcacgtgtccacagtcaagagcaaagggagaattcgtgcacaaatccctactgttcagcttgctgtctccagtttcctatagtctaggattctaagtgggatgctgccattcccctgaggagcaggtcttcccatatcaactagcacaatcaagacagttcatcacacacattcccataagccagctggttctatagactccctgatgcagacatacttcccagatgatcctagattctgtcacactgaaaattaaaactatcacacatatttatcatgtttgatagtatacttaaaatgtaattgaaagtgttacatgtaaggtaacatctatagtgtagcacacaaacgtggatttcataccaggactcttgggtgagatgactgagtctcactttactgtagaagttggtggtccccatcagtgggttcattaatagctatgtgtcccttgcctcgtgctgtatacatgtcaatcttaagctgccaagggaggagatggttgtatttattacactcaccatcagtacaaacattcatcctgttcttgtcttttctttctctcccgcagatgaacacaatgatgtacagaagaaaacctttaccaaatggataaacgctcgattttccaaggtatccaagatgctggtggattttactgtgtggtcagtgcctccttctgactttagcatagctaaaaaagatgaccagttcctttagcatggttaaccatgaaaactcaggcatcctttctgccctgtgcaacagtgataggcttttcctcctgtgagtatggctaatagcattatccatcctctctctcctttacttgtctgctctttatcagcatctgcaaccagtggaacataatcattgctatgctcagaattgggggagagggagggagaggtgtggagtatggtaaaatgaggggtttcacattggctttaaatgtgaaatagttatagaaggtaggaatcccccacccccaccccttccaagtcttatatgggaacagcctttgggttgattgactctaagacaggaacttgaagaagaaaggtttctttggttatctttaaactagtctggaagatccctttaaagagattggtttattttattttagatgtattgcctacttgtatgtatgtgcacagttttcatgaaggcaacctcagaggtcagaggagggcatcgggtcccctagaattggagttatagatggttgtgagccataacctgggtgcttcaactgaactgggccctctgctagagcagccagtgctcttgtgtgggtggtaatctttccagtctcttggaagctcttttagtcgaaagttctgtgtttacaagttgtaaagtcagggccaccgacactggtgtttcctggagggaaggagaggctgacttacggtgactttaaatagtgacacatttcacagttgccccatgtctcacaggtcaggtacagtggcacatgacacttgggaggctgcatcaggaggatcacttggcccaggagtttgaggtcagcctgaacagtataaggataccccatctcctaaacaaaaccaaagtgcctatctccagactcagagatattaatttatttattactttattattactcaatttattatttatttattactcagagatattaattatttattacttgactgcagtgtttcttaggttttacagctttttgttgaaggttgttttatcttgcccttgagagtagaaggggtgtgaaaacggacagatagagtagtgaggattgcaggattttgggtcagggagctgacttagtgtgcaaagacaccttctgccaatcctcacatcttgagttcaatccctgggactcacgcggtcgagggagtgaagcaatgtcaccaagttctcctctgacctctataaattcatttccctctcttccccttgcatattgcatacacacttatacatacacatctgtcaataaattaataagtaagtaaatgcaatagaatgagtcactaagcggtatgtgtatacctctgtatgtgatcgtccgcaaaactgtgcagaatcatgtcatattgtttcatatgttatatataaaaagaattcagagagtgagccactatgtggttgctgggaattgaactcaggacctctggaagagcagtgagtgctcttaacctctgagccttctctccagcccaagaattcagagagtgacggaagaacacaagtgcttcacgactgatggcttcaggtgcctgattgtcttacagcattgctaggtatgtttggtaaatgttaaatggtttgattctgtagtggcaaggagcccataacacggacttgacagtattcacagttctgtctctgcatgtgttacattctcagcaaggtttagtgacagagtgtggccagagttgttccctccctgcaatctcctgagagctcatgtgggtgggattatccagcctggttattactggggtcatggccattttctatgctagaactagtgaagacgcatggttttcagcagtttcacgcacttattagggaaaggagtgccctagttttaacattgaaaggccattttcagagacttgggacaccttgaatgaggcaacctttaaaattgggtgaattctttttgccttactattgagaatggtgagcagaagatagatgaatgaaagaaggaagagggtatggaataatagaaatagctgagaaagaataaaggaagaaaaatcactatggtgatagtcttggcagtttcagggacccaaataacacagattctactaggaccacccttggttatttaatgaagctgatatttacatatgtgtattcatagaaaggtgaaggggtctctttaactcagaactgtgttgttcttttgtagcatcacagggggttgtaattccatttctttgtcctaggatgttcagagttcctgctgggagagtcaaagttactggacagagcctagtgagctggcttttgggctcccgcagagactgtgcggtcttgatttgtttagagaaaagatcaaaggagggatggccttgaaaacttactttgtcagactgtttccaacaggaagtcatttatctaagatatgatgaggatgtgactggaaggaagggaattccatccatgttcaacagccttcatccacgttctgttttccttccttctgctgactttagtctactagtgggtaggagagggcacagtacatttgtgggcttggaattcctatgcagtttaatactcattgggattgaaaagcttgcatttccatttttgtgtagcctcattgagcaatcctgaagctagtctgtctgactttccatccatccatccatccatccatccatccatccatccatccatcattttaatctatcatccatcattttaatctatcatccatcattttaatctatctgtctatctatctatctatctatctatctatctatctatctatctatctatctacctacctacctaatctatccacctatatacaacctacctgtctatatctcctctatacacacaggttgttaaaagaaaataaacttattatttttcttgtttacctaggcccttttgcatatattttgatgaactctgaaacatatttattttgtgtgtctgttggctctcttcactatgagacctccacatagacaccaatggtatcttctgccttttaggaatttgttttaaaaccgatatattgtttgatatttcatttcaggctacccccctatctagagtgtctatgagacaccatcttgttaattctacacttgatcttagccaaaaggcagagaagtgatcatcttgttaattctaatgcctgcatgcatccagaattcatttactcattgtattcactgatcaatatcttccgtttctaagttactattacgtatattagaaaaactttttaaagttctaaaaatgggaaaaaatattagtggataccttgtttggctcagtcctctggattagctctaccttccattacttagtactttaatttcttcttcttcttcttcttcttcttcttcttcttcttcttcttcttcttcttcttctccttctccttctccttctccttctccttctccttctccttctccttctccttctccttctccttctccttctccttctccttctccttctccttctccttctccttctcctcctcctcctcctcctcctcctcctctttccttccttccttccttccttccttccttccttccttccttccttccttccttccttccttcctcttcttcctcttcttcctcttcttcctcttctttccctattattattattatcatcatcactataattactattactattacttattatttggggatgggcactcctgtatctcaggctggcctcaaacttgctttgtagctaaggatggccttgaacttcagcacatatgcaatcagacctcatttttgagatgctgtggtttggattggccctaaatcttcatgcatggtaggcaagcaccctgtcaacctagctccatcctcagccctacattttgttatttgaaagtacattacagcttgatacattgtagaaagtagatgatgaaaattatctcatccatagataaatctgtgttatttgggtctctgaaacttccaagactatcatcatagagatttttcttcctttattctttctcagctatttctattaccccataccctcttctctctttcattcatctgtcttctgctctccattctcaacagtgggggaaaaggaattcacccagtttttaaaggttagctgaaaaggaattcattattgccatagagcaacttatgcattttcgcactacatttgattcccttttctgcctgtagatgcgtagctctttgaattctcctttgaagtgattgtggtactgtatgtgttcttccagtgaacaatgtattagtaaagacttcagaccaggctagtgctacatttgcctgggagttatcatcccatctttttgggaccttgtctttgaacatgtggagcactatgaccagctatgggctctttcccctttcttcttttccttccaagctttgatgaagtagctggtgtggcctcagaggcctggttgcctccttttcttttagaggatgcttaatgttctgctcattgttaactgtatttcttttgaaaattagaattgtgtgtacttaagatgtatagtgcgagtttgatctctgttgactttcaggcccttggcctgatttgctcttaatttctttgtttctgctgccaccttctcaccatcctagatccacattgcctgtgttttcaaccgggcagctttcttttctttttctttttctttttctttttctttttttttttttttttcttttttcttttttttcgagacagggtttctctgtataaccctggctgtcctggaactcactctgtagaccaggctggcctcgaacttagaaatctgcctgcctctgcctccggaatgctgggattaaaggcgagtgccaccacacccggcaaccgggcagctttctacagcctctgtgcatgctttccttttcagccccgttctagtctgctcatgggcctcctccttgcctgagttgaaatgccatttagtagtggataccttttttttttttttttttttgagcttaaagataagggtagatatgtttttgtttgtttgcttgttttttgttttttcgagacagtgtttctctgtgtagtcctggctgtcctggaactcactctgtagaccaggctggcctcgaagatatgtttatatattaaaagattatacctttaaagtagctataattcaaatcacacttccagagtgtactggctggcttggtgtgtacaagctggagttatcatagagaaaggagcctcccttgagaaattacctccatgagatccagctgtaaggcattttctcaattagtgatcaaggggggagggcccagcccattgtgggtggtgccgtccttgggctggtagtcctgtgttctataagaaagcaagctgagcaagccaggggaagcaagccagtaaggaacatccctccaatggcctctgcatcagctcctgcctccaagttcctctcctgtgtgagttccagtcctgacttcctttggtgatgaacagcagtgtggaagtgtaaactgaataaatcctttcctttccaacttgcttcttggtcatgatttttgtgcaggaatagaaaccctgactaagacagtttactaaagaaatgagtgacagtaacacagacatttttttaaatatgtctaaaactatatgttcagaaaacagctagagacagttttattggaaagagatatataataatatattaattttataatatataaaataataaagatatataaataaaaatataataatgttttgagtacaaaatacctagtgttatttcatgaaaatagatacaataggttgagattcttactgtttttactaaaaatgaaaagagtaggctggagacatgacttagcacttaagagcccttgctgctctttcaggggccttaggcacaatgtgggtactgggaattgaactcaagacctctggaagagcagccagtgctaagctatctctccatctttcagtagaattcttcatcctgaccctcaactacttaattcacagggaatgaaaaaacttaaacttgacttaaagctccatgattttttagttgtctccttaattaaggatgaagggcttgatcatattgaatgatatggatctaaaactatcttttcctaggaagtatatgtggctatacagaagctaaaaacaattccctcaccggaggacacttacgtgtatgtttcatgttggtgtatcttcccaagcagatgtctgcctattatcgatgtatatagctggaagtgcttgttaatttgcccgagtccacaatgcttcagagccctggggtcctgaaaggcagttcacactgcagccagtcatggtctgatgttttatagaggtgaagagcaaaggagaaactggctgcataaagggttaagaaacgctcgctcctgggtgtgctgctcatttatttacggcctcaggcaaacctgggggcagttttaagaggaactgtgttttatgtttttatccattaaacacccctggtcatcattgccttgtagtgtccgggagtatagctgtgcaggaatgttaacaaaaacccatgaggcaccactaatttgtgaattccctgctctctgctacacatttccaaatagaaataagccctcttgagactgttgcatggtgtgtaaaaccatgcaacaaagttttggactttctagttgttggagtctgatttgcatgtggctctcccaggggagacagggaagctgttgggcaatgtgtcctgacttggagcctgcgctttctttggctcactttcagagctgctcatctggcagagccgagagactacaaattacagaagctctttcatcagtgcagttaggggaagaatatgcaaacttgaaaatgcagaaaatgcatgtttctgctttcctccttttgaaaagacaaattcccatgggtaacaattgcagactcgaaatctatatccactgaacaggaggcagggctgtgaagcatggagcctggattctggtgtgagttgctgctcacatgcagttgccctttaaacagtctgggacacggatgtgtgtgctctgctgttttctgctccttgaatcttgggagttaatagtcataaaaatgggatctggaaaagaagatgctacagaatgtgtggtcagagcagctgggagcaccatccccctggagatggttcatctccttgtgagtactaccagaggcactgcaggcttccttgagctgaaccatgtgctacccattggttttgatactcatttcatgtcaacagagctaattattttaagagctgtatgtacttcctcctcctcctcctcctcctccaccacctcctcctcctcctcctcctccatttatgagtacactgtagctgtcttcagaaacaccagaagaggtcatcagatcccattacagatggttgtgagccaccatgtgggtgctgggaattgaacttgggacctttggaagtgcaataggtgttcttaactgctgagccatctcttcagcctcatatgtcctcttcttaaaaagacatttcaatttttattaattcccaaataccaatgagaaaaaataaacaataaaatattctctatattcttgaccaccatctttaggatactctggtggtacttttgtaagctagctagctttctttcttgcttgcctccttttgcctaaattctaattgatttatttttaattaaaaaattaggttttgttttatttcgtgtgtgtgtgtgtgtgtgtgctcacatgacatggagatcagaagacaatgtgttgtatcacttcttccctttgaccatatgggtcctgaggacagaattcaggttttcagtcttggctgaacatgattttggataaaagcatttgagctattagctgaccccatgtgacattttttaagaattacattttcatttaagtgtgtgtgtatgtgtgtgtgtgtgtgtgcgtgacagagcacacacatgttgtcatgaaggcgtccatgtgtgtgtatacttgtgtactggtcacagagtttacaattccttaagagactcactattgactaaccctatatttcctttggatgtggccctgccctacttggtgattgcctgtcattcatcttacgactcagtatgcctgtagacaagacttacttgcctggtgtgatggtctagaaaattaccagtgctgcacaggccaattcagattttcaacttgtcttttaaacaggaagccctgccaaacagcgagtcttgatttctgcatggtcatgctgtgctggcacagagcagggagcacctgctgactgtccatgtgtgacggatgcccatcagacatgcttcccttcatcatgtcatcacatgtgtgaagcctgctccctacagctgcctctacctctccttttgcttagcaatgattggtagcatctttgcccagatgcttttaaatgcagtcgcactcatgttccaggaaatagtactgatgttgcagttctcttgtcaaaatggtgggcccagggctggtactgagattgtccaaagatggactagtagaaaaggatgagagtgggggccagtcctaattaggcagtctaggactacagccatcatgcttctgtttattaggctttgaaagaaaaaggagattcttagagtgatggcttggtggttaagaacactggctcctcctacaaaggtctacagtttggtccccagctcacaacaattctgggagatccattgcccagttttggcctccatgggaacagcatgcatgtggttcacagaccacataaaggcaagagacccatacacataaaataaagtaaaaataatttaaaaagtaaaatgggacataagtgttatcttccccccaagttcaagattgcttttctgtaccgttttgtgtttattagtaagtaatgaaaatggtcccataaggagactggagagagtgacgtgaactcagcattttgccaggactaaggcacaaaggggatattcaccaaatatttatgtgattgggttattaaactgtattttctctgccaaagaagttgctgcaagtcagtctttgcacagatttaaatgtgaggttgatgttcaagatgaatcagtccttatttttattaaaagatgacttttgacatttctagacttgttcccagagccgatgtttacagcccacatcacaaaaaacaccagagatgctttacagtgggctgctgggaaatggtgccttagtttagtacagtgtggtgatttatgctgttgttctgagaagttgatatctatctatatattcatatatctatatattcatatatctatatctataatctatacctatatctatatctacagctacatctataatctatgtctatatatctgtatctctctagatttcaatctctactaatttatatctctctatatcatctacatttctgtctatctttatcccaatcctgcaattaaaatgcttgctcccctgtttactgcattgtatgccttggtaatatttattggctcaaatgttgagaagatggacttggagccaggttttgtaagatcagatcctggttctgtctctcacttgttatgccacctttaggtctcagtctcttcagttgtaaaatgggaatgttgaagctgttccctttagaccacttaggaggaaagaatatgtataaacaatgaatctaaatccatacaattctcagaacttaacctatgcacacagtaaatgctgactgttattgtgttagaacattttactatgtcactgtgtggttttgcatggtcttcaagttaaaatcatttttatatttacagaggagcaacatattatcttataatttgtgttaatgctatgaaatttggacttcagtgttcatgaaattagaacaaagttgtctttcagttggcttactcattcttgtatgattaatgactgttttcccattacaacagagctgagtagtttcaacagagaccacacagccaacaaagtctaaaatatgtactgacctgtccttacataagaagtgttctgccctcctgtgtagaacaaggaccctgcttacacaccagctacttgtacatattgggcggggacatgtcctcttgggtactactagtcctttctgtatttatgtggaacatttggaagttgcatgtgtcagggatatttagtgttttgtaatgacagtctaagtgtgcgctgagtgtacacacttggatatgtgtgtctgtgtgtgggtgcatgcatgtgttaattttcttttcttgtagtgctgggggttgtatcctgggcattgtaattgctaggcaaacctatcagtggactacatctctggctcctgctcaggctgagtttggactttctgtgtagaccaaaaattgtagttctcctcttgcatgctgggatatgtgccgtggttgtgggttccatgtatgtttttcccccagcacattttcagtccgtgtcctattgctaaaaatatatacacacaggtgtgtagagtttcttactctcacagacagttccttcttcaaggagtcaaaagtatttaaaactcccaaagacggtgtgactaagaagctgccgagtctacagagtgagatctaggatagccaaggtgcaaagggagaccttttctcagaatgaaacaaaactgaaatcaaaaaccaaaaactcggcggataaactaccaagaaaagaacctgccttttctagtgttttgatgctgaggcagctcgttaacattttcctgggagacagtgctctggacagagcagagaagaaccagggaacggccatgcctgtgcttaaaggacaggaacgaactagtctcaagtagagtattttaatatttttcaccattttaattgtaggaatgggtggaaactagtactgtggtttaaagattgatggcttgctgacagaatacttgcctgtccttgggggaatggttttggtgctgggtaactggatccaggggcctgagagtttgacagagcacagaagcttgcttgttgattgagacagcatttttctgtgtagccctggctgtcctggaacttgctctgtagaccagggtggctttgaacttacagagatccacctgcctcccgagtattagttaaggccatcactcacacataagttttacagcacagattttgatgagttccttgtgagagtctaggcaccatctcttactctctccagcggagccccatcaccttccttgtctgccattctgcagggatttggggttctttcttagagaattgactgccagtgtaccacacccatgtgtgggaacatggagggaagggcacacattcacagcacattctgtatagcttgtcgtcagtgatcgtctgagattgagaaacagaaggaagaaactgagctgtcgttaccatgagccttctgtttaagggaaaggggtactctggtcatccttgcgtttatatttgacttttacagggacagaactgcatcttcatggttttttttcccatcagaatattctagaggagcctttcttaaacttgttgcctgttaaacaattggactatttggacgtgagggaaaaagagtgtgccattaatggcaacttttagaagtcttcgtttgcaatggagcctttctggcatctgtgttattcctacataggtgtctgtgtgaattgtttttgaataggaaaggttcccacaagtgaccatttctgtgaatttgggactgggaagatactcattccataaatcccctcagatattatcgaaaatgtatggttctttcagagaagattattttatgtgtctgaatgttttgcgtgcatgaatgtatatacaccatgtgtattcctgctgcttgaacagttcataagagggctttgggtcccctggatctagaattgtggatggctgtgagtcaccacatgggtactgggaaccgcacctggatcctctgcaagagcaacaagtgatttcaattgccaagccatctcttctgcttcaatagtactttttataataatagaaagcatgaaggttttgcttgtggtataactgataataatactgggttaaccatttgaagtttttgttttgttttgttttgttttttcgagacggtttctctgtatagccctggctgtcctggaactcactttgtagaccaggctgacctcgaactcagaaatccgcctgtctgtgcctcccgagtgctgggattaaaggcgtgcactatcatgcccagcttccatttgagtttttaacaaacaagtgagtgtgtaaagaccaggtaacatgactaaagtttgtggctagtgtacagcacaacctgcttgtgtcaaaggacactgatagatatcaacaattatctgatatggggaaataatggaatttgcttcactttataataggcttttacatattattttgttgtacgttggaaagtgaatgctagtaggtggcggtcccctagataactcattctgttctatggacttgacctcttatctttctctttgctgcgtaagacatgagagaggattgagctctgtgtgagctcaggagaggagcctcgaagacaggctgttaacaagggcttgtccaccctttgctttgttgatagttcagaagtctccagtgtctctcgaaagtggcatctgagctcatctagtctgcttgttgctgtagttggtagagataatctatgtgtctacaacacggtggcaaaccgaagagatagctgtatttcagagacagggtccagcttattccccactgtttctgtggtgggccacatgttccctcctagagcctatgaacttttaagatacatgctaagaattcttaacagattgcacactatagttattcaaaaccgagtaagaattcagtaggaggatcagggaacccttcttttcttgtctcaaatttaaagtcttgcttcatatagtttttttttttttttaagtgatcacaaaaagatagttcttgattatgtaatatctaggactggcagggaaggacttttagctctatctttcatatgaagaagtgacaacatccaagaccattatagatttattacatcatggtttatgatttttagtacattctcacatcacattatactttttggtatttaacatagccggtgccttaagggagcttaggtaactgattaagtctcgttgggtagttcttggtcagactgtgtttgaaactgaggctcttgtttttttctgtgcaggaatttccttgtgtttgtggactgtggccaaacacggccaaaagtattttaaatgttttcatttttcttacatttctatatttattagcatgcacatacacgctctcactcatggcgtggtgcccctgagacagatggtgggatttcttctctctttccactgggtgcattctggggattgagcttgggtcatcacggtcaccagagagcgtatttgcaccttgaaccatctcaccagccccgatgtggaacttctggtcctgaagtcgaccttagttttcttcttcttcattgcagagtgggaaaccacccatcagtgatatgttctcagacctcaaagatgggagaaagctcttggatcttctcgaaggcctcacaggaacatcattggtgagaggacatctctgatcattttcctcagacagggtcttgtttccctcaggctagttacaacctaactgtgtagctgaccttgaacttctgatccttctgcctctccatcctcccaagtactgaggtgtccaccacaccacatttgggcagtgctgaggttggaacacagggctccatgcatgatagggaaacactaccacttgagctatgtctctagcctataggagaggatggccatctctgagaatgtggctgatggagtgcctctggcactgttgagattgggagattctctctgggtactaaattgtgaagcctgagtactgcatcctctgtctgccttcctggccgaggctgggcagcttcaggctaaaccgatatctctcatgagattccctggcccgtgaggtagaaggaagatgactagcttgtcatgccctaggtggcacactcttctcatgtgacttggagtttgggacaatgtctctttgctctgttgttcctacatgggcaggagaaagcaggcagactattctgctgtttttttctgcctctggagaagtttaaataaaaaagctttgtctgacagaattgattctcaaatgtgtctacctgcctgtgaagagtaactagagcaattttgaaaatgctgaatccatgtcacagcctaagtcctttaaatcactgtctcatgtgggggcaggaaactgccaggcctgtttgaatgtctcctagatgattttagtaggcatgctggtaaatgagcccatgtttcaggatgttcttagtgaatttccatcctgtggtacccaggctggtgacatggatgctgacctgctattctgcttccgtttctgtgtcagagtttgtcaacacatgaagggatagggactcttacttggtttttgtttgtttgttttattttgttttgttttgctttgttttccagccaaaggaacgtggttccacaagggtgcatgccttaaacaatgtcaaccgagtgctacaggttttacatcagaacaatgtaagtaacatttagggatctcagctgctgcaggcattgttgtttgctgggaagcctgctggttgctgtatatgtcagttgatgcttggcagtgtttcctcttggtgggagttttgaatttgttctgtgagtgacggataagtcacatgccttttccgatgctctcattgatctgtaggataaataatacgcttttgagttttgcattgatccaattcctaaaatgaaaattttatccttgtttatattgctgtataaatatacttaatcaaaaggtttggagttcgatggtgacgctgtcccacgaatttaattgttgtgttattattttgctctgacaggtggacttggtgaatattggaggcacggacattgtggatggaaatcccaagctgactttagggttactctggagcatcattctgcactggcaggtggggaccttcccagtcaccttgagataggcctcgtattattttctctgttcattttctacagctgtcaaatcgaagttccacaaacggcttggctggaataggaggtgtttattgcctcaaactcctcgtgtctgcaagtctgcaacccaagtgccagcagagctggatcttctcagcagctccttgtctttctcctaacttcgagtttgctgtaaactgcggtgtgctggcttaggcaagcttagtcttcatgacacactctctgtgttggtgtccagatttccctttgttctttgggaaggtcatcagtcatgctgtgtttgaaggccaccctcctctactgtgcttgcaccttaaatagttctgtgtgcagcggccctacttcacacagggctcaattttaaggtgctgatgttctggcgttagcatatggatctccagagaacacgtctaatttacagattcccaatggacagtgttggcagcctgatatagatttttggcagaggagaaaaaaaggtgtttcatatttcattgagaaaactgctttgctttcagcctcataggaggttgtaggagtagcctaagggatttccaaatgccgttcattcagattccccaaatgttaacacttacccgcatttcctgagcttactctggcgttctctgtctgagtactttggatgctctttccttttataaaacaccaaatacacttcccaagcttcggtctaaaaacatggcttaaaaaaataaaaaggaactccactgtatagccacaataccattaacatacaaatataaaatgtgtactattaccatctgttactgtgttatcacaatcattaagtaccaaaatgatagatagttgtcaaagtcaggaagatgattttgggatagtggagttatctataggtctcatggaggtttgactcacctcgtcagtaatatacccctgggagcgtagctcagtggttcagtgattgacagtaggcatgaggttctaggctcagttcccagtagcagtggagtggagggagggaggcaggatgataagccaggaaaacagtaggtccagatcatgagcgatgctcattgggtttctctttggtatctcttcaacctgggacactttcggagcctttcttttcaccgtgctgatgtttttgaagaacactgaacttcatacaatgtccgtgggattgactctgcccaccagcacgttggatcgagcttgttccttgtatagacttgttacaggagaagtgttgaattttctcagtcaccgtgtcagggtcatgtgctgccaactatctctctctctctctggccatatttacttaggttaaagtggtatttcccaagtttttctccattgtaaggtgactgtcccttgttattaagtgtatcttgttggggcgtacttagtgacagtataaatgtctagttagtttcccaacttgaaccattagttttagcagccattcattattattacccaaatcattaagatccttgccaaatagtaagtttctgatgccattgttccttctacaattattagctagctctgtttataaaaaaaatcggtttttatcagtgtgtcaaccatccacccatccatgcatccacccatccatccatcaaccacccacctgttcatcaacgtattatgggcttttatataagtttattaacttttactaatattattcatcttgatatggcgattgtcttagattcaactccttctgatcctttacattggctaaaggtccttttgatagatctctgtcattctctgaggcctttcttatgcatatggatacatattgctttaggataatgacaaactgtcagttcttaagagtataattattgctatcaggaaaattacttaattctttgcgttataagcaggtgtgggtctttctgcacaggtgaaggatgtcatgaaagatatcatgtcagacctgcagcagacaaacagcgagaagatcctgctgagctgggtgcggcagaccaccaggccctacagtcaagtcaacgtcctcaacttcaccaccagctggaccgatggactcgcgttcaacgccgtgctccaccggcacaagtgagatgtcttccggtctgcaaatcttacctcctctgtgtcttttttctacttctcttccccatagtcccttcggctacctctgctgcccacattgctcatgttgaaaagcatcaaggaaagcaataccatgcagatcaaccaccgggtatctctttcggacttcagggctggagtgcaaagcccatggtgtctcctacacatttataaactaagaagtgtaagataattgacatagttcactcccactcatctggcctaaccagtaacacacacaaagagttgtgtgtagcttttcttctgatagcagaaggacaactctgtttattgtgttacccacatttacgaagagctatacaattttcttatgaaatctcataaactagattctaacttgtatgtaagaatttaatacaaaagtcgccattataccccagaagaataaacagcctgaaataactttctagtaaaaaatcatgacactgtatgaatacagagctataaaatggagtagaatcattatagttgcatgtaaaggtgccagcattggactgtgctagatatacaagaacaagctcttagagcttccatcctggaggtactaagagctgaggaagagctctcctgtatagaccggtctgataaccagttgagctgacattgcaactgaacatgcggtatggggcagttggttaaccatgtaaatatgtgccttgacacaccagacaagtaattctgcatccctcagagattaagtgccaaaagcaggaaaagtggattgtgttttgttgctgttatgaattattaattttctcatttaatcccctgaatgttcttgcctgctatatacaaatgaagtacaagcttctgtatttatgttctacatttcactaagtttatctctgtataatataggtttggctttctttgtttcttacttttctttctttttttaatctttgctggtagattgttaggtggggaagtagccatggctgaatttaggataaccttaaaatgtgttatccttttccccttctcctccttttctttataggattctgttcttcatgtagtattgtttcaaattagtgacagtgagaagaatgtttgataccaaagcaatgcttttaatatttttcacataggatcgatgtgtgctatagatttaagttttggtattttgatttgttatggggttaaagaccctttccctctcctgttctcccgctctttttctgtcatcttgaagatcctgtcctgtactgttaagaaactgttgcatttatccattatcctttgcctttttaggctctttgattcaacaaatggatataaagtgtcttgcactagacacaaggatagagcaggagcaaaacagacaaacatctcagttccttctaactggagacagagatttatttagaaaatgtaaattatagctgggcatggtggtgcacatatgatctcagaacttgggaagtagaaagatcaggggttctgggtgatcctcggccacctgtgtaactattttgaggtcatcatgggctacatgtggaagactctgtctcacaaaatgtgtgtatggggatgtgaagatatagaaatggtagacaggctaaagaaaaagacgatagatgagagggaagaggcatctgatatgggggaggctggtggctgtggtggctaagggacagaggaagaggtagaaaggagaacgggggtgggggaaggggagaccagtctcagggtgcatgtaagatacaagagtgaagtgcaaagaaagggaccaacttttaggtctgtcaagccagtgatactgtccacgatgtgaggctggaagaaagacaagatgtaaaggaaaactagttttcatggagaaagatgaacggaagggaaccagccccctttgcacctctgcttttaggataactaagtccagttgcactagagtatctgtgtgctcatcttagtctcttctggtgtgtagaggcatcaagtcagggtctccctctgcagcccaagctggactgaaactggctatgtggatgaggccagcttttaattggtgaccttcttgtcttagaacccttagaactgtaatatcaggagtgtacctttgtcctaattgtggaatttagtctattaaaatcattaaatttgtgaagcaataaaatcatagaatccattaatttgtagaatttagtccattaaaataattgatttggtaactcatatatttaggttcgtttttaccactgtgttggagcttatttcacctcctgtttctgtatcattttcttccccggtcttctctgtatccatacgtctcctttactcataatatactgtctgggaaacactgtacactcaactgtgccaagaacctgagattttcttacttattgttatcgttgtcacacatgtcacttttagattttacaaacttgagatgcaaaagatacaatttaaaatagcactcacaaattaaaaaaaaaaattgaagtgcaatgaattacggtgctatctacattgtttccattatatttttctgtcactgatttcagaccagatctcttcagctgggacagagtggtcaaaatgtccccaattgagagacttgaacatgcttttagcaaggcccacacttatttgggaattgaaaagcttctagatcctgaaggtaaggttgagatcttgattctgctatgtataagtttgttacataaaaacctgctgaacttgattctgctttctaattttgaacacctttagcagtgatgatgtttttcttttttacaaaacactatgacaattaagggatcctcattttaccatattggccataattatatctttgtgttggttttcctacttttctgtgtgtagtatgtgtggctgttgtgcatgagtggagtgggtgtgtgcacatatgtgaatgcatgtgtgggccagaggagggaatcaggtgtctttaccacttcccaccttgtcttttaagacatgggcgctgtcagctgggctgactggcaatgagcctgtggggtccacctcccgtctcccacaaagcactttattgcagtaaatcttttgtcctgtttgtagtctttagacagcaggttaatgatttcaccagataagagttaacttgtatcaagtaggattggaaaagtctaggaatacctacttgctagagaaataattcagaattagtttggtttcttggaatgcatgtacgtgtgagcatttgtgtatggtttgaagactttaattgcaactttaggtttgaattctgcccactctattgtgtgagtgaagcctgtgccatattttaaatggctacatgagtagctcttagagcattttgagacagttttttgtttgttgttttaaaatttgttcttgaaggcagggtcttagttagtatggagcctaggcagtcttcaaactcatgaacctcctgcctcagcctgtcaggagctgaattgcagtatgcattatcatgcccaccttatggaaaacttaagaaccggaggctgaataagtcttcacctctgtccatattttgtgatctgcagcagcaatttcctgagaggcagcattatggagatcacaaatgaggcattgtttctgggtacaagaacagtcactttttacttggtatcgagcagtccacacgtttctgagtcatcttttcttctgcttttagatgttgctgtgcatctccctgacaagaaatccataattatgtatttaacgtctctgtttgaggtgcttcctcagcaagtcacgatagatgccatccgagaggtggagactctcccaaggaagtataagaaagaatgtgaagaggaagaaattcatatccaggtgctggctcatttttctcgaaacttttgccgtgcctgtttgatttcccccaggtcaaacttgtgcagggtgttttctgaacatgtgtgtgtgtgtgtgttttttttttctgagttccgttttttatgaaacagggaagtgttttgtttctcaaggtgagtagcgtctggggctgttgatcgtggtgctgtgtggtacgctaaaagctctactatggagtcaactggatgctgagtggtggattctgtttatgctgagaggccaaggcgttgacctggtgtggggaacgttttctctcatgttgtcctgggtaatttttgttaagtagtaattttctttctgtttggggtccattaatagagaacttttgcccccaatatcttctcataaggattctcaaaataccagccttactttccctttcccctggaagaggcactgtactataaatcattcatcagatttttccagaaatgggctaacagatgatttcaccagcaaataaatgagattttcctaaggagatatgaataatggatttttttctttctccattaccctggcttgactcaacccatattttgtctctttgtgatttttgtctaaaatcccattcttcttcattcataaaaggaagaccgttcagattttcgaagtcatgcattttagcaactaagtccagatgttcacacaggcgctggggagatggctcagtcagtagagtgctctatgtccatgcctgaggagctgagttaggatgccctgcatgtacatagacatcgggtttggtggtctccctgtatcctgatgctgggagacagggatgggcgggttagcggaactcatgggtcagccagcataagtgagtcactgagctccaccttcagtgagagacactgtctcagtgaaggaaggaaggtggtgagtgattggaaaatacactagatatcaacctctggctaccacattcgtgtgaacacacatgcttacacaccacatagatatacacatatgaggaaaaagagggggtgaggattgcaaatttgtgagaagtgcattttggatgagtgtgtgccctgcagcttacatgtcaccctctggtacttggatggggtcagtgacttggcctcttgaccactgtggttaatgttacctccttggcaaaggcaacacaaagaatactcacttgctaagcccgtttctctgtcattactatagatttctctccagatttgctttgacattctcatttagcaaatttgctttcatttttttaaaaaagttactcaattttccaattataataatcttgaacatatcatctttttcccctatttttatgagattcaaagagtttacttactcttttagattttgggtggcatgtagtaatcattttatttttatccatttagaaaaaggagaaaaacaccttattgaataggaaaagggagagatggagcctgattgtgaatcctggtttctttttagttttgatcatcaaataatgcagaaggaaaacccttaactactgcaaattgtttaccttggctcctggacactgctttggttcaatgatgtactttcactgggtgactaagatggtgttctgggctgtcctgtaggtcttgcctcttgtatttacagtcatttcttcattggactgatttatttttgttaaaaagagaagatatttcaattcttagtgttaaggctgtcctctcaaaaaggaagggccattaagatggttcagttggtaaaagtgattgtttgttctgaagcttgatggtttaggttagatccgtagaactcacataatggtaggagagtgcactatataattgttcaccagcctccgtatgtatgtatatactcatacagaaacatagcaaatcataggaaaaagaagtggattttacttattttatggtatttagctaaaacaatcacttctttagcatgcaaggttggtatggtaagaatttcagaaaccactttctatttgttaatgactgagtggtttaatgctcacgctgtttattgtatgcttttattggtaacttagaggctaagttccattaagtgagggaatgatgtggtcaagtcttgattgtctcctcgttggcttgtcttgctgtccactgttctctaaggaatgctgactgccagccagccttctctctgaatcctctttctcccaccatgctgagtagcattgggaggtcagtaggcaatccctgagtttccctttagaaacacgccagttgaaaagctcctgcgtatttacatggagaggctttgctgctttccacccctcggggggatgctggtgcctacacagatgacctttggctgatgactagcagtcctagttttgcatgttcttcccattgtctagacttttgcttacctcaccttctgaattatcttagcactgtgacttcaggcctttaagttgagagaatgtagcttattttccttcctatgccctggcattgtttgcgtcttaatttgccagtgtttttacttatgatgactggtttctttaactcctataactcagttgaaaacattcctttgatctctcctataaaacaacattttctgggcttcaaccccaagttttcatgaggatttaatacctcttatgctttaaattgcagtcagagtaggcttttcttcattcctgattcttatgtgtgttgaattccatctatgaaggatcttctacctatatggtctctgagcatgccttccccttttcctacacttaaacagaacctttgagtttctccctaaccaattaagatccgtctctatgtgcccacagtctttcttgccctgtcagtatttttgtgaactatgtcaagaattttaaatagtgacttaagaccgtggaaaggatagtgagggatttcaggccgggcgacctgtgggtgtgaacacatgagagagaccattctctctgctgcctgagaagtggcttggcagataggactgtgggtgccaagggttagcaagccattgtgggccagaggagagacgggtggtgcagaagtggagaggtctgcatggatttgagttgaactttgaaggtaggactagtttgcagattaaacacgggagagggaagaaagaggggtgtgtccaagtatatcacccaggtttttggctgtggtgcctaggtgcatggagcctggggtaggtgttggcaagttttggggtgggtgaaacaaatgagtgtttaaatgtgggtctggtttgatatatctttaaagatgctgcagatgttattgctgctgaaagttagaagagagttttactagaaataaaatatctatcgaatctagattattttttaaaaatcaaataggaatagatgatatcacttagttaaggtatatcgaaagaagggagaaagaagttcaggagggttactgcttgcagatgggcagggccactggattgggaaggagagctttggaagtcaggatggatcggctccaggcacagccactgggaggcttctggaagaaccacgtgagacctggcttctcttgtttccagttggtgcctgttattccggcatagctgttatcagaaacattttaattgattggctaattgtatgattactctaaaaagtaagtctgggaaaatggctttgtcagcttttcagtcatttgggggcaaatgttgagactgttgaagcagactgttaagactttggtggtaacatgtgtaggcatgacttttaccattctcctcatttatgtacatgtgggatagtttacacacgtcttgaagaagttttgtttgaatggaaacaaaggaacagcagagccagtaggcttgattacaagatcattaagtgcataaagagaaactagtaagttagagaaagatcggcagacatttattttacaagtcctaaccctcaaaccacatcccccaaacagaacagctcacacactagagggctgttgcctcaaaacaatgaaacatgaaatcccatccgttccacaggttgtatgtgcgcccttgttcactgtttaatacatggcaccagaatgcagggtccctaaagaattctaagcaggggtcaaagcagagtgtcaggctctctattctgtaaactgcaaccgttgttcaagggccagcatgttcttagttctccatcaaaattctctatgtcttgaagtcaaatactggcatttggagttttatttttgtccagtgactcatgtgggatatttttctctccatgcctcttccaatgtggcgcttgtgtgtgtactctattttgtatttcttggctgtcagtgtcctctgattaattcatggcttcattcactcagctcctgaaaactgggggttgtctcctgagatcctagtccctaccttggtttctccagacattgctcatgtggtgagcgtctgtatgttcatggttgctgtggctttgtttccacagagtgcagtgctggcagaggaaggccagagtccccgagctgagacccctagcaccgtcactgaagtggacatggatttggacagctaccagatagcgctagaggaagtgctgacgtggctgctgtccgcggaggacacgttccaggagcaagatgacatttctgatgatgtcgaagaagtcaaagagcagtttgctacccatgaagtaaatatctgtggccgagagccatatttttccagggccgggcctgatttttaggggtggtggtaggtggagtgacttcaccattggcttggtatttaccaaatgatgctctgtaaaaagatcatgatgtagtgcctgcattatttacgtgggctttgttagaaaactggagtgatcgacagttcatgagaatcagatttcaggcagtcttgtgacattttgtgtatttttttagaactgaggattaaatcagtgtgaacattgttcctttttgaaatattgagctgtagttgcaaatcaacatagccaactagtatcccaaataatcaggtttctcatgctaccctaaaagccagtatttttatttgttgtctgattaagccagtgttatatccagtgttcctgcacgattttatgcaagggcagctacctgctatttagagatagaatcatgatttttcactctatgggaaattctttacggttaagtgggttcttgtgtgtgtgtgtgtgtgtaagcagctcctcttctccttcttcttcttcttcttcttcttcttcttcttcttcttcttcttcttcttcttcttcttcttcttcttcttcttcttcttctctatttttacattaacaacataatcatcatttacttaagagatagcttagctgttaaaggtgcttgctgcaaaactgatgatccaaggtcggtccctgcaactcacttggtggaatgacagatccacctcttatgagctgtcctgtgattccctatatgtgtgttgaaatgctgaacatggtgtgtgtacatggacacattcacgggtgaatggggatacacacccatgaatagttgtaaaacttttaaaatctactattatcatccataacattgttttctttgatctagctttctcttgagttatggttaataccaaatctctcatttcagagctttccacctttggtgaaagcctcctccgtctttgctttgcacaggttcctttctctggggcgttgctgttgggcttatgcactaccagtttgttgtttcatgtcttcgcagcaagtgactcactaactaccacaatctcctttgctagacttttatgatggagctgacagcacaccagagcagcgtggggagcgtcctgcaggctggcaaccagctgatgacacaagggactctgtcagaggaggaggagtttgagatccaggaacagatgaccttgctgaatgcaaggtgggaggcgctccgggtggagagcatggagaggcagtcccggtgagtggagctcaaggaccgagagcctgactccccagaccacagtgcacagtgacactcaagtacaggcctgcggggctgtgactaaaatcagtacagggcaagccttccactgtcctcacaccgctctgtgagtctcatctctgtcaagatcatagaggacagttggaatgcagagggtagtaagaggggaagttatattttgcatgggtgatattgtaattttatatttgttacagtgataaaacaccctggccaaaaaggcaacttaagggaggaaaggatttattttagctaacaattccaggttttggtctcattttggggacccccgaggagtgggagcttgaattcagtagtcatgtcactgcacagtgaggagcagagaagaatgactgtgcccatgctagtgcccaactggctttctttactttcatacagtccagggccccaaccagggagtggtgctgctcggtttcagactagccttcctatatcaattaggttaataatcaatgcagctccccacagacaaggcctcaggttaacctcatttagacagccccctcattgaggctgtcaccacaggacagtgtgccacgggcctacttactgttcagtggtctgtaacagtttaaagagcaggcttataccatggtctgtttcactttccacgttgtgattcgcgttccggtgccgtttccaccaatttaatacgccaggaattcctgagtgtagaaacaatgattctgttttgaatacagggagctgttatttatattcctgactgcccttaatgaactccagttatgaatcaaatcagagctttcccccttagtttctatactgatggactctctgctacttggatggttagggtacacaaggctgtgttttcctgcccccgcttccctggtgctcagagtgggtgcccgtgccaggggacaagcccgagggaatgacactctgtcctcctggccaggctgcacgacgctctgatggagctgcagaagaaacagctgcagcagctctcaagctggctggccctcacagaagagcgcattcagaagatggagagcctcccgctgggtgatgacctgccctccctgcagaagctgcttcaagaacataaagtaaatttgctgcttgttccttttctacttccttgtgtaggaagagtgctgagctgacccggggcctgatggcttctctcggtgtggagttgggctacttcttccctgttgctttttattcagaaggtgttcgttgggaggtgacattttggaaagagacagctttgcacacatgtccatgtctttcttctgaaagtgtgtgacatttgtcacatttggcaagggtgatttgtttgttttttgtttttttttgttttgttttattttttttataaatctttttaataaagattaatttatttattattataagtacactgtagctgtcttcagatgcaccagaagagagcatcagatctcattacggatggttgtgagccaccatgtggttgctgggatttgaactcaggaccttcggaagagtagttggttctcttaaccactgagccatctctccagccaggcaagggtggttttggactcacaagtgcatgagaacctgaacatatgggcaggaatacacagtgtgggtggagaaagaaacagggatatatacttatacttaattaggattaggatatatacccaatcctgtcagggagactgttacctcttttttttttctttttaaaaaagatttactttatttattatatgtaagtacactagctatcttcagacaccagaagacggaatcagatggttttgagccaccatgtggttgctgggatttgaattcaggacctccggaagagcagtcagtgctcttaaccgctgagccatctctctagccccccgttacctcttttcagaagagcatgaagtgctgagtgaggaaccagcacatggtggacagtgtggtttggttctgagatgagtggttcggtttttatagcagaagaaaggtagaattttgttgatcagtgaaacatctagatagctgatactaaggctttagggtcacatgaaacactacccaagaggcatttcaccatactcttgctactgtttaaaccaattactctctacagatgtctaatgactgttctcttcctgtggaagagggaagtgaaggtgtccatatgcttgttcttggttgctctcttggggagctaatcagaatagcttctatgagtcatacagccttttcctcattttgcacattatggaactacagaaaatgacctctgattctatttgcttaaactctgggtttttagagtagtcaggtctacatttttgtcttttttattttccagtgtctcattgtgtaccactagctgacttggaactttctatgtagaccacgatggccttgcactcactgcgatcctcctgtccctgcctctttagtgctgggatacctgcatatggatatatttttattttaattcctagaatagacacagattttcttcttttcctcctttccttcttccttctcatcttcttctacctcgacttgtttttttgggaagaattaggactgaaaatggcacacattgtcacacatttacaattggttttgaagttgcactcgcagactctggctcctaatgaaatgtaagggtgtgttcaggtttctttctttagtatggtacttagggtaatggttgggaatggcaataccatgcctcattaggttccttaattactatcgtgaagaagcggatttttaaataggtaaatgaggaagagcagatatcatagtttatcttttcttttttcctctagagtttgcaaaatgaccttgaagctgaacaggtgaaggtaaattccttaactcacatggtggtgattgtggatgaaaacagtggggagagtgccacagctcttctggaagatcagttacaggtaagaccttgagaagtaggatgcccttcagatccactctctggtcaaggtccatgtattgttcctcctgggcatccttgtttgtacagaagggtataaaaaagtagactcctttaatcatcttttcgttactgtaatgaaggtcctgaggcaggctacttgatagagaacaaagtttacttagctcacagttttggaggctggcagttcagacagcctgacaaatgttctcccttggctatgtctaatagaacagaaacatgtgtatgtgtgtgttgtgtctctgccttaattttttaatccattagaatttatcatgatcggccacctttgtgccctgatttagaacccccctaaaaccaaaccaaacaaaacaaaacaaaacatcagatttccccaccctaaccagaaacaaagcccatcctcaatctgaatttccaccttcttgatactatttatgcaaatcttttttagttaaattcttgtttgaattcatggtggggtggggtggggtggggtgggacacaaagcatggcacctgtttttggttgtatctcccagttaggcctcctcattgtgtggtttcaggcttagctaggcattccttgtttcattcgagtccttgcagtgaaggcatgagattgttattctgctcccttgtgtataatggtgacaacatttaaaagcaccagaactcattcaagtgactcccaggcttcccccagaacagtcacttgaagaattggtgaaggcaaccatagcctggaaggtttgaagcatagaaagtaaacatgtagattgtggttgtagcagtggttgaaaaaaaaaaatacaacaaccctcagacacatatacccaattttcaaatacatgtgaaatgttgcattcccatacaaaccttacagtgaagtaggaacaggaattctagttttttttttttcctcatctctgagtaatttaagtaagtctaccctatgaaagttagtttttttctcatatatgtacttaaaagtattttttgtagattggtgttttggaaaactgtagtaattgtgtctcctggctgggctgacagagactgcttctcccttccctagaaactgggtgagcgctggacagctgtatgccgctggactgaagaacgttggaacaggttgcaagaaatcagtattctgtggcaggaattattggaagagcaggtatgaaactcaaccactgtccactgaggacaaaacagtgacaaggagcccatcgtttcagtatggctgtggaatgtggctgccctcttctctagtgagaattctggaactttggcttctttaaaaaacacagaaatattataagaatatgttttttttttatcttaggttgttccccctcccccagtagctgattatgatttgcctcgtgctctggtggggatgtgattttgccagctgcagatattttctgtgattgtgtggcctttgtaatcctgtggactcttcagagggtatatgtcatagtcagggtttctattcctgcacagacatcatgaccaagaagcaagttggggaggaaagggtttattcagcttacaattccatactgctgtttatcaccaaggaagtctggactggaactcaaacaggtcaggaagcaggagctgatgcagaggccatggagggatgttctttactggcttgcttctcctggcttgttcagcctgctctcttatagaacccaagactacaagcccagagatggttccacccacaagtggtggtgacactgtggacaaaagttgttaatatcatagtggataagaaggagaggggggtagagagagagaatgagaggggagagggagagatccttaatagggaatagcatataaacaaagaaatgtgtcttgcaatttagaaggtaatgagtccaatttggtgagggcttctttctggctcacaaaggatcctttgttacattcttatcaatttgtagaaggaaaaagtagttcttgatcactaattgaggaaatgccttacagttggttctcatggaggcatttcctcaactgaagctcctttctctgtgataactccagctgtgtcgagttgacacaaaactagccagaacagtatataaatcctggggccctgagggttgttgggttgttctttgttggtggtcaaggttagtcctgcacaaagaagaaacaacaagaagaaattagatatcctgacatcgaaggacttggcacccgtaatcagcaggaaatagtctaaggataacgttgacccctttctggtccctgactttgttcatggatctctttgctctctcccctctattcttttctccctcctatctagtgttatggaatcgaacgagttgaaggcgtaggtagaagagggtggaaggaagaagaacccacaaagtagccaaagaccagctagctacactcttccctttttttgaaaggccttattttgaaaataatttatgaaatttggaaataatggtttgctaatcactttaaaaattaaaaaaaaaaaaaaccaagggaaaacaagtaatctgaccatttctatcagtttaagttttatacaaatgtgtatgcattattgactgctgctgcattcattaattcatctttttgcttgcttacatattttttggcttactttatttattctgtcctcatactcactgtgtaactaaggatggcactgagctcccaatcgatccttctgcctccagcagtaaaggtggcatcgtccccgattcctgtgggggctgtggggagaagccagggccttcctttacatggtagccatgcagcctaccggctgagcaacatttccagtcccctatttattattttgaaagtcaaatttctattaatgttatatccatttctgcagcttactcattaagatcatggtatgaggctccatggtaatagtaatttgatttctgttcattatttacaatgttagtgcttaggtctgttcctgtcttgacttacttttcatggtttaattactcatgggcttttgttgagggatctgtttgaatgtgtaccagcacaattcccagcatacagtttgtgctcagtaaataaaaggtacaggaatattctccatatgctgtgaatattaaattataatcttcctcttaacttttaaccagcatacaggatgaaactagtgagaaaatatttcctagcattgcttttggataagcattcagtggctccgtgtgcaaagccgtctgcacagcttttctcttggtttggtgtctcttcgatcaccttttagctttacacaaaggttgttatcaaaacagagtacaaagaagtaaaaaatttctccccagtgccaagcagctgtagcctagaaaagaagcagacacaaggttcccacagcgtccatcttggctctgttgcatttccatccagaaaaagcagctctgttctctgcatggggtcaggaaccagatgggtgagatcctggggcttcgctgaggcagaggcagatagttcattttaaatactgttacaaatgattaatccgcatggtggtcaatgatcttcctcctcctcctcttcctcttcctcctctttaaatcagggactacataatggggctgtgactcagtgcttgtttaatgtgtatgaagccttgggttaaatcctcagtaactcataaagtgggtgttgtggtgtataccacaacttaccttgcatgccgagacataagcaggaggatcagaatttcaaggttatacttagctggctagcaagtttgaggctaatctgggttaaaagaacctgtctcaagacagacacccaccaaaacaattgtataatttattctgcttcatgacatatggatggtgcattttggtaatgtgtatatcaccccagatctttatgttcaaatcaaagcatcccatacagtagtttatttttctaaagtaataatgacggacatcagtcattatcagaacaagattggtttgccttttctgcctttccagtttgcttattgcttctttgtttcttgtcagcttgacacactgtagtgtgttattagagaagaggaaccacaattgagacaatgtcttcatcaggttagcctgtaggcaagtctgtgcgggcattttctttaatgattgatgtgggagggcctcccccactttggggttgctgcccctggggcaggtggtcctgcgttgtagcaggaagcaggcagcatgagcctggatgactgaggcagctggcggcattccttcctctctgctgtaattcctgccctgtgtcccttagagacggagcctttcctcctaagctccttttggccatggtgttttatcacagcaatagaaactctattaaagtttggaaataactttaggattaaaaaaatgtttagaaaacaagggatttttgaccaactgtatcacttgaagttttatttatttcatgtatgtgactttactgttgctgtcgtcagacacacaagaagagtgcatcggatcccattacagatggttgtgagccaccatgtggttgatgggaattgaactcaggacctctagaagagcagtcagtgctcttaaccactgagccatctctctagcctgtcacttgtagttttaaataggccgtctattcattattgtctattgctaggacattttatctctctcccactctctctctctctctctccctctctctctctctctctctctctcttgagagagaagggtatgtctgcaccttctgttttgctccctggtcatttatacgcatatcttaactttactaggcgaggagataggatctgcatttgtcttttatttttctaattttcactttttttggggtggtggtggtggtggtagactatagaggtaaggagtagcttgaaaatacgttgattaatgagacaactgagaaagaattcttcccattgcaagtccagaactaaccctttgccccttagctatacagaaaaaaaaattaaaaaaagaaaaaaaaaggagagtgtaatacactctacttttgggaatagggctgtcttaagagcatctcactccatcacttaacatcttccaaagaacacacacttttggctgtgagttttaaataattttgttgttggctttgggacatcttcatccttcttcctttaatgtaattgcatttgaactttgaccatttgcatacttttccctcctggtgctgtggacagacagttgatttaggggtgggagtttatgacccagctcagccatttagtagcttactcacctcaaacatgtaacttgacgtctgtttccttctctaaaatgagcagcaggaacaagaaaatctatgagcttcctttgaattaaaacctagagttctaatatgatttttttaaagctcagcataattggatttagtatcctttgtctactcaccttcttgagatctagggttagttgctatatgggattattttctcctactgtaataaattccctagccaggtttggcgtcacatgcttgtggtgctcaggagatggagataggaggattgcaagttcaagatcagcttgatatactagcaagaccccactcccatgccccccaggggctagtgatatgaggcttattcgtattgtttcatgactatattctactaatgattcgagctggtagctccaccactgagttgcacccatagtcctgaaggcttgcttgattcagtgttttagagttgtgaacatccaaaagtacggtgctagctctggcgaggaatccctgcctgtcacatcacagtacttagcactgcagtgggagtgtgcaccaaagggggaggtggtgtggagacacaggaagccagaggtcaggaggcgccagccttactcttttgtaacagtgattctcaggaacttatggaggccccagaagaacagcatatctctcttctgcgggcagcaccatctgagacttcctcctagcttctatatcttacagattctagcctctctcctgccacactggagaccatgctcttcctacacaggagccctttaaggacatgctaaactctattcacaccttacgagttatcactatcgattagacctaatgacaggttaatctgttgtaagttatagaggctatgcttttgccagtccttgaactcgggtatttgaggttcttattatcccgatctacatgtgagtcacagaattgtcaggtgattgaccatgtctctttccaacttttgttgttactcctagtgtctgttggaggcttggctcaccgaaaaggaagaggctttgaataaagttcaaaccagcaactttaaagaccagaaggaactaagtgtcagtgtccggcgtctggctgtaagtgtgtccctgtcggcatctgttgtaagcctgtgatgtgtagtgttttataactaagagttaatatacttgaatgaatacagattatagcttatttcccattactacatcgcttccagccatggtactgtaccaggagccttttattattgcatagagaatggcagaacacactgttggcgggattacaaatctacttgattatacttcccgaggaagataaactttcttgagagaaagaaaattatttgtggaagttggtcctgactcttcctcccagccccatgctcccagaaataagactcaggcaaaatatatttagatatcttggccatatagctagactcttctctgagtagactgtaacttagaaaaactccttttttttttttttttttttttttagacatggtttctctgtgtagctctggctgtcctggaactcactttgtagaccaggctggccttgaactcagaaatctgcctgcctctgcctcccaagtgctgggattaaaggtgtgtgccaccacgcccggctaactcatttattttaatccacattctgccatatggctggttacttgtgctcaggtaccagacttctgtcttctcacatcttcctctggcaaatctcccacctggctctatcccagaatcctttctcctcccgaatgccctacctcctatttcctgcctaagccttaggccatcagatttattattgacaggtgtcatgtccatatagacctaagatattctctatagttgttgtgtgataaatatttgacattctagatattgaaggaagacatggaaatgaagaggcagactctggatcaactgagtgagattggccaggatgtgggccaattactcagtaatcccaaggcatctaagaagatgaacagtgactctgaggagctaacacagagatgggattctctggttcagagactcgaagactcttctaaccaggtacgtttttgatttgggtagtatattataccatgaaaaaattgtgtgtacaggaacagaaaaatgcagtctgagatccaaagtgtgctttattaattgacaatacgaaagattgagccatcagtacaatgtggctgaactgtgaaaacatcatgatagaggaagccagtcatgcatgatagttatgaactatgaattgtgcaggacaggcagaacctggcaggtgctcagtggcctcgagcggtggtgattagggagtgggatgctgtgaacagatatcaaggttctatttgggctgattaagttgtcttggagtgaatgagaagacaagacagacacgggtatgggctattcaaagatagtacaagcttttattcagaagaaaagccctcagggtttctagtctgggaatgagagcacactgtctacttataggctagggtagttagctacaggatagaaagggattgatctgggcaaggatactagaatgttttcttttgtcctgtgctaaaaaaggttaaatggtgacatagaaaatgtcaaccagcatcttgcttgggcagccatcagtgcaggcccatggcatggccagggcaagaatctagaaaaacaagtgactataatttagaaacagagatgactttggttcgggcagttgtcattattcaagcagaatggaggagtattacaagctggcatagccatggctgatgttgacctaaagtctgtagccaatacccacaccaatacccactgcagtggacttttccctttgcttctgtgcagttctggctagtctcgaacctctaacctctgcctctcctaccaagtcctaggattacaggagggtgttaagttttataaagcagtataatcatcggcggggatatattggcaggcccatgctgaggtgtcttcctgaggagacaccatgcaacagacctagtataaagaagacttactgtgggggaagggagcagggacctggagaagcggcaacagaggtgtgagggcaaagaactgtggggctggggggagagaagggcagagagaaagagaagagagaggatacgtgggtacagggaaagaagatggagagagctgctagggtagcagccagtccctccttatatgcctggcttgctcccttctctctcacctggtggactttgacacaggctgttgctaggtagctgttgggcgaggcctaaaggaattgtcaataagccaacagagtgtggcaccatgcgtggcttgaactgtttatttttatagggagcgttttatgtgaataactctcagcagcggctttcatttaaagccaacgctgggcgtgacttgcctttcaggtgactcaggcggtagcgaagctcggcatgtcccagattccacagaaggacctattggagaccgttcatgtgagagaacaagggatggtgaagaagcccaagcaggaactgcctcctcctcccccaccaaagaagagacagattcacgtggacgtggaggccaagaaaaagtgagagatgtcccagcctcaggcctgcctgtaactcgcactaatcactaatcaaatgagagtttagacatgctcattattatgtaaattcagtcatgagctcagttactggctttgagtctctggaagattctgcctcccaggagctaagcagctaaattgccctgagggactttactcatcctctgctaaatttagagactggtgtggagtaacccttctgttatcaatccccatctgtttctcagaggacgattgttttggggtccggctcctgctttcttctttctttcatacctttaagacctgacagtttggctttggataaattccttattctttgtgaatctctttcctctgctcatcactgcaatagcagttcaggaagacaatgcatttttgtgacctcacgatctctgtctgtctgtctgtctctcctcctcttcttcctcttcttcctttcctttttatcccccccccccccaccaaacccatccatgtatttaggttttctttgataattccttttatcaggtttcttaatagatgctttctgttttgctgaaagagctcttttgggttaaaatgtcccttttatctaactgattcgaaagaaaactggagattgttagaagaatgagatttcagctgcattcactgggcctttgctgtgtcagagcctttaaaaaaattctctacctgtaggtctcgactcctttgggggtgtgtgtgtgtcatatcaaaaacccttcatatcagatatttacactaccatccataacagttgcaaatttataactatgaagtagcaaagaaataattttattgatggaggtgacggccacatgaggaactgtattaaaggatggcagcattaggaaggttgagaactgctgctttaaaatgtagtgtgttctaggcactggatctggtacgcctggtcacagtgagccttcggctcggcctcaagcttgctctcatgctccctcttgcagtgcgatcccagggttcagggacattggcagttattaggggcctgaataaaaagataagctttccttccataggatagctttattagaggaatcaggatgtggggcgtatctgatgattctccttttgaccctcagcctgttttctgcctcctaacggtgcctcatgcatgactggcgcacctgccgttgtgagcagcagcctttactttggccagagcagcaggcagagaaggagatgctgtcgatgtcaacattagcagcaatcttccatttcctgaactcttgttagctgctgggcgcatctggcactgtgtgtctccagggctggctttggaatagacagggtgtatcctgatgggaggctcatttaaacttgcctgtagtgaataatgagccttctgctgcaagagacaaaatgctgtgaccaaggtgacttcaacaactcattatcgtgtcgtatgacaagaaacagtccagaagtggcccagctgtggcgagaggatgcacttaagcagacttcccactgccgtccctgctattgttggcttggttgcttttcctcacagtgctttgtcttctcagcaaactgggtctccgatgtcaccagccaggattttgtcccttgcttgttcaagtttataagctgacggcaatggtactggaggtccagatgaaccgggtcatgtgtccttcccttatccccagtctatgcagtttgtacaaagtatagagaggggttgtgagtcatgagtcctgaccttcgagggtggattgaggcagacattcattactgaattaattcctcggcagaggcctgagtgcatgctgtccacggtagcagaaatctcatttgtaaattttttttatgccccatgtttgcctcagaacgtcctgtgtgctgtctttgtagagcccaggcatgcttttgtaggcagtagcagggtccgatggctgcccactgggagttccagtttcctagaacatggaagtagacagggatgcttaggtgttgcagaagctgacagtttcctaagatacggtgtgcacatcccaggagaaggcatggaccagagcagagcacaaggctggaagcccaagctccgagccccaggctttcttgtgacctgctgtgggtcctgggcatccgaggagattctccgtgtgtgtgcagtgctggctcttctgcatccatgcagtgtcctttccctgttaaccttggctatgaaggtttccagtcttcctctctgccagctggtttttctgctgtgtgaacctctcagtcttttcttttttttccccctgagacagggtttctctgtatagccttggctgtcctggaactcactctgtagaccaggctggccttgaacctctcagtcttaatgcagttcacttcccccttattctccccaacctcctctcctcaaaatggtccctcacgaatgtttgaggttagctctcacagtcacttccattgtcctaaagacgaggctctccttagctattccttgtatgacataattttcagacccttttgtgtattcagttagctgtaaaaacggtcatgaacttgtgttggactccacagacaattgagagccctaaattacctaattacttattcttggtagtcaattttattttgttctctttttttttttttttttttttcgtttcttttaaaatctgctcaggtcaggcatttccagctatctggttatcttgtactggggtcaatgtgtcttgctcatttctcttatctcagagagaaactgtggacatctggattctggttacttagctagagcatcacacactcttatgttgaagtaaaatttatcgaccctcagatgtctgaaataaaaggggtttaatgagtggctcagggacaaattctgaagcctacaaaagcaaaagggttcagtagatggaaatgggcacttgggaactaatagcccaaaacctctgtgtgtgtgtgtgtgtgtgtgtgtgtgtgtgtctgtctgtctgtctgtctgtctgtgcatggttggttatatggatgtttgtgagtataggcatatgtgtgtgaatgcaggtttatgtgtgagtgtgattatgtggatgtttgtgagtgagagcaggtatgtgtgtatggttatgtggatgctttgtgtgagtacaggtatatgtgtgtgtgtgtgtgaatacaggtttgtgtgagtgtggttatgtaggtgtgggtgtggatgtgtggggttatgtggatgcttgtgtgtgagtacaggtgtgtgtgtgtgtgtgtgtgtgtgtgtgtgtgtctgtctgtctgtctggttatgtggatgtttatgtgtgagtatagagtgtgcatatatggttatgtagatgtttgtgtgtgagcacagatgtgatatgtatacgtgagtacaggtttgtgtgtgagtgtggttatgtggatgtttgtgtctgtgagtacagggatctctctctctctctctctctctctctctctctctctctctctctctctctctctctctctggattccaaaggtttccttcctcaggcatggtccccctggcttatttgtcagtgagcctcaggaatttggctgactctgcctgcctccacagctctgggattaaaagcatgccacccagccagacttttaaaatgcaggaatgacttagaagtcagatcttgcagggcaaatgctttacctacagagccatccctctctgcagtcctcagagcgctttgtcctagggaagactagcgaaggaagagtcagttgagtacattgtgtttacctggccatatttagaggtgagactgcaaggtgctgaagggcttggtctgagtggctgggtgcagagtccctaagaagcattgctgcttcttgctcactagtctgggacatttatatattaacaggttgtggtgcctggggtacagccaccacagatgccaggtcagttttaacttgctttcaggaatgtggaactatcatgttagttctggctggtagctattaattaattcccttaactcttgcctcctctgatttagatttgagatattgtagaaaatgccttttaaaatcacatattacacagaaaacttactcagaatctactagaaacacattaagagctgctttccagaggaaccttcaaatacctcttctcagcttatgatgctgagtcacgccagggtaagggggcagctgcatggactgcctctgtttgaatagctcttgcttcgtttattagtatggggtccattattcaaaacccgtatgagctcagttgcttcgactctaacaggatattcaaaagtattttcagagagagtggtgaggattctttgcgttaacgatagacatggaaggtttaaccaagggcctggtctctggtcacctttcagaaaactgtggttttcacctgctttgggatcccatgtccagcctgcccactcttccccctcccattaccgctcgctgagttcctcttgtgttctatctgtggtggtcttttctgtgcagtcttgggttctggccccacagtgagtgactggacactatgaacagactcttatcagttctgtgcttaacacagctgatgactgctctttgtttaaatccatcatctatcacccagggctttattggcccctttgactcttggccacatcattatttcgccttccctcgcatcactctctataccagacacacctatttgtagctggcaaaatatggcctctatttccgttgctttctctttgcaagggaagctgtcaaacacagccacacttatgccctgagaccatgctttccacggatgggttaggagtcagtccttggcagtcctgggatttacctagcatatacttttcttattacttgtcaatttcagttgcttcctgatgacttgaggcccccgaaaggctgagataggtctggttaactatgtattgagcagcagaggatagttttataaatgtttgtacttgtcctttttctgttatcatctaactaaatctgttttttgttgtctacaatagcttataaaaatacaaatgattcccaattaagtaaaaaaaaaataattattttattagccctataatgttttcacttttaattgtaaaagtattatgggtggttgctctattttggggcagagtttgaatatccttgcctggtgggcattcaggttggtctttattgggccaaggcaacactggaagctgaccagtgacagaggcaaatgtctccatcttgaccaggtttgatgctataagtacagagctgctgaactggattttgaaatcaaagactgccattcagaacacagagatgaaagaatataagaagtcgcaggagacctcaggaatgaaaaagaaattgaaggtaaaatatacaatgaatatgccaggaagtaaaataattcatcaggctaattttactattggcacagagatgtgccagggtccagaagctattgcaaaatacatgtagccacagatggcttttagagcttcaccgtaaacatcagatcaccacatgtaggagaaattaaaaatgttttccccttttcctccttaatcgttgagttgtatatacagtcatcattattgccctctatgtagatttaaatttacatggtctggtacatagtaacttaggactttgtattgtttcagagatattctgcccttgtatctaacaaagcatttggcgtattaaaatttcctcaaaatatttcctttaaacaatacagctttttttaaaaagtcgatcttagaccaaaaatgttaattttaattatttccccttgataatgaactcataattacagaacatataatcttcccttctaaaagaatctaaagttgatattcactgtcatcattttggaattttctttttcagacgtactgattctccgagtgctagagagtggccaggaattgcgtagttttttcattacagtactttgtagataaactttgaaatacctaaagaaaagttaagagggcacaaaatatgaggttttaaaataacatcagcgttgcatcgagaagggatgctttcagtgttttatatttggtctttgtttccagggattagagaaagaacagaaggaaaatctgccccgactggacgaactgaatcaaaccggacaaaccctccgggagcaaatgggaaaaggtgaggccctgcagggcttttttttccctctcagattattttagaaggtcacacttaatatttgcagcttaacacacaaaacatttaatacacaaagatagaaaaaagatctggttttcaatttttttttgaggcagcagaatctttcaaaaactgaaatcttatattgaagctttttattaaaaacagataaaatcaaagtcgttctgctcccacttgggggtcagaaaactagaaaccttgaaaacctcagcagagcaattaaaatccaacagtgcacaagattgtaaaacctcacctttggggttacatactctgaatttttcttatacatgagggcactgagagaaatgtttatgctggcaatgtcttagatatgaagtcgccttaaggtaaacttattctagtttcattctgctgctgtgacaatcaccatgactcagagcagctcgggaagaaccagttcgtttcagcttacaggtcccagtccatcactgagggaagtcagggtgggaactcaagcatctgaaagcagaaaccatggaggatgctgcttgttggctgcctggtccttacagcctaggacctcctgcctaaggaatggtgttgcccacagtgggctggactcgtctacatttctttttcttttctttttttttttttttcttttttttttttttttgagacagagtatctctgtgtagccctggctgtcctggcactcactttgtagaccaggctggcctcgaactcaggaatttgtctgcctctgcctcccgagtgctgggattaaaggcttgtgccgccaccaccgccagcctgttctatatttcttaatgatcaagacaatggctactgtgtgatcctcagtctaggatgtcagatgatgctaggctgtgtcagatggacaattacagctatctaggacacttattaatgtttgatatttggtcacgttcggaggatcacattaatatactctagaaacatttttctacttaaatttgatgttacttgtattcaaaaaattttcaagcagcaaagacccttgctcctcactaaagccttgcatagacacagagaaacctaaaattagtattttctcttctgtggctgtttagtttggcatatggtttttttctttggtggtactggacctttcttccttccctcttaagaaaagatgtggcaggctgagatgtcaaaggctggggcatgggttgcagtcgggtgagattcgcatgctgctttaggcccgggttgaagggcagaaactgtagcgggcacacgccagtaggtgcacataggcaggagcaggtaggactggccaggctgactgcagaaactccctccttgagaactctagagggaggacaccacgaagcacacttcctgtgcacctgttccttcttctaaaaatacttaggttgcctgtcagatggttgggtcttagctccgcctgcatggaaatcatggatcggcaagggaagggctagtcttctgtaggcagctttagcatctgttcacagcagtgtatggcctcagcaggcaggagcgacatcaggcagtgctctctgatattagccttcccacagtgggactcttctataagcatcagagttattgcttaggcctaggaagtggggagccttcatcccaagagagtggctggctttgtttcttgtaagtggacatagctgtagggattcctcaaccttgggcaatggccaatattatagcttctgtacctctggtgcctaacactcttggctctaaaggcttgacagctttctgggtctattctgaggactgatgcttgtagtttcttcttaatctctctctctctctctctctctctctctctctctctctctctctctctctctctctctctctccattccctcctcccctctctctttccccttcccttcttccctccctccctcttcctccctctcctcctccctctaccctctcttgcctccaatttatttccaccttctctcctaccctgtctattatctcacatccactgcattgcagctgtgtctgtggctacatccccattgctgctgctcaggacctggctacctcagcctttgtgccactgtcagtagaggctctgccccttctgcagcttggcctgctaattgctctggtctgtcttgttgtcagatgtctatttcgaagtttagcctactagtactgctcagttctgtattccctctctctatcatctctttttctaaaccccgttcctccctttctgccaacacctcccctgaactcacgtctgtactagggatatattgcattcaagactttgcacacataagtggtctcccctgtctttcctgaagctgtcaggcatccagtccccatcccttggccactgctggtctggttcagggctgctggctttactctccagctgtcacttcttgctgtctctgttgctcctgtctttctggcatgtgctcagctcatccacctgacagtagacaataaaagaccatacaggaaaagccttttctggacctaatgttacatcctgggagggtgtaagagtatgttttccagctagttccccaagtgagccaaaccgtcctatcatgtagccagagaaagggtatttgtatcaattgcagcaaacctcaaaaataaataaaggttgtgcctataccaagtgttctatttgtaccaatcacattgttccatttgtaacaatcacattagtgttttgaggccaaggaggaaaggccaatgtgcgtggaaatgtgtgcagtgtcatctactgtttgctgaagctagcaaaatgtgtagttcaaactctcatggttggtgctgcaccttcaggagttgggcctgtgttgcagccttgactgtcatgtgcgtcccctaaggcacctgtggggccatcattccgcgtggctgaggccagctgaagggcagcctgcctggccattttattgatagtcccctggcttgcagcagtcaggagattctgggagtatcatttggggagttaggtcaccccttctgtcacatttttatttatgggaaaaccaacaacagaaggaatgcttatgataggaacttactaacactcatgtcagctttaatggtatttaagagctcttcacatatttattcaactcctgcccagggagaggtgggacccactcgcctgcctttgaaagtgttctgtgcctggctctgcccttgatcagagctataaacaaccaaggcacaatgtggcagattagttataccaaatctttaaaccagtagtttttttttacatctttaactttgtgtgtgtgtgaatcattttgcaattactgcttttggaatgaaattttctttatgatttatttctattgtatgtgcttaagtattgccagcatgtaagtaagtatttgaccacgccaaagcaccatcatatgcatgtccattgttcacacagttgctaagaaaatggtgctttttcttgtccatgactccgttagcagtgatacttgcacatggactgtggtgtgaatgccttgcttaggtttaatgtcctcttagcagcttgctggtggaagtgcccttgaacagctgatgtgggtggtacctttctaccatggtgtgcatgtttgtatctctgattcttaggagatgtggtgtgacacaaaaccttccaaatttgtattgctggtgagacaggggtggcttctcagtttccatgacattttcctttcatgttgggtttccatgactgtggatgttgatcatatatgttcacagagaagactctgcactcctactcatatcctgaaggtgttgagtctctcctttcagcatgtgtgtctgccaaatagagttggttgctgtagtacaatcaatttaatcttatccccaactagcttacaaatgaatgagactcagagtctggttattttatttagctttgacaattcttggggggggggcacctataatctgatcttctgactgctggcctggctacctccccagaggtgtaccccagatacctactcttactcctggatctgggctcacggcccccctagtctcgtctctcatggccccttctctgctctccctcctctttccagttctcccatgctcaaccaggtaacttaaaaacctgcctacctctgatctctccagtcagtggctgtagccccttatattcaaccagtagttttaagttaaggaacaaggtctacacaagaaaagctggtagttcacgggtgggcctaggctttctggtaaagaatctagcattacagtgcatagcaacagaccaaacctccacggattgccacttttctataccacctctcactcacttaacaaaagatttaatgatagtttatagcactacaaagggtatggaaagtgttattgttatagataatttttttaaatcaattctaaggacattgcatagctttctaaaatttgagaaaaaaaatttaagcttgtcagtggctggaaagatagctctgtgggtaacgctttttgccaccaaacctaatgacttagatccttccctgggagccacacagtagaaagagagacataattccagcgctttgtcatctgacctccatgtgcatgccttggcatgtggcagcccccccaatacaaaataagtaaataaatctgggagcttgtaagagtaacataatagaataacattttttgagctgtgtctccagagtagctaccattatcattactttggcattgtttgtatttactcatatataatatttatataatataataataatatgtttatatttactcatatgtgttcagagtgcttcgtaggcttcttgatgcttcctgaacctggcatctagtttaatgttcttacatgtacccatttgcttgcaggcaaagggactcctgtcatcttttgtcatcctagacttcagccagctctgagttctgctagtcttctgcttcattttcctatggcagaaggcgtatattctgatgtctgagctctgcacaaattcaggcatttgagttgatttgcctgcatcagattataagttagcagagtgttacagtgtcggggatggagacatggtctacagaagaggaactagtggatgctttatagatataccttatgagatagccatatcacctctgaactcttagcattcctaactccccttaggtcaaggagttaaagcatatccagttattagtacatcataatggtgtaaaatagtcatatctaagggtatgacctaagggtatgacctaagggtatgactgaaaggtatgacctcagggtatgacctaagggtatgacctcagggtatggcctaagggtatgacctaaggatatggcctaagggtatgactgaaaggtatgacctaagggtatgactgaaaggtatgacctcagggtatgacctaagggtatggcctaagggtatgatctaaggatatggcctaagggtatgactgaaaggtatggcctaagggtatgaccattttacgtaacattgcctaatctttcactgtgttagatgtctaggaccaattctaagccactttggtattactggatgaagtgctttgatgcacctggacctttttgtttccgtagaaggcctttccactgaagaagtaaacgatgttctggaaagggtttcgttggagtggaagatgatatctcagcagctagaagatctgggaaggaagatccagctgcaggaagatataaatgcttattttaagcagcttgatgccattgaggagaccatcaaggagaaggaagagtggctgaggggcacacccatttctgaatcgccccggcagcccttgccaggcttaaaggattcttgccaggtagggtgagaaatggctgcactataggactgtagagcctttctgggctgagtctcttatataaaaagagaagatatcattcagtgtgtctggtgagtgggctgtgtgtgtgtgtgtgtgtgtgtgtgtgtgtgtgtgtgtgtgtggggtgtgcatctctactcatggagacctttctgggttgaatctcatatatgaagaggaaatatcattcagtatatgtggtgaatgatgcatgtgtgtgtgtgagcacacatatctctactcatggatgccagaagaggtcagaggaggacattaggtgccctgccctaccacactctaccttattccttgagatacggtctttcactgaacctggagcctggtgtctagtaagtcccagctgccctcctgtcactgccctcccttaattccagggtcgcagcaggtggtgatacccacattttcacatgggttctgggtatccagactcaggtctacatgattgcttagcaagcgctctcacccactgagccgtatctgtagcccgagaggctgtatctcctaaaaggcaaaaggtctcgaaatctgaagagaaagcagagagcgggggagcatggatctggtatcatgagctttgtctttgcttctttcataactgtttatgggaacgctcgtattcatggagtgaagtgaccgtattttctcttcctcagagggaactgacagatctccttggccttcaccccagaattgagacgctgtgtgcaagctgttcagccctgaagtctcagccctgtgtcccaggttttgtccagcagggttttgacgaccttcgacatcattaccaggctgtgcggaaggctttagaggaataccaacaacaactagaaaatggtaaatattggctctcctctgctgtgtgtgtgtgtctgtctgtctgtctgtctgtctttctgtctctgtttctctgtctctgttcctctggttctcctcttagttttccttaaatctaaaattactcccaatatttccacctttagtgtgtcttgagtttcattctggcttcatgctttcttccctgcatccctgtggcttgaagtattataatacattcagacctggccaggtggtggtggcacaaacctttaattgcagcacttgggaggcaggggcaggggaagcagcagaggcagagggataggcaatctgagttcgaggccagcctggtctatagagtgagttccgggagagccagggctacacagagaaaccctgtctcaacaacatccctcccccaaacaaacaaacaaacaaacaaacaaccacccaacaaaccaagccagcttggcatgctgtaaaactgcatgagtaggatatagtgacttctgggagactttgctttcttttggtggtgatgggttgaaccccagtgccccatgcttgctaggcacatgatttgcactccagcccttaaggagaatttaatgggagaaaccactttgttctcatcaaacaaaaacatcatcgatttctgtttgctcccagtggttaaggtcttagtagccccactcgatccttgaaagggatcatgttgcttttccagaatttgaacaaaattgagcaaggtagaattggagacagtggaatgaagctggttcgggtagctggatttggaaagcttgtatgtcgctttctgtgtctcgtcagctgctgccctgggttgtcatgtgccatgtgctctctgtgctctgactgtgacctccaccatgttagctcccgtacagcatgtacaggcattaggaaggcatgcatgttagacaaaggcaccatgttacttttctcttgactgtgcatttggacttcatgcatttcactcatggaaatctgttaacttagtgtgacattaaaaaccagagaagatgtctttcccggctgacccccgcaaaccaagctttcccttatgacgaggatcaggagtgggcagttgaactcatgctgctaattggtttcacctcttggtgcttcacatttcagctcacttcctctttggtacaaatgctgattgtctgggatttgtacagaggcacagagggatactctgtgttagctggctgttgccagtcacccctgtttcttacggtcttagggttcccatgtagtttgtgtacactcatgggatttcaggaaggctggtggcagggtcttcgcttctgtttattctttgggtatcatttgggggaggggaggttgtgtgagacaaaaacgaatgttgtccttcaagcttcatagagacatttcagcatgatcaaatggagaaaaatgctagcgagttaatagttcaaacaccagcctcgagaggaatgaagccacggtctgtctgtctgaaatgccagagggatggctggtcttgttaagcaacagagagccttttcagttgtaatcaggggatctaatttattatctactggagtctccttattatatacagaagattaatggtgcagtcgataacagtagtgaagtcctagcgctgttttccctaagcaagcatgttcaattgtcagagctgaagagccagcctggacccgcgtatttggacacactgaataccctgaaaaaaatgctaagcgagtcagaaaaggcggcccaggcctctctgaatgccctgaacgatcccatagcggtggagcaggccctgcaggagaaaaaggtaagctgtccttgggagcttggccatttctgagagttcctgttatgtatttgaagtggtttttcagtgattaaaaaaaatgaccatttttgatgaagtcttttaagattgttaaaaatttgttacaaaaattgcagagtaaatgtaatttattttattttttgtttattatttattattagtattattgtagaggtgggtgtgtgctgagtcagaggtgggtgtgtgctgagtcctgaggacgactttggcaacttggttttctcttccactgtgaattccagggggagcgttcattcaatcttaagtcttgtgtggctgccatcttcatctgtggagtcaatctgcaggcctaagaatttataattttaaacttaattaccttaaataatttatttgaggtccagaaagatattaagtgttactgggaaacatttacttttttaaatcatttaaataaaattctaaacctgttcctaatctgctagatatatctcctaaaataatgtgaggtgtattaggtgacctgatttctttctttctttttcctctttctctttctttttttcctctctctctttttttcttttcttttcttttcttttcttttcttttcttttcttttcttttttttcttttttttttttttttgagacaagagttttactctgtaatacacactggctgagaattgagtgcagtcttcctgcctcagcctcccacattctgggagccacttaaattatattgactaaaccactctcctgcgtccagtggcctgaaggctcaatgccaatgtttctccactgtgaccctgtaacacagttcctcatgatgtggtgacctccaaccatcgtattattttcaatgctacctcataactccaattttgctactggaatgaatcataatgtaaatcttcgatatgcaaaatatatgatatgcaggccctgtgaaagggttgttagacccctccaaaggagtctcgcccctcagattgagaaacactgttctatactacggtacctgatagaaaagaccaactgccgaccttgggctcttgttctacactgtgtgtgctgttacagggtttaatgtacagaatccatgatgccacacctacttatgagaaaagaaagatttttatttttaagtaagataccctcttctccatatatatgtatatatatgttactacatctgtgctaatacatatgtacattgttgtggatggttttaatctcttgacactttcgtaggcccttgatgaaacccttgagaatcagaaacatacgttacataagctttcagaagaaacgaagactttggagaaaaatatgcttcctgatgtggggaaaatgtataaacaagaatttgatgatgtccaaggcagatggaataaagtaaagaccaaggtttccagagacttacacttgctcgaggaaatcacccccagactccgagattttgaggtaaatcgagaggccaatcgataggagtttaggcttgtttcagggcacacagcgataatcatgcaagactgggatatctgctttctgagttctttgctttcttccttgtcccacgtttgttatatgcttaagttgggattcataatttgcttatcagagatattttaatgtgctggcaagcacatgtatttcttttgccttatagagagaaggcttcttggtagaggtgtacaagaccttgttgaggatgtagcttagtagcggttaagatagactttcatctggggatctgcatggccctatgaaccagtgctcaaagtacagcggtgactagttagagtggagcaggttaacctagttggaggcagagaatggagtcggggacacaggggcaggctctcacatgtcctaggctggccttaaaccatgctatctagtcaaggatagccttgaacttctgacccttcagtcacctcaagtgctgagagtgcaggtgtgtgtgccactgtgcctgccttttttttttttttttttttttttgagacagggtttttctgtgcagccctggctgtcctggaactcactttgtagaccaggctggcctcgaactcaggaatctgcctgcctctgcctcccaagtactgggatcaaaggtgtgcaccaccaccgcctgtgcctgccttttaaacctgtggcagaggttaacttcagggtcttatcatgctaagtaggcactctgccacacagcttcgagtgttccaactacaagtgagaggcttttacaaccttctgctgcattcacagaacatacatattacaatggtatgaatgagagttatacttgtctgtgattgtaacattttttgatgatggtcacattgacctatcagtgattctcaaccagcagtgtttttgattttcccctcaccctaagatatgtgttagtctagagacatctttggttgtcactgacatggcaataggggtgaggtagagcagtgacaaacagaggcttagtagccagggatgtagctagctgttttatggcacccaggttggccctcatagaggcagaactgtttagtcccaaatgtcagagttcaaggttgacccatgctgtgtgaactgattttatattttcaaatttaaatttagttaggggaattcatgagtgactcctgaaaagtttattttcgggtgggttagatgtatgtgttttagctgctttcctgatgctgggataaactattctgactaaagaatctcggggtgggaggtgtttacacttcatgatcacggcctgttgctatggggagtcagggaaggaactgaagtaggagccgtggaggaacttgctgcttgctggcttgctctcagacctatgcttgcctatcttttttatacagtcctagatcatctgcctcgagaatggtgccatccacatgtctgggtcctctcacgtctaagtcaattagttaacaagcaagagtgttccccacagacaggcccataggtcaatttgatctgggcagtccctcagttgagactcattgactcttggctgagacaagttgacattttaaaattaaatgggatggtgtgccagtatttgaatatggcacctttagtggccagtttgatacacacacacacacacacacacacacacaaacacacacacatacacacacaccatacacacacatacacacacaaacacacacatatccatcaaacacgtggatctctattcaactatttggtattacagtagcagactttaacatcttgttattttctgtttttctttggtgggtcatcagcaaggttggtgatagtatttgtatttattttttaattgtgtaacttcatgcatgtaacacatgtaagtttttgtttttgtttttcgagacagggtttctctgtgtagctctggctgtcctggaactcactttgtagaccaggctagagtcgaactcagaaatccgactgcctctgcctcccaagtgctgggattaaaggcatgcaccaccaacacccggcgtaacacatgtatgacttcaatgctaaaggccacgcttgctctcttgtttcaaacgaattgcttgttaattcactactcagaattcatgtgggaaaacttcaaagtttcttcataaagttacaagataattgtagtaaacactcactcacaggataacttttttctttttccagtgtcctgatgcatgttttagtttttaagctctattctttaaagccgtgagcacagtgggtattagattcactgccaatttatggagtttctttgggataaggtagtggaattgtttgcttaatttaattaaatcaattagttgattacttgagactgggcgtcattatgtagatgaactccccttgaggatctcgctggtctctagcaaacagagatccacctacttctgcttccaaagtgctgggattaaaggtgcacaggcacctactgagcctggtggaaatcagaagctgctgattttaaaatgcgtttttaatcctatatgtgatgcatgaagactgctattgtgcagatactgaataatataggaatactcattgccaacagtattcttagtcccagttctatgtcccgtcctggcaggcttgtattcacagtgaatgtttgcagaatttccatgtacatacagtccgcacatactactaattccaatctggggtgttttgtttgtttgtttgtttgtttgtttgtttgtttgtttgttttttctgtactatagaatacactactgtagatcctgatgagggattgttaagataaaaggaaagtccatttccccaggttccaaaaggcagaatggacaggtggctatctgtggcgtctgttagcatacctaagcacaggcaggcctttgggctccctcagcatcagaagtaccagctacacatttcaaagtccatgctagcatcttggtgtctcccacttcctttcttactgtgactccctctagctaagaggcttcctttccaccagctacacattctgtttgtttgtttgtttatttatttaaattaattattttatctatttacatcccaaatgttccccctccccctcccagagttcttactcccattccccttccccttcttgtctaagaggttgcctcccacccctgcagacccccttcccaggggcatcaagtctctgcaggatcaggtgcaccttctcccactgaggccagacaaggcagtcctctgctacatacatgccgcaggcctggaccagcctgtgcttgctctttggttggtggctcagtctctaggagctccctgggattcaggttgacacattctctttataacccaaccatttcagctacacttattcttttgcccactccctatcttctgtgttaacctacccgccccacccccacccccttgtgcttctgtttctctcatggccatgttcagtctgctggccatgtttagtcaactactgtctctctcctctctctgctctggactcttccagatacttctggctgtgtgttctctctctctctctccctctccccctccctccctctccctctccccctccctccctccctccctccctccctccctctccccctccctccctcccttcctcttcccctccctctctctctccctcttatctcataaacaccattcccttatgcatactaagaagcagtcatgttgtcagtttatatgtgtggtgctgaaatctgggaggagcacagttggacctctttccaaaccacactgttgatttaactctggtaagatatggatcatttatttctgctggcttctgcctcccaccatattcaactctgaattccaggttctacctcctgggctgctgcttttctccagctgcttcactccccaggtgccctcggctccctcctaaagattattggaatcctccctctgacagagttcctgtttgtgacactttcccctccttttctaatctttccctcctcagcctcagagacattccattctgtcttgctgcaaatggtctcagtccaactcagttaatggccaaagatggcgcattagatttccaaattctcacagaccgtagcaagttctctcacttcacgaacaaatgctccccaaatctcttaactctaaactctctgtgctctatataaaccttcccttaaccatccatggagtggtcataccatcagtttatacggacatttcaatacctaatagagtgcaaagcttagaaagtgactcctcctgctcagaatgaagtctttcaagagtctatagcacttttagaagctgagttaatcgtggtggtgcttagcttccatcctccagccctgggatatttgcaagaagagtccccaggtttgtgtctgtggtcatagttgcctcttagtttcttggcatttgttgacatttccgttgtctttacagctaattccttttgtacaggctaaggttagactagcccgctattgtctcccacagtgctaggcacaaacatggacttaaagtctgttctgtgctttgcttcacaatccatcacctcccttcctggtagcaagacatttgaaaaacatgaaacaggcatttttttcttattgctttcggttatgaatcatgagtacaaaataaaatccaaagaggccccttcttctctgattctttctctcacacaggcagtaatatcttcggttattatggactgtgatatgttttatattatttcctttcccctactcaagatcctacagtgtgggaatacctggaacattaccagcatgtctgcaagtgcccactaaacctagttttgcctcttggctctgccctccactttataacagttccaactcccgattcccagcagttaccttggaaattcatcttcccactgaagcaagggatggtctggttatcgtcatcagagtaaaatgttcacactttatcacacagtccctgccctttcttcttctagcttgcctattgtccccactgtgagtggcatcaagttgggagagaatcatgggtcccaaaggactaccctggactgtattgccttcctgtggacatgacacacctacttgttggaatattatgtttccctggctgatttattttttaatgtgtacagtagtttttttttaaagctttattattttatttattgtatatgagtgctcaaatgccattacaaatggcaaccaccatgtggttgctgggagagcaactatgctcctaaccactgagctacctcttcagccccacccactacccccacccaggctgagtctctaagaacaaacttcatggccagtcaccagtcttgctcagcaccaaagtacagcctgaaccttcctcaccttttcatgctcccatccacaccctgtggagttttatcaacttagagctctgtgtttctcctcccctcccagggtatgagctctttgaagatagaactctgcggggtgcccagcaagtaagagggggtgaatggcagtgatcagaatgactcactcagtaggtgtgactctatcaggtagccttccccctctctagtgagcagtctcagacccacttatcctcaaagatcacacagccctctgcttgttctcttccttcagttgctcaaagtcaaggacactcaccaaaccaaggtgttctgccccaggatgctgaaaagacatgtggggacggggccattgaagacacaggatttgaaattattttggaagtatttcagggtcaagataaggaagacgaacatcccgtatttagctactttagtctttctagagaatacaagcctgatatagtaattaaaatactgtcccctccccccatcatttttactcattacaggaaacaatgggccattccacaccttggatttagtgacacaggtttagatgtgttgatgtggtggcaatgttattcttggccttcctctctgtgacagaacaccgtttttataacagtcttttgagtagggttatggtatccttgaaaccccaggtagtgtctgttacaggctccagaatgtcaccaaactgagcaaattaggaagctctttacattaaattcctatgccaactctattttcaaagctggtttgtccctgtcccaggcagaaattagcagcttgaggatccacatacattccagctgatgggggagcaggaaagcaaaaatgccagctatgtggctgtagtccagaatgaggggctgcagtgcaccctcgagtctcaggctctcctgtccagagcttccaagctttcaaatgcttctatctccagctcaggaggcgggcagggtaaggtgcaaagggattgtttcattgaccctacatttctcctctgtgacctgcccctgggtgttgcccgctcaagaagttttctggagggatggatggtcaaggtttttaaacattttccacattccaaaggagaatctttggtattttaaggtcctctaaataaccatgttattagcaatttcatcgtacttgaatatttatgagtaaaaatgagaatgagaaatgattactgtcttagatgaggaccgattaattttttttgcagacatttttattagaaatttactggcaatggtgtgtgtgtatgtgtcagagagacagagacgggtagacagggacagacacatacagacacagacacagaaagacagatagacagagaagatgtgtgtgcttatgagaatatgtgtggaggccagaggccagatgactgtatttgcactgttttttaaaacaaggtctctgggacctggggctcccaggttaggctacattgactggccagtgaaccccgggaatctcctagcttcccaggaattgtaccttttaccagcatgtcggttctgcatgtcagtctcaggtccccatgcatgccaggaaagcagtttactgactgagccacctcccgagcttctcctgggaactttaaaccagtttatttagcagaagagaagttccttaaagaactttgtgcgcgtacatgtgtgtgtattcttgtgtttgttcagcaagttggatagaggcaaagaaaccattgctgttgtagactgtagactcctaagcgctttaaagatttatttattttatgtatatgagtacgctgtagctattttcagatgcaccagaagaggacatcagatcccattacagatggttgtgagccatcatgtggttgctgggatttgaactcaggacctctagaagagcagtcagggctctaaatggctgagccagctctccagtcccccctaagctctttagtggtgtggtttttaaatggctagagagattctcttgtttttgtgaattctttcatgttctttgggacttagctgaggaactaatgtgagagccagagtttgtaagttttagtgactgtacataagagatccatgaagccccttgtccagggacagatggagaaatgctggagactgatttttctataagataacaagccacatgttctgacttcccttaacaaatttgttccacctgactgcaccagatgtgtttgatcactcagaggcaggcaggagggaccctggcaggaagtgcaccagcgtgtatgcttacctctgattggatctggtgagaaatatgcagccttgtaggtttgcttggaaagttgtagtggaatgtgactccatgtccgatgatccctggaatggacctgaccagagtccttcatcctggccagtatttctttaacgcttgcttcgaatttggttgaaaactgttctagtggtcttagtcttgtaccgtgcattaccactgactacagatgagctggctcgtggtatcgaccggcagtttctgctacaggaacatgagacgattttccttccagggaaaaatagatagtctggggagtgtgaaagaggagcgtggagctgggtctctgcaccctctgcaggctggtggtggctggtcttcagtagtgaccccttgcttcatagtgtggctacagggcggtgtgtctactaaatctgcccctgcaaggcattttcaaagtttggactggttcccgtttccttgactttttttctgctgagctctttaactatgcccatcagatatagcacgattgagctttcagctggccattttccagggactttaaaatagttataggactgaacaaatgttaatgctgacagcaataaaaaaggacaacaacaacaaaacaacaaccaactacctgatttttagcaaacacaacttcactgtggcattcctgggcatctctgacaagatctaagttctaggatttggaagcattggctctctaacgaggtcctcattgttaatagtgaggcagatgctttcgtgggtgctaagtgtatgttgcatgcattcgtgtggcgatctctgtcccaacactgtctgtgatttttcagaacaattaaacacagttgttattgttgttattctggttttacaggtgagcaactgaggtgccaaaacagaattagtttcttacagccatgctgttagctggtgagctcggcgtctccccatcatagggtacagggattatatgtcagattttctgtagtgagaagcagaatgcctgtttgttgctccgtctctgatatttctgtggcttgtgtgtgtgtgtgtctgctacattctcctttcttttttttttcctcagtgaaactgagagcaagaaggaacgggtgttcctgggctgtgtgccctcaccggtgtctggggttgtctgaggcgaggaagaggtgactgagcccctaaaacttcctctcattccccagtgatgggttaaagctgtctattttagtcagaggtgactgtgactattagccctcttggggtatgaggcacctctatgtgttactgaaaaatcttagctgtgaaactgttttcctctttcaaaattagctttgatggatttcctagttcctcagaaatactatgttatttaggagttcagaatggagattaacaatgcaatggggtaagcaggcaattttaaaaggcttgtttcatggaacaagattttatttttagtgatttatttttaaatcttatgtgcctatctgtgaacttgtacatctgtacttgtaacatgggcatgcggtacctatggggaccagaagagggcgctagatcttctggagttggaattcaagacagttatgcattgtcttgggggtgctgagaacagaaccctgcttctctgtaagagtagtgactgttcctgtctgctggggtatccctccagccccacttctatttttattagcatttattaattataaacaatgggcgccatgatttcacttacaaatcctaacactcaaaagcaagaaacccaattgaaaccaaccaaccaaccaagcggacccaaaccatgtacccaatagaaaattgtgtttctatgtccactttccaagtagaggaaagttaggaagagaagttggtaggaaagtggaaaggttaaaagttctaattattctgttggcttgttgctgatctattttttaaacttctgttgtcagcataataaaacaaaatttggtatttataatgatcaagttctatagctattctatccatgttaagcaatgtttggtaggggaagcttattttgaggtaaatactgagaacactggggttttagtcttcatgttgctcctgatatatttaagaacaaacaagtttaacccaaaagaatcattggacaaattcacgataagaaaaacctaaaatggttttaggtggtattttataggtataacctattttatagatgtaacttgccatagttgtatgtctttacgattcattccagcttcataagaatattaatagttggttttgtttggtatattataggaatataaaatattttttgttgtctccagagtacatggatcagaatggtttgtgcattacccggctatattgccctgtaaatgtcacaaaagaaggaatatttagccttcccaggactagggagacacatggtggtcactttcgaattaaccattcaggtttatttctatttctaggcgtgatcaagagtagaactgaaggggactcggagaaacattaggggaattagcaaggcagactaaccaatgaagggacaggaggctttggggaaaatagccaatgctttagtactgaagtttaagtgtggctgcagttgacttctctacagctattcctttgcgatctcctctctcaagcctactttctagaaaacgtttgccttctctttgtacttattaactttgagtggttagaagaactgaaataaaccagacagtggctagttctgttttcagagaaggaggtatcccatggaagattggagagtcctgtgtcatgttccttcatgatgctgtgtgcttactcctagttccagtaacttccgagaaaaaattgctctaagttagttgaaagcaaaagatttttgtttatgctttgactatgactagagtagcattttttttcctgtaatttgaatcttagtcctaaatattgcttgcatttagatacaatagtttattccagagtggcttgagactggtggatgaccaccgcagtgtcatttttggaaacatttccttgaggataaactaaagactttattttccaagttgggagacttcaaagaggaaatgaaacaaatgaaaacgatgttattgagttttgagaagttgtctctttctttggtcccagtagatcttgagatgtcctggggttgtatgtcactgagtaatatgcccctctgttattgtgttcaatttaggctgattcagaagtcattgagaagtgggtgagtggcatcaaagacttcctcatgaaagaacaggctgctcaaggagacgctgctgcgctgcagagccagcttgaccaatgtgctgtgagtgcctccgctctggcaatcctactggaataaataacattctcttctcgctctttgtcacttgccattattaaaattgtaagaatagggcttatgaagtctagataaagagtcttttattgtaaagcttttatttttacttcgtagctaataaaggacagacagattgctcatattatactgccgtctgtggttataggattcgtgatgagaacaagagcaaatttatttctttggaagctgttttcttctgttaagattgtgatcttaatgtaatgattatcacaagcatgctgctgccattgtagcacatgacgaacctttctgagcagcatatctagcaaatgaaatgtgctagcaacacaatttatacttgagactcaccaggtctctctagagcagtggttctcagccttccgaatgctgtggcctttaatacagtccctcagagtgtggcaaacaccaaccataaagttattttcattgctacttcatgactgtaattctgctactgttatgaatcataatgtaaatatctggtatgcaggctgtctgatatgtgaccctccccccacccccaaaggcctacaggttgagaaccgctactctaagttaattaaaagtcatacttcccactgagattcaagtaattctaatttaatttttagcgggcgactgtattaaatgctaggcaaaatgagtttcttgaagtgagtcatctcttaagtagctgagaatcctgaataccagtcactatgtccttgaaatatttgcaggatccaggtagataggtgtgatactgatgtccacttacatgggagtacacttaacatggacttatctcctgtattcagacgtttgctaatgaaatcgaaaccatcgagtcatctctgaagaacatgagggaagtagagactagccttcagaggtgtccagtcactggagtcaagacatgggtacaggcaagactagtggattaccaatcccaactggagaaattcagcaaagaggtgagcttggcaccttctttaggaaggggacacactgtcactggcttctcttgaccacaaaatcaaaaccaaaaaatagtgctctacaatttttacaggacagcataaaacacacttaaagcacacatgcacagacacatgcatatatatatatatatatatatatatatatatatatgtatatatatatatatatatatatatatatatatatatgtgtctgtgtgtatatatatacatgtatatacatatacatacatatatctgtgtgtgatgtacacacatacaaacaatattctttcatagttttaagatagatattaaatatatattaaagacatatataaagatacatatatcttatatataatatatttacttattttatttatttatatactacatatacatataatatataaagatatataaagatatattaggtatataaaatatgtatattaatattaagtatataagatatattaaatatcttaaattaaaatatattgtatgaattatatatatttattatattagtatattgtataaattatatatgtgtgtatatatacaaagacatatatatatatgtatatatatgtgtgtgtgtatatatatataaaaattaaggaagactactgcttgcttagtgagactcaggactgtcctattctttctgttttcaactgagttccacacattcatttatgacacttgccttgccttgaggacatttcagtgtggtatctactgattatagctattaatcctttaagcagcacatatttattaattaggcataattaataaatatagtgtagtattttcttaattagtgtctgttgctaggcttctttgtatgctctgggacacagaaatgaccagaggaaaagtttttgcattcctatgaggcaggtgagctgtcagggaggggcagccaagaattaagagaaggtagagttcttggcaatcgtttagtcagggagttgctcacattgggacattgcagaggtctgagagttggtgactcttggctggagagaccatgtttgtggtcaggatagcacgtgtgagctgtatcccttgggaacagagacaggccttgggtggaggacaatgtcagatggaaaactgatgctctgggtggctccagagattggcaaacggtgtgtgcgttcgtgcgtgtgttctgtgtggattgtggtgctctctgagtgataagaacccaggagcagaagcttcctagcagcaggtaactggatgagacctgttctggaaggatggaggtggaggtaactctgtgcatgcaaaggctgcttcttatttttcctctttttaaaattttagcttttaaaattcttagtgcccttggggcatgggaagcagaagatagtaagagaggtgaataaagctagaggcatgagtcaggttatctgagttaaaaatcaagctttaactttaactcaggagcgacttcggatgaccccaagaaaagtgcatcccctggcgaggtggggaaggaagtgacaatggacagtgggggagggaatgggaaggaaccctatggtggcatgattgaatgttttgttcttgttttagcccaacatcttcattttgaacatattttatgaggagaaaaatcatactaatcctacagagaaacacccatggacctattccaagatttatcagtagctagttttgtattatattttctatgtatctctgaaaatatgcttcatacaggaacttgaaattattgtcatatattataatataggcatttgtcaagatgccatgatccaactcaagaaaataatctttttttgtaatatcactgaatacactatccaagtttgtatttctgtatctgctttataatctgacagtgtaagcagctggggattttatctaaggaaataaaggacaagcttcctaagtgacattgaggaataagcaaccatgtagcatccattcgtctacttatcccctgtctcctgtatccatgcatttatccatctgtccttcatcctccatcatcttcatccatccattgtctaccattaccatctcctatctgtcacatccatccatccatccatccatccatccatccatccatccatccatctactcaagttcatctgttcacccacttgctcataacaatataaaatctacggtacagaaagtatttagatcagttctagacggtttatctcactcactagtaaaatttaaaaagttgtatagtgtgtgtgtatgtatacacacacacacacacacatatatatatacacacaaatgtacttaggaaacataggtctatctggggctggagagatgggttagcagtttagagcccttcagctcttgctgaagacccaggttccatttccagcacccacattggcaacatacaacagtctggaactccatttccaggtgaccttgatttgcccgcttctggcctttgtggttaggtgaggagctctgaaaatattcccagactcctctgaagtacttcacaaagttacacagtctgtacacagactgtgtacaggcaaaatatccctacacacaaaataaaaataagtaaacacaggccatgtcaaactaaaatgtacagaaatgtgtctcatgtatgctaccatgacagaatttaacactgtcctaaaataccaagtctatagttatgatcttgtggattttattttcaacttttctatggatccactaaaatgataatatttattgttgttcaggaaatgtaaaccaagagtctacatttatgtgactacattgcattttacccccccccacacacacacacactatgccatagttttatcaagagctgcttaaagtgttgagcaagggagaggagcactgtgtgctattgtggcttctcctagaagagtcacaccctagcttgcggggtgggcatggaaagaaaagttccttgtctatttttaggcctgtgctcctgtttggagggagggaacaggaaagccactaaccattccttaacccacattcctgtgagcccatcctgttcctggcctggcctccggtttctgtcagctctggcctccactcagacatgtaatttgagcaggctactggacgtgtcaggggaaggttggacgattcctgtgtgacacgatcatctctttcagccgaagtgcatttgtggttaggtgaggagctctgaaaatattcccagactcctctgaagtacttcataaagttactgagccagattcagacagatagctattttcaaatatatgttctacttcctcctcctcctcctcctcctcctcctcctcctcctccttcttcttcttctctccttctctccttctcctccccctcctttttcttttacaaaacactttacttatgtgccttggtgttttgtctgtctgtatgtctgtgtatgtagagtgttggattttcttgaacttgaactggagttacagttacagaggagttgtgagccatcatgtggggactgggaattgaacctgcatcctcgggaagagcagcaagtgctcttaaccactgagccatctctccaacgtctatcttctactttctgtttttttttttttaagatttatgtatgtgagtacactgtaactgtacagatggttgtgagccaccatgtggttgttgggatttgaactcaggtccttcggaagagcagtcagtgctcttaaccactgagccatctctccagtcctaccttctactttctaaccaacattttatagggtaatgccttgtggacatcttttgtaatagttcttttcatcctcagttttttccccttatttttaagaacatttttttgagaacaggtcttcttctgtagagcaggctagccctggatttacagagacacacctgcttctgccttccaagggctgatattacaagaatgtgtgactgtgcccaactccaggctcagtttagaatgtgaggccacaccatgggaattctgcttcctgttttattttttatataatagacagtgttacaattaaattacttgatgttcatacctttatcgctataggtgaagctccttaatgtggaattaaaaggtcagaaacctagttagtttctgctgcttacctttcacagtgttgggagtacagtgcaggctgccagggagaaaaaacaccagctgtgaaccctattttcagagttatattagatatcttctagttaggttcatgtctaaaatgttgtatagaagtcattatattttcatcctttcttacattacacagcaccagcacaggatgctttaaaagttttatttaaatgttaaaaaataagactggaaatctattgcagtgcctttaaatattaaagggtagaacttggcatttaacgtattaaaatttatttattgagtggaattggcgtttccttcctagattgctattcaaaaaagcaggctgtcagatagtcaagaaaaagccctgaacttgaaaaaggatttggctgagatgcaggagtggatggcacaggctgaagaggactacctggagagggacttcgagtacaaatctccagaagaactcgagagtgcggtggaggaaatgaaggtaaggccttcctcccgactgccctcttcacactagttagtctgttggtctttcacctatcacactgcacagaaccctatggacaagtctgctctcagtaggagtgagtgatgagcagctgtggtaatcttagttgggaaagaggctgatgccagtccactggttcaagtccaccccagagtagatcgattctgggaagtccctgtggatagtcatggaggtttctgtctcgaagaagggttgtgaggagaaactcatttttcttttattattgcaataaacacatataatataaattttttttttacccttttagcagtttcttggtgtatattttatggtgttaattctagtcatggtaccgtgtgacttctatcactgtttccaggaagtgtaagttttggtaaggagcaaaggagacttggaggttattctagttctaatgggtttcattctagtcattcgtgggggcccagggaaccccagaatgtctttggagcaggaggcaaaggctacattcaagtcagtattgggagtacatgggaaccccagaacatcccaggagcaggaggtaggagatatagagtcagtaatgagggcacataggaaccccacaatgtccttgagcagaaatcttggcgtatacagagaagataaggtgaagataagttggagttacaagctgtggttccagaaacatctattcctgtgtcagtagttgtccttgtataaggaaagaactgggcctcagacccacatttgcctccactatccttctagcatgagggcgtgattctgtctttaagagtcatccttcttgtcaggtggtggtggtggtggggatacagctttaaccccagtacttcagaggcaggggcagaggggcagaggggcagaggggcagaggggcagaggggcagaggggcagaggggcagaggggcagaggtaggtggatctctgtgtttgaggctagtcagtctacagagcaagtttcagagcagccagggctacacggagaaatcctgtccttaaaaaaaaaattaaaaaaaaaaagtacacttctctttgtaaaagatcaagtaacatggtatattgttaactagtagttatactaccaattaagttggttaactcaactagtagtataactaaggcaaacttttctgtgcaggtagtttttaaaaagattctatgtgacattcatgcatgctatcttgagtcagtagatatgaaaagagacttatttaatctgtgtcggggatcaatatatatataattttcttttttctaaaattttttttattaggtattttcctcatttacatttccaatgctatcccaaaagtcccccataccctcctccctcactcccctacccacccactcccacctcccggccctggcggtcccctgcactgaggtacataaagtttgcacgaccaatgggcctctctttccactgatggccggctaggccatcttctgctatatatgcagctagagacactagcttcgggggtactggtcatgtagctctttttgaaaagttttaaaactatttttagtactgaaaatatttaaaagtagattactatgtaaagaatggctaactcatttatcactcacacttttggagctgcagtttgctgctgattttaaaagtcattgtagttgacagtgaagaaaaatgagattacaatccctgattgggcaacactctatttatttttattctttaaaacagccattaggaatttaaaagccactacacttaattactttttccctcaccctgggagagctgaaatccattaagcaataaagcaagctaaaggggggagtgaaagacggctgcaggtaggttttcctgcatgtgagactgagcaccttgggcaccgagagaaagccaggaagcagctatttctggatcaggttgtccagaggagcttcttcatcttcattattggaaggatggatggacccatggtcaaggaggaaaatgtttttacaaggatttgtgggccattttaatagatgcctctgccacagtgtcctgccattttggggggtgtttatttatttcaatttaatgtgttcagacctccagtggtcatttaaaatgagttcatttagattcctaccctgagtccagaatttaaaaatatatcttgccagtagacactatttaggataacttgcctctaaactctggtggtattaaaaagaaactgttgtgggctcggggaattggaaactagaagagtaagtgagattttatttttagcattcttctttcaaaaaactcaggttacagaattttttaaatagtgttctactgaggcatatagaatcatttagttgttttgatattggattaatcattattattattttttaaagaaagatattagtcacagagagccatgtttcaaattgctcctttcttgggacagagggcaaaagaggaggtgctgcagaaggaggtgagggtgaaaattctgaaggacagcatcaagctggtggctgccaaggtgccctctggtggccaggagttgacgtcggaattcaacgaggtgctggagagctaccagcttctgtgcaatagaattcgagggaagtgccacacactggaggtaagagcttgtttgccccagggctaccatcctgagatcccagctctgctgtgtggatttccctgtcttatttaaaaaaaagaagaagaagaagaaagaaagcgccattactttgtcaaacattggattataaaagtaatttttatggaccaagtagataaaaaaatagagagatttttgtttgttttgtgttaaaaggagaccaagatctgcctgcatttctcaggaggttcaatggtgataattgatccccgcaggtttgtgtgctcactagtgttctcaggttaccataagaatccagacagctctcttttacctggctgactgttattttatttttattttgagtcgtgtctaatatttactggaggggaaaaagaatttcagtatgtagagatttcattgcatttttaggtggagaatctcactgcctatcagactgaagacctagattattctgtgggattattttaataaagtgctttctcatcttcatggttaaaaaaaaactggtcaaaagtcttaagaagcgttttgagttattcaaatttaaatgaaacacaccctacaataagcaattacattctggtgagttctgataatgccgagggaagatttaaactgagtttactcattgtacttcttgtaagatctgagcagatttttcggcctgcttcttgtaagattaatgggagaaggggactagaaatctctttcttcttttgctctgaaccaagagtcaacaaattatggtagaggcctcaggtataaattgtgtagtttgagctaggcaatggtgttctatgcctttaatcccagcaccctgaagggagaagcatctctgagcccaaggccagcctggcctacacctgaggtctggaacagccagggccacatagagaaaccctgccctgaaaaaaaaagttggttttttttggggggggggtaggtttggttaagagtggtatttctaaaggattgaacatggtgtaaacacctatacaccaaagatgaagctgtgacaaactatggatgtcacccctaaagtctgaaataccttctctgtgcctctcgagaaataccggctgagccctgttctggcgagcagagctgatgtggggaatggatgggactgtgccctaccttggtagagaagacagatgcaggggattttgtgcagagctctaatcttagcagtcagataagatcctctcttgttctggagcaaggggatagaaggctctaaatgcatgccttcctcggcttctctcctacttcggaactctgagtagggagaacacaggactacctggctcctgttttggtaaaatgggcccatcctcttatgtgtctatctttactcacttggaaagaagtccagatggctacagagacatctgctcccatcagtcatctaggaactggaattggatatgtcctaggagatttaagtttctataaaaaaatatcctgaatggtttttaccttttgctctttctgggggtgttgctgttgttgttgttgttggtggtgttgttgttgttgttgttgttgttgttgttggtgttggtgttggtgttgttggtgttgttgttgttgttgttggtgttggtagtggtggtggtggtggtgttgttggtgttggtgttgttgttgttgttggtggtggtggtgttggtgttgttgttgttgttgttgttgttggtggtggtggtgttggtagtggtggtggtgttggtggtggtggtggtggtgttggtggtgttggtagtggtggtggtggtggtggtggtgttgttgttggtgttggtgttggtgttggtgttggtgttggtgttggtgttggtggtgttggtggtggtggtggtggtggtactggggattggacttagggcctttgtcaggcaagtacaggttgtagccactgagctaaatctccggctctaacattttctttaaaacaaacaaacaaacaaacaaacaaacagaaaatgtatttctctgctgtttttttcccctattaattattcaggtttgtttttttttttaacatttagccaggtccttggaactcattttactgaaaaccgaggcagcttcttttccatttttccttctccttccatcttaattgctcctattttattgaagatttagttttgcctcatttatttgatattctagcttcgctggtttctggattcctgtatattactcactgaaatggagttcttattgatcgaagggatgacgtatggttatggcttctcttccgtgttaattttcccttcacatttgttaggaggtctggtcttgctgggtggagctgcttcactatctggacctggagaccacgtggttgaacaccttggaggagcgcgtgaggagcacggaggccctgcctgagagggcagaagctgttcatgaagctctggaggttggcacctgatgtctgagccacagttattttcactgtgaatgggaaagatgtctgtctgtctgtctgtctgtctgtctgtctgtctatccatccatccgtgcatacaataggatgtgtgttgaggtcagagcacaatttgtaaaagttattttcccccttgcaacatagatcccagggatcaaatccaggtcgttagggtttgtggcaagctccttttgacccactgagccatctcaccggcccctgggaactctttataatcagttttgtaaggcaggagctacatgagtgcatgttagacacagcgatagtcactagtagggtccagttcttttcaccattctctgaacaaaccctgttttgtttctttgcacttatgactatggcatgaaccatgcttcaggtggcttcttcatcattctcagatgtaaaaagttaaagcaggctgctatgtgcattcgtgaaggcaggggctcccacagtggggctggatgacaaggctgggcttcaggctcctggggccaagaaatatcccgaaggcttcctcgttctgtagtttcgagcccaggagtacacacgatactgtggtaattacttcagaaacgaattacagtgtaaccaaagaggtttcacttgtacaggagtagtagggaaatttggggatccgatgaacagcagaatgggaagtcagagagctattcccagggggtgggggtgaatggggctccattcctgaagatggatgccgtgcagggagagaattgtcacttctcaaacacagcagagtagaggatgcatagacagcatggaaaccactacatgcccattgaacaaacagcaagcatgcttttctcatagggcataaatatacattctagaaatccagacaatggagaaaaggaaaagaaggctccatgataaacactttaatacattctgtgttctcttctcttctctcttctctctccctcactccctttctttctttcaggtttatttatatatatatgagtacactgttgctttcttcagacacaccagaagaaagcatcagatcccactacaggtggttgtgagccgccatgtggttgctgggatttgaactcaggacctttggaagagcagtcagtgctcttacccgctgagccatctctccagccccctgtattttttctttattatcagcattccttttgtgcatgtatactgcagggcagtaaatgcagtcaaagggctcctagtcctaagagcttcggaaagagtttggagccttaggatttttgtttgtttgtttgtgttttgtttttgtttttttttaattgactctcttttgtcaaattgaactttatggctttcagatttcccatctgtagaatgggagtagtatttcatgcataaggttagttggacttgtgtctataaaactgtatacatagaaatacttagtgtatttctgtatcataaggtagaaaaatggatctctaattttaccaatgtagttaataacatgagataattttatttgtagagtacagttttgtatgtcacactgagagtttctcataaaattaataattattcaaattattttatgcatatgttcttgaagtttttttttaaagttttgtgattttgttaatctatagtggataattttgtgaattagttatttccttaatatttgtcattacttgtttcttaaatagatttctagaaagtggaattaatattaatgcttaaaatggcattttgcagatcttgatccatttagacccattgaatgtattttttcccctgcccaactgcagtctcttgagtctgttttgcgccatccggcggataatcgcacccagattcgggaacttgggcagactctgattgatggtggaatcctggatgacataatcagcgagaagctggaggcttttaacagccgctacgaagagctgagtcacttggtgagaaccagacatgtgcagtgtgattaggtagttactgccacaagctaactctgagagctctctctcttactcggagcttccgtgctggttacacttggtaatgtataaattggtccccattagataatgctttggtgtggtgggagttaaagtaggcaggcaatgttaatgggagcataagggctttgaagtaagtatagaagaatagatctaatatttgtaggtcagatgcagcttgatcaaacaaacaaacaaaagacaaacaaacatccaaattgccaggacaaggcatggtggtatatgcctttaatccaaaaacttaagaggcagaggcaagaatatctctgagcttgaggctagaatactctgcatagggagtcttaagccaggtgaagctacatagtaaggtattgtttcaacaacccaatcccaagccaagccaaaccaagccaagccaaaaatgaaaccaaaccaaactttgtcagatactggatgtagcccagtggtaaagcacttttgttgtacacacaaggctatgtgttaagttcccagttaccttctatctccaacacctctttgagatttatttctatttgtgaattatgcagttttctgtaagaatagtattacagctatgtctaagaataataacgtctatatgtatgtcctaataacgattagggccttccgaatttgacattaactgttatgaaagctacatcactcggctgatgctcagattatatctcaacatgcatatccatatcagtgataagagaagggaccttgttcttttgtaagaaggttgagttgatcattagataactataccagattaccaagtaacaactgctgagattagactaaaaatatcattgagcttaatccaaagatgtgtggcaattagtggtttgactcacatgtgcactgttagaacttgttctcaattttagaaaaaaaaattaggtatttattcacttgatagacattcttactatgtcttattttttttgttaggcattggagattcttaaaattgctttatatttctagtaaaataaaaaaattagaaattacaaattttactaagtttaagacattttgtatatgtgagtgtctgcatagatgtttatgtcccatatatgcgtctcatggtcatgttgtccagaagcgggtatctgaccccctatagctggagcacagatagtcgtgagccaccctcactatctactagggcaacaagtacccttagccactgagccagtcgcctgaaatacacattttttttctattttatatgtcctatgggggaatctttttgtacttgtattttgtcatagtataggttaatagaagtaagaatgagagattcaggggctggagagatggctcagcagataaaagcactggatgctctccttgattcaattcccagcacccacatggtggctctcaactgtctttagctcctgtcccaggggatccgacaccctcacatagacatacaggtagtcaaattaccaatgtatttaaaatgaaaataaataaataattcttttaaaaatgagaggttcagctgctgtgtccatgagatactagaagaacatttgcactcttattatgatcgttattaattatttataagaagagctacagtcttgaaccagtactttattataatctgcatggccagaaggcacattcagctatttatatttgtgctgagcagttacaaaggaaatgtctcctctgtgcaggcggagagcaaacagatttctttggagaagcaactccaggtcctccgcgaaactgaccacatgcttcaggtgctgaaggagagcctgggggagctggacaaacagcttaccacatacctgacggacaggatcgatgccttccaactgccacaggaagctcaggtattgctgcaaagccgagagcctttgcgtcttgagaaagggcagctgtagcctggtcctcactgccagagtcaggaggactctgtatggaacagcctttgggtgggggctgttcttgttccttgtgtgagaacttgacacattttctccctaccattttatgcatatgggtgtctggcttacatgtgcatctgtgcactgtgctcgtgcctactgcctgtggatgccagaagacagcagtgaggcccctggaactggagttagactgttgtaaaccaccctgtggggactgggaaaggaacctagatcctttggaagagcagctggtgctcttaacagctgagccatctctccagctcctttcacacagttgatatgttagaaaatagatttcttcctttctctctttctctctttctctctttctctctttctctctttctctctttttctctttctctttctctctttctctctttctctctttctctctttctctctctctctctctctctctctctctctctctctttccttccttccttccttccttccttccttccttccttcctttgtagctatacagttcaggcagtttattctgtatacatcagatgtgaacattaataatgacaagcaaagaccttagcatgtgcatagcacacggtggtgtactgtgcaacagtttgttattatcatgtatcccacaagcttattagtgtgtattagatataggatcatatactatacaactaccttgaacttctgtattatatttcttcctgtacttggttgttgtataaagacatactgctgtattccaactgttgttatataaaagctcacatgttgtgtaaaggcatactgtaactcgtgcttgtctgggacttactatgcagccaagggtggccttaaactcagccatcctccagctgcagactccagaatgctaaggattacaagcatgggccattacccagggcttctttgtgtactttaaaaacacaccttctcccgttttttatcttcttggtagaagatccaagccgaaatctcagcccatgagctcaccctggaggagctgaggaagaatgtgcgctcccagcccccgacgtcccctgagggcagggccaccagaggaggaagtcagatggacatgctacaggtaaggactggcttccctttgctttttatatatggtgggtatagaaaagaaaagcagaaaggcttaaggacttcggtaccttcgctctgtgctatgattcaaacatgggatgggagcggagtattaaaggctcatggcaacaggaacaggttgttagctgggtaaggaaactatgagctttaagagttggctgagaagaggggatgagttcaggccagcagttgactttgtgtagaccattctctgatctcagaggctgatgtctgggcactcagggcctcagtaggtagagggaaatgagcttccactcttaatgtggtagaaggcatctgaggtctatgttcatgaaaaagtgagtaaatgaatggactttctcatccagagacaccatctgtctccagatgtagtttggagactgaaattctgagtactgctcactcatgacatcgagcagtggttctgaacctgtgggatgtgacccttttgggggtcgcatatcagatctcctctgtatcagataatatattatgattcatagcagtcactgaattagttatgaagtagcagtgaaatagttttatggttgggggcggggtcaccacaacgtgggaactgtgttaaagggaacattagaaaggctaagaactactgctttatatgaccgtcctaattcctctggggtttcctgggttggcctgtttttttttttttttgaaaagtctttcggcattatgtattatagtaatatctagttagagcgaaagtgagtggcttactcttatttctgcaaacagaggaaacttcgagaggtctccaccaaattccagcttttccagaagcccgcaaatttcgagcagcggatgctggactgcaagcgtgtgttggagggagtgaaggccgagcttcatgtcctcgatgtgagggatgtggaccctgacgtcattcaggcccacttggacaagtgcatggtgagcctgaggcccagcaggcagctcacatggccagagctgctctgatggtttagtatagagcatcccttcttattctttagttcagggtatggagatgatggagactgtgtcagaacaaaaagaactgtggctctcccagaaaaaaaaatagacagtataagagtaataggggagtatgaaagcaacaggtatgatctgtgcagataaaggaagcagattgcacataaataacatggatttaaaaagaaagaaatgtataaactacaacatgaagtgggaaagacctctctgaaggatgcaactgataaatgaaactttccacaataaatttgaagtacctctaatatttggaatattatagagtaaaaaaaatattttgctaggaaaatgacattcaagtcaaagtttaaacttcagatgggcagaaatgaatgacaaataagaccttactattccattgtttgtagttagtttaatagaggtttataaattttatttgttttttattttttaaacaagtgctctatctgcatgtatgcctgcatgccagaagatcccattacagatggttatgagccaccatgtggttgctgggaattgaactcagagcctctggaagagcagacagtgctcttaaccactgagccatctcgccagccctaatagagagttttaaatgatgttgtggggaggacctgaacttagccttattgtgcccggtgctcttctatctcctgggaggagatattggtaggactgtcttttccatggtttgtttcttatgtgggtggaatagtgcacaggtaggagacgtttgaatcacatgaaagtgttgtaagcatctgtttgctcattgggacagagtagcagatgtcactgtatttgacatcacagatactggctttgtatccttgaagtgttttgagttggatgctcatgtatggataagctgcctagacagagtttgggggttcacggtgacaagtacgaaggcaatttggaatttgacctgttgaactccaacttcatactcatatccattttgacactttaaagtattaagtgtatttcagaatataaattatactcattatggtacatttgtcttctctgaggaatagaaacaaataaatgttagggattccacattctttcgggcacagattgccagaggcaactgtcttccagtcaccggtgttaggattaaagaattcattcagtgccgtgagttgaaccaaggaccttgtgcatagtaaacccatgctttctcagtaaggagtctgccatccctacagtgtggttccacacagagacattccagtttgcatcctgtaactttccaaagtttttgaaggaaacatggttacagtgagcccttatccaggatttctactgacatttaatacgcacgtcttgttttatatttaaacacacgcaaactctattagtttattatctgatttgaagaagcattacaatcctgacttcacttaattcaaccttcaaaccatattcaagacagacagtgtgccctttcatatccgggatgaggtattatctgtccagccacagaagctgtgctctgaaatgatgccagtcgggaattttctgttaacaatggaaattttttttcctcttttttaaagaaactatataaaacgttgagtgaagtcaaacttgaagttgagactgtcatcaaaacagggaggcacattgtccagaagcagcagacggacaacccgaaaagcatggacgaacagcttacatctctgaaagtcctctacaatgacctgggcgcacaggtggggggcgcttctctctctctcctctctctatttatctgtcaccccctctcccaacatttatcaaatttaatctttacttgtacatcagtagtataatcgttattagttatataaatatttttagattacttaatacaggatgatatttatattttccatggccattggcataagttattctaaggaaactcaacaaggtaatagtttctgtataaactttggttttggatatctaaattcagtaggtatgttatcatgtcaggatctagtaaatacttggtggtaggtagtctaccgagactaaaagcgtccattgtatacttcaatgagtgagtgttaagagttggtaggcaggccattttctgttgctaaatcccatagaaaaactgtcctctgactttgagggtttgccctgaaatttagagtccaaagaatacgtgaaattagctagggagaggatatgatgagggaaaatgaggctactgagcaagtgttacggattagcaaaacaaactttaaaataagaagataacaggtgtgataggtgtatggcagggatgagctctgggaaaccaggagggtagtatttcaaagatgagttcagtcatggctctgtgaatattgtgttcacttaaaaatgccctttgcatctgttgccttggggttgttattgaatttagcaagggatgtgtgagaagtcaggcatagcaccacactctaagaagcagctttgatcatatggtaaaagtagacagtggatatttagggaagttggtgtgtgtgtgtatgtgtgtgacatgagagtgtttaaaatgtttacccagaaggaatggtcctataactaagagggaagggagaatatccaggtaagttggggtgtgtgtgtgagtgagtgagagagagagagagagagagagagagagagaagagaggagatgagagtgtttaaaatgtttaccaagaaggaatggttctatagctaaaagggaagggatgagcagtcaggtaaagccttacatcttcctatggtcccttgcagatgcccttagcccacattgatgaggttgagaaaaagtgtgcatccttataagttgagcttggatgcttttcttcctgatacagaaatctttgtgagcactaagtttggtggtacttgtggagctgctcgggcatgtcagtcagagaagcattctgtaattcaagtgtttactatttatttttttaaagatttatttatttactttatgcatatgagtacaccattgctctcttcaggcacaccagaagagggcatcagatcctattacagatggttttgagccaccatgtggttgctgggaattgaacacaggacctctggaagagcagtcggtgctcttaaccactaagccatctctccagccccaagtgtatactatttaaagtctgtgttctggtgctattttttttttgtttgtttgttttgttttgttggttttttttgtttttgtttttgtttttcgagacagggtttctctgtatagtggtggctgtcctggaacttactctgtagaccaggctgggttctggtgctattaattgagtgttatggattcagttgaaccacactgtgtctttctcattgtgtccttgacctccttgtttactctgtctcacagtgtccttggtccccttgtttatctttgactcgctcaccatgtctttgaccccctttttaggtgacagaagggaagcaagacctggaaagagcctcacagctgtccaggaagatgaagaaggaggctgccgtcctctctgaatggctctctgccacagaggcagaactagtgcagaaatccacatcagaaggcgtgattggtgacctggacacagaaatctcctgggctaaagtgagttttagttgggttggacatgtcccatcagtggcatttgctttggacaatctggctggacactgcctctatttcgtattaattgtaacctctgctcttctccctccctttctttccctcttctgtgatctgggaagaacattttgaatacaccttgtttcagaggtttctctctgtaacctgggctgccatgcattcattgaatatcacacgctggccgtaaatctgcagagtttctcttcattagcttctccagtgctagggtcaccatcatgtgcaactatgctcagttaaaaccaggcattttaacagtacttttgtgtgtgtatgtgtgtgtgtccgtgtatgcacaagtgtgtcagtgtgagtataaatgtgtgcatgtgtgtttgtgagtgagtgtgtatgaatgagtgtgagtgttcacatgtgtatttgtgagtgtgtgggagattcggtgtgagtgtatgtgaatttgtgtgtgtgtgtgtgtgtgtgtgtgtgtgtgtgtgtgtaggcctgtggttgatgtcatatgtccttctcagttgctttctctgggtcaaactctcattctgaacatgaaacttactgttttggctagacttgccagcaaactcctgtctctgttttccccagtgctagaattctgctctcgtttctgactttttacagcagtgtgcaggatcagaactcagctcttcattattcagcaagcactttaccaactgagctgcctccacagccccgataaaacacttcatttcccttccaaaagcgctgaagtcctaggagtcatcaggccctttttttacattatgcttaggtagtatctgaagatgttatattaacagttagcctccttagctgggtgtggtggtgcacacctttaattccagaacttcgaaggcagaggcaagtagacctcagagtgttcaagagttccaggatagccagggcaatgtagagagaccctgtctcaaaaaagaaaggaaaagaaacaacagaaaaaaattaatcacctgtccatgacattttctcccagtattcattctatattcatattatttatatttatatctctctttctctctctcttttatctatctctagctacatagctatcactacctttatccctatatctatctatctatctatctatctatctatctatctatctatctacttattgcaaaataactgatgcagaaatcataatcacataatgtaaagcaaaactcacacagtttcctttagccttctagctatttggaataattcctacttaggaattaacatgtagcgtcttgtttctgagctggacacgggattggatggaggccttctcttttcctgagttccttttgtatgaaagacacaggcatgcttgagaaccttcgcaggatacactggctgcagaaacatggacgacccaaagtctctccagtgaactctgtagggtttcctgcgacctctgtgagaagggactcgggcttaatgacgtaactcccactcgcctgaacgctcagtggcagggacacttgggagaaagtcaagctgttgctctgggaagaatattccagtttctaagacagtacatggaaaggagctcatgctctgtgtgtgggggacaaggagcagagagagggatgtggaaggaaaaggaacttgaaggtcactggtgtattctgactggctgaaaaagaaaagaagccaaattgattttgttaactgtgatctttgtttagtatgctgaaagcaattcttctcttcccttggacagctccaggctcctccccctgctctcgcccctccctgtgccaccattcctcttcttttgagactgggtttcaccatgcagttctgagtggtcttgaactcttgatgcctcggcatcctgatggtgaggatttcaggccagtgccatcagggcctggacacactgtcttctttccttattatctctacgactttcactgtttcccagagatcacaaactctccttggctttctgagttgctaaagtcacagtttatgtgtaggacctaaaataaagtcaaacacaagctaactgtgagcttggcagtttgtctttccctctgcttttctagtgtatgttagacaagcctactcctatggttggttgtttttattgcccaattcttccactcacagctgtttaccaccctccattttcattattatgcatagttctatgaacaacattcctatggctgattttcagcatacatttataattgtttcctgaatgtgttttagtagctggaaaatctaaggccaaagaatacacccattttaaatctcatgtgtgcttcaagtctgtgccatagacagtgcattacaagcaccacatatgcatcaattcctccctggattttgaaaatacattcgaccgtggtgtacaaacacggtctctgactatccagttagaaccttttccatggcttatagaccatcggtagcccctatttgaaaaatatttttcctgtagttttgaccatttttaaataaccagattaaactgctaattttgatttcttcatcagacttattaatgctcgctgtgttgtgtagtatttaagaaattcctttctttgtcattgcggttcacttcctgtccttattattttttttaacacacacttaagtgtgattttaaagaacagaatactcagttccttgttattggtgccttccgtttcagaagggctgccgtgaccctgagcttctgtggaatttcttcatgatcttgtgtagtctcatcccttcaactttaatgtttaatccttagaggctaatttgctctatattaggagagaggctctgaacttctccccgaagaacaaacgtatgctcccaggtttgtcggtctgagttctgagttcttctctagtctaacacagtagttaatatatcattgttgttttctgttgtacaattctggtcttctaccctcccccagttcccaaactgctgagtgagtcattccgttagctattttaattctcagtagagggtccttctctttatgattctcttcgtggcttatgtacttttatagaaatagtccccatatttgtaaaataacttttgtgtggatttactttaaagctctagacttgttagatgagaacttatgtattttgccttttgtttctgtgggggctggagattaatcccaggtcctggcccatgccatgcgagtgccctgccagccttgctaaatcatttataaataaataaaacaaatattggttgttattgttgtgtatatacatgtctgtgtgcgtgcacatgtatgtgagagaatgtatgagtgaggctcacttgtgccagggcatagatgtgaaggtcacagaataacttttagaacttggtcttctctttccatatttatgtgctttccagggatggaacttggattttcagacttgaacagcaaatgcctttgtctgctgagccattatgctggcctctaggtgtagcccaggctggcctctaggtgcagcccaggctggcctctaggtgcagcccaggctggcctcaccctggtgattctcttgcttcagcctctttagcacatcctactagcacgtaccaccacgacaggcttcagtccttattaaaatgctatgtctcactttcctgacctttcagttcttttactttccctcataatatcttaattttttcctgtataaacattgtgtgtatatgcgtgggtatatatatatgtgtgtgtgtgtatatgaataatgcatctattttatattattttgttttattaccatataaatgtgcattttcctttttttactgattgcttttatatgtgtgcatatataatatataggtgagattgagttgtatatactaatatttgatgatcctttttttctggtctcataagttccatttttttgttaactatcatttttgaagacagactataaatagtggtaagcttgtgaaatatataattttgaattcccaactaattgttttacagatctgacatagttagggtggcatctaggaagcacccagcactttcctctcagtggggtgggaggaacgttgatgtggagcatagccacccacttttctttttctatcagtttatttatttatttatttatttatttacatcctgattgcagcacccccccccccccccactcaaccccttctcttattctcctacccttttcctctgagaaggaggaggcccctctgggtactaacctactgtggcacatcaagtcactgcaggactaggcacatcctctcccactgaggccagacaaggcagctcagttaggggaacaggatccataggaggcaacagagtcagggacagccccgcctcccgttgttatgagacccacgtgaagatcaagctgtacatctgctacatacatgcaggtacccaggtctaggccatgtatgctctttggtgattgcccaccttttcaatgatatgtcttaagatttaaaaccattaaagatttagaagatattttagtttcataaattaaatattatgtgcaatatttaaatgcagaatttaagtggtgtttttatttgtggatgtaagtgggaaatttattccatacattcaatattattttaaacactttttaccataaaacccaccagacttgtgtatgtattatttaaacttaattacttgtctgtagttattttttatggttcttccagccaattttagtcagttactacagaaccactgaaggagcgcagaaagtctgaactacacagagtacatttgtaatagactttttctctcatttaggggaagagtaggagcaggaaatacccgactgcctttcaaatgcgtctctaagtgtcatgaccaaggcagtgtttcagccttgactcccttgtgggtttgtgatttgtatccattcagaaatgtgattttcagcagtgttcacataagaacttgaattccttgaagtgatttctttaaatgttgatttaagaacccgtaccacagggaggtggctcagtggccaagagcacttgctgctcttgcagaagaccagtgtttcattttgaggacccaatatcagcgtgtaactttaggtctggaacatctggtggtcctcaagggcacacgcacacctctgtcctcaagggcatacacatacacacatgaacacttaaataaactcacacacgtacacttaaataaacagaaatatgaaaagtactttttgaaaaaggaacaacagttgaggagtaagggggccacgggtgtttccatatgtcatttcaggatagtttgcattttcagcatgatttgaatttctgtgaatgtgcactttcctggtgagccttcacgtgtgtgtgagtcccggggccattttccctcctggagtgttcccactgcaaggcatgaagctgatgttcaaagcttctattttcctggttctcctttgatttacttaagctgtatttcccatctgaatttctttcttttttttttctctccatttttaatatttagcattagtatcatcactcacgtctcaggacatgtgtaatatttcttttttttaattaaatattttcttcatttacatttcaaatgctgttcctaaagtcccttataccctcccccaccctgctccccaacccacccactcctgcttcctgaccctggcattcccctgtactggagaatatgatcttcacaagaccaagggcctctcctcccattgatggctgactaggccatcttttgatacatatgcagctagagacaagagctccggggtactggttagttcatattgttgttccacctatagggttgcagaccctttagctccttgggtaatttctctagctcctccattgagggtcctgtgttccattcaatagatgactgtgagcatccacttctatatttgccaggcactagcatagcctcacaagagacagctatatcagggtcctgtcagcaaaatcttgctgggatatgcagtagtgtcttggtttggtggctgtttatgtgatggatccccaggtggggtagtgtccttacgtctcagctcaaaactttgtctctgtaactgccttcatgggtattttgttccccgttctaaggaggaatgaagtatccacactttggtcttctcatctattaaaaacaataaatttatgaaattattaggcaaatggatggatctggaggatatcatcctgagtgagataacccaatcacaaaaaaactcacatgatatgcactcactgataagtggatattagcccagaaacttagaatacccaagatacaatttgaaaaacacatgaaactcaagaagaaggaaggcctatctgaatttcttatgtcttttcagattcacctacttaaccatttcagttttttttatggcttgagagttgcaatgtgtcagagagttgagttttataaacctttaaggtattgcaagttatctagaaaccattgactcgttattgctggaaaaaaaaaagctaaagaacaaaccacaatacataaggttaggtaaatgttagtgtgttctgaaagtcaagtgggtttttttttttttctttttcctttttcttctagagtattctcaaggatctggaaaagaggaaagttgacttaaatggcattacagagagcagtgccgcccttcagcacttggtcttgggcagtgagtctgttctggaagagaacctctgtgtgctcaatgctggatggagccgagtgcggacgtggaccgaagactggtgcaacaccttgctggtaagatgccagaacatgcctgccactggggatgtcttctctaagtagctgcattggaaagcatgcggccctcgttagggctctgtgtgtgtctgctttgcttcgcttgtgcgttaggtttattattttatttttctactgaaaagataccaaaaagaagaatttacagcacctctgataaaagtcaaatattcatgccaaacacaggggccatgttacttaatattttagtaaacatagttttgttttaatgataagagtatttgctagtataatcataatatataatttatacatacatatgcacatgtatgtagaaatgtatatttatatacacacagtcttcacagtgtcttagttatatactagcacagataaagggttatcccagacattgctgcctgtaaaattcttgactactacctcagtgaagttacttacaaactctattctttctttttctcatctacaaaatgggcgttattatcatttctaccttgtatgattttataataattaaatgacttaaaatgtgtagtggtattatataacaatatgttaaacaccctattattttcttttaattataactattccactttcatagtgtttcctggctacttctaccaatgattaacatatggcagcccctatctctgaagtgagagttacaatttataagttattactttattctagcacatcagataggactttaactcagttatttccccagtaatggattggcatagatataagaataagtgatctgtttgggatttttttttttttcaaatcagttaggatatacagggcagaggagctcatgtgcttaggtcttgattgatcagaggtttatattctagtccatgactcattactgttataactttatgcaaattctgtaatataatacatcaccacataccaatgtagagagaaaagtaaagctaaagctggccatggtgatacatacctgtaatcccagaatttaagagaccaaaacaagagtctctaatgataaaggtcaatttacatagcaaggctctgtctcaaaaacgccaaaaaaacaaaacccccaaaacccaataccccttctcccctcagaatagtcacacctggtagcacaggcttgtaagcctgctgcttggatgactgaggcaggaggatcacaacttgaaggtcttcttgggctatatagtaaattcaaggatagcctaaataatttaaaataaaaagtaagaagaggcctgaggtcatattcagttgcgcagtgtatgaggccctatgctcagtctgcagaactttaaagcagtcgcccctccctccaaaataaccccaaaccaaaacaaaccaagtgaaagtatgtagcaaacttcgttctttgttgacacgattgtgtgacatgcagcatgctctttgatggcctcttcaatctctactaagattgccatcttaatatttcatttaaagctcatcagcaccatcttattcctttgcagaaccatcaaaaccagctggagctatttgatggacacgtcgctcacatcagtacctggctctatcaagccgaagctctgctggatgagatcgaaaagaaaccagcgagtaaacaggaagaaattgtgaaggtagtcagcctcatgagtcccgcaggctaatttgctgttctcttgtgccgtgtgctgtcagcagtgtgtgtggtgttctcaagcagtttgctttttggtgggagaaaccaagatcaccatgggtttctatgaccaccacatcctctggtgctgagagtcttcctagcaatctcagatgtttatttcaaatacctttaattcatagtaagcatcttgtgtgcttggaataatattcttctctctctctccctccctccttccctccccccctccctccctccttttactatcagcgtttactgtctgaattggatgatgccagcctccaggttgagaatgttcgggaacaagccatcatcttggtgaatgctcgtggaagcgccagcagggaactcgtggaaccaaaattagccgagctgagcaggaactttgaaaaggtgtcccagcacataaagagcgcccgagtgagtgcttgcatttgtataggatgccatttctccccatggtttatgtataatggtacataattttgttcaagcctattaatttgtaaatgaattttaataactgtttggcaaagcaactgctgttacttatgtgtgattgttgatataagaaaatattgtttagtaaataactcacccaggacaggcttcagagccagttgacagtcgggatagaaagagaatagaaataagtcatttcccaactgacacatgattatcaattcctgatcctaaatgcatccttttaatgtatgtgtttatagaaaatacatgtgtgtgtatgtgtttatatgttgacagatttaaatgttataagttatagactcacagtttgtagttcacagggaaattttctgaattcgctaatttgaaaacgctttatcaattaaaagaagggtcataaataacagctgtcattacaaaatggtgtctgtactactctattattttttcagcccccctgtatctttcccatccccccctctgttattctttattttcagaggggggcaggagacaagctttactgtagagttctcaaggccgagcacagatggagcttgagtaaatgtgaggtggaaacgatgcaagcattttctcagcttagagggagagcggtggacctgagatgcccatgctgagggatcacaggatgctgagcgttttatataatctcatctgtgcacatctggtggcactttaaagaagtagtcaattgaacctcttggcagttatctattgaaataacaaagagaaaagatcgtttgttttatatgtgtgcaggaagtaagttttacctaactttgttttaacttaaaatatctggtatagtgagccacacttttttctatgccccagcatataattattcacgacttaaaacaatacagtcagaccttccttgagcatttgtcttctttaatcttggctttgcctccttattgtatgacttaattccattttatttgtttaaatagattcatgggagggtttttttttttttttgacattaaaaactaagcaaaggacggtgctaagagaaataataaagaaaattagcattgcccctcaaatgacctttgcaaaccactctgttgcttaacaatttttactcactgatgcatgattccaaaatataaaaaaaaaaaaaattatagcattctgtacatgctcccttgaaatggattttaacagtaatgttctatgggctgttataatttgctaggttaactttgtgaatattgggcccttgggaatgttgtctttgttaaaatcatcttactcgtatctgctggctcatctcttactattctgctggtatcggattttagaatccattgagttgttgcagagggtgtagagggccgttccaaacactttcagcaggggctagtggaaaatctgtgcaggttaagaagtgagactgctaccttcttcatagacgctggatgttttattcatttatttttattaaaatggccatttttacttttattttcccaaatgtgatgtttttctctatagatgtgaaaatgtggcatttggaaatacaaatctttttgaggttctgtcattaaaacacccaaggggtgttcttcttggtgggcatgtatgggaggcgttctctagggtctccttgcaccctggagtgaggactggccattgtttctttcatggcttgtggcagggatggttcacatcacggccctgtaggatgttcaccttggcagctgccctactgtgctcgaagcagccacagggaacggaatgcactttacattcctggctccagattgaaaaatgagcagttcgagtacacccaggttgccctaagtcattgctctgtgatgaatgaccttgaagtcatttcagataaatgctggtttctgctgtgaccctgcctctcgggatgattttagaaaatcaactctcagaagcctcttttccttccctagatgctgattggtcaggacccttcatcctaccaaggcttggaccctgctggaactgttcaagctgctgagtctttctctgacttggaaaacttagaacaagacatagaaaacatgttgaaagttgtggaaaagcacttggaccccaataacgatgagaaggtaggtggtctgcaaaccctaccctcgttttttttttttttttctctccttaacaatatggattcatttgcttgacccaccacatgtaactgaagtaatccagatgtgatttatgagagtcactgccgaagctgtcaggtaactcatgcaatgcttgaagttcacatacaacgctcatctaaccccaacattgggaggcagatgcaggaggaatcccagttcctgatcttctctagcgatagagcaagtatgaggatagcctgggctacaagaaacaaacaaacaaacaaacaaacaaacaaacaaacaaacaagcaaacactaatggtggtggtgatgatgatgatgatgaagagcaacaggagaaagaggaagggcaggaggagaagaaggagaggaaacagtggtagtagcagctccaccccctccttcctgactagctgtaatcattagctacgttttgataaattagctttgggatatttgattttccaatataaagtatttgaagaaaatcaagagcagttgtgtcattcaggccgatgtggcttgacccacactgccctgtctgtctcagcatagttcttaacactgaacaatggagagtacgaagtttgtctgtgtatttttgttttcagtaattttctttctttaaatatttagatggatgaggagcaagcccagattgaggaagttctacaaagaggggagcatttgttacatgaacctatggaggacagtaagaaagaaaagatccgcttgcagttgttacttttgcatactcgttacaacaaaattaaggtaggttgctgtggtctccgcagcaaagaaataacttacccagttgtaccatccaggctggggatgtaatatttaaagacacaagcaatattcaagcaaatcacctagggaaattatatatttccccctcactgtctttttaagtttaagtaattactgcttattttttggagttaggattggatcctattcctggtgtatattataggttatttgggaatttcccatcatgcactctgatcacacgcacttcccagtcctcccatgtctgctcccttaaatgtaaaaaaaaaaaacaaaccaaaaaccaaaacaaagacaaggggaggaagtggggggggggagagaggaagagaggaagagaggggagggaaggggaggaaaaagaccctcagaccattttgtgttaaacttacttgtgcatggtctagtcccaatgagaaagggaaactgagtccttccccacccttgccagaagccatcagttgtggagagctacatttcagcatccttatcacagctttcaaaacttctctttgatggctaccttcttaggctattaattttttaggggtagggtggaggtaggggttgtcccagaagcctcggtgttcctctttttcaactgtgcatctgcagacattgaaaatacggcaagagtaatatccttgtggtgttttaagtgatgctgttccccagagctctattttttggtagttcttcctgaaatgagttttatttgatcacttcggaatctgagtggagtcctgtgccttggcttgctgtctaccagctgtctctgactgcacgtgccttgttgtacgatccaatggaagttgccattggtgtcgtccactttccccatttcccttcttagtctatcctcttaaaaaaatagcccgtctgtgtagatggaggaaacttcattaccatcctcacctattttcctgttcattacaggaagcaggacttacaacgattaggctttggactgaggatagtggtctgggaagtgtgtgtctcacacgtatgaggacctgagctgtcttagttcagtctccagtctcagtttatgtaaaaatgttaagcatggtggcacagtgctgtgatcccagtgctggagtggcagacaggaggatcccagggctctgtagaccaagcagtctcacctaattggtgagctctagccatgagaccaatgaaagacccttcctcagtgggtgggtggtggtcctgaggttgccttttggcatgaaagtggcagactgctgatgaaagctgaggcagcttgtggagtttctgtagcaatgaaggttaaaagaagaaaacttatattgaatgttatttttattagcatttattaattgtgtgataatggtttcattgtgacattttgtgcatgtacatagtgtgttttgatcataatcacctgacttgtgtttcttacaactttggttgacattctgggattcttcaacccccccacccccaatttgttgttactttcatgggggggggttaacatacctgcattaatattttttttgaatcttttaatagacaatccctatccagcagagaaaaacaattccagtttcttctggaattacatcatcagccctccctgcagattatttggttgaaattaataaaattttactcactctggatgacattgaattatcacttaatatgccggagctaaacaccactgtctacaaagacttctctttccaggaagactctctgaaggtaaaaatccaagtgcggaatgtccgttgccattgttaatagaaaaagtacagaaacaaggccaatctccggctcttcctgttttgccttttccctccccctctctccctcctcccctccctccctctcttctttcctcctaccctctctccttccctccctctttctctctttcctcctccgttttaaccttttccctccttccctcccttcttttcttttttcctttcccctcatctttttaaagacagggcttccttagatagtccaggctaattggatgctcaccctccttttcttgcctgtggagagctgagattacaggcatgattgccgtgctcagatggaagttgctcttgtacttatttagataatccaaatctttgattactccaaattagcaacaacagtgtataaatagtgagattttactgtattccctggtaggatgcagcatttttttttttcaatttaaaaagcatctaggtctggactcttatgaatgcacatttatttgcaacagcagagatctaattttaatctgatgtaaactcgattgtcatttgtgtcaaatgatgtcaggtcatccatattgattcgagattggctagttgccccgttgtggaattgcgtattgattgcaagttaacattttgagttctttgaaagttttttcccatgtatttgattgtacttctatataaagatgtcgtattatttctgatagattcaataatttattttctcatttaagctacagtgattaggcatttaaaactataattctagaagtgtctcctttttttttttttcacctacatagtatgttagtaaagctacctttcctgtatcctgccttgaagccggtcaggacatctaggagggtgccttcccattcgccattgtgatggtattcctcacattttggtgactctgagatttttatatagaaaagtccataagaaaaccaacagcggcaactaacctggacccttgggggctcccagagaccgaaccatcaaacaaagagcaagcacaggctggacctaccccccacccccaaatgttacagatgtgcagcttggtttgacaattgtctgacctcagtgggagaagatgcacctagtcctgcagtgacttgatgtaccagggtggggggatacccaggtggggcatcccccttctcagaaaagaatgggagtgggattgaggaaagtagccatgcaagggtcaccaggaggaggggtgaatgcaattaggatgtaaagtgaagaaataaattgaaaaaaatagaatcccctcatttgcacacagaacagtaattagccccactattactttaaatgagtgtcatacatgtaactctttatctgtggttctggtgttttgtacaatgatgcgtttgcagagtatcaaaggtcaactggacagacttggagagcagattgcagttgttcacgagaagcagccggatgtcatcgtggaagcctctggccctgaggccattcagatcagggacatgctcgctcagctgaatgcaaaatgggaccgagtgaatagagtgtacagtgatcggagagggtaggtgtgaactaagtgaatagttatctctaagtcacacgagtaccaggccatgcagcgttgacagagtccaagtgtgcattaggatcatggaaaccatttttcatgtatttctaatatgacatgattaataaatagagatgagcttcattccttaaagagaaatgtgtccacaggcacacagccattaagcacataataccttaatgatatgggggcacctttagtttttagcttaaaaataattctcccttttaattagaaaggattttattaatgttcctttctcccacacggcatgattaatgtgaatgaggaacagaagcagcttcaggtaattggaattcatatataaccacaggcccgttcttcccggtttttctgctctataaccttctgcttcataggatgtttcggagtttttttttttttttttcctgttgtttttagacttcgaacagggacctgtgaataggagtaaagaaaaatgagtgtgatcccccccccccccccagtagctgtgaatgtagttaaatgcaaatacaacatgaaatagcccaacaacaacaacaacaaaaataacatgtaatggagaatttactatagagcaatacattgcaagtattcagatacgaaagcaaggaatcatatggttaaaatttttttaattcatgtgactgtttaatcagtgaagaagtatgccttaatgatctttgttgctatgtaaatttataatatggtctctttgtgtagttagtgaacattcttttgtacatttatatatatgtgtgtgtatatgtgtgtgtgtgtgtatttttgttgttgttgtttgtttgtttgttagaactggtatagtagttactttcttcattggtgacacaaatgttgatcaaagcaccttaaaaaggaagggttgttttggtttatggtttcaggacacacacttcgcataacaggcaagacatgatcacaggagaaggaggttggctggtcacatttcatcagcaatcaggaagtgtagagagaacagaaagtaggataaaataaaacctgaaagcctccaccaagctatgtgcttcttccagtgaggctctgtcttctaaagattctccaaacagcgccacctgctggtgactatgtgttctaacacacgagcctatgggtgacatttcacattcaaatcacagcacttggttattacatgaagacaattaaaaaagcaagatgttgaaactcgatttgtattataacatgaacttggctactgtaccctgccagggatatttataaactcacccttcctttagaagcctggctattattggcaggaatatttctccaatattacagtgatagcttcattgttgtctttctttactgtgctctcaatgggacttgaagtttctttgtgcccagtaatggctcatctttgaaaccaagggagtaatacttactgtttaaaattgtttttctaactggaagatattatttatgtatatttttgtttatttgtgagtatttacagccttttgtatgtcactcaaaatggcctgtaccctttgacgtagagccaacttagttttatgaaattatatcttatagttgtttcctttatgattgtatacagttaacaaaacttacatatccattccttacatttgctgtgtctgaggaaataataatgtatggtttggaaacaatcttagttgcttggttttgattttggtatgacctctgttcagggcccagctcaggagcctttgtaccacagcttcagtaccatgagtctgtgcatgcacctctactttccaaaaacccttaagcaactttttgtgcatctctagataaatatttaccagctctaatttgcctcattgttcttaaagaaatgaccaatgtctccccataagttttcattgtccttatagttagcaaaaaatgtcataatttaaagttatgttattgtgtattaatttagtggtgctaattatgctttgatgcaccattcattttaactaaatgctatatttttatttgtaatttgtaaaatttcccttcaatgttccagaacagttactcttttttggccttcgttttaacttgtttttactttgtttcaacttgaattgaagccttctatcactgaaaccacatactttcgaagagaatagaggtagttaatcatgtgtttctgtttcactatacttaaacggtaagggtataaatttggatggattaacatgcctacaattaatcaaaagtggctgtgtaagtcagagaaagcaaaaacctttttgacataacacattccatttaaactcttcggtttaaatcagatttgattgacttattactaggatgggtttgaaagagaggttacttctggattgctctgtgaagcttgaagctccactgagtctgtctctcgtgctccaggtcctttgccagggctgtggaggaatggaggcagttccaccatgaccttgatgaccttacacagtggctatctgaagctgaagacctgctggtagacacttgtgctccagatggtagcctggacctggagaaagccagggcacagcagctggtgagtgtgtcccatcctgggggcagagtgtgtgtgtgtgtgtgtgtgtgtgtgtgtgtgtgtgtgtgtgtgtgtgtgtgtttggggggtggggtgggaagggggaggcagggcatgcaggggcagggcgggaaggtcagatgcttcatagattgttgtaatttttaccactgtacattttttcctacatctagttcccagttttaaaattctaagaaacactggtcattatacaatttatttatttatttattattttattttatttttaatttattttttacattccatattccattccctgcccttcatccaccctccgactgctccacatcccacatctcctccccaccccacaccgtgtccacctggatgtccctaccctcccaccccacctgacctctaaactccttggggcctccagtctcttgaggggtaggtgcatcatctctgaatgaaggaatccctgcagtcctctactgtatgtgtgttgggggcctcatatcagctgatatatgcttctgtttggtggtccagtgtttgagagatcttgggtccacgttaattgagactgatggtcttcctacagggtcacccttttcctcagcttctctcagccttccctagttcaacaacaggggtcagctgcttctgtccattggttgggtgcaaatatctgcatctgactctttcagctgcttgttgggtcttttggagggcagtcatgatagatccctttttgtgagcattccagagactcagtaatagtgtcaggccttggggcctccccttgacctgaatcacaccttgggcctgtcactggaccttcttttcctcaggctcctctccatttccatccctgtaattctttcagacaggaacaattatgggtcagagatgtgactgtgggttggcaaccctctccctcatttgatgccctgtcttccttttggaggtggactctataagttccctctctctactgttggccgattcatctaaggtccctccctttgagtgctgggagtttctcacctctcaggtctctggtgcattattgggggggggggggagtgtcttcccaacctcctatttcctgaggttgcctgtttccattctttctgctggtcctcaatctttttccctcacccaataccagatcaggttcccctcttcccttcccctcccctaacctgtccactttcctggcccccatcatacaatttataatccagattttaaagaagtttttaaaaggataaggcactcttaggttgttaatgtgagagatagttatttttaaaaatattttaagatatatttctcctcaggagattttatattcatactaacacaaaaaattatatctaagactatatgaaagacagaaaagtatgtgtatattcaatgtcacctctgctttgtacccctaacacctaggcatcccggttatttctttttccttttttaaaaaatcattgattattgtcatgagaggatgctgttctttatggacaaagccagcctcttgtaggactcagcctcgagactatgtagcacccagcagtcagcctgccagcacaataggtcactaaagggagaaatggagcaagcagaagctcagatgtccattgtcaaatgtatttcttgttttagtacattttcaaaatgtattttctctagacagttcatggggcgtcgaaaacaatgcctccccctcacttgcagacatggtgctgcggttttttttgggtgtgtgtgtgaaagtttgagttacaggtaagtatttagacttgactttgaagtagaccttaatctgtgactttaaaatttttacagacagaggcagcatctcagtaaaatgcacattgaggattttttattataaatggctggacataaaaattttattgaccaaatatttgtgtgtatgtggtatccacatgtccctggaaatgcaattttaaattctttgaaaagacattatagccctaccccgaatttgtttctgtaggtgttagattgatgcttaaaaacttgggtacactgaaggtatctgaacagcttgattgagtggtagaaattcataatgtgtcatctgtcataggaactggaagagggcctcagcagccaccagcccagcctgatcaaggttaaccgaaagggggaggaccttgttcagagactccgcccctcggaggcaagcttcctgaaggagaagctggcaggtttcaaccagcgctggagcactcttgtagctgaggtggaggctttgcagcccaggtgatgactcagctctgaatgttttgagcagaggggcgaagatttcatgtaaactacatagaagctgatctaataccatgataaaaatattagtggcatttgaggcttcactgttcatgttacttaggacagtttttaggctgtcttgtaaatcttactgttctgttcagatttcctatgtataaaactttctttggggccagggtgatggctcagtcaataaagtgcttgccacgcaagcacagagagccttgcttagacctccagcacccgtgtgaaatggtccctgttgcaaagagaggtttctttgatgagggatcagaattatacttatctgggttggaagaagttaaatatttagattgtacttatgaattatgttgatttaggcaagtggcggttgtaagagcacatccaagttccatggcttcactaaccttggatagctggataggtttccagtatcaggcatagtttccattttttctgaatgggctttatgcccagttagagagctattagttgcataaaggtattgttgcactcttgtacccttagggttaatgcattgtgctggtcacccaccacagcacttatggtcactgtttcctttctacaaaagaaagctataatgtcagacagttgcttgagggttaaatgagactgtatttgaaaaatgtgtatgtcttaactttttatggcgaacatttaaaatatccatttcttataatcctttctcgaacatattctcccagcgtgttgttgctgtgtattgctaatagtcaattaatgtaatcagctttatcaatattctctcgcactgagcattcagatgttactatgaactcagactgaaaagatgaagtagaaaggaaaaaagcgtgatcaagggaaacatccacatgaagatgttgacacagaggcaggaaagatgagctatggaattgggtactgatgaagagggatgctgaagctgagtttcgaggcatttatagcaattttctgtacattctttctagggtgagcctttgtggcagctagctttctgcagcaataatgcataatcaagatgattagcttataaagagagaatgtttattttggttctcagttgtacgggtgccagtctgtgagtgtttagccccacagctttggcccttctctgggacattgtggttggggtgcctgctagagcagacagcttgcttcatggccaggaagcaggagagggaaaaggcgactgaggttcctgtgtcagcttctccttcaaggtcacaggccccatgtgctgaagactgccatcaggttttataaaattgccaccactgcccagtagcctcaggggcctctaggagatttcagacgaaactggaaaccttcttgagagaagatgtagaactgggctttgtgagtaccacacccagggctgtgtgagagagatgggcagatgaggagacaagataggaggactcgatatcacaagggaaggaattcatggatcatcctttcctacaacaattaatcagattattgttatagtaatgcattaatattaatagtaattttaccactactactattgtcaatcaattcatatatcatataataaacagtacatacttaataataaaatagcaaccaattaataattatatcaataataaaattattaacttatataataacataatgataagtggctatttatgtcttcttaaaaaagaaaaaataaacaaacctgctgctggcaagatattaacagctgcagaaatacccctcaattttcaagtgggtttctgtggagtgtggaagccattcttccccaacctacaggatgacctcgacccacactttactcaagcttttggaagtgaatgcagtaatgagtttcttcttagcttcttgtatattcactaaaacaatattggttttcagaaattcgtagtgaacttcactgtttctctaacctgtgtgtattggggtcactttggaagccccagaggttcagggtcattgacagttaccacactgcttcatttctctgtgtattcagtacctgcaggtaaatatttgcacatttacagtttatggtgtcattccttaataagcaattcttatcctagaattgtttctactcttaagaatagcaaagtgtacattatatttagctggtttacagatgaaaattacttggtaatattagtttcttttatagttctagttttagagcatgaaagtagtcatgattatgaaacactggcaatttaattttcaatatatctgaaagaaaagaactatacaagtattatggagtgtttctaaagttgttagattatttttaaattacattttattataatttctactaccgccatcattgcttcattttttttttaatttcaaagtgcatcttcttttttttcttcttttactttttaaaaaataagttacattttaagcaatttttattaggtttaaatagttaaatattatacctttccattatgactgttagtactatgtaacattaacatataatatcacatattagcatattgacgtaatacatattacatgcatattttgttgtatgtattatattgtattatgctttttatggttaaaatataggaggtggcatgagaccattaatttccattagggatggcacagtgtaatttattaaagtgtcacactcagttttcaatcagcgtctagttgcagtagcttaaaagtcatgatcccactaagatcttaacagctttcaaactctctctctctctctctgtctctctctctctgtctctctctcttaaatctgcaatcttatttgtcatctgggttctgatcacacttcattgtctggcagatggctggtatccctaggtgttcttcttatactgttaggaagttctaactgggggattctgatgtcatagtcatcctgtggcctacatttatcttttggaccttggctggatttttttcccttcatctcctttatgcaatatgacatcctatgcatatgttatccttattttaatgaactaatcaagcatatatgtttgtagaagatttcgattctcagtactcatatttttgctgttatatgggtagaatggacaaatactgctatcttgttgtatctgcgttggtggcgcacgcctttaatcctagcacttgggaggcagtggcaggcagatttctgagttcaaggccagcctggtcaacagagtgagttccaggactgccaaggctacacaatgatgtctttctgtctccatggagaactcagataattattcctttttccttattttacacaaggacatgttcactgttcgttaactgtattatacagcaatagctaacttaaacattttcatattaacttgccatttaatttttatgatgagaagataagacttctcagtgtgtctgaatttaattaaggggaaaaaatccctttagtcctatatgtaatttttagtatggtactctgtatgcatgattattaatgttaatttaaaaactacatatttaatatcattattagaaattatttctactggggctatggggagcaagttttctaaaacaaatatattgttttgcttactcagtaatttctgtcaatattttccctactgtgttcttttaggctaaaaggagaaagtcagcaggtgttggggtataagagacggctagatgaggtcacctgctggttaacgaaagtggagagtgctgtgcagaagagatcaacccctgacccggaagaaagcccacaggaattaacagtaaggagtttgtagctttccagagccttcgaatgcaggatctaatgaacttgggaaataagatcgttttgactgaaattgagagggaagtacaactttgttctttatgataagtatggtaaatttgaaagagttgggattttttttcccattattttatactattttggtcatgcagagatcaaacaaaagattagtaaccctgaccttgatgttttattaaaagatgtagactatcttaaagtgacttagaacacaatgcagccatgaagaatagtttctgcctttgtattgaaaaggtaactgtgtggtgacttacaagaaaatcctgggtgttgtgcagttagcgccttgcagcttgaagcaggcttagagttacagttcagcaatcagagtttcttgttgatttgtagccaacagggatttttaatggttgtgcatctgtgcacatgcatgcacatgtgtacacagacacacaatctataaaaatatataaagatatatagatatctaaatgccaaatctccataaatattcaggtccatgagcatctgtagtctctattaagaattgagacattaatagtacaacgttggacaggatccattttctgaaagcgtcacagacatggcaagatggctcatcagataaaacactcactgtggtcatctggtaacttggttcaatcacccaaccagtggtaaaaaaatttagatatgacggtgtgcctctggagtgccagcctttttgcagacaggtgctaggtagagacaggagaattacttagatacatgagggccagctagtctgggtactcggtacgagagaaatcccacttaagtaaggcgaaaggagggaactgactccccaaatttgtcctttgacctccacatgtgtgtgtgcgcgcgcacacacacacacacacacacacactcacatttaaaataataacataaaaattgtacttgaatgtgttaatatatatacatatacatacacacactcacatttaaaataataacataaaaattgtatttgaatgtaattacacatacacactcaaatttaaaataacataaaaattgtatttgaatgtgattacacacatacacacacattcacatgtaaaactatgttcaaaaaagtattcaacttatttgagaagtggttttgtcatagagatgtatggttaaagtatcttgagaaagaaacttttagtgatgatgggaaacgtgggaattgttcattaaattttttttttgaagtatgaggatattccttctttatgtaaagagtcaagaattttcttcaaatatcctgtttataaagtatttggaaaatttacaaagggtaggacagcatgttaagatgaagaaatttagtggtgatcatgatgtatcttaacaatgtaaacatagtgtgcgcctggtgaagtggtgctggtcctagagcgatggcccagcaggccagagcactaactgctctttcagaggccccatgtcaggcaggcagcttggaactgcctgtaactagagcttcaagtaatctgatgccctctcaagactgtgaactcaagtgtagagcccttccaccaatatatacacttggttaagaataataaaaaagagtatgtgtttgtgcatgtatattcagacacatacacaggaatgtacattcatgctctatcagtgagagtgtgttaacaatttcggtaagctgactttccatttaagatgcctgagtcctgaatgtataaggatattttcccaagagaatatattgtgtatagtaactctccctcagaacaaccttctaaccatggctgttttttgtttcaggatttagcccaagagacggaagttcaagctgaaaacattaagtggctgaacagagcagaactggaaatgctttcagacaaaaatctgagtttgcgtgaaagagagaaactttcggaaagtttaaggaatgtaaacacaacatggaccaaggtgtgcatgtgggaatcctgtaacgtgttcctcttgtctattgacttttagaattatacttgctttggagtgtgtgtatttgtgtgtgtgtgtgtttgtgcgcgcacacatgcacatgcaaaggggggggggcaaacagacagagacatagagaaagtaccacacataagggaacaacttttgggaattgatctcttctctcatgtgggttccagggattgagctaaggctgtaaggcttagtgcaagcaatcttaccagatgagccatcttgttgacccctatttactgagtccttggttaaattgttctcttgctattgctctaagtgtacagatacaggtctgacatatgtgtgttttttcagcactttacaattatacacacacacacacacacacacacacacacatacacacacacacacacacacacacacacaatatatctatatatattcatccactatcacatgtattctcaaagaatatcttttatttcacatggacttctttgttctaggggatgtgtatattttcaaacataccacatatgattgtctattggaatttagcagtaaaatgccagtaattatagtctgaaaatgaagaccttaaaatagcctcttgatgttgaacaagactttcccacatctgtttatttttggtgattttttttattcctttagtatgtttttattgttaggatcctgtggaatttaataacatctgacaaaaattaaactaagatgggagttattttccttatatgattactttgtttcacagaggaaatggttaaaggtagatgaaatcataggattcttctcattttgtcttagtacccactgggtcgatgtatggtgtctatttgaacatggaatggatgtgtcccacccgggactgccagtcacttgactctcttttcaattctatcaaactggaagtcctggcgaatgtgttggcatgcatcagtagctctgacatttgacatttactaggctaaggtaggaggagagtttcttcaaagccaacctgggctacatagtgagatcttatctcaagaaggaaagagtaagaggaaagaggaggaagacgagctatgagaatgaagtggtattatgctgtatctaacaacctatgtgtgctttctagacccagcctctgtgactatgagttactgtccaagtgatcactcgttatctgtatctctggcctagacctttctctgtattcggcacttgaatgttcaatgtctctgctttgggagctaatagatgtctcaacagttacaaaattgaactcctgatttctaccttatctttgggccttagtgtatatcacattcctcaattaatggcatgtatgtctctattgttgcctaaatcagaaatcctgaatcattaaaatggcacataaattatatatgtgaattataactcaataaagagacatttcttccttttcttacacacccagacacccacatccagacacacacacacacccagacagacagattcacccgccaccccccaattctttgatgtccctgtcattggctttttccatggacttgatggatagtttgatagtaggcagctatatgtgataaggcagatgagggcaaatttttgatgtgtagaatattggttgtgcacgaatgtttctgcacagttatttcagttttctttatgttagaaaaataatggcataaattggacttcaccgctcctttgtattgcttatcccaagccaccgtcatctctgggaaagccctccttcctggtctcttctgccaccctttctcattgtcagagcacagcagccaaagctttgttaagatgtaagtgagatccagtaactctctgaacaatgtccactaacgactttccgtcttactgagagtaaaagccaattgtcctccgtgtgatttataaggcctctcaccctgcctagctgctctctctgagtttatctgatgctctctcttctgctctccactctggacatattggctcccatgtcacttgccaaatccatttgcacgtattcatccagagcatacatttttatggaacacagagggttttgcttggtattatagattaaagggtattgtggccagttggggaacaccatgataggcagcattgaagcttctattactgctggaattaaattaacataggttttagtattgcccactttgggtaattatgacatctaaggcaaaaaaaaaatgcttcttgtgtggggaatcatgttaggaactgctactctggaatattttattccttcaattcttttatatacttagcagatttcactacacccctggttcatgcaaggccccattttaaggactataggaaattttttatcacccagttggtttgacatggataagacaaagagatcaataattaaaaattggaagcaaggaacattcaggggacacttatatactttcgagtgatcaaggaaggcctgtgggagaagatcttatctagcctaagttataaaagcttcactgcttaggtgagggatgaagtaacaggctttgacggggaagtacagcaagtggaaggctctagaggacacaccgtgagggaagtgcatctgtggtctacaatagacttatacataaaacagtcacccgagagatgcccagtcactccagagaccagatcctggtttattgagcaaatgtgccactctacagaattcgggctctatcttgagaagaattcactactttgagggaaatggacagctattatttatttataaacagatttctgttagaaagaccccatagctatactgtagggaaggtgggctcagtgtatggaacaatcaggtagagtttcaagagaagcttaccaaaggcagtttcctggaagacagaaatcgtgaactgaggtttggatgtgtctaaagatctattagacagaaagctgagtggaagatatattactgggggagttctttagcctctgaagcatccatataggaaatgaagagtaagaaaggtcaaaggtttaacctgcacagcaatggcacttgatggacagtgaaggaaacttaagagaggcaggaagaaggtcagactcactgggtctttacaggatttgagttgtgaggggaatgggcagctccagtggtgcaagtgtcacacatgaggactggttggcatccttgcgcttactgtcaggggaggtaacctgccacgaccacacatgcttagtgtgtataatttgatcctgatcataggattttgatcccttccaaacccctgatcgtggagttttgaaggctgcatttcccaggaaaccatgtcctagtaacatcacagtggatagtgaaggtggagatgcaagctagggtgggaactgaaagaaaattgattgagctgtcgtatggaagagtggctgtgtttcgaagatacaatcatcgtttgtttctcttgtgtgtttggcttgatgctacaggtatgcagagaagtgcctagcctcctgaagacacgcacccaagacccctgctctgccccacagatgaggatggctggtaagaaagcatttgctctttaggagtcatttttatcaacacagacaaacttatagtgggaacatcctattagaagaacttactgaaaaacatcacgtgattgctgttcataatctgaatccagactggatgcttagcatggggaaagatttgttgttctccgagtcaaagatatatctggatggccatgggtcctggtgaaggaaggaaagaggggctaggtggaaaatactgagttaatttaatggagagatgcactttttcaagttatcttgtgtaacctgccatgacaacacatgtttagtgtgtacaatttgatcctgatcatagaattttgatcccttccaaacccctgactgtggggtttcgaaggctgcatttcccgggaaaccatgtcctagcaaatattattcccttagttatggggaacattgtatattttctcatgattcctgtttatttccttctgtttctgtcccaagtagaccatatagccactgggactatggccttgctcactctcctacccaccacattctgcttgctgtctgtagtccttagctgtactaaccccagccacccacgtctctttgccagctgaggctggaggttgggactttctcactgtttttcagtgcccccctcatctctcctcctctcctcaactctgcctcccacctgccgcctcctacctgggctcaccttgtccatttccacctcttcttctcttctttatatcttcttcttttcctttaaaaacaatgtgtatttccttcctgatattgcagcattgcttatgacccagtgtgtgttctgcattacttattttcctcagtaccttgtcttggaaatccctgtggcctgattggttttcttgattatatttagaacaattgaattgagatttgtatatatgtatctctcttcctctctctcatctatgtatgtatgtatgtatgtatgtatgtatgtgtgtgtatctgtcgtatgtatgcatgtatctatgtatgcatgcatgcatgtatgtatatatctgtatctgtcgtatgtatgcatatgagtctgtatgcatgtatgtatgtatgtatcatctatatgtatctgtcttgtatgtgtctatgtatgcatgtatgtatatatgtgtctatgtatgcatgcatgtatgtatctatcatctatatctatgtatctatttatgtatatatgtatgtgtctttgtatctgttgtatgtatgtatgtgtctatgtgtgcatgtatgtatgtatctatcatctatatgtatctgtcaatgtatctgtgcatgtacatatgtatgtatgtatgtatgtatgtgcctatgcatgcatgtatgtatctatcatctatatctatgtatctgtgtatgtacatatgtatttatgtatgtatatatgtatgtgtctgtctttttgtctatcttgcttcaattctatgaccataaagaaacagcttgctttattaagtacagctgcagaggtttaccttttttagaacattgacaaaggagtagaaaaagtttatgtacatccttagattataaaagaccaacagcaaaaccactttacagtaggtttgcagtttgttttccttaaggcaaccctccataaaacaggtgtgagacctgaagccaatttcagtatgactttccttctacagtgttcttgttttttttttttaagtctaaacacaaaatgtaaaaatctaaatgaataattttaaattctaagtaaaaaattttaaatgtagaaaatgatgaaattatgtgtttatctgtgtttgtacatgagtgtaggtgcctggagaggccagatccactggagctggggtggaatggccattgtgaaatatcccacataaatgttgggaactgaatttaggtccctaacaagaataatatgtgcttttaacttctgagccatctctccagcccttacacaactttttagtttaatatttttcttcttttaaaatcatattaaaagtaaaatgatctatttttaaaataaataattcaaggacatttagttcattgacagtgttgtacaagcttcacctctatgtagctccaaaatatttctattctcaagttagagttcttgtgcttgagtagcttctctctgctcctccctccgacccccagattctcagcgtctggtatccaacagtgtgcatgccagccatgtcagcagattggtccatcttgactatctcgtataaatggtgtcacacaatgtttctttcatttagcctagggaacttcacaaaatttttgtttatctgtatgtttaaaaatggcacaggctgggcatggtggcgcacgcctttaatcccagcactcgggaggcagaggcaggcggatttctgagttcgaggcccgcctggtgtacaaaatgagttccaggacagccagggctatacagagaaaccctatctcgaaacccccctccccaaattggcaataaccaatctattatgcttttaaaatatatatttttataatattaaaatctactatgtttcaagagaaagtgaaaatgaaggaagtgacattgttttgcctttttacaacctaagtatctggctttgaagatgatatctaccttctcatttatgcttctgggtttcatctgtaaagatggtgcaggtgatgtgtcattatatacctgggggagatttaaagcaaataagtatggtggtggtggtgctattaccagcatccagatatcttggaagaggcacagggaggccagtgcttgtcagctgtcactttgccaacctgagacctgcacactttgctgacctgtgattgcaaaacattttgctttaattagtgctttctctttcatgtttcatgttgaactgctgtccctgttatctgtgtagtaggttatctgtcgcctcgtccagagctctaaagaataaaagcattttgctcactaattaaattcacgtgcctagcaatcacctcctttcttagtctttcagagatgtttgaacggatcggtctctggtgctttccttagacgtttagagctttaatggtgcattaacaagtttgcctgtctttgtgttgtgctctcgactcataaagatattcttctacgtcttaatctgatagtcatagtttttccccttcatgccttcatctccaggtgtctattttcctttatgcacatgaggtcagattccgtggcatcatcttgccatactagctgccagacagcagtgcttacggggtagtgaagtctttagcatccttccacaatgccacttctgtgtcaggtctttctgtccctgtgccttatggttctcctctcctggtcatctatttattattttgggatacagttatcattggtcaaaagtgtaactcaataattgtagggcatatctccttacacaaatatttttataaatttttttgggggggaagaggagggtccctttctttcttattgaacaactagaaattagtatctgtgattttgccaagctgcctgcatacctgttggggtttttattagaattgtactgaatttatgctaggtgccaggtagatttagtattcgtcttaactacatcttatattgaaaccaactgttaacttctcttagaaacaaaagaaaaacaaaaacaaaactaagaacaaagacagaaacaaaaccaagaacaaagacagaaacaaaaccaaagggttggagaggtggcttagtgtctgatatcattggctgcttttccagaagacccagaattcatccccaacatacacatgaccgctcacatctatctttctggggattgggtggcctcttctggcccctgtgggcatcaggcatgcgcatgttgtgaatatctatatctgtatctgtatctatctaatctccagacaaaacactcatacgtgtaacagaaataaaaccaagcacaaaacaaagagaaagaaaatatttatcagttctttggagaagacaagaattgattttaatacctttgggaggacatgtaagatccttctgctcactgtgaaggacaagggtggattcctctgacagaaaggagtaaataaaattaaataaatcaaataaataaataaataaaaatgaaacaataattcaaaaaataaaccaaataataagtaagaacaataataaaataataaacaataataaataaaataaatataataaataaagcaaaaccctaggaggacagcccctctcagaaagagtaatgaaattgacttcctcaagtttgttaagatataagtaattacaaagtagaaggacttagggaggaggagaaagaggaagggaggacataacacattgcaaaaatgaaacaggagaaaacaaacaggccagacagtagcatagctttcatctcaaaggcatccaaattgataaagaagtagattccaaagaaacaaaaaccagactaatacagatactaactataccactcggtgcagaagcatgaaaacacctttattagtaattaatccattacagtaatggaggcaggtgtgtactgagatggagtcctgttgatgtagatacagggtgtttagctagttgttggagaagtgaattccctttggcaaggagattaaatacatgaatttaaaaatgttgtctgacccagtgatttctctttgggaaatctctactaaattggaaactggaaatgtggaaaatactatactcaaaaagagtttccctttaagctctttggtaaagaatggatttcaggagatttgtacatgtacagctcaatgtgtagctgaaggaaagggtgctgtaaaagtcagtgactatttgtgtaaattcttatacagatcttcacattatagttagctaagaatgagatatgcagtccaggtgtggtagtgtgggctttcaatctctgaactcaggaggcagagaaggttggatcgctatgagtttgaggccagcccagtctacatagaaagttccaggtcagctagggctacactttgagactctgtgtctcagagagtgtgtgaaacagacagaggcaaagaaacaggagataaaaataaaaggtgaatatgctgtaaagttaaatgaaaagaacagaaaaattagaaataaatttgctttatatttacagtagcctgactcaatgaaataatgcttttaattttatcagtgtgtgtgtgtttgtgtttgtgtgtgtgtgtgtgtgtgtgtctgtgtgtgtgtgtgtttgtgtttgtgtgtgtgtgtatttgctttgtttactgctttattttttgtgttaatgttgattgcatgtgcattattgattgcatggaattttgagagggctgtgttatattggatctatggctattaaatacacgtggttatttcaatctatgccatttcaacataaaaataccttcctagaaaaatggaaatttacttagtacacaaatgcacatgccctcactacatatcttaaccattgcctcctgttgattattttcaacttgctacatctcttgtttcagctcatcccaacgtccaaaaggtggtgctagtatcatctgcatcagatgctcctctgcgtggcggcctggaaatctcggttcctgctgatttggataaaaccatcacagaactggctgactggctggtattgatcgaccaaatgctgaagtccaacattgtcactgtgggggacgtgaaagagatcaataagacagtttcccggatgaaagtaggtgcagaatgtgaagttttgccagggcactacgctctccttgggtctctgtggtttatcctaaatttagagaaaacaagcttaccgatattccttatctgctgggtagcccttcagggttaactccaaagagtcaagcttttcttcagttagcgcaggttgatcaaatagaactgaaggctcagtgtaaaactctagtattgatactgtgaagctggacaccacataactgtaagctacctttccatttaatgcgcaatgcaatatagaataatttctaagcctatgtttcatcttagatttcataatgagtacatttcatttctgatcttagaaatgaatgtgttctgatgatatgttttttttttctcttatagaatagagaccaccaagtagcaacctggaaaattctttttccatacttagtatatgctaggctatagcttatctgttatatagagtaaggctgaaaagaatgttttagatagatatgcataacaaaataatagctattgctagcatctaagtgcttaatgtgtgttgaacattttcttactttcacatgtattgtcttgtctatatcataacaatctggtatggtaggtgccaattcattcccatatcaccaagaactttgaacttctaaaccagtggttctcatcctgtacgtctgacccttttggggttgcctaataccactggaaaacaatacattccaattcaaattatgatagctaaattacagctttgaagtagcaacaaaaataatttcatggctggggtgtgtgtgtatgtgtgtgtgtgtgtgtatgtgtgtgtgaccacaacccgaggaactgtattaaagggtcgcagtgttaggaaggttgagaactgttgttttaagaggtcgggaagatgggcatatcaagcagatggttttctctgacaaaatagtttctaataaatgtcccaggggagtgtcagccacatgttagaggagacaggccaaggaggggctgtttcagtagccctgggatcaggaggtgggtttatgagatatttaccgttctatcataggggacaggaggcaggggcttggggttgatcaaatacttagagccggcatttgtgcaagaagtgtttttgtttttgttttccccttatggaaaagttaacttagttctttgagaagaggcatgcgaagctgttcacagcctcgtggacgtaagagtctgcaatcagtagacaagcgtgctcggccgtttctttctggttcctgattcgtggctggggactgttgataataatgctttgctttagtagaagatgaggatggctcggaggcaggagatgcttaagtcagggaaaggagcccttcctgaggggctgagacgatgctgtttccagtagaggaagtagaggaagtagagggaggaggaggaggagaagcggagctccagtgaccctctgagtgatttagctttgagtctgttgtgcagagggaagaaagtcagcagcataaacggaagctctgggatctagagctggagtaggagtcgttcatttggaaatacttactcctgtaggagtgattgaggtctagagaagtagtttacccgcagggagccggctggaccaatcttttggcacactgtttgtaccaactgtgaattgtgttttctaattctttttggtatttattggttctagaattagaatagacttttcctggaattcttagccctcactgtatttatcagctaagacacatagtccatgaaaaaagggtggtttatgaaggtgattcatttgcagttattgtaattattgcttttctaacatgccgttttcatctttctacaccagtggttctcaaacttcatcatgctggacccctttaatacagttccatccataacatcgtttttcataactgtaattttgctactgttataaattgccatgtaaatatgttgggagatggaggcttaccaaaggattgcagcctacaggttgggaaccattactgtagggcatccacatgtgcattcatatctgatgtccaacaggtacacaaggagtcagtagcgaagattgctgatgttttgagagcatttatagtgagagttccttgatttaatttccttagatttgatggaactgagctgggggagccaatggagagggcagatgccatttctggttatggaagacctgagatttgaacctaaggcctctgactccaaatcacatattcttcctctgttacatcgatgatgtttcattgcctcttagaggaagaagacacacccaatacacagctaggggcttatctcaggatgcattaatccctttgaacttgtctccttgcagatcacaaaggctgatttagaacaacgccatcctcagcttgattgtgtatttaccttggcccaaaatttgaaaaacaaagcttccagttcagatgtgaggacagcaatcacagaaaaatgtaagttaaaaaaaaaatgtcctgcctggcgtggtggcgcagacctttaatcccagcactcaggaggtagaggcaggtagatttctgagttcgaggccagcctggtctataaagtgagttccaggacagtcagggctacacagagaaatcctgtcttgaaccccttccccccctccaaaaaaaaaaaatgtcctttatagtatcagctacttcccttaacactcgcaaaaatgtcttcagagattatcctactagaaataaatgttatttttagaagaaaatacttttttctctctttttatcttcaagtttttgaaagtcttttcatacctattcctcccttctgaactcttatacatttaataattttttcttttattttaagaattttttctattttttttttttttttcttttgagacagggtttctctgtgtaacagagccatggctgttcttgaacttgctttgtggatcaggttggcctggaagtcacaaatgcccacctgcctctgtctcctgagtgcggggattaatggcatacaccaccatgcctggccaacattgggatattggtttaaggcatctaatggaataagctagctaaactcatagtcacataaatccattctgccattgtgccttactcacggaaactggctgtcaccatctcttaaacttccgtgagaattcacttcgtacttgctttctgatcggctttcatgtggggatgcctcagttaaaaagaaaattaaacagccaataaaaagaatgggtggaacactaacaaaccagagtctctgtttggagttagtgttggagctgaggatctgtgtcgcatgcggaactggattcttaacgatggtgtctggtggctatcatagtctttctcctcagcccctgtcccctgcagacctggcctgctccggatccctgttcaaagtccctgatatttccagccattaacttttatccatattctccccgcccaacctcaattttgttcttctcctggggtgagattactcagcagctaaagtgtccctccctctgtgagtccttcccacccacacatgctcccctgtggactgcattttctatctttagttcttgccacagcctccttccccatcagtttcctctggatcccatagctgctttaatcttctttcccattcccaggctatgcagactcaccttcctggtctctggtcctcccacttggcagaccatgagggactcagttaaatacacgtgagaatgtaaactaggcgaataaagttgaatttttcttaagggagagcattcggctataggcttaatagatgggtttggctttcaaaataagtggaacaaagtggttcctgatggagacagttagcctggggactttgagtgacagatggcgttgatttattttcacttaaacagccactatcctttagtcttcctgattttgataattgatcaaatatggatcttttatgatggagcactccgatatgagggagcactctggagtcatctttcctccctctcttggtaggacatcttctctgttcacagcaccagaccatttctagccacatttcatttttctttctgatcatcttatcaggactttatttttttttcctgagcaggtggactgctggctgagatcactatatcaagcccagacagtgttgctgactgagcctaggatcttgggcacgctaggaaaccactcttgcctgagctgcaaccctagcacacacttgtgctctctctctctctctctctctctctctctctctctctctgtctctctctctgtctgtctttgtctacctgtctgtctttctgtctctctctctccctccctcctttcctccctctccctctccctctccctctccctctccctctccctctccctctccctctccctctccctctccctctccctctctctctgacaacagggtttctatctcctgaatatcttcccttatcacttatttctgtctctggtctttgtcttctcctcctcttcttcctcccctcgtcctccccactccccaactaattaatcttcatcattattgtatgcaaagagcccttaccagctcctgtggcactaatagtaacaggtttatcatttataatgaataggataatcagtttattttttatgataggccaatgatatttgctgtcactcgatacttcagcttgtatttgtgcaaaccaatgaactgtagcagtagttaaattggccataagtatttagctgagaattagactatcatgatagtttggtcttttcttcccttgagttaaaactttcagtaattttcttacattattaaaacaatatacagcagaggatctcaatggatactttttataaattataactcactgaacaatttaatggaatttatgacatgtaagtctctcagacttctaaaaaactccaagtcgatagcctcatgatttacaatgaccatatgtaatcttaggaattttaccagaatgttacattgtaactaaacccaatcttttcagttttcaaaaactgtacgtgtgtgagtgtttcgcctgcttctaagtctgtatggcattgaaatatgtgaaccacatgcatgcaggtgcccatggagaacagatcagggcattcgatctcctagaactggagtaacggatcgctgtgaacctccgtgatagtgtcggggccccaacttgggctttctgcaggagcagcaactccagattcctggctggagtttgtcttgtagttaagttcttcttgggctcgttcttctgtacctttgaggttgttcagcctccagatgtcactgagccttgtgtttgccattcatgggctgatatggagaactattatttcctggtatttcagcccacagctgtgaactttccttgtgataatgaaccaaagtgtaaatttcgaaaggtctctctctctctctccttttagatctatgatttaaaaataaggataaaagacaggagaggagagagtgttggagagggaaaagagagaagggaaggacaaaagacagagacagagacagagaaagcaggactgagaaaaggagaaatggtacaggagtggggggggggggagccagcatgaaattttatgactgtgaacttataggtacagagaacttgcaatttcttcattctcagtatttctgttgaacttgaacatgtaaaatattgccagtcagaaaggcctcacgctagactagagcaaatgtaaaaagtgttctttgcctgagggattgtcattgttaggcagaaggagacggtgtctttttgttaacgtcctatcctagactgccattaggtgtcattgtcaaaccaggttctgtgaaatacaggaactagggaattgttttctatctatctatctatctatctatctatctatggaattgttttctatctatctatctatccatccatccagtagatatttttgttattacatgactagtgtatttaacataagccgtattcaagtttttgctgttcaggaacaattttagaaatatgtgtggtgaggtagcccagtcctggatgtcagccaagctacttgggataccacatcaggggagctgcaagttccaggctagtctggggaacagaggaaggactaacttacataaataaagcaatttagaagagcaatgtatgtagttcaggggtaaagtggttacttgatatgtgaaatgtcctggatttgagcccagcactgaaggaagaaaaattggtgagctgagcactgtagaataatctcagcactcaggaagctgagccaatagaattggctacatatacctataatggtgtgatgtgtaatgtatttttttacacagtgtacatatttgcgagccatctctccaacccctgtacatattatatagcattacttactataataatacattatactatgtacataatgttgtggcaggtgagcatagagttcctttaagatatgtttatcgtcttccactctttctgtttctagatctatttatagcatatttggaaccaggtcttttccttctgtggtggtcactttaacaggtttctttttactcccactccccagtggaaaagctgaagacccagtgggagagtactcagcatggtgtggagctgcggcggcagcagctggaggacatggttgtggacagcctgcagtgggacgaccacagggaagagactgaagagctcatgagaaaatacgaggctcgcttctacatgctgcagcaggcccgccgggacccacttagcaaacaagtttctgataatcaagtaaggcaaattggctagttttttgatgcagtcatttgatagatttacttgttttatattgataactataattaggggctctcacgttttcccaagttcttagacatacatgttgagatttatgggaatttaatcacagggttcttgttattttgggaagatgtctaaagacacaatgagcaggaacgtgcacttgtgtgagtagagccatagttagcgtctacaaggcaatcctcatttgttgaccctttttctgtctagggagattcttttcttttttttttttttttttggtgtttttgagacagggtttctctgtgtagtcctggctgtcctggaactcactttgtcgaccaggttggcctcgaactcagaaatccgcctgcctctgcctcccgagtgctgggattaaaggcgtgcgccaccacgcccggctgagattattttaatgtataaaatttttctagacttccatttgagtacttctgtagtgtgcaagctaagtcgtacctcagtgtcattctctattctatgtttatcagtagcaacagctttcatgaccaatttcataatagtggtgagaatattgaacactcagtgtttaaagtgtgttatttaaaaattacttctgtagtcacagaaattttcttgtgctggacatgtggttacatactttgtatttgcccttgtgattgcctgagatgaaaatgtacttttaggaagaatgtagtaatctagaacaatgtgggaagaaaactgagaacctgcaaataatgccttaaatctctgcacacgagggcttctcgtggctatcatctcatgggtatcatttaaaatccacctggccacgtctgttagttcctgaattgtcccatgtgtttatgacgcttgtcgatggccccgaagtaagagtgaagcttttgtacacatgactagaaaaacctgatcagcaatgttcaccagtgcttccatcttcatacccagaatgcacttggccttcccatctgtagcatccatgtctacagattttaaaatgaacacatggattttctgttagcttgccattatcccgtgaccacacagtaggacaactaattatgagtattgatgtcattttaagccagttcttcccagccttcctcgtgctgtgatcctttagcccagctccttatgttatggtgacccccaacaatttaattattgttcttgctacttcataactgaaactttgctactgttatgaacagtaatgtaaatacccgatatacaggatatttgatatgtgaccctggtgagaagatagtttgacttctgaggggtcgcgacccacaggttgagaaccactgttttaagcactgcaagtaacccacaggagacttaaagtgcactggagggcgtgcacgtcttattgtgcaaacactatgccattttctctaggggatgtgtgtgaatttggtatctgtggaatggaaaggtttgggagcagtctttcacaagtactagacacagattctctgctgctctaatgaacagtgtgtatgttctttctgaagccttaaggtggatttttctttcacaattgctacaaaaacattacagatacaagtgacacaagtgtccttcttgattgacacacacacacacacacacacacacacacacacacacaccccgcttaacctccctgggttgagaacctgtgaaggggattgtgcctgtgatacactgagcatctgtgtagatagaatgctgaacaaatcttcattggctgcctgatccattccagctgttatctttgcaaacactcagactgattcggagttaaagggcagagggtttccaccagggtaatcttccgacgtgtctctaaatgtatacacaagaactcagtttatgttgatatgattcatgttctgtgagaattagctacacagcaaaaagaatgacaagggcattccaggaatacgagggtttgaggaggccagaaatctcaatgggtaatattttactctcacctactaggcacctgattcctcaggcatgttctcttttaaacaagtatttttattatattttaaagcatgtgtatatgtgtgtcatgcaagagtgcaggtggctatagaggtcagaagagggtgtccacctcccgaaactgcctgggacttcagactaccatggtggaaaagctctctttttgctatttctagaattactctggtttgattgttctgatttaaacttgagagtttgtcctcttgcttccttcttatgatttctgtgtctaaaatgtgctaaatcttttcaggactatgagagttgggtagtcctagttactgagtagccatgggtaggtagttttagttattgagtggccatgggtaggtagtagtagttattgagtgaccatgggtgggtagtactagttattgagtaaccaggggtggtagtaatagttactgagtgaccagttctaactgtgtttcaatttacaccttagctattgcttcaagagctggggtctggcgatggtgtcatcatggcgtttgataatgtcctgcagaaacttctggaagaatacagtggcgatgacacaaggaatgtggaagaaaccacggagtacttgaaaacatcatgggtcaatctcaaacaaaggtaagcctgggtggggacatgtgcatctccttcccgagcatccaatttccttcgctttcccatggaaacaagctaaataggcaaatattagaagtgtatcttattatttttctctacttttaaattctgatgaaaaaattcatgtcagtatattttgtgcagagtgtgtatttttatatcttcttgaagttttaacactgtatttttaaaaataaaccttgctagtattattttaagttttcttatttttttccctatgcctctttgtattatttagaatacattttgtagttctctgagagcacagatagttgtaactacatcaggctaatattagtactaattgttactgtgatagcgtatgatatttgggtgggatactctcaaatgaggaccagacactgtggatctaccacctgacctcagaaatcatctatgtgccgagttttggctaattcattatcttttctttccatcattgtcttatcattatgtatggaaaaacctggaacaacatatgtgtttcagagagggtttcactcacttaatcttgcagggatcgagaaagcatgggcagcagttagcatttttccagattccatgtatgtccatcatcagttaaaatatttatatagcttactgttagtgcccatatgtaagtgaaattatggcttcttttttatgctaagtgcaatttcttgaaaattattttaataccaaaacatatttattttgtaatggataaaattgctaccagaacattttatgttaaaataactccaaaaatttaatggtaacttaacacagaggaatttttgcgtatagatgtgttttaaattgtgtgtgtgcctgtgtgtgtgtgggtgtgtgtgcatgtgaacatgtgtacgtgtatacatctgcacatgaacatgcgtgtgctcatgcatgagtgtatccatgggtgctattgcactcatatagagaccaaagaatctcttgtcgaagggagttggttctttttgtctacagggtgcgaggcttgtgagaatgcacctttatgcagcacaccactaggttggacctctggagagccttgtgagttagattctttaacaaggttctggaactccttgaaggatgagaatgtttacgtgttagatgcttactcaggttctccatagaccctaacaaatacacagctttgccaaaagttaaaggtaaatagctgcaatcttggcagtttcagcagaatagcgttcttgtatcatgccatgttgtttgtgtagatctcataactaagatagggagggaaatgcattaaaaaccacagagatatatcttaaaactgcttcatccatttccagaaattacatgtgtaagaaacatggctttggttttttttttttgtaagcaattccaaaaagttgagcactcgctggaatgaacagtctgctttttcttagcaacattgaggcttttctttgtaaatactctaagacagtccatggctgcagttaagttagacggacgaggcaattaaagacaaattatatcccaaggagatctctcatttatcagcgttgaggtagccacagagccccagttttgtcgtagtgaaaacacgtgcttcactttattctgtttctgagttgttttagtaatgagaattcctattaatattcagacatgatttaggtcatattgttctttatgcggttaggaaaatacaacaaaaccttggctcacagaatccttcctgagtgacagccacagcttctatattgaaactgtgtgtctttcaaatctttaactatcctaaatagacatctcttgggaatatataaaccattccttcctttcttaagcaaggtgtgagattatattaaccttcttttgtgtttttgacattgttcttataaagacagactttagaccaatacttctccactttttaaattatcttccacaggaagcttttaaaactccttccactgaaattttaattaattagtaaatgaattattctgggggcacagcagagtcttactaatgtagctgaacttgcaaagtagctcagagtgggattaaacttgggatcttcctgtataatctttgaagctttattaataatggagtattctgtgagtctgtttccattctatgcacttaagctttttagttagacagaaaaaggagtgagtttttctaccaccactctgggggtagatctactaagcaactcctttgagaccacttgggctagcctaacactgtcaagcttagtgacatagaaagcaaacgacaatttcttaagaccaaaagccggtaacactatccatgctctgaattctgaaacatggaagacaaacttaatcagctgctgtctcctgtgagtgtctgctgtggttttccagtgtggatctgagtgacttctcactgtttctaactgtggtaggcacttgacacagctctcctgtagttcgcccacagccttaagagacaggacgcatcttcctcagcattgcattggttgtaaatggaagctcagaggcagcagagagttccccagagtcacacagctcatcaagcatagctggaatttggatttttgcctttttgcctacacagccaggctcttacttcctttaccaagagtttaatttttcttctttgttatcagaatgtcagctattgctggtgaatgctcgctgtgtgctcttgcttctcagatctgcggttctatttactggtgcttctctgtactgtgtatggagaacagatcagattaaagatacgggagcttccgtgaataatagaatagagcaagctctagcacatggccactgtgccaactctgatggcccccgccaggcctttatcatcacttcctcttacttcacatcatctctgaatatactctgaatatacatcattgtcagcagaattgtgcacaggtgaaggggtatcacacttgcatacacagtaatgttgttagtggctgtgattcataaagtttaatatgagctttcaggggagatgtttggtatgaattgaaattgaccattcatagttaaaggtcctcattcccttatctacagtgtataagccccaagcagccctgataacagacagctgccctttaatgtgagtgccttaattatagtctttatgcagtgggaatgacttcctcctagcagcacgagtattagtctgcttgattgcttccctaaaccttctggaagatgatctgtaatatagagaaatgtatagaaattcttagatctttgctttccttttttaatgccagttagataattacttactgcaaattttgatagtcaagatatgtgtgcacaagttgaatattctttatctgaaatgcttgggacaagaagtggtttggacttgcagatatttacaggcacatgatgaaagatatagaagatgatgctcaaatctaaacatgaaatttattctgttttcaacatactgtgtaagttgggaaattgtagcatgtgtgaagccttgtaccatgccagcactgtaattaattaactaataaaaagtcatgtatattttaaacatataaccagaaggcaatttatataacatgtttagtaaatgaaacagaaatttccaccgcagcatcatgtcagtactgaaatcaattttagatttcagagcatttcaggtgtcagggttagtaatactcaatttatagcaagttttggagcgtggatgcctgatttggatgtgaatggttgtttagtcctttatttttgctctatatagataaaataacactatatatatatatgtatatatatacacatacacatatacatatacatacatatataaataatgtatgcctgtctatgagtatggatgtatatatgtatgtgtatgtatagaaatagaatgatctgttctgaaggattataaaggaaatcagatcccatgactatatgctatggtttctcacaagtcactaattaactatggactttctcttgtcctatcaccacacatgcctattataaggaaggcacttccaggatggtagaggtagagcaagtccagtgtgaaccttgagcaagttatttcatctcgctgggtctcagcttttcctttaaagcggagggcatggctgatgggtaggcctactgtgagatcaaaagtcatatataaacgttcttggttcctggtctgtgctccacaaaagtgcacccaaattaacatcatcgctgtcatgtcttccacgggactgatatgcagacttgtttgtcattctgaatggtttctactgatcctgatggtaaagtgttggattatctgctttaatgaatgcattagagttgcactcagtctttattagtagatgaaacttcttttaaaaaaatccaattatcttacttagtgaaatcaccacacttgcttaatccatgttgtattcaagtgtcttgtgctaaagcacagatctagccatcctggcaagaaaagaatataaaacttaaaggactatggtttgattgagtgccatgcaaacgattcaaactgatgagtgaaataactttattttctttttatataagactgtctttattcattggtactcatggactgggtatatttacatggactgacagaagttttgtgtccactgatgactgagcctgaggactgggcgtatagctccattgtagatggcttgtcttgaggttcaattctcaaatcctgcataaacagggtatagtaacaattgcctgtaatctcagcactcaagagatgtgggcagtgggatcaggagttcaaggacatcctccgtggcaccaggagtttggggcagcctgggacctaggagactctgaaataaatggactgaatttggtagttcctggaccgtagtagttttcacagtgaattttgtcgcgtgtctccaagcttccgttttgttttcctttctctgtcgtgtttgcttattgtctctgtagattaagcaaaaagcgtatattcttcagcatgggccccttttcaataccttttcaatacaaaaaggtattggctcaaaaccttttaagagtggccaatgaaagacatcatatcaggattaccgcttttgcctaccctttggccaggctcaaccactgagctcataaaattagcgactgtcatgctcagtcaatggactttgatgggaagtgcagttagctttttccttcttgctgatttactattatgagagccagaggtttgcatcagtcagctggactttcctcttggaaggcaatttctttcctcaatagtcacctttggttttcagtctgtttcttttgtttacgctgttcacattgagagaagtataaaagttatactcttctacattgttctgttctgctatttaatagtccatgtattgtttttctgcccttaataaagcacagccatcatgacatactatttgtatggtgtatggagagaagattcctgtgttcagtttgtgccaggcccctacatgcagacatttttctcagttttgcatcaaataatatagagggttagtgggcacagtctttgtcttttctttcatttgttttgtttttattccatcagtgaattaatcatttaattaatgaactattcactagtctccatctgtccaggccccaagagagtacagaagaaccaaccataaacatacgtgttccttccaccagaaagctcacattctattaagagaaatagtagaatgcaaacatggtatggaagaagttgggataaagattaacataattgtaggcggttgtttggaacttgtaaatgaagttggcagtgtaatgtaagaacgggactttaaaatggtagaaagcaaaacccagtggtcagatgtgaactttatgaagcacaggcgtctcggcatgagcgcgatgggaggctagtgcgtgataagtctgggagcgacactgcgttggttccaacttaatctctgtacatcatgctttgagagttgttcactgggctaaaaagaacagttgggaagagcagaaaggacacaattgcttttgaaatgaagacattgttggctattgtgatgcagccatggatactgtagtcttcggatctgccttggatgttggcatgctttggtggtttagctgtatggtgtgatagggtggaaatattaaaagatagaatcttatgaaagacactgaactgagagacactgtagctttgtggggaaaaacaatctagaggcgagaaagtgcagacgatttatagaaataatttcagagaactttgctgtgaggaggggacagccagattagacaggaatgggggtggggtgggggtggaaattgaaaacatagtacttttgggcttaagaattccagtttcagtgaagcccagatgaggccttggcctgaggagactaaggtccaagtctggctgattgtatagcaggagctctgggacttggttgaagatgcctttggaacgtggaccggtgcatgtcgggaagggtatggaatgataaaatattgattgataaagtgaagagcaaatgtgagtagtgatctagtttaaataaataattaaaaaagatctagcgagaacgcagcctcttatggaaatgtctgggtggtctgttgttgtttttttaactggcaatggcagccccacagggaagtaggtgctctgctgtgttctacacaaccttgcatcatgagctggggccagagctctcctctttaacttttaagtgctctggcatcagtgccttagcacacagaccccttaagacctgtggggtgaatttttaagtggcttgggaaaggcgcaatctctatgtagcaaggactgctacagttccccaggcctctctgtgcacactgaaaggctttccccacagtatgtgttggtatctatttcagatgaacaaaatcttaggaaattacttccctgtaagtttcctaccttctacttagactgattctgccattttccatgctgaaagagataaatacatttaaatcttctgcagagatcaccgttaaagacgtcaaaattagcaacacacaactgtggctttcctaagaactcgttttgcatcttgtaaaaaaatttggggacaatgttctctttgaccaattataagcatacacatacttcatagaacagtatattacattctgtagcctaaaataccaaatattgcctaacatctttaaaattgcgttttcaaaagcctgctttgtaggtggctatattttatgttacaaaatggctatcggtttgttttatagactatcacagtgagttttattacagacatcatgtgaaagctaagacttcatattttagaaaatcctggttccctttaatataaacgatcacaaatctgtcacccgtggatggccttacatttcctatgtgaagctatttctattttctttgtgtcctatagttggttatttcttttgtttgaggcataaaaatattttagctaaagtaccctgtgtagacttcaaatgttatatcttacatgttttcagcctattcttgctttttttgattttataggtttaaagatttagatttttaaaaagtccctgcttttgtcttctgaactcagatttcctaaagttaaaacttttattcccattataataggatcctttccatacatacggtcatctttgtccttttgcttcttctactccatcctggtcttatttgagacccagcaaatcaagcattgggtgaagacctgagctggacctacagaaccatgtttgtaataaatgaaaagctccaaacatgatagtgtgctctggtagtcccagggctgtggggacagagataggtagatccttggggctcagtcaccagccaatgtagcctatgtggcctgccagactgtgttagtaaaagcagaaggtatctcaggagttacatcagtttgcccttggctgttacacacaaatgcgcatgtgcacacacatatgcaccctgagactctagatgaatgtgggttcagtactaggcatggccacaggagccctaggatcagtgcctctcaacctctttgctccagtaacatttcatgtacaagtagagacacttagtgaagtgggatttcaagctaggatgggaacaacagtggaagaactcttccagctgtgcctatgatatcagcaatggcttacacagtttgaaaaggacccctagagagtctgaaatggctcttccactgatctgctccaagctcttcattctaaggcgagaactgatatatcaaagacttttacatggttcactcgaagccatgttcctgggaaattgcagaagaggcaaaaataggttcttttcttctgaaggtagcatacagggctattaaaaataatttattaacctgcttgattgaatatttgtatatgtgtgtgtgtatatatatatatacatattatctatctatctatctatctatctatctatctatctatctatctatctatctatctatccacacacacacgtgtgtgtgtgtgtgtgtgtgtgtgtgtgtgtgtgaataaaattcagtataccacactagatttggatctaattttagaaacaaaaaatcagctgagctgcactctgttagaaacttcatataaattatattaacgtcagaaatcagaacacaaagtgacatatatgtgtgggctatgataactctttgtgtgtgtgtgtgtgtgtgtgtgtgtgtagttctagaaattaggtttgtgcatgtggtaggcaagcattctactactgagtcatatacagacatacatatgtcctccactataattcattatgacatatgtatcatttagacttctataaacagagtctaaacttcaatattcctttttataattagaaggtgtattgtgtatgtatggtatatgcctttgtgtgtatccttgcacgttcatgtgcaggccagaggagagtaccagaagtctccctgtattgctctctgtcttgtttcctcgagacagggactttcactgatcctttgattcttttactttatcggaagttagtatttacctctgtggtttttttttttttaatgcataagtttcttcgttcctattgctaattcctctcacatcttttcagtagcctggcagtgtaatttttcacaaagtctgccacgttagggaagctgtcacttctgctatctttatcttgaaggcatctctcctggtgccatgcattctgtgtgtaccttcactcaccatactgagtatgtctattcttcttctctcaatgtgtcatctcttcttggatcttatggttttgttctcccttttggagacatttcatttgagtatatcttttgtaagttttgtcgagttaatacagagaccacagagcagtcaaagtgacaacacactcttctctctttgatcccctttgtcaccaccaaatagcctcctgatggttcctgttgtcaggagtcttgtttctttggttctggaattttaccccttcatggtgtatatagtttgatgtagtctatctccaggttctttagggaaaaatggcatttaggaacaaatctcaaaggccagatatccatctggtgaacatcatagttctgcagtatggactctgaggaatgtggaaatatggaaaacaattgctgcctgtaggttgtagaataagtggacagattaaaaagtctatatattataaagtgtagagtggaagcagatcagaatctaaggacctttctagaatacacatgattattttttatatagagcagctcactgtccttttataaacccagagtgaggaaacttgagaaagaatagtctcaaagagatgggttctaaactttaaaagataagtttgatcttgttaagtagagatagtaggaaggacactataatgtaggtataaagtttttacacagtcatactatcaataacattctagaaaatctgaaacattacttggacatgaagagaatatgagagaaaagtagaggttaaagttggggagagaaattggcaaaaagttttagaggacggaacattccgagtagggcagtgtctctgttagggttctattgttgggaagagacaccatgaccatgccaactcttttaaaggaaagcagttaattggagctagtttccagataatggagtttagttcattatcctggcaggaagcatggtggcttgcagacagacatggtgctggaaatggagctaagagttctacatcttttttttttttctttattaggtattttcttaatttacattttccaatgctatctcaaaagttgcccataacctcccccgtcacttccctaccctcccactcccacttcttggccctggcattcccctgtactgaggcatataaagtttgcaagaccaaggggcctctcttcccaatgatggccaactaggtcatcttctgctacacatgcagctagagacatgagctctgggggtactggttagttcatattgttgttcctcctatagggttgcatatccctttagctccttggatactttctctagctcctccattggggtccctgtaatccatccaatagctgactgtgagcatccacttctgtgtttgctaggccctggcttagcctcacaagagacagctatatcagggtcctttcagcaaaatcttgctagtgtatgcaatggtgttgatctgtgggcaacaagagaaagaccatgtcaccctgaccatacttgagcttagaagaccgcaaagcctacttccatattggcacacttcctccaacagggccacaccttttaatagtgccactcgctgtgggccaagcattcccacacattagtctttggaagccattcctattcaaactactacaggcagttcgggtttattttctagacaaatgggactagaggaattttatagagtagctgctgctatgattatgtcatctcggaaggtcacattaattgattcactgttgtcctttgtatctggcttctttcacttagaagcatgaatttgagagcccgatcatatcattgagtgtagtttgtctcagtttctgagtcctatcccattgcttgcatggagtgcgctttactctccacctcctgtttgggttgtttatggtcctggaggataagtcatctgctttccctgtcttgagtttagttgctttagagatttcccccaaatggaatctcacagtatgtgtcctttggaacttggactccttctcttagcctatttttgtggtgtgggcatgttaagttagagtgtttatcaggatggttttattcattctgtggttgagtaattgttcatgtattagcatataatggtccattggttagtgcttccttcagataatgtacagtggtgtttcagtattctgaatcatgaagctctaaacatttgtgtatgacactttgaatgggcgggcagttccagtgttcttgggtctagatagataggactaaaaatatgtgagtgcctttttttcaaattaagatttatttatttggtatctgtgagtgtatatgtgtgtgcatgccccttcctgcctttatagaagccagaataggaattgtatcattgtgccctttggagctggaattacaagagtctttggaccactgagcttgttactttctgagacccaaacttcatcctggtgatggtacatcacacactctgggtcacaggtccatccatctatctagcctagtatccatttaataaaaatagtttgtctattttctcactgtgaaacttggaggtatatacagctataaatgttggatttacaggtatataccttgcctaattcagataactctcggtgctctagttttgatgtagaacttatgaaacattcataaaagcttgtttgttcagtgtctttcagatactattaaatattaagttgatattactaaatattaattattaagtcaagtattattaaatcacattatatttacttagattattagcaaaagccaaaagttattatttcctttgtggtgttgggggttgggcccagggccttgtaaatactaggcaagtgcttcaacactgagctctccatgttagcctgtgtattgtttgtttttaagtcttaaatatttattttgaatttgctcttttaaattcagtgagtgaagtatgactatgtattaatatcacctttgattgacatcccttttatggcagttcatagatttttggcataaatctataagagatcatgttaatgcacaaatctgatatgtaaaatacaggcatgatttattttatgttgtgggtgtggctttgttaatatttctctgtctctgtactggtatctcacaagtcactagacatcctctttaaggattattttagacacacagatgaaaaaaatcacacatttccgtttgatggcttaaaggatggaggttcctctgaggctgtgtgttaattttgtcttgggtgcgtatgatgtatgacatcaccctgaaagtcacagagctgtgtcttctatgttgtttcttttagcatcgctgatagacagagtgccttggaggctgagctacagacagtgcagacttctcgtagagacctggagaactttgtcaagtggcttcaggaagcagaaaccacagcaaatgtgctggccgatgcctctcagcgggagaatgctcttcaggacagtgtcctggcccggcagctccgacagcagatgctggtaagtgtgtgggaagccacaggcagcagtctctcctgagcccctgggccaccagggaactgattactgtttcaaagtgaggaggctgtctgcactttgagttatggaatccgtgctgtcccatgaataactagtttttttttggatatgatctacagaatacttaatatacttaacattaggctgaagaccaccttgttttatagaaataattgtgtatttagagctagagactcagggctgcttggttttctgccattttaagcccttgtgccattagtgctattgaatattaaattataaggtcatttcaccttcatatgaatgggaaattataatttgtattattatatttattataatatatatttattatttataacaataacttgtatttatactacacttaatataaatacttgctgtagaaatttcaaatctttgtgattcagttatagccagatctatgaggctcaaagacattatttatgtatttactttataatcatgactacatatgcagtctgaggttcaaatctcattcttgagaaatgtggtaatattaaagcttttctttaaataactttgtgtgaaattatatgaagcatgccagaatctctctttccattccaagtcatagcccttctgtgctcctgcgtctttttctcttatcgtgggtaaatgcagtgatcatttcttgtcaattttagataagccttctcaattacaacttttaaaaagttgcttcatcaggggcatctcctgtgtgccacagcgacacatcacattttgtctgtatgctgtgacttatttacaaacatgtgaattcatcactttgactactgtcttctgccattgtggtgaacatgcgttttgttatcattgagtgtatgtattttacctaccttagttgctcacatagttctttaagcatagggatgctattcttgttgtttacatgatgtttcaggatcaagtcccaagtaaatgcacttgattctaacttctgcagttgaaatttagtactgttaaccaatttttaatccattcttaagaatgcttttctcttgaaatatctaaaagaccatattataaaatatcagcaaattggattaaaggtctagaggcttttttggaactattactcttaaattttctaagttaaaaataattattattaatgtgttaaaaggagtgttgttgctgtaccttctacaagagaacacacacacacacacgtgcatgtgcacaaacacatgcatacacacttgtacacacatgtgcacacactggcacacatgcatgcaaacatgcccacacacttatacatgtgtatgcacatgtgcacactcacagaaaatttaaaaaacttttaaaacaagtttgtttaatttggaataggcttatttataatccatccttatgtgtgaagactcttacagtctcatagtgaaattaaggagagttagggcctgggaagagtggcttagtaggcaatgtttttgccacagaagcataaagacctgagtttgaattctttgtactgtcaaaggtttagtgtgggggttgcctgatgattttgctgtgggtcttctatctcaagctgtgggtaggagggtggagacaggcaatttcagggtctcaatggccaggcagtcttccctaaactgtgtgtgagctccaggttgactgagaaatcaggtctaaaacaatggagaggagagtgattgaggaagacatctgaggtcagccttcacagtccaagggcacccacatatacacacgtgcacatatggaccccagccaacacaaagaaatggtagaaaagaaagaaaaacaaataccagagaaaatgtctgttggcttgctcatttcttatgcattgcacactgttcttgtgacttggtgatgagtgtgtccaggcaagtatcaaagttaaaggtgctctttcccgtcactctctcgaccctcagaatgactgttaatgtgaattgctaaaatatttcgagaaagtcctcatttcaggaggctgcagtgggcattcagtgtgtgtaaacgctaaaccatattagttttgtgatttaaacaactataaatttgatctacacatgcttgcagatatttaatttatagtggtgttaatttcaatgctgtttagactgtgccccccagtaagcagtaacttgtgggaaggaaggaaggttccacatgaaccctgctaatatctggcctgagcagcacacaggcccattggagagtctagtggtgttttctcacacattttctcttaggatatattcttaccagagctccagctcctctccatttttaatgaatattcaagctatgggaaaaataaatttaaatagaaatggtgggaatcttttaaataaaaataactaagctggggattacttgtcttatggcaaacattgacagcccaaggaggctgttggctaatggatggagagaaaatgtgtacggtaattgcttctcaaaaataatctgatgttgctaacatagtctgtttgggctcatacgaaggcaggcctttgctaacagctgagtcagatatctgtttatctgaagacaaacgtggaatgtgtccaggatgcctcacagtatggtgatctctgtggcttccaccttctgctcttctagattggatactcttagtttatagccctcccattgtttgactaaaacaaaaaaattaatccaatgactttgtttctggcactgtatagatagatggttgttagatatgtagtggcactggctgagcatttctgagataaaggaatttaaattttcccatgggtttgtagtttatttctcgtttgtgtgcatgatttcaaatggaaacgtgttcagaaatggaaaggtatgtgaggaaatcagaaaagacctgaaatcatgaaataaatttactggtgttgagctgctgctggtggtggtgagccagccatctgagatttctgtgtaaggtgtggtgtttacttcattgtactcttgttgcatgatcaggagatggatggatctattctgatagccattatctatctatttatctatctatttatccatctgtcatctatctatctattcatccatctgtcatctatctatctatgcatccatctattatctatctatccatctatcacctatctatctatacatccatctatcatctatctatctatccatccatcatccatcaatgcatccatctattcattcatcaatgcatccattcatctatcatctatctatctatctatctatccgtccatctgtatctatttgtcctgagatgacatgttcactgtttgtatttgattagcattttgtgccaaccagatataaagccccacagaggtatttcatggagatacagtttataccgtgttcagtttaaagatgattctgaatatattttaataaagaagggcttggaagcacaatggtggttgaagcctttctggaccatttcttttatggacatttggtcatttggactcttgtatttatgttttggtttttcttctaggcagaggactttcagtaagagaaaatttgattttgatgacttgctggagagagatgctccttgagagctgaactgtacatggcagggtggtggtggtggtggtggtggtgtgtacctggcagtataatgtatatttaatctgctgctggtgggagatgtcataaaggggattaggccagagagtgaggtattatagcctccaagttacaggaatctagctgacgactctgtgaggaatggatttgtcctcagtgacagagacagtaagggtacctgctaggttcatttgtgctagatgtgatagtagctagaagtacagccctgcaggagttgaaggccttgggaggaggtgaacatgagatgtgtgtggtaatccaatgtagttggtatcataggagaagaaggtaacaggagagacttgtttggacttgaagggatggcacgttcttctattttgattaaagcagaataaagtgttaagagtagcctcccgtagaaggtgccaaatttggctcttttattttaagaagaaactgttgttgatttaaaaactcaatttattaattgacgcatttgtcttaattttcattgccacagtctagggcattcattattttaattacatttagttgtaagctctatttattgcagtatcaactactgagaagtgttagttcttttccggataagcttcggagtccctatggcctttgcggagtggatgtgagaatgtgctggatttgatccgaaagtctttgtctttcacagtcttccgcttgtcctgccctgtgcttgctgctagctacgtgttctacttctattgtaggagacagaagatcgttcagttctaccactgcacccaacttgtggggtgaacccccgtttcacttgctggctctggaacaggaattatacaagttaagcatccccaacttaaaaaaaaaaaaagcaaaaaccaaaaaaccaaaaagctgaaaccaagatactctaaactctgtaagttgttaaatgctaacatgatgtcctacatgttctataccgtgacagtttcttccatgcatagaatcactaataatgctataaaaaccatcctcagggttgtgcttaaggtctgtgtgaaacacaattgacttatctgtaggcttgggtcccacccctggaatacctcagtgtatttatgcaactattttattccatgatggggaaaaaaacaaaaactaaaaaaccaaaaaaccaaaaaaaaccaaaaccaaaacaaaaccaaaaaaaaaccccaaaaaacaaaaaacaaacaacaaacaaaaacaaccaaatcctgaagcttcaagcactcctgggctcaagcctttcatgtgaacgatgctcaacttgtaagttcatattttttatatctagtcatctatctgttatttacatactgccctgtctatgtacattctataattcagttttttgtacactcaaagatgtacagccatagctgcggtcgacatagaacaaacacgcaccccccagaagtccacttccctttaggatcagttcccgttctcaacccttcagaccctgaccttgttttatcactaactaatctgtattcctatctaactaagaacaagcactttccattatgttaatggaatgtctctggctttggcagcctcaccaggaggaggcagtataggttctcaataaggagctgatggcaaattatacatacacaggctgaagtttgatgaaccagctctatttgacccaatctaagaccttaaatcacacgagtgtgaaggactgaggagacagaggaagcaaaaagaagttcctgaaaatgtcattttcctgaccatagcatcacagagaggtgaatgagcagtgttccctgggcaattaggataggccggaccttgataatgagaaacatatgggcttagtttcaggctgtgcccttttgcccagccacttaatcatcctgggatactctggtcctctaagatattgtgcccaaattggttatcatagtgcaaaacgtctctcagacatgtatgtatacatgcacataatacacacacacacacacacacacacacacacacacacacacacacacacacccttcatatgatgtacaattgttctcttggatttcctatatgtgaaattaaaacagcttcaggacaaacagaaagattacgaagatgctgtctaagagggagatggagggtgatgctctacagtcatttgcaggcttcttgttattaacttggctgtttacttaaggggtcctatttgatttctggcctgatttgctcctgtgcagggacctggaagcctatcttttggctctgcctttggagccgaggtaaaccttcatccctccgtaaatatgttcagttttgttttggatgatgcaatgcccagactggcttaaggtgatttattagcacagagtgggcttcagtctgtccttccagacaaatcccttagtgctcctcagtgtttctactcattccacaagcacagcgggagccgcgttccactgggagtgctcgcatctctctgtaaagcctcatgttccctgccacccggtctcctcatgtaaactcagctaccaggcatgcaccgtggccgtgatggggttcactctctgtccccaggggaagtcgcctttgtatctttagctttagtgcttcacttaatatcctctcgtctccggagcgctctccttccctgcagccagcagtgcttggccacgctgcaacttgcttcatttctggccacgccaggctgagcaggtcctggctgtgagcatctgctgggggctgtctgggtggcgttcttcagtgtttttgtcaaatcaagaagttgatggactcccagcctccttttctctagaaccttaaacccccctttatctttcaaatgcatgtctggaaacgagcatgctcagagaactggcaaatcattgtccagtgaccgggaggaaatgatcgctgctcttcatttataatgcaaattctgaggactcttcagaagtgtggtaaacttaaaatgatggcggtggtgagaacgtctctgcagaaagttgtggttttgttacatcgtttacaaaggatggcagtttcctctccgcggtaccagaagctctgcaaggtaactgattggaaatagggagtgggtgtctgaagaatccactgttgcctggctaggaaatactcatctttcaggctcctctgaaggaaaggaaaaactccctttccaggcaactgattgcaaaagctgttaaaagaaatcgctccattaaaatttatttaagcctatgagacaagtactattttagtacatattttattttaccatctataacctagtcttctgagatgggttgtttggagaaaatatgacaaactattttcattaagacctgttacctctggggtactttacaatatcttaatatttaatgacacattaatacaatgttaagctccagcaaaatcaagcagagagctcagaatgctctttcaacagattgcttaccgtgctcttctttttatagctgatattttccaattaagaaaagtaatgcccattttaaaaacaagcttagccccattgtaaacatttcttatattcttgtgtgtccacatgtcctagttaaagttgaagaacacaattttctgtggccaggtgggttaagtagtgttttaggatataacttgtttgacagttatacattttgaatgcaatgtcagttattctaaacacaagccgtcccacgtcctcctgtgttgttttgggttagtatttgttattgcccatggtcttatcttatttagtgttcgtactgtctccttatttttataaaaacaagatgatatgatgcaaaaggaagattatagcagcagcaaatcaaattttatgttattacaattttctccctgtacaattcttagtatgcttctaaagaaggaatcttactgttctttaaaagatcaactgatcagtaattgggaaaactgcctcttatctcattatttttctgaagatgttaaatttgatgtgttgaagcacctaggctctgcctataaagcaatgggtctaggctgggaagctggattctgttaatttgatttttttttttaatcacagtgttgtgctttacagtttgtctaatttaatatatgtctgtccagaaacttactttttaaaatataatcttaggaaatcgattgatatagtgagacgtgctttaaagagatgctatattttcatttgtgttaagttaattaaagcttgatccaacttattaatccagtcggaaaagtacagaactaactgttggatatgttgagatttcatctgcttaaagaatccgtgtgtttttgtaagatgtttacattttcacaaaaagccaattttgataatggagaagaaaaatgcattcactaaataagtattagtattttactttttaagtattggtatagatacatgaatcattaatatatgttacttttttaaagctaaggatataaatgtatgaagcattaaaaaaaagctgggttattatttttctcatctattcccataagcactttcacaaaagcagaggggttttgagctgtaaggccattgggtgcgttgacttccacacataaagcaaagttaaggtgctggagaaagctactaagtagtcttatgataagaccctgaataagcacacatcatgttactggagtcatggggaagttcacttccaacaggagtattctttgggaagatttattgagatttgtaatttctcaaagatgccttagaatttaaatcttcggcacgggcattactttttgggaacctgaggttgtcttatttgcaattgaaatttaccctttatatattctctaccctatgtgaaattagctactgctcagacagggagggggggggcacacacttccagtactttccagtaggtgtcagtgtcaggcagtgatatatgaggtttggggactccagacagggaagtggcgtgatgctgttgttgactatgaataaatgaactggtagcaggtatcttttatttatcttattgtatgtgggaaatggatcctaatgcatatcattgtggataaaattataggtacagacttaaatgtcagttgtccttctctgttaatggcatggtatctatatctactgagcctacttgttaccagtgctgtcactgtgctgcaagtttgaccagctgtactgtttatctgcttagcgagacactgaattctctttatttaaattgcaaatgttgttacagctatttccccctatatcccttacattctctaaatttagtcttttagaaaggaaatgttaaatacttcagtgttttgccataaaaaatacagaaagtctatatttcaagtacatttaaagacgagagagagagagagagaaagagagagagagagagagagagagagagagagagagaagagaagagtctattttgcgttcatcttggcattttgaaaactggtgtctgaatatttgtaccctcttcatctttcacatctttcttttgtctgttgtatgggtatcagtcatttataagtaagtgaaaaacgactggaaaattgtgcacagtattcttattttgagttttatttatttgtatgtatttccccctgcctatttctcatagggaaagggacagggatgggcagaacttggggaaactgtggctctgagtaacccccctccaactgtacatggtgttgtattttttgcttttaaaggtgtttctttctggttatacaatccctaaaatttgggcaggaaacagaaacacattggctgctgacttgagaagcagcagcattgaaattgccctgatgacctcgagccaccccacgctagatgctaatttctcctgatttggcttagatcacttagcttctttaaaatattaatgactctagaggataatttttcctctattagagcacagtggacacaaagctggatgtaagtgacttttaagattgctactgactttaacttgtttgcattttgtgattatcttggcctgttttcagtctttgaattgaaacctgattgaggttatgttgagttagagaggaattttataatcccacccccacccccaccccctcagggacatttttaatggcatatttaataattgacgtggtaaaaagtagattcttacaaggtagattagtgggtgagtcatagaacattgaaaaataattagtattataaattgagtccttcatgacttcagcatttttattgatttagctaattattttgatttagttttatgatttttttgtgctgccagcatatgtatgtaaaacagtttcgctgaaataattttgtgcccaaacattttgtcatgtgtcctatgagttaaaatattttaagcatcctggtgtatattattaattcaaggttgtgcacaggtgccatgaagaaggaaacagctgttcaagaatcatagagtgttgatttgttcgtgtggtcaatattgtcttcttactgcccagactgattcgccccttcattctgtgcatttttctcccaccattggcttattagtaggggacaatgacggcttggaaagccagggatgacaagtgatgtttaaacaaaatcagtttctcctccctgacgtctgtatatatgtttgtgtgtgagaaccacatagaccctgtgtgggtacttttataaagggtaactctataactgaacatatcccaatcactcagtgtttgacatgacttttaagttcacatgctgcctggcatctgtatgttaatatgaggttcatataaggtcaagcatatgtgctggacagtggtggcacatgcctttaatcctagcacttggaaggcagagacaggctgatttctgagttcgaggccagcttggtctacagagtgagttccaggacagccaggactacatgaagaaaccctgtctcgaaaaaacaaaaaaataaaccaaaacaaaacaaaaaaggttgaacatatgtgttttgggggaaaaaaatagaacacgtgagtggtgcattttaaaataagccttacaggttttactttcaggtggggtgtgttgctctccttggataactaaaccctgaagtgtttcagagcatgaaacaagcttgacttggccacagtctgaatgttaagacagaggtattttaagaccatctgtcaggctcccttggtttctctcagtaaccaaaccgtacacatatttcttgagccacagtaaatggacgtcctagcctgaggtccccttgatcatgagtcagttcttgctttcatgagaagccagtgggttgggtagttcagaaggtgtatggaggtggagatgccgtggagcaaaatggcggatgcggagggattcacatttattctcccctttccttggtgctgtttgtggtgtctcatcagagatgtgtgaactcccagaacgagtactttcttaatgctctgtcttctgcagttcctgctgaggtccagattactgactcaaaacaggagaccttcctccctgcctgtgactgtcacaggagttttgttttgtggcttcccaaaggggcagcagcttagctgatctgtgacctccctttttaccataattcctcatatcaacgcgaatgtcaaaattatcttttattacttaagtagtaacatatcgttaatcagaaaacccatgttaccaatgacttcacttatgatttaatgcagtgctttttacatgattaaaaaatagccgggcgtggtggtggcggacgcctttaatcccagcacttgggaggcagaggcaggcggatttctgagttcgaggccagcctggtctacagagtgagttccaggacagccaggaaaatacagagaaatcctgtctcgaaaaacacccccacccccaaatgccggtcacaaagttaagtggttctttaagaacaaaaaacgttagttggaactctgcgtgactgacgcggatacagtagggagtaaacagaaagttctttctgagaagagagctggcatagcactctagattcagaaaatgctattttgtcatcgtgactaaaagcttgatgacttgtgtttcctctggggtgcagtttattaagtatcaaatggaaatttccagcctgtatgtatggatctgaaagctataggcacgaaccgctttctcttggttctcggcagagccctgctggcctttcaaagggaagttagttgtttatatttagctctggaaattaagcaattagcagggataggagaatatagacaatgtcacaccattgtcgttttctcacttgctcgaagtttgttcatctcaggcaaggtaaatgagtccaagtaattgaagttggaaaggatgtggagtgtgggagaggattgcttttcatttttctttttctagtttgttcaggtctgtgaagttctgaaagactgatttgtaacaaagctcagtcacagaagcggacagtgctttttaatgcttaataaataattggccgctgtgacagcatggcctgataaagccggaacggaatccctctagaatggaaagtgaagtagttgggtcaggcctggtggtacaggttctgtactctcagctaactgggaagctgaggctggaagattgttccaggcctgggtggtttgtagagtgaactgaaggtcaggttgtataacttagtgactctctgtcttgtattgaaatgttaaagtatcaaagctttgtgtattgtgccaggtgaacatttgcctaacatatgtaaggccctaagggcaattccctgcagttgctggaaggtgttggttttcagggtgggtgcctccttctccctgctcttcctccttctcttctccctcttcttcctccttctcttcctcctcctcctaatacatatttgtgcatgtttattatagaattggtagacagtttctgtgtatagacaccatgaccttgacaactcttattaaaaaaacaaaacaagacaaaacatttaattgcgctggcttacagtatagaggttcagtcccttaccatcatggtgggaagcatggcagagtgcaggcagacatggagctgagggttctatatctggatcctcaaacagcagttggagactgtgtcacaccagccacatttgaccttatgctacctcaaagcctgccctcacagtgacacactttctccaacaaggccacacctcctccaaggaggccacagctcctaatactgtcacttcctatgggccaagcacttatatacatttgtgtatgggctccatacctgttcaacaccacattcacaaaagtgaccatctcttttgagacaggatcttttattggcctgacctcaccaagctgtccagactggggtggattctccctgtttagacttccctagctctgggattacaaagacagtgcacacacaccaccatacccaacaaacatttttctgtggtttctgagaatcaagctcaagtcaagcactttatccagtgagccaccttctcaggccatatttatggtgtctgtattttttcctactgtaaaaggactaggaaaacaaaaactgttgacatagaaaaccacagcacaataaaaattaacaggaaagcaacaaccctagactccatgggaaagcgtctaatgaaacacggacagagacgcctaatgaataggattgtaaacgttctatgtgtttttaagatagtgttaatatatatttttatatgttttatctatcatctatccatttatatatcttctatttatctatctatctaatttatatatcatctatctacatatctttcatctatctatctatctatctatctatctatctatctatctatctatcttcctacctatcatctgtctgggaaagaaaattgtcaccagttctatgtaacatctggagaaacaagctcttttaactccacagtgaaggcacagagtaggcgatgcttggccagtacatgatttaactggcactgttgacaggttttctgattccagattcagtgtctctctgcatttcatttcaggtggtcacagtggttatcctgagctacaaagaaccatgcggttgaggggtaaagaaagagaaagtagcttaagtcattgctatactttcttttagttatcattcgttgtattttcactgtactaggaaggaaatcccctgtgtagatgtttcatcacccgtagtcttgggcatgcctaggtacttgttctcatcttgaagttgaaaaaacaatgagcaactgggctgtggtggcgcacgcctttaatcccagtactcgggaggcagaggcaggtggatttctgagtttgaggccagcctggtctacaaagtgagttccaggacagccagggctacacagagaaaccctgtctcgaaaaaccaaaaaaaaaaaaaaaagaaaaaaaaaaaaagaaaaacaatgagctacattatttttgaaactattttggctatatgaacgtttttgtttccagtttctataggctttttttttcccccctaatggattcatttctcagctttgtacaaaggatggattggctcattttaatgcaaattgatatagttggttctgggttttgattcataatttagcttggtttgagtctcaataccacaagtattgaattatgtattccccaagcctaattctccatacccaaatgtagttttttatcatcatatttaagacacataatagcgcctttagaagataagtgggaaggagccagctgtggagcaccttgttttagtgaagcatcttctctgttttgaaagtcatgtattcagtggttctcatgcaccacatatatgttcagcgtgcagggatgtgccagctttgtcagtcccagaagttcatttaagttgttctaaagacatttaaaatattttcttcttatgttttttatttgtttgttttaaaactttaaagctttgtttttattatttttgaagtgtgtatctctctctctctctctctctctctctctctctctctctctgtctctgtgtgtgtgtgtgtgtccgtgtgtgtgtgtgtgtgtgtccgtgtctgtgtctgtagtgatgtgtacatgagtatagccagagaggcttggatcctctggagctggagttacaggcagttgtgagttgcttaacataggtgctggcatccagctgtactactcggaaaggcaattaggtgaccctaatcctctgagctagctatctttccagccctgtttgttttttgaggctgtctctgcatatgtagcccatgatgacctcaaactaagcatccacctgcctcagcttccagggtactaggattacagtctcataccaccacagccatttattttaataattaataatagtagtaatggtatgaacttttgaagaattgttgtgagtcaaagtgttcatactagtctagaataagactatgtgtattcacataattttggcctggtcatttactacgttgacatcaccttgacaaaccattgacaggatctatagctcagctgtctttccagaaaatgagagtccagttaatctctctgaatttcactaacatcttgaatctttacacaggctgtatgggtattcattgatcaagggagatgacctagggagtgtgcccataacttcacgtgcctgtgtgtggtattgttactttcctggtattctctaacattaaagggaccaccaaatcctaataaggaagtccacagcataatggcccggggagtgcctctcaaagattcaaaccttgtagactctggcttcctgagatgaagtctgggccatcctcagcagggctaccttacaccactgttctctatagagaataaggaaagagtgctaagagtgctacagaggggtgtgtgtgtgtgtgtgtgtgtgtgtgtgtgtgtgtgtgtgtgtgtgtgtgtcttggtttctgtttgcagctctgcttgggaaagtccaggcaatcctttcccttgaccttgaggtaagattcccataggatatgcattccccagttctgttcactcctctggatttccaggctcctccttattgcctataatctttgaagcctacaatacaactatcatgcactgatttagacattattaagagactctgttctttttaaacaaagccaggaaagacatcacttgtcctgggaccactgtaggagaatacaacacatttacttagagatagagaaaagcaaaaacttcttaaatacatttttcagtatcttgaagaatgatcactgttttgttttgtttctgttttttgagacagggtttctctgcgtaacagctctggctgtcctggaactcattctttagaccacggtgccccaaactcacagaggcctgcttctgcttcctgagtgctaggtttaaaggcatgtaccaccacacatagcagaatgaatacattttgatatcataagttttgaccaaacacctgagtttttttgtttgtttgttttgttttttgttttgttttgtttttcggtgtatgcctaccattaattagctaagtaggcataatttttttttccaaatagttaattagttaactaattttgaggcaggatctcatctcatatgtcatccagcctcggcatgcctggagctcatggtgacctgagtgagactcactgcatagcccaggcttgtctgggactcactgtatagcccaggctgacccaggactaactgcttagcctggacttgcctcagacatggagtaatcctgccagctttgcctaccaagagctgagtttacaggcatgtgccaccatgtctggcttactatgtgtaggcctttaacaaatgctcttgctaattgttcaatgtattttataaaataataaatcttacttttaaaagggtaaactttacagaacttagaggaagagaagaaggggggaatttgattagattgagaacatttcctgtatgtcttttggttcagaatctacaaggatcacagtgcctatgcccctgacctatacaagctgaggggacaggcttctctaagacttgcttttatatgcaagctaagtaggcataatttctttgctagtgagttttctccttgcatgtataacttccctttacatcttcatatgttatgaatgctttcccctgggtcaaaaagtatttcttacattgtgatttttttccctcaatggtgtaaataaaattcaattgaatggcttcaatttgccataatttatccaagctttcaaatgtggtgagatgcatgcttgttgccagtgttctcctgataaattactgtgtggcgaacatactcctgcattcctgactgcatcctgatgactttcagaataccttcatagaatacaacaactgcactaaaacgcagaacctccaaaagctcttacacgcaaggtcaaattccaccttgtgaggtgccacttgcttgcacgctctctcccagctgagaggatgaatttctagcatgatcacaggcagtagcaggtgtcggttaaatgattttaggaagttattagatcaaacccccccatttggcaaagtagagaaccacatattctgtccctgaatggactgctgagaacccgaacactacagggcctacatgggcatgacagagggtgtgtggtaaaaccgaacctaggacattctaactgaaatgaccgaagtgtttagggaaaaggcagtacccaacatggatctggagggataggtagaattgtagagaagctgaggcttctgggaatagataagagaacaagcagatagctagagcattgaagcatgctggttgcatctaggggaccgaggcatttatttgccagagttcattcattaaaatattgtaatgacattgaacaagtcttttggtttccaggtgtgtggccctgactcctccaaattactgaagtttaatccatgagatgctccagcatgaaaaacatctctggaaaggaattataaagtttggaggagtgggtgtgtgagcgtgaacattcatctgtctgtgtgtgtatgtgtgtgttcatgtggatttatatatctaggggcatgtacataggtgtacttgtagttgtggcagattgatatcaaatgtcttctatttcttactgtaatcttctatctatgaggaaaaaatatttttttcacaacttcatgcatgcacatgatgtattctgctcaccccgcttttcccgtctgtccctataagctcctattcctagctatttcccccgatttactagtttggcttttgttttataccctgttgagttaaagaagggtcatcagtgtgactctgagtttggaactaagcatgagagcctactgggctcaccagagcatggacctggacactgtctccctccaagagtctgctgcttgctaatagatcagcagaattgactgtgtcctgcctgttcctcctccctccatagctaacagaggccctgacttctgtggacacagtcaaccttgtttttgggataggatctctcactgaacttttacactcaccaatttggcaagaaaggttatctagagagcctcagggatcccctctctctgctttcccactaagattatagacctgtatcaccatgcctggccatttacacaagttctggggagcctcatcaagtgctcagacttgcctagctaacagtttattaactgagccatctcttcagtcctgaaaaggaattctgaaaactaaattgcttaatgtctgtatatttaaggcaagaacatagttacttatgatgtcttctttccaagggacaactttcctctgaatgcaggactgcaattggagtgacaaaaagctggaaggcaattgatgaggaaatgtcatggtatttcaagcagaaatctaaaaagaaaaggagtcacgggaaatgtgtctattattaacttagattctagacttatagaaccttagggtttatagaatggttgaaattatttaaagttttgtatctgaagaggcaattccttagcatacacatagaacttctcaagtgagtgtgaatatggactttgaaggtagccaaggttgaacagccaagtggtcctttgcagctcagctttcagggatttctctgatatgtatatttatatgtgtgtatatatgtttatgtgcatgtgtatgtatgtgtacatacatatggatatgatcaatatgtgtacatgtatgtatgtatccatatgtatgtatgtatatatatatacatatacatatatatacacacatttgcatgttatgatgatatatatgcatatttttctcacttttcgtagtactacatttatctgtttgtctgttttaccttttcaattatgaactttttaaaatttggggccatgtcttattatcagtatcttttgatccttagaatactgaacaatatataaataatccgatgttcagaatgttactataataaagcagaaatgcaatatgtaatggctccggtttcttttttataacagctttattgatgtgcaggagagatggcttggcagttaagagcacttttctattctctcagtggaccagggttcagttccaagcacctgcatgaggcctcagaactgtctgtaactgcagtaccagggaagaagctgacagcctttgctggccttgccgagcacaacacatgtgtatggtacacatacacaatgcaggcaaacattcatatatataaaatgtaaaaatagatcttagaaacaaagagctttattgaaataaaattgatatctagaacaatttattctattcagtaaaataaaaataaaaatttatatatttagggttctgcaaccaccactacgagtttgtttgtgaacattttatgaccttctaaaacagatagatacccttccttatgttccgtgtctgtcaacctgagacagccactgcctttccttagcttttcttccattaatctatatggaacacacacacactcacacgtattttaaatgtttatgtatgcctgcaactgtgaaatgcacacgtgctggcttctcacagaagcaaaaagaggctgtcaggttttacttagggttatagatgattgcaggccaatggatttgggtgctgaggaccaaactcctgttttgactctcttaaccactgagtcatctctccagctcccccttttttttagtatgtgattcagtttgtcaacattgcaaaatagaaagtcatggaaaaccccttataattttctgtggtaaacttactactttagcttagagaattctatattttgattttgtttgtggggcagtcttagcttggcttgtaattcactttgtagaccaggctggtctcgatcttacggaaatctgcctgcttctgcttcccaatgagaattcagtacagtttaattagaaataacaaataagacacctaagttcaatctttataaaccctatagagctatatataactgactttccataataattatataagttcattaagcataagaataaagggggaaatgctgaatttgaaatcagaaggcctatgtgacgcaacctcatttgccacttcattttataaaaggcacatatgacctatgaattcttgagatttctcatttaaacattccataacttcaggaaggtctcattggcctggtatcttaatgcttttgaacttgccctgaagagctaaagtattattgaaactgccttttctatgattcccttttctacaagcagcaacactgataatatttatctccttgtttaatcacagttcatttggaatataacacacaacccaaagagtctgtgtccgtcctcgctcacttagcctactgagaactccaggtccttttgtagttcacggccatttcagctttcttcttcccgaagcttatttccaacttccttattaggatacattttctgccagtaaaaaccatagtggtttttccaaacacatccatcactaattagaacttcacacattgtatcatgtcttaagagtctaagaccagtggctaatggcctctggggcaacatgctttgaaatcatcaacacaaaattaggggcagctgtgattgctcttttctcttccttctctggtttccttccttccttccttccttccttccttccttccttccttccttccttccttccttccttccttccttccttccttccttccttccttccctccctccctccctccctccctccctccctccctccctccctccctccctccctccctccctccctctctctctctctctctctctctttctttctttctttctttctttctttctttctttctttcttttttgagataggttcacactgtaagcatggtggtccaggaactactatgctggatctggctgcccttgaattcacagagctgagtattggttttgaaggtatgtactaccataccgggccactttggtttcttaagtccatacatcaataacctcagatgctcacgagcactagggaaggctgcaagaagattttccttgagttttaatgataattaaacattctatacttctcatattttttctgtaacttctctattgagaataaggtcttgatagttgatgaagaacttgaattaatgaccacagggatagtcttggtttgccttagttcttgaagccaagtcctcattacttctttgcatgcccttccagtgtagaaaaatctcatgtggtgtggagtggaggtaaagtaggagtaaacatggcctctttttttttttcccagtaattgcttctaatggaagcctaatgacctattatgcttatttcgaagagcggaacagcttaataggaagccggtgaaggatttgagaaattatataatagaaaccaaaatttcaggaactcacacatgtggttgagaatcaatacttcattagagaatttaatgattcagtggtttgctggtgccaaatgtcacccttactttaaaagccgtaggaacttgtagatgaatattctcaggagtgaggaccaaaggagacggctgtgcttttgttcttgtaggtgtttatttatttaaattctacatgtagacaataaaaggtgaggagagtagaattttcttacagcattgaaatattattaaaatttaataactagaagtgaacttgacatttttaaatttagcttcctctttggtttctttgttctgcttttatgtttgagacaggaacttgttagagctcaggttggcttcacaatctcctggctcagcctccccagtgcttagagtatacacttggccttagcttttgcattttgtgtaaaatccatggaccaggtgcgtcaaaaggttaagtgatctgtcctaactttcatcaatagtgtcagcagctaacttctctcatggcgatatactctggttgtgggttttatgatacgttacatctaaagtgggctttgtaggtctctgagatgaatggttaacctcaaatgatatacctgatggttgtaaacatagcttttggataaaatgttcatgctaacagtttaactgttgccaactccagatgttattgtggttattttactaggctttcaactgttttgtatacttgagtgtttttatgatgaaatgctggaaaagtagcagccattcaatcataagatgggtcagtttcctgtaaggtgcttatgggccgctatctctcatagccaagttaagacagtgatacgttgaaaatgcttgaaaaattctccatttacctggtgataagtatttgcagaacaaatccatagctctcatgctttgaactcaaactcaaatgaaatatattttacatcactatctgttctttttacaaaacctgcatatacctcctatcaacatttataactttgcaaaaacatgagatacgatatgccataggtcacaaattcctgtagagattaaaaagaaaataatcttatttctttagcatccagctgaattcctatttaggcacagtttccagccctttctggaaatgttgacatttctttgggacttgcataaggggtatgcatcctctcacacatattgatgcacatgctgattttatggttctctattcataaagattcaatttgcagtcctcatctttatttaaggcacatcagttttgtcaaagaatcatttatttggattaaatgactgtatagctcatttgtgttacattgttttattttgcttttatcaattctctgatatcatttacgctatctatttcataagttgacttaatcacatctagagtggttctttcagaacatatgttagtatatttttgggggtatatgtgtgtacatgtgtgatgtatgtaagtagatatgcatgtgtgtatttgggcgtgcttacctttgccagtacatgtagatgttagtatttgatactggaatctcttcaatcaagcagaaataataataactattattattacttggtttttgacaagaaatgttattggacctggagctcaccaattcagcgaacacttgggatattttttttctctgtcatttagccctagattcaacagacctgtgactctgaaatcacatcttcaagtctttcagcaagaatttacctagtgagtaaatttaaatgagcatcttctcaggcttcgcctcattcctgtttgagatagatagggtctcaggtctgtaactcaggtgagatagatagggtctcaggtctgtaactcaagctgggtcggaactcaggttggttttgctctcccagcaatcctcctgcctcagggtccagagttcttgttactcttaaaattttcaagtaattaaaaaaaatcttattatttctagcgtgttctacttcactgtataaactgacattctgtaatattgcaaacattaagttatagagtatggtatagcataggatattttgatttccacacatgaattggatgtcatgatgtgacctagaaatagctgagttgttggaagattttacattctatttatttatttctcacatctagtttgtgtgttgattaattgctcttgattaacttccaactccttaaagtaaatcaaaattaacaaatatttattgcagcttgctgaaaatcttgtttacgccacatagcgtagttgaagtctcacttttaataaaggtcagaaatcaaacactaacatttaaccaccgcgtgtatttcctgatacagccgttacacggggaagtgagtgggtgcttcagtttggaatcagagagaggaggacactcatttaaataattctgcatgatttttttgttttttgtttttttaatcttgctggagattgagtccaggctgttgagcgcacttgacaagtgtgttaccacagggccacccctggtgcgacatgctgttttccttttcatgatatcagatcctttgagaaataactaaagaattgtaaaacagctaaatgaatgaagggaaccctaggcaaggaagggtaaaggggatttctggacataccttgaacagaggagtgaaatgggtgagaccttaactgttacaagtaagttattatttttgttgttgttgttcatacttgcacttaagctggtttctctaaagtatgaaatattgttttatggctttgtgggggtagggcttaatggctaactcagcaaagtgcttgctttgcaaggacaagtgactcagttctatatccaggatccatgaaaaagggctgtgcctgttggtatgtacttgtgagctcactgatgggtaggcaaggactgcagcatccttgtgggtcactgaactgcccacgaccagttatgacactatctcagaggagggggaggaggaggaggaggaggaggagatttcttgagggctgccttccttgcacaggcccatatcatatacagttccatgtacatgaacatgccgccatccccctttcaaagaaggttgctgacagtgttattgagaattgtcttctgtcttccccactacatatgcctccatatccgtgaacacacacacacacacacacacacacacacacacacacacacacatacaccatattaaaatgcttttagtgacctggattttagtagcaatgaagcattttgacaatttttggctatgcatattcatcatatagatttcattagctctaaaagtggaatttatagtgtaactcctggatatatgaaagagaaagcacctgttttataaatatctaggagggaagaagaaaagaaagctgaccagctcagtttgctcatcagagagcaacactagtaacatcgtatttcctttctttttactcagttatgcacattgaacacactgagatagtatttcacacaatgtcttctgctttcttaagtaaggattgtgttggcagcggtgatttgtttctaacggattttataagcattttagcgtttctttatttgaaaagttgtcattgtagcaatggctccagtcccacagtgctctgtattttagaaaatgctttttcaatctgagtttggtcttataatgtggaaatgactcccacaagttattcttagacatatacgtgtgtgcgtgcttcccataaaaaaaaaaaataagtgtatgtttaaaaaaatgtaagacaagctactagatctctagaaaaatccaattatttatttttatctgtgtatctatgagtgactcattattccatagtaaatacattcttgataccatgaaaactttctttttctgttatgattcctcctatgagtgcagtatgtggaatatttggtggttgtttttcagctttgaatattacagtttgtggcatgtctaatggcttttaaaagacaaagcaaagtcattaatgtccacaagtgttttatctgagtacagagtcctgtaatgctttcagaagagggtcgtcatcacagccagcctttgggtcccccgtggctccctattgttattgtgcaaagctgtactgctctgaaaaatcctggttctctgtgaataaagcattctctttggccctggcttgatagagtctcttagtgtctgagcctggtggtttgtttcagctcacagcccccaccaacaccatcattattgtctgatagttgtatgtagaacaccatggtatgccatttgtgacaaaaattaattttacatatagtgaaattttattgtgcatctgctaaaggtttgccttgcccgtgaggatgccagccctggcgtctggcagtagcacatgatagtaaggagcgtctcctgaggtgattcagggtagaacgttgctatcacttgaccagttaggtcacagagttcaatagatcttccttttcaatgtgaccataagacctcaactctaagcctatttctgttcttctttcattatgactcagtaacttttccttatcagctttggcaagagagcacctgtcaattacttggagaaactggctttagaaatgaatcgatattctatttgtatgtcacctctgctttgaaaggcgccatacaatcctgcattcttgcaaccagtcagcgttagttcctcagcttcgggtatggatccacttgatgttctgcaggtttctttcaaacaaccaaactaagcaagaagtctctccttaggctgctgagctcctgtaactgcagactgagtttcctgatatttaggttatttaggagttgagaggaaatcatcttgaggattccaaacagcatttgagtctcatttggaatcttcctgtcctctttgcaaatgctctttctttgtgagttaagaagaataatatttaagttgtgaacaaggtgaatggtcgtgaagttcatgttgtggcatctctttatggacattctcatgagatagattttgtgtttcttattttgttcttttaatttgtgggcattttcttatttgctcatgggaataaattctcattgtacactattgacttaaaacgtaataatcacacatcatatatgagctcaatgttttattcaaggatagcccaaaagcactgttagacaccggaaaataacataacttgtctttgttagttttgtgtggtgacatcgtcctacacaaaacacaactttagattgtggcatatacatgtgcagagggagctgttaattcaaaccaatgagagctggtaaaaggggaaagggtgctgggtggtgtgtctaggatctacagtaatcaccatgctcagcaacaacatctgttgctggcaatattggcaggatcataggagaaagcaatcattaaaattagctggtgcttgctttaagcaccacacagcgcactgacattttcaatattttctctagttttatgttttctcattccacaagtatccacctggttttgcctgaacggcttctattatgtctttttaaagaactatcctctacctttctttctgaatcgattagaggctatagcttgtgtctccagtgggccagagtggcctttacccctcatattgcaactgggtaccacagccacctggtttgcatttggtctcactgagttttaagaattgtagtgtgaaggagactcattaatttgtcttattttagttgaaggggatccatggactagatagagtatattggggaaaattctgggggggaggggaacaacttaatgtcgtggccttcttggggacaaggggacaatgctgtcttttctgagcctctcaacctctccttcctttccctcacctgttcaaggagaggaatggcattgtgtttttagaagttagaatttgtatttctcctttcttggtcagacagatgacagggacacacaaaggcatgcacgcacacatgcacttgtgtctacattttctctgtctcttgtttttattttattttatttttagggacagatatgatttttgagactaaatattttgtaccaaaaatgtctttcgagctgcctctgtggatgactttctgtacactcccttctttcacaaggcaggacaaggctgcattatttgccaagaagtgaaatgagtatagagttggaaagctgacaactcctaaccttttagggtgttaatgcatcaatgcactgttcaatggttgatggagtcttatcattcattcatctatacccagattcatttccaaagcccagggacaggacacaacaatagacaaatttgatcaaaaggtctagctttctccaaatccccatttcagctgggaaggaagcccagcagtccttggctgagggctggctggggatggagcctggttgctgagtgctgagaagagaccttcactgtggactcatcttccagctgtctgctttgcttaaataataacaaataacccaactgctctctggagagatctctgttctacctgtgagcccaggaaacatcagcttctcatggattatgaatgctgatatggttttgtgaaggagtttcagcaaagtatcccaagatcttcgtataaaatttataagatgagagttcatttcgtagccaaaatggtgtggggctggcttctctctggtatctctagccttttgtcaagcagacaagccaagtcagagaactctttttatttctggaagacactagatttaaatgaaaaaacaaaacaagacaacagaaacccagcttgtaaatacagtttaatgacattttaggaaggtttaatatactaacggggataataaattgtatctttcacagcccactctgtgtggattttttcatgtaaatttcattaagttttaattcacattaaactgagaataataataatacccttggaccatgggtgggctttggggtctcagacggagttaagaagaagaaaactgagaaaggaacttaaaattatggttaagctttgccccataccatatgatacaaagtaaatgcatgcttaaaattatattcttttgcccaatagaatgtctgttccactagtttatttcttctgactactgagactaaaatactggtcagactgtcagtaattttctcctctttccctctacctggttgcagcacaaacaaagaaggcagagattttgattcctgcatgttagattttcagtgtagtcttagcgctgcaagtctgctcagccacctgattctcctcttgttattatttttaacctgttaaaacctcggtatttttatatatgtgtaaatataattagcatatagacttgcacaaaatactaaggtcccagcttgatttctgtctctatgataaaaacattctgaccacaagcaggtcaggggaggaaagggtttacttcatcttacacttccaggtcaaaggccatccttggcggaagtcaatcaggaactcaagcagaacgttgaaaccgaaactgtggaggatttttctgcttgcctgcttactccggctcatcctactttcttacacagcacagggcactaggccattgtgcttcaactaataaatcaggacacccctcacagacatgctccagtctaacccagggaagacaactactcaactgaaactgtttttttttttggggggggggtcggggtggggagtaggaagtgtttttttaggttgttctctgctgtgtccagttgatagctaaaataacccaggacaaatagatttttattgtatcgctgtcatacctgtccgagggcactttggttctatcacattacctatcattagttttttgatggctatgggggaatagcctgaaagaatatgtaaagtgttagtaattaaaggctcttctgcctgttttctgaaaatgccatgaaaagtgtttaattatactcttagtgatcgacaaatattttcttaaaacagaagtgataaagtgtgtatggcagaggaggtctggttgattctcagacgagcagatgcagaagaaatatcaacaaaacacagccaccagcatagactaaagatgcaaaacaagggcaatcatagattccttgagagtttacagtgaacgtttgtgtgtgtctggtgtatgtgcatgcatgtgtgtatgtgtgttcatatgtgtgtagatacatgggggtgtagttgcatatccatgtgtgtatgtgtatggagtctagaggacaaccccagttattattcctctggagacctctaccttattgtttgagacagtggctctcgttggcctggaactcactgattaagctaggcaaaaaggccagcaagccctgaacctgcctctgtcttcctgcccaacctagcaatgacaatcatgccaccacacctggatttatactgtgtttctgttgctcaatctcagatccatgtgttcacaaggcaagtgctatatggattgagccatcctctgtcccttggataatttttttaatgtaagcattaagtctcagctagctagatcattattttggtctcagtgagtcttccaaagtaaaaagtgatgaaatgattataggtgttttagatgtataattatgtgtcatttgctcattcttgagaaaaacaagtgaatgaaccagtgggtgagttcacgaaaggagcctagtggagtctgactgttgtcagggccttttggcctgtgctttccattttcaccagtatactactcaagatgatctctctcagcaggaagtgacagcacaccctgtgggattgcttagtggttttaaatatggggacaagtatgagtttggaaataaatttttcctaagttattcttcttctgagaagttatttatgttataatggcttagaagtaagtctttatatcaaacaaggaaaagatctggcaatttaatatctgaattcttaagaacccccaaattccaaaagcacaaattagaacactttgtttcttcttatcaaaggtctcacctggggtagtataagtaacagagccacttgtccagcttttgtttcctcatatccacttattagggtaccagataatgtaacagaaaagttgagatgcataataaaaattgaaggattatgaaatgtcattacaagtcagccactattggtagtttctgaaagatggtttttagtcatccaaaaattcttctgttgaaggcatattgagaaactaccagatatttggctcctgaggagtcagtaaacatatgcattttataagcatgtacatttgtcactagtgcagcttcttagaaacgacttcctgtattgctttgccatgatgagtgttaccaataattatggatgcagtttttagatgtatggatgtgcccttgtagttctgagcctttgtaagcatgttttcatcaatctctatagaatgttttcccaggagtcttgtactccttattcttcttttggaagcccttgctgactgcttctctttctctgtgctcttatggtacccattgctgccctgacagttcatcctgatcaatttctgaatgcctagctcaaacccattgccctgtgattcatgcttgcctgggtcacttactttctgccctttctttttctgaacatgtaagccattgttattttcattccttcctcatgctgggataatacctgcccagcttttatgtggctttggggatccaaattcaggtcatctcctttgtgcggtaagtactttatctcctgagccacctcctcaacctctcaactgtatcttaaacagccattcacatctctcttctctgatgatcgctcaaaaccatgtccttgtaactggaccaaagtaatagtccccaaagttctctttgcttctgcttgtgattgctctcctgcatcagtcttctcagggcaccagaggtcttagagaagcatgcactgggtcctcttagtgcactatctagttgaatcacaccgaaagcctcacaatcatactataccctattgcctttgtccactatgtgtaattctgggtgatcaagtttctgtctgttgatgtgtttttgttgctgctattttgattttaagtcacccctgtccctttgattcactacatgtgagccatactggcctcttttctctttgtagtccactcttaacatacctaccacagtaggcatgcagtcctttatcacagtaggcatgcaattactgaacatacctggaggcagttcccactcatctccctgtaacaattcttgcttagttaagcagttggccaggatggtatgtcatattttatcctggtttaattctgtttctatatactagatagagtatctgttggtaaacttgaccaatgaagaagtatcaactcaactattattttaataactcctgttgttaactgtatgctacctatatgttgacctatgaagtatcaattctgagcaattatttaatagttcttattgctaactataatttatatgtgtgcttaagaactacttaatattgtggggcttggggctgtcatatggagacaatttatcagatagcttcaaatgataaaaaaaagtcatgctgatgagagaaacaaatattagcaactcttaacatttaattcataatttataacagcaaatatggaaatttccactcttggaaatttatatttgtttctttatcaactgtggagctctggttgattttgaagtttgcattttctcttacatatttttcttttgattgatttcttaagatcaataggtggaggtaaaattcacataaaattgaccaaagtaaatgtttttacttttaaccttaatttttatgtcaattagtctagttatttgatattgcctgaggggggaaaatagaatatatgttcaatttttttttccccttaggaagttctttcatctttgcccaccaactcatggggcacgcactctgaattctctccttgttctgctcttaagaactgtgagcctacattggccctgcttggctgtattctaggcacaggtaggttttggcactgccagttcacagggtgccaaaagttcacagttcactggtaaagaaatctgttaggcaccacaaggaattttggttgctttcattcataggtcctttgcttttgaatctacctgcaaaaaggaatttattatcgaactaagccccatgaattctatccagtccctgcattattgattttcagaccagctcattccattatactgttgtactgttggctaagttcagtgtcaatacatgatcggttgggagatcggaggctcattttcattgtgtttagccaacgtgtcctgtgtgtttcactgggccctgacttgcatctttccacacgtggcaagttaatgatttgaatccacttttgcttgaatcgatccattattgtgttactctgtgggcagcaagcaaggcactccctaggagagagacctgttgtgtaacacaagtaacatcaggaaatgacattttacgttatctccttgtctccctgttcagtcaccagtcagttaatatcagttaactattgggaagctcctctatctcagtttacacgagatgtgtcctgtgttaaagccagtgttactgcatgtatgaaacaagacccctcagtctggtacacgggagtacatttggcaactacttcctcttcattttcgccaataccctacacttataaatagtattctttgtggattttgcttattcaggccatgggcattaggttatatttgctttaattatcttcctgcttctgtagacattatgtgtgtggactgtacgatcgatcaacttggtatttgcaagaggatgagcctgctttttgtatacctttagctgatctcaggagagttgtatagactgatctttagggcccagtttatcctttctttgttttccttctcctcacaaatgtctcccaggcctgctttgcatggttagtaaatggaagcacagccatcttgcatttcataagtggcttcaagcttctattcagcagagaagtacagttgcacaggggcacaatctcattcattaccccccactcaggcccattccatgcttgctttggagtttagggaggcatttctgaggtctgtactccagccttttctccagataatcaaaactctgttcccgggtgcagcaggcctctgggaaatggcttgctttaactggagttcattgtgtctttaaaagcttgcaaattgtatgttggtgctttaaagagagaacacatatgagtgttaattcacatgtattgtaattcaaaagataattttttttttttttgcagagtaaattaaaagatacagaggccattcagagatgccatctgttactatttgagatataattagggtgataatttttaatgccattgtcatatgatgggaaagagaggctttggggtaccaattaaagattttctccttctgaatgccatgttaattccaaatttaaaaatgtagtgggctcaaagctttccttcaattttaaaggcaaactcattctttcttactgatgctggtgggagcatcctcatgagtatacgatcataggtgtttcttcagctacaagcctattatgccacaagctagctttcaacttctaatttgagttgatagttctgtgtattaattagttatgaataaaacatgggaggttaatagctgtaccccggccagaagactttgtagttttaaaaaggtgctctaaatccatttgtgtcaaaaatccttcagcaatcatgaaatttcagaccagtcatggtagtccacacctttaattcagcactaaggaagcagatgcagaaggatcatgagttcaaggccaggctaagttgcatctgcagctctcatttcaaaaagtaaaaataaggctggtgagatggtttagtgggtaaaagtgcttgccatgtaagtctggtgatcagaatttgatctgtggcacccatgatgtaaggacaaactcgactcttgaaaattgtccttgggcctatgtgccatggcagacacatgccacgcaacacactgctactaatactaattttaagtaataaatgaattgtataaagtaaacaccatttcaatttcatctgttagtatcttgttgctttgttttatgaatattttagttttatgttcactatatattggatggtatgctaactgtggtggtttgaatatgcttggcccctggaaatggcactcttaggaggtgtggccttacagtgggcgtggccttgttggaggaagtgtgtcactgtgggggtgggctttcaggtctctatgctcaagccccacccagtttagaatgctggtctcttcctgtttgccttctgatcatgtctgcctacaagatgctattcttcttgccaggatgataatggattgaacctctgaaattgtaagtcagctcaattaaatgttttgtgtcataagagataccttagtcatggcatcgcttttcagcagtggaaatcctaactaaggcagtaacttggctcgttgttttttctctgtcataatcgtttaatacatggaagttaacatacattgtgctcatattctgaatcagctaaagccaaacattggtgctgtactaccaaaatataatcgctaaagaatagatttgaccaaatacatttcatttatactcaaacctctaacatgatccatttaggcataatatttaataagttttgttgttctatcgtaatttaggctttttgaagcagtgcttttataaaaatgataatgaaatcggccatgtacaattcttgctgtgattaaactgttcagtctattaaaacacactgattgattttgttgacagttagcaaatagcccattatattaaatacaattgcctagtgatcacagcaactatatggtcttaaaggtctccctcaaggtcttagtggtggtgcattacaaatttgctgtcagtgagattaaataaatcttatttattaataaaggaaaatagtttcttaaggcaatagaattgcttggcatctatgttctatttaaatggtgccattattatttgagaatgtcacttgtcaacatgatcagtttacaaatgttaacacctaatgaagcagactattggtgagtcagaacatagtttcacagccccgtgcaccagaatgtgggagaggtctggtttgcctttgaatctgttgagtgcctgtgtggagaaacgcgttaaagtgtcaatgatgagtaaatccctcagtgctttccttcatctgtgggaagttgctctagaatttcactgtttttggaccaaatgtatcaatgctataaagtatcacagctttgcacatcctagcacatatgtacagacatgattgaagaagaaatcttaaatattgcctctaaacatccctctagccctgactgtgattgtgtgcgcgtcgtgttgatattataattgaatgagaaataaggaaacatttttaaaccacacgggtgagtgtctcaatatgagatcaccgagaaagagaattctgtctttaaacttggagtatgtcactacaggaattcgttgtggatatgccttgatccagaactttctaacagagctccagtgagcctaatgggcccacctgtcacttttctgccttctgttcatctctgtctctgtcacccctccctccctccctccctccctccctccctccctccctccttctcctttgtctctctccatggcccacccctactcccctcccttcctcacccttctccgagaataagcgttaatatgtcattctcttttttacatcgctatactttagacaccttctgctcatactgagtggcttctttgggctaggttgtgaatttaaggagctccttcattgtgataaccatagtggctaaggggaaaataccagtacggagtaccagtttaaatcatttttaagtacccacttgttctactgagccttccttctggggtttattgtttgatatgttttatttcaaaatgggttccttcaactctgatgctgatgaggtgcattaatctgggtgtgtatgtggttgcccttttagcgcctgaccctgttttaataaaagcaccatctgcttaattggtgggcttgtgtgttttccctgttttctttttctttttttcttttttacatttttacaaagcctggttcaaaagggcaacactaagtgtaccctttaaaatgtattatttgggaagaatttacatttccaccctcagtctggtgaatagatgtggtaactgagtggtaatatctaaaacagcactgtttttcttgatcctttgttctgttggtagatcattgtttctgtagttcatgaaactaagccttccctgaggtttgatgggccgggaccaagacagctctgggcatttacctatcttagattttctacttttcttaattcatttcttaattaagccctcttgttacatttccaggagaatgaagggagaataggggatttctgtagaaggcagtatagaggtcaacagaagtgaatggaaggaaggaaggaaaggaaaagattggaaggactcaaaggaagtgcaaggagggacttggtggttgtttctgttcttcccgtccatactggacatagcttggagcttgagaccaagtttctaagtgagcgtggcttggtgctgtaggacggagttggtgatccagcacctgggagatattctgaagccaagctattacattagccaaattggttaacttctctgttttcccctatgaagtgagatggtaactttatcattaccttttatggttgtgtgatgataaaccaaacaattgtgttacaaatgcttaccagggattgaagagattgtttagtggtactcttcttaaagaaaagctcagtcacgttcccagtactttcctggttcggtcactcccaactgcagtaactccagctccaggggatctgattcccccttctggccactgtgcgtactgcactgattaacacatacacacaatcaggtacacatggatacacataattaaaagtgtaatttaaaaatgcttagagaagtatatttaactgtaatgtacatattttattataatttttaagagtaggatatcaatataagtgaggtaaaaattcatggattgtaaatcattttagtgagaaactttttttgttgttaatgtgaatagaccattcatatatgaaattgttcatggctcttcaaagaagtcctgcacttttctgtgcatctgtcttcatgcctggactgcttttcttctggaatcttctattcatttgctagagcttttctctgttatcttctttgtgaattccctaataacaactataaagagatttagctcacttccaaaattgagcttttgtagtacttagtggtttttaatctagcacttgatccattataatgcactcatattcttacctttgtacgttccctcactggagcctgacggtgagtttttccatcattttagacatgcacataaaaaaatgaaatgcctgtctgtggctgacctttggtgaggaaagatgtgaccatttcatagtgttctcagctcatactctcagaaggagagatcatggcgtctttccctggaaatgggtgtctttagcatgtgtagcaagtattgttgtttccctgcaaatattcaaaggaactttcatttaatttgtcgaagggatgttggtgtcatgtttcctttctgtggtctctctcttccttgactttgttcttttttctattcttatcccttccttccttctgcctctttctgctaggctgcagttttcagggttggggaatatatttatttgaagctgtgctcacttttactcattcccacagagatttctcttctcttagtgtaaataaattttcatcctgttcattagttacagcattcttatgaaagtttagtcaacaaccagttgaataatttctgtttttatttatacatgcttataaaatggcctcctatacttgtcactgaaccagtggtttatgctagcaacagatgtttcctacaatacataatatgatgacataaagtttaagaataataactaaatgtaaatttgtggcattgcctgataagaaatatcctccggtgtagtgtttttgttggaataatgatggttgttttcctcatatctttgtggatctattagaaagcttctggattgcagggctttatcacccatacccaggggagatgacctcgaacagttagaggtctttatcatcaatgaaccttttaaatatcttttctcacaaggacgtcagttattttggggaattgggacagaattgttgaaatttccatcccccttgggaaatgacttgttattgtggacccaggcctgctgaaggtaacatctctcagattctacagtgcttctacttaaaataaggttaatgtagataataggagtgtgtgtgtgtgtgtgtgtgtgtgtgtgtgtgtgtgtgtgtttactactaggattagtgtaaagcgagcactggccattgtggtctagagagccatacacataaaataacacttcaaagaaacatagtgactctagtcccagccaaacagatgtattcagaaaacaaacaaacaagcaagcttgttccaaacaaattcatcattactttgttgcttagtttatggggcagaacagtggctctgttgagcaacagtagctctgttgagccgaggacaaggcatgtgttagacttggaatcggatttggcatctttgctagctttttgcacctgagttttctgagctccttatctttcatcgtgtctgtaagatgagaaaggctgagtcaatacatatagtaccatttcaacccagcccaacaacagaagcattggcaatgttagtaaagacttggcccagctagtctttttttcttagatttacagatatacttccagtttacctttgaaatgctatagagtactgtattgatgactatcagcacagcaggagtccatgaagctgggtttctttttgttcttttgtagttttgtttttgttattgttgttaacatttatttacttttattttatggatgtaggtgttttgtctgcatgtatgtttgggcatcatttacatgcattgcccaagaaggcctgaagtaggtgggtttcagactccctgctggagtttgggcaggttgttgactaccacatgggcgcttggggaatttatttagccctggtccttggagcagcagccagagagctcttaattgctgagccacctccttatccctccataaagcttttccataaaggaattgaaatgattttaatgactcggttcagttttaggttgtggttgatcccctttagcagactggagaaggttgtgtttcattttatcaatgctccccagaattagtgacagtaaagagccacctttcagcagattcccaagtcagctgttgaacaactcctggtgtgagagtgtgacttgactcccagagccttgactgtggagtggagaagcttctcatggtctaacgtttccagtccactctttgctttgtcagtgttttagagactcaaaagtcttttttcccttcccttcccttcccttcccttcccttcccttcccttcccttcccttcccttcccttcccttcccttcccttcccttcccttccctcccctaccttaccctcccctttccctcctctcccctgccctccccttctctctctctctccttccttccttccttccttcctttcttccttccttccttccttccttccttccttccttccttccaaattcctatcactcaataacagacatttacagggctcttgaggacattgcagtgcttttgttaagatgtagagaaaagaagggggcttttagtaaactggtgtttgagagagcagataaaactatcttggaacaggtgagatataacaagtagaagaaagtgaatgttgagagtcacatgtccagaattggcaacttggtgaaggtttactgttggattctaagagtatgaagggcaggcaaggagggcaaccacaatgaggatgggaggaatctttttgagtagattgagaacgggaaaaacctagtccttggccattgaggggttgttaaaggggcgaattggggatgtaataggaagagtttggtcaaatcacccaagattctgagatcttgccaaagaattcaaagtttattatttcaagacctttggctgttattgaagatcttgaaggagggcaccattgtgctttagcaaagttaaactaaccatcgtgttcaagaaactcagaacagtagtgtatggaagggatgaagggacctggcactggattgtctattgcttttctattgctgaagcacgacactataaccaagatgatttattgaagaaagagtttattggggactctcagtttcagaaggcgagtccatggtcatcatgatgaggggcacagcagcaggacgtagtgctggatcaatagcagagagtgtacatctgacccaaaagtactagtcccagagagagggcgactctgctccagtgacataatcctctaacaaggtcacacctcctcacccttaccaaactgtctcactaactggagaccaagtgttccaatatgtgaacctggtggctcattctagctaccacattgcactccctggggcctcataggcgcatacacacacacacacacacacacacacacacacacacacacatgcgcatatatatgcacaaagtgtattcagtccaacttcaaaagtctcaataatgtttcacagtttcaacacagtttaaacacccaagttccttctgaggctcatggaagtttcttaattgtagttctttgtgaattcagaaaaccagttggctacttggattgtacagtagtacagaatatacgccaacattccataagggaggaatggctgcctagtgaggaaatactggaccaaagcaagactgaaactcagccgggcaaactccaaagctccatgtctgaagtcaagtgcctcccctccagctccgctgactgtaacctacttctattaggctggctcagctcacccttttcaggtctctgtggcaaatcttccttgggtctggaatccgaacccagtccaggcttcacacactggtttctccaggttttgatgtaggcattaccctgttgcatgttcagcagctttccttaacctcagagcaagattccagggacctctttagtcctgcatcctttcctgactctaaagccaagttctgctttctgcttggggtggagcctggcgccttgcttgagccttgtttgcataagcttttctctatggttgctcttaagggggaggatcatttcagccttgtgtttctcaagtttcagggctaagtgggtggggtcttgtcctgagggtaccactccctttactccatttcacattaggtctttcagccttggctccaatgtttcctggtgctctccctgcctcccctcagtgctctcctgcctcccaactgattggtttgtttttatttgccccacatttgctctttttcattatagatctgagtaagaatgaccactaattaacaagcaacagaatcaataccaggctgtcctaaaatctgttttgccaatgaaattagtgcaaaaattcttccatttagcctcaggcagatccttaatactccggtaaacagtagtcacatgttggtttgtttgtttgtgtgccttgtttttgttttggccaaaatgtcacaagaatgacccaacccagctgctaatactcttcccctctgaaacctctctagctggatacatacagtccaaattgcgctcagcatggccttccaggcttctactaggatggcctattatggtctgcttctactttttaaccactgtgttaggctaaagtcccaaagtcttccatactcttccaaaaatgcagcatggtcaggcctgtcacatgtgctaagcccacagtgcagtaatgcagggtagatttattaaaaacaaaacaaaaaaaatccatgttccgccgtcatcatatctgcagagatccctgtgggccacttggcatatgaaaagctgtctaattagcttactttgagtcatattttatattgtaaactttccatcgagacatttgataggataatcggagtgatgcttatttgtgtatttgagtcctgtgacttattgactcaatgatcagaattgaaaatgtggactttgctaagaggcattttgcttgtcttgggcttatcactgatacagttttaaagtcattgcagtggaatttacccggattccccagaggagacttgtgaggagctgcagagctcacagagatagattagtgtgtctgtggtcagtgaaaagctaccaaatctgagcaaaagtaacaataaaagccatgtgaatccacctgcctggacatttctctccagtccttcagccctggacattgtctcccatccttcagccatctgctccttgccagaaccaactcccattgcacagaacaaaacttatgtgcacaccttgtctatttgaataggatttgaatagaatacattccatcttctctatacaataagagtatcaagcagtatcaggtgaggcttaagtattttaaaaatataagcaaaaatggagattatttacttatttatttatttatttatttatttaaaaaaaagcctagtcctgaaagtggaatgaggttgttagggatcatttctggctaaaaagcattgtgttaatcatggactgagcaatcatttctctttagggaatgttttataactatatcacagaaattcaagcctaactataactgctaagtgatgtttaatgacttgaatcttcaaagacaagcaaatatggacttggaaaggtcttaactaaaagatatgttaagtattgaaaactcatttaaaaccttaataaaacttcagatttacataactaaacctgcctgttacttctcatctttccactttatttaccatgacactaaaaatcaactcaacaaatacctaaaatccccttagcatagggtccgtaatacatgggttttgtttgtaaagctttcaggaacctctgtagattataggagttcactgttatatctatttataaaactgggctaaagacataaaatttaggattttaaccattttaagtgcacatttcagtggcattaagtatattaactgtggtatgtgacagcggtcagcatctgtttctagaacattctcaccatccacaccagaaactctctacccatttaaacagtatgtcctctgatgccagcccctggagacccccattctataccccatatctatcctgactgcagtaagtccaccacataaaggaaaacaaaatatttatctttgtcttttgtggctggtttgtttattattgagcacggtgcccttaacatttatctaggttgtgtcagaatttccttcttctttcagtatggattttgttctattatgcatgtgacagattttgcttatcggttcatctgttggtggatactgggctatttctccctcccggctgttttgacaatattgctgtgaacattggttaacaagtatttctagaatcactactttcagtctttttgatatgtaaacaagacttttaacctgatttttttcatctcttacgtctggtctcagtatacagttcttttaaaatctatatttatgtagtattctttcatgattttagccctgggaggggagtggcaggttctaggccctctgtgaagatttaataccaggtgtagattctggaactatatgtatattaagccccatttctgtcactgagccacacatctctacctattctttgacacgtgtgacctccaagtgcttcaaacgtcaacctgaaattattggtttctatgccagaagcatttctgcaaagctcagctctttagaagttcagtgcatgatgttgctttagaacttaaactttcaatgctgctgttgctgttgctgctgctgctgctgctgcttctcctcctcccaacccccatctttctgctccttcccactgcatacatgctttgggaaattttcttcattcctgttgctctctgcactggactaacccaacttactaactcatttttctaaactgtgtggtcccccagcatgtggaaatatgttgttgatttcattttagttggcatgttgcgattaagacttcttgctgtataatgaacttcaattttcactgaagattcctggagtctgtgggttatagatcacatgattggcagttcctattatataccgtaagaggagcctggtctgccctactccccatcctggggggggggggttgacatctgaagctaaggactggattaactaatcagggcctttatcctgtttgggctccttacttttaaaacagcataaacctttaggctatggaaatacggttctacaagtgttaaattgactcatgatttccaggtgtatggaaaaatggcatattgaacttgtaactctcttcatatatacgcgcacactcgcgctcacacacacacattgaatatgaacaacagcaggcagcaattacttctgtctttgaagatcttgttccttggccatgagacaccagtctcattgcttaccttcgattttaatactctgcatttgtaagcagatacttcatgtgtccctacttattttctctcattttgcaaaagatagaatgcatgttttgttttaaggctggggaatcaaaaccccttcctgattattgataggagctgcagttttgaaggatagacaccaatactagtttcttttgtcttcttacagactaagttactgtattaggcttagcggggtgtgtgtgtgtgtgtgtgtgtgtgtgtgtgtgtgtgtgtatgctcatgcatgtgtatacctgtgttgtgagcacaggtgcctttataagggttagatgcatgcatgtgcacatgtgtgtagaggccagagattgatttcatgtctttttttttaattgctatctactttatatatcaagactgggtctctcacaggaacccagagttctccaatatggctattatagctcattcccttgctctggaaaccttctgtctccacctcttaggcacagagattacaagcaggctggctgacattaacatgggtattaggcatttgtactctgctccttatgcaagagttttactgactaacatattctctagtctgtattttaaaagcaagcaaacaaccaagcaaacaaataacaaaccctacagaggtttttttccctttgtgtcccaccctggtcttaaactttcgatccctctgcctcaggctcccatgtgcttaggtggtagaaccatcacacctgacttgctttttattttaaaacacaaaatgcaggtggaacagcatataaaacacaggcgctctaaataatcactgcaaagaactcattgaagagaatttctggtctctgcaagctgtatgtgcctcctccatggaattcctccctgctcttaaatagtagccacactgaatcgagtgctgccagcactgtctccattaaaggagcagagcctggtaccctaaccgcgcttgccacgtgctccctaagcggacaggctacaggctaattactgactctgatgagttcttcaatgttcttccacccagggcagatgcgtcttggtaatcacagtgctcctcatctgggctgagactttgcttctgtgttagccgtggcggatttagatgttgctaataagctcatcctgcccgaaagagcactttcaatgcagtgcattcatgttatttgggctacacctgctagtgtagaatgtgcattcagaaaagggaagacggtttttgaaattttggagcaaagcatcactctgattgccagtcatgaaggttatgtcttacaggaagacggaacatgcacagactgcgctgggggaggaaagagagcggggaatatagatagtttgggggatgcaaagagattgagcttgttaattccaacgattatcggagtttctgcaacaaaatcagtgactgaggagtagttatggaacccaaatgaaccactcacctgccccgtgctccaaatgttagacagagggagggaggtggcaaggaagttccagtttggagaacatatgcaataatcatttatcactaaacgttttacttgggaggatggcaatacggatgtgaggtgtggggtgggctctggggagggtggtttctggaagagtggagcagcagggtggatggtgcttagttctgtgaaagccgggggggggggggggggggggggagacaactgggcatgaagaaggatgcgctggttctgagttcaagggagtgtggggatgtctctttgaattttgtgttttctttctttctcttcctttatttttttcctggtttactatagagcatctttctttgctttcaattacatctcttgttgtctgtgggagtttactggctttcttttcttttctttttatttatttatttatttttttgttttgagaaagtttttttgtgggtttgaaatgacattctagctgccattggaaagacaacagtgtcctaagctttatggtgtcagagctctgaggagaaaggaaaagcaggcgactgggaggaacggaagcttcctcttctgagctgcagtgaggccagccagggctgagtcatccttaaaaagtgaagatccgctcagcaaatgaccagatcccatcggaggaggccccaggaaaccccagggagagtcattagaacggtttctcccccagcctctgagttccctatggactgtcagctctcagagcatgcaaaactgtgcaaaactctctctctctctctctctctctctctctctctctctctctctctctctctctctttctccctccccccacctccttcgtcctcttctcccctctccctccccttcccctcctgcgcaagcaagagagagagagaaagagagagagagagcttagttttcacccagtttcatcctctgtgaaaacaagtgaagtctgtgcttggaaccatgcatagaacctgctattttcattgtatatacgctgtgttctgtaccataattgttgaacaaatgtgtctgagtttagtgatgggatgctttccttccatacacaaggctctaggttcaggccctggtgccaaaaagcaaaaagcctcaaactggcaaatataaacctttctaagagtaaggaatcaccacaagtagagccatttgtgaggagagtcctgggtcagagagggctatctccccttccccatagagctcctagaaagcaagagaatgtccagacagtaagatgatgtacagtccttctcgtaactaatttatccccagaaattccagaaatactaggaatgaaacgaaaactagtttgattcctgtgttctgagacctttttaatgattccttataacatgagagagtaatgttttgtgaattattctgccgggctgggtatgcagctccctcctctgtgacttaaacagtcttctttatctttattccaccttgctaaagagagcatagcacttcccctgtggcgtgcactccaggctaccagcagatcttttgtcttttcctcccattgtgatgtagaactcctggaatttgaggcgagggttagctttttaggttcctcagttggaactctgatcctcaggctcttgtggcaaaaaaatgctgtctgctgacccatattgttggctctatcatgaatttctttttaactaccattatagagaataatttagtgtcgtgccaatgtttcattgtgtatttgcaaatgaggcattttacaaaataaaggtaaaatgtgtgttttattcttttacttcttccatcaaatagtttatttcttaaggagtaaagaaaattgatacattatatacatatatgtcatatacacccacacatacatcatctacatcatatacatatataaatacatcatatacacatatagcctacacatatactatatatacacacatacacatttatatcacacacatatttagatgtatatcatcgcttctgtttttgtccacaaaatattttcctcaggagcatagcactacatcgccattgcttcatagtaatgcattgccatgctgagtgtctcctttctcgtagtcactggagttgccatccaaagggaaggaaagcagtgtgtctaccttttaatgagttgtgctgcatccagattcttctgagttctctttgatgaattgactggatatttttagtgatctgttaggatacttttcattcttttctcccccccttagccttaggtgtgaggaattatttaaaactggcatcattcaaccccaggaaacggagaacacttgaaagctgtgttttaatgcttgccaggaatgattgaatccgtgtgttgcaatttcaatgtttgttagtgttgtgtttgtttgtgaggtggcaagggtcttgggttcagtaagcaggtagaagtattctgtgtgtcgtagataccacgttgtgtagcaaaaagagcacctggatacctggatgattggaacgcgttgccccaaagagcccccactgtcacgctgccttcaaggcaatgccaggatatgatgcagaactggggcatccgtgcaggttgctggaatatagcatggacacattcaggcatggggtttatggtagtcttggtgacggaggacccaggaactgaacacaatgaataaataggcacggggactttgggctgttatttattttagttaaatcccaacacttctgccactcagaaatattatggactaagaaacttagtccccatcgaatggaaaagtcctattcttagtggggccttctcaggtgggacggtaagctgttactttgtgcaggtcctttggtggggactagggaatcattcctgggtagcataattgtctgggtgaaaattgaagactcttcctttctacctttttctgtccccctcctttctatatctctgtccctcctcccatctgtctctccctccatccccccagccttcccaccctttctcctcccatccttccctctcttcccaccctctctccctccctttccaagatcttactccttaggtagcctgacctcaaattcttcttcagcctccctgaatgctgagtacaggtgtcagccactatgctaatctcctacagaggcatagcttagagcccctgaatcatagaaacagtgaaagcaagtcttgcttttatttttttaaaatatatttcatataggttacccatatagatgtcatttcaaagcacagtcggccatgcatatccacagcttctttatcagtggatataattaaccagagatgagaaacaattagaaaaacaaaacacaaaacaaaaccaatcagccagccaccaagaacaacaacaaaaataaccctaattgcaccattctgtaaacagtacaacgtgtctgctatttacatagcatttacattgtattcagtatcatgaataagctactgatgacttaactgaattgtagaggaggatgagcacagactatatgcaagcattgcatcattctaagtccaggacctgaaccactttgggattgtggtaacctggaaggatggtgtagacctgacctggcctttctccccatagaccatgggatccctgtcgactcgaaactgtgtactgtcaccacagtctattctaggacctaatctttacttccagagaaacttgaaaccctctgtccatctgatcaacatactccctcaggctcaatgacttgaagatctgccttctcttcctatagctttactattctggctgtttcgaatggatgggatcacatggtatatggctttttttggctgtatttttcatttaacattatatttacaaggtttgcccattttgtagtttgggttggtatttcctttcttgatagataataattcattttatgtatagataccattttatttgtctctattgactgatggttgttggagtaattttcacttttttggctattattaataatcttgctgtaaacatttgattatggctttttgtatagctgtactttttatttctcataagcattttatctagactacaataactaaatccaaaaatatctaagtccaaaaatatctcttatttgctcttcttttcaattccttctctctagctctccgtatcctcctgtttctttaccatgttatggaataccatgcctgcgttcttctgtggcctctcttcaagtttagagaagattgacagggttttacacagtagctcttttctggcagattcattaaaaatcccacatgtttatgtttattatattttcatgttcagaatctaatatagctctttggtgctgagatgatattgtcttctatattgcgttgtttatggaatgattcatttaggggttatttttgtttttatttggttttctagttattcctcatctctggttatatccactaatatagaagtcatgggtactgaggactggctgtgctttgggttggcccactttaaataataacctagaggaaattcttctgtgtttttaaataacatttctcaagtaaagagttataaatcatacattttgttagactttacgttttacaataatgaaagttacccgaaagaaaaacatgactaccatagcccaggaacgctgtaataggaggtgcctcttgccccagatgaagctttacattccgagccccgaatccctgagcaaccgttagttcctatattcctcccagaacatgctaatacattaaatgtatttatagccatatgtgttctaagtgttatccctagtgtcgttccatacattaatatgcttatagcatcgcctgtccctctgcttgtaactgacattacataatgatttaactagtttctgcgttttctgtttgctgtggcagtcaggaatctcatttaaaatttctaggagccctgagctcattgtagttgcctgctgaatgaagccttgactttcttaaaattttctccccttttcttaactatttctttaaaaaaaagaatacttgaaagtttcttttccttgtgtgaactttgtttaaacagtttcagtgtgtaggaggattgaacatgcagctagaagaggcgcgcttgacctgatgcagtggacagtgttctgtgcctatataattttagcatctgggacatcacagagcagagcagtacttaagaagttacccctttaatgagtatttaggactgaaatactccaaagggtaaatgtaacttaccaacttgcaaaagatatttttcagaaagtgttattagaaaagaataattatctagttggaacattttagatatttctatatcacggaaactgtacttacgggtagtgccttttatgtctttaggataagtgcttatgaatttgcagtccttgcttgtgtaatcacactggattgttctttggtatgatattgaaatagaaaatacccccactgccattctttcagactacagtgctgtgctttgaatgtggtaaatatcaattgtagtactttaagaattgcttatctgtagaccctagatgctttctttacatgtgagttcccaggtgggaaatcacttgactttttgcttacgagtgagagaaaccatttcgccgaggcctgtcttgccagggtgggtcactggagcacatactgcatctttgtttcagagacttcggctctagcatacaaagtttacttaatggcgctttggctaccattcatgtttgaagttgactttggatgttacaatgcacttaattagaaatttcctttaatgagggaatggaatgtattgagttggtactgtttgatggtggtccttctagaaggcagctaagtgaactggctgtcatggtgcttttgagtggctctagtgataggcgtccagggttaggagtctgaactaatattgttcttaaattctacaactgttagggtcttgtgaacccatgaggacacagtgtttgtaacattcatgcatgttgtcttttacagtcaatccgctcaaacagcttcttttttttttaaagttttatttatttattgtttatatgagtacactgttactgtctacaccagaagagagcatcagattccattatagatggttgtaaaccaccatgtggttgctgggaattgaactcgggacctctggaagagcagtcactgctcttaagcactgagccatctctccagccttcaaacagcttcttttcctattacctcgacactgcccttttgcattggccatagtacatggtattccagcgtctgcttcaagcatagccttgatatttttaggatctgtcagaaagctgttagttttctcttgtggattttcagttcacttctctttactgtgctagacagaaatcttcccctcggttttcctcctctgtgggccgatcacgtgcttaggattgcattggcacacttggccatttctttccttttttcactgtcttctttcttcccttttgcttgagactttccagatgtgtttcctaaaatgtctcttcactttctgctttccctggcccatgtgtatctaataagtgatgagttgtttctttatctctctccctgctctaagccattatgtctgactgcttcctcgatatagaagttgataattccatctgtcagacctgtaaaacccccaagtatgcctctcactggattcccttgtttggttaatcttgcctagttaacccaagcagacatttacctatcactgaacacaattgttattgttgttcttgcttctccttctccttctccttctccttctccttctccttctccttctccttcttcttcttctcttcttcttccccttctcccttccttcttccttctttcttcttccttctcctcctcctcttccttctcctcctcctccttcaccttctccctcctcttcattttccttttcctcctcttcctccttcttcctctacctcttctcccttctccttactcctcttcctcttcttcagtattcttgaattctcaagctatgcaaacacagtgataagtgcagcattagagccatctgccaatattgctattagactttcaatgtagaacttacaagcattaactgagctttaaagaaatcaaagcaaactgtgtagggaagatgtctgtaggcaattctgaagactatgttggacacgggaatagagattactatgtgtggggcttgctaaaagagtgagagaggcttcaccatgtacctaaaacaatgcagaaagcgttgggatttggaaaatgtgatctggagcaataggtaatctggattgtgaaaagccaggtgtcatggagcagccttgtaatcttagcacattaaaggcaaggacaagcgggtgcttggagctgctgctggcctgacctctgagcttagtcatcaaatcccatgtctctgactcaaaagaccaggttcatatttcccaggagcaacacccaagtttgacctccgtcttctacatatataagtgtgaacacatgcacttgcatctgcacgcatatacccatatagaacatgtgtgtgctcacacacacacacacacacacacactctctctctctctctctctctctcacagaaagaggagacttaaaaatggcttatgagcaaagtatttaaatagagaaaaagagaaactaagctattaataatttcaaatagcagaagggttgtcttttggaaatgtttgtcttgtactagaagaagctaaaatacatcacagacaagatgagtttcagaccctaatgataagaagacattttttcatttggtgtacagagactgagacttgattgcatatcacattgatgataatatagaaggtagaaagtacttcttaaaaatattatgggtaggattggattataataaaaaaatctgattagagcactgctacattccagtccagccctgctgtgtcgagggtgtcccttagaatgatactgaagagcttcctagcctttgcacttttacctatagcttggaagtatttgtgaagctatgcagcacaggagagatggctcagtggttaagaacactgactgctgctcttccagagacatgggttcgattcttagcaccacctggccactcacaactccagtctcagaggattggatgctgctttctggcctcagtgggcactaggcacacatatgatacacaaatgcacatacagggaaaacactcttatacataaaatgaaaataaaaacaaagaatatataaatactctaatagtcatcacagtaaaatatctccatttctctgctaagaatattaaaataatttttaaagaattgctagaaaaacatatatttggttttagtatcctataaactaaatcctataatgcacagattctaggtaggaggcatatagtcagttttatttatttgttcaaaggctagtcttctgaaaattgctatataaatacttattttaacaactgttattattaaggggattgtatgaaagtctgccaacatgatcctaatatttatgtagtagatcaaaatattttgaaaattttgctctcaactgtgatctttgttgttttaaaaatccaaaatatccttgttattttcagttaactgcagctggaatagtttttatcgccaatctttggtttcttttttgcttttaattaaaaaaaaaaacagaaattattatgcaaagaataactatctcatgttagtgatttaagtgaaaggaagagttgggggattgagattgggggcatttcagtcaataaaacaataaaactgatacttatgtgcaaattaacagtcaggacaccaacttgttataaccagtgacctcattataattatttcctaactctagagtaattatagattcatgcttgtatatgaagtgatagcaagcgactttcagagtctgtgtttgtcgtacacaatcaggaaatttaatagtcatctattgaggaaaaaaaacacagatgagctgaataatatctccatgaataaggaaattaatttgtgattggttgatgctgtgcttttaggtttacagacattttcttgctgagtggtcttgactgaggcaatgcaggtgtttacatgaatataaaattggcaactatatttaactctaatttaatgtactgtgataggcaaagcctgtttgtctctgccttggacttatttgaagttaatgacatctcagaggagattgtagatagaatgttcctttttagaaacaaaaccccaagtgtgtgtgtggtaggggcccatggtgatattctttgttatggtctctgtacttgttatcgaatttgattttgttataaagctctggcagggatggacatgtagttcagctgtaggtcaaggttttagtacccatggcactgacaccctgtgcctcacccaggctggctccacatccaacatactccaggctcatcttccaaggcactgtgatgattggtacggtgattgttgtctcgtcctgccaggcttcttattctgggcaactttctttaaactttatgttactcatacaagcacccaggaccgtggtccaggaaatcttacaggaatgaagttaatgtgttccgtggattcacagagatacgctggttgtagtcatccctgagttgtcttggttaatatttcagctcttccaacagtttcctttcagctttgggctcacctgacatcatctccatcgtcctctttgctgtgaatctcttgttcatcttccccttattgccaaggctaagtgggtacattgtgaggaagtttgaacagcacacatatggctcctttccaactatctactgtagctgcagtcagctaagagagattgaatgtctagtctgccctcgactccactcttctctcaaaatagcctccataacttccaattttcatatcctattaattaggaaaaagagaaaaactgtcacagggtccctgggagttttgtctccggctaatcagtacttgtttccttcagagtaaagtgcagttattctttatcttgagggagaagatgtcagtcttggttaccgtgtattatcttttactgggtgtagttattatccctatgacagagccgtgtaaatgctctaaaatactttattttaatctgcctttgtttttggtcttgagtcctaatcgaattattccccatcccctttgggtgttcagacagcctttacatttttctatggagtcttacagaccctagaacccgttcatttcacctgattggattgtttcaggaaaaatgataggagatagtcctggaaaactgcttcattcatagaagtaaattgcagttaaaaaaaaaaaaaaaaaacctaaactaaaaggaagtgtggaacaaggcatttcttgagagggtgagacaggaggatagcaagtttgaagccaacctggttccatggtgaatccatttctaaagaaacatcaaaagcaccaacagttacactgaccgagtcctgtgtaattaacctgttcagtttccaaagggcatggtgaatccagtccctgacctgtgagaatgctgcccatttagcattattagaagacagtggagggccttgggaaatgaagttctgattttgatttaccataaagcaagtagaaagggtgcaggttgggagaaataagaacatatttttgaggagactacaaatacagaaaaccaaaacatgaaatattgcttatgactgaatgggaataagtatcatgttcttcactgagggtaggctcaactggatcattctcatgagaatttgtaactctccatctcttttccttgtaaatgattgaattattaaaattttgtattaatcttgctaaattagcttgagcctgggtgctattacattcttccatgcaatcttaaaaatcatagtctggctatatcatgagtctctgtcaattgtaactgggtatatttgtagattagttggctatttttatcatcctgaaaaggataccataatattttgtcagatgtgtcaaaggagcagtgacatacaaatgcctaaaggcgtgtgtccacactggtttaacccagcctatgtgtgctaacagcaaagtcctgtgtaaccatatagaaaaccaagcactcataaaacttcctaattctcaccatctcatgccttttgggaagcaattctaaaattcatattggatgctcccttcaactggttccaatagctgtcgttatggtcatatgatcagaggtgcaaaatagtgtcacctgtgggttcaaaactcatctaaacgggagttttggaatggcaaaacaagtgtctggtgtgcatggtctcatttcactgattaagaattaagaagccggtctgcctggaacagccggcagagacaggagcctagcatagcagccctctgagaggttctacccagcagctgactgagacagacactcacagacaaacattggatagaggtcagggactcctgtaaaacagtaaaaggaaggatggacaagcgtcaaggggatggcatttccacaggaaaaccaacagtgacaactaacctggacccctgggggctcccagacactgaaccaccaaccaaagagcatacgcaggctggcccaagccccagacacttatgtagtatagggctgccttgtctggcctcagtgggagaggatgcacctagtcctgctgtgacttgatgcaccaaggtggggagatgagaggggagctgccttctcagagtagaaaggggtgggggggggagtggagctgggaagaagcagggaggaagggccagagcagggcaacctttgtgatgaaaacaaataggcaaatgataacgtggccttacttaggtttgcaaatcatccatcatttaatcacaacccaaggaatcatgacaactacgaaatgtaacctatttttatttttggttatttattcttagatggttaactcatataattaacctggcagtgtgtttttacagtttttactttttctatgaagctgtatttcctaattcttaacttaccagggaagttgactttatcctcattaagtagtgataatgaatttaaatccagctgacagaattttctaaaactctgggaatatgtccatgccagtgattcatttggattcctgttcccaaggaattttaatttttgaagctgctataaaattatttttgtcggtcctaactacaatccatattttttacatatttactaaaatggaatcacatttaaaaaaatatagtcctagaaattgcattgagtcaggcttggtggcgcacgcctttaatcccagcacttgggaggcagaggcagaggcaggtggatttctgagttcgaggccagcctggtctacaaagtgagttccaggacagccagggctacacaaaggaaccctgtctcaaaaaaaaaaaaaaaaaaaaaaaccgaaaaacaaaaaacaacccccccaccccccaaaaaaaagaaattgcattgaacttagttataaattactttggattgaatgtgtttttgtattggcttcaaagtccatttctttgattttaaaaattgttgttatcatcatcctcatcgtcaccaccaccatcatcaccatcaccatcattgtgcatgtgtgggtgggtatgagtaccacagtatgcatgtcagagtataaattgtaaagtaggatctttcattctgccaatctgtgtattccagagattgaactcccccgtgggtgtcaagtacctttgcccactgagctttctcacagacccctatttctttgttctccttgggcttttctggaagagaatagaaaaaacagaaacatttagatcaatagtggaaatatgatccacattaccaaatgctgtttataagtgttattggggggctggagagatggctcagtggttaagagcactgactgctcttctggaggtcctgagttcaaatcccagcaaccacatggtggctcacaaccatctgtaacaaggcctgattctctcttctggtgtctgaagacagctagtgtacttaaatataataaataaaaattttaaaaaagggttattgattagctggtccagtatagatggccaaagttcaacccagcaacacccccttcaaacaaacaaacaaacaaacaaacaaaagcaagggaggaaaagccacgttggtgagggattaggcttgctcctggcaatggcagacagtaacgttggctattagcgaaggcaatagagagaaaaccaacaactctttaaagaaatttgtgtcaaaatgggattcagtggcccatcacattaaatcaacacatctgtattgagaacgttgtttagcacacactccaggggttcatttttctcattttctgtacttgcaaaccctgtatttatctccagcatgggtcactgaacaaattctggttttcctcattaggtacagagtaatgaggccttaagtctcctgttctatttcaccttctacccaactttgtctgacatgtacctccaccgctcaatgagagacttcaatgtgagcgccgtgctactttgttccttcccagcttttctgcctttgttgattcccgtgcgtggtgcgtgggttcctgcccaggcagtccactgtgcactggtggtctcaggatgctgaggagctggggagttcagtggtgggcagcaggctccctgagagctgtccagggtatgggcagcgctctaccttcccttttttggcttgagaacccacacaagtgacatgttccctccgagtgtgatggatctgtcttccttgtgcctagggccccggatagtttaatttaaaatattttaaatcatgtgatggttaattttcttctggttttgtgtctcagctcactgagatgttcctgattttctttggctatctgctatttgaacagggaagtatttagaatcctaagtcagaggaattacagtttttctattcttttttttttaaagggatttttttttaaaggaagctgctcgaaaatacaccatactaaccagatacaagcctcctgctctcccttgagactcctctcgactctcacagtgctcctttatcccctgtcataataagactccaaaagtattatgttttcttataaagaaaacttctcacgtataaagattcaaaccagcaaaacaaatgtaccagagggtgatttttaatttgacaaaagatcttctacatgacaaagagttcccccgaagattacgtttaagtagacaatttccttcgagtgctgagagtcacattaaacagttgtcaacattttaaaaacaagcacagacctgttcctaatagttatatgtaaatggtgactgtgtgtccccatgttatgagtcatgatacagtctgtgaaatactcaccatcgccagtgttgaaaaaataagcaagatggctattccagtttgcatctctgttgtgagaagacatcaagttgatcaacaggaacttgtggatgagatggggtgtggctaggtcaccttacacttccctggtccagtccttgggaatcctaggtgggaaggaattttagggcagacatctggaattaggaattgaagcagggttcaaggggagagagctacttgctggcttgctttctcagactttctcagcttcttttcttcgatggtgtaagcccacccacagtgttctgagccaccatgcccaatttaagtaggttttaagtacatgtatttaactggattcttaaagcttatggaatttatagtagccattaccttgacttgtgaatatgtttgttatttatgagatcttggagtgagtcgtttttcatatactttcataactcagaacataatatctcccagaaccatacttgggctatggaagctgcctaaagaagagatggtatatattgtagccattgaatttccatagaccatactgtttgtttgtggcaattagtacttactacgtagcacactctggcctactgcttccctctgctctttcactgtagctcagcacagctctccacagtttgcagtattattgaatactaacttcataggtaaatgattagaacatagacagtttttctcttctctgaggtcatagtcacagtgttgccttgagatttgccatgttggtatcaactcatttttgttgcccttgtccacttcatttgtacagctcctcacctccagcccttcccgaaccttccatttatgtcagggaaacctaccaacccactcattatttttcaattagagtcagccctcatctggttagaaagttgaccggagacaggatggagagcccccaatgggaaacatgcacggttttgcgataaactctttttctcttaatgttaaaatttaactttgcagtatttcctcagctgtcagcccagtgacaaatcttctacctcctttcacgaaggggcaccacttccttctaaagcctgaagtatgactttaaaaaaaatacagtcagttatgtttctccaatataacatcaagtttgaatggttcctagcaggaagggaatcaatctctctctctctctctctctctctctctctctctctctctctctcgtagaattggggagtaagattggaaaaaccatagtacacttgagttccctcttgaaaatgtaatgctaacctctaggattttctgtttgaggcttgaattagtttattaatttgtaatcttataaatggttgagtcaaccaaaaccatgacttcctcttcaactatagaatcgtgtgtgtgtgtgtgtgtgtgtgtgtgtgtgtttgtgattttaatattctaattccttttctcctggaaaaaaaagcatactttgttgtttgtttagcattcaacagctcacttgatggacagattgatataacttttttttttcttctttcaaggaacatgccttagcttgggtttagagagaaagttaaagcaaaaaataagctggcaacaaccagacttcaggtgaagcaatatgggatactagcacagtgtagaagacagactccagtgaacaactgcagagagaaagtcagagggtgaggctttgtgcagagtgtgggtattgaacttgacctcccaactggataaacattgaatggatagaaaacattgggaaggtgggatgaaagagaagagaatccgccagtggagcaaaagtagaattaattccttccttccttccttccttccttccttccttccttccttccttccttccttccttcctgggaaagttatgaagactgtactattgagagcattgtggggaaacagtgtccggctttacagaaccccaaaaccaagtgctaattctgacctctttcttcctcttttgcagcgtgctgtacatcccatgtacaaactagacaagggctctatcactgagctctattactgagctctgtcactgagctctatcactgagctctatcactgagttctgtcactgagctctgtcactgagctctatcactgagctctgtcactgagttctgtcactgagctctgtcactgagctctatcactgagctctatcactgagctctatcactgagctctatcactgagttctgtcactgagctctatcactgagctctatcactgagctctatcactaagctgtagcttcagcccaggctacatttcctagtttcagattcactagccgtatgtgtctttccaacattgtaagtttaaattaagcaaatgctgagttcctccatcgtagcagccacctttcaagggattagtggctctagttcttgctgtgggaatgtcaataatatagactgttttcttatcgcagcaagacctcctggacagcacactgcccagtttcaataatgttaggtttggatatggagaactgtcaagttggagagctggcataataataaaaaccatagttgaattttaatgctgtcagtaaagatcagctttgctgttctcaccctcttcctcctctgccttctttctccccttcctctctattcttccctcttttccttatctttctacttttaattgctattttgttgttcaaggaccaaacacagtttgccagcaaattgtattttgtatatgtttttaagaatgtcatgcttcatttatgttcatcagtcacgtactagtttcatagtcaaggaactagaggattttgggaaacactttttcattaaagtagattttaaggagaattcagcttagtttatcatgacagccagggcatggaaaataatttgagtctagaaagtacaaaaggaatgatggtataaagtgatcctgttgggatgtgagagagatctgaatcaaatgatgttgtaagtcattaggagaggggctgaagagatgacgcagagattaatgttctgagatgcacagagatgagtcatgcacaggacccaagttcatgtcccagcactattgccaagtgcctcagaactgcctgtagctccagttccacgggagtctgcactcctgaccctcaggacacctgcactcatgtgcacaaatacacactcatatacacacacgcacacacacacacatttatataattaaatctttaaaatttaaagatattttgatacttgtttgaatggaggtgtaattcttgaccatttcaagttgttttaaagtattagaatttgccgggcgtggtggtgcacacctttaatcccagcactcgggaggcagaggcaggcggacttctgagttcgaggccagcctggtctacagagtgatctccaggacagccagggctatacagagaaaccttgtcttgaaaaaccaagaaaaaaaaagtattagaatttacttttcgataccatagcaacagtgtgtatgatcagtagcttctgctccgtagcagccagtcccttgcttgtgtttcctatgtgtgagagagtgttagaatctccccaggaaaaacatcaacagagaaacagtgtgttgctatattaggaatcgcttcactgctgtgataaatattttattagttaatattgcattttaataatttgtaatcagtaataaatgtttatgtagcatgtatttatttttaaaattttgttgctaataatagtcactcctaccaagttgtaaacactctgataaaaatgtgcagagatattaaaaataccacatactaggcttctcaaaataagtttctatactatcttaaaaattcatgaaaatttacgagagccctggcccctgaaacattcaatgtagctactccttgtgtcccatgggattataggaacgtcttggttatcctgtaacaactacatctgttctactttaaatgatgtttttgttgccattagtaagaagttatatatggccccactgaacagccttcatgataaaagtgtttgcttaagtgtcacagggacactcttcacacaaaaatcaagattcaggcaaaggctccaggcttgtaaaaccagattagtgtctgagatgaaatggctgaatattatacttttttttattggtctcatgagaaatactatgtctaagagctggggtaaaataaacagatgaggaatataattcaaatatgaatttagtttagcatctcataattacgaaagtttctggttacttttccaactgtcctaatagaagactgtgcccctatgatttgtaataagaaagttatcttctaagccagtggttctcaacctgtgggtcgcaactcctttcacatgagttgcctaaaatccccaggaacacagatagttacattactattcataatagttgcaaaattcccgttctgaagtagcaatgaaaataattttacggttggagggtcaacacaacatgacaaactatgttaaagggtctcagcattaggaaggttgagagccgctgcccgacacactgatggtcttaaccatcctaacctgttgtcctgtgtgtggagagtctggtgctcacagttagctgagcaagaaagaatcgacaccatggctagaggaaagctggtggctttgggggttgggctgatgagtttggagaggatgacatacctgttgtcaataaattaataattctcacagtcacctttagattgcatgtatgtcttctaaattgatttcatgctttttggtattatatagttcttgtagcatccttaatactgtatagtgagtctactgagtgctagtagactggatcaattagtccagacttggggtttgtatctcaacaggtcatacagataactctagtgatcagtaggggtgaaagttacgctataaatcaaacagtgacatctcaaattcattatatgagtcttaaaagattttgcgaagtagctgtatttcaggacctttcagaaatttgttttttgttttttgtttttgtttttgtttttaaattgagagtgggatgaccactagattcagggtgttgcttttaacggattattttacgccatcatctaattataaagctgaaacatgagctcagtcagattcctgatgtgaacatcgctctcagtaccccttgccctgacagtttcttacgcagaggcaggaatgacacatgtacgaccctctctgtacagcagcaggtggctgctgactatgtcacgggatatttctttcagtacttttgcttttttaatagtaatcttagcacatcaagacaagcagggttcatgatattttccttttttcctaagataactttgatcataaatgggttttcaggtaacctgtctggcaggggtggtggttgtcctagtggcaaaccttgcgtcttccttctttgcaaacaaggtgggactactgagcccctctggagaggtcaagtgatggtttcctggggggtaaccccctccccatccccaccacacacacacacacacacacacacacacacaatgtatagcatacagtatcatgtatctgatgataacagaagtaaagatcactttgaagagagagaagctagaatgatatagttgcctatttagacacagttatcatttaaataagcaggtgttgctggttacagagtaacttttcagaacaaaagggctttgtccttgtggcctttagaaaagtttgccatttgtaaaccctgttctgctgaggccagtttttattgagggctgatttgttagaatggtggaccatctggcacttcaaaacttctgagactttcagggaggggggggggaaagattgtgtgctgtgttattaactgtcaagtaaaatgatgctgccattgtggtatggagagcgacctaaaaggatgaacatggtttacttgggagtgttctagtggacttcattttgtgtgaaaaaaaatattacatgatcaggtaaaaaaatgtttttcaatttaaatcaaggagatttaagataaattttatctctccatgtccatttctacattttttctgagtgatagccattatttctatcatttgattgttccgtttaccatagattattactaaataaagcttttatcatcctcctcccctttgaagatacacatatggcttatttctctctgtgcactatttatttgccagcctatccacttttctgtgttccttaatgcgtgaatctgccatcatttctttacatgtttcctgtccaaatggagcttattgtgaattcctgtgggtagaatttctgtgtcaaaggtcataagcatttaaaattatcctctgtccccagactgggcagtttctagtaatcttcaggaaatggagtggttaccctagttctgccaggcataggcagaactctaaacagcccacaattttctgtgtcatggtctgggttgactgactgtgtttggtagaagaagagtgtggagaagaaacaaagaaccagtgtagagctcaatgcgcagaacacccatagaaaggagtcaggcaaagacacagcatgtcaatcagagggtgggtgcagtagagagagataaacaaagaaaattactgtctctgtctttaggggcgctgtatttgtgcttcctgtggaaagtgtacagactttgatttctttaacctgggcattcccacaaagctgccaaaccttccagagccttcttcttaaagctccatgtcacgtggccacatctgtcctatgcgcttacactgaggcttggctgttaagagcattttacccttgtctgatgctgcattgttttcgggaaggatatattttggggacagtaacttgtctcggtattattttctgaataacctactatagtgctctctgaatccttaactatttagagggccgtggaaagctgacccctgcacctggctggctaattcagaagtggatcagctggcgggcctgcccctgaaccccttccccactctcccagggaagaaaaaaagctctttgtgcttttaccataactgttaaaaccttctggccatgaactatggaaacatctaaagtagtaacttttttttcttatgaatggtgttttttttttttatttcccaacacccacccttatcattatcaaaatagatgtggcatttattaaaggtgaacattataaaataagaccttgtgcacagtcttatgccccggcttcctgggatgaaaggaggtttcacccctttcatcagggggctcaggcctccatctcctggttgaactttctgccctttggggctgtatattaccttaaatagcttgcagctgacagactgcactgccggcccatgtgaactggaacgctgtaatggatggggtagcgtctcctaatggaaccaccgtggtaggcgacaatgagaagaaatctctcctcgggattaggggcttggagcgattttattttattttatactttattttattttagttctgacctccaagttagcaggttatgaagaggagaaatgaggtgatttgcttcacaagaaataaacaagggtcttttcttgagtcagaatgggcttacagcaggcacaatgttcttgcccatgcctgaagctgttcattttgtgaatcggccagccgccatttatctgtggccacctattgacccccgtatgctttgctttacaggctcctaaaatctctttcttttctcagggttctttgtattggccacatcaggagaaatctgttaggttttatgcagaaaaaaaaaacactttatttttacagttttaagacatgtgagcttggtatttagagggaaggaacgcttaagttcactgtaggagaaaatatcagttccccaaagctactctttatgttaaccctagataatctcttgctgcttttataaaattacaagtaagttatcttttagcaagctatacgcaacacagtttttaaatgtagaatattactttatcagcctgctctttggaagttcatggggaagccatacaggccttttcattttgacactggaatgtggttttcattaggtaatttggatttggattttattggttggattttcctgtgcttctccatggttccggggccttccttggctttctcatggaactgtatgcttgaatttgaaacatgtcttacttagctaaagattctgggttgcttaggttgatctatcgtagagaccagcagcttggcatgccttcgcactcctgaggattagtgagccttttatttgcacactggtttaaacggagaaaatgtcaactacttcaaatgccaccatccaatttgttgtctctctggtggctttttaatttcactggaggcttctctaggacttataggatttacagaagataatgtatcaagaaaagcttgctgtacaaaaaagggggagtacatatcacaattcatgaactgaatttaaactgaggaaatgtcatcaccaatagatagaaggcagttcactacatttagattttcgaagtcttacttttaatgcctcatttccaagctcttaatttacatgctggagctgcagctgaatgaccgatcactttcataatgtagataaggccctgagtttgatcatctagaacagataaatgaataagaaaacataacaatacagatttagtgtggtgacagtatgtaattaaagtgaagactacggagattgggactggagaggtggcctggcccttaagtgttcatacagttctcccaggccttggggttcagttcccatccaggtcaggtggcttgcagcctcttgtaattccagtcccagcagatccagtgtgtttcttctcgcctttgcaggtaccggcactctcatgcacatacccatacccatacatacatgtataacaaaaaataaaaatcttaaaaacaagagtgtaaagatgtcttctgaggggactggagagatggctcagcagttaagagcaccgactgctcttctgaaggtcctgagttcaaatcccaacaactgcatggtggctcacaaccatcagtaacgagatctggcaccctcttctagagtgtctgaagacagctacagggcacttacatataataaataaataaatcttaaaaaaaaaaagatgtcttctgaacgactccaccacctttccagtggtttattttgaatatagaccccctagtctatgctggtcacctttgtttactgcaccatcatagctaggctgacccccatctttgacagttttgacaacggtgtgaagaaaattctatctcagtgccctctcttctttgccggcagagggtggcaattctgagaacgggcagcagctttggtatgttctactgcaaagctgctggtcccctccttctttttccttatcctgtacagaatatggacatttaccgcactcagaaatgtgtcttctctggaggagatctgccctaaagaaggatgctgttattatgccttgacctttattcttagggaaggaaacaggatatctcaggcacttctaatagcattgtgctccttagcttggtgtaaaaaccctctaagggtaagagccttcttgtgcttcctattgtctgttgcttggtagagtcttttcagttcactctttagatatgtgcggcctgtttgcacatgtcagctcacagtcctgtagcactctgggtggtagctggaagtttgcccagctgagagagtttgctctttttcttcctcttatttatttatttattttctgggtggtggttggtggtggtggtagctgtggtggtggtttcttttgtcttgaatttatgtaaaaagtttatttgttgctgtttaaagatctcagcatgtggcctgagccctggcagactgggtcaccttggctaaagcaagggctgagaaagagtcccctggatgtgtgaatgtcagtactccagtcttgtccagtctgttttgagccacattgcagactgcttttcctctatattttctgaataatggttggagaaaaatgagagtttctatttatccatcaaaatgtggtgctttggaaatcctacatagccatttttgccccccaggggaatatatagatttctataaataagtaatgaaaatattttaaaagcttgttaaattttgtataaatggacatatgtaaaacacatgctatggaaatactgatgtgaaaataggttgggaatgaagtggaaagagaacaggtttgtagatcagacacctgtaatagtgatggattcctggtagatttgaactcttacatgtgaagatctttttgtataggtttaaatggatgctcacaactttgatactcaggtaattgtgtagaaaactctaatttcagcgtgctcttccacctttgctgttgacctgatgcaaaaaagtagattcagttgcattaagaccctttgtgatgtgtccccattaaaacactgtttatggtaaaaatcctccccgtgactagagaaagatgcttcctatggacagccccaccgttcttaccttttatggctatgctaaatagctatgtaaaacaaaacaaaacaagacaaaacaccctgtgaaatggtaggatgactgatcagtacaaaggtgtagtttgttctgaacttccccctccaaagtcatcccacctgaagtggaaaataagttcggtgtcattggttgtcaaaattggaatattttctttcattttgtccgtatcaaattctccttatgcaaacagaccgggcgactttttaataagatcaaagaactttaagaactatttccctcatcattttgcctttgcagcccgttttattttctttgcactaataatggaattaatgaagcttgtttccttttgtggcatgtggtgtgtggcgcacccactcccctttcttttcctgggtgggctcccaaggggactatggctcctggggtctattcaggactgagacaatgtaaaggatactgtactgaagtttggggcagggcggcctccaggaagtgggaggaagcttcagtcctgctgggtgaggggtggcgggagagggaggatgctgattaaaataataaacaggggcctaggagagagtccgggtgctgtcagatcaggtctgggagtcgcgggagctgctgcaaagctccctctgggcactgcacaccctgtcctgaggagggcatcctgagatttgttgcaagacctttccttccggaccggagcaaagcaacttttaaaagttttaactccgcggcactgacagcgtaccttaggctgtgctgaagtgagcaagcggagtgaaactagcttggtggtcaccatagcaactgtgcttctgctgtctgggagaatggaagctggtggtctcgtgtctcgggttttttggggcgtcttcagctaggagcacactcctgcttactggaactctacataagccctgctgttttaaaattggctcttgactcagactttttttttttttcctgtcttttccttttttctttttgaaggcagcctgaatggaggaagttggtaatgcttggctttttttccctcccttctctcttgcaagtttccaggctatagctttttccccctttcctttctgctgtgtgtaattgagaccaaactctaagcctgggctctgaagagaacagtggtggcctgcaggtctttagggaggccggcagaaagagatcctgggcttcccagggcaaaaaaggagaccatgccagcctcgtggaacacagctacaagaaaacacagaagcaggtctctgcctgccgagctccgaagtccgtgaggaaacggacccaaggtggggtggctaaaatgtcccagcgcaagctgctgatgctcatgggccaccgctcaagggcaaggattgaaaaggattttacgaaggagttgaaagtatagctagtgaagatacgggttttaaaagttggacgttgttgtctgaaggaagtttgccaggaagatgtaggcttcaagggctcccggacgatgattggtctgaacttcagcttacgagaattgttgacaaaatttgaaaaggtatgcagaaagaaaacttcacggacgcacttctgttttagttctgtttcttcttctgtttgtgctctcctctttcttcttcttcttcttcttcttcttcttcttcttcttcttcttcttcttcttcttcttcttcttcttcttcttcttcttcttcttcttcttcttctcctcctcctcctcctcctcctcctcctcctcctccttcttctccttctcctcctcctccattgtttactgtaacttctaaagcattttcatttttaattttaatgtaatagcttctttgagattgtgttttagggaacatagttctttcccttggtcaggaagagttctcatgcttgtcagctttaacgttccacatcagaaggaatggcttagagtcaagtcagctggtaacttaattgcaatttatttggggggagaaaacaaaacaacagccaaatccagcaacaaacactgggtttgggtgccaaaggctgacttcatcaagcgtgtattctgttttccatgcccctcaggtttgtttatctctcaggctgctgcggctgagcctgcccttgcagccccggctgaggattcagctctgagccccagaagctggcccttggtaacgatggcacatctgctgtctggcatttccttcagaatctcttgttttaaaagtggataaggtttaaggcttggattactaactttgcacttggcaccctctcttcccccaaggctcttggcacaccccagggtggagcatagcctgtaaaaaggctacctcctcactttttgaattaaacaaagcagaaacctccccgagccagttagtggcttcctgagtgccagtcttgttccagtttctgctacttaaaggagtggggagagaaagaaaagaaagaggcagggtcctttatccctataggcacagatgaactgtttatcaactgttaaatgtgttctggtttttcccaccattcctgaaagtacaaatataagcatcttgaatcattcaaagaataatagactttttcttaggaattgcaactgccagaggaaaagatgtaaaaagtgataccctttaaaaaggtggtaggcttttcctgaacaattgcagccatcctggcttcccagtgatggaagcagcctatcagaagtatgtataacaacagcaaaaagttagtccctcctcatagagtgcttcctatctcacatcccaacttgagtagtggagaatttgcttgtaacatgggacagacctgttgctttcatagttggtaagggtctgaattctggagagcaagagccagttcacagttggcttgctcacttacaaagggcatgacaaagaaagaatatcgctcttgtggcagctgcgaacagcaggtgacaaactttatggccgtaaagaggtctgttagcttgttttctgcagatttgtctcattcacataaaaaggtatagagcatatgtgacaggaataataattcatgcttgtcatcctcacccccctccaataatcatggtgcaatagctggacttttgaattctaattgctgctatttgtcttcaggcttaggtcagatagctgaggtgagcaacctagtttcttaggcctctgggccatcttgtgggtagagtcagatgttctgacattggtatgctttctcctttaattcccaggccttggtatctgaacatgacttaatcttgtttttactttaggagttgacttgacagcaaaagaaaggcttatatatgtaaaaggcttgatttgaaaattttctccaaggatagatttccaagagaccaccctgcttccattgaatatgaactttatgtatgctcattcttgtggtgggcatgttttcaaagcctggatgaaggtaacacttatatgtgtttcactggtaggaagccatcacccaccagtgtgtatttttccaactcgcaccttaaaaaaaatccctttgtatattctaacaaagctgtctcatatattcagtttatgctccattaagtcattgccaggaaaaccggaattctggaaaggtttcactacttcacacctctcaaattcagctacttccctttctctaacccagaaagcaacgctgccatttctggggacatttgaactatttgtaattggaaagccacgtggggtgctgactgccacttgcaacagtacactcaactcccttttcccgtggcatgcagaagctaccatgttcatttgtggtcttgctttattccaaagactgtagaagctgacctgctatgtgcagtggtagactccctttattccatggaatacaggagctgacctactatgtgcactaggggactccctttactttcagttctcttagtttttcttcctccttctcctcctcccctcctcctcctccttgcctcagacatgccaccattttcataacagcagtttaattgttcaatcagatggtaagttatcacaaccaaatgtcaattttgctttatttttaaagccatttctggcttgaagaaaactaagagtccatcttgggatagtagatgcagatttgatatgtttggtaattgaggtccgtgcttggcaggttacccagtgctgactgatactgagagattgacttgttagatatctaagatcattggatggggtgaaagcaaaccttctgcccgcctttaaggcaccagactgtggagatgaagagaaagccacattattttaaggaaactagtgaaaactttgctcttttcacacatatctgaacatctatcatatgaatgaatatctactcctgggcagattgcaactaggactcgtgtctcttcaaaccaccatgttatgagtccttgggggtccaagaggcaggaagctttcagagatgctcatccaagctcagggaaccattccctcctaagaggaggaccttcttactagaggataaggacctcaccgtgtgatggatccgccaataaggaggtctctcagtatccttaagccacatgcagctatgcccatgaacctgagagtgacttctcagcaagctcaagtttgtagacaaagagatgactcaccagggaacccctgtcaaagcctctggcttagtttcatggttccactcattttaattcaccagcgtttttcttgagcaaactttcctaacgaaagcataacagcgttagtgctgtactgtcttagcagagcctcttgtattgtgtactggttttgtgtctgttgcttagtcctacagagacttgagtaatgggcagctctagctcagtgacattttaaatgactgtcgcttttattaatttttttatagccctgctactagatgattaatgataatggtcatcccaaggggttctgtttttgtttttaatcgacagatgataatcatacatctttatggggtaacatgtgacaatgttgttacatttatatattatgtcatgattaactcaggctctttaagccatccatcatctgaaacatttatcattccattgctctttagacatacaaaatctcctatcacagtttgaaacatatgatagaatatggtcggttgtgttctcctttgagggatccttaccatgtatctggatggcagtgttcacttggtgagtctttaaagaaagagactcttcatagtgacaatatagtcactgactatgtaatgcatctctatggcatttaccccctttatcaagcatgagtctgatattttaaaagctagaagagaagtgagccatggttcataggtgatggtctatcatgttggagaaaatatggctgccatggtggttttgttcccactggtggcaattaggatggtttgctcatagatgtgcaggtacaacaggagaaaaactggattggagagaagtggggccagggtataatattcaagcctgcctgccacttggcaaccacatcctccagctagaccctctctcctacagtcttcataacatttcaaaaacaactccagtaaattttaaatacataagtctatgggggacgtttcacattaaaactgttataacctctgagctatacctccaaccctccaattaaatatttaattcaaattaaatatttaatttaaatgtgggtagatcctggaagagacagtaaattccttcatttactgtttagggaatatttctgaagtaccagttatcaaggttgaatgtagggatgggagacaaccacgtggggcccactctttccttcattgggctattgtagtggtaggatatagaccttaagcgagaagatttacatgataagtgtgcagtttatcctattgtcttagttgggtgggtttttgttgttgttgttttttgcttgttttatgcgaggagacacatgccataaccaaggcaaattttataaaggaaaacatttcattggtgctggcttactgttggaggtttagtccattatcatcatgcctggggaagcacggtgtcatataggcagacatggtgctggagaagaagctgagaattctacatcctcaactcacaggcagcagacttgaacatctgagagctcaaagctcataccctagtgatgaacctctaccaaccaaaccacagctactctaacaaggccacacctcctaatagtgaccctcctgatgtgcctctaggaaccactttctttcaaacaggcttattttgtccagtttcttttagcttaactgagttttgttttaattcagcttacttttgagatggggtattctagagttggtcattgtgttgatcagtttgtaatcaagttcttggtgatcctcctgcctcaacctcccaagtgctgggcagttgcaggaatgagccctcacactcagccaatagcaagtatagtaacagtagaaactggttttataaagtctcctctggagaaattgcattatatctgtgatttcaaaacctagtttaagcttaaggagaaactgaggttgtgttccggtttgcgagctcctgcgcagcatgggtggatttgggtggagggagaaactcactaggatcttcattgacagagcacagcagcaacactgattgggatttgaagagaagcttaccccaggattgtagctttgaatgtttgattagtgtgaaggacaacagtccattggtgtgaggtcagacttaagtttgatcacaatgctggatagaggagttgagttaaaacattatattggccacttgaaaggttaagggagtgttcctagaaacttgtgatgcagatagtctgtgcttatgtagtgtgtgctttgaaaggaaagtcactgtagtgtgatttagtgtggcttaaaactatatggtttagacgttcagagttaaaagcttgaaataattttttttttttttttttggtggtagaagatagttctgtttacagcagtgtttacatgttggcatttaaaaagcagtttatagtttattggaaactggcttgttgaaatcaccttgaaattgtagtaaatggtgatcttaaacttagtaaattgtaaattagtaaatagacttgtcataggttttgtctctttgatataagtgtagacagatgttcctgcgactctcagttgaggagtttcctccatcagattgtcctgtgagcttatctgtgggatatcatctttcttaattgcttattgatgtaggagggcacagcccactgtgggcagcaccatccttatgctgaataagaaagttagccaagcaaaccaggaggaacaaggcagtaagcagcatttctcagtggtctctgcttcagttcctacctccaggattctgtcctgacctccctagtgatagactgtgacctaggagttgtaacatgaaataaatcctttcctgccccacttggttttactcagtgtggtatcaaagcaacacaaagcaaaccaagacaaaagtttttctactccattatcttacatatatttacatcacaaacagtgggagaagagcattaattgctctgatttcttaatttgtaaaagtaaccgtcaatactatcagctttacagtcagaatggcattctaatgttgatcaaaataggactcacagcttgactcaaaatttcaagacaagttattggaaggaaatacagtatttagcacaattaatagggtaactgaaatcaataaataattgagtaacttcttacaagtttcaaatgctgaaaacatacttttgacttgacatttgattatattaactatttatttttatttggaaaaatatctggatttttttcaagttatgaaactcctctttaaaatacaaagctccttgagcatctctttcagtccatcttccctatctcctggatccaacatggctttttaaaggcacaccggatttatttttcatcccacgggttactgtgttcatttagcctaagtttgggacaggctaatggaataattgctcatttcccctctccaccttcaggacaggggtcaacactcctccagaggaaacattgctatagccatatagggttagagaaataagccacgcaaaaaataaagttgagtcaattagtctcaaagagaatgcatggaatctagcagggatttagctgttgaagttggcttgatggtattatgccctattagaatgttcatacagttctgtttgggtaaatctaaagaaacatttttaccttccaagttacattagtagtgttagtaagacatagggaacagagtatatcagggcacagtggcctatatctgtaaatctaacacttgaaatagtccatgggaggatcaggctaggatacatagtgaaatactcactcaaaagcaaaaacataacaacaacacaaacaaattgtgtgtgtatttgtatttctgtgatatctttatttatatcttcattaaaagaatgaccaaatgaggcagatctgctattaagatatcaaatataaagtaagtacaatacagaattaatgtattcctttctttgtgccatttattggacctacatagtgagagctattcacagaaacactactgctaatcagcaaatcagcaaatcttacttagctctggaagccctgttttggagagctgtgatggggtttgcatctcatgctactgatggtgtttcagtaagaggaaaagtagtggccttcttttccagcccttcttctttcttaaccctccccattgtgcttacaccccctacatgcatccttaggacatttaccagccttgttttcaaggtattagttcaactacttgctccagtgtgcacatgactggtttatgttaagagcttggaagagaattgctttgtgcttctagatggattacagtcccttgctaattatcagtaactgtttagtgctatttaaccttctgcagggcttgctgggtgacagaggtaagcattaatagaactacatcttcctggatggccaacaaaaggaacacttcctttatggaactttgatttattttagcatttagtgctgcttgagggtcttgccctcaaagccctccgtgctggcatcttgattttaaaagcttcgcatcattgcacagctatctatcaaggagcatgattcattaacttcatttaattctgagtttccagtgagagcgttgataggactttacagcaccggcttctaaatgatttcacgtttttcatatccaaacttttaagtgaggaaattgaacttaaacatttaccccattgctgttcaatccatcacctgcttcctttgtcactactgtggcttacttgtcaaccagtcaagatgtatgagtatttgtttatgacattggtcttttatgttagacttattttgtataacagaagctgtgaaagatgcagaagaaacataatacaattttcttttttttttttttaattttatttttttgtttgtgtgtttgttttcaattctgggtgattttggaagaatatgtcaccaaaaggcaaataaaacaaaataatgtgtggtgatctctttttctttgttcatgttctgattgttggcgtttcttcctaactgttgatgttgctctcatatggaagggtttctcacatcttgcaggctttattccaactgggacatcactgcagttctctctcagtgccttcagggccaaacatctttactgtctttgctgaattgggaaacatatcacctgccatgattgtgaggagaaatttgcttcacatctgcagtgtccaaacgtatgaagttaggcagtgctcttgtggaccatagcatttctatatcctgttgtacatccgtctttctggtctcgtggatctgaagggtagcaggaaccaggtctaatgtgagaataactttaaaagtcccacactctttacatattcttaaaatttcaatctctttataatatccatctcttttaaatccaaagtctttttacaattaaaagtctcttaactgtgggctccactaaaatagtttcttccttcaagagggaaaatatcagggcacagtcacaatcaaaagcaaaaatcaatctccaaccatccaatgtctgggatccaactcacgatcttctgggctcctccaagggcttgggtcacttttccagccatgccctttgtagcacaggcgtcgtcctctaggtgcctgtactccactgctgctgctgctcttggtggtcatctcatggtactggcatctccaaaacactgcatgacccctttagtcctgggcttgaggttgtgttgtgaatttttggcccattgttcttaagaatctgtgcagagaatataaggccaagttcccttggcaatggaaagcaaagagaggccttgttgattctatcattgagtctcttgagaaatatggtaatgatatagatcaacagcactgcaaaagtagtcttctaagtttcatatacaaatctatacgtatgtaggttatactcaatgatgcttcagattttgattcaagtagctatattttgtggttatacctgcaccctttaaagctggggtcccaaaaaggaaactcaggctgcatcctgttctttgaatagatactataacatgtttttaggatagatactgtaacaagttcttaggatagatactgtaacaagttcttaggatagatactgtaacaagttcttaggatagatactataacatgtttttaggatagatactgtaacaagttcttaggatagataatgtaacaagtttgtttttccgtacattctgcaagtaatttcagtattaactttcacattcctatttaatagaagaaaaattatttttcctttattatttcttagtgaagctaaacatatgtgaatattcttcaaaggttttagaataaattgtatgagattaaaatgacaggcagagggagagtaagtagtgacttacaatagtaataaaaatttaaaaaatgcccactccctctaaaatactaacatcaaacaggatggtgcatgaatgtagaatgttataaattctgcttttaggacactgggaattgatgtattagagatttaaagactattattttcaatgatggaactgtgggaatacttggttttgttttacattactgatggtaaaataaagtcttttgattaaaaacagttcttctgcacatccaaaagtaactgttcatgtaaagatcctgcaacgtgccccaagtgacctttagcatttgcatcatctctttgcttttctatttaggacatccaggcagaaattgatgcccacaatgacatatttaaaagcatcgatggaaaccggcagaagatggtgaaagctctggggaattctgaggaagcaacaatgcttcagcatcgactggatgacatgaaccaaagatggaatgatttgaaggcaaaatctgctagcatcaggtcagaccactcgagatttaaaaaaaaaagtgtgtgtgaatgtgtgtgtgtgtgcgcgcttatgtagatttgggtctatcagaaagagaaaggattagtacaactctatcagaatttgtttaagattgaaatccaaagtctgttttctttccagttggtactgaagatatacttaacagtagaggacttaactgtggattaggtcttgggttcaatcctcagcactaccaaaagaataaatatgtagttagaagtttttgcctcgtttatatacccagtgtgctctactatttgttccaggatattcatagtcatgttttaaaccatacaacaatacggataataatgtcactgacacttgctaattgataagtgtttatcattatattgtatgttttatactgtgttaggatcattagagccctattgatctgtctatctatctatctatctatctatctatctatctatctatctatctatctacctacctaccatccatccatctattaatttatttgagacaaggtagtagtactgggtggcttagaaatcactacatgaccggactgactttaaactcagagttatctgctcacctttgccactcaagtgcaggaaataaagacattcatttttcacagagcaggcgtgctatagcccaggttgaccttgagtttattgtgtaggcaaggttggcctttaatgctttgttagaaacaaaaacaaaaacaaaaacaaaacccttcatttaaattatgtacatgtatataacttttgtaaatgtatgtacaccatgtgtgtagcagcccatggaagtggaagaggacatcgaatcccctagaactggagagctgccatgtagatattgggaaccagcctggctcctctgcaagagcactaggtgctcctaacttgtgaactatctttctcaggccctggcctttgactttttcattcttcatccagagtgtgctgacattacatacaagtcccatcctgcccatttagaacaattactttacttagtagtcttgcactgtgtactaacttatccatcactttatgtacagtagttgtttcacacaactacttaatttatactatagagatctgatggcttctcagaacgtgcctctgttgttaagtggcacatgatagttcttgaaaaaaaatccctgtaaagtagaaggtcaggatttccatatgagaagtttaatgaatataaagattaagataataagataatagccagaatttgaatgtagatttctttaaatcttggtattgaatctattttgccccatcaagtgtttatgtccactttgaaaatatatttatttattgagattaattgcctcttataaacactaaaatgtagaagtgatgattcagttctgctttggatgaaagtaaaattcagttaagtacggacaataggatcagggctctgacaaggaaacagcattaacgaattacccagagtaacagactggtaccattattggacttcaagcacattttaagttcatactcagtagctgatagacagtttctaattggcagcaagttaaagggatacttacagaagaccatagtagcaagaatgataattccaaagaggaatgttggttaaagccttagatttggttgtatcatgtgttgaatatgcataaccttaaaaccaaatggtaccgactttgatttttgcactttgctatgtattttctgaagttggacacattactttacccctgtgaactttgccaaggtgtactatctgtatccaacacacttgattgtcaggaagaccaactagaatgatttgattttttctcaggctctgtagaccctggttaaagtagactctaggctattactcatacacaaggttgggtgagtggatcggattcagcaggtgttgggaatccatagagcggctgccagagaatggaaatcatccactattttttgtcctgtatgattttcttattaataaagaaaagtaccatgtgctctactgggtctcataaattaaaacttacaacccctctatttcttaggaagagtgaattgtggcgctatgcactcttctccctatagctccagttggaaattatctctgcatcagccacctctcctgttcatttgtgctagagatggaagcccaagctttgcttatgctgtgtagatactatctatgtttatgtccatatggactcacttgtgttttctatgattagatatgtgtaactaaagaggaaagaacttttcatattttaatcttcaaatatgtaaaaagatgaaatcacgtatcctttatgaatttgtatgagatagtggtttatctttctcagtagtgggctcttcacataggaagttcagcttagaaagaaggggaacaaagcagctttggagagcattgcgctttgcagagacactatgtccaaacactggtgttgtcatgcagcagtcagtgggcaggttattgacccatgtgtgtgcttcagtttccttgtatgtgaagcaagagtaatttccttagtggggcttccatgcatgttttagttagcccacatacaatacatgcaagaagtgggtcatgtttattactgctatcagccactacttgtgtggtaaattcctctcctccccagcccctcccatatcttagtcatgagtgtaggaactgtttgagggactcaccagtaagcagtgccctctttcctggctggattctgaacaaatgtgaaagaaaagtgggtttagccggcttcctcacaaaatctaatgccatgggaatgacggacagaagccaggtgaaaggaggaactggcttagagcttaggttgctaactcaaacctagactgatgcagaattcccagtagtcactactcaaaggtggcttcccaagtgagacaccctacatgcaaggtctattattttacagcaaaattcttccctgggccagtctctttctggctccgcctccttcattatacacgcaaatgatgtgggtggagttgctgttcagatcactcctccctttcttctctggctttaggagtccagcctggtactcacattgcctttaggagtccagcctggttctcacattgccttctgttggtatccgattatcactcttccctgtaattaattgaaaattgacttttctcttaattgccaaactttacttgaaatgttctttaatagaggttaatttcctccattttccttgcctagaagccagtgggaatactctgaatattaagcctcctgtggacaccacgcattaggatatcagtcataaactggccgtggaaggcagtttgcctgcagaagtagccctgtcacatagggataggtggccaattggcagcctcttgtggctcctcctgccttgattcccatctcttcacatctcccccccccctttttttttttaaaacaatgcatctatatttctgcccctttatcatcttactcctaatctataggggcatatggttcctttctctttgaagtacacacactacttccttttatcttccgccctcagctctcagccttggtggaaacattcacactggtaactttttcttccccgacacagactttctctgtgtagtcatgactgttctggaacttgctctctataccaggctggccttgaactcagagagttgcctgtatctgcctctctagagctgcgattaaaggtatatactatcacccagcaataacatttttgtattttaatcttcaagtctctctttgcactgtctgtgaacgttctcagctcatttctattcttaagtcccatagacctgctcatcctgggcttccattgatttcatcttcatcttggcctccttgagatcacccagtccccaggggaccatgggcagggtgatctccagagggattcaggtgcattccactggacacgtgaattcctcagagatgggccttggttaaaccaaatcaaacttaggcattattaatgaaaccctctcatatgaaagtgatggaccttctccagctagggcccctttcctccttagctggagccatctgtgtactattctataactgtgttatttacttcatacaatttatttataatgaagctacattactctagccacctgcactatatttaaaaatgtagatcctccaacattttctttttattcattgatttaacatttttcacacaattttgatcatattccgtcctctccctcaggtcctctcaggccaccccagccttgttccagccttttccatgatggactgcttcatttctgtcttagtttggttttccagtgctgtaataaaagcaatttggggagggaaggctttatctccctcacacttcaacgtcacagtctttcagggtaggaactgagcagagactgctagggagccttgctctctggcctcttccgtggcttgtgcagctttcctatacaactctggaccacaagggtgacctcacccaccgtgagctgggcctttctacatcagtcattaatcaagacagtactccacagatttgcctacaggccagtgtgatagaggcattttctcaaccccttccatccagcttggagctcttcataacacattctagtcagagccatgcccttgtattgtcccccaaaccccagttgagctttctcttctacttctattcacattgatatatcctggtcaccaccttctctctatcccctactattaatcttggattaattgccccctccttccctccctccttccttccctttctgtgtatgtgtgtgctcatgaccatgtgtctcttaagatgcttctgcatgtagacacacaaacatggagagattaaagatgtgtattttcctttccacttttaaaaacaatttttgtttttgttgttgttgttgttaattttgaggcaggttctctcattgaacctggagccaggaagccccagggatttttcctgtttccacatctccagggttacaagtgccaccttttatgtggaagctgggaatctgaacatagaggctcatgcttgtatcccaagcattttaccaactgaaccatctccccagatgtgtggtgctttaggaaggggggtggcaggcagaagctaaggtttctttgatataatttgatactgcctactattgctgttataattctgaatatttttctattttattcactgccatgtctatcttcaaaggccttgttttctcttcagtttccaagcctttctttctctggatgacttaatcattttctgaggatgaggccatttgattgataacaccctgccccttcaattccataatatttgtggattgtgtatttcaaatagtgtttagttcatactaccaccatggggaaatgtttcttttaatttgtttttaggaagtggatgtatgctctttattgttttgttttgataatctactcttaaatatttatggacatcacctactttaaccatgctgtggtcattggaacagctacctgaactattactttaaagatttttggatgaccatgattgagccctttaaatattaaaattcagtgtgctaaatatgctgtatcatcttaaatacaatccataacattataatatatacttgtatatattatataatgttgcatagcattatatataattatatataacattgattttatacacacacacacacacacacacacacacacacacacacacacacacatacacacgccagtacacaatggagtatcaggtcagtatataacaaattagctgaagacttaagatttcatttataaaagaggctcttaggagtgctggcagtactttatgatcacttttaaaactgattggaattatactaataaattcaagactgaatgccatggcttacatttttaaattaaatttatttaatgtaagattatgttaattaaatatccacttatcggcttaatgatgtttaatatagatccatcctaacactgggtttcaaaggctgggcaagttgtcaaatgtgacagaaacagagtttaaagataaaaatctatcttgcatttcttttataagtctttttaacatttgggtcattgttctccaagcccttatgggcgatggctattcactgtcatccttggtgttgtcacattttacagcaccattcttaaccttaagggcttgtttttgctaactacattacaaagctaaagtctccttctcctaaatgtaacaaaacaagattctattctcctcttagaacgttctccagcagggctctctgtggtggcaggaaggagccctgtcaatctggttacaccatgcccggttagctacaagtggcattttgaactcttaaattatggctagtgtgactgaggagctgagtttaagtcctagttatctgaagatgtgtgtttccatagctgcacatcacaggtgtccgccatatccagtcatagctctggggtgctctttagtggctgaattttaaggactgtctgttttatttggttggccttccatgctcattttgggagcaggaataatctcttttgaatgttgtcaccttacatgtacattcttagttacatttgttgttggtttttttttttcattgttacacaatttaaattaagtgagtttcacaatatctgaaaagagatcacacttgtacttgaatgacagatttcatctgtgtagttttctctgctctgggaggtagcatgtctctgtctttgttgtcttttcactgagatccttacaaagcttaggagactgagtttgcgaaagtgcttttgacttgtgtaccatttagttgagcagtttatagttttcctccttttgctgttgctaaccaaagccgtggttggctgaagtccacatcttcctagtgctgcctgaggcctttggctccctcagtgtcccgatatttagcagagtggccatcagccttcccatcttgggagtgtatttggtgaacttgaaatttttccaatttgaccttcaaatattaacattttgccttttgttttagaagtcttgttgtacctaagggtgctccttgaacactggttcgtactgatgattgagaactgttttccttcctgcctctctccctctcactcccccttaccctcccacaccttttcttccccattttcttccttggacagcgtctcatgcatcacaggctggcttggaagccgctgtggagaatgatcttgcactgttgattctcctgcctctacctcctgaatgccgaggttacaggagggcaccacctcacctggtttatgagatgctggggaaccaaaccaggatatgtgcatgctaaacaaacactctaccaactgacttctggctctggtccccaaatgggtatcttttagcttacacgattttctttgttgataattatattctggagaggagtcagataatttgtttgatgacagttactttgaaaaatcactttggtgattcaaaacagatatgagtgtacatttcactctgtagttcttttcttaccatagccaattggtaaggaaagcttttaataaatgtttttcttctaataagtctataatttttgaataactagtcatgtaaaaacttataaaacttagagctttataaaatgatatttcacccagagttgggaaatctgtgtaaggcagaatccattatggatactatctaaggttaatactataatcaatgagagggtctattgcactgcaaatcttacatatggtaagtattaactgatgtcaataagacactgtgataattattgaaaaacgtttctacagataatgaactaggtaaagcagtgtttacctgtaaatgccctgaacatgtggatgacctgcgatctgtagtattggcacagttcaagctataaaatgtctatagtcaatggtgagagaccacaactaagccaagcacaaatatacagtttctccttacagagccttccacccactgaccaggaaaagactttcatcttgaaagatgaaagaactaaactgaatcaggaacagcaaaggctactgcagcaggctgggcctgtttgggcatatggtagtaatctgctaagcacaaaggtgcgatgtggagagtaagcagagcaggttttctaggcagagattctgtcagatgagctcagtgtttataatgggaaggcagagctatggagatgtacatggaatcgatgcttccattttcatttcaaagcagctttagcatctcttgtaaaagtgtagccttcatttgtgcagatgctccttctggggctggattcctgaacattgtaatgatcaatgatcaatcccagtatttctgtctagtcaatagagtccattgcactaggaagacatttgtgtgctcttcaggaaacatatagggttttattatcaagggaattgatatgtagcttatttattgatgatgaaattacagacactgatgatgccgcatcagatctgggtaagaggtcggatatgcacagaagtggtttactcagtagatagtcaacacttctgggttgaatggagagctgtgatttctagctgtctttgcatttaacagtggtttgtaagcaattgtaacagccctgtcagatatacatcatgcaacaagcattttgcattagggttcataactgtacagggattttggttaatatgattggaatgatttagacatgctctatggcaagaaagtttgtttatcaggatgacttgccccaaattaataagaatccagaaaagctggagctcatgtggaagcaggatcttgtcagaacacagctttgacacagaacactgagctcatcggacagaatctccgcctagaaaacccgctctgcttcctctccgcatcacacctctgtgcttagcagattactaccatatgcccatcctggcatttatggaacaaatagaaacaatagtaaaagaaagaagagaaaatgaatgtgtttgtgtgtgtcttgtgtatatgtgtcctcatgggttcatgctcatgtgtgtaagtacatcggaggccagaagttgaatcatgtgtctccccctctgtttttctctacttcattagttagtcagggtctccagctgaactcagagctcatggattccagctaatgtagctagatttctttgcctttctattgttgggattatgtgtagctaccatgtctgccttccctttttatttgattttttgcttggtagtgtggtttggtttggcttggtttgagttggtttggtttggtttggtttgagttggtttggtttggttggtttgggttggtttgggttagtttggttggtttggtttgggttagtttgggttggtttggtttggttggtttggttgggttggtttgggttggtttggtttggtttgggttagtttggtttggtttggtttgggttgggttagtttgggttggtttggtttggttgggttagtttggttgatttggtttggtttggtttggtttgggttagcttggttggttgggttagtttggttggtttgggttggtttggtttggtttgtttttgatgtgggttctggggatctgaatccagttttcatgcttgtccagcaaacaccctatctactgatctgtttctcaattctaaactaaactgagatttaagctatacagttttgaggtagttacaaaattctttgaacatgtttaagacttaaaaattatgttttagtattttatagctaaccttttggaatgaggcatagaatgttcaagtttgagtagttggttttattagccagatggcaacacatctgtgaagagatgggaagataattggcctttgcaataactgtgtgaatgctggcatgcagtattttaaagtgcacccagagaaccggctttcctttccatctagagtattggacggtagactccagttattgttatatgagctagagatgaactagatgaacttttagccaaaatttacgataattgttgagtgaggatcgctggaaatagctcctaaatgcgatcagtgaggtaatgcttgtcgtggtacctctagcaaaactgttcactttgagacagacgtgcaagtggaacagaggtgcacaggacattacctccgtggtctgagagacagcagtggctgagcctggtggatagcttccatgtccttggtaaagaatcagatttatggaagtgaggatcctaatgccaacatcatggtgaaggttgtcttagaagacatggagtctgctgaggtcccaaggcctgacactattactgaggctgtggagcgctcacaaaaagggacctatcatgactgctctctgaaagacccaacaagcagttgaaagagtcagatgcagatatttgcacccaatcaatggacagaagcagctggctcctgttgttgagttagggaagggcgattctgtaggaggaccagcagtctcaatctggacccctgagatctctcaaactctggaccaccaaacagacagcatacaccagctgattggaggcttccagcacacatagagtagaggactgctgagtcagtgtgcattcagagatgatgcacccaaccctcaagacactggaggccccagggagtttagaggtcaggtggtgtggggacatccacgtggagacagggggtggggagaaggtatagactgtaaaagagtcagagggtagatgtggggggggggggataaaatatggagtgtaaaaaataaaaataaattaattaattagaaaaaataaagaagacacagagtctgaatgtgtgctctatgtggctgaagcttctaagataacactctctctctttctctctccctctctctctctctttctctctctctctgtctctgtctctctgtctctgtctctgtctctctctctctctctctctcacacacacacacacacacacacacacctgttcacatacatgctaagcctttccctttggaagatgttgagcagtgaggctatgtgaatttccagtaggctcgaccctctgcacctggctgattgcagatgtgcaaggcagcccatctcaccagctcagcactgagttcacattcatgcccatgcactgggtatagcagtcctgagggaaatggattccttgaatgaatggaggttctctaaatagtacatgtttttaaatccagccctcctatgggatccaatctagatggatgggccttttccagggtcttagtgaaaaccaggaagaatttgtcctctgcttaatactaagattctcaaaggattctagtcaacttaaagccaagcagttcttggctagatagtgacttactgattttcaacagtttggagtaaatatttctaatgtcttaattctaacaatttacttcagtgtaagaaagattgggggttaatgatttcctctccttaaatgattagtctgggcgctgcagagatggctcagtggttaagagcaccgactactcttccagaggtcctgagttcaattcccagcaaccacatggtggctcacaactatctgcaatcagatctgatgccctcttctgatgtgtctgaggacagctacagtgtactcatataaataaaatagagagctgggcgtggtagcgcatgcctttaatcccagcacttgggaggcagaggcaggtggatttctgggttcgaggccagcctggtctacagagtgtgttccaggacagccagggctatacagagaaaccctgtctcggaaaaccctaaataaatagataaaatagaaaaataaatctttaaaaaaataagattagtctgttcatttagagagaaaaatgaataaattttaaataaatactttttaaacataaaagttagtaactagtgtctgtgtgtcttttttctttcctgtgtgtgtgtgtgtgtgtgtgtgtgtgtgtgtgtgtgtgtgtgtatttgcaacaagcctcactgtttatcccttgctcaactactttgatctgtgtctgtagataaggctgttcttgaactgatagatatctccctgcctctgtctcctgagggctgggattaaaggtgtaagacaccaactagactccagatgtttcgtatgcattctttttcttctccctctaactatgtattttgataaaaatgagaaaaatatttgaatttttgtatttaatatttgcatagggtatgcgaacaatcagaacctggtttgtaattttaagcatttcagacatagcctggataatatagctgttttgaaataactgtttctcacagagtattttttgtgcaccacaagaaaaatttctcctcctcctcctcctcctcctcctcctcctcctcctcctcctcctctccctcgttgatttggatgtgttgtttggtgattagttgtgtgtatatggtgattaggtcaaaggagtatgtatcactttttaatttgttgctagcacctggaaggtcttcatcaccttcattcttatctgtcaccagggcccatttggaggccagtgctgagaaatggaaccggttgctggcatcgctggaagagctgatcaaatggctcaatatgaaagatgaggagcttaagaagcagatgcccattggaggggacgtccctgccttacagctccagtatgaccactgcaaggtaagtacaacatttgtgcccttttttaaaaattaatttcgataaacaaactgaatgaagttctcaagaaatgaaaatttaaactaattaccacagcgttcccccctctttggcatctagttggttgctaaaggatcaatataaggttgaaattagcttaggtaacatgattaagtctgaggccagactaggctataaagcaagaccctacctttaaaatccatgcacacatgcatctatacatccatacttagataaaaataaaagataacttgtgaagttttttccaatatgctgatatccaaagaaatcttctagaaagcctcccagtgctaggattacaggggcgtgtctgctgttatatctaactgtaacctaatcaggagtatagaagtcatggtgtcagaaagggttttaatgtagaactcgggaggcagaagcaggtggatctatgtgagtttgaggccagcaaaggtgatacactcagaccctgtttcaagtcaatgaataaatacataaataaaattccaaagtagttctaaggatatagctttaaagtgtgagcttttcctattggccccaagctcctcggatgaagacttttgagactcaaaatatatctgcaatcaccttggccatatgctttggtttggtctccatctaacttataacctgtttattctaatctaagttttgccatgtgactggctacgtctgctcaggtctcatgcatctgtcctctgtcctcttcctgggtgaacactgctctccctgccttactctatcccacaattcttaatcttttctgcctctggatgtcccaccttctttctattctaccctttcctatagggcagaggtttttgtttgtttgtttgtttgtttgtttttactgacaaacaatacatccatacaatacacaagatattctctgtacatatagcccagtggtagagcacttgcctagcttgctggagattaaactaagacaaacaaaacctgaaattatcttgttcattaaaattaaaagtagagaaaatctgtagggcagatttcagtcctgtatcaaatgaagatcacagtgtgaaacaaaagatcattttatggtctttttatgtttcattttctttctctaagttctgtttccttctgcatgacatccacctctacacacgctgtgtttgcattctgacaatgaacaaggaatcctgaaatgtcacctgacatatccctcagcctttagatttttaaatatcttctcctattccaagttccattaatttatttatatccttttatactcttttctcatatattaaatgtcatttagttctgttgtattttttcctacccatgtgcagtatgaattctccttctaagtctgcacatttcaatgcaacattgtgtccttgttcccaattgaaagatgaatgcaaatgcatgttcctgagggaagatagcatctattacagaagatgttctaaccgatgttgatagggtcttgaattctattttattttgaccctgtgcttggtgaataaaattactatttcagtagaaagagaacatgatagacagataaccctgagatagaaagacacagagactaagaaaatacccactaggtgtgcctacatgagagcctcagggaggcggttacttcatttacattcccaggtgttaacaaagcaagattttccattgcacagagagcttgggtctgaggtagagcagcccctgccactgggctgcaaagctgaaagcttctagaacctccctacatagcactaccagctagtgcccaagtgtccacacatcatcctgtaaatgtaacgtttattctcctgtcattgatgtctcagaagcttactaactgaggcctagtcctgaaagtttttagcttctgtacagtcttatctaggcctacaatgttttctgcctctgagacttacactcaccgtttctagatctttctgatctctggctggctggtctaatctagcttctctcagtttcttactgagttgctctgcttggcctcatactaactttagcaatatgttctaattttctggctccttcccattctctggctggctccttcttcaatctgtctctgtaaaattctcccagtaaaactgtttcttccctccctctctctgcattgctctcttaagtagcttcccttccctctctcgtttcctgagagttgggcatgtgctgtgaagtctttctctgattcatcactttgtctgccactcagttagacatcacattcaaacatggctgcttccttctgcaaaccatctttacctttgtttgggattaaagttgtgtgctagggactgagccacaccacaactagaaacagttttgttttgtttttcagtaaagaacacagtaattcacagtgtggttaaatatcctgcagtgtgttcctctggaagatggtgcacactgaagccctaatacctgtctgaagttacgtacctttcttatggaacaccaccatcatttgaaaaatctctgacagttgaactacagtagaatcaagcaattcccttaaagttagtctcttacaggtgtgctgccaggcaacatttttttttaaagtccattttctccaatctcacattcttcctatgaagagaaatctttacttactatgtgtacacctgcaacatctaaccagttgtcagaagctcaaggacctgctcactgcatagaggaaaatggatgagtgctgcttagcttgatgaaatccgagcagctgtgccccccctccacctcccgcgtcccccttcactttcacagatactcatcatattcctgttgtgggctggtagtttctaagccactggtacagagagcagacacagctcctgttctgtgcaggggacagcctgtgtctgtgtagtaagagagcattcagagaaagctatggcaggactgtgacatgcttattcatgcagtttcccctggttgctgtctgtctgtccatccctgtttgttcactcctatcttccagtctttgttcttgcttacactgcacacggactcaattgaggtcatggacatgtttatctccaaattcctctctaaaggacttagaactctctttatttatagcattacagtgcagaacatgaaatgatttttttttaaacaatgttttcacagatatgtttttagctttgtgaaaaattcattgggcttttttttttctccctcttttagttttttttttattataaagtgcaaggttgggtttttggggggttggttgttttttgttattgttggtttttattatctgctttagatgcttaaattttcctgataaagttgaaaaaagtcttcctaattaaaaaaaaatgtgatttaatgatacatttccaaagcatttctttgataatagaattaccagtctgttcaccacccacaccccttgtatactattcatggaatgccttatatgttaaagttggtgcctttgtccagaaagcagtataacctggcctctgtaccgctctgatatgtttcaatagttcctttcccccagagatctgttcttgtggtttctttggatgtatccaaaggaaatcctatccatttaaaatttggctctgagattgtcagttagaaaggtaatacaggatcatgctttaaatcgctccttgaccaaacatcttgcaattataggaaaaacattaaaaagtagaaaaccacccatagcataactctgctccaaaacacaacagctacctttagcctacaagaagcaaagtagctactgaagttgatgctcctgaagagatgaaaaaaggcttgcaggaagatgagccatactgaagacttggggtggcatctctcctcagagcttgtctctccttgctggtgtgagccctctatggatggaaatttttccactttctagtacagatgctagatcatgcctgtagttttctggaagatgtgttgtgttgatactaatttcattgggcttgttgatgacctggcctgtgactggatacaaggtagaatgctcagcatgaagaagctggtgtttactcttgtaattgttgagactctgtgcatttactttgtttctgttgctgtgatcaaaagcgctgtcaaaaagtaacttgggagagaaaggatttatgtgagctcacaactccaggttacagtgcatcattttaaggaagggatgtcaagtaaccaggaactggaagcagtaaatcctatctaacccacacttaggagtagagagaaatgctttaatgcaagaatgcttattactcctctctactattaagtgattcagaacctaaaccgagggaatggtgtagcccactgcatgctgggtgttcccacatcagttaatgtaatcaacgaaatgtcccatagacaagcccataggctgactgagtgtagacaattcctcattgaaatgttttccaagctgattctagactgtgtcaaattggcagttaaagcttagcaccatggtctgtgttggtggttttgatcactctgtcttaattctgtctaggctatatgagctctttcagggagctacaatgccattaatacctagtaaccatccaacacagcccaacagtgcttcccccacctccccacttcctatgcagtattaatttgttgaattattcaagagtcacattccagactttacagattgggtagataacacagtcgtgttattttctcatatatgtacatatttaattcctttaaatattaaaataaataactaccatataacttttagtggcttgaaaaatgagtgaagatggctgaacgttcctctcaatgactttaattattattattttttgcctctttgagtcttgaaagtggatgatttatatgcaacttcattgtcaacatgtcgtccagtcagttatttcttataaagcacctacagtgtgcatagtgttgatatgcatgccatgaattaacttcagatactcaaaagttgcctacagttgcatatgcagttttgaatattcaatttgcactttattttcacagtaatgtaaatactgagttatgcgtaggcaattatcagagctctaacacgcttttcccaataaaatgcatgttggttttataaaagcaaatcaccaagaatgattaaattgcatgattcaggtataatttcctggtgtgcatcttttccctcagggttactttgccctttgcctaactcaatttaatttcttatatccaaacctcattatgtaagaatcaggacatttgggccttaaaccaaactgccaagatacataagaaaacttagtcattaaagtaacagattctgatgtcgtttttaaaacctccaccacgtgtggacacatacgcctttaatctcagcactcaagaaccagaagtaggtgggcctttatgagtttgaggtcagcctggtctacatagtgagttccaggctagtcaaggctatgtaataagaccctttctcaaaaaccagcaagctacaacaaaaatgaaatgtcaatacctccttgttaaatttgggttctgtgcatttgcatgtgtgtatgatgcagttctattaatctgaggttgcctacaaacctgtaatgttgaggtcttgctgtatgttatgagatttttttctatggtagtaaattagttattttctgattgggttgaggagttcccatgcaggtatattatgcacatctctgtgtgtacatccatatggaggctaggaataaccttgagtatcaatcctagagtccttcctcctttccctccttttgtcttccctccttccctccccaccccactttctttgtatatcttttggagacaaagtcttacactggctagggtggttggccagtgagcctcacggtcccatgcagctctccctccctcctgggttctgagatgacaagcatatgccccactgtgtctagcttttaaaaagtagattctggagaccaagctcacatcctcagtgtacaaggccattgcaagcactttacaaactgtactacctcttcaacccaatgttctaaagttaagcatttctaagtgctcttctgaaatttgcaactgtattgctttccttctcagaaacacactgcaccccatctgttggtagagcctatacctataggcaccctgaatcagctttcttaaggagccatctctactccagttaaccattcatatggctacaggtgatcatgtcctctaagtttgggagcaatagatgaagactcactcccaagagctggggctcacacaatgtccgtgtttagagggacagggggcagcttgagagctgtcagactggtgatgaaataaagagtatggccattcttgggcacgaaatggcctctgtgaaaccagccacccgcttccaggtgaaccacttctatgatctttgttgcttagtgaccatttcctttgtttaacagctcatttcttctttcagcttccatgttaaatctgatagttgacatcctgtattaggtactatggtggtttggatatgcttggtccagggagtggcgctattattaggaggtgtggccttgttggaggaagtgtgtcactgtgggggtaggctttgaggtctctgatatatgctcaagtctgtccagagtcagtcatcctatgtcaacctttggatcaagatgtagaactcttggcaccttctttatcactgtgtcttcctggatgctgccatgcttcctgccatgatgagaatgcactgaaccaagccagccctaattaagtgttgttccttagatgggttgcctgggtcatggtgtctcttctgagcaactgaaaccctaactaagacagatactcagcacacatcactcaatagagggtcctgtattttcacaaaacacactgcctagtcgcaggattgaccttcacaagaagataaacactatcaaaagccctgcatcagggacatgaacacacagccaggaagcagagatgcttatgactgtatgctgtggctgataaagaaaggctttaggaagtcctggagtagagagtccgtaaagtaaaaagtccttaaagaatgttatccaggttactatggtgaagatcttgcgtgttcctggttgtgtttcttagagtaatggggtgtactgcattcatgcttgtagctcagggggtctcaactttcctaatgctggggccatttgaaacagttccttatgttgtggtgactctccctgccaactgtaaaattatttaattgctactacatagatgcaattttgatactttaatgaatcataaatatctgtgtgttctgatggtcttaggtaacccctgtcaaagagtcattcgaccccacaaaggggtcagctcacagattaaaaatggatgctttagcctaacactgagagcaaagctcaaagagaaggaacttgaatgttagcacctaacaggggctgatgagagaagctactaatggatttgctgaataagagggatgcaggcgcatgtctgtgtatctccatgcatgtgtacgtgtgtgtgtctgtgttcaacaatgcagaggaaagactggtttgttactgtgacacgttggagagtcctgtcttgctcttagcattcatacttagtattcctattttgcctttattttttgatgccagtggggtggaaccaaaatgaatttatacatttaactgatcatttagggacattaaccaaaacttttacggcactgtgcactatgaaggagaattaaaagaattttttgcttgcataccaatggaacataatcccatttttctcttttttttctttgagttttattagtgctatcaactttaacgactgtctggccttctttgctaccgtacaaaatgacttagatccatacatgctgatttagctctgaaagcaagctgggaggaggaagggagtaaattatattctggcagattctccttacgtttccatcattttttttctatctctcttctgcagtaagccatgaagttcttttgagaaccaaaggttaaagaagcctggtgtgtaccaacactgcctccagcctgccccagtgcagatgcccctcgtccatgccagctactagggcacccatatgctctcattagtgccaggttgtgggaagggctctccgtgctttgttgtaggccttgctgttatagtgaatgcccaaatattcagataagtggccctgtggtttcatcttgctgtggagtttgctgttttatagttagatctgttggcatcaagaacagttatgtaagctaggtattggtggcacacacctttaatcccagcccttgggagggaggagccggtgatctttgtgtgttcgaggccaccctggtctacagagtgagttccaggacagccagggctatatagagagaccctgtctcaaaacaaacaaacaaacaaacaaacaaacaaaacaaaacaaaaaacacaaaaaaaaccccatccagccaaacagacaaataaaaagtatattatgcttcaacatatataaactataatgtgttaaaaataacaaaagactctgagaatgtatttccaggagcgtctctctcctcagttcaggcatggtccttacactgagtcgtgtgcctcttgtcttaacttgtggatgttagagttggctagtcttgggcttcggcccacacttggtcctctctacttgacttctaggtaccctgccctcctgattttctcatcctctcaatgaagctccgtctctttccctctctggtccgttctttaagctccttgtagaactgggaagcactaggagccaggccatcctgatgtcactatatgtagcctttcctgggtttagaatctatctgcaggccagacactcccagctttgtgaatgtgctgatgtgtcacctctacagggatcctaattttgcacatcctatggccaagctgaaagcactgcagagttgacttttaagacattctaccctgaattctatacccccatctcacttggtagagatgtgacttaagttgcttaaaataataataataataccttgaaccccatctttctcattcaatgtgttagggagttttaagttttctcatcaagatagagaatctaaattggccacttgccaccattcatctgactctggggtccccagcacagcagccagtatgttcctgttaataaatcaaacacccagtaatagacatagtctcaggaaggcatgcaagagccccgtgtggccccctacgcctcccacacaccaagctcagttcagctcttgctcatcttctcccacactggtctcagccatgctggcctcttgctgtgattcaatcacagacccttgctgtgtcctagaatgttctttctgatagtctacaaagttaactctccgctgctcctcaaggtgctggatggcaccttccaatcctggcaacctctctttgttccagcattctcatcttcctatgtagctgctgtactattttctattctttgtgtacccacagttccataaactcaataaagacttgttgaatgcaaaatgactgacacatacctaagggtatttgattctttttaatttctttatatctatgtaatccttttaatttcgttcatttaccaaatatcacatttaaaaaacacttgtgtgcgtaattttctaaaacactgtcttatttatgtatgccaggtgaatatcaaacttgcagtgtagctgagggtgaccttgaacttctaactctcctgcttccacctcctgagtactttttcaggagtgtaccactatacccaggctatgttaagctgaggattggaccagggacctcgtgcatgcgaggcaagccctctcccagtttagctgttaccttggcgtttttgctactttaagtaactgaatttttaggaaaaatgatcctctctttagacatataagcaaggatctttcatcgacagcttagagataattttttgatatttttttgatctgcaagagttggactgtaagaaaccctaccggcacagctatagtttaacatgtattagttaagagacttcttttccttccgtgtcagttcacattggccttgaacttgtggctttacctttcagtgtcatcccagtgctgagagtctaagtgggtgccatcatttctggtcaagaaattatctcttctctgtctcaatattgccttaattgttccactcagggggtgggaaagtaatgtttatgggatgagagggagtggactggcaaatcaaggttattgaggcatcctctaaatatggttcattttacttctggaatatgctatcagattgtccctctgtgcatggctcctattatcccttaaatagatgctttaaaaataaatatcagatactctttaaaactaaatatgttaagatctccaatgaccataggaatgtaaatgtacagactctttgattcaatgattgtcgtagatctcattttataaatgaatctaacctggaagagatcactgaaggaaatccgtagaaaaatttatatacactgccttagaaatgaagcattggcttctaatacacagtctcccttttatttcataaatttatttttagttatgagtttgtttgtgtatatatgtgtgtctgcagttatagatttatttgtagttatgggttgtccaggaaggccagaagaagctgtctgaccccttggacctacaggtagttatgggccacccagttctggtgctgggaagcaaactcgggtcatttggaagaacagcaatccctttttgccactgagccattgccctggcccatacatatgtaattgctaatagtgtgttatttaaaggtagtaatttgttcacgacttctgttttgcagcctagagactataattaataacatgtataacattcttgaaaattgttgaaagactatattttaatattattgtaagaagctcaaactatatgagatattacatatgttagctgcatgatccattctgcaagtttattatttatttcaaaataaagcattatatgaggtagatgtatatattttatttcttaatgaaaagtagaaaaaatagtttagaactattgggaaaagatctttaccaatgctacatccaatagagggctaatatccaatatatacaaagaactcaagaagttagattccagagaaccaaataaccctattaaaaaatgggaaacggagctaaacagaatttttaattaaggaaactcgaagggctgagagcacctaaagaaatattcaacatccttagccagcagggaaatgcaaatcaaaacaaccctgagattccacctcacaccaatcagaatggcttagatcaaaaactcaggtgacagcagatgctggcaaggatgtggagaaagaggaacactcctccattgctcgtgggattacaaactggtacaaccattctggaaatctttctggtggttcctcagaaaattggacatagtattacctgagtacctagctataagactcctgggcatatactcagaagatgctccaacatgtaataaggacatgctccactatgttcataggagccatatttataatagccaggagctggaaaccacccagacatccctcaacagaggaatggatacagaaaatatggtacatttacacagttgaacactactcagctattaaaaacagtgacttcatgaaattcataggcaaatgaatggaacttggaaatatcatccagagtgaggtaactcagtcacaaaagaacacacatggtaacaaaaaaacctaggacagcaaaaactcttctcaatgataaaaggacctctggtggaatcaccatgcctgacctaaagctgtactacagagcaattgtgataaaaactgcatggtactgctatagagccagaagctggaaagaaccctcaacagaggaatggatacagaaaatgtggtacatttacacaatggaggactactcagctattaaaaagaatgaatttatgaaattcctaggcaaatggatggacctggagggcatcatcctgagtgaggtaacccaatcacaaaagaactcacatgatatgtactcattcataagtggatattagcccagaaacttagaatacccaagatacaatttgcaaaacacatgaaagtcaagaagaaggaagaccaaagtgtggacactttgccctttcttagaattgggagcaaaacacccatggaaggagttacagagacaaagtttggagctgagacgaaaggatggaccatctagagactgccacacctgcagatccatcccataatcagcctccaaacgggcgctgacaccattgcatacactagcaagattttactgaaaggacccagatatagctgtctcttgtgaggccatgccgggggcctagcaaacacagaagtggatgctcacagttagctattggatggatcacagggcccctaatgaaggagttagagaaagtacctaaggagctaaaggggtctgcaaccctataggtggaacagcaatcaatatgaactacccagtacctcccagagctcatgtctctagctgaatatgtatcagaagatggcctagtcggccatcattggaaagagaggcccattggtcttgcaaactttatatgcctcagcacaggggaacgccagggccaaaaagtgggagtgagtgggtaggggagtgggaggggagggtatgggggacttttgggatagcattggaaatgtaaatgaagaaaatattaaataaataagtaaataaacaaacaaacaaacaaataagaaaaaaaaagagttgccatgttcacagtgtctcttttcaacaataaaatccctaaggcaaaacaaaaccacacatggtaggcactcactgataagtggatattagcccaaacatttgaaatttccaagatacaattcacagaccatatgaggcctaagaagaaggaaaatcaaagagtggatgcttcagtgattcttagaagggggaacaaaatactcacaggaggaagtatggagacaacgtgtagagcatagactgaagaaaaggcctccagagactgccccacctggggatccatcccatatacagtcgccaaacgtggatactattgtggataccccgaagtgcttgctgacaggagcctgatatggctgtctcctggggggctctgtcagagcctgacaaatacagaggtggatgctagcagccaaccatgggactgagcatggggtccccagtggaggagttggaaagagctgaggggatttgcagccccatgtggggagcaacagtattaaccggccatattctcagagctcccaggaactggaccactaactgaagagtacacatggagggacccatggctctggccacgtatgtggcagaggatgatcttgttaaacatcagtgggaggagtggcctttgggcctgagtgtgtttgatgcttcagtgcaggggaatgccagggtgggaaggcagaaatgggtgggtggggagcatccacatagaggcaaggggggatgggatagggggtttctgaagagaagatctagataggggataacatttgaaatgtaaataaagaaaatatccaattaaaaaaaacccaaaacctattttcaatgatattttaaatgattaatgagctctctgttaagtgttcttttaggtataattttcaatcataaagataatatttacagatgaaataatgaacagctgggtcttgattattcaagcttatctcttcagcttctcaagagctgaagtaggggggaccacacatttaagtcctgcctggagtgcatttctcagtgaatttaaggccagaccagtctgatcttaactcaactgagtgagatcttgcctcagagtaaaaagggatagccagctggggttgtatgtcagtggtcagactctagctgggctcgcacaagtcgctgcttccatccctcacactgcagagtgatagcaaagcaaaatacacactcttctgtcttaccttcctctagtgccattgttctcatccttcctaatgcttcgaccttttaatactgttcttcatgtggaagtcaccactcctaccataaaattgctttcattactagctcataactgtcattttgctactattgcagatcgtaatgtgaatatctgtgttatccaaaggtcttaggtgacccctgtaagaaggtaatttgacctctgcaaaggggccatgacccatgttcccatggtggtatctcctcttgtatacacaccgtccttagctttaattggaggcctcgttttcttactctgctttcacctttaggtttctgtcatgctcacgttctgaccttgctcttgtggccattatcatagtaatctttgaaggttgtgtaatggttcctagtgtggacctgccattgtggatctcaataatttcctagtgttggatatttaagctgccctcaatttcttaaagacataaataatgttgcagtggacacctttttatgtgtagacttttttttcccctcctctggttcattttcttagactccatcctcaaaggtgaaattcttgtttcataccatgtgatcagcataatgactttatagactgccaaattgggtttcccaaatgatcaaaccatttccctccctctagaaaatatggacacgtcagtgctctcttgcttgactctctcacttctgctccttgtctgatggacttgcactgctagcacccaaactctgctactccacagtgggtggaaaaaacagttttcagattctatacaggtctggcccatgcttctcttcttttcaaagaataaagaggaaaatttgggagatctgtttgacttagccatgtgtagagtagcagggagatgtggtttcttgaactttctgggggagaaagttcctatttatatcacatgggatgtgatctaatcaacccctaagtccccatagctttacttcactgttatggagaagatttagataaaaaaagactaaatttttttctcatctaagagtctaaatatattgcaaagttttatatgtatcaaatattttagcttaatcttggggaatcacaaagtttcacagccttcctaaccacatcacgtgaacattgggatacatattaagttcagtttttcctggaaaggggagattggtgtgttagcgagtttttcttgctataacaaaatacttgaggtaaccaccttaaaacagtagaaaggtttgctctttagttcatgatataagaagatccagtccatgactctaatatttttaggcatatggtaagggggcagcatcatagtgggaatgtatgagggaagaaagctgcttgcccctctgtcagcccagaaagaaaggacgcatgtcaaggagagaagggaagagcagagctgcttcaccgcattctgtctcctgtgagcctgttttcttagggagagacttgcaggctctccacgtttctgcagaagaacggataatattgtttgtttagcagcaacttttacatgacaccaagctgatgctgtgcccagaatgaaaacgaagagctgtgattgacaggtggtagtttttgacctttgccaagccagtcacttcttcaaccaccttaccccttaatccctggcctttccagtaagttctagcaggtggagtgttccctgaccagtgagccagaagtgttccctgaccagtgagccacagtgaagaatctctgcaggtgcttatagttggatctgcagaaattcattgtgctgcctggcactctgggaaatagccgtggctactggagccctccttgctgttcagatgctcgggacggtcagatggaagaagggatggctcagttaagagggatgctgagctcctagatattctggaaggaataaaattctgatactaatgttcaggttttcgtttgaggcacatgagagactagatggctttactctcaattattctgtctttctgtccatttatgtgtttttaaacctgtagttcacatgaaaagttcaatgggaaatgcctctgcagttaaatcatttgcctggcaagactagcatttggatccccagatctcaagtaaatgccaggtgggcaggggtggtcctgtgtaacttgagccttggaaagaggagcgggaggattcccagggcaggcaggctagtgatacaggggtagtgtttgactgagagatgatggaagagtgatggagtgatcaggagtgattcctcatttcaatcaggagctctacatacatgctcactcatatatgttcgtatcctgatacacatgcacttaacacatgcaaactcacacagattcatacacatacacacacaccactcaaaaggcaaaatgcagagagaaagagagagagagagagatgcatatgcctttaagagactcctatgtttgagaagttgttcacccttcctccctgcattgtatgtttgtacttagtagggctcttgatagcctgcttgtgcttttcaaagtctggtgacaattatcacattctgcccttctcctcccccttttagattgtatgacatgatctgtggctatgtctagccattttctgtatattcagtatgagagtagtgtttgttttaacttttttattagggtggaaaactctatggtactttgctagctccataccttgggagacagtagaatgtctccactcgagacaggttttcaggtagactatgctgtcccggaacttgtgttgttcctgccttagtctcttgagagctgagactactgtactcagctaagtgaattttattttttaatggacacaaaatactttttgtattctcccttttctattgttgtctcttgagcatttgaggtctagtaaacattttagaacgtttaggctttaaagtccagtttctgctttctttggtgaagttatcttatttttgtgagttattttgaagttttcttccttgttccggttgagtcttgtttactacatgtaagctaaaatttccctttacactgttctgtcctggagattatttagggcacttatttactgggaaggtatattagttcatttacttttgctataacagagtccttgagactgaacaatatataaggaaaagtagttcacatatctcatagctctagaagcagagctgtatctagtgaggtcttcatactctatgcacactgatagcagaaggcagtggctgcctctgacagcaggggacaggacagatgctgtgacctgctgtgcagtaattggaccttatgagaatttatcagttcctgggagaacttgtccagtctcacaagaaagacatcatcccctcttaaatcctcacgttccaaccctacgtcaaccaatccgtctcaacatgagtggtgattgtatcagctgaatgtgtcacaggcagggccaagctgccacacgagtgtgcttctagcttagtggccgagctttgtttggtttggcaaagtcaccaggtgtctgcaaagacaggaagtgcatgtttaccaggtatttctccctgcaaacacaaagactcagattctaaaacactgtcacagaaagaacatccctgatccttcctcgctcggcataatttcagctgtcactaggcagtacccacttggatgagcctcacagcctgtgaaatgcttcctttgaacagctggactgaatgttaccaatcccaattcattcttgcttgtctgcgtatggtattgttagaataatggataatgccttcctcttgagctgacatgattgttcctctcatccagtgatggagtatagttctccattctccttagccagttgatgcaggggacgggtgcatagccacacagggtatccagacagcaaggtaggaagtgttccagaatgagtgagaggatccattgtatgactaaatatgctcaaaccctgaagatcaactcttacacacacatgtgatatatagtgatatatagtaacacatatatgtttgtgtatatgcatgtatgtgtgttataaagaaactgaaaaagaaacatgacctgcagttttttttttttttatgttttagtttaagaacaagatatttgcatatcgttaagtttaccccattaagtgtatggttcagcctttggtctatttacagaatcaagtgagcatcattgactcctaagtttagcatttcattatcttcgaaagaatggaacaaagctatagccttagctttggcctcactgttgctgaagccttgatgggctgactagactgcatcctctatccatgtcatttggggtaggtagatattttacaaagccaaacttggaaacttggaaacctggaaaccatgcccttgacaccaatactggaagcatctatccctgtagacttccacagtcctccttcagttgctgagtcctgtgagctaccaccatgaggctgccctgggaactggaaacagccagatgcctcaaagcaaacatgtagagtttggccatcatctatgacttggggaaggagattagaaacaggtatgcagcaagcaagagcaccgtggagaggctaaaatgaggcctcacctcattcactccagggctggttctggagtgcgtggctgaagcagattacaatgtcagatcctggcctttgatagttcagaaggtccccacatctttctatgagatgggagggttcagctcatttctcctgttgaaagaaaattcatccccccaacctgaaaatagtaactgcacggcttctttttgctttgtttcccctgtcctggctcattatactctgaaacactcaaaaattgggtaaatattttggagttagttaagatgagcattttaagtggttaggaatggcctaggtctttttcttccctccccttttttaaagctttcatgtaaaaggtgcctatgaagttcccttatagccctccagtgtctccccttcatcttcctatggatgtgtttaccatttgtatcactcacattggctcattgtaacccaagttcctcttcataacatcccaggacttaggcccccagtggttaggactcaatgattgacttagaagctcactgcatggctgtccagtgtggcacctgcgagatagagtttctttgattaaacagttgtgtggcgagtgctctcaagtcaatctaaaatgtgcaagttgtaagtaaagcaaagagagtgttctatcaggacttgagcacccgtggaatttctctactgacatgtttgcactaagctgatggactttccctggaagagaaggactaaaaccatttgcaccttggtttgcatttattacccagtgtaatgaagtttattctcatgaaaaagaacccctgtgtacctgaaccccctcaggcctccaacactaggcagctgctgatatacttttttttctctctgtagacacctctgtggtaatggaatctcacaccacaggcttccctctgagtcatttcgctgagaacatttgttaggtttttatctagtggtagtctgcattggtctgtaactcattttccttgctaagatctgtcgtgcagctcggttgcattttgcttatctactgatcaatggctgcatgtttggttggtccctcggtctggctatgatggcgtgctgttatgaacatttgatgccgtgctgttatgaacattcacgtgtgtgtgtgtgtgtgtgtgtgtttaatctgtacagatgttttatttctgggtagacctagttatgggatatctaggatacagggtaaaataaaccctgtatttaacttttgaggaaccaccaaactgaaatgtcttatgagtctacgatccccaacagtgtgtgagaattcagttcctcacaactttacctaagcttgttattgtttggatagaggttgttttcggtaaaaatataaagtcattaacacagaaaaattccaattaggttatcttatactcatttaagtggctcccaaatgagacacgagataccagaaagtggatgctactttgtatacaaaacaactcattggactctaattaccttatcattaatgctcaggaaaatgaaggctttcttttacgtcgaatggagaggtaaaaggtgtggtgattatgtgtgtaatacagttgagagtcgaatccctttgtgagtgcaattaaatacaattgaaatagggcaaattgaataacaaaattaaaacgtcaaaagagcgtatgtacaggtatactgagtgtgttctctaggctactggggagagagatggtatcagggtcagagtcccagaagtttttacttagggtgctttccacctgcccatgcctgctgtacttcttctctggcttatcaagtcagctcacctgatattccttaccaagaattcaaggctgggtgatcctccccccccccaacacacacctttggcaggttgtagattaatgtgctaagaaatgcaaattaactatggaagactctctactactctgatttcatttttattatctagacgacccaacaatattgttaagaagactatgtaaatttgtagtcacttcctaacccatttgcctgcctggctcttcatcagtttgcctgtcatttggtatcaggtgtacaaaggtgcgcacatagacttctgccttcacttctacctgtgtcttgagccttagctattgccttgtataggggccaaaggcgtgtggttctctcctgatctacacactggaatcttccccccaaggctggcgcatggtttttctctgggggaagaaactttctctctttgcaagactcagatgaagccccctccccagcccccaccccacatcatgaggaagcactttggagccaagctcagtgctcaacttcctgtagtataagatccagaagtcctgagaatttatggtgtatctgagaaaggtagaaattaaataaaacataaaaaaaggaatacatactgtccttgactaatagatctgggaagtacaaaaagacataaacagagtaatgggaacaggaaatgtacagaacgggaaaggtgagcgctactgtaatggtagggtgactgtgcgaacctccatctataaagcattaatggtttgaagaacctccagtgtggctgtctggggagagagctttctgagctcagccaacagccagccaacacaattgctctcctgtgagagtctccatgcataattgataaagtttcagccatgtggggaatcgatcagtttgtctcctcagtagtttttctgtagacaaacgtttattttctatttgaatgtgagagactctaaacacaattttaagaacaactgtcctctgtctgtccccttccctcccacagcactctccaaggcactttgtgaactgagacattttgactggccaggcacaaatactccttttccagtcactggatcacctctcctaggttccccaccatagcatctgggatttaccctctgggacatctccccatcagaattttcttcctcctgaggcccaacatctgtctgctctccctcatttcctcttcagacttagtctttcttccattttttaaaatgtctgttctggtttccctttagcaatgtctctaaaacactctaaggaatttcaatctctctctctctgtctctctgtctctgtctctgtctctgtctctctctctctctctctctctctctccctctctctctctctgtgtcagatgcccccgagggaaggtgtagtcttctagcacctctgcctcttcttctgtaccttgcatttgaacagttacatttctggcaagtcctctcagggaggagagttgcagcagagccctggttgccattttatgaatcttcactgcttttctattacctagttgcactcagctctaggagatgagtactcttgactattaattttttttaagttcaaaaatataaatgaatgtgatattctcataccaccattttatatttatttataagtggttttggaagttaactattaggaatgcctctgcatctctagatccctctcatctaaagatgtgataatctcttgttaagaaatgtggagcagacccataaatacatgtatttcttctcattctcttctgactttttctttacatacatgaaaacactatgtgtcagaaaactgatctgtttcatctcgtgcagctatgagaccctggaacaccttgagctgcttttcttgaccaggaatgctgaaggctgtgtttcctaacatgaccatttaataacactccttgactgggggtttgtcccctctccactgactctgctgtcaggctttggtgtgataagtgagggagtatgcataagtgttatctatggaaattattttcagagacagttttccttcccacctagatccttacatatattgggttgtagattttattttataaggggctggggaggtcctactttcattttttaaaattcttagcagataataattgtccatgaagtcaaataaccttgaattgtccttgccctggctgtccctttcctctccacctgtaacagctccctctgactttggcccacgccagtttatctttgctgtctctatgtgatgattattctggaacttctacattttttccatttttactgagtacaaaagatgatgatttggcctccaagtaaccttgcgtcctatcaccattgtgtcaagcactatccaaacatttaatgattccggaaaggcaaaaggaaagacttgattctacaatcttaaggggaaatattttagggaggaaaaagaccccttgcatgttcatagtgcatagccactggcttgttctatgatcagttattagggcctgaagacgtggctgtgtctgtactggccagaaatgacagcagcagctttcagttagctttgctttagtattgaaaacagggcacgagacatatttacatgttggtgtcttatccccgagtgagtgtggctgtcatgaaacccttgtcaattagagtcctaatcaccaaacattttataggagcaggggtgaaagttcatctctacttaaaagaataaatgtgctagagaccagttgttctgggagtcccagatctgcatgcaaacctcaccagggaaaacagtaattgcctcagcatgagagacggacggactgtgttttaagataattggagactgtcttttatgtgttctctttgctttagttttgatttcatacactttaatttgtgcctatctcttaattttttctcagtgtattctaaagaacataaaaccctctgaggccttcattaccacatgtgaactcacctccttcagtatcattggatgcgattgttcttgtcagtcttaaggaagaagtgtctttgagcaggctattatgttttagcaactctacacagtggggattctctaagttcacatttggtaaattcaaatacaatagctaactcctgtagatgaaaatcttaaagtgtccttcccgacattcatcattttcttctttccttcaacacagacaacattttcaggagccctctctttggcttttattcacactttctgttgttcctacctgtaacacattttcacttgtaacttatctgaatgttggcttaagccactccctctgcagcttcagtcagaagtggtaaagctaaaccctgcgttcatttgctgaaaacatgggaagttgtttatatactccatttctgtttctttttgcaaaggtgctgagacgtgagctaaaggagaaagagtattctgtgctgaacgccgtagatcaagctcgagtttttctggctgatcagccaatagaggcccccgaagaaccaagaagaaacccacaatcaaagacaggtgagcgtggttcatttctttagaaaaaaaaaaaaaaaaaagacaaccaaccaagcctttttcttgcagcatcaagcatgtacaaatgacggcctgtcacatcgggatatttagcttaaaatgaagcaggaactaacttctttattaggaaacatcaattcttaatatcattattagattttgcagtgttgccaaaagaagctctgtggtatattcaaaaacaaacaaacatgcagagccttggatatggttcagcagttcggcgccctggctactctaccagaagacctgggtttgaatctctgcaaccattggtaaccccagtcccagggaatctcatgacctattctggcatccaaggataccgggtacacacatggtatgcatacataacatgggtatgggtaaaccgctcatacatgttgtataaaaacacatgttgcccaaagtattttcccatcattcactttacccaggaaaagcaggcatgcagagtgccttactgtgtttagcagtgcagatcacttccttatgaggggcggggtcagtgggagcccctttcctcactgaaggtgaactctatatgtataacttacctcagctctcattccagtttaagcatcatgctagatcccctgcttccccttttaagatattgccttcctgcagcaaccggataataatgacaagcaaatgacagcgtgagccagctgacttcagtgtgactccccaggaaggctcctcgtggctggctctcctcatcaccaccctggtttctcagttgctcctctctgcatcctcatttctgccttcctggctgcactgctatgttttgaacattcagggttgctccaatctcgaaacctttgtgtgtctcttccctgtttctggaacattcctgctcctctcccagatccccatgcctactcctaccaccactacctccccacttctcctcccaccctcccttcctctctgcttctatccctcttcctactcctcccttcccttctacttgggtcttcatccaaatgttgcatctttagttcttcccagtgttgtgcccacatgtgtgcacatgtgcatcaatgtgtgtgtccgtgtgtatgtggaggacacagtcaacatggagtattttcctcaatcctgctttaccttggatttttagttttctactataaacggtccctatggtttggctagactgacccatcagcaagcttgggggtcaccagtcttgacgtccacaagcatgtacagtctggtgatgcctgcacagaaccttgcccagcttcttaacgcagtgctgggatcggaactcaggtcctcctgtttctgtatcacacactcttcccactatccatctccttcactgatgtattttgtagtgtctgggatgtgatccctgcctctcacatagttactaaatggattaaagtatcaacagagtacggcgtggggataggtaagacccccccccccccggacacatttcataaaaaggatttaggctagttgcagatgaagcctaacacaaagaggtaagaaagaaagcaattgccactacccacaataccctgtatttgtccaggggcttggttgtacaccacaaaggacagggagtttgaggatcagagtagagactactgtctccgtgcacacccttaaaatgggagaagaggtgattaggtgagaagacagccacacaggaaactcaagaagaacgaagaccaaagtgtggacactttgccccttcttagaattgggaacaaaacacccatggaaggagttacagagacaaagtttggagctgagacaaaaggatggaccatctagaaactgccatatccagggatccatcccataatcagctcccaaacgctgacaccattgcatacaccggcaagattttgctgaaaggacccagatgtagctgtctcttgtgagactatgccagggcctagcaaacacagaagtagatgctcacagtcagctattgaatggatcacagggcccccaatgaaggagctagagaaagtatccaaggagctaaagggatctgcaaccctataggtgaaacaacaatatgaactaaccagtacccaccccagagctcgtgtctctagctgcgtatgtatcagaagatggcctagtcagccatcagtggaaagagaggcccattggtcatgcaaactttctatgcctcagtacaggggaacgccagggccaagaagtgggagtgggtgggtgggggagcgtgtgggtgacttttgggatagcattggaaatgtaaatgaaataaatacctaattaaaaaaaaaaacaactttaaaggggcagggcgtggtggcgtacacctttaatcccagcacttgggaagcagagtcaggcagatttctgagttcgaggccagcctggtctacagagtgagttccaggacagccagggctatacagagaaactctgtctcgaaaaacaaaaaaaaacaaaaaaatctttaaaggacacttttgtagcttctctcctttgttcttagactcaggattttgctcagttcccatttccaaccaccaattgggggtgggggggaactggcaagagaaaaatgttacatcaatttaactttatgaggtttgtccttttggtttggtttggttttgcaaggaaccattttccaaccctctccttccttgatattattttctgtaatggtagcccattttacctgctgttaaaagtaaatggagggaaattatccataatagcttctatcctttttttgtttactgtgacttatgcacaactgcgatcagaaacagagactgtttgagcattagtcatcccgagtaatagtgaagtgctctgtgttggaggcattagtgctagcccaagccgtagatggcttttagttctacttaataagcagtttttgaatacgctctgtgcattatgccctagggtacaaagatagatccatctctttttaattctagaaaatagttttctccattatttttctctcaaacgtctttttcccttgcaagccccattccactcattttgttcttctgttatcaactttattaataactggtgttgcatgtattttcaaatatttgggaagcagtaccacccagcattatcatgtgtgagggtgcgcatacatgtgagtgtgtgcagaagccagaggttaacctctggtacctttcctttttttttttttttttaacctcttctttacctccttttgagacacggtctctcatttttacctatagctctccatccagctatgctgtgctgtctggccgtcgagccccaggtctacatgttgtctctgcctccctgtcagtaggattacaggcatgtgactttatagctgactttttacatgggagttctgggcattggattcaggtcatcctgctggcatggtacatatgttacttactgaaccatcagcccgtgacccaagtgatctgtctaaagaccagcactggcattcctttagaatgggacctggtgtagaaggttgagcagacacctgacgtcagtgttcgaccagtctgctccagtgacgaccctgtctcatgccacccactctgtgccccacgctcgatgtccactggacaccagacttctgctttctgcagccatgcactgccttgtcttactgttcacttttccagtcatgatccctctactctgctctccagctccttcctcatatactggcacagcacctacttgctcgaccaaccccctcccaagctcagccctgtctcagcgacttcttaagtactctgctgacagattcttgcctgatttcctagcactttatcatcggtgaaaccatgccaccaaaggctgactcgggcacttagcccaccctggggccccactgacttcctgtttatcaagaatctgaagaagggatttgaacatgaacagtaaatacaataagtgggacatatagaccctgttctgaacgcaggtgaagcctacaggtactttctcagagacacagactgacattttagacaggttgtaagtactcgaactccatgacctgtgaattgcgaacaagtaactaggtagaagtgacaagacagggacaaggttgacaggagtgaccacagccagatgacacaaaccaggggaaattaaaaaatacagatactagataagacctgtaaaatctgaagctatgagttgcagtttatttctgaaggcagaaggcataagaggtcttactgtattttaataagtttcctccccaaagtgaaaacaataaagaaattgagttaaatggggtatcatgtaactatgtggaaaactcagttaccagaacaacgtgcactgtttagaaatgattcaagtaaatacgatttctttttgtgcaactaaagtaggagatttaaagagctttgtgttcagtgttcttgtttgaacggcatggaagtaatctcatttaatctatcatatcgacacatttttccttttaatgcaaattgcttttagttgatcattatcatccagtgtataatgggatatacgtttcttatcatttgtgttgtttttttttccctactttttaaactgcatttgtgttcattctttgaaccaggtgaatgtgctagacagattataaaggtaccatttattattttttaaaaaaaataccaaatactaaggccaagagcatcttgcttggccgagcaaggtcattgagataatcaaaggaagatgcagatccagcactaagctgctgcttattcaccttctctcacccctgggctttcactggctttaggcccatccctgtaatttcaccctctccatctctgctcatgtggaatgctctggctgctgacctcctagctccttcttgactcccgtgtcaagaacctcttagccttgcacacacatttcttggctcttctttgtgctgccaacttcccttgctgttctcagagctgcatctgaattgtgtgctggctcaaggatctactcactgtggggtacacagccagggaccacctctgcctccccaccctccattctctagagttagtggggggcagaacatggcattttcccaactgcccatcaccatcaatagcaatttctaatgcattataacacaatatgatattttgttcattaattttcccacaaataagctttaaaaatgatttcagctaaagccttcctgttaccgtgactacagtatccttctcttgtgagaatggctcgctttatcctaggctggtcatctttgcttcatttaaatgatattcacaaatagtcatagaaaaatatagttcttagtgtaatgtgtttatctgtgtatagttagttatatgtctggtgtatgttagtgctatacccgcaattagttcaatgtgactggaccgggggtcaatgggaaataatcattttttttagatcagtgtttcctctttgggtctccgatggctagctgtgtgtattaacaacatttgttctatctcagtgtatgttgtactctttgaaataccaaacacaacaatataatgtttccaaaggccaattcctggcagtgtttctctcttatggggctcctatattgtaggatattgatgctcactgataattaacagggcaaggcccagctcactgtgggtgcttccacctctgggctggtgggcttgggagctactagatagtgggttgaacaaaccatgaggtccaagctagtaaacagcattccttcatggcctctccatcactcttaccttcaggttcctgccctgaatgggttcctgacctgacttccttcaacaatcaagtgtgattttagaattgtacgctgacataaatccttctgcccaagttgtttttgtgcatggtgttttatcgtgggactagaacccctcggacagagttatctggcagaagaacccagctgggcttggtgtgacaggctgaagggtgcttatccttttggagaactacagacatatttcagaatctaaatcacattgcaattccatgtcagctcattttatagcagcaatgacagatttgtgcagaaaaaaattttatgatcattgaatgaatgacggtagggaattgtcatatagtttaatagaatgtcctttttgtatggcttctccaagtaacttagggttccattgtttccttgtagccaataaaatgaggccaaattacatcttacctaacagaaataattaagctattaaactggcaggtggttttcccctccaggctttttgtttgtttgttttgcaagtaacaggcttatctttcaaatcccttcattgtaaaggtggaccctcatgcccctaccagcgtccttgcttccctgcttccccactcctaggccctatgggccccacaacccagtcacaggaggagcagggatggagctggcagcagcagctgaaatgccacccaggaacctggccttcctggtttcctctctgctggttttcttttccttagcttctttttcacaagggatgggagtagactgcctctctcgtcatctggagtctcttgaggaaagccttcccctcgtttaggttaagtgaggaggaatgaggctttctaggactggccaggatctatcctcagaagccccaggctaagtccatgagaacactctgcattaagagtgctttctaccacccattgtacagatagggacatttagaatgctcagttcataagtctatgcaagttagaagccaagatttgagtcattaaacttggtgcttgtaacctctagaggtttttaaatttacttctatcctcattggtatttctgtaggaaacttagcagcataattaaatgcatataccttctttgtaccctctgctacacttcccatcctaaagtcccacactgcttaatagagtcatacaccagttcaccgattcccttaccgagggagaaggtgtttaagcaacattagaatttgtcttttcaattttcacataaagagttgaagtatgagtaattgctctcagatctgtagagcacagcaataatttaattagcttcccaagtccaagttagatgggtaaagttgtaacacatgaaagggcatagaaaaatatgttactttctgtttcagtgttcttaactacagatagatatagtgatccaaccttgaactgaagaagcccatggattgggcagacattttttagaaagcaaaacttcttttagtggttatgaatatcactgcaagaaagttctgtgtaagtaaataagtcagcactctctctattgagaacagaagttagtgttatggacagacatggttttaataaattgcttgccagctgctactttccccagccagtgttgtggccatcaataaataaaacacatttgcttcataaaaagatatggtgacactttacagggatatattttatggggatctgcatccgggatgtcactttctgattttagcataaaggacaggaaggtgctacagcccttgagcagagtgtggtgttttttctggttgttgtttcttggttgggagctagaaacttctgagatgtcaccgtggttttgaagatggaaggccatcaaaggcatatatgtccctcttccgctgaactcatcgattgttttcacagaacataaacatgaaacgtacttcttcaataagaatagctaagctcaggtagaaagcttctgaaatttctgacttaaagatcactagcttttgtgtgttgcggggaaacagcccaaggtgtggggagaaatggatgctaatgtgtcaagaaagagcttttaaatctatggctcctgtcctctgattctttggtgtgtgttgggttgggtgggtagggggagatggttgtgggtcggtgtcttagtcagggtttctattcctgcacaaaacatcatgaccacgaagcaagttgggaggaaagggtttattcagcttaaacttccacattgctgttcatcatcaaaggaagtcaggacaggaactcaaacagagtaggaacttggaggcaggagctgatgcagaagccatggagggatgctgcttactgccttatttcccctggcttgctcagcttgctttcttatagaacccatggggtattagaggccctgggaatacatgtgagagcattgtggatcccttgtcctgctgacatcgaatgttctcagtatttttaccccattcagtactgtcttcctgtccccagtgacctgctcattgctgtccagtgtgacactgttgtcagcaggaggacattcagggagtcactgctgcagagagtcagtccggagggtcaggagttggctctctgggtgccacgcaagctgccctgctgcgttcagcttcttcctgcccctcctgctcctgccctgtgtatggctgtcattaggagtttctcccttagctcagcacactggcactgcttacatctgagagcatggtgggaatccttgtctgttttgtaggcagaataaaatctcagtgaccaccagtgattttctttctttctttcttttatttaatttaatttttttttacttattcacttgacatcctgttcacttccccctcctggttactccctctcctacagtgtttcccctatcccccttccccaacaaaacagtgattttctaatcagaattgccctcactgagacccctcagccctcagggtggtcctcctgcctctctcctcctccttcctcacctcatgctctgcagaaagttgccttttgagattctggaagatgtttcctaccttttttttcttgaactttatatatatatatatatatatatatatatatatatattttctctcattcccccctcccatgcgcgcgctctctctctctctctttctctctctctctctctctctctctctctctctctctctctctctctctctctctctctctcattcaccatactacctttagcctatcctcattgaaagctgtagttttctcatctgctgggcaatcagctgagtagcccctactaacttgtcaaccttataatttgctagatgagcataattagaagtcttaaccagctgagtgcacttgatattcttgtgatcttgtccataatgaactgttaccatctgccacctcccagactagaagtggacagggtccccttagccactgacagaccattttaaagagattaatttgatcttaattatttaatcagaatacttgggagtggaaataagatattccccattattttaatcagaaataccttttgattatgaagagaggggaggggctgtaaagagagagaaataaagatactggaagtgtgagcatccatagggaggcacaacccatcacttttgccagaatcccaaggaatgtgaccttttgcttactccactcagataaaacagaagtatttagggagacatgagtgtgcgctggagtcatattgaactacctttaaaagacacgcatgcatgcacatctttcaatggatgtaatttgtaacaagatttaaaacaaacttaaaagtgaagtttacaagtaaaataatagtcaatttacttgtttctcttaccttacaggatttcctttggtaaaggaaattgcaaagtggttttaggatgcacactgataggtttgggcattagatcgaacattagaaacatcccaggtttcccctgcataaccattgttcatttattgacttatccttattaaacatcctccttggagaggtctcttgtagagcctacattatctctgtagtcaactttggttttatcagtttttaaattccttgagtctcaactatgcaagcaggaaaggccaatcagattccagagtgaatcttcttttatgtcccatgtccccttaatctaaccctgtcccatgtgactcagaaacaccaaaagagagtgagtaaatttttctttttttttttctgttgaactccagtggtctaatcagccaggattatgcggacaatcactggaggattccagagctccagattagaactagacgcttcactgaggaccgactgtgtgatgtgtgtgtgtgtgtgtgttttgtagttataaactcagcttctaacaaataagagtgagcagcatctaggataatatatcgtactgctagaatttctaatcttttcttacggagagttgtatagcagtgaaatcctacttacaatctttttctttgtcattgttaacattaacctttcatgtattgataaagtataaaagactgcaaataaatgcaaaaaggaccccacatagtacacgtcaaatatttggaatgaccataggttaaatgacttttgaaggtttataatttgaatatgtagcttgacatggggttggcaaggaggggaaaaatgaagtgggcatttaaaaatggagtttagtattgcttttaaaaagtacagctaaagtatttactgcaagtcagtgacagactgggcccctgtctgggttctcaacccacatggaaaggaaataaatgttcgtgacataaacgtttagaatcagtagtaacgagaagtagaagccgggccagtaccaaaactaagaaaaaaatatgataaggttaggaaatcgtccttaccaaccttaaggttaacgttgaccttaatcatccttaagaccaggatgactccagtaaatgacaacatcactattttatataagaattatgtttaaaataaatattttcacaagcacacacaggggaaatgtctacctctcgtaaacactgaagagtagagtgttttcctagaatgagagaagaggattccatggagtttcctcttggaaagacaggggtgaagtaagtattcatgctgcgtgcccgtgcttgagcaacctgcatgcacatgaaggaagtgcttctgcttcggaagtctgggcctggctcctagcctccgtctgctttcctccctctagtcttcgctcccactgtacagaagagcctgtgacagatgcaggacaatccacgagcacacacggagagatataaagactgctgagttttctctcctcttctccgtgcagcccagactggcctcaaacttaaagggcagaggttacaggcatgtgacaccaactttacccctctcggtcttctaaaaatctgtcgcacattatagactgtactatttaaaataacagaataaaaatagaaaacacacaagatatccataaagtatggtaggacgtagaatatactgtcaaatgaacccaagaatgtaaatataattcttccttcaaattctgggcagttggatccccaggcctgaacaggggagggtggagagtttgggatgaatatatccatacaggtgcacacagacactgggtgggaaggccagtgacaaggaaagagctcttctggcatcagaagtgcaggcaaatgggtttggctttgtcctcctatttcccctctcagctcctgttcctgttttcaaatgcaaattagagtgctctcttatcactgggctcccaggtctcctagactgagtagctgtgttgtacatgggattgatacatcaacgcagtggaaggcaaatgtgtctttagcttcaagaccagcgcatcactgtgttccattaagctaggcatgctctactgacagatgctgggaccactggggcagtgtgggcatctctccaggaatctccagcttgatgggccaagtcactatgctggagtgtgggtctctgatagcagcttctagagagtatcggtttgaatcagctctcagcagggtttctcagacaataccatgctatagaaagactggctaggatgcgtctccacccggggcttcagaatttaccatagaagcttttcatacttgaaaaaaacattcatcctttggttttcaaatgagaaggttttgtttttaaagaatgcatcctttaagaactttattcttttccctgtaaatcttttctgcctcttcgagtttactttctttcctttttcttcttctctttcttctttgtcccctcaaattgccctaacttgaacttttatgtattgcttcattttatatgcctcacaaacgtggacaactttgggtttgttttgtttgttatcctctcgttggctttgaacagcttctaaggcttgctgcagcgggacacagtggtgttctgactacagagtgcttagtgggcacaggtcctctgtggtaaacagatggggagtttagtgtcgagctttgctcctctattggcgagctgcttgagaggggattatatgataaaccaacgaaaggactgtacaaagagaagaacttccactgggcgaaaatgtggcagccaatatgggatgtttcatcccaggatgagaaagctctgtgtgcccctctgtggactgatatttagtggttggtttagaaacagtttgtatttcatccaagggaaaccactgtgagtaagctgtcttgcctcgaacatgaacaggcagtctgtctgtctgtctgtctgtctgtctgtctgtctctctgcctctgtctctctgtctgtctctcactgtctctctcttcctccctccctcctcccctccctcccacagacattgaaacacaaatgcttaaaatacattcttcgcaaagcccagtaacttattaaccagcacaggtgtagccctcataaaagctactccacttctcctgaggctgctaggaatgaaattttcatctcacacataacattttacatttgtgtaaaatataaaatataggtgttatatttagcattttacagatgtctcgaaggcataagtatttagaggagcttgccttttaatgacactgtttccccctctctggagtctggctgccttatgtgttggttaaacttattggcccttctctctagacttcctggcttaggatcctaaattggctttcacttattattagtgtgtgtgtgtgttagtgtgtgtgtgcatgtgtgagtacgtgtgcatgtggtgtgggtaggtgtgtgcatgtatggttttagagatgtgtgtgtgtgtgcacgctcgtactggtgaggctcagtctggtatagtcagagtacccactattttggtgctttcccgtctcaccctggactctcctacccagtagtcccttgagactgggttcttcgtaggccatttggtcacagtctgagtatcagtgtttaaaattttctggaaaattaaacaaacatacagtctgtgttctttaaattgtcttttgaatcacacttagatgaggacagagaggcaggctttttataaggatggatattaaggtttaagaacgctggcttccgttcattttatgatgtcgtttatacttaaagatgggatattattccagataaagacttaggatgagtcatcttaaaacatttggggggctccagccatgggagactacagccctgtggccattccgtttcaagcatttggagtagtattctgcacattatgagacctttagcattttatcatgaaggaagctttgtgttcagtgcgcttgtctaactacaggcttatatcgggactctatccatattcagtataggctgagctgtggtgtttgctaggtcagatctaataaatgtgcttttgatttctgagattcccctcagcttaggatgggcgtatccacaacactaccttaagtcccgaaacatctgtatacgtgtctgccttagacaaccctgccttttgccatatctgtgtgggtttggtctgcctctctgtttctggggacagtcaagaaggtacacttaagccagctagaataaagagggggtcctcaagtgtgggggtgagagtcccagacattcctatacttgggttgtcccgctttgggagtcactctctgtgtccaaatgtgtccttttgtctttgctttgttggattcagtgtttctgtgcctgagctttgttccaacctgactttggtttctctgtgcaacttttcttcattgctgggctgtcgcttttcttgctagccttacattgtgtgtttcctttccattggaaaggcttagtttatttcttaaactcagactcctggctctgttacatgtcaaggatggtccttgtaatcttgcagacttcctggtgaagtgtggataaacattcagtttccatatgtctagtcttcggaaaatgtcctttgttaaatatgaacaggcaagcaaatttacagatgatgaagtctctaagatgtcatatgccttgaatttgttctttaaagaaacatggtaaattaatctttttttaaataacttacagctaatctttgctaattatgcttctaatttcacttgagaacaatgaaataaaaaactgtctttggattttcacagaagtaaatttatggtaaaggaaaaatgttttctttcttgagttattttgctacatctcaagccttacacgtgttaaagtattaaaattcagaagtttccatgaacgttaaaccacttactaatctgcgcaaccattttcttttccttttgagtatccatttagatgtaactatgccttactggtaaacgcatatagataccattgtaactcagcctttttaatctatacactagtaacccttttaacagtgagattcatacttggatttgaagaatacctgtataactgagtagacacccaggttagaccttctcgtttttatcaacagagttgactcctgaggagagagcccagaagatcgccaaagccatgcgcaagcagtcttctgaagtccgagagaagtgggaaaatctaaatgctgtcactagcaactggcaaaagcaagtagggaaggcgttagagaaactccgagacctgcagggagctatggacgacctggacgcagacatgaaggaggtggaggctgtgcggaatggctggaagcccgtgggagacctgcttatagactccctgcaggatcacatcgagaaaaccctggtcagcaccactgcctttgacaaagaatatttaagaaatgtattcttgttgttgcagagaacacatataaggagacccacatataagggattcttataagctggtaccacttcagctccccacctaaatcaggaattatggcagatgttttccatatataaccccctcaaaaaaacaagaccccaccaagatggctttatgataatttagtttgtttaaacattttaaaaattccattcaagtatccctaaatagtgtagattaggcttaaccatttaaaacaagacaaaacctctcacaaactttttaagttcaatttgtttctagatatgccttccatttcatttacttttgtttcctattcatttgtttttttttttatattgtttattttgtaatgattcctgcagcctagatttaatagaatcgtgcccatgtggtacagcctacaggtctgtctcctagaaactggtggttggatttacaggtttaataaaaaaacaaactgccttagtgggaattctcatctataatttctatcttattgtctaagtaagtgaaaaataaatttggttataaattccatttgtaatcaggagttgcccgaggttaaggatattagttctatggtgtaaagcagctttgcttactcattctacattttcaggatgtgtgtgtgtgtgtgtgtgtgtgtgtgtgtgtgtgtgtatgggtgggtgggtgggtgggggagtaacagaatttaggcagcagaagacacagagagaaactttagagaaagcaatgtttgtatagacatgaatcacgccagagggtgagcactgagacaatcagaagggatgcatccaacattatccatcatgcatggagttttcattgcaaaaggtacacacatcctgtgttcatagacaccgggtaacagtcttcctttatatgagtgtggctgagtggaaaggcaagctctgggaaattaacttaatgctcaggccagttacaggagtgagagcatctgtgtgtgtagacaggggagtagtgacagccagcatttcttaaagctgaattgttcttagtcatttcacgtggttatctcgtttaatccacacactgtcaacacggtaaggattatttcctgaaggcaaaactgcagttgtccaagcccacacagctagttaggtttagggtctctgtgatacttttttggtttttttggttttttttaattgtccttctctttcactgcagagatctaatgttaaacacagccttgaccaaccctttgaatttaaaccctctaaaattcaaacacttttaaacttaaaacttttaaatgtaaaacaaatgttaacaaagaatatagtgttctccatttctgatgatagatatgcatctgcctactctataaattaagcagacctcttcaagaacttagagcattctgaaaaacatttctctggatacatgtgaatttaacatagtctaagaaaaaaataatcattcatttatcagtgcatctttatcaaatattggacactggatttttcctacttgtttatcttaggtagtgtgggttgtacttgggccttgtgtattcgggttaatgcagcgccactcagctgggtgcaaagccttctttttactttttattttgatacaagatcctgctagggtgtgtgggctagtcttgaactcactccatagccccaatagcccttaatcttgcaggctttctgcctcaccctcccatgtagctgttattacaggcctttgacatcaaatctggcttaactaattttaaagcctaaaaagtctaaatacaattagtatcaaaaaaaaaaaaaaacccaacaaccttaatacctccggatttgagtgggaacttacctttttgaatttgaaagtatcacatgataactggggaaaattagtgtggaaaaaaataaaaatttgtatctgcagaaaagaccaaagagtttgagaattggcagtcttactaaattaaaggactgacttgcctctccagccaaattcttttgttcaaatctacttaagtgggaagcttaaaaaaaaaaaagcaaaaacacagaagcaaatagtctaatgggaaagaataaattggattaaattacttttatatctttagaggtaaaaattaaaaattcaagtctcactgaatcaaatcaagtaaactcaatgtgtgtaatagtttacattttccgtaaagtatatcccctctcttactgtaggcatatagagaggtaaaacctaaatactagaagttgcaaaatattagttaatatgtcaaagctggaaataaaatcctcagaaataagtaaataatttcagttgctaaagttgtctttaataatgctggttttttgtttttttttttttttttgcatatataccttgtggtaccagacgggtttgagacacacacctgccaacagtctaatgagcacctttgatagtagcagatgtttctgtttttatagcagtgagggctacgtagacttgtattctcttataggaaaatacagtcaaaacatgatgaattagttctttatacaagaacacatggcagttctgaaagccatttataactccatttatttcaagccccaatttggaaactcttaaaaggcaaaagataaacttccttgatagaaagtttcctcattgccataaaaacaccttgccataaaagtgcaaacagagccagaaagactttcctgttaaagctctgtcaatgtttcacctatgacttgtaatagaaacaaaacaaaacaaaaataggatttttttttacacagtagaaatataagcttctttattgttccttaaaattaaaaaaaaatcctgtcctgaaattatgcatgaagttataatcaagttctaaaacacctttctaaatttctaaatcaccatctgttgatataaaactggttgttatttaaaattaaaaacctatcaaatagcatgttaactttaaaattttaatatctaaaactaaaaggatattgattttaaaatatggatccagttttaaggtctttgaatttatctgtgaaagagaatattaatataccaagctaaaaaatcccagttaaaaactctagaaacatttgaggtctagcatgtgtgttcagctgtgtctgggagaatctgacttgtttcagagtccacgctgataaactctgtgtccttccctctgtctcccacacctgtattatttgttaatcctttgcacctgtcatgcctgtcactatgtcactgtatgccccataaccagatttatacattgtgcacattgcccaattacattacaatctgcgtgtgcattttggaccatcttcagatgtctggcatcggcagggatagacaaaactgactgcaaatcaaaattctttctctttccatgttgtagcaggacatgtgtcctttggggcttcctttcttctgacttcttttgatacagtggtatctactgaggttggaaatagatcttattaaacacctggtgactcccatgtctacaaattcaaacagcattcataccctgctctctctgatgcctgtattttacatgttggcttctggctctcagtctcttctcatgtggtttgttcttcaactctcctttgaacttaaccgcatgcctttaggcagagtcaagaacttgaaaacactaaagtatattccctgtttaccattggaaatatttgattcctgaatattgggttttagcaataattataattcaggataggttttaggagaggcaaaattttatccctgccatcttggaaggctgtttatctgtcctaaaatctaacataagaccaaggaacaaaggaggtacattccattccttactataaaaaagcatcagaaagacagcagatgagtgcgtgcgtgcgtgtgtgtgtgtgtgtgtgtgtgtgtgtgtgtgcgcgcgcacgtgcgcgcaggttctaaatgtaagaaagtgtcccctcccaagcagcttcttccatggggcaggaggaatgtgaatgctaagggataggaactgaaatctgaggtgtccagcagtggggttggaatagctctgaactgtcagaatagctatgtcatgacatgtgacacgtgtgtggtttgtacgttttgatatgttggctgaaagtcatagctgggttagtgacaccgaacagaaaatccaggagtgctggggaaaggcctccaggcaaggctgccgagggccatctcctcacggaggcatttcagcatccagtgggatgtagagaaagacttgtcagagaaagcgaaccagtgctttagaagacaggtggaattcagcggagaactgaggccatgactatatcattatgctgtttgctctcattggctttaaagtctagcttcccttttcatatgcttgcccaggacatatactttttacctgggtctattcttcacccagaggcagcagttcaatactgagactcagctatagattttccatgatgctctgctcttcctgcccatcccctaagcacagactgtgatcctagcgggttcagggagatacagaacttttctctcctatccaataactatagcttagtagtgaggaaagctacttttactcgacccctaatctaagcatgactgagatcaagtcaacttgttgtgtctggtgaaataaaggagtaaggcagccatgcttcaataaaaacagcaaatggaccatgcaacagtaatcctgtggtttgcatattatagactagacagaaatgtttagtgtcttaaatgagttcacaacttgagtttgtctcattgcccacatactttaaggctcagggagtctctggctgtataggttattacaggtctgatccagtcagctgctgttaagtagtgtctctacttgacagcatcactatggccttcctatggtcttcactaagaagatggcaactctggcttttgagaaagtctcttctggcgacattctaaaataatctgttttctaccaggcgtttagagaagaaattgcaccaatcaacttaaaagtaaaaacaatgaatgacctgtccagtcagctgtctccacttgacttgcatccatctctaaagatgtctcgccagctggatgaccttaatatgcgatggaaacttctacaggtatcggcttagccccttcagaatgctatctaacactgcataaagaatacagaacaggaatagaaatgtcaggctatacaattgttgatttgtatttagtttcttagtgtaacaattctttgtggggttttttttttaaacctgaaaaacacacattaggatgtacacaaacagaaacactcagatggtctttaaaactcacctcagttgtaaactacatattatctcgtctctctctttactgagggtgtttgataataaatttagtaggcaggtacttgtctttctatatcttgaaaccaagagcatcatttagttatgagtatggatttcttggttataatttatatttacactgtatataatacttgtaaaaaatacacaaaagccagtaagttgcagcaatgataacctggagtcagccacaggatcctttgtcctgttgtaacctgtaaagaaatcattgtcttactttcattatgtgttctttctcttttgaaaaagttacaaagcttttcttcgttttctttacattgttcactgtgcaggagttttctttctgtttacagaaagcacacctgcacttagtgtctagatccgaccttcccaaggcaattgtttcagtggctcctgaccctacttgtagactccagattagctgagccaggactcatgagtgttccaggtctaagcattggctgactactgtccatgccaggcagcagttcatggtacaaagggtctgggacacatttgctctccacctcctatcagtcaaagcagctatgcctttttgctgaaaatccgcaggggaggctgtaactagaagagtaatagtaaataattctgactaatttctctacaatataacatgtagtaatacaaatgtgcagttccgtcattttatttgaaaagtactgtacattttaggttataatatattcttacattatccaacatcaaaatgcataaggaggtgactgagattggacttggtatgtaaatgcatttgtaaacaccagaatctgtccctagcaactcacttggtagaggaaagggccaccttctaaaagatgctttgtgacgcctgtgtcctgaccacccgcacgcctctccatgtagaatacatgaacgttaatttttttttttaatttaatgttacatgttttcttaatgaagttgaaagtgtgagatgtgaatattccatatgtgacgatctttcctatccttgtgaaggatgtcaataatccgggattagtcaggctaagcatattaaatttgtaagtgctcacagagatgtctgaacctaattctttttgcttctgtcccatctctctgcatcgttatcattcattatactcatttgaagattgcttttctggtctttcttgatttccttttgctttgcctctgttatcctcatctctacagatgtcagatgtattgttagatttgatgggaacattcttccacctttatctttgatgttggtagctactagggttcaaatatcagtcctggataagcaaagacaaatccctgttagcagacagtgctgttaaatttcaggactagcagcttacttataaaatatgacatttgagcatctctcataatgaataaagtacactctgatgcaatttatgtagctgaccaggagaaagctgagatgcccagtgagctaggcagatgcaagttttatttacagtgtgctgaaaatgaaattgttcattcaaatggaacagctcaccaccactgcacagacaaataacagggccagggaaatggaaatgtcagaaggcagtatgcaattgttgttcatttgcatttggtttcataactggttttgtcctgtggcacggtaacaatagaatccacactaacaaccatagaagggagtcatggctgggatgcactggtgacacattgcagcctggagcagggattctcagaggctcctctttcctttggtaaagaccatcagatgcaaacttgtagggaaatcagaagatgtttcacacccagcttccagttttctctcttctgtcatctcatatactcatttatctatctcccatctgtctgcctgcctaccttcctacctacttatcaatatgcttatcaacctgtgtaaccatctaggatcatctgcttaactgcctgtctacccatctatccatctgtttatgtctttatctttagagttctctaagctccatttcctacacattctctgtggtacttttatcctctttttttataaaagaggcatggataagggctcctcccatggccacatcttaagctgtcttagaagcatgcttcctgccaccaagttggggagaacagttttcaggcataaagatgggctccgatggccaaggcatgaatattcactttgttctgactagttgtgtcctctggcccttccttgtgtcttgctttcttcatatctaaaatgataaccacaattaatattaagctaatgtggttattgtatagattgaaagttcatatagatagtttagaatgatctctgactttctttaccattatttaatgtcagaagttgattttcatgctgccgcattaataagaagagaagttttctgcccaaacagtaatgaattgatagagcaacagcattacttgataaagtaattacgtcaaggatgttatgaaaaccattgtcttgaagtcagtcgtttcatctggcgtgtgcttgtgtgcaggtttccgtggacgatcgccttaagcagctccaggaagcccacagagattttgggccatcttctcaacactttctgtccagtaagtatcaataaatttgagtgttcttgcttaacttgaatgaatttgcaaattcgttcagttctgcccaagaagctctatctttgctctaactatactttaaattaagagaacatgttcatgaaatattacttattgcttatgtaataaatgcagtatgtaaattggtaaatattcaaaggaaaacaaaagtaaatttgtatctagatatgttttctcatttaaacattggttatgataacatatatggtatttgtcatgcaaagcttatgaatgtctcataccaaaaatttatgctgtaaggttttttaaccagtttatttcaattctctctctatatatgtatacttagttttttttttaaagcttcacatgaattttaattcactatataaatacttaaatgagaaaatgttggtttactaagctcaaggtagtcatctcatggacaaatgttatacattaagtgttgcaccaaggtaggtttaatggaacatcctccaactggaacttgtaattttatgtgcacttcatgaagtcttagggaaataattttgagccctgttttatttatcatccacttctgatgatacttaagaatgctgaattttgaaactcccaaactgattttaaatgttaacattgtcttttactagacctgagaatttttgaaaattaatttcttgatctctgcatacctatttcctcagattgcctcaagaatgaaattcagtagtctatcctgttagaccaagcacgcaagccacaccttggcaaagatgctttcagcacatattaatgccttttctttaatttcctatgggaagtatatggaaaaaaaacaagttgtgtaatttaattaaatttaagtaaattttaagctcaaggccaagaatacttctcaattatggaaacttattttctctgaaaccacagagaaagggtcagggtttatttacttttgtattcttgtgaagtcacatttgtcattttctgtcccctacctctaagacttacccatcttcagttcctaagctgagcctgtgggtgtttgtctctgagtgaggtatagccctttgtggtgggtaagggcggacctttttttttaatgcttaacatatggatagcactattgttgaaataaatagcctcttattatactcattagatattaagtattatagatttctaaaccctatagaataactaagaccaaattgaagaagcatttgtaaataatggagactctgtagttcaaatgatcagtttatctgctaatattgatggagccctacctttccacctggcaacctctcccatggaaatctagttcatgtttcttcagtcataaagcactgcagaattgcaatacactacatggtgttcaagcacgtggtcttcaaccgacagtccaagaagcttggttattcgaatcaaaataattactgaataaatgaagaagtgtgagaaaacttgcaattagtacatttaataattcttattccttgctgcttacggtctttggcttgattgtgttctttggactttacccatgcttgttaaaaagcaagttccatgaggcacacaataaaacctgacctatcagcctggtgccaccatgaagtgaggctagctcttatgagaagtttagcatacctgagtcttcatttctgtgtctgtttgtgaatatctgtggacacagttgtaaagatgagtgcttgcctttgatcaagaccagaacaattgttaaggaggaagtttgctgagctagtttttggaaaggtgttgtagtatctgaactacaccattttgaaaaggactttgggcagcttcttcttttttaggggaggggggctcatatcacaggactctctctctctctctctctctctctctctctctcattatttatttattttatgtatatgagtacactgttactctcttcagacgcaccagttgagggcattgattcccattacagatggttgtgagccatcatctggttgctgagactagagctcaggacgtctggaagagcgggcagtgctcttagacagtgagccatctctccagcccttgggcagctatttttaactctgcgtatttagcttcttctccattatactggacattggtgtgtggatcttgctgcattttcaaaataaagtttggatttgggatgcttggcaaagtttagaatgttgcatatttgcaagatatcaatgtgccaagaaattatgaaaaaatagtgacgtgtctatatgaaggtctagagatagttgtaaactttcattttaatttacctggtaccttgcttagcaaaattcttctggttctaaattcatgtggctactctacttaaataaacatttaactaattgatttactaaagcactaatgtaatgtatctttacaagtaatcagtaaacagaatttcaaaaaggaaagaacttccattaaaaggcatcatatctcaatcgtggcaaacatctcaaacatactacaaacatggaaaactgttttttaaatactgcggatcaaaataaatatctgatatttttcttagatgatctgcttgcttcttaaaaaaccccttgcctatttttatgttgaattttctttctaaaaccttcttataattaaatttgcttgagtgccatctgttcataatagctgagcctatgaatatggtgcaaagtgaagaatactattagtgatctagaaattccatcttgggaactgtcattttaaatctgaatgtacagcatatagggagcatgctttgcagatggcactgtgttctgtgttgcaatgtttatgaacaataacctgattttgtgaaagtgttttcattgttagggtctgacagaatcggctctggacgttgagtcttggttcttttcctcacttcacatgaagctttaaagctgtgctgcttggcctcgtgcttttcttaattgcaggaatccagctcagagccagaacgggtccctcaagagttgctccgaaatgtgttcatttgttttacattaaggtgtaaggcttgctgcttccaataacttccttttgtttcctcagcttcagtccagctgccgtggcagagatccatttcacataataaagtgccctattacatcaagtaagtccacttcagttctcttttatgtaccaagaaaataaagttttaccgaataattgaagagcgctcctgctcccctatgtaacttgttttgttgttggtcatttttgtttgtttgtttgttctgagacagggtctccctatgtagtcctggctggcctggaacttattatgaagctaggttggccttgaacgcagggagatccccacccccacccccacccccagcctttgccttccaagtgctgggaataaagctgtgtaccggacccagagggtctgcggcacaaacccagctccctggacgttttaatccagaattcaatccgcttaccaagaggaagatgtgcatgataataatgggaagaaattaattttaagatcagcgagttgtccttccttaggtctttctggccttggggacaggtcactgagttgctattttatcatcatcttcatcttcctctttctcctcatcataaggttttttcagcctagtttctctctcctgttacttcttatgtgacatattctgacccttatctagtttgcacaccatctcaggatgctggtcctttacttactgtatactttgtcccagaaaagaatgatgaagcactcctctgttatctctggaaggggaggttagtgaagcagttgctttacaacgcaatccagcactaagcattgtcatcgaccctattatgtattaggagaactagattgtaattctgagagtgcacactgagtatcaaaagacagctgtggctcacattagctgtgtggccttgggtgagttgaataaaaaaaagtctctgtgccaagatctctttgtatggtgtctgaaactaactgtggtctcttgaaaatcaaagtgtgttctcttaaaaatcctatttcaatattaattgactttcggatctttgtttggaaaaagcttgtgaaaccaatatttgttgaataggacattttaatatgcccttccttctatcctgaaatccattcttatttttaaaacaaactggtcatcatctataaaaatataagcagtatgtgttacattgtcttgtgagaattgaactcttttgttcatagacagcatttggtatattgagttgtgatggattctagaatgaggcatcaaggcaattgatgagtgtgtcatttctacagacaggaatggaaaggactccaagactgggtgagatgatttgtcttggttgaaagcagttgtggccatctaattaaaattttaaaatttcttagctgttttacattttaatttcaattaataataactttagcaatggtattgaagagctttagtctgcttgggtaaatatttacctgaatcaaataataaggctttagttataaatctgagacagaataagccctccccttaaagaagtccaatcctaacccctgggactttgactcagttctctttatacataacagtgttgacaacaacatttagcaacagtctccaggttgtaggctaccataggcagattatcctgatgtcagtgaaatcatgtgagccttttaaaaggaagaaagcagctgaggagaagccagactggaagagggaaatacagatgcaactttgaaaatggaggaagtggaatgtccttctgggaatagagacaattggaagaagctgggaaagaaggggtgtggtccttatagacctcccagaagcatccatgccgtgctcaatgctagcctttggaagctttttgtgtggtagcattaaaaaatgagtatacatacagtcccaagtttagaaatccataaagattgattaaaatgaattcatggatagtttgacctagactcctctataatcagatattttaaaatgtaaacgcgatctagtaaaacagaatttgttttcactagatagagaaaattggaaatggcttactcttttcctttgttttgtttttgtgggggtcgggaagacatctacagttcatttcacacacacacacacacacacacacacacacacacacacacacacacacttccattagctgaagaatttccatttgtatacatcagtaatagatgacgaagaattaagcagttggaccttgtctaacccctggagtttatgttgcggcacagtggaagagtgttcttgctcagtcagtcaattctcatggagagaaaacacgtgggagcaaagttggcctatccgacatcttattgcttgctcataaccaacactggaaaaataatatataaaacagcactggcaattctttaattctttaatgtttaaaggttaagcttcctataatgttttctatatcttagtaaatatcagattttcttttctctttttagtaattattacttggcagtttcatacatacattctggtaactgctcatctcctcactctctcctgtccttttcccacctccattaatcccccctcctaccaagagctcctcttcttgctttcttgtcttttgctttgttttgtttgtactttgtgcctcagatcctccatggctacccacctggaaatgggtcattttcttaaatacatacagatttagcgttaaatgtcttttatggtattcacaatttagagcaaagtctccgggttctataaaattcactaatctggcagtttttcattgtttactctgttatgcaactttccagtttatttccccatagaaaaaggaacattaaacttgggaggtagagtttagagtgccagttttcacttagaattgttacgaaaacaagagtcaatccttgggtaaattcataagcaagtaaatgatgaatgaaagaacttttaatgtgtatttcctcttgcatgtctgtacatataagtagaaaaaaatgtttaaaacctacttagcattattgtcacgctattagaatttcctggggcaaagtgagtgaattaatttagctgtcagaaaatagtattcaagtagaaattttaagcttgcattttcgtacatgtaatgctggagtgcagcaagagacttaaggagaggtgaaacttattttggggttatatcttaattgtataggtgaattaaaaatataggatacagatcgagatggcccttcattagcgttttgaagttcatggtagtgagaggcatgtctttgaagagcatcaggatgtagatgtgaactgtgagaacatgtctatctggcatgactctgttactgcctgtgatagttgggtgcctggtgcactaacaaatgccagagaggaataaataaggtcataaagaaaaacaggtttaatcaaaatgctgagttgtggagcctggtcctaatggctacatctacaaacactccctcacctaagactcagggaatattgcagaagaggtggtggaaagattgtaagagccagaggggatcagggagtttactctgagactgtgtttcctagtaacattggaagctacacccataaagtctcactgacctatctgcccaaacaggagcgcaaggatgacatcagtggatgccagcctgactggaggaaaatccacaggtcctcaacactggacaaaaaactataggcgactgaagacggctgggagtaggcgaggtggccttccccagtgaagagaataccaattggttgcctagggccttacaaacatacatacaaacaaacatttagcagcttatactttggagtgtgtgtgtgtgtgtgtgtgtgtgtgtgtgtgtggtatagagcatacaataacaaatagtgaggatggcagtgttgtttttccctaaccaagggtagggaagctgggctattataggaaaccctaatacccagccagacaacaaaggggaagctcgtgaaggtgtttctctaccagcaacagcttaagtgataaggacaacttatttttaaggattcttgaaagttcaaactagaaccaattgaatctatagcaatggtttaatgcccagtacaagaaaaatatgttaccctctacatctctccctacaacacatttcctccttttcccttgtccaaaggacagattatatctctgagctcctgatttgtaagtagaggcccacaggacacactgagtccctttaaaggggaaggctgtgtatgtgtatgtgtgtgttttgttttgtttgtttgttttgcgtcccagggacaaggcaaaaggagatggcttccagcagtgttgatgggtggtccccgttcccttatttgaggatgagagggaggtggagatattaggtggcagttgggggtgccttattagttctggtgcccctgtatctattgaggtagtgcacatgtttattcttctaatcaatctttagtgccctgtagcaaagtgtcgcctgcccctccccttaccccaggttcattccaccctgaaaattaattctgctggtcctttaaagccaagaaccaacacagcttctcgcacagttctataccaactattctgtcatccctgcccacagtattgactttctgaatttagggatgtagtgaacctacttatagctttgcctttggacttgctcctgaatctcaaattatcttaaataaactgtacagtcaaatccagttctttgctgtttgtagtttgtattttcttcctcatgtcctcattaccatgaggagccaggacatttttagggttgactctggccctttacaatctgtctcacttgcatgaggagtaacactctctgttatggaatgttgactgtcaagccctctccttaactctgtgagtttctaattccattccctcccaaaaaatataatcttaaatttcctgcctttaaaagtccaaaagacaaaatgctgtgacgaggttcgagaagttttctattgcctgaggatcatggggttactgttaggcttgctggacagtgccttgctgccccagcagaccctcagcctatgcaatcctgttcacagtgaggactcaagttatgttggtgagcgctggggtactggagtttcttcttatggggcacactcggcgaaaccaaaaattgagatgatgacggtggcaaataccatcttttagggctttgagactgtatcacttggatgactggcatcacttgggactaacagcgtttgtttcactatatagtttaggggcctctaaaaaattgattggttattggattactaatccaacttttataaaccatatttaaacaattgttacaataatctcaaggcttatgttttatcttaatcaggtttattatctgtgtttttttcttatcatttcttatcttctgtcctattacataacatccttaggaaatgtcttatcccttaagttagggcttttccactgggaacgttgtggcgtgttgacagttttgataagaccagtttagatggaggagaaatttaggagccaaaggcaaattgattgagtagataatgtgacagcaggaagtttaactattgcataatagatggtaatggtaagttttgtttgtggagaagcgggaaaagggtatgtttaaggttatggtgtgtgtgtgtgtgtgtgtgtgtgtgtgtgtgtgtgtgtgtgtgtgtgtgtgtttggcaggagaattgagcagatcagttttattgtgagatgagctgataatatagcacatttttttccctttgaatcattggtggggaattggccactgctggtatcagtgactttcaattgagggtggcaaggaaggcgggtagaagagagaacgttgtggatttggaagtagggagatggaatctatcagtttatagtttttcaatgaagtgtgagacaaaggcaagatagtatcagggaagggaacttccttttgggtaagcaaggagaaggaggaaggaaggggtgtgtgatcttggactttagggacactagttcacttgtttgtaggcaggcatttgaagcttggaatcaaatgtttaaagtagaaacagtctgtatgtagactgtttttttgggtttttttgttttttcttctccatattcaggcgcagctgctttgattcagaaacggcaaagtaattgagtagatccaggcccgagatttgccaggggtaagggggaaggcagagtgataaaagttgtttgtagtgattataatgatggactgtgggctcaaatctggatggattcatcaagaaatatttaaaaacgttaattctgcaaatccacttccatatcaagagctcaggcttaaatcagaccatctgtgttcagatctccatactgctcctggcccgaggccttcagtgagttatctaagtgccttctctccactgtgccctcccacatctgaaaacagccatcagagtcccctaagtcacgggcagcatcataacgtggactgagcttttcacatacagaaaagtccaagctgctcactggaatattaggctaatacctaatattacttagtaaaacttgattttcaaaatgtatagaatatgtaagccatgccttaatgtaatattatcctattacttaatatccctcagcagaagtttgctcagaaatccatatatttcctatttgcctatcaaaaaggacaccaaagctgaactgtgcagttggttgcttcatggcctctctgcagtgctaatttcgttcgtttgaatgctttcctgtatgatctgcattttgctttctatggcatatcaaaataaatgtaagtcccagggtaccctgtagacttttcctcatcaaaggcttcaacagttttgctattgtttcccctatgaaggcaaacccttggatggaaggccgtcctggtgagaggtcacttctcacactatcctttgcttcaagagattttttgaacctaaatattcatttggatatttaaattttaattttattccgggacaccttcctggatcaggtacaattttttgaagtaagattttggtagcagcactccagtgtggcagaatagtttctccggggtgctgtggttaacttctccccctaccgggccttgggattgcttggaagataagaagattgcctctgttgttttgagggaagacattcctttgcttctgtcttggttgcctgctctaggcaagctggaagttttatggcaagggttccctgctctagggatcctgcagctgctcatatacttagcttttacatctcatatggattgtgttctgatcctctttctccacttaaaaaggagagaaagaaagagagagagagagggagggaggaaggaaagaaggaaggaaggaaggaaggaaggaaggaaggaaggaaggaaggaaggaagaaagaaagaaagaaagaaagaaagaaagaaagaaagaaagaaagaaagaaagaaagagagaggaagaaagaaagggagaaagaaagacatccccccccccaaattgttgttgtgtaacccacagctttactttgtaaccagaggctgtgtttactttgagcctttgcagttctgcctaatgaatcaactagtattgaattcacaaaggagcctccctgctcctccctccatctgcttgccaaatgtgtgtgttccttaggctcccaggatgccgagccatcagcgcagaaccattagcagcctgctttggaatcctcaattgtttgcctaacttgccagtggtattttgcccttgtggcaatgtaggattgtccaaggggaaggtccacatttgtagttctagagaaggcatacataatatttaagcctgaagtctgattctgcattgctgagagctctagtttggcccgtgagctttggtttgtcctggtatctttggatgagatgggtatctttggacaatagtgctgtgaccaggactgaaattgcttggaggggaaaaaagagagagagagagagagagagagagagagagagagaaaactatcaactgagtcttagttgtttgagattaggaacccatgatagcagcatgggactgtactacattttcactaaactgttctttaaatcttactggtggctgatagatgtgtttctgccaagctcatggctatactgtgaacagccattcttttaggccagacatcttctacatgcccatgatctttaaggcagtatgggtagttagaggatagagtggttttgttgatgttcaggtcaagtggaaatacttgtccctttgtactggagctaagcatgagaggatgggaggcaaacagctttccagtgggttctaaaacctattccctccatagaactattcgatttgagattcttaggacgtcttactgactcagttcaagggcataggacgtcttactgactcagttcaaaagtaagctttatttatttatttatttatttatttatttatttatttattgaaacccactttgaattaccagggcattctattacccaagtatacaaaataatgattctgttccttgcccagcaatgcaagcgacttttctggtgcatcatgtaagttataaaagcagtgatttctcttaaatttatttttatgaatattctaatatcatctctcatggtctgtgctatttcacatagcttgctaaacagtttcttaagaattaagggtcatctgagaagtcttttgagaaccattagctgttattgctttgttatggcctagataatggactgcaaactatttttaaatataaggctactaaatcatcaaagttaactcatattaactcattattaatattatcacattgattcatattccccccacacatgcttacactcacacacatatgtttgcatgctaacagtcacacacacatacaaacatgcccatgcacacatatatgcacacacctaatttgtgacccactgtaatttgttttacaatctattcttttaagatttccaagtaacatatatgaattatagcaataaaataaaggtgtgtttttcaaataaagaatagggatcatacgtaaaattatccacctccaaaaataatagtactcgttattgagtaaaactaggaagatggagctagagtttaaaaatcacaagagaaaagcacttagctaaggagaggctggggcctggggttgtgtaaggaaaggagagctagcaggcatgaactagggaggaagagaaccggggttaacaaacagaagagctcaggagatggcaaagtgagcacatgatattcagatttagagtcttcatttctctgctctttagaaatttgattaggacttttaaagtgtggtaactcttcagaatgcagcaactcgtcatagccttctgctgtcaaagcatttactgggaatggaaaaaaaacatcagcctaacaagatggatattattccggaggccacattgatttggccacaccctactctgggtccaagcatccctggcagtcatcccttatgtctgtgtttcagattgtagttgcaattgttttttcgatacagaaggcagaattttgtctatcttttcttaatacagttacacaagcaaaattggttattcatagtgtttttgtatgtatatgtgtctgtgtattgtgcaagtttatgcatgttcccatgtatgtggaaaatgacgagagagagagagagagaatatatgtacatatatggaggtcacaggtcctttattcctctacactttatatattgaggcagggtacctcacttgaacccagagctcaccaaagtctagcttgctagttcactgcagacaccccctgcctctctccgctgtcctggcattatagatgagttccaaacctaccaggattcacagagtacagggctctgaattttcatcctcatatttccttggcaaacattttactcctgaagccatctccccagcccctattattcataacttgaatactgagtaataattgagtactagatttctgagcgatccataatggagtttttttttttttttttttgcctgctttgcaagtctatgtgggattttagaagacgatagcttatattgtattttgtagtgtgttgtttatacttacatttttgttttctccccagccatcaaacacagacaacctgttgggatcatcctaaaatgactgagctcttccaatcccttggtgagtgctgctgtgtttatgagtaggccttagtgagtgctgctgtatttatgagtaggccttagtgagtgctgctgtatttatgagtaggccttagcgagtgttgctgtgtttagtagtgatgaacggccttcatagccaaggactgaatagtcgtaaaaagaaactcagctactcatcttttcttcttgtgtggatgaaaggatcatgctgtggcatgagaagacagtgccccgacatgctacaacaagagtcctgaaatttaaaggtagttgcactcctaaggtaaacacacaaagcaagactcggtgatttggaagtgtaccagccaaaaggacttcattttctgggagagatctgattgttgtaggtcttacctcatcttatagttcagctctgcacactaaaaaaagggaaaacatagtaacaatatagtaacctcaaatttaccgatttaaaccattttgttttctatgtgggaaaattttctcaaattagcttacttaatttttaagtcataaactaaacttattttgacagggggaaaaaaagatttctgtttttagactgtcagtaggcagtgactttcagcttattggtgagatggccttcatcaggttgacagtagtcactgaagtttagtccttgagaaaccgaggcggtgctaagggaggatatggcagcatcctgtgctccactccttcccattttaagaccaggcgcacacacttgtttctcttaaacactgggctctgttgggcactctcccttggtagttgagtctgcagaagaaaagcaagagaaaagtcactgctttgcttgatttagagactgagatgggggaaaagaggcagtgatctttgagttttcttccaactctgtcagtttctgctaacctatctttagggaacagaggaagaaattgtaatattcactggttccaagataggaatgttgattattttcatagatctgcttagaacaaccaaatctgtgaaccaataaaagaagcaaattgatcagggtagacagagcgtagaagaacagcccccatgagtactgggatgagctggcagatgacagaaaactaattgccccagtaagccaatgactctgaaggagaaaccctgttagctgagcagtctggtagtccccagtcatagtggtacctcctgttttcccgcagggcagaacttttccccatgctcattacccccacgggtcatggctgacacacccacagcacaagacaggttctatagaaaagcagtgcaaaattattggatcaaagctttgtgttatgaaagagaagtggaaagtaaggaaatgttttacttctgtatggctctgatgaagtcaggtagtctgatgagacgaggagagatgttctgctggtgaatagaatgaaggagaagccaccttatgtgtccaggttctccccaacttctatgcatattgttcttttcctccaaaggggaggacatgatatgttacttgtagtttcaaatgaggatggaaaaggtcacagtgacctccattttatcactcgtcttggaaaagaggcgtctaagatctgtgatttggtcatggaaagggaatttgagtttcctgtataagattgttttgcagtgtctcccaataaggtatgaacaatcatttgatcatatttttatagattgatgtgaaatttaggaagtttttttttatcatgaactcacacatttttttatgatccaaaataagcaaatatgttcattcttggcattcagtagaagttaaataataagcaggcctttaacttgttctcttttccatttcagctgatctgaataatgtacgtttctctgcctaccgcacagcaatcaaaattcgaaggctgcaaaaagcattatgtcgtgagttatcacactaactgaatcaccttgctttgggaggttgactttgttgttatcattaagacagagacaaatggcgaggctgaggtatttgcagagtcaatctgactttcagtgcccctcattgaaggagttagctgcatttctactcatacttcatgattggtgtcgtcagtgggtactggcaaaaccaatgagcagtgccactcgaattcagagtgcaaaatttatccaaacgcaggaaaagctctttggaaatttatactgccacccagttttaaaagattaagccattgaatcaaagctgtaggttgttgcctagtaagtcctttttgtccactccaaactggaggcttccaagctgtttgactcagtacaatcatgaaagagaaatgcaaagcagtcacattgctgatttctctgggaactaaaaccataaacatgatagaaaattctgttttcctttaaacatgacagaagttatctgtgtcattaatggatttttccctgtggagggcatgctcatgggatattctatggtagtcattctaaccaaaggttctttttatgccgagaatatcaaaaagtgagcagacatgtgtatccttgtaaatagagtattgatttaggctttctggattctgtctttgcttggattattgacctgacccaagcaacatttaagccttgctagatactattatgcaaagtaatatttgcatgtactttaaagattgggagatttggaaaattccatatatgcttgttttctactctttgttaagaactactatctgcctgggtagctcagtgaagttttgaaaactaccctcagaaaaatggtatgttagggtcaaaaattgtgcttaaaaccaatcatgggagggctgatgagtgtctcatatggaagaagaacttgttgtatatgacaatgacttctgttgccggatctcatggtagaaggagagaaccaactcctgtaagttttcctctgtggactcacagttgcacaccacacccctccccccaactaaggaaaataaatttcaatagctaaatataagttatggatccattttaagttggctgggtgagcagagtcgagcaaagggagatgttcaatcacttagagaagacagagttgtacaaagtattaaataagaaagacctatgttccttttggatgagatgtctaacaggcagagaaacagcaatatctaagccacggaatggaaggaggaggtgacctcaagccttgcgttatcccctcaggctcaaaggtagtcagcatgttgtagtagttacaaaacatgttccagaatgacctgttcaaaacatgggagctctcgcacttgggctagagatctgtgtattgggtgggaatgggataggaagctgactgtgaacagaaggcaggttgtctatctcctcaatgtgtctgtagtgataatagttttgaaccctacatccagctagtcttgtctttccaggcctgttgggttttaaaatgagggcagatgacccagccatggactttccactggccaaccactgttttgtaacatggcgaacatgttaccaatgttctgttctgcacctgggtagagagccctctttatgcactaagggtttgctttcttggtttctcttactcctgaaggaagatgtctctctctggatcacgtccaaacccgagaggagcagaagagcgaaaagatattttataaagtacagtgaacaatgtccccagtttgtgtcagcttaaatagcttcagggatctcctgacagccactggcatccctctttccactgcctctggccaccacagggctccagcctggagcctctatactacttgtcacatttacctgtttgaccaaatcaacttttctctctcaaattctctgtttacttgaactgccctggctcatcttttatttcttcctgatgctttttagaatttgcctcttctacaattttcatgctcatcccacctgtttctaattttcccagcatttttatgatggcctgaagctgctgtttttcacttgcttgcctggtgtaatagttgtgtgtcaggaggttgacctgtctctacacacagtggctttgaggtcatggtcacctctcattctgtgcctgtctgcactcagcatagtgccttcttgccagcataaaagagagagcacatttgtctttattctttcactcttgctttattgatttggttctgagaacaaggcaagagactcattccaccctgcaaagggctcagatccaaagggcacaatgcaggtggctggaaggttcatgctttcagcagattgcactccccttataatttagggctctttacctggctggcatctgctttctgtctccctacttccttccctttgctcccatcagctcaccttgaagagtggcctagcagattatacccagtttctccagcctaaaagctctgggtgccagctcttcacatttgcaatcttcccgtgactggtgtgtgctatcctgtgggtctcaggctgccagctatgctttaataccatggctcctcttccctcactcctggtagctccatctagtcttttcttatgtgagtgtgtgcttttgttttattacactgcttgtcttagacacgtggtcagaatcataactcttaatattctttctacatacttcttgcctgcctttccaaaataactatatttttatgagaaggaagagtctgtgctgtgttcttccctacctgagccctcctatagtttctggtgcagagctggagtcatgtaggccatcctgagcaaggttcgagtttgaaggtgacataggtgtgtactagaagacacgtaaaagatttagagtcatgctttgtagtagtcagatttatttaattttgacttactcaaaatatgttacaatacaggaacaaaacctgaatgaactgaccgtcagcatcagcatggtccatgcgaaagctgtaaaactaatgggaaaagacatttgcatagttcactttcatttatatatagttcaaagccttactattctatttatggtacacacatgcttttaagaacttaaagtaaattcaaagtttagagattaccctcgtgatcatgatggcatataattacatatgatgctagtatgttcattttctttggtgtgtaacagattgtgtattcttttttcttcaacacactatgcattctatgtgttatacacacacacacacacacacacacacacgactttttgtagcaggccatgcagagaagtaagagaaaacactggctgagacagaagcagtccctatggtgtttagaaagccagtgtccttgtatcacagttctatttactcgaccataagagccaccttggatttcggcatgtggacactaatctgagataaggatataggagttagatgcatccaatcaaatgcttggatacaggtcgagagtgtcaaccaatgtattatggttaattagcttactcagtatcaagaggtttccctaaatcccatttagattccttcagagttcatttaaattttgttcttgaaatttctgatttggaggtattattattaactattactaacattacttatcaagacagtattttactatgtagcccagatgtcttggagctcactatgtagcccaggctagccttgcattcctcctgtttccctagttctaggataagagatgtttgacaaagtgaagccatttctaatttctttagtattttgatctccatggtattggctttaaagtttggataatttttctgtctagaattcagtagtatacaatcattttctactttgagacagtcaaaccaagtagacggtgtatgtcctaaatagtattttagcatgaagacaagagagaatagaatgggtaggtgcttcttgccagagatgaccgaggctaagcccactataagggaagattcataggactgcctgtttgtgactggtttacaaagggattggtagttggagaattgtaaaggatgaaggagagaaggtcctagaattgctaaagaccagatttccgaaggtaaggttttgattaggaatacagccaggtagaagtttctgagagatggggactgagcagtgaaaacaggctggtgttcaccacgagactcgaggcaggaaagggaatgtggaatcatctaaagagatgctgtgtggtgagaggtatgagccatcatctctgcagattaaaactccaagcctgaaagcttgcgtgtagaagtgtttcccaggaagaggacatggtgcacacagccaagacctggagaggtgtccaaagccctgaatcaggtactcagcagtgtccttctgtttttatcagttctaccctcccctgacctagaagagggcatgatgatgtctctttttgacccctgtgcttcatatgtgagaatctagaaaagtctgtaacttgcttagaaaacaaattgcctgtttgttccatttactgcatgcatgactaagctgtcatttttctccctctgaagagacaaaaatcataatttcctgtgatttaaatgtagtctgttctttaaaaggtaccgaaatgtgacatgcttcagcaagatgcctgcttggcttaggcactaagtcaaagtgtcagtgtaaatcactggaaattgaagacaggatcgtttgtgggaagtggcaagttactgtctgggtcccagagtggataacaaggaaggcttttctgaacggagtgaagggtggactgatcccggaatgatgtttttgcaatttggtccattgtccctgtgtgttttgcggctggcataattagtgttggaattcagaaatcttaacattctggcagtaattgaatatatttctttgtatctgtggagaaccatgcttctcagtcgactgtccttgattaagcaggtccctttgtcagatgctgtagaaagtggattttgctactgctatcctaggttcagagttgaaaataatttatagtaccaagaaatggagcaaaatgataatgaaaaatatagatgattcccaggtcacttactcttgtgtgggtttttttttttttttttttttggcactatttccagctcatggaatgcttatgcaaattatttttgttagtagcatacatttagagggtgatattgttgacatctaaaagaaaagggactggcctcttcctcagaattcctatgtctcctgctggagtctttttaagaagtcttccctattgagttattgaagaagttgtatttgtctatgttattttaacatatacttcttttctactgtagtcaacttgaaaaaagaaatgttgtttaaacagccagcatagacatatttcataaatgtacttaaaatttaaaattagtaattagtcactagctacaagtactcagatacaaaggaagctgtttctttgctttggttcactgtcaaacgatgccatgggggctggggaagtttatttattagaaaagaaagaagtagttgcttaaatgttctcagtcccacttagatgcttttcagtgctaaaaacctggaaacggaagatgaagcaaacattttacataatggtcatttccatgagcaaactttaaattagcgccagcctgcgatttcccttgcctgtctgttacgaattgggtcatttccacgttcagtaagtgcatagtggtttgatggtctgcttggctttgttttcaccttgctaaggaataacttttttagggggtggaagctttgtgtacagtagctgcctcagtaagaccatagcccactatgtgtcacaattgatactagctgccatctgttttctctagtggaatcctagagtaatttaatttctgtcttttctaaagcaacatctcttcctggaagatagtgcttttaaatatctccccctcccttgctttcctggatctcttatattttgtctatcttatctttcaaagactatttcaaaatttaccttctagggagtcttttcaagctttcctttggccaagcattcctaatccaaacatctgcaatgtgaaaaccacaggatcagaagcttatggtttgctgccatggttgcagaattgcatgcctgacccttggtgcatgaatctcagtagaaatgcagtcgcattaaaaatactgtataaggggttagagagatgactcagcaaaatgtttgctgctcttttggaagaacagggttcagttcccagcacccacatcaggtactcactgatcactcttggaaggctccaaaccttcaaggacatctgcagtcacatggtgtacagatatacacagacacagtaataagcactgttctttcaaattacttaccagcttactttagggcatacataaggtatacatgaaacataaatgacaattgtattagacttgagccccatccacaatagctgcataaaatagctgagtttatgcatatgttacaaaaccaccaagaaggtagaaggtaaagaaagtaaaaatgcaaaatgctccccttacagcatttccaaccatgagttggtagcctgtgtctgctctctcacacggttgtccatccttctcccaggtgtttccctccttcctcttagtaatgtgcttaagaaagagctccgtgcacaccctacatgctctagcaccagccttaccctccatctgtgctttacataagaagagtaaagatgaaatgaaataaatacctgaaggccagtgatctgtgaagcagtaggaatccatcttagtgacaggtggtctgaaatgcaaaggggcttgacttgatttgggccaattctggtagttgagaataattctgatgtcactcatttcaggtggtagagagctattacttttctatgaaatctggttcttttatttatttatttgtttgcttcatttttctaaaaaactatctccggtgatcttttaatgccattatatacatttttgcatactgttagagaattgttagcttgacagtggtatggagattaactgcttgataggccataattatataattacaggttataattaaaactagggttctggtgtctgttgttgtgactatagataataaaacttgctttacttttcaaagagttagagtaaaggatttttgaatgttttccctgcacacatgttaagaaacgtttgaggggatgatgggttacccagatttaaatatcacctagtgtagatatctgttgaaatcacagagttcctcctcaatattcgcaactttggtgtttctatgagaatcacttaagactaactttagagaatttaaaaagcagttagaaagtgagctaacatgaggtgaccagtgttgttacttgggatattttaatgtttggaataaatttgtagactactcatttctgtactgaaaaacacagagcgactataacaaggatgtcaaaaagaaagaaaaattcaaagaccaaaaatttgtaaaagatccaaaagctacagcgtctagatgaacaggcacaaaggtagagagaatatatttgatctgagagaatgaaaatgttatctcactaacagctgaagttaactgggaaggatcagttcatgagttggccagtcaagctaaaagctggagaataggagtgctgggcttcaatgttgttgggtaaggcgatgcctctctctaatcctttctcctcattcaattagtggatctcttagagctgaatacgacgaatgaagttttcaagcagcacaaactgaaccaaaatgatcagctcctgagtgtcccagacgtcatcaactgtctgaccaccacttacgatgggcttgagcagctgcacaaggacttggtcaatgttccactctgcgtcgatatgtgtctcaactggctgctcaacgtatacgacacgtaagtgtgtcatttatcctttaaatgatcactagtgagcgaagcacattgataataaactgggcactatcatcatcgccttgttgttgttgttgttgttgttgttgttgttgttgttgttgttgttgttgttgttcttcttcttcttcttcttcttcttcttcttcttcttcttcttcttcttcttcttcttcttcttcttcttcttcttcttcttcttcttcttcttcttcttcttcttctcctcctcctctccttctcctcctcctcctcctcctcctcctcctcctcctcctcctccttccccttccccttcccctttcccttccccttcttccccttccccttcttccccttcttccccttcttccccttcttccccttcttccccttcttccccttcttccccttcttccccttcttccccttcttccccttcttccccttcttccccttcttccccttcttccccttcttccccttcttccccttcttccccttccccttcttccccttccctttccccttctccttcttcttctttcttcctcctcgtcctcttcctcctccttctccttcttctctgtcaccctcattaatgggtgatactaaagttttaacttgggaataagtttgcacatggcaaacactttaccattgagctacatctccgaccctagtgtgatttctttaaaaagatgttttcataatcctctcgcccagtagaaagatttattctgattgtttaaaagtaactggttttccaagtccttttgctcctaaccataggataagagggaacatacaagtgttctttcgtgacttcctagtcagtgaaggctggggatgtagcatgcattctctttcaggaaacagctagggaaacctgagctgcatggtttcttttctttctctctgctccttactatcttagattattatttttcaacaggcaaacaaaagctgacattcactgtgaattaaaatgatttttagcatataagaatctctataactttgtaaggtggcggtttgagtgtaatttggacagcagtgaataaaacttggtttgtccttaaataattgccattgtggttatgtttttctaaagtggtcttgcctttataattgatgctatatgacactaacacatgtacttgaactgtttctcagtgtatagaaggagcacccttaacttccagcccagcacatcccgcatatgtgtgacccttttgattttgacaatgtatttgtgcactaatcagttatcaaaagacttgctgtgagctgacatttcagaaatgttgggaattattcattctctggtagggggttgaagtatgcaaaaatgaaagaggaaaatgaagacttgcttttctcttgaatctcaaaacttagttctcattaagtagctacatgaagatttacatttgtcagcctttgatctgaagacagagaaggtaagtggtcgtcatagacagagaatatagatgatagttcataaatgtacatgttctgaagccgattcattctgtgtaaatgatgatgataatagacatgacttatctataattttatctactcctttcattaggaaaagagatcctttatctttcagtagtaacaaatatcaatatatcttttaaaaaaataaaataaaaggatagccttgtgagtgagagtgaagctcagttaccagaaagagaagaggatttactgtaatacactgctgcctggtatcttttattatgctttttaatacaaagttgtaattcttcttggatacaatattaattttagtgtaagtagctcattaatttgctcatcactatttcaaagtctcaaaggacatcttttctacaataaattcaccgcaaatagctcgttatttccgtgttttctgtgcagtagcctgtaacatggcttcccatctcagaaagaaagctaaatgagaacgtctggggacttcatctgactctgaaatagcaagaggaggacaacttgatcaaagtttctggggaacaatctgccccccagcaggttcctactatgacaattgtagatttctaggttgctgaaaccaaacctagtatactaggttgcttaaacatcatttcctcacatctgtaaaggcctgaagactgagctcacggtgatggtggggctgactgctgtgttgttttctccagaacgtctccttggctcttcagtttctctcttctttccataaagagccataaattctttctacttgctcttttttcctacaagtgcaccaggcattctggattaaggtctccccttccatcttcatgttaactgactcttgaaagatgctgttggcatgaaaagcagtatcctaagatacaaagagttaggacttcagtgtgcaaatcgagaggaacacagttaagctcagaacatatagagaggatgctgttattctagaatgaggaggcagtgactctttgttaggacccacccagtgtgcaaaatgttgtgattcatttctgggagttaaatgttggcacaatcccatttctgactgccagatgtgaacacatagaaatgctacatagaatttttttttctactagaaaaacaatacctcgaaatatgccattgttttgtttttaatggataaaaaaaatcctgcaaaacttacttcccctcaataccaatgaaacatcaatcacccctctgggtcagatgggttcccttcggtctcactttctattgggataaatgaattaagctaagcatttgaaatttgaaatgtatataaagaaaatatctaataaaaaacaaataacaaattaattaagctaaggaaaattcagttactttgtaggcagtaatcactgatgtccagcaatgactacctgagtttctctacttcatatggcccattcgtttatctgagcaatgactgttaactctacttcaagtaatggtcctctgagtgactctgatcaactaactataattttactctacccagagtagggatcttggatattacagaaccatcagaaggctttgaacttaaaaatgatgcctgtgttcagctaattttttaaaaaagttttatgtgacagagttatagttctttaagaaaatattttaatgtagatttacttgaagcacaggtgttgggggagcgaaagagtttcttaggaaatggacagtgaattcccaagagaaaagcagaccacttgaaagagttacattgatttacctatccatccatcatccatccatccatccacccatcaattcattcattcattcattcattcattcattcattgtttgggtttctattgttgtaaaaaaacaccacaaccaaggcaagtcttataaaggcaaacatttaattggagttagcttactgtttctgaggttcagtccattattatcatggcagagtccagatagatgtggtggacgaacagagttctacatcttgatctgatggcaattaggagactgtgtctttccctgggcagagcttgagcatatatattacctaaaggccccgcctccacagtgacatacctcctccaataaggctacatctcctaatagtgccacttcccatgggccaagcctattcaaaccaccacacaacactatcataagcaggtgatgaaatcaactcacacagaggaagatagtttttggatagtcatttgagaggtttcaacccatgactggcttgcccctgactgtaggtgaggtagcacagcatggtgggaatgctggtggaccaaactgtcatcacatgacccagaaatgcaagaaagggaagacaatcctgttttcttctgggagggtttgcctctcagaggtcatctaataggttctggcttttaaagtttctcctggtcctcagggaccttttcagatgtaaactgtaaactgttaggtattttcaactccttgatttattgccatatgatgtaaccagggcagaccttctcaacgtcaacttgaaataatgagtcatgcagatagaggagatcaaagaattctaatacacatatgacttagagatgagatatgatctttccattttgccctctatttaactgattggaaaacaaacacatggagataccagagtttttctgtaaccacctgttacaaatcaatcatagttacagggctaacttgtagattttatttccttggttgcatggatagtcttatcatattgctgtagcttagccatgacgctttataaaatcaactaaacttttgagttttaacatatacccagcttcacgtcatattttcagttttgtgccctggttgctatgttacttggcaaccacttaacttttggcatctcagtatctggaaaatttagttaaaaataaacacacagcttaccatacaaaaggtgaatactaggggcaaatgagctaatatatatagaaaggggctttataaactatagcaatcaaatcgattccatttatgaattcacagcctcactctgtctttatcttgccaggttcaaaagtcttaatttcacaatcttccttctagatttaatggaaatccaaatcatttaaatcatacttcagagcaatagtctggaacacttggttcaaacattttttttctctatagagaatattagcttcatttgttataataagtcatatttctcccactatcctgagatgaatataattttgaaggcacttaacttcacagttaaactaatttcagaagtcacttacaaaaactgtcctgggaattggatacttagctattgggctagatcgctcactcatacattttattagctctcagatgcatctccaattagatatcctacttgacatcaaaatagtcaagaatggccccatgtatgcacagattaatcagccagtgagcctgtgtataaatgctcaccccaccctatgtgttggagggggtgtgtttgcacccacacctatgttctcttacgcaggcgtgtgctatgacatctcatgtatgtctgattgtaatcttctctttcttagagggaggaggacagtactagggattaactagggctggcccactccatgtaaggcaagcactctgccactgagctccaatggcaggccttaagtttgaacttcttgattaactgtgagaggctgggaactactcaaagtgctctctcaaaaacctaccaaccacagtcatcttgtatttggtttttcatttccacacattagggttgatactgtattttctatagtcaccctcttgtcttacttccctagctagtatgtgggttattgagtaagaatcaggttctctacttcttcttgaagttcatggaacaattctgggatcttagattacagtaagcctttacagctgatggtagctgattgacattttcaattgtctttctgatgatgtagctctcctgttttcccagtagacttggaagtcagctctactggtatctttctgatcccttaaaggactggtttgtttttaccaacattcttgcaccaatcccttagctacattcattcattaacctttattactttctaaaagtaaattgcctgtgttcagaggataaacactttccagctcttgaagggaataaacactatttcatatgataatttggaaaactctacaaatattaagtagaaacatgatttgaagtatggctcagtttatttgaaactggctggtatttcttgactctaggctaggttaggctagaacttgtcatttttctgcctgttgaattctcagaggttgctaccatccttagccataatctaagcatgctttctttttcttttaaagaacatttatatgtttggtgtcatgctatatatgcagacatttacttgatcatttatcacttgaaaatggaagactattacttagtatgactaacaaagcacattacagatgtttatgtatttttcaaatactgtaaatcacaacctgtattagttacttttctattgctgggataaaacactgtgtccaaggcagcttatagaaagacaggttttttatggcttatagttccaggggcatgggagaccatcagcatcatggtaaagtgccaaccatggatgcaatatggggcctggaggagcaagcagagtaagagaactcaaagtccgccttcagtaacatcccttctccagtgaggacacacctcctaaacctacccaagacagggccacaaccagggacatagctcaaaaactaacattgcttattcatacaactacactgtcttatgtgcccatatagtaagtgaacattcgcttatgtgttttaaacgttcaatatgtatgccttaaatctaagaaattttagagaataaacccaagctgaaaacggatgaagattatgaaacaagaaatatagtgagaagactttttcctgggttgtgtgttgttccactggaaagatcatgttctgttaattttatggtgcttttctgcatcccagggcttgtttaacagcttaatactttgataggcattggaataaaaatgtgtgtgtgtgtgtgtgtgtgtgtgtgtaaaatctccagttcttaagtgaaattgaaatgatgtttcactgtcttagtgtgaaagtatttcctagagctgactaattaatacattccatttttaattacaatttcatgcttcctctaatacagatatcaccccagcctatttgaaaccattcactattaaaattgcaataataatttatagactacattggcagagatcaaagtgaatgaagacagcaaactctaaagtttcataagccctgagtcttcaacatataattttctacgtatattttttttacatttgggttttaatttattagtattcttctcttgctatataatgttgcgttcatatgttgtacagcctgcttgctatctagctttgatgcgtattttgattttacatttaaaaccaacagatttcagttatagcatttctttaagtaaaatctatttggctttatgattgttgtttttatattcatttcatgtgttcttgggctgtgtcttgtgtgtaaaaggacgtcagtgtatttttctggacttgttcaaagatgttgaactgtcatgaagttgtgatgtaggtttggcagtaatggttaaaaccaagtagacaagttgaatctttaactcgaatttattatgcagtagtttactcccaagaaaatggcattcaacttgctgtgtaaatgcatataacccatcttataatttcaggggccggactggaaaaattcgggtacagagtctgaagattggattgatgtctctctccaaaggcctcttagaagagaaatacagatgtatgtaagaccttttactccatggtgcttctaataataatctaaatttattgggcgctgactttatatagtttgcggtaatgttagcttccaattggaggtgcttactatgtgtaccagtttgaacaaagatgacaatgtgaagagaatttggatgatttgaaaaactgattgtggggcaagagtgaggtgtacagatacagcacaaactaagcacaaatgtacattcatttaatattagaatattctagtaggtattacaactcccattcttttaggtgagcaaattaatgctgaaataggtcaagaatctagtcaaaggccgtatgacccattaaaatgttggtgttgagctaaggactccataacccccttttttttctctcttaaaaatctcatttcttccgtttattgtagcaagtagtttttgctaccccactttaagctccaggtggaccacactaccagccccacccagactcccttgcatccatggattaaaaacaacacacatactctccagtgagtcttagagtgcttttgctaactcagtgaccgcaactgaaaactcacatcactggttggcttaatctcctgctgctactgcctccttcttcttccccagattctccctgaatcctcctgggtaactcttaagtatcccaccccatcctcagtcattgattggtccctggtatctttattgagcaatcaagaaccacctgggaacaggaccttagcattagactccctacagtttatggttaatgataattagaaaaaaaaaagaaaagaaagaagaaagaaagaaagagagagagagagagagagagagagagagaaagaaaggaaggaaggaagaaagagagagagagagagagaaaagtaagagggactaaaacttttattagcctttattctaaatagtattattttgtaatttggacattataaagtgatagatgctttcaacttttatttcggttattcaagtaagtgcctcattagctattgattactgaacaatgtcttggcatgctcaagagtgggacctgtagttatatctttcccacttagtgatcaagtgtcattagatgggtgtcttgatcccttttagtacgtctagccaaaagtaatattaccactatttcctggtacactgagctgtacaccagagggtgagagatgagaccaacaattgtaccattgggaggaaatcaaggtaatagattacaaattgtcaaaaatagcagtggtcaagtaaatgattaccatctccatgtgtctccaaactcattgccatggtgacagcatgtcgtttagttttatttgttcataaaatataagtagcttgatgctgccaagcctacttctagatgagtctgtgcaaataaatctgtgtatttggaggagagtgtggataataatttttgaatagaaagatatcagaagacaaaaatgggtacaagaaaggagtagtagtatgagggtctattaatagctcagtggtccatctcatgctacgcaatgtccttgctcctatccccaaaatcaagaaaaaaattttccccaagtaaaggtatgtgatcattgttcttataacctaagtcaattgagtttcttctaaaagcattcaacatcgtgtattttggggataactgttattgtttgatttaaatgtcaagcctagaatccaaaggcatgattttcttacaaatgttaacaagaatgttcaagaaagagctgtgggttttgtacagagcatgagcttactgaagaaccaggagttgaggatgctgaagtgtgtctgagccttgcaagccatgtagagagacgggaagaagccctgaataaataaaccttacataaagttttgtctatggtcctttgtctagaacttcaggaatcttcaccattatcaggaaaagatatttccaaagcggagaacttgccatttctaaactgattaggaaaggaaagaattactgaaaaatcagtgttccaaaattaggaaaagattttcttactaatcatctgtgattcggggtttttcatacgctcccaaaagacttggggctttaaaagtaacagttacatcatagtgctgaatggactctaaaatgaatgcaaattcaagctcaagatttgcattttctgcaaaacagcattaagtgctcacatttgggcaagaaagcagaggcccttgcattgcaagtttctactagtctatataactcatgatggatgtcacttcaggacataattaaataagaaatctcttgggctaaatctttaatctaaatctttacttaaatattgaggccctggaaatgtcctgaggttcagttttgtttcttatcttgagatcttgagcaactccgattccacctttgatttccccagtgttgtgggaacatctcttcattattattttctttgttaaaattaatattcaaaacaaactgctcgttagcctcagtaacaggaggcatccatctgaaaagcattttgcagtggctgatattagagtctttgtcctacttgtgcctattacttgtgacttactgagaatgactttggagtggtttctgacattccatgggccgtcctgcaaatggccaggggcttgctggcatcagcagaagcacactcaggaagcatcttttggagagccccttggatctcctctggtttgttttttttttttttttttttttttttcaagcttgtctcttagttgtttctttccattttttttgttaattatttatatttcaaatgctagattgctcttcccaattccccctcctcgagctgtccatctcatccttcctccccccatgcttctatgagagtgctcccccacccatccactcctgcctcaccaccctagcattcccctacactggggcatctagcctccacaggaccaagggcctctcctcccattgatactagaaaaggaactcctctgttacatgtgtgactggagccatgggtccctccatgtgtactctttggttggtggtttagtccctgggagctctgggggaaggaggtctggttggttgatattgttgttcttcctatggggttgcaatccctttccgttctttcagaccttcccctaactcctccattggggtccctgtgctcagtctgatggttggctgtgagccaacctcctctgtattggtcaggttctggcagatcctctcaattaaaaacttgttgtgacccattcttcacatcctctgcataccacctcttgtatacgcttctaagaataagaacgcagtgcttggtgtcactttttctccatgcacaatacactttttctttatgagtagtctcaccttcgcagtggcatagaagcttagctttcagcctagatgtgggaacgttgggcagaactgatgctcttaaaaatgtgcacctctctataaggatcatttcacatgcacatagatgcacaataagcatcatggtaagaattcggggccaatgttttgggggagatgatagcctttttcaaataatataacaagtggagctctataaacaaatctaaatgaacaaatgataacaataattaattttatctcagatgaatttccttccccttcttgtgcttatataattaaaactgtatttcatgataattactgtgtcgatatcactcaggatgcttcagtttggaacttcactgttgacactgttagataaggggagaatgacgttttatctgctgtttatgttttggatattatttgaaaatggtttgggggaacatcttaaatatttaatatttaatgcttcttcttagcattacatgacgaacatttaaatagtatgttttttggactgttacaattcaacaatgcctcccaaatgtgtcagtttttatgataaaaggaatattttttaatgaggtgtgtctccatgcagaaaaagtaatgtcctttcctacattagcttcttcattgggaatcttatattaattattttttttcaactttttgttagatattttctttatttacatttcaaatgctatcccaaaagtcccctattaccccactaccaccctgctctcctacccacccactcccacttcttggccctggcattcccctattctggggcatataaagtttgtaagaccaaggggcctctcttcccaatgatggccgactaggccatcttcttatacatatgcagctagagacatgagctctgggggtactggttagttcaaattgttgttccacctaaatgcagacccctttagctccttgggtactttctctagctcctccattagggaccctgtgatccatccaatagatgactgtgagcatctacttctgtattttccaggcactggcatagcctcacatgagacagctatatcagggtcctttcagcaaaatcttgctggcatgtgcaatagtgtctgtgtttggagactgattatgggatggatccccaggtgggttagtctctggatggtccatcctttcgtcttagctccaaactttgtctctgtaactccttccatgggtattttgttccctattctaaggaggcatgaagtatccaggtacatttacacaatggagtactactcagctattaaaaataatgaatttatgaaattcttgggcaaatggatgtatctggaggatatcatccttagtgaggtaacccaatcacaaaagaagtcacttgatatgcactcactgataagtggatattagcccagaaacttagaatacccaagatacaatttgcaaaccacaagaaaatcaagaagaatgaagaccaacgtgagaatcttctattaattataatcctcaaaatgttacccatagtagatcaaagataaatatcctgggaagaggagttttaatgttgttgacttaagaatattagaaaacaaagcactgtttgccttgtttatgcatggaaaagccaaagaaaggcaaagatacaaacatttttatgtcttaaaattgaaagaaaaaaatgtttcattacagaaaataacttattaagttcctaaaatgaaaagctaaacctccttatttatttttggtatttataatacaaaggaggtatgaatataaacatacctaaaataagatgaaatgttcgtgcataggatattgaatttgtgagtgaacaaagaagttaataaatcaattgtaaaatgtgaagctatcctttatatactatatgctctagcaaattataagggaacctttgttttgcctcatgctttttctagggaatgccttagactataaaattaaccaatgtacatttctttatagtatttaaaacagtaattttctattagctgaccagatttaatgtaataatctataacataagattattcttttatttttaaagattcctttatgttaataagattattcttttattatttatttttatttatatgagtacactgaagctatcttcagacacacaccagaagagtgcactggatcctgctactgatagttgtgagccaccatgtgggttctgggaattgaactcaggacctctggaagagcagtcagtgctcttaaccattgagccatctcttcagccccatataagatcattctaggacatgtggttctgtttacagatggcagattaagacacctgatctggataatatccctccttggttttgttttttttgtttgtttgtttttttttgttttgttttgttttgttttgttagtttttgtggggtttttttttttttttttttggttttgtttggtttttggttttaagttgacatagtttaatctacctcaccgaagataacgctttaagtaagataatgttttgagtaggtagatggtaacatctcgttcttcttctttgtaggtctctttaaggaggtggcagggccaacagagatgtgtgaccagcggcagcttggcctgctacttcacgatgccatccagatccctaggcagctgggggaagtagcagcctttgggggcagtaacattgagcccagtgtccgcagctgcttccagcaggtaggcatgggcattatgggtatgtatggtgtgttgagaaagggacttaatgtttccaagaagggagtcagttgtgctagcatcaaacagtggaggtttcaggtatcagccctctaagctgatgatttctttcttaagttacatttgactcaaggcatagtaaaaccttggtagatatacatctttttcagggactatacattgaagtgcagtgttggaattgcaacatgctggctctgtactcatgtctgtgacctgtccccttgtgctcagcttctcgtaatactcacttcactccttgattcctgcttccatgccctcggacatgcactcttctgtttagaatgttcttcctttgtgtgcacacactctcttctcccactcgttctgttctgtctttatgtgctggcttagctcttgtgtctgctcaagccctatcaggtgaagatcctctgccctgtcatgctcactacagtgtgacatcatactgagatatgtaattaattggtttgtattgcttcttccttgtccacctaagcttcctggagacaaagctatgccttcacacgtctctccagtcttagtctgctcaagctgctatagcagaatctatgaactggtgggttatgaacaactgatgtttattccttagttggagaggctgagagcctgaagattaaggttccagcaggtttgacatgtgctgaagaaagctttctgacagcgttttcttggcctgcccaatgcacttcagaagaacaatctgatggttgctcatcccttcataatacgttgaacctcatattgactttgatacgttttcttattgaaggaataaaaatgctttagtgttctctgtggagaatatcctttaaaatatgaaagcattacaaaaacagccatcttttctcaaatgcacatacacacaaagtcatgtacaaatttttgcactgatctgagctgctaattttcacctgggcaaaagccacagtttcttttttaaatgcttacggtgcagaagaacatttataaatgctactgatgtcatccatatgcataaagttagaagcctacagatatttttccaaagcagagccaatgatttatcactgttgagcgaaagaaatgctcacacggtatctttgaggagaatcaatgtcacgggttattacattttataatggccctttttcttattttagaaataaaaaaatgctaaatgattttttttctaaatatgatttatagtcatatgtgtcagtgctcagaatgacctcaacccctgcgggaagaggcagttggcggaatttacctctgctctcacccacaatcattcagcattaggattcaaggaagacttgagttgcctcacaaagtctgtcttgatgagcttagagaacctatctggtggatccgggctggtctgcctccagtgtgatgctctgatagaacagaggcggggcgtagcaatgactccttttgggaaacatttgtaaagctcgtgtagagtcttccactttgtctggaaggtgaggagtcctcgtctcgtacgtttaccatcttagataaacttgtgctacagaattaaaggctgggttacctggaatcgtgtgggttttcattttgcttcctttttctttctttttgatttgagcacagagggactaggtagacggcccagttaaagggagtttccgtagaagcctgaggacttgggatttatctccatgacccgcttaagtcacgtgtagtagcgcatggcctgtccttgtaatcccagcatcaatgtagcagagacaggcagatccttgggctcaatcaatgaaaggctgtccacgggcctcctcatgtatgtgacctgcatgcaagtgtacctgcatagatgaacatttaaaaacccacaaataaaaaagaaaatctgagcactaaggaattgccccccccaaccatatggcaatggctgcttccctaccccttcctgcattcttctaattttagcttctagaattttcttaccttaaagaacctattgtcttggctggcctggagtcacttgacttttctctcgtgccaatttgcagcagcagcacttgctgcagcttcaatgaagagctgttcttcactttctgtctcttcccccagaataacaacaagccagaaatcagtgtgaaggagtttatagactggatgcatttggaaccccagtccatggtgtggttgccggttctgcatcgggtcgcagctgctgagactgcaaaacatcaggccaaatgcaacatctgcaaagaatgcccgattgttgggttcaggtgagaagcactaagagaaatcagaactcaatggtctctgctctcctcatatggccatcccttcccatttattcctgcttggtggtttgtctttggagtacatttatgctccacagcgtccttctttccaatgtaccattcctcctcatgatctatacacaaacttattttgattcttgtagttatttgtaatactttagtccagaatcagaaagttttataaatatcctttcactgaggccataggaatacctgcgcaggataattgcattgtagattaggtacatatagtcttgatcaaatttgttggctgttctaagttgtttgggatcaaagttagtaagacaaaagcaatatgtaaaatatgagcaagaagttatcagaaaactgtttcgtgtgctaagtttgttgtgatcaattctacatttcacctgctcattaattctgttgattgtctattctctctctctctccatctcctacctttttcttaatgagcatgtatgtatatactcctggatatgtgtacatgtgcatggagaccagagattgaggtcaagtatctttatctttctcaatgactctccagcttattcttcatccagagctctctctgaatcttgagtttgacgtcagctaggctgagtggcatgccctgggcatcgtcctgtctctgcttccccagtattcagatcatctcgggttgctggtgcatgccactagactcagcatctttatgccaactctgaagaatctgaactcagatcttcatagttggctaagccagtcctgccacactcagtccatctttttttctcatcgtgtcaaggacactgacttaaagccttagaggagactgtgtaggactcttaccttggtcttcacaggatggtgtgtttgttcacgttggttccttcattacctcttgaaaaagtatgccacattcttttcctggggtttatgatttctcagaaatagttattacatagctattagtatatgctttaaacattattgctgatcacattattagttatggtcagccaaaaatgataatacactgaccttatgagtaatattgaacttttctgtaaaagtggagacatgaggaatgtacgtgtgtaagatttatttttatttatgcgtctgtatgtgtatgcgcatgtatgtgcctgtgtgtgcacccatagaagagggtgttggttccctcggagctagagtttcagatggttgctagcctctgtatgggttctgggaatcaaatctgcatcacctggaagtacagtgaatgttcttaattgctgagccacctctccagtccttcaaattgagctttagtgaaatcttagatctctaaggtgtttaccgagctgagaattgtttcatttcaaattccacacagctggtcacagtagcatgaataacaggcaggcctcatctcctttcatgtgaacaaaatgctaagagatatgccaaggctggggctgcatgctcatcttgactctcggttttgcctgccttcataatctctgttatccccaacccatgacttgaattttcacgctgatctccactggcaaattggctcctctggatgtcatttctgccttttgaagagagggaaaagccatgcccttcttcccattcaattggtcccttaaaatcccaagggaaagccttgcccaagacttcaccctgtattgtcctgcttaccaccatcagcaagcaagactgagaaacagcagttttagcaaagcacatggctaaaacatagtgacagtgcaagagtttctccctggtgaagaaaagggaagggttgcactaaagaagatttcacaaaggacagacaatgccagccatatttgtcaacctatgagaaaaggttaaaagatataagtgatctatcaagccaggagcataacaaagctggtataaatagattgtcttcagataacttgcatttttgcatgtcattttaaaagtccttcatcacttgatagtgtatattaacctcacataacctttacagtgtctttctagtttgactttgctagtcttggcatttaaaatgtccctctacagatacagctgtaatgtatgtttctatctatacagctgtaatgtatgtttctatctatacagctgtaatgtatgtttctatctatacagctgtaatgtatgtttcttagttcccccagttgtcttaactgagtgggctatttggggagcattttcctttcagactccatagaagtttaagacttaagagtgttgtttctgcaaatagacatcagtgcacagggttactttctacgagaggcttaaaacattatttctttcaagactgtgtaatgatcaaggtttctctctctctcttcctaataacgattttaaacaaaacctaaaaatgctcaaggtagaaacgagtgttcttatgaaggaatcttatattcatttcttatgagtggtcttgttgatattttaaaataatgtgtgatgctcactgtcataacttttctctatcatttcctctccacactcagatctcatgcagactcttctgacattgattctagacttcacatcatgggtaaacatgtgcaagcatgttttcagactcttagatgcatttacacatgtttatcatctttcatggtatgcctgcatctaattctcagtaataaagaaaaaaattaattaaaaagtttacaaaacctaacttaggaacaaggcttctaccttccttcataatctgagatcctttttaacaaatacttaaattcctctccccttgttagagagataaacttcttttttttcccccctagagcaagaacaagcagaagtcttattaagacagacaagacacaaaatgtacataaatctaaaatctaatgtaatgtgactaaattataaacgcatataccttcctctaactccaactttatagaagcaaaagtcttacacttaataaaaatatacagaatgtataaaagcttactccagattggtttctttctgaatagggtcttttcatatggaaacctcacattatgtcatttatccttggtagtctacatgtgattacagccatcgcttttaaattgacactgagaaacatcatcttgcatttgtagcagatgcgctcttggtttcctaagtgcaaagcttgttgctaaggcacagggttgggttcagtggcaggagtgatgcctgttcttttctccaccacagatacaggagcctaaagcattttaattatgatgtctgccagagttgcttcttttctggaagaacagcaaagggccacaagttacattacccgatggtagaatactgcataccggtgagtatcttttgaatctactgagcagttatatcactggtttcttaatcttatttttatttccttatttgtttggctgattggttggctggttgtttgttttggattttttgagaagggtttctctgtgtattctttgctgtcccagaactctttttatagaccaggctggccatgaactcacagatctacctgcctctggctgccaagtgctgggattaaaggcatgtgccactacctcctggctagtaatgacacttttatctaatacatttttacttaactattttttaaaccttcaaaaatttatggttgtaaattttgttgttttctttccttttaaatataagtgtttcttatgttgaattaagaaaaattctacattataccaaatgtaatttgttaacttaccaaatatgtgttttcattttaaacttaacttttttggaagcatattaagaactcatactgatttagctatgatgaaaatgaaaccacttgctgaaaacaaccatgtttctcttaaatttttaaaggatgttttttgaaaaaaagagttataggtgatcaaaaatgaaaaatagagaaattaaaaattcatccatacatttagtttctgaacaaactaccttctaatatttaagcatgttctaattttataaaacatatgtatagttttacttgattttttttttaaagacattgtatgtcactcatgtagcatgggatggcctggtgctcactatgtgtattaggctggtcttggacttactgaggtccatctatgtctgctttctgagtgccaggattgaagacatgcactaccatgcttgctaataaaagaattttcttcaatctggagtttgtctgcccccccacccccacccccatttttccttagacaatagcttcctggaacaaagtattaagtgaatgaattgctatagctggcctaaccatcttttagatttaagtctttagtttcctataaacagcatttaagagcattactgagaaggtaacattttatatgtgttatataaattacatttcctttgggcaaatgaccagaagtaggtgagctaggtcaatgactatgagtagctctgtggccaaaatacttaatgtcaagttgttttccaaaagaggtccctgccaccatatcatacagtcacatttgctaatgtgttcattttgccatagccccctcacactggacacagttatggttcctttcatctaaagttgctttgtcctaagattatcctcattttctgtcaatagccattccttagttttgttccagattgtggcaaaatttatttatagagttgtatattttctttggtttagagaattaagtaactttttagcccataaatctatacaaaggcagcagtacttgtaaaatatgcacatataattctcctattcttgctgtcttattttaagtcaatagagattctttcatgtggagaggaaatttctagaaaatgttgctgaattataatggatgaaataatcttgatgcccaacattaactaggaaaatattgctcccaatgaagctggggaaatatctattacagttattaatttatttactaacccagttaatattgaattcttactgtatgtcttacatgattatcaaagctagctgctagttgaagtggtaggacagtttattcagtagaatccacatgtatgtgtgaggagtatgtctgtacacatagtggagtgctcagaagtatttgagcatgtgagaaggggatactggcttggcagtgagaaggacagggacagagctaagcagaagacaaaagaaaagtgacaaaagtgtgatgctggagaccagctgtgtctccagttagagaagttaggataaatctccataaaaactggaaggcattgccttcttacctaataatctcctttcagagaaatggctttcgaggtcctcaaggacaaggctcctgagttctaagcgatcatctgcccatttcaggaccacaccaaggtttccgactcctcattcctttttgataagtcctcttggagtggtcagggctcatttcagtgtgacattacacagacaggaaatgttttgagcagcatagtttctacaaggtatctacttgttctatgctgttatgtgcagctggaggtcataagaagtatgcagccttgagctatcagaaatcaaggtgatgcctgttcaagtcttttaaaagaggatgggatggggtggatggaacaataactgagaatgtgttatttttgtaggtcagaaattcgacagaatagaaggctatgaaccttagttagatccaagagagaatctgtctttagagtcaactctaatggtttgtcggttgtctaggaaagacaagattactgatgtccccactgctgtctatataggaagaggaaatatgtgatactgagcaaggcaacagagaaatgagatgactacgggtctagtggctgtatttgaaaagcaggatgaggagatgggagaaaccatcttagataagagcaatcaggtccagtttgagaagctaacatttggattgaatatgaaggtggagagattcagcaaccatgtacagaatggggtagagtaacaaggcattgagacggaagaagcagcagtctcagaaagaactctgatagcaggcaagaggctgacaagaagatatagaacagaagtggaacctgtccttcaaacaagacacagggcaggctgaagtgcctagagaaaaatgaaaaggtagggtcccctgttcaaaagatactatgaatttccaagtgacaataaaggatcattaaactgagctggggatgttctgagcatggtagctctgcgactagctaggccttctgtctaatgacaaagacagtgggagaacaaagggcctgatgaaatagtgtcaggttgtacaatgctcttcagatccttataatagatttggattgggaagcagtataatgttaatatttacatgataatagctagacatttagggagctgattataaagatctggtattaaatgggaaaatcaagataagtggataagggtagaggaatgacgtagaattactgtttttattctcactaaatacaataattttaaataaattcttaacatttctaagcaagttgaaagcaaggcatgtttaatgatcattgatcaacggaagcctgtttgcaaccagtaacacatgtatgaagtttcctttcctactactaatgttgaatttaaaaagaaaacaaagctccaagtcagcagttttcaacctgtagatcacgacccctcaggtcgaatgatcctttaataggaatgccaagaccatcagaaaacacagatatttgtattaccattaatagctaacaaaattatagttatgaagtagcaatgaaaataatgttaaccacaacaagagaaaccttattaaagggttgtaccattagaaaggttgagaaccaccgctttaagccttcccaaaatctttcttctgtgtggttatttccaagtggctttcatttctgaggttccatcttgctttttaatttcctggatggtatcatcctttcggtgcgggaggggatcatttcacctttcctgatcttatgtggcaatcctatctgggttagtttctacatttaacctacaacttctagtccatttttatctgatttgtgttgggaatcagccccagacgtacatgcatgctaggcaaacaactcaccacagagcatgctagacaatcaatctactacagagcttaacttataacctttcctaacttctggagatatgtctgtaaactgagtcttagaggcatagtcttgctttaaatggtatgatgtgacttaattacgttccagtgtttttcacctaaatcctttagaccttttccattctactctcttcgttataaacaagctgtatgtatggcccattcatctttaccttgacatctaccttaaaaaatgggcttaaacagtgctcaggtttgtttttctttttttcagtgaagtgatatttgtgcattaaatggttgtggcctttccataagcaccatgttatttgcagttctcccaacctgtcttcatttcaggttaagaaaatggcccattcatatcactggcttctctctttctcctccaaggtcacatcttacccttctttcaatgtgtttattgttaaaaagtatactttgtcagccttataatgaggctccagactccccaaatattccaccaacctatcagcttattgcctatgactgtgtttgtgtttagatgtagggaaactaatgaggtctaaattagctctcatgattcatgaaggtattttattatactactaataaaatattcacatgaggaaatggagtggaatttttgtttttacgaaactgcctttaactcttactacccattactattctataatccaaatgtgtacctttataattccttcagttcaacaaaagtttatgttcaagtgatagcgtgacttggattctagttagtgtgtgtcccctttctctctctattcatttgcatcttacctttcccccaaaataactcgactgattcttgtagaggaatctttagaggttcctctaggctttagacctctagtaaggacagtgcatcattatagaagcatgcagtaaacaaactacttacatcattagccagagagcagagaagagaagcagagacagtatcccacaatccccttaaagatcaccataccagtgacttgaccatccaataggcttcaccttccaaaagcttctgccaagttccataaggacacactggagattgcctttgatatatggaccttcaaggaacgctcagtatccaaagttagccctataagctgctgtaataatacagataggtgatgtgtaatgaacagactcttacttggctgtttctaaaagtgaggaagtctaagttggaagggacctcatggggccagaaatctcttgcatcattacatggtagaaaatagaagggcaagacagctcctgtgtgaaagagaggggaaggatctgaacacattctctatcgggaatcttcactgctaaaaagtagctcttgtgatcaaatccatccttaatggtatctatgatgtaattcactcttaaggattctacttttaaacactgttgccttcagataaaattcccagcacatctaaaaaataaaatcatttgtctctgtaatgaaaattcagtctcctttaaataattgctgctgtaaataaccaaaatttaatttgaattagaaaaatcattcatgtaattagagaatttgaaagttctttttttaaaaaaagttattttactatttcatccatacaacatttttgttagactgggttttgattttggtattggcattactggggaccaatctcacggtctcacacgtgctaggaaaccacttttcttctgagctccatcccagatcttttaaaaggcatttttattttgagatagggtttcaaaattgcatagcttgaccttgaacttgctgtctgccaacctcagccttctgagaatctagaactacagggctgccctaccagacccaacatacactcttaactatagctacagtgctatctatggagactcaggaactcactcttgttacaactgacagtttggatggctttctatttttgaacctctctccagatttgagaatcaccattctaccctctccactctcagcttaactcctcacttatttacattctttgtataaatgagaccatgcaatatttttctttgtatatctgaatcatttcactcaggtccatctgtgttgtcaaaaatgggaagaattccttcttttataaggctgaatataaattataagcccttccccatgttctctctctctctctctctctctctctctctctctctctctctctctctgtgtgtgtgtgtgtgtgtgtgtgtgtgtgtgtgtgtgttgattttcctaatccatgtattgtggaatatttaactagtacctctttgagaccatgttgtcattgtccttgggtgtgtgtctagaagtagaatttctagatcaccttgtattgatcctttaacttctttaaaggacttcagaccattttccatggtggctgaatcagtaatagtatatctttagatttcaggctggtggtatacacatagtttataagagtgtgtgcaatttctaactatgagcgagcgctaaatagggttacagtctaaggagagtgggaaaggcttataatctctgctagggtcaggctgaatcaccaagagaaaagtcaggtgctatcttgacacaagcgcacagctgaggcaatcaccaaagagttgttagctctggctctccagcgcttaggagctgtagacttagacaatgataattttagttaaaggccaaagcagtaagaaatccccaagtagttatggtattgtgattgtcatgggctttcctcgtgctgaagaaaccctattgcagatgaaagggctagagatgaaagtactggggtgacaaagacttgtatccaccacccccaaggcctcccccaaaaggagagggagacttcaaagagtccagttaacagttttttccctagttattttttatagactgaaaaatgttttgagttttagcaaggcttaaggtgtagttacatcccaacatttaactaaaattgaatgtagagggtttcagaagtaagaggacatttaagaaaatgacaagttatagctgtgtgatattgtatctttagaaaggcttcaatagtacattggctacagatggtgaggctgaggggaataatgtaagggaaggaaaagaaatatctcttcttcctatttttaagatcagagctgaagagagattatcaaatgcacacaagttcatttagtgccaagtttccctgacctctgaggcttccatgaggaaatgcagacccaggaaaatgggaagcctatttagttcagtgctaaggatttcataaagaatagacagagaattctaagtgaacaaagatgttcttatatagggtatagcttatgatcctagagaaataaaaagcctgcatgtgaagactctgctccatgtcctgtatcttcaaaacccatcaagacatttgctgctgccataacagaacacttgaaaacgagatgtttacaaactacagctggttcgttgtcacatagttttggagtctgagaaatctaagattaaattctgcctctggtcataacaattgtgttaggttattgcatgctgaaggacactcaagataacacaaaagagatggaggggaaaagagaaagagctacacacatccttttcatcaggcactcttctgccatatccttaatccactgatgatatcagaacccatattacccaatcatgtcataacatcctatccacaatttgtgggacactttcaacactcagcaacaagatggtgattcctacctctccaagagaggcctcatgagtttctttggtggagaagatcagagagtgaccatcctggttctgctggttttttttttcaaatgccttgtttgaggcaacatgtactgagctccatggaatagaaaccccattttctgttgtcatcagcactgggattcatttatggaaaaagatatgaacatgttataggggaatctttggaagcaagtagagggtacaacagtgaagcaggaaaagtagacagaggctgtgtgcatgtgctgagagacagtggcccccgctaagttaggggaaaggaaaaacccagaggctgtggtattgctacatacagagttcagaatatgaagggttggctagggtgtttgagagatgtgttttctagagatgagatttacaaaaacttgttacctagaagggcagaagtattggctatgtccagattctcactgttggtcttgagtcacagtaaatcttgatcagttgagggtcattggacagagctagattgtactggtggttactctgggatccactaagaagaactgggatggggctggggagtgagtacctctgtgaagacactaaattactgtcacttaaaacagattggtagtgtaatttttaagcaagtacatggctgtatcttcattacttagaaaatactttgtttaatcaaaactgtgtagctaaaaaccgtatgtatttaatacaatgtgttacttctcacaaacagaaacaacaacaaacactcatacctagctgtgaagtgctgtgtggtataaacccaacacaggaaactgagacaaatctttttacagaagtgacagcacggctaaggtttcccgatacctacagtttgtttatgtgaaaagtccaatagtagcagtgtatttcagaatcccatcaatagcttcatcaggttctgcagtcaacttagcaaaagtatggagacttccagggtactatagttaaaaaaaaaaaagttatttttagaacagctcttagcatatttgttatgcaaaatatagtgtggaagacaagaggtatgggcaggtaaaaaggatttactgagaacagaagcagagacgatgtactgatatattgtgcaggggctgcagataagttcttgcagagtgtagaacagctggggacagcacatatttgatcttatctcctgggctagtttacagcatacgttgtcttccttggggctgggcttttgggtagaggacgtggtgatctcttaagattgggctccaaatatttacctcgttgaaatcacattccaagtcatcatagcccagttgttaaagtataggaaatatcctattgctcttggcctttggctatataatattcttaatgctctgaatttgtaggtggataattatctgtggttttaggatccaatagaatcaaaatattatattaaaaaacattttttaattaagttaaatgtgcctttttgaattgtattggcaaaaagtgagaaaaaaatcaaataaaagagaaaaaagggaccaactggcaccagtggctttgtctcctcccttttgccagcatccttgtgttctgaaggctgtgagtatcaactggaagaaagtgctgactctgtcctggtgccgtcggcacggtttgtgttggcaggcctgcttcttcagatgtgcattgggatattggccaatatgctaaaactgcagcctcgttgccatttctctgacttcagcatcccgaagtggtgattttcggctcttatctccctgatgttggttccccagcaagtctggtacatttagatgagccattagctcttaagaggaggctgcaacaagctctgctttacatcggtggcttattaccatccttgttcacggtgattctgtcaatgttacttaatttttagctttctgggccctccctcattaagattcagaaggctttgagtttctcttactgattccaccaagctgtagaatccagacatgtcttaattttactttgttgaaatcagtgaaaacccagggttagttttgccattaaaaaagaaaaaaatcctggagtgtcttcaagtcttaggataatgaaatgcacatttagaagtgtgcatgtgtccctcagctctgtcctcagtaaacctgctagtgagtgtgcttccttcgatttaataattgcagcgtttgtgcgtggttcacatggcagcattttcttattcaccccatgtatcacatgactacgcatctttatattaccttgatttacatcatcacacttctgtatctccctatgtacaacttattaatatttgaatttaatagttgaaaatctaatgctggacatgtttgttatggacatcgatgttactgtcacttgagttatgactgagaaaattactgggaggtagaaaaaaaaacaaacatggttgtagttttgcttattttcagttctttttgttattcagcttaaattaatctggaattagcagttgggttttgtccttggacttttttggcatcattgtgagcagactctttctccatggtgccttgtggctctctggcattaggagctgttggttcttcagctgaagtagaggagtaatttattcaacaagtcaattgccaataaattacatggaggtccgtatttctgaatcctagactcttctgcgccttggccttgcattttcatttgtcacattaaatgagaaggaagtaactgtcagtcatccatcaatgcatttcaagtgtaagattgtgcagggagtcaacagttaagctaaggatgtgcagtttaaaacatggaccaggaacatggggattcatggacatgcattaatatagagatattcaattgaagccaaagataatctcaaagtctacatcacctgaagtagactatttttactctcaattaaggagtaattagagaggactttaaaatattcttgataggggctagagtgaagatttagtggttaagagcactggctggttttatagaggacttaagtttgattctcagctccaaagtggcttttaactgtaacttcaattctaggggatatcataccctcttctgccctatacaagtagtttatatgtatggcacacagacatacatgcaagcaaaacatactatcaaatatatataaagattatatatattttttatttttattttaatacgcgcacacacacacacactgcaggcttttattattgttattgtcattggtaaaatagggcctggaaatgcagttacttggtttcaataccttaggagttttgtagaggcttacatgattaggttggatctgtggtagcctttataattgggtaatgcctttcaatattgtattcattcattcgtgatgatggaaagccagtggagaactagctgttctcattacctaaataagctttgatcctgtcgttgctgcttcacttcaggggaatggggtgtttcttgaggatccccacacccagtattttcacagtgccgcactatcactagctttgaaagaaaaagagaaggaaaggagggcagctctctgttgtgagttcttacaggctgtgagctatcagtctagagggactttgagggagatggtggctctgtggtttcaagctatctcattctctttgtgtttgctgtttcctcttctttgttagctacctaaaaagtaacagagcagttagttagcaaaatctagaaatccacagagccaatatctgcaataaaatccaggtccaagaaagtctccaaacaaaactgatgacaggccaccatcagccacaggacctactggattatcaccatgtcagggaaagagaaggaagcaaaagtgcttgggaactgtagatcctctagagacatcacatggtttgtagaaaacaggactgctgcttttgagcagaagtctaccattgaggtgcttctcctgtccaacttccatgtgatagttttgtttcatctttccatattttattttgttatattttaatattatcttttagaagtctcttctttcctagtaagagacaaaaggggagtgaatctggataggaggggtggagggaagggacttggaaaagtagagggaggggaaactgtattcaggatatagtatgagagaaaagaatctattttcaataaagtgagaaaaaaaccgtacctaatgttccaagaaatgcatctggcatttaacaggttgactcattgtgcagtaatttccagtaagttcctttccattccatgcttcccgccgtaacagcaacagctgtctgcttttaaacaacaaaacactacacctaatgtgcagcgggagttgagtttgatggcaatgatggcttccattatcctaggtggtgggtttctctttgccaaggcattgcattagcactataaaatagagaggtgctagcaaatgccgttaggtggctaattagacgaagtctacaacaatgttttaccatttcagtgcaaaatattaagcttaaatcatttccttggctctattccaactgcagaattacattctcttataccaaaggtcatctcccatggctatgagaagagtcacttttcatatcttctttggtgttgcgataaagtttatagagccagtgaaatagcagccttagattacaactttggatggcaaacagttatattccctgaacacaaaaattactgaagaaattaaaacatgctgtttctatgtggctgtctcctttataatacacatgcactgttagaagcaatctaactccactgtatgccttaactctgggggaaatgatcaggggtctgttgggtttttggtgatgggggaagaatagagaaatagtgcttctttattgcttgattagattggccctggttttctaggtcctggatatagttgaagaagagtgtgtaatgtgcgattggacatttgagtggtacctttgagtggtttctctctttttattcaaatatgattctacataggtacccagaatagataagccagaacagcatagaaaccacagaagacatactatatgaagatctgtctatgaaacacccagaataagcaatctcatagagacagaagctatattaatacctggcagggcctgggcatgggtagtagtcatagagtatctttgaagagtgatagagtcattgtatatgtaagtagacagggttgtggttgtttaagtagaagtggactcataaccagtgagttgtatactgtacactactggggagttggcagcgaagcttggaacctggtcatgtggctttctttcattcatctcagggctacaaattcaagtcctctggactcagcgatgaatgcctaaccatagccaaacttagttacaggccgagttgaagctagagcacattcttcatttggtatttctttgtatgttaactgcctatgctaagagcaggcacaggagcagtggaatcacaaatccctatccagaaataaacagtttcagtttgtaaacaagtctctatgatgctgggtcacttgccattaaataaaaggcagaaagtgggaccagttggcacagtgcattcacatacgcatcattccgtttgtgttatatagataacttctctgtctccttataaagagggcaatgaatccactctgcgctaagtgtggaagcaaactacctgagtagtagttcagcattctgctaataatctgaatatgtaactggatcgccaggactagagtttctgtctgtgttgaatatgaacactagaattgttgatagtataaaattaggcttagaaaacagttgatggaatcagataagagagttggctttgaggattctaagcatatctcacatgtaaatggttatagatttatcatcttgccaggtatggtgacacatgaccttagtcccagcactcaagaagcagaggccagccttgtctacagagcatgctgtagcactttcagggctatgtaaagacaccctggctcaacgaagcagagaaacaaacaacaaactaaaacaccaatcattttgaaatccttaaggaaattgcaacatcatacatcatattacattttaatctgggtataacaatagtttttctgcttggttgataaagacttgagaaacttagactgttttcctaacagaatcctgaggtggccctttgcttcctctcctctcccctcccctcccctcccctcccctcccctcccctcccctcccctcccctcccctcccctcccctcccctcccctcccctcccctcccccctcttgtgcttttttttttccttcttcagaaagtgtctcatgtagctcaggctagcctggtatgcctattcctcttgcttgtatctcccaagtcctggggtttatgggcctgcacaccatgcctggttagaagggtttgttcatttgactgctttgttttcttcctcagctcttttgagatttacttagggcctcaccaagtagccgaggctggccttgagctacatataaatcctttgtctctttcttgtatgtgctgagattatgggcatgcaccttccatgtccccttccactgccctttctttattattgattaaaatttctcccaactagaatgcgtggtagcttgtgggcagcataggctaagcactgacctcagtttttaaacccaattcaaagtatgtcctctggaatgtcatcactactcttgtagatggaaatcagtttactcacaggaatcttccagtaagctttccaaaactgtaattttgggatcaagttttaaaatatagaataaagaagctatttagtggtttacttttaacacgttttattaaattatggcataactgaatgtgtctttcatagagtctcaattaccctttattttcctgatactgggcttttcaaaggtatataaaggtatttttggcatttaatgaccgtcaccttacttctgctcagcttttgttgtagatattgttgtagcctttttaaccagaactgtgaatttttcaacctatagacaacatctggggaagatgtgagagatttcactaaggtgctgaagaacaagttcaggtccaagaaatattttgccaaacatcctcggcttggctacctgcctgtccagaccgtgctggaaggggacaacttagaaacgtgagttctgttctagcattcagtttgtgcgtgcttgcacctcattgtctttaatactagtgctaacaacatgaaacaaattgcatcttttcaaagagatttgtgtcctgatgaaatattttattttgaaacaagttgctcttcaacagttaatttgtattatctggggatttttgtttgttgtttccgaatgtgtattattatttcttcctcctcctcttctttctcctcttcctcctcctccttctcctcctcttcctcctcctccttctcctcctcttcctcctcctccttctccttcttcttttcttctctctctctctctctctctctctctctctctgtatttagaaatatttgcccaatcaatgtggtattatttgctccttcattttttcatttatttcccttcctttcttccctttcataggtttcaatctttttgttataatacctttcattattttgtttcgtgttgtggtactggtctgaaccctgagccttatacttactagagaaggactctacttttgagttatatcctcagctccacattatatctttttaaattaaattatcaaaaatatttcatcttacacttcaaatgcaactcttctctgaaccctcgttttatgtttcattgtcatctccttaaagataaagttggcaaaaatgaagtatctttatgcatctatgaagcagacaaaattgcttacaagtctgcaatttgagttaacaagcatcttctaagaaattaggagggagaaaaaaaattacaatgggatcataaagctaagaaagaaaacaaaagactctagagcttgaaatgagatgaagaaagatgttaaaatgagccagaagacatacatacatggacattttaaatcaccaggcagtcttctattgagatcaaagtagatgtgattttaactcatcgaatccctttttaaagcatgtacttcagcgtttcaactgcaatgctttttgtatgctggagtgtgtaagcaaagcacccatgtgactatatgaggggtgattgattaaggaagacacccagcattcacctctggcctccatgtgtaggtatatacatgcatacacacacccaaaaaagtatgtacactacccacaacaatacattttttttctcattgcttccataccacataagacaaatttaacatttgttttattttaaacaaagctatttaaatacatttagaaaatgcatgtcttttgtgaatatgcttttgtctttaaagagtgtatattaattattcttgttgttgtatccgatacaagtttgacttcctgaagacctgataaagtctttcttctgctctgatcacatcgacttaacctttgacatagctcattgtggcatatagtgttgtaggttgactatcacatcgtgctgggatctaagagggaagagagtagacttgtattgagcaatgttgccttgcactattttcataaatcatcgccatttttcatcccaaatatctccacccttcacatgagccatagatagatggatatttcctgctcctttcttttaaattttaatgttttgcctttacatgtcaaaatgatcatgacatttgatttgtgggcacacacttgagttcatctgtgtatgtggagcctagagattgacatcagttgtcatcttcaattgctgacaacttattgattgagacagggtcactcactgagtctggagcttgctttctgagcaaggctggctagccagcaagtccccagcatcctccagtttctgcctctgtactgggatcctaggtgaccagattccatgtgggtcagggggttgaattcatgtgttttgtgcttgcagtgaacacattttactgactgagccatcttcaggatccacttagagacttttttttccaagtaaaaatgaacagaaaaccatgcaaaataattacattctctgcttttgatatactacgctgaaaatgcctcaccctgattaacataaatttcccaccattttccaagagagatacaagaaggagaaaggaaggggcatctgattaaattggatgccaccaaatcccttttgaacaagatttatgagctactagatagtgtgggtgggtgttcttcaaatcctatgcagagctctgtggatttgctgtagttcatttttctgctgaaccctcttctgctccaaggtcacttaatcattccagtggaacaatttatgtgagtgggtagggttttgtttttttgtttttttttaaagaaaaaaatgtttgatttcatttattctcctacttgtgggaggagagaacattggagaaaaaccattgaagtggtgaaagtgttgaagttatttatggagctgggtaaagcttcctttgacttctttcatctttgccaatgtggtactttaatttctgaccagtgattagccatgcaggcatgcatgcagggactctatgaggagaaatgcttattactaaatgggggtaaacatgtccatgctaaggcttattcagttaatttaataggtctctatgcaagaattttcaaaatgagaaaaatttattcataatgaagttgaaaaaaagagctaaaataaaatggtggcaggaataatttgagagttctgagagattattagtgactttagaattagtttagtttccctagagattaagaaacaacaagaaacaccgacttctggtattgggtaatatatccatagtgaatataatatataatatatagtgactgagtcactctttgaagaatccctacagagcaggcgcagttgtggagagggatgttcaaggctggaagggacggataacgatgctgagacctgcctgaatcatctgctgaggactcaggatggccagaggtgaaggaaaagactcactggccaaatgaatcattttcaaaagcctggattaaagttctaacacgaaactaatatcaaaaacaaatgagagaggcagagccagatgataaaggaccttgttatctatgctcacatctccagggtttaacttgagaatagtgagagagttcacaggtaacaattacgagaaaagagtggtggatggttcaggaaagatgttgatatgaaattacccttcagaaaatgaactttagtaggagcaagggggcttcactaacacaggaaccatggtcatggcagagcattttgagcaacaatatatcatatcagaggtatcttgatgggcctgaaaggtaggagagaattatagaagcattgcgaaagtttgcctggggctagggagattccctagtagttaccagcctgatctgctcttccagagtttaattcccagtgactatgttgggtagctacaaccacttgtaactctagctcctggacatccagtggcctctcctggtttccgaaggcacccaccccacatttggcatgttcagacatagggtagatacagtggcatatacacagacaaatacaaatataagtcttgaaaagaaagttactttaagttgaatgtgtagaagaggtagtgttagccattgtagacagtgttataggtagtgttagctatagacagtgttataggtagtgttagctatagacagtgttataggtagtgttagctatagacagtgttgtaggtagtgtaagctatagacagtgttgtaggtagtgttagctatagacagtgttgtaggtagtgtaagctatagacagtgttgtaggtagtgttagctatagactgttgtaggtagtgttagctatagacaatgttgtaggtagtgtaagctataaacagtgttgtaggtaatgttagctatagacagtgttataggtagtgttagttatagacaacatggtaaaggtggaaagtacacaatctagagagacagagaagttggggagcttggctataacaccacatgacgcagataggaaagtatatttgtttacattttcacattatattttatggcatgcgaaccagccagaattacagggtcttgttaatttgctgtcctcagtggacagactgactatagggagtggagagggagggggtaagactagtctggttttcaagcaccaggctatgatctaacaggtagaaacagttaacagctttggagcaaatgggttaaagaatcaaaaacacggaaatatgaggagactgctggcaatttgcgtcattagatgtctatgttggaattcatagacttacatttatattagagtctgattcttctcatagcatatgaaattagtcaaaccccccgctgagctgctacactgaaaacaggaagcagctccattttgaagtcagtggtagctcacagattgatgctgcctttattttattatttacttctctgcatttgggtgctggcagtagcagtcagagactcatctatgccaaacaagcagcctggcaagtgagctcaacccttcttactgtaggtcccagggatgaagcgcggcgctgctgttctttcttcctactgagtgtgagcttgtatcacaacttctccctgtgagccaaagtcctctgaaggcaaagaaacctaaagtttgattttgtatctgtttcctttatttgatattgtccgtgaaaaatgttcttctttcagtccagctttctgcctgttccattcttagttcacaaatttttgtgccaacaattaacttcctaagaatcgctaaagccaatccacaaagctttgccagggtttcttaagataagtgcatatatatatatatatatatatatatacactcacaattttttttctgttgaaagcttatattgaatgttgtcctaggcttgaattttagagataatttcttaagcagttgctgttttaggaagagtgacacagggtgcagagctgtctgtctcttgccatttgcaaggtttcagggataatgagaagtagtgatatactaaagacgaggaatgatactgtgtctccactgtcccggcttctcctttacatggacacagttaactctatttacagaatacatattttggcagacatagaggatgaatgcccacttttgaaagcagatctaaagaactttagctttctacccaataagatgacctccatctctttaatgtctgtagtgcacatatcatcttgtgcttcacacagcaggagataataagatcatagttatgtctccagtccacatatgtaatagaaaaggaaatctgaaaggattttgcttgatcagcaatagctttttcaagagactttacataattagagtactaattttccttgtgcttttaaaattctacattcatcaggtaattcgtcaccaccttctctcaaaagttaagagtttgaactactgtttaattgggatgagttgtttcaatggcatttcatggagatttgaggctctcaggggatctgaaaatctagggcggcccctgcactgcctcagacccaagcccctgattcaagcagagctggttggcccatgttgtttcctagagcgaacttctagttaatagcatcatagtggatggaagtctgtcctgtcctggcgaggtcaccctcagtgtgctgatgctctgactctgaggagggcataggtaggaaggaaaacttttcttttccatgtgtttctgaaattgagaaatgtggtgtacacataatttaaacttttatatttctgaatgaagagccataaacccctcttacttcaattctgatgtcaatagtctagtaattaggtaataaattcacctttctaattcaatgtcttttccaaggaaaaaaaaaaaaaagaactgtgtctcccttagaatattctggaacatcatcttccaacagcctataatgtgggacgatcttagcacatttggctgatcttttcactctcactgttctaaaacatgatgcccatcttgacacatggatgctgcaggtgtgggaaagttgctttcagtttccctggcggtgaggtgatgatcaaggaagccaaatgagagtggaagacgaatctgcctccgtctgcttttgtctgaaatcgctctaaatgtttgttctgtgacttttgtctccctgtcccctctctgcagtcctatcacgctcatcagtatgtggccagagcactatgagtgagtattcacagccccctgtgcacaggcggggagttctaatcaggaatattagcatgggtctaaactactacttttacatcctgggtgacagtgctggtggtttgtttgcatggcagattcgttacttaactaaccttctaactggtaacatctgtcaatattgagaataaatcctttgcctttttatttcccccttttcagcccctcccagtcccctcagctgtttcatgatgacacccactcaagaatagagcaatacgctacacggtaagagactgataaccatcccccactctgcttttgtagtagttcagtgctgctgacaaaccttgtggtaggagtgtatttgcagaagtcatggttctattccatgtggatcctggccttttatctattcatgatgtaatttgtactttaccaaacacctgctatatattctgtgaagagtagattacaatagactgccattacagagctgctgagactccaaacatcaagcagtcaggataaagagaatataacctaattccaatgaataaaggtagcatttggaactgcccttgggagactgcgcacatatgaattgcaatatgtaattaaacttatgctaatatttgattattagggtttgtttttaagtccctaagcagagcaaactatagatctgcatgcagtgtgcaaaactttcaggaaagtgtgtaaaatcaaccattggtcatactagaaggcagctgtctccaaagtccttagtttaaaagctatttttaaaaaatagtcggccaggcggtggtggcgcacgcctttattcccagcactttggaggcagaggcaggtggatttctaagttcgaggccaggtctacagagtgagttccaggacagccagggctacacagagaaaccctgtctcgaaaaaaacaaattaaaaaaaaatggtcacatttgtgctgaattaagactaagtcagattttttggagctgttggataacatgctacagaagaatgtagcttctttattgaactacagaagggagaggagtggagagtctgtggggttaacaaagaccatagtctgataacacagagcccggttgatcaggagttggttcacattctaggtcaagagaagtcatggtgaatcttcagacctgagaggaacaaaattaggtttgtgtgaaaggttgctctgtttcagtggagaccagctagagggcctgagggctcaatgagaagacctcacactgtggtataccgcctacaggcccaaagtgaatggcaatcaaatttcagctcaccagtacagatggttttaattccaccactgagtgagatctggactattttctgttaggtcataatatagatttaaaagccagcaagggtgcttctggaggactgttccagttgcagccgtgtaatgtcatcttctcgtttttgtgtttccagactggcccagatggaaaggacaaacgggtccttcctaactgatagcagctctacaacaggaagcgtgtaagtgcatcgtgcattgagtctgcccaagaggccaactgaaatagttggggttgtgaaagagtatctcagagattggggccaaggaaggccacagacaccacaccatgcaacagacctcatagaaaagatttactggggaagtgaggagatgtagaaggctgcctccgaggagggatggaacaacagagagatgggccaggtcatgatggtgggctttagaggggatatggagcacatacactgggagggtatgtgatggtggaaacgtgtcctattggtgatgactgggccatggaaggcaggaaggaacctggttctggaatgtgggaggttcttggctgactaaccttgcctccttgtattatggtctcaggattaatcttcatagatcatggcatctgagttgttatcccaatccaaactgatgtgtgtttcatattagtctatgcacattttaacttttaaagccatgttagtgtaaatgaagcatgtttatttacttaggaatcaacttatctgctttagaataatcagattgctgcataattatataatattgatatgtatttttgtggatatttatatgttttatgtttgtatttatgtgggtatgtacacatatatacgtaggttcatatggttgcacatgtatgtggaggacagggataaatattagatatctttatcaattttctcctatttatttatttgagacaaagtttctcaatgaaaatggatctcatttatttggccaccctataagctctgtctctctccaccccccacccccacccctatccaattccctcaactagagatgtgtgctaccacaccccacttgtacatcagagctgggatctggactcaggtcctcattggctccctggctagtgttttaccaacctagccgtctctcgcacccatagtattgatagttttacaaatttattgatagttttacaaatgcacatccaggatcaacacacttttgtaacttcctctctcctgtgcgttctaacattttcttcatagtctctgctgttaacagtgccctccacacatgcttggacagactcattctgccattcactgaaaaataactcccttacaaatattttattttatcaggaagtggggaaagcttcattgacttataatatcttttagaaatagcttcggagctagatattttatatctcatttccttatttgtacatcttaagcttggctgtggaatgctcttggcaaacgcttcctctctgatgttaatgttgtaatagatcttttctctttgggacttgttttgaccttgtttttttatgagatgatgtgtaaaaaggcttgtatagtttcaagttgatgtgacttgtaggctcactatggttttgaccagtcagggagcccaggagaacctgagaagctctagaatatagtgtgcacatgttctcactcacaaagacggaagaaagccaagtagaataatacctcaagccagtggttctcacctttcctaatgctgtgatcctttagacacttcctcgtgttgtggtgaagtagcattcattgctacttcataaatgtaattttgctactgattggatcatagtgcaaatatttgctatgtgacccttgtgaaagagtcactggactcccaaaggggttgtgaccctcaggttgataatcattgctaagaacactgataaagaatgactcccttaagtctgtttcatatttcatttatcattaagcttataagtagaagctcttgggaacttttttctattttaaatatcaaaagtttggcatcttaggcatcataagtcatggctgaggcattattattcaggtgttatgaaccagaaaccacttcagctcaagataataaaatatttgccctgctctttcatatataacctaacagtaagtgtttcatataaagtaattaagttgcttaaatatctcttaaatcaggctagtcctcacctcaccagtgttaaaagcagcagggaatttaatgaactgaaaaataatagttatgataaaaatctaacttcttcagaacatttgtgttcctttctatgtgggcagaacataggaaatacaatgtgcactgtcctttagttttctcgcgaatgtgtcagaacggagaagttatccagatgattagcagctcaacagatttaacacagagacctttggtgtggtgattcattcaacagatattcattttattcctagacggtagtgaagtgatggagccacttgtgagaggcagctgttacactcaggacgtatgtggcctgtttggcagagccctattccagtctgtgtattctctcatgtatgtgcattgataagtaaattaagtttagttttaggagagagtgctcagaacccaccagccctgtttttgttcttattgtgttttgttgctgttattttattgtttgtttgtttttattttcctccctcttttatagacagggttttactatgtgccacatgctggcctcagatttccaatcttccgtctcaccctgtaaagtgttctggtgacaagcatgtgcttccagctccttttacctcattgtactctcgctgcccctgggtgatgtttagtcggggggtgggggggtatgcagctgtgtatcttccgcatcttctgcacacactattgaagggtgagcttgctcaccatgggagacctccaaccacagagctagcaaagatcattcaccaatatttggttttgggttgttttttgtttatttgggttttgtgccttcagctatagccaacatacctgtagttggaggtggctttcatccttcaagtaggatcatggaaacaattccctgtcccctctccaagtactcccctccatgaaccttcactgtgtattgagcattcatgtatcatatataccagtttcccaaaattgacccctacataatccagtcccaagtactcccctatttctctgaaagccagactccagatgatctgttggggcattagttttaaggcttctcagtatcttcgtaggaagttattcaaatacatcttcaggaggggcaagactcagagagacccttagacagcagtccctgaggccgttaaccagcttctcactccatccactttctgcctttgggtgatgctgttttatgtggactgaagttggggcttggtcatggtctacctcaacattaccatttgtaaatctgaaagctggaatagagcattggttttaaagttcatcaagggaatcacagctctttcatcatgtgacaggtactaattttgtaatgtagatagtatttactatatgtatcacatacagtataattatattgcatctaatgatacctcttgatacaggctacatttaaaaaaactttctatttcagcatgatgcacactattgatgtttaatagccctaatctggtgcatgatgtatcatctgcataatgagggtgctcttggtttttattatacacaattaaacactagaacagatctatttttgtatttaacctttaaggctaataatctatgaaaatatttaaggccaagattttatgctacatgtaaattattctatttttcattttacagaaatgaccttaattctcttccagacaccataacaaacaatgtagttagtggccatgataattattacaacgccctgtacatcaagttcacaaaggaggcgaatttacattaatactgacaacaaaatgcttcccaaatagagaagttcaagtggtttcccagtgcccagattaaaaaaaaaaaatttctcagttgtgtgtgcatatgcatacttgcatgtgtacagagaccagaagacaacttacaggaggctaatcttttcttccaccgtgtagcttgcagatgttggaacctaggacatgagcaagtactcttaccacttgggccatcttgccagcccaacatttgaaaccaaaagtgtggtttatgttattacgaagcacctagtccccaggcccaagtgtctacacaaatgttcttagggaataaatgatctctgctatctcccaatcgcaggggctctagtccaaatctgtggccagtcctagccataagataattcaggctattttgggggtacatgatttttattcagaagattcttatgatttatcctttttaaggtattgactttgagttttttagggatagtatccacaggcattatataactaatttgacttgccttttatttatttcaataactaaatctgcgtcaatctgatgcgaatgactgaggtaggattccacacatcacccccttgtcattgaatcttaggtatctgggacaggaggggcccaagcttttctttcctttgtaaatgactgctcattttgctttgatttttagtggattactcatggtgttttatccttaaaacatagaacatttactgacataacacattttccgctttcttggatatcccattgtttagttgcttgcttaggtgtgtttcagcctgaaagggaatatttgcagtatgttctgctgtgctctcattttgcagttgctttagtgtgtgtgccctccatccttacaccttgcccatctgttctgtcctcgatgcatcttggactcacatcttttcctactgccttattttccacttgatctcagagtggaaccaccacccatgatacacagtctctaactcgtgtctcaggctatggatttattcatcacagggcgtcagggcttcatctctgcttctgcctcttcaagtacttatgtctaggctactgatcatgaacttgtgtgtgtgtgtgtgtgtgtgtgtgtgtgtgtgtgcatgtgagtttcatacacatgaaggtcagagggcaacttatggaagttagttctctccttccaccttgtggctccgggagagcaaactccagtgatctggcttggggcaaccactttcacttgtagagtcattttccttgccagagctctgtttcattcttctgtgtgggtagctgtcttagggtttcgtcactgtgacgagacaccatgcccatggcaacttttatacaggaacacatttaattggggctgccttacaggttcagaggttcagttcattatcatcatagcaggaagcatggcaacatccaggcagacaggattataaagaagatgttgagaattctgtatcttgatccaaaggctaccaggagagaactctctcctatactgggcagagcttgagtgctaggagcccttaaagtccccacacacagtggcatcagcactcctaatagtgtgcttcccatgagccaaacatatccaagccactagagtagcctagaagttttagctgctgtgcaggggtcgtatatcaactttcctgctcttctcatcctttgaaccctcaggacatcatgcgacttcttttgttccctctagagatcttgcatttactatgaaaggtgagatgacgtcatggccaattctatcttttgtgtcatctacctgctgtatttttattttccaccatcattgtaaacaaccttcaaaagaccctctttaaaaaggccacatttgtcaggagggagggaagttaagttaggctttaagcttagccaaagtacatgagttttatttttgatatacagtcacactctctcatatgtgtgtgtgtctgtgtgtgtgtgtctgtgtctgtgtgtttgtgtgtgtctgtgaaggaaggaaagtgagagtgctcaatgcaggaaggaggcccattaagtcaccaagaatttctccctctccctctccctctccctctccctctccctctccctctccctctccctctccctctccctctccctctccctctccctctccctctccctctccctctccctctccctctccctctccctctctctctgatctctttgcctgaaacacatttttttctaagaacacactaaatcatagatgcaatttcagacccctgactatcagaacaaaagtgtgatatgccaaggatggattttctatcacacataagaatcagagtgcttgcccagtatccagtactgcacaagagcaaaggggttttaaggtccaggtggaacaataaagttcccagactgccaggctctccttggctgttttagcacagagtctgatccagggctacagcgaaagatgctgagagaaccgtacagctgcacagcttatactgaaggctcagccataggacagctccattttcaactctggtgaacacatcagttatgtcttattttcctgatgccttatcctttatttcccctcttgacaaaaactatcaaaccaggccatgtccagtatgctagagggctctgaaatctcctgagccaggagatggatgtgacagtcataccttcctgaggacatccaactagatctgcctcacaaaggaagaacagagattccagcccagctggaaagctttttcattaccacagacatatttggccttgtctcccttcactcttctgctgctgacagtcatgcatcaacactactgtcgatgtgtctagttcagtaacagatcattggatgaagaacttcaatgaattaaatgtaattaatgatttaatgcaggatattgatcctaaaaattagttatgatgacaccaagtaaaatagctactgctattttataaatatgtacaattgtgtttatgctgttatttaaatagaaatacgttgtaaatcctttgggttatcaaacataggaaaactggttatagccaaatcaaaagatcagtcattcttggtgctgtgatcttttagtccactgttttggtagtcagtgggcaatatgcttgcctatatcatctttaacttttatgttaactgcttctaggtatgtccaacccattgatatttgtaacatgttcttatctaaaaatgtggtggactacatttcaagctctcctgagctgcatgcggcttatggtcataggttgggtgcaccccattaagcctgatttatagcaacttattactcttatttataggcatggatgtgcctttttttttttttttctgttgagtggaatggctctctggggattgtgagaataacaaattgtggcatgagagttttgatatgttgagctcatcctacacaagcactgtagcatgaactccagcatccagctcgagtttcaaaggatggccatggagacacagagttccgaagcagcctggtccagccaccggtccaggcgtcacaggttttatttcttgtgtgctctgagatctcagcacccagatgtgagctgatgggcatcttccttgtctctagggaggatgagcatgccctcatccagcagtactgccagaccctgggcggggagtcacctgtgagtcagccgcagagtccagctcagatcctgaagtccgtggagagggaagagcgtggggaactggagcggatcattgctgacttggaggaagagcaaaggtgagctagacccgggagaagaaaatacactactcgctccccttcccttccttctgtcttttcagagatgttatctaagacatcacaatgaggtccaagtttgagaggacattagcaggctgggatgtgggtagggcctcgtgcatctgtgatttaatgatggatcctggaaaaactcttgcttgaagcccattttctccctcctagctcttcgtgctaataaatgtttttctatgagatgaagagtatcaaactaaatttggagttcccaggcagtttgggggagataattatctgataataattctggttaattttatatttttccctttccatattagaaatctgcaggtggagtatgagcagctgaaggagcagcacctaagaaggggtctccctgtgggctcccctccagactccatcgtatctcctcaccacacatctgaggactcagaacttatagcagaagctaaactcctgcggcagcacaaagggcggctggaggcgaggatgcaaattttggaagatcacaataaacagctggagtctcagctgcaccgcctcagacagctcctggagcaggtaggggtgtggattcctgtgcagcacctccacaggacccacccacccacccacccacctcactgaagcctggacccgtcaattcatgagcaacacagttaattctgtgtatgagtggaatctccactgatacaaaattgtctgttttcctatctgactcatagaaattctttcttcttttgtactaaaatatcaccttagaacagtttgactttaaaaaaaaaccagaatcctgtggtagccacgagcctgactttcatcaggaaagattccacagagaatagggacagcaggtgacctacaatcttcaatctaacactttcttccagagaactaggactaagaaggtacctcagaaatcactgtctgtaaaacaacgacgacaacagcaaaaggaagcagaggaacaggtggctgctagtttgccactgtcatttcttacacgggggatgctctgctatagcagtgacttggaaactttcttgacaacaagcagtacaattttcattttgaggaaaacgtatgtttctgatgagtatgaaatgatgcacacctttaacagagatggatgcacacctttaacagagatggcgtctcttaccctcctccccttccccggccccttcctccctccctccctccctccctccctctctccctccttgttttctcttgctttcctttttataatattgggaccgtttttaatactggcacctttcttttatgattaaatactggctaataactgacagttttgagaaactaccatcctttggtttgtggcttctgcctttctgcttctgcccctctgtgagggggaagaaacaacgtggcaaggagccacaggcagagagttaatagtttgactaacttaactagaagagggcagtcagctcgcagagctaacagggagaacacctttgctgcagacagatataatgttgatttccccacataatatttcctgactggcaccagcagtcctagcacggttgcctttttctccagcctgtgtggggtggcgtcctgtgacatcctaacagagatgccctttcccacatgtgctgtactgcattaaagaaaaccatttctccggggatttgcttacgtttacgaaagctgtcttggcttagttgccaccagggtctttttatcttgtcaggaatcttgaaagcattataatttttgcattaccaacatagtggacagttgatccctttccctcctttggccacttgcttttctctctctctctctctgtcatcatagagtttctttgatataactgtgtgaatcatttacttaaaagactgaaaattctccatctttggaaaataatggcttgctaagtgagtcaaaacttggctttctgttaagacctcagactgtttgcttgatcctatcctcagtgtcacatatattggcaggggcgggtgttgcttgtagagtgaatttgaagttcccacgtagtaccttagtacagcataagtttccttgtgtgatctcttagagcggcagttctgagcctgtgggtcacaacctctttggaggcattggatggctcttctgcaggggttgtatgtaagatatcctgcatatcagatactcgcactatgagtgataatggtagcaaaatcgcagttatgaagtagcaacggagatagttttaaggttgaggttaccatgacacgaggaactgtagtaaatggtcacagcactaggaaggttgcgaatcatcaactgttgatgtccacagtttagcgtccacttggaaccatcacacaagctctgctcgaagcccttgcgtgctgtatacctttttgatgctcttgggaggaaagaaaaggttcctggactcattcttccaacctcccccctgccatcccattagaccaaggacctagtggctcataggccttcacaattacacagtaatgtttttggaactagctgatgtctaagtggctcagaatatccaaggctgtggagctcttatctcttcataacgatttagtgtgcgtgccagaagtagatggaaattttaactcaatataaacagggaaaactaccagacatcaactaatagggatttaatggaaaatctacatcaaagaggaatttctacattctcatattatagatcctgctttctattttgaccacgtacttatcagcatgcccttcggtagcacaaagatatgcacgggagttatcatggagggttcgccctgtgtcggactgggcaaatggctttggaaagactcatttatcactttcctggcaaaattctatgccgcggctatggcccataaagctttatttagcatctcttcctccgggttcttcatccacactaaggtgttaatgctaaaacagtttgtacacagcatctaacacaaaagtttctgtagtttgcctagaattgtactgattcttagtgctccaagttggactttgaattcaagctgctgaatccaaaatccagggggataaaagcactctctctctatatcgcctctgaggggagctattgaaagttagtacatttgccattttcaaagtacaatggcactttctgaaagatgaacccaaattacttctaagtttactacattggtgtaaaaataatgtaaaatttgggagatgaaaatggcagacataaagaaattctgtggtgtaagaagaagttcttcaaagcacaaacatggagcaagcatttgggtctcaggagaagtgttcgggccataacctaggctgaaattgcccaaggaccatggcaggggctggaggtgggggaggaatactgtcctttctaggttgcaggcatctttcttactctaacatcccatgtgattgcagcctgactctgactcccgcatcaatggtgtctccccctgggcttccccacagcattctgcattgagctactcacttgacactgacccaggcccacagttccaccaggcaggtaagtgtcactgaagcacagttgaatttggactaggctggagtttttatggttttggtgtttggttgctagcattcttacgtctgtgtgctctggagcatagaacattattctctttagtctgaaatgaatgtagatccattttaataataaaaaaacactttagtcataatgtgcttgtttataaaatgtgtaggagtggattcaattttggtgaaagatgaaaaatttctcctttcatttgaaataagcaagacttttattttgctttgagaatatttgtgtgtgtgctcatgtgtacatgtatgtgtgtacacttgtgtgtgtgtgtgtgtgtgcacacatgtgcatgtagtgtatgttcatgtatgtgtgaagatgctccaagagccagaggaggacatccggtgcccggctctcatcctccacgtgattgctttgagataagttccctcactgacctgggataggatgggcaggaagcctcagcagtccttctgtctcagctccctcccccctcgttactaagggttacgggcacacatcatcacagccagctttttagttggactctggaatccaggctcggtctcatacccaacgcaggaggctctcttacctactgagccgtctcttcagccccaagactggtcgtttgcatatatgtttctctacaacttttacattcatgtacatgcagaacctaatgctgaagagtagcctgcaacgtggtcttctctaccttatccatcctagtctctgtggacattgctccacctatgctctacagcagaagtgccaccaacaccatcagtgacagtgtcacctcactgttatgctgttaaaaacactattgtagtttcaatcatagaataaaatacatatcgagataatataaagcaagacaaaatagactgtgataaaagctccaaaatggaaaagaaagaaattgctagaatattttatgtgcaaaataatggatttttcagctagcacactagcgtcaaattcactgctacttatttttcactttcatattttctcttagtatataaatttatccacataaacatatgatacatttttaactatataaaagtctactgctggagctaaggatgttgctcagtggtagaatgttccccctatgtttttataaagatctatgtatcgttcctgtatgctttgtgtgtgtgtgtgtgtgtgtgtgtgtgtgtatgtgtgtgtgtgtgtgtgtgcgcgcactgtatcgttcctgtatgctttgtgtgtgtgtgtgtgtgtgcacatgcttgcatgtatgacatgtcaaatgaatacagatgcttctgttcccccagaagttgttcttttcaatgacagttcatatcctgttcctattttggggctggttacggtattttttgcctgcaagcggttctttggtagaaggatggacattgattctaagctccctccttcctccgtgttttgtctcagcatctgaggacctgctggccccacctcacgacactagcacggacctcacggacgtgatggagcagatcaacagcacgtttccctcttgcagctgtgagtagtaacacctttatgcccccgtggtgtgcctgtcctgtccttcctccttccccacttgcaactctcttgtcttctttcggacgacagcaaagccaatgttagagacaagattgcaggctgttttgaaataacacagacatatgtgttgacagagaaagtgaagccccattcagatggcagagagattctgaggtccactgatggtatgatcccggccttggagattttcccacaggcctcaaaagcgactaaatagagtccattagcacaatgtctgcttttagaatataacttgggttaagtgcaggctataagaaacttgtgttacttcaaagaagagccttgaacggcatgccaatctaggatgaacacagcttttctaaggtaactttctacgttccttgagatatatctccacatgtcttcgtagtcaggcacagaaagcaattatttctggcctcccctctcctttaaaagaattcttttttttttcccttcagggaataaaataatcattgtgtgaaaaccagatgattcacagggtcacaaattatgagtctgaagtctccatatgaacagccaggagccaaaaaaaatcgcccaatgagagcagtccaaatcccaggggaaattacataatgattttaatcgattgaattttttaagtggtttctctcctggcatcttgccacccttgagattctgctgcactctcacctcagagacctctgtggtctctctactcaggagctgtccacagagtccatagacacagactcaccactggattgtgacagtttcaaatacttttaaggagcatgaaagggtcacttatcatttgggggtggggcctctcaaatggatgttaaaaccagtcaatcagtaaactacagttttgtggaagtctctgttttttggtttactgttttctgtcagctccctagacaaatctaagtcaggagaaagagattcatcaattgttggtgtaattgataaacatgttaaatctgttacagtaattgaagttaaaggttgaatttcatctcagaagtttttgttctggcttatgtagtacccaatggctagaaaaactatcatgttttatgaattagagtttcagaattaaagtttctaaacactaatactttttagctgaactgccacctaaatgtattcatcactaaagagcaaattctgtaagtggaattctgtttagaagtttttatttaaatttaatgttggaccttttcaatttaaaactctgttggcagtgaaatcagagtgtgagatatgcttaaatctacgctttgtaataaatataaaaatataaaatgcatagtttctataatggaaatgtgcttcaagttcaggatttttcttttacgagtctttttttctaaagcacttctaaatctttcctaaggcatattctgatatgtatatttgatttttaaaatgttcatctatgccttgcttaaaatagaatataatggaaaaactataactgtataacacctaatcttcaaaggtaactgttgctacctcatgccctgacccctgatacaaggataaaattcccattgagttgaaccactcacggtgattggttcctgagaagaggcttagtctctatggagaccacactgcagtggctaaacccttcccttgcattgagacctctttacctgtgacatcatccttggcgctcactgggttatttaaagaggcttgcagttccttaagaggaaaactgttggcattctctggcagtgtgtatatctaccagtgtttataatgttgagattttctatacatgagcactcctagtcatttgttataatgaagaatccaggcacctcttaaataagaaatggtacatagtacattttagagtcctgtgggatccacagactatgtgttcttacttctgaaaatggcattgtttgttccttttcattatttatattcatatgtttctctggcaaatataaaaatcttcaaggtaaaaaaaatgctttccaatctagaaaaaaaaaaaaagaactccattgtcttgtttacaaaattaatgcatacctcagaattttacctaggattactaaatcatttcaaattgtacagaatcaattagtgcatggtacagacctggtacctaacacagacttccagattgatgttgtcagtggtttacagggacagtcatgtttctagctagagaaatataatggttgaaaatttcccagctagcacttagaaaggttttgcaggattcattagctttaatgttccatttaaattgctcagttagcaaatattttatcgagagtctgcaactcccaagcttcctgatcacctttggaagtttatctaactaaataggattggcatgctctcattgcctaaacaatctcttgagtttctatagagaaggagaatgttcaaattgcttgtagccagtgtgtgatggatgggctgagctgcatgttaatcttgacttttgatcctttgtggattaaacaaattgcatggctacaaatgaatttcactcatggcaattttggaattaaaatgagtgtctgtattcataaatcctaatagcatgaatagctctgttagcttattttttatattgtgtcttatatgctgttgtgtgtaaagacttttaaaacccttgcattttgaatcaatattgcagttagcaatggtagcatctttgaattatgacctcttaaaatgacattgaatctcaaagcagagacacaggcatcgccatcttaccctaacaattaaagaattgaatttaatttgtgttgacagttatccagtcatgtagtagaaaattctaatgactataactgtttctttgttggcataatatagtctgcttatagtttgttcaaatatgtggaatattaatagtaaattgagctttctttctttctttctttctttctttctttctttctttctttctttctttctttttctgctagaagtaatgcttttagacttattgttaacttaccttgtgtttctgctgtgatcagcctgcatttgtcaggcttgaatggcatccatcaaaaactcaagacttaacaaaagcacaatgattacctaattttcttttaaaatacacagcttgttccaggaaccgcctataatgttttatttgattaaaagagataggaaggcaaaatggctttgacttctgtctagggtttgactattacatatccattatttaagagagaagcctaactgtctttcttttcagatggggtgtatatttacaacatgtctttactaataattcacctcagctacctccggggtatagctcacatgaggacaggggttcactcttttctctgatgggaaacaccttgtaggactaggcttatgtttccctggttcttctcccaaataccggggctcacattctcccctgctatcacagggaggaaatcaatctcaatcaatcaatctctctctctctctctctctttttctctctctctcctcacaaatgagccacagatgtcctttttcccccttatcacagaaaaatgaaggattggaagcatgtaacatgctacttgattagagacactcccctttggccaaggatagatattgtcatcattaccctttctttccctatgttgaatatgaatctgcagcgaaagtgtcaaatattggcaggcttagaggacatagccagccaatggcctgtaaagcaaaatggtgaagcagttagacttcaattactgttcacaacaacagcaacaatgggtcctgaaatgtgtctctagtattagaaggaggtagacatcctgcctggaagactataggaatcctaaactttctaggcgttgaggacaaaggcttaccccttctccctcctatgggagatagttacttgcacagcccagatttcctcaggaaagttcagagatagttttaaaagaattatttactcttattttatgttatgttcatgcaagttttgcttgcttgcttgcatgtctgtgtaacatgtgcatgtagtgccaatggaggcaagaagaaggagaagtggggaggaggaagaggaggagaagaagaagaggaggagaagaagaagaggaggagaaagaggaggaggaggaggaggaggaggagaggaggaggaggaggaggaggaggaggaggagaagaagaagaagaagaagaagaagaagaagaagaagaagaagaagaagaagaagaagaagaagaagaagaagaaaaagaagaagaagaagaagaagaagaagaagaagaagaagaagaagaagaagaagaagaagaagaagaagaagaagaagaagaagaagaagatgatcttaactgctgagatgagcatctcttcagcccttggattttttattttttctttcatagaaagcaacaattttcaacctgtgcacctctatactcttgagagtcaaatgacactttcacagggttcacatatcagatatcctgtgtgtcagatatttatattgtaattcataacagaagcaaaattacagttattaagtagcaatgagaataattttacagctggggtcaccacagcatgtggaagggtcacggcatttggaaggttgagaaccactgatagcccgcctataatgtctgtgtgaacagtggtctcttggaccattgctgctcttcagaggggctctaccctgctctgccatcagctttgtcttctagactatactcattttaatctctgaattgtttttagtgaagatcacaagaacaaggggtcatgaacatgatctcagtgaaaaatggacctgacaaagcagagatctagaaaagtcttggtagtgccagttctccgtaagcccacgacatcagcttctttgtcatgggctccgatgcaaggataatgttgaagggttattagcaccctaggctaacttctgtgctctttactgaacccatgtaaggcatcactgttgatccccgttctgaagactgctgatgaatgactagccttttcactgatgcaaatgtaccttcttcctacagctttcagcaagggtgtgccaaggtgtgcagaaaatactaattccctctaaggacccttttggtcagaatcaaactgtatattcaacacaacatataggctctcctctgtacttattatacaaaagtcaaaaaatacatggcatagttataaaatgaagttttcagattttttttctcatttataaaactaagaccttcctgaatgttttattttttttttccattttttattaggtatttagctcatttacatttccaatgctataccaaaagtcccccttacccacccacccccactcccctacccacccactccccccctttggccctggcgttcccctgtaccgggtcacacaaagtctgcgtgtccaatgggcctctctttccagtgatggccgactaggccatcttttgatacatatgcagctagagtcaagagctcaggggtactggttagttcataatgttgttccacctatagggttgaagatccctttagctccttggatactttctctagctcctccattgggagccctgtgatccatccattagctgactgtgagcatccacttctgtgtttgctaggccccggcatagtctcacaagagacagctacatctgggtcctttcgataaaatcttgctagtatatgcaatggtgtcagcgtttggatgctgattatggggtggatccctggatatggcagtctctacatggtccatcctttcatctcagctccaaactttgtttctgtaactccttccatgggtgttttgttcccacttctaaggaggggcatagtgtccacacttcagtcttcatttttcttgagtttcatgtgtttaggaaattgtatcttatattgtgggtatcctaggttttgggctagtatccacttatcagtgagtacatattgtgtgagttcctttgtgattgtgttacctcactcaggatgatgctctccaggtccatccatttggctaggaatttcataaattcattctttttaatagctgagtagtactccattgtgtagatgtaccacattttctgtatccattcctctgttgaggggcatctgggttctttccagtttctggctattataaataaggctgctatgaacatagtggagcatgtgtccttcttaccagttggggcttcttctggatatatgcccaggagaggtattgctggatcctccggtagtactatgtccaattttctgaggaaccgccagactgatttccagagtggttgtacaagcctgcaatcccaccaacaatggaggagtgttcctctttctccacatcctcgccagcatctgctgtcacctgaatttttgatcttagccattctcactggtgtgaggtggaatctcagggttgttttgatttgcatttccctgatgattaaggatgttgaacattttttcaggtgcttctctgccattcggtattcctcaggtgagaattctttgttcagttctgagccccattttttaagggggttatttgattttctgaggtccaccttcttgagttctttatatatgttggatattagtcccctatctgatttaggataggtaaagatcctttcccagtctgttggtggtctttttgtcttatagacagtgtcttttgccttgcagaaactttggagtttcattaggtcccatttgtcaattctcgatcttatagcacaagccattgctgttctgttcaggaatttttcccctgtgcccatatcttcaaggcttttccccactttctcctctataagtttcagtgtctctggttttatgtgaagttccttgatccacttagatttgaccttagtacaaggagataagtatggatcgattcgcattcttctacatgataacaaccagttgtgccagcaccaattgttgaaaatgctgtctttcttccactggatggttttggctcccttgtcgaagatcaagtgaccataggtgtgtgggttcatttctgggtcttcaattctattccattggtccacttgtctgtctctataccagtaccatgcagtttttatcacaattgctctgtagtaaagctttaggtcaggcatggtgattccaccagaggttcttttatccttgagaagagtttttgctatcctcggttttttgttattccagatgaatttgcaaattgctccttctaattcgttgaagaattgagttggaattttaatggggattgcattgaatctgtagattgcttttggcaagatagccatttttacaatgttggtcctgccaatccatgagcatgggagatctttccatcttctgagatcttctttaatttctttcttcagggacttgaagtttttatcatacagatctttcacttccttcgttagagtcacgccgagatattttatattatttgtggctattgagaagggtgttgtttccctaatttctttctcagcctgtttattctttgtgtagagaaaggccattgacttgtttgagttaattttatatccagctatttcaccgaagctgtttatcaggtttaggagttctctgttggaatttttagggtcacttatatatactatcatatcatctgcaaaaagtgatattttgacttcctcttttccaatttgtatccccttgatctccttttgttgtcgaattgctctggctaatacttcaagtactatgttgaaaaggtagggagaaagtgggcagccttgtctagtccctgattttagtgggattgcttccagcttctctccatttactttgatgttggctactggtttgctgtagattgcttttatcatgtttaggtattggccttgaattcctgatctttccagaacttttatcatgaatgggtgttggatcttgtcaaatgctttttctgcatctaacgagatgatcatgtggtttttgtctttgagtttgtttatataatggattacattgatggattttcgtatattaaaccatccctgcatccctggaataaaacctacttggtcaggatggatgattgctttaatgtgttcttggattcggttagcgagaattttattaaggatttttgcatcgatgttcataagagaaattggtctgaagttctctatctttgttggatctttctgtggtttaggtatcagagtaatagtggcttcataaaatgagttgggtagaataccttctacttctatcttgtgaaaaagtttgtgcagaactggagttagatcttctttgaaggtctgatagaactctgcactaaacccgtctggtcctgggctttttttggctgggagactattaataactgcttctatttctttaggggatatgggactgtttagaaggtcaacttgatcctgattcaactttggtacctggtatctgtccagaaatttgtccatttcgtccaggttttccagttttgttgagtatagccttttgtagaaggatctgatggtgttttggatttctttttttttttttttttttttttttttttattaggtatttagctcatttacatttccaatgctataccaaaagtcccccttacccacccacccccactcccctacccacccactccccccctttggccctggcgttcccctgtaccggggcacacgaagtctgcgtgtccaatgggcctctctttccagtgatggccgactaggccatcttttgatacatatgcagctagagtcaaaagctcaggggtactggttagttcataatgttgttccacctatagggttgaagatccctttagctccttgggtactttctctagctcctccattgggagccctgcgatccatccattagctgactgtgagcatccacttctgtgtttgctaggccccggcatagtctcacaagagacagctacatctgggtcctttcagtaaaatcttgctagtgtatgcaatggtgtcagcatttggaagctgattatggggtggatccctggatatggcagtctctacatggtccattctttcatctcagctccatactttgtttctgtaactccttccatgggtgttttgttcccacttctaaggaggggcatagtgtccacacttcagtcttcatttttcttgagtttcatgtgtttaggaaattgtatcttatatcgtgggtatcctaggttttgggctagtatccacttatcagtgagtacatattgtgtgagttcctttgtgattgtgttgcctcactcaggatgatgctctccaggtccatccatttggctaggaatttcataaattcattctttttaatagctgagtagtactccattgtgtagatgtaccacattttctgtatccattcctctgttgaggggcatctgggttctttccagtttctggctattataaataaggctgctatgaacatagtggagcatgtgtccttcttaccagttggggcttcttctggatatatgcccaggagaggtattgctggatcctccggtagtactatgtccaattttctgaggaaccgccagactgatttccagagtggttgtacaagcctgcaatcccaccaacaatggaggagtgttcctctttctccacatcctcgccagcatctgctgtcgcctgaatttttgatcttagccattctcactggtgtgaggtggaatctcagggttgttttgatttgcatttccctgatgattaaggatgttgaacattttttcaggtgcttctctgccattcggtattcctcaggtgagaattctttgttcagttctgagccccattttttaagggggttatttgattttctgaggtccaccttcttgagttctttatatatgttggatattagtcccctatctgatttaggataggtaaagatcctttcccagtctgttggtggtctttttgtcttatagacagtgtcttttgccttgcagaaactttggagtttcattaggtcccatttgtcaattctcgatcttacagcacaagccattgctgttctgttcaggaatttttcccctgtgcccatatcttcaaggcttttccccactttctcctctataagtttgagtgtctctggttttatgtgaagttccttgatccacttagatttgaccttagtacaaggagataagtatggatcgattcgcattcttctacatgataacaaccagttgtgccagcaccaattgttgaaaatgctgtctttcttccactggatggttttggctcccttgtcgaagatcaagtgaccataggtgtgtgggttcatttctgggtcttcaattctattccattggtccacttgtctgtctctataccagtaccatgcagtttttatcacaattgctctgtagtaaagctttaggtcaggcatggtgattccaccagaggttcttttatccttgagaagagtttttgctattctcggttttttgttattccagatgaatttgcaaattgctccttctaattccttgaagaattgagttggaattttaatggggattgcattgaatctgtagattgcttttggcaagatagccatttttacaatgttggtcctgccaatccatgagcatgggagatctttccatcttctgagatcttctttaatttctttcttcagggacttgaagtttttatcatacagatctttcacttccttcgttagagtcacgccgagatattttatattatttgtggctattgagaagggtgttgtttccctaatttctttctcagcctgtttattctttgtgtagagaaaggccattgacttgtttgagttaattttatatccagctacttcaccgaagctgtttatcaggtttaggagttctctgttggaatttttagggtcacttatatatactatcatatcatctgtaaaaagtgatattttgacttcctcttttccaatttgtatccccttgatctccttttgttgtcgaattgctctggctaatacttcaagtactatgttgaaaaggtagggagaaagtgggcagccttgtctagtccctgattttagtgggattgcttccagcttctctccatttactttgatgttggctactggtttgctgtagattgcttttatcatgtttaggtattggccttgaattcctgatctttccagaacttttatcatgaatgggtgttggatcttgtcaaatgctttttctgcatctaacgagatgatcatgtggtttttgtctttgagtttgtttatataatggattacattgatggattttcgtatattaaaccatccctgcatccctggaataaaacctacttggtcaggatggatgattgctttaatgtgttcttggattcggttagcgagaattttattaagaatttttgcatcgatgttcataagagaaattggtctgaagttctctatctttgttggatctttctgtggtttaggtatcagagtaatagtggcttcataaaatgagttgggtagaataccttctacttctatcttgtgaaaaagtttgtgcagaactggagttagatcttctttgaaggtctgatagaactctgcactaaacccgtctggtcctgggctttttttggctgggagactattaataactgcttctatttctttaggggatatgggactgtttagaaggtcaacttgatcctgattcaactttggtacctggtatctgtccagaaatttgtccatttcgtccaggttttccagttttgttgagtatagccttttgtagaaggatctgatggtgttttggatttcttcaggatctgttgttatgtctcccttttcatttctgattttgttaattaggattttgtccctgtgccctttagtgagtctagctaagggtttatctatcttgttgattttctcaaagaaccaactcctcgtttggttaattctttgaatagttcttcttgtttccacttggttgatttcacccctgagtttgattatttcctgccgtctactcctcttgggtgaatttgcttcctttttttctagagcttttagatgtgttgtcaagctgctagtatgtgctctctcccattttttcttgaaggcactcatagctatgagtttccctcttagaaatgctttcattgtgtcccaaaggtttgggtacgttgtggcttcattttcattaaactctaaaaagtctttaatttctttctttattccttccttgaccaaggtatcattgagaagagtgttgttcagtttccatgtgaatgttggctttctgttatttattttgttattgaagatcagccttagtgcatggtgatctgataggatacatgggacaatttcaatatttttgaatctgttgaggcctgatttgtgacctattatgtggtcaattttggagaaggtaccatgaggtgctgagaagaaggtatatccttttgttttagggtaaaatgttctgtagatatctgtcagatccatttgtttcatcacttctgttagtttcagtgtgtccctgtttagtttctgtttccatgatctgtccattggtgaaagtggtgtgttgaagtctcccactattattgtgtgaggcgcaatgtgtgctttgagctttactaaagtttctttagtgaatgtggctgctcttgtatttggagcatagatattcagaattgagagttcctcttggaggattttacctttgatgagaatgaagtgtccctccttgtcttttttgatgactttgggttggaagtcaatcttatcagatattaggatggctactcctgcttgtttcttcataccatttgcttggaaaattgttttccagcctttcattctgaggtagtgtctatctttttctctgagatgagtttcctgtaagcagcaaaatgttgggtcttgtttgtgtagccagtttgttagtctatgtctttttattggcgagttgagaccattgatgttaagagatattaaggaaaagtaattgttgcttcctgttattttagttgttaaaggtggcattctgttcttgtggctgtcttcttttaggtttgttgagggattaccttcttgttttttctagggcgttgttcccgttcttgtattggtttttttctgttattatcctttgaagggctggattcgtggagagataatgggtgaatttagttttgtcgtggaatactttggtttctccatctatggtaattgagagtttggctgggtattgtagcctgggctggaatttgtgttctcttagtgtctgtataacatctgtccaggctcttctggctttcatagtctctggtgaaaaatctggtgtaattctgataggcttgcctttatatgttacttgacctttttcccttactgcttttagtattctatctttatttagtgcatttgatgttctgattattatgtgtcgggaggaatttcttttctggtccagtctatttggagttctgtaggcttcttgtatgttcatatgcatctcattctttagatttgggaagttttcttcaataattttgttgaagatgtttgctggacctttgagttgaaaatcttcattctcatccactcctattatccgtacgtttggtcttcttattgtgtcctggatttcctggatattttgagttaggatctttttgcattttccattttctttgattgttgtgccgatgttctctatggaatcttctgcacctgagattctctcttccatctcttgtattctgttgctgatgctcaaatctatggttccagatttttttcctagggtttctatctctagtgttgcctcgctttgagttttctttattgtgtctacttccctttttaggtctagtatggttttgttcatttccatcacctgtttgtatgttttttcctctttttctgtaaggacttctacctgtttgattgtgttttcctgtttttctttaaggacttgtaactctttagcagtgttctcctgtatttctttaagtgatttattaaagtccttcttgatgtcctctaccatcatcatgagatatgcttttaaatctaggtctaggttctcaggtgtgttggggttccctggactgggcgaagtgggtgtgctgggttctggtgatggtgagtggtcttggttcctgttagtaagattcctccgtttacctttcgccatctggtaatctctggagttagtagttatagttgactctgtttagagattgttcttctggtgattctgttaccgtctatcagcagacctgggagacagattctctcctctgagtttcagtgctcagagcactctctgctggcaagctctcttacagggaaggtgcgcagatatcttgtatttggacctcctcctggccgaagaagaaggcccaaaacaggacctttctcagacactgtgttgctttggcagttcccaggtggtacagactctaacctaagcagactaaattcctaagttccttggagtcccgggacgaagatggtgaccgctgctgctgtggcttaggccgcctcccctgccgggtgggcacctgtcctccggtccggaaggtggccggctgtccccggcccacacagggtgctgcctcagcgcctctgtgcttctgcctgttccagaagctgtcaggttctctggcgcaccctctcacctgttcagactaatttcctaagttcggcgggtcccggaccaagatggcgaccgctgctgctgtggcttaggccgcctccccagccgggtgggcacctgtcctctggtccggaaggtggccggctgtccccggcccacacagggtgctgcctcagcgcctctgtgcttctgcctgttccagaagctgtcaggttctctggcgcaccctctcacctgttcagactaattccctaagttcggcgggtcccggaccaagatggcgaccgctgctgctgtggcttaggtcgcctccccagccgggcgggcacctgtcctctggtccggaaggtggccggctgtccccggcccacacagggtgctgcctcagcccctctgtgcttctgcctgttccagaggctgtcaggttctctggcgcaccctctcacccgttcagactaatttcctaagttcagcgggtcccggaccaagatggcgaccgctgctgctgtggcccaggccgcctccccagccgggcgggcacctgtcctccggtccagacggtggctggctgtccccggcccacaaagggtgctgcctcagtgcctctgtgcctctgcctgttccagaggctgtcaggttctctggcgcaccctctcacctgttcagactaatttcctaagttcggcgggtcccggaccaagatccttcctgaatgttttaaaagagctagtatatgttttgtgtggggttttggttttttctttttcttctctctctctctctctctctctctctctctctctctctctctctctctctctctagaatgtttgcatttcaaatcacatagaatatgagacatttacttggaaaactagccttgcttagagggtcagggtggctggcctctgcttcctgctagcatccttggaagggcagagctattctcttcctctgaaaagcattctatacatttgcatgcatgagaagggaaggcacaaagcaatagtaaagccctcaattgatttcttctattttctttttcagcaaatgtccccagcaggccacaggtaagagttaatggttcaattgacttcgctttcttgatcccatctgggcgtaagcacattagctgctattgatttagtttagtcttacttcattctccatataaatgagtaaagccacgtgatgtttaagtgttacttggttctgtacaacagattgttgctttgaagatgttgggtgggaccatttggttccccaaaccaaactctatgaggcacccaaagtacccatgctggatttcagttctcattccatgctctctactatacaagtttctgtgtaaatctgactgacctcaaatctcacatttgtcacagaacagtgactttgaaatgtccctggtactacagggcaatactgagatcattactccaatgaagacagagttgcctttttcatttaagaaaatacgttgagctcttctggcatctttagcccagtagctttcagttttgtttggttccttatgaggagccattaattaaaatataccacggagccaaagcagatctttataaaacattttcttgagtgaatttattagtcctttcaaaacagtcaacattgtttcatcttattagcaagtggaactggggtcttggctagaagacaggtgtctgtaaagcagtctgtgacacagtaggtagggttagcatcttccggtgatgcccattgtcctggtccattggaagcaaggattttaaagggaagtgagatgacagaagaaccctcagaggtataagaagagatgggaagatgtgctcatgtgcagggaagcagacacatcccaaaacaatccatttgttaaaagtactcaagttagacatgttttttcaaaaatctacttcaaaattgtgtagcccgtatttagacccattggcattttccacatagcagacaccactagacatctgtctcctcctctctaggacatgaaggaatggggtactcttttggtagcctaacacatatatcatcgctacctttcccaagaagcaaagacctctcaatttgacctgggtttctagcctgtttaaaaaaaaaaaaaaaaaaaaaaaaaaagacgtcttgtcacccctggcctctgcttttatgttggtgttgactactgtaataaacagctggcatgtgacttcagggtgaaggaaatgtcctcatcccacatgagcagttgggggagggtcccctttgaacacagccatataaagttttagttagttctgaaagatgcccttattttcccatgaagaactgacaagtcttcattacctgaatgtccttatgcagatgctgttctgaccttggtgttttcccttgccacaggcaatgtgagcatctatccagccagccaacatttcccgaccttcagtattgccctcttctgcaaatgccaatcccaagacccattcaaccccaaagctccgtggctccacgacacaagctgttgagtgcttactgggtgttctactgagggaaccaaacactgactatccaaagagaaaaggatattttggttttctaataacgtatattattgttttcttctcccctttctatgcaactgtaaattaatgaacagagaagtatttggaggtggtaaagcatttgtcactgatttgtataatatatacagccatgggaaagtgggtgggggctttctaatatgaaactgtctttttaataaccaagagaaaaaattgcataagaattagaccactttacattattacattccttctgctgttcacattaaccttgtacaataacttcacttattatttgactgttttaccattatgttttggttatttataaatttatcagccatacaaacaaatagattctatgtatttgtttctataatctggccaaattcctaagttcatatatttgaatcaaatattttacatatgtggagtaggcaggcattctgaagatactatttaactttagttgacgtcacacacaccatcctttagtaaccactggatgactacactaaaaatcctgtggactttaacggcaagctgctggggtatttttcctcctgtttttattccttttttgtaagtagatcttgacgtctttatttatttcatcttgcaatctctataataaagaagactgtattgtaatagtctcaaaaaattattttaccaagggttaccatttaagcatattttcattttgattcagaaaccaaagttggtacaacctctcctagtacttgcaaccttggttttcatgagaaaacacacggcaggctttgcccattgtgaggagagcacacatcatgctcttcagtttcctttgaatagacttttattgttgtttttgtatttttcgagtcctgtgtaagttttgaaagctctggttgtttcctttgtgaaagcaggcagatacttattggctgtctcatttgaagctttggagcagatagtcagatgtctcatgacccctcacttggccagcagcacatccgagaaggatgtcactcacaagcctacaccacggcttctctagaatgaaatcagtgctcggatgattgtatccctgcctctacttctgagtgtgttcaactaggtattggcttctttttctttttcttttcttttttttttaatttaacacttaattgccgattttagagaaaccaaaaataaaggtgaaggtaatatgttttgattcaaacatatatgcttttaaaacatcaggacatgctaactttgggttctctttcactgggatctggccagaaggaggctgaaagttagaaattgctattcttttaggatcggttgggtgggttggggggcaagggtgtctatttgcagcatagatattttgagacgaagaaaattgttttatataaggggagagccatgatcacctttctacctcagaaccaccttcctccattgtgttggacatagctttatatgccgcagtgtgcaaaacctagggctgtagtcaggcctttccatacccaggaagcacctgtgtaaagaagatcaacagaaactcccggaactcagaaccccaagttgtagatttggtgtcgtccttgttcttgctttgaggagtcatgtattcttttatttcctgcctgtatttgtatgcaaaatgatctctatctgctattacagaaaaagctacacaaaacactacattgtaaccttctgagtaataaataagaggaaatatattacagtaaccatgatgagaaataagtgtattgttcttttgaaatatgtggttaatcgcagactgtcatctaatctgttacataccgtatttttcatcctgaataaaagtaattttaacacaaaatgactttgatgtttggctgtgttcactgatgaaatcagatctctgaatgtatgtgatgaaagctaactataagatgatctatattctgataaatctaaatattttctgaaactctctcttatacattaatctagtctccattcactcattatctctctctcctttcttgcatataaatatgattatatatttttcaatttcctgtacaaatcagagtcttattactagggaaaatggatgttataagtacattcctaaagcccattgggccttcatttttataacttggagctactgagatttatcaggttactctctcaaatccactttcatcactagactcatagttttctatgtatctatattattataactaaataaaaatatacatgaacatatatgtgtgtatgtatatatagttatatttatttatatttattttagatatatatagttagttttctgtgcagtgttgctgtaaagcagcaccataactgatctaacttataaaacaaagcatttcattcagagactgatggttctagaggagtagagcccatgtccatccggattcagcccatgcctgcagctggcagacaggcaaggcgctagcgaagtagctaagagcttataaggggtgggcaaatctaaagcagagggagacagagacagactgagagagctgaaatgacatagtcatttgatatctcaaagcccacccccagtgacactaatcctaatctgtcccaaacagttgtaccaactgagaaccaggcatgcaaacatacggcctcataggggtccttcttattcaaaccagtacagactctacattacctgttcattggtgctgttgattttattgtgtgttttatatatagtacacatatataaaatatacaggacaatatatagtaaatatatgtttatatacagtctggtatcagatttatcttgcttctgaagctcataagggcaaaatggtgtcaaaaattacaattaagtacaattaagtcagcaaccctccaagaattagaaaattccgccaaaatatattattttaaaagagaacagaaacaattagaccaatattttaaacgtctcatctaccatgaagtatcacattaataattcctaaggaaaccattagtttccagtgactttactgagtcgtcactgaaaggcctccggagtgacaaccagaacagctttgtttctgtgacattgatattctcattgtattttaaatgacatagttgcctctgatgactctttgctacttgagcagactggctcttcaaatcccttccccgtgtcaaagaaccatcaaaataccatcaccaccactgaaacccatgtgctgaatgtaaaacccaattaacttgttaactgaatggtctttctcagatgcatgtgcgcgcgtgcacgcacacacacacacacacacacacacacacacacacagtgttcaatgcctgtgatagccattattccatgatgatggtagacagcagttcagctcatgagacgtgtaggttaagctcacctgggagggacttttgtaacctcagtgagaatcttacacgtacctctgatctccagaggcttgtgttgatggtggctggtttcctctcaggtctaggctaggctgcatgttgatggatagatcatagatagtctagcatggttatagacacttggctgcattcttggcaagccaacctggtttcatgcaaaggcagctgtgtgaagggtttaggcaaagaaaatctcaaggctagggaagagtagataacatctcatggagagaagctgcaaagagctgcagtttcatggcacacaatgaatagggactttttttttttttttttttttttttttttgtcatgcaagctctggaagcagagaacttagggccagagtaccagactatctgctgccacaggcatcttctcagttcagtagaatggaagagaaaagaagtgtctccttgccaccttttcctgatttatttctataccgctctttttaagtcatgcttatggatttaaaaatcagtccttgcagtttggattattacagggcttgttttcacgtgataccttgctgaaatacagattgctggcctgtctgtctgtctgtcctttctttcttgtttgttgaaagattttcttttttatttagtgtattgtctagaaggatctggggaaagcaaaagaatatgatcaaaaggtattgttctgtatgattaaaattaaagataataataaaattagtgtgtattaagtccctccaactcaagatgtaacctcagagacagagaaacttggcacatatgtggcaaaaaaaaaaaaaaaaaacaaaaaaaacaaaaacaaaaacaaacttaagagaaatggaaggtaacaataaaattaggaacaaaaacaaaaaaatcagagattttagacttaaaaatagagtaaatgagaagtcagagtgaattacatattttagtagaagaatattgcatgggggcctccttgctttgccaggtgggcaagatgcaagtggtgagtttgtcccccagcaagccatgcatgtcatcagaggcatgaaatttgcataagcttccaaactggcactaactctcacctcagaatccttggcactgtgactgggtggtggtggcacactcctttaaccccagcactcacaaggcagaaccaggcagatctcttgagttcaaggccaaggccagcctggtctatacaacaagttccaagacagccagggctatacagaaacctatcttgaaaaaaaccaaaccaaaccacaaagcactatttgcacttgattccaggttatcttttgcaggcagcttatttcctggtccctttttgaactttgtagataggaaaatttggaaaaattatctgacagcctgccctgtaccgacctctgttccagaagtcccagaagtcacaaatttcttatttcttattctgtttgtcaatgttcttcaagaaacatattccaagtatggaaagagagagagacagatgtagaaaaacactttgaaagatgacttcatgcaccaggcgtggtggcacacgcctttaatcccagaaattgggaggcagaggcaggcgaatttctgagttcaaggccagcctgaactacaaagtgagttccaggacagccagggctatacagagaaaccctgtcttgaaaaaccaaaaaaaaaaaaaaaaaaaaaaaaaaaaaaaaaaatgcatacagatgtcttggtaggggttgtttcagtccagccccaggagccagggagacagaaagtgtatgtctcatttggagtcacgggactagagaagcagaagctccaataacctaaaacagcagagggtggacctcccaggtcaagcagaaagactcgatttatccttctataggtctcaatggatgggcctggccctccccacaccagaagtctttcacatctagcatttcaaatgctaattttcccagaaatgtctccagtgacttgaaaatatttaaacagatatgtgcccattcctcagcctagttacaatgatacatggaactgtttcatcacagtaaaggagacaagttcccagctaactctggtttataatcacagtaggacccaatattgctctcttatgatcgatcattttccccaaatgttaagatcctggtttttaaatgtttagtgtaagatcattatattttaaaaatctcttctgctttaatttagttgaaataaaaatgtcagtacttagactgctggggaggctgaaatcatcctattgtaagtctggctcaagttgagctgatcaaactccagcacggtgtcatttattatcctctgaactgcctgagctgtgttcgccccgtgaacagctatagtcggtcacacatgatgaacctgtgcccatacctgtggcacacaagtctcatatgctctgttctcctcgtcccagctcctccatctcaagttggtttatacgacaataattttagaagcagtctgtcacaaaacaagaatgtttgctgggtacaatgtccacacaaattcagtaataataaaaaatgtgagtcaaacaactttatgattaaatgaaggatgctaaccatgcatcaaaatggcatttttggcttaaaatttggtcatatattttagactattacttaaaaataaaatcaccatccaaattgctaaaaacaacgggagcctctgcctcaaggtgttcctaatctagcagataaacacagtgccaagcaaactgttgcaatagcagttttgggaagtggagggggccgagtctgttcctatacagatgtggctgcaccccatgcttccactatatgtttctacatacagggatactgctcgcaaaaagcatgtatagaacttgttaccacctgtggagccacattgtgacaaatgatgtcataatggtgacacacttgcaagtgaaacccagcatttccctaagaaaaatatctcttggctaactgatttcgcgatgctctgttgcaccagcgccctttggagattcacagcacacatcagcctgttaaaagctatgagaaatctgaagaaagataatgtgccttaatgcagcagttttaatctgtggttcacgacctcctgtggatcaaataacccttccacaggggtcacatattagatatcctatgtatcacatgctataattcattaactagcaaaattacagttatgaactagcaacaaaaataattgtatgtttgggggtcaccacaacatgaggaactgtattaaagggttgcagcattaggaaaattaagacccattgccttaaaataaatctctctggatctctatagcatttaattcttgtattttctcaacatgctttgtgatgtacacttggatagcaatcctatgtttcaattttttgccagtatacatttgaggcagcaacacacgaagactataaaaatgactcaaaactagttttctcttaaattatcaataaaattttaggattttaaacatgaaaggagccttgtgggcaactaaagagtgccttatcaaaaggcatgctttatcaagaatgaggaacaaggaaaacaaataaagaatgctactttaattcataaagaatgatctgtatttctagaaaccgcatctctaagatggctaagccagacatgaatgtgaagcacaacaataggtgggaccagcagagccatttacaagcgatttcccgatatcacactgtttactatgtcttagttttcttaagagcagggtgccaggcagagagtgtgatcccagcgctgagcaggtgggtgtgtgcaagaaggggaggagggtcatcccggattagatagctagactgaagatactctgggcctgtctcaaagcaaaaaataaacaaaataaaaggaagaagagagcgaggaaggaaacaggactgtctagattttcctaaatctgatccagacattttccaaccggagcgtgactggcgtacaatacctggaaatactccatttattttcatctccgtattttgtttgaggatctggttgtttcccacacaggtaaacatttctggcaggaggactgttttttggagtcacagctggcttgagattcttttgaagcctcccttagtgtgctgggcaaatatgaagtggagcatcctcaatggaaagaagaaccctagcgatctgccattcggatgcaggcagaacttcctgacagctgctaccaagctctgtgctcaccaggttcatcccatgcagatctgctgctcagttaagagaagctcatgagcaccagggtttgccgtgaatgtttgccttgcctcaaagatgaattatttagtgaactgatttcatcttaaccagtctaggagttagagcactaagttatgatcctcatatctttttcctcaatatctcttgaagcttaattgggctcttgggggacccacagagtgagtatctacaggccacgcttgagagtctaccctataatcctgctggtcctcccaagtaccattaaaataaatgataagatggagcagaatttatcttttaaaacagcaaacagggaaaccatttggctgaataatttatgttgtcttaaaggggaaaggctccagctaggactacaaaacacagtgggtgtaagccttgacctccgggtacagcaaaaggaacctgttgggacggaggattttataatcaggggaacatggttttgtgttgtgtgttgaatgattaggttttgatgcgaaataaatagaattttcaggaactttcggtaataaagatttttctttttttggtttggttttgagacaattttttgagtagcccagccatcctcaaaaattagtatgtagctaatgtgatcttgaactacctctttaaaagttatcatgtataagtatatgtgcatgtatgtgcaggtatgtgtgtatataaagatgtgtgagtgcagaaatgtgtatatgtgcagatgtgtatgtttgtatgaagatttctccctcccactgtgtgtgtgtgtgtgtgtgtgtgtgtgtgtgtgtgtgtgtgtgtgcagggactgtcatggcaccagtatagatgtcagaggaaagctttcagaagtcaattctctcctcgatttcttggttcctgggggcaagcttgggggactaagtgcctctactcactaagccatcctgtaggctctaatcttgactttcttaattcccctgcctctaccaccagaatactggcatcataggcaacctttctatactcattgctgatgattaaacacagttcttcttgcatgttgggcaagcactctcatcaactgagctatatccctagtcctgaaataaagttttaataaaatcatgactgttatgaaatataagggggcggcagtagcaagactaagggtcgtcgccctgagaaatcacaccatgcgacagacttgatataagggaagtttactgtgggggtaaaaggggtagcagaagaggaggggacagagaagggcagaaagagggaaagaaaggcttgccaggaacatgtgggaacagagagagaaaaagagagtgagtgagaagggagagagaaagcaatgaaaagctgggctggggtagtgagcagtccttttatatgctgccaggccacccacaacttacagagtgggaggcaggtgctgatatgctgttgctaggtcactgttgggaggaacctagagggattgtctgtaataaatgataacaacaggagtagtactgatattctggtaaagataatagcctttgaagtcattgcactgtgtgtagctgtggatgatgtggattttcaagctttctgcagcttctcccacccccaaaagacacatcacgatcaagctacatcatcatcatagattttggtgtcatggtttggggtggaaggagtcattgaagtggtccaatgtgtcagcttctcccattccttgtgctagaaggtcatttgatgggtcatgtgttgagtggagagcctgtaaaacccaaggctctcagatgcaatttatacaaacattaaaataaaactaaaggatgagtttagagtgtgaagcctacttctcatgcagggactacccaaatgaaccaaggggaatggctgtggggttaaaaggaccagtgtgactgtaaagcaaagtctcttggggaatgttttgtgcactgtgtattcgaatgttgattctgcaccaggagtccaggcctggcttggtcattattagaaagtatttcctgactcagtattttgtaaaactttggtctccatcaacttctgattggtcaataatgagctggtcagcctctggctgggcaggagaggatagggcagatgtctgtaccctgagagagaaacagagggtctcaggggacaaggagagaaatcaccatggtgacatgagtgaagaaggaagtcctagagtgaaaccaagatggctgggaaccaggccagaccaggccagcagagttgggttagaataaatcagtatctacccagctatagtgcctagaagctacatacgcatgactgaatgtcttcagaggtacaccaaacaatgttcttgggacacagcgctcattcttactttctctgaaatgaccatctcttaaaaaaaaaaaaaaaaaggaagcagctctgttctgaaacacagtttcatttaatttcctgagtccaaagagacagaccaaggtttctatagtgatagtgacattattaagcatgcttgccagcattttgcagtatataatgtataatgtgtatggttcctccagctactcgggtttcttttaaagtgtgaaataaaggatattaaagacaggagaaactgattaagaatgcccccttgatagtatagttcccagatctagcataatatcatgatatttttgtacagaaaagaaagttgttgctgaaaatctatcttgggtgatgtcagaaagtttacagaaagtaggaataagtttaccaagtttctgtccaggtaggaagactagtgagtgattttgggggttgggggaggaaaaaaaaaccctattacatattgttgagcttctgtgaacatttttttcatcaagaatataacaataatggagccggacagacacactccaaatatagaccctttgttcctaagttctatttctatgtaagttcaggcattaaacctggctcctgtgaaaggttactgaatgtcatctctgtggcagcaggaaccaacttttcaagatatggtgtgataatggctttggatttctaatggcctgtcctgctgtgggcaaccataattattcgtcttgcttgtctttcagttaccgatctggggaaatctggaaaggccaactttgttaagaaaaatacccacatgtgtgtttgtgtgtgggggggggagagagagggggggggtccatcacctccaataattccaaattaggaatcaaatcaatgtagtaatctcttgaagaactgtgaacctttataactcgatcaccttcaaatgattgcattcttataaaaggattggtggtcaacccatcaacacctgagccttctaggtagacactttacttccaaatgatagcaggctggccttcaaaagcaacttatatcactagaataattgtccacataagtctcttgttgaaatctgctgtggttggctcagttgagatacacagacattgctaagctcaagtctgaactagctgtaccatctttaagaatagggaggctgtagacaccatcgcatacaccagcaaggttttgctaaaaaggaccctgatatagctgtctcttgtgaggctatgccagtacctggcaaacacagaagtggatgctcacagtcagatattggatggaacactgggcccccaatggaggagctagagaaagtacccaaggagctaaaggggtctgcaaccctataggaggaacaacaatatgaactaaccagtaccccccagagctcatgtctctagctgcatatgtagcagaagatggcctagtcggccatctttgggaagagaggccccttgatattgcaaactttatatgctccagtacagaagaatgccagggccaagaagtgggagttggtgggtaagggagtggggcgggggagggtatgggggacttttgggatagcattggaaatgtaaatgaagaaaatacctaatttaaaaaaaaaagaattgggaggctgtgagattttgagaaaggcactgtaaagagactgtttcctctggcacatcagtgtgcagagtaaatagcaccctatatggttagctggtgtgtctgtgttcacaagaagaaaacaagcccaccactgaagattcaacagtggtttgatatggacgaggtcatgagaatgtctaaaggtcactacctacagctactgctggaatggtggttcactcccaaagcattagaacagaggcaggggttggggctgatggtatagcacctatgttaatgtttttctaaacatgtgtggtttccacttactattcttatgaagttaggagtaaaaagagaaaatgagtgcttggtttctatttacaggaatctcgtggatcttccactccattttcccacacggatttttgattaacacaagaaagttcttttcccaatgcccttttacttatgggaagtaattatccaagtctcaattaaagaccctcctctcctatatactatgacccatttaaaaaaaaaaccctatatggttctgtttttgttattgttgttattttaaattatataaaattataagcacatcattagtctttttctttcttttcttctcttttgctgttattctttgtttttgttattgttgtttttaccgtatcttcagctggtggtggaggtgtttttgaaaaggactatttccaatcttaattttgctttcctatcagattctgtgttttagctaagctgtaaagtgaggagccgaggaacaaaacagacaacctccccttctccacttctcagttctcagatctgacctcagttacaaaagacagattaacaaagcaaattgcactgaaaaaaatttaccatatgtatctacatttttaaaaaatggtgtgtatgtgcatgtatgcgtgtgtatgggtatgcatatgtgtgcatgcatgcgcatgtatgtgtgctagaacatgtgtttgtgtggatgcattacacacatgtgtgtgagtgtgtcatcagggagaaatccaggaagagcaagcaaatatgagctgtgcttagagaccatgttcacctgaaggaaagagtgaattggggtagggaggggcagaagggaggtaatttgcaaaggcaaccataaaattacagtagatggaagagaggcttgttgcttggatatacatccatatcgtctgactataatcagtaagtttattaccacttagcaatattgctttgtgtctgaagcagatggtcagagccccgtctactttatgggattcttgggagagtgccaagaagagagttttcagcatctccaacttatccatggtcctctggattcttagtggttactcttgacatgtttccatctctcccttttggagacagacatttgctctgtatttctgctagccttgaactcactgtgtggtccaagccagtccccgatttgaaacaatcttcccacctcaagtctgcagagtgctgggatacaggtgccaccaccacacctgcctttttctctatcttttgcatggaattttgtgtgactgaattcttaaaattgattcttttctttttggcgtgtgtgtgtgtgtgtgtgtgtgtgtgtgtgtgtgtgtgtgtgtgtgtgttgtacacatgtgtatagtacatgggtctcagtagccaggagaggatattgtatgtcctactgcatcactctccatattattccttttgggacaaggtattttactgaaactggagtcaggctggtggtaagcaagccctagggatctttctgtctccatccctattatgctggacttacgagcatgcatacagccaggccagcctttttacatggggtaggtcttgaactcaggtcctcatgattacacagcacacacccttattcacgaacatccagtagtgtagccccttaagtgggtttcttattccaaagagttgcacttgttatataagaaactcagttcagcttccctatgcaggtgattgatttctgtgcacatgtaggaagtttcccaatgtcatgcagcttccaaatacccacattgcaagacaagtgccttcagtcactgcacccgtcttggagggggctctaagactgtcaagtatcaaacaaaatggtcaagtaaccattggatcaaacaaggatggcaggagagtgagttctgcttgataactagcaagcataggacacgcgacaagcaatgcatgagagttttagctaaggtgatttctca

SEQ ID NO: 46 - DNA, 503548 bp, Mus musculus
tgagaaatcaccttagctaaaactctcatgcattgcttgtcgcgtgtcctatgcttgctagttatcaagcagaactcactctcctgccatccttgtttgatccaatggttacttgaccattttgtttgatacttgacagtcttagagccccctccaagacgggtgcagtgactgaaggcacttgtcttgcaatgtgggtatttggaagctgcatgacattgggaaacttcctacatgtgcacagaaatcaatcacctgcatagggaagctgaactgagtttcttatataacaagtgcaactctttggaataagaaacccacttaaggggctacactactggatgttcgtgaataagggtgtgtgctgtgtaatcatgaggacctgagttcaagacctaccccatgtaaaaaggctggcctggctgtatgcatgctcgtaagtccagcataatagggatggagacagaaagatccctagggcttgcttaccaccagcctgactccagtttcagtaaaataccttgtcccaaaaggaataatatggagagtgatgcagtaggacatacaatatcctctcctggctactgagacccatgtactatacacatgtgtacaacacacacacacacacacacacacacacacacacacacacacacacacacgccaaaaagaaaagaatcaattttaagaattcagtcacacaaaattccatgcaaaagatagagaaaaaggcaggtgtggtggtggcacctgtatcccagcactctgcagacttgaggtgggaagattgtttcaaatcggggactggcttggaccacacagtgagttcaaggctagcagaaatacagagcaaatgtctgtctccaaaagggagagatggaaacatgtcaagagtaaccactaagaatccagaggaccatggataagttggagatgctgaaaactctcttcttggcactctcccaagaatcccataaagtagacggggctctgaccatctgcttcagacacaaagcaatattgctaagtggtaataaacttactgattatagtcagacgatatggatgtatatccaagcaacaagcctctcttccatctactgtaattttatggttgcctttgcaaattacctcccttctgcccctccctaccccaattcactctttccttcaggtgaacatggtctctaagcacagctcatatttgcttgctcttcctggatttctccctgatgacacactcacacacatgtgtgtaatgcatccacacaaacacatgttctagcacacatacatgcgcatgcatgcacacatatgcatacccatacacacgcatacatgcacatacacaccattttttaaaaatgtagatacatatggtaaatttttttcagtgcaatttgctttgttaatctgtcttttgtaactgaggtcagatctgagaactgagaagtggagaaggggaggttgtctgttttgttcctcggctcctcactttacagcttagctaaaacacagaatctgataggaaagcaaaattaagattggaaatagtccttttcaaaaacacctccaccaccagctgaagatacggtaaaaacaacaataacaaaaacaaagaataacagcaaaagagaagaaaagaaagaaaaagactaatgatgtgcttataattttatataatttaaaataacaacaataacaaaaacagaaccatatagggttttttttttaaatgggtcatagtatataggagaggagggtctttaattgagacttggataattacttcccataagtaaaagggcattgggaaaagaactttcttgtgttaatcaaaaatccgtgtgggaaaatggagtggaagatccacgagattcctgtaaatagaaaccaagcactcattttctctttttactcctaacttcataagaatagtaagtggaaaccacacatgtttagaaaaacattaacataggtgctataccatcagccccaacccctgcctctgttctaatgctttgggagtgaaccaccattccagcagtagctgtaggtagtgacctttagacattctcatgacctcgtccatatcaaaccactgttgaatcttcagtggtgggcttgttttcttcttgtgaacacagacacaccagctaaccatatagggtgctatttactctgcacactgatgtgccagaggaaacagtctctttacagtgcctttctcaaaatctcacagcctcccaattcttttttttttaaattaggtattttcttcatttacatttccaatgctatcccaaaagtcccccataccctcccccgccccactcccttacccaccaactcccacttcttggccctggcattcttctgtactggagcatataaagtttgcaatatcaaggggcctctcttcccaaagatggccgactaggccatcttctgctacatatgcagctagagacatgagctctggggggtactggttagttcatattgttgttcctcctatagggttgcagacccctttagctccttgggtactttctctagctcctccattgggggcccagtgttccatccaatatctgactgtgagcatccacttctgtgtttgccaggtactggcatagcctcacaagagacagctatatcagggtcctttttagcaaaaccttgctggtgtatgcgatggtgtctacagcctccctattcttaaagatggtacagctagttcagacttgagcttagcaatgtctgtgtatctcaactgagccaaccacagcagatttcaacaagagacttatgtggacaattattctagtgatataagttgcttttgaaggccagcctgctatcatttggaagtaaagtgtctacctagaaggctcaggtgttgatgggttgaccaccaatccttttataagaatgcaatcatttgaaggtgatcgagttataaaggttcacagttcttcaagagattactacattgatttgattcctaatttggaattattggaggtgatggaccccccccctctctctcccccccccacacacaaacacacatgtgggtatttttcttaacaaagttggcctttccagatttccccagatcggtaactgaaagacaagcaagacgaataattatggttgcccacagcaggacaggccattagaaatccaaagccattatcacaccatatcttgaaaagttggttcctgctgccacagagatgacattcagtaacctttcacaggagccaggtttaatgcctgaacttacatagaaatagaacttaggaacaaagggtctatatttggagtgtgtctgtccggctccattattgttatattcttgatgaaaaaaatgttcacagaagctcaacaatatgtaatagggtttttttttcctcccccaacccccaaaatcactcactagtcttcctacctggacagaaacttggtaaacttattcctactttctgtaaactttctgacatcacccaagatagattttcagcaacaactttcttttctgtacaaaaatatcatgatattatgctagatctgggaactatactatcaagggggcattcttaatcagtttctcctgtctttaatatcctttatttcacactttaaaagaaacccgagtagctggaggaaccatacacattatacattatatactgcaaaatgctggcaagcatgcttaataatgtcactatcactatagaaaccttggtctgtctctttggactcaggaaattaaatgaaactgtgtttcagaacagagctgcttcctttttttttttttttttaagagatggtcatttcagagaaagtaagaatgagcgctgtgtcccaagaacattgtttggtgtacctctgaagacattcagtcatgcgtatgtagcttctaggcactatagctgggtagatactgatttattctaacccaactctgctggcctggtctggcctggttcccagccatcttggtttcactctaggacttccttcttcactcatgtcaccatggtgatttctctccttgtcccctgagaccctctgtttctctctcagggtacagacatctgccctatcctctcctgcccagccagaggctgaccagctcattattgaccaatcagaagttgatggagaccaaagttttacaaaatactgagtcaggaaatactttctaataatgaccaagccaggcctggactcctggtgcagaatcaacattcgaatacacagtgcacaaaacattccccaagagactttgctttacagtcacactggtccttttaaccccacagccattccccttggttcatttgggtagtccctgcatgagaagtaggcttcacactctaaactcatcctttagttttattttaatgtttgtataaattgcatctgagagccttgggttttacaggctctccactcaacacatgacccatcaaatgaccttctagcacaaggaatgggagaagctgacacattggaccacttcaatgactccttccaccccaaaccatgacaccaaaatctatgatgatgatgtagcttgatcgtgatgtgtcttttgggggtgggagaagctgcagaaagcttgaaaatccacatcatccacagctacacacagtgcaatgacttcaaaggctattatctttaccagaatatcagtactactcctgttgttatcatttattacagacaatccctctaggttcctcccaacagtgacctagcaacagcatatcagcacctgcctcccactctgtaagttgtgggtggcctggcagcatataaaaggactgctcactaccccagcccagcttttcattgctttctctctcccttctcactcactctctttttctctctctgttcccacatgttcctggcaagcctttctttccctctttctgcccttctctgtcccctcctcttctgctaccccttttacccccacagtaaacttcccttatatcaagtctgtcgcatggtgtgatttctcagggcgacgacccttagtcttgctactgccgcccccttatatttcataacagtcatgattttattaaaactttatttcaggactagggatatagctcagttgatgagagtgcttgcccaacatgcaagaagaactgtgtttaatcatcagcaatgagtatagaaaggttgcctatgatgccagtattctggtggtagaggcaggggaattaagaaagtcaagattagagcctacaggatggcttagtgagtagaggcacttagtcccccaagcttgcccccaggaaccaagaaatcgaggagagaattgacttctgaaagctttcctctgacatctatactggtgccatgacagtccctgcacacacacacacacacacacacacacacacacacacacacacacagtgggagggagaaatcttcatacaaacatacacatctgcacatatacacatttctgcactcacacatctttatatacacacatacctgcacatacatgcacatatacttatacatgataacttttaaagaggtagttcaagatcacattagctacatactaatttttgaggatggctgggctactcaaaaaattgtctcaaaaccaaaccaaaaaaagaaaaatctttattaccgaaagttcctgaaaattctatttatttcgcatcaaaacctaatcattcaacacacaacacaaaaccatgttcccctgattataaaatcctccgtcccaacaggttccttttgctgtacccggaggtcaaggcttacacccactgtgttttgtagtcctagctggagcctttcccctttaagacaacataaattattcagccaaatggtttccctgtttgctgttttaaaagataaattctgctccatcttatcatttattttaatggtacttgggaggaccagcaggattatagggtagactctcaagcgtggcctgtagatactcactctgtgggtcccccaagagcccaattaagcttcaagagatattgaggaaaaagatatgaggatcataacttagtgctctaactcctagactggttaagatgaaatcagttcactaaataattcatctttgaggcaaggcaaacattcacggcaaaccctggtgctcatgagcttctcttaactgagcagcagatctgcatgggatgaacctggtgagcacagagcttggtagcagctgtcaggaagttctgcctgcatccgaatggcagatcgctagggttcttctttccattgaggatgctccacttcatatttgcccagcacactaagggaggcttcaaaagaatctcaagccagctgtgactccaaaaaacagtcctcctgccagaaatgtttacctgtgtgggaaacaaccagatcctcaaacaaaatacggagatgaaaataaatggagtatttccaggtattgtacgccagtcacgctccggttggaaaatgtctggatcagatttaggaaaatctagacagtcctgtttccttcctcgctctcttcttccttttattttgtttattttttgctttgagacaggcccagagtatcttcagtctagctatctaatccgggatgaccctcctccccttcttgcacacacccacctgctcagcgctgggatcacactctctgcctggcaccctgctcttaagaaaactaagacatagtaaacagtgtgatatcgggaaatcgcttgtaaatggctctgctggtcccacctattgttgtgcttcacattcatgtctggcttagccatcttagagatgcggtttctagaaatacagatcattctttatgaattaaagtagcattctttatttgttttccttgttcctcattcttgataaagcatgccttttgataaggcactctttagttgcccacaaggctcctttcatgtttaaaatcctaaaattttattgataatttaagagaaaactagttttgagtcatttttatagtcttcgtgtgttgctgcctcaaatgtatactggcaaaaaattgaaacataggattgctatccaagtgtacatcacaaagcatgttgagaaaatacaagaattaaatgctatagagatccagagagatttattttaaggcaatgggtcttaattttcctaatgctgcaaccctttaatacagttcctcatgttgtggtgacccccaaacatacaattatttttgttgctagttcataactgtaattttgctagttaatgaattatagcatgtgatacataggatatctaatatgtgacccctgtggaagggttatttgatccacaggaggtcgtgaaccacagattaaaactgctgcattaaggcacattatctttcttcagatttctcatagcttttaacaggctgatgtgtgctgtgaatctccaaagggcgctggtgcaacagagcatcgcgaaatcagttagccaagagatatttttcttagggaaatgctgggtttcacttgcaagtgtgtcaccattatgacatcatttgtcacaatgtggctccacaggtggtaacaagttctatacatgctttttgcgagcagtatccctgtatgtagaaacatatagtggaagcatggggtgcagccacatctgtataggaacagactcggccccctccacttcccaaaactgctattgcaacagtttgcttggcactgtgtttatctgctagattaggaacaccttgaggcagaggctcccgttgtttttagcaatttggatggtgattttatttttaagtaatagtctaaaatatatgaccaaattttaagccaaaaatgccattttgatgcatggttagcatccttcatttaatcataaagttgtttgactcacattttttattattactgaatttgtgtggacattgtacccagcaaacattcttgttttgtgacagactgcttctaaaattattgtcgtataaaccaacttgagatggaggagctgggacgaggagaacagagcatatgagacttgtgtgccacaggtatgggcacaggttcatcatgtgtgaccgactatagctgttcacggggcgaacacagctcaggcagttcagaggataataaatgacaccgtgctggagtttgatcagctcaacttgagccagacttacaataggatgatttcagcctccccagcagtctaagtactgacatttttatttcaactaaattaaagcagaagagatttttaaaatataatgatcttacactaaacatttaaaaaccaggatcttaacatttggggaaaatgatcgatcataagagagcaatattgggtcctactgtgattataaaccagagttagctgggaacttgtctcctttactgtgatgaaacagttccatgtatcattgtaactaggctgaggaatgggcacatatctgtttaaatattttcaagtcactggagacatttctgggaaaattagcatttgaaatgctagatgtgaaagacttctggtgtggggagggccaggcccatccattgagacctatagaaggataaatcgagtctttctgcttgacctgggaggtccaccctctgctgttttaggttattggagcttctgcttctctagtcccgtgactccaaatgagacatacactttctgtctccctggctcctggggctggactgaaacaacccctaccaagacatctgtatgcatttttttttttttttttttttttttttttttttttggtttttcaagacagggtttctctgtatagccctggctgtcctggaactcactttgtagttcaggctggccttgaactcagaaattcgcctgcctctgcctcccaatttctgggattaaaggcgtgtgccaccacgcctggtgcatgaagtcatctttcaaagtgtttttctacatctgtctctctctctttccatacttggaatatgtttcttgaagaacattgacaaacagaataagaaataagaaatttgtgacttctgggacttctggaacagaggtcggtacagggcaggctgtcagataatttttccaaattttcctatctacaaagttcaaaaagggaccaggaaataagctgcctgcaaaagataacctggaatcaagtgcaaatagtgctttgtggtttggtttggtttttttcaagataggtttctgtatagccctggctgtcttggaacttgttgtatagaccaggctggccttggccttgaactcaagagatctgcctggttctgccttgtgagtgctggggttaaaggagtgtgccaccaccacccagtcacagtgccaaggattctgaggtgagagttagtgccagtttggaagcttatgcaaatttcatgcctctgatgacatgcatggcttgctgggggacaaactcaccacttgcatcttgcccacctggcaaagcaaggaggcccccatgcaatattcttctactaaaatatgtaattcactctgacttctcatttactctatttttaagtctaaaatctctgatttttttgtttttgttcctaattttattgttaccttccatttctcttaagtttgtttttgtttttgttttttttgttttttttttttttttttgccacatatgtgccaagtttctctgtctctgaggttacatcttgagttggagggacttaatacacactaattttattattatctttaattttaatcatacagaacaataccttttgatcatattcttttgctttccccagatccttctagacaatacactaaataaaaaagaaaatctttcaacaaacaagaaagaaaggacagacagacagacaggccagcaatctgtatttcagcaaggtatcacgtgaaaacaagccctgtaataatccaaactgcaaggactgatttttaaatccataagcatgacttaaaaagagcggtatagaaataaatcaggaaaaggtggcaaggagacacttcttttctcttccattctactgaactgagaagatgcctgtggcagcagatagtctggtactctggccctaagttctctgcttccagagcttgcatgacaaaaaaaaaaaaaaaaaaaaaaaaaaaaagtccctattcattgtgtgccatgaaactgcagctctttgcagcttctctccatgagatgttatctactcttccctagccttgagattttctttgcctaaacccttcacacagctgcctttgcatgaaaccaggttggcttgccaagaatgcagccaagtgtctataaccatgctagactatctatgatctatccatcaacatgcagcctagcctagacctgagaggaaaccagccaccatcaacacaagcctctggagatcagaggtacgtgtaagattctcactgaggttacaaaagtccctcccaggtgagcttaacctacacgtctcatgagctgaactgctgtctaccatcatcatggaataatggctatcacaggcattgaacactgtgtgtgtgtgtgtgtgtgtgtgtgtgtgtgtgtgcgtgcacgcgcgcacatgcatctgagaaagaccattcagttaacaagttaattgggttttacattcagcacatgggtttcagtggtggtgatggtattttgatggttctttgacacggggaagggatttgaagagccagtctgctcaagtagcaaagagtcatcagaggcaactatgtcatttaaaatacaatgagaatatcaatgtcacagaaacaaagctgttctggttgtcactccggaggcctttcagtgacgactcagtaaagtcactggaaactaatggtttccttaggaattattaatgtgatacttcatggtagatgagacgtttaaaatattggtctaattgtttctgttctcttttaaaataatatattttggcggaattttctaattcttggagggttgctgacttaattgtacttaattgtaatttttgacaccattttgcccttatgagcttcagaagcaagataaatctgataccagactgtatataaacatatatttactatatattgtcctgtatattttatatatgtgtactatatataaaacacacaataaaatcaacagcaccaatgaacaggtaatgtagagtctgtactggtttgaataagaaggacccctatgaggccgtatgtttgcatgcctggttctcagttggtacaactgtttgggacagattaggattagtgtcactgggggtgggctttgagatatcaaatgactatgtcatttcagctctctcagtctgtctctgtctccctctgctttagatttgcccaccccttataagctcttagctacttcgctagcgccttgcctgtctgccagctgcaggcatgggctgaatccggatggacatgggctctactcctctagaaccatcagtctctgaatgaaatgctttgttttataagttagatcagttatggtgctgctttacagcaacactgcacagaaaactaactatatatatctaaaataaatataaataaatataactatatatacatacacacatatatgttcatgtatatttttatttagttataataatatagatacatagaaaactatgagtctagtgatgaaagtggatttgagagagtaacctgataaatctcagtagctccaagttataaaaatgaaggcccaatgggctttaggaatgtacttataacatccattttccctagtaataagactctgatttgtacaggaaattgaaaaatatataatcatatttatatgcaagaaaggagagagagataatgagtgaatggagactagattaatgtataagagagagtttcagaaaatatttagatttatcagaatatagatcatcttatagttagctttcatcacatacattcagagatctgatttcatcagtgaacacagccaaacatcaaagtcattttgtgttaaaattacttttattcaggatgaaaaatacggtatgtaacagattagatgacagtctgcgattaaccacatatttcaaaagaacaatacacttatttctcatcatggttactgtaatatatttcctcttatttattactcagaaggttacaatgtagtgttttgtgtagctttttctgtaatagcagatagagatcattttgcatacaaatacaggcaggaaataaaagaatacatgactcctcaaagcaagaacaaggacgacaccaaatctacaacttggggttctgagttccgggagtttctgttgatcttctttacacaggtgcttcctgggtatggaaaggcctgactacagccctaggttttgcacactgcggcatataaagctatgtccaacacaatggaggaaggtggttctgaggtagaaaggtgatcatggctctccccttatataaaacaattttcttcgtctcaaaatatctatgctgcaaatagacacccttgccccccaacccacccaaccgatcctaaaagaatagcaatttctaactttcagcctccttctggccagatcccagtgaaagagaacccaaagttagcatgtcctgatgttttaaaagcatatatgtttgaatcaaaacatattaccttcacctttatttttggtttctctaaaatcggcaattaagtgttaaattaaaaaaaaaagaaaagaaaaagaaaaagaagccaatacctagttgaacacactcagaagtagaggcagggatacaatcatccgagcactgatttcattctagagaagccgtggtgtaggcttgtgagtgacatccttctcggatgtgctgctggccaagtgaggggtcatgagacatctgactatctgctccaaagcttcaaatgagacagccaataagtatctgcctgctttcacaaaggaaacaaccagagctttcaaaacttacacaggactcgaaaaatacaaaaacaacaataaaagtctattcaaaggaaactgaagagcatgatgtgtgctctcctcacaatgggcaaagcctgccgtgtgttttctcatgaaaaccaaggttgcaagtactaggagaggttgtaccaactttggtttctgaatcaaaatgaaaatatgcttaaatggtaacccttggtaaaataattttttgagactattacaatacagtcttctttattatagagattgcaagatgaaataaataaagacgtcaagatctacttacaaaaaaggaataaaaacaggaggaaaaataccccagcagcttgccgttaaagtccacaggatttttagtgtagtcatccagtggttactaaaggatggtgtgtgtgacgtcaactaaagttaaatagtatcttcagaatgcctgcctactccacatatgtaaaatatttgattcaaatatatgaacttaggaatttggccagattatagaaacaaatacatagaatctatttgtttgtatggctgataaatttataaataaccaaaacataatggtaaaacagtcaaataataagtgaagttattgtacaaggttaatgtgaacagcagaaggaatgtaataatgtaaagtggtctaattcttatgcaattttttctcttggttattaaaaagacagtttcatattagaaagcccccacccactttcccatggctgtatatattatacaaatcagtgacaaatgctttaccacctccaaatacttctctgttcattaatttacagttgcatagaaaggggagaagaaaacaataatatacgttattagaaaaccaaaatatccttttctctttggatagtcagtgtttggttccctcagtagaacacccagtaagcactcaacagcttgtgtcgtggagccacggagctttggggttgaatgggtcttgggattggcatttgcagaagagggcaatactgaaggtcgggaaatgttggctggctggatagatgctcacattgcctgtggcaagggaaaacaccaaggtcagaacagcatctgcataaggacattcaggtaatgaagacttgtcagttcttcatgggaaaataagggcatctttcagaactaactaaaactttatatggctgtgttcaaaggggaccctcccccaactgctcatgtgggatgaggacatttccttcaccctgaagtcacatgccagctgtttattacagtagtcaacaccaacataaaagcagaggccaggggtgacaagacgtctttttttttttttttttttttttttttaaacaggctagaaacccaggtcaaattgagaggtctttgcttcttgggaaaggtagcgatgatatatgtgttaggctaccaaaagagtaccccattccttcatgtcctagagaggaggagacagatgtctagtggtgtctgctatgtggaaaatgccaatgggtctaaatacgggctacacaattttgaagtagatttttgaaaaaacatgtctaacttgagtacttttaacaaatggattgttttgggatgtgtctgcttccctgcacatgagcacatcttcccatctcttcttatacctctgagggttcttctgtcatctcacttccctttaaaatccttgcttccaatggaccaggacaatgggcatcaccggaagatgctaaccctacctactgtgtcacagactgctttacagacacctgtcttctagccaagaccccagttccacttgctaataagatgaaacaatgttgactgttttgaaaggactaataaattcactcaagaaaatgttttataaagatctgctttggctccgtggtatattttaattaatggctcctcataaggaaccaaacaaaactgaaagctactgggctaaagatgccagaagagctcaacgtattttcttaaatgaaaaaggcaactctgtcttcattggagtaatgatctcagtattgccctgtagtaccagggacatttcaaagtcactgttctgtgacaaatgtgagatttgaggtcagtcagatttacacagaaacttgtatagtagagagcatggaatgagaactgaaatccagcatgggtactttgggtgcctcatagagtttggtttggggaaccaaatggtcccacccaacatcttcaaagcaacaatctgttgtacagaaccaagtaacacttaaacatcacgtggctttactcatttatatggagaatgaagtaagactaaactaaatcaatagcagctaatgtgcttacgcccagatgggatcaagaaagcgaagtcaattgaaccattaactcttacctgtggcctgctggggacatttgctgaaaaagaaaatagaagaaatcaattgagggctttactattgctttgtgccttcccttctcatgcatgcaaatgtatagaatgcttttcagaggaagagaatagctctgcccttccaaggatgctagcaggaagcagaggccagccaccctgaccctctaagcaaggctagttttccaagtaaatgtctcatattctatgtgatttgaaatgcaaacattctagagagagagagagagagagagagagagagagagagagagagagagagagagagaagaaaaagaaaaaaccaaaaccccacacaaaacatatactagctcttttaaaacattcaggaaggatcttggtccgggacccgccgaacttaggaaattagtctgaacaggtgagagggtgcgccagagaacctgacagcctctggaacaggcagaggcacagaggcactgaggcagcaccctttgtgggccggggacagccagccaccgtctggaccggaggacaggtgcccgcccggctggggaggcggcctgggccacagcagcagcggtcgccatcttggtccgggacccgctgaacttaggaaattagtctgaacgggtgagagggtgcgccagagaacctgacagcctctggaacaggcagaagcacagaggggctgaggcagcaccctgtgtgggccggggacagccggccaccttccggaccagaggacaggtgcccgcccggctggggaggcgacctaagccacagcagcagcggtcgccatcttggtccgggacccgccgaacttagggaattagtctgaacaggtgagagggtgcgccagagaacctgacagcttctggaacaggcagaagcacagaggcgctgaggcagcaccctgtgtgggccggggacagccggccaccttccggaccagaggacaggtgcccacccggctggggaggcggcctaagccacagcagcagcggtcgccatcttggtccgggacccgccgaacttaggaaattagtctgaacaggtgagagggtgcgccagagaacctgacagcttctggaacaggcagaagcacagaggcgctgaggcagcaccctgtgtgggccggggacagccggccaccttccggaccggaggacaggtgcccacccggcaggggaggcggcctaagccacagcagcagcggtcaccatcttcgtcccgggactccaaggaacttaggaatttagtctgcttaggttagagtctgtaccacctgggaactgccaaagcaacacagtgtctgagaaaggtcctgttttgggccttcttcttcggccaggaggaggtccaaatacaagatatctgcgcaccttccctgtaagagagcttgccagcagagagtgctctgagcactgaaactcagaggagagaatctgtctcccaggtctgctgatagacggtaacagaatcaccagaagaacaatctctaaacagagtcaactataactactaactccagagattaccagatggcgaaaggtaaacggaggaatcttactaacaggaaccaagaccactcaccatcaccagaacccagcacacccacttcgcccagtccagggaaccccaacacacctgagaacctagacctagatttaaaagcatatctcatgatgatggtagaggacatcaagaaggactttaataaatcacttaaagaaatacaggagaacactgctaaagagttacaagtccttaaagaaaaacaggaaaacacaatcaaacaggtagaagtccttacagaaaaagaggaaaaaacatacaaacaggtgatggaaatgaacaaaaccatactagacctaaaaagggaagtagacacaataaagaaaactcaaagcgaggcaacactagagatagaaaccctaggaaaaaaatctggaaccatagatttgagcatcagcaacagaatacaagagatggaagagagaatctcaggtgcagaagattccatagagaacatcggcacaacaatcaaagaaaatggaaaatgcaaaaagatcctaactcaaaatatccaggaaatccaggacacaataagaagaccaaacgtacggataataggagtggatgagaatgaagattttcaactcaaaggtccagcaaacatcttcaacaaaattattgaagaaaacttcccaaatctaaagaatgagatgcatatgaacatacaagaagcctacagaactccaaatagactggaccagaaaagaaattcctcccgacacataataatcagaacatcaaatgcactaaataaagatagaatactaaaagcagtaagggaaaaaggtcaagtaacatataaaggcaagcctatcagaattacaccagatttttcaccagagactatgaaagccagaagagcctggacagatgttatacagacactaagagaacacaaattccagcccaggctacaatacccagccaaactctcaattaccatagatggagaaaccaaagtattccacgacaaaactaaattcacccattatctctccacgaatccagcccttcaaaggataataacagaaaaaaaccaatacaagaacgggaacaacgccctagaaaaaacaagaaggtaatccctcaacaaacctaaaagaagacagccacaagaacagaatgccacctttaacaactaaaataacaggaagcaacaattacttttccttaatatctcttaacatcaatggtctcaactcgccaataaaaagacatagactaacaaactggctacacaaacaagacccaacattttgctgcttacaggaaactcatctcagagaaaaagatagacactacctcagaatgaaaggctggaaaacaattttccaagcaaatggtatgaagaaacaagcaggagtagccatcctaatatctgataagattgacttccaacccaaagtcatcaaaaaagacaaggagggacacttcattctcatcaaaggtaaaatcctccaagaggaactctcaattctgaatatctatgctccaaatacaagagcagccacattcactaaagaaactttagtaaagctcaaagcacacattgcgcctcacacaataatagtgggagacttcaacacaccactttcaccaatggacagatcatggaaacagaaactaaacagggacacactgaaactaacagaagtgatgaaacaaatggatctgacagatatctacagaacattttaccctaaaacaaaaggatataccttcttctcagcacctcatggtaccttctccaaaattgaccacataataggtcacaaatcaggcctcaacagattcaaaaatattgaaattgtcccatgtatcctatcagatcaccatgcactaaggctgatcttcaataacaaaataaataacagaaagccaacattcacatggaaactgaacaacactcttctcaatgataccttggtcaaggaaggaataaagaaagaaattaaagactttttagagtttaatgaaaatgaagccacaacgtacccaaacctttgggacacaatgaaagcatttctaagagggaaactcatagctatgagtgccttcaagaaaaaatgggagagagcacatactagcagcttgacaacacatctaaaagctctagaaaaaaaggaagcaaattcacccaagaggagtagacggcaggaaataatcaaactcaggggtgaaatcaaccaagtggaaacaagaagaactattcaaagaattaaccaaacgaggagttggttctttgagaaaatcaacaagatagataaacccttagctagactcactaaagggcacagggacaaaatcctaattaacaaaatcagaaatgaaaagggagacataacaacagatcctgaagaaatccaaaacaccatcagatccttctacaaaaggctatactcaacaaaactggaaaacctggacgaaatggacaaatttctggacagataccaggtaccaaagttgaatcaggatcaagttgaccttctaaacagtcccatatcccctaaagaaatagaagcagttattaatagtctcccagccaaaaaaagcccaggaccagacgggtttagtgcagagttctatcagaccttcaaagaagatctaactccagttctgcacaaactttttcacaagatagaagtagaaggtattctacccaactcattttatgaagccactattactctgatacctaaaccacagaaagatccaacaaagatagagaacttcagaccaatttctcttatgaacatcgatgcaaaaattcttaataaaattctcgctaaccgaatccaagaacacattaaagcaatcatccatcctgaccaagtaggttttattccagggatgcagggatggtttaatatacgaaaatccatcaatgtaatccattatataaacaaactcaaagacaaaaaccacatgatcatctcgttagatgcagaaaaagcatttgacaagatccaacacccattcatgataaaagttctggaaagatcaggaattcaaggccaatacctaaacatgataaaagcaatctacagcaaaccagtagccaacatcaaagtaaatggagagaagctggaagcaatcccactaaaatcagggactagacaaggctgcccactttctccctaccttttcaacatagtacttgaagtattagccagagcaattcgacaacaaaaggagatcaaggggatacaaattggaaaagaggaagtcaaaatatcactttttacagatgatatgatagtatatataagtgaccctaaaaattccaacagagaactcctaaacctgataaacagcttcggtgaagtagctggatataaaattaactcaaacaagtcaatggcctttctctacacaaagaataaacaggctgagaaagaaattagggaaacaacacccttctcaatagccacaaataatataaaatatctcggcgtgactctaacgaaggaagtgaaagatctgtatgataaaaacttcaagtccctgaagaaagaaattaaagaagatctcagaagatggaaagatctcccatgctcatggattggcaggaccaacattgtaaaaatggctatcttgccaaaagcaatctacagattcaatgcaatccccattaaaattccaactcaattcttcaaggaattagaaggagcaatttgcaaattcatctggaataacaaaaaaccgagaatagcaaaaactcttctcaaggataaaagaacctctggtggaatcaccatgcctgacctaaagctttactacagagcaattgtgataaaaactgcatggtactggtatagagacagacaagtggaccaatggaatagaattgaagacccagaaatgaacccacacacctatggtcacttgatcttcgacaagggagccaaaaccatccagtggaagaaagacagcattttcaacaattggtgctggcacaactggttgttatcatgtagaagaatgcgaatcgatccatacttatctccttgtactaaggtcaaatctaagtggatcaaggaacttcacataaaaccagagacactcaaacttatagaggagaaagtggggaaaagccttgaagatatgggcacaggggaaaaattcctgaacagaacagcaatggcttgtgctgtaagatcgagaattgacaaatgggacctaatgaaactccaaagtttctgcaaggcaaaagacactgtctataagacaaaaagaccaccaacagactgggaaaggatctttacctatcctaaatcagataggggactaatatccaacatatataaagaactcaagaaggtggacctcagaaaatcaaataacccccttaaaaaatggggctcagaactgaacaaagaattctcacctgaggaataccgaatggcagagaagcacctgaaaaaatgttcaacatccttaatcatcagggaaatgcaaatcaaaacaaccctgagattccacctcacaccagtgagaatggctaagatcaaaaattcaggcgacagcagatgctggcgaggatgtggagaaagaggaacactcctccattgttggtgggattgcaggcttgtacaaccactctggaaatcagtctggcggttcctcagaaaattggacatagtactaccggaggatccagcaatacctctcctgggcatatatccagaagaagccccaactggtaagaaggacacatgctccactatgttcatagcagccttatttataatagccagaaactggaaagaacccagatgcccctcaacagaggaatggatacagaaaatgtggtacatctacacaatggagtactactcagctattaaaaagaatgaatttatgaaattcctagccaaatggatggacctggagagcatcatcctgagtgaggcaacacaatcacaaaggaactcacacaatatgtactcactgataagtggatactagcccaaaacctaggatacccacgatataagatacaatttcctaaacacatgaaactcaagaaaaatgaagactgaagtgtggacactatgcccctccttagaagtgggaacaaaacacccatggaaggagttacagaaacaaagtatggagctgagatgaaagaatggaccatgtagagactgccatatccagggatccaccccataatcagcttccaaatgctgacaccattgcatacactagcaagattttactgaaaggacccagatgtagctgtctcttgtgagactatgccggggcctagcaaacacagaagtggatgctcacagtcagctaatggatggatcgcagggctcccaatggaggagctagagaaagtacccaaggagctaaagggatcttcaaccctataggtggaacaacattatgaactaaccagtacccctgagcttttgactctagctgcatatgtatcaaaagatggcctagtcggccatcactggaaagagaggcccattggacacgcagacttcgtgtgccccggtacaggggaacgccagggccaaagggggggagtgggtgggtaggggagtgggggtgggtgggtaagggggacttttggtatagcattggaaatgtaaatgagctaaatacctaataaaaaaaaaaaaaaaaaaaaaaaaaaaaagaaatccaaaacaccatcagatccttctacaaaaggctatactcaacaaaactggaaaacctggacgaaatggacaaatttctggacagataccaggtaccaaagttgaatcaggatcaagttgaccttctaaacagtcccatatcccctaaagaaatagaagcagttattaatagtctcccagccaaaaaaagcccaggaccagacgggtttagtgcagagttctatcagaccttcaaagaagatctaactccagttctgcacaaactttttcacaagatagaagtagaaggtattctacccaactcattttatgaagccactattactctgatacctaaaccacagaaagatccaacaaagatagagaacttcagaccaatttctcttatgaacatcgatgcaaaaatccttaataaaattctcgctaaccgaatccaagaacacattaaagcaatcatccatcctgaccaagtaggttttattccagggatgcagggatggtttaatatacgaaaatccatcaatgtaatccattatataaacaaactcaaagacaaaaaccacatgatcatctcgttagatgcagaaaaagcatttgacaagatccaacacccattcatgataaaagttctggaaagatcaggaattcaaggccaatacctaaacatgataaaagcaatctacagcaaaccagtagccaacatcaaagtaaatggagagaagctggaagcaatcccactaaaatcagggactagacaaggctgcccactttctccctaccttttcaacatagtacttgaagtattagccagagcaattcgacaacaaaaggagatcaaggggatacaaattggaaaagaggaagtcaaaatatcactttttgcagatgatatgatagtatatataagtgaccctaaaaattccaacagagaactcctaaacctgataaacagcttcggtgaaatagctggatataaaattaactcaaacaagtcaatggcctttctctacacaaagaataaacaggctgagaaagaaattagggaaacaacacccttctcaatagccacaaataatataaaatatctcggcgtgactctaacgaaggaagtgaaagatctgtatgataaaaacttcaagtccctgaagaaagaaattaaagaagatctcagaagatggaaagatctcccatgctcatggattggcaggaccaacattgtaaaaatggctatcttgccaaaagcaatctacagattcaatgcaatccccattaaaattccaactcaattcttcaacgaattagaaggagcaatttgcaaattcatctggaataacaaaaaaccgaggatagcaaaaactcttctcaaggataaaagaacctctggtggaatcaccatgcctgacctaaagctttactacagagcaattgtgataaaaactgcatggtactggtatagagacagacaagtggaccaatggaatagaattgaagacccagaaatgaacccacacacctatggtcacttgatcttcgacaagggagccaaaaccatccagtggaagaaagacagcattttcaacaattggtgctggcacaactggttgttatcatgtagaagaatgcgaatcgatccatacttatctccttgtactaaggtcaaatctaagtggatcaaggaacttcacataaaaccagagacactgaaacttatagaggagaaagtggggaaaagccttgaagatatgggcacaggggaaaaattcctgaacagaacagcaatggcttgtgctataagatcgagaattgacaaatgggacctaatgaaactccaaagtttctgcaaggcaaaagacactgtctataagacaaaaagaccaccaacagactgggaaaggatctttacctatcctaaatcagataggggactaatatccaacatatataaagaactcaagaaggtggacctcagaaaatcaaataacccccttaaaaaatggggctcagaactgaacaaagaattctcacctgaggaataccgaatggcagagaagcacctgaaaaaatgttcaacatccttaatcatcagggaaatgcaaatcaaaacaaccctgagattccacctcacaccagtgagaatggctaagatcaaaaattcaggtgacagcagatgctggcgaggatgtggagaaagaggaacactcctccattgttggtgggattgcaggcttgtacaaccactctggaaatcagtctggcggttcctcagaaaattggacatagtactaccggaggatccagcaatacctctcctgggcatatatccagaagaagccccaactggtaagaaggacacatgctccactatgttcatagcagccttatttataatagccagaaactggaaagaacccagatgcccctcaacagaggaatggatacagaaaatgtggtacatctacacaatggagtactactcagctattaaaaagaatgaatttatgaaattcctagccaaatggatggacctggagagcatcatcctgagtgaggtaacacaatcacaaaggaactcacacaatatgtactcactgataagtggatactagcccaaaacctaggatacccacaatataagatacaatttcctaaacacatgaaactcaagaaaaatgaagactgaagtgtggacactatgcccctccttagaagtgggaacaaaacacccatggaaggagttacagaaacaaagtttggagctgagatgaaaggatggaccatgtagagactgccatatccagggatccaccccataatcagcatccaaacgctgacaccattgcatatactagcaagattttatcgaaaggacccagatgtagctgtctcttgtgagactatgccggggcctagcaaacacagaagtggatgctcacagtcagctaatggatggatcacagggctcccaatggaggagctagagaaagtatccaaggagctaaagggatcttcaaccctataggtggaacaacattatgaactaaccagtacccctgagctcttgactctagctgcatatgtatcaaaagatggcctagtcggccatcactggaaagagaggcccattggacacgcagactttgtgtgacccggtacaggggaacgccagggccaaagggggggagtgggtgggtaggggagtgggggtgggtgggtaagggggacttttggtatagcattggaaatgtaaatgagctaaatacctaataaaaaatggaaaaaaaaaataaaacattcaggaaggtcttagttttataaatgagaaaaaaaatctgaaaacttcattttataactatgccatgtattttttgacttttgtataataagtacagaggagagcctatatgttgtgttgaatatacagtttgattctgaccaaaagggtccttagagggaattagtattttctgcacaccttggcacacccttgctgaaagctgtaggaagaaggtacatttgcatcagtgaaaaggctagtcattcatcagcagtcttcagaacggggatcaacagtgatgccttacatgggttcagtaaagagcacagaagttagcctagggtgctaataacccttcaacattatccttgcatcggagcccatgacaaagaagctgatgtcgtgggcttacggagaactggcactaccaagacttttctagatctctgctttgtcaggtccatttttcactgagatcatgttcatgaccccttgttcttgtgatcttcactaaaaacaattcagagattaaaatgagtatagtctagaagacaaagctgatggcagagcagggtagagcccctctgaagagcagcaatggtccaagagaccactgttcacacagacattataggcgggctatcagtggttctcaaccttccaaatgccgtgacccttccacatgctgtggtgaccccagctgtaaaattattctcattgctacttaataactgtaattttgcttctgttatgaattacaatataaatatctgacacacaggatatctgatatgtgaaccctgtgaaagtgtcatttgactctcaagagtatagaggtgcacaggttgaaaattgttgctttctatgaaagaaaaaataaaaaatccaagggctgaagagatgctcatctcagcagttaagatcatcttcttcttcttcttcttcttcttcttcttcttcttcttcttcttcttcttcttcttcttcttcttcttcttcttcttcttcttcttctttttcttcttcttcttcttcttcttcttcttcttcttcttcttcttcttcttcttcttcttcttcttcttcttcttctcctcctcctcctcctcctcctcctcctcctctcctcctcctcctcctcctcctcctctttctcctcctcttcttcttctcctcctcttcttcttctcctcctcttcctcctccccacttctccttcttcttgcctccattggcactacatgcacatgttacacagacatgcaagcaagcaagcaaaacttgcatgaacataacataaaataagagtaaataattcttttaaaactatctctgaactttcctgaggaaatctgggctgtgcaagtaactatctcccataggagggagaaggggtaagcctttgtcctcaacgcctagaaagtttaggattcctatagtcttccaggcaggatgtctacctccttctaatactagagacacatttcaggacccattgttgctgttgttgtgaacagtaattgaagtctaactgcttcaccattttgctttacaggccattggctggctatgtcctctaagcctgccaatatttgacactttcgctgcagattcatattcaacatagggaaagaaagggtaatgatgacaatatctatccttggccaaaggggagtgtctctaatcaagtagcatgttacatgcttccaatccttcatttttctgtgataagggggaaaaaggacatctgtggctcatttgtgaggagagagagagaaaaagagagagagagagagagagattgattgattgagattgatttcctccctgtgatagcaggggagaatgtgagccccggtatttgggagaagaaccagggaaacataagcctagtcctacaaggtgtttcccatcagagaaaagagtgaacccctgtcctcatgtgagctataccccggaggtagctgaggtgaattattagtaaagacatgttgtaaatatacaccccatctgaaaagaaagacagttaggcttctctcttaaataatggatatgtaatagtcaaaccctagacagaagtcaaagccattttgccttcctatctcttttaatcaaataaaacattataggcggttcctggaacaagctgtgtattttaaaagaaaattaggtaatcattgtgcttttgttaagtcttgagtttttgatggatgccattcaagcctgacaaatgcaggctgatcacagcagaaacacaaggtaagttaacaataagtctaaaagcattacttctagcagaaaaagaaagaaagaaagaaagaaagaaagaaagaaagaaagaaagaaagaaagaaagctcaatttactattaatattccacatatttgaacaaactataagcagactatattatgccaacaaagaaacagttatagtcattagaattttctactacatgactggataactgtcaacacaaattaaattcaattctttaattgttagggtaagatggcgatgcctgtgtctctgctttgagattcaatgtcattttaagaggtcataattcaaagatgctaccattgctaactgcaatattgattcaaaatgcaagggttttaaaagtctttacacacaacagcatataagacacaatataaaaaataagctaacagagctattcatgctattaggatttatgaatacagacactcattttaattccaaaattgccatgagtgaaattcatttgtagccatgcaatttgtttaatccacaaaggatcaaaagtcaagattaacatgcagctcagcccatccatcacacactggctacaagcaatttgaacattctccttctctatagaaactcaagagattgtttaggcaatgagagcatgccaatcctatttagttagataaacttccaaaggtgatcaggaagcttgggagttgcagactctcgataaaatatttgctaactgagcaatttaaatggaacattaaagctaatgaatcctgcaaaacctttctaagtgctagctgggaaattttcaaccattatatttctctagctagaaacatgactgtccctgtaaaccactgacaacatcaatctggaagtctgtgttaggtaccaggtctgtaccatgcactaattgattctgtacaatttgaaatgatttagtaatcctaggtaaaattctgaggtatgcattaattttgtaaacaagacaatggagttctttttttttttttctagattggaaagcattttttttaccttgaagatttttatatttgccagagaaacatatgaatataaataatgaaaaggaacaaacaatgccattttcagaagtaagaacacatagtctgtggatcccacaggactctaaaatgtactatgtaccatttcttatttaagaggtgcctggattcttcattataacaaatgactaggagtgctcatgtatagaaaatctcaacattataaacactggtagatatacacactgccagagaatgccaacagttttcctcttaaggaactgcaagcctctttaaataacccagtgagcgccaaggatgatgtcacaggtaaagaggtctcaatgcaagggaagggtttagccactgcagtgtggtctccatagagactaagcctcttctcaggaaccaatcaccgtgagtggttcaactcaatgggaattttatccttgtatcaggggtcagggcatgaggtagcaacagttacctttgaagattaggtgttatacagttatagtttttccattatattctattttaagcaaggcatagatgaacattttaaaaatcaaatatacatatcagaatatgccttaggaaagatttagaagtgctttagaaaaaaagactcgtaaaagaaaaatcctgaacttgaagcacatttccattatagaaactatgcattttatatttttatatttattacaaagcgtagatttaagcatatctcacactctgatttcactgccaacagagttttaaattgaaaaggtccaacattaaatttaaataaaaacttctaaacagaattccacttacagaatttgctctttagtgatgaatacatttaggtggcagttcagctaaaaagtattagtgtttagaaactttaattctgaaactctaattcataaaacatgatagtttttctagccattgggtactacataagccagaacaaaaacttctgagatgaaattcaacctttaacttcaattactgtaacagatttaacatgtttatcaattacaccaacaattgatgaatctctttctcctgacttagatttgtctagggagctgacagaaaacagtaaaccaaaaaacagagacttccacaaaactgtagtttactgattgactggttttaacatccatttgagaggccccacccccaaatgataagtgaccctttcatgctccttaaaagtatttgaaactgtcacaatccagtggtgagtctgtgtctatggactctgtggacagctcctgagtagagagaccacagaggtctctgaggtgagagtgcagcagaatctcaagggtggcaagatgccaggagagaaaccacttaaaaaattcaatcgattaaaatcattatgtaatttcccctgggatttggactgctctcattgggcgattttttttggctcctggctgttcatatggagacttcagactcataatttgtgaccctgtgaatcatctggttttcacacaatgattattttattccctgaagggaaaaaaaaaagaattcttttaaaggagaggggaggccagaaataattgctttctgtgcctgactacgaagacatgtggagatatatctcaaggaacgtagaaagttaccttagaaaagctgtgttcatcctagattggcatgccgttcaaggctcttctttgaagtaacacaagtttcttatagcctgcacttaacccaagttatattctaaaagcagacattgtgctaatggactctatttagtcgcttttgaggcctgtgggaaaatctccaaggccgggatcataccatcagtggacctcagaatctctctgccatctgaatggggcttcactttctctgtcaacacatatgtctgtgttatttcaaaacagcctgcaatcttgtctctaacattggctttgctgtcgtccgaaagaagacaagagagttgcaagtggggaaggaggaaggacaggacaggcacaccacgggggcataaaggtgttactactcacagctgcaagagggaaacgtgctgttgatctgctccatcacgtccgtgaggtccgtgctagtgtcgtgaggtggggccagcaggtcctcagatgctgagacaaaacacggaggaaggagggagcttagaatcaatgtccatccttctaccaaagaaccgcttgcaggcaaaaaataccgtaaccagccccaaaataggaacaggatatgaactgtcattgaaaagaacaacttctgggggaacagaagcatctgtattcatttgacatgtcatacatgcaagcatgtgcacacacacacacacacacaaagcatacaggaacgatacagtgcgcgcacacacacacacacacacatacacacacacacacacacacacacacacacaaagcatacaggaacgatacatagatctttataaaaacatagggggaacattctaccactgagcaacatccttagctccagcagtagacttttatatagttaaaaatgtatcatatgtttatgtggataaatttatatactaagagaaaatatgaaagtgaaaaataagtagcagtgaatttgacgctagtgtgctagctgaaaaatccattattttgcacataaaatattctagcaatttctttcttttccattttggagcttttatcacagtctattttgtcttgctttatattatctcgatatgtattttattctatgattgaaactacaatagtgtttttaacagcataacagtgaggtgacactgtcactgatggtgttggtggcacttctgctgtagagcataggtggagcaatgtccacagagactaggatggataaggtagagaagaccacgttgcaggctactcttcagcattaggttctgcatgtacatgaatgtaaaagttgtagagaaacatatatgcaaacgaccagtcttggggctgaagagacggctcagtaggtaagagagcctcctgcgttgggtatgagaccgagcctggattccagagtccaactaaaaagctggctgtgatgatgtgtgcccgtaacccttagtaacgaggggggagggagctgagacagaaggactgctgaggcttcctgcccatcctatcccaggtcagtgagggaacttatctcaaagcaatcacgtggaggatgagagccgggcaccggatgtcctcctctggctcttggagcatcttcacacatacatgaacatacactacatgcacatgtgtgcacacacacacacacacacaagtgtacacacatacatgtacacatgagcacacacacaaatattctcaaagcaaaataaaagtcttgcttatttcaaatgaaaggagaaatttttcatctttcaccaaaattgaatccactcctacacattttataaacaagcacattatgactaaagtgtttttttattattaaaatggatctacattcatttcagactaaagagaataatgttctatgctccagagcacacagacgtaagaatgctagcaaccaaacaccaaaaccataaaaactccagcctagtccaaattcaactgtgcttcagtgacacttacctgcctggtggaactgtgggcctgggtcagtgtcaagtgagtagctcaatgcagaatgctgtggggaagcccagggggagacaccattgatgcgggagtcagagtcaggctgcaatcacatgggatgttagagtaagaaagatgcctgcaacctagaaaggacagtattcctcccccacctccagcccctgccatggtccttgggcaatttcagcctaggttatggcccgaacacttctcctgagacccaaatgcttgctccatgtttgtgctttgaagaacttcttcttacaccacagaatttctttatgtctgccattttcatctcccaaattttacattatttttacaccaatgtagtaaacttagaagtaatttgggttcatctttcagaaagtgccattgtactttgaaaatggcaaatgtactaactttcaatagctcccctcagaggcgatatagagagagagtgcttttatccccctggattttggattcagcagcttgaattcaaagtccaacttggagcactaagaatcagtacaattctaggcaaactacagaaacttttgtgttagatgctgtgtacaaactgttttagcattaacaccttagtgtggatgaagaacccggaggaagagatgctaaataaagctttatgggccatagccgcggcatagaattttgccaggaaagtgataaatgagtctttccaaagccatttgcccagtccgacacagggcgaaccctccatgataactcccgtgcatatctttgtgctaccgaagggcatgctgataagtacgtggtcaaaatagaaagcaggatctataatatgagaatgtagaaattcctctttgatgtagattttccattaaatccctattagttgatgtctggtagttttccctgtttatattgagttaaaatttccatctacttctggcacgcacactaaatcgttatgaagagataagagctccacagccttggatattctgagccacttagacatcagctagttccaaaaacattactgtgtaattgtgaaggcctatgagccactaggtccttggtctaatgggatggcaggggggaggttggaagaatgagtccaggaaccttttctttcctcccaagagcatcaaaaaggtatacagcacgcaagggcttcgagcagagcttgtgtgatggttccaagtggacgctaaactgtggacatcaacagttgatgattcgcaaccttcctagtgctgtgaccatttactacagttcctcgtgtcatggtaacctcaaccttaaaactatctccgttgctacttcataactgcgattttgctaccattatcactcatagtgcgagtatctgatatgcaggatatcttacatacaacccctgcagaagagccatccaatgcctccaaagaggttgtgacccacaggctcagaactgccgctctaagagatcacacaaggaaacttatgctgtactaaggtactacgtgggaacttcaaattcactctacaagcaacacccgcccctgccaatatatgtgacactgaggataggatcaagcaaacagtctgaggtcttaacagaaagccaagttttgactcacttagcaagccattattttccaaagatggagaattttcagtcttttaagtaaatgattcacacagttatatcaaagaaactctatgatgacagagagagagagagagaaaagcaagtggccaaaggagggaaagggatcaactgtccactatgttggtaatgcaaaaattataatgctttcaagattcctgacaagataaaaagaccctggtggcaactaagccaagacagctttcgtaaacgtaagcaaatccccggagaaatggttttctttaatgcagtacagcacatgtgggaaagggcatctctgttaggatgtcacaggacgccaccccacacaggctggagaaaaaggcaaccgtgctaggactgctggtgccagtcaggaaatattatgtggggaaatcaacattatatctgtctgcagcaaaggtgttctccctgttagctctgcgagctgactgccctcttctagttaagttagtcaaactattaactctctgcctgtggctccttgccacgttgtttcttccccctcacagaggggcagaagcagaaaggcagaagccacaaaccaaaggatggtagtttctcaaaactgtcagttattagccagtatttaatcataaaagaaaggtgccagtattaaaaacggtcccaatattataaaaaggaaagcaagagaaaacaaggagggagagagggagggagggagggagggagggaggaaggggccggggaaggggaggagggtaagagacgccatctctgttaaaggtgtgcatccatctctgttaaaggtgtgcatcatttcatactcatcagaaacatacgttttcctcaaaatgaaaattgtactgcttgttgtcaagaaagtttccaagtcactgctatagcagagcatcccccgtgtaagaaatgacagtggcaaactagcagccacctgttcctctgcttccttttgctgttgtcgtcgttgttttacagacagtgatttctgaggtaccttcttagtcctagttctctggaagaaagtgttagattgaagattgtaggtcacctgctgtccctattctctgtggaatctttcctgatgaaagtcaggctcgtggctaccacaggattctggtttttttttaaagtcaaactgttctaaggtgatattttagtacaaaagaagaaagaatttctatgagtcagataggaaaacagacaattttgtatcagtggagattccactcatacacagaattaactgtgttgctcatgaattgacgggtccaggcttcagtgaggtgggtgggtgggtgggtgggtcctgtggaggtgctgcacaggaatccacacccctacctgctccaggagctgtctgaggcggtgcagctgagactccagctgtttattgtgatcttccaaaatttgcatcctcgcctccagccgccctttgtgctgccgcaggagtttagcttctgctataagttctgagtcctcagatgtgtggtgaggagatacgatggagtctggaggggagcccacagggagaccccttcttaggtgctgctccttcagctgctcatactccacctgcagatttctaatatggaaagggaaaaatataaaattaaccagaattattatcagataattatctcccccaaactgcctgggaactccaaatttagtttgatactcttcatctcatagaaaaacatttattagcacgaagagctaggagggagaaaatgggcttcaagcaagagtttttccaggatccatcattaaatcacagatgcacgaggccctacccacatcccagcctgctaatgtcctctcaaacttggacctcattgtgatgtcttagataacatctctgaaaagacagaaggaagggaaggggagcgagtagtgtattttcttctcccgggtctagctcacctttgctcttcctccaagtcagcaatgatccgctccagttccccacgctcttccctctccacggacttcaggatctgagctggactctgcggctgactcacaggtgactccccgcccagggtctggcagtactgctggatgagggcatgctcatcctccctagagacaaggaagatgcccatcagctcacatctgggtgctgagatctcagagcacacaagaaataaaacctgtgacgcctggaccggtggctggaccaggctgcttcggaactctgtgtctccatggccatcctttgaaactcgagctggatgctggagttcatgctacagtgcttgtgtaggatgagctcaacatatcaaaactctcatgccacaatttgttattctcacaatccccagagagccattccactcaacagaaaaaaaaaaaaaaaggcacatccatgcctataaataagagtaataagttgctataaatcaggcttaatggggtgcacccaacctatgaccataagccgcatgcagctcaggagagcttgaaatgtagtccaccacatttttagataagaacatgttacaaatatcaatgggttggacatacctagaagcagttaacataaaagttaaagatgatataggcaagcatattgcccactgactaccaaaacagtggactaaaagatcacagcaccaagaatgactgatcttttgatttggctataaccagttttcctatgtttgataacccaaaggatttacaacgtatttctatttaaataacagcataaacacaattgtacatatttataaaatagcagtagctattttacttggtgtcatcataactaatttttaggatcaatatcctgcattaaatcattaattacatttaattcattgaagttcttcatccaatgatctgttactgaactagacacatcgacagtagtgttgatgcatgactgtcagcagcagaagagtgaagggagacaaggccaaatatgtctgtggtaatgaaaaagctttccagctgggctggaatctctgttcttcctttgtgaggcagatctagttggatgtcctcaggaaggtatgactgtcacatccatctcctggctcaggagatttcagagccctctagcatactggacatggcctggtttgatagtttttgtcaagaggggaaataaaggataaggcatcaggaaaataagacataactgatgtgttcaccagagttgaaaatggagctgtcctatggctgagccttcagtataagctgtgcagctgtacggttctctcagcatctttcgctgtagccctggatcagactctgtgctaaaacagccaaggagagcctggcagtctgggaactttattgttccacctggaccttaaaacccctttgctcttgtgcagtactggatactgggcaagcactctgattcttatgtgtgatagaaaatccatccttggcatatcacacttttgttctgatagtcaggggtctgaaattgcatctatgatttagtgtgttcttagaaaaaaatgtgtttcaggcaaagagatcagagagagagggagagggagagggagagggagagggagagggagagggagagggagagggagagggagagggagagggagagggagagggagagggagagggagagggagagggagagggagagggagagggagaaattcttggtgacttaatgggcctccttcctgcattgagcactctcactttccttccttcacagacacacacaaacacacagacacagacacacacacacagacacacacacatatgagagagtgtgactgtatatcaaaaataaaactcatgtactttggctaagcttaaagcctaacttaacttccctccctcctgacaaatgtggcctttttaaagagggtcttttgaaggttgtttacaatgatggtggaaaataaaaatacagcaggtagatgacacaaaagatagaattggccatgacgtcatctcacctttcatagtaaatgcaagatctctagagggaacaaaagaagtcgcatgatgtcctgagggttcaaaggatgagaagagcaggaaagttgatatacgacccctgcacagcagctaaaacttctaggctactctagtggcttggatatgtttggctcatgggaagcacactattaggagtgctgatgccactgtgtgtggggactttaagggctcctagcactcaagctctgcccagtataggagagagttctctcctggtagcctttggatcaagatacagaattctcaacatcttctttataatcctgtctgcctggatgttgccatgcttcctgctatgatgataatgaactgaacctctgaacctgtaaggcagccccaattaaatgtgttcctgtataaaagttgccatgggcatggtgtctcgtcacagtgacgaaaccctaagacagctacccacacagaagaatgaaacagagctctggcaaggaaaatgactctacaagtgaaagtggttgccccaagccagatcactggagtttgctctcccggagccacaaggtggaaggagagaactaacttccataagttgccctctgaccttcatgtgtatgaaactcacatgcacacacacacacacacacacacacacacacacacaagttcatgatcagtagcctagacataagtacttgaagaggcagaagcagagatgaagccctgacgccctgtgatgaataaatccatagcctgagacacgagttagagactgtgtatcatgggtggtggttccactctgagatcaagtggaaaataaggcagtaggaaaagatgtgagtccaagatgcatcgaggacagaacagatgggcaaggtgtaaggatggagggcacacacactaaagcaactgcaaaatgagagcacagcagaacatactgcaaatattccctttcaggctgaaacacacctaagcaagcaactaaacaatgggatatccaagaaagcggaaaatgtgttatgtcagtaaatgttctatgttttaaggataaaacaccatgagtaatccactaaaaatcaaagcaaaatgagcagtcatttacaaaggaaagaaaagcttgggcccctcctgtcccagatacctaagattcaatgacaagggggtgatgtgtggaatcctacctcagtcattcgcatcagattgacgcagatttagttattgaaataaataaaaggcaagtcaaattagttatataatgcctgtggatactatccctaaaaaactcaaagtcaataccttaaaaaggataaatcataagaatcttctgaataaaaatcatgtacccccaaaatagcctgaattatcttatggctaggactggccacagatttggactagagcccctgcgattgggagatagcagagatcatttattccctaagaacatttgtgtagacacttgggcctggggactaggtgcttcgtaataacataaaccacacttttggtttcaaatgttgggctggcaagatggcccaagtggtaagagtacttgctcatgtcctaggttccaacatctgcaagctacacggtggaagaaaagattagcctcctgtaagttgtcttctggtctctgtacacatgcaagtatgcatatgcacacacaactgagaaattttttttttttaatctgggcactgggaaaccacttgaacttctctatttgggaagcattttgttgtcagtattaatgtaaattcgcctcctttgtgaacttgatgtacagggcgttgtaataattatcatggccactaactacattgtttgttatggtgtctggaagagaattaaggtcatttctgtaaaatgaaaaatagaataatttacatgtagcataaaatcttggccttaaatattttcatagattattagccttaaaggttaaatacaaaaatagatctgttctagtgtttaattgtgtataataaaaaccaagagcaccctcattatgcagatgatacatcatgcaccagattagggctattaaacatcaatagtgtgcatcatgctgaaatagaaagtttttttaaatgtagcctgtatcaagaggtatcattagatgcaatataattatactgtatgtgatacatatagtaaatactatctacattacaaaattagtacctgtcacatgatgaaagagctgtgattcccttgatgaactttaaaaccaatgctctattccagctttcagatttacaaatggtaatgttgaggtagaccatgaccaagccccaacttcagtccacataaaacagcatcacccaaaggcagaaagtggatggagtgagaagctggttaacggcctcagggactgctgtctaagggtctctctgagtcttgcccctcctgaagatgtatttgaataacttcctacgaagatactgagaagccttaaaactaatgccccaacagatcatctggagtctggctttcagagaaataggggagtacttgggactggattatgtaggggtcaattttgggaaactggtatatatgatacatgaatgctcaatacacagtgaaggttcatggaggggagtacttggagaggggacagggaattgtttccatgatcctacttgaaggatgaaagccacctccaactacaggtatgttggctatagctgaaggcacaaaacccaaataaacaaaaaacaacccaaaaccaaatattggtgaatgatctttgctagctctgtggttggaggtctcccatggtgagcaagctcacccttcaatagtgtgtgcagaagatgcggaagatacacagctgcatacccccccaccccccgactaaacatcacccaggggcagcgagagtacaatgaggtaaaaggagctggaagcacatgcttgtcaccagaacactttacagggtgagacggaagattggaaatctgaggccagcatgtggcacatagtaaaaccctgtctataaaagagggaggaaaataaaaacaaacaaacaataaaataacagcaacaaaacacaataagaacaaaaacagggctggtgggttctgagcactctctcctaaaactaaacttaatttacttatcaatgcacatacatgagagaatacacagactggaatagggctctgccaaacaggccacatacgtcctgagtgtaacagctgcctctcacaagtggctccatcacttcactaccgtctaggaataaaatgaatatctgttgaatgaatcaccacaccaaaggtctctgtgttaaatctgttgagctgctaatcatctggataacttctccgttctgacacattcgcgagaaaactaaaggacagtgcacattgtatttcctatgttctgcccacatagaaaggaacacaaatgttctgaagaagttagatttttatcataactattatttttcagttcattaaattccctgctgcttttaacactggtgaggtgaggactagcctgatttaagagatatttaagcaacttaattactttatatgaaacacttactgttaggttatatatgaaagagcagggcaaatattttattatcttgagctgaagtggtttctggttcataacacctgaataataatgcctcagccatgacttatgatgcctaagatgccaaacttttgatatttaaaatagaaaaaagttcccaagagcttctacttataagcttaatgataaatgaaatatgaaacagacttaagggagtcattctttatcagtgttcttagcaatgattatcaacctgagggtcacaacccctttgggagtccagtgactctttcacaagggtcacatagcaaatatttgcactatgatccaatcagtagcaaaattacatttatgaagtagcaatgaatgctacttcaccacaacacgaggaagtgtctaaaggatcacagcattaggaaaggtgagaaccactggcttgaggtattattctacttggctttcttccgtctttgtgagtgagaacatgtgcacactatattctagagcttctcaggttctcctgggctccctgactggtcaaaaccatagtgagcctacaagtcacatcaacttgaaactatacaagcctttttacacatcatctcataaaaaaacaaggtcaaaacaagtcccaaagagaaaagatctattacaacattaacatcagagaggaagcgtttgccaagagcattccacagccaagcttaagatgtacaaataaggaaatgagatataaaatatctagctccgaagctatttctaaaagatattataagtcaatgaagctttccccacttcctgataaaataaaatatttgtaagggagttatttttcagtgaatggcagaatgagtctgtccaagcatgtgtggagggcactgttaacagcagagactatgaagaaaatgttagaacgcacaggagagaggaagttacaaaagtgtgttgatcctggatgtgcatttgtaaaactatcaataaatttgtaaaactatcaatactatgggtgcgagagacggctaggttggtaaaacactagccagggagccaatgaggacctgagtccagatcccagctctgatgtacaagtggggtgtggtagcacacatctctagttgagggaattggataggggtgggggtggggggtggagagagacagagcttatagggtggccaaataaatgagatccattttcattgagaaactttgtctcaaataaataaataggagaaaattgataaagatatctaatatttatccctgtcctccacatacatgtgcaaccatatgaacctacgtatatatgtgtacatacccacataaatacaaacataaaacatataaatatccacaaaaatacatatcaatattatataattatgcagcaatctgattattctaaagcagataagttgattcctaagtaaataaacatgcttcatttacactaacatggctttaaaagttaaaatgtgcatagactaatatgaaacacacatcagtttggattgggataacaactcagatgccatgatctatgaagattaatcctgagaccataatacaaggaggcaaggttagtcagccaagaacctcccacattccagaaccaggttccttcctgccttccatggcccagtcatcaccaataggacacgtttccaccatcacataccctcccagtgtatgtgctccatatcccctctaaagcccaccatcatgacctggcccatctctctgttgttccatccctcctcggaggcagccttctacatctcctcacttccccagtaaatcttttctatgaggtctgttgcatggtgtggtgtctgtggccttccttggccccaatctctgagatactctttcacaaccccaactatttcagttggcctcttgggcagactcaatgcacgatgcacttacacgcttcctgttgtagagctgctatcagttaggaaggacccgtttgtcctttccatctgggccagtctggaaacacaaaaacgagaagatgacattacacggctgcaactggaacagtcctccagaagcacccttgctggcttttaaatctatattatgacctaacagaaaatagtccagatctcactcagtggtggaattaaaaccatctgtactggtgagctgaaatttgattgccattcactttgggcctgtaggcggtataccacagtgtgaggtcttctcattgagccctcaggccctctagctggtctccactgaaacagagcaacctttcacacaaacctaattttgttcctctcaggtctgaagattcaccatgacttctcttgacctagaatgtgaaccaactcctgatcaaccgggctctgtgttatcagactatggtctttgttaaccccacagactctccactcctctcccttctgtagttcaataaagaagctacattcttctgtagcatgttatccaacagctccaaaaaatctgacttagtcttaattcagcacaaatgtgaccatttttttttaatttgtttttttcgagacagggtttctctgtgtagccctggctgtcctggaactcactctgtagacctggcctcgaacttagaaatccacctgcctctgcctccaaagtgctgggaataaaggcgtgcgccaccaccgcctggccgactattttttaaaaatagcttttaaactaaggactttggagacagctgccttctagtatgaccaatggttgattttacacactttcctgaaagttttgcacactgcatgcagatctatagtttgctctgcttagggacttaaaaacaaaccctaataatcaaatattagcataagtttaattacatattgcaattcatatgtgcgcagtctcccaagggcagttccaaatgctacctttattcattggaattaggttatattctctttatcctgactgcttgatgtttggagtctcagcagctctgtaatggcagtctattgtaatctactcttcacagaatatatagcaggtgtttggtaaagtacaaattacatcatgaatagataaaaggccaggatccacatggaatagaaccatgacttctgcaaatacactcctaccacaaggtttgtcagcagcactgaactactacaaaagcagagtgggggatggttatcagtctcttaccgtgtagcgtattgctctattcttgagtgggtgtcatcatgaaacagctgaggggactgggaggggctgaaaagggggaaataaaaaggcaaaggatttattctcaatattgacagatgttaccagttagaaggttagttaagtaacgaatctgccatgcaaacaaaccaccagcactgtcacccaggatgtaaaagtagtagtttagacccatgctaatattcctgattagaactccccgcctgtgcacagggggctgtgaatactcactcatagtgctctggccacatactgatgagcgtgataggactgcagagaggggacagggagacaaaagtcacagaacaaacatttagagcgatttcagacaaaagcagacggaggcagattcgtcttccactctcatttggcttccttgatcatcacctcaccgccagggaaactgaaagcaactttcccacacctgcagcatccatgtgtcaagatgggcatcatgttttagaacagtgagagtgaaaagatcagccaaatgtgctaagatcgtcccacattataggctgttggaagatgatgttccagaatattctaagggagacacagttcttttttttttttttccttggaaaagacattgaattagaaaggtgaatttattacctaattactagactattgacatcagaattgaagtaagaggggtttatggctcttcattcagaaatataaaagtttaaattatgtgtacaccacatttctcaatttcagaaacacatggaaaagaaaagttttccttcctacctatgccctcctcagagtcagagcatcagcacactgagggtgacctcgccaggacaggacagacttccatccactatgatgctattaactagaagttcgctctaggaaacaacatgggccaaccagctctgcttgaatcaggggcttgggtctgaggcagtgcaggggccgccctagattttcagatcccctgagagcctcaaatctccatgaaatgccattgaaacaactcatcccaattaaacagtagttcaaactcttaacttttgagagaaggtggtgacgaattacctgatgaatgtagaattttaaaagcacaaggaaaattagtactctaattatgtaaagtctcttgaaaaagctattgctgatcaagcaaaatcctttcagatttccttttctattacatatgtggactggagacataactatgatcttattatctcctgctgtgtgaagcacaagatgatatgtgcactacagacattaaagagatggaggtcatcttattgggtagaaagctaaagttctttagatctgctttcaaaagtgggcattcatcctctatgtctgccaaaatatgtattctgtaaatagagttaactgtgtccatgtaaaggagaagccgggacagtggagacacagtatcattcctcgtctttagtatatcactacttctcattatccctgaaaccttgcaaatggcaagagacagacagctctgcaccctgtgtcactcttcctaaaacagcaactgcttaagaaattatctctaaaattcaagcctaggacaacattcaatataagctttcaacagaaaaaaaattgtgagtgtatatatatatatatatatatatatatgcacttatcttaagaaaccctggcaaagctttgtggattggctttagcgattcttaggaagttaattgttggcacaaaaatttgtgaactaagaatggaacaggcagaaagctggactgaaagaagaacatttttcacggacaatatcaaataaaggaaacagatacaaaatcaaactttaggtttctttgccttcagaggactttggctcacagggagaagttgtgatacaagctcacactcagtaggaagaaagaacagcagcgccgcgcttcatccctgggacctacagtaagaagggttgagctcacttgccaggctgcttgtttggcatagatgagtctctgactgctactgccagcacccaaatgcagagaagtaaataataaaataaaggcagcatcaatctgtgagctaccactgacttcaaaatggagctgcttcctgttttcagtgtagcagctcagcggggggtttgactaatttcatatgctatgagaagaatcagactctaatataaatgtaagtctatgaattccaacatagacatctaatgacgcaaattgccagcagtctcctcatatttccgtgtttttgattctttaacccatttgctccaaagctgttaactgtttctacctgttagatcatagcctggtgcttgaaaaccagactagtcttaccccctccctctccactccctatagtcagtctgtccactgaggacagcaaattaacaagaccctgtaattctggctggttcgcatgccataaaatataatgtgaaaatgtaaacaaatatactttcctatctgcgtcatgtggtgttatagccaagctccccaacttctctgtctctctagattgtgtactttccacctttaccatgttgtctataactaacactacctataacactgtctatagctaacattacctacaacactgtttatagcttacactacctacaacattgtctatagctaacactacctacaacagtctatagctaacactacctacaacactgtctatagcttacactacctacaacactgtctatagctaacactacctacaacactgtctatagcttacactacctacaacactgtctatagctaacactacctataacactgtctatagctaacactacctataacactgtctatagctaacactacctataacactgtctacaatggctaacactacctcttctacacattcaacttaaagtaactttcttttcaagacttatatttgtatttgtctgtgtatatgccactgtatctaccctatgtctgaacatgccaaatgtggggtgggtgccttcggaaaccaggagaggccactggatgtccaggagctagagttacaagtggttgtagctacccaacatagtcactgggaattaaactctggaagagcagatcaggctggtaactactagggaatctccctagccccaggcaaactttcgcaatgcttctataattctctcctacctttcaggcccatcaagatacctctgatatgatatattgttgctcaaaatgctctgccatgaccatggttcctgtgttagtgaagcccccttgctcctactaaagttcattttctgaagggtaatttcatatcaacatctttcctgaaccatccaccactcttttctcgtaattgttacctgtgaactctctcactattctcaagttaaaccctggagatgtgagcatagataacaaggtcctttatcatctggctctgcctctctcatttgtttttgatattagtttcgtgttagaactttaatccaggcttttgaaaatgattcatttggccagtgagtcttttccttcacctctggccatcctgagtcctcagcagatgattcaggcaggtctcagcatcgttatccgtcccttccagccttgaacatccctctccacaactgcgcctgctctgtagggattcttcaaagagtgactcagtcactatatattatatattatattcactatggatatattacccaataccagaagtcggtgtttcttgttgtttcttaatctctagggaaactaaactaattctaaagtcactaataatctctcagaactctcaaattattcctgccaccattttattttagctctttttttcaacttcattatgaataaatttttctcattttgaaaattcttgcatagagacctattaaattaactgaataagccttagcatggacatgtttacccccatttagtaataagcatttctcctcatagagtccctgcatgcatgcctgcatggctaatcactggtcagaaattaaagtaccacattggcaaagatgaaagaagtcaaaggaagctttacccagctccataaataacttcaacactttcaccacttcaatggtttttctccaatgttctctcctcccacaagtaggagaataaatgaaatcaaacatttttttctttaaaaaaaaacaaaaaaacaaaaccctacccactcacataaattgttccactggaatgattaagtgaccttggagcagaagagggttcagcagaaaaatgaactacagcaaatccacagagctctgcataggatttgaagaacacccacccacactatctagtagctcataaatcttgttcaaaagggatttggtggcatccaatttaatcagatgccccttcctttctccttcttgtatctctcttggaaaatggtgggaaatttatgttaatcagggtgaggcattttcagcgtagtatatcaaaagcagagaatgtaattattttgcatggttttctgttcatttttacttggaaaaaaaagtctctaagtggatcctgaagatggctcagtcagtaaaatgtgttcactgcaagcacaaaacacatgaattcaaccccctgacccacatggaatctggtcacctaggatcccagtacagaggcagaaactggaggatgctggggacttgctggctagccagccttgctcagaaagcaagctccagactcagtgagtgaccctgtctcaatcaataagttgtcagcaattgaagatgacaactgatgtcaatctctaggctccacatacacagatgaactcaagtgtgtgcccacaaatcaaatgtcatgatcattttgacatgtaaaggcaaaacattaaaatttaaaagaaaggagcaggaaatatccatctatctatggctcatgtgaagggtggagatatttgggatgaaaaatggcgatgatttatgaaaatagtgcaaggcaacattgctcaatacaagtctactctcttccctcttagatcccagcacgatgtgatagtcaacctacaacactatatgccacaatgagctatgtcaaaggttaagtcgatgtgatcagagcagaagaaagactttatcaggtcttcaggaagtcaaacttgtatcggatacaacaacaagaataattaatatacactctttaaagacaaaagcatattcacaaaagacatgcattttctaaatgtatttaaatagctttgtttaaaataaaacaaatgttaaatttgtcttatgtggtatggaagcaatgagaaaaaaaatgtattgttgtgggtagtgtacatacttttttgggtgtgtgtatgcatgtatatacctacacatggaggccagaggtgaatgctgggtgtcttccttaatcaatcacccctcatatagtcacatgggtgctttgcttacacactccagcatacaaaaagcattgcagttgaaacgctgaagtacatgctttaaaaagggattcgatgagttaaaatcacatctactttgatctcaatagaagactgcctggtgatttaaaatgtccatgtatgtatgtcttctggctcattttaacatctttcttcatctcatttcaagctctagagtcttttgttttctttcttagctttatgatcccattgtaattttttttctccctcctaatttcttagaagatgcttgttaactcaaattgcagacttgtaagcaattttgtctgcttcatagatgcataaagatacttcatttttgccaactttatctttaaggagatgacaatgaaacataaaacgagggttcagagaagagttgcatttgaagtgtaagatgaaatatttttgataatttaatttaaaaagatataatgtggagctgaggatataactcaaaagtagagtccttctctagtaagtataaggctcagggttcagaccagtaccacaacacgaaacaaaataatgaaaggtattataacaaaaagattgaaacctatgaaagggaagaaaggaagggaaataaatgaaaaaatgaaggagcaaataataccacattgattgggcaaatatttctaaatacagagagagagagagagagagagagagagagagaagaaaagaagaaggagaaggaggaggaggaagaggaggagaaggaggaggaggaagaggaggagaaggaggaggaggaagaggagaaagaagaggaggaggaagaaataataatacacattcggaaacaacaaacaaaaatccccagataatacaaattaactgttgaagagcaacttgtttcaaaataaaatatttcatcaggacacaaatctctttgaaaagatgcaatttgtttcatgttgttagcactagtattaaagacaatgaggtgcaagcacgcacaaactgaatgctagaacagaactcacgtttctaagttgtccccttccagcacggtctggacaggcaggtagccaagccgaggatgtttggcaaaatatttcttggacctgaacttgttcttcagcaccttagtgaaatctctcacatcttccccagatgttgtctataggttgaaaaattcacagttctggttaaaaaggctacaacaatatctacaacaaaagctgagcagaagtaaggtgacggtcattaaatgccaaaaatacctttatatacctttgaaaagcccagtatcaggaaaataaagggtaattgagactctatgaaagacacattcagttatgccataatttaataaaacgtgttaaaagtaaaccactaaatagcttctttattctatattttaaaacttgatcccaaaattacagttttggaaagcttactggaagattcctgtgagtaaactgatttccatctacaagagtagtgatgacattccagaggacatactttgaattgggtttaaaaactgaggtcagtgcttagcctatgctgcccacaagctaccacgcattctagttgggagaaattttaatcaataataaagaaagggcagtggaaggggacatggaaggtgcatgcccataatctcagcacatacaagaaagagacaaaggatttatatgtagctcaaggccagcctcggctacttggtgaggccctaagtaaatctcaaaagagctgaggaagaaaacaaagcagtcaaatgaacaaacccttctaaccaggcatggtgtgcaggcccataaaccccaggacttgggagatacaagcaagaggaataggcataccaggctagcctgagctacatgagacactttctgaagaaggaaaaaaaaaagcacaagaggggggaggggaggggaggggaggggaggggaggggaggggaggggaggggaggggaggggaggggaggggaggggaggggaggggaggggagaggagaggaagcaaagggccacctcaggattctgttaggaaaacagtctaagtttctcaagtctttatcaaccaagcagaaaaactattgttatacccagattaaaatgtaatatgatgtatgatgttgcaatttccttaaggatttcaaaatgattggtgttttagtttgttgtttgtttctctgcttcgttgagccagggtgtctttacatagccctgaaagtgctacagcatgctctgtagacaaggctggcctctgcttcttgagtgctgggactaaggtcatgtgtcaccatacctggcaagatgataaatctataaccatttacatgtgagatatgcttagaatcctcaaagccaactctcttatctgattccatcaactgttttctaagcctaattttatactatcaacaattctagtgttcatattcaacacagacagaaactctagtcctggcgatccagttacatattcagattattagcagaatgctgaactactactcaggtagtttgcttccacacttagcgcagagtggattcattgccctctttataaggagacagagaagttatctatataacacaaacggaatgatgcgtatgtgaatgcactgtgccaactggtcccactttctgccttttatttaatggcaagtgacccagcatcatagagacttgtttacaaactgaaactgtttatttctggatagggatttgtgattccactgctcctgtgcctgctcttagcataggcagttaacatacaaagaaataccaaatgaagaatgtgctctagcttcaactcggcctgtaactaagtttggctatggttaggcattcatcgctgagtccagaggacttgaatttgtagccctgagatgaatgaaagaaagccacatgaccaggttccaagcttcgctgccaactccccagtagtgtacagtatacaactcactggttatgagtccacttctacttaaacaaccacaaccctgtctacttacatatacaatgactctatcactcttcaaagatactctatgactactacccatgcccaggccctgccaggtattaatatagcttctgtctctatgagattgcttattctgggtgtttcatagacagatcttcatatagtatgtcttctgtggtttctatgctgttctggcttatctattctgggtacctatgtagaatcatatttgaataaaaagagagaaaccactcaaaggtaccactcaaatgtccaatcgcacattacacactcttcttcaactatatccaggacctagaaaaccagggccaatctaatcaagcaataaagaagcactatttctctattcttcccccatcaccaaaaacccaacagacccctgatcatttcccccagagttaaggcatacagtggagttagattgcttctaacagtgcatgtgtattataaaggagacagccacatagaaacagcatgttttaatttcttcagtaatttttgtgttcagggaatataactgtttgccatccaaagttgtaatctaaggctgctatttcactggctctataaactttatcgcaacaccaaagaagatatgaaaagtgactcttctcatagccatgggagatgacctttggtataagagaatgtaattctgcagttggaatagagccaaggaaatgatttaagcttaatattttgcactgaaatggtaaaacattgttgtagacttcgtctaattagccacctaacggcatttgctagcacctctctattttatagtgctaatgcaatgccttggcaaagagaaacccaccacctaggataatggaagccatcattgccatcaaactcaactcccgctgcacattaggtgtagtgttttgttgtttaaaagcagacagctgttgctgttacggcgggaagcatggaatggaaaggaacttactggaaattactgcacaatgagtcaacctgttaaatgccagatgcatttcttggaacattaggtacggtttttttctcactttattgaaaatagattcttttctctcatactatatcctgaatacagtttcccctccctctacttttccaagtcccttccctccacccctcctatccagattcactccccttttgtctcttactaggaaagaagagacttctaaaagataatattaaaatataacaaaataaaatatggaaagatgaaacaaaactatcacatggaagttggacaggagaagcacctcaatggtagacttctgctcaaaagcagcagtcctgttttctacaaaccatgtgatgtctctagaggatctacagttcccaagcacttttgcttccttctctttccctgacatggtgataatccagtaggtcctgtggctgatggtggcctgtcatcagttttgtttggagactttcttggacctggattttattgcagatattggctctgtggatttctagattttgctaactaactgctctgttactttttaggtagctaacaaagaagaggaaacagcaaacacaaagagaatgagatagcttgaaaccacagagccaccatctccctcaaagtccctctagactgatagctcacagcctgtaagaactcacaacagagagctgccctcctttccttctctttttctttcaaagctagtgatagtgcggcactgtgaaaatactgggtgtggggatcctcaagaaacaccccattcccctgaagtgaagcagcaacgacaggatcaaagcttatttaggtaatgagaacagctagttctccactggctttccatcatcacgaatgaatgaatacaatattgaaaggcattacccaattataaaggctaccacagatccaacctaatcatgtaagcctctacaaaactcctaaggtattgaaaccaagtaactgcatttccaggccctattttaccaatgacaataacaataataaaagcctgcagtgtgtgtgtgtgtgcgcgtattaaaataaaaataaaaaatatatataatctttatatatatttgatagtatgttttgcttgcatgtatgtctgtgtgccatacatataaactacttgtatagggcagaagagggtatgatatcccctagaattgaagttacagttaaaagccactttggagctgagaatcaaacttaagtcctctataaaaccagccagtgctcttaaccactaaatcttcactctagcccctatcaagaatattttaaagtcctctctaattactccttaattgagagtaaaaatagtctacttcaggtgatgtagactttgagattatctttggcttcaattgaatatctctatattaatgcatgtccatgaatccccatgttcctggtccatgttttaaactgcacatccttagcttaactgttgactccctgcacaatcttacacttgaaatgcattgatggatgactgacagttacttccttctcatttaatgtgacaaatgaaaatgcaaggccaaggcgcagaagagtctaggattcagaaatacggacctccatgtaatttattggcaattgacttgttgaataaattactcctctacttcagctgaagaaccaacagctcctaatgccagagagccacaaggcaccatggagaaagagtctgctcacaatgatgccaaaaaagtccaaggacaaaacccaactgctaattccagattaatttaagctgaataacaaaaagaactgaaaataagcaaaactacaaccatgtttgtttttttttctacctcccagtaattttctcagtcataactcaagtgacagtaacatcgatgtccataacaaacatgtccagcattagattttcaactattaaattcaaatattaataagttgtacatagggagatacagaagtgtgatgatgtaaatcaaggtaatataaagatgcgtagtcatgtgatacatggggtgaataagaaaatgctgccatgtgaaccacgcacaaacgctgcaattattaaatcgaaggaagcacactcactagcaggtttactgaggacagagctgagggacacatgcacacttctaaatgtgcatttcattatcctaagacttgaagacactccaggatttttttcttttttaatggcaaaactaaccctgggttttcactgatttcaacaaagtaaaattaagacatgtctggattctacagcttggtggaatcagtaagagaaactcaaagccttctgaatcttaatgagggagggcccagaaagctaaaaattaagtaacattgacagaatcaccgtgaacaaggatggtaataagccaccgatgtaaagcagagcttgttgcagcctcctcttaagagctaatggctcatctaaatgtaccagacttgctggggaaccaacatcagggagataagagccgaaaatcaccacttcgggatgctgaagtcagagaaatggcaacgaggctgcagttttagcatattggccaatatcccaatgcacatctgaagaagcaggcctgccaacacaaaccgtgccgacggcaccaggacagagtcagcactttcttccagttgatactcacagccttcagaacacaaggatgctggcaaaagggaggagacaaagccactggtgccagttggtcccttttttctcttttatttgatttttttctcactttttgccaatacaattcaaaaaggcacatttaacttaattaaaaaatgttttttaatataatattttgattctattggatcctaaaaccacagataattatccacctacaaattcagagcattaagaatattatatagccaaaggccaagagcaataggatatttcctatactttaacaactgggctatgatgacttggaatgtgatttcaacgaggtaaatatttggagcccaatcttaagagatcaccacgtcctctacccaaaagcccagccccaaggaagacaacgtatgctgtaaactagcccaggagataagatcaaatatgtgctgtccccagctgttctacactctgcaagaacttatctgcagcccctgcacaatatatcagtacatcgtctctgcttctgttctcagtaaatcctttttacctgcccatacctcttgtcttccacactatattttgcataacaaatatgctaagagctgttctaaaaataacttttttttttttaactatagtaccctggaagtctccatacttttgctaagttgactgcagaacctgatgaagctattgatgggattctgaaatacactgctactattggacttttcacataaacaaactgtaggtatcgggaaaccttagccgtgctgtcacttctgtaaaaagatttgtctcagtttcctgtgttgggtttataccacacagcacttcacagctaggtatgagtgtttgttgttgtttctgtttgtgagaagtaacacattgtattaaatacatacggtttttagctacacagttttgattaaacaaagtattttctaagtaatgaagatacagccatgtacttgcttaaaaattacactaccaatctgttttaagtgacagtaatttagtgtcttcacagaggtactcactccccagccccatcccagttcttcttagtggatcccagagtaaccaccagtacaatctagctctgtccaatgaccctcaactgatcaagatttactgtgactcaagaccaacagtgagaatctggacatagccaatacttctgcccttctaggtaacaagtttttgtaaatctcatctctagaaaacacatctctcaaacaccctagccaacccttcatattctgaactctgtatgtagcaataccacagcctctgggtttttcctttcccctaacttagcgggggccactgtctctcagcacatgcacacagcctctgtctacttttcctgcttcactgttgtaccctctacttgcttccaaagattcccctataacatgttcatatctttttccataaatgaatcccagtgctgatgacaacagaaaatggggtttctattccatggagctcagtacatgttgcctcaaacaaggcatttgaaaaaaaaaaccagcagaaccaggatggtcactctctgatcttctccaccaaagaaactcatgaggcctctcttggagaggtaggaatcaccatcttgttgctgagtgttgaaagtgtcccacaaattgtggataggatgttatgacatgattgggtaatatgggttctgatatcatcagtggattaaggatatggcagaagagtgcctgatgaaaaggatgtgtgtagctctttctcttttcccctccatctcttttgtgttatcttgagtgtccttcagcatgcaataacctaacacaattgttatgaccagaggcagaatttaatcttagatttctcagactccaaaactatgtgacaacgaaccagctgtagtttgtaaacatctcgttttcaagtgttctgttatggcagcagcaaatgtcttgatgggttttgaagatacaggacatggagcagagtcttcacatgcaggctttttatttctctaggatcataagctataccctatataagaacatctttgttcacttagaattctctgtctattctttatgaaatccttagcactgaactaaataggcttcccattttcctgggtctgcatttcctcatggaagcctcagaggtcagggaaacttggcactaaatgaacttgtgtgcatttgataatctctcttcagctctgatcttaaaaataggaagaagagatatttcttttccttcccttacattattcccctcagcctcaccatctgtagccaatgtactattgaagcctttctaaagatacaatatcacacagctataacttgtcattttcttaaatgtcctcttacttctgaaaccctctacattcaattttagttaaatgttgggatgtaactacaccttaagccttgctaaaactcaaaacatttttcagtctataaaaaataactagggaaaaaactgttaactggactctttgaagtctccctctccttttgggggaggccttgggggtggtggatacaagtctttgtcaccccagtactttcatctctagccctttcatctgcaatagggtttcttcagcacgaggaaagcccatgacaatcacaataccataactacttggggatttcttactgctttggcctttaactaaaattatcattgtctaagtctacagctcctaagcgctggagagccagagctaacaactctttggtgattgcctcagctgtgcgcttgtgtcaagatagcacctgacttttctcttggtgattcagcctgaccctagcagagattataagcctttcccactctccttagactgtaaccctatttagcgctcgctcatagttagaaattgcacacactcttataaactatgtgtataccaccagcctgaaatctaaagatatactattactgattcagccaccatggaaaatggtctgaagtcctttaaagaagttaaaggatcaatacaaggtgatctagaaattctacttctagacacacacccaaggacaatgacaacatggtctcaaagaggtactagttaaatattccacaatacatggattaggaaaatcaacacacacacacacacacacacacacacacacacacacagagagagagagagagagagagagagagagagagagagagagagagagaacatggggaagggcttataatttatattcagccttataaaagaaggaattcttcccatttttgacaacacagatggacctgagtgaaatgattcagatatacaaagaaaaatattgcatggtctcatttatacaaagaatgtaaataagtgaggagttaagctgagagtggagagggtagaatggtgattctcaaatctggagagaggttcaaaaatagaaagccatccaaactgtcagttgtaacaagagtgagttcctgagtctccatagatagcactgtagctatagttaagagtgtatgttgggtctggtagggcagccctgtagttctagattctcagaaggctgaggttggcagacagcaagttcaaggtcaagctatgcaattttgaaaccctatctcaaaataaaaatgccttttaaaagatctgggatggagctcagaagaaaagtggtttcctagcacgtgtgagaccgtgagattggtccccagtaatgccaataccaaaatcaaaacccagtctaacaaaaatgttgtatggatgaaatagtaaaataactttttttaaaaaaagaactttcaaattctctaattacatgaatgatttttctaattcaaattaaattttggttatttacagcagcaattatttaaaggagactgaattttcattacagagacaaatgattttattttttagatgtgctgggaattttatctgaaggcaacagtgtttaaaagtagaatccttaagagtgaattacatcatagataccattaaggatggatttgatcacaagagctactttttagcagtgaagattcccgatagagaatgtgttcagatccttcccctctctttcacacaggagctgtcttgcccttctattttctaccatgtaatgatgcaagagatttctggccccatgaggtcccttccaacttagacttcctcacttttagaaacagccaagtaagagtctgttcattacacatcacctatctgtattattacagcagcttatagggctaactttggatactgagcgttccttgaaggtccatatatcaaaggcaatctccagtgtgtccttatggaacttggcagaagcttttggaaggtgaagcctattggatggtcaagtcactggtatggtgatctttaaggggattgtgggatactgtctctgcttctcttctctgctctctggctaatgatgtaagtagtttgtttactgcatgcttctataatgatgcactgtccttactagaggtctaaagcctagaggaacctctaaagattcctctacaagaatcagtcgagttattttgggggaaaggtaagatgcaaatgaatagagagagaaaggggacacacactaactagaatccaagtcacgctatcacttgaacataaacttttgttgaactgaaggaattataaaggtacacatttggattatagaatagtaatgggtagtaagagttaaaggcagtttcgtaaaaacaaaaattccactccatttcctcatgtgaatattttattagtagtataataaaataccttcatgaatcatgagagctaatttagacctcattagtttccctacatctaaacacaaacacagtcataggcaataagctgataggttggtggaatatttggggagtctggagcctcattataaggctgacaaagtatactttttaacaataaacacattgaaagaagggtaagatgtgaccttggaggagaaagagagaagccagtgatatgaatgggccattttcttaacctgaaatgaagacaggttgggagaactgcaaataacatggtgcttatggaaaggccacaaccatttaatgcacaaatatcacttcactgaaaaaaagaaaaacaaacctgagcactgtttaagcccattttttaaggtagatgtcaaggtaaagatgaatgggccatacatacagcttgtttataacgaagagagtagaatggaaaaggtctaaaggatttaggtgaaaaacactggaacgtaattaagtcacatcataccatttaaagcaagactatgcctctaagactcagtttacagacatatctccagaagttaggaaaggttataagttaagctctgtagtagattgattgtctagcatgctctgtggtgagttgtttgcctagcatgcatgtacgtctggggctgattcccaacacaaatcagataaaaatggactagaagttgtaggttaaatgtagaaactaacccagataggattgccacataagatcaggaaaggtgaaatgatcccctcccgcaccgaaaggatgataccatccaggaaattaaaaagcaagatggaacctcagaaatgaaagccacttggaaataaccacacagaagaaagattttgggaaggcttaaagcggtggttctcaacctttctaatggtacaaccctttaataaggtttctcttgttgtggttaacattattttcattgctacttcataactataattttgttagctattaatggtaatacaaatatctgtgttttctgatggtcttggcattcctattaaaggatcattcgacctgaggggtcgtgatctacaggttgaaaactgctgacttggagctttgttttctttttaaattcaacattagtagtaggaaaggaaacttcatacatgtgttactggttgcaaacaggcttccgttgatcaatgatcattaaacatgccttgctttcaacttgcttagaaatgttaagaatttatttaaaattattgtatttagtgagaataaaaacagtaattctacgtcattcctctacccttatccacttatcttgattttcccatttaataccagatctttataatcagctccctaaatgtctagctattatcatgtaaatattaacattatactgcttcccaatccaaatctattataaggatctgaagagcattgtacaacctgacactatttcatcaggccctttgttctcccactgtctttgtcattagacagaaggcctagctagtcgcagagctaccatgctcagaacatccccagctcagtttaatgatcctttattgtcacttggaaattcatagtatcttttgaacaggggaccctaccttttcatttttctctaggcacttcagcctgccctgtgtcttgtttgaaggacaggttccacttctgttctatatcttcttgtcagcctcttgcctgctatcagagttctttctgagactgctgcttcttccgtctcaatgccttgttactctaccccattctgtacatggttgctgaatctctccaccttcatattcaatccaaatgttagcttctcaaactggacctgattgctcttatctaagatggtttctcccatctcctcatcctgcttttcaaatacagccactagacccgtagtcatctcatttctctgttgccttgctcagtatcacatatttcctcttcctatatagacagcagtggggacatcagtaatcttgtctttcctagacaaccgacaaaccattagagttgactctaaagacagattctctcttggatctaactaaggttcatagccttctattctgtcgaatttctgacctacaaaaataacacattctcagttattgttccatccaccccatcccatcctcttttaaaagacttgaacaggcatcaccttgatttctgatagctcaaggctgcatacttcttatgacctccagctgcacataacagcatagaacaagtagataccttgtagaaactatgctgctcaaaacatttcctgtctgtgtaatgtcacactgaaatgagccctgaccactccaagaggacttatcaaaaaggaatgaggagtcggaaaccttggtgtggtcctgaaatgggcagatgatcgcttagaactcaggagccttgtccttgaggacctcgaaagccatttctctgaaaggagattattaggtaagaaggcaatgccttccagtttttatggagatttatcctaacttctctaactggagacacagctggtctccagcatcacacttttgtcacttttcttttgtcttctgcttagctctgtccctgtccttctcactgccaagccagtatccccttctcacatgctcaaatacttctgagcactccactatgtgtacagacatactcctcacacatacatgtggattctactgaataaactgtcctaccacttcaactagcagctagctttgataatcatgtaagacatacagtaagaattcaatattaactgggttagtaaataaattaataactgtaatagatatttccccagcttcattgggagcaatattttcctagttaatgttgggcatcaagattatttcatccattataattcagcaacattttctagaaatttcctctccacatgaaagaatctctattgacttaaaataagacagcaagaataggagaattatatgtgcatattttacaagtactgctgcctttgtatagatttatgggctaaaaagttacttaattctctaaaccaaagaaaatatacaactctataaataaattttgccacaatctggaacaaaactaaggaatggctattgacagaaaatgaggataatcttaggacaaagcaactttagatgaaaggaaccataactgtgtccagtgtgagggggctatggcaaaatgaacacattagcaaatgtgactgtatgatatggtggcagggacctcttttggaaaacaacttgacattaagtattttggccacagagctactcatagtcattgacctagctcacctacttctggtcatttgcccaaaggaaatgtaatttatataacacatataaaatgttaccttctcagtaatgctcttaaatgctgtttataggaaactaaagacttaaatctaaaagatggttaggccagctatagcaattcattcacttaatactttgttccaggaagctattgtctaaggaaaaatgggggtgggggtgggggggcagacaaactccagattgaagaaaattcttttattagcaagcatggtagtgcatgtcttcaatcctggcactcagaaagcagacatagatggacctcagtaagtccaagaccagcctaatacacatagtgagcaccaggccatcccatgctacatgagtgacatacaatgtctttaaaaaaaaaatcaagtaaaactatacatatgttttataaaattagaacatgcttaaatattagaaggtagtttgttcagaaactaaatgtatggatgaatttttaatttctctatttttcatttttgatcacctataactctttttttcaaaaaacatcctttaaaaatttaagagaaacatggttgttttcagcaagtggtttcattttcatcatagctaaatcagtatgagttcttaatatgcttccaaaaaagttaagtttaaaatgaaaacacatatttggtaagttaacaaattacatttggtataatgtagaatttttcttaattcaacataagaaacacttatatttaaaaggaaagaaaacaacaaaatttacaaccataaatttttgaaggtttaaaaaatagttaagtaaaaatgtattagataaaagtgtcattactagccaggaggtagtggcacatgcctttaatcccagcacttggcagccagaggcaggtagatctgtgagttcatggccagcctggtctataaaaagagttctgggacagcaaagaatacacagagaaacccttctcaaaaaatccaaaacaaacaaccagccaaccaatcagccaaacaaataaggaaataaaaataagattaagaaaccagtgatataactgctcagtagattcaaaagatactcaccggtatgcagtattctaccatcgggtaatgtaacttgtggccctttgctgttcttccagaaaagaagcaactctggcagacatcataattaaaatgctttaggctcctgtatctgtggtggagaaaagaacaggcatcactcctgccactgaacccaaccctgtgccttagcaacaagctttgcacttaggaaaccaagagcgcatctgctacaaatgcaagatgatgtttctcagtgtcaatttaaaagcgatggctgtaatcacatgtagactaccaaggataaatgacataatgtgaggtttccatatgaaaagaccctattcagaaagaaaccaatctggagtaagcttttatacattctgtatatttttattaagtgtaagacttttgcttctataaagttggagttagaggaaggtatatgcgtttataatttagtcacattacattagattttagatttatgtacattttgtgtcttgtctgtcttaataagacttctgcttgttcttgctctaggggggaaaaaaaagaagtttatctctctaacaaggggagaggaatttaagtatttgttaaaaaggatctcagattatgaaggaaggtagaagccttgttcctaagttaggttttgtaaactttttaattaatttttttctttattactgagaattagatgcaggcataccatgaaagatgataaacatgtgtaaatgcatctaagagtctgaaaacatgcttgcacatgtttacccatgatgtgaagtctagaatcaatgtcagaagagtctgcatgagatctgagtgtggagaggaaatgatagagaaaagttatgacagtgagcatcacacattattttaaaatatcaacaagaccactcataagaaatgaatataagattccttcataagaacactcgtttctaccttgagcatttttaggttttgtttaaaatcgttattaggaagagagagagagaaaccttgatcattacacagtcttgaaagaaataatgttttaagcctctcgtagaaagtaaccctgtgcactgatgtctatttgcagaaacaacactcttaagtcttaaacttctatggagtctgaaaggaaaatgctccccaaatagcccactcagttaagacaactgggggaactaagaaacatacattacagctgtatagatagaaacatacattacagctgtatagatagaaacatacattacagctgtatagatagaaacatacattacagctgtatctgtagagggacattttaaatgccaagactagcaaagtcaaactagaaagacactgtaaaggttatgtgaggttaatatacactatcaagtgatgaaggacttttaaaatgacatgcaaaaatgcaagttatctgaagacaatctatttataccagctttgttatgctcctggcttgatagatcacttatatcttttaaccttttctcataggttgacaaatatggctggcattgtctgtcctttgtgaaatcttctttagtgcaacccttcccttttcttcaccagggagaaactcttgcactgtcactatgttttagccatgtgctttgctaaaactgctgtttctcagtcttgcttgctgatggtggtaagcaggacaatacagggtgaagtcttgggcaaggctttcccttgggattttaagggaccaattgaatgggaagaagggcatggcttttccctctcttcaaaaggcagaaatgacatccagaggagccaatttgccagtggagatcagcgtgaaaattcaagtcatgggttggggataacagagattatgaaggcaggcaaaaccgagagtcaagatgagcatgcagccccagccttggcatatctcttagcattttgttcacatgaaaggagatgaggcctgcctgttattcatgctactgtgaccagctgtgtggaatttgaaatgaaacaattctcagctcggtaaacaccttagagatctaagatttcactaaagctcaatttgaaggactggagaggtggctcagcaattaagaacattcactgtacttccaggtgatgcagatttgattcccagaacccatacagaggctagcaaccatctgaaactctagctccgagggaaccaacaccctcttctatgggtgcacacacaggcacatacatgcgcatacacatacagacgcataaataaaaataaatcttacacacgtacattcctcatgtctccacttttacagaaaagttcaatattactcataaggtcagtgtattatcatttttggctgaccataactaataatgtgatcagcaataatgtttaaagcatatactaatagctatgtaataactatttctgagaaatcataaaccccaggaaaagaatgtggcatactttttcaagaggtaatgaaggaaccaacgtgaacaaacacaccatcctgtgaagaccaaggtaagagtcctacacagtctcctctaaggctttaagtcagtgtccttgacacgatgagaaaaaaagatggactgagtgtggcaggactggcttagccaactatgaagatctgagttcagattcttcagagttggcataaagatgctgagtctagtggcatgcaccagcaacccgagatgatctgaatactggggaagcagagacaggacgatgcccagggcatgccactcagcctagctgacgtcaaactcaagattcagagagagctctggatgaagaataagctggagagtcattgagaaagataaagatacttgacctcaatctctggtctccatgcacatgtacacatatccaggagtatatacatacatgctcattaagaaaaaggtaggagatggagagagagagagaatagacaatcaacagaattaatgagcaggtgaaatgtagaattgatcacaacaaacttagcacacgaaacagttttctgataacttcttgctcatattttacatattgcttttgtcttactaactttgatcccaaacaacttagaacagccaacaaatttgatcaagactatatgtacctaatctacaatgcaattatcctgcgcaggtattcctatggcctcagtgaaaggatatttataaaactttctgattctggactaaagtattacaaataactacaagaatcaaaataagtttgtgtatagatcatgaggaggaatggtacattggaaagaaggacgctgtggagcataaatgtactccaaagacaaaccaccaagcaggaataaatgggaagggatggccatatgaggagagcagagaccattgagttctgatttctcttagtgcttctcacctgaacccaacaatcgggcattctttgcagatgttgcatttggcctgatgttttgcagtctcagcagctgcgacccgatgcagaaccggcaaccacaccatggactggggttccaaatgcatccagtctataaactccttcacactgatttctggcttgttgttattctgggggaagagacagaaagtgaagaacagctcttcattgaagctgcagcaagtgctgctgctgcaaattggcacgagagaaaagtcaagtgactccaggccagccaagacaataggttctttaaggtaagaaaattctagaagctaaaattagaagaatgcaggaaggggtagggaagcagccattgccatatggttggggggggcaattccttagtgctcagattttcttttttatttgtgggtttttaaatgttcatctatgcaggtacacttgcatgcaggtcacatacatgaggaggcccgtggacagcctttcattgattgagcccaaggatctgcctgtctctgctacattgatgctgggattacaaggacaggccatgcgctactacacgtgacttaagcgggtcatggagataaatcccaagtcctcaggcttctacggaaactccctttaactgggccgtctacctagtccctctgtgctcaaatcaaaaagaaagaaaaaggaagcaaaatgaaaacccacacgattccaggtaacccagcctttaattctgtagcacaagtttatctaagatggtaaacgtacgagacgaggactcctcaccttccagacaaagtggaagactctacacgagctttacaaatgtttcccaaaaggagtcattgctacgccccgcctctgttctatcagagcatcacactggaggcagaccagcccggatccaccagataggttctctaagctcatcaagacagactttgtgaggcaactcaagtcttccttgaatcctaatgctgaatgattgtgggtgagagcagaggtaaattccgccaactgcctcttcccgcaggggttgaggtcattctgagcactgacacatatgactataaatcatatttagaaaaaaaatcatttagcatttttttatttctaaaataagaaaaagggccattataaaatgtaataacccgtgacattgattctcctcaaagataccgtgtgagcatttctttcgctcaacagtgataaatcattggctctgctttggaaaaatatctgtaggcttctaactttatgcatatggatgacatcagtagcatttataaatgttcttctgcaccgtaagcatttaaaaaagaaactgtggcttttgcccaggtgaaaattagcagctcagatcagtgcaaaaatttgtacatgactttgtgtgtatgtgcatttgagaaaagatggctgtttttgtaatgctttcatattttaaaggatattctccacagagaacactaaagcatttttattccttcaataagaaaacgtatcaaagtcaatatgaggttcaacgtattatgaagggatgagcaaccatcagattgttcttctgaagtgcattgggcaggccaagaaaacgctgtcagaaagctttcttcagcacatgtcaaacctgctggaaccttaatcttcaggctctcagcctctccaactaaggaataaacatcagttgttcataacccaccagttcatagattctgctatagcagcttgagcagactaagactggagagacgtgtgaaggcatagctttgtctccaggaagcttaggtggacaaggaagaagcaatacaaaccaattaattacatatctcagtatgatgtcacactgtagtgagcatgacagggcagaggatcttcacctgatagggcttgagcagacacaagagctaagccagcacataaagacagaacagaacgagtgggagaagagagtgtgtgcacacaaaggaagaacattctaaacagaagagtgcatgtccgagggcatggaagcaggaatcaaggagtgaagtgagtattacgagaagctgagcacaaggggacaggtcacagacatgagtacagagccagcatgttgcaattccaacactgcacttcaatgtatagtccctgaaaaagatgtatatctaccaaggttttactatgccttgagtcaaatgtaacttaagaaagaaatcatcagcttagagggctgatacctgaaacctccactgtttgatgctagcacaactgactcccttcttggaaacattaagtccctttctcaacacaccatacatacccataatgcccatgcctacctgctggaagcagctgcggacactgggctcaatgttactgcccccaaaggctgctacttcccccagctgcctagggatctggatggcatcgtgaagtagcaggccaagctgccgctggtcacacatctctgttggccctgccacctccttaaagagacctacaaagaagaagaacgagatgttaccatctacctactcaaaacattatcttacttaaagcgttatcttcggtgaggtagattaaactatgtcaacttaaaaccaaaaaccaaacaaaaccaaaaaaaaaaaaaaaaaaaccccacaaaaactaacaaaacaaaacaaaacaaaacaaaaaaaaacaaacaaacaaaaaaaacaaaaccaaggagggatattatccagatcaggtgtcttaatctgccatctgtaaacagaaccacatgtcctagaatgatcttatatggggctgaagagatggctcaatggttaagagcactgactgctcttccagaggtcctgagttcaattcccagaacccacatggtggctcacaactatcagtagcaggatccagtgcactcttctggtgtgtgtctgaagatagcttcagtgtactcatataaataaaaataaataataaaagaataatcttattaacataaaggaatctttaaaaataaaagaataatcttatgttatagattattacattaaatctggtcagctaatagaaaattactgttttaaatactataaagaaatgtacattggttaattttatagtctaaggcattccctagaaaaagcatgaggcaaaacaaaggttcccttataatttgctagagcatatagtatataaaggatagcttcacattttacaattgatttattaacttctttgttcactcacaaattcaatatcctatgcacgaacatttcatcttattttaggtatgtttatattcatacctcctttgtattataaataccaaaaataaataaggaggtttagcttttcattttaggaacttaataagttattttctgtaatgaaacatttttttctttcaattttaagacataaaaatgtttgtatctttgcctttctttggcttttccatgcataaacaaggcaaacagtgctttgttttctaatattcttaagtcaacaacattaaaactcctcttcccaggatatttatctttgatctactatgggtaacattttgaggattataattaatagaagattctcacgttggtcttcattcttcttgattttcttgtggtttgcaaattgtatcttgggtattctaagtttctgggctaatatccacttatcagtgagtgcatatcaagtgacttcttttgtgattgggttacctcactaaggatgatatcctccagatacatccatttgcccaagaatttcataaattcattatttttaatagctgagtagtactccattgtgtaaatgtacctggatacttcatgcctccttagaatagggaacaaaatacccatggaaggagttacagagacaaagtttggagctaagacgaaaggatggaccatccagagactaacccacctggggatccatcccataatcagtctccaaacacagacactattgcacatgccagcaagattttgctgaaaggaccctgatatagctgtctcatgtgaggctatgccagtgcctggaaaatacagaagtagatgctcacagtcatctattggatggatcacagggtccctaatggaggagctagagaaagtacccaaggagctaaaggggtctgcatttaggtggaacaacaatttgaactaaccagtacccccagagctcatgtctctagctgcatatgtataagaagatggcctagtcggccatcattgggaagagaggccccttggtcttacaaactttatatgccccagaataggggaatgccagggccaagaagtgggagtgggtgggtaggagagcagggtggtagtggggtaataggggacttttgggatagcatttgaaatgtaaataaagaaaatatctaacaaaaagttgaaaaaaaataattaatataagattcccaatgaagaagctaatgtaggaaaggacattactttttctgcatggagacacacctcattaaaaaatattccttttatcataaaaactgacacatttgggaggcattgttgaattgtaacagtccaaaaaacatactatttaaatgttcgtcatgtaatgctaagaagaagcattaaatattaaatatttaagatgttcccccaaaccattttcaaataatatccaaaacataaacagcagataaaacgtcattctccccttatctaacagtgtcaacagtgaagttccaaactgaagcatcctgagtgatatcgacacagtaattatcatgaaatacagttttaattatataagcacaagaaggggaaggaaattcatctgagataaaattaattattgttatcatttgttcatttagatttgtttatagagctccacttgttatattatttgaaaaaggctatcatctcccccaaaacattggccccgaattcttaccatgatgcttattgtgcatctatgtgcatgtgaaatgatccttatagagaggtgcacatttttaagagcatcagttctgcccaacgttcccacatctaggctgaaagctaagcttctatgccactgcgaaggtgagactactcataaagaaaaagtgtattgtgcatggagaaaaagtgacaccaagcactgcgttcttattcttagaagcgtatacaagaggtggtatgcagaggatgtgaagaatgggtcacaacaagtttttaattgagaggatctgccagaacctgaccaatacagaggaggttggctcacagccaaccatcagactgagcacagggaccccaatggaggagttaggggaaggtctgaaagaacggaaagggattgcaaccccataggaagaacaacaatatcaaccaaccagacctccttcccccagagctcccagggactaaaccaccaaccaaagagtacacatggagggacccatggctccagtcacacatgtaacagaggagttccttttctagtatcaatgggaggagaggcccttggtcctgtggaggctagatgccccagtgtaggggaatgctagggtggtgaggcaggagtggatgggtgggggagcactctcatagaagcatggggggaggaaggatgagatggacagctcgaggagggggaattgggaagagcaatctagcatttgaaatataaataattaacaaaaaaaatggaaagaaacaactaagagacaagcttgaaaaaaaaaaaaaaaaaaaaaaaaaacaaaccagaggagatccaaggggctctccaaaagatgcttcctgagtgtgcttctgctgatgccagcaagcccctggccatttgcaggacggcccatggaatgtcagaaaccactccaaagtcattctcagtaagtcacaagtaataggcacaagtaggacaaagactctaatatcagccactgcaaaatgcttttcagatggatgcctcctgttactgaggctaacgagcagtttgttttgaatattaattttaacaaagaaaataataatgaagagatgttcccacaacactggggaaatcaaaggtggaatcggagttgctcaagatctcaagataagaaacaaaactgaacctcaggacatttccagggcctcaatatttaagtaaagatttagattaaagatttagcccaagagatttcttatttaattatgtcctgaagtgacatccatcatgagttatatagactagtagaaacttgcaatgcaagggcctctgctttcttgcccaaatgtgagcacttaatgctgttttgcagaaaatgcaaatcttgagcttgaatttgcattcattttagagtccattcagcactatgatgtaactgttacttttaaagccccaagtcttttgggagcgtatgaaaaaccccgaatcacagatgattagtaagaaaatcttttcctaattttggaacactgatttttcagtaattctttcctttcctaatcagtttagaaatggcaagttctccgctttggaaatatcttttcctgataatggtgaagattcctgaagttctagacaaaggaccatagacaaaactttatgtaaggtttatttattcagggcttcttcccgtctctctacatggcttgcaaggctcagacacacttcagcatcctcaactcctggttcttcagtaagctcatgctctgtacaaaacccacagctctttcttgaacattcttgttaacatttgtaagaaaatcatgcctttggattctaggcttgacatttaaatcaaacaataacagttatccccaaaatacacgatgttgaatgcttttagaagaaactcaattgacttaggttataagaacaatgatcacatacctttacttggggaaaatttttttcttgattttggggataggagcaaggacattgcgtagcatgagatggaccactgagctattaatagaccctcatactactactcctttcttgtacccatttttgtcttctgatatctttctattcaaaaattattatccacactctcctccaaatacacagatttatttgcacagactcatctagaagtaggcttggcagcatcaagctacttatattttatgaacaaataaaactaaacgacatgctgtcaccatggcaatgagtttggagacacatggagatggtaatcatttacttgaccactgctatttttgacaatttgtaatctattaccttgatttcctcccaatggtacaattgttggtctcatctctcaccctctggtgtacagctcagtgtaccaggaaatagtggtaatattacttttggctagacgtactaaaagggatcaagacacccatctaatgacacttgatcactaagtgggaaagatataactacaggtcccactcttgagcatgccaagacattgttcagtaatcaatagctaatgaggcacttacttgaataaccgaaataaaagttgaaagcatctatcactttataatgtccaaattacaaaataatactatttagaataaaggctaataaaagttttagtccctcttacttttctctctctctctctctctttcttccttccttcctttctttctctctctctctctctctctctctctctctttctttctttcttctttcttttcttttttttttctaattatcattaaccataaactgtagggagtctaatgctaaggtcctgttcccaggtggttcttgattgctcaataaagataccagggaccaatcaatgactgaggatggggtgggatacttaagagttacccaggaggattcagggagaatctggggaagaagaaggaggcagtagcagcaggagattaagccaaccagtgatgtgagttttcagttgcggtcactgagttagcaaaagcactctaagactcactggagagtatgtgtgttgtttttaatccatggatgcaagggagtctgggtggggctggtagtgtggtccacctggagcttaaagtggggtagcaaaaactacttgctacaataaacggaagaaatgagatttttaagagagaaaaaaaagggggttatggagtccttagctcaacaccaacattttaatgggtcatacggcctttgactagattcttgacctatttcagcattaatttgctcacctaaaagaatgggagttgtaatacctactagaatattctaatattaaatgaatgtacatttgtgcttagtttgtgctgtatctgtacacctcactcttgccccacaatcagtttttcaaatcatccaaattctcttcacattgtcatctttgttcaaactggtacacatagtaagcacctccaattggaagctaacattaccgcaaactatataaagtcagcgcccaataaatttagattattattagaagcaccatggagtaaaaggtcttacatacatctgtatttctcttctaagaggcctttggagagagacatcaatccaatcttcagactctgtacccgaatttttccagtccggcccctgaaattataagatgggttatatgcatttacacagcaagttgaatgccattttcttgggagtaaactactgcataataaattcgagttaaagattcaacttgtctacttggttttaaccattactgccaaacctacatcacaacttcatgacagttcaacatctttgaacaagtccagaaaaatacactgacgtccttttacacacaagacacagcccaagaacacatgaaatgaatataaaaacaacaatcataaagccaaatagattttacttaaagaaatgctataactgaaatctgttggttttaaatgtaaaatcaaaatacgcatcaaagctagatagcaagcaggctgtacaacatatgaacgcaacattatatagcaagagaagaatactaataaattaaaacccaaatgtaaaaaaaatatacgtagaaaattatatgttgaagactcagggcttatgaaactttagagtttgctgtcttcattcactttgatctctgccaatgtagtctataaattattattgcaattttaatagtgaatggtttcaaataggctggggtgatatctgtattagaggaagcatgaaattgtaattaaaaatggaatgtattaattagtcagctctaggaaatactttcacactaagacagtgaaacatcatttcaatttcacttaagaactggagattttacacacacacacacacacacacacacacatttttattccaatgcctatcaaagtattaagctgttaaacaagccctgggatgcagaaaagcaccataaaattaacagaacatgatctttccagtggaacaacacacaacccaggaaaaagtcttctcactatatttcttgtttcataatcttcatccgttttcagcttgggtttattctctaaaatttcttagatttaaggcatacatattgaacgtttaaaacacataagcgaatgttcacttactatatgggcacataagacagtgtagttgtatgaataagcaatgttagtttttgagctatgtccctggttgtggccctgtcttgggtaggtttaggaggtgtgtcctcactggagaagggatgttactgaaggcggactttgagttctcttactctgcttgctcctccaggccccatattgcatccatggttggcactttaccatgatgctgatggtctcccatgcccctggaactataagccataaaaaacctgtctttctataagctgccttggacacagtgttttatcccagcaatagaaaagtaactaatacaggttgtgatttacagtatttgaaaaatacataaacatctgtaatgtgctttgttagtcatactaagtaatagtcttccattttcaagtgataaatgatcaagtaaatgtctgcatatatagcatgacaccaaacatataaatgttctttaaaagaaaaagaaagcatgcttagattatggctaaggatggtagcaacctctgagaattcaacaggcagaaaaatgacaagttctagcctaacctagcctagagtcaagaaataccagccagtttcaaataaactgagccatacttcaaatcatgtttctacttaatatttgtagagttttccaaattatcatatgaaatagtgtttattcccttcaagagctggaaagtgtttatcctctgaacacaggcaatttacttttagaaagtaataaaggttaatgaatgaatgtagctaagggattggtgcaagaatgttggtaaaaacaaaccagtcctttaagggatcagaaagataccagtagagctgacttccaagtctactgggaaaacaggagagctacatcatcagaaagacaattgaaaatgtcaatcagctaccatcagctgtaaaggcttactgtaatctaagatcccagaattgttccatgaacttcaagaagaagtagagaacctgattcttactcaataacccacatactagctagggaagtaagacaagagggtgactatagaaaatacagtatcaaccctaatgtgtggaaatgaaaaaccaaatacaagatgactgtggttggtaggtttttgagagagcactttgagtagttcccagcctctcacagttaatcaagaagttcaaacttaaggcctgccattggagctcagtggcagagtgcttgccttacatggagtgggccagccctagttaatccctagtactgtcctcctccctctaagaaagagaagattacaatcagacatacatgagatgtcatagcacacgcctgcgtaagagaacataggtgtgggtgcaaacacaccccctccaacacatagggtggggtgagcatttatacacaggctcactggctgattaatctgtgcatacatggggccattcttgactattttgatgtcaagtaggatatctaattggagatgcatctgagagctaataaaatgtatgagtgagcgatctagcccaatagctaagtatccaattcccaggacagtttttgtaagtgacttctgaaattagtttaactgtgaagttaagtgccttcaaaattatattcatctcaggatagtgggagaaatatgacttattataacaaatgaagctaatattctctatagagaaaaaaaatgtttgaaccaagtgttccagactattgctctgaagtatgatttaaatgatttggatttccattaaatctagaaggaagattgtgaaattaagacttttgaacctggcaagataaagacagagtgaggctgtgaattcataaatggaatcgatttgattgctatagtttataaagcccctttctatatatattagctcatttgcccctagtattcaccttttgtatggtaagctgtgtgtttatttttaactaaattttccagatactgagatgccaaaagttaagtggttgccaagtaacatagcaaccagggcacaaaactgaaaatatgacgtgaagctgggtatatgttaaaactcaaaagtttagttgattttataaagcgtcatggctaagctacagcaatatgataagactatccatgcaaccaaggaaataaaatctacaagttagccctgtaactatgattgatttgtaacaggtggttacagaaaaactctggtatctccatgtgtttgttttccaatcagttaaatagagggcaaaatggaaagatcatatctcatctctaagtcatatgtgtattagaattctttgatctcctctatctgcatgactcattatttcaagttgacgttgagaaggtctgccctggttacatcatatggcaataaatcaaggagttgaaaatacctaacagtttacagtttacatctgaaaaggtccctgaggaccaggagaaactttaaaagccagaacctattagatgacctctgagaggcaaaccctcccagaagaaaacaggattgtcttccctttcttgcatttctgggtcatgtgatgacagtttggtccaccagcattcccaccatgctgtgctacctcacctacagtcaggggcaagccagtcatgggttgaaacctctcaaatgactatccaaaaactatcttcctctgtgtgagttgatttcatcacctgcttatgatagtgttgtgtggtggtttgaataggcttggcccatgggaagtggcactattaggagatgtagccttattggaggaggtatgtcactgtggaggcggggcctttaggtaatatatatgctcaagctctgcccagggaaagacacagtctcctaattgccatcagatcaagatgtagaactctgttcgtccaccacatctatctggactctgccatgataataatggactgaacctcagaaacagtaagctaactccaattaaatgtttgcctttataagacttgccttggttgtggtgtttttttacaacaatagaaacccaaacaatgaatgaatgaatgaatgaatgaatgaatgaattgatgggtggatggatggatggatgatggatggataggtaaatcaatgtaactctttcaagtggtctgcttttctcttgggaattcactgtccatttcctaagaaactctttcgctcccccaacacctgtgcttcaagtaaatctacattaaaatattttcttaaagaactataactctgtcacataaaacttttttaaaaaattagctgaacacaggcatcatttttaagttcaaagccttctgatggttctgtaatatccaagatccctactctgggtagagtaaaattatagttagttgatcagagtcactcagaggaccattacttgaagtagagttaacagtcattgctcagataaacgaatgggccatatgaagtagagaaactcaggtagtcattgctggacatcagtgattactgcctacaaagtaactgaattttccttagcttaattaatttgttatttgttttttattagatattttctttatatacatttcaaatttcaaatgcttagcttaattcatttatcccaatagaaagtgagaccgaagggaacccatctgacccagaggggtgattgatgtttcattggtattgaggggaagtaagttttgcaggattttttttatccattaaaaacaaaacaatggcatatttcgaggtattgtttttctagtagaaaaaaaaattctatgtagcatttctatgtgttcacatctggcagtcagaaatgggattgtgccaacatttaactcccagaaatgaatcacaacattttgcacactgggtgggtcctaacaaagagtcactgcctcctcattctagaataacagcatcctctctatatgttctgagcttaactgtgttcctctcgatttgcacactgaagtcctaactctttgtatcttaggatactgcttttcatgccaacagcatctttcaagagtcagttaacatgaagatggaaggggagaccttaatccagaatgcctggtgcacttgtaggaaaaaagagcaagtagaaagaatttatggctctttatggaaagaagagagaaactgaagagccaaggagacgttctggagaaaacaacacagcagtcagccccaccatcaccgtgagctcagtcttcaggcctttacagatgtgaggaaatgatgtttaagcaacctagtatactaggtttggtttcagcaacctagaaatctacaattgtcatagtaggaacctgctggggggcagattgttccccagaaactttgatcaagttgtcctcctcttgctatttcagagtcagatgaagtccccagacgttctcatttagctttctttctgagatgggaagccatgttacaggctactgcacagaaaacacggaaataacgagctatttgcggtgaatttattgtagaaaagatgtcctttgagactttgaaatagtgatgagcaaattaatgagctacttacactaaaattaatattgtatccaagaagaattacaactttgtattaaaaagcataataaaagataccaggcagcagtgtattacagtaaatcctcttctctttctggtaactgagcttcactctcactcacaaggctatccttttattttatttttttaaaagatatattgatatttgttactactgaaagataaaggatctcttttcctaatgaaaggagtagataaaattatagataagtcatgtctattatcatcatcatttacacagaatgaatcggcttcagaacatgtacatttatgaactatcatctatattctctgtctatgacgaccacttaccttctctgtcttcagatcaaaggctgacaaatgtaaatcttcatgtagctacttaatgagaactaagttttgagattcaagagaaaagcaagtcttcattttcctctttcatttttgcatacttcaaccccctaccagagaatgaataattcccaacatttctgaaatgtcagctcacagcaagtcttttgataactgattagtgcacaaatacattgtcaaaatcaaaagggtcacacatatgcgggatgtgctgggctggaagttaagggtgctccttctatacactgagaaacagttcaagtacatgtgttagtgtcatatagcatcaattataaaggcaagaccactttagaaaaacataaccacaatggcaattatttaaggacaaaccaagttttattcactgctgtccaaattacactcaaaccgccaccttacaaagttatagagattcttatatgctaaaaatcattttaattcacagtgaatgtcagcttttgtttgcctgttgaaaaataataatctaagatagtaaggagcagagagaaagaaaagaaaccatgcagctcaggtttccctagctgtttcctgaaagagaatgcatgctacatccccagccttcactgactaggaagtcacgaaagaacacttgtatgttccctcttatcctatggttaggagcaaaaggacttggaaaaccagttacttttaaacaatcagaataaatctttctactgggcgagaggattatgaaaacatctttttaaagaaatcacactagggtcggagatgtagctcaatggtaaagtgtttgccatgtgcaaacttattcccaagttaaaactttagtatcacccattaatgagggtgacagagaagaaggagaaggaggaggaagaggacgaggaggaagaaagaagaagaaggagaaggggaaagggaaggggaagaaggggaaggggaagaaggggaagaaggggaagaaggggaagaaggggaagaaggggaagaaggggaagaaggggaagaaggggaagaaggggaagaaggggaagaaggggaagaaggggaagaaggggaagaaggggaagaaggggaagaaggggaagaaggggaaggggaagaaggggaagggaaaggggaaggggaaggggaaggaggaggaggaggaggaggaggaggaggaggaggaggaggagaaggagaggaggaggagaagaagaagaagaagaagaagaagaagaagaagaagaagaagaagaagaagaagaagaagaagaagaagaagaagaagaagaagaagaagaagaagaagaagaagaacaacaacaacaacaacaacaacaacaacaacaacaacaacaacaacaacaacaaggcgatgatgatagtgcccagtttattatcaatgtgcttcgctcactagtgatcatttaaaggataaatgacacacttacgtgtcgtatacgttgagcagccagttgagacacatatcgacgcagagtggaacattgaccaagtccttgtgcagctgctcaagcccatcgtaagtggtggtcagacagttgatgacgtctgggacactcaggagctgatcattttggttcagtttgtgctgcttgaaaacttcattcgtcgtattcagctctaagagatccactaattgaatgaggagaaaggattagagagaggcatcgccttacccaacaacattgaagcccagcactcctattctccagcttttagcttgactggccaactcatgaactgatccttcccagttaacttcagctgttagtgagataacattttcattctctcagatcaaatatattctctctacctttgtgcctgttcatctagacgctgtagcttttggatcttttacaaatttttggtctttgaatttttctttctttttgacatccttgttatagtcgctctgtgtttttcagtacagaaatgagtagtctacaaatttattccaaacattaaaatatcccaagtaacaacactggtcacctcatgttagctcactttctaactgctttttaaattctctaaagttagtcttaagtgattctcatagaaacaccaaagttgcgaatattgaggaggaactctgtgatttcaacagatatctacactaggtgatatttaaatctgggtaacccatcatcccctcaaacgtttcttaacatgtgtgcagggaaaacattcaaaaatcctttactctaactctttgaaaagtaaagcaagttttattatctatagtcacaacaacagacaccagaaccctagttttaattataacctgtaattatataattatggcctatcaagcagttaatctccataccactgtcaagctaacaattctctaacagtatgcaaaaatgtatataatggcattaaaagatcaccggagatagttttttagaaaaatgaagcaaacaaataaataaataaaagaaccagatttcatagaaaagtaatagctctctaccacctgaaatgagtgacatcagaattattctcaactaccagaattggcccaaatcaagtcaagcccctttgcatttcagaccacctgtcactaagatggattcctactgcttcacagatcactggccttcaggtatttatttcatttcatctttactcttcttatgtaaagcacagatggagggtaaggctggtgctagagcatgtagggtgtgcacggagctctttcttaagcacattactaagaggaaggagggaaacacctgggagaaggatggacaaccgtgtgagagagcagacacaggctaccaactcatggttggaaatgctgtaaggggagcattttgcatttttactttctttaccttctaccttcttggtggttttgtaacatatgcataaactcagctattttatgcagctattgtggatggggctcaagtctaatacaattgtcatttatgtttcatgtataccttatgtatgccctaaagtaagctggtaagtaatttgaaagaacagtgcttattactgtgtctgtgtatatctgtacaccatgtgactgcagatgtccttgaaggtttggagccttccaagagtgatcagtgagtacctgatgtgggtgctgggaactgaaccctgttcttccaaaagagcagcaaacattttgctgagtcatctctctaaccccttatacagtatttttaatgcgactgcatttctactgagattcatgcaccaagggtcaggcatgcaattctgcaaccatggcagcaaaccataagcttctgatcctgtggttttcacattgcagatgtttggattaggaatgcttggccaaaggaaagcttgaaaagactccctagaaggtaaattttgaaatagtctttgaaagataagatagacaaaatataagagatccaggaaagcaagggagggggagatatttaaaagcactatcttccaggaagagatgttgctttagaaaagacagaaattaaattactctaggattccactagagaaaacagatggcagctagtatcaattgtgacacatagtgggctatggtcttactgaggcagctactgtacacaaagcttccaccccctaaaaaagttattccttagcaaggtgaaaacaaagccaagcagaccatcaaaccactatgcacttactgaacgtggaaatgacccaattcgtaacagacaggcaagggaaatcgcaggctggcgctaatttaaagtttgctcatggaaatgaccattatgtaaaatgtttgcttcatcttccgtttccaggtttttagcactgaaaagcatctaagtgggactgagaacatttaagcaactacttctttcttttctaataaataaacttccccagcccccatggcatcgtttgacagtgaaccaaagcaaagaaacagcttcctttgtatctgagtacttgtagctagtgactaattactaattttaaattttaagtacatttatgaaatatgtctatgctggctgtttaaacaacatttcttttttcaagttgactacagtagaaaagaagtatatgttaaaataacatagacaaatacaacttcttcaataactcaatagggaagacttcttaaaaagactccagcaggagacataggaattctgaggaagaggccagtcccttttcttttagatgtcaacaatatcaccctctaaatgtatgctactaacaaaaataatttgcataagcattccatgagctggaaatagtgccaaaaaaaaaaaaaaaaaaaaacccacacaagagtaagtgacctgggaatcatctatatttttcattatcattttgctccatttcttggtactataaattattttcaactctgaacctaggatagcagtagcaaaatccactttctacagcatctgacaaagggacctgcttaatcaaggacagtcgactgagaagcatggttctccacagatacaaagaaatatattcaattactgccagaatgttaagatttctgaattccaacactaattatgccagccgcaaaacacacagggacaatggaccaaattgcaaaaacatcattccgggatcagtccacccttcactccgttcagaaaagccttccttgttatccactctgggacccagacagtaacttgccacttcccacaaacgatcctgtcttcaatttccagtgatttacactgacactttgacttagtgcctaagccaagcaggcatcttgctgaagcatgtcacatttcggtaccttttaaagaacagactacatttaaatcacaggaaattatgatttttgtctcttcagagggagaaaaatgacagcttagtcatgcatgcagtaaatggaacaaacaggcaatttgttttctaagcaagttacagacttttctagattctcacatatgaagcacaggggtcaaaaagagacatcatcatgccctcttctaggtcaggggagggtagaactgataaaaacagaaggacactgctgagtacctgattcagggctttggacacctctccaggtcttggctgtgtgcaccatgtcctcttcctgggaaacacttctacacgcaagctttcaggcttggagttttaatctgcagagatgatggctcatacctctcaccacacagcatctctttagatgattccacattccctttcctgcctcgagtctcgtggtgaacaccagcctgttttcactgctcagtccccatctctcagaaacttctacctggctgtattcctaatcaaaaccttaccttcggaaatctggtctttagcaattctaggaccttctctccttcatcctttacaattctccaactaccaatccctttgtaaaccagtcacaaacaggcagtcctatgaatcttcccttatagtgggcttagcctcggtcatctctggcaagaagcacctacccattctattctctcttgtcttcatgctaaaatactatttaggacatacaccgtctacttggtttgactgtctcaaagtagaaaatgattgtatactactgaattctagacagaaaaattatccaaactttaaagccaataccatggagatcaaaatactaaagaaattagaaatggcttcactttgtcaaacatctcttatcctagaactagggaaacaggaggaatgcaaggctagcctgggctacatagtgagctccaagacatctgggctacatagtaaaatactgtcttgataagtaatgttagtaatagttaataataatacctccaaatcagaaatttcaagaacaaaatttaaatgaactctgaaggaatctaaatgggatttagggaaacctcttgatactgagtaagctaattaaccataatacattggttgacactctcgacctgtatccaagcatttgattggatgcatctaactcctatatccttatctcagattagtgtccacatgccgaaatccaaggtggctcttatggtcgagtaaatagaactgtgatacaaggacactggctttctaaacaccatagggactgcttctgtctcagccagtgttttctcttacttctctgcatggcctgctacaaaaagtcgtgtgtgtgtgtgtgtgtgtgtgtgtgtataacacatagaatgcatagtgtgttgaagaaaaaagaatacacaatctgttacacaccaaagaaaatgaacatactagcatcatatgtaattatatgccatcatgatcacgagggtaatctctaaactttgaatttactttaagttcttaaaagcatgtgtgtaccataaatagaatagtaaggctttgaactatatataaatgaaagtgaactatgcaaatgtcttttcccattagttttacagctttcgcatggaccatgctgatgctgacggtcagttcattcaggttttgttcctgtattgtaacatattttgagtaagtcaaaattaaataaatctgactactacaaagcatgactctaaatcttttacgtgtcttctagtacacacctatgtcaccttcaaactcgaaccttgctcaggatggcctacatgactccagctctgcaccagaaactataggagggctcaggtagggaagaacacagcacagactcttccttctcataaaaatatagttattttggaaaggcaggcaagaagtatgtagaaagaatattaagagttatgattctgaccacgtgtctaagacaagcagtgtaataaaacaaaagcacacactcacataagaaaagactagatggagctaccaggagtgagggaagaggagccatggtattaaagcatagctggcagcctgagacccacaggatagcacacaccagtcacgggaagattgcaaatgtgaagagctggcacccagagcttttaggctggagaaactgggtataatctgctaggccactcttcaaggtgagctgatgggagcaaagggaaggaagtagggagacagaaagcagatgccagccaggtaaagagccctaaattataaggggagtgcaatctgctgaaagcatgaaccttccagccacctgcattgtgccctttggatctgagccctttgcagggtggaatgagtctcttgccttgttctcagaaccaaatcaataaagcaagagtgaaagaataaagacaaatgtgctctctcttttatgctggcaagaaggcactatgctgagtgcagacaggcacagaatgagaggtgaccatgacctcaaagccactgtgtgtagagacaggtcaacctcctgacacacaactattacaccaggcaagcaagtgaaaaacagcagcttcaggccatcataaaaatgctgggaaaattagaaacaggtgggatgagcatgaaaattgtagaagaggcaaattctaaaaagcatcaggaagaaataaaagatgagccagggcagttcaagtaaacagagaatttgagagagaaaagttgatttggtcaaacaggtaaatgtgacaagtagtatagaggctccaggctggagccctgtggtggccagaggcagtggaaagagggatgccagtggctgtcaggagatccctgaagctatttaagctgacacaaactggggacattgttcactgtactttataaaatatcttttcgctcttctgctcctctcgggtttggacgtgatccagagagagacatcttccttcaggagtaagagaaaccaagaaagcaaacccttagtgcataaagagggctctctacccaggtgcagaacagaacattggtaacatgttcgccatgttacaaaacagtggttggccagtggaaagtccatggctgggtcatctgccctcattttaaaacccaacaggcctggaaagacaagactagctggatgtagggttcaaaactattatcactacagacacattgaggagatagacaacctgccttctgttcacagtcagcttcctatcccattcccacccaatacacagatctctagcccaagtgcgagagctcccatgttttgaacaggtcattctggaacatgttttgtaactactacaacatgctgactacctttgagcctgaggggataacgcaaggcttgaggtcacctcctccttccattccgtggcttagatattgctgtttctctgcctgttagacatctcatccaaaaggaacataggtctttcttatttaatactttgtacaactctgtcttctctaagtgattgaacatctccctttgctcgactctgctcacccagccaacttaaaatggatccataacttatatttagctattgaaatttattttccttagttggggggaggggtgtggtgtgcaactgtgagtccacagaggaaaacttacaggagttggttctctccttctaccatgagatccggcaacagaagtcattgtcatatacaacaagttcttcttccatatgagacactcatcagccctcccatgattggttttaagcacaatttttgaccctaacataccatttttctgagggtagttttcaaaacttcactgagctacccaggcagatagtagttcttaacaaagagtagaaaacaagcatatatggaattttccaaatctcccaatctttaaagtacatgcaaatattactttgcataatagtatctagcaaggcttaaatgttgcttgggtcaggtcaataatccaagcaaagacagaatccagaaagcctaaatcaatactctatttacaaggatacacatgtctgctcactttttgatattctcggcataaaaagaacctttggttagaatgactaccatagaatatcccatgagcatgccctccacagggaaaaatccattaatgacacagataacttctgtcatgtttaaaggaaaacagaattttctatcatgtttatggttttagttcccagagaaatcagcaatgtgactgctttgcatttctctttcatgattgtactgagtcaaacagcttggaagcctccagtttggagtggacaaaaaggacttactaggcaacaacctacagctttgattcaatggcttaatcttttaaaactgggtggcagtataaatttccaaagagcttttcctgcgtttggataaattttgcactctgaattcgagtggcactgctcattggttttgccagtacccactgacgacaccaatcatgaagtatgagtagaaatgcagctaactccttcaatgaggggcactgaaagtcagattgactctgcaaatacctcagcctcgccatttgtctctgtcttaatgataacaacaaagtcaacctcccaaagcaaggtgattcagttagtgtgataactcacgacataatgctttttgcagccttcgaattttgattgctgtgcggtaggcagagaaacgtacattattcagatcagctgaaatggaaaagagaacaagttaaaggcctgcttattatttaacttctactgaatgccaagaatgaacatatttgcttattttggatcataaaaaaatgtgtgagttcatgataaaaaaaaacttcctaaatttcacatcaatctataaaaatatgatcaaatgattgttcataccttattgggagacactgcaaaacaatcttatacaggaaactcaaattccctttccatgaccaaatcacagatcttagacgcctcttttccaagacgagtgataaaatggaggtcactgtgaccttttccatcctcatttgaaactacaagtaacatatcatgtcctcccctttggaggaaaagaacaatatgcatagaagttggggagaacctggacacataaggtggcttctccttcattctattcaccagcagaacatctctcctcgtctcatcagactacctgacttcatcagagccatacagaagtaaaacatttccttactttccacttctctttcataacacaaagctttgatccaataattttgcactgcttttctatagaacctgtcttgtgctgtgggtgtgtcagccatgacccgtgggggtaatgagcatggggaaaagttctgccctgcgggaaaacaggaggtaccactatgactggggactaccagactgctcagctaacagggtttctccttcagagtcattggcttactggggcaattagttttctgtcatctgccagctcatcccagtactcatgggggctgttcttctacgctctgtctaccctgatcaatttgcttcttttattggttcacagatttggttgttctaagcagatctatgaaaataatcaacattcctatcttggaaccagtgaatattacaatttcttcctctgttccctaaagataggttagcagaaactgacagagttggaagaaaactcaaagatcactgcctcttttcccccatctcagtctctaaatcaagcaaagcagtgacttttctcttgcttttcttctgcagactcaactaccaagggagagtgcccaacagagcccagtgtttaagagaaacaagtgtgtgcgcctggtcttaaaatgggaaggagtggagcacaggatgctgccatatcctcccttagcaccgcctcggtttctcaaggactaaacttcagtgactactgtcaacctgatgaaggccatctcaccaataagctgaaagtcactgcctactgacagtctaaaaacagaaatctttttttccccctgtcaaaataagtttagtttatgacttaaaaattaagtaagctaatttgagaaaattttcccacatagaaaacaaaatggtttaaatcggtaaatttgaggttactatattgttactatgttttccctttttttagtgtgcagagctgaactataagatgaggtaagacctacaacaatcagatctctcccagaaaatgaagtccttttggctggtacacttccaaatcaccgagtcttgctttgtgtgtttaccttaggagtgcaactacctttaaatttcaggactcttgttgtagcatgtcggggcactgtcttctcatgccacagcatgatcctttcatccacacaagaagaaaagatgagtagctgagtttctttttacgactattcagtccttggctatgaaggccgttcatcactactaaacacagcaacactcgctaaggcctactcataaatacagcagcactcactaaggcctactcataaatacagcagcactcactaaggcctactcataaacacagcagcactcaccaagggattggaagagctcagtcattttaggatgatcccaacaggttgtctgtgtttgatggctggggagaaaacaaaaatgtaagtataaacaacacactacaaaatacaatataagctatcgtcttctaaaatcccacatagacttgcaaagcaggcaaaaaaaaaaaaaaaaaaactccattatggatcgctcagaaatctagtactcaattattactcagtattcaagttatgaataataggggctggggagatggcttcaggagtaaaatgtttgccaaggaaatatgaggatgaaaattcagagccctgtactctgtgaatcctggtaggtttggaactcatctataatgccaggacagcggagagaggcagggggtgtctgcagtgaactagcaagctagactttggtgagctctgggttcaagtgaggtaccctgcctcaatatataaagtgtagaggaataaaggacctgtgacctccatatatgtacatatattctctctctctctctctcgtcattttccacatacatgggaacatgcataaacttgcacaatacacagacacatatacatacaaaaacactatgaataaccaattttgcttgtgtaactgtattaagaaaagatagacaaaattctgccttctgtatcgaaaaaacaattgcaactacaatctgaaacacagacataagggatgactgccagggatgcttggacccagagtagggtgtggccaaatcaatgtggcctccggaataatatccatcttgttaggctgatgttttttttccattcccagtaaatgctttgacagcagaaggctatgacgagttgctgcattctgaagagttaccacactttaaaagtcctaatcaaatttctaaagagcagagaaatgaagactctaaatctgaatatcatgtgctcactttgccatctcctgagctcttctgtttgttaaccccggttctcttcctccctagttcatgcctgctagctctcctttccttacacaaccccaggccccagcctctccttagctaagtgcttttctcttgtgatttttaaactctagctccatcttcctagttttactcaataacgagtactattatttttggaggtggataattttacgtatgatccctattctttatttgaaaaacacacctttattttattgctataattcatatatgttacttggaaatcttaaaagaatagattgtaaaacaaattacagtgggtcacaaattaggtgtgtgcatatatgtgtgcatgggcatgtttgtatgtgtgtgtgactgttagcatgcaaacatatgtgtgtgagtgtaagcatgtgtggggggaatatgaatcaatgtgataatattaataatgagttaatatgagttaactttgatgatttagtagccttatatttaaaaatagtttgcagtccattatctaggccataacaaagcaataacagctaatggttctcaaaagacttctcagatgacccttaattcttaagaaactgtttagcaagctatgtgaaatagcacagaccatgagagatgatattagaatattcataaaaataaatttaagagaaatcactgcttttataacttacatgatgcaccagaaaagtcgcttgcattgctgggcaaggaacagaatcattattttgtatacttgggtaatagaatgccctggtaattcaaagtgggtttcaataaataaataaataaataaataaataaataaataaataaagcttacttttgaactgagtcagtaagacgtcctatgcccttgaactgagtcagtaagacgtcctaagaatctcaaatcgaatagttctatggagggaataggttttagaacccactggaaagctgtttgcctcccatcctctcatgcttagctccagtacaaagggacaagtatttccacttgacctgaacatcaacaaaaccactctatcctctaactacccatactgccttaaagatcatgggcatgtagaagatgtctggcctaaaagaatggctgttcacagtatagccatgagcttggcagaaacacatctatcagccaccagtaagatttaaagaacagtttagtgaaaatgtagtacagtcccatgctgctatcatgggttcctaatctcaaacaactaagactcagttgatagttttctctctctctctctctctctctctctctctctctcttttttcccctccaagcaatttcagtcctggtcacagcactattgtccaaagatacccatctcatccaaagataccaggacaaaccaaagctcacgggccaaactagagctctcagcaatgcagaatcagacttcaggcttaaatattatgtatgccttctctagaactacaaatgtggaccttccccttggacaatcctacattgccacaagggcaaaataccactggcaagttaggcaaacaattgaggattccaaagcaggctgctaatggttctgcgctgatggctcggcatcctgggagcctaaggaacacacacatttggcaagcagatggagggaggagcagggaggctcctttgtgaattcaatactagttgattcattaggcagaactgcaaaggctcaaagtaaacacagcctctggttacaaagtaaagctgtgggttacacaacaacaatttggggggggggatgtctttctttctccctttctttcttcctctctctttctttctttctttctttctttctttctttctttctttctttctttctttctttcttccttccttccttccttccttccttccttccttccttccttccttccttctttccttcctccctccctctctctctctctttctttctctcctttttaagtggagaaagaggatcagaacacaatccatatgagatgtaaaagctaagtatatgagcagctgcaggatccctagagcagggaacccttgccataaaacttccagcttgcctagagcaggcaaccaagacagaagcaaaggaatgtcttccctcaaaacaacagaggcaatcttcttatcttccaagcaatcccaaggcccggtagggggagaagttaaccacagcaccccggagaaactattctgccacactggagtgctgctaccaaaatcttacttcaaaaaattgtacctgatccaggaaggtgtcccggaataaaattaaaatttaaatatccaaatgaatatttaggttcaaaaaatctcttgaagcaaaggatagtgtgagaagtgacctctcaccaggacggccttccatccaagggtttgccttcataggggaaacaatagcaaaactgttgaagcctttgatgaggaaaagtctacagggtaccctgggacttacatttattttgatatgccatagaaagcaaaatgcagatcatacaggaaagcattcaaacgaacgaaattagcactgcagagaggccatgaagcaaccaactgcacagttcagctttggtgtcctttttgataggcaaataggaaatatatggatttctgagcaaacttctgctgagggatattaagtaataggataatattacattaaggcatggcttacatattctatacattttgaaaatcaagttttactaagtaatattaggtattagcctaatattccagtgagcagcttggacttttctgtatgtgaaaagctcagtccacgttatgatgctgcccgtgacttaggggactctgatggctgttttcagatgtgggagggcacagtggagagaaggcacttagataactcactgaaggcctcgggccaggagcagtatggagatctgaacacagatggtctgatttaagcctgagctcttgatatggaagtggatttgcagaattaacgtttttaaatatttcttgatgaatccatccagatttgagcccacagtccatcattataatcactacaaacaacttttatcactctgccttcccccttacccctggcaaatctcgggcctggatctactcaattactttgccgtttctgaatcaaagcagctgcgcctgaatatggagaagaaaaaacaaaaaaacccaaaaaaacagtctacatacagactgtttctactttaaacatttgattccaagcttcaaatgcctgcctacaaacaagtgaactagtgtccctaaagtccaagatcacacaccccttccttcctccttctccttgcttacccaaaaggaagttcccttccctgatactatcttgcctttgtctcacacttcattgaaaaactataaactgatagattccatctccctacttccaaatccacaacgttctctcttctacccgccttccttgccaccctcaattgaaagtcactgataccagcagtggccaattccccaccaatgattcaaagggaaaaaaatgtgctatattatcagctcatctcacaataaaactgatctgctcaattctcctgccaaacacacacacacacacacacacacacacacacacacacacacacacacacacaccataaccttaaacatacccttttcccgcttctccacaaacaaaacttaccattaccatctattatgcaatagttaaacttcctgctgtcacattatctactcaatcaatttgcctttggctcctaaatttctcctccatctaaactggtcttatcaaaactgtcaacacgccacaacgttcccagtggaaaagccctaacttaagggataagacatttcctaaggatgttatgtaataggacagaagataagaaatgataagaaaaaaacacagataataaacctgattaagataaaacataagccttgagattattgtaacaattgtttaaatatggtttataaaagttggattagtaatccaataaccaatcaattttttagaggcccctaaactatatagtgaaacaaacgctgttagtcccaagtgatgccagtcatccaagtgatacagtctcaaagccctaaaagatggtatttgccaccgtcatcatctcaatttttggtttcgccgagtgtgccccataagaagaaactccagtaccccagcgctcaccaacataacttgagtcctcactgtgaacaggattgcataggctgagggtctgctggggcagcaaggcactgtccagcaagcctaacagtaaccccatgatcctcaggcaatagaaaacttctcgaacctcgtcacagcattttgtcttttggacttttaaaggcaggaaatttaagattatattttttgggagggaatggaattagaaactcacagagttaaggagagggcttgacagtcaacattccataacagagagtgttactcctcatgcaagtgagacagattgtaaagggccagagtcaaccctaaaaatgtcctggctcctcatggtaatgaggacatgaggaagaaaatacaaactacaaacagcaaagaactggatttgactgtacagtttatttaagataatttgagattcaggagcaagtccaaaggcaaagctataagtaggttcactacatccctaaattcagaaagtcaatactgtgggcagggatgacagaatagttggtatagaactgtgcgagaagctgtgttggttcttggctttaaaggaccagcagaattaattttcagggtggaatgaacctggggtaaggggaggggcaggcgacactttgctacagggcactaaagattgattagaagaataaacatgtgcactacctcaatagatacaggggcaccagaactaataaggcacccccaactgccacctaatatctccacctccctctcatcctcaaataagggaacggggaccacccatcaacactgctggaagccatctccttttgccttgtccctgggacgcaaaacaaacaaacaaaacaaaacacacacatacacatacacagccttcccctttaaagggactcagtgtgtcctgtgggcctctacttacaaatcaggagctcagagatataatctgtcctttggacaagggaaaaggaggaaatgtgttgtagggagagatgtagagggtaacatatttttcttgtactgggcattaaaccattgctatagattcaattggttctagtttgaactttcaagaatccttaaaaataagttgtccttatcacttaagctgttgctggtagagaaacaccttcacgagcttcccctttgttgtctggctgggtattagggtttcctataatagcccagcttccctacccttggttagggaaaaacaacactgccatcctcactatttgttattgtatgctctataccacacacacacacacacacacacacacacacacactccaaagtataagctgctaaatgtttgtttgtatgtatgtttgtaaggccctaggcaaccaattggtattctcttcactggggaaggccacctcgcctactcccagccgtcttcagtcgcctatagttttttgtccagtgttgaggacctgtggattttcctccagtcaggctggcatccactgatgtcatccttgcgctcctgtttgggcagataggtcagtgagactttatgggtgtagcttccaatgttactaggaaacacagtctcagagtaaactccctgatcccctctggctcttacaatctttccaccacctcttctgcaatattccctgagtcttaggtgagggagtgtttgtagatgtagccattaggaccaggctccacaactcagcattttgattaaacctgtttttctttatgaccttatttattcctctctggcatttgttagtgcaccaggcacccaactatcacaggcagtaacagagtcatgccagatagacatgttctcacagttcacatctacatcctgatgctcttcaaagacatgcctctcactaccatgaacttcaaaacgctaatgaagggccatctcgatctgtatcctatatttttaattcacctatacaattaagatataaccccaaaataagtttcacctctccttaagtctcttgctgcactccagcattacatgtacgaaaatgcaagcttaaaatttctacttgaatactattttctgacagctaaattaattcactcactttgccccaggaaattctaatagcgtgacaataatgctaagtaggttttaaacatttttttctacttatatgtacagacatgcaagaggaaatacacattaaaagttctttcattcatcatttacttgcttatgaatttacccaaggattgactcttgttttcgtaacaattctaagtgaaaactggcactctaaactctacctcccaagtttaatgttcctttttctatggggaaataaactggaaagttgcataacagagtaaacaatgaaaaactgccagattagtgaattttatagaacccggagactttgctctaaattgtgaataccataaaagacatttaacgctaaatctgtatgtatttaagaaaatgacccatttccaggtgggtagccatggaggatctgaggcacaaagtacaaacaaaacaaagcaaaagacaagaaagcaagaagaggagctcttggtaggaggggggattaatggaggtgggaaaaggacaggagagagtgaggagatgagcagttaccagaatgtatgtatgaaactgccaagtaataattactaaaaagagaaaagaaaatctgatatttactaagatatagaaaacattataggaagcttaacctttaaacattaaagaattaaagaattgccagtgctgttttatatattatttttccagtgttggttatgagcaagcaataagatgtcggataggccaactttgctcccacgtgttttctctccatgagaattgactgactgagcaagaacactcttccactgtgccgcaacataaactccaggggttagacaaggtccaactgcttaattcttcgtcatctattactgatgtatacaaatggaaattcttcagctaatggaagtgtgtgtgtgtgtgtgtgtgtgtgtgtgtgtgtgtgtgtgtgtgtgtgaaatgaactgtagatgtcttcccgacccccacaaaaacaaaacaaaggaaaagagtaagccatttccaattttctctatctagtgaaaacaaattctgttttactagatcgcgtttacattttaaaatatctgattatagaggagtctaggtcaaactatccatgaattcattttaatcaatctttatggatttctaaacttgggactgtatgtatactcattttttaatgctaccacacaaaaagcttccaaaggctagcattgagcacggcatggatgcttctgggaggtctataaggaccacaccccttctttcccagcttcttccaattgtctctattcccagaaggacattccacttcctccattttcaaagttgcatctgtatttccctcttccagtctggcttctcctcagctgctttcttccttttaaaaggctcacatgatttcactgacatcaggataatctgcctatggtagcctacaacctggagactgttgctaaatgttgttgtcaacactgttatgtataaagagaactgagtcaaagtcccaggggttaggattggacttctttaaggggagggcttattctgtctcagatttataactaaagccttattatttgattcaggtaaatatttacccaagcagactaaagctcttcaataccattgctaaagttattattaattgaaattaaaatgtaaaacagctaagaaattttaaaattttaattagatggccacaactgctttcaaccaagacaaatcatctcacccagtcttggagtcctttccattcctgtctgtagaaatgacacactcatcaattgccttgatgcctcattctagaatccatcacaactcaatataccaaatgctgtctatgaacaaaagagttcaattctcacaagacaatgtaacacatactgcttatatttttatagatgatgaccagtttgttttaaaaataagaatggatttcaggatagaaggaagggcatattaaaatgtcctattcaacaaatattggtttcacaagctttttccaaacaaagatccgaaagtcaattaatattgaaataggatttttaagagaacacactttgattttcaagagaccacagttagtttcagacaccatacaaagagatcttggcacagagacttttttttattcaactcacccaaggccacacagctaatgtgagccacagctgtcttttgatactcagtgtgcactctcagaattacaatctagttctcctaatacataatagggtcgatgacaatgcttagtgctggattgcgttgtaaagcaactgcttcactaacctccccttccagagataacagaggagtgcttcatcattcttttctgggacaaagtatacagtaagtaaaggaccagcatcctgagatggtgtgcaaactagataagggtcagaatatgtcacataagaagtaacaggagagagaaactaggctgaaaaaaccttatgatgaggagaaagaggaagatgaagatgatgataaaatagcaactcagtgacctgtccccaaggccagaaagacctaaggaaggacaactcgctgatcttaaaattaatttcttcccattattatcatgcacatcttcctcttggtaagcggattgaattctggattaaaacgtccagggagctgggtttgtgccgcagaccctctgggtccggtacacagctttattcccagcacttggaaggcaaaggctgggggtgggggtgggggtggggatctccctgcgttcaaggccaacctagcttcataataagttccaggccagccaggactacatagggagaccctgtctcagaacaaacaaacaaacaaaaatgaccaacaacaaaacaagttacataggggagcaggagcgctcttcaattattcggtaaaactttattttcttggtacataaaagagaactgaagtggacttacttgatgtaatagggcactttattatgtgaaatggatctctgccacggcagctggactgaagctgaggaaacaaaaggaagttattggaagcagcaagccttacaccttaatgtaaaacaaatgaacacatttcggagcaactcttgagggacccgttctggctctgagctggattcctgcaattaagaaaagcacgaggccaagcagcacagctttaaagcttcatgtgaagtgaggaaaagaaccaagactcaacgtccagagccgattctgtcagaccctaacaatgaaaacactttcacaaaatcaggttattgttcataaacattgcaacacagaacacagtgccatctgcaaagcatgctccctatatgctgtacattcagatttaaaatgacagttcccaagatggaatttctagatcactaatagtattcttcactttgcaccatattcataggctcagctattatgaacagatggcactcaagcaaatttaattataagaaggttttagaaagaaaattcaacataaaaataggcaaggggttttttaagaagcaagcagatcatctaagaaaaatatcagatatttattttgatccgcagtatttaaaaaacagttttccatgtttgtagtatgtttgagatgtttgccacgattgagatatgatgccttttaatggaagttctttcctttttgaaattctgtttactgattacttgtaaagatacattacattagtgctttagtaaatcaattagttaaatgtttatttaagtagagtagccacatgaatttagaaccagaagaattttgctaagcaaggtaccaggtaaattaaaatgaaagtttacaactatctctagaccttcatatagacacgtcactattttttcataatttcttggcacattgatatcttgcaaatatgcaacattctaaactttgccaagcatcccaaatccaaactttattttgaaaatgcagcaagatccacacaccaatgtccagtataatggagaagaagctaaatacgcagagttaaaaatagctgcccaagggctggagagatggctcactgtctaagagcactgcccgctcttccagacgtcctgagctctagtctcagcaaccagatgatggctcacaaccatctgtaatgggaatcaatgccctcaactggtgcgtctgaagagagtaacagtgtactcatatacataaaataaataaataatgagagagagagagagagagagagagagagagagagtcctgtgatatgagcccccctcccctaaaaaagaagaagctgcccaaagtccttttcaaaatggtgtagttcagatactacaacacctttccaaaaactagctcagcaaacttcctccttaacaattgttctggtcttgatcaaaggcaagcactcatctttacaactgtgtccacagatattcacaaacagacacagaaatgaagactcaggtatgctaaacttctcataagagctagcctcacttcatggtggcaccaggctgataggtcaggttttattgtgtgcctcatggaacttgctttttaacaagcatgggtaaagtccaaagaacacaatcaagccaaagaccgtaagcagcaaggaataagaattattaaatgtactaattgcaagttttctcacacttcttcatttattcagtaattattttgattcgaataaccaagcttcttggactgtcggttgaagaccacgtgcttgaacaccatgtagtgtattgcaattctgcagtgctttatgactgaagaaacatgaactagatttccatgggagaggttgccaggtggaaaggtagggctccatcaatattagcagataaactgatcatttgaactacagagtctccattatttacaaatgcttcttcaatttggtcttagttattctatagggtttagaaatctataatacttaatatctaatgagtataataagaggctatttatttcaacaatagtgctatccatatgttaagcattaaaaaaaaaggtccgcccttacccaccacaaagggctatacctcactcagagacaaacacccacaggctcagcttaggaactgaagatgggtaagtcttagaggtaggggacagaaaatgacaaatgtgacttcacaagaatacaaaagtaaataaaccctgaccctttctctgtggtttcagagaaaataagtttccataattgagaagtattcttggccttgagcttaaaatttacttaaatttaattaaattacacaacttgttttttttccatatacttcccataggaaattaaagaaaaggcattaatatgtgctgaaagcatctttgccaaggtgtggcttgcgtgcttggtctaacaggatagactactgaatttcattcttgaggcaatctgaggaaataggtatgcagagatcaagaaattaattttcaaaaattctcaggtctagtaaaagacaatgttaacatttaaaatcagtttgggagtttcaaaattcagcattcttaagtatcatcagaagtggatgataaataaaacagggctcaaaattatttccctaagacttcatgaagtgcacataaaattacaagttccagttggaggatgttccattaaacctaccttggtgcaacacttaatgtataacatttgtccatgagatgactaccttgagcttagtaaaccaacattttctcatttaagtatttatatagtgaattaaaattcatgtgaagctttaaaaaaaaaactaagtatacatatatagagagagaattgaaataaactggttaaaaaaccttacagcataaatttttggtatgagacattcataagctttgcatgacaaataccatatatgttatcataaccaatgtttaaatgagaaaacatatctagatacaaatttacttttgttttcctttgaatatttaccaatttacatactgcatttattacataagcaataagtaatatttcatgaacatgttctcttaatttaaagtatagttagagcaaagatagagcttcttgggcagaactgaacgaatttgcaaattcattcaagttaagcaagaacactcaaatttattgatacttactggacagaaagtgttgagaagatggcccaaaatctctgtgggcttcctggagctgcttaaggcgatcgtccacggaaacctgcacacaagcacacgccagatgaaacgactgacttcaagacaatggttttcataacatccttgacgtaattactttatcaagtaatgctgttgctctatcaattcattactgtttgggcagaaaacttctcttcttattaatgcggcagcatgaaaatcaacttctgacattaaataatggtaaagaaagtcagagatcattctaaactatctatatgaactttcaatctatacaataaccacattagcttaatattaattgtggttatcattttagatatgaagaaagcaagacacaaggaagggccagaggacacaactagtcagaacaaagtgaatattcatgccttggccatcggagcccatctttatgcctgaaaactgttctccccaacttggtggcaggaagcatgcttctaagacagcttaagatgtggccatgggaggagcccttatccatgcctcttttataaaaaaagaggataaaagtaccacagagaatgtgtaggaaatggagcttagagaactctaaagataaagacataaacagatggatagatgggtagacaggcagttaagcagatgatcctagatggttacacaggttgataagcatattgataagtaggtaggaaggtaggcaggcagacagatgggagatagataaatgagtatatgagatgacagaagagagaaaactggaagctgggtgtgaaacatcttctgatttccctacaagtttgcatctgatggtctttaccaaaggaaagaggagcctctgagaatccctgctccaggctgcaatgtgtcaccagtgcatcccagccatgactcccttctatggttgttagtgtggattctattgttaccgtgccacaggacaaaaccagttatgaaaccaaatgcaaatgaacaacaattgcatactgccttctgacatttccatttccctggccctgttatttgtctgtgcagtggtggtgagctgttccatttgaatgaacaatttcattttcagcacactgtaaataaaacttgcatctgcctagctcactgggcatctcagctttctcctggtcagctacataaattgcatcagagtgtactttattcattatgagagatgctcaaatgtcatattttataagtaagctgctagtcctgaaatttaacagcactgtctgctaacagggatttgtctttgcttatccaggactgatatttgaaccctagtagctaccaacatcaaagataaaggtggaagaatgttcccatcaaatctaacaatacatctgacatctgtagagatgaggataacagaggcaaagcaaaaggaaatcaagaaagaccagaaaagcaatcttcaaatgagtataatgaatgataacgatgcagagagatgggacagaagcaaaaagaattaggttcagacatctctgtgagcacttacaaatttaatatgcttagcctgactaatcccggattattgacatccttcacaaggataggaaagatcgtcacatatggaatattcacatctcacactttcaacttcattaagaaaacatgtaacattaaattaaaaaaaaaaattaacgttcatgtattctacatggagaggcgtgcgggtggtcaggacacaggcgtcacaaagcatcttttagaaggtggccctttcctctaccaagtgagttgctagggacagattctggtgtttacaaatgcatttacataccaagtccaatctcagtcacctccttatgcattttgatgttggataatgtaagaatatattataacctaaaatgtacagtacttttcaaataaaatgacggaactgcacatttgtattactacatgttatattgtagagaaattagtcagaattatttactattactcttctagttacagcctcccctgcggattttcagcaaaaaggcatagctgctttgactgataggaggtggagagcaaatgtgtcccagaccctttgtaccatgaactgctgcctggcatggacagtagtcagccaatgcttagacctggaacactcatgagtcctggctcagctaatctggagtctacaagtagggtcaggagccactgaaacaattgccttgggaaggtcggatctagacactaagtgcaggtgtgctttctgtaaacagaaagaaaactcctgcacagtgaacaatgtaaagaaaacgaagaaaagctttgtaactttttcaaaagagaaagaacacataatgaaagtaagacaatgatttctttacaggttacaacaggacaaaggatcctgtggctgactccaggttatcattgctgcaacttactggcttttgtgtattttttacaagtattatatacagtgtaaatataaattataaccaagaaatccatactcataactaaatgatgctcttggtttcaagatatagaaagacaagtacctgcctactaaatttattatcaaacaccctcagtaaagagagagacgagataatatgtagtttacaactgaggtgagttttaaagaccatctgagtgtttctgtttgtgtacatcctaatgtgtgtttttcaggtttaaaaaaaaaaccccacaaagaattgttacactaagaaactaaatacaaatcaacaattgtatagcctgacatttctattcctgttctgtattctttatgcagtgttagatagcattctgaaggggctaagccgatacctgtagaagtttccatcgcatattaaggtcatccagctggcgagacatctttagagatggatgcaagtcaagtggagacagctgactggacaggtcattcattgtttttacttttaagttgattggtgcaatttcttctctaaacgcctggtagaaaacagattattttagaatgtcgccagaagagactttctcaaaagccagagttgccatcttcttagtgaagaccataggaaggccatagtgatgctgtcaagtagagacactacttaacagcagctgactggatcagacctgtaataacctatacagccagagactccctgagccttaaagtatgtgggcaatgagacaaactcaagttgtgaactcatttaagacactaaacatttctgtctagtctataatatgcaaaccacaggattactgttgcatggtccatttgctgtttttattgaagcatggctgccttactcctttatttcaccagacacaacaagttgacttgatctcagtcatgcttagattaggggtcgagtaaaagtagctttcctcactactaagctatagttattggataggagagaaaagttctgtatctccctgaacccgctaggatcacagtctgtgcttaggggatgggcaggaagagcagagcatcatggaaaatctatagctgagtctcagtattgaactgctgcctctgggtgaagaatagacccaggtaaaaagtatatgtcctgggcaagcatatgaaaagggaagctagactttaaagccaatgagagcaaacagcataatgatatagtcatggcctcagttctccgctgaattccacctgtcttctaaagcactggttcgctttctctgacaagtctttctctacatcccactggatgctgaaatgcctccgtgaggagatggccctcggcagccttgcctggaggcctttccccagcactcctggattttctgttcggtgtcactaacccagctatgactttcagccaacatatcaaaacgtacaaaccacacacgtgtcacatgtcatgacatagctattctgacagttcagagctattccaaccccactgctggacacctcagatttcagttcctatcccttagcattcacattcctcctgccccatggaagaagctgcttgggaggggacactttcttacatttagaacctgcgcgcacgtgcgcgcgcacacacacacacacacacacacacacacacacgcacgcacgcactcatctgctgtctttctgatgcttttttatagtaaggaatggaatgtacctcctttgttccttggtcttatgttagattttaggacagataaacagccttccaagatggcagggataaaattttgcctctcctaaaacctatcctgaattataattattgctaaaacccaatattcaggaatcaaatatttccaatggtaaacagggaatatactttagtgttttcaagttcttgactctgcctaaaggcatgcggttaagttcaaaggagagttgaagaacaaaccacatgagaagagactgagagccagaagccaacatgtaaaatacaggcatcagagagagcagggtatgaatgctgtttgaatttgtagacatgggagtcaccaggtgtttaataagatctatttccaacctcagtagataccactgtatcaaaagaagtcagaagaaaggaagccccaaaggacacatgtcctgctacaacatggaaagagaaagaattttgatttgcagtcagttttgtctatccctgccgatgccagacatctgaagatggtccaaaatgcacacgcagattgtaatgtaattgggcaatgtgcacaatgtataaatctggttatggggcatacagtgacatagtgacaggcatgacaggtgcaaaggattaacaaataatacaggtgtgggagacagagggaaggacacagagtttatcagcgtggactctgaaacaagtcagattctcccagacacagctgaacacacatgctagacctcaaatgtttctagagtttttaactgggattttttagcttggtatattaatattctctttcacagataaattcaaagaccttaaaactggatccatattttaaaatcaatatccttttagttttagatattaaaattttaaagttaacatgctatttgataggtttttaattttaaataacaaccagttttatatcaacagatggtgatttagaaatttagaaaggtgttttagaacttgattataacttcatgcataatttcaggacaggatttttttttaattttaaggaacaataaagaagcttatatttctactgtgtaaaaaaaaatcctatttttgttttgttttgtttctattacaagtcataggtgaaacattgacagagctttaacaggaaagtctttctggctctgtttgcacttttatggcaaggtgtttttatggcaatgaggaaactttctatcaaggaagtttatcttttgccttttaagagtttccaaattggggcttgaaataaatggagttataaatggctttcagaactgccatgtgttcttgtataaagaactaattcatcatgttttgactgtattttcctataagagaatacaagtctacgtagccctcactgctataaaaacagaaacatctgctactatcaaaggtgctcattagactgttggcaggtgtgtgtctcaaacccgtctggtaccacaaggtatatatgcaaaaaaaaaaaaaaaaacaaaaaaccagcattattaaagacaactttagcaactgaaattatttacttatttctgaggattttatttccagctttgacatattaactaatattttgcaacttctagtatttaggttttacctctctatatgcctacagtaagagaggggatatactttacggaaaatgtaaactattacacacattgagtttacttgatttgattcagtgagacttgaatttttaatttttacctctaaagatataaaagtaatttaatccaatttattctttcccattagactatttgcttctgtgtttttgcttttttttttttaagcttcccacttaagtagatttgaacaaaagaatttggctggagaggcaagtcagtcctttaatttagtaagactgccaattctcaaactctttggtcttttctgcagatacaaatttttatttttttccacactaattttccccagttatcatgtgatactttcaaattcaaaaaggtaagttcccactcaaatccggaggtattaaggttgttgggtttttttttttttttgatactaattgtatttagactttttaggctttaaaattagttaagccagatttgatgtcaaaggcctgtaataacagctacatgggagggtgaggcagaaagcctgcaagattaagggctattggggctatggagtgagttcaagactagcccacacaccctagcaggatcttgtatcaaaataaaaagtaaaaagaaggctttgcacccagctgagtggcgctgcattaacccgaatacacaaggcccaagtacaacccacactacctaagataaacaagtaggaaaaatccagtgtccaatatttgataaagatgcactgataaatgaatgattatttttttcttagactatgttaaattcacatgtatccagagaaatgtttttcagaatgctctaagttcttgaagaggtctgcttaatttatagagtaggcagatgcatatctatcatcagaaatggagaacactatattctttgttaacatttgttttacatttaaaagttttaagtttaaaagtgtttgaattttagagggtttaaattcaaagggttggtcaaggctgtgtttaacattagatctctgcagtgaaagagaaggacaattaaaaaaaaccaaaaaaaccaaaaaagtatcacagagaccctaaacctaactagctgtgtgggcttggacaactgcagttttgccttcaggaaataatccttaccgtgttgacagtgtgtggattaaacgagataaccacgtgaaatgactaagaacaattcagctttaagaaatgctggctgtcactactcccctgtctacacacacagatgctctcactcctgtaactggcctgagcattaagttaatttcccagagcttgcctttccactcagccacactcatataaaggaagactgttacccggtgtctatgaacacaggatgtgtgtaccttttgcaatgaaaactccatgcatgatggataatgttggatgcatcccttctgattgtctcagtgctcaccctctggcgtgattcatgtctatacaaacattgctttctctaaagtttctctctgtgtcttctgctgcctaaattctgttactcccccacccacccacccacccatacacacacacacacacacacacacacacacacacacacatcctgaaaatgtagaatgagtaagcaaagctgctttacaccatagaactaatatccttaacctcgggcaactcctgattacaaatggaatttataaccaaatttatttttcacttacttagacaataagatagaaattatagatgagaattcccactaaggcagtttgtttttttattaaacctgtaaatccaaccaccagtttctaggagacagacctgtaggctgtaccacatgggcacgattctattaaatctaggctgcaggaatcattacaaaataaacaatataaaaaaaaaaacaaatgaataggaaacaaaagtaaatgaaatggaaggcatatctagaaacaaattgaacttaaaaagtttgtgagaggttttgtcttgttttaaatggttaagcctaatctacactatttagggatacttgaatggaatttttaaaatgtttaaacaaactaaattatcataaagccatcttggtggggtcttgtttttttgagggggttatatatggaaaacatctgccataattcctgatttaggtggggagctgaagtggtaccagcttataagaatcccttatatgtgggtctccttatatgtgttctctgcaacaacaagaatacatttcttaaatattctttgtcaaaggcagtggtgctgaccagggttttctcgatgtgatcctgcagggagtctataagcaggtctcccacgggcttccagccattccgcacagcctccacctccttcatgtctgcgtccaggtcgtccatagctccctgcaggtctcggagtttctctaacgccttccctacttgcttttgccagttgctagtgacagcatttagattttcccacttctctcggacttcagaagactgcttgcgcatggctttggcgatcttctgggctctctcctcaggagtcaactctgttgataaaaacgagaaggtctaacctgggtgtctactcagttatacaggtattcttcaaatccaagtatgaatctcactgttaaaagggttactagtgtatagattaaaaaggctgagttacaatggtatctatatgcgtttaccagtaaggcatagttacatctaaatggatactcaaaaggaaaagaaaatggttgcgcagattagtaagtggtttaacgttcatggaaacttctgaattttaatactttaacacgtgtaaggcttgagatgtagcaaaataactcaagaaagaaaacatttttcctttaccataaatttacttctgtgaaaatccaaagacagttttttatttcattgttctcaagtgaaattagaagcataattagcaaagattagctgtaagttatttaaaaaaagattaatttaccatgtttctttaaagaacaaattcaaggcatatgacatcttagagacttcatcatctgtaaatttgcttgcctgttcatatttaacaaaggacattttccgaagactagacatatggaaactgaatgtttatccacacttcaccaggaagtctgcaagattacaaggaccatccttgacatgtaacagagccaggagtctgagtttaagaaataaactaagcctttccaatggaaaggaaacacacaatgtaaggctagcaagaaaagcgacagcccagcaatgaagaaaagttgcacagagaaaccaaagtcaggttggaacaaagctcaggcacagaaacactgaatccaacaaagcaaagacaaaaggacacatttggacacagagagtgactcccaaagcgggacaacccaagtataggaatgtctgggactctcacccccacacttgaggaccccctctttattctagctggcttaagtgtaccttcttgactgtccccagaaacagagaggcagaccaaacccacacagatatggcaaaaggcagggttgtctaaggcagacacgtatacagatgtttcgggacttaaggtagtgttgtggatacgcccatcctaagctgaggggaatctcagaaatcaaaagcacatttattagatctgacctagcaaacaccacagctcagcctatactgaatatggatagagtcccgatataagcctgtagttagacaagcgcactgaacacaaagcttccttcatgataaaatgctaaaggtctcataatgtgcagaatactactccaaatgcttgaaacggaatggccacagggctgtagtctcccatggctggagccccccaaatgttttaagatgactcatcctaagtctttatctggaataatatcccatctttaagtataaacgacatcataaaatgaacggaagccagcgttcttaaaccttaatatccatccttataaaaagcctgcctctctgtcctcatctaagtgtgattcaaaagacaatttaaagaacacagactgtatgtttgtttaattttccagaaaattttaaacactgatactcagactgtgaccaaatggcctacgaagaacccagtctcaagggactactgggtaggagagtccagggtgagacgggaaagcaccaaaatagtgggtactctgactataccagactgagcctcaccagtacgagcgtgcacacacacacacatctctaaaaccatacatgcacacacctacccacaccacatgcacacgtactcacacatgcacacacacactaacacacacacacactaataataagtgaaagccaatttaggatcctaagccaggaagtctagagagaagggccaataagtttaaccaacacataaggcagccagactccagagagggggaaacagtgtcattaaaaggcaagctcctctaaatacttatgccttcgagacatctgtaaaatgctaaatataacacctatattttatattttacacaaatgtaaaatgttatgtgtgagatgaaaatttcattcctagcagcctcaggagaagtggagtagcttttatgagggctacacctgtgctggttaataagttactgggctttgcgaagaatgtattttaagcatttgtgtttcaatgtctgtgggagggaggggaggagggagggaggaagagagagacagtgagagacagacagagagacagaggcagagagacagacagacagacagacagacagacagacagactgcctgttcatgttcgaggcaagacagcttactcacagtggtttcccttggatgaaatacaaactgtttctaaaccaaccactaaatatcagtccacagaggggcacacagagctttctcatcctgggatgaaacatcccatattggctgccacattttcgcccagtggaagttcttctctttgtacagtcctttcgttggtttatcatataatcccctctcaagcagctcgccaatagaggagcaaagctcgacactaaactccccatctgtttaccacagaggacctgtgcccactaagcactctgtagtcagaacaccactgtgtcccgctgcagcaagccttagaagctgttcaaagccaacgagaggataacaaacaaaacaaacccaaagttgtccacgtttgtgaggcatataaaatgaagcaatacataaaagttcaagttagggcaatttgaggggacaaagaagaaagagaagaagaaaaaggaaagaaagtaaactcgaagaggcagaaaagatttacagggaaaagaataaagttcttaaaggatgcattctttaaaaacaaaaccttctcatttgaaaaccaaaggatgaatgtttttttcaagtatgaaaagcttctatggtaaattctgaagccccgggtggagacgcatcctagccagtctttctatagcatggtattgtctgagaaaccctgctgagagctgattcaaaccgatactctctagaagctgctatcagagacccacactccagcatagtgacttggcccatcaagctggagattcctggagagatgcccacactgccccagtggtcccagcatctgtcagtagagcatgcctagcttaatggaacacagtgatgcgctggtcttgaagctaaagacacatttgccttccactgcgttgatgtatcaatcccatgtacaacacagctactcagtctaggagacctgggagcccagtgataagagagcactctaatttgcatttgaaaacaggaacaggagctgagaggggaaataggaggacaaagccaaacccatttgcctgcacttctgatgccagaagagctctttccttgtcactggccttcccacccagtgtctgtgtgcacctgtatggatatattcatcccaaactctccaccctcccctgttcaggcctggggatccaactgcccagaatttgaaggaagaattatatttacattcttgggttcatttgacagtatattctacgtcctaccatactttatggatatcttgtgtgttttctatttttattctgttattttaaatagtacagtctataatgtgcgacagatttttagaagaccgagaggggtaaagttggtgtcacatgcctgtaacctctgccctttaagtttgaggccagtctgggctgcacggagaagaggagagaaaactcagcagtctttatatctctccgtgtgtgctcgtggattgtcctgcatctgtcacaggctcttctgtacagtgggagcgaagactagagggaggaaagcagacggaggctaggagccaggcccagacttccgaagcagaagcacttccttcatgtgcatgcaggttgctcaagcacgggcacgcagcatgaatacttacttcacccctgtctttccaagaggaaactccatggaatcctcttctctcattctaggaaaacactctactcttcagtgtttacgagaggtagacatttcccctgtgtgtgcttgtgaaaatatttattttaaacataattcttatataaaatagtgatgttgtcatttactggagtcatcctggtcttaaggatgattaaggtcaacgttaaccttaaggttggtaaggacgatttcctaaccttatcatatttttttcttagttttggtactggcccggcttctacttctcgttactactgattctaaacgtttatgtcacgaacatttatttcctttccatgtgggttgagaacccagacaggggcccagtctgtcactgacttgcagtaaatactttagctgtactttttaaaagcaatactaaactccatttttaaatgcccacttcatttttcccctccttgccaaccccatgtcaagctacatattcaaattataaaccttcaaaagtcatttaacctatggtcattccaaatatttgacgtgtactatgtggggtcctttttgcatttatttgcagtcttttatactttatcaatacatgaaaggttaatgttaacaatgacaaagaaaaagattgtaagtaggatttcactgctatacaactctccgtaagaaaagattagaaattctagcagtacgatatattatcctagatgctgctcactcttatttgttagaagctgagtttataactacaaaacacacacacacacacacatcacacagtcggtcctcagtgaagcgtctagttctaatctggagctctggaatcctccagtgattgtccgcataatcctggctgattagaccactggagttcaacagaaaaaaaaaaagaaaaatttactcactctcttttggtgtttctgagtcacatgggacagggttagattaaggggacatgggacataaaagaagattcactctggaatctgattggcctttcctgcttgcatagttgagactcaaggaatttaaaaactgataaaaccaaagttgactacagagataatgtaggctctacaagagacctctccaaggaggatgtttaataaggataagtcaataaatgaacaatggttatgcaggggaaacctgggatgtttctaatgttcgatctaatgcccaaacctatcagtgtgcatcctaaaaccactttgcaatttcctttaccaaaggaaatcctgtaaggtaagagaaacaagtaaattgactattattttacttgtaaacttcacttttaagtttgttttaaatcttgttacaaattacatccattgaaagatgtgcatgcatgcgtgtcttttaaaggtagttcaatatgactccagcgcacactcatgtctccctaaatacttctgttttatctgagtggagtaagcaaaaggtcacattccttgggattctggcaaaagtgatgggttgtgcctccctatggatgctcacacttccagtatctttatttctctctctttacagcccctcccctctcttcataatcaaaaggtatttctgattaaaataatggggaatatcttatttccactcccaagtattctgattaaataattaagatcaaattaatctctttaaaatggtctgtcagtggctaaggggaccctgtccacttctagtctgggaggtggcagatggtaacagttcattatggacaagatcacaagaatatcaagtgcactcagctggttaagacttctaattatgctcatctagcaaattataaggttgacaagttagtaggggctactcagctgattgcccagcagatgagaaaactacagctttcaatgaggataggctaaaggtagtatggtgaatgagagagagagagagagagagagagagagagagagagagagagagagagagagagagagagaaagagagagagagagagcgcgcgcatgggaggggggaatgagagaaaatatatatatatatatatatatatatatatatatataaagttcaagaaaaaaaaggtaggaaacatcttccagaatctcaaaaggcaactttctgcagagcatgaggtgaggaaggaggaggagagaggcaggaggaccaccctgagggctgaggggtctcagtgagggcaattctgattagaaaatcactgttttgttggggaagggggataggggaaacactgtaggagagggagtaaccaggagggggaagtgaacaggatgtcaagtgaataagtaaaaaaaaattaaattaaataaaagaaagaaagaaagaaaatcactggtggtcactgagattttattctgcctacaaaacagacaaggattcccaccatgctctcagatgtaagcagtgccagtgtgctgagctaagggagaaactcctaatgacagccatacacagggcaggagcaggaggggcaggaagaagctgaacgcagcagggcagcttgcgtggcacccagagagccaactcctgaccctccggactgactctctgcagcagtgactccctgaatgtcctcctgctgacaacagtgtcacactggacagcaatgagcaggtcactggggacaggaagacagtactgaatggggtaaaaatactgagaacattcgatgtcagcaggacaagggatccacaatgctctcacatgtattcccagggcctctaataccccatgggttctataagaaagcaagctgagcaagccaggggaaataaggcagtaagcagcatccctccatggcttctgcatcagctcctgcctccaagttcctactctgtttgagttcctgtcctgacttcctttgatgatgaacagcaatgtggaagtttaagctgaataaaccctttcctcccaacttgcttcgtggtcatgatgttttgtgcaggaatagaaaccctgactaagacaccgacccacaaccatctccccctacccacccaacccaacacacaccaaagaatcagaggacaggagccatagatttaaaagctctttcttgacacattagcatccatttctccccacaccttgggctgtttccccgcaacacacaaaagctagtgatctttaagtcagaaatttcagaagctttctacctgagcttagctattcttattgaagaagtacgtttcatgtttatgttctgtgaaaacaatcgatgagttcagcggaagagggacatatatgcctttgatggccttccatcttcaaaaccacggtgacatctcagaagtttctagctcccaaccaagaaacaacaaccagaaaaaacaccacactctgctcaagggctgtagcaccttcctgtcctttatgctaaaatcagaaagtgacatcccggatgcagatccccataaaatatatccctgtaaagtgtcaccatatctttttatgaagcaaatgtgttttatttattgatggccacaacactggctggggaaagtagcagctggcaagcaatttattaaaaccatgtctgtccataacactaacttctgttctcaatagagagagtgctgacttatttacttacacagaactttcttgcagtgatattcataaccactaaaagaagttttgctttctaaaaaatgtctgcccaatccatgggcttcttcagttcaaggttggatcactatatctatctgtagttaagaacactgaaacagaaagtaacatatttttctatgccctttcatgtgttacaactttacccatctaacttggacttgggaagctaattaaattattgctgtgctctacagatctgagagcaattactcatacttcaactctttatgtgaaaattgaaaagacaaattctaatgttgcttaaacaccttctccctcggtaagggaatcggtgaactggtgtatgactctattaagcagtgtgggactttaggatgggaagtgtagcagagggtacaaagaaggtatatgcatttaattatgctgctaagtttcctacagaaataccaatgaggatagaagtaaatttaaaaacctctagaggttacaagcaccaagtttaatgactcaaatcttggcttctaacttgcatagacttatgaactgagcattctaaatgtccctatctgtacaatgggtggtagaaagcactcttaatgcagagtgttctcatggacttagcctggggcttctgaggatagatcctggccagtcctagaaagcctcattcctcctcacttaacctaaacgaggggaaggctttcctcaagagactccagatgacgagagaggcagtctactcccatcccttgtgaaaaagaagctaaggaaaagaaaaccagcagagaggaaaccaggaaggccaggttcctgggtggcatttcagctgctgctgccagctccatccctgctcctcctgtgactgggttgtggggcccatagggcctaggagtggggaagcagggaagcaaggacgctggtaggggcatgagggtccacctttacaatgaagggatttgaaagataagcctgttacttgcaaaacaaacaaacaaaaagcctggaggggaaaaccacctgccagtttaatagcttaattatttctgttaggtaagatgtaatttggcctcattttattggctacaaggaaacaatggaaccctaagttacttggagaagccatacaaaaaggacattctattaaactatatgacaattccctaccgtcattcattcaatgatcataaaatttttttctgcacaaatctgtcattgctgctataaaatgagctgacatggaattgcaatgtgatttagattctgaaatatgtctgtagttctccaaaaggataagcacccttcagcctgtcacaccaagcccagctgggttcttctgccagataactctgtccgaggggttctagtcccacgataaaacaccatgcacaaaaacaacttgggcagaaggatttatgtcagcgtacaattctaaaatcacacttgattgttgaaggaagtcaggtcaggaacccattcagggcaggaacctgaaggtaagagtgatggagaggccatgaaggaatgctgtttactagcttggacctcatggtttgttcaacccactatctagtagctcccaagcccaccagcccagaggtggaagcacccacagtgagctgggccttgccctgttaattatcagtgagcatcaatatcctacaatataggagccccataagagagaaacactgccaggaattggcctttggaaacattatattgttgtgtttggtatttcaaagagtacaacatacactgagatagaacaaatgttgttaatacacacagctagccatcggagacccaaagaggaaacactgatctaaaaaaaatgattatttcccattgacccccggtccagtcacattgaactaattgcgggtatagcactaacatacaccagacatataactaactatacacagataaacacattacactaagaactatatttttctatgactatttgtgaatatcatttaaatgaagcaaagatgaccagcctaggataaagcgagccattctcacaagagaaggatactgtagtcacggtaacaggaaggctttagctgaaatcatttttaaagcttatttgtgggaaaattaatgaacaaaatatcatattgtgttataatgcattagaaattgctattgatggtgatgggcagttgggaaaatgccatgttctgccccccactaactctagagaatggagggtggggaggcagaggtggtccctggctgtgtaccccacagtgagtagatccttgagccagcacacaattcagatgcagctctgagaacagcaagggaagttggcagcacaaagaagagccaagaaatgtgtgtgcaaggctaagaggttcttgacacgggagtcaagaaggagctaggaggtcagcagccagagcattccacatgagcagagatggagagggtgaaattacagggatgggcctaaagccagtgaaagcccaggggtgagagaaggtgaataagcagcagcttagtgctggatctgcatcttcctttgattatctcaatgaccttgctcggccaagcaagatgctcttggccttagtatttggtattttttttaaaaaataataaatggtacctttataatctgtctagcacattcacctggttcaaagaatgaacacaaatgcagtttaaaaagtagggaaaaaaaaacaacacaaatgataagaaacgtatatcccattatacactggatgataatgatcaactaaaagcaatttgcattaaaaggaaaaatgtgtcgatatgatagattaaatgagattacttccatgccgttcaaacaagaacactgaacacaaagctctttaaatctcctactttagttgcacaaaaagaaatcgtatttacttgaatcatttctaaacagtgcacgttgttctggtaactgagttttccacatagttacatgataccccatttaactcaatttctttattgttttcactttggggaggaaacttattaaaatacagtaagacctcttatgccttctgccttcagaaataaactgcaactcatagcttcagattttacaggtcttatctagtatctgtattttttaatttcccctggtttgtgtcatctggctgtggtcactcctgtcaaccttgtccctgtcttgtcacttctacctagttacttgttcgcaattcacaggtcatggagttcgagtacttacaacctgtctaaaatgtcagtctgtgtctctgagaaagtacctgtaggcttcacctgcgttcagaacagggtctatatgtcccacttattgtatttactgttcatgttcaaatcccttcttcagattcttgataaacaggaagtcagtggggccccagggtgggctaagtgcccgagtcagcctttggtggcatggtttcaccgatgataaagtgctaggaaatcaggcaagaatctgtcagcagagtacttaagaagtcgctgagacagggctgagcttgggagggggttggtcgagcaagtaggtgctgtgccagtatatgaggaaggagctggagagcagagtagagggatcatgactggaaaagtgaacagtaagacaaggcagtgcatggctgcagaaagcagaagtctggtgtccagtggacatcgagcgtggggcacagagtgggtggcatgagacagggtcgtcactggagcagactggtcgaacactgacgtcaggtgtctgctcaaccttctacaccaggtcccattctaaaggaatgccagtgctggtctttagacagatcacttgggtcacgggctgatggttcagtaagtaacatatgtaccatgccagcaggatgacctgaatccaatgcccagaactcccatgtaaaaagtcagctataaagtcacatgcctgtaatcctactgacagggaggcagagacaacatgtagacctggggctcgacggccagacagcacagcatagctggatggagagctataggtaaaaatgagagaccgtgtctcaaaaggaggtaaagaagaggttaaaaaaaaaaaaaaaaaggaaaggtaccagaggttaacctctggcttctgcacacactcacatgtatgcgcaccctcacacatgataatgctgggtggtactgcttcccaaatatttgaaaatacatgcaacaccagttattaataaagttgataacagaagaacaaaatgagtggaatggggcttgcaagggaaaaagacgtttgagagaaaaataatggagaaaactattttctagaattaaaaagagatggatctatctttgtaccctagggcataatgcacagagcgtattcaaaaactgcttattaagtagaactaaaagccatctacggcttgggctagcactaatgcctccaacacagagcacttcactattactcgggatgactaatgctcaaacagtctctgtttctgatcgcagttgtgcataagtcacagtaaacaaaaaaaggatagaagctattatggataatttccctccatttacttttaacagcaggtaaaatgggctaccattacagaaaataatatcaaggaaggagagggttggaaaatggttccttgcaaaaccaaaccaaaccaaaaggacaaacctcataaagttaaattgatgtaacatttttctcttgccagttcccccccacccccaattggtggttggaaatgggaactgagcaaaatcctgagtctaagaacaaaggagagaagctacaaaagtgtcctttaaagatttttttgtttttttttgtttttcgagacagagtttctctgtatagccctggctgtcctggaactcactctgtagaccaggctggcctcgaactcagaaatctgcctgactctgcttcccaagtgctgggattaaaggtgtacgccaccacgccctgcccctttaaagttgtttttttttttaattaggtatttatttcatttacatttccaatgctatcccaaaagtcacccacacgctcccccacccacccactcccacttcttggccctggcgttcccctgtactgaggcatagaaagtttgcatgaccaatgggcctctctttccactgatggctgactaggccatcttctgatacatacgcagctagagacacgagctctggggtgggtactggttagttcatattgttgtttcacctatagggttgcagatccctttagctccttggatactttctctagctccttcattgggggccctgtgatccattcaatagctgactgtgagcatctacttctgtgtttgctaggccctggcatagtctcacaagagacagctacatctgggtcctttcagcaaaatcttgccggtgtatgcaatggtgtcagcgtttgggagctgattatgggatggatccctggatatggcagtttctagatggtccatccttttgtctcagctccaaactttgtctctgtaactccttccatgggtgttttgttcccaattctaagaaggggcaaagtgtccacactttggtcttcgttcttcttgagtttcctgtgtggctgtcttctcacctaatcacctcttctcccattttaagggtgtgcacggagacagtagtctctactctgatcctcaaactccctgtcctttgtggtgtacaaccaagcccctggacaaatacagggtattgtgggtagtggcaattgctttctttcttacctctttgtgttaggcttcatctgcaactagcctaaatcctttttatgaaatgtgtccgggggggggggggtcttacctatccccacgccgtactctgttgatactttaatccatttagtaactatgtgagaggcagggatcacatcccagacactacaaaatacatcagtgaaggagatggatagtgggaagagtgtgtgatacagaaacaggaggacctgagttccgatcccagcactgcgttaagaagctgggcaaggttctgtgcaggcatcaccagactgtacatgcttgtggacgtcaagactggtgacccccaagcttgctgatgggtcagtctagccaaaccatagggaccgtttatagtagaaaactaaaaatccaaggtaaagcaggattgaggaaaatactccatgttgactgtgtcctccacatacacacggacacacacattgatgcacatgtgcacacatgtgggcacaacactgggaagaactaaagatgcaacatttggatgaagacccaagtagaagggaagggaggagtaggaagagggatagaagcagagaggaagggagggtgggaggagaagtggggaggtagtggtggtaggagtaggcatggggatctgggagaggagcaggaatgttccagaaacagggaagagacacacaaaggtttcgagattggagcaaccctgaatgttcaaaacatagcagtgcagccaggaaggcagaaatgaggatgcagagaggagcaactgagaaaccagggtggtgatgaggagagccagccacgaggagccttcctggggagtcacactgaagtcagctggctcacgctgtcatttgcttgtcattattatccggttgctgcaggaaggcaatatcttaaaaggggaagcaggggatctagcatgatgcttaaactggaatgagagctgaggtaagttatacatatagagttcaccttcagtgaggaaaggggctcccactgaccccgcccctcataaggaagtgatctgcactgctaaacacagtaaggcactctgcatgcctgcttttcctgggtaaagtgaatgatgggaaaatactttgggcaacatgtgtttttatacaacatgtatgagcggtttacccatacccatgttatgtatgcataccatgtgtgtacccggtatccttggatgccagaataggtcatgagattccctgggactggggttaccaatggttgcagagattcaaacccaggtcttctggtagagtagccagggcgccgaactgctgaaccatatccaaggctctgcatgtttgtttgtttttgaatataccacagagcttcttttggcaacactgcaaaatctaataatgatattaagaattgatgtttcctaataaagaagttagttcctgcttcattttaagctaaatatcccgatgtgacaggccgtcatttgtacatgcttgatgctgcaagaaaaaggcttggttggttgtcttttttttttttttttttctaaagaaatgaaccacgctcacctgtctttgattgtgggtttcttcttggttcttcgggggcctctattggctgatcagccagaaaaactcgagcttgatctacggcgttcagcacagaatactctttctcctttagctcacgtctcagcacctttgcaaaaagaaacagaaatggagtatataaacaacttcccatgttttcagcaaatgaacgcagggtttagctttaccacttctgactgaagctgcagagggagtggcttaagccaacattcagataagttacaagtgaaaatgtgttacaggtaggaacaacagaaagtgtgaataaaagccaaagagagggctcctgaaaatgttgtctgtgttgaaggaaagaagaaaatgatgaatgtcgggaaggacactttaagattttcatctacaggagttagctattgtatttgaatttaccaaatgtgaacttagagaatccccactgtgtagagttgctaaaacataatagcctgctcaaagacacttcttccttaagactgacaagaacaatcgcatccaatgatactgaaggaggtgagttcacatgtggtaatgaaggcctcagagggttttatgttctttagaatacactgagaaaaaattaagagataggcacaaattaaagtgtatgaaatcaaaactaaagcaaagagaacacataaaagacagtctccaattatcttaaaacacagtccgtccgtctctcatgctgaggcaattactgttttccctggtgaggtttgcatgcagatctgggactcccagaacaactggtctctagcacatttattcttttaagtagagatgaactttcacccctgctcctataaaatgtttggtgattaggactctaattgacaagggtttcatgacagccacactcactcggggataagacaccaacatgtaaatatgtctcgtgccctgttttcaatactaaagcaaagctaactgaaagctgctgctgtcatttctggccagtacagacacagccacgtcttcaggccctaataactgatcatagaacaagccagtggctatgcactatgaacatgcaaggggtctttttcctccctaaaatatttccccttaagattgtagaatcaagtctttccttttgcctttccggaatcattaaatgtttggatagtgcttgacacaatggtgataggacgcaaggttacttggaggccaaatcatcatcttttgtactcagtaaaaatggaaaaaatgtagaagttccagaataatcatcacatagagacagcaaagataaactggcgtgggccaaagtcagagggagctgttacaggtggagaggaaagggacagccagggcaaggacaattcaaggttatttgacttcatggacaattattatctgctaagaattttaaaaaatgaaagtaggacctccccagccccttataaaataaaatctacaacccaatatatgtaaggatctaggtgggaaggaaaactgtctctgaaaataatttccatagataacacttatgcatactccctcacttatcacaccaaagcctgacagcagagtcagtggagaggggacaaacccccagtcaaggagtgttattaaatggtcatgttaggaaacacagccttcagcattcctggtcaagaaaagcagctcaaggtgttccagggtctcatagctgcacgagatgaaacagatcagttttctgacacatagtgttttcatgtatgtaaagaaaaagtcagaagagaatgagaagaaatacatgtatttatgggtctgctccacatttcttaacaagagattatcacatctttagatgagagggatctagagatgcagaggcattcctaatagttaacttccaaaaccacttataaataaatataaaatggtggtatgagaatatcacattcatttatatttttgaacttaaaaaaaattaatagtcaagagtactcatctcctagagctgagtgcaactaggtaatagaaaagcagtgaagattcataaaatggcaaccagggctctgctgcaactctcctccctgagaggacttgccagaaatgtaactgttcaaatgcaaggtacagaagaagaggcagaggtgctagaagactacaccttccctcgggggcatctgacacagagagagagagagggagagagagagagagagagagagagagacagagacagagacagagacagagagacagagagagagagattgaaattccttagagtgttttagagacattgctaaagggaaaccagaacagacattttaaaaaatggaagaaagactaagtctgaagaggaaatgagggagagcagacagatgttgggcctcaggaggaagaaaattctgatggggagatgtcccagagggtaaatcccagatgctatggtggggaacctaggagaggtgatccagtgactggaaaaggagtatttgtgcctggccagtcaaaatgtctcagttcacaaagtgccttggagagtgctgtgggagggaaggggacagacagaggacagttgttcttaaaattgtgtttagagtctctcacattcaaatagaaaataaacgtttgtctacagaaaaactactgaggagacaaactgatcgattccccacatggctgaaactttatcaattatgcatggagactctcacaggagagcaattgtgttggctggctgttggctgagctcagaaagctctctccccagacagccacactggaggttcttcaaaccattaatgctttatagatggaggttcgcacagtcaccctaccattacagtagcgctcacctttcccgttctgtacatttcctgttcccattactctgtttatgtctttttgtacttcccagatctattagtcaaggacagtatgtattcctttttttatgttttatttaatttctacctttctcagatacaccataaattctcaggacttctggatcttatactacaggaagttgagcactgagcttggctccaaagtgcttcctcatgatgtggggtgggggctggggagggggcttcatctgagtcttgcaaagagagaaagtttcttcccccagagaaaaaccatgcgccagccttggggggaagattccagtgtgtagatcaggagagaaccacacgcctttggcccctatacaaggcaatagctaaggctcaagacacaggtagaagtgaaggcagaagtctatgtgcgcacctttgtacacctgataccaaatgacaggcaaactgatgaagagccaggcaggcaaatgggttaggaagtgactacaaatttacatagtcttcttaacaatattgttgggtcgtctagataataaaaatgaaatcagagtagtagagagtcttccatagttaatttgcatttcttagcacattaatctacaacctgccaaaggtgtgtgttggggggggggaggatcacccagccttgaattcttggtaaggaatatcaggtgagctgacttgataagccagagaagaagtacagcaggcatgggcaggtggaaagcaccctaagtaaaaacttctgggactctgaccctgataccatctctctccccagtagcctagagaacacactcagtatacctgtacatacgctcttttgacgttttaattttgttattcaatttgccctatttcaattgtatttaattgcactcacaaagggattcgactctcaactgtattacacacataatcaccacaccttttacctctccattcgacgtaaaagaaagccttcattttcctgagcattaatgataaggtaattagagtccaatgagttgttttgtatacaaagtagcatccactttctggtatctcgtgtctcatttgggagccacttaaatgagtataagataacctaattggaatttttctgtgttaatgactttatatttttaccgaaaacaacctctatccaaacaataacaagcttaggtaaagttgtgaggaactgaattctcacacactgttggggatcgtagactcataagacatttcagtttggtggttcctcaaaagttaaatacagggtttattttaccctgtatcctagatatcccataactaggtctacccagaaataaaacatctgtacagattaaacacacacacacacacacacacacgtgaatgttcataacagcacggcatcaaatgttcataacagcacgccatcatagccagaccgagggaccaaccaaacatgcagccattgatcagtagataagcaaaatgcaaccgagctgcacgacagatcttagcaaggaaaatgagttacagaccaatgcagactaccactagataaaaacctaacaaatgttctcagcgaaatgactcagagggaagcctgtggtgtgagattccattaccacagaggtgtctacagagagaaaaaaaagtatatcagcagctgcctagtgttggaggcctgagggggttcaggtacacaggggttctttttcatgagaataaacttcattacactgggtaataaatgcaaaccaaggtgcaaatggttttagtccttctcttccagggaaagtccatcagcttagtgcaaacatgtcagtagagaaattccacgggtgctcaagtcctgatagaacactctctttgctttacttacaacttgcacattttagattgacttgagagcactcgccacacaactgtttaatcaaagaaactctatctcgcaggtgccacactggacagccatgcagtgagcttctaagtcaatcattgagtcctaaccactgggggcctaagtcctgggatgttatgaagaggaacttgggttacaatgagccaatgtgagtgatacaaatggtaaacacatccataggaagatgaaggggagacactggagggctataagggaacttcataggcaccttttacatgaaagctttaaaaaaggggagggaagaaaaagacctaggccattcctaaccacttaaaatgctcatcttaactaactccaaaatatttacccaatttttgagtgtttcagagtataatgagccaggacaggggaaacaaagcaaaaagaagccgtgcagttactattttcaggttggggggatgaattttctttcaacaggagaaatgagctgaaccctcccatctcatagaaagatgtggggaccttctgaactatcaaaggccaggatctgacattgtaatctgcttcagccacgcactccagaaccagccctggagtgaatgaggtgaggcctcattttagcctctccacggtgctcttgcttgctgcatacctgtttctaatctccttccccaagtcatagatgatggccaaactctacatgtttgctttgaggcatctggctgtttccagttcccagggcagcctcatggtggtagctcacaggactcagcaactgaaggaggactgtggaagtctacagggatagatgcttccagtattggtgtcaagggcatggtttccaggtttccaagtttccaagtttggctttgtaaaatatctacctaccccaaatgacatggatagaggatgcagtctagtcagcccatcaaggcttcagcaacagtgaggccaaagctaaggctatagctttgttccattctttcgaagataatgaaatgctaaacttaggagtcaatgatgctcacttgattctgtaaatagaccaaaggctgaaccatacacttaatggggtaaacttaacgatatgcaaatatcttgttcttaaactaaaacataaaaaaaaaaaaaactgcaggtcatgtttctttttcagtttctttataacacacatacatgcatatacacaaacatatatgtgttactatatatcactatatatcacatgtgtgtgtaagagttgatcttcagggtttgagcatatttagtcatacaatggatcctctcactcattctggaacacttcctaccttgctgtctggataccctgtgtggctatgcacccgtcccctgcatcaactggctaaggagaatggagaactatactccatcactggatgagaggaacaatcatgtcagctcaagaggaaggcattatccattattctaacaataccatacgcagacaagcaagaatgaattgggattggtaacattcagtccagctgttcaaaggaagcatttcacaggctgtgaggctcatccaagtgggtactgcctagtgacagctgaaattatgccgagcgaggaaggatcagggatgttctttctgtgacagtgttttagaatctgagtctttgtgtttgcagggagaaatacctggtaaacatgcacttcctgtctttgcagacacctggtgactttgccaaaccaaacaaagctcggccactaagctagaagcacactcgtgtggcagcttggccctgcctgtgacacattcagctgatacaatcaccactcatgttgagacggattggttgacgtagggttggaacgtgaggatttaagaggggatgatgtctttcttgtgagactggacaagttctcccaggaactgataaattctcataaggtccaattactgcacagcaggtcacagcatctgtcctgtcccctgctgtcagaggcagccactgccttctgctatcagtgtgcatagagtatgaagacctcactagatacagctctgcttctagagctatgagatatgtgaactacttttccttatatattgttcagtctcaaggactctgttatagcaaaagtaaatgaactaatataccttcccagtaaataagtgccctaaataatctccaggacagaacagtgtaaagggaaattttagcttacatgtagtaaacaagactcaaccggaacaaggaagaaaacttcaaaataactcacaaaaataagataacttcaccaaagaaagcagaaactggactttaaagcctaaacgttctaaaatgtttactagacctcaaatgctcaagagacaacaatagaaaagggagaatacaaaaagtattttgtgtccattaaaaaataaaattcacttagctgagtacagtagtctcagctctcaagagactaaggcaggaacaacacaagttccgggacagcatagtctacctgaaaacctgtctcgagtggagacattctactgtctcccaaggtatggagctagcaaagtaccatagagttttccaccctaataaaaaagttaaaacaaacactactctcatactgaatatacagaaaatggctagacatagccacagatcatgtcatacaatctaaaagggggaggagaagggcagaatgtgataattgtcaccagactttgaaaagcacaagcaggctatcaagagccctactaagtacaaacatacaatgcagggaggaagggtgaacaacttctcaaacataggagtctcttaaaggcatatgcatctctctctctctctctttctctctgcattttgccttttgagtggtgtgtgtgtatgtgtatgaatctgtgtgagtttgcatgtgttaagtgcatgtgtatcaggatacgaacatatatgagtgagcatgtatgtagagctcctgattgaaatgaggaatcactcctgatcactccatcactcttccatcatctctcagtcaaacactacccctgtatcactagcctgcctgccctgggaatcctcccgctcctctttccaaggctcaagttacacaggaccacccctgcccacctggcatttacttgagatctggggatccaaatgctagtcttgccaggcaaatgatttaactgcagaggcatttcccattgaacttttcatgtgaactacaggtttaaaaacacataaatggacagaaagacagaataattgagagtaaagccatctagtctctcatgtgcctcaaacgaaaacctgaacattagtatcagaattttattccttccagaatatctaggagctcagcatccctcttaactgagccatcccttcttccatctgaccgtcccgagcatctgaacagcaaggagggctccagtagccacggctatttcccagagtgccaggcagcacaatgaatttctgcagatccaactataagcacctgcagagattcttcactgtggctcactggtcagggaacacttctggctcactggtcagggaacactccacctgctagaacttactggaaaggccagggattaaggggtaaggtggttgaagaagtgactggcttggcaaaggtcaaaaactaccacctgtcaatcacagctcttcgttttcattctgggcacagcatcagcttggtgtcatgtaaaagttgctgctaaacaaacaatattatccgttcttctgcagaaacgtggagagcctgcaagtctctccctaagaaaacaggctcacaggagacagaatgcggtgaagcagctctgctcttcccttctctccttgacatgcgtcctttctttctgggctgacagaggggcaagcagctttcttccctcatacattcccactatgatgctgcccccttaccatatgcctaaaaatattagagtcatggactggatcttcttatatcatgaactaaagagcaaacctttctactgttttaaggtggttacctcaagtattttgttatagcaagaaaaactcgctaacacaccaatctcccctttccaggaaaaactgaacttaatatgtatcccaatgttcacgtgatgtggttaggaaggctgtgaaactttgtgattccccaagattaagctaaaatatttgatacatataaaactttgcaatatatttagactcttagatgagaaaaaaatttagtctttttttatctaaatcttctccataacagtgaagtaaagctatggggacttaggggttgattagatcacatcccatgtgatataaataggaactttctcccccagaaagttcaagaaaccacatctccctgctactctacacatggctaagtcaaacagatctcccaaattttcctctttattctttgaaaagaagagaagcatgggccagacctgtatagaatctgaaaactgttttttccacccactgtggagtagcagagtttgggtgctagcagtgcaagtccatcagacaaggagcagaagtgagagagtcaagcaagagagcactgacgtgtccatattttctagagggagggaaatggtttgatcatttgggaaacccaatttggcagtctataaagtcattatgctgatcacatggtatgaaacaagaatttcacctttgaggatggagtctaagaaaatgaaccagaggaggggaaaaaaaagtctacacataaaaaggtgtccactgcaacattatttatgtctttaagaaattgagggcagcttaaatatccaacactaggaaattattgagatccacaatggcaggtccacactaggaaccattacacaaccttcaaagattactatgataatggccacaagagcaaggtcagaacgtgagcatgacagaaacctaaaggtgaaagcagagtaagaaaacgaggcctccaattaaagctaaggacggtgtgtatacaagaggagataccaccatgggaacatgggtcatggcccctttgcagaggtcaaattaccttcttacaggggtcacctaagacctttggataacacagatattcacattacgatctgcaatagtagcaaaatgacagttatgagctagtaatgaaagcaattttatggtaggagtggtgacttccacatgaagaacagtattaaaaggtcgaagcattaggaaggatgagaacaatggcactagaggaaggtaagacagaagagtgtgtattttgctttgctatcactctgcagtgtgagggatggaagcagcgacttgtgcgagcccagctagagtctgaccactgacatacaaccccagctggctatccctttttactctgaggcaagatctcactcagttgagttaagatcagactggtctggccttaaattcactgagaaatgcactccaggcaggacttaaatgtgtggtcccccctacttcagctcttgagaagctgaagagataagcttgaataatcaagacccagctgttcattatttcatctgtaaatattatctttatgattgaaaattatacctaaaagaacacttaacagagagctcattaatcatttaaaatatcattgaaaataggttttgggttttttttaattggatattttctttatttacatttcaaatgttatcccctatctagatcttctcttcagaaaccccctatcccatccccccttgcctctatgtggatgctccccacccacccatttctgccttcccaccctggcattcccctgcactgaagcatcaaacacactcaggcccaaaggccactcctcccactgatgtttaacaagatcatcctctgccacatacgtggccagagccatgggtccctccatgtgtactcttcagttagtggtccagttcctgggagctctgagaatatggccggttaatactgttgctccccacatggggctgcaaatcccctcagctctttccaactcctccactggggaccccatgctcagtcccatggttggctgctagcatccacctctgtatttgtcaggctctgacagagccccccaggagacagccatatcaggctcctgtcagcaagcacttcggggtatccacaatagtatccacgtttggcgactgtatatgggatggatccccaggtggggcagtctctggaggccttttcttcagtctatgctctacacgttgtctccatacttcctcctgtgagtattttgttcccccttctaagaatcactgaagcatccactctttgattttccttcttcttaggcctcatatggtctgtgaattgtatcttggaaatttcaaatgtttgggctaatatccacttatcagtgagtgcctaccatgtgtggttttgttttgccttagggattttattgttgaaaagagacactgtgaacatggcaactctttttttttcttatttgtttgtttgtttgtttatttacttatttatttaatattttcttcatttacatttccaatgctatcccaaaagtcccccataccctcccctcccactcccctacccactcactcccactttttggccctggcgttcccctgtgctgaggcatataaagtttgcaagaccaatgggcctctctttccaatgatggccgactaggccatcttctgatacatattcagctagagacatgagctctgggaggtactgggtagttcatattgattgctgttccacctatagggttgcagacccctttagctccttaggtactttctctaactccttcattaggggccctgtgatccatccaatagctaactgtgagcatccacttctgtgtttgctaggcccccggcatggcctcacaagagacagctatatctgggtcctttcagtaaaatcttgctagtgtatgcaatggtgtcagcgcccgtttggaggctgattatgggatggatctgcaggtgtggcagtctctagatggtccatcctttcgtctcagctccaaactttgtctctgtaactccttccatgggtgttttgctcccaattctaagaaagggcaaagtgtccacactttggtcttccttcttcttgactttcatgtgttttgcaaattgtatcttgggtattctaagtttctgggctaatatccacttatgaatgagtacatatcatgtgagttcttttgtgattgggttacctcactcaggatgatgccctccaggtccatccatttgcctaggaatttcataaattcattctttttaatagctgagtagtcctccattgtgtaaatgtaccacattttctgtatccattcctctgttgagggttctttccagcttctggctctatagcagtaccatgcagtttttatcacaattgctctgtagtacagctttaggtcaggcatggtgattccaccagaggtccttttatcattgagaagagtttttgctgtcctaggtttttttgttaccatgtgtgttcttttgtgactgagttacctcactctggatgatatttccaagttccattcatttgcctatgaatttcatgaagtcactgtttttaatagctgagtagtgttcaactgtgtaaatgtaccatattttctgtatccattcctctgttgagggatgtctgggtggtttccagctcctggctattataaatatggctcctatgaacatagtggagcatgtccttattacatgttggagcatcttctgagtatatgcccaggagtcttatagctaggtactcaggtaatactatgtccaattttctgaggaaccaccagaaagatttccagaatggttgtaccagtttgtaatcccacgagcaatggaggagtgttcctctttctccacatccttgccagcatctgctgtcacctgagtttttgatctaagccattctgattggtgtgaggtggaatctcagggttgttttgatttgcatttccctgctggctaaggatgttgaatatttctttaggtgctctcagcccttcgagtttccttaattaaaaattctgtttagctccgtttcccattttttaatagggttatttggttctctggaatctaacttcttgagttctttgtatatattggatattagccctctattggatgtagcattggtaaagatcttttcccaatagttctaaactattttttctacttttcattaagaaataaaatatatacatctacctcatataatgctttattttgaaataaataataaacttgcagaatggatcatgcagctaacatatgtaatatctcatatagtttgagcttcttacaataatattaaaatatagtctttcaacaattttcaagaatgttatacatgttattaattatagtctctaggctgcaaaacagaagtcgtgaacaaattactacctttaaataacacactattagcaattacatatgtatgggccagggcaatggctcagtggcaaaaagggattgctgttcttccaaatgacccgagtttgcttcccagcaccagaactgggtggcccataactacctgtaggtccaaggggtcagacagcttcttctggccttcctggacaacccataactacaaataaatctataactgcagacacacatatatacacaaacaaactcataactaaaaataaatttatgaaataaaagggagactgtgtattagaagccaatgcttcatttctaaggcagtgtatataaatttttctacggatttccttcagtgatctcttccaggttagattcatttataaaatgagatctacgacaatcattgaatcaaagagtctgtacatttacattcctatggtcattggagatcttaacatatttagttttaaagagtatctgatatttatttttaaagcatctatttaagggataataggagccatgcacagagggacaatctgatagcatattccagaagtaaaatgaaccatatttagaggatgcctcaataaccttgatttgccagtccactccctctcatcccataaacattactttcccaccccctgagtggaacaattaaggcaatattgagacagagaagagataatttcttgaccagaaatgatggcacccacttagactctcagcactgggatgacactgaaaggtaaagccacaagttcaaggccaatgtgaactgacacggaaggaaaagaagtctcttaactaatacatgttaaactatagctgtgccggtagggtttcttacagtccaactcttgcagatcaaaaaaatatcaaaaaattatctctaagctgtcgatgaaagatccttgcttatatgtctaaagagaggatcatttttcctaaaaattcagttacttaaagtagcaaaaacgccaaggtaacagctaaactgggagagggcttgcctcgcatgcacgaggtccctggtccaatcctcagcttaacatagcctgggtatagtggtacactcctgaaaaagtactcaggaggtggaagcaggagagttagaagttcaaggtcaccctcagctacactgcaagtttgatattcacctggcatacataaataagacagtgttttagaaaattacgcacacaagtgttttttaaatgtgatatttggtaaatgaacgaaattaaaaggattacatagatataaagaaattaaaaagaatcaaatacccttaggtatgtgtcagtcattttgcattcaacaagtctttattgagtttatggaactgtgggtacacaaagaatagaaaatagtacagcagctacataggaagatgagaatgctggaacaaagagaggttgccaggattggaaggtgccatccagcaccttgaggagcagcggagagttaactttgtagactatcagaaagaacattctaggacacagcaagggtctgtgattgaatcacagcaagaggccagcatggctgagaccagtgtgggagaagatgagcaagagctgaactgagcttggtgtgtgggaggcgtagggggccacacggggctcttgcatgccttcctgagactatgtctattactgggtgtttgatttattaacaggaacatactggctgctgtgctggggaccccagagtcagatgaatggtggcaagtggccaatttagattctctatcttgatgagaaaacttaaaactccctaacacattgaatgagaaagatggggttcaaggtattattattattattttaagcaacttaagtcacatctctaccaagtgagatgggggtatagaattcagggtagaatgtcttaaaagtcaactctgcagtgctttcagcttggccataggatgtgcaaaattaggatccctgtagaggtgacacatcagcacattcacaaagctgggagtgtctggcctgcagatagattctaaacccaggaaaggctacatatagtgacatcaggatggcctggctcctagtgcttcccagttctacaaggagcttaaagaacggaccagagagggaaagagacggagcttcattgagaggatgagaaaatcaggagggcagggtacctagaagtcaagtagagaggaccaagtgtgggccgaagcccaagactagccaactctaacatccacaagttaagacaagaggcacacgactcagtgtaaggaccatgcctgaactgaggagagagacgctcctggaaatacattctcagagtcttttgttatttttaacacattatagtttatatatgttgaagcataatatactttttatttgtctgtttggctggatggggttttttttgtgttttttgttttgttttgtttgtttgtttgtttgtttgtttgttttgagacagggtctctctatatagccctggctgtcctggaactcactctgtagaccagggtggcctcgaacacacaaagatcaccggctcctccctcccaagggctgggattaaaggtgtgtgccaccaatacctagcttacataactgttcttgatgccaacagatctaactataaaacagcaaactccacagcaagatgaaaccacagggccacttatctgaatatttgggcattcactataacagcaaggcctacaacaaagcacggagagcccttcccacaacctggcactaatgagagcatatgggtgccctagtagctggcatggacgaggggcatctgcactggggcaggctggaggcagtgttggtacacaccaggcttctttaacctttggttctcaaaagaacttcatggcttactgcagaagagagatagaaaaaaaatgatggaaacgtaaggagaatctgccagaatataatttactcccttcctcctcccagcttgctttcagagctaaatcagcatgtatggatctaagtcattttgtacggtagcaaagaaggccagacagtcgttaaagttgatagcactaataaaactcaaagaaaaaaaagagaaaaatgggattatgttccattggtatgcaagcaaaaaattcttttaattctccttcatagtgcacagtgccgtaaaagttttggttaatgtccctaaatgatcagttaaatgtataaattcattttggttccaccccactggcatcaaaaaataaaggcaaaataggaatactaagtatgaatgctaagagcaagacaggactctccaacgtgtcacagtaacaaaccagtctttcctctgcattgttgaacacagacacacacacgtacacatgcatggagatacacagacatgcgcctgcatccctcttattcagcaaatccattagtagcttctctcatcagcccctgttaggtgctaacattcaagttccttctctttgagctttgctctcagtgttaggctaaagcatccatttttaatctgtgagctgacccctttgtggggtcgaatgactctttgacaggggttacctaagaccatcagaacacacagatatttatgattcattaaagtatcaaaattgcatctatgtagtagcaattaaataattttacagttggcagggagagtcaccacaacataaggaactgtttcaaatggccccagcattaggaaagttgagaccccctgagctacaagcatgaatgcagtacaccccattactctaagaaacacaaccaggaacacgcaagatcttcaccatagtaacctggataacattctttaaggactttttactttacggactctctactccaggacttcctaaagcctttctttatcagccacagcatacagtcataagcatctctgcttcctggctgtgtgttcatgtccctgatgcagggcttttgatagtgtttatcttcttgtgaaggtcaatcctgcgactaggcagtgtgttttgtgaaaatacaggaccctctattgagtgatgtgtgctgagtatctgtcttagttagggtttcagttgctcagaagagacaccatgacccaggcaacccatctaaggaacaacacttaattagggctggcttggttcagtgcattctcatcatggcaggaagcatggcagcatccaggaagacacagtgataaagaaggtgccaagagttctacatcttgatccaaaggttgacataggatgactgactctggacagacttgagcatatatcagagacctcaaagcctacccccacagtgacacacttcctccaacaaggccacacctcctaataatagcgccactccctggaccaagcatatccaaaccaccatagtacctaatacaggatgtcaactatcagatttaacatggaagctgaaagaagaaatgagctgttaaacaaaggaaatggtcactaagcaacaaagatcatagaagtggttcacctggaagcgggtggctggtttcacagaggccatttcgtgcccaagaatggccatactctttatttcatcaccagtctgacagctctcaagctgccccctgtccctctaaacacggacattgtgtgagccccagctcttgggagtgagtcttcatctattgctcccaaacttagaggacatgatcacctgtagccatatgaatggttaactggagtagagatggctccttaagaaagctgattcagggtgcctataggtataggctctaccaacagatggggtgcagtgtgtttctgagaaggaaagcaatacagttgcaaatttcagaagagcacttagaaatgcttaactttagaacattgggttgaagaggtagtacagtttgtaaagtgcttgcaatggccttgtacactgaggatgtgagcttggtctccagaatctactttttaaaagctagacacagtggggcatatgcttgtcatctcagaacccaggagggagggagagctgcatgggaccgtgaggctcactggccaaccaccctagccagtgtaagactttgtctccaaaagatatacaaagaaagtggggtggggagggaaggagggaagacaaaaggagggaaaggaggaaggactctaggattgatactcaaggttattcctagcctccatatggatgtacacacagagatgtgcataatatacctgcatgggaactcctcaacccaatcagaaaataactaatttactaccatagaaaaaaatctcataacatacagcaagacctcaacattacaggtttgtaggcaacctcagattaatagaactgcatcatacacacatgcaaatgcacagaacccaaatttaacaaggaggtattgacatttcatttttgttgtagcttgctggtttttgagaaagggtcttattacatagccttgactagcctggaactcactatgtagaccaggctgacctcaaactcataaaggcccacctacttctggttcttgagtgctgagattaaaggcgtatgtgtccacacgtggtggaggttttaaaaacgacatcagaatctgttactttaatgactaagttttcttatgtatcttggcagtttggtttaaggcccaaatgtcctgattcttacataatgaggtttggatataagaaattaaattgagttaggcaaagggcaaagtaaccctgagggaaaagatgcacaccaggaaattatacctgaatcatgcaatttaatcattcttggtgatttgcttttataaaaccaacatgcattttattgggaaaagcgtgttagagctctgataattgcctacgcataactcagtatttacattactgtgaaaataaagtgcaaattgaatattcaaaactgcatatgcaactgtaggcaacttttgagtatctgaagttaattcatggcatgcatatcaacactatgcacactgtaggtgctttataagaaataactgactggacgacatgttgacaatgaagttgcatataaatcatccactttcaagactcaaagaggcaaaaaataataataattaaagtcattgagaggaacgttcagccatcttcactcatttttcaagccactaaaagttatatggtagttatttattttaatatttaaaggaattaaatatgtacatatatgagaaaataacacgactgtgttatctacccaatctgtaaagtctggaatgtgactcttgaataattcaacaaattaatactgcataggaagtggggaggtgggggaagcactgttgggctgtgttggatggttactaggtattaatggcattgtagctccctgaaagagctcatatagcctagacagaattaagacagagtgatcaaaaccaccaacacagaccatggtgctaagctttaactgccaatttgacacagtctagaatcagcttggaaaacatttcaatgaggaattgtctacactcagtcagcctatgggcttgtctatgggacatttcgttgattacattaactgatgtgggaacacccagcatgcagtgggctacaccattccctcggtttaggttctgaatcacttaatagtagagaggagtaataagcattcttgcattaaagcatttctctctactcctaagtgtgggttagataggatttactgcttccagttcctggttacttgacatcccttccttaaaatgatgcactgtaacctggagttgtgagctcacataaatcctttctctcccaagttactttttgacagcgcttttgatcacagcaacagaaacaaagtaaatgcacagagtctcaacaattacaagagtaaacaccagcttcttcatgctgagcattctaccttgtatccagtcacaggccaggtcatcaacaagcccaatgaaattagtatcaacacaacacatcttccagaaaactacaggcatgatctagcatctgtactagaaagtggaaaaatttccatccatagagggctcacaccagcaaggagagacaagctctgaggagagatgccaccccaagtcttcagtatggctcatcttcctgcaagccttttttcatctcttcaggagcatcaacttcagtagctactttgcttcttgtaggctaaaggtagctgttgtgttttggagcagagttatgctatgggtggttttctactttttaatgtttttcctataattgcaagatgtttggtcaaggagcgatttaaagcatgatcctgtattacctttctaactgacaatctcagagccaaattttaaatggataggatttcctttggatacatccaaagaaaccacaagaacagatctctgggggaaaggaactattgaaacatatcagagcggtacagaggccaggttatactgctttctggacaaaggcaccaactttaacatataaggcattccatgaatagtatacaaggggtgtgggtggtgaacagactggtaattctattatcaaagaaatgctttggaaatgtatcattaaatcacatttttttttaattaggaagacttttttcaactttatcaggaaaatttaagcatctaaagcagataataaaaaccaacaataacaaaaaacaaccaaccccccaaaaacccaaccttgcactttataataaaaaaaaaactaaaagagggagaaaaaaaaaagcccaatgaatttttcacaaagctaaaaacatatctgtgaaaacattgtttaaaaaaaaatcatttcatgttctgcactgtaatgctataaataaagagagttctaagtcctttagagaggaatttggagataaacatgtccatgacctcaattgagtccgtgtgcagtgtaagcaagaacaaagactggaagataggagtgaacaaacagggatggacagacagacagcaaccaggggaaactgcatgaataagcatgtcacagtcctgccatagctttctctgaatgctctcttactacacagacacaggctgtcccctgcacagaacaggagctgtgtctgctctctgtaccagtggcttagaaactaccagcccacaacaggaatatgatgagtatctgtgaaagtgaagggggacgcgggaggtggagggggggcacagctgctcggatttcatcaagctaagcagcactcatccattttcctctatgcagtgagcaggtccttgagcttctgacaactggttagatgttgcaggtgtacacatagtaagtaaagatttctcttcataggaagaatgtgagattggagaaaatggactttaaaaaaaaatgttgcctggcagcacacctgtaagagactaactttaagggaattgcttgattctactgtagttcaactgtcagagatttttcaaatgatggtggtgttccataagaaaggtacgtaacttcagacaggtattagggcttcagtgtgcaccatcttccagaggaacacactgcaggatatttaaccacactgtgaattactgtgttctttactgaaaaacaaaacaaaactgtttctagttgtggtgtggctcagtccctagcacacaactttaatcccaaacaaaggtaaagatggtttgcagaaggaagcagccatgtttgaatgtgatgtctaactgagtggcagacaaagtgatgaatcagagaaagacttcacagcacatgcccaactctcaggaaacgagagagggaagggaagctacttaagagagcaatgcagagagagggagggaagaaacagttttactgggagaattttacagagacagattgaagaaggagccagccagagaatgggaaggagccagaaaattagaacatattgctaaagttagtatgaggccaagcagagcaactcagtaagaaactgagagaagctagattagaccagccagccagagatcagaaagatctagaaacggtgagtgtaagtctcagaggcagaaaacattgtaggcctagataagactgtacagaagctaaaaactttcaggactaggcctcagttagtaagcttctgagacatcaatgacaggagaataaacgttacatttacaggatgatgtgtggacacttgggcactagctggtagtgctatgtagggaggttctagaagctttcagctttgcagcccagtggcaggggctgctctacctcagacccaagctctctgtgcaatggaaaatcttgctttgttaacacctgggaatgtaaatgaagtaaccgcctccctgaggctctcatgtaggcacacctagtgggtattttcttagtctctgtgtctttctatctcagggttatctgtctatcatgttctctttctactgaaatagtaattttattcaccaagcacagggtcaaaataaaatagaattcaagaccctatcaacatcggttagaacatcttctgtaatagatgctatcttccctcaggaacatgcatttgcattcatctttcaattgggaacaaggacacaatgttgcattgaaatgtgcagacttagaaggagaattcatactgcacatgggtaggaaaaaatacaacagaactaaatgacatttaatatatgagaaaagagtataaaaggatataaataaattaatggaacttggaataggagaagatatttaaaaatctaaaggctgagggatatgtcaggtgacatttcaggattccttgttcattgtcagaatgcaaacacagcgtgtgtagaggtggatgtcatgcagaaggaaacagaacttagagaaagaaaatgaaacataaaaagaccataaaatgatcttttgtttcacactgtgatcttcatttgatacaggactgaaatctgccctacagattttctctacttttaattttaatgaacaagataatttcaggttttgtttgtcttagtttaatctccagcaagctaggcaagtgctctaccactgggctatatgtacagagaatatcttgtgtattgtatggatgtattgtttgtcagtaaaaacaaacaaacaaacaaacaaacaaaaacctctgccctataggaaagggtagaatagaaagaaggtgggacatccagaggcagaaaagattaagaattgtgggatagagtaaggcagggagagcagtgttcacccaggaagaggacagaggacagatgcatgagacctgagcagacgtagccagtcacatggcaaaacttagattagaataaacaggttataagttagatggagaccaaaccaaagcatatggccaaggtgattgcagatatattttgagtctcaaaagtcttcatccgaggagcttggggccaataggaaaagctcacactttaaagctatatccttagaactactttggaattttatttatgtatttattcattgacttgaaacagggtctgagtgtatcacctttgctggcctcaaactcacatagatccacctgcttctgcctcccgagttctacattaaaaccctttctgacaccatgacttctatactcctgattaggttacagttagatataacagcagacacgcccctgtaatcctagcactgggaggctttctagaagatttctttggatatcagcatattggaaaaaacttcacaagttatcttttatttttatctaagtatggatgtatagatgcatgtgtgcatggattttaaaggtagggtcttgctttatagcctagtctggcctcagacttaatcatgttacctaagctaatttcaaccttatattgatcctttagcaaccaactagatgccaaagaggggggaacgctgtggtaattagtttaaattttcatttcttgagaacttcattcagtttgtttatcgaaattaatttttaaaaaagggcacaaatgttgtacttaccttgcagtggtcatactggagctgtaaggcagggacgtcccctccaatgggcatctgcttcttaagctcctcatctttcatattgagccatttgatcagctcttccagcgatgccagcaaccggttccatttctcagcactggcctccaaatgggccctggtgacagataagaatgaaggtgatgaagaccttccaggtgctagcaacaaattaaaaagtgatacatactcctttgacctaatcaccatatacacacaactaatcaccaaacaacacatccaaatcaacgagggagaggaggaggaggaggaggaggaggaggaggaggaggaggaggaggagaaatttttcttgtggtgcacaaaaaatactctgtgagaaacagttatttcaaaacagctatattatccaggctatgtctgaaatgcttaaaattacaaaccaggttctgattgttcgcataccctatgcaaatattaaatacaaaaattcaaatatttttctcatttttatcaaaatacatagttagagggagaagaaaaagaatgcatacgaaacatctggagtctagttggtgtcttacacctttaatcccagccctcaggagacagaggcagggagatatctatcagttcaagaacagccttatctacagacacagatcaaagtagttgagcaagggataaacagtgaggcttgttgcaaatacacacacacacacacacacacacacacacacacacacacacacaggaaagaaaaaagacacacagacactagttactaacttttatgtttaaaaagtatttatttaaaatttattcatttttctctctaaatgaacagactaatcttatttttttaaagatttatttttctattttatctatttatttagggttttccgagacagggtttctctgtatagccctggctgtcctggaacacactctgtagaccaggctggcctcgaacccagaaatccacctgcctctgcctcccaagtgctgggattaaaggcatgcgctaccacgcccagctctctattttatttatatgagtacactgtagctgtcctcagacacatcagaagagggcatcagatctgattgcagatagttgtgagccaccatgtggttgctgggaattgaactcaggacctctggaagagtagtcggtgctcttaaccactgagccatctctgcagcgcccagactaatcatttaaggagaggaaatcattaacccccaatctttcttacactgaagtaaattgttagaattaagacattagaaatatttactccaaactgttgaaaatcagtaagtcactatctagccaagaactgcttggctttaagttgactagaatcctttgagaatcttagtattaagcagaggacaaattcttcctggttttcactaagaccctggaaaaggcccatccatctagattggatcccataggagggctggatttaaaaacatgtactatttagagaacctccattcattcaaggaatccatttccctcaggactgctatacccagtgcatgggcatgaatgtgaactcagtgctgagctggtgagatgggctgccttgcacatctgcaatcagccaggtgcagagggtcgagcctactggaaattcacatagcctcactgctcaacatcttccaaagggaaaggcttagcatgtatgtgaacaggtgtgtgtgtgtgtgtgtgtgtgtgtgagagagagagagagagagagacagagacagagacagagagacagagacagagagagagagaaagagagagagagagggagagagaaagagagagagtgttatcttagaagcttcagccacatagagcacacattcagactctgtgtcttctttattttttctaattaattaatttatttttattttttacactccatattttatccccccccccccacatctaccctctgactcttttacagtctataccttctccccaccccctgtctccacgtggatgtccccacaccacctgacctctaaactccctggggcctccagtgtcttgagggttgggtgcatcatctctgaatgcacactgactcagcagtcctctactctatgtgtgctggaagcctccaatcagctggtgtatgctgtctgtttggtggtccagagtttgagagatctcaggggtccagattgagactgctggtcctcctacagaatcgcccttccctaactcaacaacaggagccagctgcttctgtccattgattgggtgcaaatatctgcatctgactctttcaactgcttgttgggtctttcagagagcagtcatgataggtccctttttgtgagcgctccacagcctcagtaatagtgtcaggccttgggacctcagcagactccatgtcttctaagacaaccttcaccatgatgttggcattaggatcctcacttccataaatctgattctttaccaaggacatggaagctatccaccaggctcagccactgctgtctctcagaccacggaggtaatgtcctgtgcacctctgttccacttgcacgtctgtctcaaagtgaacagttttgctagaggtaccacgacaagcattacctcactgatcgcatttaggagctatttccagcgatcctcactcaacaattatcgtaaattttggctaaaagttcatctagttcatctctagctcatataacaataactggagtctaccgtccaatactctagatggaaaggaaagccggttctctgggtgcactttaaaatactgcatgccagcattcacacagttattgcaaaggccaattatcttcccatctcttcacagatgtgttgccatctggctaataaaaccaactactcaaacttgaacattctatgcctcattccaaaaggttagctataaaatactaaaacataatttttaagtcttaaacatgttcaaagaattttgtaactacctcaaaactgtatagcttaaatctcagtttagtttagaattgagaaacagatcagtagatagggtgtttgctggacaagcatgaaaactggattcagatccccagaacccacatcaaaaacaaaccaaaccaaaccaacccaaaccaaccaaactaacccaaccaaccaagctaacccaaaccaaaccaaaccaaaccaaatcaaccaaactaacccaaccaaaccaaaccaacccaaactaacccaacccaaaccaaaccaaaccaaactaacccaaaccaaaccaaaccaacccaaaccaacccaaccaaaccaaccaaaccaaaccaacccaaactaacccaaaccaaaccaaccaaactaacccaaaccaacccaaaccaaccaaaccaaaccaactcaaaccaaaccaaaccaaaccaactcaaaccaagccaaaccaaaccacactaccaagcaaaaaatcaaataaaaagggaaggcagacatggtagctacacataatcccaacaatagaaaggcaaagaaatctagctacattagctggaatccatgagctctgagttcagctggagaccctgactaactaatgaagtagagaaaaacagagggggagacacatgattcaacttctggcctccgatgtacttacacacatgagcatgaacccatgaggacacatatacacaagacacacacaaacacattcattttctcttctttcttttactattgtttctatttgttccataaatgccaggatgggcatatggtagtaatctgctaagcacagaggtgtgatgcggagaggaagcagagcgggttttctaggcggagattctgtccgatgagctcagtgttctgtgtcaaagctgtgttctgacaagatcctgcttccacatgagctccagcttttctggattcttattaatttggggcaagtcatcctgataaacaaactttcttgccatagagcatgtctaaatcattccaatcatattaaccaaaatccctgtacagttatgaaccctaatgcaaaatgcttgttgcatgatgtatatctgacagggctgttacaattgcttacaaaccactgttaaatgcaaagacagctagaaatcacagctctccattcaacccagaagtgttgactatctactgagtaaaccacttctgtgcatatccgacctcttacccagatctgatgcggcatcatcagtgtctgtaatttcatcatcaataaataagctacatatcaattcccttgataataaaaccctatatgtttcctgaagagcacacaaatgtcttcctagtgcaatggactctattgactagacagaaatactgggattgatcattgatcattacaatgttcaggaatccagccccagaaggagcatctgcacaaatgaaggctacacttttacaagagatgctaaagctgctttgaaatgaaaatggaagcatcgattccatgtacatctccatagctctgccttcccattataaacactgagctcatctgacagaatctctgcctagaaaacctgctctgcttactctccacatcgcacctttgtgcttagcagattactaccatatgcccaaacaggcccagcctgctgcagtagcctttgctgttcctgattcagtttagttctttcatctttcaagatgaaagtcttttcctggtcagtgggtggaaggctctgtaaggagaaactgtatatttgtgcttggcttagttgtggtctctcaccattgactatagacattttatagcttgaactgtgccaatactacagatcgcaggtcatccacatgttcagggcatttacaggtaaacactgctttacctagttcattatctgtagaaacgtttttcaataattatcacagtgtcttattgacatcagttaatacttaccatatgtaagatttgcagtgcaatagaccctctcattgattatagtattaaccttagatagtatccataatggattctgccttacacagatttcccaactctgggtgaaatatcattttataaagctctaagttttataagtttttacatgactagttattcaaaaattatagacttattagaagaaaaacatttattaaaagctttccttaccaattggctatggtaagaaaagaactacagagtgaaatgtacactcatatctgttttgaatcaccaaagtgatttttcaaagtaactgtcatcaaacaaattatctgactcctctccagaatataattatcaacaaagaaaatcgtgtaagctaaaagatacccatttggggaccagagccagaagtcagttggtagagtgtttgtttagcatgcacatatcctggtttggttccccagcatctcataaaccaggtgaggtggtgccctcctgtaacctcggcattcaggaggtagaggcaggagaatcaacagtgcaagatcattctccacagcggcttccaagccagcctgtgatgcatgagacgctgtccaaggaagaaaatggggaagaaaaggtgtgggagggtaagggggagtgagagggagagaggcaggaaggaaaacagttctcaatcatcagtacgaaccagtgttcaaggagcacccttaggtacaacaagacttctaaaacaaaaggcaaaatgttaatatttgaaggtcaaattggaaaaatttcaagttcaccaaatacactcccaagatgggaaggctgatggccactctgctaaatatcgggacactgagggagccaaaggcctcaggcagcactaggaagatgtggacttcagccaaccacggctttggttagcaacagcaaaaggaggaaaactataaactgctcaactaaatggtacacaagtcaaaagcactttcgcaaactcagtctcctaagctttgtaaggatctcagtgaaaagacaacaaagacagagacatgctacctcccagagcagagaaaactacacagatgaaatctgtcattcaagtacaagtgtgatctcttttcagatattgtgaaactcacttaatttaaattgtgtaacaatgaaaaaaaaaaaccaacaacaaatgtaactaagaatgtacatgtaaggtgacaacattcaaaagagattattcctgctcccaaaatgagcatggaaggccaaccaaataaaacagacagtccttaaaattcagccactaaagagcaccccagagctatgactggatatggcggacacctgtgatgtgcagctatggaaacacacatcttcagataactaggacttaaactcagctcctcagtcacactagccataatttaagagttcaaaatgccacttgtagctaaccgggcatggtgtaaccagattgacagggctccttcctgccaccacagagagccctgctggagaacgttctaagaggagaatagaatcttgttttgttacatttaggagaaggagactttagctttgtaatgtagttagcaaaaacaagcccttaaggttaagaatggtgctgtaaaatgtgacaacaccaaggatgacagtgaatagccatcgcccataagggcttggagaacaatgacccaaatgttaaaaagacttataaaagaaatgcaagatagatttttatctttaaactctgtttctgtcacatttgacaacttgcccagcctttgaaacccagtgttaggatggatctatattaaacatcattaagccgataagtggatatttaattaacataatcttacattaaataaatttaatttaaaaatgtaagccatggcattcagtcttgaatttattagtataattccaatcagttttaaaagtgatcataaagtactgccagcactcctaagagcctcttttataaatgaaatcttaagtcttcagctaatttgttatatactgacctgatactccattgtgtactggcgtgtgtatgtgtgtgtgtgtgtgtgtgtgtgtgtgtgtgtgtgtgtgtgtgtgtataaaatcaatgttatatataattatatataatgctatgcaacattatataatatatacaagtatatattataatgttatggattgtatttaagatgatacagcatatttagcacactgaattttaatatttaaagggctcaatcatggtcatccaaaaatctttaaagtaatagttcaggtagctgttccaatgaccacagcatggttaaagtaggtgatgtccataaatatttaagagtagattatcaaaacaaaacaataaagagcatacatccacttcctaaaaacaaattaaaagaaacatttccccatggtggtagtatgaactaaacactatttgaaatacacaatccacaaatattatggaattgaaggggcagggtgttatcaatcaaatggcctcatcctcagaaaatgattaagtcatccagagaaagaaaggcttggaaactgaagagaaaacaaggcctttgaagatagacatggcagtgaataaaatagaaaaatattcagaattataacagcaatagtaggcagtatcaaattatatcaaagaaaccttagcttctgcctgccaccccccttcctaaagcaccacacatctggggagatggttcagttggtaaaatgcttgggatacaagcatgagcctctatgttcagattcccagcttccacataaaaggtggcacttgtaaccctggagatgtggaaacaggaaaaatccctggggcttcctggctccaggttcaatgagagaacctgcctcaaaattaacaacaacaacaacaaaaacaaaaattgtttttaaaagtggaaaggaaaatacacatctttaatctctccatgtttgtgtgtctacatgcagaagcatcttaagagacacatggtcatgagcacacacatacacagaaagggaaggaaggagggagggaaggagggggcaattaatccaagattaatagtaggggatagagagaaggtggtgaccaggatatatcaatgtgaatagaagtagaagagaaagctcaactggggtttgggggacaatacaagggcatggctctgactagaatgtgttatgaagagctccaagctggatggaaggggttgagaaaatgcctctatcacactggcctgtaggcaaatctgtggagtactgtcttgattaatgactgatgtagaaaggcccagctcacggtgggtgaggtcacccttgtggtccagagttgtataggaaagctgcacaagccacggaagaggccagagagcaaggctccctagcagtctctgctcagttcctaccctgaaagactgtgacgttgaagtgtgagggagataaagccttccctccccaaattgcttttattacagcactggaaaaccaaactaagacagaaatgaagcagtccatcatggaaaaggctggaacaaggctggggtggcctgagaggacctgagggagaggacggaatatgatcaaaattgtgtgaaaaatgttaaatcaatgaataaaaagaaaatgttggaggatctacatttttaaatatagtgcaggtggctagagtaatgtagcttcattataaataaattgtatgaagtaaataacacagttatagaatagtacacagatggctccagctaaggaggaaaggggccctagctggagaaggtccatcactttcatatgagagggtttcattaataatgcctaagtttgatttggtttaaccaaggcccatctctgaggaattcacgtgtccagtggaatgcacctgaatccctctggagatcaccctgcccatggtcccctggggactgggtgatctcaaggaggccaagatgaagatgaaatcaatggaagcccaggatgagcaggtctatgggacttaagaatagaaatgagctgagaacgttcacagacagtgcaaagagagacttgaagattaaaatacaaaaatgttattgctgggtgatagtatatacctttaatcgcagctctagagaggcagatacaggcaactctctgagttcaaggccagcctggtatagagagcaagttccagaacagtcatgactacacagagaaagtctgtgtcggggaagaaaaagttaccagtgtgaatgtttccaccaaggctgagagctgagggcggaagataaaaggaagtagtgtgtgtacttcaaagagaaaggaaccatatgcccctatagattaggagtaagatgataaaggggcagaaatatagatgcattgttttaaaaaaaaaaaggggggggggagatgtgaagagatgggaatcaaggcaggaggagccacaagaggctgccaattggccacctatccctatgtgacagggctacttctgcaggcaaactgccttccacggccagtttatgactgatatcctaatgcgtggtgtccacaggaggcttaatattcagagtattcccactggcttctaggcaaggaaaatggaggaaattaacctctattaaagaacatttcaagtaaagtttggcaattaagagaaaagtcaattttcaattaattacagggaagagtgataatcggataccaacagaaggcaatgtgagaaccaggctggactcctaaaggcaatgtgagtaccaggctggactcctaaagccagagaagaaagggaggagtgatctgaacagcaactccacccacatcatttgcgtgtataatgaaggaggcggagccagaaagagactggcccagggaagaattttgctgtaaaataatagaccttgcatgtagggtgtctcacttgggaagccacctttgagtagtgactactgggaattctgcatcagtctaggtttgagttagcaacctaagctctaagccagttcctcctttcacctggcttctgtccgtcattcccatggcattagattttgtgaggaagccggctaaacccacttttctttcacatttgttcagaatccagccaggaaagagggcactgcttactggtgagtccctcaaacagttcctacactcatgactaagatatgggaggggctggggaggagaggaatttaccacacaagtagtggctgatagcagtaataaacatgacccacttcttgcatgtattgtatgtgggctaactaaaacatgcatggaagccccactaaggaaattactcttgcttcacatacaaggaaactgaagcacacacatgggtcaataacctgcccactgactgctgcatgacaacaccagtgtttggacatagtgtctctgcaaagcgcaatgctctccaaagctgctttgttccccttctttctaagctgaacttcctatgtgaagagcccactactgagaaagataaaccactatctcatacaaattcataaaggatacgtgatttcatctttttacatatttgaagattaaaatatgaaaagttctttcctctttagttacacatatctaatcatagaaaacacaagtgagtccatatggacataaacatagatagtatctacacagcataagcaaagcttgggcttccatctctagcacaaatgaacaggagaggtggctgatgcagagataatttccaactggagctatagggagaagagtgcatagcgccacaattcactcttcctaagaaatagaggggttgtaagttttaatttatgagacccagtagagcacatggtacttttctttattaataagaaaatcatacaggacaaaaaatagtggatgatttccattctctggcagccgctctatggattcccaacacctgctgaatccgatccactcacccaaccttgtgtatgagtaatagcctagagtctactttaaccagggtctacagagcctgagaaaaaatcaaatcattctagttggtcttcctgacaatcaagtgtgttggatacagatagtacaccttggcaaagttcacaggggtaaagtaatgtgtccaacttcagaaaatacatagcaaagtgcaaaaatcaaagtcggtaccatttggttttaaggttatgcatattcaacacatgatacaaccaaatctaaggctttaaccaacattcctctttggaattatcattcttgctactatggtcttctgtaagtatccctttaacttgctgccaattagaaactgtctatcagctactgagtatgaacttaaaatgtgcttgaagtccaataatggtaccagtctgttactctgggtaattcgttaatgctgtttccttgtcagagccctgatcctattgtccgtacttaactgaattttactttcatccaaagcagaactgaatcatcacttctacattttagtgtttataagaggcaattaatctcaataaataaatatattttcaaagtggacataaacacttgatggggcaaaatagattcaataccaagatttaaagaaatctacattcaaattctggctattatcttattatcttaatctttatattcattaaacttctcatatggaaatcctgaccttctactttacagggattttttttcaagaactatcatgtgccacttaacaacagaggcacgttctgagaagccatcagatctctatagtataaattaagtagttgtgtgaaacaactactgtacataaagtgatggataagttagtacacagtgcaagactactaagtaaagtaattgttctaaatgggcaggatgggacttgtatgtaatgtcagcacactctggatgaagaatgaaaaagtcaaaggccagggcctgagaaagatagttcacaagttaggagcacctagtgctcttgcagaggagccaggctggttcccaatatctacatggcagctctccagttctaggggattcgatgtcctcttccacttccatgggctgctacacacatggtgtacatacatttacaaaagttatatacatgtacataatttaaatgaagggttttgtttttgtttttgtttttgtttctaacaaagcattaaaggccaaccttgcctacacaataaactcaaggtcaacctgggctatagcacgcctgctctgtgaaaaatgaatgtctttatttcctgcacttgagtggcaaaggtgagcagataactctgagtttaaagtcagtccggtcatgtagtgatttctaagccacccagtactactaccttgtctcaaataaattaatagatggatggatggtaggtaggtagatagatagatagatagatagatagatagatagatagatagatagatagacagatcaatagggctctaatgatcctaacacagtataaaacatacaatataatgataaacacttatcaattagcaagtgtcagtgacattattatccgtattgttgtatggtttaaaacatgactatgaatatcctggaacaaatagtagagcacactgggtatataaacgaggcaaaaacttctaactacatatttattcttttggtagtgctgaggattgaacccaagacctaatccacagttaagtcctctactgttaagtatatcttcagtaccaactggaaagaaaacagactttggatttcaatcttaaacaaattctgatagagttgtactaatcctttctctttctgatagacccaaatctacataagcgcgcacacacacacacattcacacacacttttttttttaaatctcgagtggtctgacctgatgctagcagattttgccttcaaatcattccatctttggttcatgtcatccagtcgatgctgaagcattgttgcttcctcagaattccccagagctttcaccatcttctgccggtttccatcgatgcttttaaatatgtcattgtgggcatcaatttctgcctggatgtcctaaatagaaaagcaaagagatgatgcaaatgctaaaggtcacttggggcacgttgcaggatctttacatgaacagttacttttggatgtgcagaagaactgtttttaatcaaaagactttattttaccatcagtaatgtaaaacaaaaccaagtattcccacagttccatcattgaaaataatagtctttaaatctctaatacatcaattcccagtgtcctaaaagcagaatttataacattctacattcatgcaccatcctgtttgatgttagtattttagagggagtgggcattttttaaatttttattactattgtaagtcactacttactctccctctgcctgtcattttaatctcatacaatttattctaaaacctttgaagaatattcacatatgtttagcttcactaagaaataataaaggaaaaataatttttcttctattaaataggaatgtgaaagttaatactgaaattacttgcagaatgtacggaaaaacaaacttgttacattatctatcctaagaacttgttacagtatctatcctaaaaacatgttatagtatctatcctaagaacttgttacagtatctatcctaagaacttgttacagtatctatcctaagaacttgttacagtatctatcctaaaaacatgttatagtatctattcaaagaacaggatgcagcctgagtttcctttttgggaccccagctttaaagggtgcaggtataaccacaaaatatagctacttgaatcaaaatctgaagcatcattgagtataacctacatacgtatagatttgtatatgaaacttagaagactacttttgcagtgctgttgatctatatcattaccatatttctcaagagactcaatgatagaatcaacaaggcctctctttgctttccattgccaagggaacttggccttatattctctgcacagattcttaagaacaatgggccaaaaattcacaacacaacctcaagcccaggactaaaggggtcatgcagtgttttggagatgccagtaccatgagatgaccaccaagagcagcagcagcagtggagtacaggcacctagaggacgacgcctgtgctacaaagggcatggctggaaaagtgacccaagcccttggaggagcccagaagatcgtgagttggatcccagacattggatggttggagattgatttttgcttttgattgtgactgtgccctgatattttccctcttgaaggaagaaactattttagtggagcccacagttaagagacttttaattgtaaaaagactttggatttaaaagagatggatattataaagagattgaaattttaagaatatgtaaagagtgtgggacttttaaagttattctcacattagacctggttcctgctacccttcagatccacgagaccagaaagacggatgtacaacaggatatagaaatgctatggtccacaagagcactgcctaacttcatacgtttggacactgcagatgtgaagcaaatttctcctcacaatcatggcaggtgatatgtttcccaattcagcaaagacagtaaagatgtttggccctgaaggcactgagagagaactgcagtgatgtcccagttggaataaagcctgcaagatgtgagaaacccttccatatgagagcaacatcaacagttaggaagaaacgccaacaatcagaacatgaacaaagaaaaagagatcaccacacattattttgttttatttgccttttggtgacatattcttccaaaatcacccagaattgaaaacaaacacacaaacaaaaaaataaaattaaaaaaaaaaaaaagaaaattgtattatgtttcttctgcatctttcacagcttctgttatacaaaataagtctaacataaaagaccaatgtcataaacaaatactcatacatcttgactggttgacaagtaagccacagtagtgacaaaggaagcaggtgatggattgaacagcaatggggtaaatgtttaagttcaatttcctcacttaaaagtttggatatgaaaaacgtgaaatcatttagaagccggtgctgtaaagtcctatcaacgctctcactggaaactcagaattaaatgaagttaatgaatcatgctccttgatagatagctgtgcaatgatgcgaagcttttaaaatcaagatgccagcacggagggctttgagggcaagaccctcaagcagcactaaatgctaaaataaatcaaagttccataaaggaagtgttccttttgttggccatccaggaagatgtagttctattaatgcttacctctgtcacccagcaagccctgcagaaggttaaatagcactaaacagttactgataattagcaagggactgtaatccatctagaagcacaaagcaattctcttccaagctcttaacataaaccagtcatgtgcacactggagcaagtagttgaactaataccttgaaaacaaggctggtaaatgtcctaaggatgcatgtagggggtgtaagcacaatggggagggttaagaaagaagaagggctggaaaagaaggccactacttttcctcttactgaaacaccatcagtagcatgagatgcaaaccccatcacagctctccaaaacagggcttccagagctaagtaagatttgctgatttgctgattagcagtagtgtttctgtgaatagctctcactatgtaggtccaataaatggcacaaagaaaggaatacattaattctgtattgtacttactttatatttgatatcttaatagcagatctgcctcatttggtcattcttttaatgaagatataaataaagatatcacagaaatacaaatacacacacaatttgtttgtgttgttgttatgtttttgcttttgagtgagtatttcactatgtatcctagcctgatcctcccatggactatttcaagtgttagatttacagatataggccactgtgccctgatatactctgttccctatgtcttactaacactactaatgtaacttggaaggtaaaaatgtttctttagatttacccaaacagaactgtatgaacattctaatagggcataataccatcaagccaacttcaacagctaaatccctgctagattccatgcattctctttgagactaattgactcaactttattttttgcgtggcttatttctctaaccctatatggctatagcaatgtttcctctggaggagtgttgacccctgtcctgaaggtggagaggggaaatgagcaattattccattagcctgtcccaaacttaggctaaatgaacacagtaacccgtgggatgaaaaataaatccggtgtgcctttaaaaagccatgttggatccaggagatagggaagatggactgaaagagatgctcaaggagctttgtattttaaagaggagtttcataacttgaaaaaaatccagatatttttccaaataaaaataaatagttaatataatcaaatgtcaagtcaaaagtatgttttcagcatttgaaacttgtaagaagttactcaattatttattgatttcagttaccctattaattgtgctaaatactgtatttccttccaataacttgtcttgaaattttgagtcaagctgtgagtcctattttgatcaacattagaatgccattctgactgtaaagctgatagtattgacggttacttttacaaattaagaaatcagagcaattaatgctcttctcccactgtttgtgatgtaaatatatgtaagataatggagtagaaaaacttttgtcttggtttgctttgtgttgctttgataccacactgagtaaaaccaagtggggcaggaaaggatttatttcatgttacaactcctaggtcacagtctatcactagggaggtcaggacagaatcctggaggtaggaactgaagcagagaccactgagaaatgctgcttactgccttgttcctcctggtttgcttggctaactttcttattcagcataaggatggtgctgcccacagtgggctgtgccctcctacatcaataagcaattaagaaagatgatatcccacagataagctcacaggacaatctgatggaggaaactcctcaactgagagtcgcaggaacatctgtctacacttatatcaaagagacaaaacctatgacaagtctatttactaatttacaatttactaagtttaagatcaccatttactacaatttcaaggtgatttcaacaagccagtttccaataaactataaactgctttttaaatgccaacatgtaaacactgctgtaaacagaactatcttctaccaccaaaaaaaaaaaaaaaaaattatttcaagcttttaactctgaacgtctaaaccatatagttttaagccacactaaatcacactacagtgactttcctttcaaagcacacactacataagcacagactatctgcatcacaagtttctaggaacactcccttaacctttcaagtggccaatataatgttttaactcaactcctctatccagcattgtgatcaaacttaagtctgacctcacaccaatggactgttgtccttcacactaatcaaacattcaaagctacaatcctggggtaagcttctcttcaaatcccaatcagtgttgctgctgtgctctgtcaatgaagatcctagtgagtttctccctccacccaaatccacccatgctgcgcaggagctcgcaaaccggaacacaacctcagtttctccttaagcttaaactaggttttgaaatcacagatataatgcaatttctccagaggagactttataaaaccagtttctactgttactatacttgctattggctgagtgtgagggctcattcctgcaactgcccagcacttgggaggttgaggcaggaggatcaccaagaacttgattacaaactgatcaacacaatgaccaactctagaataccccatctcaaaagtaagctgaattaaaacaaaactcagttaagctaaaagaaactggacaaaataagcctgtttgaaagaaagtggttcctagaggcacatcaggagggtcactattaggaggtgtggccttgttagagtagctgtggtttggttggtagaggttcatcactagggtatgagctttgagctctcagatgttcaagtctgctgcctgtgagttgaggatgtagaattctcagcttcttctccagcaccatgtctgcctatatgacaccgtgcttccccaggcatgatgataatggactaaacctccaacagtaagccagcaccaatgaaatgttttcctttataaaatttgccttggttatggcatgtgtctcctcgcataaaacaagcaaaaaacaacaacaacaaaaacccacccaactaagacaataggataaactgcacacttatcatgtaaatcttctcgcttaaggtctatatcctaccactacaatagcccaatgaaggaaagagtgggccccacgtggttgtctcccatccctacattcaaccttgataactggtacttcagaaatattccctaaacagtaaatgaaggaatttactgtctcttccaggatctacccacatttaaattaaatatttaatttgaattaaatatttaattggagggttggaggtatagctcagaggttataacagttttaatgtgaaacgtcccccatagacttatgtatttaaaatttactggagttgtttttgaaatgttatgaagactgtaggagagagggtctagctggaggatgtggttgccaagtggcaggcaggcttgaatattataccctggccccacttctctccaatccagtttttctcctgttgtacctgcacatctatgagcaaaccatcctaattgccaccagtgggaacaaaaccaccatggcagccatattttctccaacatgatagaccatcacctatgaaccatggctcacttctcttctagcttttaaaatatcagactcatgcttgataaagggggtaaatgccatagagatgcattacatagtcagtgactatattgtcactatgaagagtctctttctttaaagactcaccaagtgaacactgccatccagatacatggtaaggatccctcaaaggagaacacaaccgaccatattctatcatatgtttcaaactgtgataggagattttgtatgtctaaagagcaatggaatgataaatgtttcagatgatggatggcttaaagagcctgagttaatcatgacataatatataaatgtaacaacattgtcacatgttaccccataaagatgtatgattatcatctgtcgattaaaaacaaaaacagaaccccttgggatgaccattatcattaatcatctagtagcagggctataaaaaaattaataaaagcgacagtcatttaaaatgtcactgagctagagctgcccattactcaagtctctgtaggactaagcaacagacacaaaaccagtacacaatacaagaggctctgctaagacagtacagcactaacgctgttatgctttcgttaggaaagtttgctcaagaaaaacgctggtgaattaaaatgagtggaaccatgaaactaagccagaggctttgacaggggttccctggtgagtcatctctttgtctacaaacttgagcttgctgagaagtcactctcaggttcatgggcatagctgcatgtggcttaaggatactgagagacctccttattggcggatccatcacacggtgaggtccttatcctctagtaagaaggtcctcctcttaggagggaatggttccctgagcttggatgagcatctctgaaagcttcctgcctcttggacccccaaggactcataacatggtggtttgaagagacacgagtcctagttgcaatctgcccaggagtagatattcattcatatgatagatgttcagatatgtgtgaaaagagcaaagttttcactagtttccttaaaataatgtggctttctcttcatctccacagtctggtgccttaaaggcgggcagaaggtttgctttcaccccatccaatgatcttagatatctaacaagtcaatctctcagtatcagtcagcactgggtaacctgccaagcacggacctcaattaccaaacatatcaaatctgcatctactatcccaagatggactcttagttttcttcaagccagaaatggctttaaaaataaagcaaaattgacatttggttgtgataacttaccatctgattgaacaattaaactgctgttatgaaaatggtggcatgtctgaggcaaggaggaggaggaggggaggaggagaaggaggaagaaaaactaagagaactgaaagtaaagggagtcccctagtgcacatagtaggtcagctcctgtattccatggaataaagggagtctaccactgcacatagcaggtcagcttctacagtctttggaataaagcaagaccacaaatgaacatggtagcttctgcatgccacgggaaaagggagttgagtgtactgttgcaagtggcagtcagcaccccacgtggctttccaattacaaatagttcaaatgtccccagaaatggcagcgttgctttctgggttagagaaagggaagtagctgaatttgagaggtgtgaagtagtgaaacctttccagaattccggttttcctggcaatgacttaatggagcataaactgaatatatgagacagctttgttagaatatacaaagggattttttttaaggtgcgagttggaaaaatacacactggtgggtgatggcttcctaccagtgaaacacatataagtgttaccttcatccaggctttgaaaacatgcccaccacaagaatgagcatacataaagttcatattcaatggaagcagggtggtctcttggaaatctatccttggagaaaattttcaaatcaagccttttacatatataagcctttcttttgctgtcaagtcaactcctaaagtaaaaacaagattaagtcatgttcagataccaaggcctgggaattaaaggagaaagcataccaatgtcagaacatctgactctacccacaagatggcccagaggcctaagaaactaggttgctcacctcagctatctgacctaagcctgaagacaaatagcagcaattagaattcaaaagtccagctattgcaccatgattattggaggggggtgaggatgacaagcatgaattattattcctgtcacatatgctctatacctttttatgtgaatgagacaaatctgcagaaaacaagctaacagacctctttacggccataaagtttgtcacctgctgttcgcagctgccacaagagcgatattctttctttgtcatgccctttgtaagtgagcaagccaactgtgaactggctcttgctctccagaattcagacccttaccaactatgaaagcaacaggtctgtcccatgttacaagcaaattctccactactcaagttgggatgtgagataggaagcactctatgaggagggactaactttttgctgttgttatacatacttctgataggctgcttccatcactgggaagccaggatggctgcaattgttcaggaaaagcctaccacctttttaaagggtatcactttttacatcttttcctctggcagttgcaattcctaagaaaaagtctattattctttgaatgattcaagatgcttatatttgtactttcaggaatggtgggaaaaaccagaacacatttaacagttgataaacagttcatctgtgcctatagggataaaggaccctgcctctttcttttctttctctccccactcctttaagtagcagaaactggaacaagactggcactcaggaagccactaactggctcggggaggtttctgctttgtttaattcaaaaagtgaggaggtagcctttttacaggctatgctccaccctggggtgtgccaagagccttgggggaagagagggtgccaagtgcaaagttagtaatccaagccttaaaccttatccacttttaaaacaagagattctgaaggaaatgccagacagcagatgtgccatcgttaccaagggccagcttctggggctcagagctgaatcctcagccggggctgcaagggcaggctcagccgcagcagcctgagagataaacaaacctgaggggcatggaaaacagaatacacgcttgatgaagtcagcctttggcacccaaacccagtgtttgttgctggatttggctgttgttttgttttctccccccaaataaattgcaattaagttaccagctgacttgactctaagccattccttctgatgtggaacgttaaagctgacaagcatgagaactcttcctgaccaagggaaagaactatgttccctaaaacacaatctcaaagaagctattacattaaaattaaaaatgaaaatgctttagaagttacagtaaacaatggaggaggaggagaaggagaagaaggaggaggaggaggaggaggaggaggaggaggaggagaagaagaagaagaagaagaagaagaagaagaagaagaagaagaagaagaagaagaagaagaagaagaagaagaagaagaagaagaagaagaagaaagaggagagcacaaacagaagaagaaacagaactaaaacagaagtgcgtccgtgaagttttctttctgcataccttttcaaattttgtcaacaattctcgtaagctgaagttcagaccaatcatcgtccgggagcccttgaagcctacatcttcctggcaaacttccttcagacaacaacgtccaacttttaaaacccgtatcttcactagctatactttcaactccttcgtaaaatccttttcaatccttgcccttgagcggtggcccatgagcatcagcagcttgcgctgggacattttagccaccccaccttgggtccgtttcctcacggacttcggagctcggcaggcagagacctgcttctgtgttttcttgtagctgtgttccacgaggctggcatggtctccttttttgccctgggaagcccaggatctctttctgccggcctccctaaagacctgcaggccaccactgttctcttcagagcccaggcttagagtttggtctcaattacacacagcagaaaggaaagggggaaaaagctatagcctggaaacttgcaagagagaagggagggaaaaaaagccaagcattaccaacttcctccattcaggctgccttcaaaaagaaaaaaggaaaagacaggaaaaaaaaaaaaagtctgagtcaagagccaattttaaaacagcagggcttatgtagagttccagtaagcaggagtgtgctcctagctgaagacgccccaaaaaacccgagacacgagaccaccagcttccattctcccagacagcagaagcacagttgctatggtgaccaccaagctagtttcactccgcttgctcacttcagcacagcctaaggtacgctgtcagtgccgcggagttaaaacttttaaaagttgctttgctccggtccggaaggaaaggtcttgcaacaaatctcaggatgccctcctcaggacagggtgtgcagtgcccagagggagctttgcagcagctcccgcgactcccagacctgatctgacagcacccggactctctcctaggcccctgtttattattttaatcagcatcctccctctcccgccacccctcacccagcaggactgaagcttcctcccacttcctggaggccgccctgccccaaacttcagtacagtatcctttacattgtctcagtcctgaatagaccccaggagccatagtccccttgggagcccacccaggaaaagaaaggggagtgggtgcgccacacaccacatgccacaaaaggaaacaagcttcattaattccattattagtgcaaagaaaataaaacgggctgcaaaggcaaaatgatgagggaaatagttcttaaagttctttgatcttattaaaaagtcgcccggtctgtttgcataaggagaatttgatacggacaaaatgaaagaaaatattccaattttgacaaccaatgacaccgaacttattttccacttcaggtgggatgactttggagggggaagttcagaacaaactacacctttgtactgatcagtcatcctaccatttcacagggtgttttgtcttgttttgttttgttttacatagctatttagcatagccataaaaggtaagaacggtggggctgtccataggaagcatctttctctagtcacggggaggatttttaccataaacagtgttttaatggggacacatcacaaagggtcttaatgcaactgaatctacttttttgcatcaggtcaacagcaaaggtggaagagcacgctgaaattagagttttctacacaattacctgagtatcaaagttgtgagcatccatttaaacctatacaaaaagatcttcacatgtaagagttcaaatctaccaggaatccatcactattacaggtgtctgatctacaaacctgttctctttccacttcattcccaacctattttcacatcagtatttccatagcatgtgttttacatatgtccatttatacaaaatttaacaagcttttaaaatattttcattacttatttatagaaatctatatattcccctggggggcaaaaatggctatgtaggatttccaaagcaccacattttgatggataaatagaaactctcatttttctccaaccattattcagaaaatatagaggaaaagcagtctgcaatgtggctcaaaacagactggacaagactggagtactgacattcacacatccaggggactctttctcagcccttgctttagccaaggtgacccagtctgccagggctcaggccacatgctgagatctttaaacagcaacaaataaactttttacataaattcaagacaaaagaaaccaccaccacagctaccaccaccaccaaccaccacccagaaaataaataaataaataagaggaagaaaaagagcaaactctctcagctgggcaaacttccagctaccacccagagtgctacaggactgtgagctgacatgtgcaaacaggccgcacatatctaaagagtgaactgaaaagactctaccaagcaacagacaataggaagcacaagaaggctcttacccttagagggtttttacaccaagctaaggagcacaatgctattagaagtgcctgagatatcctgtttccttccctaagaataaaggtcaaggcataataacagcatccttctttagggcagatctcctccagagaagacacatttctgagtgcggtaaatgtccatattctgtacaggataaggaaaaagaaggaggggaccagcagctttgcagtagaacataccaaagctgctgcccgttctcagaattgccaccctctgccggcaaagaagagagggcactgagatagaattttcttcacaccgttgtcaaaactgtcaaagatgggggtcagcctagctatgatggtgcagtaaacaaaggtgaccagcatagactagggggtctatattcaaaataaaccactggaaaggtggtggagtcgttcagaagacatctttttttttttaagatttatttatttattatatgtaagtgccctgtagctgtcttcagacactctagaagagggtgccagatctcgttactgatggttgtgagccaccatgcagttgttgggatttgaactcaggaccttcagaagagcagtcggtgctcttaactgctgagccatctctccagtcccctcagaagacatctttacactcttgtttttaagatttttattttttgttatacatgtatgtatgggtatgggtatgtgcatgagagtgccggtacctgcaaaggcgagaagaaacacactggatctgctgggactggaattacaagaggctgcaagccacctgacctggatgggaactgaaccccaaggcctgggagaactgtatgaacacttaagggccaggccacctctccagtcccaatctccgtagtcttcactttaattacatactgtcaccacactaaatctgtattgttatgttttcttattcatttatctgttctagatgatcaaactcagggccttatctacattatgaaagtgatcggtcattcagctgcagctccagcatgtaaattaagagcttggaaatgaggcattaaaagtaagacttcgaaaatctaaatgtagtgaactgccttctatctattggtgatgacatttcctcagtttaaattcagttcatgaattgtgatatgtactcccccttttttgtacagcaagcttttcttgatacattatcttctgtaaatcctataagtcctagagaagcctccagtgaaattaaaaagccaccagagagacaacaaattggatggtggcatttgaagtagttgacattttctccgtttaaaccagtgtgcaaataaaaggctcactaatcctcaggagtgcgaaggcatgccaagctgctggtctctacgatagatcaacctaagcaacccagaatctttagctaagtaagacatgtttcaaattcaagcatacagttccatgagaaagccaaggaaggccccggaaccatggagaagcacaggaaaatccaaccaataaaatccaaatccaaattacctaatgaaaaccacattccagtgtcaaaatgaaaaggcctgtatggcttccccatgaacttccaaagagcaggctgataaagtaatattctacatttaaaaactgtgttgcgtatagcttgctaaaagataacttacttgtaattttataaaagcagcaagagattatctagggttaacataaagagtagctttggggaactgatattttctcctacagtgaacttaagcgttccttccctctaaataccaagctcacatgtcttaaaactgtaaaaataaagtgttttttttttctgcataaaacctaacagatttctcctgatgtggccaatacaaagaaccctgagaaaagaaagagattttaggagcctgtaaagcaaagcatacgggggtcaataggtggccacagataaatggcggctggccgattcacaaaatgaacagcttcaggcatgggcaagaacattgtgcctgctgtaagcccattctgactcaagaaaagacccttgtttatttcttgtgaagcaaatcacctcatttctcctcttcataacctgctaacttggaggtcagaactaaaataaaataaagtataaaataaaataaaatcgctccaagcccctaatcccgaggagagatttcttctcattgtcgcctaccacggtggttccattaggagacgctaccccatccattacagcgttccagttcacatgggccggcagtgcagtctgtcagctgcaagctatttaaggtaatatacagccccaaagggcagaaagttcaaccaggagatggaggcctgagccccctgatgaaaggggtgaaacctcctttcatcccaggaagccggggcataagactgtgcacaaggtcttattttataatgttcacctttaataaatgccacatctattttgataatgataagggtgggtgttgggaaataaaaaaaaaaaacaccattcataagaaaaaaaagttactactttagatgtttccatagttcatggccagaaggttttaacagttatggtaaaagcacaaagagctttttttcttccctgggagagtggggaaggggttcaggggcaggcccgccagctgatccacttctgaattagccagccaggtgcaggggtcagctttccacggccctctaaatagttaaggattcagagagcactatagtaggttattcagaaaataataccgagacaagttactgtccccaaaatatatccttcccgaaaacaatgcagcatcagacaagggtaaaatgctcttaacagccaagcctcagtgtaagcgcataggacagatgtggccacgtgacatggagctttaagaagaaggctctggaaggtttggcagctttgtgggaatgcccaggttaaagaaatcaaagtctgtacactttccacaggaagcacaaatacagcgcccctaaagacagagacagtaattttctttgtttatctctctctactgcacccaccctctgattgacatgctgtgtctttgcctgactcctttctatgggtgttctgcgcattgagctctacactggttctttgtttcttctccacactcttcttctaccaaacacagtcagtcaacccagaccatgacacagaaaattgtgggctgtttagagttctgcctatgcctggcagaactagggtaaccactccatttcctgaagattactagaaactgcccagtctggggacagaggataattttaaatgcttatgacctttgacacagaaattctacccacaggaattcacaataagctccatttggacaggaaacatgtaaagaaatgatggcagattcacgcattaaggaacacagaaaagtggataggctggcaaataaatagtgcacagagagaaataagccatatgtgtatcttcaaaggggaggaggatgataaaagctttatttagtaataatctatggtaaacggaacaatcaaatgatagaaataatggctatcactcagaaaaaatgtagaaatggacatggagagataaaatttatcttaaatctccttgatttaaattgaaaaacatttttttacctgatcatgtaatattttttttcacacaaaatgaagtccactagaacactcccaagtaaaccatgttcatccttttaggtcgctctccataccacaatggcagcatcattttacttgacagttaataacacagcacacaatctttcccccccccctccctgaaagtctcagaagttttgaagtgccagatggtccaccattctaacaaatcagccctcaataaaaactggcctcagcagaacagggtttacaaatggcaaacttttctaaaggccacaaggacaaagcccttttgttctgaaaagttactctgtaaccagcaacacctgcttatttaaatgataactgtgtctaaataggcaactatatcattctagcttctctctcttcaaagtgatctttacttctgttatcatcagatacatgatactgtatgctatacattgtgtgtgtgtgtgtgtgtgtgtgtgtgtgtggtggggatggggagggggttaccccccaggaaaccatcacttgacctctccagaggggctcagtagtcccaccttgtttgcaaagaaggaagacgcaaggtttgccactaggacaaccaccacccctgccagacaggttacctgaaaacccatttatgatcaaagttatcttaggaaaaaaggaaaatatcatgaaccctgcttgtcttgatgtgctaagattactattaaaaaagcaaaagtactgaaagaaatatcccgtgacatagtcagcagccacctgctgctgtacagagagggtcgtacatgtgtcattcctgcctctgcgtaagaaactgtcagggcaaggggtactgagagcgatgttcacatcaggaatctgactgagctcatgtttcagctttataattagatgatggcgtaaaataatccgttaaaagcaacaccctgaatctagtggtcatcccactctcaatttaaaaacaaaaacaaaaacaaaaaacaaaaaacaaatttctgaaaggtcctgaaatacagctacttcgcaaaatcttttaagactcatataatgaatttgagatgtcactgtttgatttatagcgtaactttcacccctactgatcactagagttatctgtatgacctgttgagatacaaaccccaagtctggactaattgatccagtctactagcactcagtagactcactatacagtattaaggatgctacaagaactatataataccaaaaagcatgaaatcaatttagaagacatacatgcaatctaaaggtgactgtgagaattattaatttattgacaacaggtatgtcatcctctccaaactcatcagcccaacccccaaagccaccagctttcctctagccatggtgtcgattctttcttgctcagctaactgtgagcaccagactctccacacacaggacaacaggttaggatggttaagaccatcagtgtgtcgggcagcggctctcaaccttcctaatgctgagaccctttaacatagtttgtcatgttgtgttgaccctccaaccgtaaaattattttcattgctacttcagaacgggaattttgcaactattatgaatagtaatgtaactatctgtgttcctggggattttaggcaactcatgtgaaaggagttgcgacccacaggttgagaaccactggcttagaagataactttcttattacaaatcataggggcacagtcttctattaggacagttggaaaagtaaccagaaactttcgtaattatgagatgctaaactaaattcatatttgaattatattcctcatctgtttattttaccccagctcttagacatagtatttctcatgagaccaataaaaaaaagtataatattcagccatttcatctcagacactaatctggttttacaagcctggagcctttgcctgaatcttgatttttgtgtgaagagtgtccctgtgacacttaagcaaacacttttatcatgaaggctgttcagtggggccatatataacttcttactaatggcaacaaaaacatcatttaaagtagaacagatgtagttgttacaggataaccaagacgttcctataatcccatgggacacaaggagtagctacattgaatgtttcaggggccagggctctcgtaaattttcatgaatttttaagatagtatagaaacttattttgagaagcctagtatgtggtatttttaatatctctgcacatttttatcagagtgtttacaacttggtaggagtgactattattagcaacaaaattttaaaaataaatacatgctacataaacatttattactgattacaaattattaaaatgcaatattaactaataaaatatttatcacagcagtgaagcgattcctaatatagcaacacactgtttctctgttgatgtttttcctggggagattctaacactctctcacacataggaaacacaagcaagggactggctgctacggagcagaagctactgatcatacacactgttgctatggtatcgaaaagtaaattctaatactttttttttcttggtttttcaagacaaggtttctctgtatagccctggctgtcctggagatcactctgtagaccaggctggcctcgaactcagaagtccgcctgcctctgcctcccgagtgctgggattaaaggtgtgcaccaccacgcccggcaaattctaatactttaaaacaacttgaaatggtcaagaattacacctccattcaaacaagtatcaaaatatctttaaattttaaagatttaattatataaatgtgtgtgtgtgtgcgtgtgtgtatatgagtgtgtatttgtgcacatgagtgcaggtgtcctgagggtcaggagtgcagactcccgtggaactggagctacaggcagttctgaggcacttggcaatagtgctgggacatgaacttgggtcctgtgcatgactcatctctgtgcatctcagaacattaatctctgcgtcatctcttcagcccctctcctaatgacttacaacatcatttgattcagatctctctcacatcccaacaggatcactttataccatcattccttttgtactttctagactcaaattattttccatgccctggctgtcatgataaactaagctgaattctccttaaaatctactttaatgaaaaagtgtttcccaaaatcctctagttccttgactatgaaactagtacgtgactgatgaacataaatgaagcatgacattcttaaaaacatatacaaaatacaatttgctggcaaactgtgtttggtccttgaacaacaaaatagcaattaaaagtagaaagataaggaaaagagggaagaatagagaggaaggggagaaagaaggcagaggaggaagagggtgagaacagcaaagctgatctttactgacagcattaaaattcaactatggtttttattattatgccagctctccaacttgacagttctccatatccaaacctaacattattgaaactgggcagtgtgctgtccaggaggtcttgctgcgataagaaaacagtctatattattgacattcccacagcaagaactagagccactaatcccttgaaaggtggctgctacgatggaggaactcagcatttgcttaatttaaacttacaatgttggaaagacacatacggctagtgaatctgaaactaggaaatgtagcctgggctgaagctacagcttagtgatagagctcagtgatagagctcagtgatagagctcagtgacagaactcagtgatagagctcagtgatagagctcagtgatagagctcagtgatagagctcagtgacagagctcagtgacagaactcagtgacagagctcagtgatagagctcagtgacagagctcagtgacagaactcagtgatagagctcagtgatagagctcagtgacagagctcagtaatagagctcagtgatagagcccttgtctagtttgtacatgggatgtacagcacgctgcaaaagaggaagaaagaggtcagaattagcacttggttttggggttctgtaaagccggacactgtttccccacaatgctctcaatagtacagtcttcataactttcccaggaaggaaggaaggaaggaaggaaggaaggaaggaaggaaggaaggaaggaaggaaggaattaattctacttttgctccactggcggattctcttctctttcatcccaccttcccaatgttttctatccattcaatgtttatccagttgggaggtcaagttcaatacccacactctgcacaaagcctcaccctctgactttctctctgcagttgttcactggagtctgtcttctacactgtgctagtatcccatattgcttcacctgaagtctggttgttgccagcttattttttgctttaactttctctctaaacccaagctaaggcatgttccttgaaagaagaaaaaaaaaagttatatcaatctgtccatcaagtgagctgttgaatgctaaacaaacaacaaagtatgcttttttttccaggagaaaaggaattagaatattaaaatcacaaacacacacacacacacacacacacacacacacgattctatagttgaagaggaagtcatggttttggttgactcaaccatttataagattacaaattaataaactaattcaagcctcaaacagaaaatcctagaggttagcattacattttcaagagggaactcaagtgtactatggtttttccaatcttactccccaattctacgagagagagagagagagagagagagagagagagagagagagagagattgattcccttcctgctaggaaccattcaaacttgatgttatattggagaaacataactgactgtattttttttaaagtcatacttcaggctttagaaggaagtggtgccccttcgtgaaaggaggtagaagatttgtcactgggctgacagctgaggaaatactgcaaagttaaattttaacattaagagaaaaagagtttatcgcaaaaccgtgcatgtttcccattgggggctctccatcctgtctccggtcaactttctaaccagatgagggctgactctaattgaaaaataatgagtgggttggtaggtttccctgacataaatggaaggttcgggaagggctggaggtgaggagctgtacaaatgaagtggacaagggcaacaaaaatgagttgataccaacatggcaaatctcaaggcaacactgtgactatgacctcagagaagagaaaaactgtctatgttctaatcatttacctatgaagttagtattcaataatactgcaaactgtggagagctgtgctgagctacagtgaaagagcagagggaagcagtaggccagagtgtgctacgtagtaagtactaattgccacaaacaaacagtatggtctatggaaattcaatggctacaatatataccatctcttctttaggcagcttccatagcccaagtatggttctgggagatattatgttctgagttatgaaagtatatgaaaaacgactcactccaagatctcataaataacaaacatattcacaagtcaaggtaatggctactataaattccataagctttaagaatccagttaaatacatgtacttaaaacctacttaaattgggcatggtggctcagaacactgtgggtgggcttacaccatcgaagaaaagaagctgagaaagtctgagaaagcaagccagcaagtagctctctccccttgaaccctgcttcaattcctaattccagatgtctgccctaaaattccttcccacctaggattcccaaggactggaccagggaagtgtaaggtgacctagccacaccccatctcatccacaagttcctgttgatcaacttgatgtcttctcacaacagagatgcaaactggaatagccatcttgcttattttttcaacactggcgatggtgagtatttcacagactgtatcatgactcataacatggggacacacagtcaccatttacatataactattaggaacaggtctgtgcttgtttttaaaatgttgacaactgtttaatgtgactctcagcactcgaaggaaattgtctacttaaacgtaatcttcgggggaactctttgtcatgtagaagatcttttgtcaaattaaaaatcaccctctggtacatttgttttgctggtttgaatctttatacgtgagaagttttctttataagaaaacataatacttttggagtcttattatgacaggggataaaggagcactgtgagagtcgagaggagtctcaagggagagcaggaggcttgtatctggttagtatggtgtattttcgagcagcttcctttaaaaaaaaatccctttaaaaaaaaaagaatagaaaaactgtaattcctctgacttaggattctaaatacttccctgttcaaatagcagatagccaaagaaaatcaggaacatctcagtgagctgagacacaaaaccagaagaaaattaaccatcacatgatttaaaatattttaaattaaactatccggggccctaggcacaaggaagacagatccatcacactcggagggaacatgtcacttgtgtgggttctcaagccaaaaaagggaaggtagagcgctgcccataccctggacagctctcagggagcctgctgcccaccactgaactccccagctcctcagcatcctgagaccaccagtgcacagtggactgcctgggcaggaacccacgcaccacgcacgggaatcaacaaaggcagaaaagctgggaaggaacaaagtagcacggcgctcacattgaagtctctcattgagcggtggaggtacatgtcagacaaagttgggtagaaggtgaaatagaacaggagacttaaggcctcattactctgtacctaatgaggaaaaccagaatttgttcagtgacccatgctggagataaatacagggtttgcaagtacagaaaatgagaaaaatgaacccctggagtgtgtgctaaacaacgttctcaatacagatgtgttgatttaatgtgatgggccactgaatcccattttgacacaaatttctttaaagagttgttggttttctctctattgccttcgctaatagccaacgttactgtctgccattgccaggagcaagcctaatccctcaccaacgtggcttttcctcccttgcttttgtttgtttgtttgtttgtttgtttgaagggggtgttgctgggttgaactttggccatctatactggaccagctaatcaataacccttttttaaaatttttatttattatatttaagtacactagctgtcttcagacaccagaagagagaatcaggccttgttacagatggttgtgagccaccatgtggttgctgggatttgaactcaggacctccagaagagcagtcagtgctcttaaccactgagccatctctccagccccccaataacacttataaacagcatttggtaatgtggatcatatttccactattgatctaaatgtttctgttttttctattctcttccagaaaagcccaaggagaacaaagaaataggggtctgtgagaaagctcagtgggcaaaggtacttgacacccacgggggagttcaatctctggaatacacagattggcagaatgaaagatcctactttacaatttatactctgacatgcatactgtggtactcatacccacccacacatgcacaatgatggtgatggtgatgatggtggtggtgacgatgaggatgatgataacaacaatttttaaaatcaaagaaatggactttgaagccaatacaaaaacacattcaatccaaagtaatttataactaagttcaatgcaatttcttttttttggggggtgggggggttgttttttgtttttcggtttttttttttttttttttttttgagacagggttcctttgtgtagccctggctgtcctggaactcactttgtagaccaggctggcctcgaactcagaaatccacctgcctctgcctctgcctcccaagtgctgggattaaaggcgtgcgccaccaagcctgactcaatgcaatttctaggactatatttttttaaatgtgattccattttagtaaatatgtaaaaaatatggattgtagttaggaccgacaaaaataattttatagcagcttcaaaaattaaaattccttgggaacaggaatccaaatgaatcactggcatggacatattcccagagttttagaaaattctgtcagctggatttaaattcattatcactacttaatgaggataaagtcaacttccctggtaagttaagaattaggaaatacagcttcatagaaaaagtaaaaactgtaaaaacacactgccaggttaattatatgagttaaccatctaagaataaataaccaaaaataaaaataggttacatttcgtagttgtcatgattccttgggttgtgattaaatgatggatgatttgcaaacctaagtaaggccacgttatcatttgcctatttgttttcatcacaaaggttgccctgctctggcccttcctccctgcttcttcccagctccactcccccccccacccctttctactctgagaaggcagctcccctctcatctccccaccttggtgcatcaagtcacagcaggactaggtgcatcctctcccactgaggccagacaaggcagccctatactacataagtgtctggggcttgggccagcctgcgtatgctctttggttggtggttcagtgtctgggagcccccaggggtccaggttagttgtcactgttggttttcctgtggaaatgccatccccttgacgcttgtccatccttccttttactgttttacaggagtccctgacctctatccaatgtttgtctgtgagtgtctgtctcagtcagctgctgggtagaacctctcagagggctgctatgctaggctcctgtctctgccggctgttccaggcagaccggcttcttaattcttaatcagtgaaatgagaccatgcacaccagacacttgttttgccattccaaaactcccgtttagatgagttttgaacccacaggtgacactattttgcacctctgatcatatgaccataacgacagctattggaaccagttgaagggagcatccaatatgaattttagaattgcttcccaaaaggcatgagatggtgagaattaggaagttttatgagtgcttggttttctatatggttacacaggactttgctgttagcacacataggctgggttaaaccagtgtggacacacgcctttaggcatttgtatgtcactgctcctttgacacatctgacaaaatattatggtatccttttcaggatgataaaaatagccaactaatctacaaatatacccagttacaattgacagagactcatgatatagccagactatgatttttaagattgcatggaagaatgtaatagcacccaggctcaagctaatttagcaagattaatacaaaattttaataattcaatcatttacaaggaaaagagatggagagttacaaattctcatgagaatgatccagttgagcctaccctcagtgaagaacatgatacttattcccattcagtcataagcaatatttcatgttttggttttctgtatttgtagtctcctcaaaaatatgttcttatttctcccaacctgcaccctttctacttgctttatggtaaatcaaaatcagaacttcatttcccaaggccctccactgtcttctaataatgctaaatgggcagcattctcacaggtcagggactggattcaccatgccctttggaaactgaacaggttaattacacaggactcggtcagtgtaactgttggtgcttttgatgtttctttagaaatggattcaccatggaaccaggttggcttcaaacttgctatcctcctgtctcaccctctcaagaaatgccttgttccacacttccttttagtttaggttttttttttttttttttaactgcaatttacttctatgaatgaagcagttttccaggactatctcctatcatttttcctgaaacaatccaatcaggtgaaatgaacgggttctagggtctgtaagactccatagaaaaatgtaaaggctgtctgaacacccaaaggggatggggaataattcgattaggactcaagaccaaaaacaaaggcagattaaaataaagtattttagagcatttacacggctctgtcatagggataataactacacccagtaaaagataatacacggtaaccaagactgacatcttctccctcaagataaagaataactgcactttactctgaaggaaacaagtactgattagccggagacaaaactcccagggaccctgtgacagtttttctctttttcctaattaataggatatgaaaattggaagttatggaggctattttgagagaagagtggagtcgagggcagactagacattcaatctctcttagctgactgcagctacagtagatagttggaaaggagccatatgtgtgctgttcaaacttcctcacaatgtacccacttagccttggcaataaggggaagatgaacaagagattcacagcaaagaggacgatggagatgatgtcaggtgagcccaaagctgaaaggaaactgttggaagagctgaaatattaaccaagacaactcagggatgactacaaccagcgtatctctgtgaatccacggaacacattaacttcattcctgtaagatttcctggaccacggtcctgggtgcttgtatgagtaacataaagtttaaagaaagttgcccagaataagaagcctggcaggacgagacaacaatcaccgtaccaatcatcacagtgccttggaagatgagcctggagtatgttggatgtggagccagcctgggtgaggcacagggtgtcagtgccatgggtactaaaaccttgacctacagctgaactacatgtccatccctgccagagctttataacaaaatcaaattcgataacaagtacagagaccataacaaagaatatcaccatgggcccctaccacacacacacttggggttttgtttctaaaaaggaacattctatctacaatctcctctgagatgtcattaacttcaaataagtccaaggcagagacaaacaggctttgcctatcacagtacattaaattagagttaaatatagttgccaattttatattcatgtaaacacctgcattgcctcagtcaagaccactcagcaagaaaatgtctgtaaacctaaaagcacagcatcaaccaatcacaaattaatttccttattcatggagatattattcagctcatctgtgttttttttcctcaatagatgactattaaatttcctgattgtgtacgacaaacacagactctgaaagtcgcttgctatcacttcatatacaagcatgaatctataattactctagagttaggaaataattataatgaggtcactggttataacaagttggtgtcctgactgttaatttgcacataagtatcagttttattgttttattgactgaaatgcccccaatctcaatcccccaactcttcctttcacttaaatcactaacatgagatagttattctttgcataataatttctgtttttttttttaattaaaagcaaaaaagaaaccaaagattggcgataaaaactattccagctgcagttaactgaaaataacaaggatattttggatttttaaaacaacaaagatcacagttgagagcaaaattttcaaaatattttgatctactacataaatattaggatcatgttggcagactttcatacaatccccttaataataacagttgttaaaataagtatttatatagcaattttcagaagactagcctttgaacaaataaataaaactgactatatgcctcctacctagaatctgtgcattataggatttagtttataggatactaaaaccaaatatatgtttttctagcaattctttaaaaattattttaatattcttagcagagaaatggagatattttactgtgatgactattagagtatttatatattctttgtttttattttcattttatgtataagagtgttttccctgtatgtgcatttgtgtatcatatgtgtgcctagtgcccactgaggccagaaagcagcatccaatcctctgagactggagttgtgagtggccaggtggtgctaagaatcgaacccatgtctctggaagagcagcagtcagtgttcttaaccactgagccatctctcctgtgctgcatagcttcacaaatacttccaagctataggtaaaagtgcaaaggctaggaagctcttcagtatcattctaagggacaccctcgacacagcagggctggactggaatgtagcagtgctctaatcagatttttttattataatccaatcctacccataatatttttaagaagtactttctaccttctatattatcatcaatgtgatatgcaatcaagtctcagtctctgtacaccaaatgaaaaaatgtcttcttatcattagggtctgaaactcatcttgtctgtgatgtattttagcttcttctagtacaagacaaacatttccaaaagacaacccttctgctatttgaaattattaatagcttagtttctctttttctctatttaaatactttgctcataagccatttttaagtctcctctttctgtgagagagagagagagagagagagagtgtgtgtgtgtgtgtgtgtgtgtgagcacacacatgttctatatgggtatatgcgtgcagatgcaagtgcatgtgttcacacttatatatgtagaagacggaggtcaaacttgggtgttgctcctgggaaatatgaacctggtcttttgagtcagagacatgggatttgatgactaagctcagaggtcaggccagcagcagctccaagcacccgcttgtccttgcctttaatgtgctaagattacaaggctgctccatgacacctggcttttcacaatccagattacctattgctccagatcacattttccaaatcccaacgctttctgcattgttttaggtacatggtgaagcctctctcactcttttagcaagccccacacatagtaatctctattcccgtgtccaacatagtcttcagaattgcctacagacatcttccctacacagtttgctttgatttctttaaagctcagttaatgcttgtaagttctacattgaaagtctaatagcaatattggcagatggctctaatgctgcacttatcactgtgtttgcatagcttgagaattcaagaatactgaagaagaggaagaggagtaaggagaagggagaagaggtagaggaagaaggaggaagaggaggaaaaggaaaatgaagaggagggagaaggtgaaggaggaggaggagaaggaagaggaggaggagaaggaagaagaaagaaggaagaaggaagggagaaggggaagaagaagagaagaagaagaaggagaaggagaaggagaaggagaaggagaaggagaaggagaaggagaagcaagaacaacaataacaattgtgttcagtgataggtaaatgtctgcttgggttaactaggcaagattaaccaaacaagggaatccagtgagaggcatacttgggggttttacaggtctgacagatggaattatcaacttctatatcgaggaagcagtcagacataatggcttagagcagggagagagataaagaaacaactcatcacttattagatacacatgggccagggaaagcagaaagtgaagagacattttaggaaacacatctggaaagtctcaagcaaaagggaagaaagaagacagtgaaaaaaggaaagaaatggccaagtgtgccaatgcaatcctaagcacgtgatcggcccacagaggaggaaaaccgaggggaagatttctgtctagcacagtaaagagaagtgaactgaaaatccacaagagaaaactaacagctttctgacagatcctaaaaatatcaaggctatgcttgaagcagacgctggaataccatgtactatggccaatgcaaaagggcagtgtcgaggtaataggaaaagaagctgtttgaaggctggagagatggctcagtgcttaagagcagtgactgctcttccagaggtcccgagttcaattcccagcaaccacatggtggtttacaaccatctataatggaatctgatgctctcttctggtgtagacagtaacagtgtactcatataaacaataaataaataaaactttaaaaaaaaaagaagctgtttgagcggattgactgtaaaagacaacatgcatgaatgttacaaacactgtgtcctcatgggttcacaagaccctaacagttgtagaatttaagaacaatattagttcagactcctaaccctggacgcctatcactagagccactcaaaagcaccatgacagccagttcacttagctgccttctagaaggaccaccatcaaacagtaccaactcaatacattccattccctcattaaaggaaatttctaattaagtgcattgtaacatccaaagtcaacttcaaacatgaatggtagccaaagcgccattaagtaaactttgtatgctagagccgaagtctctgaaacaaagatgcagtatgtgctccagtgacccaccctggcaagacaggcctcggcgaaatggtttctctcactcgtaagcaaaaagtcaagtgatttcccacctgggaactcacatgtaaagaaagcatctagggtctacagataagcaattcttaaagtactacaattgatatttaccacattcaaagcacagcactgtagtctgaaagaatggcagtgggggtattttctatttcaatatcataccaaagaacaatccagtgtgattacacaagcaaggactgcaaattcataagcacttatcctaaagacataaaaggcactacccgtaagtacagtttccgtgatatagaaatatctaaaatgttccaactagataattattcttttctaataacactttctgaaaaatatcttttgcaagttggtaagttacatttaccctttggagtatttcagtcctaaatactcattaaaggggtaacttcttaagtactgctctgctctgtgatgtcccagatgctaaaattatataggcacagaacactgtccactgcatcaggtcaagcgcgcctcttctagctgcatgttcaatcctcctacacactgaaactgtttaaacaaagttcacacaaggaaaagaaactttcaagtattcttttttttaaagaaatagttaagaaaaggggagaaaattttaagaaagtcaaggcttcattcagcaggcaactacaatgagctcagggctcctagaaattttaaatgagattcctgactgccacagcaaacagaaaacgcagaaactagttaaatcattatgtaatgtcagttacaagcagagggacaggcgatgctataagcatattaatgtatggaacgacactagggataacacttagaacacatatggctataaatacatttaatgtattagcatgttctgggaggaatataggaactaacggttgctcagggattcggggctcggaatgtaaagcttcatctggggcaagaggcacctcctattacagcgttcctgggctatggtagtcatgtttttctttcgggtaactttcattattgtaaaacgtaaagtctaacaaaatgtatgatttataactctttacttgagaaatgttatttaaaaacacagaagaatttcctctaggttattatttaaagtgggccaacccaaagcacagccagtcctcagtacccatgacttctatattagtggatataaccagagatgaggaataactagaaaaccaaataaaaacaaaaataacccctaaatgaatcattccataaacaacgcaatatagaagacaatatcatctcagcaccaaagagctatattagattctgaacatgaaaatataataaacataaacatgtgggatttttaatgaatctgccagaaaagagctactgtgtaaaaccctgtcaatcttctctaaacttgaagagaggccacagaagaacgcaggcatggtattccataacatggtaaagaaacaggaggatacggagagctagagagaaggaattgaaaagaagagcaaataagagatatttttggacttagatatttttggatttagttattgtagtctagataaaatgcttatgagaaataaaaagtacagctatacaaaaagccataatcaaatgtttacagcaagattattaataatagccaaaaaagtgaaaattactccaacaaccatcagtcaatagagacaaataaaatggtatctatacataaaatgaattattatctatcaagaaaggaaataccaacccaaactacaaaatgggcaaaccttgtaaatataatgttaaatgaaaaatacagccaaaaaaagccatataccatgtgatcccatccattcgaaacagccagaatagtaaagctataggaagagaaggcagatcttcaagtcattgagcctgagggagtatgttgatcagatggacagagggtttcaagtttctctggaagtaaagattaggtcctagaatagactgtggtgacagtacacagtttcgagtcgacagggatcccatggtctatggggagaaaggccaggtcaggtctacaccatccttccaggttaccacaatcccaaagtggttcaggtcctggacttagaatgatgcaatgcttgcatatagtctgtgctcatcctcctctacaattcagttaagtcatcagtagcttattcatgatactgaatacaatgtaaatgctatgtaaatagcagacacgttgtactgtttacagaatggtgcaattagggttatttttgttgttgttcttggtggctggctgattggttttgttttgtgttttgtttttctaattgtttctcatctctggttaattatatccactgataaagaagctgtggatatgcatggccgactgtgctttgaaatgacatctatatgggtaacctatatgaaatatattttaaaaaaataaaagcaagacttgctttcactgtttctatgattcaggggctctaagctatgcctctgtaggagattagcatagtggctgacacctgtactcagcattcagggaggctgaagaagaatttgaggtcaggctacctaaggagtaagatcttggaaagggagggagagagggtgggaagagagggaaggatgggaggagaaagggtgggaaggctggggggatggagggagagacagatgggaggagggacagagatatagaaaggagggggacagaaaaaggtagaaaggaagagtcttcaattttcacccagacaattatgctacccaggaatgattccctagtccccaccaaaggacctgcacaaagtaacagcttaccgtcccacctgagaaggccccactaagaataggacttttccattcgatggggactaagtttcttagtccataatatttctgagtggcagaagtgttgggatttaactaaaataaataacagcccaaagtccccgtgcctatttattcattgtgttcagttcctgggtcctccgtcaccaagactaccataaaccccatgcctgaatgtgtccatgctatattccagcaacctgcacggatgccccagttctgcatcatatcctggcattgccttgaaggcagcgtgacagtgggggctctttggggcaacgcgttccaatcatccaggtatccaggtgctctttttgctacacaacgtggtatctacgacacacagaatacttctacctgcttactgaacccaagacccttgccacctcacaaacaaacacaacactaacaaacattgaaattgcaacacacggattcaatcattcctggcaagcattaaaacacagctttcaagtgttctccgtttcctggggttgaatgatgccagttttaaataattcctcacacctaaggctaagggggggagaaaagaatgaaaagtatcctaacagatcactaaaaatatccagtcaattcatcaaagagaactcagaagaatctggatgcagcacaactcattaaaaggtagacacactgctttccttccctttggatggcaactccagtgactacgagaaaggagacactcagcatggcaatgcattactatgaagcaatggcgatgtagtgctatgctcctgaggaaaatattttgtggacaaaaacagaagcgatgatatacatctaaatatgtgtgtgatataaatgtgtatgtgtgtatatatagtatatgtgtaggctatatgtgtatatgatgtatttatatatgtatatgatgtagatgatgtatgtgtgggtgtatatgacatatatgtatataatgtatcaattttctttactccttaagaaataaactatttgatggaagaagtaaaagaataaaacacacattttacctttattttgtaaaatgcctcatttgcaaatacacaatgaaacattggcacgacactaaattattctctataatggtagttaaaaagaaattcatgatagagccaacaatatgggtcagcagacagcatttttttgccacaagagcctgaggatcagagttccaactgaggaacctaaaaagctaaccctcgcctcaaattccaggagttctacatcacaatgggaggaaaagacaaaagatctgctggtagcctggagtgcacgccacaggggaagtgctatgctctctttagcaaggtggaataaagataaagaagactgtttaagtcacagaggagggagctgcatacccagcccggcagaataattcacaaaacattactctctcatgttataaggaatcattaaaaaggtctcagaacacaggaatcaaactagttttcgtttcattcctagtatttctggaatttctggggataaattagttacgagaaggactgtacatcatcttactgtctggacattctcttgctttctaggagctctatggggaaggggagatagccctctctgacccaggactctcctcacaaatggctctacttgtggtgattccttactcttagaaaggtttatatttgccagtttgaggctttttgctttttggcaccagggcctgaacctagagccttgtgtatggaaggaaagcatcccatcactaaactcagacacatttgttcaacaattatggtacagaacacagcgtatatacaatgaaaatagcaggttctatgcatggttccaagcacagacttcacttgttttcacagaggatgaaactgggtgaaaactaagctctctctctctctttctctctctctcttgcttgcgcaggaggggaaggggagggagaggggagaagaggacgaaggaggtggggggagggagaaagagagagagagagagagagagagagagagagagagagagagagagagagagagagttttgcacagttttgcatgctctgagagctgacagtccatagggaactcagaggctgggggagaaaccgttctaatgactctccctggggtttcctggggcctcctccgatgggatctggtcatttgctgagcggatcttcactttttaaggatgactcagccctggctggcctcactgcagctcagaagaggaagcttccgttcctcccagtcgcctgcttttcctttctcctcagagctctgacaccataaagcttaggacactgttgtctttccaatggcagctagaatgtcatttcaaacccacaaaaaaactttctcaaaacaaaaaaataaataaataaataaaaagaaaagaaaagaaagccagtaaactcccacagacaacaagagatgtaattgaaagcaaagaaagatgctctatagtaaaccaggaaaaaaataaaggaagagaaagaaagaaaacacaaaattcaaagagacatccccacactcccttgaactcagaaccagcgcatccttcttcatgcccagttgtctcccccccccccccccccccccccggctttcacagaactaagcaccatccaccctgctgctccactcttccagaaaccaccctccccagagcccaccccacacctcacatccgtattgccatcctcccaagtaaaacgtttagtgataaatgattattgcatatgttctccaaactggaacttccttgccacctccctccctctgtctaacatttggagcacggggcaggtgagtggttcatttgggttccataactactcctcagtcactgattttgttgcagaaactccgataatcgttggaattaacaagctcaatctctttgcatcccccaaactatctatattccccgctctctttcctcccccagcgcagtctgtgcatgttccgtcttcctgtaagacataaccttcatgactggcaatcagagtgatgctttgctccaaaatttcaaaaaccgtcttcccttttctgaatgcacattctacactagcaggtgtagcccaaataacatgaatgcactgcattgaaagtgctctttcgggcaggatgagcttattagcaacatctaaatccgccacggctaacacagaagcaaagtctcagcccagatgaggagcactgtgattaccaagacgcatctgccctgggtggaagaacattgaagaactcatcagagtcagtaattagcctgtagcctgtccgcttagggagcacgtggcaagcgcggttagggtaccaggctctgctcctttaatggagacagtgctggcagcactcgattcagtgtggctactatttaagagcagggaggaattccatggaggaggcacatacagcttgcagagaccagaaattctcttcaatgagttctttgcagtgattatttagagcgcctgtgttttatatgctgttccacctgcattttgtgttttaaaataaaaagcaagtcaggtgtgatggttctaccacctaagcacatgggagcctgaggcagagggatcgaaagtttaagaccagggtgggacacaaagggaaaaaaacctctgtagggtttgttatttgtttgcttggttgtttgcttgcttttaaaatacagactagagaatatgttagtcagtaaaactcttgcataaggagcagagtacaaatgcctaatacccatgttaatgtcagccagcctgcttgtaatctctgtgcctaagaggtggagacagaaggtttccagagcaagggaatgagctataatagccatattggagaactctgggttcctgtgagagacccagtcttgatatataaagtagatagcaattaaaaaaaaagacatgaaatcaatctctggcctctacacacatgtgcacatgcatgcatctaacccttataaaggcacctgtgctcacaacacaggtatacacatgcatgagcatacacacacacacacacacacacacacacacacacacacaccccgctaagcctaatacagtaacttagtctgtaagaagacaaaagaaactagtattggtgtctatccttcaaaactgcagctcctatcaataatcaggaaggggttttgattccccagccttaaaacaaaacatgcattctatcttttgcaaaatgagagaaaataagtagggacacatgaagtatctgcttacaaatgcagagtattaaaatcgaaggtaagcaatgagactggtgtctcatggccaaggaacaagatcttcaaagacagaagtaattgctgcctgctgttgttcatattcaatgtgtgtgtgtgagcgcgagtgtgcgcgtatatatgaagagagttacaagttcaatatgccatttttccatacacctggaaatcatgagtcaatttaacacttgtagaaccgtatttccatagcctaaaggtttatgctgttttaaaagtaaggagcccaaacaggataaaggccctgattagttaatccagtccttagcttcagatgtcaaccccccccccccaggatggggagtagggcagaccaggctcctcttacggtatataataggaactgccaatcatgtgatctataacccacagactccaggaatcttcagtgaaaattgaagttcattatacagcaagaagtcttaatcgcaacatgccaactaaaatgaaatcaacaacatatttccacatgctgggggaccacacagtttagaaaaatgagttagtaagttgggttagtccagtgcagagagcaacaggaatgaagaaaatttcccaaagcatgtatgcagtgggaaggagcagaaagatgggggttgggaggaggagaagcagcagcagcagcagcagcaacagcaacagcagcattgaaagtttaagttctaaagcaacatcatgcactgaacttctaaagagctgagctttgcagaaatgcttctggcatagaaaccaataatttcaggttgacgtttgaagcacttggaggtcacacgtgtcaaagaataggtagagatgtgtggctcagtgacagaaatggggcttaatatacatatagttccagaatctacacctggtattaaatcttcacagagggcctagaacctgccactcccctcccagggctaaaatcatgaaagaatactacataaatatagattttaaaagaactgtatactgagaccagacgtaagagatgaaaaaaatcaggttaaaagtcttgtttacatatcaaaaagactgaaagtagtgattctagaaatacttgttaaccaatgttcacagcaatattgtcaaaacagccgggagggagaaatagcccagtatccaccaacagatgaaccgataagcaaaatctgtcacatgcataatagaacaaaatccatactgaaagaagaaggaaattctgacacaacctagataaatgttaagggcaccgtgctcaataataaacaaaccagccacaaaagacaaagataaatattttgttttcctttatgtggtggacttactgcagtcaggatagatatggggtatagaatgggggtctccaggggctggcatcagaggacatactgtttaaatgggtagagagtttctggtgtggatggtgagaatgttctagaaacagatgctgaccgctgtcacataccacagttaatatacttaatgccactgaaatgtgcacttaaaatggttaaaatcctaaattttatgtctttagcccagttttataaatagatataacagtgaactcctataatctacagaggttcctgaaagctttacaaacaaaacccatgtattacggaccctatgctaaggggattttaggtatttgttgagttgatttttagtgtcatggtaaataaagtggaaagatgagaagtaacaggcaggtttagttatgtaaatctgaagttttattaaggttttaaatgagttttcaatacttaacatatcttttagttaagacctttccaagtccatatttgcttgtctttgaagattcaagtcattaaacatcacttagcagttatagttaggcttgaatttctgtgatatagttataaaacattccctaaagagaaatgattgctcagtccatgattaacacaatgctttttagccagaaatgatccctaacaacctcattccactttcaggactaggcttttttttaaataaataaataaataaataaataagtaaataatctccatttttgcttatatttttaaaatacttaagcctcacctgatactgcttgatactcttattgtatagagaagatggaatgtattctattcaaatcctattcaaatagacaaggtgtgcacataagttttgttctgtgcaatgggagttggttctggcaaggagcagatggctgaaggatgggagacaatgtccagggctgaaggactggagagaaatgtccaggcaggtggattcacatggcttttattgttacttttgctcagatttggtagcttttcactgaccacagacacactaatctatctctgtgagctctgcagctcctcacaagtctcctctggggaatccgggtaaattccactgcaatgactttaaaactgtatcagtgataagcccaagacaagcaaaatgcctcttagcaaagtccacattttcaattctgatcattgagtcaataagtcacaggactcaaatacacaaataagcatcactccgattatcctatcaaatgtctcgatggaaagtttacaatataaaatatgactcaaagtaagctaattagacagcttttcatatgccaagtggcccacagggatctctgcagatatgatgacggcggaacatggattttttttgttttgtttttaataaatctaccctgcattactgcactgtgggcttagcacatgtgacaggcctgaccatgctgcatttttggaagagtatggaagactttgggactttagcctaacacagtggttaaaaagtagaagcagaccataataggccatcctagtagaagcctggaaggccatgctgagcgcaatttggactgtatgtatccagctagagaggtttcagaggggaagagtattagcagctgggttgggtcattcttgtgacattttggccaaaacaaaaacaaggcacacaaacaaacaaaccaacatgtgactactgtttaccggagtattaaggatctgcctgaggctaaatggaagaatttttgcactaatttcattggcaaaacagattttaggacagcctggtattgattctgttgcttgttaattagtggtcattcttactcagatctataatgaaaaagagcaaatgtggggcaaataaaaacaaaccaatcagttgggaggcaggagagcactgaggggaggcagggagagcaccaggaaacattggagccaaggctgaaagacctaatgtgaaatggagtaaagggagtggtaccctcaggacaagaccccacccacttagccctgaaacttgagaaacacaaggctgaaatgatcctcccccttaagagcaaccatagagaaaagcttatgcaaacaaggctcaagcaaggcgccaggctccaccccaagcagaaagcagaacttggctttagagtcaggaaaggatgcaggactaaagaggtccctggaatcttgctctgaggttaaggaaagctgctgaacatgcaacagggtaatgcctacatcaaaacctggagaaaccagtgtgtgaagcctggactgggttcggattccagacccaaggaagatttgccacagagacctgaaaagggtgagctgagccagcctaatagaagtaggttacagtcagcggagctggaggggaggcacttgacttcagacatggagctttggagtttgcccggctgagtttcagtcttgctttggtccagtatttcctcactaggcagccattcctcccttatggaatgttggcgtatattctgtactactgtacaatccaagtagccaactggttttctgaattcacaaagaactacaattaagaaacttccatgagcctcagaaggaacttgggtgtttaaactgtgttgaaactgtgaaacattattgagacttttgaagttggactgaatacactttgtgcatatatatgcgcatgtgtgtgtgtgtgtgtgtgtgtgtgtgtgtgtgtgtgtgtatgcgcctatgaggccccagggagtgcaatgtggtagctagaatgagccaccaggttcacatattggaacacttggtctccagttagtgagacagtttggtaagggtgaggaggtgtgaccttgttagaggattatgtcactggagcagagtcgccctctctctgggactagtacttttgggtcagatgtacactctctgctattgatccagcactacgtcctgctgctgtgcccctcatcatgatgaccatggactcgccttctgaaactgagagtccccaataaactctttcttcaataaatcatcttggttatagtgtcgtgcttcagcaatagaaaagcaatagacaatccagtgccaggtcccttcatcccttccatacactactgttctgagtttcttgaacacgatggttagtttaactttgctaaagcacaatggtgccctccttcaagatcttcaataacagccaaaggtcttgaaataataaactttgaattctttggcaagatctcagaatcttgggtgatttgaccaaactcttcctattacatccccaattcgcccctttaacaacccctcaatggccaaggactaggtttttcccgttctcaatctactcaaaaagattcctcccatcctcattgtggttgccctccttgcctgcccttcatactcttagaatccaacagtaaaccttcaccaagttgccaattctggacatgtgactctcaacattcactttcttctacttgttatatctcacctgttccaagatagttttatctgctctctcaaacaccagtttactaaaagcccccttcttttctctacatcttaacaaaagcactgcaatgtcctcaagagccctgtaaatgtctgttattgagtgataggaatttggaaggaaggaaggaaggaaggaaggaaggaaggaaggaagaaaggaaggaaggaaggaaggaaggagagagagagagaaggggagggcaggggagaggagggaaaggggagggtaaggtaggggagggaagggaagggaagggaagggaagggaagggaagggaagggaagggaagggaagggaagggaagggaagggaagggaagggaagggaaaaaagacttttgagtctctaaaacactgacaaagcaaagagtggactggaaacgttagaccatgagaagcttctccactccacagtcaaggctctgggagtcaagtcacactctcacaccaggagttgttcaacagctgacttgggaatctgctgaaaggtggctctttactgtcactaattctggggagcattgataaaatgaaacacaaccttctccagtctgctaaaggggatcaaccacaacctaaaactgaaccgagtcattaaaatcatttcaattcctttatggaaaagctttatggagggataaggaggtggctcagcaattaagagctctctggctgctgctccaaggaccagggctaaataaattccccaagcgcccatgtggtagtcaacaacctgcccaaactccagcagggagtctgaaacccacctacttcaggccttcttgggcaatgcatgtaaatgatgcccaaacatacatgcagacaaaacacctacatccataaaataaaagtaaataaatgttaacaacaataacaaaaacaaaactacaaaagaacaaaaagaaacccagcttcatggactcctgctgtgctgatagtcatcaatacagtactctatagcatttcaaaggtaaactggaagtatatctgtaaatctaagaaaaaaagactagctgggccaagtctttactaacattgccaatgcttctgttgttgggctgggttgaaatggtactatatgtattgactcagcctttctcatcttacagacacgatgaaagataaggagctcagaaaactcaggtgcaaaaagctagcaaagatgccaaatccgattccaagtctaacacatgccttgtcctcggctcaacagagctactgttgctcaacagagccactgttctgccccataaactaagcaacaaagtaatgatgaatttgtttggaacaagcttgcttgtttgtttgttttctgaatacatctgtttggctgggactagagtcactatgtttctttgaagtgttattttatgtgtatggctctctagaccacaatggccagtgctcgctttacactaatcctagtagtaaacacacacacacacacacacacacacacacacacacacacactcctattatctacattaaccttattttaagtagaagcactgtagaatctgagagatgttaccttcagcaggcctgggtccacaataacaagtcatttcccaagggggatggaaatttcaacaattctgtcccaattccccaaaataactgacgtccttgtgagaaaagatatttaaaaggttcattgatgataaagacctctaactgttcgaggtcatctcccctgggtatgggtgataaagccctgcaatccagaagctttctaatagatccacaaagatatgaggaaaacaaccatcattattccaacaaaaacactacaccggaggatatttcttatcaggcaatgccacaaatttacatttagttattattcttaaactttatgtcatcatattatgtattgtaggaaacatctgttgctagcataaaccactggttcagtgacaagtataggaggccattttataagcatgtataaataaaaacagaaattattcaactggttgttgactaaactttcataagaatgctgtaactaatgaacaggatgaaaatttatttacactaagagaagagaaatctctgtgggaatgagtaaaagtgagcacagcttcaaataaatatattccccaaccctgaaaactgcagcctagcagaaagaggcagaaggaaggaagggataagaatagaaaaaagaacaaagtcaaggaagagagagaccacagaaaggaaacatgacaccaacatcccttcgacaaattaaatgaaagttcctttgaatatttgcagggaaacaacaatacttgctacacatgctaaagacacccatttccagggaaagacgccatgatctctccttctgagagtatgagctgagaacactatgaaatggtcacatctttcctcaccaaaggtcagccacagacaggcatttcatttttttatgtgcatgtctaaaatgatggaaaaactcaccgtcaggctccagtgagggaacgtacaaaggtaagaatatgagtgcattataatggatcaagtgctagattaaaaaccactaagtactacaaaagctcaattttggaagtgagctaaatctctttatagttgttattagggaattcacaaagaagataacagagaaaagctctagcaaatgaatagaagattccagaagaaaagcagtccaggcatgaagacagatgcacagaaaagtgcaggacttctttgaagagccatgaacaatttcatatatgaatggtctattcacattaacaacaaaaaaagtttctcactaaaatgatttacaatccatgaatttttacctcacttatattgatatcctactcttaaaaattataataaaatatgtacattacagttaaatatacttctctaagcatttttaaattacacttttaattatgtgtatccatgtgtacctgattgtgtgtatgtgttaatcagtgcagtacgcacagtggccagaagggggaatcagatcccctggagctggagttactgcagttgggagtgaccgaaccaggaaagtactgggaacgtgactgagcttttctttaagaagagtaccactaaacaatctcttcaatccctggtaagcatttgtaacacaattgtttggtttatcatcacacaaccataaaaggtaatgataaagttaccatctcacttcataggggaaaacagagaagttaaccaatttggctaatgtaatagcttggcttcagaatatctcccaggtgctggatcaccaactccgtcctacagcaccaagccacgctcacttagaaacttggtctcaagctccaagctatgtccagtatggacgggaagaacagaaacaaccaccaagtccctccttgcacttcctttgagtccttccaatcttttcctttccttccttccttccattcacttctgttgacctctatactgccttctacagaaatcccctattctcccttcattctcctggaaatgtaacaagagggcttaattaagaaatgaattaagaaaagtagaaaatctaagataggtaaatgcccagagctgtcttggtcccggcccatcaaacctcagggaaggcttagtttcatgaactacagaaacaatgatctaccaacagaacaaaggatcaagaaaaacagtgctgttttagatattaccactcagttaccacatctattcaccagactgagggtggaaatgtaaattcttcccaaataatacattttaaagggtacacttagtgttgcccttttgaaccaggctttgtaaaaatgtaaaaaagaaaaaaagaaaaagaaaacagggaaaacacacaagcccaccaattaagcagatggtgcttttattaaaacagggtcaggcgctaaaagggcaaccacatacacacccagattaatgcacctcatcagcatcagagttgaaggaacccattttgaaataaaacatatcaaacaataaaccccagaaggaaggctcagtagaacaagtgggtacttaaaaatgatttaaactggtactccgtactggtattttccccttagccactatggttatcacaatgaaggagctccttaaattcacaacctagcccaaagaagccactcagtatgagcagaaggtgtctaaagtatagcgatgtaaaaaagagaatgacatattaacgcttattctcggagaagggtgaggaagggaggggagtaggggtgggccatggagagagacaaaggagaaggagggagggagggagggagggagggagggagggagggaggggtgacagagacagagatgaacagaaggcagaaaagtgacaggtgggcccattaggctcactggagctctgttagaaagttctggatcaaggcatatccacaacgaattcctgtagtgacatactccaagtttaaagacagaattctctttctcggtgatctcatattgagacactcacccgtgtggtttaaaaatgtttccttatttctcattcaattataatatcaacacgacgcgcacacaatcacagtcagggctagagggatgtttagaggcaatatttaagatttcttcttcaatcatgtctgtacatatgtgctaggatgtgcaaagctgtgatactttatagcattgatacatttggtccaaaaacagtgaaattctagagcaacttcccacagatgaaggaaagcactgagggatttactcatcattgacactttaacgcgtttctccacacaggcactcaacagattcaaaggcaaaccagacctctcccacattctggtgcacggggctgtgaaactatgttctgactcaccaatagtctgcttcattaggtgttaacatttgtaaactgatcatgttgacaagtgacattctcaaataataatggcaccatttaaatagaacatagatgccaagcaattctattgccttaagaaactattttcctttattaataaataagatttatttaatctcactgacagcaaatttgtaatgcaccaccactaagaccttgagggagacctttaagaccatatagttgctgtgatcactaggcaattgtatttaatataatgggctatttgctaactgtcaacaaaatcaatcagtgtgttttaatagactgaacagtttaatcacagcaagaattgtacatggccgatttcattatcatttttataaaagcactgcttcaaaaagcctaaattacgatagaacaacaaaacttattaaatattatgcctaaatggatcatgttagaggtttgagtataaatgaaatgtatttggtcaaatctattctttagcgattatattttggtagtacagcaccaatgtttggctttagctgattcagaatatgagcacaatgtatgttaacttccatgtattaaacgattatgacagagaaaaaacaacgagccaagttactgccttagttaggatttccactgctgaaaagcgatgccatgactaaggtatctcttatgacacaaaacatttaattgagctgacttacaatttcagaggttcaatccattatcatcctggcaagaagaatagcatcttgtaggcagacatgatcagaaggcaaacaggaagagaccagcattctaaactgggtggggcttgagcatagagacctgaaagcccacccccacagtgacacacttcctccaacaaggccacgcccactgtaaggccacacctcctaagagtgccatttccaggggccaagcatattcaaaccaccacagttagcataccatccaatatatagtgaacataaaactaaaatattcataaaacaaagcaacaagatactaacagatgaaattgaaatggtgtttactttatacaattcatttattacttaaaattagtattagtagcagtgtgttgcgtggcatgtgtctgccatggcacataggcccaaggacaattttcaagagtcgagtttgtccttacatcatgggtgccacagatcaaattctgatcaccagacttacatggcaagcacttttacccactaaaccatctcaccagccttatttttactttttgaaatgagagctgcagatgcaacttagcctggccttgaactcatgatccttctgcatctgcttccttagtgctgaattaaaggtgtggactaccatgactggtctgaaatttcatgattgctgaaggatttttgacacaaatggatttagagcacctttttaaaactacaaagtcttctggccggggtacagctattaacctcccatgttttattcataactaattaatacacagaactatcaactcaaattagaagttgaaagctagcttgtggcataataggcttgtagctgaagaaacacctatgatcgtatactcatgaggatgctcccaccagcatcagtaagaaagaatgagtttgcctttaaaattgaaggaaagctttgagcccactacatttttaaatttggaattaacatggcattcagaaggagaaaatctttaattggtaccccaaagcctctctttcccatcatatgacaatggcattaaaaattatcaccctaattatatctcaaatagtaacagatggcatctctgaatggcctctgtatcttttaatttactctgcaaaaaaaaaaaaaattatcttttgaattacaatacatgtgaattaacactcatatgtgttctctctttaaagcaccaacatacaatttgcaagcttttaaagacacaatgaactccagttaaagcaagccatttcccagaggcctgctgcacccgggaacagagttttgattatctggagaaaaggctggagtacagacctcagaaatgcctccctaaactccaaagcaagcatggaatgggcctgagtggggggtaatgaatgagattgtgcccctgtgcaactgtacttctctgctgaatagaagcttgaagccacttatgaaatgcaagatggctgtgcttccatttactaaccatgcaaagcaggcctgggagacatttgtgaggagaaggaaaacaaagaaaggataaactgggccctaaagatcagtctatacaactctcctgagatcagctaaaggtatacaaaaagcaggctcatcctcttgcaaataccaagttgatcgatcgtacagtccacacacataatgtctacagaagcaggaagataattaaagcaaatataacctaatgcccatggcctgaataagcaaaatccacaaagaatactatttataagtgtagggtattggcgaaaatgaagaggaagtagttgccaaatgtactcccgtgtaccagactgaggggtcttgtttcatacatgcagtaacactggctttaacacaggacacatctcgtgtaaactgagatagaggagcttcccaatagttaactgatattaactgactggtgactgaacagggagacaaggagataacgtaaaatgtcatttcctgatgttacttgtgttacacaacaggtctctctcctagggagtgccttgcttgctgcccacagagtaacacaataatggatcgattcaagcaaaagtggattcaaatcattaacttgccacgtgtggaaagatgcaagtcagggcccagtgaaacacacaggacacgttggctaaacacaatgaaaatgagcctccgatctcccaaccgatcatgtattgacactgaacttagccaacagtacaacagtataatggaatgagctggtctgaaaatcaataatgcagggactggatagaattcatggggcttagttcgataataaattcctttttgcaggtagattcaaaagcaaaggacctatgaatgaaagcaaccaaaattccttgtggtgcctaacagatttctttaccagtgaactgtgaacttttggcaccctgtgaactggcagtgccaaaacctacctgtgcctagaatacagccaagcagggccaatgtaggctcacagttcttaagagcagaacaaggagagaattcagagtgcgtgccccatgagttggtgggcaaagatgaaagaacttcctaaggggaaaaaaaaattgaacatatattctattttcccccctcaggcaatatcaaataactagactaattgacataaaaattaaggttaaaagtaaaaacatttactttggtcaattttatgtgaattttacctccacctattgatcttaagaaatcaatcaaaagaaaaatatgtaagagaaaatgcaaacttcaaaatcaaccagagctccacagttgataaagaaacaaatataaatttccaagagtggaaatttccatatttgctgttataaattatgaattaaatgttaagagttgctaatatttgtttctctcatcagcatgacttttttttatcatttgaagctatctgataaattgtctccatatgacagccccaagccccacaatattaagtagttcttaagcacacatataaattatagttagcaataagaactattaaataattgctcagaattgatacttcataggtcaacatataggtagcatacagttaacaacaggagttattaaaataatagttgagttgatacttcttcattggtcaagtttaccaacagatactctatctagtatatagaaacagaattaaaccaggataaaatatgacataccatcctggccaactgcttaactaagcaagaattgttacagggagatgagtgggaactgcctccaggtatgttcagtaattgcatgcctactgtgataaaggactgcatgcctactgtggtaggtatgttaagagtggactacaaagagaaaagaggccagtatggctcacatgtagtgaatcaaagggacaggggtgacttaaaatcaaaatagcagcaacaaaaacacatcaacagacagaaacttgatcacccagaattacacatagtggacaaaggcaatagggtatagtatgattgtgaggctttcggtgtgattcaactagatagtgcactaagaggacccagtgcatgcttctctaagacctctggtgccctgagaagactgatgcaggagagcaatcacaagcagaagcaaagagaactttggggactattactttggtccagttacaaggacatggttttgagcgatcatcagagaagagagatgtgaatggctgtttaagatacagttgagaggttgaggaggtggctcaggagataaagtacttaccgcacaaaggagatgacctgaatttggatccccaaagccacataaaagctgggcaggtattatcccagcatgaggaaggaatgaaaataacaatggcttacatgttcagaaaaagaaagggcagaaagtaagtgacccaggcaagcatgaatcacagggcaatgggtttgagctaggcattcagaaattgatcaggatgaactgtcagggcagcaatgggtaccataagagcacagagaaagagaagcagtcagcaagggcttccaaaagaagaataaggagtacaagactcctgggaaaacattctatagagattgatgaaaacatgcttacaaaggctcagaactacaagggcacatccatacatctaaaaactgcatccataattattggtaacactcatcatggcaaagcaatacaggaagtcgtttctaagaagctgcactagtgacaaatgtacatgcttataaaatgcatatgtttactgactcctcaggagccaaatatctggtagtttctcaatatgccttcaacagaagaatttttggatgactaaaaaccatctttcagaaactaccaatagtggctgacttgtaatgacatttcataatccttcaatttttattatgcatctcaacttttctgttacattatctggtaccctaataagtggatatgaggaaacaaaagctggacaagtggctctgttacttatactaccccaggtgagacctttgataagaagaaacaaagtgttctaatttgtgcttttggaatttgggggttcttaagaattcagatattaaattgccagatcttttccttgtttgatataaagacttacttctaagccattataacataaataacttctcagaagaagaataacttaggaaaaatttatttccaaactcatacttgtccccatatttaaaaccactaagcaatcccacagggtgtgctgtcacttcctgctgagagagatcatcttgagtagtatactggtgaaaatggaaagcacaggccaaaaggccctgacaacagtcagactccactaggctcctttcgtgaactcacccactggttcattcacttgtttttctcaagaatgagcaaatgacacataattatacatctaaaacacctataatcatttcatcactttttactttggaagactcactgagaccaaaataatgatctagctagctgagacttaatgcttacattaaaaaaattatccaagggacagaggatggctcaatccatatagcacttgccttgtgaacacatggatctgagattgagcaacagaaacacagtataaatccaggtgtggtggcatgattgtcattgctaggttgggcaggaagacagaggcaggttcagggcttgctggcctttttgcctagcttaatcagtgagttccaggccaacgagagccactgtctcaaacaataaggtagaggtctccagaggaataataactggggttgtcctctagactccatacacatacacacatggatatgcaactacacccccatgtatctacacacatatgaacacacatacacacatgcatgcacatacaccagacacacacaaacgttcactgtaaactctcaaggaatctatgattgcccttgttttgcatctttagtctatgctggtggctgtgttttgttgatatttcttctgcatctgctcgtctgagaatcaaccagacctcctctgccatacacactttatcacttctgttttaagaaaatatttgtcgatcactaagagtataattaaacacttttcatggcattttcagaaaacaggcagaagagcctttaattactaacactttacatattctttcaggctattcccccatagccatcaaaaaactaatgataggtaatgtgatagaaccaaagtgccctcggacaggtatgacagcgatacaataaaaatctatttgtcctgggttattttagctatcaactggacacagcagagaacaacctaaaaaaacacttcctactccccaccccgaccccccccccaaaaaaaaaaacagtttcagttgagtagttgtcttccctgggttagactggagcatgtctgtgaggggtgtcctgatttattagttgaagcacaatggcctagtgccctgtgctgtgtaagaaagtaggatgagccggagtaagcaggcaagcagaaaaatcctccacagtttcggtttcaacgttctgcttgagttcctgattgacttccgccaaggatggcctttgacctggaagtgtaagatgaagtaaaccctttcctcccctgacctgcttgtggtcagaatgtttttatcatagagacagaaatcaagctgggaccttagtattttgtgcaagtctatatgctaattatatttacacatatataaaaataccgaggttttaacaggttaaaaataataacaagaggagaatcaggtggctgagcagacttgcagcgctaagactacactgaaaatctaacatgcaggaatcaaaatctctgccttctttgtttgtgctgcaaccaggtagagggaaagaggagaaaattactgacagtctgaccagtattttagtctcagtagtcagaagaaataaactagtggaacagacattctattgggcaaaagaatataattttaagcatgcatttactttgtatcatatggtatggggcaaagcttaaccataattttaagttcctttctcagttttcttcttcttaactccgtctgagaccccaaagcccacccatggtccaagggtattattattattctcagtttaatgtgaattaaaacttaatgaaatttacatgaaaaaatccacacagagtgggctgtgaaagatacaatttattatccccgttagtatattaaaccttcctaaaatgtcattaaactgtatttacaagctgggtttctgttgtcttgttttgttttttcatttaaatctagtgtcttccagaaataaaaagagttctctgacttggcttgtctgcttgacaaaaggctagagataccagagagaagccagccccacaccattttggctacgaaatgaactctcatcttataaattttatacgaagatcttgggatactttgctgaaactccttcacaaaaccatatcagcattcataatccatgagaagctgatgtttcctgggctcacaggtagaacagagatctctccagagagcagttgggttatttgttattatttaagcaaagcagacagctggaagatgagtccacagtgaaggtctcttctcagcactcagcaaccaggctccatccccagccagccctcagccaaggactgctgggcttccttcccagctgaaatggggatttggagaaagctagaccttttgatcaaatttgtctattgttgtgtcctgtccctgggctttggaaatgaatctgggtatagatgaatgaatgataagactccatcaaccattgaacagtgcattgatgcattaacaccctaaaaggttaggagttgtcagctttccaactctatactcatttcacttcttggcaaataatgcagccttgtcctgccttgtgaaagaagggagtgtacagaaagtcatccacagaggcagctcgaaagacatttttggtacaaaatatttagtctcaaaaatcatatctgtccctaaaaataaaataaaataaaaacaagagacagagaaaatgtagacacaagtgcatgtgtgcgtgcatgcctttgtgtgtccctgtcatctgtctgaccaagaaaggagaaatacaaattctaacttctaaaaacacaatgccattcctctccttgaacaggtgagggaaaggaaggagaggttgagaggctcagaaaagacagcattgtccccttgtccccaagaaggccacgacattaagttgttcccctcccccccagaattttccccaatatactctatctagtccatggatccccttcaactaaaataagacaaattaatgagtctccttcacactacaattcttaaaactcagtgagaccaaatgcaaaccaggtggctgtggtacccagttgcaatatgaggggtaaaggccactctggcccactggagacacaagctatagcctctaatcgattcagaaagaaaggtagaggatagttctttaaaaagacataatagaagccgttcaggcaaaaccaggtggatacttgtggaatgagaaaacataaaactagagaaaatattgaaaatgtcagtgcgctgtgtggtgcttaaagcaagcaccagctaattttaatgattgctttctcctatgatcctgccaatattgccagcaacagatgttgttgctgagcatggtgattactgtagatcctagacacaccacccagcaccctttccccttttaccagctctcattggtttgaattaacagctccctctgcacatgtatatgccacaatctaaagttgtgttttgtgtaggacgatgtcaccacacaaaactaacaaagacaagttatgttattttccggtgtctaacagtgcttttgggctatccttgaataaaacattgagctcatatatgatgtgtgattattacgttttaagtcaatagtgtacaatgagaatttattcccatgagcaaataagaaaatgcccacaaattaaaagaacaaaataagaaacacaaaatctatctcatgagaatgtccataaagagatgccacaacatgaacttcacgaccattcaccttgttcacaacttaaatattattcttcttaactcacaaagaaagagcatttgcaaagaggacaggaagattccaaatgagactcaaatgctgtttggaatcctcaagatgatttcctctcaactcctaaataacctaaatatcaggaaactcagtctgcagttacaggagctcagcagcctaaggagagacttcttgcttagtttggttgtttgaaagaaacctgcagaacatcaagtggatccatacccgaagctgaggaactaacgctgactggttgcaagaatgcaggattgtatggcgcctttcaaagcagaggtgacatacaaatagaatatcgattcatttctaaagccagtttctccaagtaattgacaggtgctctcttgccaaagctgataaggaaaagttactgagtcataatgaaagaagaacagaaataggcttagagttgaggtcttatggtcacattgaaaaggaagatctattgaactctgtgacctaactggtcaagtgatagcaacgttctaccctgaatcacctcaggagacgctccttactatcatgtgctactgccagacgccagggctggcatcctcacgggcaaggcaaacctttagcagatgcacaataaaatttcactatatgtaaaattaatttttgtcacaaatggcataccatggtgttctacatacaactatcagacaataatgatggtgttggtgggggctgtgagctgaaacaaaccaccaggctcagacactaagagactctatcaagccagggccaaagagaatgctttattcacagagaaccaggatttttcagagcagtacagctttgcacaataacaatagggagccacgggggacccaaaggctggctgtgatgacgaccctcttctgaaagcattacaggactctgtactcagataaaacacttgtggacattaatgactttgctttgtcttttaaaagccattagacatgccacaaactgtaatattcaaagctgaaaaacaaccaccaaatattccacatactgcactcataggaggaatcataacagaaaaagaaagttttcatggtatcaagaatgtatttactatggaataatgagtcactcatagatacacagataaaaataaataattggatttttctagagatctagtagcttgtcttacatttttttaaacatacacttattttttttttttatgggaagcacgcacacacgtatatgtctaagaataacttgtgggagtcatttccacattataagaccaaactcagattgaaaaagcattttctaaaatacagagcactgtgggactggagccattgctacaatgacaacttttcaaataaagaaacgctaaaatgcttataaaatccgttagaaacaaatcaccgctgccaacacaatccttacttaagaaagcagaagacattgtgtgaaatactatctcagtgtgttcaatgtgcataactgagtaaaaagaaaggaaatacgatgttactagtgttgctctctgatgagcaaactgagctggtcagctttcttttcttcttccctcctagatatttataaaacaggtgctttctctttcatatatccaggagttacactataaattccacttttagagctaatgaaatctatatgatgaatatgcatagccaaaaattgtcaaaatgcttcattgctactaaaatccaggtcactaaaagcattttaatatggtgtatgtgtgtgtgtgtgtgtgtgtgtgtgtgtgtgtgtgtgtgtgtgttcacggatatggaggcatatgtagtggggaagacagaagacaattctcaataacactgtcagcaaccttctttgaaagggggatggcggcatgttcatgtacatggaactgtatatgatatgggcctgtgcaaggaaggcagccctcaagaaatctcctcctcctcctcctcctcctccccctcctctgagatagtgtcataactggtcgtgggcagttcagtgacccacaaggatgctgcagtccttgcctacccatcagtgagctcacaagtacataccaacaggcacagccctttttcatggatcctggatatagaactgagtcacttgtccttgcaaagcaagcactttgctgagttagccattaagccctacccccacaaagccataaaacaatatttcatactttagagaaaccagcttaagtgcaagtatgaacaacaacaacaaaaataataacttacttgtaacagttaaggtctcacccatttcactcctctgttcaaggtatgtccagaaatcccctttacccttccttgcctagggttcccttcattcatttagctgttttacaattctttagttatttctcaaaggatctgatatcatgaaaaggaaaacagcatgtcgcaccaggggtggccctgtggtaacacacttgtcaagtgcgctcaacagcctggactcaatctccagcaagattaaaaaaacaaaaaacaaaaaaatcatgcagaattatttaaatgagtgtcctcctctctctgattccaaactgaagcacccactcacttccccgtgtaacggctgtatcaggaaatacacgcggtggttaaatgttagtgtttgatttctgacctttattaaaagtgagacttcaactacgctatgtggcgtaaacaagattttcagcaagctgcaataaatatttgttaattttgatttactttaaggagttggaagttaatcaagagcaattaatcaacacacaaactagatgtgagaaataaataaatagaatgtaaaatcttccaacaactcagctatttctaggtcacatcatgacatccaattcatgtgtggaaatcaaaatatcctatgctataccatactctataacttaatgtttgcaatattacagaatgtcagtttatacagtgaagtagaacacgctagaaataataagattttttttaattacttgaaaattttaagagtaacaagaactctggaccctgaggcaggaggattgctgggagagcaaaaccaacctgagttccgacccagcttgagttacagacctgagaccctatctatctcacctgagttacagacctgagaccctatctatctcaaacaggaatgaggcgaagcctgagaagatgctcatttaaatttactcactaggtaaattcttgctgaaagacttgaagatgtgatttcagagtcacaggtctgttgaatctagggctaaatgacagagaaaaaaaatatcccaagtgttcgctgaattggtgagctccaggtccaataacatttcttgtcaaaaaccaagtaataataatagttattattatttctgcttgattgaagagattccagtatcaaatactaacatctacatgtactggcaaaggtaagcacgcccaaatacacacatgcatatctacttacatacatcacacatgtacacacatatacccccaaaaatatactaacatatgttctgaaagaaccactctagatgtgattaagtcaacttatgaaatagatagcgtaaatgatatcagagaattgataaaagcaaaataaaacaatgtaacacaaatgagctatacagtcatttaatccaaataaatgattctttgacaaaactgatgtgccttaaataaagatgaggactgcaaattgaatctttatgaatagagaaccataaaatcagcatgtgcatcaatatgtgtgagaggatgcataccccttatgcaagtcccaaagaaatgtcaacatttccagaaagggctggaaactgtgcctaaataggaattcagctggatgctaaagaaataagattattttctttttaatctctacaggaatttgtgacctatggcatatcgtatctcatgtttttgcaaagttataaatgttgataggaggtatatgcaggttttgtaaaaagaacagatagtgatgtaaaatatatttcatttgagtttgagttcaaagcatgagagctatggatttgttctgcaaatacttatcaccaggtaaatggagaatttttcaagcattttcaacgtatcactgtcttaacttggctatgagagatagcggcccataagcaccttacaggaaactgacccatcttatgattgaatggctgctacttttccagcatttcatcataaaaacactcaagtatacaaaacagttgaaagcctagtaaaataaccacaataacatctggagttggcaacagttaaactgttagcatgaacattttatccaaaagctatgtttacaaccatcaggtatatcatttgaggttaaccattcatctcagagacctacaaagcccactttagatgtaacgtatcataaaacccacaaccagagtatatcgccatgagagaagttagctgctgacactattgatgaaagttaggacagatcacttaaccttttgacgcacctggtccatggattttacacaaaatgcaaaagctaaggccaagtgtatactctaagcactggggaggctgagccaggagattgtgaagccaacctgagctctaacaagttcctgtctcaaacataaaagcagaacaaagaaaccaaagaggaagctaaatttaaaaatgtcaagttcacttctagttattaaattttaataatatttcaatgctgtaagaaaattctactctcctcaccttttattgtctacatgtagaatttaaataaataaacacctacaagaacaaaagcacagccgtctcctttggtcctcactcctgagaatattcatctacaagttcctacggcttttaaagtaagggtgacatttggcaccagcaaaccactgaatcattaaattctctaatgaagtattgattctcaaccacatgtgtgagttcctgaaattttggtttctattatataatttctcaaatccttcaccggcttcctattaagctgttccgctcttcgaaataagcataataggtcattaggcttccattagaagcaattactgggaaaaaaaaaaagaggccatgtttactcctactttacctccactccacaccacatgagatttttctacactggaagggcatgcaaagaagtaatgaggacttggcttcaagaactaaggcaaaccaagactatccctgtggtcattaattcaagttcttcatcaactatcaagaccttattctcaatagagaagttacagaaaaaatatgagaagtatagaatgtttaattatcattaaaactcaaggaaaatcttcttgcagccttccctagtgctcgtgagcatctgaggttattgatgtatggacttaagaaaccaaagtggcccggtatggtagtacataccttcaaaaccaatactcagctctgtgaattcaagggcagccagatccagcatagtagttcctggaccaccatgcttacagtgtgaacctatctcaaaaaagaaagaaagaaagaaagaaagaaagaaagaaagaaagaaagagagagagagagagagagagagggagggagggagggagggagggagggagggagggagggagggagggagggagggagggagggagggaaggaaggaaggaaggaaggaaggaaggaaggaaggaaggaaggaaggaaggaaggaaggaaggaaggaaggaaggaaggaaggaaggaaaccagagaaggaagagaaaagagcaatcacagctgcccctaattttgtgttgatgatttcaaagcatgttgccccagaggccattagccactggtcttagactcttaagacatgatacaatgtgtgaagttctaattagtgatggatgtgtttggaaaaaccactatggtttttactggcagaaaatgtatcctaataaggaagttggaaataagcttcgggaagaagaaagctgaaatggccgtgaactacaaaaggacctggagttctcagtaggctaagtgagcgaggacggacacagactctttgggttgtgtgttatattccaaatgaactgtgattaaacaaggagataaatattatcagtgttgctgcttgtagaaaagggaatcatagaaaaggcagtttcaataatactttagctcttcagggcaagttcaaaagcattaagataccaggccaatgagaccttcctgaagttatggaatgtttaaatgagaaatctcaagaattcataggtcatatgtgccttttataaaatgaagtggcaaatgaggttgcgtcacataggccttctgatttcaaattcagcatttccccctttattcttatgcttaatgaacttatataattattatggaaagtcagttatatatagctctatagggtttataaagattgaacttaggtgtcttatttgttatttctaattaaactgtactgaattctcattgggaagcagaagcaggcagatttccgtaagatcgagaccagcctggtctacaaagtgaattacaagccaagctaagactgccccacaaacaaaatcaaaatatagaattctctaagctaaagtagtaagtttaccacagaaaattataaggggttttccatgactttctattttgcaatgttgacaaactgaatcacatactaaaaaaaagggggagctggagagatgactcagtggttaagagagtcaaaacaggagtttggtcctcagcacccaaatccattggcctgcaatcatctataaccctaagtaaaacctgacagcctctttttgcttctgtgagaagccagcacgtgtgcatttcacagttgcaggcatacataaacatttaaaatacgtgtgagtgtgtgtgtgttccatatagattaatggaagaaaagctaaggaaaggcagtggctgtctcaggttgacagacacggaacataaggaagggtatctatctgttttagaaggtcataaaatgttcacaaacaaactcgtagtggtggttgcagaaccctaaatatataaatttttatttttattttactgaatagaataaattgttctagatatcaattttatttcaataaagctctttgtttctaagatctatttttacattttatatatatgaatgtttgcctgcattgtgtatgtgtaccatacacatgtgttgtgctcggcaaggccagcaaaggctgtcagcttcttccctggtactgcagttacagacagttctgaggcctcatgcaggtgcttggaactgaaccctggtccactgagagaatagaaaagtgctcttaactgccaagccatctctcctgcacatcaataaagctgttataaaaaagaaaccggagccattacatattgcatttctgctttattatagtaacattctgaacatcggattatttatatattgttcagtattctaaggatcaaaagatactgataataagacatggccccaaattttaaaaagttcataattgaaaaggtaaaacagacaaacagataaatgtagtactacgaaaagtgagaaaaatatgcatatatatcatcataacatgcaaatgtgtgtatatatatgtatatgtatatatatatacatacatacatatggatacatacatacatgtacacatattgatcatatccatatgtatgtacacatacatacacatgcacataaacatatatacacacatataaatatacatatcagagaaatccctgaaagctgagctgcaaaggaccacttggctgttcaaccttggctaccttcaaagtccatattcacactcacttgagaagttctatgtgtatgctaaggaattgcctcttcagatacaaaactttaaataatttcaaccattctataaaccctaaggttctataagtctagaatctaagttaataatagacacatttcccgtgactccttttctttttagatttctgcttgaaataccatgacatttcctcatcaattgccttccagctttttgtcactccaattgcagtcctgcattcagaggaaagttgtcccttggaaagaagacatcataagtaactatgttcttgccttaaatatacagacattaagcaatttagttttcagaattccttttcaggactgaagagatggctcagttaataaactgttagctaggcaagtctgagcacttgatgaggctccccagaacttgtgtaaatggccaggcatggtgatacaggtctataatcttagtgggaaagcagagagaggggatccctgaggctctctagataacctttcttgccaaattggtgagtgtaaaagttcagtgagagatcctatcccaaaaacaaggttgactgtgtccacagaagtcagggcctctgttagctatggagggaggaggaacaggcaggacacagtcaattctgctgatctattagcaagcagcagactcttggagggagacagtgtccaggtccatgctctggtgagcccagtaggctctcatgcttagttccaaactcagagtcacactgatgacccttctttaactcaacagggtataaaacaaaagccaaactagtaaatcgggggaaatagctaggaataggagcttatagggacagacgggaaaagcggggtgagcagaatacatcatgtgcatgcatgaagttgtgaaaaaaatattttttcctcatagatagaagattacagtaagaaatagaagacatttgatatcaatctgccacaactacaagtacacctatgtacatgcccctagatatataaatccacatgaacacacacatacacacacagacagatgaatgttcacgctcacacacccactcctccaaactttataattcctttccagagatgtttttcatgctggagcatctcatggattaaacttcagtaatttggaggagtcagggccacacacctggaaaccaaaagacttgttcaatgtcattacaatattttaatgaatgaactctggcaaataaatgcctcggtcccctagatgcaaccagcatgcttcaatgctctagctatctgcttgttctcttatctattcccagaagcctcagcttctctacaattctacctatccctccagatccatgttgggtactgccttttccctaaacacttcggtcatttcagttagaatgtcctaggttcggttttaccacacaccctctgtcatgcccatgtaggccctgtagtgttcgggttctcagcagtccattcagggacagaatatgtggttctctactttgccaaatgggggggtttgatctaataacttcctaaaatcatttaaccgacacctgctactgcctgtgatcatgctagaaattcatcctctcagctgggagagagcgtgcaagcaagtggcacctcacaaggtggaatttgaccttgcgtgtaagagcttttggaggttctgcgttttagtgcagttgttgtattctatgaaggtattctgaaagtcatcaggatgcagtcaggaatgcaggagtatgttcgccacacagtaatttatcaggagaacactggcaacaagcatgcatctcaccacatttgaaagcttggataaattatggcaaattgaagccattcaattgaattttatttacaccattgagggaaaaaaatcacaatgtaagaaatactttttgacccaggggaaagcattcataacatatgaagatgtaaagggaagttatacatgcaaggagaaaactcactagcaaagaaattatgcctacttagcttgcatataaaagcaagtcttagagaagcctgtcccctcagcttgtataggtcaggggcataggcactgtgatccttgtagattctgaaccaaaagacatacaggaaatgttctcaatctaatcaaattccccccttcttctcttcctctaagttctgtaaagtttacccttttaaaagtaagatttattattttataaaatacattgaacaattagcaagagcatttgttaaaggcctacacatagtaagccagacatggtggcacatgcctgtaaactcagctcttggtaggcaaagctggcaggattactccatgtctgaggcaagtccaggctaagcagttagtcctgggtcagcctgggctatacagtgagtcccagacaagcctgggctatgcagtgagtctcactcaggtcaccatgagctccaggcatgccgaggctggatgacatatgagatgagatcctgcctcaaaattagttaactaattaactatttggaaaaaaaaattatgcctacttagctaattaatggtaggcatacaccgaaaaacaaaacaaaacaaaaaacaaaacaaacaaacaaaaaaactcaggtgtttggtcaaaacttatgatatcaaaatgtattcattctgctatgtgtggtggtacatgcctttaaacctagcactcaggaagcagaagcaggcctctgtgagtttggggcaccgtggtctaaagaatgagttccaggacagccagagctgttacgcagagaaaccctgtctcaaaaaacagaaacaaaacaaaacagtgatcattcttcaagatactgaaaaatgtatttaagaagtttttgcttttctctatctctaagtaaatgtgttgtattctcctacagtggtcccaggacaagtgatgtctttcctggctttgtttaaaaagaacagagtctcttaataatgtctaaatcagtgcatgatagttgtattgtaggcttcaaagattataggcaataaggaggagcctggaaatccagaggagtgaacagaactggggaatgcatatcctatgggaatcttacctcaaggtcaagggaaaggattgcctggactttcccaagcagagctgcaaacagaaaccaagacacacacacacacacacacacacacacacacacacacacacacacacacacccctctgtagcactcttagcactctttccttattctctatagagaacagtggtgtaaggtagccctgctgaggatggcccagacttcatctcaggaagccagagtctacaaggtttgaatctttgagaggcactccccgggccattatgctgtggacttccttattaggatttggtggtccctttaatgttagagaataccaggaaagtaacaataccacacacaggcacgtgaagttatgggcacactccctaggtcatctcccttgatcaatgaatacccatacagcctgtgtaaagattcaagatgttagtgaaattcagagagattaactggactctcattttctggaaagacagctgagctatagatcctgtcaatggtttgtcaaggtgatgtcaacgtagtaaatgaccaggccaaaattatgtgaatacacatagtcttattctagactagtatgaacactttgactcacaacaattcttcaaaagttcataccattactactattattaattattaaaataaatggctgtggtggtatgagactgtaatcctagtaccctggaagctgaggcaggtggatgcttagtttgaggtcatcatgggctacatatgcagagacagcctcaaaaaacaaacagggctggaaagatagctagctcagaggattagggtcacctaattgcctttccgagtagtacagctggatgccagcacctatgttaagcaactcacaactgcctgtaactccagctccagaggatccaagcctctctggctatactcatgtacacatcactacagacacagacacggacacacacacacacacacacggacacacacacacacacagagacagagagagagagagagagagagagagagagagagagagagatacacacttcaaaaataataaaaacaaagctttaaagttttaaaacaaacaaataaaaaacataagaagaaaatattttaaatgtctttagaacaacttaaatgaacttctgggactgacaaagctggcacatccctgcacgctgaacatatatgtggtgcatgagaaccactgaatacatgactttcaaaacagagaagatgcttcactaaaacaaggtgctccacagctggctccttcccacttatcttctaaaggcgctattatgtgtcttaaatatgatgataaaaaactacatttgggtatggagaattaggcttggggaatacataattcaatacttgtggtattgagactcaaaccaagctaaattatgaatcaaaacccagaaccaactatatcaatttgcattaaaatgagccaatccatcctttgtacaaagctgagaaatgaatccattaggggggaaaaaaaaagcctatagaaactggaaacaaaaacgttcatatagccaaaatagtttcaaaaataatgtagctcattgtttttctttttttttttttcttttttttttttttttggtttttcgagacagggtttctctgtgtagccctggctgtcctggaactcactttgtagaccaggctggcctcaaactcagaaatccacctgcctctgcctcccgagtactgggattaaaggcgtgcgccaccacagcccagttgctcattgttttttcaacttcaagatgagaacaagtacctaggcatgcccaagactacgggtgatgaaacatctacacaggggatttccttcctagtacagtgaaaatacaacgaatgataactaaaagaaagtatagcaatgacttaagctactttctctttctttacccctcaaccgcatggttctttgtagctcaggataaccactgtgaccacctgaaatgaaatgcagagagacactgaatctggaatcagaaaacctgtcaacagtgccagttaaatcatgtactggccaagcatcgcctactctgtgccttcactgtggagttaaaagagcttgtttctccagatgttacatagaactggtgacaattttctttcccagacagatgataggtaggaagatagatagatagatagatagatagatagatagatagatagatagatgaaagatatgtagatagatgatatataaattagatagatagataaatagaagatatataaatggatagatgatagataaaacatataaaaatatatattaacactatcttaaaaacacatagaacgtttacaatcctattcattaggcgtctctgtccgtgtttcattagacgctttcccatggagtctagggttgttgctttcctgttaatttttattgtgctgtggttttctatgtcaacagtttttgttttcctagtccttttacagtaggaaaaaatacagacaccataaatatggcctgagaaggtggctcactggataaagtgcttgacttgagcttgattctcagaaaccacagaaaaatgtttgttgggtatggtggtgtgtgtgcactgtctttgtaatcccagagctagggaagtctaaacagggagaatccaccccagtctggacagcttggtgaggtcaggccaataaaagatcctgtctcaaaagagatggtcacttttgtgaatgtggtgttgaacaggtatggagcccatacacaaatgtatataagtgcttggcccataggaagtgacagtattaggagctgtggcctccttggaggaggtgtggccttgttggagaaagtgtgtcactgtgagggcaggctttgaggtagcataaggtcaaatgtggctggtgtgacacagtctccaactgctgtttgaggatccagatatagaaccctcagctccatgtctgcctgcactctgccatgcttcccaccatgatggtaagggactgaacctctatactgtaagccagcgcaattaaatgttttgtcttgttttgtttttttaataagagttgtcaaggtcatggtgtctatacacagaaactgtctaccaattctataataaacatgcacaaatatgtattaggaggaggaggaagagaaggaggaagaagagggagaagagaaggaggaagagcagggagaaggaggcacccaccctgaaaaccaacaccttccagcaactgcagggaattgcccttagggccttacatatgttaggcaaatgttcacctggcacaatacacaaagctttgatactttaacatttcaatacaagacagagagtcactaagttatacaacctgaccttcagttcactctacaaaccacccaggcctggaacaatcttccagcctcagcttcccagttagctgagagtacagaacctgtaccaccaggcctgacccaactacttcactttccattctagagggattccgttccggctttatcaggccatgctgtcacagcggccaattatttattaagcattaaaaagcactgtccgcttctgtgactgagctttgttacaaatcagtctttcagaacttcacagacctgaacaaactagaaaaagaaaaatgaaaagcaatcctctcccacactccacatcctttccaacttcaattacttggactcatttaccttgcctgagatgaacaaacttcgagcaagtgagaaaacgacaatggtgtgacattgtctatattctcctatccctgctaattgcttaatttccagagctaaatataaacaactaacttccctttgaaaggccagcagggctctgccgagaaccaagagaaagcggttcgtgcctatagctttcagatccatacatacaggctggaaatttccatttgatacttaataaactgcaccccagaggaaacacaagtcatcaagcttttagtcacgatgacaaaatagcattttctgaatctagagtgctatgccagctctcttctcagaaagaactttctgtttactccctactgtatccgcgtcagtcacgcagagttccaactaacgttttttgttcttaaagaaccacttaactttgtgaccggcatttgggggtgggggtgtttttcgagacaggatttctctgtattttcctggctgtcctggaactcactctgtagaccaggctggcctcgaactcagaaatccgcctgcctctgcctcccaagtgctgggattaaaggcgtccgccaccaccacgcccggctattttttaatcatgtaaaaagcactgcattaaatcataagtgaagtcattggtaacatgggttttctgattaacgatatgttactacttaagtaataaaagataattttgacattcgcgttgatatgaggaattatggtaaaaagggaggtcacagatcagctaagctgctgcccctttgggaagccacaaaacaaaactcctgtgacagtcacaggcagggaggaaggtctcctgttttgagtcagtaatctggacctcagcaggaactgcagaagacagagcattaagaaagtactcgttctgggagttcacacatctctgatgagacaccacaaacagcaccaaggaaaggggagaataaatgtgaatccctccgcatccgccattttgctccacggcatctccacctccatacaccttctgaactacccaacccactggcttctcatgaaagcaagaactgactcatgatcaaggggacctcaggctaggacgtccatttactgtggctcaagaaatatgtgtacggtttggttactgagagaaaccaagggagcctgacagatggtcttaaaatacctctgtcttaacattcagactgtggccaagtcaagcttgtttcatgctctgaaacacttcagggtttagttatccaaggagagcaacacaccccacctgaaagtaaaacctgtaaggcttattttaaaatgcaccactcacgtgttctatttttttcccccaaaacacatatgttcaaccttttttgttttgttttggtttatttttttgttttttcgagacagggtttcttcatgtagtcctggctgtcctggaactcactctgtagaccaagctggcctcgaactcagaaatcagcctgtctctgccttccaagtgctaggattaaaggcatgtgccaccactgtccagcacatatgcttgaccttatatgaacctcatattaacatacagatgccaggcagcatgtgaacttaaaagtcatgtcaaacactgagtgattgggatatgttcagttatagagttaccctttataaaagtacccacacagggtctatgtggttctcacacacaaacatatatacagacgtcagggaggagaaactgattttgtttaaacatcacttgtcatccctggctttccaagccgtcattgtcccctactaataagccaatggtgggagaaaaatgcacagaatgaaggggcgaatcagtctgggcagtaagaagacaatattgaccacacgaacaaatcaacactctatgattcttgaacagctgtttccttcttcatggcacctgtgcacaaccttgaattaataatatacaccaggatgcttaaaatattttaactcataggacacatgacaaaatgtttgggcacaaaattatttcagcgaaactgttttacatacatatgctggcagcacaaaaaaatcataaaactaaatcaaaataattagctaaatcaataaaaatgctgaagtcatgaaggactcaatttataatactaattatttttcaatgttctatgactcacccactaatctaccttgtaagaatctactttttaccacgtcaattattaaatatgccattaaaaatgtccctgagggggtgggggtgggggtgggattataaaattcctctctaactcaacataacctcaatcaggtttcaattcaaagactgaaaacaggccaagataatcacaaaatgcaaacaagttaaagtcagtagcaatcttaaaagtcacttacatccagctttgtgtccactgtgctctaatagaggaaaaattatcctctagagtcattaatattttaaagaagctaagtgatctaagccaaatcaggagaaattagcatctagcgtggggtggctcgaggtcatcagggcaatttcaatgctgctgcttctcaagtcagcagccaatgtgtttctgtttcctgcccaaattttagggattgtataaccagaaagaaacacctttaaaagcaaaaaatacaacaccatgtacagttggaggggggttactcagagccacagtttccccaagttctgcccatccctgtccctttccctatgagaaataggcagggggaaatacatacaaataaataaaactcaaaataagaatactgtgcacaattttccagtcgtttttcacttacttataaatgactgatacccatacaacagacaaaagaaagatgtgaaagatgaagagggtacaaatattcagacaccagttttcaaaatgccaagatgaacgcaaaatagactcttctcttctctctctctctctctctctctctctctctctctctttctctctctctctctctcgtctttaaatgtacttgaaatatagactttctgtattttttatggcaaaacactgaagtatttaacatttcctttctaaaagactaaatttagagaatgtaagggatatagggggaaatagctgtaacaacatttgcaatttaaataaagagaattcagtgtctcgctaagcagataaacagtacagctggtcaaacttgcagcacagtgacagcactggtaacaagtaggctcagtagatatagataccatgccattaacagagaaggacaactgacatttaagtctgtacctataattttatccacaatgatatgcattaggatccatttcccacatacaataagataaataaaagatacctgctaccagttcatttattcatagtcaacaacagcatcacgccacttccctgtctggagtccccaaacctcatatatcactgcctgacactgacacctactggaaagtactggaagtgtgtgccccccccctccctgtctgagcagtagctaatttcacatagggtagagaatatataaagggtaaatttcaattgcaaataagacaacctcaggttcccaaaaagtaatgcccgtgccgaagatttaaattctaaggcatctttgagaaattacaaatctcaataaatcttcccaaagaatactcctgttggaagtgaacttccccatgactccagtaacatgatgtgtgcttattcagggtcttatcataagactacttagtagctttctccagcaccttaactttgctttatgtgtggaagtcaacgcacccaatggccttacagctcaaaacccctctgcttttgtgaaagtgcttatgggaatagatgagaaaaataataacccagcttttttttaatgcttcatacatttatatccttagctttaaaaaagtaacatatattaatgattcatgtatctataccaatacttaaaaagtaaaatactaatacttatttagtgaatgcatttttcttctccattatcaaaattggctttttgtgaaaatgtaaacatcttacaaaaacacacggattctttaagcagatgaaatctcaacatatccaacagttagttctgtacttttccgactggattaataagttggatcaagctttaattaacttaacacaaatgaaaatatagcatctctttaaagcacgtctcactatatcaatcgatttcctaagattatattttaaaaagtaagtttctggacagacatatattaaattagacaaactgtaaagcacaacactgtgattaaaaaaaaaaatcaaattaacagaatccagcttcccagcctagacccattgctttataggcagagcctaggtgcttcaacacatcaaatttaacatcttcagaaaaataatgagataagaggcagttttcccaattactgatcagttgatcttttaaagaacagtaagattccttctttagaagcatactaagaattgtacagggagaaaattgtaataacataaaatttgatttgctgctgctataatcttccttttgcatcatatcatcttgtttttataaaaataaggagacagtacgaacactaaataagataagaccatgggcaataacaaatactaacccaaaacaacacaggaggacgtgggacggcttgtgtttagaataactgacattgcattcaaaatgtataactgtcaaacaagttatatcctaaaacactacttaacccacctggccacagaaaattgtgttcttcaactttaactaggacatgtggacacacaagaatataagaaatgtttacaatggggctaagcttgtttttaaaatgggcattacttttcttaattggaaaatatcagctataaaaagaagagcacggtaagcaatctgttgaaagagcattctgagctctctgcttgattttgctggagcttaacattgtattaatgtgtcattaaatattaagatattgtaaagtaccccagaggtaacaggtcttaatgaaaatagtttgtcatattttctccaaacaacccatctcagaagactaggttatagatggtaaaataaaatatgtactaaaatagtacttgtctcataggcttaaataaattttaatggagcgatttcttttaacagcttttgcaatcagttgcctggaaagggagtttttcctttccttcagaggagcctgaaagatgagtatttcctagccaggcaacagtggattcttcagacacccactccctatttccaatcagttaccttgcagagcttctggtaccgcggagaggaaactgccatcctttgtaaacgatgtaacaaaaccacaactttctgcagagacgttctcaccaccgccatcattttaagtttaccacacttctgaagagtcctcagaatttgcattataaatgaagagcagcgatcatttcctcccggtcactggacaatgatttgccagttctctgagcatgctcgtttccagacatgcatttgaaagataaaggggggtttaaggttctagagaaaaggaggctgggagtccatcaacttcttgatttgacaaaaacactgaagaacgccacccagacagcccccagcagatgctcacagccaggacctgctcagcctggcgtggccagaaatgaagcaagttgcagcgtggccaagcactgctggctgcagggaaggagagcgctccggagacgagaggatattaagtgaagcactaaagctaaagatacaaaggcgacttcccctggggacagagagtgaaccccatcacggccacggtgcatgcctggtagctgagtttacatgaggagaccgggtggcagggaacatgaggctttacagagagatgcgagcactcccagtggaacgcggctcccgctgtgcttgtggaatgagtagaaacactgaggagcactaagggatttgtctggaaggacagactgaagcccactctgtgctaataaatcaccttaagccagtctgggcattgcatcatccaaaacaaaactgaacatatttacggagggatgaaggtttacctcggctccaaaggcagagccaaaagataggcttccaggtccctgcacaggagcaaatcaggccagaaatcaaataggaccccttaagtaaacagccaagttaataacaagaagcctgcaaatgactgtagagcatcaccctccatctccctcttagacagcatcttcgtaatctttctgtttgtcctgaagctgttttaatttcacatataggaaatccaagagaacaattgtacatcatatgaagggtgtgtgtgtgtgtgtgtgtgtgtgtgtgtgtgtgtgtgtgtgtgtgtgtattatgtgcatgtatacatacatgtctgagagacgttttgcactatgataaccaatttgggcacaatatcttagaggaccagagtatcccaggatgattaagtggctgggcaaaagggcacagcctgaaactaagcccatatgtttctcattatcaaggtccggcctatcctaattgcccagggaacactgctcattcacctctctgtgatgctatggtcaggaaaatgacattttcaggaacttctttttgcttcctctgtctcctcagtccttcacactcgtgtgatttaaggtcttagattgggtcaaatagagctggttcatcaaacttcagcctgtgtatgtataatttgccatcagctccttattgagaacctatactgcctcctcctggtgaggctgccaaagccagagacattccattaacataatggaaagtgcttgttcttagttagataggaatacagattagttagtgataaaacaaggtcagggtctgaagggttgagaacgggaactgatcctaaagggaagtggacttctggggggtgcgtgtttgttctatgtcgaccgcagctatggctgtacatctttgagtgtacaaaaaactgaattatagaatgtacatagacagggcagtatgtaaataacagatagatgactagatataaaaaatatgaacttacaagttgagcatcgttcacatgaaaggcttgagcccaggagtgcttgaagcttcaggatttggttgtttttgtttgttgtttgttttttgttttttggggtttttttttggttttgttttggttttggttttttttggttttttggttttttagtttttgtttttttccccatcatggaataaaatagttgcataaatacactgaggtattccaggggtgggacccaagcctacagataagtcaattgtgtttcacacagaccttaagcacaaccctgaggatggtttttatagcattattagtgattctatgcatggaagaaactgtcacggtatagaacatgtaggacatcatgttagcatttaacaacttacagagtttagagtatcttggtttcagctttttggttttttggtttttgctttttttttttttaagttggggatgcttaacttgtataattcctgttccagagccagcaagtgaaacgggggttcaccccacaagttgggtgcagtggtagaactgaacgatcttctgtctcctacaatagaagtagaacacgtagctagcagcaagcacagggcaggacaagcggaagactgtgaaagacaaagactttcggatcaaatccagcacattctcacatccactccgcaaaggccatagggactccgaagcttatccggaaaagaactaacacttctcagtagttgatactgcaataaatagagcttacaactaaatgtaattaaaataatgaatgccctagactgtggcaatgaaaattaagacaaatgcgtcaattaataaattgagtttttaaatcaacaacagtttcttcttaaaataaaagagccaaatttggcaccttctacgggaggctactcttaacactttattctgctttaatcaaaatagaagaacgtgccatcccttcaagtccaaacaagtctctcctgttaccttcttctcctatgataccaactacattggattaccacacacatctcatgttcacctcctcccaaggccttcaactcctgcagggctgtacttctagctactatcacatctagcacaaatgaacctagcaggtacccttactgtctctgtcactgaggacaaatccattcctcacagagtcgtcagctagattcctgtaacttggaggctataatacctcactctctggcctaatcccctttatgacatctcccaccagcagcagattaaatatacattatactgccaggtacacaccaccaccaccaccaccaccaccctgccatgtacagttcagctctcaaggagcatctctctccagcaagtcatcaaaatcaaattttctcttactgaaagtcctctgcctagaagaaaaaccaaaacataaatacaagagtccaaatgaccaaatgtccataaaagaaatggtccagaaaggcttcaaccaccattgtgcttccaagcccttctttattaaaatatattcagaatcatctttaaactgaacacggtataaactgtatctccatgaaatacctctgtggggctttatatctggttggcacaaaatgctaatcaaatacaaacagtgaacatgtcatctcaggacaaatagatacagatggacggatagatagatagatagatagatgatagatgaatggatgcattgatgaatgaatagatggatgcattgatggatgatggatggatagatagatagatgatagatggatgtatagatagataggtgatagatggatagatagataatagatggatgcatagatagatagatgacagatggatgaatagatagatagatgacagatggataaatagatagataaatagatagataatggctatcagaatagatccatccatctcctgatcatgcaacaagagtacaatgaagtaaacaccacaccttacacagaaatctcagatggctggctcaccaccaccagcagcagctcaacaccagtaaatttatttcatgatttcaggtcttttctgatttcctcacatacctttccatttctgaacacgtttccatttgaaatcatgcacacaaacgagaaataaactacaaacccatgggaaaatttaaattcctttatctcagaaatgctcagccagtgccactacatatctaacaaccatctatctatacagtgccagaaacaaagtcattggattaatttttttgttttagtcaaacaatgggagggctataaactaagagtatccaatctagaagagcagaaggtggaagccacagagatcaccatactgtgaggcatcctggacacattccacgtttgtcttcagataaacagatatctgactcagctgttagcaaaggcctgccttcgtatgagcccaaacagactatgttagcaacatcagattatttttgagaagcaattaccgtacacattttctctccatccattagccaacagcctccttgggctgtcaatgtttgccataagacaagtaatccccagcttagttatttttatttaaaagattcccaccatttctatttaaatttatttttcccatagcttgaatattcattaaaaatggagaggagctggagctctggtaagaatatatcctaagagaaaatgtgtgagaaaacaccactagactctccaatgggcctgtgtgctgctcaggccagatattagcagggttcatgtggaaccttccttccttcccacaagttactgcttactggggggcacagtctaaacagcattgaaattaacaccactataaattaaatatctgcaagcatgtgtagatcaaatttatagttgtttaaatcacaaaactaatatggtttagcgtttacacacactgaatgcccactgcagcctcctgaaatgaggactttctcgaaatattttagcaattcacattaacagtcattctgagggtcgagagagtgacgggaaagagcacctttaactttgatacttgcctggacacactcatcaccaagtcacaagaacagtgtgcaatgcataagaaatgagcaagccaacagacattttctctggtatttgtttttctttcttttctaccatttctttgtgttggctggggtccatatgtgcacgtgtgtatatgtgggtgcccttggactgtgaaggctgacctcagatgtcttcctcaatcactctcctctccattgttttagacctgatttctcagtcaacctggagctcacacacagtttagggaagactgcctggccattgagaccctgaaattgcctgtctccaccctcctacccacagcttgagatagaagacccacagcaaaatcatcaggcaacccccacactaaacctttgacagtacaaagaattcaaactcaggtctttatgcttctgtggcaaaaacattgcctactaagccactcttcccaggccctaactctccttaatttcactatgagactgtaagagtcttcacacataaggatggattataaataagcctattccaaattaaacaaacttgttttaaaagttttttaaattttctgtgagtgtgcacatgtgcatacacatgtataagtgtgtgggcatgtttgcatgcatgtgtgccagtgtgtgcacatgtgtgtacaagtgtgtatgcatgtgtttgtgcacatgcacgtgtgtgtgtgtgtgttctcttgtagaaggtacagcaacaacactccttttaacacattaataataattatttttaacttagaaaatttaagagtaatagttccaaaaaagcctctagacctttaatccaatttgctgatattttataatatggtcttttagatatttcaagagaaaagcattcttaagaatggattaaaaattggttaacagtactaaatttcaactgcagaagttagaatcaagtgcatttacttgggacttgatcctgaaacatcatgtaaacaacaagaatagcatccctatgcttaaagaactatgtgagcaactaaggtaggtaaaatacatacactcaatgataacaaaacgcatgttcaccacaatggcagaagacagtagtcaaagtgatgaattcacatgtttgtaaataagtcacagcatacagacaaaatgtgatgtgtcgctgtggcacacaggagatgcccctgatgaagcaactttttaaaagttgtaattgagaaggcttatctaaaattgacaagaaatgatcactgcatttacccacgataagagaaaaagacgcaggagcacagaagggctatgacttggaatggaaagagagattctggcatgcttcatataatttcacacaaagttatttaaagaaaagctttaatattaccacatttctcaagaatgagatttgaacctcagactgcatatgtagtcatgattataaagtaaatacataaataatgtctttgagcctcatagatctggctataactgaatcacaaagatttgaaatttctacagcaagtatttatattaagtgtagtataaatacaagttattgttataaataataaatatatattataataaatataataatacaaattataatttcccattcatatgaaggtgaaatgaccttataatttaatattcaatagcactaatggcacaagggcttaaaatggcagaaaaccaagcagccctgagtctctagctctaaatacacaattatttctataaaacaaggtggtcttcagcctaatgttaagtatattaagtattctgtagatcatatccaaaaaaaaactagttattcatgggacagcacggattccataactcaaagtgcagacagcctcctcactttgaaacagtaatcagttccctggtggcccaggggctcaggagagactgctgcctgtggcttcccacacacttaccagcatctgctgtcggagctgccgggccaggacactgtcctgaagagcattctcccgctgagaggcatcggccagcacatttgctgtggtttctgcttcctgaagccacttgacaaagttctccaggtctctacgagaagtctgcactgtctgtagctcagcctccaaggcactctgtctatcagcgatgctaaaagaaacaacatagaagacacagctctgtgactttcagggtgatgtcatacatcatacgcacccaagacaaaattaacacacagcctcagaggaacctccatcctttaagccatcaaacggaaatgtgtgatttttttcatctgtgtgtctaaaataatccttaaagaggatgtctagtgacttgtgagataccagtacagagacagagaaatattaacaaagccacacccacaacataaaataaatcatgcctgtattttacatatcagatttgtgcattaacatgatctcttatagatttatgccaaaaatctatgaactgccataaaagggatgtcaatcaaaggtgatattaatacatagtcatacttcactcactgaatttaaaagagcaaattcaaaataaatatttaagacttaaaaacaaacaatacacaggctaacatggagagctcagtgttgaagcacttgcctagtatttacaaggccctgggcccaacccccaacaccacaaaggaaataataacttttggcttttgctaataatctaagtaaatataatgtgatttaataatacttgacttaataattaatatttagtaatatcaacttaatatttaatagtatctgaaagacactgaacaaacaagcttttatgaatgtttcataagttctacatcaaaactagagcaccgagagttatctgaattaggcaaggtatatacctgtaaatccaacatttatagctgtatatacctccaagtttcacagtgagaaaatagacaaactatttttattaaatggatactaggctagatagatggatggacctgtgacccagagtgtgtgatgtaccatcaccaggatgaagtttgggtctcagaaagtaacaagctcagtggtccaaagactcttgtaattccagctccaaagggcacaatgatacaattcctattctggcttctataaaggcaggaaggggcatgcacacacatatacactcacagataccaaataaataaatcttaatttgaaaaaaaggcactcacatatttttagtcctatctatctagacccaagaacactggaactgcccgcccattcaaagtgtcatacacaaatgtttagagcttcatgattcagaatactgaaacaccactgtacattatctgaaggaagcactaaccaatggaccattatatgctaatacatgaacaattactcaaccacagaatgaataaaaccatcctgataaacactctaacttaacatgcccacaccacaaaaataggctaagagaaggagtccaagttccaaaggacacatactgtgagattccatttgggggaaatctctaaagcaactaaactcaagacagggaaagcagatgacttatcctccaggaccataaacaacccaaacaggaggtggagagtaaagcgcactccatgcaagcaatgggataggactcagaaactgagacaaactacactcaatgatatgatcgggctctcaaattcatgcttctaagtgaaagaagccagatacaaaggacaacagtgaatcaattaatgtgaccttccgagatgacataatcatagcagcagctactctataaaattcctctagtcccatttgtctagaaaataaacccgaactgcctgtagtagtttgaataggaatggcttccaaagactaatgtgtgggaatgcttggcccacagcgagtggcactattaaaaggtgtggccctgttggaggaagtgtgccaatatggaagtaggctttgcggtcttctaagctcaagtatggtcagggtgacatggtctttctcttgttgcccacagatcaacaccattgcatacactagcaagattttgctgaaaggaccctgatatagctgtctcttgtgaggctaagccagggcctagcaaacacagaagtggatgctcacagtcagctattggatggattacagggaccccaatggaggagctagagaaagtatccaaggagctaaagggatatgcaaccctataggaggaacaacaatatgaactaaccagtacccccagagctcatgtctctagctgcatgtgtagcagaagatgacctagttggccatcattgggaagagaggccccttggtcttgcaaactttatatgcctcagtacaggggaatgccagggccaagaagtgggagtgggagggtagggaagtgacgggggaggttatgggcaacttttgagatagcattggaaaatgtaaattaagaaaatacctaataaagaaaaaaaaaaaagatgtagaactcttagctccatttccagcaccatgtctgtctgcaagccaccatgcttcctgccaggataatgaactaaactccattatctggaaactagctccaattaactgctttcctttaaaagagttggcatggtcatggtgtctcttcccaacaatagaaccctaacagagacactgccctactcggaatgttccgtcctctaaaactttttgccaatttctctccccaactttaacctctacttttctctcatattctcttcatgtccaagtaatgtttcagattttctagaatgttattgatagtatgactgtgtaaaaactttatacctacattatagtgtccttcctactatctctacttaacaagatcaaacttatcttttaaagtttagaacccatctctttgagactattctttctcaagtttcctcactctgggtttataaaaggacagtgagctgctctatataaaaaataatcatgtgtattctagaaaggtccttagattctgatctgcttccactctacactttataatatatagactttttaatctgtccacttattctacaacctacaggcagcaattgttttccatatttccacattcctcagagtccatactgcagaactatgatgttcaccagatggatatctggcctttgagatttgttcctaaatgccatttttccctaaagaacctggagatagactacatcaaactatatacaccatgaaggggtaaaattccagaaccaaagaaacaagactcctgacaacaggaaccatcaggaggctatttggtggtgacaaaggggatcaaagagagaagagtgtgttgtcactttgactgctctgtggtctctgtattaactcgacaaaacttacaaaagatatactcaaatgaaatgtctccaaaagggagaacaaaaccataagatccaagaagagatgacacattgagagaagaagaatagacatactcagtatggtgagtgaaggtacacacagaatgcatggcaccaggagagatgccttcaagataaagatagcagaagtgacagcttccctaacgtggcagactttgtgaaaaattacactgccaggctactgaaaagatgtgagaggaattagcaataggaacgaagaaacttatgcattaaaaaaaaaaaaaccacagaggtaaatactaacttccgataaagtaaaagaatcaaaggatcagtgaaagtccctgtctcgaggaaacaagacagagagcaatacagggagacttctggtactctcctctggcctgcacatgaacgtgcaaggatacacacaaaggcatataccatacatacacaatacaccttctaattataaaaaggaatattgaagtttagactctgtttatagaagtctaaatgatacatatgtcataatgaattatagtggaggacatatgtatgtctgtatatgactcagtagtagaatgcttgcctaccacatgcacaaacctaatttctagaactacacacacacacacacacacacacacacaaagagttatcatagcccacacatatatgtcactttgtgttctgatttctgacgttaatataatttatatgaagtttctaacagagtgcagctcagctgattttttgtttctaaaattagatccaaatctagtgtggtatactgaattttattcacacacacacacacacacacacacacacacacacgtgtgtgtgtggatagatagatagatagatagatagatagatagatagatagatagatagatagatagataatatgtatatatatatatacacacacacatatacaaatattcaatcaagcaggttaataaattatttttaatagccctgtatgctaccttcagaagaaaagaacctatttttgcctcttctgcaatttcccaggaacatggcttcgagtgaaccatgtaaaagtctttgatatatcagttctcgccttagaatgaagagcttggagcagatcagtggaagagccatttcagactctctaggggtccttttcaaactgtgtaagccattgctgatatcataggcacagctggaagagttcttccactgttgttcccatcctagcttgaaatcccacttcactaagtgtctctacttgtacatgaaatgttactggagcaaagaggttgagaggcactgatcctagggctcctgtggccatgcctagtactgaacccacattcatctagagtctcagggtgcatatgtgtgtgcacatgcgcatttgtgtgtaacagccaagggcaaactgatgtaactcctgagataccttctgcttttactaacacagtctggcaggccacataggctacattggctggtgactgagccccaaggatctacctatctctgtccccacagccctgggactaccagagcacactatcatgtttggagcttttcatttattacaaacatggttctgtaggtccagctcaggtcttcacccaatgcttgatttgctgggtctcaaataagaccaggatggagtagaagaagcaaaaggacaaagatgaccgtatgtatggaaaggatcctattataatgggaataaaagttttaactttaggaaatctgagttcagaagacaaaagcagggactttttaaaaatctaaatctttaaacctataaaatcaaaaaaagcaagaataggctgaaaacatgtaagatataacatttgaagtctacacagggtactttagctaaaatatttttatgcctcaaacaaaagaaataaccaactataggacacaaagaaaatagaaatagcttcacataggaaatgtaaggccatccacgggtgacagatttgtgatcgtttatattaaagggaaccaggattttctaaaatatgaagtcttagctttcacatgatgtctgtaataaaactcactgtgatagtctataaaacaaaccgatagccattttgtaacataaaatatagccacctacaaagcaggcttttgaaaacgcaattttaaagatgttaggcaatatttggtattttaggctacagaatgtaatatactgttctatgaagtatgtgtatgcttataattggtcaaagagaacattgtccccaaatttttttacaagatgcaaaacgagttcttaggaaagccacagttgtgtgttgctaattttgacgtctttaacggtgatctctgcagaagatttaaatgtatttatctctttcagcatggaaaatggcagaatcagtctaagtagaaggtaggaaacttacagggaagtaatttcctaagattttgttcatctgaaatagataccaacacatactgtggggaaagcctttcagtgtgcacagagaggcctggggaactgtagcagtccttgctacatagagattgcgcctttcccaagccacttaaaaattcaccccacaggtcttaaggggtctgtgtgctaaggcactgatgccagagcacttaaaagttaaagaggagagctctggccccagctcatgatgcaaggttgtgtagaacacagcagagcacctacttccctgtggggctgccattgccagttaaaaaaacaacaacagaccacccagacatttccataagaggctgcgttctcgctagatcttttttaattatttatttaaactagatcactactcacatttgctcttcactttatcaatcaatattttatcattccatacccttcccgacatgcaccggtccacgttccaaaggcatcttcaaccaagtcccagagctcctgctatacaatcagccagacttggaccttagtctcctcaggccaaggcctcatctgggcttcactgaaactggaattcttaagcccaaaagtactatgttttcaatttccacccccaccccacccccattcctgtctaatctggctgtcccctcctcacagcaaagttctctgaaattatttctataaatcgtctgcactttctcgcctctagattgtttttccccacaaagctacagtgtctctcagttcagtgtctttcataagattctatcttttaatatttccaccctatcacaccatacagctaaaccaccaaagcatgccaacatccaaggcagatccgaagactacagtatccatggctgcatcacaatagccaacaatgtcttcatttcaaaagcaattgtgtcctttctgctcttcccaactgttctttttagcccagtgaacaactctcaaagcatgatgtacagagattaagttggaaccaacgcagtgtcgctcccagacttatcacgcactagcctcccatcgcgctcatgccgagacgcctgtgcttcataaagttcacatctgaccactgggttttgctttctaccattttaaagtcccgttcttacattacactgccaacttcatttacaagttccaaacaaccgcctacaattatgttaatctttatcccaacttcttccataccatgtttgcattctactatttctcttaatagaatgtgagctttctggtggaaggaacacgtatgtttatggttggttcttctgtactctcttggggcctggacagatggagactagtgaatagttcattaattaaatgattaattcactgatggaataaaaacaaaacaaatgaaagaaaagacaaagactgtgcccactaaccctctatattatttgatgcaaaactgagaaaaatgtctgcatgtaggggcctggcacaaactgaacacaggaatcttctctccatacaccatacaaatagtatgtcatgatggctgtgctttattaagggcagaaaaacaatacatggactattaaatagcagaacagaacaatgtagaagagtataacttttatacttctctcaatgtgaacagcgtaaacaaaagaaacagactgaaaaccaaaggtgactattgaggaaagaaattgccttccaagaggaaagtccagctgactgatgcaaacctctggctctcataatagtaaatcagcaagaaggaaaaagctaactgcacttcccatcaaagtccattgactgagcatgacagtcgctaattttatgagctcagtggttgagcctggccaaagggtaggcaaaagcggtaatcctgatatgatgtctttcattggccactcttaaaaggttttgagccaatacctttttgtattgaaaaggtattgaaaaggggcccatgctgaagaatatacgctttttgcttaatctacagagacaataagcaaacacgacagagaaaggaaaacaaaacggaagcttggagacacgcgacaaaattcactgtgaaaactactacggtccaggaactaccaaattcagtccatttatttcagagtctcctaggtcccaggctgccccaaactcctggtgccacggaggatgtccttgaactcctgatcccactgcccacatctcttgagtgctgagattacaggcaattgttactataccctgtttatgcaggatttgagaattgaacctcaagacaagccatctacaatggagctatacgcccagtcctcaggctcagtcatcagtggacacaaaacttctgtcagtccatgtaaatatacccagtccatgagtaccaatgaataaagacagtcttatataaaaagaaaataaagttatttcactcatcagtttgaatcgtttgcatggcactcaatcaaaccatagtcctttaagttttatattcttttcttgccaggatggctagatctgtgctttagcacaagacacttgaatacaacatggattaagcaagtgtggtgatttcactaagtaagataattggatttttttaaaagaagtttcatctactaataaagactgagtgcaactctaatgcattcattaaagcagataatccaacactttaccatcaggatcagtagaaaccattcagaatgacaaacaagtctgcatatcagtcccgtggaagacatgacagcgatgatgttaatttgggtgcacttttgtggagcacagaccaggaaccaagaacgtttatatatgacttttgatctcacagtaggcctacccatcagccatgccctccgctttaaaggaaaagctgagacccagcgagatgaaataacttgctcaaggttcacactggacttgctctacctctaccatcctggaagtgccttccttataataggcatgtgtggtgataggacaagagaaagtccatagttaattagtgacttgtgagaaaccatagcatatagtcatgggatctgatttcctttataatccttcagaacagatcattctatttctatacatacacatacatatatacatccatactcatagacaggcatacattatttatatatgtatgtatatgtatatgtgtatgtgtatatatatacatatatatatatagtgttattttatctatatagagcaaaaataaaggactaaacaaccattcacatccaaatcaggcatccacgctccaaaacttgctataaattgagtattactaaccctgacacctgaaatgctctgaaatctaaaattgatttcagtactgacatgatgctgcggtggaaatttctgtttcatttactaaacatgttatataaattgccttctggttatatgtttaaaatatacatgactttttattagttaattaattacagtgctggcatggtacaaggcttcacacatgctacaatttcccaacttacacagtatgttgaaaacagaataaatttcatgtttagatttgagcatcatcttctatatctttcatcatgtgcctgtaaatatctgcaagtccaaaccacttcttgtcccaagcatttcagataaagaatattcaacttgtgcacacatatcttgactatcaaaatttgcagtaagtaattatctaactggcattaaaaaaggaaagcaaagatctaagaatttctatacatttctctatattacagatcatcttccagaaggtttagggaagcaatcaagcagactaatactcgtgctgctaggaggaagtcattcccactgcataaagactataattaaggcactcacattaaagggcagctgtctgttatcagggctgcttggggcttatacactgtagataagggaatgaggacctttaactatgaatggtcaatttcaattcataccaaacatctcccctgaaagctcatattaaactttatgaatcacagccactaacaacattactgtgtatgcaagtgtgataccccttcacctgtgcacaattctgctgacaatgatgtatattcagagtatattcagagatgatgtgaagtaagaggaagtgatgataaaggcctggcgggggccatcagagttggcacagtggccatgtgctagagcttgctctattctattattcacggaagctcccgtatctttaatctgatctgttctccatacacagtacagagaagcaccagtaaatagaaccgcagatctgagaagcaagagcacacagcgagcattcaccagcaatagctgacattctgataacaaagaagaaaaattaaactcttggtaaaggaagtaagagcctggctgtgtaggcaaaaaggcaaaaatccaaattccagctatgcttgatgagctgtgtgactctggggaactctctgctgcctctgagcttccatttacaaccaatgcaatgctgaggaagatgcgtcctgtctcttaaggctgtgggcgaactacaggagagctgtgtcaagtgcctaccacagttagaaacagtgagaagtcactcagatccacactggaaaaccacagcagacactcacaggagacagcagctgattaagtttgtcttccatgtttcagaattcagagcatggatagtgttaccggcttttggtcttaagaaattgtcgtttgctttctatgtcactaagcttgacagtgttaggctagcccaagtggtctcaaaggagttgcttagtagatctacccccagagtggtggtagaaaaactcactcctttttctgtctaactaaaaagcttaagtgcatagaatggaaacagactcacagaatactccattattaataaagcttcaaagattatacaggaagatcccaagtttaatcccactctgagctactttgcaagttcagctacattagtaagactctgctgtgcccccagaataattcatttactaattaattaaaatttcagtggaaggagttttaaaagcttcctgtggaagataatttaaaaagtggagaagtattggtctaaagtctgtctttataagaacaatgtcaaaaacacaaaagaaggttaatataatctcacaccttgcttaagaaaggaaggaatggtttatatattcccaagagatgtctatttaggatagttaaagatttgaaagacacacagtttcaatatagaagctgtggctgtcactcaggaaggattctgtgagccaaggttttgttgtattttcctaaccgcataaagaacaatatgacctaaatcatgtctgaatattaataggaattctcattactaaaacaactcagaaacagaataaagtgaagcacgtgttttcactacgacaaaactggggctctgtggctacctcaacgctgataaatgagagatctccttgggatataatttgtctttaattgcctcgtccgtctaacttaactgcagccatggactgtcttagagtatttacaaagaaaagcctcaatgttgctaagaaaaagcagactgttcattccagcgagtgctcaactttttggaattgcttacaaaaaaaaaaaaccaaagccatgtttcttacacatgtaatttctggaaatggatgaagcagttttaagatatatctctgtggtttttaatgcatttccctccctatcttagttatgagatctacacaaacaacatggcatgatacaagaacgctattctgctgaaactgccaagattgcagctatttacctttaacttttggcaaagctgtgtatttgttagggtctatggagaacctgagtaagcatctaacacgtaaacattctcatccttcaaggagttccagaaccttgttaaagaatctaactcacaaggctctccagaggtccaacctagtggtgtgctgcataaaggtgcattctcacaagcctcgcaccctgtagacaaaaagaaccaactcccttcgacaagagattctttggtctctatatgagtgcaatagcacccatggatacactcatgcatgagcacacgcatgttcatgtgcagatgtatacacgtacacatgttcacatgcacacacacccacacacacacaggcacacacacaatttaaaacacatctatacgcaaaaattcctctgtgttaagttaccattaaatttttggagttattttaacataaaatgttctggtagcaattttatccattacaaaataaatatgttttggtattaaaataattttcaagaaattgcacttagcataaaaaagaagccataatttcacttacatatgggcactaacagtaagctatataaatattttaactgatgatggacatacatggaatctggaaaaatgctaactgctgcccatgctttctcgatccctgcaagattaagtgagtgaaaccctctctgaaacacatatgttgttccaggtttttccatacataatgataagacaatgatggaaagaaaagataatgaattagccaaaactcggcacatagatgatttctgaggtcaggtggtagatccacagtgtctggtcctcatttgagagtatcccacccaaatatcatacgctatcacagtaacaattagtactaatattagcctgatgtagttacaactatctgtgctctcagagaactacaaaatgtattctaaataatacaaagaggcatagggaaaaaaataagaaaacttaaaataatactagcaaggtttatttttaaaaatacagtgttaaaacttcaagaagatataaaaatacacactctgcacaaaatatactgacatgaattttttcatcagaatttaaaagtagagaaaaataataagatacacttctaatatttgcctatttagcttgtttccatgggaaagcgaaggaaattggatgctcgggaaggagatgcacatgtccccacccaggcttacctttgtttgagattgacccatgatgttttcaagtactccgtggtttcttccacattccttgtgtcatcgccactgtattcttccagaagtttctgcaggacattatcaaacgccatgatgacaccatcgccagaccccagctcttgaagcaatagctaaggtgtaaattgaaacacagttagaactggtcactcagtaactattactaccacccctggttactcaataactagtactacccacccatggtcactcaataactactactacctacccatggccactcaataactaaaactacctacccatggctactcagtaactaggactacccaactctcatagtcctgaaaagatttagcacattttagacacagaaatcataagaaggaagcaagaggacaaactctcaagtttaaatcagaacaatcaaaccagagtaattctagaaatagcaaaaagagagcttttccaccatggtagtctgaagtcccaggcagtttcgggaggtggacaccctcttctgacctctatagccacctgcactcttgcatgacacacatatacacatgctttaaaatataataaaaatacttgtttaaaagagaacatgcctgaggaatcaggtgcctagtaggtgagagtaaaatattacccattgagatttctggcctcctcaaaccctcgtattcctggaatgcccttgtcattctttttgctgtgtagctaattctcacagaacatgaatcatatcaacataaactgagttcttgtgtatacatttagagacacgtcggaagattaccctggtggaaaccctctgccctttaactccgaatcagtctgagtgtttgcaaagataacagctggaatggatcaggcagccaatgaagatttgttcagcattctatctacacagatgctcagtgtatcacaggcacaatccccttcacaggttctcaacccagggaggttaagcggggtgtgtgtgtgtgtgtgtgtgtgtgtgtgtgtgtgtgtgtcaatcaagaaggacacttgtgtcacttgtatctgtaatgtttttgtagcaattgtgaaagaaaaatccaccttaaggcttcagaaagaacatacacactgttcattagagcagcagagaatctgtgtctagtacttgtgaaagactgctcccaaacctttccattccacagataccaaattcacacacatcccctagagaaaatggcatagtgtttgcacaataagacgtgcacgccctccagtgcactttaagtctcctgtgggttacttgcagtgcttaaaacagtggttctcaacctgtgggtcgcgacccctcagaagtcaaactatcttctcaccagggtcacatatcaaatatcctgtatatcgggtatttacattactgttcataacagtagcaaagtttcagttatgaagtagcaagaacaataattaaattgttgggggtcaccataacataaggagctgggctaaaggatcacagcacgaggaaggctgggaagaactggcttaaaatgacatcaatactcataattagttgtcctactgtgtggtcacgggataatggcaagctaacagaaaatccatgtgttcattttaaaatctgtagacatggatgctacagatgggaaggccaagtgcattctgggtatgaagatggaagcactggtgaacattgctgatcaggtttttctagtcatgtgtacaaaagcttcactcttacttcggggccatcgacaagcgtcataaacacatgggacaattcaggaactaacagacgtggccaggtggattttaaatgatacccatgagatgatagccacgagaagccctcgtgtgcagagatttaaggcattatttgcaggttctcagttttcttcccacattgttctagattactacattcttcctaaaagtacattttcatctcaggcaatcacaagggcaaatacaaagtatgtaaccacatgtccagcacaagaaaatttctgtgactacagaagtaatttttaaataacacactttaaacactgagtgttcaatattctcaccactattatgaaattggtcatgaaagctgttgctactgataaacatagaatagagaatgacactgaggtacgacttagcttgcacactacagaagtactcaaatggaagtctagaaaaattttatacattaaaataatctcagccgggcgtggtggcgcacgcctttaatcccagcactcgggaggcagaggcaggcggatttctgagttcgaggccaacctggtcgacaaagtgagttccaggacagccaggactacacagagaaaccctgtctcaaaaacaccaaaaaaaaaaaaaaaaaagaaaagaatctccctagacagaaaaagggtcaacaaatgaggattgccttgtagacgctaactatggctctactcacacaagtgcacgttcctgctcattgtgtctttagacatcttcccaaaataacaagaaccctgtgattaaattcccataaatctcaacatgtatgtctaagaacttgggaaaacgtgagagcccctaattatagttatcaatataaaacaagtaaatctatcaaatgactgcatcaaaaaactagccaatttgccttacttgattatcagaaacttgtttgctaagtgggtcccggcgggcctgctgcagcatgtagaagcgagcctcgtattttctcatgagctcttcagtctcttccctgtggtcgtcccactgcaggctgtccacaaccatgtcctccagctgctgccgccgcagctccacaccatgctgagtactctcccactgggtcttcagcttttccactggggagtgggagtaaaaagaaacctgttaaagtgaccaccacagaaggaaaagacctggttccaaatatgctataaatagatctagaaacagaaagagtggaagacgataaacatatcttaaaggaactctatgctcacctgccacaacattatgtacatagtataatgtattattatagtaagtaatgctatataatatgtacaggggttggagagatggctcgcaaatatgtacactgtgtaaaaaaatacattacacatcacaccattataggtatatgtagccaattctattggctcagcttcctgagtgctgagattattctacagtgctcagctcaccaatttttcttccttcagtgctgggctcaaatccaggacatttcacatatcaagtaaccactttacccctgaactacatacattgctcttctaaattgctttatttatgtaagttagtccttcctctgttccccagactagcctggaacttgcagctcccctgatgtggtatcccaagtagcttggctgacatccaggactgggctacctcaccacacatatttctaaaattgttcctgaacagcaaaaacttgaatacggcttatgttaaatacactagtcatgtaataacaaaaatatctactggatggatggatagatagatagatagaaaacaattccatagatagatagatagatagatagatagatagaaaacaattccctagttcctgtatttcacagaacctggtttgacaatgacacctaatggcagtctaggataggacgttaacaaaaagacaccgtctccttctgcctaacaatgacaatccctcaggcaaagaacactttttacatttgctctagtctagcgtgaggcctttctgactggcaatattttacatgttcaagttcaacagaaatactgagaatgaagaaattgcaagttctctgtacctataagttcacagtcataaaatttcatgctggctccccccccccccactcctgtaccatttctccttttctcagtcctgctttctctgtctctgtctctgtcttttgtccttcccttctctcttttccctctccaacactctctcctctcctgtcttttatccttatttttaaatcatagatctaaaaggagagagagagagagacctttcgaaatttacactttggttcattatcacaaggaaagttcacagctgtgggctgaaataccaggaaataatagttctccatatcagcccatgaatggcaaacacaaggctcagtgacatctggaggctgaacaacctcaaaggtacagaagaacgagcccaagaagaacttaactacaagacaaactccagccaggaatctggagttgctgctcctgcagaaagcccaagttggggccccgacactatcacggaggttcacagcgatccgttactccagttctaggagatcgaatgccctgatctgttctccatgggcacctgcatgcatgtggttcacatatttcaatgccatacagacttagaagcaggcgaaacactcacacacgtacagtttttgaaaactgaaaagattgggtttagttacaatgtaacattctggtaaaattcctaagattacatatggtcattgtaaatcatgaggctatcgacttggagttttttagaagtctgagagacttacatgtcataaattccattaaattgttcagtgagttataatttataaaaagtatccattgagatcctctgctgtatattgttttaataatgtaagaaaattactgaaagttttaactcaagggaagaaaagaccaaactatcatgatagtctaattctcagctaaatacttatggccaatttaactactgctacagttcattggtttgcacaaatacaagctgaagtatcgagtgacagcaaatatcattggcctatcataaaaaataaactgattatcctattcattataaatgataaacctgttactattagtgccacaggagctggtaagggctctttgcatacaataatgatgaagattaattagttggggagtggggaggacgaggggaggaagaagaggaggagaagacaaagaccagagacagaaataagtgataagggaagatattcaggagatagaaaccctgttgtcagagagagagggagagggagagggagagggagagggagagggagagggagagggagagggagagggagagggagagggagagggaggaaaggagggagggagagagagagacagaaagacagacaggtagacaaagacagacagagagagagacagagagagagagagagagagagagagagagagagagagagcacaagtgtgtgctagggttgcagctcaggcaagagtggtttcctagcgtgcccaagatcctaggctcagtcagcaacactgtctgggcttgatatagtgatctcagccagcagtccacctgctcaggaaaaaaaaataaagtcctgataagatgatcagaaagaaaaatgaaatgtggctagaaatggtctggtgctgtgaacagagaagatgtcctaccaagagagggaggaaagatgactccagagtgctccctcatatcggagtgctccatcataaaagatccatatttgatcaattatcaaaatcaggaagactaaaggatagtggctgtttaagtgaaaataaatcaacgccatctgtcactcaaagtccccaggctaactgtctccatcaggaaccactttgttccacttattttgaaagccaaacccatctattaagcctatagccgaatgctctcccttaagaaaaattcaactttattcgcctagtttacattctcacgtgtatttaactgagtccctcatggtctgccaagtgggaggaccagagaccaggaaggtgagtctgcatagcctgggaatgggaaagaagattaaagcagctatgggatccagaggaaactgatggggaaggaggctgtggcaagaactaaagatagaaaatgcagtccacaggggagcatgtgtgggtgggaaggactcacagagggagggacactttagctgctgagtaatctcaccccaggagaagaacaaaattgaggttgggcggggagaatatggataaaagttaatggctggaaatatcagggactttgaacagggatccggagcaggccaggtctgcaggggacaggggctgaggagaaagactatgatagccaccagacaccatcgttaagaatccagttccgcatgcgacacagatcctcagctccaacactaactccaaacagagactctggtttgttagtgttccacccattctttttattggctgtttaattttctttttaactgaggcatccccacatgaaagccgatcagaaagcaagtacgaagtgaattctcacggaagtttaagagatggtgacagccagtttccgtgagtaaggcacaatggcagaatggatttatgtgactatgagtttagctagcttattccattagatgccttaaaccaatatcccaatgttggccaggcatggtggtgtatgccattaatccccgcactcaggagacagaggcaggtgggcatttgtgacttccaggccaacctgatccacaaagcaagttcaagaacagccatggctctgttacacagagaaaccctgtctcaaaagaaaaaaaaaaaaaaaatagaaaaaattcttaaaataaaagaaaaaattattaaatgtataagagttcagaagggaggaataggtatgaaaagactttcaaaaacttgaagataaaaagagagaaaaaagtattttcttctaaaaataacatttatttctagtaggataatctctgaagacatttttgcgagtgttaagggaagtagctgatactataaaggacattttttttttttggagggggggaaggggttcaagacaggatttctctgtgtagccctgactgtcctggaactcactttatagaccaggctggcctcgaactcagaaatctacctgcctctacctcctgagtgctgggattaaaggtctgcgccaccacgccaggcaggacattttttttttaacttacatttttctgtgattgctgtcctcacatctgaactggaagctttgtttttcaaattttgggccaaggtaaatacacaatcaagctgaggatggcgttgttctaaatcagcctttgtgatctgcaaggagacaagttcaaagggattaatgcatcctgagataagcccctagctgtgtattgggtgtgtcttcttcctctaagaggcaatgaaacatcatcgatgtaacagaggaagaatatgtgatttggagtcagaggccttaggttcaaatctcaggtcttccataaccagaaatggcatctgccctctccattggctcccccagctcagttccatcaaatctaaggaaattaaatcaaggaactctcactataaatgctctcaaaacatcagcaatcttcgctactgactccttgtgtacctgttggacatcagatatgaatgcacatgtggatgccctacagtaatggttcccaacctgtaggctgcaatcctttggtaagcctccatctcccaacatatttacatggcaatttataacagtagcaaaattacagttatgaaaaacgatgttatggatggaactgtattaaaggggtccagcatgatgaagtttgagaaccactggtgtagaaagatgaaaacggcatgttagaaaagcaataattacaataactgcaaatgaatcaccttcataaaccacccttttttcatggactatgtgtcttagctgataaatacagtgagggctaagaattccaggaaaagtctattctaattctagaaccaataaataccaaaaagaattagaaaacacaattcacagttggtacaaacagtgtgccaaaagattggtccagccggctccctgcgggtaaactacttctctagacctcaatcactcctacaggagtaagtatttccaaatgaacgactcctactccagctctagatcccagagcttccgtttatgctgctgactttcttccctctgcacaacagactcaaagctaaatcactcagagggtcactggagctccgcttctcctcctcctcctccctctacttcctctacttcctctactggaaacagcatcgtctcagcccctcaggaagggctcctttccctgacttaagcatctcctgcctccgagccatcctcatcttctactaaagcaaagcattattatcaacagtccccagccacgaatcaggaaccagaaagaaacggccgagcacgcttgtctactgattgcagactcttacgtccacgaggctgtgaacagcttcgcatgcctcttctcaaagaactaagttaacttttccataaggggaaaacaaaaacaaaaacacttcttgcacaaatgccggctctaagtatttgatcaaccccaagcccctgcctcctgtcccctatgatagaacggtaaatatctcataaacccacctcctgatcccagggctactgaaacagcccctccttggcctgtctcctctaacatgtggctgacactcccctgggacatttattagaaactattttgtcagagaaaaccatctgcttgatatgcccatcttcccgacctcttaaaacaacagttctcaaccttcctaacactgcgaccctttaatacagttcctcgggttgtggtcacacacacatacacacacacacacacatacacacacaccccagccatgaaattatttttgttgctacttcaaagctgtaatttagctatcataatttgaattggaatgtattgttttccagtggtattaggcaaccccaaaagggtcagacgtacaggatgagaaccactggtttagaagttcaaagttcttggtgatatgggaatgaattggcacctaccataccagattgttatgatatagacaagacaatacatgtgaaagtaagaaaatgttcaacacacattaagcacttagatgctagcaatagctattattttgttatgcatatctatctaaaacattcttttcagccttactctatataacagataagctatagcctagcatatactaagtatggaaaaagaattttccaggttgctacttggtggtctctattctataagagaaaaaaaaaacatatcatcagaacacattcatttctaagatcagaaatgaaatgtactcattatgaaatctaagatgaaacataggcttagaaattattctatattgcattgcgcattaaatggaaaggtagcttacagttatgtggtgtccagcttcacagtatcaatactagagttttacactgagccttcagttctatttgatcaacctgcgctaactgaagaaaagcttgactctttggagttaaccctgaagggctacccagcagataaggaatatcggtaagcttgttttctctaaatttaggataaaccacagagacccaaggagagcgtagtgccctggcaaaacttcacattctgcacctactttcatccgggaaactgtcttattgatctctttcacgtcccccacagtgacaatgttggacttcagcatttggtcgatcaataccagccagtcagccagttctgtgatggttttatccaaatcagcaggaaccgagatttccaggccgccacgcagaggagcatctgatgcagatgatactagcaccaccttttggacgttgggatgagctgaaacaagagatgtagcaagttgaaaataatcaacaggaggcaatggttaagatatgtagtgagggcatgtgcatttgtgtactaagtaaatttccatttttctaggaaggtatttttatgttgaaatggcatagattgaaataaccacgtgtatttaatagccatagatccaatataacacagccctctcaaaattccatgcaatcaataatgcacatgcaatcaacattaacacaaaaaataaagcagtaaacaaagcaaatacacacacacacaaacacaaacacacacacacacagacacacacacacacacacacacaaacacaaacacacacacactgataaaattaaaagcattatttcattgagtcaggctactgtaaatataaagcaaatttatttctaatttttctgttcttttcatttaactttacagcatattcaccttttatttttatctcctgtttctttgcctctgtctgtttcacacactctctgagacacagagtctcaaagtgtagccctagctgacctggaactttctatgtagactgggctggcctcaaactcatagcgatccaaccttctctgcctcctgagttcagagattgaaagcccacactaccacacctggactgcatatctcattcttagctaactataatgtgaagatctgtataagaatttacacaaatagtcactgacttttacagcaccctttccttcagctacacattgagctgtacatgtacaaatctcctgaaatccattctttaccaaagagcttaaagggaaactctttttgagtatagtattttccacatttccagtttccaatttagtagagatttcccaaagagaaatcactgggtcagacaacatttttaaattcatgtatttaatctccttgccaaagggaattcacttctccaacaactagctaaacaccctgtatctacatcaacaggactccatctcagtacacacctgcctccattactgtaatggattaattactaataaaggtgttttcatgcttctgcaccgagtggtatagttagtatctgtattagtctggtttttgtttctttggaatctacttctttatcaatttggatgcctttgagatgaaagctatgctactgtctggcctgtttgttttctcctgtttcatttttgcaatgtgttatgtcctcccttcctctttctcctcctccctaagtccttctactttgtaattacttatatcttaacaaacttgaggaagtcaatttcattactctttctgagaggggctgtcctcctagggttttgctttatttattatatttattttatttattattgtttattattttattattgttcttacttattatttggtttattttttgaattattgtttcatttttatttatttatttatttgatttatttaattttatttactcctttctgtcagaggaatccacccttgtccttcacagtgagcagaaggatcttacatgtcctcccaaaggtattaaaatcaattcttgtcttctccaaagaactgataaatattttctttctctttgttttgtgcttggttttatttctgttacacgtatgagtgttttgtctggagattagatagatacagatacagatatagatattcacaacatgcgcatgcctgatgcccacaggggccagaagaggccacccaatccccagaaagatagatgtgagcggtcatgtgtatgttggggatgaattctgggtcttctggaaaagcagccaatgatatcagacactaagccacctctccaaccctttggttttgtttctgtctttgttcttggttttgtttctgtctttgttcttagttttgtttttgtttttcttttgtttctaagagaagttaacagttggtttcaatataagatgtagttaagacgaatactaaatctacctggcacctagcataaattcagtacaattctaataaaaaccccaacaggtatgcaggcagcttggcaaaatcacagatactaatttctagttgttcaataagaaagaaagggaccctcctcttcccccccaaaaaaatttataaaaatatttgtgtaaggagatatgccctacaattattgagttacacttttgaccaatgataactgtatcccaaaataataaatagatgaccaggagaggagaaccataaggcacagggacagaaagacctgacacagaagtggcattgtggaaggatgctaaagacttcactaccccgtaagcactgctgtctggcagctagtatggcaagatgatgccacggaatctgacctcatgtgcataaaggaaaatagacacctggagatgaaggcatgaaggggaaaaactatgactatcagattaagacgtagaagaatatctttatgagtcgagagcacaacacaaagacaggcaaacttgttaatgcaccattaaagctctaaacgtctaaggaaagcaccagagaccgatccgttcaaacatctctgaaagactaagaaaggaggtgattgctaggcacgtgaatttaattagtgagcaaaatgcttttattctttagagctctggacgaggcgacagataacctactacacagataacagggacagcagttcaacatgaaacatgaaagagaaagcactaattaaagcaaaatgttttgcaatcacaggtcagcaaagtgtgcaggtctcaggttggcaaagtgacagctgacaagcactggcctccctgtgcctcttccaagatatctggatgctggtaatagcaccaccaccaccatacttatttgctttaaatctcccccaggtatataatgacacatcacctgcaccatctttacagatgaaacccagaagcataaatgagaaggtagatatcatcttcaaagccagatacttaggttgtaaaaaggcaaaacaatgtcacttccttcattttcactttctcttgaaacatagtagattttaatattataaaaatatatattttaaaagcataatagattggttattgccaatttggggaggggggtttcgagatagggtttctctgtatagccctggctgtcctggaactcattttgtacaccaggcgggcctcgaactcagaaatccgcctgcctctgcctcccgagtgctgggattaaaggcgtgcgccaccatgcccagcctgtgccatttttaaacatacagataaacaaaaattttgtgaagttccctaggctaaatgaaagaaacattgtgtgacaccatttatacgagatagtcaagatggaccaatctgctgacatggctggcatgcacactgttggataccagacgctgagaatctgggggtcggagggaggagcagagagaagctactcaagcacaagaactctaacttgagaatagaaatattttggagctacatagaggtgaagcttgtacaacactgtcaatgaactaaatgtccttgaattatttattttaaaaatagatcattttacttttaatatgattttaaaagaagaaaaatattaaactaaaaagttgtgtaagggctggagagatggctcagaagttaaaagcacatattattcttgttagggacctaaattcagttcccaacatttatgtgggatatttcacaatggccattccaccccagctccagtggatctggcctctccaggcacctacactcatgtacaaacacagataaacacataatttcatcattttctacatttaaaattttttacttagaatttaaaattattcatttagatttttacattttgtgtttagacttaaaaaaaaaaaacaagaacactgtagaaggaaagtcatactgaaattggcttcaggtctcacacctgttttatggagggttgccttaaggaaaacaaactgcaaacctactgtaaagtggttttgctgttggtcttttataatctaaggatgtacataaactttttctactcctttgtcaatgttctaaaaaaggtaaacctctgcagctgtacttaataaagcaagctgtttctttatggtcatagaattgaagcaagatagacaaaaagacagacacatacatatatacatacataaatacatatgtacatacacagatacatagatatagatgatagatacatacatgcatgcataggcacatacatacatacatacatacatatgtacatgcacagatacattgacagatacatatagatgatagatacatacatacatgcacacatagacacatacatacatacaacagatacaaagacacatacatatatacataaatagatacatagatatagatgatagatacatacatgcatgcatacatagacacatatatacatacatgcatacatagacacatacaagacagatacatatagatgatacatacatacatacatgcatacagactcatatgcatacatacgacagatacagatatatacatacatgcatgcatgcatacatagatacatgcatacatacgacagatacacacacatacatacatacatacatacatacatacatagatgagagagaggaagagagatacatatatacaaatctcaattcaattgttctaaatataatcaagaaaaccaatcaggccacagggatttccaagacaaggtactgaggaaaataagtaatgcagaacacacactgggtcataagcaatgctgcaatatcaggaaggaaatacacattgtttttaaaggaaaagaagaagatataaagaagagaagaagaggtggaaatggacaaggtgagcccaggtaggaggcggcaggtgggaggcagagttgaggagaggaggagagatgaggggggcactgaaaaacagtgagaaagtcccaacctccagcctcagctggcaaagagacgtgggtggctggggttagtacagctaaggactacagacagcaagcagaatgtggtgggtaggagagtgagcaaggccatagtcccagtggctatatggtctacttgggacagaaacagaaggaaataaacaggaatcatgagaaaatatacaatgttccccataactaagggaataatatttgctaggacatggtttcccgggaaatgcagccttcgaaaccccacagtcaggggtttggaagggatcaaaattctatgatcaggatcaaattgtacacactaaacatgtgttgtcatggcaggttacacaagataacttgaaaaagtgcatctctccattaaattaactcagtattttccacctagcccctctttccttccttcaccaggacccatggccatccagatatatctttgactcggagaacaacaaatctttccccatgctaagcatccagtctggattcagattatgaacagcaatcacgtgatgtttttcagtaagttcttctaataggatgttcccactataagtttgtctgtgttgataaaaatgactcctaaagagcaaatgctttcttaccagccatcctcatctgtggggcagagcaggggtcttgggtgcgtgtcttcaggaggctaggcacttctctgcatacctgtagcatcaagccaaacacacaagagaaacaaacgatgattgtatcttcgaaacacagccactcttccatacgacagctcaatcaattttctttcagttcccaccctagcttgcatctccaccttcactatccactgtgatgttactaggacatggtttcctgggaaatgcagccttcaaaactccacgatcaggggtttggaagggatcaaaatcctatgatcaggatcaaattatacacactaagcatgtgtggtcgtggcaggttacctcccctgacagtaagcgcaaggatgccaaccagtcctcatgtgtgacacttgcaccactggagctgcccattcccctcacaactcaaatcctgtaaagacccagtgagtctgaccttcttcctgcctctcttaagtttccttcactgtccatcaagtgccattgctgtgcaggttaaacctttgacctttcttactcttcatttcctatatggatgcttcagaggctaaagaactcccccagtaatatatcttccactcagctttctgtctaatagatctttagacacatccaaacctcagttcacgatttctgtcttccaggaaactgcctttggtaagcttctcttgaaactctacctgattgttccatacactgagcccaccttccctacagtatagctatggggtctttctaacagaaatctgtttataaataaataatagctgtccatttccctcaaagtagtgaattcttctcaagatagagcccgaattctgtagagtggcacatttgctcaataaaccaggatctggtctctggagtgactgggcatctctcgggtgactgttttatgtataagtctattgtagaccacagatgcacttccctcacggtgtgtcctctagagccttccacttgctgtacttccccgtcaaagcctgttacttcatccctcacctaagcagtgaagcttttataacttaggctagataagatcttctcccacaggccttccttgatcactcgaaagtatataagtgtcccctgaatgttccttgcttccaatttttaattattgatctctttgtcttatccatgtcaaaccaactgggtgataaaaaatttcctatagtccttaaaatggggccttgcatgaaccaggggtgtagtgaaatctgctaagtatataaaagaattgaaggaataaaatattccagagtagcagttcctaacatgattccccacacaagaagcattttttttttgccttagatgtcataattacccaaagtgggcaatactaaaacctatgttaatttaattccagcagtaatagaagcttcaatgctgcctatcatggtgttccccaactggccacaataccctttaatctataataccaagcaaaaccctctgtgttccataaaaatgtatgctctggatgaatacgtgcaaatggatttggcaagtgacatgggagccaatatgtccagagtggagagcagaagagagagcatcagataaactcagagagagcagctaggcagggtgagaggccttataaatcacacggaggacaattggcttttactctcagtaagacggaaagtcgttagtggacattgttcagagagttactggatctcacttacatcttaacaaagctttggctgctgtgctctgacaatgagaaagggtggcagaagagaccaggaaggagggctttcccagagatgacggtggcttgggataagcaatacaaaggagcggtgaagtccaatttatgccattatttttctaacataaagaaaactgaaataactgtgcagaaacattcgtgcacaaccaatattctacacatcaaaaatttgccctcatctgccttatcacatatagctgcctactatcaaactatccatcaagtccatggaaaaagccaatgacagggacatcaaagaattggggggtggcgggtgaatctgtctgtctgggtgtgtgtgtgtgtctggatgtgggtgtctgggtgtgtaagaaaaggaagaaatgtctctttattgagttataattcacatatataatttatgtgccattttaatgattcaggatttctgatttaggcaacaatagagacatacatgccattaattgaggaatgtgatatacactaaggcccaaagataaggtagaaatcaggagttcaattttgtaactgttgagacatctattagctcccaaagcagagacattgaacattcaagtgccgaatacagagaaaggtctaggccagagatacagataacgagtgatcacttggacagtaactcatagtcacagaggctgggtctagaaagcacacataggttgttagatacagcataataccacttcattctcatagctcgtcttcctcctctttcctcttactctttccttcttgagataagatctcactatgtagcccaggttggctttgaagaaactctcctcctaccttagcctagtaaatgtcaaatgtcagagctactgatgcatgccaacacattcgccaggacttccagtttgatagaattgaaaagagagtcaagtgactggcagtcccgggtgggacacatccattccatgttcaaatagacaccatacatcgacccagtgggtactaagacaaaatgagaagaatcctatgatttcatctacctttaaccatttcctctgtgaaacaaagtaatcatataaggaaaataactcccatcttagtttaatttttgtcagatgttattaaattccacaggatcctaacaataaaaacatactaaaggaataaaaaaaatcaccaaaaataaacagatgtgggaaagtcttgttcaacatcaagaggctattttaaggtcttcattttcagactataattactggcattttactgctaaattccaatagacaatcatatgtggtatgtttgaaaatatacacatcccctagaacaaagaagtccatgtgaaataaaagatattctttgagaatacatgtgatagtggatgaatatatatagatatattgtgtgtgtgtgtgtgtgtgtgtgtgtgtatgtgtgtgtgtgtgtgtgtgtgtgtgtgtgtataattgtaaagtgctgaaaaaacacacatatgtcagacctgtatctgtacacttagagcaatagcaagagaacaatttaaccaaggactcagtaaataggggtcaacaagatggctcatctggtaagattgcttgcactaagccttacagccttagctcaatccctggaacccacatgagagaagagatcaattcccaaaagttgttcccttatgtgtggtactttctctatgtctctgtctgtttgcccccccccctttgcatgtgcatgtgtgcgcgcacaaacacacacacacacaaatacacacactccaaagcaagtataattctaaaagtcaatagacaagaggaacacgttacaggattcccacatgcacaccttggtccatgttgtgtttacattccttaaactttccgaaagtttctctctttcacgcaaactcagatttttgtctgaaagcatttccagttctgctctgttcagccacttaatgttttcagcttgaacttccgtctcttgggctaaatcctgaaacaaaaaacagccatggttagaaggttgttctgagggagagttactatacacaatatattctcttgggaaaatatccttatacattcaggactcaggcatcttaaatggaaagtcagcttaccgaaattgttaacacactctcactgatagagcatgaatgtacattcctgtgtatgtgtctgaatatacatgcacaaacacatactcttttttattattcttaaccaagtgtatatattggtggaagggctctacacttgagttcacagtcttgagagggcatcagattacttgaagctctagttacaggcagttccaagctgcctgcctgacatggggcctctgaaagagcagttagtgctctggcctgctgggccatcgctctaggaccagcaccacttcaccaggcgcacactatgtttacattgttaagatacatcatgatcaccactaaatttcttcatcttaacatgctgtcctaccctttgtaaattttccaaatactttataaacaggatatttgaagaaaattcttgactctttacataaagaaggaatatcctcatacttcaaaaaaaaaatttaatgaacaattcccacgtttcccatcatcactaaaagtttctttctcaagatactttaaccatacatctctatgacaaaaccacttctcaaataagttgaatacttttttgaacatagttttacatgtgaatgtgtgtgtatgtgtgtaatcacattcaaatacaatttttatgttattttaaatttgagtgtgtatgtgtaattacattcaaatacaatttttatgttattattttaaatgtgagtgtgtgtatgtatatgtatatatattaacacattcaagtacaatttttatgttattattttaaatgtgagtgtgtgtgtgtgtgtgtgtgtgtgcgcgcgcacacacacatgtggaggtcaaaggacaaatttggggagtcagttccctcctttcgccttacttaagtgggatttctctcgtaccgagtacccagactagctggccctcatgtatctaagtaattctcctgtctctacctagcacctgtctgcaaaaaggctggcactccagaggcacaccgtcatatctaaatttttttaccactggttgggtgattgaaccaagttaccagatgaccacagtgagtgttttatctgatgagccatcttgccatgtctgtgacgctttcagaaaatggatcctgtccaacgttgtactattaatgtctcaattcttaatagagactacagatgctcatggacctgaatatttatggagatttggcatttagatatctatatatctttatatatttttatagattgtgtgtctgtgtacacatgtgcatgcatgtgcacagatgcacaaccattaaaaatccctgttggctacaaatcaacaagaaactctgattgctgaactgtaactctaagcctgcttcaagctgcaaggcgctaactgcacaacacccaggattttcttgtaagtcaccacacagttaccttttcaatacaaaggcagaaactattcttcatggctgcattgtgttctaagtcactttaagatagtctacatcttttaataaaacatcaaggtcagggttactaatcttttgtttgatctctgcatgaccaaaatagtataaaataatgggaaaaaaaatcccaactctttcaaatttaccatacttatcataaagaacaaagttgtacttccctctcaatttcagtcaaaacgatcttatttcccaagttcattagatcctgcattcgaaggctctggaaagctacaaactccttactgttaattcctgtgggctttcttccgggtcaggggttgatctcttctgcacagcactctccactttcgttaaccagcaggtgacctcatctagccgtctcttataccccaacacctgctgactttctccttttagcctaaaagaacacagtagggaaaatattgacagaaattactgagtaagcaaaacaatatatttgttttagaaaacttgctccccatagccccagtagaaataatttctaataatgatattaaatatgtagtttttaaattaacattaataatcatgcatacagagtaccatactaaaaattacatataggactaaagggattttttccccttaattaaattcagacacactgagaagtcttatcttctcatcataaaaattaaatggcaagttaatatgaaaatgtttaagttagctattgctgtataatacagttaacgaacagtgaacatgtccttgtgtaaaataaggaaaaaggaataattatctgagttctccatggagacagaaagacatcattgtgtagccttggcagtcctggaactcactctgttgaccaggctggccttgaactcagaaatctgcctgccactgcctcccaagtgctaggattaaaggcgtgcgccaccaacgcagatacaacaagatagcagtatttgtccattctacccatataacagcaaaaatatgagtactgagaatcgaaatcttctacaaacatatatgcttgattagttcattaaaataaggataacatatgcataggatgtcatattgcataaaggagatgaagggaaaaaaatccagccaaggtccaaaagataaatgtaggccacaggatgactatgacatcagaatcccccagttagaacttcctaacagtataagaagaacacctagggataccagccatctgccagacaatgaagtgtgatcagaacccagatgacaaataagattgcagatttaagagagagagacagagagagagagacagagagagagagagagagtttgaaagctgttaagatcttagtgggatcatgacttttaagctactgcaactagacgctgattgaaaactgagtgtgacactttaataaattacactgtgccatccctaatggaaattaatggtctcatgccacctcctatattttaaccataaaaagcataatacaatataatacatacaacaaaatatgcatgtaatatgtattacgtcaatatgctaatatgtgatattatatgttaatgttacatagtactaacagtcataatggaaaggtataatatttaactatttaaacctaataaaaattgcttaaaatgtaacttattttttaaaaagtaaaagaagaaaaaaaagaagatgcactttgaaattaaaaaaaaaatgaagcaatgatggcggtagtagaaattataataaaatgtaatttaaaaataatctaacaactttagaaacactccataatacttgtatagttcttttctttcagatatattgaaaattaaattgccagtgtttcataatcatgactactttcatgctctaaaactagaactataaaagaaactaatattaccaagtaattttcatctgtaaaccagctaaatataatgtacactttgctattcttaagagtagaaacaattctaggataagaattgcttattaaggaatgacaccataaactgtaaatgtgcaaatatttacctgcaggtactgaatacacagagaaatgaagcagtgtggtaactgtcaatgaccctgaacctctggggcttccaaagtgaccccaatacacacaggttagagaaacagtgaagttcactacgaatttctgaaaaccaatattgttttagtgaatatacaagaagctaagaagaaactcattactgcattcacttccaaaagcttgagtaaagtgtgggtcgaggtcatcctgtaggttggggaagaatggcttccacactccacagaaacccacttgaaaattgaggggtatttctgcagctgttaatatcttgccagcagcaggtttgtttattttttcttttttaagaagacataaatagccacttatcattatgttattatataagttaataattttattattgatataattattaattggttgctattttattattaagtatgtactgtttattatatgatatatgaattgattgacaatagtagtagtggtaaaattactattaatattaatgcattactataacaataatctgattaattgttgtaggaaaggatgatccatgaattccttcccttgtgatatcgagtcctcctatcttgtctcctcatctgcccatctctctcacacagccctgggtgtggtactcacaaagcccagttctacatcttctctcaagaaggtttccagtttcgtctgaaatctcctagaggcccctgaggctactgggcagtggtggcaattttataaaacctgatggcagtcttcagcacatggggcctgtgaccttgaaggagaagctgacacaggaacctcagtcgccttttccctctcctgcttcctggccatgaagcaagctgtctgctctagcaggcaccccaaccacaatgtcccagagaagggccaaagctgtggggctaaacactcacagactggcacccgtacaactgagaaccaaaataaacattctctctttataagctaatcatcttgattatgcattattgctgcagaaagctagctgccacaaaggctcaccctagaaagaatgtacagaaaattgctataaatgcctcgaaactcagcttcagcatccctcttcatcagtacccaattccatagctcatctttcctgcctctgtgtcaacatcttcatgtggatgtttcccttgatcacgcttttttcctttctacttcatcttttcagtctgagttcatagtaacatctgaatgctcagtgcgagagaatattgataaagctgattacattaattgactattagcaatacacagcaacaacacgctgggagaatatgttcgagaaaggattataagaaatggatattttaaatgttcgccataaaaagttaagacatacacatttttcaaatacagtctcatttaaccctcaagcaactgtctgacattatagctttcttttgtagaaaggaaacagtgaccataagtgctgtggtgggtgaccagcacaatgcattaaccctaagggtacaagagtgcaacaatacctttatgcaactaatagctctctaactgggcataaagcccattcagaaaaaatggaaactatgcctgatactggaaacctatccagctatccaaggttagtgaagccatggaacttggatgtgctcttacaaccgccacttgcctaaatcaacataattcataagtacaatctaaatatttaacttcttccaacccagataagtataattctgatccctcatcaaagaaacctctctttgcaacagggaccatttcacacgggtgctggaggtctaagcaaggctctctgtgcttgcgtggcaagcactttattgactgagccatcaccctggccccaaagaaagttttatacataggaaatctgaacagaacagtaagatttacaagacagcctaaaaactgtcctaagtaacatgaacagtgaagcctcaaatgccactaatatttttatcatggtattagatcagcttctatgtagtttacatgaaatcttcgcccctctgctcaaaacattcagagctgagtcatcacctgggctgcaaagcctccacctcagctacaagagtgctccagcgctggttgaaacctgccagcttctccttcaggaagcttgcctccgaggggcggagtctctgaacaaggtcctccccctttcggttaaccttgatcaggctgggctggtggctgctgaggccctcttccagttcctatgacagatgacacattatgaatttctaccactcaatcaagctgttcagataccttcagtgtacccaagtttttaagcatcaatctaacacctacagaaacaaattcggggtagggctataatgtcttttcaaagaatttaaaattgcatttccagggacatgtggataccacatacacacaaatatttggtcaataaaatttttatgtccagccatttataataaaaaatcctcaatgtgcattttactgagatgctgcctctgtctgtaaaaattttaaagtcacagattaaggtctacttcaaagtcaagtctaaatacttacctgtaactcaaactttcacacacacacccaaaaaaaaccgcagcaccatgtctgcaagtgagggggaggcattgttttcgacgccccatgaactgtctagagaaaatacattttgaaaatgtactaaaacaagaaatacatttgacaatggacatctgagcttctgcttgctccatttctccctttagtgacctattgtgctggcaggctgactgctgggtgctacatagtctcgaggctgagtcctacaagaggctggctttgtccataaagaacagcatcctctcatgacaataatcaatgattttttaaaaaaggaaaaagaaataaccgggatgcctaggtgttaggggtacaaagcagaggtgacattgaatatacacatacttttctgtctttcatatagtcttagatataattttttgtgttagtatgaatataaaatctcctgaggagaaatatatcttaaaatatttttaaaaataactatctctcacattaacaacctaagagtgccttatccttttaaaaacttctttaaaatctggattataaattgtatgatgggggccaggaaagtggacaggttaggggaggggaagggaagaggggaacctgatctggtattgggtgagggaaaaagattgaggaccagcagaaagaatggaaacaggcaacctcaggaaataggaggttgggaagacactcccccccccccccaataatgcaccagagacctgagaggtgagaaactcccagcactcaaagggagggaccttagatgaatcggccaacagtagagagagggaacttatagagtccacctccaaaaggaagacagggcatcaaatgagggagagggttgccaacccacagtcacatctctgacccataattgttcctgtctgaaagaattacagggatggaaatggagaggagcctgaggaaaagaaggtccagtgacaggcccaaggtgtgattcaggtcaaggggaggccccaaggcctgacactattactgagtctctggaatgctcacaaaaagggatctatcatgactgccctccaaaagacccaacaagcagctgaaagagtcagatgcagatatttgcacccaaccaatggacagaagcagctgacccctgttgttgaactagggaaggctgagagaagctgaggaaaagggtgaccctgtaggaagaccatcagtctcaattaacgtggacccaagatctctcaaacactggaccaccaaacagaagcatatatcagctgatatgaggcccccaacacacatacagtagaggactgcagggattccttcattcagagatgatgcacctacccctcaagagactggaggccccaaggagtttagaggtcaggtggggtgggagggtagggacatccaggtggacacggtgtggggtggggaggagatgtgggatgtggagcagtcggagggtggatgaagggcagggaatggaatatggaatgtaaaaaataaattaaaaataaaataaaataataaataaataaataaattgtataatgaccagtgtttcttagaattttaaaactgggaactagatgtaggaaaaaatgtacagtggtaaaaattacaacaatctatgaagcatctgaccttcccgccctgcccctgcatgccctgcctcccccttcccaccccaccccccaaacacacacacacacacacacacacacacacacacacacacacacacacacacactctgcccccaggatgggacacactcaccagctgctgtgccctggctttctccaggtccaggctaccatctggagcacaagtgtctaccagcaggtcttcagcttcagatagccactgtgtaaggtcatcaaggtcatggtggaactgcctccattcctccacagccctggcaaaggacctggagcacgagagacagactcagtggagcttcaagcttcacagagcaatccagaagtaacctctctttcaaacccatcctagtaataagtcaatcaaatctgatttaaaccgaagagtttaaatggaatgtgttatgtcaaaaaggtttttgctttctctgacttacacagccacttttgattaattgtaggcatgttaatccatccaaatttatacccttaccgtttaagtatagtgaaacagaaacacatgattaactacctctattctcttcgaaagtatgtggtttcagtgatagaaggcttcaattcaagttgaaacaaagtaaaaacaagttaaaacgaaggccaaaaaagagtaactgttctggaacattgaagggaaattttacaaattacaaataaaaatatagcatttagttaaaatgaatggtgcatcaaagcataattagcaccactaaattaatacacaataacataactttaaattatgacattttttgctaactataaggacaatgaaaacttatggggagacattggtcatttctttaagaacaatgaggcaaattagagctggtaaatatttatctagagatgcacaaaaagttgcttaagggtttttggaaagtagaggtgcatgcacagactcatggtactgaagctgtggtacaaaggctcctgagctgggccctgaacagaggtcataccaaaatcaaaaccaagcaactaagattgtttccaaaccatacattattatttcctcagacacagcaaatgtaaggaatggatatgtaagttttgttaactgtatacaatcataaaggaaacaactataagatataatttcataaaactaagttggctctacgtcaaagggtacaggccattttgagtgacatacaaaaggctgtaaatactcacaaataaacaaaaatatacataaataatatcttccagttagaaaaacaattttaaacagtaagtattactcccttggtttcaaagatgagccattactgggcacaaagaaacttcaagtcccattgagagcacagtaaagaaagacaacaatgaagctatcactgtaatattggagaaatattcctgccaataatagccaggcttctaaaggaagggtgagtttataaatatccctggcagggtacagtagccaagttcatgttataatacaaatcgagtttcaacatcttgcttttttaattgtcttcatgtaataaccaagtgctgtgatttgaatgtgaaatgtcacccataggctcgtgtgttagaacacatagtcaccagcaggtggcgctgtttggagaatctttagaagacagagcctcactggaagaagcacatagcttggtggaggctttcaggttttattttatcctactttctgttctctctacacttcctgattgctgatgaaatgtgaccagccaacctccttctcctgtgatcatgtcttgcctgttatgcgaagtgtgtgtcctgaaaccataaaccaaaacaacccttcctttttaaggtgctttgatcaacatttgtgtcaccaatgaagaaagtaactactataccagttctaacaaacaaacaaacaacaacaacaaaaatacacacacacacacatatacacacacatatatataaatgtacaaaagaatgttcactaactacacaaagagaccatattataaatttacatagcaacaaagatcattaaggcatacttcttcactgattaaacagtcacatgaattaaaaaaattttaaccatatgattccttgctttcgtatctgaatacttgcaatgtattgctctatagtaaattctccattacatgttatttttgttgttgttgttgttgggctatttcatgttgtatttgcatttaactacattcacagctactgggggggggggggggatcacactcatttttctttactcctattcacaggtccctgttcgaagtctaaaaacaacaggaaaaaaaaaaaaaaaaactccgaaacatcctatgaagcagaaggttatagagcagaaaaaccgggaagaacgggcctgtggttatatatgaattccaattacctgaagctgcttctgttcctcattcacattaatcatgccgtgtgggagaaaggaacattaataaaatcctttctaattaaaagggagaattatttttaagctaaaaactaaaggtgcccccatatcattaaggtattatgtgcttaatggctgtgtgcctgtggacacatttctctttaaggaatgaagctcatctctatttattaatcatgtcatattagaaatacatgaaaaatggtttccatgatcctaatgcacacttggactctgtcaacgctgcatggcctggtactcgtgtgacttagagataactattcacttagttcacacctaccctctccgatcactgtacactctattcactcggtcccattttgcattcagctgagcgagcatgtccctgatctgaatggcctcagggccagaggcttccacgatgacatccggctgcttctcgtgaacaactgcaatctgctctccaagtctgtccagttgacctttgatactctgcaaacgcatcattgtacaaaacaccagaaccacagataaagagttacatgtatgacactcatttaaagtaatagtggggctaattactgttctgtgtgcaaatgaggggattctatttttttcaatttatttcttcactttacatcctaattgcattcacccctcctcctggtgacccttgcatggctactttcctcaatcccactcccattcttttctgagaagggggatgccccacctgggtatccccccaccctggtacatcaagtcactgcaggactaggtgcatcttctcccactgaggtcagacaattgtcaaaccaagctgcacatctgtaacatttgggggtggggggtaggtccagcctgtgcttgctctttgtttgatggttcggtctctgggagcccccaagggtccaggttagttgccgctgttggttttcttatggacttttctatataaaaatctcagagtcaccaaaatgtgaggaataccatcacaatggcgaatgggaaggcaccctcctagatgtcctgaccggcttcaaggcaggatacaggaaaggtagctttactaacatactatgtaggtgaaaaaaaaaaaaaggagacacttctagaattatagttttaaatgcctaatcactgtagcttaaatgagaaaataaattattgaatctatcagaaataatacgacatctttatatagaagtacaatcaaatacatgggaaaaaactttcaaagaactcaaaatgttaacttgcaatcaatacgcaattccacaacggggcaactagccaatctcgaatcaatatggatgacctgacatcatttgacacaaatgacaatcgagtttacatcagattaaaattagatctctgctgttgcaaataaatgtgcattcataagagtccagacctagatgctttttaaattgaaaaaaaaaaatgctgcatcctaccagggaatacagtaaaatctcactatttatacactgttgttgctaatttggagtaatcaaagatttggattatctaaataagtacaagagcaacttccatctgagcacggcaatcatgcctgtaatctcagctctccacaggcaagaaaaggagggtgagcatccaattagcctggactatctaaggaagccctgtctttaaaaagatgaggggaaaggaaaaaagaaaagaagggagggaaggagggaaaaggttaaaacggaggaggaaagagagaaagagggagggaaggagagagggtaggaggaaagaagagagggagggaggggaggagggagagagggggagggaaaaggcaaaacaggaagagccggagattggccttgtttctgtactttttctattaacaatggcaacggacattccgcacttggatttttaccttcagagagtcttcctggaaagagaagtctttgtagacagtggtgtttagctccggcatattaagtgataattcaatgtcatccagagtgagtaaaattttattaatttcaaccaaataatctgcagggagggctgatgatgtaattccagaagaaactggaattgtttttctctgctggatagggattgtctattaaaagattcaaaaaaaatattaatgcaggtatgttaacccccccccatgaaagtaacaacaaattgggggtgggggggttgaagaatcccagaatgtcaaccaaagttgtaagaaacacaagtcaggtgattatgatcaaaacacactatgtacatgcacaaaatgtcacaatgaaaccattatcacacaattaataaatgctaataaaaataacattcaatataagttttcttcttttaaccttcattgctacagaaactccacaagctgcctcagctttcatcagcagtctgccactttcatgccaaaaggcaacctcaggaccaccacccacccactgaggaagggtctttcattggtctcatggctagagctcaccaattaggtgagactgcttggtctacagagccctgggatcctcctgtctgccactccagcactgggatcacagcactgtgccaccatgcttaacatttttacataaactgagactggagactgaactaagacagctcaggtcctcatacgtgtgagacacacacttcccagaccactatcctcagtccaaagcctaatcgttgtaagtcctgcttcctgtaatgaacaggaaaataggtgaggatggtaatgaagtttcctccatctacacagacgggctatttttttaagaggatagactaagaagggaaatggggaaagtggacgacaccaatggcaacttccattggatcgtacaacaaggcacgtgcagtcagagacagctggtagacagcaagccaaggcacaggactccactcagattccgaagtgatcaaataaaactcatttcaggaagaactaccaaaaaatagagctctggggaacagcatcacttaaaacaccacaaggatattactcttgccgtattttcaatgtctgcagatgcacagttgaaaaagaggaacaccgaggcttctgggacaacccctacctccaccctacccctaaaaaattaatagcctaagaaggtagccatcaaagagaagttttgaaagctgtgataaggatgctgaaatgtagctctccacaactgatggcttctggcaagggtggggaaggactcagtttccctttctcattgggactagaccatgcacaagtaagtttaacacaaaatggtctgagggtctttttcctccccttccctcccctctcttcctctcttcctctctccccccccccacttcctccccttgtctttgttttggtttttggtttgttttttttttttacatttaagggagcagacatgggaggactgggaagtgcgtgtgatcagagtgcatgatgggaaattcccaaataacctataatatacaccaggaataggatccaatcctaactccaaaaaataagcagtaattacttaaacttaaaaagacagtgagggggaaatatataatttccctaggtgatttgcttgaatattgcttgtgtctttaaatattacatccccagcctggatggtacaactgggtaagttatttctttgctgcggagaccacagcaacctaccttaattttgttgtaacgagtatgcaaaagtaacaactgcaagcggatcttttctttcttactgtcctccataggttcatgtaacaaatgctcccctctttgtagaacttcctcaatctgggcttgctcctcatccatctaaatatttaaagaaagaaaattactgaaaacaaaaatacacagacaaacttcgtactctccattgttcagtgttaagaactatgctgagacagacagggcagtgtgggtcaagccacatcggcctgaatgacacaactgctcttgattttcttcaaatactttatattggaaaatcaaatatcccaaagctaatttatcaaaacgtagctaatgattacagctagtcaggaaggagggggtggagctgctactaccactgtttcctctccttcttctcctcctgcccttcctctttctcctgttgctcttcatcatcatcatcatcaccaccaccattagtgtttgcttgtttgtttgtttgtttgtttgtttgtttgtttgtttgtttcttgtagcccaggctatcctcatacttgctctatcgctagagaagatcaggaactgggattcctcctgcatctgcctcccaatgttggggttagatgagcgttgtatgtgaacttcaagcattgcatgagttacctgacagcttcggcagtgactctcataaatcacatctggattacttcagttacatgtggtgggtcaagcaaatgaatccatattgttaaggagagaaaaaaaaaaaaaaaacgagggtagggtttgcagaccacctaccttctcatcgttattggggtccaagtgcttttccacaactttcaacatgttttctatgtcttgttctaagttttccaagtcagagaaagactcagcagcttgaacagttccagcagggtccaagccttggtaggatgaagggtcctgaccaatcagcatctagggaaggaaaagaggcttctgagagttgattttctaaaatcatcccgagaggcagggtcacagcagaaaccagcatttatctgaaatgacttcaaggtcattcatcacagagcaatgacttagggcaacctgggtgtactcgaactgctcatttttcaatctggagccaggaatgtaaagtgcattccgttccctgtggctgcttcgagcacagtagggcagctgccaaggtgaacatcctacagggccgtgatgtgaaccatccctgccacaagccatgaaagaaacaatggccagtcctcactccagggtgcaaggagaccctagagaacgcctcccatacatgcccaccaagaagaacaccccttgggtgttttaatgacagaacctcaaaaagatttgtatttccaaatgccacattttcacatctatagagaaaaacatcacatttgggaaaataaaagtaaaaatggccattttaataaaaataaatgaataaaacatccagcgtctatgaagaaggtagcagtctcacttcttaacctgcacagattttccactagcccctgctgaaagtgtttggaacggccctctacaccctctgcaacaactcaatggattctaaaatccgataccagcagaatagtaagagatgagccagcagatacgagtaagatgattttaacaaagacaacattcccaagggcccaatattcacaaagttaacctagcaaattataacagcccatagaacattactgttaaaatccatttcaagggagcatgtacagaatgctataattttttttttttttatattttggaatcatgcatcagtgagtaaaaattgttaagcaacagagtggtttgcaaaggtcatttgaggggcaatgctaattttctttattatttctcttagcaccgtcctttgcttagtttttaatgtcaaaaaaaaaaaaaaaccctcccatgaatctatttaaacaaataaaatggaattaagtcatacaataaggaggcaaagccaagattaaagaagacaaatgctcaaggaaggtctgactgtattgttttaagtcgtgaataattatatgctggggcatagaaaaaagtgtggctcactataccagatattttaagttaaaacaaagttaggtaaaacttacttcctgcacacatataaaacaaacgatcttttctctttgttatttcaatagataactgccaagaggttcaattgactacttctttaaagtgccaccagatgtgcacagatgagattatataaaacgctcagcatcctgtgatccctcagcatgggcatctcaggtccaccgctctccctctaagctgagaaaatgcttgcatcgtttccacctcacatttactcaagctccatctgtgctcggccttgagaactctacagtaaagcttgtctcctgcccccctctgaaaataaagaataacagagggggggatgggaaagatacaggggggctgaaaaaataatagagtagtacagacaccattttgtaatgacagctgttatttatgacccttcttttaattgataaagcgttttcaaattagcgaattcagaaaatttccctgtgaactacaaactgtgagtctataacttataacatttaaatctgtcaacatataaacacatacacacacatgtattttctataaacacatacattaaaaggatgcatttaggatcaggaattgataatcatgtgtcagttgggaaatgacttatttctattctctttctatcccgactgtcaactggctctgaagcctgtcctgggtgagttatttactaaacaatattttcttatatcaacaatcacacataagtaacagcagttgctttgccaaacagttattaaaattcatttacaaattaataggcttgaacaaaattatgtaccattatacataaaccatggggagaaatggcatcctatacaaatgcaagcactcactcgggcgctctttatgtgctgggacaccttttcaaagttcctgctcagctcggctaattttggttccacgagttccctgctggcgcttccacgagcattcaccaagatgatggcttgttcccgaacattctcaacctggaggctggcatcatccaattcagacagtaaacgctgatagtaaaaggagggagggagggggggagggaaggagggagggagagagagagaagaatattattccaagcacacaagatgcttactatgaattaaaggtatttgaaataaacatctgagattgctaggaagactctcagcaccagaggatgtggtggtcatagaaacccatggtgatcttggtttctcccaccaaaaagcaaactgcttgagaacaccacacacactgctgacagcacacggcacaagagaacagcaaattagcctgcgggactcatgaggctgactaccttcacaatttcttcctgtttactcgctggtttcttttcgatctcatccagcagagcttcggcttgatagagccaggtactgatgtgagcgacgtgtccatcaaatagctccagctggttttgatggttctgcaaaggaataagatggtgctgatgagctttaaatgaaatattaagatggcaatcttagtagagattgaagaggccatcaaagagcatgctgcatgtcacacaatcgtgtcaacaaagaacgaagtttgctacatactttcacttggtttgttttggtttggggttattttggagggaggggcgactgctttaaagttctgcagactgagcatagggcctcatacactgcgcaactgaatatgacctcaggcctcttcttactttttattttaaattatttaggctatccttgaatttactatatagcccaagaagaccttcaagttgtgatcctcctgcctcagtcatccaagcagcaggcttacaagcctgtgctaccaggtgtgactattctgaggggagaaggggtattgggttttgggggttttgtttttttggcgtttttgagacagagccttgctatgtaaattgacctttatcattagagactcttgttttggtctcttaaattctgggattacaggtatgtatcaccatggccagctttagctttacttttctctctacattggtatgtggtgatgtattatattacagaatttgcataaagttataacagtaatgagtcatggactagaatataaacctctgatcaatcaagacctaagcacatgagctcctctgccctgtatatcctaactgatttgaaaaaaaaaaaaatcccaaacagatcacttattcttatatctatgccaatccattactggggaaataactgagttaaagtcctatctgatgtgctagaataaagtaataacttataaattgtaactctcacttcagagataggggctgccatatgttaatcattggtagaagtagccaggaaacactatgaaagtggaatagttataattaaaagaaaataatagggtgtttaacatattgttatataataccactacacattttaagtcatttaattattataaaatcatacaaggtagaaatgataataacgcccattttgtagatgagaaaaagaaagaatagagtttgtaagtaacttcactgaggtagtagtcaagaattttacaggcagcaatgtctgggataaccctttatctgtgctagtatataactaagacactgtgaagactgtgtgtatataaatatacatttctacatacatgtgcatatgtatgtataaattatatattatgattatactagcaaatactcttatcattaaaacaaaactatgtttactaaaatattaagtaacatggcccctgtgtttggcatgaatatttgacttttatcagaggtgctgtaaattcttctttttggtatcttttcagtagaaaaataaaataataaacctaacgcacaagcgaagcaaagcagacacacacagagccctaacgagggccgcatgctttccaatgcagctacttagagaagacatccccagtggcaggcatgttctggcatcttaccagcaaggtgttgcaccagtcttcggtccacgtccgcactcggctccatccagcattgagcacacagaggttctcttccagaacagactcactgcccaagaccaagtgctgaagggcggcactgctctctgtaatgccatttaagtcaactttcctcttttccagatccttgagaatactctagaagaaaaaggaaaaagaaaaaaaaaaaaacccacttgactttcagaacacactaacatttacctaaccttatgtattgtggtttgttctttagcttttttttttccagcaataacgagtcaatggtttctagataacttgcaataccttaaaggtttataaaactcaactctctgacacattgcaactctcaagccataaaaaaaactgaaatggttaagtaggtgaatctgaaaagacataagaaattcagataggccttccttcttcttgagtttcatgtgtttttcaaattgtatcttgggtattctaagtttctgggctaatatccacttatcagtgagtgcatatcatgtgagtttttttgtgattgggttatctcactcaggatgatatcctccagatccatccatttgcctaataatttcataaatttattgtttttaatagatgagaagaccaaagtgtggatacttcattcctccttagaacggggaacaaaatacccatgaaggcagttacagagacaaagttttgagctgagacgtaaggacactaccccacctggggatccatcacataaacagccaccaaaccaagacactactgcatatcccagcaagattttgctgacaggaccctgatatagctgtctcttgtgaggctatgctagtgcctggcaaatatagaagtggatgctcacagtcatctattgaatggaacacaggaccctcaatggaggagctagagaaattacccaaggagctaaagggtctgcaaccctataggtggaacaacaatatgaactaaccagtaccccggagctcttgtctctagctgcatatgtatcaaaagatggcctagtcagccatcaatgggaggagaggcccttggtcttgtgaagatcatattctccagtacaggggaatgccagggtcaggaagcaggagtgggtgggttggggagcagggtgggggagggtataagggactttaggaacagcatttgaaatgtaaatgaagaaaatatttaattaaaaaaaagaaatattacacatgtcctgagacgtgagtgatgatactaatgctaaatattaaaaatggagagaaaaaaaaaagaaagaaattcagatgggaaatacagcttaagtaaatcaaaggagaaccaggaaaatagaagctttgaacatcagcttcatgccttgcagtgggaacactccaggagggaaaatggccccgggactcacacacacgtgaaggctcaccaggaaagtgcacattcacagaaattcaaatcatgctgaaaatgcaaactatcctgaaatgacatatggaaacacccgtggcccccttactcctcaactgttgttcctttttcaaaaagtacttttcatatttctgtttatttaagtgtacgtgtgtgagtttatttaagtgttcatgtgtgtatgtgtatgcccttgaggacagaggtgtgcgtgtgcccttgaggaccaccagatgttccagacctaaagttacacgctgatattgggtcctcaaaatgaaacactggtcttctgcaagagcagcaagtgctcttggccactgagccacctccctgtggtacgggttcttaaatcaacatttaaagaaatcacttcaaggaattcaagttcttatgtgaacactgctgaaaatcacatttctgaatggatacaaatcacaaacccacaagggagtcaaggctgaaacactgccttggtcatgacacttagagacgcatttgaaaggcagtcgggtatttcctgctcctactcttcccctaaatgagagaaaaagtctattacaaatgtactctgtgtagttcagactttctgcgctccttcagtggttctgtagtaactgactaaaattggctggaagaaccataaaaaataactacagacaagtaattaagtttaaataatacatacacaagtctggtgggttttatggtaaaaagtgtttaaaataatattgaatgtatggaataaatttcccacttacatccacaaataaaaacaccacttaaattctgcatttaaatattgcacataatatttaatttatgaaactaaaatatcttctaaatctttaatggttttaaatcttaagacatatcattgaaaaggtgggcaatcaccaaagagcatacatggcctagacctgggtacctgcatgtatgtagcagatgtacagcttgatcttcacgtgggtctcataacaacgggaggcggggctgtccctgactctgttgcctcctatggatcctgttcccctaactgagctgccttgtctggcctcagtgggagaggatgtgcctagtcctgcagtgacttgatgtgccacagtaggttagtacccagaggggcctcctccttctcagaggaaaagggtaggagaataagagaaggggttgagtgggggggggggggggtgctgcaatcaggatgtaaataaataaataaataaataaataaactgatagaaaaagaaaagtgggtggctatgctccacatcaacgttcctcccaccccactgagaggaaagtgctgggtgcttcctagatgccaccctaactatgtcagatctgtaaaacaattagttgggaattcaaaattatatatttcacaagcttaccactatttatagtctgtcttcaaaaatgatagttaacaaaaaaatggaacttatgagaccagaaaaaaaggatcatcaaatattagtatatacaactcaatctcacctatatattatatatgcacacatataaaagcaatcagtaaaaaaaggaaaatgcacatttatatggtaataaaacaaaataatataaaatagatgcattattcatatacacacacacacatatatatatacccacgcatatacacacaatgtttatacaggaaaaaattaagatattatgagggaaagtaaaagaactgaaaggtcaggaaagtgagacatagcattttaataaggactgaagcctgtcgtggtggtacgtgctagtaggatgtgctaaagaggctgaagcaagagaatcaccagggtgaggccagcctgggctgcacctagaggccagcctgggctgcacctagaggccagcctgggctacacctagaggccagcataatggctcagcagacaaaggcatttgctgttcaagtctgaaaatccaagttccatccctggaaagcacataaatatggaaagagaagaccaagttctaaaagttattctgtgaccttcacatctatgccctggcacaagtgagcctcactcatacattctctcacatacatgtgcacgcacacagacatgtatatacacaacaataacaaccaatatttgttttatttatttataaatgatttagcaaggctggcagggcactcgcatggcatgggccaggacctgggattaatctccagcccccacagaaacaaaaggcaaaatacataagttctcatctaacaagtctagagctttaaagtaaatccacacaaaagttattttacaaatatggggactatttctataaaagtacataagccacgaagagaatcataaagagaaggaccctctactgagaattaaaatagctaacggaatgactcactcagcagtttgggaactgggggagggtagaagaccagaattgtacaacagaaaacaacaatgatatattaactactgtgttagactagagaagaactcagaactcagaccgacaaacctgggagcatacgtttgttcttcggggagaagttcagagcctctctcctaatatagagcaaattagcctctaaggattaaacattaaagttgaagggatgagactacacaagatcatgaagaaattccacagaagctcagggtcacggcagcccttctgaaacggaaggcaccaataacaaggaactgagtattctgttctttaaaatcacacttaagtgtgtgttaaaaaaaataataaggacaggaagtgaaccgcaatgacaaagaaaggaatttcttaaatactacacaacacagcgagcattaataagtctgatgaagaaatcaaaattagcagtttaatctggttatttaaaaatggtcaaaactacaggaaaaatatttttcaaataggggctaccgatggtctataagccatggaaaaggttctaactggatagtcagagaccgtgtttgtacaccacggtcgaatgtattttcaaaatccagggaggaattgatgcatatgtggtgcttgtaatgcactgtctatggcacagacttgaagcacacatgagatttaaaatgggtgtattctttggccttagattttccagctactaaaacacattcaggaaacaattataaatgtatgctgaaaatcagccataggaatgttgttcatagaactatgcataataatgaaaatggagggtggtaaacagctgtgagtggaagaattgggcaataaaaacaaccaaccataggagtaggcttgtctaacatacactagaaaagcagagggaaagacaaactgccaagctcacagttagcttgtgtttgactttattttaggtcctacacataaactgtgactttagcaactcagaaagccaaggagagtttgtgatctctgggaaacagtgaaagtcgtagagataataaggaaagaagacagtgtgtccaggccctgatggcactggcctgaaatcctcaccatcaggatgccgaggcatcaagagttcaagaccactcagaactgcatggtgaaacccagtctcaaaagaagaggaatggtggcacagggaggggcgagagcagggggaggagcctggagctgtccaagggaagagaagaattgctttcagcatactaaacaaagatcacagttaacaaaatcaatttggcttcttttctttttcagccagtcagaatacaccagtgaccttcaagttccttttccttccacatccctctctctgctccttgtcccccacacacagagcatgagctcctttccatgtactgtcttagaaactggaatattcttcccagagcaacagcttgactttctcccaagtgtccctgccactgagcgttcaggcgagtgggagttacgtcattaagcccgagtcccttctcacagaggtcgcaggaaaccctacagagttcactggagagactttgggtcgtccatgtttctgcagccagtgtatcctgcgaaggttctcaagcatgcctgtgtctttcatacaaaaggaactcaggaaaagagaaggcctccatccaatcccgtgtccagctcagaaacaagacgctacatgttaattcctaagtaggaattattccaaatagctagaaggctaaaggaaactgtgtgagttttgctttacattatgtgattatgatttctgcatcagttattttgcaataagtagatagatagatagatagatagatagatagatagatagatagatatagggataaaggtagtgatagctatgtagctagagatagataaaagagagagagaaagagagatataaatataaataatatgaatatagaatgaatactgggagaaaatgtcatggacaggtgattaatttttttctgttgtttcttttcctttcttttttgagacagggtctctctacattgccctggctatcctggaactcttgaacactctgaggtctacttgcctctgccttcgaagttctggaattaaaggtgtgcaccaccacacccagctaaggaggctaactgttaatataacatcttcagatactacctaagcataatgtaaaaaaagggcctgatgactcctaggacttcagcgcttttggaagggaaatgaagtgttttatcggggctgtggaggcagctcagttggtaaagtgcttgctgaataatgaagagctgagttctgatcctgcacactgctgtaaaaagtcagaaacgagagcagaattctagcactggggaaaacagagacaggagtttgctggcaagtctagccaaaacagtaagtttcatgttcagaatgagagtttgacccagagaaagcaactgagaaggacatatgacatcaaccacaggcctacacacacacacacacacacacacacacacacacacacaaattcacatacactcacaccgaatctcccacacactcacaaatacacatgtgaacactcacactcattcatacacactcactcacaaacacacatgcacacatttatactcacactgacacacttgtgcatacacggacacacacacatacacacacaaaagtactgttaaaatgcctggttttaactgagcatagttgcacatgatggtgaccctagcactggagaagctaatgaagagaaactctgcagatttacggccagcgtgtgatattcaatgaatgcatggcagcccaggttacagagagaaacctctgaaacaaggtgtattcaaaatgttcttcccagatcacagaagagggaaagaaagggagggagaagagcagaggttacaattaatacgaaatagaggcagtgtccagccagattgtccaaagcaaatgccactgatgggacatgtccaacccaactaaaactcactttagcccaggagatttctgtgtccaggtcaccaatcacgccttctgatgtggatttctgcactagttctgcctctgtggcagagagccattcagagaggacggcagcctccttcttcatcttcctggacagctgtgaggctctttccaggtcttgcttcccttctgtcacctaaaaagggggtcaaagacatggtgagcgagtcaaagataaacaaggggaccaaggacactgtgagacagagtaaacaaggaggtcaaggacacaatgagaaagacacagtgtggttcaactgaatccataacactcaattaatagcaccagaacccagcctggtctacagagtaagttccaggacagccaccactatacagagaaaccctgtctcgaaaaacaaaaacaaaaacaaaaaaaaccaacaaaacaaaacaaacaaacaaaaaaaaaatagcaccagaacacagactttaaatagtatacacttggggctggagagatggcttagtggttaagagcaccgactgctcttccagaggtcctgtgttcaattcccagcaaccacatggtggctcaaaaccatctgtaataggatctgatgccctcttctggtgtgcctgaagagagcaatggtgtactcatatgcataaagtaaataaataaatctttaaaaaaataaatagtaaacacttgaattacagaatgcttctctgactgacatgcccgagcagctccacaagtaccaccaaacttagtgctcacaaagatttctgtatcaggaagaaaagcatccaagctcaacttataaggatgcacactttttctcaacctcatcaatgtgggctaagggcatctgcaagggaccataggaagatgtaaggctttacctgactgctcatcccttcccttttagctatagaaccattccttcttggtaaacattttaaacactctcatctcctctcttctctctctctctctctctctctctctctctcactcactcacacacacaccccaacttacctggatattctcccttccctcttagttataggaccattccttctgggtaaacattttaaacactctcatgtcacacacatacacacacacaccaacttccctaaatatccactgtctacttttaccatatgatcaaagctgcttcttagagtgtggtgctatgcctgacttctcacacatcccttgctaaattcaataacaaccccaaggcaacagatgcaaagggcatttttaagtgaacacaatattcacagagccatgactgaactcatctttgaaatactaccctcctggtttcccagagctcatccctgccatacacctatcacacctgttatcttcttattttaaagtttgttttgctaatccgtaacacttgctcagtagcctcattttccctcatcatatcctctccctagctaatttcacgtattctttggactctaaatttcagggcaaaccctcaaagtcagaggacagtttttctatgggatttagcaacagaaaatggcctgcctaccaactcttaacactcactcattgaagtatacaatggacgcttttagtctcggtagactacctaccaccaagtatttactagatcctgacatgataacatacctactgaatttagatatccaaaaccaaagtttatacagaaactattaccttgttgagtttccttagaataacttatgccaatggccatggaaaatataaatatcatcctgtattaagtaatctaaaaatatttatataactaataacgattatactactgatgtacaagtaaagattaaatttgataaatgttgggagagggggtgacagataaatagagagaggagagagagagaagcgccccccacctgtgcgcccaggtcattgtagaggactttcagagatgtaagctgttcgtccatgcttttcgggttgtccgtctgctgcttctggacaatgtgcctccctgttttgatgacagtctcaacttcaagtttgacttcactcaacgttttatatagtttctttaaaaaagaggaaaaaaaatttccattgttaacagaaaattcccgactggcatcatttcagagcacagcttctgtggctggacagataatacctcatcccggatatgaaagggcacactgtctgtcttgaatatggtttgaaggttgaattaagtgaagtcaggattgtaatgcttcttcaaatcagataataaactaatagagtttgcgtgtgtttaaatataaaacaagacgtgcgtattaaatgtcagtagaaatcctggataagggctcactgtaaccatgtttccttcaaaaactttggaaagttacaggatgcaaactggaatgtctctgtgtggaaccacactgtagggatggcagactccttactgagaaagcatgggtttactatgcacaaggtccttggttcaactcacggcactgaatgaattctttaatcctaacaccggtgactggaagacagttgcctctggcaatctgtgcccgaaagaatgtggaatccctaacatttatttgtttctattcctcagagaagacaaatgtaccataatgagtataatttatattctgaaatacacttaatactttaaagtgtcaaaatggatatgagtatgaagttggagttcaacaggtcaaattccaaattgccttcgtacttgtcaccgtgaacccccaaactctgtctaggcagcttatccatacatgagcatccaactcaaaacacttcaaggatacaaagccagtatctgtgatgtcaaatacagtgacatctgctactctgtcccaatgagcaaacagatgcttacaacactttcatgtgattcaaacgtctcctacctgtgcactattccacccacataagaaacaaaccatggaaaagacagtcctaccaatatctcctcccaggagatagaagagcaccgggcacaataaggctaagttcaggtcctccccacaacatcatttaaaactctctattagggctggcgagatggctcagtggttaagagcactgtctgctcttccagaggctctgagttcaattcccagcaaccacatggtggctcataaccatctgtaatgggatcttctggcatgcaggcatacatgcagatagagcacttgtttaaaaaataaaaaacaaataaaatttataaacctctattaaactaactacaaacaatggaatagtaaggtcttatttgtcattcatttctgcccatctgaagtttaaactttgacttgaatgtcattttcctagcaaaatattttttttactctataatattccaaatattagaggtacttcaaatttattgtggaaagtttcatttatcagttgcatccttcagagaggtctttcccacttcatgttgtagtttatacatttctttctttttaaatccatgttatttatgtgcaatctgcttcctttatctgcacagatcatacctgttgctttcatactcccctattactcttatactgtctatttttttttctgggagagccacagttctttttgttctgacacagtctccatcatctccataccctgaactaaagaataagaagggatgctctatactaaaccatcagagcagctctggccatgtgagctgcctgctgggcctcaggctcaccatgcacttgtccaagtgggcctgaatgacgtcagggtccacatccctcacatcgaggacatgaagctcggccttcactccctccaacacacgcttgcagtccagcatccgctgctcgaaatttgcgggcttctggaaaagctggaatttggtggagacctctcgaagtttcctctgtttgcagaaataagagtaagccactcactttcgctctaactagatattactataatacataatgccgaaagacttttcaaaaaaaaaaaaaaacaggccaacccaggaaaccccagaggaattaggacggtcatataaagcagtagttcttagcctttctaatgttccctttaacacagttcccacgttgtggtgaccccgcccccaaccataaaactatttcactgctacttcataactaattcagtgactgctatgaatcataatatattatctgatacagaggagatctgatatgcgacccccaaaagggtcacatcccacaggttcagaaccactgctcgatgtcatgagtgagcagtactcagaatttcagtctccaaactacatctggagacagatggtgtctctggatgagaaagtccattcatttactcactttttcatgaacatagacctcagatgccttctaccacattaagagtggaagctcatttccctctacctactgaggccctgagtgcccagacatcagcctctgagatcagagaatggtctacacaaagtcaactgctggcctgaactcatcccctcttctcagccaactcttaaagctcatagtttccttacccagctaacaacctgttcctgttgccatgagcctttaatactccgctcccatcccatgtttgaatcatagcacagagcgaaggtaccgaagtccttaagcctttctgcttttcttttctatacccaccatatataaaaagcaaagggaagccagtccttacctgtagcatgtccatctgacttcctcctctggtggccctgccctcaggggacgtcgggggctgggagcgcacattcttcctcagctcctccagggtgagctcatgggctgagatttcggcttggatcttctaccaagaagataaaaaacgggagaaggtgtgtttttaaagtacacaaagaagccctgggtaatggcccatgcttgtaatccttagcattctggagtctgcagctggaggatggctgagtttaaggccacccttggctgcatagtaagtcccagacaagcacgagttacagtatgcctttacacaacatgtgagcttttatataacaacagttggaatacagcagtatgtctttatacaacaaccaagtacaggaagaaatataatacagaagttcaaggtagttgtatagtatatgatcctatatctaatacacactaataagcttgtgggatacatgataataacaaactgttgcacagtacaccaccgtgtgctatgcacatgctaaggtctttgcttgtcattattaatgttcacatctgatgtatacagaataaactgcctgaactgtatagctacaaaggaaggaaggaaggaaggaaggaaggaaggaaggaaggaaagagagagagagagagagagagagagagagagagagaaagagagaaagagagaaagagagaaagagagaaagagaaagagaaaaagagagaaagagagaaagagagaaagagagaaagagagaaagagagaaaggaagaaatctattttctaacatatcaactgtgtgaaaggagctggagagatggctcagctgttaagagcaccagctgctcttccaaaggatctaggttcctttcccagtccccacagggtggtttacaacagtctaactccagttccaggggcctcactgctgtcttctggcatccacaggcagtaggcacgagcacagtgcacagatgcacatgtaagccagacacccatatgcataaaatggtagggagaaaatgtgtcaagttctcacacaaggaacaagaacagcccccacccaaaggctgttccatacagagtcctcctgactctggcagtgaggaccaggctacagctgccctttctcaagacgcaaaggctctcggctttgcagcaatacctgagcttcctgtggcagttggaaggcatcgatcctgtccgtcaggtatgtggtaagctgtttgtccagctcccccaggctctccttcagcacctgaagcatgtggtcagtttcgcggaggacctggagttgcttctccaaagaaatctgtttgctctccgcctgcacagaggagacatttcctttgtaactgctcagcacaaatataaatagctgaatgtgccttctggccatgcagattataataaagtactggttcaagactgtagctcttcttataaataattaataacgatcataataagagtgcaaatgttcttctagtatctcatggacacagcagctgaacctctcatttttaaaagaattatttatttattttcattttaaatacattggtaatttgactacctgtatgtctatgtgagggtgtcggatcccctgggacaggagctaaagacagttgagagccaccatgtgggtgctgggaattgaatcaaggagagcatccagtgcttttatctgctgagccatctctccagcccctgaatctctcattcttacttctattaacctatactatgacaaaatacaagtacaaaaagattcccccataggacatataaaatagaaaaaaaatgtgtatttcaggcgactggctcagtggctaagggtacttgttgccctagtagatagtgagggtggctcacgactatctgtgctccagctatagggggtcagatacccgcttctggacaacatgaccatgagacgcatatatgggacataaacatctatgcagacactcacatatacaaaatgtcttaaacttagtaaaatttgtaatttctaatttttttattttactagaaatataaagcaattttaagaatctccaatgcctaacaaaaaaaataagacatagtaagaatgtctatcaagtgaataaatacctaatttttttttctaaaattgagaacaagttctaacagtgcacatgtgagtcaaaccactaattgccacacatctttggattaagctcaatgatatttttagtctaatctcagcagttgttacttggtaatctggtatagttatctaatgatcaactcaaccttcttacaaaagaacaaggtcccttctcttatcactgatatggatatgcatgttgagatataatctgagcatcagccgagtgatgtagctttcataacagttaatgtcaaattcggaaggccctaatcgttattaggacatacatatagacgttattattcttagacatagctgtaatactattcttacagaaaactgcataattcacaaatagaaataaatctcaaagaggtgttggagatagaaggtaactgggaacttaacacatagccttgtgtgtacaacaaaagtgctttaccactgggctacatccagtatctgacaaagtttggtttggtttcatttttggcttggcttggtttggcttggcttgggattgggttgttgaaacaataccttactatgtagcttcacctggcttaagactccctatgcagagtattctagcctcaagctcagagatattcttgcctctgcctcttaagtttttggattaaaggcatataccaccatgccttgtcctggcaatttggatgtttgtttgtcttttgtttgtttgtttgatcaagctgcatctgacctacaaatattagatctattcttctatacttacttcaaagcccttatgctcccattaacattgcctgcctactttaactcccaccacaccaaagcattatctaatggggaccaatttatacattaccaagtgtaaccagcacggaagctccgagtaagagagagagctctcagagttagcttgtggcagtaactacctaatcacactgcacatgtctggttctcaccaagtgactcagctcttcgtagcggctgttaaaagcctccagcttctcgctgattatgtcatccaggattccaccatcaatcagagtctgcccaagttcccgaatctgggtgcgattatccgccggatggcgcaaaacagactcaagagactgcagttgggcaggggaaaaaatacattcaatgggtctaaatggatcaagatctgcaaaatgccattttaagcattaatattaattccactttctagaaatctatttaagaaacaagtaatgacaaatattaaggaaataactaattcacaaaattatccactatagattaacaaaatcacaaaactttaaaaaaaaacttcaagaacatatgcataaaataatttgaataattattaattttatgagaaactctcagtgtgacatacaaaactgtactctacaaataaaattatctcatgttattaactacattggtaaaattagagatccatttttctaccttatgatacagaaatacactaagtatttctatgtatacagttttatagacacaagtccaactaaccttatgcatgaaatactactcccattctacagatgggaaatctgaaagccataaagttcaatttgacaaaagagagtcaattaaaaaaaaacaaaaacaaaacacaaacaaacaaacaaaaatcctaaggctccaaactctttccgaagctcttaggactaggagccctttgactgcatttactgccctgcagtatacatgcacaaaaggaatgctgataataaagaaaaaatacagggggctggagagatggctcagcgggtaagagcactgactgctcttccaaaggtcctgagttcaaatcccagcaaccacatggcggctcacaaccacctgtagtgggatctgatgctttcttctggtgtgtctgaagaaagcaacagtgtactcatatatatataaataaacctgaaagaaagaaagggagtgagggagagagaagagagaagagaagagaacacagaatgtattaaagtgtttatcatggagccttcttttccttttctccattgtctggatttctagaatgtatatttatgccctatgagaaaagcatgcttgctgtttgttcaatgggcatgtagtggtttccatgctgtctatgcatcctctactctgctgtgtttgagaagtgacaattctctccctgcacggcatccatcttcaggaatggagccccattcacccccaccccctgggaatagctctctgacttcccattctgctgttcatcggatccccaaatttccctactactcctgtacaagtgaaacctctttggttacactgtaattcgtttctgaagtaattaccacagtatcgtgtgtactcctgggctcgaaactacagaacgaggaagccttcgggatatttcttggccccaggagcctgaagcccagccttgtcatccagccccactgtgggagcccctgccttcacgaatgcacatagcagcctgctttaactttttacatctgagaatgatgaagaagccacctgaagcatggttcatgccatagtcataagtgcaaagaaacaaaacagggtttgttcagagaatggtgaaaagaactggaccctactagtgactatcgctgtgtctaacatgcactcatgtagctcctgccttacaaaactgattataaagagttcccaggggccggtgagatggctcagtgggtcaaaaggagcttgccacaaaccctaacgacctggatttgatccctgggatctatgttgcaagggggaaaataacttttacaaattgtgctctgacctcaacacacatcctattgtatgcacggatggatggatagacagacagacagacagacagacagacagacagacatctttcccattcacagtgaaaataactgtggctcagacatcaggtgccaacctccagagcttcatgaacagcttctgccctctcaggcagggcctccgtgctcctcacgcgctcctccaaggtgttcaaccacgtggtctccaggtccagatagtgaagcagctccacccagcaagaccagacctcctaacaaatgtgaagggaaaattaacacggaagagaagccataaccatacgtcatcccttcgatcaataagaactccatttcagtgagtaatatacaggaatccagaaaccagcgaagctagaatatcaaataaatgaggcaaaactaaatcttcaataaaataggagcaattaagatggaaggagaaggaaaaatggaaaagaagctgcctcggttttcagtaaaatgagttccaaggacctggctaaatgttaaaaaaaaaaacaaacctgaataattaataggggaaaaaaacagcagagaaatacattttctgtttgtttgtttgtttgtttgtttgttttaaagaaaatgttagagccggagatttagctcagtggctacaacctgtacttgcctgacaaaggccctaagtccaatccccagtaccaccaccaccaccaccaccaacaccaccaacaccaacaccaacaccaacaccaacaccaacaccaacaccaacaacaacaccaccaccaccaccaccaccactaccaacaccaccaacaccaccaccaccaccaccaacaccaccaccactaccaacaccaccaccaccaacaacaacaacaacaacaacaacaccaacaccaccaccaccaacaacaacaacaacaccaacaccaacaacaccaccaccaccaccactaccaacaccaacaacaacaacaacaacaccaacaacaccaacaccaacaccaacaacaacaacaacaacaacaacaacaacaccaccaacaacaacaacaacagcaacacccccagaaagagcaaaaggtaaaaaccattcaggatatttttttatagaaacttaaatctcctaggacatatccaattccagttcctagatgactgatgggagcagatgtctctgtagccatctggacttctttccaagtgagtaaagatagacacataagaggatgggcccattttaccaaaacaggagccaggtagtcctgtgttctccctactcagagttccgaagtaggagagaagccgaggaaggcatgcatttagagccttctatccccttgctccagaacaagagaggatcttatctgactgctaagattagagctctgcacaaaatcccctgcatctgtcttctctaccaaggtagggcacagtcccatccattccccacatcagctctgctcgccagaacagggctcagccggtatttctcgagaggcacagagaaggtatttcagactttaggggtgacatccatagtttgtcacagcttcatctttggtgtataggtgtttacaccatgttcaatcctttagaaataccactcttaaccaaacctaccccccccccaaaaaaaaccaactttttttttcagggcagggtttctctatgtggccctggctgttccagacctcaggtgtaggccaggctggccttgggctcagagatgcttctcccttcagggtgctgggattaaaggcatagaacaccattgcctagctcaaactacacaatttatacctgaggcctctaccataatttgttgactcttggttcagagcaaaagaagaaagagatttctagtccccttctcccattaatcttacaagaagcaggccgaaaaatctgctcagatcttacaagaagtacaatgagtaaactcagtttaaatcttccctcggcattatcagaactcaccagaatgtaattgcttattgtagggtgtgtttcatttaaatttgaataactcaaaacgcttcttaagacttttgaccagtttttttttaaccatgaagatgagaaagcactttattaaaataatcccacagaataatctaggtcttcagtctgataggcagtgagattctccacctaaaaatgcaatgaaatctctacatactgaaattctttttcccctccagtaaatattagacacgactcaaaataaaaataaaataacagtcagccaggtaaaagagagctgtctggattcttatggtaacctgagaacactagtgagcacacaaacctgcggggatcaattatcaccattgaacctcctgagaaatgcaggcagatcttggtctccttttaacacaaaacaaacaaaaatctctctatttttttatctacttggtccataaaaattacttttataatccaatgtttgacaaagtaatggcgctttctttcttcttcttcttcttttttttaaataagacagggaaatccacacagcagagctgggatctcaggatggtagccctggggcaaacaagctcttacctccagtgtgtggcacttccctcgaattctattgcacagaagctggtagctctccagcacctcgttgaattccgacgtcaactcctggccaccagagggcaccttggcagccaccagcttgatgctgtccttcagaattttcaccctcacctccttctgcagcacctcctcttttgccctctgtcccaagaaaggagcaatttgaaacatggctctctgtgactaatatctttctttaaaaaataataataatgattaatccaatatcaaaacaactaaatgattctatatgcctcagtagaacactatttaaaaaattctgtaacctgagttttttgaaagaagaatgctaaaaataaaatctcacttactcttctagtttccaattccccgagcccacaacagtttctttttaataccaccagagtttagaggcaagttatcctaaatagtgtctactggcaagatatatttttaaattctggactcagggtaggaatctaaatgaactcattttaaatgaccactggaggtctgaacacattaaattgaaataaataaacaccccccaaaatggcaggacactgtggcagaggcatctattaaaatggcccacaaatccttgtaaaaacattttcctccttgaccatgggtccatccatccttccaataatgaagatgaagaagctcctctggacaacctgatccagaaatagctgcttcctggctttctctcggtgcccaaggtgctcagtctcacatgcaggaaaacctacctgcagccgtctttcactcccccctttagcttgctttattgcttaatggatttcagctctcccagggtgagggaaaaagtaattaagtgtagtggcttttaaattcctaatggctgttttaaagaataaaaataaatagagtgttgcccaatcagggattgtaatctcatttttcttcactgtcaactacaatgacttttaaaatcagcagcaaactgcagctccaaaagtgtgagtgataaatgagttagccattctttacatagtaatctacttttaaatattttcagtactaaaaatagttttaaaacttttcaaaaagagctacatgaccagtacccccgaagctagtgtctctagctgcatatatagcagaagatggcctagccggccatcagtggaaagagaggcccattggtcgtgcaaactttatgtacctcagtgcaggggaccgccagggccgggaggtgggagtgggtgggtaggggagtgagggaggagggtatgggggacttttgggatagcattggaaatgtaaatgaggaaaatacctaataaaaaaaattttagaaaaaagaaaattatatatatattgatccccgacacagattaaataagtctcttttcatatctactgactcaagatagcatgcatgaatgtcacatagaatctttttaaaaactacctgcacagaaaagtttgccttagttatactactagttgagttaaccaacttaattggtagtataactactagttaacaatataccatgttacttgatcttttacaaagagaagtgtactttttttttttaattttttttttaaggacaggatttctccgtgtagccctggctgctctgaaacttgctctgtagactgactagcctcaaacacagagatccacctacctctgcccctctgcccctctgcccctctgcccctctgcccctctgcccctctgcccctctgcccctctgcccctgcctctgaagtactggggttaaagctgtatccccaccaccaccaccacctgacaagaaggatgactcttaaagacagaatcacgccctcatgctagaaggatagtggaggcaaatgtgggtctgaggcccagttctttccttatacaaggacaactactgacacaggaatagatgtttctggaaccacagcttgtaactccaacttatcttcaccttatcttctctgtatacgccaagatttctgctcaaggacattgtggggttcctatgtgccctcattactgactctatatctcctacctcctgctcctgggatgttctggggttcccatgtactcccaatactgacttgaatgtagcctttgcctcctgctccaaagacattctggggttccctgggcccccacgaatgactagaatgaaacccattagaactagaataacctccaagtctcctttgctccttaccaaaacttacacttcctggaaacagtgatagaagtcacacggtaccatgactagaattaacaccataaaatatacaccaagaaactgctaaaagggtaaaaaaaaaatttatattatatgtgtttattgcaataataaaagaaaaatgagtttctcctcacaacccttcttcgagacagaaacctccatgactatccacagggacttcccagaatcgatctactctggggtggacttgaaccagtggactggcatcagcctctttcccaactaagattaccacagctgctcatcactcactcctactgagagcagacttgtccatagggttctgtgcagtgtgataggtgaaagaccaacagactaactagtgtgaagagggcagtcgggaggaaggccttaccttcatttcctccaccgcactctcgagttcttctggagatttgtactcgaagtccctctccaggtagtcctcttcagcctgtgccatccactcctgcatctcagccaaatcctttttcaagttcagggctttttcttgactatctgacagcctgcttttttgaatagcaatctaggaaggaaacgccaattccactcaataaataaattttaatacgttaaatgccaagttctaccctttaatatttaaaggcactgcaatagatttccagtcttattttttaacatttaaataaaacttttaaagcatcctgtgctggtgctgtgtaatgtaagaaaggatgaaaatataatgacttctatacaacattttagacatgaacctaactagaagatatctaatataactctgaaaatagggttcacagctggtgttttttctccctggcagcctgcactgtactcccaacactgtgaaaggtaagcagcagaaactaactaggtttctgaccttttaattccacattaaggagcttcacctatagcgataaaggtatgaacatcaagtaatttaattgtaacactgtctattatataaaaaataaaacaggaagcagaattcccatggtgtggcctcacattctaaactgagcctggagttgggcacagtcacacattcttgtaatatcagcccttggaaggcagaagcaggtgtgtctctgtaaatccagggctagcctgctctacagaagaagacctgttctcaaaaaaatgttcttaaaaataaggggaaaaaactgaggatgaaaagaactattacaaaagatgtccacaaggcattaccctataaaatgttggttagaaagtagaaggtaggactggagagatggctcagtggttaagagcactgactgctcttccgaaggacctgagttcaaatcccaacaaccacatggtggctcacaaccatctgtacagttacagtgtactcacatacataaatcttaaaaaaaaaaaaacagaaagtagaagatagacgttggagagatggctcagtggttaagagcacttgctgctcttcccgaggatgcaggttcaattcccagtccccacatgatggctcacaactcctctgtaactgtaactccagttcaagttcaagaaaatccaacactctacatacacagacatacagacagacaaaacaccaaggcacataagtaaagtgttttgtaaaagaaaaaggagggggaggagaaggagagaaggagagaagaagaagaaggaggaggaggaggaggaggaggaggaggaggaggaggaagtagaacatatatttgaaaatagctatctgtctgaatctggctcagtaactttatgaagtacttcagaggagtctgggaatattttcagagctcctcacctaaccacaaatgcacttcggctgaaagagatgatcgtgtcacacaggaatcgtccaaccttcccctgacacgtccagtagcctgctcaaattacatgtctgagtggaggccagagctgacagaaaccggaggccaggccaggaacaggatgggctcacaggaatgtgggttaaggaatggttagtggctttcctgttccctccctccaaacaggagcacaggcctaaaaatagacaaggaacttttctttccatgcccaccccgcaagctagggtgtgactcttctaggagaagccacaatagcacacagtgctcctctcccttgctcaacactttaagcagctcttgataaaactatggcatagtgtgtgtgtgtgtgggggggggtaaaatgcaatgtagtcacataaatgtagactcttggtttacatttcctgaacaacaataaatattatcattttagtggatccatagaaaagttgaaaataaaatccacaagatcataactatagacttggtattttaggacagtgttaaattctgtcatggtagcatacatgagacacatttctgtacattttagtttgacatggcctgtgtttacttatttttattttgtgtgtagggatattttgcctgtacacagtctgtgtacagactgtgtaactttgtgaagtacttcagaggagtctgggaatattttcagagctcctcacctaaccacaaaggccagaagcgggcaaatcaaggtcacctggaaatggagttccagactgttgtatgttgccaatgtgggtgctggaaatggaacctgggtcttcagcaagagctgaagggctctaaactgctaacccatctctccagccccagatagacctatgtttcctaagtacatttgtgtgtatatatatatgtgtgtgtgtgtgtgtgtatacatacacacacactatacaactttttaaattttactagtgagtgagataaaccgtctagaactgatctaaatactttctgtaccgtagattttatattgttatgagcaagtgggtgaacagatgaacttgagtagatggatggatggatggatggatggatggatggatggatggatggatgtgacagataggagatggtaatggtagacaatggatggatgaagatgatggaggatgaaggacagatggataaatgcatggatacaggagacaggggataagtagacgaatggatgctacatggttgcttattcctcaatgtcacttaggaagcttgtcctttatttccttagataaaatccccagctgcttacactgtcagattataaagcagatacagaaatacaaacttggatagtgtattcagtgatattacaaaaaaagattattttcttgagttggatcatggcatcttgacaaatgcctatattataatatatgacaataatttcaagttcctgtatgaagcatattttcagagatacatagaaaatataatacaaaactagctactgataaatcttggaataggtccatgggtgtttctctgtaggattagtatgatttttctcctcataaaatatgttcaaaatgaagatgttgggctaaaacaagaacaaaacattcaatcatgccaccatagggttccttcccattccctcccccactgtccattgtcacttccttccccacctcgccaggggatgcacttttcttggggtcatccgaagtcgctcctgagttaaagttaaagcttgatttttaactcagataacctgactcatgcctctagctttattcacctctcttactatcttctgcttcccatgccccaagggcactaagaattttaaaagctaaaattttaaaaagaggaaaaataagaagcagcctttgcatgcacagagttacctccacctccatccttccagaacaggtctcatccagttacctgctgctaggaagcttctgctcctgggttcttatcactcagagagcaccacaatccacacagaacacacgcacgaacgcacacaccgtttgccaatctctggagccacccagagcatcagttttccatctgacattgtcctccacccaaggcctgtctctgttcccaagggatacagctcacacgtgctatcctgaccacaaacatggtctctccagccaagagtcaccaactctcagacctctgcaatgtcccaatgtgagcaactccctgactaaacgattgccaagaactctaccttctcttaattcttggctgcccctccctgacagctcacctgcctcataggaatgcaaaaacttttcctctggtcatttctgtgtcccagagcatacaaagaagcctagcaacagacactaattaagaaaatactacactatatttattaattatgcctaattaataaatatgtgctgcttaaaggattaatagctataatcagtagataccacactgaaatgtcctcaaggcaaggcaagtgtcataaatgaatgtgtggaactcagttgaaaacagaaagaataggacagtcctgagtctcactaagcaagcagtagtcttccttaatttttatatatatatacacacacacatatatatacatatatatatatgtctttgtatatatacacacatatataatttatacaatatactaatataataaatatatataattcatacaatatattttaatttaagatatttaatatatcttatatacttaatattaatatacatattttatatacctaatatatctttatatatctttatatattatatgtatatgtagtatataaataaataaaataagtaaatatattatatataagatatatgtatctttatatatgtctttaatatatatttaatatctatcttaaaactatgaaagaatattgtttgtatgtgtgtacatcacacacagatatatgtatgtatatgtatatacatgtatatatatacacacagacacatatatatatatatatatatatatatatatatatatacatatatatatatatatatatatatatatatatatatgcatgtgtctgtgcatgtgtgctttaagtgtgttttatgctgtcctgtaaaaattgtagagcactattttttggttttgattttgtggtcaagagaagccagtgacagtgtgtccccttcctaaagaaggtgccaagctcacctctttgctgaatttctccagttgggattggtaatccactagtcttgcctgtacccatgtcttgactccagtgactggacacctctgaaggctagtctctacttccctcatgttcttcagagatgactcgatggtttcgatttcattagcaaacgtctgaatacaggagataagtccatgttaagtgtactcccatgtaagtggacatcagtatcacacctatctacctggatcctgcaaatatttcaaggacatagtgactggtattcaggattctcagctacttaagagatgactcacttcaagaaactcattttgcctagcatttaatacagtcgcccgctaaaaattaaattagaattacttgaatctcagtgggaagtatgacttttaattaacttagagtagcggttctcaacctgtaggcctttgggggtggggggagggtcacatatcagacagcctgcataccagatatttacattatgattcataacagtagcagaattacagtcatgaagtagcaatgaaaataactttatggttggtgtttgccacactctgagggactgtattaaaggccacagcattcggaaggctgagaaccactgctctagagagacctggtgagtctcaagtataaattgtgttgctagcacatttcatttgctagatatgctgctcagaaaggttcgtcatgtgctacaatggcagcagcatgcttgtgataatcattacattaagatcacaatcttaacagaagaaaacagcttccaaagaaataaatttgctcttgttctcatcacgaatcctataaccacagacggcagtataatatgagcaatctgtctgtcctttattagctacgaagtaaaaataaaagctttacaataaaagactctttatctagacttcataagccctattcttacaattttaataatggcaagtgacaaagagcgagaagagaatgttatttattccagtaggattgccagagcggaggcactcacagcacattggtcaagctggctctgcagcgcagcagcgtctccttgagcagcctgttctttcatgaggaagtctttgatgccactcacccacttctcaatgacttctgaatcagcctaaattgaacacaataacagaggggcatattactcagtgacatacaaccccaggacatctcaagatctactgggaccaaagaaagagacaacttctcaaaactcaataacatcgttttcatttgtttcatttcctctttgaagtctcccaacttggaaaataaagtctttagtttatcctcaaggaaatgtttccaaaaatgacactgcggtggtcatccaccagtctcaagccactctggaataaactattgtatctaaatgcaagcaatatttaggactaagattcaaattacaggaaaaaaaatgctactctagtcatagtcaaagcataaacaaaaatcttttgctttcaactaacttagagcaattttttctcggaagttactggaactaggagtaagcacacagcatcatgaaggaacatgacacaggactctccaatcttccatgggatacctccttctctgaaaacagaactagccactgtctggtttatttcagttcttctaaccactcaaagttaataagtacaaagagaaggcaaacgttttctagaaagtaggcttgagagaggagatcgcaaaggaatagctgtagagaagtcaactgcagccacacttaaacttcagtactaaagcattggctattttccccaaagcctcctgtcccttcattggttagtctgccttgctaattcccctaatgtttctccgagtccccttcagttctactcttgatcacgcctagaaatagaaataaacctgaatggttaattcgaaagtgaccaccatgtgtctccctagtcctgggaaggctaaatattccttcttttgtgacatttacagggcaatatagccgggtaatgcacaaaccattctgatccatgtactctggagacaacaaaaaatattttatattcctataatataccaaacaaaaccaactattaatattcttatgaagctggaatgaatcgtaaagacatacaactatggcaagttacatctataaaataggttatacctataaaataccacctaaaaccattttaggtttttcttatcgtgaatttgtccaatgattcttttgggttaaacttgtttgttcttaaatatatcaggagcaacatgaagactaaaaccccagtgttctcagtatttacctcaaaataagcttcccctaccaaacattgcttaacatggatagaatagctatagaacttgatcattataaataccaaattttgttttattatgctgacaacagaagtttaaaaaatagatcagcaacaagccaacagaataattagaacttttaacctttccactttcctaccaacttctcttcctaactttcctctacttggaaagtggacatagaaacacaattttctattgggtacatggtttgggtccgcttggttggttggttggtttcaattgggtttcttgcttttgagtgttaggatttgtaagtgaaatcatggcgcccattgtttataattaataaatgctaataaaaatagaagtggggctggagggataccccagcagacaggaacagtcactactcttacagagaagcagggttctgttctcagcacccccaagacaatgcataactgtcttgaattccaactccagaagatctagcgccctcttctggtccccataggtaccgcatgcccatgttacaagtacagatgtacaagttcacagataggcacataagatttaaaaataaatcactaaaaataaaatcttgttccatgaaacaagccttttaaaattgcctgcttaccccattgcattgttaatctccattctgaactcctaaataacatagtatttctgaggaactaggaaatccatcaaagctaattttgaaagaggaaaacagtttcacagctaagatttttcagtaacacatagaggtgcctcataccccaagagggctaatagtcacagtcacctctgactaaaatagacagctttaacccatcactggggaatgagaggaagttttaggggctcagtcacctcttcctcgcctcagacaaccccagacaccggtgagggcacacagcccaggaacacccgttccttcttgctctcagtttcactgaggaaaaaaaaaagaaaggagaatgtagcagacacacacacacacaagccacagaaatatcagagacggagcaacaaacaggcattctgcttctcactacagaaaatctgacatataatccctgtaccctatgatggggagacgccgagctcaccagctaacagcatggctgtaagaaactaattctgttttggcacctcagttgctcacctgtaaaaccagaataacaacaataacaactgtgtttaattgttctgaaaaatcacagacagtgttgggacagagatcgccacacgaatgcatgcaacatacacttagcacccacgaaagcatctgcctcactattaacaatgaggacctcgttagagagccaatgcttccaaatcctagaacttagatcttgtcagagatgcccaggaatgccacagtgaagttgtgtttgctaaaaatcaggtagttggttgttgttttgttgttgttgtccttttttattgctgtcagcattaacatttgttcagtcctataactattttaaagtccctggaaaatggccagctgaaagctcaatcgtgctatatctgatgggcatagttaaagagctcagcagaaaaaaagtcaaggaaacgggaaccagtccaaactttgaaaatgccttgcaggggcagatttagtagacacaccgccctgtagccacactatgaagcaaggggtcactactgaagaccagccaccaccagcctgcagagggtgcagagacccagctccacgctcctctttcacactccccagactatctatttttccctggaaggaaaatcgtctcatgttcctgtagcagaaactgccggtcgataccacgagccagctcatctgtagtcagtggtaatgcacggtacaagactaagaccactagaacagttttcaaccaaattcgaagcaagcgttaaagaaatactggccaggatgaaggactctggtcaggtccattccagggatcatcggacatggagtcacattccactacaactttccaagcaaacctacaaggctgcatatttctcaccagatccaatcagaggtaagcatacacgctggtgcacttcctgccagggtccctcctgcctgcctctgagtgatcaaacacatctggtgcagtcaggtggaacaaatttgttaagggaagtcagaacatgtggcttgttatcttatagaaaaatcagtctccagcatttctccatctgtccctggacaaggggcttcatggatctcttatgtacagtcactaaaacttacaaactctggctctcacattagttcctcagctaagtcccaaagaacatgaaagaattcacaaaaacaagagaatctctctagccatttaaaaaccacaccactaaagagcttaggggggactggagagctggctcagccatttagagccctgactgctcttctagaggtcctgagttcaaatcccagcaaccacatgatggctcacaaccatctgtaatgggatctgatgtcctcttctggtgcatctgaaaatagctacagcgtactcatatacataaaataaataaatctttaaagcgcttaggagtctacagtctacaacagcaatggtttctttgcctctatccaacttgctgaacaaacacaagaatacacacacatgtacgcgcacaaagttctttaaggaacttctcttctgctaaataaactggtttaaagttcccaggagaagctcgggaggtggctcagtcagtaaactgctttcctggcatgcatggggacctgagactgacatgcagaaccgacatgctggtaaaaggtacaattcctgggaagctaggagattcccggggttcactggccagtcaatgtagcctaacctgggagccccaggtcccagagaccttgttttaaaaaacagtgcaaatacagtcatctggcctctggcctccacacatattctcataagcacacacatcttctctgtctatctgtctttctgtgtctgtgtctgtatgtgtctgtccctgtctacccgtctctgtctctctgacacatacacacacaccattgccagtaaatttctaataaaaatgtctgcaaaaaaaattaatcggtcctcatctaagacagtaatcatttctcattctcatttttactcataaatattcaagtacgatgaaattgctaataacatggttatttagaggaccttaaaataccaaagattctcctttggaatgtggaaaatgtttaaaaaccttgaccatccatccctccagaaaacttcttgagcgggcaacacccaggggcaggtcacagaggagaaatgtagggtcaatgaaacaatccctttgcaccttaccctgcccgcctcctgagctggagatagaagcatttgaaagcttggaagctctggacaggagagcctgagactcgagggtgcactgcagcccctcattctggactacagccacatagctggcatttttgctttcctgctcccccatcagctggaatgtatgtggatcctcaagctgctaatttctgcctgggacagggacaaaccagctttgaaaatagagttggcataggaatttaatgtaaagagcttcctaatttgctcagtttggtgacattctggagcctgtaacagacactacctggggtttcaaggataccataaccctactcaaaagactgttataaaaacggtgttctgtcacagagaggaaggccaagaataacattgccaccacatcaacacatctaaacctgtgtcactaaatccaaggtgtggaatggcccattgtttcctgtaatgagtaaaaatgatggggggaggggacagtattttaattactatatcaggcttgtattctctagaaagactaaagtagctaaatacgggatgttcgtcttccttatcttgaccctgaaatacttccaaaataatttcaaatcctgtgtcttcaatggccccgtccccacatgtcttttcagcatcctggggcagaacaccttggtttggtgagtgtccttgactttgagcaactgaaggaagagaacaagcagagggctgtgtgatctttgaggataagtgggtctgagactgctcactagagagggggaaggctacctgatagagtcacacctactgagtgagtcattctgatcactgccattcaccccctcttacttgctgggcaccccgcagagttctatcttcaaagagctcataccctgggaggggaggagaaacacagagctctaagttgataaaactccacagggtgtggatgggagcatgaaaaggtgaggaaggttcaggctgtactttggtgctgagcaagactggtgactggccatgaagtttgttcttagagactcagcctgggtgggggtagtgggtggggctgaagaggtagctcagtggttaggagcatagttgctctcccagcaaccacatggtggttgccatttgtaatggcatttgagcactcatatacaataaataaaataataaagctttaaaaaaaaactactgtacacattaaaaaataaatcagccagggaaacataatattccaacaagtaggtgtgtcatgtccacaggaaggcaatacagtccagggtagtcctttgggacccatgattctctcccaacttgatgccactcacagtggggacaataggcaagctagaagaagaaagggcagggactgtgtgataaagtgtgaacattttactctgatgacgataaccagaccatcccttgcttcagtgggaagatgaatttccaaggtaactgctgggaatcgggagttggaactgttataaagtggagggcagagccaagaggcaaaactaggtttagtgggcacttgcagacatgctggtaatgttccaggtattcccacactgtaggatcttgagtaggggaaaggaaataatataaaacatatcacagtccataataaccgaagatattactgcctgtgtgagagaaagaatcagagaagaaggggcctctttggattttattttgtactcatgattcataaccgaaagcaataagaaaaaaatgcctgtttcatgtttttcaaatgtcttgctaccaggaagggaggtgatggattgtgaagcaaagcacagaacagactttaagtccatgtttgtgcctagcactgtgggagacaatagcgggctagtctaaccttagcctgtacaaaaggaattagctgtaaagacaacggaaatgtcaacaaatgccaagaaactaagaggcaactatgaccacagacacaaacctggggactcttcttgcaaatatcccagggctggaggatggaagctaagcaccaccacgattaactcagcttctaaaagtgctatagactcttgaaagacttcattctgagcaggaggagtcactttctaagctttgcactctattaggtattgaaatgtccgtataaactgatggtatgaccactccatggatggttaagggaaggtttatatagagcacagagagtttagagttaagagatttggggagcatttgttcgtgaagtgagagaacttgctacggtctgtgagaatttggaaatctaatgcgccatctttggccattaactgagttggactgagaccatttgcagcaagacagaatggaatgtctctgaggctgaggagggaaagattagaaaaggaggggaaagtgtcacaaacaggaactctgtcagagggaggattccaataatctttaggagggagccgagggcacctggggagtgaagcagctggagaaaagcagcagcccaggaggtagaacctggaattcagagttgaatatggtgggaggcagaagccagcagaaataaatgatccatatcttaccagagttaaatcaacagtgtggtttggaaagaggtccaactgtgctcctcccagatttcagcaccacacatataaactgacaacatgactgcttcttagtatgcataagggaatggtgtttatgagataagagggagagagagagggaggggaagaggaagggagggagggagggggagagggagggagggagggagggagggagggagggggagagggagagggagggagggggagagggagagagagagagagaacacacagccagaagtatctggaagagtccagagcagagagaggagagagacagtagttgactaaacatggccagcagactgaacatggccatgagagaaacagaagcacaagggggtgggggtggggcgggtaggttaacacagaagatagggagtgggcaaaagaataagtgtagctgaaatggttgggttataaagagaatgtgtcaacctgaatcccagggagctcctagagactgagccaccaaccaaagagcaagcacaggctggtccaggcctgcggcatgtatgtagcagaggactgccttgtctggcctcagtgggagaaggtgcacctgatcctgcagagacttgatgcccctgggaagggggtctgcaggggtgggaggcaacctcttagacaagaaggggaaggggaatgggagtaagaactctgggagggggagggggaacatttgggatgtaaatagataaaataattaatttaaataaataaacaaacaaacaaacagaatgtgtagctggtggaaaggaagcctcttagctagagggagtcacagtaagaaaggaagtgggagacaccaagatgctagcatggactttgaaatgtgtagctggtacttctgatgctgagggagcccaaaggcctgcctgtgcttaggtatgctaacagacgccacagatagccacctgtccattctgccttttggaacctggggaaatggactttccttttatcttaacaatccctcatcaggatctacagtagtgtattctatagtacagaaaaaacaaacaaacaaacaaacaaacaaacaaacaaacaaacaaaacaccccagattggaattagtagtatgtgcggactgtatgtacatggaaattctgcaaacattcactgtgaatacaagcctgccaggacgggacatagaactgggactaagaatactgttggcaatgagtattcctatattattcagtatctgcacaatagcagtcttcatgcatcacatataggattaaaaacgcattttaaaatcagcagcttctgatttccaccaggctcagtaggtgcctgtgcacctttaatcccagcactttggaagcagaagtaggtggatctctgtttgctagagaccagcgagatcctcaaggggagttcatctacataatgacgcccagtctcaagtaatcaactaattgatttaattaaattaagcaaacaattccactaccttatcccaaagaaactccataaattggcagtgaatctaatacccactgtgctcacggctttaaagaatagagcttaaaaactaaaacatgcatcaggacactggaaaaagaaaaaagttatcctgtgagtgagtgtttactacaattatcttgtaactttatgaagaaactttgaagttttcccacatgaattctgagtagtgaattaacaagcaattcgtttgaaacaagagagcaagcgtggcctttagcattgaagtcatacatgtgttacgccgggtgttggtggtgcatgcctttaatcccagcacttgggaggcagaggcagtcggatttctgagttcgactctagcctggtctacaaagtgagttccaggacagccagagctacacagagaaaccctgtctcgaaaaacaaaaacaaaaacttacatgtgttacatgcatgaagttacacaattaaaaaataaatacaaatactatcaccaaccttgctgatgacccaccaaagaaaaacagaaaataacaagatgttaaagtctgctactgtaataccaaatagttgaatagagatccacgtgtttgatggatatgtgtgtgtttgtgtgtgtatgtgtgtgtatggtgtgtgtgtatgtgtgtgtgtttgtgtgtgtgtgtgtgtgtgtgtgtgtgtatcaaactggccactaaaggtgccatattcaaatactggcacaccatcccatttaattttaaaatgtcaacttgtctcagccaagagtcaatgagtctcaactgagggactgcccagatcaaattgacctatgggcctgtctgtggggaacactcttgcttgttaactaattgacttagacgtgagaggacccagacatgtggatggcaccattctcgaggcagatgatctaggactgtataaaaaagataggcaagcataggtctgagagcaagccagcaagcagcaagttcctccacggctcctacttcagttccttccctgactccccatagcaacaggccgtgatcatgaagtgtaaacacctcccaccccgagattctttagtcagaatagtttatcccagcatcaggaaagcagctaaaacacatacatctaacccacccgaaaataaacttttcaggagtcactcatgaattcccctaactaaatttaaatttgaaaatataaaatcagttcacacagcatgggtcaaccttgaactctgacatttgggactaaacagttctgcctctatgagggccaacctgggtgccataaaacagctagctacatccctggctactaagcctctgtttgtcactgctctacctcacccctattgccatgtcagtgacaaccaaagatgtctctagactaacacatatcttagggtgaggggaaaatcaaaaacactgctggttgagaatcactgataggtcaatgtgaccatcatcaaaaaatgttacaatcacagacaagtataactctcattcataccattgtaatatgtatgttctgtgaatgcagcagaaggttgtaaaagcctctcacttgtagttggaacactcgaagctgtgtggcagagtgcctacttagcatgataagaccctgaagttaacctctgccacaggtttaaaaggcaggcacaggcggtggtggtgcacacctttgatcccagtacttgggaggcagaggcaggcagattcctgagttcgaggccagcctggtctacaaagtgagttccaggacagccagggctgcacagaaaaaccctgtctcaaaaaaaaaaaaaaaaaaaaaaaaggcaggcacagtggcacacacacctgcactctcagcacttgaggtgactgaagggtcagaagttcaaggctatccttgactagatagcatggtttaaggccagcctaggacatgtgagagcctgcccctgtgtccccgactccattctctgcctccaactaggttaacctgctccactctaactagtcaccgctgtactttgagcactggttcatagggccatgcagatccccagatgaaagtctatcttaaccgctactaagctacatcctcaacaaggtcttgtacacctctaccaagaagccttctctctataaggcaaaagaaatacatgtgcttgccagcacattaaaatatctctgataagcaaattatgaatcccaacttaagcatataacaaacgtgggacaaggaagaaagcaaagaactcagaaagcagatatcccagtcttgcatgattatcgctgtgtgccctgaaacaagcctaaactcctatcgattggcctctcgatttacctcaaaatctcggagtctgggggtgatttcctcgagcaagtgtaagtctctggaaaccttggtctttactttattccatctgccttggacatcatcaaattcttgtttatacattttccccacatcaggaagcatatttttctccaaagtcttcgtttcttctgaaagcttatgtaacgtatgtttctgattctcaagggtttcatcaagggcctacgaaagtgtcaagagattaaaaccatccacaacaatgtacatatgtattagcacagatgtagtaacatatatatacatatatatggagaagagggtatcttacttaaaaataaaaatctttcttttctcataagtaggtgtggcatcatggattctgtacattaaaccctgtaacagcacacacagtgtagaacaagagcccaaggtcggcagttggtcttttctatcaggtaccgtagtatagaacagtgtttctcaatctgaggggcgagactcctttggaggggtctaacaaccctttcacagggcctgcatatcatatattttgcatatcgaagatttacattatgattcattccagtagcaaaattggagttatgaggtagcattgaaaataatacgatggttggaggtcaccacatcatgaggaactgtgttacagggtcacagtggagaaacattggcattgagccttcaggccactggacgcaggagagtggtttagtcaatataatttaagtggctcccagaatgtgggaggctgaggcaggaagactgcactcaattctcagccagtgtgtattacagagtaaaactcttgtctcaaaaaaaaaaaaaaaagaaaaaaaagaaaagaaaagaaaagaaaagaaaagaaaagaaaagaaaagaaaaaaagagagagaggaaaaaaagaaagagaaagaggaaaaagaaagaaagaaatcaggtcacctaatacacctcacattattttaggagatatatctagcagattaggaacaggtttagaattttatttaaatgatttaaaaaagtaaatgtttcccagtaacacttaatatctttctggacctcaaataaattatttaaggtaattaagtttaaaattataaattcttaggcctgcagattgactccacagatgaagatggcagccacacaagacttaagattgaatgaacgctccccctggaattcacagtggaagagaaaaccaagttgccaaagtcgtcctcaggactcagcacacacccacctctgactcagcacacacccacctctacaataatactaataataaataataaacaaaaaataaaataaattacatttactctgcaatttttgtaacaaatttttaacaatcttaaaagacttcatcaaaaatggtcattttttttaatcactgaaaaaccacttcaaatacataacaggaactctcagaaatggccaagctcccaaggacagcttacctttttctcctgcagggcctgctccaccgctatgggatcgttcagggcattcagagaggcctgggccgccttttctgactcgcttagcatttttttcagggtattcagtgtgtccaaatacgcgggtccaggctggctcttcagctctgacaattgaacatgcttgcttagggaaaacagcgctaggacttcactactgttatcgactgcaccattaatcttctgtatataataaggagactccagtagataataaattagatcccctgattacaactgaaaaggctctctgttgcttaacaagaccagccatccctctggcatttcagacagacagaccgtggcttcattcctctcgaggctggtgtttgaactattaactcgctagcatttttctccatttgatcatgctgaaatgtctctatgaagcttgaaggacaacattcgtttttgtctcacacaacctcccctcccccaaatgatacccaaagaataaacagaagcgaagaccctgccaccagccttcctgaaatcccatgagtgtacacaaactacatgggaaccctaagaccgtaagaaacaggggtgactggcaacagccagctaacacagagtatccctctgtgcctctgtacaaatcccagacaatcagcatttgtaccaaagaggaagtgagctgaaatgtgaagcaccaagaggtgaaaccaattagcagcatgagttcaactgcccactcctgatcctcgtcataagggaaagcttggtttgcgggggtcagccgggaaagacatcttctctggtttttaatgtcacactaagttaacagatttccatgagtgaaatgcatgaagtccaaatgcacagtcaagagaaaagtaacatggtgcctttgtctaacatgcatgccttcctaatgcctgtacatgctgtacgggagctaacatggtggaggtcacagtcagagcacagagagcacatggcacatgacaacccagggcagcagctgacgagacacagaaagcgacatacaagctttccaaatccagctacccgaaccagcttcattccactgtctccaattctaccttgctcaattttgttcaaattctggaaaagcaacatgatccctttcaaggatcgagtggggctactaagaccttaaccactgggagcaaacagaaatcgatgatgtttttgtttgatgagaacaaagtggtttctcccattaaattctccttaagggctggagtgcaaatcatgtgcctagcaagcatggggcactggggttcaacccatcaccaccaaaagaaagcaaagtctcccagaagtcactatatcctactcatgcagttttacagcatgccaagctggcttggtttgttgggtggttgtttgtttgtttgtttgtttgtttgggggagggatgttgttgagacagggtttctctgtgtagccctggctctcccggaactcactctatagaccaggctggcctcgaactcagattgcctatccctctgcctctgctgcttcccctgcccctgcctcccaagtgctgcaattaaaggtttgtgccaccaccacctggccaggtctgaatgtattataatacttcaagccacagggatgcagggaagaaagcatgaagccagaatgaaactcaagacacactaaaggtggaaatattgggagtaattttagatttaaggaaaactaagaggagaaccagaggaacagagacagagaaacagagacagaaagacagacagacagacagacagacacacacacacagcagaggagagccaatatttaccattttctagttgttgttggtattcctctaaagccttccgcacagcctggtaatgatgtcgaaggtcgtcaaaaccctgctggacaaaacctgggacacagggctgagacttcagggctgaacagcttgcacacagcgtctcaattctggggtgaaggccaaggagatctgtcagttccctctgaggaagagaaaatacggtcacttcactccatgaatacgagcgttcccataaacagttatgaaagaagcaaagacaaagctcatgataccagatccatgctcccccgctctctgctttctcttcagatttcgagaccttttgccttttaggagatacagcctctcgggctacagatacggctcagtgggtgagagcgcttgctaagcaatcatgtagacctgagtctggatacccagaacccatgtgaaaatgtgggtatcaccacctgctgcgaccctggaattaagggagggcagtgacaggagggcagctgggacttactagacaccaggctccaggttcagtgaaagaccgtatctcaaggaataaggtagagtgtggtagggcagggcacctaatgtcctcctctgacctcttctggcatccatgagtagagatatgtgtgctcacacacacacatgcatcattcaccacatatactgaatgatatttcctcttcatatatgagattcaacccagaaaggtctccatgagtagagatgcacaccccacacacacacacacacacacacacacacacacacacacacacagcccactcaccagacacactgaatgatatcttctctttttatataagagactcagcccagaaaggctctacagtcctatagtgcagccatttctcaccctacctggcaagaatcctttaagcctggcaagggctgccggggcgattcagaaatgggtgtgcccctcagccactcttccttctccttgatggtctcctcaatggcatcaagctgcttaaaataagcatttatatcttcctgcagctggatcttccttcccagatcttctagctgctgagatatcatcttccactccaacgaaaccctttccagaacatcgtttacttcttcagtggaaaggccttctacggaaacaaaaaggtccaggtgcatcaaagcacttcatccagtaataccaaagtggcttagaattggtcctagacatctaacacagtgaaagattaggcaatgttacgtaaaatggtcatacccttaggccatacctttcagtcatacccttaggccatatccttagatcatacccttaggccatacccttaggtcataccctgaggtcatacctttcagtcatacccttaggtcatacctttcagtcatacccttaggccatatccttaggtcatacccttaggccataccctgaggtcatacccttaggtcataccctgaggtcatacctttcagtcatacccttaggtcatacccttaggtcatacccttagatatgactattttacaccattatgatgtactaataactggatatgctttaactccttgacctaaggggagttaggaatgctaagagttcagaggtgatatggctatctcataaggtatatctataaagcatccactagttcctcttctgtagaccatgtctccatccccgacactgtaacactctgctaacttataatctgatgcaggcaaatcaactcaaatgcctgaatttgtgcagagctcagacatcagaatatacgccttctgccataggaaaatgaagcagaagactagcagaactcagagctggctgaagtctaggatgacaaaagatgacaggagtccctttgcctgcaagcaaatgggtacatgtaagaacattaaactagatgccaggttcaggaagcatcaagaagcctacgaagcactctgaacacatatgagtaaatataaacatattattattatattatataaatattatatatgagtaaatacaaacaatgccaaagtaatgataatggtagctactctggagacacagctcaaaaaatgttattctattatgttactcttacaagctcccagatttatttacttattttgtattgggggggctgccacatgccaaggcatgcacatggaggtcagatgacaaagcgctggaattatgtctctctttctactgtgtggctcccagggaaggatctaagtcattaggtttggtggcaaaaagcgttacccacagagctatctttccagccactgacaagcttaaattttttttctcaaattttagaaagctatgcaatgtccttagaattgatttaaaaaaattatctataacaataacactttccataccctttgtagtgctataaactatcattaaatcttttgttaagtgagtgagaggtggtatagaaaagtggcaatccgtggaggtttggtctgttgctatgcactgtaatgctagattctttaccagaaagcctaggcccacccgtgaactaccagcttttcttgtgtagaccttgttccttaacttaaaactactggttgaatataaggggctacagccactgactggagagatcagaggtaggcaggtttttaagttacctggttgagcatgggagaactggaaagaggagggagagcagagaaggggccatgagagacgagactaggggggccgtgagcccagatccaggagtaagagtaggtatctggggtacacctctggggaggtagccaggccagcagtcagaagatcagattataggtgccccccccccaagaattgtcaaagctaaataaaataaccagactctgagtctcattcatttgtaagctagttggggataagattaaattgattgtactacagcaaccaactctatttggcagacacacatgctgaaaggagagactcaacaccttcaggatatgagtaggagtgcagagtcttctctgtgaacatatatgatcaacatccacagtcatggaaacccaacatgaaaggaaaatgtcatggaaactgagaagccacccctgtctcaccagcaatacaaatttggaaggttttgtgtcacaccacatctcctaagaatcagagatacaaacatgcacaccatggtagaaaggtaccacccacatcagctgttcaagggcacttccaccagcaagctgctaagaggacattaaacctaagcaaggcattcacaccacagtccatgtgcaagtatcactgctaacggagtcatggacaagaaaaagcaccattttcttagcaactgtgtgaacaatggacatgcatatgatggtgctttggcgtggtcaaatacttacttacatgctggcaatacttaagcacatacaatagaaataaatcataaagaaaatttcattccaaaagcagtaattgcaaaatgattcacacacacacaaagttaaagatgtaaaaaaaaactactggtttaaagatttggtataactaatctgccacattgtgccttggttgtttatagctctgatcaagggcagagccaggcacagaacactttcaaaggcaggcgagtgggtcccacctctccctgggcaggagttgaataaatatgtgaagagctcttaaataccattaaagctgacatgagtgttagtaagttcctatcataagcattccttctgttgttggttttcccataaataaaaatgtgacagaaggggtgacctaactccccaaatgatactcccagaatctcctgactgctgcaagccaggggactatcaataaaatggccaggcaggctgcccttcagctggcctcagccacgcggaatgatggccccacaggtgccttaggggacgcacatgacagtcaaggctgcaacacaggcccaactcctgaaggtgcagcaccaaccatgagagtttgaactacacattttgctagcttcagcaaacagtagatgacactgcacacatttccacgcacattggcctttcctccttggcctcaaaacactaatgtgattgttacaaatggaacaatgtgattggtacaaatagaacacttggtataggcacaacctttatttatttttgaggtttgctgcaattgatacaaataccctttctctggctacatgataggacggtttggctcacttggggaactagctggaaaacatactcttacaccctcccaggatgtaacattaggtccagaaaaggcttttcctgtatggtcttttattgtctactgtcaggtggatgagctgagcacatgccagaaagacaggagcaacagagacagcaagaagtgacagctggagagtaaagccagcagccctgaaccagaccagcagtggccaagggatggggactggatgcctgacagcttcaggaaagacaggggagaccacttatgtgtgcaaagtcttgaatgcaatatatccctagtacagacgtgagttcaggggaggtgttggcagaaagggaggaacggggtttagaaaaagagatgatagagagagggaatacagaactgagcagtactagtaggctaaacttcgaaatagacatctgacaacaagacagaccagagcaattagcaggccaagctgcagaaggggcagagcctctactgacagtggcacaaaggctgaggtagccaggtcctgagcagcagcaatggggatgtagccacagacacagctgcaatgcagtggatgtgagataatagacagggtaggagagaaggtggaaataaattggaggcaagagagggtagagggaggaggagagggaggaagagggagggagggaagaagggaaggggaaagagagaggggaggagggaatggagagagagagagagagagagagagagagagagagagagagagagagagagagagagagagagattaagaagaaactacaagcatcagtcctcagaatagacccagaaagctgtcaagcctttagagccaagagtgttaggcaccagaggtacagaagctataatattggccattgcccaaggttgaggaatccctacagctatgtccacttacaagaaacaaagccagccactctcttgggatgaaggctccccacttcctaggcctaagcaataactctgatgcttatagaagagtcccactgtgggaaggctaatatcagagagcactgcctgatgtcgctcctgcctgctgaggccatacactgctgtgaacagatgctaaagctgcctacagaagactagcccttcccttgccgatccatgatttccatgcaggcggagctaagacccaaccatctgacaggcaacctaagtatttttagaagaaggaacaggtgcacaggaagtgtgcttcgtggtgtcctccctctagagttctcaaggagggagtttctgcagtcagcctggccagtcctacctgctcctgcctatgtgcacctactggcgtgtgcccgctacagtttctgcccttcaacccgggcctaaagcagcatgcgaatctcacccgactgcaacccatgccccagcctttgacatctcagcctgccacatcttttcttaagagggaaggaagaaaggtccagtaccaccaaagaaaaaaaccatatgccaaactaaacagccacagaagagaaaatactaattttaggtttctctgtgtctatgcaaggctttagtgaggagcaagggtctttgctgcttgaaaattttttgaatacaagtaacatcaaatttaagtagaaaaatgtttctagagtatattaatgtgatcctccgaacgtgaccaaatatcaaacattaataagtgtcctagatagctgtaattgtccatctgacacagcctagcatcatctgacatcctagactgaggatcacacagtagccattgtcttgatcattaagaaatatagaacaggctggcggtggtggcggcacaagcctttaatcccagcactcgggaggcagaggcagacaaattcctgagttcgaggccagcctggtctacaaagtgagtgccaggacagccagggctacacagagatactctgtctcaaaaaaaaaaaaaaaagaaaaaaaaaaaaaaagaaaagaaaaagaaatgtagacgagtccagcccactgtgggcaacaccattccttaggcaggaggtcctaggctgtaaggaccaggcagccaacaagcagcatcctccatggtttctgctttcagatgcttgagttcccaccctgacttccctcagtgatggactgggacctgtaagctgaaacgaactggttcttcccgagctgctctgagtcatggtgattgtcacagcagcagaatgaaactagaataagtttaccttaaggcgacttcatatctaagacattgccagcataaacatttctctcagtgccctcatgtataagaaaaattcagagtatgtaaccccaaaggtgaggttttacaatcttgtgcactgttggattttaattgctctgctgaggttttcaaggtttctagttttctgacccccaagtgggagcagaacgactttgattttatctgtttttaataaaaagcttcaatataagatttcagtttttgaaagattctgctgcctcaaaaaaaaattgaaaaccagatcttttttctatctttgtgtattaaatgttttgtgtgttaagctgcaaatattaagtgtgaccttctaaaataatctgagagggaaaaaaaagccctgcagggcctcaccttttcccatttgctcccggagggtttgtccggtttgattcagttcgtccagtcggggcagattttccttctgttctttctctaatccctggaaacaaagaccaaatataaaacactgaaagcatcccttctcgatgcaacgctgatgttattttaaaacctcatattttgtgccctcttaacttttctttaggtatttcaaagtttatctacaaagtactgtaatgaaaaaactacgcaattcctggccactctctagcactcggagaatcagtacgtctgaaaaagaaaattccaaaatgatgacagtgaatatcaactttagattcttttagaagggaagattatatgttctgtaattatgagttcattatcaaggggaaataattaaaattaacatttttggtctaagatcgactttttaaaaaaagctgtattgtttaaaggaaatattttgaggaaattttaatacgccaaatgctttgttagatacaagggcagaatatctctgaaacaatacaaagtcctaagttactatgtaccagaccatgtaaatttaaatctacatagagggcaataatgatgactgtatatacaactcaacgattaaggaggaaaaggggaaaacatttttaatttctcctacatgtggtgatctgatgtttacggtgaagctctaaaagccatctgtggctacatgtattttgcaatagcttctggaccctggcacatctctgtgccaatagtaaaattagcctgatgaattattttacttcctggcatattcattgtatattttaccttcaatttctttttcattcctgaggtctcctgcgacttcttatattctttcatctctgtgttctgaatggcagtctttgatttcaaaatccagttcagcagctctgtacttatagcatcaaacctggtcaagatggagacatttgcctctgtcactggtcagcttccagtgttgccttggcccaataaagaccaacctgaatgcccaccaggcaaggatattcaaactctgccccaaaatagagcaaccacccataatacttttacaattaaaagtgaaaacattatagggctaataaaataattattttttttttacttaattgggaatcatttgtatttttataagctattgtagacaacaaaaaacagatttagttagatgataacagaaaaaggacaagtacaaacatttataaaactatcctctgctgctcaatacatagttaaccagacctatctcagcctttcgggggcctcaagtcatcaggaagcaactgaaattgacaagtaataagaaaagtatatgctaggtaaatcccaggactgccaaggactgactcctaacccatccgtggaaagcatggtctcagggcataagtgtggctgtgtttgacagcttcccttgcaaagagaaagcaacggaaatagaggccatattttgccagctacaaataggtgtgtctggtatagagagtgatgcgagggaaggcgaaataatgatgtggccaagagtcaaaggggccaataaagccctgggtgatagatgatggatttaaacaaagagcagtcatcagctgtgttaagcacagaactgataagagtctgttcatagtgtccagtcactcactgtggggccagaacccaagactgcacagaaaagaccaccacagatagaacacaagaggaactcagcgagcggtaatgggagggggaagagtgggcaggctggacatgggatcccaaagcaggtgaaaaccacagttttctgaaaggtgaccagagaccaggcccttggttaaaccttccatgtctatcgttaacgcaaagaatcctcaccactctctctgaaaatacttttgaatatcctgttagagtcgaagcaactgagctcatacgggttttgaataatggaccccatactaataaacgaagcaagagctattcaaacagaggcagtccatgcagctgcccccttaccctggcgtgactcagcatcataagctgagaagaggtatttgaaggttcctctggaaagcagctcttaatgtgtttctagtagattctgagtaagttttctgtgtaatatgtgattttaaaaggcattttctacaatatctcaaatctaaatcagaggaggcaagagttaagggaattaattaatagctaccagccagaactaacatgatagttccacattcctgaaagcaagttaaaactgacctggcatctgtggtggctgtaccccaggcaccacaacctgttaatatataaatgtcccagactagtgagcaagaagcagcaatgcttcttagggactctgcacccagccactcagaccaagcccttcagcaccttgcagtctcacctctaaatatggccaggtaaacacaatgtactcaactgactcttccttcgctagtcttccctaggacaaagcgctctgaggactgcagagagggatggctctgtaggtaaagcatttgccctgcaagatctgacttctaagtcattcctgcattttaaaagtctggctgggtggcatgcttttaatcccagagctgtggaggcaggcagagtcagccaaattcctgaggctcactgacaaataagccagggggaccatgcctgaggaaggaaacctttggaatccagagagagagagagagagagagagagagagagagagagagagagagagagagagagagagatccctgtactcacagacacaaacatccacataaccacactcacacacaaacctgtactcacgtatacatatcacatctgtgctcacacacaaacatctacataaccatatatgcacactctatactcacacataaacatccacataaccagacagacagacagacacacacacacacacacacacacacacacacacctgtactcacacacaagcatccacataaccccacacatccacacccacacctacataaccacactcacacaaacctgtattcacacacacacacacatatacctgtactcacacaaagcatccacataaccatacacacatacctgctctcactcacaaacatccacataatcacactcacacataaacctgcattcacacacatatgcctatactcacaaacatccatataaccaaccatgcacagacagacagacagacagacagacacacacacacacacacacacacacacacacagaggttttgggctattagttcccaagtgcccatttccatctactgaacccttttgcttttgtaggcttcagaatttgtccctgagccactcattaaaccccttttatttcagacatctgagggtcgataaattttacttcaacataagagtgtgtgatgctctagctaagtaaccagaatccagatgtccacagtttctctctgagataagagaaatgagcaagacacattgaccccagtacaagataaccagatagctggaaatgcctgacctgagcagattttaaaagaaacgaaaaaaaaaaaaaaaaaaaaagagaacaaaataaaattgactaccaagaataagtaattaggtaatttagggctctcaattgtctgtggagtccaacacaagttcatgaccgtttttacagctaactgaatacacaaaagggtctgaaaattatgtcatacaaggaatagctaaggagagcctcgtctttaggacaatggaagtgactgtgagagctaacctcaaacattcgtgagggaccattttgaggagaggaggttggggagaataagggggaagtgaactgcattaagactgagaggttcaaggccagcctggtctacagagtgagttccaggacagccaaggctatacagagaaaccctgtctcagggggaaaaaaaagaaaagactgagaggttcacacagcagaaaaaccagctggcagagaggaagactggaaaccttcatagccaaggttaacagggaaaggacactgcatggatgcagaagagccagcactgcacacacacggagaatctcctcggatgcccaggacccacagcaggtcacaagaaagcctggggctcggagcttgggcttccagccttgtgctctgctctggtccatgccttctcctgggatgtgcacaccgtatcttaggaaactgtcagcttctgcaacacctaagcatccctgtctacttccatgttctaggaaactggaactcccagtgggcagccatcggaccctgctactgcctacaaaagcatgcctgggctctacaaagacagcacacaggacgttctgaggcaaacatggggcataaaaaaaatttacaaatgagatttctgctaccgtggacagcatgcactcaggcctctgccgaggaattaattcagtaatgaatgtctgcctcaatccaccctcgaaggtcaggactcatgactcacaacccctctctatactttgtacaaactgcatagactggggataagggaaggacacatgacccggttcatctggacctccagtaccattgccgtcagcttataaacttgaacaagcaagggacaaaatcctggctggtgacatcggagacccagtttgctgagaagacaaagcactgtgaggaaaagcaaccaagccaacaatagcagggacggcagtgggaagtctgcttaagtgcatcctctcgccacagctgggccacttctggactgtttcttgtcatacgacacgataatgagttgttgaagtcaccttggtcacagcattttgtctcttgcagcagaaggctcattattcactacaggcaagtttaaatgagcctcccatcaggatacaccctgtctattccaaagccagccctggagacacacagtgccagatgcgcccagcagctaacaagagttcaggaaatggaagattgctgctaatgttgacatcgacagcatctccttctctgcctgctgctctggccaaagtaaaggctgctgctcacaacggcaggtgcgccagtcatgcatgaggcaccgttaggaggcagaaaacaggctgagggtcaaaaggagaatcatcagatacgccccacatcctgattcctctaataaagctatcctatggaaggaaagcttatctttttattcaggcccctaataactgccaatgtccctgaaccctgggatcgcactgcaagagggagcatgagagcaagcttgaggccgagccgaaggctcactgtgaccaggcgtaccagatccagtgcctagaacacactacattttaaagcagcagttctcaaccttcctaatgctgccatcctttaatacagttcctcatgtggccgtcacctccatcaataaaattatttctttgctacttcatagttataaatttgcaactgttatggatggtagtgtaaatatctgatatgaagggtttttgatatgacacacacacacccccaaaggagtcgagacctacaggtagagaatttttttaaaggctctgacacagcaaaggcccagtgaatgcagctgaaatctcattcttctaacaatctccagttttctttcgaatcagttagataaaagggacattttaacccaaaagagctctttcagcaaaacagaaagcatctattaagaaacctgataaaaggaattatcaaagaaaacctaaatacatggatgggtttggtgggggggggggggataaaaaggaaaggaagaagaggaagaagaggaggagagacagacagacagacagagatcgtgaggtcacaaaaatgcattgtcttcctgaactgctattgcagtgatgagcagaggaaagagattcacaaagaataaggaatttatccaaagccaaactgtcaggtcttaaaggtatgaaagaaagaagaaagcaggagccggaccccaaaacaatcgtcctctgagaaacagatggggattgataacagaagggttactccacaccagtctctaaatttagcagaggatgagtaaagtccctcagggcaatttagctgcttagctcctgggaggcagaatcttccagagactcaaagccagtaactgagctcatgactgaatttacataataatgagcatgtctaaactctcatttgattagtgattagtgcgagttacaggcaggcctgaggctgggacatctctcactttttcttggcctccacgtccacgtgaatctgtctcttctttggtgggggaggaggaggcagttcctgcttgggcttcttcaccatcccttgttctctcacatgaacggtctccaataggtccttctgtggaatctgggacatgccgagcttcgctaccgcctgagtcacctgaaaggcaagtcacgcccagcgttggctttaaatgaaagccgctgctgagagttattcacataaaacgctccctataaaaataaacagttcaagccacgcatggtgccacactctgttggcttattgacaattcctttaggcctcgcccaacagctacctagcaacagcctgtgtcaaagtccaccaggtgagagagaagggagcaagccaggcatataaggagggactggctgctaccctagcagctctctccatcttctttccctgtacccacgtatcctctctcttctctttctctctgcccttctctccccccagccccacagttctttgccctcacacctctgttgccgcttctccaggtccctgctcccttcccccacagtaagtcttctttatactaggtctgttgcatggtgtctcctcaggaagacacctcagcatgggcctgccaatatatccccgccgatgattatactgctttataaaacttaacaccctcctgtaatcctaggacttggtaggagaggcagaggttagaggttcgagactagccagaactgcacagaagcaaagggaaaagtccactgcagtgggtattggtgtgggtattggctacagactttaggtcaacatcagccatggctatgccagcttgtaatactcctccattctgcttgaataatgacaactgcccgaaccaaagtcatctctgtttctaaattatagtcacttgtttttctagattcttgccctggccatgccatgggcctgcactgatggctgcccaagcaagatgctggttgacattttctatgtcaccatttaaccttttttagcacaggacaaaagaaaacattctagtatccttgcccagatcaatccctttctatcctgtagctaactaccctagcctataagtagacagtgtgctctcattcccagactagaaaccctgagggcttttcttctgaataaaagcttgtactatctttgaatagcccatacccgtgtctgtcttgtcttctcattcactccaagacaacttaatcagcccaaatagaaccttgatatctgttcacagcatcccactccctaatcaccaccgctcgaggccactgagcacctgccaggttctgcctgtcctgcacaattcatagttcataactatcatgcatgactggcttcctctatcatgatgttttcacagttcagccacattgtactgatggctcaatctttcgtattgtcaattaataaagcacactttggatctcagactgcatttttctgttcctgtacacacaattttttcatggtataatatactacccaaatcaaaaacgtacctggttagaagagtcttcgagtctctgaaccagagaatcccatctctgtgttagctcctcagagtcactgttcatcttcttagatgccttgggattactgagtaattggcccacatcctggccaatctcactcagttgatccagagtctgcctcttcatttccatgtcttccttcaatatctagaatgtcaaatatttatcacacaacaactatagagaatatcttaggtctatatggacatgacacctgtcaataataaatctgatggcctaaggcttaggcaggaaataggaggtagggcattcgggaggagaaaggattctgggatagagccaggtgggagatttgccagaggaagatgtgagaagacagaagtctggtacctgagcacaagtaaccagccatatggcagaatgtggattaaaataaatgagttagccgggcgtggtggcacacacctttaatcccagcacttgggaggcagaggcaggcagatttctgagttcaaggccagcctggtctacaaagtgagttccaggacagccagagctacacagagaaaccatgtctaaaaaaaaaaaaaaaaaaaaaaaaggagtttttctaagttacagtctactcagagaagagtctagctatatggccaagatatctaaatatattttgcctgagtcttatttctgggagcatggggctgggaggaagagtcaggaccaacttccacaaataattttctttctctcaagaaagtttatcttcctcgggaagtataatcaagtagatttgtaatcccgccaacagtgtgttctgccattctctatgcaataataaaaggctcctggtacagtaccatggctggaagcgatgtagtaatgggaaataagctataatctgtattcattcaagtatattaactcttagttataaaacactacacatcacaggcttacaacagatgccgacagggacacacttacagccagacgccggacactgacacttagttccttctggtctttaaagttgctggtttgaactttattcaaagcctcttccttttcggtgagccaagcctccaacagacactaggagtaacaacaaaagttggaaagagacatggtcaatcacctgacaattctgtgactcacatgtagatcgggataataagaacctcaaatacccgagttcaaggactggcaaaagcatagcctctataacttacaacagattaacctgtcattaggtctaatcgatagtgataactcgtaaggtgtgaatagagtttagcatgtccttaaagggctcctgtgtaggaagagcatggtctccagtgtggcaggagagaggctagaatctgtaagatatagaagctaggaggaagtctcagatggtgctgcccgcagaagagagatatgctgttcttctggggcctccataagttcctgagaatcactgttacaaaagagtaaggctggcgcctcctgacctctggcttcctgtgtctccacaccacctccccctttggtgcacactcccactgcagtgctaagtactgtgatgtgacaggcagggattcctcgccagagctagcaccgtacttttggatgttcacaactctaaaacactgaatcaagcaagccttcaggactatgggtgcaactcagtggtggagctaccagctcgaatcattagtagaatatagtcatgaaacaatacgaataagcctcatatcactagcccctggggggcatgggagtggggtcttgctagtatatcaagctgatcttgaacttgcaatcctcctatctccatctcctgagcaccacaagcatgtgacgccaaacctggctagggaatttattacagtaggagaaaataatcccatatagcaactaaccctagatctcaagaaggtgagtagacaaaggatactaaatccaattatgctgagctttaaaaaaatcatattagaactctaggttttaattcaaaggaagctcatagattttcttgttcctgctgctcattttagagaaggaaacagacgtcaagttacatgtttgaggtgagtaagctactaaatggctgagctgggtcataaactcccacccctaaatcaactgtctgtccacagcaccaggagggaaaagtatgcaaatggtcaaagttcaaatgcaattacattaaaggaagaaggatgaagatgtcccaaagccaacaacaaaattatttaaaactcacagccaaaagtgtgtgttctttggaagatgttaagtgatggagtgagatgctcttaagacagccctattcccaaaagtagagtgtattacactctcctttttttttctttttttaatttttttttctgtatagctaaggggcaaagggttagttctggacttgcaatgggaagaattctttctcagttgtctcattaatcaacgtattttcaagctactccttacctctatagtctaccaccaccaccaccaccccaaaaaaagtgaaaattagaaaaataaaagacaaatgcagatcctatctcctcgcctagtaaagttaagatatgcgtataaatgaccagggagcaaaacagaaggtgcagacatacccttctctctcaagagagagagagagagagagagagagggagagagagagagagagagtgggagagagataaaatgtcctagcaatagacaataatgaatagacggcctatttaaaactacaagtgacaggctagagagatggctcagtggttaagagcactgactgctcttctagaggtcctgagttcaattcccatcaaccacatggtggctcacaaccatctgtaatgggatccgatgcactcttcttgtgtgtctgacgacagcaacagtaaagtcacatacatgaaataaataaaacttcaagtgatacagttggtcaaaaatcccttgttttctaaacatttttttaatcctaaagttatttccaaactttaatagagtttctattgctgtgataaaacaccatggccaaaaggagcttaggaggaaaggctccgtctctaagggacacagggcaggaattacagcagagaggaaggaatgccgccagctgcctcagtcatccaggctcatgctgcctgcttcctgctacaacgcaggaccacctgccccaggggcagcaaccccaaagtgggggaggccctcccacatcaatcattaaagaaaatgcccgcacagacttgcctacaggctaacctgatgaagacattgtctcaattgtggttcctcttctctaataacacactacagtgtgtcaagctgacaagaaacaaagaagcaataagcaaactggaaaggcagaaaaggcaaaccaatcttgttctgataatgactgatgtccgtcattattactttagaaaaataaactactgtatgggatgctttgatttgaacataaagatctggggtgatatacacattaccaaaatgcaccatccatatgtcatgaagcagaataaattatacaattgttttggtgggtgtctgtcttgagacaggttcttttaacccagattagcctcaaacttgctagccagctaagtataaccttgaaattctgatcctcctgcttatgtctcggcatgcaaggtaagttgtggtatacaccacaacacccactttatgagttactgaggatttaacccaaggcttcatacacattaaacaagcactgagtcacagccccattatgtagtccctgatttaaagaggaggaagaggaagaggaggaggaggaagatcattgaccaccatgcggattaatcatttgtaacagtatttaaaatgaactatctgcctctgcctcagcgaagccccaggatctcacccatctggttcctgaccccatgcagagaacagagctgctttttctggatggaaatgcaacagagccaagatggacgctgtgggaaccttgtgtctgcttcttttctaggctacagctgcttggcactggggagaaattttttacttctttgtactctgttttgataacaacctttgtgtaaagctaaaaggtgatcgaagagacaccaaaccaagagaaaagctgtgcagacggctttgcacacggagccactgaatgcttatccaaaagcaatgctaggaaatattttctcactagtttcatcctgtatgctggttaaaagttaagaggaagattataatttaatattcacagcatatggagaatattcctgtaccttttatttactgagcacaaactgtatgctgggaattgtgctggtacacattcaaacagatccctcaacaaaagcccatgagtaattaaaccatgaaaagtaagtcaagacaggaacagacctaagcactaacattgtaaataatgaacagaaatcaaattactattaccatggagcctcataccatgatcttaatgagtaagctgcagaaatggatataacattaatagaaatttgactttcaaaataataaataggggactggaaatgttgctcagccggtaggctgcatggctaccatgtaaaggaaggccctggcttctccccacagcccccacaggaatcggggacgatgccacctttactgctggaggcagaaggatcgattgggagctcagtgccatccttagttacacagtgagtatgaggacagaataaataaagtaagccaaaaaatatgtaagcaagcaaaaagatgaattaatgaatgcagcagcagtcaataatgcatacacatttgtataaaacttaaactgatagaaatggtcagattacttgttttcccttggttttttttttttttaatttttaaagtgattagcaaaccattatttccaaatttcataaattattttcaaaataaggcctttcaaaaaaagggaagagtgtagctagctggtctttggctactttgtgggttcttcttccttccaccctcttctacctacgccttcaactcgttcgattccataacactagataggagggagaaaagaatagaggggagagagcaaagagatccatgaacaaagtcagggaccagaaaggggtcaacgttatccttagactatttcctgctgattacgggtgccaagtccttcgatgtcaggatatctaatttcttcttgttgtttcttctttgtgcaggactaaccttgaccaccaacaaagaacaacccaacaaccctcagggccccaggatttatatactgttctggctagttttgtgtcaactcgacacagctggagttatcacagagaaaggagcttcagttgaggaaatgcctccatgagaaccaactgtaaggcatttcctcaattagtgatcaagaactactttttccttctacaaattgataagaatgtaacaaaggatcctttgtgagccagaaagaagccctcaccaaattggactcattaccttctaaattgcaagacacatttctttgtttatatgctattccctattaaggatctctccctctcccctctcattctctctctctacccccctctccttcttatccactatgatattaacaacttttgtccacagtgtcaccaccacttgtgggtggaaccatctctgggcttgtagtcttgggttctataagagagcaggctgaacaagccaggagaagcaagccagtaaagaacatccctccatggcctctgcatcagctcctgcttcctgacctgtttgagttccagtccagacttccttggtgataaacagcagtatggaattgtaagctgaataaaccctttcctccccaacttgcttcttggtcatgatgtctgtgcaggaatagaaaccctgactatgacatataccctctgaagagtccacaggattacaaaggccacacaatcacagaaaatatctgcagctggcaaaatcacatccccaccagagcacgaggcaaatcataatcagctactgggggagggggaacaacctaagataaaaaaaaaacatattcttataatatttctgtgttttttaaagaagccaaagttccagaattctcactagagaagagggcagccacattccacagccatactgaaacgatgggctccttgtcactgttttgtcctcagtggacagtggttgagtttcatacctgctcttccaataattcctgccacagaatactgatttcttgcaacctgttccaacgttcttcagtccagcggcatacagctgtccagcgctcacccagtttctagggaagggagaagcagtctctgtcagcccagccaggagacacaattactacagttttccaaaacaccaatctacaaaaaatacttttaagtacatatatgagaaaaaaactaactttcatagggtagacttacttaaattactcagagatgaggaaaaaaaaaaaactagaattcctgttcctacttcactgtaaggtttgtatgggaatgcaacatttcacatgtatttgaaaattgggtatatgtgtctgagggttgttgtatttttttttttcaaccactgctacaaccacaatctacatgtttactttctatgcttcaaaccttccaggctatggttgccttcaccaattcttcaagtgactgttctgggggaagcctgggagtcacttgaatgagttctggtgcttttaaatgttgtcaccattatacacaagggagcagaataacaatctcatgccttcactgcaaggactcgaatgaaacaaggaatgcctagctaagcctgaaaccacacaatgaggaggcctaactgggagatacaaccaaaaacaggtgccatgctttgtgtcccaccccaccccaccccaccccaccatgaattcaaacaagaatttaactaaaaaagatttgcataaatagtatcaagaaggtggaaattcagattgaggatgggctttgtttctggttagggtggggaaatctgatgttttgttttgttttgtttggtttggttttaggggggttctaaatcagggcacaaaggtggccgatcatgataaattctaatggattaaaaaattaaggcagagacacaacacacacatacacatgtttctgttctattagacatagccaagggagaacatttgtcaggctgtctgaactgccagcctccaaaactgtgagctaagtaaactttgttctctatcaagtagcctgcctcaggaccttcattacagtaacgaaaagatgattaaaggagtctacttttttatacccttctgtacaaacaaggatgcccaggaggaacaatacatggaccttgaccagagagtggatctgaagggcatcctacttctcaaggtcttacctgtaactgatcttccagaagagctgtggcactctccccactgttttcatccacaatcaccaccatgtgagttaaggaatttaccttcacctgttcagcttcaaggtcattttgcaaactctagaggaaaaaagaaaagataaactatgatatctgctcttcctcatttacctatttaaaaatccgcttcttcacgatagtaattaaggaacctaatgaggcatggtattgccattcccaaccattaccctaagtaccatactaaagaaagaaacctgaacacacccttacatttcattaggagccagagtctgcgagtgcaacttcaaaaccaattgtaaatgtgtgacaatgtgtgccattttcagtcctaattcttcccaaaaaaacaagtcgaggtagaagaagatgagaaggaagaaggaaaggaggaaaagaagaaaatctgtgtctattctaggaattaaaataaaaatatatccatatgcaggtatcccagcactaaagaggcagggacaggaggatcgcagtgagtgcaaggccatcgtggtctacatagaaagttccaagtcagctagtggtacacaatgagacactggaaaataaaaaagacaaaaatgtagacctgactactctaaaaacccagagtttaagcaaatagaatcagaggtcattttctgtagttccataatgtgcaaaatgaggaaaaggctgtatgactcatagaagctattctgattagctccccaagagagcaaccaagaacaagcatatggacaccttcacttccctcttccacaggaagagaacagtcattagacatctgtagagagtaattggtttaaacagtagcaagagtatggtgaaatgcctcttgggtagtgtttcatgtgaccctaaagccttagtatcagctatctagatgtttcactgatcaacaaaattctacctttcttctgctataaaaaccgaaccactcatctcagaaccaaaccacactgtccaccatgtgctggttcctcactcagcacttcatgctcttctgaaaagaggtaacggggggctagagagatggctcagcggttaagagcactgactgctcttccggaggtcctgaattcaaatcccagcaaccacatggtggctcaaaaccatctgattccgtcttctggtgtctgaagatagctagtgtacttacatataataaataaagtaaatcttttttaaaaagaaaaaaaaaagaggtaacagtctccctgacaggattgggtatatatcctaatcctaattaagtataagtatatatccctgtttctttctccacccacactgtgtattcctgcccatatgttcaggttctcatgcacttgtgagtccaaaaccacccttgcctggctggagagatggctcagtggttaagagaaccaactactcttccgaaggtcctgagttcaaatcccagcaaccacatggtggctcacaaccatccgtaatgagatctgatgctctcttctggtgcatctgaagacagctacagtgtacttataataataaataaattaatctttattaaaaagatttataaaaaaaataaaacaaaacaaaaaaaaacaaaaaacaaacaaatcacccttgccaaatgtgacaaatgtcacacactttcagaagaaagacatggacatgtgtgcaaagctgtctctttccaaaatgtcacctcccaacgaacaccttctgaataaaaagcaacagggaagaagtagcccaactccacaccgagagaagccatcaggccccgggtcagctcagcactcttcctacacaaggaagtagaaaaggaacaagcagcaaatttactttatgttcttgaagcagcttctgcagggagggcaggtcatcacccagcgggaggctctccatcttctgaatgcgctcttctgtgagggccagccagcttgagagctgctgcagctgtttcttctgcagctccatcagagcgtcgtgcagcctggccaggaggacagagtgtcattccctcgggcttgtcccctggcacgggcacccactctgagcaccagggaagcgggggcaggaaaacacagccttgtgtaccctaaccatccaagtagcagagagtccatcagtatagaaactaagggggaaagctctgatttgattcataactggagttcattaagggcagtcaggaatataaataacagctccctgtattcaaaacagaatcattgtttctacactcaggaattcctggcgtattaaattggtggaaacggcaccggaacgcgaatcacaacgtggaaagtgaaacagaccatggtataagcctgctctttaaactgttacagaccactgaacagtaagtaggcccgtggcacactgtcctgtggtgacagcctcaatgagggggctgtctaaatgaggttaacctgaggccttgtctgtggggagctgcattgattattaacctaattgatataggaaggctagtctgaaaccgagcagcaccactccctggttggggccctggactgtatgaaagtaaagaaagccagttgggcactagcatgggcacagtcattcttctctgctcctcactgtgcagtgacatgactactgaattcaagctcccactcctcgggggtccccaaaatgagaccaaaacctggaattgttagctaaaataaatcctttcctcccttaagttgcctttttggccagggtgttttatcactgtaacaaatataaaattacaatatcacccatgcaaaatataacttcccctcttactaccctctgcattccaactgtcctctatgatcttgacagagatgagactcacagagcggtgtgaggacagtggaaggcttgccctgtactgattttagtcacagccccgcaggcctgtacttgagtgtcactgtgcactgtggtctggggagtcaggctctcggtccttgagctccactcaccgggactgcctctccatgctctccacccggagcgcctcccaccttgcattcagcaaggtcatctgttcctggatctcaaactcctcctcctctgacagagtcccttgtgtcatcagctggttgccagcctgcaggacgctccccacgctgctctggtgtgctgtcagctccatcataaaagtctagcaaaggagattgtggtagttagtgagtcacttgctgcgaagacatgaaacaacaaactggtagtgcataagcccaacagcaacgccccagagaaaggaacctgtgcaaagcaaagacggaggaggctttcaccaaaggtggaaagctctgaaatgagagatttggtattaaccataactcaagagaaagctagatcaaagaaaacaatgttatggatgataatagtagattttaaaagttttacaactattcatgggtgtgtatccccattcacccgtgaatgtgtccatgtacacacaccatgttcagcatttcaacacacatatagggaatcacaggacagctcataagaggtggatctgtcattccaccaagtgagttgcagggaccgaccttggatcatcagttttgcagcaagcacctttaacagctaagctatctcttaagtaaatgatgattatgttgttaatgtaaaaatagagaagaagaagaagaagaagaagaagaagaagaagaagaagaagaagaagaagaagaagaagaagaagaagaagaagaagaaggagaagaggagctgcttacacacacacacacacacaagaacccacttaaccgtaaagaatttcccatagagtgaaaaatcatgattctatctctaaatagcaggtagctgcccttgcataaaatcgtgcaggaacactggatataacactggcttaatcagacaacaaataaaaatactggcttttagggtagcatgagaaacctgattatttgggatactagttggctatgttgatttgcaactacagctcaatatttcaaaaaggaacaatgttcacactgatttaatcctcagttctaaaaaaatacacaaaatgtcacaagactgcctgaaatctgattctcatgaactgtcgatcactccagttttctaacaaagcccacgtaaataatgcaggcactacatcatgatctttttacagagcatcatttggtaaataccaagccaatggtgaagtcactccacctaccaccacccctaaaaatcaggcccggccctggaaaaatatggctctcggccacagatatttacttcatgggtagcaaactgctctttgacttcttcgacatcatcagaaatgtcatcttgctcctggaacgtgtcctccgcggacagcagccacgtcagcacttcctctagcgctatctggtagctgtccaaatccatgtccacttcagtgacggtgctaggggtctcagctcggggactctggccttcctctgccagcactgcactctgtggaaacaaagccacagcaaccatgaacatacagacgctcaccacatgagcaatgtctggagaaaccaaggtagggactaggatctcaggagacaacccccagttttcaggagctgagtgaatgaagccatgaattaatcagaggacactgacagccaagaaatacaaaatagagtacacacacaagcgccacattggaagaggcatggagagaaaaatatcccacatgagtcactggacaaaaataaaactccaaatgccagtatttgacttcaagacatagagaattttgatggagaactaagaacatgctggcccttgaacaacggttgcagtttacagaatagagagcctgacactctgctttgacccctgcttagaattctttagggaccctgcattctggtgccatgtattaaacagtgaacaagggcgcacatacaacctgtggaacggatgggatttcatgtttcattgttttgaggcaacagccctctagtgtgtgagctgttctgtttgggggatgtggtttgagggttaggacttgtaaaataaatgtctgccgatctttctctaacttactagtttctctttatgcacttaatgatcttgtaatcaagcctactggctctgctgttcctttgtttccattcaaacaaaacttcttcaagacgtgtgtaaactatcccacatgtacataaatgaggagaatggtaaaagtcatgcctacacatgttaccaccaaagtcttaacagtctgcttcaacagtctcaacatttgcccccaaatgactgaaaagctgacaaagccattttcccagacttactttttagagtaatcatacaattagccaatcaattaaaatgtttctgataacagctatgccggaataacaggcaccaactggaaacaagagaagccaggtctcacgtggttcttccagaagcctcccagtggctgtgcctggagccgatccatcctgacttccaaagctctccttcccaatccagtggccctgcccatctgcaagcagtaaccctcctgaacttctttctcccttctttcgatataccttaactaagtgatatcatctattcctatttgatttttaaaaaataatctagattcgatagatattttatttctagtaaaactctcttctaactttcagcagcaataacatctgcagcatctttaaagatatatcaaaccagacccacatttaaacactcatttgtttcacccaccccaaaacttgccaacacctaccccaggctccatgcacctaggcaccacagccaaaaacctgggtgatatacttggacacacccctctttcttccctctcccgtgtttaatctgcaaactagtcctaccttcaaagttcaactcaaatccatgcagacctctccacttctgcaccacccgtctctcctctggcccacaatggcttgctaacccttggcacccacagtcctatctgccaagccacttctcaggcagcagagagaatggtctctctcatgtgttcacacccacaggtcgcccggcctgaaatccctcactatcctttccacggtcttaagtcactatttaaaattcttgacatagttcacaaaaatactgacagggcaagaaagactgtgggcacatagagacggatcttaattggttagggagaaactcaaaggttctgtttaagtgtaggaaaaggggaaggcatgctcagagaccatataggtagaagatccttcatagatggaattcaacacacataagaatcaggaatgaagaaaagcctactctgactgcaatttaaagcataagaggtattaaatcctcatgaaaacttggggttgaagcccagaaaatgttgttttataggagagatcaaaggaatgttttcaactgagttataggagttaaagaaaccagtcatcataagtaaaaacactggcaaattaagacgcaaacaatgccagggcataggaaggaaaataagctacattctctcaacttaaaggcctgaagtcacagtgctaagataattcagaaggtgaggtaagcaaaagtctagacaatgggaagaacatgcaaaactaggactgctagtcatcagccaaaggtcatctgtgtaggcaccagcatccccccgaggggtggaaagcagcaaagcctctccatgtaaatacgcaggagcttttcaactggcgtgtttctaaagggaaactcagggattgcctactgacctcccaatgctactcagcatggtgggagaaagaggattcagagagaaggctggctggcagtcagcattccttagagaacagtggacagcaagacaagccaacgaggagacaatcaagacttgaccacatcattccctcacttaatggaacttagcctctaagttaccaataaaagcatacaataaacagcgtgagcattaaaccactcagtcattaacaaatagaaagtggtttctgaaattcttaccataccaaccttgcatgctaaagaagtgattgttttagctaaataccataaaataagtaaaatccacttctttttcctatgatttgctatgtttctgtatgagtatatacatacatacggaggctggtgaacaattatatagtgcactctcctaccattatgtgagttctacggatctaacctaaaccatcaagcttcagaacaaacaatcacttttaccaactgaaccatcttaatggcccttcctttttgagaggacagccttaacactaagaattgaaatatcttctctttttaacaaaaataaatcagtccaatgaagaaatgactgtaaatacaagaggcaagacctacaggacagcccagaacaccatcttagtcacccagtgaaagtacatcattgaaccaaagcagtgtccaggagccaaggtaaacaatttgcagtagttaagggttttccttctgcattatttgatgatcaaaactaaaaagaaaccaggattcacaatcaggctccatctctcccttttcctattcaataaggtgtttttctcctttttctaaatggataaaaataaaatgattactacatgccacccaaaatctaaaagagtaagtaaactctttgaatctcataaaaataggggaaaaagatgatatgttcaagattattataattggaaaattgagtaacttttttaaaaaaatgaaagcaaatttgctaaatgagaatgtcaaagcaaatctggagagaaatctatagtaatgacagagaaacgggcttagcaagtgagtattctttgtgttgcctttgccaaggaggtaacattaaccacagtggtcaagaggccaagtcactgaccccatccaagtaccagagggtgacatgtaagctgcagggcacacactcatccaaaatgcacttctcacaaatttgcaatcctcaccccctctttttcctcatatgtgtatatctatgtggtgtgtaagcatgtgtgttcacacgaatgtggtagccagaggttgatatctagtgtattttccaatcactcaccaccttccttccttcactgagacagtgtctctcactgaaggtggagctcagtgactcacttatgctggctgacccatgagttccgctaacccgcccatccctgtctcccagcatcaggatacagggagaccaccaaacccgatgtctatgtacatgcagggcatcctaactcagctcctcaggcatggacatagagcactctactgactgagccatctccccagcgcctgtgtgaacatctggacttagttgctaaaatgcatgacttcgaaaatctgaacggtcttccttttatgaatgaagaagaatgggattttagacaaaaatcacaaagagacaaaatatgggttgagtcaagccagggtaatggagaaagaaaaaaatccattattcatatctccttaggaaaatctcatttatttgctggtgaaatcatctgttagcccatttctggaaaaatctgatgaatgatttatagtacagtgcctcttccaggggaaagggaaagtaaggctggtattttgagaatccttatgagaagatattgggggcaaaagttctctattaatggaccccaaacagaaagaaaattactacttaacaaaaattacccaggacaacatgagagaaaacgttccccacaccaggtcaacgccttggcctctcagcataaacagaatccaccactcagcatccagttgactccatagtagagcttttagcgtaccacacagcaccacgatcaacagccccagacgctactcaccttgagaaacaaaacacttccctgtttcataaaaaacggaactcagaaaaaaaaaacacacacacacacacatgttcagaaaacaccctgcacaagtttgacctgggggaaatcaaacaggcacggcaaaagtttcgagaaaaatgagccagcacctggatatgaatttcttcctcttcacattctttcttatacttccttgggagagtctccacctctcggatggcatctatcgtgacttgctgaggaagcacctcaaacagagacgttaaatacataattatggatttcttgtcagggagatgcacagcaacatctaaaagcagaagaaaagatgactcagaaacgtgtggactgctcgataccaagtaaaaagtgactgttcttgtacccagaaacaatgcctcatttgtgatctccataatgctgcctctcaggaaattgctgctgcagatcacaaaatatggacagaggtgaagacttattcagcctccggttcttaagttttccataaggtgggcatgataatgcatactgcaattcagctcctgacaggctgaggcaggaggttcatgagtttgaagactgcctaggctccatactaactaagaccctgccttcaagaacaaattttaaaacaacaaacaaaaaactgtctcaaaatgctctaagagctactcatgtagccatttaaaatatggcacaggcttcactcacacaatagagtgggcagaattcaaacctaaagttgcaattaaagtcttcaaaccatacacaaatgctcacacgtacatgcattccaagaaaccaaactaattctgaattatttctctagcaagtaggtattcctagacttttccaatcctacttgatacaagttaactcttatctggtgaaatcattaacctgctgtctaaagactacaaacaggacaaaagatttactgcaataaagtgctttgtgggagacgggaggtggaccccacaggctcattgccagtcagcccagctgacagcgcccatgtcttaaaagacaaggtgggaagtggtaaagacacctgattccctcctctggcccacacatgcattcacatatgtgcacacacccactccactcatgcacaacagccacacatactacacacagaaaagtaggaaaaccaacacaaagatataattatggccaatatggtaaaatgaggatcccttaattgtcatagtgttttgtaaaaaagaaaaacatcatcactgctaaaggtgttcaaaattagaaagcagaatcaagttcagcaggtttttatgtaacaaacttatacatagcagaatcaagatctcaaccttaccttcaggatctagaagcttttcaattcccaaataagtgtgggccttgctaaaagcatgttcaagtctctcaattggggacattttgaccactctgtcccagctgaagagatctggtctgaaatcagtgacagaaaaatataatggaaacaatgtagatagcaccgtaattcattgcacttcaatttttttttttaatttgtgagtgctattttaaattgtatcttttgcatctcaagtttgtaaaatctaaaagtgacatgtgtgacaacgataacaataagtaagaaaatctcaggttcttggcacagttgagtgtacagtgtttcccagacagtatattatgagtaaaggagacgtatggatacagagaagaccggggaagaaaatgatacagaaacaggaggtgaaataagctccaacacagtggtaaaaacgaacctaaatatatgagttaccaaatcaattattttaatggactaaattctacaaattaatggattctatgattttattgcttcacaaatttaatgattttaatagactaaattccacaattaggacaaaggtacactcctgatattacagttctaagggttctaagacaagaaggtcaccaattaaaagctggcctcatccacatagccagtttcagtccagcttgggctgcagagggagaccctgacttgatgcctctacacaccagaagagactaagatgagcacacagatactctagtgcaactggacttagttatcctaaaagcagaggtgcaaagggggctggttcccttccgttcatctttctccatgaaaactagttttcctttacatcttgtctttcttccagcctcacatcgtggacagtatcactggcttgacagacctaaaagttggtccctttctttgcacttcactcttgtatcttacatgcaccctgagactggtctccccttcccccacccccgttctcctttctacctcttcctctgtcccttagccaccacagccaccagcctcccccatatcagatgcctcttccctctcatctatcgtctttttctttagcctgtctaccatttctatatcttcacatccccatacacacattttgtgagacagagtcttccacatgtagcccatgatgacctcaaaatagttacacaggtggccgaggatcacccagaacccctgatctttctacttcccaagttctgagatcatatgtgcaccaccatgcccagctataatttacattttctaaataaatctctgtctccagttagaaggaactgagatgtttgtctgttttgctcctgctctatccttgtgtctagtgcaagacactttatatccatttgttgaatcaaagagcctaaaaaggcaaaggataatggataaatgcaacagtttcttaacagtacaggacaggatcttcaagatgacagaaaaagagcgggagaacaggagagggaaagggtctttaaccccataacaaatcaaaataccaaaacttaaatctatagcacacatcgatcctatgtgaaaaatattaaaagcattgctttggtatcaaacattcttctcactgtcactaatttgaaacaatactacatgaagaacagaatcctataaagaaaaggaggagaaggggaaaaggataacacattttaaggttatcctaaattcagccatggctacttccccacctaacaatctaccagcaaagattaaaaaaagaaagaaaagtaagaaacaaagaaagccaaacctatattatacagagataaacttagtgaaatgtagaacataaatacagaagcttgtacttcatttgtatatagcaggcaagaacattcaggggattaaatgagaaaattaataattcataacagcaacaaaacacaatccacttttcctgcttttggcacttaatctctgagggatgcagaattacttgtctggtgtgtcaaggcacatatttacatggttaaccaactgccccataccgcatgttcagttgcaatgtcagctcaactggttatcagaccggtctatacaggagagctcttcctcagctcttagtacctccaggatggaagctctaagagcttgttcttgtatatctagcacagtccaatgctggcacctttacatgcaactataatgattctactccattttatagctctgtattcatacagtgtcatgattttttactagaaagttatttcaggctgtttattcttctggggtataatggcgacttttgtattaaattcttacatacaagttagaatctagtttatgagatttcataagaaaattgtatagctcttcgtaaatgtgggtaacacaataaacagagttgtccttctgctatcagaagaaaagctacacacaactctttgtgtgtgttactggttaggccagatgagtgggagtgaactatgtcaattatcttacacttcttagtttataaatgtgtaggagacaccatgggctttgcactccagccctgaagtccgaaagagatacccggtggttgatctgcatggtattgctttccttgatgcttttcaacatgagcaatgtgggcagcagaggtagccgaagggactatggggaagagaagtagaaaaaagacacagaggaggtaagatttgcagaccggaagacatctcacttgtgccggtggagcacggcgttgaacgcgagtccatcggtccagctggtggtgaagttgaggacgttgacttgactgtagggcctggtggtctgccgcacccagctcagcaggatcttctcgctgtttgtctgctgcaggtctgacatgatatctttcatgacatccttcacctgtgcagaaagacccacacctgcttataacgcaaagaattaagtaattttcctgatagcaataattatactcttaagaactgacagtttgtcattatcctaaagcaatatgtatccatatgcataagaaaggcctcagagaatgacagagatctatcaaaaggacctttagccaatgtaaaggatcagaaggagttgaatctaagacaatcgccatatcaagatgaataatattagtaaaagttaataaacttatataaaagcccataatacgttgatgaacaggtgggtggttgatggatggatgggtggatgcatggatgggtggatggttgacacactgataaaaaccgattttttttataaacagagctagctaataattgtagaaggaacaatggcatcagaaacttactatttggcaaggatcttaatgatttgggtaataataatgaatggctgctaaaactaatggttcaagttgggaaactaactagacatttatactgtcactaagtacgccccaacaagatacacttaataacaagggacagtcaccttacaatggagaaaaacttgggaaataccactttaacctaagtaaatatggccagagagagagagagatagttggcagcacatgaccctgacacggtgactgagaaaattcaacacttctcctgtaacaagtctatacaaggaacaagctcgatccaacgtgctggtgggcagagtcaatcccacggacattgtatgaagttcagtgttcttcaaaaacatcagcacggtgaaaagaaaggctccgaaagtgtcccaggttgaagagataccaaagagaaacccaatgagcatcgctcatgatctggacctactgttttcctggcttatcatcctgcctccctccctccactccactgctactgggaactgagcctagaacctcatgcctactgtcaatcactgaaccactgagctacgctcccaggggtatattactgacgaggtgagtcaaacctccatgagacctatagataactccactatcccaaaatcatcttcctgactttgacaactatctatcattttggtacttaatgattgtgataacacagtaacagatggtaatagtacacattttatatttgtatgttaatggtattgtggctatacagtggagttcctttttatttttttaagccatgtttttagaccgaagcttgggaagtgtatttggtgttttataaaaggaaagagcatccaaagtactcagacagagaacgccagagtaagctcaggaaatgcgggtaagtgttaacatttggggaatctgaatgaacggcatttggaaatcccttaggctactcctacaacctcctatgaggctgaaagcaaagcagttttctcaatgaaatatgaaacacctttttttctcctctgccaaaaatctatatcaggctgccaacactgtccattgggaatctgtaaattagacgtgttctctggagatccatatgctaacgccagaacatcagcaccttaaaattgagccctgtgtgaagtagggccgctgcacacagaactatttaaggtgcaagcacagtagaggagggtggccttcaaacacagcatgactgatgaccttcccaaagaacaaagggaaatctggacaccaacacagagagtgtgtcatgaagactaagcttgcctaagccagcacaccgcagtttacagcaaactcgaagttaggagaaagacaaggagctgctgagaagatccagctctgctggcacttgggttgcagacttgcagacacgaggagtttgaggcaataaacacctcctattccagccaagccgtttgtggaacttcgatttgacagctgtagaaaatgaacagagaaaataatacgaggcctatctcaaggtgactgggaaggtccccacctgccagtgcagaatgatgctccagagtaaccctaaagtcagcttgggatttccatccacaatgtccgtgcctccaatattcaccaagtccacctgtcagagcaaaataataacacaacaattaaattcgtgggacagcgtcaccatcgaactccaaaccttttgattaagtatatttatacagcaatataaacaaggataaaattttcattttaggaattggatcaatgcaaaactcaaaagcgtattatttatcctacagatcaatgagagcatcggaaaaggcatgtgacttatccgtcactcacagaacaaattcaaaactcccaccaagaggaaacactgccaagcatcaactgacatatacagcaaccagcaggcttcccagcaaacaacaatgcctgcagcagctgagatccctaaatgttacttacattgttctgatgtaaaacctgtagcactcggttgacattgtttaaggcatgcacccttgtggaaccacgttcctttggctggaaaacaaagcaaaacaaaacaaaataaaacaaacaaacaaaaaccaagtaagagtccctatcccttcatgtgttgacaaactctgacacagaaacggaagcagaatagcaggtcagcatccatgtcaccagcctgggtaccacaggatggaaattcactaagaacatcctgaaacatgggctcatttaccagcatgcctactaaaatcatctaggagacattcaaacaggcctggcagtttcctgcccccacatgagacagtgatttaaaggacttaggctgtgacatggattcagcattttcaaaattgctctagttactcttcacaggcaggtagacacatttgagaatcaattctgtcagacaaagcttttttatttaaacttctccagaggcagaaaaaaacagcagaatagtctgcctgctttctcctgcccatgtaggaacaacagagcaaagagacattgtcccaaactccaagtcacatgagaagagtgtgccacctagggcatgacaagctagtcatcttccttctacctcacgggccagggaatctcatgagagatatcggtttagcctgaagctgcccagcctcggccaggaaggcagacagaggatgcagtactcaggcttcacaatttagtacccagagagaatctcccaatctcaacagtgccagaggcactccatcagccacattctcagagatggccatcctctcctataggctagagacatagctcaagtggtagtgtttccctatcatgcatggagccctgtgttccaacctcagcactgcccaaatgtggtgtggtggacacctcagtacttgggaggatggagaggcagaaggatcagaagttcaaggtcagctacacagttaggttgtaactagcctgagggaaacaagaccctgtctgaggaaaatgatcagagatgtcctctcaccaatgatgttcctgtgaggccttcgagaagatccaagagctttctcccatctttgaggtctgagaacatatcactgatgggtggtttcccactctgcaatgaagaagaagaaaactaaggtcgacttcaggaccagaagttccacatcggggctggtgagatggttcaaggtgcaaatacgctctctggtgaccgtgatgacccaagctcaatccccagaatgcacccagtggaaagagagaagaaatcccaccatctgtctcaggggcaccacgccatgagtgagagcgtgtatgtgcatgctaataaatatagaaatgtaagaaaaatgaaaacatttaaaatacttttggccgtgtttggccacagtccacaaacacaaggaaattcctgcacagaaaaaaacaagagcctcagtttcaaacacagtctgaccaagaactacccaacgagacttaatcagttacctaagctcccttaaggcaccggctatgttaaataccaaaaagtataatgtgatgtgagaatgtactaaaaatcataaaccatgatgtaataaatctataatggtcttggatgttgtcacttcttcatatgaaagatagagctaaaagtccttccctgccagtcctagatattacataatcaagaactatctttttgtgatcacttaaaaaaaaaaaaaaactatatgaagcaagactttaaatttgagacaagaaaagaagggttccctgatcctcctactgaattcttactcggttttgaataactatagtgtgcaatctgttaagaattcttagcatgtatcttaaaagttcataggctctaggagggaacatgtggcccaccacagaaacagtggggaataagctggaccctgtctctgaaatacagctatctcttcggtttgccaccgtgttgtagacacatagattatctctaccaactacagcaacaagcagactagatgagctcagatgccactttcgagagacactggagacttctgaactatcaacaaagcaaagggtggacaagcccttgttaacagcctgtcttcgaggctcctctcctgagctcacacagagctcaatcctctctcatgtcttacgcagcaaagagaaagataagaggtcaagtccatagaacagaatgagttatctaggggaccgccacctactagcattcactttccaacgtacaacaaaataatatgtaaaagcctattataaagtgaagcaaattccattatttccccatatcagataattgttgatatctatcagtgtcctttgacacaagcaggttgtgctgtacactagccacaaactttagtcatgttacctggtctttacacactcacttgtttgttaaaaactcaaatggaagctgggcatgatagtgcacgcctttaatcccagcactcgggaggcacagacaggcggatttctgagttcgaggtcagcctggtctacaaagtgagttccaggacagccagggctatacagagaaaccgtctcgaaaaaacaaaacaaaacaaaacaaaaacttcaaatggttaacccagtattattatcagttataccacaagcaaaaccttcatgctttctattattataaaaagtactattgaagcagaagagatggcttggcaattgaaatcacttgttgctcttgcagaggatccaggtgcggttcccagtacccatgtggtgactcacagccatccacaattctagatccaggggacccaaagccctcttatgaactgttcaagcagcaggaatacacatggtgtatatacattcatgcacgcaaaacattcagacacataaaataatcttctctgaaagaaccatacattttcgataatatctgaggggatttatggaatgagtatcttcccagtcccaaattcacagaaatggtcacttgtgggaacctttcctattcaaaaacaattcacacagacacctatgtaggaataacacagatgccagaaaggctccattgcaaacgaagacttctaaaagttgccattaatggcacactctttttccctcacgtccaaatagtccaattgtttaacaggcaacaagtttaagaaaggctcctctagaatattctgatgggaaaaaaaaccatgaagatgcagttctgtccctgtaaaagtcaaatataaacgcaaggatgaccagagtacccctttcccttaaacagaaggctcatggtaacgacagctcagtttcttccttctgtttctcaatctcagacgatcactgacgacaagctatacagaatgtgctgtgaatgtgtgcccttccctccatgttcccacacatgggtgtggtacactggcagtcaattctctaagaaagaaccccaaatccctgcagaatggcagacaaggaaggtgatggggctccgctggagagagtaagagatggtgcctagactctcacaaggaactcatcaaaatctgtgctgtaaaacttatgtgtgagtgatggccttaactaatactcgggaggcaggtggatctctgtaagttcaaagccaccctggtctacagagcaagttccaggacagccagggctacacagaaaaatgctgtctcaatcaacaagcaagcttctgtgctctgtcaaactctcaggcccctggatccagttacccagcaccaaaaccattcccccaaggacaggcaagtattctgtcagcaagccatcaatctttaaaccacagtactagtttccacccattcctacaattaaaatggtgaaaaatattaaaatactctacttgagactagttcgttcctgtcctttaagcacaggcatggccgttccctggttcttctctgctctgtccagagcactgtctcccaggaaaatgttaacgagctgcctcagcatcaaaacactagaaaaggcaggttcttttcttggtagtttatccgccgagtttttggtttttgatttcagttttgtttcattctgagaaaaggtctccctttgcaccttggctatcctagatctcactctgtagactcggcagcttcttagtcacaccgtctttgggagttttaaatacttttgactccttgaagaaggaactgtctgtgagagtaagaaactctacacacctgtgtgtatatatttttagcaataggacacggactgaaaatgtgctgggggaaaaacatacatggaacccacaaccacggcacatatcccagcatgcaagaggagaactacaatttttggtctacacagaaagtccaaactcagcctgagcaggagccagagatgtagtccactgataggtttgcctagcaattacaatgcccaggatacaacccccagcactacaagaaaagaaaattaacacatgcatgcacccacacacagacacacatatccaagtgtgtacactcagcgcacacttagactgtcattacaaaacactaaatatccctgacacatgcaacttccaaatgttccacataaatacagaaaggactagtagtacccaagaggacatgtccccgcccaatatgtacaagtagctggtgtgtaagcagggtccttgttctacacaggagggcagaacacttcttatgtaaggacaggtcagtacatattttagactttgttggctgtgtggtctctgttgaaactactcagctctgttgtaatgggaaaacagtcattaatcatacaagaatgagtaagccaactgaaagacaactttgttctaatttcatgaacactgaagtccaaatttcatagcattaacacaaattataagataatatgttgctcctctgtaaatataaaaatgattttaacttgaagaccatgcaaaaccacacagtgacatagtaaaatgttctaacacaataacagtcagcatttactgtgtgcataggttaagttctgagaattgtatggatttagattcattgtttatacatattctttcctcctaagtggtctaaagggaacagcttcaacattcccattttacaactgaagagactgagacctaaaggtggcataacaagtgagagacagaaccaggatctgatcttacaaaacctggctccaagtccatcttctcaacatttgagccaataaatattaccaaggcatacaatgcagtaaacaggggagcaagcattttaattgcaggattgggataaagatagacagaaatgtagatgatatagagagatataaattagtagagattgaaatctagagagatacagatatatagacatagattatagatgtagctgtagatatagatataggtatagattatagatatagatatatgaatatatagatatatgaatatatagatagatatcaacttctcagaacaacagcataaatcaccacactgtactaaactaaggcaccatttcccagcagcccactgtaaagcatctctggtgttttttgtgatgtgggctgtaaacatcggctctgggaacaagtctagaaatgtcaaaagtcatcttttaataaaaataaggactgattcatcttgaacatcaacctcacatttaaatctgtgcaaagactgacttgcagcaacttctttggcagagaaaatacagtttaataacccaatcacataaatatttggtgaatatcccctttgtgccttagtcctggcaaaatgctgagttcacgtcactctctccagtctccttatgggaccattttcattacttactaataaacacaaaacggtacagaaaagcaatcttgaacttggggggaagataacacttatgtcccattttactttttaaattatttttactttattttatgtgtatgggtctcttgcctttatgtggtctgtgaaccacatgcatgctgttcccatggaggccaaaactgggcaatggatctcccagaattgttgtgagctggggaccaaactgtagacctttgtaggaggagccagtgttcttaaccaccaagccatcactctaagaatctcctttttctttcaaagcctaataaacagaagcatgatggctgtagtcctagactgcctaattaggactggcccccactctcatccttttctactagtccatctttggacaatctcagtaccagccctgggcccaccattttgacaagagaactgcaacatcagtactatttcctggaacatgagtgcgactgcatttaaaagcatctgggcaaagatgctaccaatcattgctaagcaaaaggagaggtagaggcagctgtagggagcaggcttcacacatgtgatgacatgatgaagggaagcatgtctgatgggcatccgtcacacatggacagtcagcaggtgctccctgctctgtgccagcacagcatgaccatgcagaaatcaagactcgctgtttggcagggcttcctgtttaaaagacaagttgaaaatctgaattggcctgtgcagcactggtaattttctagaccatcacaccaggcaagtaagtcttgtctacaggcatactgagtcgtaagatgaatgacaggcaatcaccaagtagggcagggccacatccaaaggaaatatagggttagtcaatagtgagtctcttaaggaattgtaaactctgtgaccagtacacaagtatacacacacatggacgccttcatgacaacatgtgtgtgctctgtcacgcacacacacacacacacatacacacacacttaaatgaaaatgtaattcttaaaaaatgtcacatggggtcagctaatagctcaaatgcttttatccaaaatcatgttcagccaagactgaaaacctgaattctgtcctcaggacccatatggtcaaagggaagaagtgatacaacacattgtcttctgatctccatgtcatgtgagcacacacacacacacacacacgaaataaaacaaaacctaattttttaattaaaaataaatcaattagaatttaggcaaaaggaggcaagcaagaaagaaagctagctagcttacaaaagtaccaccagagtatcctaaagatggtggtcaagaatatagagaatattttattgtttattttttctcattggtatttgggaattaataaaaattgaaatgtctttttaagaagaggacatatgaggctgaagagatggctcagcagttaagaacacctattgcacttccaaaggtcccaagttcaattcccagcacccacatggtggctcacaaccatctgtaatgggatctgatgacctcttctggtgtttctgaagacagctacagtgtactcataaatggaggaggaggaggaggaggaggtggtggaggaggaggaggaggaggaggaagtacatacagctcttaaaataattagctctgttgacatgaaatgagtatcaaaaccaatgggtagcacatggttcagctcaaggaagcctgcagtgcctctggtagtactcacaaggagatgaaccatctccagggggatggtgctcccagctgctctgaccacacattctgtagcatcttcttttccagatcccatttttatgactattaactcccaagattcaaggagcagaaaacagcagagcacacacatccgtgtcccagactgtttaaagggcaactgcatgtgagcagcaactcacaccagaatccaggctccatgcttcacagccctgcctcctgttcagtggatatagatttcgagtctgcaattgttacccatgggaatttgtcttttcaaaaggaggaaagcagaaacatgcattttctgcattttcaagtttgcatattcttcccctaactgcactgatgaaagagcttctgtaatttgtagtctctcggctctgccagatgagcagctctgaaagtgagccaaagaaagcgcaggctccaagtcaggacacattgcccaacagcttccctgtctcccctgggagagccacatgcaaatcagactccaacaactagaaagtccaaaactttgttgcatggttttacacaccatgcaacagtctcaagagggcttatttctatttggaaatgtgtagcagagagcagggaattcacaaattagtggtgcctcatgggtttttgttaacattcctgcacagctatactcccggacactacaaggcaatgatgaccaggggtgtttaatggataaaaacataaaacacagttcctcttaaaactgcccccaggtttgcctgaggccgtaaataaatgagcagcacacccaggagcgagcgtttcttaaccctttatgcagccagtttctcctttgctcttcacctctataaaacatcagaccatgactggctgcagtgtgaactgcctttcaggaccccagggctctgaagcattgtggactcgggcaaattaacaagcacttccagctatatacatcgataataggcagacatctgcttgggaagatacaccaacatgaaacatacacgtaagtgtcctccggtgagggaattgtttttagcttctgtatagccacatatacttcctaggaaaagatagttttagatccatatcattcaatatgatcaagcccttcatccttaattaaggagacaactaaaaaatcatggagctttaagtcaagtttaagttttttcattccctgtgaattaagtagttgagggtcaggatgaagaattctactgaaagatggagagatagcttagcactggctgctcttccagaggtcttgagttcaattcccagtacccacattgtgcctaaggcccctgaaagagcagcaagggctcttaagtgctaagtcatgtctccagcctactcttttcatttttagtaaaaacagtaagaatctcaacctattgtatctattttcatgaaataacactaggtattttgtactcaaaacattattatatttttatttatatatctttattattttatatattataaaattaatatattattatatatctctttccaataaaactgtctctagctgttttctgaacatatagttttagacatatttaaaaaaatgtctgtgttactgtcactcatttctttagtaaactgtcttagtcagggtttctattcctgcacaaaaatcatgaccaagaagcaagttggaaaggaaaggatttattcagtttacacttccacactgctgttcatcaccaaaggaagtcaggactggaactcacacaggagaggaacttggaggcaggagctgatgcagaggccattggagggatgttccttactggcttgcttcccctggcttgctcagcttgctttcttatagaacacaggactaccagcccaaggacggcaccacccacaatgggctgggccctccccccttgatcactaattgagaaaatgccttacagctggatctcatggaggtaatttctcaagggaggctcctttctctatgataactccagcttgtacacaccaagccagccagtacactctggaagtgtgatttgaattatagctactttaaaggtataatcttttaatatataaacatatcttcgaggccagcctggtctacagagtgagttccaggacagccaggactacacagagaaacactgtctcgaaaaaacaaaaaacaagcaaacaaacaaaaacatatctacccttatctttaagctcaaaaaaaaaaaaaaaaaaaaggtatccactactaaatggcatttcaactcaggcaaggaggaggcccatgagcagactagaacggggctgaaaaggaaagcatgcacagaggctgtagaaagctgcccggttgccgggtgtggtggcactcgcctttaatcccagcattccggaggcagaggcaggcagatttctaagttcgaggccagcctggtctacagagtgagttccaggacagccagggttatacagagaaaccctgtctcgaaaaaaaagaaaaaagaaaaaaaaaaaaaaaaagaaaaagaaaaagaaaaagaaaaagaaaagaaagctgcccggttgaaaacacaggcaatgtggatctaggatggtgagaaggtggcagcagaaacaaagaaattaagagcaaatcaggccaagggcctgaaagtcaacagagatcaaactcgcactatacatcttaagtacacacaattctaattttcaaaagaaatacagttaacaatgagcagaacattaagcatcctctaaaagaaaaggaggcaaccaggcctctgaggccacaccagctacttcatcaaagcttggaaggaaaagaagaaaggggaaagagcccatagctggtcatagtgctccacatgttcaaagacaaggtcccaaaaagatgggatgataactcccaggcaaatgtagcactagcctggtctgaagtctttactaatacattgttcactggaagaacacatacagtaccacaatcacttcaaaggagaattcaaagagctacgcatctacaggcagaaaagggaatcaaatgtagtgcgaaaatgcataagttgctctatggcaataatgaattccttttcagctaacctttaaaaactgggtgaattccttttcccccactgttgagaatggagagcagaagacagatgaatgaaagagagaagagggtatggggtaatagaaatagctgagaaagaataaaggaagaaaaatctctatgatgatagtcttggaagtttcagagacccaaataacacagatttatctatggatgagataattttcatcatctactttctacaatgtatcaagctgtaatgtactttcaaataacaaaatgtagggctgaggatggagctaggttgacagggtgcttgcctaccatgcatgaagatttagggccaatccaaaccacagcatctcaaaaatgaggtctgattgcatatgtgctgaagttcaaggccatccttagctacaaagcaagtttgaggccagcctgagatacaggagtgcccatccccaaataataagtaatagtaatagtaattatagtgatgatgataataataataatagggaaagaagaggaagaagaggaagaagaggaagaagaggaaggaaggaaggaaggaaggaaggaaggaaggaaggaaggaaggaaggaaggaaggaaggaaagaggaggaggaggaggaggaggaggaggagaaggagaaggagaaggagaaggagaaggagaaggagaaggagaaggagaaggagaaggagaaggagaaggagaaggagaaggagaaggagaaggagaaggagaaggagaagaagaagaagaagaagaagaagaagaagaagaagaagaagaagaagaagaagaaattaaagtactaagtaatggaaggtagagctaatccagaggactgagccaaacaaggtatccactaatattttttcccatttttagaactttaaaaagtttttctaatatacgtaatagtaacttagaaacggaagatattgatcagtgaatacaatgagtaaatgaattctggatgcatgcaggcattagaattaacaagatgatcacttctctgccttttggctaagatcaagtgtagaattaacaagatggtgtctcatagacactctagataggggggtagcctgaaatgaaatatcaaacaatatatcggttttaaaacaaattcctaaaaggcagaagataccattggtgtctatgtggaggtctcatagtgaagagagccaacagacacacaaaataaatatgtttcagagttcatcaaaatatatgcaaaagggcctaggtaaacaagaaaaataataagtttattttcttttaacaacctgtgtgtatagaggagatatagacaggtaggttgtatataggtggatagattaggtaggtaggtagatagatagatagatagatagatagatagatagatagatagatagatagacagatagattaaaatgatggatgatagattaaaatgatggatgatagattaaaatgatggatggatggatggatggatggatggatggatggatggatggaaagtcagacagactagcttcaggattgctcaatgaggctacacaaaaatggaaatgcaagcttttcaatcccaatgagtattaaactgcataggaattccaagcccacaaatgtactgtgccctctcctacccactagtagactaaagtcagcagaaggaaggaaaacagaacgtggatgaaggctgttgaacatggatggaattcccttccttccagtcacatcctcatcatatcttagataaatgacttcctgttggaaacagtctgacaaagtaagttttcaaggccatccctcctttgatcttttctctaaacaaatcaagaccgcacagtctctgcgggagcccaaaagccagctcactaggctctgtccagtaactttgactctcccagcaggaactctgaacatcctaggacaaagaaatggaattacaaccccctgtgatgctacaaaagaacaacacagttctgagttaaagagaccccttcacctttctatgaatacacatatgtaaatatcagcttcattaaataaccaagggtggtcctagtagaatctgtgttatttgggtccctgaaactgccaagactatcaccatagtgatttttcttcctttattctttctcagctatttctattattccataccctcttccttctttcattcatctatcttctgctcaccattctcaatagtaaggcaaaaagaattcacccaattttaaaggttgcctcattcaaggtgtcccaagtctctgaaaatggcctttcaatgttaaaactagggcactcctttccctaataagtgcgtgaaactgctgaaaaccatgcgtcttcactagttctagcatagaaaatggccatgaccccagtaataaccaggctggataatcccacccacatgagctctcaggagattgcagggagggaacaactctggccacactctgtcactaaaccttgctgagaatgtaacacatgcagagacagaactgtgaatactgtcaagtccgtgttatgggctccttgccactacagaatcaaaccatttaacatttaccaaacatacctagcaatgctgtaagacaatcaggcacctgaagccatcagtcgtgaagcacttgtgttcttccgtcactctctgaattcttgggctggagagaaggctcagaggttaagagcactcactgctcttccagaggtcctgagttcaattcccagcaaccacatagtggctcactctctgaattctttttatatataacatatgaaacaatatgacatgattctgcacagttttgcggacgatcacatacagaggtatacacataccgcttagtgactcattctattgcatttacttacttattaatttattgacagatgtgtatgtataagtgtgtatgcaatatgcaaggggaagagagggaaatgaatttatagaggtcagaggagaacttggtgacattgcttcactccctcgaccgcgtgagtcccagggattgaactcaagatgtgaggattggcagaaggtgtctttgcacactaagtcagctccctgacccaaaatcctgcaatcctcactactctatctgtccgttttcacaccccttctactctcaagggcaagataaaacaaccttcaacaaaaagctgtaaaacctaagaaacactgcagtcaagtaataaataattaatatctctgagtaataaataaataataaattgagtaataataaagtaataaataaattaatatctctgagtctggagataggcactttggttttgtttaggagatggggtatccttatactgttcaggctgacctcaaactcctgggccaagtgatcctcctgatgcagcctcccaagtgtcatgtgccactgtacctgacctgtgagacatggggcaactgtgaaatgtgtcactatttaaagtcaccgtaagtcagcctctccttccctccaggaaacaccagtgtcggtggccctgactttacaacttgtaaacacagaactttcgactaaaagagcttccaagagactggaaagattaccacccacacaagagcactggctgctctagcagagggcccagttcagttgaagcacccaggttatggctcacaaccatctataactccaattctaggggacccgatgccctcctctgacctctgaggttgccttcatgaaaactgtgcacatacatacaagtaggcaatacatctaaaataaaataaaccaatctctttaaagggatcttccagactagtttaaagataaccaaagaaacctttcttcttcaagttcctgtcttagagtcaatcaacccaaaggctgttcccatataagacttggaaggggtgggggtgggggattcctaccttctataactatttcacatttaaagccaatgtgaaacccctcattttaccatactccacacctctccctccctctcccccaattctgagcatagcaatgattatgttccactggttgcagatgctgataaagagcagacaagtaaaggagagagaggatggataatgctattagccatactcacaggaggaaaagcctatcactgttgcacagggcagaaaggatgcctgagttttcatggttaaccatgctaaaggaactggtcatcttttttagctatgctaaagtcagaaggaggcactgaccacacagtaaaatccaccagcatcttggataccttggaaaatcgagcgtttatccatttggtaaaggttttcttctgtacatcattgtgttcatctgcgggagagaaagaaaagacaagaacaggatgaatgtttgtactgatggtgagtgtaataaatacaaccatctcctcccttggcagcttaagattgacatgtatacagcacgaggcaagggacacatagctattaatgaacccactgatggggaccaccaacttctacagtaaagtgagactcagtcatctcacccaagagtcctggtatgaaatccacgtttgtgtgctacactatagatgttaccttacatgtaacactttcaattacattttaagtatactatcaaacatgataaatatgtgtgatagttttaattttcagtgtgacagaatctaggatcatctgggaagtatgtctgcatcagggagtctatagaaccagctggcttatgggaatgtgtgtgatgaactgtcttgattgtgctagttgatatgggaagacctgctcctcaggggaatggcagcatcccacttagaatcctagactataggaaactggagacagcaagctgaacagtagggatttgtgcacgaattctccctttgctcttgactgtggacacgtgcaagtgcttaaggctcctgcctgaatccccatgacaatggaccctttcagggtcaaaaagatcctttcaggtaatgaagctagaccaacacatcccaccaaaaagttactcaacagaaacttaagactccatagctactccttcttcacacaagtcctaccccttctagaaaaaaaaagggggggaatataagatttctagtcagttatccaacacattttcttgacaaaatggggggagcaacagagtcacagtggctttaaactttaagtacagtttaatatttaatttaccatgtttaatcatgtgtatatatgtgtctatgtgtgggtatatgcatgcgagtgcaaacacccacggagtccagaagagggcatcggatcctctgaagctgaagttacaagaggttacagccaccatgcaggtgctagaaactgaactccagccattcttcaagaacagtatgtggtcttagccactccagccctcttaaacaaacattttaatgagcatataaaccagaagaatttaaaaacattatcaactctggctcaattacaaatccattgggcaaggcacaactagcaccaaacatctgaagaacctcaaattgcttgaaaatgagccaagtaaatgaagtatgtaaggagactacatggtacaatagcaccaacagcaaaagcaatgtgtattagggccaaatagatcacattctgatccacttctcatgggattctgagttaagaaccagaagagtcatccacccccaaagtcctcatctgcaagatggaaataaatattaactatattgtaagatatattgttatgctgacaagtgaaacttttccgcaaagacttgatgtggtggtttgaataagaatagctcccacaggctcatatatttgaacacttggtctctaattggtggaacagtttgggaaggattaggaggtgtggccttgttagaagaggtgtgtaactgggggtgggatttaaggtttcaaagcctataccacccccagttagcgttctctctgccttgagcttgtgggtcagatataagctctcagctactcttctagcaatcatacctgctgtctgacccatgttccctatcatgatgaccatggactctaaccctctaatactatgagcctcaaatcaaatgcttcttcttataggttgcctgggtcacagtgctttgtcaaagcagtagaaaagtaaataaggtacctggcatttagtttttggttgtcaaaatgatggcataactatgaacaaacaggaaaacaacagtccagttttatcatttcccattatatgattcaagcactctccacttttctattaaaactaacagaagtcattgttggttgaacacctacaaagtaatatcttaactacctgtgagtagttctgaaagcagtctatattcagaatagtccataaagccatgggtccatctaagtgcctcacctactacagcacacttctaggcaacatcatcacaggaagagacctgtgtgttctgccagccaagcacacaccacaaagggactgcctgtatttggtaaagaggaacatctcactaataaataagactgactacatctagtattatagtttggaaaaagaaggtccccttcaaaggaccatgtattaaaaggctttcgtcccctttggatgcactgggaaaggtggaaacctcaataggggaaccttgttgaagtacttaagtcactggcagaatgtctatgaaggggataagaggtccccctactttctcttcgtcctcccttggctctccacccattttctctgccacccattcctggctattgccacatggtacagaaactaaaggtctattcagtcatcaactctgatcttcagatctataagccaacataaactttttcttctataagtcaactatctgtcctggttgatcttttttgtcaattggacacaagctacagttatctgggaagagaaacctcaattgagaaaatgcctccaccagattaacctataggcaagtctataggacattttcttaataatcaacgtgggaaggcctggcccattgtagatagtaccacaccagggaggtagttatggaatatataagaaagcaaactgaacaagccaataagtagcataggttcctaccttgagttcctgccttggctttcctaactagactatgactcagaatatgtaagccaaataaatctttcctctcaagttggttttgttctttaactttatcttggttactccattgttcatatagatgattggctaaaacatcaagtttgtgataaattcgtgttctaatagcttatggaaagtgtgcagatttggatgaaaatggtccccatagggtcacatgtttgaatacttggtctacagttagtggaactgtttgagaaggactcagaggggtagctttgctggaggaatgtcactaggggggggggcagtcttttggtttcaaaagctcatgccattctcaagtgttgcaagaaatattttaaaaaggtaccagcacgttcccgcacatgtgctggtaactcttggccctgctggctctgtctctacctgccaattttctggtggggctggagttcccaagttcctctcattggcatgcaacaaccacccaccccacagtcagctaatacaaaacccatttacctggtagaatagaaactcttaaagcttataaataaccaatcagatttatgcatcaataaattctcaattaacaagatgctaatacaatcatttcagaaccaattgataatgataaaagctttattccaattgttctaactttctgatatcataactatttgtggttggttaaaggtacactggttcatgtctgcctccatttttctttctccttctcactctctacactctctgtccctgcaactcttagctctgcctcccttttctctgtccaatcacaggcctcctgttaccctaatgtaattggacagggaaaatcctgcaacactcaggtagctctctctgcttccagtcagtagatgggaatgtaaggtattccagcaccatgcctgcctatttgccaccatggtaccagccatgatggtcatggattctaaccatctagaactaagttccaaattaatgtcttcttttataagttgctttggtcacaatgttttgccacagccaatagaaaagtaactaagacagaaggaaaatttgtaactgaaaggccatccctgtgataaatataacagttctagaaagagagtttgcagatccataaaggaaattggagagcaaccctaaggctcaaaggggacagtatagaaggacactaagaagattcttgatgttaatggtgctgaaaggtgacctgcatctcagaaaggacagggaagaaagtcatcagccccaattccagctttatacattatctgatcgatgctacaaagtcattaatcaaggagacttgcttacatacacagaatgtcccagcctttaccatcaaacttcagaaggacagagctgacaatacagccagcgtgcaaggctatactaggtacatctacctataaacagtcactataccagcttggctgaaaagaatttaattttaaacatctgtgtttgaaacacttaacataataatatgttccatgactctaaaggaggtttacttttgtaaattgtgttgtacccaccatcctttaatcttatgaagaagaaatagaaagttcacaaataaatattctcttactttcataatgttcagacaatttaagagttctttaacgctaagcagtggtggcatgcagccttaatcctagcactcaggaagcaaaggcaggtgaatctctgagtcaatgatatcccctggtctacagaaagaattccaggacagccaagacaaatcctgactcattaaaacaataacaaacaaaacaaaacaaaacaaaatcctttacaataaagataagaaaaatggaaaatattcacagaaatataacaatattttatttttaaacatatttcaaaagtttcaactttcatgatcatattaagtctcatgatatagcccagcagtagtgaatgtgcacacacccaaagctctgcctccaatccccagaagggtgaggtgctggggagtaattaaagtatctaatgatgtacagagttttctctgtaggttgaccacagaaaggagtaactaccaatttacctttctatgccatctactgtagaataacataaaatttgaaaataaagtcccacataaagagatgtttataagaacaaagcagtgtttcccctaacatagcctagaactttttagtcaaatcaacacatatctatatctcggtgcccaacatgaaatggagtgtttggccatcaaagataacatccaggcattcaaaaatattccaaaatgtacagatactcttttgtatttatttcccctaaacaacttgaaagatttgtattcaacacatctatagactgcccactcctttgcccattctcccctcctctcctctctaaccccatgatctacaaattttcagtaaaggaaaggcttttcagtcatggaaaatataaaaaatgtgaacagccaggaagggagctcccaaggaacacaagatgtgctcctagcacctgggctggacagctcaaaactgcctccaaatcaaggggccaggggctttgggggtccttgaacacttttattcctgtacacacacatgcacacacacacaattaaaaataaaatactttctaaggaaaaaaaaaagaatgagaagccattgttagtagagtaactgctctccatgtcctcattggtaactcagaaacaactgaaaatctgccatgctgttatcatttacccttcaacttcctataaaatgacacagagcttgaagagcctcactggggttgtagcccacagtagagtgatggcctagcgtgcctcaggatccaggatcaactccagttccacagaaaaagatcaaagaacttcaatagtctcaggctaagtctgggaagatgcctcaacaggtgaagatgctcactgcccagcatggtcgtctgctctgattccttggaactactacatggtgaaaggagaaaacagagccctgaaaatccctgtatacacaccatggcacatgtgcgcacacacatattcacaaaataaagaaatgcaaatattaggaaaaataggggactggagagatggctcagcaattaagagtactttctgttcttctagaacacctaggttcagttcccagcacccacattgggcagctcaaagccacctgtaactctagcttcaaagcatccaacaccctcttctggccttcataggcacctgcattcacatggcatatacacacacacatacacacacacacacacacacacacacacacacacatgcagacacacacacataaacacacacaaaataaaaaaaataaaacaatgcttagaaaaagattcaaacagtttctattacaattctcatcaaacagaccaattgattggtttaattcctgacccccccccaaaaaaaatttagaaacatacaatataacccctcatcttattaagctgatcacatacagactgaaatagtaagaacaatgcatgcagctgatctacctcctcaatgtgtattctttcagggtcccaaactgaaagcaatgtattcattagacaggaattttagaattcccttctaagagcctttgctgtcttagcaaatctcatcatcaatgacctctctccattagggaaaaaagcacggggttgaattaggagaagaaaaatgtgttaaaccccttaaggctgcttttccaaattcttctaaatattttgctcttcttaaatactcctgacatgctcatacaaatccaagggccagcgatgctgcctggcctagaattttattgctgtaatctgtaaaacaggaaacaccaatgagactatggggtttaaaatgacttcagttcgcccgctaaaatgtataatgaaataaatatcttttaatagacctttgccatgaggggaaagggagatggtcagtaggtccagtgctggccaaaaaagaatacagacccaagttcagatcctcagaacacgtgtgaaaaataaggcatggtagtacgtgccggtaatccctgtcctggggaagcagaggtgggatgggtcccagcgccttgcagccagacagtctaacttagtggttctcaacaggttgtgatccctctgtgggtcaaacgactttcacagaggtgacctaagaccatagtgcatagcagacatttacattatgattcataacagtagcaaaattacatgaagtagcaataaaaatgattttatggttggtgggtcaccacaacgtgaggttgagaaccctgatctaggtgaattaggtaaattctggatccagtaaaagaccccagctccgaaaaaatagatagtggttgaagaagacactgaacattaactctgcatcacaaatatgtgcacacacaaaaatatataacatacatacacctctgtatctattacagacagacaagccctgataaaagggcttaaaaggaaagcagcatcctcctaacatattttgaagcaatttaatagtggtcaaccagctcaccctaacctgaactccacaaaatttgagaattcagaaaagaaatgtggactataaggaatgtgtggctggaggctttagacctcggatctgctttataaattaaagcctcattcacagatttaacacatcctagaacatgacagtaattacagaagcaacaagaatgctcagcctacagcccattccctcattctctgggctcttcccatgagtgacccttaacacaccatgatgagacacggacgcgccttctactctgatgtcttctgtgctgtctaaatgaaatcaagtcattcattcacagactatgcatttaaaatatcatacagaaatagtaggtatcatctaataatctgtaacatgcaatcttttcctagacaaggaactcccccaagcagagtcctttaatactgagcatactttcaaagaacaaaaagaagaaaaaaaaaaaaaggaaaacaccttgatatggaaagggtagccttgagaatgatccaaactgactgctgaaatgctgagtttgttgggtgtcagggcaatgagaaacacaaaactgtccctttcctgttttacttcctggaactccctaagcttatcttgaaagactgtgtgagatttagaggggcctgacactgccttaaaccctctctctagaggtgtgtttttggaaagaaatcaattcttaaagccttaagccttgggggtggagattcagcttactcacaggtagagggctcacctagaattcgcgtggccccaggaacctaggaacagcctctgatgctgaaggagaaagtttgccacgtgggaaatatcaagcacagtacacgtgttgcaaacataccagaacaaagactctggtgggaggggcagctccaccacgcttacaaatgcttccctccagattgttatgagccttgttttaatcaattgtgatagcacggaatagaaggaggttactcaggaagagagcagtggggtcactgactttttaaaatgactatcaagagattaaattgactcatgaagaaaaattcctatacaattggatccctcctgttactgttgctcttactaactaggaaatctcaaggcagagtatctgttttcatctacaaataatttgagatgtatggaaactgttttaaaaaactaaacctggacaacactgcagtgatctgtcagccttggcatgagttctgcttgtcaacaacagaaatatatccttacaagactcagtcatcatagatcagtctcattccaattcatttattctattagtttccccatattgtaagggattctttaaatccctcataaatttaaaaaaatcacaatacattttttttcgaaaattttgcaatactcacaaaagcttggaggctccgtcttggccatccaagccggtaattccatcactaggaaggaatatgcagatgagggtaagcttaaggccagactggaccacctaaagaggctctgtctaaaaatatacaaatattttccctgtcttgaaaaatcttaataaaatattttctgcctgagttagggtttctcttggtaacaccctggctagaactcactctgtagaccaggctggtcttgaactcacaaagatccacgtgcctctacctccaagtgctgggattaaaagtgtgttcgaccaaaaagaaataaataaataaaataaaatagggaacaatactgccagtaacaaacatcttgttccatttgtaaatagcaatattatttttctatatagctgatatataaaacatttttcatctttgttttacatttatctagtgtgtgtgtgtgtgtgtgtgtgtgtgtgagtgtgtgtgtatatgtgtacatttcacatcttttatcttaacatccctatataatgcctaccatataattaggagatctcagccacgaaactcacaacatcacgtctattactttaagtcaaaggttcatcttcaagaagcccaaggaattctcaaatgtttaagttgacagctaatatttatcatgaatttaaataggcaaaaatatgtaatttctagctgcaaggttttttctccttaaataataagaggatgacttctctgttccctaactgctgagacttctcctccctgtcagaccaaccaggcacatcacatttaaatctctggcaagagaaggcagacttgagttttctatttaaaaatcacactgagggctggtgagatggctcagtgggtaagagcacccaactgctcttccgaaggtcaggagttcaaatcccagcaaccacatggtggctcacaaccatccgtaacaagatctctcttctggagtgtctgaggacagctacagtgtacttgcatataatcaataaataaatctttaaaaaaaaaaaatcacactgatatatatcttcagaggaatatctcacttcagaatcctctatccgggataaataggtgggtaggtggatggaaggatagacggatgaatggataggtggatggatggataggtggatgggtgggtgactcagtgcatgaatgagtggacatgtgggaaaatgggtgggtgggtggatggatggatggatggacggacggacggacggacggacggatggatgagtaggtggatggttgggtagataggtggatggacagatcaaaatgtggatggaatggtgactgggtacaaagccttatccagggtgtaactgaattctgcttatactaagtgcctgggagaagtgaaccactacatgagttaggaatgctggaaggtacgctcttctttcagcaacaggaaaggtgacaatgaaaggtggataaacaaaaggaaagcacctaagatgcagccttgggcttaaccaggagagggttcatggccacagaagcctgaaagacttcagggtgtctccgttgttcccatctagaataaactgatgaatgatgaatatattccctagacatcccatattatcagttaaacagaaaacaattccttcagtctagatgctaaatccatgagggtcctgtcagccattagctagataggttctagccatctgatgccaattacaacatgaccccaaatcctattgcaaaaattgtgctgtctagagaaatgtcatattagtaacattatagaatttatggctttgttttggttttctttctttttttttttttttttgaagatgttagagatttaacatgaaacctcatcagatagtcaagaccaggacacatatcaagaagctgaatccccagccctgattgggtttggttttgtttattaaattggtttttagtgcattggtattatgaatgcttgtatttctgtgtgagggtgtcagacccctagaattgaagttatagccagctgtgagctgacatgtgggtgctaggaactgtacctgggtcctttgcaaaagtggccagtgtggtcagtgttctcaaccactcagccttctctccatccacccacaccagcccagtttttatactttttttaaaaagatttatttatttattttatatatatgtaaatacactgtagctgacttcagacaccacaaaagaagcatcagatctcatttcggatggttgtgagccaccatgtggttgctgggatttgaactcaggaccttcagaagagcagtcagtgctcttaaccgctgagtcatctctccagccccttttatactgttttttgtttgtttgtttgtttgtttttgttttgttttttgttttgagatagtgtctcactagttgtgcagactggtcttggatttacagtctaccataggctacgattctccagcctcagctgaagaagtagcaggaacgataaccctgcaccttagacctaccctgacatataaacttttaaaatctctactagccacacttaaaaagaaaaaaaaaaaaaaaagtaaagctcattttagtatacgtgctgtttccaggttcagttgttatttagcccactacatctaaaatgctatttcagcacatactcaatgctttactgtgcactgccatctaacaccattcatcatactaagactttgtgatccaatgtgtatttcatttccagcaccatctgaatctggatcagccacactgcaggtgccctgcacccaacaatgaagaaggtcagctcagctctagaatatctttgtattcactgtaactaaagccttggtgcccttcagaaggacagagagaaatggcttatcgctcctgctaactggcggcctgacagctaaggagcccagtgcggatattgactgtcttgtgaatgccaatgatggtggcaacattttatctaaaactttcctccattcaatccctagaagatggatggatactcatacacctccttgtcaggcacttggagctaatattgtcaaccaaaagaaacagaaaattttacagtgtaaatgattactttagcctaggtccttttatagaacttctgccccagtaaatgattaaacaaaagaaactttgcaatggctagtaacagtaaatggcagttagtttcatacctaatttatagaaaacactatacaaaagaccaaataatgacatttactgatcagcaggcagagagaaagacactaggcctgacttgggctttagaaacctcaaagctcaacctactctaacaaagccacaccccctcatccttcccaaaaggttccactaactggcaatcaatcactcaagcatttgaggctatggggagtatttccattcaaaccactataccgagtgtctactatgcatgattccaaaatcaagcatcattagcattttcaagaaggcagtggttttggacttgacagatagctcaagtaacgtacatgtgcagaaaggatgaggaactgagttcaactcccaaaacccacattaaaaagaatccaagcatggtgatacaggcttgggatcccagcatgagagagacagaggcaggttggaacttggggctgattggccagattgactggaaagctcaaggtctcagctcctaagtaatggcacccaggccatcctatggcttctctatgcatgtgctttggtagactgtgcacacacaaacacacacgcacaaaaagaaagcatgattattgttgacaaggaaggataagacaggaattgaaaacaataggcaattgtaactactatgttaggtagatatatattcagaattatataggaaagatatttcgtcattgttgtttgaggcatgtaaatggccagaaagagcatttataaaaaggtgaagagccgcaggcaagtcctaatgaatgcaaacagatgaaatgagagtggtataaggcatgtgctttcactgtgcaagcatgtgacatgattgaaggtgactttagtgaaatgggggcgggggcggtataggtataggtataggtataggtataggtataggtataggtataggtataggtataggtataggtataggtataggtataggtataggtataggtataggtatagatggattcagagccatccatgataaacctctgaaaggctgcagggctgaggagaaaaggaataagaaagggggatatggaagcaatagagaccaaacccttgaagaatagcttttcccttaaacattatatgtacgtatgactatacgatgcatgactgcaaaaccaagaaataaaataccactgtatttctaaagagattctaagaaattcttatactcatttgtgttaatttctatattttttcagtgttataagaaatcatactacagcatctcaagttgtctgtcctataaaaaagtgcattttcttctacctcccatttgacatgtaaggaagcagaaagattggtgaccaagacacaacttgcctggcaggtctgactgtctatgctgataggaattctaagaataaggcgccccatctgtatctgtaattacagacaggtaggcaggatcaagactggagggagatgcttaggtgtcagtagctaagaagaagggtcccctgcagaggtcaaaaggagagttagaagcaaatgaacctgactctgttttacagtgaagctcatatatttgttaaacagaaactcaccagattaaactgcttatatttctatctgattttccagtgggcattactttccagtctgttgatgtaactaggtataaaacaactgcagctatggaaaccatacatctccaagttgactcagtagagaaacactgagcaagagggggacaaaactacacagcttacaactttcagggggaaaaaaaccctcaagtaccaacagacaaaatgacaattataaagatagaaactataaataataatgataataataataataataataataataataatatacaagagaaatcacgaacaagtcatggaccaagactttaagcactttcagaaaagcaagacaaacctgagggaaagcaagacacatttgccatttgttcctgtgctttatttaatggcatgtcacctgctgcaaatgcgttcaaatttttaaatggtattcagaattttttttcttttctctaggtgaaggtttttatattgagccttaaattaaaaccaaatgaagaggggttggtaagatggcttggagggtaaagtcactttgtttgccagtctgatgacctgagtttcatccctggaaccttacagaggtggaaagacagactcctcaggcctccacaggttcaccacgtgaggagaagaatcactaaaaatgattattttcaagtaatttaaaataattaaaatttcaaagcagcaagtccactaaagtgcaatcttctgtccaagataaatatttctaagaagctgggaaagtgtcaggaaggacgctgtgtgcccttccagaagtcaagagaaaagatttctttcaatgaaccttcttgagaaattagcccagggagcacagacctctgcactttgaggtggcacaaaatgatatgtaaagtattcccatgagctaataaaacctttttttatttctggaaatgcctgataggtcggggcaaggacaagatgacacccatagtgcaggcaaactctgatcccacttcaaactcaaatctttccgctagagtgctgatattaatatattatccttgacatcactatcaaaaattatagttctcagggatctacctcagccgatatagtgcctacctaccatgtacgaagccctgggttcaatccccaacaccccataaatgtggtaagtctctaatcccagcacacagaagataagacaggaggattgttgcaagtaaagagactagcctgtgctacattataagaccctgtctcaaaaaactaaacaaataaattaaaaaaaaaattatagaggctggagatgtggctcagttgttaagagcagtggctgctcttccagaagacatgggttttattcccagcacccacaaggcagttcacagctatctataattccacctctagtggatccagtgccctcttctggtctccaaaggcactaggcattcacatggtacacagacacacaaggaggcacaacactggtgcacatggaagaaaattgtatacaccatcacagagaatggcaattttatttactggcttctgcatgaactagctctttctttttcttcccaacacatgcctcttgaaggcatcaaaaagttcagctgtagccagcggtggtgccgcataactttaaccccagcactcgggaggcagaggcaggcagatttctgagttcgaggccagcctggtctacaatgtgagttccaggacagccagggctataaagagaaaccctatctaaaaaaaaaaaaagttcagctctgtttcacagctgaagattaaaaagtaaggtggaaatttctggttgcttctgaaactccgctatgtcatatgatgctttgctgggtcagacaggtgaagggatattttgctgaagcagactcaggtgagagatgttttcctgaaacggacatgtgagaggatttgtgatgtttacaaaggatataaatatgaccgcagacaatgggaggagcctcttgagttgctaatctttgattgtcatggcttcatacgaaggaactctccaaagaacttcaagatactctagtggcttcttgcagcttcctcggactcctgccaattggtggagctctgaggtttcttcaggattgaactgctgttgctgaccctagagtggtgctcaactaatagctgacaaccaagactgaaagagccccaaagaactatttctaaattggtccacagaccccatttcctattaacctttctttccccaccaactctagtgagtggtgggctacaagggaggttgagccagttaagaacccttattaaagtaggtttttaaaaatctaagcctacaagaaggaccttcttttcatggttgctgtcttagtcagggtctctattcctgcacaaacatcatgaccaagaagcaagttggggaggaaaggatttattcagcttacacttccatactgctgttcatcaccaaggaagtcaggactggaactcaagcaggtcaggaagcaggagctgatgcagaggccatggagggatgttctttactggcttgcttcccctggcttgctcagcctgctcttttatagaacccaagactaccagtccagagatggcaccacccacaaggggcctttcccccttgatcactaattgaggaaatgccttacagttgggtctcatggaggcctttcctcaactgaagctcctttctctgtgctaactccagctgtgtcaagttgacagaaaactagccagtacagttgcctttctgaactatgtgaccttatagccagtaaccctatcaaatttccacttccaccttcttagactggagaagccttatcgttggatcgctcttaggagacaacaaatgtattctctctagggctggggtttccttcagaacactctcactgttaaatcatttaggcacgagagcaggacctcagtcagtcatccaggctcatagcaatgtggcttttcaaagagtggaaatgtccagtttccttcttcacttccttcctgatgagctgccaaggacgtgtgtccttctgctccaaagctatgcaacagccagtgcattctgggaacactataatctcttccttccttcctccatctcacagattgtgtcaactataattcataatgaaagattttttccttgtttgaatgagtgacccttaacaataagatctggatgtttaatcattcaatcgagatttagcagtttctgctggatgacagtgaaccaaccaccatgactctagggcttggacaaggggctgcccagcagactgggttacataatacaacccagtcgctaaagctcaaacaacaacggcaccagcaaactcaaaacagtgtaagaaataaaacacaggatctgaaacagactcttggactttataccctcatgctcacaaaaggtacttactattcatgagagcaaatggatcaaaccaacacaaaagttcttcaatagaattaattagcaagacatgaactattacagagtccttacaaacaatatcctatgagatatgttacacatggatgaacgcttgggtcattgtaacgagtttcatgttcctgtcacatgagcacagctgttctgtaaatccacgatcaaagcagtcacacacatagagataaaaatcgatactgtagcttccaggggctgaggggagaggtgagagagaaattaattgttcaatgatacagagtttaagctttgtaacattaaaaaagtttgggaaagatgattgtaattgttgcacattgcaatatgaatatacagttaaaactgtgaatattatatacatgctaccaaaattttatataatggtgaaaagcacaagcaattttcattgccatgtcagtgtgattagtcttaatttgccttttgtttctggttccttagacagaatcttactcagcagttcaagctaatctagaacccattatgtagccccataatgcccctagcacagccccctgagtaattgcattatagatgtgagacaccgctcagtgtgatctctgttcattgattgaataatataggtatttgtggcaggggtaatgtacgtgagtgcaggggaccagaggtgtcagatcccccagaactgggagttacaggaagttgcaagcaagtagatgttggtactaagaactgaactcaggccctgtgcaagagcaatacatgctcttaactgtgaagccatctctctggccaccgaagtgtaattttataggagactgcagggtgctctagtgcaaccattcctccacataacagtaaagagatgggctggtgagatggctcagtgggttagagcacccgactgctcttccgaaggtccagagttcaaatcccagcaaccacatggtggctaacaaccatccgtaacaagatctgactccctcttctggagtgtctgaagacagctacagtgtacttacatataataaataaataaattaaaaaaaaaaaaaaaaaaaaacaataaagagagtctttttgtttccaaccaaactttcaacctatctcttgtttcactttgagacagggtcttaccctatagcccaggctatccttgaacttatgatccttcttcctcaacctgtgctcaacaacagccaaggtttaatatgttccttaggaatattagcaccgggtaacctaaattttagaatcagaattggctttactgtgaaagaggaacatatctgttcaaggtcactgtagtgaatggggctggttaccaacatacacacacacaaaacctttccacctttttttttttccagacaggctttctctgttcctggctgtcttggaactcacttttgtagaccaggctggcctcaaactctgaaatccacctgcctctgcctcccaagtactgggattaaaggcacctttccaccttcttatttacaagataattctggggttttgtccctccagtaaggtgaatggctaagacacccacctgctcttacaaacagggatggctacacagcatttctggccaggcactgagcacactgagtggacaatccatgaaagctactatttccttgccgagagtgacagtgacctccttgctgttggttgcccttcccccttagtcaggtccccaagcaagtcaccagccctgacttttctatctataaagttgacttgagaaaaaaaattcctcttcacaaaacccagagaaactttcctactccccattaaattcagttataatgccactgaggtcaatctaagggaagaatttcaggaatactcctggagtacaagatgaaatgagaacactctccctctctaaaattgacattaataagaacgaaatgtaacaggccatgtgacattgattgaagaaataccgaaaagactggaaactgaaataatgagatgaattaattgattaggaagtcatgggctcgagccacaaatcgtgtgttctcatactaaaactaacatttactaacagtttacttgccagattctggtgtgttcacttcaaacccatccccaccttaccttcaatagcccttaacaaagaacccatattcctactttaagaattgggtttttaagggcttatttttatctaaatatttgtgggtgtgcttgtgtgcttgtttgtttctgtgtgagtatatgcacttatgtgtgcatggaagccaggagagttaccttggagttataatctgaacttccatccctcataacttcaaagcaaatgttcttaatgactgagccatcctgccaggttcagggactgtgtatttatttctttgtttaattattttagattaagtttattttatgtgtatgaatgttttgcctgtatgtatgtatgtatgtatgtatgtatgtatgtgcacaatgcgcatgcatggagcccaaggaggtcagaagagggcatccgatcccagggaactggagttatagatgattgtcagctaccacatgggtgctgagaactgaatcctgcaagagctgagccatttctccagccccaggaactgtgttttgatagtcttggatgcatgtaaaattggggccaaacccaaaatggtaaactcacttaaaatatagcgagactctttgctcttctatttctttctttccttttgccttccttcctttcttccttttttcttcctcctccctctcctcctcctccttcttctttttgataaggactgtatatttctccagcatgaactttgtaggctacaatgtatcacaataccaaaaggtggacaaacctgcatgctttaaactacctgctttgatattcctgctgtaaagaagggaaagaaaaaggccagtaaatggctacaagagtaaatgctactataatctgcatctacatgcacacaagggttaattataaataaaatctgtcatcatctgataaaggacaatgtactgcagattcccacgctctttgaacacctgtattagatgaagaatcttctttggggggggggggggcggagtttccagacagggtttctctgtgtagccctggctgtcctggaactcactctgtacactctgtagtccaggctggcctcgaactcagaaatccgcctgcctctgccgcccaagtgctagaattaaaggtgtgcaccaccacccggcatgaagaattttcttaaaatgcagattccttaaccctcaggcctgagttaggtggagcccagtcaagtagacatgtgcaaatcaggtctttgtgaatgcaccaagctgccacactgttaccccaaatgattagcgtacttgtcttcctaagccactccctgctgaaactgcttgggggacagtggatgtcactccttctcagactgggtgcagttaagtaagctattcagaggcatcagagagcagctttcctatggcacaatgttgctagtgtatcagctggcttggtggctccaaagtcgagagccaagtcttatactgtataacttcctccaccaaattttaaagattagtattatcatttcatttttgatttgcaaaattacctatactgtacaactaaccatatttatgaagatttacccaaacaaaatgaaaatgtaaactactttctctcccctgaaggaggaagtgaaatattgacatatttacacagctttctagacattcttgcccacttggtttttgttttgttttgttttgttttgttttgttttgtttttcacaaaaaatgaagacagatagcaaatataacctttatttaaaatatattatgaataaatttattattttagatgtattctttaatgatagcatttttaagcactattcatattttgtagcctggaaattaatgtatttatcacttgccctacctagctatttctcgtatgtgcacatacatgtgtgtgtgtgtgtgtgtgtgtgtgtgtgtgtgtgtgtgtagagagagagagagaaagagagagagtatgttttgtttttagcccagtttagattggaactcactgtgtagttcagaatggcctcagtctcatgggcgttcatcccttagttctgaaattacaggcaggagacaacggagccctgggaattcacacacaggtcctgtgcaagtgaaaacctcaggcatttttcccatcttatagtttgtgttgctgtcatgtgcatgtgtacataatacatttatgcatgtgttctcctgttaacctgtctgctatggctctattttgtacaactcatagagtctttagagtatggaagggttcatatatggaccaagcatcttcctgacactgccacagaaatacagcatagacttgtatcagcattaacacattgaatgaagactgatgttctctcaaatccactggtccaccttcactcattcaattattcctgcctggacctgtcagtatctgtaacagtggcttccttctcctcagcacagtctatcaatgcacacctccactgtaacctcctgggatgattagttttaattgtcaacttgacacaatctataatcacctgaaaaggcagtgtcaatgcgagattgcctagcttaggttggcctgaggactaatcaaggaattatcttgattatattaattgatgtcagaagacccacccaatgtgggcattactattccctagtctaggaccatgaactgtgtaaaagcacacaaaatgaactgagcataattatgcatgcttaaattccatcctccctgttctggctttcatggggtggcggtgggggggcacattttatcacagcaacaggagataaaacttatacatccatcatcctaagatattgtcgtttctttcctccaacctatagccaacaccatctctcactatttcctaaattctattctttctcctctcagactggctctctaaagagcagctggctgaacagtaaaatttctaaaaaccaaattaacacatttacaaggctacaaaccaattgaccaccctgccccatcttctcagggtgctctaagcgccggcctttgtgccacctgtaaagacccagcccttcctgccccagatatctacgcatgtgctgttctccttccctcgagtcttcacaccattctcaccctctctggacattctacatgccacaggcatgtgccagggtgggttggaaccccttcttctctagggggaatggagggaggggctgtgagagagggggacctggagaatagggggactgtgatggagatgtaaaataaattaatgaatgaacgaaaaaaggttttaggtgccattttatacctttcctcaaagcagattctagactcccccctcccccctcccaagcacttaaagcaccccgttttcttccctcttatacaccaatgcttacttatgttgataacattgaggtgagttcaggaggtcaagaaatatgtaatctggtcaacataaaagttgtagttcctgatacagattgccaatcgaaaattactgaatgggcttatttagtgtgttctgtaagtctcaatgaactacatttaccaaaatttcatatcaactgttaatatgtacacttcaaaggaaaaaaaaaagagcatgaaccagttatacacattacgtcttcatacttgtgcaaataattcgagtcacaaacatcaagatgacctgctgactctctttgccatcccatccattcacgtgtttgaagatcctttctcattattgactaagataaaaatctgacttctagcaacattccaagcaaggaaatcaggtataaaaatagtccctgaaggcaagcgagaaaagcagctcaaagcccattagaggaggacatcgaccctgattgatctaagtaggaacatctcattccgttgctcagagatcgcatgactcatcggctcccattccaaagcccagtggttataaatgcagggaggatcctgattcatgcgaagagtattctgtgatgaagaaatcagaggccagttagtgggagaaccaagaactactactaataagggcaagccaaaacagcactggatggtggtgccctgcctctccagcttccaggaacagctatgcttgctgtaaccagagatgtgtggctccagggagtagatgctgtgggctatggggccacacacaggcagaagccccacaattaccagaccaatacaaccacccagaacagaaaccgtccatacctcctgtgatgaaaaaaacacagaaaccacccttacctccaacttcccacactacagacaccaaaatccaagagtgttgcacaaacctctttcagcttaaaaagatatttaagggggaaaaaacaacaacaacaacaacaacaacaacttatgtttacaagccaagttataaaattagaaggctagactgctttgactgcttttactttggtaaattcttcagaaaaataaatttatttatttatttatttatttattatttggggtttggagacagggtatcccagagcccggggtggctcatatgcagctgagggtgaccttgaactcctgatccaccccattgccttcaccacttcagtcctgttatcactccactgtggtaccagacacagctaaaagtggaaatcttttttttttttaaagtggaatcttaatcaaagagttgaaccaaggcaactacagttgtatacaaagctctctaacagctgaattcccagtgtttgctgaaatgacttattctgaacactacaatttaaaaaaaaaaaatgctatattctgaacacaatcacctgtctcaaaaaattcaaagcagaatgagaccagagagcaaagcaacaaccatttgtaagtctcgtataagtaaacacaatttgaatactaatctccccattaaacctacagtaaatccctcaaagcgtggccaccttacctggagaaagaaagcatgacctcaagctatcaggccaaaggtggtgactttcagaaattattctgtgccctgaccagaagagaggtgtcccgggcagccaccagacacagaggaagagtggaggaaacatgccaccttgcttccctctatgtgagtgaaacacactgtgtgccacccctccccccatagcaagtcacacaccagccaggttgatcgcctactggggcatacagagtcagagccacagttctactgaaggtcaaagggaaataagaagagtcagaggccagcaaaaaaaccacagagtgtatagacacacagaaatcaaagacaaatctaaccaggttgcatagccaaacaaagatctcagagggtcaccatgatgtctagctactaggagactgtgacataatcttggtactgctaatgatgaagttagaatatccttcaaagccaacttacaaagggggaagttatgaaccagattaatttcagattcatagcgtactccataagtaaatagtctaatattatttaccaacaatatttattaacactacactttacatgagcacaaacacttcttaaacctgaaaattatgaaatgcccccaagtctcatctgtgaatggttcagacaggagcacagggcttcaagatacatcaacactttttgcagagggtacaaccactgatctacatcaccaagaactgatgtctgtctgaaatgcatgttatgtacctggtaagagaccccaggtgtggttatcagtgtacctcactcccgcaagtctcacaccacaacccctctcccaaagggaagcatgcataagttctatgacgtcagatgaattccacgggactatcccaactttttgaactgccccatctaataaatcaaaccaaagagagcaaaaaagaaaaagatctctacatggaatatgacctgcaaagaagtcctttatcttacttaaatagtaagaagttgcagaatgtacagatgggaaaaacacattagccaacaataattcagcagcatctcatctcatctcatctcgtctcatctcatctcatctcatctcatctcatcatctcaggactcgctcataaatgcagacttttaaaaacacacacacaggcagctggagagatggctcagtggttaagagcactcactgctctttctgaggtcctgagttcaattcccagcaaccacatggtggctcacaaccatctgtaatgcgatccaatgccctcttctggtgtgtctgaagacagcaacagtatatttatatacgttaagtagataattctttaaacatacacacacacacacacagaggcgttaacgtgctagtgtttctgtacattcaacaaagttgtgccataattaccactcgtgtcagacatgttatttcattattcctaaaagaacctccccccacccatcccaccccccgcctccatactcatgagctgtcatccctggattccctgccctacctgtcccctgagaacatcaacactaatctcctttctatccctgtgcacttgcccagtagagagacgtcatcccatagagtgtgatgatgtgtggctgcttctgcaggcttcttccacctagcagtattctttcaacaaccatgcatagcatggccctcgccaggacctcatgtctccttgtgagcaaactctgtgccatcttttattgattatattgatttattggcagttcatcagctgccaggccaattttagtagtttctactactactactactactactactactactactactactactactactacttatgatgggtagctgtttcaggcatctgtgtattattttcgaggtggccttagggtttcttctcctttaaatgcataactcatacagaaattgctgttatgtggtaacttgacacctaactaactctcttaggagctgacagaaaactccaagagcatagtgcatttccaccagcagggtaagcctaacacttctcagccttttcaagtcctgttctctgccacgtttaggggttgtttgtttgtttttcaatcacacccaccctagtatgtacaaagtggaatccctgtggtttgaatttcgatgtccataatgctactgatcaccttttcctgggccaactggccatctgtgtatcttccttagagagacagctattcctttgcccactccacagttgtgtttgcttgcgttgtgcctgtggctgtccaataaatctttatatattgcattctagactttaatcagatgtaatgtgcaagtgtttgtttttctacacaatgtcttttcatttagattgtcttcttttactccttacaacaatcaagaggtgcagctgacaagaggtgcagcatacacctcagtccaggtcctcagcttccatcacgagtggaagacacagtcagtcctcccaatctgagacttccacatcttcagaatcaaccagctgcatgtccaaagtggtcagaaaatcttgtgtctgactgaatatgtacaagcactctttcttgtccttcctccctaaacaaatatttgcatagcattcacattgcagtgggctatacaagtgatatgcgcagggtttatcgacaaatatgatccagcttcccacagacaacatgagcagcctcagaagagaaagagggctcctggaagcgggatacgggacactgacggatagtaaactgtcccagcctgcccttcttccatagtggagcaatagaagtaataaaacaaggaggattcaaaagtccttacttagaaagaaaccatattactgaagccgtgcctagaaataccagagggccagtctcctggctcttctcttgaggaagaagagattaaaaccaagtgcatttagccttagaaggcaaaacttggcctctacgtggcctctgttcttttcaattgtaggaaacttgctgttttggttgttgagttatgtcgttgaaacaaaaggcctcagaatacaagtggtatttttgctgagagtcaaacattgcacagagtcacagtgggtgttctgggaggcgaagcctgatttcttagtcaacactcaccccttcttttaaatgtctgcctcccccagtcccacccaggcactcactggggcgagagaacaaagaggcctcagcaactcagaggtcacaggagctccctctgagtccagcctccagctacactgcacagcagagctcatccgtaagccctttgactctggctgtaacattacgctcactctgcccaaatcagcaaagtacaaaggtgctagggatacggatggatagacttgaaatgcacttgtagccccttcagatattcaattatggtgtatctcagcagaaaaaaaataaaattaattagatttaatcattgaaatcatttttataacatgagctagatgtggtagctcctgtttttttataatcctaataagtgaaggcggagtcgagagaatctggaattcaaggttttcccctcagcagacagttcaagaccagcctagactgcttgaagcgtcaacccccaccaccaaaaaaaaaagaaaaaaacaaacaaacaaacaaacaaaaaaaatcttcaaaggttttaaaaagaatatattcaaactactggtactgtgttaaaaaattttttttaggtaaggcaaaaagataaaacaaaaaagacaaaatgaaaacaaaaacccttataaaaccatagaagtaatacagtattataggtagtatttctgaaggcagtggatgtacttgcccagcacacacaaagctctggggtctatctccagcaccaaacaggatgggtttggggacgcgggtgcgggtggtacaagcctgtaagcccaaaactctccaggaagaaacaagacgataagaagttcaaggccttcccccaagtcaggagcaagcctgagcttccagagatcaaatctaaaaagaaggtggagggagagggagaggcaacatagacaccaactacatgggacattacaagccgtgctctaagtcaccactgggtcctcgaacctctcagttgtgaaaggccaaactagaaattaaaaaataaatcaagccgggcgtggtggtgcccgcctttaatcccagcacttgggaggcagaggcaggcggatttctgagtttgaggccagcctggtctacagagtgagttccaggacagccagggctatacagagaaaccctgtctcagaaaaaaaaacaaaaaacaaaagaaagaaagaaaaaagaaacaaacaaacaaacaaacaaaaacaaaaaaagtaaataaatcaaatacctaagacggcaaacccagagcgaccccttcaaaatcaggcaagcagccctgggtcttctttgggaccctgctcagtgattctttgcctgacacagaaataattttatcgttggttaaatatactatttgtaggaattaatgttgatgcttctttttccataaaacaccatgcaaagcctttcctatgtcaagaaaaggaagcatattacgggggccttttcattcttacctctcctcctggctttggcccaacaaataagttattttcttgaaggaaatattttccttgaaaaacagaagctgggaggatttatccatttgaacataaaagatttaggtacctgaaatagggcattatcacactgccaggatacctatctgtctaccggatactgtacttccagaaacccgagtcttccagaaatatgtgttttccaaaaagcattcaaaatatcaggattctaaattttaggatagtacattctaatcttctctgtatcgttccaattttagtatatgtgctgccgaagcgagcacaggatagtacattctaaactaattaaactatttaacaatgtgttatctctgatgacgggggggggtgggtaaagaaaattgttttctccacagaatttaattcatatctataaaactaacaaaaagtcagacatggtggtgcatacctttaatcccagcacacgggaggagaggcaagctgatctctctgagttcgaggccagctggtcttcaaacactcacaggacaggcagggctataacatacagaaaccctgtcttgaaaaaacaaacaaacaaaccaaaaaaacaaaaaaaaaacaaacaactaacaaaaaagtggcagaccaaagtgattattatgtctgagaggtattttcagaacaaatctctggttcacagatgctctcatcttaaacatgtatgttgacttcctgtggtgccatgaacaggtatattcatattttcaatgttgtccacaagccctgctattttaattttatcaaggttttgattgacagggtagacttttcaaagagaaagactctctctgtggttctggctggcctataaatcagtatatagcctgagctgacctcaaaaatgtagcaatcttcctgcctcagccttccaagtgctgaaattacaggtgtacaccaccatgcctggctgaaccacatatcactttaagacaccattttctttttttatattcatatggcgataataccatctgagttattgggtcagaaggaaattgtaatacacataaaatctgtaccctctgccacaagaaagacaatttaccgaaaatacatttgcgagaatggagagatggctcatggttaagagcagtggctgctcatgcagaggacccaggttctgatcccatcccacatgacagctcacaaccatatgaactccagttccaggaaatccaatgtcttggcctctgcaggcactgtgtatatatggtacacaggcacacatatactcaggaaaacattcatacacataaaataaacataaattaatctttaaaatgtgttttaagtgaatccattccagagatgagattcccactaagcatacggttcatttttttaatgcttgctatctaacctctgaacttctgcacttcccctgaatttggaatcacttgagttccactgtttgcttagctgttcacttgttttcttcccaaacactcttgaacactgtcggatgctctcagagccaacagcactgagagaaagctactgagtcacagccactgtaacgtgtagcttcagaagatagtagactaagtagatggcaaggacgttctctggtttctgtcacagtagagttaataacccacatctataatgtgtgcagatgccagcatcctgctgtccctaatgttaaaacaacttgagatggtccttcccttcccccatcaccagacaaacagacatcctgatacacacaaaaacttttttgctttttgtttttcgagacagggtttctctgtatagccctggctgccctggaactcactttgtagaccaggctggcctcgaactcagaaatccgcctgcctctgcctcccgagtgctgggattaaaggagtgtgccaccacgcccagcatacacaaaaacttttaagaacaactctctgtgctgttgttttaaaatagtagcagcagcagcaacaacaacaaattgattgctaaaaaggcatgctgacactaaacccagacatacaggacaaaatgaggaatgagcgtccatcttaaattctttgtgcttacattcttgtgacaaagaaatgatcagaagttcccactatggaagacaaaacaatataactacctggtccagtctccccacaaaagaccttcatgtactgatagtgagatcctgatggtgacagcatttcactacctgaagcatagtgtgagacatggagcagcatgtgttcatttgggacaatcagctgattttggaacagggcaatcattttggcttattccagtatgcccaacgtcaccacacggctctttatatgcataagaggaaggcaggagagaattggcgtcagcaatgtattagaacctgacctataactgctgcttttgagagtgccattgaccatgagccaaggaatgaagcagcctgttggacaggaaaaggaaacggactcatccctggtactttcaagaagggcagagcccaccaatatcttcattttatcccaatgagatccacaacagaaccccacaactgaaagattaaaggactgctaggctggaaaatcagcattaatgggacacgtctggcagcaagagggaactgacatgggaactgacacagccgccgccaccacacacacacacacacacacattcacacagagaggggggagggagagagagagagagagagagagagagagagagagagagagcaggtctcaagcagaagcagaaagcagcaggagccttcagagagccagagcttcgagcccagcagggcttaattacaagctctgggtctccacacataatccacaggatgattccataggtgcagacctggaagacagaaatgtgacagccgcacccctccaaggctccttttaccttttgctagaggacagaagggagaagcagatgtccatgggaagtgccttcagcaggtgttagctgggattcagcctagatggtgctgacccaacaggggggcacttcatcccttggtcacagtcacactctgaagagcagtgagctcagcctttggcagcagaatcttaaatattaaaatccatgcagggagctttgccatcactcattttaatcactcactggagccaggataatcatgcccagacttccagcctcaggagggaagtcctccccaacttccccttccagctctctcatgagcaccacgccatccacccacacccacacccacacatgcccctgaccttgaaattaattctgcacctctgaacgatgctcaaaacctgtggtctctgtgtcggccctaacaagtcagcccctcaaacctggagcattttccctcagatccggattcccatcaacccccacgtctttccttgaggccaacatgtaggtgccactgatggttcaactctgggcctcctatatgccacacaggctctggaagagtttgtttgaattcgagtttgagacatggccaaattttcccaggctggggttgaagtccctgaagcctcagacagcctgaattaagaatcaggctgactcggcctcctgaggagacaggattacacgtgtgtaccacttgtgcccaaatggtattagctttcacggagtctttaaagaaagcctctcccttagcagtgtagcactctgtccactcctttggaatttagacaggacttaattccttgcttactacaaatcactttacatgtccatgcctgcgtcatcagctctcctaatgagaccttaatccttagaggaagaaacagtcttatcccttcactcttccccatacttctttacacagagaaatgatgctgatgggtagagtccaacgaagactgcatctctacccgcctgaagtcacctctaccctacacctaagttcacacaagatgagttaggaaggccttggaagctgtctggtaagagactggagaccctgtggtaatgcaagcaaacagtaacttgacagagaaagggaagtcaccttgccaagtcaaccttcaaccaccttagttcgtacttgttcagagataatagactctccctctatcaacttcaaactaaatctgcccttgtcatttataattaaaactgctagctagatcttgtgataagaaaccctctatccaaacagacatgaagagatggacttcaaaaagatctaggcagtcccattctgccacggagtgctattagtagagaaaggacggaagtagctctttccttgacgtgcttttttttttaaagatttatttatttttattataagtacactgtagctgtcttcagacacaccagaagagggagtcagatctcattatggatggttgtgaaccaccatgtgattgctgggatttgaacttcggaccttcggaagagcagtcgggtgttcttacccactgagccatctcaccagcccccttgatgtgctttttaaagtatgtattaatatcaagggattggctcagtggctgaatgcttccctggaatacacaggccctaggcttgggcctcagcatttaaataaaattaaatggcaaagcaaatcacatggagaatggcatgtccctgtatcttctgctccatttctgaaattattgaggtgtgcacgcacatcagtctaccacaccttgccaaagtttagttcacacgggcaatatctcatgacctggaagtctatgctcaacaatgaagtcatttggctttctatcccacccagttattaatctcaaaaaacaaagggcgaaatttcccttggaaactgtgtacctctgctggcccacatcctgtctgggttgtaaaggtcaccgagacccatgcaatggcctccactcttctgaaatcaccttccatattttgttggagaggaaacagaaaaagtacttaaatctatgacaaatgttcttggaaatttacaggcaaagaagagcagcagaggctgagaggaaaagaaggttgtaaggctgaggaggcccagcacttgcccttcctagtaggccttttgctgtctacatttgaatagaaggattctagcatccaatgaccacaccaggccttcttcagcattcctacataataataataataataataataataataagccatttattagctacattagcataactgtggtcatcagcacacctgtcagacacaacttgaaggaagaacattttaccttggttcatggttctgatggtttcagacaatcacgacagaactgaaagcccagacccagagacctacctgcaccagctatgcttggcctcccaagtgttcctcggcctcacaaagccacatcaccacctggacagcaatggtcaaaacatggaggtaggggctggggagggttccctacagatccaaagcacacagctaatttgtttactctttccaaagatgactttttagaaatcatcaccaatgatgagttgggttgggttttcttattgttgttgtagcttaatgaagtagatatttacaactgttttaggattgtttccacaatgattggtggtgatggtagctttaagaatctggcctgtgcttttaatttcttttaatatcagtgaggaagcagtggcataatggatgtgatcccaggaagtgccctgtgcctgcaatcaacacgcccatctttccttacagccctgcaaagcccctctcagcagccagaaatagaaccatctgctctttccccaactcctggatggttttcactcaagcacagccctctggactaagctcacaattaaaactaatattgtcctgcctactaagctattttaccccccaaggcatgaataattagctgaaaatgaaggacaaaattagaaaactctataaaggggtccctccccacttcctaatattagtcatgttctgtgtgagccaggccacaagggaaaactgtagtcactctgaaatcctgcaaggtccccaggacagtgtgagacagtgggttgagtgtcacttcaattgaggacactaaattccattctgccatgcattagaccggtcctgtagactagggggaaagttcttccttcttctctcatcagccacggtcatgagatgagctggctaacatgatactttggcttatcttacaaaggagatactaaggtgaagaatcaagtctttgtcatttctcttggaagtagcaccaggaaacacagaaaatatgaagatgtgataggaatcgtcctagtcagggttactattactataatggaacatcataaccaaaaacaaggtgagaagaaaaggtttattcgcttacacttccacatcatggtccattatcaaaggtgtaagggcaggaaacaaacagggcaggaacctggaggcaggagctgatacagaagccataaaggagtgctgcttcctgctttgttctccatggctttctccatctgatttcttatagaacccatgacccagcccagagatggcatcaccaacaatgggctcagtcctccctcatcaatcaccaattaagaaagtaccctataggtttgccggcagcccaagcttatagaagcatttactcaattgagggcccctgggttcaattcccagcaaccacatggcagctcacaactatctatatctctaataccaagggatcctggcctctcgtgacatggcatgtatgtagtacacagatgtgcatggaaataacaacatctacacacataaaaggtaaatattcttttttaaaaaacaaaaaacacataatacaaacaagatactgcatgaaaacaatatcatcaaacatactaaacttgactgagtctactgaagatcacttaacaatccatattaatagtttcagtgttgcatgtagcttttgctaccctgcctcagctccagaaatggactgcactaccagcacccccacccccccgagagtatttgatccatggatgaaaaacacagacacacacacacagacacacacacacacaaaaccacagacaaaagttgctcaagttcaactttcctcattggctcaattgctgggcattattaaactcccgtggctagtgtacgcttcccaatactcttagctcacaaccctaaatctgttttcaattttagctgctcagttgttagtccaagctcaagaatcccaaccttgtgcctgtagaaccagcctgtggccatcctgtccaatatctcacatgacagacgggtcaccttttgtccttccaaagcatgaccaaaaccctctctcttctccttgagtctgcctgcttgcctgcgggggcccagaagtcctgcctattccttatgcccagtaactggtccatggcatctttactgacagatcaggaaccaattgggggataggaccaatcagcaccatccctacaacctaaaattaaacttcttatcccaaaagtaggttcataggaagttattggaaataagtaactagaatccagaaaggaaccaatgacaatgaaagtaacaaaatccagaacaaggctgggcaaacttggggaggcagaggcaggcgaatgtctgagtttgaggccagcctgatctacagagggttccagaacagccagggctacaaagagaaaccctgtcttgaaaatccaaaccaaacaagaaaatacgtatctaattctctctcagcaatgcctatggttgggcagagtccacactgtcacatcaaactaagtgtggtgacacaggtctgtaatcccaacactagttagaggcgggaggatccgaggttcctgccatcttcaactaccaatgggtttgaggtcagcctgggtttaagaaaaaacaataacaagaagaacttcataatcaaccaatattagcaagtaagtatttactgagaaacacaacagagtcattcaaagcacagtaaggctgcccacgtttccacagaagggctgagatggaagatgctacatggggcattcatctcaccctctgctcccacacactgttctgtttcagtggattaaggactaaaaaaaacacattctgttaataggaaaatggctaccttagaaaacatagcagaaggactgcttaaacaatggaggtgtctgtttctggaaccctgaagagggcaggaaggctaagtataaaatgatgtttgtagacagtaagttattgggtttcaccaactccagcatagctgcacccacccagggcatatactacaaaatgaagtcacaaaaacaaaatgctgtgatcttactagattcccaaagcgcagattaacttaacaaataacagggatcaggagactaataacatatcatcatggggaaatgagggagatttggcaggaaccaaagtacaggctccaagcatgctgctgcgatcactcaaagcaggcagcaggtagctgaatggggtttgggagaaactggcctccaaattccacacctcctagtcctttcaggggtctcctcttcccacgggaaccaaagggacagtgcagagagcagcagtcaacctagagatctatatccctcttctgcagtgggagtctctaagaaaatttgaattcaaaatacacccctgcccccccccccacctctttaagataggctctcgcagcacacaggctagcctccaattcaaattctctatgtagccaaggatgacactgagtagctgatcctctggtgcaggcatgagctacctctcctgatgtgtgtgctactcgggattgaaggcagggtctcatggattacatactggacaacgctcagccaactcagccatatccctacaccaaaatgcaaccgcatcataaaagaatgaaaaacttatgtttatctttttaaacaagttctcaggttttctttaagttattctctgtctgtctgtctgtctgtctgtctcggtctccctctgtttctccctctctgcctgtcctctctctctctctctctctctcggtctctctttgtctctgtatgtgcacgtgtgtgcatgtgtgtgttgtctgcatgtgtgtgttgtgtgtatgtggctgtaccagccagagcacacaagtagaagtcagaggacagcttgcagtagttaactctcatcttcccaccatcagttccagagattaaactcaggtcagagggctgccacacagcaaatgcctctacctcctgagccacctcactggcctagaacctcatttttaacacatagtgacttaccgtctgatgtcccactaagctaaatgtttttaattgatcagaaataacaaatgaaaaaagacatcaaccatggcaaacatttatacagtactcactgtcagagagcctggctgctatgactgccttacattaggactaccaactgaatcatacgacaatgtctagagacatttatagggcactcaaaagttagcagggcagttattcatttttgagtgggcctcttttctggtcatttgctcttggatctgattggtcaagggctattccatacctattatttcgaatgatcctttctgtttgaggagattataagtaactcaaacgcatgtgtaataaaacctaaggtactagcaagtaattattttcattactgcaaagtaatgcagagattttagacataagtcagcctttaaaatagccttctccttcaccaggtcccagaaggctcatcagagactgactcccacgtcacaagttttcatctgttttgtcaatgtgtttacaaagtatgacatgtaaggattcaaaagctctgagcctgagcacactcaaaaacaattcaagtcaaaatgtgatatgttataaataatagctataaatattttttaaatcaataataactcttaaggaaacttgggatttctgataatgacttcatgattaatatactaatggtccatttgttttaaaaaatgtagcaatgatggtaagatattaactaagtagagaagggactgagtacactctcagaaccatctttacaattttcctgtaaatgtaaaaccttctaaaagaaaagtaaaagtgcagactagcaagatgtgcataaagttgtttgccatcaaacctgacactctgggtgcaatccccagagtctatatgttataaaaagagaactgatcccacaagttgtcctctggcctccatatccattcctagtcatatacatgcacaaacaaacacacatacacatcacactaaaaataatgtacaataagcaaataaatgagaggaggaaaaatattttaagagttaaaatacaaataatatgttttctcaaacataaacaaaagcaaaaactagccataatgtgtattaaattctcacatattgctgatctataaaacaaaacaataaagattagtgggctggaattcctcatatgacttcattcagatgtctggattccaccagcacgtaggcctgcatccatacaactctgagtcaattattgttcactggccaaaaaatccctaagccaacaaataacccaggaactgggatgggtctgaggaatcaagttagtaagaacagacaagacttaaactgagagcctaaaagaaggttctcagacacatagcagtagaagcaaaaaagatgttcccaggccctacatggcagagacagactagctttcaacagcacagatcagcagcatatctcataaaggcagtgttggggaatatatccagggatatctgaacttgatcccttgggaaagatgtagatcagagaggaaggaaactcatatttagaagtcagggaagaattcttggacaagatgtacttgatcacctgaatagagaattattctaaaagcagaataaactgtgaggacatacctggctttccaagcacctggctttccaagcagctagctgggagtatgattcagttgtccagcacttgctagcatacaagcaaccttggattcagccctcaggctcagagaaaccaggcatggtggcatgttgcaggttatttgatcacactgtgaaccccaaaattttgttatttactgtatgtatgtatatatacatatatatcctgtttctagtaatggtgtggctcagccattagcacacacctttaatcccaaacaatgaaagtaacgttagtttttagaaggaagcacccatgcttgtaagtggtgtctaattgagtggcagacaaagtgtcaaatcagagaaagatttgacagagtaggatatgctcaagtttcacaagaggaaagggaaatgacccgagggagcagcagcacagaaaaggagaaagaaggaggcagttttatcaggacagttgtacagagacaggttgcagaaagagaacaaactagacactgatgaagacagaatgagctagagaatgagaaggagccagaagattagaacatattgccaaagatagtatgaggccaggcagggccattcagaataggctgagagagaagccagattggaccagtcagttgaagaggagttttgagccagaacagctgagttgaatcagccagccagagctcagaaagaataagaaagggtgagcctctgcctcgggaggcagaggcaggcggatttttgagttcaaggccagtctggtctacaaagtgagttccaggacagccagggctatacagagaaaccctgtctcgcaaaaacaaaaacaaaaacaaacaaaaaaaaagggtgagcctattcagccgtaagtctcagtggctgaaaacactctaggcctagattagattgtatggagactagaagcttccagaactaggcctaggttagcagactgaggtgataagccaaggagaccagtcaacaattgcatcaggttaatacaagttacttttccagtggtaaacacctgtcatctcagccttcggatcagaaggtccaggttggtttgggctacaaagaaactcaagctttggaatgcctctcagtggctttcaagtgccagtcaaacagctggaagcccacagagcagatgagctcaactccagccacactcaggctggaaaaccagggctggggtggggggtggggggagttggtgttttggtaggacaaaatgtgaaaacattattttgaggttgaatgggtgttccaactcagaaaaatcaacctgcttccattaacttacagccatttccacaaacaagccttttcacatgctaattatttttccacttttagcctacttgaacagcaacatggtgccctcttgaccaggttgcttagcactgcagggtttttttttcctgtcctctgcaatctgcctgctggtgggcacatcagtactatcaggatgttgatgtcagtgacactcacacccactcactaccttttcacaggacggatctagacctcaaagccaacactcaagcatgagatgaggccctaccttaccatcactgatgagcctgctcctcttactcaggacaaacgcttatcactagctctgtgcactgtctgcaaagtgtatgctgtgaccctgggctacaaagcaaaacaatacaacaaaacctatttaaaactccccacacataggcagcagaagtgcagtttggtcttcatgtgggtctcaaacaactggagcatgggctatcctaaaagctgttgcctgggaactgaccatagaacaggaacccaccaaaagagatcccaaagacttgaggataaaacagtctagcccagggctggacagatatctcaaaggtcaaaagcacccgctgctcttccaaaagacctgagttccattcccagcacccaaatcaggcttcttataactacctgtaacttcagctgtggggggaatccaacacccttttctggcctctagagacatatggcaaagattcatttaaacatagacatatatacataaataaaataaatcttatctttaaaatacatatatttaaaacactgtaacaagtggtctggagagatggctcagctgttaagagcactgactgctctttcaaaggtcctaagttcaaatccctgcaaccacctggtggctcacaaccatccggaatgagatctgatgccctcttcaggggtatctgaagacaactacagtgtacttacctacactaaataaataaataaatttttaaagccttaaaaacaaacaaacaaacaaacaaaaaacactataatacttccacttggtcttaagaccaagaaaacagcaggcactcaatatgtgcttagcagatcatttctttgttttttgttgtttttttttttccccagagcatagcaacaggctagggatttttcatcataggaccccagaccagaactgctctctggcagggcatgcaaaaacaccctgactatacttttcctgttatacactagtgactcagagttagataataaatacacgtttttttttttcattctcacttgcatgctttcaacaagatcccattatttaatcctgacttgcctagacctcactgtgtccaccaggctggcctgaaacaatgcctccccctaccaagtgctggcatcacaagtgcacgcccaccatgatgcccagctgatgcatatttacagccatcttaactaattcagacaactagcagacactaccaggcatggctgagtctctctcttgagttatcacaaaaggggatcagcaaaaccacccagcagcgacaaacatcagaaaaggggtaaatgccatggaccaagcagaagctgaaagcatgcagatcagaaggcagcaagaaaacaggccaggtcagaagccaggagactaaccttggcactaagttctcaacaaggagcttgttgtaccaaccgagagaaaagggtcagagctggggcagtaagaggagctgctttgtggagggtcaggcaaatggctatctggcagtattttcactgatgatgatgatgtgcaaagctagctggaggaatctgtgctcggtgtctttcttcctagcaccttagggtcagcctcctgtagtatctgagcaacagcactcactgggcatccatcatgctcctagactacggtgacagcgctcctttagttggagaaataaacctctctgcagactaaataaagctttttgtacaagacaccagaaagcaactaggtcatgaggcagagaactagaggggcagctaggtgcccaggctctctgcttgccagcaaacagagatggagatcctttctgagcaaatgaaagtgaactctaaaaacagcaacaccacgttgggcaccacgcctcgatcacatctcccacacagctcgtgtctcctgtatggctgtgtagctcctgccatgcagagcatctacagttaaatgaacccagcctaaaattacaggctcagtgctcggacgtggaaaattcctaagggatctatctggattgaagaatagggacgtagcaacaaataataaatggcggtaagcacggtgccagattgaaacaaaagtctcatcttcctttaataaccacatgtactttcttctatatcaacttgaaagactccattatcataagtggtcctcgtttgttataatccttccctcaactgggcttagataagaaatttgtattttcacatgtctttacaaaacaaaatgagccttaccaacttcatcttgaagacactactaatcccagcacttgggagacagagacaggcggatttctgagtttgaggccagcctggtctacaaagtgagttccaggacagccagggctacacagagaaaccctgccggggggtgggggtgggaggtagaggcaccactaacattgaattttaagtgtatttgtgtgtatgagtatatgtaggttcatcggtgtgtgggtgccttttaaagccagaagaggctgttgggtctcagggaagaaagttatggatggttaagagccaccccatgtggggtcctatgcaagagcatcaagtagccttagcactgaggccgccctccagccacaggcttcactgcattcagtgccaagagaactgctatttagtttcaagtttcactccacagcctcctggccctgactgtaacaggctccacaatgtatggaccttaaagaattccgggcttaccatccatgtgaaattaattaccagtatatgaaaaatgtaataaaatattgagggtacctaaataatgactggtctcgtgtggtttaggatggcagctgtgtccacagccaccaaaaagagagggaaaatgtggggtctgagtccaaagacgtaaacctctatctcacagaccagcaaaaggatgtcaatcttttaagttagaggttaaccaccttaaaagtcaaacaaaattaaagcaagttattcaaactcccccgttttatgtaggaattggttttggaatcgctaagagtttcaaaatcagggatccacacaacagaagaaaacgggcaccagcataggaaaggatgattggaaggtttgtctcaagacacattggcacacacagggacacacacaggcacacacacacacaaatcctctcacccaccctctacggtggcagcgtaataataaaagcacacatgctctcacagcagcccagtacgctaagatgtgtaggccctgatattaatatttgtaattttcagttatttgtttgtggcttgtttttgctttgctttgatttaattgcatgctactaacacacaacgatttttatttgatacaaaaaggaacttttgtactttatatttttatactcatagcaaaagggttacacagaacacccaaggcagtaaccctggttatggggatgggaggaaagggggggaggggaggacattcttctgtcccatataattttgattctgtatagatttttgtttgaaggagtctgactccttaagattgttcaaagcattattaagaattaggtttgaagtgaaacatccgttaaaataaaatgttcctccaagatgagagtaatttcaccaaaatggccaccctggcccataatcccgtcacccccacctaccccccccccagttcgattattctgatttacacaaaaagcctgacctgtgttctttagccctagactagcatttcacctcacacaatggcagaactaggctatgactcatcttcctccaccaaacaatgcaagtcctggtgcagtgggaaaaaactacttagagttgccaggtcactgaactgttgagatgaaggtcaaagtgctgagacaggaatgggggagcactagacccagatcctatcaaattaccacacagtacctaacatcgatttccaacaagtgctgaacctgctaatgattgaaacaggaagcacctggtgccctctaagcacgggtcagagaaacggatgggaaaacattaaacagatccaggaccatgtccatgagcagccattcaagtgataccaaggaaaaatacacaggagatgaggaggtgagagcctgtagcttacatgtctttgggtacttttggtatttgatatgtctgatttgcttttcctagacactgatcagcagtccaagtccattatcaatccatttatgtcctaccggttacacaacttatgaatcataatgtaaatatctgtgttttccaatggtcttaggtgacccctgtgaaagggtcttatgatgcccaggggtctcaacccacaggttgagaaccattgctccagggtcttcttgatgacgattctctggtcaccttctgcctttcttctccccaaatcactggcattcttgtgcctttgtaattgataggctacctggtcttcagaaccaacttctcagttccctttagccagcagggttacagaggcacctcagggcctgcactatgctctcaagcctgagctccatcatggggtcaagcatctggcaagtcagacaacaatggcccaggcctcttacccagccccagattttagcccatgccccatagaggcaattttatactcttagcgcttcccagggtacagcctgtaccaccaggtagctacatgttaactaaaaggaattaaagaagacctcaacattcaagggaaatcaaacttgcaggctgccaacccaagcaccagaagaagccactagagtacaggggaacttcctgccaatgtttccaaatctccctccaaccttctctccctctccctttcttctccccctctccctctcccccttcctcccctctctcattcactcttaatctctgtaacacacacacacacacacacacacacacacacacacacacacacacacttcctggtgtaaatctaacttctaaagctcccaattttccttgcttcatcagaacattccagtgagtgagtcacccattccttaagatcactttcttgagcttctccctctcagctgtcaatctcagcatcacacaccacgccctgaacatcagcacacactggaagctaagtctttgcctgatcctacccatggaatccacttgctcgccccacagcacttcagacttctgcttcctcaggtggtgacctgggtatgggggagataatgccttcttatccatctagggtggaactaactgccagttcagttggcacaaaagtcatcgtctccacaggcccagccacactgctccatccaggacactccagagagctatggcaaagctacaaagtcactgtctcagttcagccacatcagagcctctggaaagagcctcaggatacaggtggctacaatagacagctggagtcttggatcgtctgctccatccatctaaaaaggaaatgccaatctaggcatggagtctcagcagccaataagagagtgggaagggtggcaagctaagcaggctctcccaaagttgttccctgagcaggggaaacctcaggcgcatcatctggtacttgactgtgtgttccatcaaaataccactttaaccactgattctattatctttacttctatcaagatcactgaagaaataacgcattacaaaactagaatgagcccagcttaatttaaaagaaaagatgctgaactcctatagaatttgggaccaggtaaacactggttttctatttttatgaaaataacatccctgaaatatttttattttttaaatgttatcttcacaaagtctctatagcagccagagcaaaggaaggagtactacctaaacagagcagaactcagccaggacagtttttaaactatctgaccttgtcatctagtaactttgtttactccggcccataattttcttctggttggtctctgactgcaaccacagcagctgctccagactctctgcagcaagacaaggtgtaggctgacatctggggcaggagaaaagagaagtccaccagacttaaagggatttcagaaaggtcacagtgccactgtgactacctctgttcagggagcgttcgtcacagccctgaaaggtctcatgattatatgttgggaccttagagctcctcagtaagaaaacaaagacaggggcaatgtagataattgcagcacacgaacaccccagagctgttggccaagaaagctcatctctaagaaaacacaagctggccctcttatttcggtagcatgcttataggatacacctagtgcagtgttcctatgttactacgaaccaaaatattgaaaggagggaagaattgcaatgaagagaagtgttttaaaaaaaaaaaaactacccttaattttattttgttttttgtttgtttggtttttttatggtttgttgttatctggtttggtttctgttcttttctagggaaagtattaactcaaagaacttacagcacatgaaaacacatctttaggatttttttttccctcagacagaccacagagccagcatatccatgaatccatctaagaatacatggatgtctgcaacgatcagaaaaactaagccactctggaaatggactttaattaggaaaaaggtcaggacaccaaccccctggaagctctgcctttccaaggacaaacctgtaagaaacagaagcccccagtttcccccactcaccccaatgtagtaaacagacaccccaacaatccaccaacagtgcaacgcttccttgtgctccttctcagctctgaactacatctgtacttcctagaatgttgccttcctagaaagatctgtcaacagtccacacctcagcatctgacttggtgcctcacaccgaaaatccagctcaccagaggtggagctggaagacctagaggtcaaggccagcctgggctacatcagtagcctgccacggaggaaaagtttctctttaagagtaaacagtcagggagctggagaatggctgctgtgtttgagagcactggttcaattccggggactcggacatcctcacacagacatacatacatacatacatacatacatacatacatacatgcatacatacatgctggcaaaacaccaatgcatgattaataaaaatgaaacaggagtaagcactcaatactgaaccagctgcctcgaataaagtggcaaaccttggacacaaaggcgttcaacagcttcagtccaaagaagaaaagcacctgatgtgtggccgctcttccgctccacagagacctagtctctggaggaacaggccacctctgcctgtcacagataagccctgctttcagccgcttcctgacttacacatcagacttatcgagagaaagtgaggctctgccaactcgaacaccctctgtccaaagcctcccttagcaactgcagtctggccactgacaaacttaccgggggatctcctgcaagcctggagaggcacctgcccaggcagatccaacctccactttttccaacgaaatgtggtggctgccaggctgctcatcacctacagtggctgagatgagggaaactgtgaaggaaatcaacacaaaagccgcccgcgaactgcacactgggatgtcctgttaggttgggttttgtttttttcttttttaaagtccctttgattttttcccacgagaggatctgactaaatctaactccacctcccctcagacaggaagttaaactccgcagtcagttaagaactcttgaggtacttttggtttttaatagtcacagcttagagcttttgaatgttccaaagcaactagagagatgctaacttttcttgtttgatggtgtctgacagcacacacacacacacacaccccactatgcatactcacaacagtgtttactttggtggtggtacacgcctttactcccacacaggaggcagaggcaggtggatctctgtgagttcaaggccagcctggtctacagtgtaagctccaagacagccagggctacatagagaaaccctgtctccaaaaaccacaaaggaaaagagaaagaaactgctacggtggaaaaaaacaataaccacacagactcatattttccagacttctgttttagatggttgttttgttctcttgacatcatttgcatatgtgttctccacacacgtgcaaaagagaaggaaaggtgtttgtactgccatgcctgcatccttagtatggatctaatagctttctttcctcctctgaaacagaatccgtacctagcacaaagattctcacagaatatgtaaccctaccagggtccacaggagttccaagtaaaaggaacctatctatgtagctcagaagaccatagacttgagactctggaaaaaacaactaagcactctgtcctctgatcctcatcctccaacggaataagatggggtgagacagtaaagaatcagaatggctccagtcatgtcacttagtcaaaacccagtttactgctataacccacgtagtaggaaatcgtaagtacacatgcagagcccaagtcaacagatatcagtgtgtttgcagactctgcagccaccccaccatcaatgctatagcctcccttcactcctgcagatagcagtcattcacaggcttccttgcccagcccaaggcagctactcccatctccctctggtctccagagattcactggttctagatacttcctataagtgaaatcagcagaatttgctgcgttgggtctggcttctttcacctagcatgtttgcaagcctctgcactgaagcggacgtcaatatctcatcgtgtgtggcagaatgatgctttcctgcgtggataaggcacgtcgcagccttcatccgttcacaggcaactgcattgggctcacctttggactattattaacttttcagctctaaatatccgcatgtaaattacgtcgatggacacattttcactcctcctggagataacataaatcccaggaggagagccacaaaggaattatataacactatgaatgtagtgaagaaccactgtgcacttttccaaactggctctaccacttaacattctccccagcagttccatgacgacactccatatccactgtccatcgtaaaccaaagcatctccgttcccataggcagagctaagtagccaaagcaacaagcaagaatggaagcctgaccccgcataatcccagagaaaagaggtacccatctacagcaggagccagcttcagaaagggaccagggaatcctggcatagttgtgtgggtctgcacttgctacagtttgtcttcttaaccagaagtagaccaaatgactgcaggctttggtaagttattatttgtaaatattcttcgggagaaaatcctccaaaaaagagcctttgtgacatttatggggcaagggcataagccaagtcaccccctgtgagggtcagggagacactcagggttggtcctagggcttgaactctggttgcctggcctggaagccagcatgcttacccactgagctgtcacacacaggttaaaggtaaccaagttcatatgcagacagtaactttaaattacctttccctatcaaaagtattgatatgggagaatacaatgactactcaaaaaaagagtccagggtgggtatgggggacctttgggatagcattgaaaatgtaaacgaggaaaagagtccaaatcaaaggtctgatagttctttcaaaccttagcatgtctgaacaaattcatgtaggatgatatcaattacctctttatgtaacattctactgtagaatttaacttttttaatcctccctcataaaaaccaaacagaacaaaatctatataaagtacagcaaagaaaatactgcaagaccatgtggtgttttgaactgtgcttggcccagggagtgccactattaggaagtatagccttgttggagtaggtgtggccttgttgaaggaaatgtgtcactgtaggggtgggtaatgagaccctcttcctaacgacatgggagccagtcttctcctagcagccttcagatgaagatgtagaactctcagctcctcctgcaccatgcctgcctagatgctgccatgcttcccgccttgatggtaatggactaaacctctgaatctgtaagccagccccaattaaatgttgtccttggtcatggtttttcttcacagcagtaaaaccctaagataggacataagttcaaaagaaaatagcacttggagctggagaggtggctcagtggttaggaggcctaactgctcttggggaggaaccaagtgcagttactggcaaccacatagcagctcacaaccacgaaaactctacttccaagggagcaaacaccctttcctggccttcacaaacactgaatgcatacaggcaaaataatcatcatagaaaataagaataattattttacccagaaagagaaattataaacaacaaaaacagaaaggcccttttctgttttccaacgcaaggcctcatgtcttacaacctgtattaataatatgaatcatacatcttttaaatttttccatgtcccaaggctgctgcactacgcaatccattgttttagttatttcttggcacatggctgattttgaaagtgaccattgaactttcatatgtccaagagaactttccactgtgggaaattttctaaaacaatctcactgagctaaatagaaatgacatcaaagctcgaaagcaaagaagccacacatcggcccatttagccaccaccctggcttctctgcaggaccgatgaaagatggagcaacctttgggcaaagcgctggggctacccctaacccctgagaatgggaaaaaatgacgtgaccatcagttctctagggttatctgaaggaactcctaaaaacctctcatgacaggctctttcccaaaaactcttcgggcctgtgggaacctgttcctcacagatctgttcttctgataggttacacggtggcctcggtcctagctcatgtgaaaccaataggccatttctgtcagaattatctgtccagggtatgcacactctcattcatctggtgttgagacagctgtaatcacatttggtacataccactaactctattatagccccgaagcaactggctgtgagactaggtctcttctcaccagcagggaaagaaaggaatggcgtggaaagagaataaagaacaaataaacagctgaaacacacgcagcacagcaaagcaggggagagaaggaaagacattcagatacccatccgctatggaagaaacacagccagcatatcacacacacacacacatgcataaatatataaatataaacacaggcatgtgtacatacacctatatgcaaacacacacacaaatatatacacatatgtaaacatatacacaaatataaaagcacacaaactttcaagcccaggtcagctgactgagccacagaaggtacacagtctccttatcctgctatggggaaaccctcttggctttgaacatcatattatgactgtcagtccaaactaatgaacctacactcttaacagtgccaagcaccaggtaaaagccagtgccaagccacaccccaacaccagggtgaccaagtgggagggccttggcgctcctccatcagactcagcacagcactgtccttggctgccagctcttctttactgcccttcagcggaagccatagctttgcttttcattcatgtcaagaaaagaaagaggtccggtacggtacgctgtgtccttctgactctgaaatagcgcctgacttcacctgcggatttctaagaccagcgaacgccctgccctgctaacgggcaatctctacttaacagcagtgggtataagactgttctctgatagccttctcacctctttataatagcctgcctcgaaatagaaagtgatgagcacttttgtttcatgtccttataaactgtcttgaaatgaccttacacccattaaaataagttgtaaaaatggcacacaaaattttcatgtcacctcccataatgtgagccttttacataaccacggaataatgatcctgacagggagttaacgttgataacaatggtgcaaacaagtctacagatctggtgcagacttcccattctgtcctgtttctggcccatgcttccatcagagatcacacatatgaatgaagaagaatccataaacagtgctctatctatgtctgtgctctgcttcgcttcatgctgatgagctggtcgttactaaccctgagtgtgccaggctagacattcagccctcctcatttctgctatcacttcatgtgctgagtttcatagcccctgtccccacccagcctgaaacaaagtgttgccaattaaacccctgccatgagagaagagaaatcatatatcagaaaacacaggttacatcaaaaaaaaaaaaatcaaaaagaagcaagacccaaggcatctccctggaacgaaacccaatgccttctgcagcagacatgcttaggggtggtgaacagaatcagagaagactgaaagaagcccacagaccaggtttggtttccctcccaggtcaagtccaggttaaacttcaaatgagtgataaggaaaatccctttccttatatccggagcttcctttggatatcatagctgcagaagacggatcccaagtctgtactcgtgaaccccacagcctcaccaagcccccacactcccttctcacatctttgttcatctggtggctcagagcactctacctacaaagctagggccttgggcatgcggggcaagtgctttatccacgagccacatgatcagccttccctctcatgttctcatcagagtgacattacttgggatgcaattctcctgagtatctgaaaggggttggttccaagcctgcctgcagatatcaaaacccagagggtcaggtcccttatgtaagatgctgtaacaatcccacccgctgacaatctttacattatctgtaaattactcatactaactatcataatataagcagtctgtctcatttaaggaataatattatgaaaaaaaagtctgtacatatacagtagaaaggcaatttttccccaaaatttttgatccacaactagctgaattcacttatatagaaaccctaagaaacaatagttcctcacaaaacattctaggatttctttaattcattcatgtctcactatgaaattctatcttggcttttaatcacattaaagatcattagcaaaaatcctacgttagggtgaaaagaactcttcacgcgatgctgacaacatatgttgagaatgttcatattattgctgatatgattcaacaacaaaaagtcaacgccaggaaaaactcttgtaaaaataagcaaagccaaaaaaagcaaaggcaaggatggtatttcatgggtggagtaatttcacatcagactattttcccaaagtaacaaagatataaataaaatctaaagtcatgtcttcactaccatattagtatacaatggaactgaaggacattatcattcacaaaaccaagttacagagagtcaagtctacagcacacgtggaaaggtaagatccccaactgcacagaggctgagaaatgtgcccccgacacactcaccatgtgcttgaaggatcacctgtttttgcaacggcgagggcggtaacttggaataaggaagggaagggaattcctaagagtcaagcttgaggttaaaatgactcctttcctcacaatcaggaaagcatcatggaggtatacagaggagaaacacaacacatcacagctcttggtgaggaggaggggaaagcaggaatcatagctttggaaccctgggaagaagctggggttgtaagccaacgaggctctctcttctctcatgacagggtgcacacatcacagtaggaagcagctaaatctgaaggccggagttgctttctggtgtaagtggccagtgctttcacgaatcaagtagtagctcacagggctctgcggaagaacagaacaacactccaggatgcccggtgaggcaacctcttagcagcagcaagatgggcctgtcagagacttaggagaaaccagcatagtcaactgcttagagcaggagtccttcagatagccactcccactaccagcacctaccctgatggcaggaaagaaggccattgcctgggcgattcctggaaggaaggacagttacttaaccaagaccgcaaatgataaacaaaacacaaaacactgaaagacaaagaagaaagtagaaacactatttggtttggtttggtttttcaagacaagagtttctctgtgtagtggtagctgacctggaactcactctgtagaccagggtagcctcgaactcagagacccacctgcctctttgcaccaccaccgcctcaatttagaaatactatttttaaaaaataaaaggacatgtgattttctgaatcatctacatgttttgttttgttctttgtttttgtttggtttagtttagagggttttttttttttttcaaagatttgttgttgttgctgttgttgttttcaattgggtatgtgggtggaaggttatatgtatgtgagtaagatctccacagagaccagggctgtcagatcccagtggagctgagtgacaggcagttgtgagctgttcaacacgggtgctgggaactaaacccaagtcctctgaaaatcacttacatacatgctctgggctgctgagccatcatacctccaaccctagcttgggatttttgagaccctgaggactacactatagtcaaatttagcaatcctcctgccttgacctccgaagtgcggagattacagtcatgtgccagcatatctgaagttacatgttctgtcttttagaaatctgtaagcatcctgcatattgtagagcgaggggcagtaagtggcttttcttatgaacatttgttgggattgtgagaaaaacctgaccagtttctagagagttctagaatgctcaagctttatggcaaggcgtgaagaagatatccaagagtttttcttttattatcctcgataacaaaacccaacgggaaacctgaccaaatgatgcccaccagcctatgggttcaaatagggttgctcagaacactaccccactgtcacctgccactgcctgtctccccactgactctctgcagctaaacatactaatttccccagttcctaactactggcacccgctcacattgcctgtgcaaatactgaagtctgcctcaaagacccagccctatcagctgccccgtccaaaaggcaactctatccctgcttacaaaccggcttccatgggcaccatccactacagtccaccaggcacagttgtctgcacgtcaaccctggccacaggactgtttctttccctgtgcaaatgtccccatgcaaatccgagggtgctctctcttcagaagatacggggattaacacatgtgagtcatcgaagagccagcctgcagctgctaacacagagacggtctcgtccaaacatggacactccacccactcggactcttgtgtgtcatcatttctctccactgagaatgagataagcatctatttatgacagttagggccagaactgaggggaaagtgaaaaaaacccaggtaataactagacagggtcatccctgggaaaggaaccagaggtatttgccatctggtagtgtgtgtgtgtgtgtgtgtctgtgtgtgtgtgtctgtgtgtgtgtgtctgtgtgtgtgtgtgtacacctgcctgcgtctctgtgtctgtcttctatgtatgtgaatttgtgtctgcatttatgtctctgtatgtgtgtgtgtgtttgtctatctgtgtctatctgtcagtttctctgtgtatgtctgtctgtatacatgatagagtatgtgtctgcctatatatgtctatgtatgtgtgtccgtgtgtgtctgtctctgtgtgtgtctctgtctgtctctttgtatatgtgtgcatgtgtgtcttgtgtgttgtctgtgtgtctgtttatatatgtgtgtgtgcatctgtgtgtctcatgtgtctgtctgtctgtctatctgtgtatctgtgtgtgtgtgtgtgtgtgtgtgtgtgtgtgtgtgtgtgtgtgtgttttcctgggtgcaggtgcataaagcccagaggttaattaacctcaagtatcttcccagatcactgtccactttgtttttgtgagaaagggcccttgctggaattcatctaagctagctggccaggaagcccagggatgctcccgtctctgcctcctctgccctgagattacaaatgtgtgttagcacactcagactttttcaaataatttccggtaattaaattcaagacctgaccctggcaagcactttactgactgactattgtcccagaccatgcccttgcagtttctaacacaatgtggaagagtcacaagaaagtgtccaaatgagggacagaaaggacaagtgttagttctcgattcagtatctccaaatcaggacactcagcaacaagttcccagtatccaggtgatgtgggctgctcattcgaccaataggtttggagaggaaagaggattgctctcttctgtgcaccacagccctgaaagagctggttcccaggccagccaagggactcagtctgcaggccacaggtatcatggcacctgctgtgtccctactgcaaggagcagctcaagtcctgggaccgagtagccagaggctgcaaaaggaacaaggaaaggcagtggctgagaaaaagaggttgtaacgagctctgctaaaggagaagcacagagctggcctgtgatgagagtgatcatcagcatgaagagaaaggcagaatagagaaagaagatcagagggcagggttagcaaggagaaaacacagagattcaaagaagaaacgagagacaggcctgcaggcccagggcagcccctccagcaagcgagacattccccaagcttgccagtctgtaccctcgccagtaaagtcttctcccctggggaatatctgtgagtaaggctgtctggccaacaaagtataaatacagtaagtataacaaagttgattctgaaattaagaatattgggctcagatcacttccagctggatgccaatccaatggcaagctacagcaacgaatgctccggctcagtccttagcatataagtcaggtggtgcccagattgagggatggctggccttcactgttcattgacactgactgccactgatgcccatggccctcttacaggttacgctgtgtcaggactctgactcccacttgaaagatgaggtatgtaaggtttcatgacagcaaggagaacagccaacttaagtgttcttttcttcctttgtggcccagcctggtaccgctccattctgccggatcatttgccctcgaaggcagctccctggctccaaaggcactgactggactcacaggaagcccagagagtccaaagctatttttatgaaagtaaatgatactatacaatacttcctttcctcactcacggccacggccaaaaaccatttgatgccaagaggaaatagacgttcctcaaagcactacaagtccaggtgtcaggtggcagcagctgccagagccagtgccacccctgacctccagcacaaacactagctgtggactgtcatgacagaaggacaatgacggacagccttactacccctgaatgcatttaagtcacagacctgagggacccgtgatgttggccagctcttctccaagtcactccctgaaacccacaaccccacccccactcccacccccaccccacccccaccccaccccacaatggcacctgaaagagcagagaggaaagagaaaccaaagaaagtgactctaggctgtgggtttcatattcaagaagagtcagcaacaggtgtgtgcctctggggaaatatgaagtctctgagcgcctttcacctcagcagggcagaaagccaagcccagaagcctgacattaggcaatgatgtcagaagtggaaagtgccaccgtcctccagccacaccaaacagaccacaatttaagttctcccgtgtagccgcctgaaacacacttgaccgtaaaacagccgagacactagtcatccgtcgtacaccatctttaaggcctagcgactggtgcatgctgggtaagcaatccatagctacctagtgagtgagagtgaacgggagtgaagcaagaggggagcagaaaatgctctccacaataaagagagccaaagctcacccccaaagtaggacataaatgcagtttttaaaggacatgagcaggagggagttgggacgtgaggctaatcttggaggggtcaggatgaggaacaagatgaaaatagattgaatgaaattctcaaacaatgaataaaaacattttaagtttctggtttgttttttgtttgtttttccattctcccaaaaagagaacacaaattgggaagcagagacagagggcaagagacatgcctgggaacatagcctccccagagatagccagcttgccatcccttgagctaacagtgtagggcaaccgtcatcagttagaagccaagtgacaagtcacggtcattaagccatctacttctagttctcagaaacgaagctatttggtaagatctaaaagctgtcagagaagctgttgtggcagggcaggtctgcagtcccagtacttgggatgtgagggggcagaaaggtcacagaaggaggccaccctacgagctcagtgaacattgactgggctatacagaaaatcctgttttcaaaaaacaaatacaaagaaaaaataacaacaacaaaatccgacagaaggagtggagaaatgttatgatggtattgacccctcaaatgtctgttactgggataaagaaatgctatcagcgtgagaacatcactactaattatgcaatgtaaagggtttaattgggttaaattataatgatattaattataggaatacagtaccgtcgttggagcacggacaagaataagtcagcaagcaacaccaccaggccatgtcagaaaactaaataaaatgtgggaagcaactataaaatattataaagtatgattgtatctaaagaatctcaccatgtcattttctttgaaactgttaatttaccttctgtttataacaattattccaaagagtgtttctctgttccttgcatttttggattttttttttttaacacttaactttttcaaatagttccagaataaccccactgaggtcacacccaaaggtcctgaataagatcgtagtgaaagtccttggtgcctacatcagaacagccccaaatttcaacgaataaagagtgctttttgcccggccgggcagtggtggcgcacacctttaatcccagcacctgggaggcagaggcaggcagatctctaagtaagagggcagcatggtctacaaagtgagttccaggacagccaaggctacccagagaaaccctgtctcgaaaaaaacaacaacaagaagacaaacaaacaaacaaaaaagagtgcttttgcttcttgaacgacatctcttgactccttcatccccaggatctgtcaccctaaggacagacactctccaaagcgcagagaacaagacctggaaggccaagaagcctgcattaaacaacacgagaagcaactttggcaggtgccctgaagcaaaccagcaggcatgaggcagaggattacagggcacagtccaccctggagggagtcaggacggagatggagagggagcgagctaagggctaaggaccagcttaacaggcaggagaggcagaccacagagcgcactaaccatggagccaaaagcccacccatgtagctggatggagcagtaggcagagagaacaggcacatcgcagactggaaaccatcacctcaccacgtgattcatgggcacacacacttaactgaagatgtgtcctcacccatatgttcccataggcctagtgttcttctagactttcctctgatatctcaaacatccactgtttgggaaacattctttgcctgatcttccccgaggcaggagagttccaatctgtgtcccatgtgactgctgggcccaacctagtataaacctcagaacttgtctcttaccgtactacacagccacacagggctgcagttccaagcttgtgagaagggatctctcagtatttatgttttcaagaagcccatcacaaaatttagcaccagcagagattaaacaaatggcaagtcactaagaaaacaaaccaggaagaaatagacaagctaagtggatacaggggtgggtgtttattcaagacacccttgttggagacttggtgccaccgttaatcccctttacccactgaagatttgggggttgggaggagctagtgaggttcttacccaaacaggattctcatagaacagacacttctgggcaaatccctccacacattcaacagataggcagtaagtggcagaccagaaggacaagaagtctggtcaaccgagtgaatcgtggttccaagatgtcttttaataagtgacgtcaaatccttcctttaaaactgacacatttcaaaataaaactacaggaaccggccatccaaaaaccaaatcatttagaatctgtcataccaatttttgtctgactgaacagtgcctccgtttacttcctatgaacaaaaatatccaagcaaccgcaccattccgggcgagtctcctttacctgcctgtgactctctgctggctccatctgtggccacagatgtctcttccatttctccctggcacagcatgccctccaaatgtggtttcagttcccaagccagcagtacatgctctgtggagtcacgaagatgcacgtccccctcggctgaagggagacctggctttgatgcagtcaaattgaaaaacagggccaaagtatatgggagtgaggagagatgagtccctccccaactgcccagaccagattggttacattcttgcctctgagcagagcccaatcctggtgtgtacctcagagcctctgccaggcattgagtctgtcgccttaaaaacccagacttgtgacagcccttatctgcctaggccagcaaagcacaaatttctacaaacaccacagggctaatggttcagcaaacagaaaggcaagcacacacacacacacacacacacacacacacacacacacacacacccgtacctcgcctctcctgccaccttaggcttccctgttcattcaagccaaagacaaaactgactgagcaaagacattaaggaacttcagaccagcaaatacttttctcccagtttctaactcttgcaagagagtttcttacaaattttgcaatctggtctctctcggttttgcaattaaatgtttagcccctggtaatccatatgaatccctaaagcttttagggatctatccgcgaaagtactaaataatacctgctctctgactgaaaggtaaaggactcctgtcccatcaggatgacaaatattcttgaataaaatgccaagtgcagcctggccaacctcagcacacagccttgagcacactttgcccacaattgctggctttgtcctggctctgcacaaacctggcaagcatgaagtcctggagctgatgattcttttaaggagctcttccttaacttccacagcctatctcagccgcctcgtgattcccctcagaacactgcagaatatgtatcaactgggcagctaagcaactatctgtatattatgatattaggggtttttttttttgtttttttttttgtttgttttttttttccgactactgggcacattcaagagtccagacaccatggtggtggaagtctgttgctctgcctgctacagattgtgcagtaggggacagtcacagaacagtcaactccatgtcaaacagtcacctctgctataaaggttttctgaaacactcggccgctattgccaggctctgagcaaaccagcatgcacttgatattatcatctttatcctgggttatgacctggcaggaagcccatgaattcagacaggaagaagaaagtggtattcccgctaacttctaacaggaatctgtatccccttccactgggatgtgaggtcataaaacacactacagtctttgcagggatcaccaacagaaaccacacacagagctgagaggtagtaggtagttcagtaggtaagatgcttaccatcacagctaataaaacctcagttagattcctagagcccacatgatggaaggagaaaaccaactcctgcaagtcgtcctctgacacacacacacacacacacacacacacacacacacacacgtttaaaaaaccactccacattttcacattaccttacagctagatcaagtactttgaaaaataccatttggtttaggaaaccatcacggtaagagccattagagtgtgctgttcaaggcactagccaggcacaaatatcatttagctccgcctttttaattattttggtaaatatgtggcaatataattagcttcttttacagcatatgaattttaccttgtgcatttaaactcatctatctggcttcacccaactgctaaaatggtccaacggggaagaaagggattcgaggaaagacaaagaaaaacctaaccagcaccaagaacaacacactggatgcaccaagaaacatttgcattttgttcccagtaggctgacatattttcactcactctgaaaagcaaaaagattctcctaagaacgattcactactgagccttgaagcccatgggtttggagtgggttaccaggcacacatacacatcatctgttcccctcgctcccccaggcattctctgcctcagcaatgcgaatggagatctgcccttccttattagctgtagccactcagtgcgcatctgtacacgtcgaccaggaccagcagaggtgtgtcagcagcacctgaccaggggctgctttagccagctgatggacaagaaagagtttcaatgtgaatacagagtcctaggtggagtttgagaaccatgggacaccttccagcttgtggactcacacgggaaagattcccaaaacaccccaaaatcaaattctgccatgtctcgctggcgaccaataaaccctggatgcataatctaggctgttctaaatgaatgctcactgcaacacttctgtaacacagagttaacacaggttctagccagttttactcagtacctcccgttctgcccaataactctctccatcgctcaggctaaagggaaaataacaaaagggaaacaacccctgcatcctcccgcccccccccccctttcctcacccagtatccttgtatctctgatgcttaaactcctagggtagtgcagtcagcttgctacaggtgtctcactccttcctaatatttataattccacctcaagccgcacactacagacagaacccaaagtcctctgaaaaatgcaaacatcccagtatgctcatctgaggatgtattaaactgatgaaggctcccgttttctggtacaaaaccaccagaccactgtctacagaaggtgaaatgtgggggaaataaagcgagagtttttgaggtccaggtgaccagagacccagaaagaatggagagtctggggttttaactatctaaatagaacaacttaatcttaggaaaatcataccttcctcctgaacagacatacctcagtgacaaagtgaagagactggtacatctatctgagcatcttatatctctacaatgtcaccgtgttctgtgatgatacgacatagcagaggagagagactagtggtcccttcaatcatcttaatctctacatgtcgtgtggggctgagccaacacattcacccacagctgtgtctgacctaggagaggaattgtcaacatggtgtgtacaacagaagatactggaaagagactatttcaaaactctcaggccctagcattactaggaaactgaataccacaagtgaaatatctaatgggaaaacattctactatcactagcaatgcaaaaagcaatgagtaaggaccgtatgagaagagaaacttgcctcaaaaaaacccacatgtatagtgtgaccaggagcatgatttctaaagccatggagtctatcgggcctcatagaaggaatataaaaatgttagggcaatcgcagtcatatactgctattagtaaaagacactataggggaaacattgaggggactgtattgctcacagagctgtatgtgactgccaaaaaagtggaatcatgttgtatttcctatactcccaatatagtttcgcaataaattatttctaaagtaaacctctcattttgcatttctcaattctaacataaacacataaagtgtgtttttaaattgtgtgtgtgtgtgtgtgtgtgtgtgtgtgatatgcacaatgcacacacataaatgtgttatgggtgcaagtgcccacatacagtatgcagaggccagagcaggacatcagtatttctctctattactctcttcaccgttttctcttgagatagactttctaaatgtttggctaaactagtgtgccagtgagctctcaggatctgcccatctccatttctcattggtaggacaagagcatccatgcctagcttttgaaccggggatttgaactccgatgctgatgtttgcaaggcaagcacttgtacccaaggggccatctctccaaaccatagtttggttttagccaaataggactaaaacccaagctagcagcaagtctgtcctagtcacagccttcataactccatttctagaggatggaagtcctcttctggactctatggtactgcattggtgtgttggacatataggcaagtatatgcatacatacacacacacacacacacacacacacacacacataaaataaggtggaaaacaatttaggaagaacatccaatgtcaatctcaggtcttcacaggcaagagtacatactgcatgtgtgcacatgtacacacacgctcactcacacacatgcgtatacaagaaaaacaaaatgaatgataaataaatgactctaagttttgctttcttcggtttatactttggaataacctaaaatagtctcatctccacacgcctggacttgagttgtatttgatgacagtagccaagaaaggaatggttcccgtgaccccagaggtcaaaggatggaccttttgccttttctttcttgtctgtttgtttggggttttttttgtttatttatagttgttttgtttttatttatttgtttgtttggcacatggcttcactctgtaccccagactggcctcactcttactggtaatcctcctgcctcagcatcctaagagatgagattacaccacactagacaatactatgaataacatcactgttaactgttgttttctacatggtgacagccaataggaaatttgattgcaatatttacaaaatgactccacagagagagaaattctagttacaatatgaaatggtctttcctccattttcgaatgtgaggcttgactttggccattattcttcaatacggccaaattactgctgttattttagtacctcagtacagtcactttatgtgcataaaatcctaaattgctttaaagttttatcaaaatgttaatacaattgatccctggaaatgtaagccaagaaactcaaatacttactaaatatgtccttactatatacttactaaataatctgtaactgttctgaaaataataataataacaataataataataatagtagtagtagtagtagaaaagcaaccaaagccagttctataaccccagtgcttggctgtctgtgacaccccagcccagagaacagcatgtttatgatttttgcaagcagtggttatttcctgtcttagacatgaatggtttcttagacactttaaagggaaaacttttgggccagaaagaactttgaagctggacactagcattccaccacaaaccctgtgatcctgaggctatcacagagtggaaacttcccaagctgctttctctggctgtaacaaaatcgcaacaataatttaagggaaggaagatctatctgggccccttgttttaggtttctgttcttagcctactagttcgcatcctttggggcctatggatggtgaggtagggcacacggggaataccaacgctgctcacggtacccaggaagcaaaaatcagagaggaaggaatcccagcatcaccttcaaagacagttcctctatctccctgacctaacagcttccttcctctggggctcacccccaaatctccattatctaacagtgccacaggctgacgatgggccttttggcatatagcccttcgagggccttgtggaactgaaccataactatggtaaaaattaaacaaacactgaagcgtgtacaagcatgtttaatatgatgagccaaaggcaatgaaaatgatcagctgcttccaggcagctgcgccctccagcctttgccagagccagcctactagactcagtcagcaccttccccagcccatctccattcgtgtcaaaggcacaataaagtccaataagtaaggcaccaatgaaacagaaggtgttggaaaaatacttgatagtctcaagaatgccaggtcaggtaaatggtcccagcactcaatgatgcatgtgctaattcaatagcaaccacctgcaagccgcttacaccacgttgaagctggcaggactggagagtactggcaggcactaatttccttgttcagtatttccctccctaatcctacttagcagcaactgtcctggccacagagtaagccctctcttcctcgccctcttgtctcctcacctgctagagcatgaaatttcataagaacactacagtgtagacgactgaaactcaggcaccttctgacttatatacgaaataacttattataattaataatacaattgacattaatagccagttgctgtctctttagaacactctggcctgaaatttaagtccaactcctaaagatgccccattgttgcccatcaacagcctagagaaagtcaaaaatgatgtgaagaacagacagaaggggtggtgctcggttcaggtagtaaggcactaaccacacaggcctaacagcctaagcctgatcaccaaatcgtgtgtgaacaagccagattcagggcacacatctgtgatctcagcactccaacaactgagatgggaccgtaaagcagagtcacctggaccaaatgcaatatgcacatgcagaaaccctagcaaggtcaacaacagcatgtgtaagggagaaagacaccttgtgccataccctgagaagagtgaaattcacttaagttgcaaaaacaagagagagtagtaagaaagatttacttcggttgactagagttgaagaagtggctccctgccctgccctactctgccccatctatgaggttctggggggaaagagatcttttgtgtcaggagcttaaagcaaaactggtccactttggcaaacacagtttggaaaattgatgggcagtgtcaatcttgtaactaatcattttctttatttttctgcccagcaggacaagttgagacaaatttgcatcggaagtttaacaaggcaacagatagaacatcatctctaaatatagcaggcaagagttcagtagagccagctacggtcggcaaacacctttattcccagtcctctagaggagggagagccaagtaagggcagagccagtctggtctacattgtgagtcctaggacacagctacctcaggaaattcactctcaaaaacaacgtgtgtgtgtgtgtgtgtgtgtgtgtgtgtgtgtgtgtgtgtgtgtgagagagagagagagagagagagagagagtgtgtgtgtgtgtataaaatgcatacataacttttatatgtgatatgtgtgggtgtgttttgatagccttttgaccttaacttagtgacaagatacttatttcttttctctgtatttttgttgggttttctctcgttttcaaaatcatctctggatgaatttagaatgtgagtggcgataaactcaaaatctgagtaatttctagaaagaaaaacaactgtatcttccccacagaattaatgacaagtataaatgagacaaaagtctgggaaggttcatctcctacctagctctctacctccctcgacttttttaggaaatattttctccatttaaaatgaattttcctcacagtctaggtatttagcaagcaagcaatcagttcccatgttcctagctcttatgctgtaaataactgactgaagttttaaaagttaatatgtctccagacacttcccataggacattggctaagactcctagactcatgtattacataaagtaaaagattaacagattgtgtttaattttcaaagaaagtaatgtaaatgaaaacagcactaacaaagaaccccacagaccaatgtgcttacccttccaattgcctaggctttctctcaacacaggtacatagcccaactcagagttcactgtgattcaactacatgaagtcagtaagagccaccaagtaccatgtatatctaaagaggaaccaataatcttttcttttcttctccttcctcttcctcttctttctcttcctcctcctctttctcttcttcctcctttctcttccttcccctcttttttcttcctcctcctctttctcctcttctttctcttcttccgcttcattcttttttcttttaattaatactgggagatagaatccaaagctctgctggacagagctgtatttcactgagctacaaccacagtcccacagtggaatgctctttccactgcatgtatgtctgtgtgtgtgtcaggttgtctgcgtgtaatttgcagacatgtatgtgcctacacttgcccatgtcatacgtatgcagagcccaaagaagaacatcagaagtcttctttattcctttctactttcccttttgaaggagggtgtcccactgaaccttaaggcttgccatttttgctcccacgctccacctgttgggtccacctgttgccagtctccaatgctagggttacaggcacacaagttatcttgctttagtttctgatgctatgataaccatcacgtccagaagtcacttggagaggaaagggtttactccaccttacagtccatcccccagagaaggctaagcaggagcctgagcagaaaccatagaggaatactgcttacaggctcgctttctctggcttgatcaattggctttactgtgctgcctaaacccacctaccaagggatggcaatgtacacagtgggctgggccccaatacaccaattaacaatcaagaagatgtcctgcatcccaagaactagaaagatggtacagtggttaagagcacttgttgctcctacagaagactcaagtttggttcccatggcagatcatgaccatcagtaacttcagttactagtaatccacttctggacactgcatgcatgtggagtccttacatacatgcagagaaaacactcatacacataaaataaaaataaatcaatctttaaagaaagggggaaagttcaagagaaagagatagatagatagatagatagatagatagatagatagatagatagataaataccaacccacacagacatgcacacagaccaatttgatggatgctatcctcaatcaatattctttcttcccaggtatgtcagttaacaaccacgattagccatcacagagatcttgctcagcattgacgtgggtgtgggtaccaaacccaggtactccagcttttatgggaagcacttacgcagtgagccatctccccaggcccttcccttctccccccaacccctccctcacccctgcacagacttgagaaaaaaaaaaaactgaagaaaggactacctggggaaaacgtatcctgaatcaccttagctgcctcttccattaagatctgattaggccagcaataggaccagtttcaaaccatcatgagctcacagggctgtgttctcacctgtcaagtggcaatacaacagctgtgcctaagaccgtgggcgatccccagggctgtgccatccacaagtgttttctttccaggcaggttcctgctggtgccgcactgtctgaactcatgcacggcaggctggcccctgctggatggctttctccggtggcaggtaggactgacctcccactggcacaatggcataaacaaggacatgagaatgcccatggcactgtctctcctgcaaggctaccttgtccaaatgtctactgagagacaatggcctgacctaatattctctaaaacaaagcactgccaagcgggtgagcagattaacgcccatcgcctagtgagaacagaaatgtgaggttagagtttgccagccccagagggtgtcacaatctcaatcaagccaagccttctcttctacccacacccagccccaaaacacaagtcacccacttggccacattctcaccatagctgcccacactgctgtggagtccaccacagtgccctgaccgattgccctgtcaggcctcaaggagtaggcacaaggagaagccacaaggcaaaaagaggaagacggacagacaggccaaggacctggttcttgtcctgtttttcctccggaaacaagatcacagcagatagtgacaatcgaaggccctttcccgctatacttctacaaagtacgaagctgcctttctacaaagcaggcttactttctaaagtttctgacaagcagattagcaactttagataacaaagcaaaatgcagggagaatggctgaagtttagggactgtcctagtatgtgggagactctgggtttaagtcccaccactgaaagactaaggaatattgatttaaacataattgatttcacaaagcaagcatactgttttaccaagggaggctgggtaagccactaaccctcagaccccttatctggtttggggtttggtttggtttggtttggtttggtttggtttggtttggtttggttctgttttaagggaaaaggatagaatcacaacacaagcttactatcacccatagtcccagttccaagaattttgaaaaggaattaagggctggagagatggttcatcagataagagcactgactgctcttctgaaggtcctgagttcaattcccagcaaccacctgatggctcacaaccatctgtacacttacagaagaaaagcaattaatagtctataccatgccatggtcccaagttgaaagaggctccctggtcaaccaagtacattctataggttagagtctctctctctctctctctctctctctctctctctctctctctctcagtgtttgtttgtttgtttggtttgttttgttttttgtttttgtttttctagactgggtttctctatgtagccctggctgtccaggaactcactctgtagaccaggctggcctcgaactcagaaatccctcctgtctcttctgggattaaaggcgtgcgccaccccttcatcaacatcaaaggcttatcacaagcacattaaggcctggcctccctgagcacagcagtggctcaaccctgagacagcttagaagaagtatcctggtctcttccaagtcagtgaccagagtgagtgaatgggaggagccactgggatgctcagagagagaccatgggagccggaggggagccagacatgctgcaggatttcactggctcccaggtctggagccatcaggtacattcttatgccttgagtagcagcttttcatttctagacttttcaaagtgaatctagtgttcactcccagcactggctccctctggtctgggcaggctgccattgagtcacaagggccactcaaaagattttggtttttttgccttaagctgttgagaaccctaagctaaataagtgactattcactagcctccttccctgtcccttccctccctgtacctctattaaaatgacactcgatttatgctacacagttatgctactctggatggataagtaagtaatatgcatactataaatgactatgaatattaatattaatgaaatgagaatatcaggaaagtggctcaattggagaactcactggataatttttctttgtaagacaagaaagaatccttgccctaaaccctacatgtgagaggcccttctctctgaccccttcttcccctttctgacccatagcgatctcagaatctagcagacacacatacccaggcccaagcacagaaacccatgcatctccttctgcagtaccgacccaagttccgcaatctgcttaaatgagccctgtactcaccagccagggctggaccacaccaatgcttacacatgggtcagggccaatgtgtatttgttgttttgcttggtttttgttttgctttgttttgttctgttttagacaggtctaggtagccctggctgccctagaactcacagagatctacccgcatctgcctcccaaaggctgcgattaaaggtgcgcaccaccccagctttacagatggaagttgaagcaggtgagcagaggtgggttaggacagggctgcgccaccaagagaaggcaaagcctacgaactgactccagcttccctgtgctatgcttgggcacaggtctcagatgggctgtagttcaatcacgtctggctccctaacttgcaagtatatttgttattttccattctcttttttctttccatcaaaaatcctgcctcctgcaacccccagttataactgaacacttggcttgcatgccacagagcagattcctcaaccaccctcgcagatacatgaagctacgtgagttagctacagccagggcagccacctattcctgccagcctttaaaaagggaaatgacttctttctttctttttaagtttcccttcttccctcttcatggactatacaacatagacaagagtagaaggactagaaaacaggaaagaaccctggggctgaagagatagttcaatggttagagcacatactgttggttcttcagtaggacaggagttcagttcccaacacccatattggtgggctcataatcaacactaattccaggagcagcagatccaaccccctcttctgggcacaaatgtggttcacgtaaactcacataggcacacatacttacacataaacaaacaaacaaacaaataagtcagttattttttttaaaaaaaggaagaggggaccctgagtcccgagagaccctgctgagcatagcagtgcatgaaagctgaccaataagatgagaaaaattaatgttaaccttatctgagtcactgcattttgaagtttctttgccacacagtttaaaaatctatccacctagtgcatttgcacatggtctaaatcaaccagtttcaagttagacttagcaggcagcacagcaatgtcagacaacgctcaggatcacagctaagaacaaagcatcatgcctcctccagtaagaaggaaaggaaggggtggaggggagagaaaataaaaacatcatggaggaggggtactgtaagaagcagtcatgatggctaagatcaaaaattcaggtgacagcagatgctggcgaggatgtggagaaagaggaacactcctccattgttggtgggattgcaagcttgtacaaccactctggaaatcagtctggcggttcctcagaaaattggacatggtactaccgaaggatcccgcaatatctctcctgggcatatatccagaagatgttccaactagtaagaaagaaacatgctccactatgttcatagcagccttatttataatagccagaagctggaaagaacccagatgccattcaacagaggaatggatacaaaaaatgtggtacatttacacaatggagtactactcagctattaaaaaggatgaatttatgaaattcctaggcaaatggttggacctggagggcatcatcctgagtgaggtaacacaatcacaaaagaactcaaatgatatatactcactgataagtggatattagcccagaaacttagaatacccaagatataagttacaatttgcaaaacacgtgaaactcaagaagaatgaagaccaaagtgtagacactttgccccttcttagaattgggaacaaaacacccatggaaggagttacagagacaaagtttggagctgagacaagaggatggaccatctagagactgccttatccagggatccatcccataatcagcctccaatcgctaacaccattgcatacactagcaagattttgctgaaaggatcctgatatagctgtctcttgtgagactacaccggggcctagcaaacacataagtggatgctcacagtcagctattggatggatcacagggctcccaatggaggagctagagaaagtagccaaggagctaaagagatctgcaaccctataggtggaacaacattatgaactaaccagtacccccagagctcttgactctagctgcatatgtatcaaaagatggcctagtcggccatcactgcaaagagaggcccattggacttgcaaactttatatgccccagtacaggggaacgccagggccaaaaagtgggagtgggtgggtaggggagtgggggggagggtatggaggacttttgggatagcattggaaatataaatgaggaaaatacctaattaaaaaaaaaaaaaaaaaaaagaagcagtcatgatttcaaacatccttccagaaaactgtgtcagtaaataacagaagataaagataaaagaatttcatatgcaaatgagccagatcatccaaaatccatgaagtgagctgaaagtgcttagtctttctcagatgttcttctaagttaaaggcatcaaaaacaaacaggaggggcccagaatgacagcctctgcctgcaccccagtcctcagtactcccaccccagtcctcagtactctcaccccagtactcagtactcccaccccagtcctcagggagcaccagaaggaggagcttcatctaaaagcagcataaactgcatggcaaaaccctggctcaaagcaaacaacaacaaccgatccagatagagtggacatatttaagaaataaaagcacgggtttagaggtaaagcagctaaatgtctttgctttgtaagcatgaggacggaagttcaaatcacatgaaagccaggcgtagaggccaggctggcaagatgcctaagggaataagggactggacacctgatgatgtgcctgggaacccaaggttgaccctcagaacccacagaacaaactccgtgaagttgttctctgacctcacacgtgtgcacagcatcctaccaacacatgtgcatgcataagcaggggtgcactcgcacgcacacaggagcacacacacagacagaggcacacacatgagtaataaataaaaatttcaagttatttaataatccaggcatgcctatgtgtacctataacctcaacgctgagtgacagagacaggcagatcctaagaggtaggtgggtcagagagcctagcaaaacaggaagtgtttggttcactgaagagacccagtttcaaggcaacaggatgggagagaaagtgagaaacatcccaacatcatcgtccagcctcagcaagcaccaatgcgcacacacacacacacacacacacacactcgcatacatgcactgcacacacaaaagacacacatttagctgcacttcactctgcttcctgcccaaaaaggaagagtgtgtggctgccaccgtcacattctccagagttcacagggtcaagagatcctggaagtcacagcaggtcacacgatggctaggagtaaaggagaaaggcagagctaaagggactattccaaaaacagaggaagggaagctgcagaaattcacaaaggaagtaaaggaaaggacagcagaatacactagaaagagctgaacacgccctcagcaaagctgcttcctagcagtggaaaggggagcagaaaccacatggggggggggggctggacaagctgtcccacccctaggacaagcaagccctcagccctcacaagactcaaatccaactgggggcgggggggggggaggtgggaggctgggggggggtgggtcttggtgacggtgatccttccaggacaagtaatggtaataaatcccattttgttactttgactgccccgaagcgtcacagctggcaccatctccagagagaacctgttattaacagctgagctaccctggagacctgagaacacggagcaatttcaggtgagggagtttcaagttggtatcccatatctgcagagtgaggaatggtctggggatgtggtggcagagaacaggagagcccaattctgctgggctgtagggtgcggctggcagaaggctggcccatgtagggaagtggctaggaagagagggctcccacccttgatagacaggagcacatctcatcaactgagactaactctgaagtctgatagctctgagcctgaggtcacaaggtgggtagtctctagagcttactaacttccacacactgctgaagagcccaggaaccccaaaactgcagtgactgctacactccagcaacaggagccatctcttcagcagggagatttttactcacaggaagtcttcagagtatgaagtcatggggtgtctgaggacaggaactttcaccctgtgtcatgaccgagcctcagttcataccagtgaatgtctgtggtatatacaattggtgcctgatactggaggactgggctcagagtttccttttacgtgggaatagatgacatcgggcgacagagcagagcaaaaggaaagagctcaacaggaacgagaggagcccacacgagggcctgttgtggaaacaactgtcacatgtaaggaataatccgttgcattaatctggaatcatgatccactactgcagcctaaaaaaacagaaggaagactcagctcggcatttggatgacagatttgacttccatttcatgtttgtccaaagtgtgtgtttaatttaattttgctgtgaaatgtaatcactgataatatacaataaatgattccttgaaaaatctaaatgcacagaaaaaaaaaaaaaaaagacaaagttaggtcctctacatgtagacatagacccatggcagttgcttctctgcacacttgcaaaaatctggagacaactcttggctagaagtccagccacccagtgagtacaatctggggtcgtgggggagagtaaaaggacccactcagcacaaaggcatgggttcctacaaaagaaagctacggagctgaaggaagcaccagccaccagcaaacccttggccaccacacactcagcatcagcagaaaccaagagcaacagtcacaggctcagctggccacagcaacgccaccccacacatgatttacctctcttctttttccaatgttttgtcccgtttcttcccttttttatattcctctgtgccccacctgcagcagtattgcaacttgaccatattgggcttttttatttcttattcttacacccaaacaattttatatttgaaccttttcattactgggaaactttcttccttcttttttacttttagttattgtttcaaatatcttgctcctttctcttttccatcataatgtcccccactgttcttcatatttaggatacttgaagactccaccagagaactcctagaactaataaacacagccagtaaagtagcagagcataccaacatactcagtagctttggctatcccagtaacaaacttacacatacatacatacatacatacatacattcataaatggctagcagtgtttgaaaagcaatttttaaaactatctaagaatgcaaaattaatgactctgtcaataaaatatttgcttatacacttaagacccttagttttatcaccaaaagatggagatcaagggagggagggagggagaaaggaaggaaggagagaagaagaggagaaggaagagaggaaagccaggcattactaggtacatactcatgataccaggagactaacaacaccaggcagactggcagagatctccaaggcacactgaccaggtagcctactaggtgatatcctggccgccgagaggctttctctccaaaaacataggtaaatagcaccttaagaacaacagaggttgtcctctggctgcaacaaagtgaacacaccaaaagataaggcaagatgctcatgaattaattagcagaattaatgctgcaaaaatggctgtattagtgaaaccaatctccagatacaatgtaatccctatcaaagtttgagtaatattctctacataaccagaagaagcaatcagaaacttgcataaatgcacaaaagaccccaaatagccaaagtaatgctaaagtactgtgctggctgtatgacaatgcttggtctcagattacactgcagtgccatgtagtcataaagacagacacatataccatcagagcagaacagaaggcccaaaaccaaacccaacagccatagtcacctcatgatttacaaagctctcagaaacatgtggtggtgaaaagatagcatcttaagaattggctctgggagaactagaagtctacatgtgggagcgtgaaactaaacccctatcattctgaaccaatggtcaaagatgcatctagaagaaaaactggcatcattttactaactaggcctttatatgtttgtccttttaaaacagtgtctcactggctggtgtagaactcactacataaggacaggctggcctccaaatcacagagatccacctgccactacctcccaagtgctgatattaaaagcacgcatcatgtgggggatgaaggtagagggtggcacatgcctttaatcccagtacttgggaggcagaggtagcagatatctataagttcaaagccaaccttcgagttccaggacagccaaggctacacagggagatcctttctcttgaaaaaaaaaaaaaagtatgactggctaaagggcaatgttggcaacccactaatatccttccaatacactgactcagtcgtcattccatgcctggctattgaaaacagggttatgaagacattttcttcacatcaggaaaaaaaaaagaaaaaagattttgataccaaccctaccagagcctgatgcagcacaagtttcactaattaaaacataaataactaaaacctcaaccaggctgttaattagtaatttatgtctgattatttgccacttttagcaaaagggaaagatttgtcaacaaataaaaattcattatatgcaaaactgggtcaaacaagatcacaaattctgtccttcacactttgtgtcttctcaccttgtgtcatctgagcaatctagtgactgactggttctaggaaaacaagggccaaagtaagggggacttggagtgacagcaacgatgtgagccacagaactcccagctgcgtactaccatcggaatctccatcaggaatgatattagtaccgtgaacacagaaccctagttacacatcatgccttcctctctaaaacttaactcttagagcatagatctcctggaagaacataatcatagcccagagaggaggcccagtgactacgggtccacgacagcaagcgcgacaacctgagtgtgatccccagatccacaagtaggagagaatcaatacacaaaagttgccctctgacctccacatgtgagaatgaggcacatgtgtttgtacacagagagagacagagacagagaaaataaataaatacacatatatatatggtaaaactatattttacaaaaagaacatgtatcagaactgggaaatttttccaataaaatgcgcataagccaaagtattttttaaaaaaacaaaacaaaactatatattggttcagtcagatcccagcagctgctgtggcggctcagttcttcagtagccctttctgtcttcgtttctggaaacatggcctctggcgtggctgtctctgatcaaggtgttcaatgacatgaaagttcacaagtcctccaagccagaagaagtgaagaaacacaggaaggcagtgctctttttcctgagtgaggacaagaagaacatcatcccgggggagggcaaggtacgagatgcagggcagactgtggacgacccctacaccacttttgtcgagatgctgccgctacgcgctctatgatgcaacctatgagacctggtggtcatcttctgggcccctgagagtgcacccattaagaccaaaatgatctgtgccagctccaaggatgccatcaagaagaagaaggtaacaggaatcaagcatgaattacaagctaactgctacgaggaggcagtcaaagaccgcggcaccctggcagagaaactaggtggcagagccatcacttccctggaagacaaacctttgtgagccacctccagccccctgtgtcttcgtcagagtttctattcctgcacaaacatcatgatcaaaaagcaagttggggaggaaagggtttattcagcttacactttccacattgctgttcatcaccaaaggatgtcaggaactggaattcgagcaggtcaggaagcagaagctgatgcagaggccatggagggatgttactcactggcttgcttcccctggcttgctcagcttgatctcttatagaacccaagactaccagcccagggatggcaaccactcacaaggggacctcccaccttgatcactaattgagaaaatgccttacagctggatctcatggagacatttcccccaactgaagcccctttctctgtgctaactcaagttgacacagaaaaccagacagtgcaccaccctgcctggagcatctagcagcctcagatctgctcttgggtgtcacaggctatccctctatgtatggggtaggggaggcaggaggagacagagacagaaagctgtggtcaatatcaagtgtctgcctctgtcattctcaaacaaatagttctagacatggcttttattcctcccatagttcacaaatttggggtaggctgctggctggccattgagaatgccccaccacacccccagcactggggtcgcaaatacatgtgttactgtccctacagtgtcagggaccgactagggagctaaactcaagccctcacactaagtgagttacttcctaacctgagagtaactacattttacctgtgaaacagtgtcctatgacctagatcaatgacctacccaaatattaagcctcccaaaccactcactgtcccaccttccggtgtcttccatctttcttgttgttgttgttgttgttgtttgttttttgtttttcgagatagggtttctctgtgtagccctggctgtcctggaactcactttgtagtccaggctggcctcgaactctgaaatccacctgcctctgcctcccaagtgctgggattaaaggcgtgcaccaccaccgcctggcatcttccatctttcatattacctctctaatgctcactccacagccaacctaaaacctcagaaaatacgaaaggaataaaatattcaaaacatcgataaaagttttaatagtgccctttaattagtgcccatatcgtgtgagcctcactttgtacacatcaagctctcagaggccagaaggacatcagatctcctacatagacctggagttacagttatgaggcaccccttgtgtgtgctgggaattgaacttggatcctctgtaaaagcagtactatgttcttaactggcaaactaccactctctagctccctcaatgctatcactatatgctctataatttactagagaaaaccatcaagagtcctgtggtggtctgaatgactcccataggctcatgtaattgcatgcttagtctccagttagtggaactatttgggaaggattaggaggtgtggccctgttgaaggagacatgtcagtgggggagggctttaaaatttcaaaagcccaagtcattcccaattatttgtaggaaaaaaaatcaaaaacaacaaaaaaaagtaagctctcagctattgctgcagtactgtgcctgcccactgccacactccccagcaagaccggcacagactataaccctctaaagccctaaggctttcttctaagttgccacccttttcagggactgaaacctagcaagattgcaatgacaaaacacaatgtattttgccaaaccaaaaacacaggtatcagcagcacacaggcctaatcattacgagagctttgaaaggggctcctccagtctgcttcaaagttactgtggtggtggctcatgcagtgtacattcaagttagtccactggatgggcaactttggaagatggaactttccatccaacaagataggaacagcttcctccagtcaccaatcccaaatgctccccagcagagcacaaccaaaagcaggcatctgttagctgaataattatgacttcagcacatctcagctttattgactaaactccaatgacctttccactgcttaattattccctaaatgaaaggtattcttcaacatctgctctcgatttatttttaatttgcatttactccatcgtctctgctgaagctgaattcggtaacacaggatgacatcatctgcacagcatcaggctaaacacccccagtcttcaattaaagttgagctcaaaccgttttctgggctctcttgcctgcagattttacttgtcggagatgattatccccgcttcaaagtgaggttagtgttctttccttgctgtctttacaaagaacgcttggtctgcgttgcatgacgcctttctatgtctacactctacagtaaggcatcctctaaccctttgcagagacaacatggagatacaaagaccagaacacatccagagcttaactcagagctcactgcaagctaggctttgggggaaatggcctggaatcttccacactaattaaattcaggaacatcctctcatttctgagtcaatatttacattgtaaatttcaaaaagcattatcatttcacacaagacacgacaacaattcactgacaactggatcctgtatcacttggaaaccttttttgctgtttgggatagtctgtttaggatagattttattggttctattttgtggtctctttcttttaagtcaatctaaatatggtttttcctaaatgggttgttaagacttgccccactcttcattgtagccaatgtctgcacaaaattctgtgtccccgtcacagatagacagcaagctactcaggcccaacccacaatgcccttccacgtatccatctgaaactgcccaggaaatggctcccactaaacttggggggggggtgctcaaattccatacacagaaacaaacacaaaaattactatcttcaaccttgagggttgccttctctaggaatgaaccgacatcccttcctacactttcagagatgtttaactcagtggtattcctgcagaggtctatgaaagatttgggatttggtttggtttcattcagttttggttcttgaaacataaagatattacaagccctccaggatgttcttgtagatccctaaggaacatgctaccatggtcacgacccacttaactccccctccttccctttatccttttttatcctgtctgtatccttttttatccttctgcctgtgtgaatatctgtgaaccatgttcaagccatgcccacaaaggccaagagagggtatcgcatcccctgggtctagagttacaggtgattgtgagctaccacatggtgctaggaatcaaacccaagtcctctagaagggcaggcaatgctcttaaccactgggccgtctctccagtccctttataactttttaaccctttgacacacaaatcaccctttcctaaaattcactggttttgaaagaatgagagggggctggagagatggctcagtggctaaaagcactgactgctcttccagaggtcctgagttcaaatcccagcaaccacatggtggctcacatccatctgtaatgagatctgatgccctcttctggtgtgtctgaagacagctacagtgtacttgtatataataagtaaataaattttaaaaaagaaagaaagagagaaagaaaagagagagactgcttcatctcaaagggagcagaaacaccaaacatcacgtacttagactttaaaaagcagagaggcaaatatacttacaacttttctgtgagcataaagaaaatcaggaaagtagcacagattttttttttttcttttcccattaccagtgacaaatacacccttttaggaagtaatgtcttagaaactatatagtcatattaaggggctggggaggggcctcagttggtagaaatccccagttctccataaaccaggcatgttggcatacatctgtcgtctcagaactttgggcatctgaggctacatgagaccctgtctcaaaaagggcgatggaggtggagtcggggtggagagaaccagccaagcagccatccaagtacacaacacaaatcccagccctcggaaggccaagacaggatgatctcagtgagtctgaggccagcccagtctacagagcaaattccaggatggtcagaaataaacagtgaaaccctctctaaaaacagaagaacaaacaaacagacaaaccaaaagaaaagaaaagaagaaagctttcacaaagaagcaatcagagcagtccttgctcaggagctgtgggcaggaaagttaaccaaggttagcctcaggaaagggctaaccacgctgaggtgtgactatagtacagagcggacagagacagccctagtcagtatttgggagggacattccagttcagatgccccagaactgaagcagcatctgtcagccctcccctgacccactttcctgagtttcacctcctctcagccaaacccaagctccaaactatgagacaccaaaccatcaaaggccaatagtatgaaagccattaccttttaaatctatttaccaggaaatgtttctgagtaaaaataaacaacacttgactctccctttcctcccttcgggggaactcaggctgctctctaaggctgagacccacaggcctgactttcactatctaagccaaggcactaggaaggaaaaactctcagggctcatggaaattcctgagtcagaatccaggagggcgactctgacacagcctgaagctcaaagcccagtgttcccaataagagaacacacatcgatctatgtgattacagaatttactttaaataatgcaattcacgggtgcccttgacggggtatatcagtctcaaaatatatctcctccacataaatactgtagagccaaaaatcataggaaggcaaccaaacctttctaatatgcaggcatattggtatttctgaaagggcgggaagcaaggccaacgtcccaggctttatcacgtcagatgccaagtaccaagtcctatactgaaatagatttctctgctgagaaggtcctgcattctcttggtttgggttggttggtttgggttggttggctggtggaggggaggggatgtgattttgttgctgttttggtttggtttgggttttttggtttttagtttgggggagggggggggtgttgttttggttttggttttggtttgtttttaaggtagagtcttactgtgtgctcctggctgacctgaaactcactgtgtagactaggctggtctcaaacttacagaggaactccactagcctcagcctcctgaatgaaaggcacgcactgccacacccagcccggagtctttttttttttttttttttttcaagacagggtttctttgtgtagtcctggctgtcctggaactcactttgtagaccaggctggcctcgaactcagaaatcctcctgcctctgctccccaagtgctgggattaaaggggttcactaccaccaccccgcccagagtcttactgtttggacagaaaaaaagttttgtgacagaagtaagggccacaaggattgtactggacacataagattcctagcgtgtgaaatagcacacgctatttgtgtgtttgctgtgtaactgagctccaccactttgacagaactgaaacacacacatacacacacatatagtcaccaaaatctatttgtagaacccacatacatcgagaggagaaaaccaactcccataacctgacctctgacctctacataggcacatatacacacactaaaataaatgttaagaaaatcatttttaaacaataatataacaaaaattgagttcccaaaactagttggtggctgtgccacaccaagtcggaatctcagctgccacacatgcaaaagagaccaacaagtcacttgtgagtcatcgtgccatgaaagccagcctcagcaaaagcagccccgtgcgtgggacacacagcttagctgagaagtctgaggacttcctaagtccctaagtgtcacctgcaccctgagaggggaggaagcaatggcaaatgggaaggaagcctgggatccaaggctgggtctggtccccaggctatcatctcgagagtaaatctctatcatcctgtagctcactgggtaaggcgcttgccttgtaagcgcttggtatggtggcagcatttggtatgcttataattccagaactagggagatggagaaaggaggacctctggggctcagtgtgcaggcagactaccaggagccactcagtgcgagaggcttaaacaaaaacggttcgcagctgctaagaaacagcacctgaggccatcccttggtctctatgcacccacgcacacatacacatacgtgcagacaatctcacgctggctcgcattccaaatattgagttgagcatagctctcattcagcagttttaatttttaaaagtgcatatcaaaacaacaccatagtaaatgcttgtttctccacacagtgaaagagggcgggactctagctacctgcatcctattctccactgctttagattaaactttaactagtgtttacaactgcctgcatgatctcccttgttcccttgttcccagggaaaatcatgatatcagcatccagtgcaaacttctgggttcaaataaggttcaatcaaattgagttttcagtcctgtctatataatgaacacaccgcctctgctagaatattggcacagacaagatcttagatcgctcctcctcagcctcgtgaggacctgtgacacaggcaaggcttttgctcgtcccaagactgctgttctctaacagacttgagtttccacccgggtccctgtctgtccctcaaggcaagtcccaagggcttgtggaaaaaaaccaagcccgctgaaaggcttcccttcaaaggacagatatttcagctaagggaatctccagaaggagcaaggaactgttttcatagtcccttaaactgtggagaaaaatctctcttggatactacgatcagtgtaaaccttttaaaaaccagaccactcactccctaaacgcaacttagccactgtgttgtctgaagaggaccttctgaaaggtcaacagagaaagccaacctcctcaacctttctctcactccagaccttgttgggcagctctaatttacaccagatatcacagggcatgttttcagtaagctggctataatggaacacagcgtaaaccatcagcaaagaaatttgctttcctttagtttcatgggctcctctgccctcccccaacacatctcgatagcacagttacctccctgggcaccagatcagggcctaccctgtgccaaatgtcagtgcatctgaaatcctaccttctttgccatccagttaaaagccttgaacagccatcagaggaagagagaaagagaatccacgtcagagacagtgtcagtctctcatcttccgccccaaggactgtctgtcctccaatgttatcccctttgtcagctcccggaagagaatgacaggacagagatagaaaagaaggcagccaagcagcagcaggtcctgtctcttatgtgggctacgataccactagggaaccaaagcagccccagacttcagcccagggtcaccctcagtaggtagcaaggagggagcaagagaggacctgtgcacagttaacaccgggcaaattcgcaaggaacagatctgagcataaaataatgaccctcctggcaggcacaggatgaagactgtgcagagttcagactccaggtttcccccgtctaacctgatcctgaattcaaatcccagcgcgtgaatctccaagccatggaaccttttccattgggtaagtacttatcacttggctacaatccactgtgccctgggcttgatgccagaggtgtactggttccccaagtcacatggagtcgagctgcattgaaaaaggatatcagcaagtacaaaatgcaagcaaagtaccagatagcgagaaagaaaacacagagaagtcacaagcagtgatagggcacagggtgactaagcagggtgtggtgtgtacacctgtaactccggcacttgggaggctgaggcaggagcatcatgagtttgaggccagactaggatataaagcaagcccttttctcaaataaatacagaaagaaaagaaaaaaaagagaagaataaagaaaaagtgtaggtcaaaaacaaacaaacaaacaaacaaaaaacatgacttccaaagtcaacagagaaggccactcaatgaaggctgcatttaaatattaacctaaatggcagggaaccaggtgcacctgggaaggtcctacggaaacagagaaaaggctagtgtaacaaatgactcctctatggcttttgattgccacctgtgaacgtgcagctgtgatgcaggaatcagcatcagcatcaccgctaagatgctagcattagaggctcagctttgcatgggctctaatttcctcaacaattagaacgcagagttagataaaaaaccaaggaggtagccagccacagtgaagcaagcctttagtcccagcacgtgggaggcaaaaaggggtgtgtgtgtgtgtgtgtgtgtgtgtgtgtgtgtgtgtatgcccagcctgttctttgacatttcatcatgtcccaaagaaaagttaataaaccacacactccaccagtagcacattttctctgaagattactctctttttttgtttgtttgtttttgttttttcgacacagggtttctctgtgtagtcctggctgtcctggaactcactctgtagaccaggctggcctcgaactcagaaatccgcctgcctctgcctcctgagtgctgggattaaaggcgtgtgccaccacacccggcttctgaagattattcttggactaccattttaaaatctttataaacctgttaggctttccgactgacacagattaagagctgtcactattctagccacttctcacaaccttatctcaagtgctttagcagacagtgaaggctcactgtcagcagccctaaaccctagcccagtagacaacaaatgctttctagactcttcttttttctattttgttttttattgggtgggggtggggtggcccggttggtttgccggtttttgaggcagggtatcttagagtgacagggtgtcagtgtgtcatgacaagctgaggataccctgaacttctggtcctcctgcctccacattctgagcactgggattgctggtgtggaccaccacaacgtgcttatgtattggtggggattgaacccagagcctcatgaatgctaggccataactctacaaagtgacccacaggcttcacatctaaggcaatcacaaagtgtgtggcttttgttctttaaactatcccagtgcctacctttgatcacttagttgtagggcaggagtgaagcccagagtgagtgtgttgttgatgtgagcacagccatgcctcagcctcctggaagtggccacgccctccctgggtgagactcaaagggatggctaggcattcctcaaattagattgtggatcttgacagtgtttgcagaaaatgtcttccataactcccctattcctccaatgtttacagtcttagaggctgctctcttatagagactgctcctagcaagcttagggaaacaggcctctatttccaggtgtatgtaataagcccacctccctgttaaactgtatataataagcacgctaagctacatcagtcagcgcatcccacaagacccccgcttttctgtcgttttcatccctcatccgaatcctgggggcgacatgcaagtaactggtgctaggtatttctcttcagatggcaaaatggcttttaaacactgaattacgaatctgatgcacaacttaagatggaacgagggcaataagtggttggttagttggatggttggttggttttgtgagctaagagctcatatcttgatccaaaagcaggaaacagagagaggaatactggtattgggctgagactttcaaaaccctaaagttcacccacagtggtccaactcctccaacaagggcaaaagttcctggtttttcccaagcaggtccatcagtgagggaccctgtattcaaacacagagcccatgggagccgctgtccttcaaaccaacccctggaaggtcaaccaggccacccagtggatagccactcaagagtatatggaaatacaaactggattcagggggaaaaaaaaaaaaggaagcaaatttgtgtgagtagggaaggaagagtagatctgagagatgtttaagaagggggagaatatgaccataatatattgtatgaaattaccaaagacctactttaaaatgtaaagtctagatatggtggcacatgtctttaacaccagagctcaggaggcagaggcaggtggatctctgtgagtttaaagctagcttggtctacatagtgaattccagacgagccacagttacataatgagaccttatgtctttgtttgggttactattactgcgatgaaaccccgtgaccaaaatcaagttggggaggaaagagtttatttggtttagacttccacattatagtccatcatcaaaggaagtcaaggtcataacctaaataggacaagaaccaggcaggaggcggtgactcagaccagggagggatgctgctaattggctagcacaggctgctttcttataagaatccaggaccaccagcccacaaatgatggtccgtccacaatgggctggcctctcccacatcaatcattgatgaagaaaacgccctctagctggacctgtcttatggagccaatttcttaactgaagttccctcctttcagatgactccagcctctgtcaaattgactcaaaagtagccaccacactctgtttcaaaaatgaatagatagatagatgatagatagataggtagatagatagatagatagatagatagatagatagatagatagaaatagatagataacttttaaagagtatatgaaattgaacaggactagaagagagacgtgaagaatagaaagggaggtaattggagatcaacttgatcaaaacacattatatgcatgtataagattctcaattttattccagtcttttaatctccaatagaaagaaaaatattcctttataggaggtaggggtgtttcgctgagatgggatctccctaaattgcccaggctgggtcccaaatagtgtggctgcaggcatgcagcaccacacttgagttctctactctctgtttatgatgttatgaccttttttttttattggccttttactctcgattctatctccacctcccaaatgctgggattataaacaagcaacaggtacagggtgaatattccttcttaaaaagtggaaaactaatatgcagcatggaataacataaccagtaaaaatctttcaaatttatttattggatatggatcattccaactatttaatctagacttctaaaagtctcttaataatgtgtaaactttggagtgtcccgagatcctaccctgtgtactaagcatttgccacaaacaaaaatcaagagtatggcttccagaaatcaaagagatgactcacagactcattcaaatccaaattgatctgccagcttttgcaacacaatccagccagaggaatgtgattcatagctcagctatgcaggagctaaattttcgtcgtgttttgaagtaggtgccattcaaagggagggcacagttataacactgacagtaaaaatgctaaaagcaatttgagaattttttaaaacgtaagaagttaagtaatacaagtccatcaagcggctttggaaaacacgtgtggccggacagtaagaaaaagaacgatcccaaatgccaagattctgggatatagctcacatctttttggaggcaggatctcatagcccaggttggcatcaaactcaaaatctccctgttccagcctcccacctgataggagagcaggtgtgtgtttacgttgttattttatgtgtacgagtgttttgcctgcgtgtatgcatgcacactgtgtgagtgcctgctgtcctcagagatcagaagagagcattagctaccctaggagttacagagggttgtgagccaccatataggctgtgggaatgaacccaggtcacctagaaaagcaacaagtgctcttaaccactgactcatcttccggctcccaccggcaagcttttaaagggtacttttcacatcaacagcctcctgtatcataatcacttaacaatacctcatagcaccctccatgtttgtaatgtttatatacactcacatccacacacctcaatatcatcacttcttatgaacacgtcgctgcttcagtcatgcgctctatcttaattacctccactgggatgctgcgtcatccacacagctgtgcgaccccagtaaggagacagtaagttcctagctatttctagagttatttgactaagaacacagactttaaataaaatagtaacaacctaagaactggcggtcatttctaaacactctaggcaacaatgacctaactcatgtccaaattggatttttatggtgctttctctctctctctttttttctattgtaaacagtgctacagtcaacttcttaaatgtacatttatatcctctgcctaggaagaaactctataagcagagtcattcgaacagttgatgttccctatttaaaaaaagcagcacggaaggttggcaaaatggctcagcaagaaacccaagtttggtctcctggatgcacgtggcacatcacagaaagctgacatttgtcctctgacccccactggcgtgctgtggcatgagcatccaaacccccatgtacacaccaatgagaaagtaaatgaaataacacttgtcttccttagggttctattgctgtaaagagatacaatgaccatggcaactctcataaagggaagcatttaactggggctgccttacaggttcagaggctcagtccattatcatcatggcaggaagcacagcagcatgcaggcagaccaacatggtgctggaggagccatcttgatgcacaggcagcagaagaagaccgtgtgccacactgggtgtcgcttgagcacaaaagagctcaaagcccgtcctaacagtgacacattttctaatagtgctactccctatgggtcacgcactcaaacattgagtctatggggaccatagctattcaaaccaccacaatattttataaacaaactatcttaacaccaaaaagtatacactgtaacaaattacccccagccatgtatggaccttactaactttataaatagccattttaaatttaagaaatagtttggaagtgtggatactcagaatatactctaaaagttaaatttttccataaaactattttctagtggacaaagacagagaaccagtgacaaatatctaaagtcttttttttagtgtattttatttactattgatgtatatgtgtgtctgcgcacatgccaatgtgcacgtatggagtaagaggacagtttctgtggaaagggttctctcctctccctttctttactggggtcccgagagctgagcgcggatcactaggcttcgacagcatttacccacgcagccaccttcctaccccagaatccaaggtcttctgtaataaaggttgattcgggacgatgcgaaggatcacctggcctcacaagttatagactctgagacgtacagagacatctagctgtctctcttccactttcctgtcactttccacatctctacatatgaattctgtacccctaaaatgacatttaggagatcacagtgaatacaccacacaacatgccgacgcacttcccaaagagtccttaaagctacaaaaaccactgcatagtcacagccttatctgtaacatccagacgtttcacagaccaagcacaaccagcatcacgaagggcaatgcatatcctactgagatctcatttcctgcacgtattttagcagtttcgactaagaaatgaactcttaccataacacacagacatttccaacaggaaatatcacctttgagttctattcaatgttgttgttgttgttgttgttgttgaagagtgacacgaaggaatgtttataatgctggagttacaaaaggacaatgctcacacccaggtgagaactctatataattttcccagcttaaaaaggccatgcttgctcaaaaatatctcccctttgagcctgtctcggaaccatgtttgaagctcttttaaaaatacagaaattttcattcagtgggtttggagcagagccaacacatctgcatttgtaaaaaaactcccagttgattcatttggagagccagaattgaaaagcagtggttatataataagctgggggtggggtggcatccaaagacctccaatccgaatgttcacatgaaagtcattcgtcggtcttagtctggctgatttgatcacactggggaagactgtatctttagaaactaacatttctaaaaggaaagagaaggtcacatgccagtgttagcatccaacagcaattagcaggtgggcaaaaggttaaggaatcccaccacaaaatgatctttccaccagaaactatggtattcgctactctaagcatgtgattcctttccgttttcaggtaataagggtaaatgttagactaagcttgtctatcttattgacatcataactgcgcagcatcagttatgctgtaggcaggagtttctcccagtaaaactactgcacacacaatgtaacaaaggcaagctgggagtgtaagataggccacacagagactggagattgcctttcacagagcaatagtcactcacggctcagaattcagtttctcagaagtttacttaacaagaacaatgcacaacaagctaagaaatctctgtcttcaacacagtctatacagagggctccacagtgatgcatccattactcaccagatctggacttaatgatgtcactgaattcgttctgcccatcatcaggcctggcttcaaggtccccatacttggccatcttgaatgagtttcagtataatccaaaggctttcccagatcctcttctgaaggctaaatctgaaaaatggtccaggctagcatgaatacctaacaggaaaagagaaagtattgagtagaaatacagaaacatattccttatttgttttttcctttgcttctggcacaggtctgtgtgtgcacatgtgaaaggggtgggtgtgcatgtacatgtgtgcatgtgcacgtggaggtcagaggctgacacttgggtgtctgcctcaactgctgctctctaccttttatgttaaagcagggtctctgtttgaaccccagggttcccctgaactcacatcccacgtgctgggattacaaacaggctgccaaatgtgccgggcatctgcacggatactgaggtggggtgtcaagtacttaactgctaagccatctccagccacatatagtctaagacacagttacggagtggcttcctgagcacatccacatgaggctttatttagcacagcctcttccacgtgagtgaggcttatggacaccgagcttcacggataaaatgaaattcactctataatcaatgacctcattacaaccctgatgactgacagcagtccggaagagaaagataaagtcataaagtcataaagtggacgagtcacacctgcccagggccactgagaaggccttcctaagcaatgacatttgggtctatccttcaaggagaggaagaagttcactagctacagggcaagtagaaaagagaagagcttggtatgtgaaatattagcgccgctgagaactgggaggcagggggctaagtcctgcttttgggaagcacgtcacacagccgaggaagaaagctggggccagagattcctagagaggcttggatacctgtctgaggagaaggacaatcagagaggtgacataagcccgttcacaccatggcttgtcagtagaccagagtaactcaggaagcaccaaggactacagtacattagagcagtgctctcattaaagaacttaggccgtgagaaaggagatgtcgaatggaaacatttcagctcttctctgcatctgaaattgtttcatgctactgcgttagagaaaaataatcccacgcttgaccagactttacaaaagcatcaatggggcctcaggtgataaatggaatcacagcgcaccctctgttgagtatctctgtctgtcggagaatcaatcatgaggcttatcatgggcacacaaattggaagaggctatcaaaacaaaaggcctagggaattaggagatgggtctgtgggtaaagagcctactgcacaatcatgggaacctgacttcaatccctcgaattttataaaaataaaagagggaagcaagcatgggcatgtgccagcaatgcctgtttccaactacttcctctggaaacaaaggatcatagccaaccagcgagccccaggttcaatgagagatcctgtctcaaaaataaggcactatgccaatctctggcctccaaactataatacacacaaacaacacacacatcccacaggcccagtgtcactcaaacaaaaaccacccaaagaaaggtagtttcttcatggattaaacaaaacaaaagagacctgaccaccaaatactatcctgggttgaattttcaaagaaaacattttagggtttactttaggcaatattattataccaatgttacactgcaggattagttagcagcgatgttagggaggaggatatcttccattgtaggagacactatgaagtcattagtgagaagtatgacaggatcttcgacgtctatgcatttatatatatacaaatcgatacgcacaagcatacatgcaaagatacacacaggcagaggaagtaaatgttataaagaaaatacgagcagctctgtatctgttgtgctaatctctctgttataacgctgttaatataagcaatatgtgattgtggcctcaatggattagatggaaaaaaaataaatagatacacaggatattaaataaaaggtcaataagactcagggacagccctggcattagagacgcaggatactagcatgctgagtgactcagctggcacagggcagctcagaagtagacgaactactactcggttgggaaccgctgaggacattacagagaagaatggatgcggtttggattttctcagtgtaaggtgcttctgagacacagaaagagaaagggagcattcgggaaatacggatctggacctcaggggtggtacggcttgtagatgtatgtagaaatgtagatagccatgttgcccactgataaaaacttcattctggaagggtcatgacaccaattctgctgtacatgggtaggtaccactcagataaaacaatccaatcttcagtaactgtgagaaatatctccagggcctaaagatctgaagatctgccctgcaggagcacccgttcattaagaacgccagcaaacactgctcctctctgctcccgagcttcctggattacactgcccagagaggagccaagctcagtctctcagctcagtctctctgtctcttccagaccacggccccctttaagagcgccccaatgtcaatgaacttaatcactacttaggaatatcagagtcaagacatcccaacagtaatctgcagagaaagtacactaattcacacattaaaacacgcgtcagagccaggcaaggtggtttgtgtctgtcatccctgagatgacagatcactgagttctaggtcggcttgagctgccaagtcagacccccaccacctcaaaaaaaaaagagagagagagagaagcaaatgtcagaactagggtttctttctaggtagtaatggaccaccaattctttagtggttcttctttacgattttaaaatatttttatgtgtacatgtgagtgcctgcatttttgtctctgttaattcctgataccttcgaaagccagaaaagagtgttccattccctaaaagtggagttaccagtagtcttgagtcgcccacagtgggtgctaggaactgaacctggagcctctgggaaagtaagaagtgctctgagccaaggagccatctctccagcatgaatccttacttcgaagaatgaattgtactatattgttattttaaatttcttatttgtgtaatagttgtgtgttccattattcaatagtcattcaccgtagcaaacagtactttattatataaatattaacattatgcaacataataacttttctttctgcaagtcaggaaatgagtagagtccattaataagagcaaaatgagagtgaatgcagtagaagcgaaggaacactgggaaactgttaaagctttaagaaccatttcctctccatatatggattgcttcatcagtctcccagactttaaaggacattaaaaaaattcttaaatgtttattctgactttatggttattaaggatttacagacctgggtatagtgactcacagctgtaaccccagcatttaagagacagaggaaaaagggtcctcaatatcctaggctagcctgagctacagagtaaatcccaaactagtctaggctacctgtctaaaaattaaaaataaactaaaagggctgaggatgagccttaatggtagcctgcagggtgtgcatgcatggtcctgagttcgatccccagaactacaaaaacaaaatgaaagtcaaaagtaaccagcgaagaggactggcagcctggccatttgccaagcagctttcgccaggagtgaacaagtaaccccagttggagaagacagagtttaacgccaccttctgctacacagagagtttgagggcggcctgagctacatgagactagggggtcacggaacagctccctacaaagaatataatcaaaagcaaatatattcctatcttgaggtacagagtgtgaaagattttctaaacttttatgtgtatccttaatatattagagaaccaaaatcttgtccacagaatatgtaaacatttaattacaggaaatcccggctgtctaagaaaaagtctctttcctggaatgaagttcctttgaaagacaagtccagtgccacttcccaaggggctttatgcagggacctccagttaggcttccaaaaatgtttccactctgttagaaagagacctgcccctaaacctgatcaccacacattcgataaataaatgtcgaaaaatgaattttttaaatttttgtgtgaatgtctgccttgactgtctagtgcccaaggaggccaaaaatggacataagatagtgaacgtggactctctcttaaccactgagccatcttttaaaaatgcacacatgctctctctctctctctctctctctctctctctcacacacacacacacacacacacacacacgcactcacacacaaacactgtcaccgatttgattttgaggtaaagttaacttgtgcacagggttgcgtttcatttgcatagatccaataatgccatttcatcgtgatgtttgattctgcctttcacattgggataatttttccagtcgtgtcttcttcctaatacaaatccctactacactgcaaaaacatcagaaaaaaaaaatcaatgagctagaaaagaatgaagagggacacactaaaacattgaacagcgtgaaaggggaaatcatttgaaatgtaaataaagaaaatatccgagtgagttcaggacagccagggccacacagagaaaccctgtctaagaaaagaaaggaaaggaaaggaaaggaaaggaaaggaaaggaaaggaaaggaaaagaaaagaaaagaaaagaaaagaaaagaaaagaaaagaaaagaaaagaaaagaaaagggagaaagaaagaaagagaaaatatccaataaaaagaaaaaagaaaaacaacaacatttaagagccaccaactcttgttgccacgaatgtcccaggagctccatgtgagttggagagtttaaggatacctccttccaaactcccagatgccaaccaggtgtagtggtgcacacctataaccccagctacttcagaggctgaagcaagaggagtgccagttcaaggccagcctaggccacacagtgagaccctttctcaaaataacataaataaaatgctactgcaactctatcaggctgttcaagttacattgggctagaaccaaggctttcttagtaacaatgtgtcccaaagacattctgccgccatccacactggtggaatggaagtagccacactctacacccggataagggagaaactagaggtgaatgacccggaggttgtatagggctcctatgcaattgctgtcctccgttctcttccctcaaaatgacagctggtgacgttgaccgagtgtttcccctactgaaacctacacgcaccacagcacaggcgccagttcccccttcagggtggacgcttcttagttataccagaacagaacgccaggggtgatggctttataggcaaaagttcaagaatacacaacattcaaacggtgtcatcctaagggaatattcatccagacggctgtggaggaaacctagtcactcacaagtaaccaaaagctaggaatgctggcgatagtgaagagggatgccgaagaacaagtttgcccttctgcttgtaaaggaaaccgctgagtgccaagaactgccattcacactaagaagcgctccagggaaggttaatgccactgtgattaatgctgtttacaggcgcaataaattttgagtaaacacccaaaggagagttaaagctatctcgaaagcctcataaacgctggtgagggggtggggggacttcagcaggaatggcccatgcccctcactgccttgtcctcgggactgaacgacccacaagagcttcgaattcctccagctctggcaggcactagcgttatcagcaggctgcttctccagcgccaccagcagccagcccccgagggtccagcctgacttcacaggcccagggcaagttccaacgggacgatgagactgctgccatgccaccctggagatcccatctctcttggaattcgtgcgctctggccgcggcagaccctcccacttaaacgcatggagaggccacctctccagatcctggtgacccaggtgatctgaaggctagaagaataaaggatgatacctcagtgactccagagagtggggcccggaattacacccaggatctccaatttgggggtttaaaaaaggcgggtccctgactctgaagagtcacacacgttttctcctccccttgaaataaccctggaacgccacacggtcggaatccagggacttgaaaagtctctttgaacaatgtgccttctaaaagttgcacagcctacaattagccctttgttggttttgtaagtggccttgggcaagcagagcctcagacccaggccaaagaggggcatgaattaccttgtcagttgcagtgagggatgccaagagtccggaaaagcaggcggccgggcgggactgcgcaccaatgaggtacccctatcccctctgtctctccacagctgcaggcttgccacctcgccacactggggccccaccctcaggaacggcaaccacagagaggtcgagcacgcccccagcctggaggccggctaggaagctctccccaaccctcccaccgcacaaccgccctccccaccctctcctcccggacaccgcccgggccccgccttcccgggaccggaggtgtgtgacaagctctcagaagaggccacgtcccctcttggagatcgctagtcctgctgcccggctcggggcggtaaacggacaggcgacagacagcctctcctctcagggagagacaaaacaacagtactaaactagacctaggaatctgagaccttggcgaccagtacagattcccaccttctcaacccagctctctcccgcccaggcaggggacgctgagcttccagggaaagtgcagaagttggctacagctacttcgggacccgggcggtggaactgcagaaaggtcccacctcctttcaacccccgccccattccctaggggactgcggtcacattacccagaccgaagcttcaataatgcatgggcttacctgctagccaagtcccagaggccccaaggttcctctgggcgtgttcgggtggtggggagcttgccttggacgttacaagaattttttttaagtgaaacgtggaaagcccgacaagatccaaaggggggtgggggggggggagatccaaaattgacacccgattggaaacgccccctgacttgtgcaatcttcctgcccggtagttccgccaaaaacaaaacagtccaaacgctagcctgggggcaggcgcacgcaggagttttccctctgcaggaatgacccgaaagaaaaggggcgccgctccccgaggtggcccgatcggctgaggagcccagggctcctcctcggccctgggcgggagaaatcccgcgcccggcgctgcccgctcccctcctcgggggaagggcgactccacaactttgtgcgcgagagctgctcgccgctccggctcctcctccaggtcctcctccggctgccgccggcccctttgttggagagcgagggtggggcgctgctgggtccgcccgccaccccgggtaggggctcgcgtctcccagcacgaatcgcccagcctcggagccgtggatcccgcaggtcggacccgccgtctcgccgctcgcgcgccccggggccccaggccgggcaactttgttctcccggggagaccagtccccctcggctccgggttcggtcctgccccggcctgggaagccaccgcgggccgggctcccagaacgtggcgcttcgggtcacctgaccgcgcgcccggtcaatcagcgctagccctaggcgccctcccagcccgcagcagccggctccgtgcggtgcgcggtgcgagaatcccggaaccagtcgtgcgtgctggaagccagaagctggaatagtcaccgcgcgcacgcaccgtgccctttattcaaattgtccgaaaatgtgtgtcacacccctctaggcacactaggtctcttatcaacagtacttttaattttttttattattatcttacataaatctcaaccttctggccaattcgccccatttcagtttactgaggttgttgagtttggggttctaaatccaggggtatatttattttatggaaatttcttttgcatcattttaaatgctgtctaaacaatcccaagtgtccttatatgttcatatacacaaatagtgttggtgctgacctttaaaatttttaccgtgtgtgtgtgtgtgtgtgtgtgtgtgtgtgtgtgtgtgtgtgtgtgttgtgtgtatttggggtgctggtgacagtagacacaaatatcatacctatctaaattctctctgtctcaactttgtagagccagctttcaccttacacctttctgtgggacccaggaatcagactcaggtcttcagactttagtattcagtaggggtcttaccagtggcaccatctgccaaacctttatttatctagttatttatttatttattttctatttttccaagcaaacttacatctgtttgcagaacttgttgggagtttacgggcttagccgagacctatcacggacgtaatgaagtttgtgttatgtatgcatttttattatacatttcattctaacgtgttcccattactgttttcctgataaaacttggagaaggaaataaaaatagcaaccaaagtcgaagcagattgattacggcttattgcttccttagtactcaagggttaatttatgagccagtaaaaataattcactagccttgtgttaattaccagttgaaaacctctggagtctctaagtactgtgggctgggactgaaggaagtcttggaaaagacttttttataaagtctctgacttaacaacttcaccttggagggcattcttcatacaagccaaatagaacctaaacaccaactgggaactgatatgacttgatctcattcactttcattccttccattaacaagcatctatataaggcctactgaggcagatgatacatagaaatccaacatagatcttgcccttgaagaacgtagaattcattcaggtgagataagacatgtaagcaaaaacattggagattcctgctatcagatcaaacatgttgtatagattaccatctctgtgactgacaggtaagacttctgttagctctcggtttcatccgattcaggctgaggctggcctttgcttttgggcctgaggagtagcagaagctgtggtggagtgtgcacacctcatggctgtcaggaagcagaaagccatccagaaggaggtccagaaaaagacctgccctccaaagagatgagtccactaacttactgtctccaagtaggtccgcctccattgaattatgcattcaccaagtgacttaacccatttattaagtcaaaaacttcataaaacaattacctttcagcaactgactgagtctccaacataagaagtcttcatggatagtccatgatagtcttagttccaaacttggtctctgtaactccttttatgggtattttgttccctattctaaggaggaacaaagtatccacccattggtcttacttcttgattttcttgtgttttgcaaattgtatcttgggtgttctatgtttctgggctaatatccacttttcagatactaccccacccggggatccatcccataatcagccaccaaacccagacactattgcatatgccagcaaaattttgatgaagggaccctggtatatctgtctcatatgaggctatgccagtgcctggcaaatacagaagtggatgttcacagtcatctataagatggaacacagggcccccaatggagaagctagagaaagcacccaaggagctgaaggggtctgcaaccctatagttggaacaacaatatgaactaaccagtacccccagagctcgtgtctctagctgcatatgtatcagaagatggactagtcggccatcactgggaagagaggccctttggtacctggcaacctgagcaagcatatgtgtgggtgagtcacagaggaggaaaaaaagatcaaagtttggctgtgatcaagaattcccaccctgaccctgagttaggagaagaaaccacatctggcaggagactaagactacaaagggctctatttccataagagcagtcactatgagaccttttcagcccagcttcattttgaaggactgtgaacacgtctccaggaggcatgggtgactattgatgcactgcaaccagccgtccaccttttaatgcaccctgggtagtcagtggcctgtgacaacagaaccttctgcccactgaggctgctggaatgatcactatgaagcatgtggagggagtgataggaacatgaccctgggcccatgattaacctgaagtagtaattacactaagtggccactgaataatgaagactgaagatgtttatactgatgttactattgtaagggaagtcttttatagaagggaaaattattatatgagtaatatatagagagagtaatacataaaatatatgtacatgtatatatcatatgtttactctatgggcatgatccacataaatacaggggactgtatataatatagcagtccagaagaaaacattatctactgaacctgtgcaataacatgtaaatacaaccggacatgacatgtaaatacaaccggacatggtgggctacgcctgtaatcccaactacctgggaaactgagacatgaggactgcatgtttgaggacagcttgagcaccttagtaagaggatcagggacgttgttcagtggcgaaatgtttgcctagcatgtgcaaggctctaggttgaatcatcagtatcacagtatcaacaagagagagagacagacagagagacagagagacagagagacagagatgaagtatagatgcagtttcttttagaatagaaacatgagaaaacatgtgctatctttctgtgtgtgtctatgtgtatgtccctatgtgagggcatggaggccagaggacccttacggccttaaggattattctccaggcacttttttttaagggtccctcactagcctagaactcactgagtagactaggtagctgaccagtaaacccgagagatctatctaatactctccctcccagcactgggtttcaagtgctagctatctcccccagctttaaaaagaaagaaaacaaacaaacaagcaatcttgggtctagggatcaagcttaagttgtaaggcaaattgctttatcaagtgaggtatgtcaccagccccctatacaatgtgtgtttttgtgtttctgtttggttgggatgtgtgtatgtgtgtgtgtgtgtgtgtgtgtgtgtgtgtgtgtgtgtgtgtgtgtgatgatttgacagagtttttgtttggtagttgttgttattgtttaacagtgtctcactatgaagaccaagctggccttgaactcacagagatccacttgcttctgccctccaagttctgggattaaagcttgcaccaccatgcctggatatatatatatatatatatatatatatatatatatatatatatatatatatatatatatatatattaaaatcaagatatcacttcgtgttttccattagtgttgaatatgaataaacccacacggaagagaggggaaaggctttccttctctttttccgattaaaatatctaataaaactgcatatgtaagaggtgttagaatattcactcgtttaagaattcctcaggcgagcacataatactggtgagttgaaatttgaggttgaggatagctacaaataaaattctttgtaatcaagttaaggaaacaagataacacatgaaatgttttgacaataaataacacaaacacaatccaaggagctaaccatcatcccccagggagactattctaaattcagaatagtcctccctttgtcccccagaaattcagagtagggtctgctaggccacagacaccttcaacttcaaacagctacccccaaacc

SEQ ID NO: 47 - DNA, 46 bp, Homo sapiens
atattcacccatttctttctatctactcttgtttagaccacacttg

SEQ ID NO: 48 - DNA, 46 bp, Homo sapiens
cctgacaatgggcagaacgaattcagtgatatcattaagtccagat

SEQ ID NO: 49 - DNA, 42 bp, Homo sapiens
ctgtaaatatgtagcaactattgtgtagcttgacgggtcttt

SEQ ID NO: 50 - DNA, 53 bp, Homo sapiens
ttagggtatatccataaagtagaagattaagcattcataaaaagtgatacaga

SEQ ID NO: 51 - DNA, 39 bp, Homo sapiens
tgtaaagatattctccatgttgttacctcattatgctga

SEQ ID NO: 52 - DNA, 24 bp, Homo sapiens
cttctttgataaaataaccttcag

SEQ ID NO: 53 - DNA, 68 bp, Homo sapiens
ctctattagtaatttcagcttcaacaaataggatagaataaatgcaaattaaaaataaattaggagca

SEQ ID NO: 54 - DNA, 45 bp, Homo sapiens
ttaagtggtagaagggccctggagttcagttaataaagctgggat

SEQ ID NO: 55 - DNA, 60 bp, Homo sapiens
aaatctactatatatgctgatatttcagaaatggtggttcccttaaccttcaagaaaaaa

SEQ ID NO: 56 - DNA, 46 bp, Homo sapiens
ttaattaatgaaacttgggcttcatcaagctcaggtggaatggata

SEQ ID NO: 57 - DNA, 51 bp, Homo sapiens
cctgtggaattcttttagtttttctcttccatgtttatatatttgatatga

SEQ ID NO: 58 - DNA, 35 bp, Homo sapiens
ttattttacttgctgaggctggatattatattctt

SEQ ID NO: 59 - DNA, 35 bp, Homo sapiens
cacagactcacacacagagacacacacacacagac

SEQ ID NO: 60 - DNA, 53 bp, Homo sapiens
tttggagcataagatattttgtgatcagaagaaggtgaatctgtcagaggtgt

SEQ ID NO: 61 - DNA, 24 bp, Homo sapiens
gaatattttcaaaggtctgcattt

SEQ ID NO: 62 - DNA, 29 bp, Homo sapiens
gaattaagcaggttgagaacagggtgaag

SEQ ID NO: 63 - DNA, 355 bp, Homo sapiens
ttataggacatgtcaggcttattttatcttattttcttttatgagacaggttctcactctgtctcccaggctaaagtgcagtggtgtgatcatggctcactgcagcctcgaactcttgggttcaagtgatcctcccaccccaccctcccaagtagctgggaccacaggcatatgccaccacacccagctaatttttgtactttttgtagagacagggttttaccattttgcccaggctggtctcgaactcctgggctcaagtgatccactcgccttagcctcccaaagtgttgggattacagacatgagtcattgcgcccaggccatttcagcctgtttaacattccttttgcag

SEQ ID NO: 64 - DNA, 33 bp, Homo sapiens
aaaacgctaggttttggggtgtccttaggaagg

SEQ ID NO: 65 - DNA, 50 bp, Homo sapiens
atgcttaaaagaccagcaaatgttcaagacaaatgagaggaagagctatt

SEQ ID NO: 66 - DNA, 55 bp, Homo sapiens
agccacaggcaaattcttgttcttttactgaattcctgtctagtagaaaataaga

SEQ ID NO: 67 - DNA, 47 bp, Homo sapiens
agcaagttctcttggttaataaatggcttatgtggccttgatcagat

SEQ ID NO: 68 - DNA, 41 bp, Homo sapiens
ttagaacataatcaatgctttgagcaatattttttcatagg

SEQ ID NO: 69 - DNA, 50 bp, Homo sapiens
tttcctttttttaaaaaacacaattaaaaattgaaattgtataatttttg

SEQ ID NO: 70 - DNA, 40 bp, Homo sapiens
cgtgagttcttcttagtgcatcatatcggggataggtgat

SEQ ID NO: 71 - DNA, 50 bp, Homo sapiens
cacttggcatcggagagggcagtggctgcagtgacctgagtggggggagt

SEQ ID NO: 72 - DNA, 78 bp, Homo sapiens
tgtcaccaattgagagacttgaacatgccttcagcaaggctcaaacttatttgggaattgaaaagctgttagatcctg

SEQ ID NO: 73 - DNA, 61 bp, Homo sapiens
agcttcctgacaagaaatccataattatgtatttaacatctttgtttgaggtgctacctca

SEQ ID NO: 74 - DNA, 64 bp, Homo sapiens
gcaagtcaccatagacgccatccgtgaggtagagacactcccaaggaaatataaaaaagaatgt

SEQ ID NO: 75 - DNA, 52 bp, Homo sapiens
tgcgttggaggaagtgctgacctggttgctttctgctgaggacactttccag

SEQ ID NO: 76 - DNA, 60 bp, Homo sapiens
gagcaggatgatatttctgatgatgttgaagaagtcaaagaccagtttgcaacccatgaa

SEQ ID NO: 77 - DNA, 55 bp, Homo sapiens
aggcaggcaaccaactgataacacaaggaactctgtcagacgaagaagaatttga

SEQ ID NO: 78 - DNA, 57 bp, Homo sapiens
gattcaggaacagatgaccctgctgaatgctagatgggaggctcttagggtggagag

SEQ ID NO: 79 - DNA, 66 bp, Homo sapiens
acaggtgaaagtaaattcactaactcacatggtggtcattgttgatgaaaacagtggtgagagtgc

SEQ ID NO: 80 - DNA, 50 bp, Homo sapiens
aagaacgctggaataggttacaagaaatcaatatattgtggcaggaatta

SEQ ID NO: 81 - DNA, 41 bp, Homo sapiens
aaaggaactaagtgtcagtgttcgacgtctggctgtaagtg

SEQ ID NO: 82 - DNA, 27 bp, Homo sapiens
attttgaaggaagacatggaaatgaag

SEQ ID NO: 83 - DNA, 78 bp, Homo sapiens
ggaaaactgccattcagaccacagagataaaagagtatatgaagatgcaagacacttccgaaatgaaaaagaagttga

SEQ ID NO: 84 - DNA, 41 bp, Homo sapiens
aattaaaccaaactggacaaatccttgtggagcaaatggga

SEQ ID NO: 85 - DNA, 46 bp, Homo sapiens
ctactgaagaaataaaaaatgttctggagaaggtttcatcagaatg

SEQ ID NO: 86 - DNA, 44 bp, Homo sapiens
ttatttcaagcagcttgatgagcttgaaaaggtcatcaagacaa

SEQ ID NO: 87 - DNA, 46 bp, Homo sapiens
gagttgtgtgaccgtattttctcttccttagcgggaattgacaaat

SEQ ID NO: 88 - DNA, 54 bp, Homo sapiens
gtagaaaaattatataagcaagaatttgatgatgtgcaaggaaagtggaacaag

SEQ ID NO: 89 - DNA, 62 bp, Homo sapiens
ctaaaggtcttggtttccaaagatctacatttgcttgaggaaattgctctcacactcagagc

SEQ ID NO: 90 - DNA, 46 bp, Homo sapiens
actcaaaaaagtaggttgtctgaaagtcaagaaaaagctgcgaacc

SEQ ID NO: 91 - DNA, 42 bp, Homo sapiens
cagtaaacatactttggataacttacgttaacactgctgtta

SEQ ID NO: 92 - DNA, 46 bp, Homo sapiens
ctctggtggccaggagttgacgtctgagctgaatgttgtgctggag

SEQ ID NO: 93 - DNA, 28 bp, Homo sapiens
aaagaggggttaaaaacaggagaccaaa

SEQ ID NO: 94 - DNA, 75 bp, Homo sapiens
aagtcattttgtatattcaaactttactttttttataggtgcaatccaggttttcatgtaacagatgatctgtag

SEQ ID NO: 95 - DNA, 41 bp, Homo sapiens
cacggcatttctctttgctgtgatgaggccacacgtgtatt

SEQ ID NO: 96 - DNA, 55 bp, Homo sapiens
ctctggaatctgttctgcgccacccggcagataatcgcacccagattcgagagct

SEQ ID NO: 97 - DNA, 64 bp, Homo sapiens
tggccagactctgattgatggggggatcctggatgatataatcagtgagaaactggaggctttc

SEQ ID NO: 98 - DNA, 47 bp, Homo sapiens
aaagcaactccaggtgctgcgggaaactgaccagatgcttcaagtct

SEQ ID NO: 99 - DNA, 44 bp, Homo sapiens
cgttctcagcccctgacctccccagagagtaggactgccagagg

SEQ ID NO: 100 - DNA, 46 bp, Homo sapiens
aaactgtgattaaaacaggaagacatattgtccagaaacagcaaac

SEQ ID NO: 101 - DNA, 43 bp, Homo sapiens
atatttaattcaggctaatatttatactttcaatggctactga

SEQ ID NO: 102 - DNA, 60 bp, Homo sapiens
tgaatggctttctgctactgaaactgaattggtacagaagtccacttcagaaggtctgct

SEQ ID NO: 103 - DNA, 50 bp, Homo sapiens
tgcgtccttaacgctgggtggagccgagttcgtacctggactgaagattg

SEQ ID NO: 104 - DNA, 46 bp, Homo sapiens
tattggatgaaattgaaaagaaaccaacaagtaaacaggaagaaat

SEQ ID NO: 105 - DNA, 45 bp, Homo sapiens
ccgtggaagctcaagcagggagcttgtagaaccaaagttagctga

SEQ ID NO: 106 - DNA, 42 bp, Homo sapiens
tggtgtgcctttctctgacttggaaaaattagaaaatgacat

SEQ ID NO: 107 - DNA, 46 bp, Homo sapiens
tagatggatgaggagagtgcccagattgaggaagttctacaaagag

SEQ ID NO: 108 - DNA, 41 bp, Homo sapiens
cacttactcagctgaatgcaaaatgggacagaattaataga

SEQ ID NO: 109 - DNA, 76 bp, Homo sapiens
aaggagaaagtaagcaggtgatgaagtacaggcatcagctagatgagattatctgttggttaacaaaggctgagca

SEQ ID NO: 110 - DNA, 39 bp, Homo sapiens
ggagccaggatgaggaaggggatcacttctccagtgatg

SEQ ID NO: 111 - DNA, 41 bp, Homo sapiens
cgtgctctgctttagtagaagactaggatggattggaggca

SEQ ID NO: 112 - DNA, 42 bp, Homo sapiens
gcgccatcctcagctggattatgtttttacattggcacagaa

SEQ ID NO: 113 - DNA, 70 bp, Homo sapiens
tgtcttttaactcaacccaaaattcagtccacaaatatttattgagcaactactatgtgcttatgtgact

SEQ ID NO: 114 - DNA, 37 bp, Homo sapiens
tttttccatcacctctctttttgtccaaaacttcttt

SEQ ID NO: 115 - DNA, 46 bp, Homo sapiens
gaggagaaatagaaagagagagaaggtgataatgagtgaaaggaat

SEQ ID NO: 116 - DNA, 43 bp, Homo sapiens
tgattattgacagtcttcagtgggatgaccatagggaggagac

SEQ ID NO: 117 - DNA, 63 bp, Homo sapiens
aacaatccaagatggtattttgtaaaaggatgagtggtggtaccattcaccgaattgggaaag

SEQ ID NO: 118 - DNA, 41 bp, Homo sapiens
aggtgtctccagaagtgtggtaaacttaaaatgatggctgt

SEQ ID NO: 119 - DNA, 24 bp, Homo sapiens
gaagaatttaatttcacttggatg

SEQ ID NO: 120 - DNA, 24 bp, Homo sapiens
agaagtgctttttgggaagacttc

SEQ ID NO: 121 - DNA, 30 bp, Homo sapiens
aaatacatgtagagaccaaaatgaatgaga

SEQ ID NO: 122 - DNA, 44 bp, Homo sapiens
aatggagatttactttaacatgatctgattgttgagatgtgtgt

SEQ ID NO: 123 - DNA, 23 bp, Homo sapiens
tcatgagaaagtcttggttagat

SEQ ID NO: 124 - DNA, 45 bp, Homo sapiens
catttctgggcgaggtaaatgagtccaaataattgaaattggaaa

SEQ ID NO: 125 - DNA, 23 bp, Homo sapiens
tgtgattcttttagcacacatac

SEQ ID NO: 126 - DNA, 37 bp, Homo sapiens
atattatcttaaaacagaaacagtaaagcatggagaa

SEQ ID NO: 127 - DNA, 49 bp, Homo sapiens
actgtagttggttacattcagggtcaatagaaatgatttcttgagatat

SEQ ID NO: 128 - DNA, 43 bp, Homo sapiens
ctctgatgcctgggtaaattaatcggggtgtgcatgccattgc

SEQ ID NO: 129 - DNA, 45 bp, Homo sapiens
cctttcttatttcaaaaaatcactttgaaaaaaagcatagcttct

SEQ ID NO: 130 - DNA, 48 bp, Homo sapiens
ccaagataatactggttttcttactactttttttccatctcttgtaca

SEQ ID NO: 131 - DNA, 56 bp, Homo sapiens
ttttctttttgatctggctgccttcttggtgatattactatgagaatgaggaggga

SEQ ID NO: 132 - DNA, 76 bp, Homo sapiens
attaaggattattgtaaagtgaaatagcagctttgaggtctgaaacactgagggagaagaaggaaaagaagagaca

SEQ ID NO: 133 - DNA, 56 bp, Homo sapiens
gcttgcatagtaagagcagctccagtgtggtattagtagggttaatgattgagtgt

SEQ ID NO: 134 - DNA, 45 bp, Homo sapiens
gattgcttttaatttcattatggcacacagaatttagtgaagaaa

SEQ ID NO: 135 - DNA, 47 bp, Homo sapiens
ccaggtagatgttttatgctgggttcctaaaggtagaaatggtggga

SEQ ID NO: 136 - DNA, 69 bp, Homo sapiens
cctttgtaatttaatttatttgtgtcattttaggcatattgcatacctgctaatgtagaatggagatct

SEQ ID NO: 137 - DNA, 55 bp, Homo sapiens
tcttggctcatcattctttaaattccaaaaatgactaatttgtggggatacataa

SEQ ID NO: 138 - DNA, 46 bp, Homo sapiens
acacacaatttctttcagatagtcaccagagtagtcatcaaaagga

SEQ ID NO: 139 - DNA, 44 bp, Homo sapiens
aggggcattaacaaagctttgaaatgccaaagcagactttccag

SEQ ID NO: 140 - DNA, 52 bp, Homo sapiens
actggtcatttctgtcaattgtgaatctgctcatacttgttcttcatgaaac

SEQ ID NO: 141 - DNA, 41 bp, Homo sapiens
aagtcagctggtaatttaactgaaacttctttggagaaaaa

SEQ ID NO: 142 - DNA, 46 bp, Homo sapiens
tatagtaaacacatttcaaagtctcctcatttattccctacttagc

SEQ ID NO: 143 - DNA, 49 bp, Homo sapiens
gctactatgcttcaacatcgactggatgatatgaaccaaagatggaatg

SEQ ID NO: 144 - DNA, 35 bp, Homo sapiens
tggaaggggtagatacttgtgatttttgtatatca

SEQ ID NO: 145 - DNA, 52 bp, Homo sapiens
tgccacctgttctagactattcataaatgttcatatattttaaatctaacaa

SEQ ID NO: 146 - DNA, 337 bp, Homo sapiens
atatgctagatctacaatatttcaacttgattatttatttatttatggaacagagtcttgctctgctgcccaggctggagtgcgatggtgcaatcttggctcactacaacctccatctcccaggttcaagtgatgctcatgcctcagcctcccatgtagctggaaatacaggcacgtgccaccatgcccagctaatttttgtatttttagtagagacaaggtttcgccatattggctgggctgctctcgaactcctggcctcaagtgatccaccctcctcggccttccaaagtgctagggttacaggcgtgagccactgcacctggccccaacttga

SEQ ID NO: 147 - DNA, 72 bp, Homo sapiens
gtgctccgtaaatgtttacttgtgctgagtaaatgaaaaactgtattttattttaaccaatgctccttctca

SEQ ID NO: 148 - DNA, 43 bp, Homo sapiens
acactatttccttttatatctgtacactgggagaaggaataat

SEQ ID NO: 149 - DNA, 32 bp, Homo sapiens
gtcaaatttatttgctgcaaaatggcttagaa

SEQ ID NO: 150 - DNA, 46 bp, Homo sapiens
gaggccagcgctgagaagtggaacaggttgctgatgtccttagaag

SEQ ID NO: 151 - DNA, 46 bp, Homo sapiens
aggagatgttccagccttacagctccagtatgaccattgtaaggta

SEQ ID NO: 152 - DNA, 46 bp, Homo sapiens
ggctctgagatttcgccttagaatagggatataaagcaatgcttta

SEQ ID NO: 153 - DNA, 43 bp, Homo sapiens
agaggagaactggtttgatgtttgggttagtcatgcctagaag

SEQ ID NO: 154 - DNA, 45 bp, Homo sapiens
tgcttggaggccaaaacttcactttatacaatttgtctgggaggg

SEQ ID NO: 155 - DNA, 45 bp, Homo sapiens
agatagttaagcagaataatgagaatgggaaatgtaggggatgag

SEQ ID NO: 156 - DNA, 43 bp, Homo sapiens
gcccgagttttcttggctgatcagccaattgaggcccctgaag

SEQ ID NO: 157 - DNA, 42 bp, Homo sapiens
actcctactgtagtaataaaatctcatttaaataaacaatag

SEQ ID NO: 158 - DNA, 46 bp, Homo sapiens
atttcccaatattttaatcagaaacatcttttggtcatgaggaaag

SEQ ID NO: 159 - DNA, 52 bp, Homo sapiens
caaagaaaaatgggaaagtctaaatgctgtaactagcaattggcaaaagcaa

SEQ ID NO: 160 - DNA, 46 bp, Homo sapiens
gcaccaatcaactttaaagttaaaacggtgaatgatttatccagtc

SEQ ID NO: 161 - DNA, 47 bp, Homo sapiens
attacatcaagtaagttgattttaattctcctttatgataccaagaa

(The sequence listing continues in the following parts.)
